United States Patent Application Publication US 2005/0255487 A1 - sequence listing, part 49

SEQ ID NO: 1340481 - RNA, 19 nt, Homo sapiens
  misc_RNA (1)...(19): siRNA sense strand
ggaauggugugauguaugc

SEQ ID NO: 1340482 - RNA, 19 nt, Homo sapiens
  misc_RNA (1)...(19): siRNA sense strand
gaaggucuauccucacagu

SEQ ID NO: 1340483 - RNA, 19 nt, Homo sapiens
  misc_RNA (1)...(19): siRNA sense strand
gcacaagagcguuaucaug

SEQ ID NO: 1340484 - RNA, 19 nt, Homo sapiens
  misc_RNA (1)...(19): siRNA sense strand
gauggagaaugcuggguuu

SEQ ID NO: 1340485 - RNA, 19 nt, Homo sapiens
  misc_RNA (1)...(19): siRNA sense strand
gaugucacuuucaacuuaa

SEQ ID NO: 1340486 - RNA, 19 nt, Homo sapiens
  misc_RNA (1)...(19): siRNA sense strand
gaacagagaaagaaaauug

SEQ ID NO: 1340487 - RNA, 19 nt, Homo sapiens
  misc_RNA (1)...(19): siRNA sense strand
ucaaagagacaacaaauag

SEQ ID NO: 1340488 - RNA, 19 nt, Homo sapiens
  misc_RNA (1)...(19): siRNA sense strand
accaagaaguugccuauaa

SEQ ID NO: 1340489 - RNA, 19 nt, Homo sapiens
  misc_RNA (1)...(19): siRNA sense strand
gaagagaacacagaacuag

SEQ ID NO: 1340490 - RNA, 19 nt, Homo sapiens
  misc_RNA (1)...(19): siRNA sense strand
agacaagguuauuucauga

SEQ ID NO: 1340491 - RNA, 19 nt, Homo sapiens
  misc_RNA (1)...(19): siRNA sense strand
gugaacuugucuccaaaua

SEQ ID NO: 1340492 - RNA, 19 nt, Homo sapiens
  misc_RNA (1)...(19): siRNA sense strand
aauaucaucuuccacacua

SEQ ID NO: 1340493 - RNA, 19 nt, Homo sapiens
  misc_RNA (1)...(19): siRNA sense strand
gaggagaaugcaauauuaa

SEQ ID NO: 1340494 - RNA, 19 nt, Homo sapiens
  misc_RNA (1)...(19): siRNA sense strand
gaugcaauauaucaaccua

SEQ ID NO: 1340495 - RNA, 19 nt, Homo sapiens
  misc_RNA (1)...(19): siRNA sense strand
gaaaggaaggagaaggaaa

SEQ ID NO: 1340496 - RNA, 19 nt, Homo sapiens
  misc_RNA (1)...(19): siRNA sense strand
ucccguagaugcaauauau

SEQ ID NO: 1340497 - RNA, 19 nt, Homo sapiens
  misc_RNA (1)...(19): siRNA sense strand
gaucagaacgaguaugaau

SEQ ID NO: 1340498 - RNA, 19 nt, Homo sapiens
  misc_RNA (1)...(19): siRNA sense strand
caacaaauagcaugguaga

SEQ ID NO: 1340499 - RNA, 19 nt, Homo sapiens
  misc_RNA (1)...(19): siRNA sense strand
gcagggcugugucucaugu

SEQ ID NO: 1340500 - RNA, 19 nt, Homo sapiens
  misc_RNA (1)...(19): siRNA sense strand
ugaggaaguuggaagauca

SEQ ID NO: 1340501 - RNA, 19 nt, Homo sapiens
  misc_RNA (1)...(19): siRNA sense strand
ggaauuaggaggagaaugc

SEQ ID NO: 1340502 - RNA, 19 nt, Homo sapiens
  misc_RNA (1)...(19): siRNA sense strand
caacguuuauucuugaaag

SEQ ID NO: 1340503 - RNA, 19 nt, Homo sapiens
  misc_RNA (1)...(19): siRNA sense strand
gagaaaggaaggagaagga

SEQ ID NO: 1340504 - RNA, 19 nt, Homo sapiens
  misc_RNA (1)...(19): siRNA sense strand
agaagaaagugaggaaguu

SEQ ID NO: 1340505 - RNA, 19 nt, Homo sapiens
  misc_RNA (1)...(19): siRNA sense strand
gcaagaagcacagaauuac

SEQ ID NO: 1340506 - RNA, 19 nt, Homo sapiens
  misc_RNA (1)...(19): siRNA sense strand
gagaacacagaacuaguuu

SEQ ID NO: 1340507 - RNA, 19 nt, Homo sapiens
  misc_RNA (1)...(19): siRNA sense strand
agaacuaguuucagaagga

SEQ ID NO: 1340508 - RNA, 19 nt, Homo sapiens
  misc_RNA (1)...(19): siRNA sense strand
gaugaaccauuacugaaac

SEQ ID NO: 1340509 - RNA, 19 nt, Homo sapiens
  misc_RNA (1)...(19): siRNA sense strand
gagaaugcuggguuuauga

SEQ ID NO: 1340510 - RNA, 19 nt, Homo sapiens
  misc_RNA (1)...(19): siRNA sense strand
gaacauuacauucucacau

SEQ ID NO: 1340511 - RNA, 19 nt, Homo sapiens
  misc_RNA (1)...(19): siRNA sense strand
gaugaacauuacauucuca

SEQ ID NO: 1340512 - RNA, 19 nt, Homo sapiens
  misc_RNA (1)...(19): siRNA sense strand
gagcagguuucccaucauc

SEQ ID NO: 1340513 - RNA, 19 nt, Homo sapiens
  misc_RNA (1)...(19): siRNA sense strand
ucacuuaauucuuccuugu

SEQ ID NO: 1340514 - RNA, 19 nt, Homo sapiens
  misc_RNA (1)...(19): siRNA sense strand
gaggagcacaagagcguua

SEQ ID NO: 1340515 - RNA, 19 nt, Homo sapiens
  misc_RNA (1)...(19): siRNA sense strand
cagcagugaagaugaauuu

SEQ ID NO: 1340516 - RNA, 19 nt, Homo sapiens
  misc_RNA (1)...(19): siRNA sense strand
gaagaaagugaggaaguug

SEQ ID NO: 1340517 - RNA, 19 nt, Homo sapiens
  misc_RNA (1)...(19): siRNA sense strand
gcagugaagaugaauuuua

SEQ ID NO: 1340518 - RNA, 19 nt, Homo sapiens
  misc_RNA (1)...(19): siRNA sense strand
gagcauuagugaccagaag

SEQ ID NO: 1340519 - RNA, 19 nt, Homo sapiens
  misc_RNA (1)...(19): siRNA sense strand
guaguucuuccaacguuua

SEQ ID NO: 1340520 - RNA, 19 nt, Homo sapiens
  misc_RNA (1)...(19): siRNA sense strand
uggaagaucagaacgagua

SEQ ID NO: 1340521 - RNA, 19 nt, Homo sapiens
  misc_RNA (1)...(19): siRNA sense strand
ggacaucaucagacuccua

SEQ ID NO: 1340522 - RNA, 19 nt, Homo sapiens
  misc_RNA (1)...(19): siRNA sense strand
caagguuauuucaugaaga

SEQ ID NO: 1340523 - RNA, 19 nt, Homo sapiens
  misc_RNA (1)...(19): siRNA sense strand
acacuaaacccuucuaugg

SEQ ID NO: 1340524 - RNA, 19 nt, Homo sapiens
  misc_RNA (1)...(19): siRNA sense strand
gauaccacagaaucacuua

SEQ ID NO: 1340525 - RNA, 19 nt, Homo sapiens
  misc_RNA (1)...(19): siRNA sense strand
gcagaagcccgagaaagga

SEQ ID NO: 1340526 - RNA, 19 nt, Homo sapiens
  misc_RNA (1)...(19): siRNA sense strand
acaaauagcaugguagaau

SEQ ID NO: 1340527 - RNA, 19 nt, Homo sapiens
  misc_RNA (1)...(19): siRNA sense strand
gugcaaauaucaucuucca

SEQ ID NO: 1340528 - RNA, 19 nt, Homo sapiens
  misc_RNA (1)...(19): siRNA sense strand
acaauucaaugcucauauc

SEQ ID NO: 1340529 - RNA, 19 nt, Homo sapiens
  misc_RNA (1)...(19): siRNA sense strand
gaagauacaauucaaugcu

SEQ ID NO: 1340530 - RNA, 19 nt, Homo sapiens
  misc_RNA (1)...(19): siRNA sense strand
gaugcugaccuguuugauu

SEQ ID NO: 1340531 - RNA, 19 nt, Homo sapiens
  misc_RNA (1)...(19): siRNA sense strand
cacgugaacuugucuccaa

SEQ ID NO: 1340532 - RNA, 19 nt, Homo sapiens
  misc_RNA (1)...(19): siRNA sense strand
ucaugaagauggagaaugc

SEQ ID NO: 1340533 - RNA, 19 nt, Homo sapiens
  misc_RNA (1)...(19): siRNA sense strand
uuaugaugcugaugaauuc

SEQ ID NO: 1340534 - RNA, 19 nt, Homo sapiens
  misc_RNA (1)...(19): siRNA sense strand
caucucuugucgcagguua

SEQ ID NO: 1340535 - RNA, 19 nt, Homo sapiens
  misc_RNA (1)...(19): siRNA sense strand
gguaguucuuccaacguuu

SEQ ID NO: 1340536 - RNA, 19 nt, Homo sapiens
  misc_RNA (1)...(19): siRNA sense strand
caaagcgcuuaauagauuc

SEQ ID NO: 1340537 - RNA, 19 nt, Homo sapiens
  misc_RNA (1)...(19): siRNA sense strand
caagugaugcugaccuguu

SEQ ID NO: 1340538 - RNA, 19 nt, Homo sapiens
  misc_RNA (1)...(19): siRNA sense strand
ugaugaaccauuacugaaa

SEQ ID NO: 1340539 - RNA, 19 nt, Homo sapiens
  misc_RNA (1)...(19): siRNA sense strand
gggcaagaagcacagaauu

SEQ ID NO: 1340540 - RNA, 19 nt, Homo sapiens
  misc_RNA (1)...(19): siRNA sense strand
cuuccaacguuuauucuug

SEQ ID NO: 1340541 - RNA, 19 nt, Homo sapiens
  misc_RNA (1)...(19): siRNA sense strand
agacuuggaauggaucuua

SEQ ID NO: 1340542 - RNA, 19 nt, Homo sapiens
  misc_RNA (1)...(19): siRNA sense strand
caagagcguuaucaugcau

SEQ ID NO: 1340543 - RNA, 19 nt, Homo sapiens
  misc_RNA (1)...(19): siRNA sense strand
aagugaugcugaccuguuu

SEQ ID NO: 1340544 - RNA, 19 nt, Homo sapiens
  misc_RNA (1)...(19): siRNA sense strand
augcugaccuguuugauuc

SEQ ID NO: 1340545 - RNA, 19 nt, Homo sapiens
  misc_RNA (1)...(19): siRNA sense strand
aaugcuggguuuaugauga

SEQ ID NO: 1340546 - RNA, 19 nt, Homo sapiens
  misc_RNA (1)...(19): siRNA sense strand
gaaguuggaagaucagaac

SEQ ID NO: 1340547 - RNA, 19 nt, Homo sapiens
  misc_RNA (1)...(19): siRNA sense strand
agacuaugaugaacauuac

SEQ ID NO: 1340548 - RNA, 19 nt, Homo sapiens
  misc_RNA (1)...(19): siRNA sense strand
agagaacacagaacuaguu

SEQ ID NO: 1340549 - RNA, 19 nt, Homo sapiens
  misc_RNA (1)...(19): siRNA sense strand
ucccaaggaucgaaugguu

SEQ ID NO: 1340550 - RNA, 19 nt, Homo sapiens
  misc_RNA (1)...(19): siRNA sense strand
ggaccuguuugugagcauu

SEQ ID NO: 1340551 - RNA, 19 nt, Homo sapiens
  misc_RNA (1)...(19): siRNA sense strand
ugauucacaugaugacaga

SEQ ID NO: 1340552 - RNA, 19 nt, Homo sapiens
  misc_RNA (1)...(19): siRNA sense strand
uaugaugaaccauuacuga

SEQ ID NO: 1340553 - RNA, 19 nt, Homo sapiens
  misc_RNA (1)...(19): siRNA sense strand
ggaggagaaugcaauauua

SEQ ID NO: 1340554 - RNA, 19 nt, Homo sapiens
  misc_RNA (1)...(19): siRNA sense strand
ccaaagcgcuuaauagauu

SEQ ID NO: 1340555 - RNA, 19 nt, Homo sapiens
  misc_RNA (1)...(19): siRNA sense strand
ggaugucacuuucaacuua

SEQ ID NO: 1340556 - RNA, 19 nt, Homo sapiens
  misc_RNA (1)...(19): siRNA sense strand
caaagaagaugaacagaga

SEQ ID NO: 1340557 - RNA, 19 nt, Homo sapiens
  misc_RNA (1)...(19): siRNA sense strand
gaacuugucuccaaauaca

SEQ ID NO: 1340558 - RNA, 19 nt, Homo sapiens
  misc_RNA (1)...(19): siRNA sense strand
gcucauaucuggaccaaau

SEQ ID NO: 1340559 - RNA, 19 nt, Homo sapiens
  misc_RNA (1)...(19): siRNA sense strand
ggaaggaugucacuuucaa

SEQ ID NO: 1340560 - RNA, 19 nt, Homo sapiens
  misc_RNA (1)...(19): siRNA sense strand
gcacaggcuugaagaaaga

SEQ ID NO: 1340561 - RNA, 19 nt, Homo sapiens
  misc_RNA (1)...(19): siRNA sense strand
gaaaggaucaguugccaaa

SEQ ID NO: 1340562 - RNA, 19 nt, Homo sapiens
  misc_RNA (1)...(19): siRNA sense strand
gagacaagguuauuucaug

SEQ ID NO: 1340563 - RNA, 19 nt, Homo sapiens
  misc_RNA (1)...(19): siRNA sense strand
agaaauguaugcagacuuu

SEQ ID NO: 1340564 - RNA, 19 nt, Homo sapiens
  misc_RNA (1)...(19): siRNA sense strand
gaacacagaacuaguuuca

SEQ ID NO: 1340565 - RNA, 19 nt, Homo sapiens
  misc_RNA (1)...(19): siRNA sense strand
ggaauggaauggugugaug

SEQ ID NO: 1340566 - RNA, 19 nt, Homo sapiens
  misc_RNA (1)...(19): siRNA sense strand
acacagaacuaguuucaga

SEQ ID NO: 1340567 - RNA, 19 nt, Homo sapiens
  misc_RNA (1)...(19): siRNA sense strand
gaaguugccuauaaucaag

SEQ ID NO: 1340568 - RNA, 19 nt, Homo sapiens
  misc_RNA (1)...(19): siRNA sense strand
caaauacagucccagaguu

SEQ ID NO: 1340569 - RNA, 19 nt, Homo sapiens
  misc_RNA (1)...(19): siRNA sense strand
ccaagaaguugccuauaau

SEQ ID NO: 1340570 - RNA, 19 nt, Homo sapiens
  misc_RNA (1)...(19): siRNA sense strand
gacaacaaauagcauggua

SEQ ID NO: 1340571 - RNA, 19 nt, Homo sapiens
  misc_RNA (1)...(19): siRNA sense strand
caaaugauacugaagagaa

SEQ ID NO: 1340572 - RNA, 19 nt, Homo sapiens
  misc_RNA (1)...(19): siRNA sense strand
ggcaagaagcacagaauua

SEQ ID NO: 1340573 - RNA, 19 nt, Homo sapiens
  misc_RNA (1)...(19): siRNA sense strand
ggagaaugcuggguuuaug

SEQ ID NO: 1340574 - RNA, 19 nt, Homo sapiens
  misc_RNA (1)...(19): siRNA sense strand
caaauagcaugguagaauc

SEQ ID NO: 1340575 - RNA, 19 nt, Homo sapiens
  misc_RNA (1)...(19): siRNA sense strand
ggaaggagaaggaaauuca

SEQ ID NO: 1340576 - RNA, 19 nt, Homo sapiens
  misc_RNA (1)...(19): siRNA sense strand
gaagaugaacagagaaaga

SEQ ID NO: 1340577 - RNA, 19 nt, Homo sapiens
  misc_RNA (1)...(19): siRNA sense strand
cacagcagcucgggaaaua

SEQ ID NO: 1340578 - RNA, 19 nt, Homo sapiens
  misc_RNA (1)...(19): siRNA sense strand
gaaauucagugggagacaa

SEQ ID NO: 1340579 - RNA, 19 nt, Homo sapiens
  misc_RNA (1)...(19): siRNA sense strand
cagaauuacugccgagauu

SEQ ID NO: 1340580 - RNA, 19 nt, Homo sapiens
  misc_RNA (1)...(19): siRNA sense strand
ggaaggaaaggaucaguug

SEQ ID NO: 1340581 - RNA, 19 nt, Homo sapiens
  misc_RNA (1)...(19): siRNA sense strand
ggaauggugugauguaugc

SEQ ID NO: 1340582 - RNA, 19 nt, Homo sapiens
  misc_RNA (1)...(19): siRNA sense strand
gaaggucuauccucacagu

SEQ ID NO: 1340583 - RNA, 19 nt, Homo sapiens
  misc_RNA (1)...(19): siRNA sense strand
gcacaagagcguuaucaug

SEQ ID NO: 1340584 - RNA, 19 nt, Homo sapiens
  misc_RNA (1)...(19): siRNA sense strand
gauggagaaugcuggguuu

SEQ ID NO: 1340585 - RNA, 19 nt, Homo sapiens
  misc_RNA (1)...(19): siRNA sense strand
gaugucacuuucaacuuaa

SEQ ID NO: 1340586 - RNA, 19 nt, Homo sapiens
  misc_RNA (1)...(19): siRNA sense strand
gaacagagaaagaaaauug

SEQ ID NO: 1340587 - RNA, 19 nt, Homo sapiens
  misc_RNA (1)...(19): siRNA sense strand
ucaaagagacaacaaauag

SEQ ID NO: 1340588 - RNA, 19 nt, Homo sapiens
  misc_RNA (1)...(19): siRNA sense strand
accaagaaguugccuauaa

SEQ ID NO: 1340589 - RNA, 19 nt, Homo sapiens
  misc_RNA (1)...(19): siRNA sense strand
gaagagaacacagaacuag

SEQ ID NO: 1340590 - RNA, 19 nt, Homo sapiens
  misc_RNA (1)...(19): siRNA sense strand
agacaagguuauuucauga

SEQ ID NO: 1340591 - RNA, 19 nt, Homo sapiens
  misc_RNA (1)...(19): siRNA sense strand
gugaacuugucuccaaaua

SEQ ID NO: 1340592 - RNA, 19 nt, Homo sapiens
  misc_RNA (1)...(19): siRNA sense strand
aauaucaucuuccacacua

SEQ ID NO: 1340593 - RNA, 19 nt, Homo sapiens
  misc_RNA (1)...(19): siRNA sense strand
gaggagaaugcaauauuaa

SEQ ID NO: 1340594 - RNA, 19 nt, Homo sapiens
  misc_RNA (1)...(19): siRNA sense strand
gaugcaauauaucaaccua

SEQ ID NO: 1340595 - RNA, 19 nt, Homo sapiens
  misc_RNA (1)...(19): siRNA sense strand
gaaaggaaggagaaggaaa

SEQ ID NO: 1340596 - RNA, 19 nt, Homo sapiens
  misc_RNA (1)...(19): siRNA sense strand
ucccguagaugcaauauau

SEQ ID NO: 1340597 - RNA, 19 nt, Homo sapiens
  misc_RNA (1)...(19): siRNA sense strand
gaucagaacgaguaugaau

SEQ ID NO: 1340598 - RNA, 19 nt, Homo sapiens
  misc_RNA (1)...(19): siRNA sense strand
caacaaauagcaugguaga

SEQ ID NO: 1340599 - RNA, 19 nt, Homo sapiens
  misc_RNA (1)...(19): siRNA sense strand
gcagggcugugucucaugu

SEQ ID NO: 1340600 - RNA, 19 nt, Homo sapiens
  misc_RNA (1)...(19): siRNA sense strand
ugaggaaguuggaagauca

SEQ ID NO: 1340601 - RNA, 19 nt, Homo sapiens
  misc_RNA (1)...(19): siRNA sense strand
ggaauuaggaggagaaugc

SEQ ID NO: 1340602 - RNA, 19 nt, Homo sapiens
  misc_RNA (1)...(19): siRNA sense strand
caacguuuauucuugaaag

SEQ ID NO: 1340603 - RNA, 19 nt, Homo sapiens
  misc_RNA (1)...(19): siRNA sense strand
gagaaaggaaggagaagga

SEQ ID NO: 1340604 - RNA, 19 nt, Homo sapiens
  misc_RNA (1)...(19): siRNA sense strand
agaagaaagugaggaaguu

SEQ ID NO: 1340605 - RNA, 19 nt, Homo sapiens
  misc_RNA (1)...(19): siRNA sense strand
gcaagaagcacagaauuac

SEQ ID NO: 1340606 - RNA, 19 nt, Homo sapiens
  misc_RNA (1)...(19): siRNA sense strand
gagaacacagaacuaguuu

SEQ ID NO: 1340607 - RNA, 19 nt, Homo sapiens
  misc_RNA (1)...(19): siRNA sense strand
agaacuaguuucagaagga

SEQ ID NO: 1340608 - RNA, 19 nt, Homo sapiens
  misc_RNA (1)...(19): siRNA sense strand
gaugaaccauuacugaaac

SEQ ID NO: 1340609 - RNA, 19 nt, Homo sapiens
  misc_RNA (1)...(19): siRNA sense strand
gagaaugcuggguuuauga

SEQ ID NO: 1340610 - RNA, 19 nt, Homo sapiens
  misc_RNA (1)...(19): siRNA sense strand
gaacauuacauucucacau

SEQ ID NO: 1340611 - RNA, 19 nt, Homo sapiens
  misc_RNA (1)...(19): siRNA sense strand
gaugaacauuacauucuca

SEQ ID NO: 1340612 - RNA, 19 nt, Homo sapiens
  misc_RNA (1)...(19): siRNA sense strand
gagcagguuucccaucauc

SEQ ID NO: 1340613 - RNA, 19 nt, Homo sapiens
  misc_RNA (1)...(19): siRNA sense strand
ucacuuaauucuuccuugu

SEQ ID NO: 1340614 - RNA, 19 nt, Homo sapiens
  misc_RNA (1)...(19): siRNA sense strand
gaggagcacaagagcguua

SEQ ID NO: 1340615 - RNA, 19 nt, Homo sapiens
  misc_RNA (1)...(19): siRNA sense strand
cagcagugaagaugaauuu

SEQ ID NO: 1340616 - RNA, 19 nt, Homo sapiens
  misc_RNA (1)...(19): siRNA sense strand
gaagaaagugaggaaguug

SEQ ID NO: 1340617 - RNA, 19 nt, Homo sapiens
  misc_RNA (1)...(19): siRNA sense strand
gcagugaagaugaauuuua

SEQ ID NO: 1340618 - RNA, 19 nt, Homo sapiens
  misc_RNA (1)...(19): siRNA sense strand
gagcauuagugaccagaag

SEQ ID NO: 1340619 - RNA, 19 nt, Homo sapiens
  misc_RNA (1)...(19): siRNA sense strand
guaguucuuccaacguuua

SEQ ID NO: 1340620 - RNA, 19 nt, Homo sapiens
  misc_RNA (1)...(19): siRNA sense strand
uggaagaucagaacgagua

SEQ ID NO: 1340621 - RNA, 19 nt, Homo sapiens
  misc_RNA (1)...(19): siRNA sense strand
ggacaucaucagacuccua

SEQ ID NO: 1340622 - RNA, 19 nt, Homo sapiens
  misc_RNA (1)...(19): siRNA sense strand
caagguuauuucaugaaga

SEQ ID NO: 1340623 - RNA, 19 nt, Homo sapiens
  misc_RNA (1)...(19): siRNA sense strand
acacuaaacccuucuaugg

SEQ ID NO: 1340624 - RNA, 19 nt, Homo sapiens
  misc_RNA (1)...(19): siRNA sense strand
gauaccacagaaucacuua

SEQ ID NO: 1340625 - RNA, 19 nt, Homo sapiens
  misc_RNA (1)...(19): siRNA sense strand
gcagaagcccgagaaagga

SEQ ID NO: 1340626 - RNA, 19 nt, Homo sapiens
  misc_RNA (1)...(19): siRNA sense strand
acaaauagcaugguagaau

SEQ ID NO: 1340627 - RNA, 19 nt, Homo sapiens
  misc_RNA (1)...(19): siRNA sense strand
gugcaaauaucaucuucca

SEQ ID NO: 1340628 - RNA, 19 nt, Homo sapiens
  misc_RNA (1)...(19): siRNA sense strand
acaauucaaugcucauauc

SEQ ID NO: 1340629 - RNA, 19 nt, Homo sapiens
  misc_RNA (1)...(19): siRNA sense strand
gaagauacaauucaaugcu

SEQ ID NO: 1340630 - RNA, 19 nt, Homo sapiens
  misc_RNA (1)...(19): siRNA sense strand
gaugcugaccuguuugauu

SEQ ID NO: 1340631 - RNA, 19 nt, Homo sapiens
  misc_RNA (1)...(19): siRNA sense strand
cacgugaacuugucuccaa

SEQ ID NO: 1340632 - RNA, 19 nt, Homo sapiens
  misc_RNA (1)...(19): siRNA sense strand
ucaugaagauggagaaugc

SEQ ID NO: 1340633 - RNA, 19 nt, Homo sapiens
  misc_RNA (1)...(19): siRNA sense strand
uuaugaugcugaugaauuc

SEQ ID NO: 1340634 - RNA, 19 nt, Homo sapiens
  misc_RNA (1)...(19): siRNA sense strand
caucucuugucgcagguua

SEQ ID NO: 1340635 - RNA, 19 nt, Homo sapiens
  misc_RNA (1)...(19): siRNA sense strand
gguaguucuuccaacguuu

SEQ ID NO: 1340636 - RNA, 19 nt, Homo sapiens
  misc_RNA (1)...(19): siRNA sense strand
caaagcgcuuaauagauuc

SEQ ID NO: 1340637 - RNA, 19 nt, Homo sapiens
  misc_RNA (1)...(19): siRNA sense strand
caagugaugcugaccuguu

SEQ ID NO: 1340638 - RNA, 19 nt, Homo sapiens
  misc_RNA (1)...(19): siRNA sense strand
ugaugaaccauuacugaaa

SEQ ID NO: 1340639 - RNA, 19 nt, Homo sapiens
  misc_RNA (1)...(19): siRNA sense strand
gggcaagaagcacagaauu

SEQ ID NO: 1340640 - RNA, 19 nt, Homo sapiens
  misc_RNA (1)...(19): siRNA sense strand
cuuccaacguuuauucuug

SEQ ID NO: 1340641 - RNA, 19 nt, Homo sapiens
  misc_RNA (1)...(19): siRNA sense strand
agacuuggaauggaucuua

SEQ ID NO: 1340642 - RNA, 19 nt, Homo sapiens
  misc_RNA (1)...(19): siRNA sense strand
caagagcguuaucaugcau

SEQ ID NO: 1340643 - RNA, 19 nt, Homo sapiens
  misc_RNA (1)...(19): siRNA sense strand
aagugaugcugaccuguuu

SEQ ID NO: 1340644 - RNA, 19 nt, Homo sapiens
  misc_RNA (1)...(19): siRNA sense strand
augcugaccuguuugauuc

SEQ ID NO: 1340645 - RNA, 19 nt, Homo sapiens
  misc_RNA (1)...(19): siRNA sense strand
aaugcuggguuuaugauga

SEQ ID NO: 1340646 - RNA, 19 nt, Homo sapiens
  misc_RNA (1)...(19): siRNA sense strand
gaaguuggaagaucagaac

SEQ ID NO: 1340647 - RNA, 19 nt, Homo sapiens
  misc_RNA (1)...(19): siRNA sense strand
agacuaugaugaacauuac

SEQ ID NO: 1340648 - RNA, 19 nt, Homo sapiens
  misc_RNA (1)...(19): siRNA sense strand
agagaacacagaacuaguu

SEQ ID NO: 1340649 - RNA, 19 nt, Homo sapiens
  misc_RNA (1)...(19): siRNA sense strand
ucccaaggaucgaaugguu

SEQ ID NO: 1340650 - RNA, 19 nt, Homo sapiens
  misc_RNA (1)...(19): siRNA sense strand
ggaccuguuugugagcauu

SEQ ID NO: 1340651 - RNA, 19 nt, Homo sapiens
  misc_RNA (1)...(19): siRNA sense strand
ugauucacaugaugacaga

SEQ ID NO: 1340652 - RNA, 19 nt, Homo sapiens
  misc_RNA (1)...(19): siRNA sense strand
uaugaugaaccauuacuga

SEQ ID NO: 1340653 - RNA, 19 nt, Homo sapiens
  misc_RNA (1)...(19): siRNA sense strand
ggaggagaaugcaauauua

SEQ ID NO: 1340654 - RNA, 19 nt, Homo sapiens
  misc_RNA (1)...(19): siRNA sense strand
ccaaagcgcuuaauagauu

SEQ ID NO: 1340655 - RNA, 19 nt, Homo sapiens
  misc_RNA (1)...(19): siRNA sense strand
ggaugucacuuucaacuua

SEQ ID NO: 1340656 - RNA, 19 nt, Homo sapiens
  misc_RNA (1)...(19): siRNA sense strand
gaacuugucuccaaauaca

SEQ ID NO: 1340657 - RNA, 19 nt, Homo sapiens
  misc_RNA (1)...(19): siRNA sense strand
gcucauaucuggaccaaau

SEQ ID NO: 1340658 - RNA, 19 nt, Homo sapiens
  misc_RNA (1)...(19): siRNA sense strand
ggaaggaugucacuuucaa

SEQ ID NO: 1340659 - RNA, 19 nt, Homo sapiens
  misc_RNA (1)...(19): siRNA sense strand
gcacaggcuugaagaaaga

SEQ ID NO: 1340660 - RNA, 19 nt, Homo sapiens
  misc_RNA (1)...(19): siRNA sense strand
gaaaggaucaguugccaaa

SEQ ID NO: 1340661 - RNA, 19 nt, Homo sapiens
  misc_RNA (1)...(19): siRNA sense strand
gagacaagguuauuucaug

SEQ ID NO: 1340662 - RNA, 19 nt, Homo sapiens
  misc_RNA (1)...(19): siRNA sense strand
agaaauguaugcagacuuu

SEQ ID NO: 1340663 - RNA, 19 nt, Homo sapiens
  misc_RNA (1)...(19): siRNA sense strand
gaacacagaacuaguuuca

SEQ ID NO: 1340664 - RNA, 19 nt, Homo sapiens
  misc_RNA (1)...(19): siRNA sense strand
ggaauggaauggugugaug

SEQ ID NO: 1340665 - RNA, 19 nt, Homo sapiens
  misc_RNA (1)...(19): siRNA sense strand
acacagaacuaguuucaga

SEQ ID NO: 1340666 - RNA, 19 nt, Homo sapiens
  misc_RNA (1)...(19): siRNA sense strand
gaaguugccuauaaucaag

SEQ ID NO: 1340667 - RNA, 19 nt, Homo sapiens
  misc_RNA (1)...(19): siRNA sense strand
caaauacagucccagaguu

SEQ ID NO: 1340668 - RNA, 19 nt, Homo sapiens
  misc_RNA (1)...(19): siRNA sense strand
ccaagaaguugccuauaau

SEQ ID NO: 1340669 - RNA, 19 nt, Homo sapiens
  misc_RNA (1)...(19): siRNA sense strand
caaaugauacugaagagaa

SEQ ID NO: 1340670 - RNA, 19 nt, Homo sapiens
  misc_RNA (1)...(19): siRNA sense strand
ggcaagaagcacagaauua

SEQ ID NO: 1340671 - RNA, 19 nt, Homo sapiens
  misc_RNA (1)...(19): siRNA sense strand
ggagaaugcuggguuuaug

SEQ ID NO: 1340672 - RNA, 19 nt, Homo sapiens
  misc_RNA (1)...(19): siRNA sense strand
ggaaggagaaggaaauuca

SEQ ID NO: 1340673 - RNA, 19 nt, Homo sapiens
  misc_RNA (1)...(19): siRNA sense strand
cacagcagcucgggaaaua

SEQ ID NO: 1340674 - RNA, 19 nt, Homo sapiens
  misc_RNA (1)...(19): siRNA sense strand
gaaauucagugggagacaa

SEQ ID NO: 1340675 - RNA, 19 nt, Homo sapiens
  misc_RNA (1)...(19): siRNA sense strand
cagaauuacugccgagauu

SEQ ID NO: 1340676 - RNA, 19 nt, Homo sapiens
  misc_RNA (1)...(19): siRNA sense strand
ggaaggaaaggaucaguug

SEQ ID NO: 1340677 - RNA, 19 nt, Homo sapiens
  misc_RNA (1)...(19): siRNA sense strand
ggaauggugugauguaugc

SEQ ID NO: 1340678 - RNA, 19 nt, Homo sapiens
  misc_RNA (1)...(19): siRNA sense strand
gaaggucuauccucacagu

SEQ ID NO: 1340679 - RNA, 19 nt, Homo sapiens
  misc_RNA (1)...(19): siRNA sense strand
gcacaagagcguuaucaug

SEQ ID NO: 1340680 - RNA, 19 nt, Homo sapiens
  misc_RNA (1)...(19): siRNA sense strand
gauggagaaugcuggguuu

SEQ ID NO: 1340681 - RNA, 19 nt, Homo sapiens
  misc_RNA (1)...(19): siRNA sense strand
gaugucacuuucaacuuaa

SEQ ID NO: 1340682 - RNA, 19 nt, Homo sapiens
  misc_RNA (1)...(19): siRNA sense strand
accaagaaguugccuauaa

SEQ ID NO: 1340683 - RNA, 19 nt, Homo sapiens
  misc_RNA (1)...(19): siRNA sense strand
gaagagaacacagaacuag

SEQ ID NO: 1340684 - RNA, 19 nt, Homo sapiens
  misc_RNA (1)...(19): siRNA sense strand
agacaagguuauuucauga

SEQ ID NO: 1340685 - RNA, 19 nt, Homo sapiens
  misc_RNA (1)...(19): siRNA sense strand
gugaacuugucuccaaaua

SEQ ID NO: 1340686 - RNA, 19 nt, Homo sapiens
  misc_RNA (1)...(19): siRNA sense strand
aauaucaucuuccacacua

SEQ ID NO: 1340687 - RNA, 19 nt, Homo sapiens
  misc_RNA (1)...(19): siRNA sense strand
gaggagaaugcaauauuaa

SEQ ID NO: 1340688 - RNA, 19 nt, Homo sapiens
  misc_RNA (1)...(19): siRNA sense strand
gaugcaauauaucaaccua

SEQ ID NO: 1340689 - RNA, 19 nt, Homo sapiens
  misc_RNA (1)...(19): siRNA sense strand
gaaaggaaggagaaggaaa

SEQ ID NO: 1340690 - RNA, 19 nt, Homo sapiens
  misc_RNA (1)...(19): siRNA sense strand
ucccguagaugcaauauau

SEQ ID NO: 1340691 - RNA, 19 nt, Homo sapiens
  misc_RNA (1)...(19): siRNA sense strand
gaucagaacgaguaugaau

SEQ ID NO: 1340692 - RNA, 19 nt, Homo sapiens
  misc_RNA (1)...(19): siRNA sense strand
gcagggcugugucucaugu

SEQ ID NO: 1340693 - RNA, 19 nt, Homo sapiens
  misc_RNA (1)...(19): siRNA sense strand
ugaggaaguuggaagauca

SEQ ID NO: 1340694 - RNA, 19 nt, Homo sapiens
  misc_RNA (1)...(19): siRNA sense strand
ggaauuaggaggagaaugc

SEQ ID NO: 1340695 - RNA, 19 nt, Homo sapiens
  misc_RNA (1)...(19): siRNA sense strand
caacguuuauucuugaaag

SEQ ID NO: 1340696 - RNA, 19 nt, Homo sapiens
  misc_RNA (1)...(19): siRNA sense strand
gagaaaggaaggagaagga

SEQ ID NO: 1340697 - RNA, 19 nt, Homo sapiens
  misc_RNA (1)...(19): siRNA sense strand
agaagaaagugaggaaguu

SEQ ID NO: 1340698 - RNA, 19 nt, Homo sapiens
  misc_RNA (1)...(19): siRNA sense strand
gcaagaagcacagaauuac

SEQ ID NO: 1340699 - RNA, 19 nt, Homo sapiens
  misc_RNA (1)...(19): siRNA sense strand
gagaacacagaacuaguuu

SEQ ID NO: 1340700 - RNA, 19 nt, Homo sapiens
  misc_RNA (1)...(19): siRNA sense strand
agaacuaguuucagaagga

SEQ ID NO: 1340701 - RNA, 19 nt, Homo sapiens
  misc_RNA (1)...(19): siRNA sense strand
gaugaaccauuacugaaac

SEQ ID NO: 1340702 - RNA, 19 nt, Homo sapiens
  misc_RNA (1)...(19): siRNA sense strand
gagaaugcuggguuuauga

SEQ ID NO: 1340703 - RNA, 19 nt, Homo sapiens
  misc_RNA (1)...(19): siRNA sense strand
gaacauuacauucucacau

SEQ ID NO: 1340704 - RNA, 19 nt, Homo sapiens
  misc_RNA (1)...(19): siRNA sense strand
gaugaacauuacauucuca

SEQ ID NO: 1340705 - RNA, 19 nt, Homo sapiens
  misc_RNA (1)...(19): siRNA sense strand
gagcagguuucccaucauc

SEQ ID NO: 1340706 - RNA, 19 nt, Homo sapiens
  misc_RNA (1)...(19): siRNA sense strand
ucacuuaauucuuccuugu

SEQ ID NO: 1340707 - RNA, 19 nt, Homo sapiens
  misc_RNA (1)...(19): siRNA sense strand
gaggagcacaagagcguua

SEQ ID NO: 1340708 - RNA, 19 nt, Homo sapiens
  misc_RNA (1)...(19): siRNA sense strand
cagcagugaagaugaauuu

SEQ ID NO: 1340709 - RNA, 19 nt, Homo sapiens
  misc_RNA (1)...(19): siRNA sense strand
gaagaaagugaggaaguug

SEQ ID NO: 1340710 - RNA, 19 nt, Homo sapiens
  misc_RNA (1)...(19): siRNA sense strand
gcagugaagaugaauuuua

SEQ ID NO: 1340711 - RNA, 19 nt, Homo sapiens
  misc_RNA (1)...(19): siRNA sense strand
gagcauuagugaccagaag

SEQ ID NO: 1340712 - RNA, 19 nt, Homo sapiens
  misc_RNA (1)...(19): siRNA sense strand
guaguucuuccaacguuua

SEQ ID NO: 1340713 - RNA, 19 nt, Homo sapiens
  misc_RNA (1)...(19): siRNA sense strand
uggaagaucagaacgagua

SEQ ID NO: 1340714 - RNA, 19 nt, Homo sapiens
  misc_RNA (1)...(19): siRNA sense strand
ggacaucaucagacuccua

SEQ ID NO: 1340715 - RNA, 19 nt, Homo sapiens
  misc_RNA (1)...(19): siRNA sense strand
caagguuauuucaugaaga

SEQ ID NO: 1340716 - RNA, 19 nt, Homo sapiens
  misc_RNA (1)...(19): siRNA sense strand
acacuaaacccuucuaugg

SEQ ID NO: 1340717 - RNA, 19 nt, Homo sapiens
  misc_RNA (1)...(19): siRNA sense strand
gauaccacagaaucacuua

SEQ ID NO: 1340718 - RNA, 19 nt, Homo sapiens
  misc_RNA (1)...(19): siRNA sense strand
gcagaagcccgagaaagga

SEQ ID NO: 1340719 - RNA, 19 nt, Homo sapiens
  misc_RNA (1)...(19): siRNA sense strand
gugcaaauaucaucuucca

SEQ ID NO: 1340720 - RNA, 19 nt, Homo sapiens
  misc_RNA (1)...(19): siRNA sense strand
acaauucaaugcucauauc

SEQ ID NO: 1340721 - RNA, 19 nt, Homo sapiens
  misc_RNA (1)...(19): siRNA sense strand
gaagauacaauucaaugcu

SEQ ID NO: 1340722 - RNA, 19 nt, Homo sapiens
  misc_RNA (1)...(19): siRNA sense strand
gaugcugaccuguuugauu

SEQ ID NO: 1340723 - RNA, 19 nt, Homo sapiens
  misc_RNA (1)...(19): siRNA sense strand
cacgugaacuugucuccaa

SEQ ID NO: 1340724 - RNA, 19 nt, Homo sapiens
  misc_RNA (1)...(19): siRNA sense strand
ucaugaagauggagaaugc

SEQ ID NO: 1340725 - RNA, 19 nt, Homo sapiens
  misc_RNA (1)...(19): siRNA sense strand
uuaugaugcugaugaauuc

SEQ ID NO: 1340726 - RNA, 19 nt, Homo sapiens
  misc_RNA (1)...(19): siRNA sense strand
caucucuugucgcagguua

SEQ ID NO: 1340727 - RNA, 19 nt, Homo sapiens
  misc_RNA (1)...(19): siRNA sense strand
gguaguucuuccaacguuu

SEQ ID NO: 1340728 - RNA, 19 nt, Homo sapiens
  misc_RNA (1)...(19): siRNA sense strand
caaagcgcuuaauagauuc

SEQ ID NO: 1340729 - RNA, 19 nt, Homo sapiens
  misc_RNA (1)...(19): siRNA sense strand
caagugaugcugaccuguu

SEQ ID NO: 1340730 - RNA, 19 nt, Homo sapiens
  misc_RNA (1)...(19): siRNA sense strand
ugaugaaccauuacugaaa

SEQ ID NO: 1340731 - RNA, 19 nt, Homo sapiens
  misc_RNA (1)...(19): siRNA sense strand
gggcaagaagcacagaauu

SEQ ID NO: 1340732 - RNA, 19 nt, Homo sapiens
  misc_RNA (1)...(19): siRNA sense strand
cuuccaacguuuauucuug

SEQ ID NO: 1340733 - RNA, 19 nt, Homo sapiens
  misc_RNA (1)...(19): siRNA sense strand
agacuuggaauggaucuua

SEQ ID NO: 1340734 - RNA, 19 nt, Homo sapiens
  misc_RNA (1)...(19): siRNA sense strand
caagagcguuaucaugcau

SEQ ID NO: 1340735 - RNA, 19 nt, Homo sapiens
  misc_RNA (1)...(19): siRNA sense strand
aagugaugcugaccuguuu

SEQ ID NO: 1340736 - RNA, 19 nt, Homo sapiens
  misc_RNA (1)...(19): siRNA sense strand
augcugaccuguuugauuc

SEQ ID NO: 1340737 - RNA, 19 nt, Homo sapiens
  misc_RNA (1)...(19): siRNA sense strand
aaugcuggguuuaugauga

SEQ ID NO: 1340738 - RNA, 19 nt, Homo sapiens
  misc_RNA (1)...(19): siRNA sense strand
gaaguuggaagaucagaac

SEQ ID NO: 1340739 - RNA, 19 nt, Homo sapiens
  misc_RNA (1)...(19): siRNA sense strand
agacuaugaugaacauuac

SEQ ID NO: 1340740 - RNA, 19 nt, Homo sapiens
  misc_RNA (1)...(19): siRNA sense strand
agagaacacagaacuaguu

SEQ ID NO: 1340741 - RNA, 19 nt, Homo sapiens
  misc_RNA (1)...(19): siRNA sense strand
ucccaaggaucgaaugguu

SEQ ID NO: 1340742 - RNA, 19 nt, Homo sapiens
  misc_RNA (1)...(19): siRNA sense strand
ggaccuguuugugagcauu

SEQ ID NO: 1340743 - RNA, 19 nt, Homo sapiens
  misc_RNA (1)...(19): siRNA sense strand
ugauucacaugaugacaga

SEQ ID NO: 1340744 - RNA, 19 nt, Homo sapiens
  misc_RNA (1)...(19): siRNA sense strand
ccaaauacagucccagagu

SEQ ID NO: 1340745 - RNA, 19 nt, Homo sapiens
  misc_RNA (1)...(19): siRNA sense strand
uaugaugaaccauuacuga

SEQ ID NO: 1340746 - RNA, 19 nt, Homo sapiens
  misc_RNA (1)...(19): siRNA sense strand
ucaagaagaaagugaggaa

SEQ ID NO: 1340747 - RNA, 19 nt, Homo sapiens
  misc_RNA (1)...(19): siRNA sense strand
gguuagacuuggaauggau

SEQ ID NO: 1340748 - RNA, 19 nt, Homo sapiens
  misc_RNA (1)...(19): siRNA sense strand
gcacauccggaccuguuug

SEQ ID NO: 1340749 - RNA, 19 nt, Homo sapiens
  misc_RNA (1)...(19): siRNA sense strand
aaaggaaggagaaggaaau

SEQ ID NO: 1340750 - RNA, 19 nt, Homo sapiens
  misc_RNA (1)...(19): siRNA sense strand
ugaagagaacacagaacua

SEQ ID NO: 1340751 - RNA, 19 nt, Homo sapiens
  misc_RNA (1)...(19): siRNA sense strand
ggaaguuggaagaucagaa

SEQ ID NO: 1340752 - RNA, 19 nt, Homo sapiens
  misc_RNA (1)...(19): siRNA sense strand
aagaucagaacgaguauga

SEQ ID NO: 1340753 - RNA, 19 nt, Homo sapiens
  misc_RNA (1)...(19): siRNA sense strand
ggaggagaaugcaauauua

SEQ ID NO: 1340754 - RNA, 19 nt, Homo sapiens
  misc_RNA (1)...(19): siRNA sense strand
ccaaagcgcuuaauagauu

SEQ ID NO: 1340755 - RNA, 19 nt, Homo sapiens
  misc_RNA (1)...(19): siRNA sense strand
ggaugucacuuucaacuua

SEQ ID NO: 1340756 - RNA, 19 nt, Homo sapiens
  misc_RNA (1)...(19): siRNA sense strand
gaacuugucuccaaauaca

SEQ ID NO: 1340757 - RNA, 19 nt, Homo sapiens
  misc_RNA (1)...(19): siRNA sense strand
gcucauaucuggaccaaau

SEQ ID NO: 1340758 - RNA, 19 nt, Homo sapiens
  misc_RNA (1)...(19): siRNA sense strand
ggaaggaugucacuuucaa

SEQ ID NO: 1340759 - RNA, 19 nt, Homo sapiens
  misc_RNA (1)...(19): siRNA sense strand
gcacaggcuugaagaaaga

SEQ ID NO: 1340760 - RNA, 19 nt, Homo sapiens
  misc_RNA (1)...(19): siRNA sense strand
gaaaggaucaguugccaaa

SEQ ID NO: 1340761 - RNA, 19 nt, Homo sapiens
  misc_RNA (1)...(19): siRNA sense strand
gagacaagguuauuucaug

SEQ ID NO: 1340762 - RNA, 19 nt, Homo sapiens
  misc_RNA (1)...(19): siRNA sense strand
agaaauguaugcagacuuu

SEQ ID NO: 1340763 - RNA, 19 nt, Homo sapiens
  misc_RNA (1)...(19): siRNA sense strand
gaacacagaacuaguuuca

SEQ ID NO: 1340764 - RNA, 19 nt, Homo sapiens
  misc_RNA (1)...(19): siRNA sense strand
ggaauggaauggugugaug

SEQ ID NO: 1340765 - RNA, 19 nt, Homo sapiens
  misc_RNA (1)...(19): siRNA sense strand
acacagaacuaguuucaga

SEQ ID NO: 1340766 - RNA, 19 nt, Homo sapiens
  misc_RNA (1)...(19): siRNA sense strand
gaaguugccuauaaucaag

SEQ ID NO: 1340767 - RNA, 19 nt, Homo sapiens
  misc_RNA (1)...(19): siRNA sense strand
caaauacagucccagaguu

SEQ ID NO: 1340768 - RNA, 19 nt, Homo sapiens
  misc_RNA (1)...(19): siRNA sense strand
ccaagaaguugccuauaau

SEQ ID NO: 1340769 - RNA, 19 nt, Homo sapiens
  misc_RNA (1)...(19): siRNA sense strand
caaaugauacugaagagaa

SEQ ID NO: 1340770 - RNA, 19 nt, Homo sapiens
  misc_RNA (1)...(19): siRNA sense strand
ggcaagaagcacagaauua

SEQ ID NO: 1340771 - RNA, 19 nt, Homo sapiens
  misc_RNA (1)...(19): siRNA sense strand
ggagaaugcuggguuuaug

SEQ ID NO: 1340772 - RNA, 19 nt, Homo sapiens
  misc_RNA (1)...(19): siRNA sense strand
ggaaggagaaggaaauuca

SEQ ID NO: 1340773 - RNA, 19 nt, Homo sapiens
  misc_RNA (1)...(19): siRNA sense strand
cacagcagcucgggaaaua

SEQ ID NO: 1340774 - RNA, 19 nt, Homo sapiens
  misc_RNA (1)...(19): siRNA sense strand
gaaauucagugggagacaa

SEQ ID NO: 1340775 - RNA, 19 nt, Homo sapiens
  misc_RNA (1)...(19): siRNA sense strand
cagaauuacugccgagauu

SEQ ID NO: 1340776 - RNA, 19 nt, Homo sapiens
  misc_RNA (1)...(19): siRNA sense strand
ggaaggaaaggaucaguug

SEQ ID NO: 1340777 - RNA, 19 nt, Homo sapiens
  misc_RNA (1)...(19): siRNA sense strand
ggaauggugugauguaugc

SEQ ID NO: 1340778 - RNA, 19 nt, Homo sapiens
  misc_RNA (1)...(19): siRNA sense strand
gaaggucuauccucacagu

SEQ ID NO: 1340779 - RNA, 19 nt, Homo sapiens
  misc_RNA (1)...(19): siRNA sense strand
gcacaagagcguuaucaug

SEQ ID NO: 1340780 - RNA, 19 nt, Homo sapiens
  misc_RNA (1)...(19): siRNA sense strand
gauggagaaugcuggguuu

SEQ ID NO: 1340781 - RNA, 19 nt, Homo sapiens
  misc_RNA (1)...(19): siRNA sense strand
gaugucacuuucaacuuaa

SEQ ID NO: 1340782 - RNA, 19 nt, Homo sapiens
  misc_RNA (1)...(19): siRNA sense strand
accaagaaguugccuauaa

SEQ ID NO: 1340783 - RNA, 19 nt, Homo sapiens
  misc_RNA (1)...(19): siRNA sense strand
gaagagaacacagaacuag

SEQ ID NO: 1340784 - RNA, 19 nt, Homo sapiens
  misc_RNA (1)...(19): siRNA sense strand
agacaagguuauuucauga

SEQ ID NO: 1340785 - RNA, 19 nt, Homo sapiens
  misc_RNA (1)...(19): siRNA sense strand
gugaacuugucuccaaaua

SEQ ID NO: 1340786 - RNA, 19 nt, Homo sapiens
  misc_RNA (1)...(19): siRNA sense strand
aauaucaucuuccacacua

SEQ ID NO: 1340787 - RNA, 19 nt, Homo sapiens
  misc_RNA (1)...(19): siRNA sense strand
gaggagaaugcaauauuaa

SEQ ID NO: 1340788 - RNA, 19 nt, Homo sapiens
  misc_RNA (1)...(19): siRNA sense strand
gaugcaauauaucaaccua

SEQ ID NO: 1340789 - RNA, 19 nt, Homo sapiens
  misc_RNA (1)...(19): siRNA sense strand
gaaaggaaggagaaggaaa

SEQ ID NO: 1340790 - RNA, 19 nt, Homo sapiens
  misc_RNA (1)...(19): siRNA sense strand
ucccguagaugcaauauau

SEQ ID NO: 1340791 - RNA, 19 nt, Homo sapiens
  misc_RNA (1)...(19): siRNA sense strand
gaucagaacgaguaugaau

SEQ ID NO: 1340792 - RNA, 19 nt, Homo sapiens
  misc_RNA (1)...(19): siRNA sense strand
gcagggcugugucucaugu

SEQ ID NO: 1340793 - RNA, 19 nt, Homo sapiens
  misc_RNA (1)...(19): siRNA sense strand
ugaggaaguuggaagauca

SEQ ID NO: 1340794 - RNA, 19 nt, Homo sapiens
  misc_RNA (1)...(19): siRNA sense strand
ggaauuaggaggagaaugc

SEQ ID NO: 1340795 - RNA, 19 nt, Homo sapiens
  misc_RNA (1)...(19): siRNA sense strand
caacguuuauucuugaaag

SEQ ID NO: 1340796 - RNA, 19 nt, Homo sapiens
  misc_RNA (1)...(19): siRNA sense strand
gagaaaggaaggagaagga

SEQ ID NO: 1340797 - RNA, 19 nt, Homo sapiens
  misc_RNA (1)...(19): siRNA sense strand
agaagaaagugaggaaguu

SEQ ID NO: 1340798 - RNA, 19 nt, Homo sapiens
  misc_RNA (1)...(19): siRNA sense strand
gcaagaagcacagaauuac

SEQ ID NO: 1340799 - RNA, 19 nt, Homo sapiens
  misc_RNA (1)...(19): siRNA sense strand
gagaacacagaacuaguuu

SEQ ID NO: 1340800 - RNA, 19 nt, Homo sapiens
  misc_RNA (1)...(19): siRNA sense strand
agaacuaguuucagaagga

SEQ ID NO: 1340801 - RNA, 19 nt, Homo sapiens
  misc_RNA (1)...(19): siRNA sense strand
gaugaaccauuacugaaac

SEQ ID NO: 1340802 - RNA, 19 nt, Homo sapiens
  misc_RNA (1)...(19): siRNA sense strand
gagaaugcuggguuuauga

SEQ ID NO: 1340803 - RNA, 19 nt, Homo sapiens
  misc_RNA (1)...(19): siRNA sense strand
gaacauuacauucucacau

SEQ ID NO: 1340804 - RNA, 19 nt, Homo sapiens
  misc_RNA (1)...(19): siRNA sense strand
gaugaacauuacauucuca

SEQ ID NO: 1340805 - RNA, 19 nt, Homo sapiens
  misc_RNA (1)...(19): siRNA sense strand
gagcagguuucccaucauc

SEQ ID NO: 1340806 - RNA, 19 nt, Homo sapiens
  misc_RNA (1)...(19): siRNA sense strand
ucacuuaauucuuccuugu

SEQ ID NO: 1340807 - RNA, 19 nt, Homo sapiens
  misc_RNA (1)...(19): siRNA sense strand
gaggagcacaagagcguua

SEQ ID NO: 1340808 - RNA, 19 nt, Homo sapiens
  misc_RNA (1)...(19): siRNA sense strand
cagcagugaagaugaauuu

SEQ ID NO: 1340809 - RNA, 19 nt, Homo sapiens
  misc_RNA (1)...(19): siRNA sense strand
gaagaaagugaggaaguug

SEQ ID NO: 1340810 - RNA, 19 nt, Homo sapiens
  misc_RNA (1)...(19): siRNA sense strand
gcagugaagaugaauuuua

SEQ ID NO: 1340811 - RNA, 19 nt, Homo sapiens
  misc_RNA (1)...(19): siRNA sense strand
gagcauuagugaccagaag

SEQ ID NO: 1340812 - RNA, 19 nt, Homo sapiens
  misc_RNA (1)...(19): siRNA sense strand
guaguucuuccaacguuua

SEQ ID NO: 1340813 - RNA, 19 nt, Homo sapiens
  misc_RNA (1)...(19): siRNA sense strand
uggaagaucagaacgagua

SEQ ID NO: 1340814 - RNA, 19 nt, Homo sapiens
  misc_RNA (1)...(19): siRNA sense strand
ggacaucaucagacuccua

SEQ ID NO: 1340815 - RNA, 19 nt, Homo sapiens
  misc_RNA (1)...(19): siRNA sense strand
caagguuauuucaugaaga

SEQ ID NO: 1340816 - RNA, 19 nt, Homo sapiens
  misc_RNA (1)...(19): siRNA sense strand
acacuaaacccuucuaugg

SEQ ID NO: 1340817 - RNA, 19 nt, Homo sapiens
  misc_RNA (1)...(19): siRNA sense strand
gauaccacagaaucacuua

SEQ ID NO: 1340818 - RNA, 19 nt, Homo sapiens
  misc_RNA (1)...(19): siRNA sense strand
gcagaagcccgagaaagga

SEQ ID NO: 1340819 - RNA, 19 nt, Homo sapiens
  misc_RNA (1)...(19): siRNA sense strand
gugcaaauaucaucuucca

SEQ ID NO: 1340820 - RNA, 19 nt, Homo sapiens
  misc_RNA (1)...(19): siRNA sense strand
acaauucaaugcucauauc

SEQ ID NO: 1340821 - RNA, 19 nt, Homo sapiens
  misc_RNA (1)...(19): siRNA sense strand
gaagauacaauucaaugcu

SEQ ID NO: 1340822 - RNA, 19 nt, Homo sapiens
  misc_RNA (1)...(19): siRNA sense strand
gaugcugaccuguuugauu

SEQ ID NO: 1340823 - RNA, 19 nt, Homo sapiens
  misc_RNA (1)...(19): siRNA sense strand
cacgugaacuugucuccaa

SEQ ID NO: 1340824 - RNA, 19 nt, Homo sapiens
  misc_RNA (1)...(19): siRNA sense strand
ucaugaagauggagaaugc

SEQ ID NO: 1340825 - RNA, 19 nt, Homo sapiens
  misc_RNA (1)...(19): siRNA sense strand
uuaugaugcugaugaauuc

SEQ ID NO: 1340826 - RNA, 19 nt, Homo sapiens
  misc_RNA (1)...(19): siRNA sense strand
caucucuugucgcagguua

SEQ ID NO: 1340827 - RNA, 19 nt, Homo sapiens
  misc_RNA (1)...(19): siRNA sense strand
gguaguucuuccaacguuu

SEQ ID NO: 1340828 - RNA, 19 nt, Homo sapiens
  misc_RNA (1)...(19): siRNA sense strand
caaagcgcuuaauagauuc

SEQ ID NO: 1340829 - RNA, 19 nt, Homo sapiens
  misc_RNA (1)...(19): siRNA sense strand
caagugaugcugaccuguu

SEQ ID NO: 1340830 - RNA, 19 nt, Homo sapiens
  misc_RNA (1)...(19): siRNA sense strand
ugaugaaccauuacugaaa

SEQ ID NO: 1340831 - RNA, 19 nt, Homo sapiens
  misc_RNA (1)...(19): siRNA sense strand
gggcaagaagcacagaauu

SEQ ID NO: 1340832 - RNA, 19 nt, Homo sapiens
  misc_RNA (1)...(19): siRNA sense strand
cuuccaacguuuauucuug

SEQ ID NO: 1340833 - RNA, 19 nt, Homo sapiens
  misc_RNA (1)...(19): siRNA sense strand
agacuuggaauggaucuua

SEQ ID NO: 1340834 - RNA, 19 nt, Homo sapiens
  misc_RNA (1)...(19): siRNA sense strand
caagagcguuaucaugcau

SEQ ID NO: 1340835 - RNA, 19 nt, Homo sapiens
  misc_RNA (1)...(19): siRNA sense strand
aagugaugcugaccuguuu

SEQ ID NO: 1340836 - RNA, 19 nt, Homo sapiens
  misc_RNA (1)...(19): siRNA sense strand
augcugaccuguuugauuc

SEQ ID NO: 1340837 - RNA, 19 nt, Homo sapiens
  misc_RNA (1)...(19): siRNA sense strand
aaugcuggguuuaugauga

SEQ ID NO: 1340838 - RNA, 19 nt, Homo sapiens
  misc_RNA (1)...(19): siRNA sense strand
gaaguuggaagaucagaac

SEQ ID NO: 1340839 - RNA, 19 nt, Homo sapiens
  misc_RNA (1)...(19): siRNA sense strand
agacuaugaugaacauuac

SEQ ID NO: 1340840 - RNA, 19 nt, Homo sapiens
  misc_RNA (1)...(19): siRNA sense strand
agagaacacagaacuaguu

SEQ ID NO: 1340841 - RNA, 19 nt, Homo sapiens
  misc_RNA (1)...(19): siRNA sense strand
ucccaaggaucgaaugguu

SEQ ID NO: 1340842 - RNA, 19 nt, Homo sapiens
  misc_RNA (1)...(19): siRNA sense strand
ggaccuguuugugagcauu

SEQ ID NO: 1340843 - RNA, 19 nt, Homo sapiens
  misc_RNA (1)...(19): siRNA sense strand
ugauucacaugaugacaga

SEQ ID NO: 1340844 - RNA, 19 nt, Homo sapiens
  misc_RNA (1)...(19): siRNA sense strand
ccaaauacagucccagagu

SEQ ID NO: 1340845 - RNA, 19 nt, Homo sapiens
  misc_RNA (1)...(19): siRNA sense strand
uaugaugaaccauuacuga

SEQ ID NO: 1340846 - RNA, 19 nt, Homo sapiens
  misc_RNA (1)...(19): siRNA sense strand
ucaagaagaaagugaggaa

SEQ ID NO: 1340847 - RNA, 19 nt, Homo sapiens
  misc_RNA (1)...(19): siRNA sense strand
gguuagacuuggaauggau

SEQ ID NO: 1340848 - RNA, 19 nt, Homo sapiens
  misc_RNA (1)...(19): siRNA sense strand
gcacauccggaccuguuug

SEQ ID NO: 1340849 - RNA, 19 nt, Homo sapiens
  misc_RNA (1)...(19): siRNA sense strand
aaaggaaggagaaggaaau

SEQ ID NO: 1340850 - RNA, 19 nt, Homo sapiens
  misc_RNA (1)...(19): siRNA sense strand
ugaagagaacacagaacua

SEQ ID NO: 1340851 - RNA, 19 nt, Homo sapiens
  misc_RNA (1)...(19): siRNA sense strand
ggaaguuggaagaucagaa

SEQ ID NO: 1340852 - RNA, 19 nt, Homo sapiens
  misc_RNA (1)...(19): siRNA sense strand
aagaucagaacgaguauga

SEQ ID NO: 1340853 - RNA, 19 nt, Homo sapiens
  misc_RNA (1)...(19): siRNA sense strand
ggaggagaaugcaauauua

SEQ ID NO: 1340854 - RNA, 19 nt, Homo sapiens
  misc_RNA (1)...(19): siRNA sense strand
ccaaagcgcuuaauagauu

SEQ ID NO: 1340855 - RNA, 19 nt, Homo sapiens
  misc_RNA (1)...(19): siRNA sense strand
ggaugucacuuucaacuua

SEQ ID NO: 1340856 - RNA, 19 nt, Homo sapiens
  misc_RNA (1)...(19): siRNA sense strand
gaacuugucuccaaauaca

SEQ ID NO: 1340857 - RNA, 19 nt, Homo sapiens
  misc_RNA (1)...(19): siRNA sense strand
gcucauaucuggaccaaau

SEQ ID NO: 1340858 - RNA, 19 nt, Homo sapiens
  misc_RNA (1)...(19): siRNA sense strand
ggaaggaugucacuuucaa

SEQ ID NO: 1340859 - RNA, 19 nt, Homo sapiens
  misc_RNA (1)...(19): siRNA sense strand
gcacaggcuugaagaaaga

SEQ ID NO: 1340860 - RNA, 19 nt, Homo sapiens
  misc_RNA (1)...(19): siRNA sense strand
gaaaggaucaguugccaaa

SEQ ID NO: 1340861 - RNA, 19 nt, Homo sapiens
  misc_RNA (1)...(19): siRNA sense strand
gagacaagguuauuucaug

SEQ ID NO: 1340862 - RNA, 19 nt, Homo sapiens
  misc_RNA (1)...(19): siRNA sense strand
agaaauguaugcagacuuu

SEQ ID NO: 1340863 - RNA, 19 nt, Homo sapiens
  misc_RNA (1)...(19): siRNA sense strand
gaacacagaacuaguuuca

SEQ ID NO: 1340864 - RNA, 19 nt, Homo sapiens
  misc_RNA (1)...(19): siRNA sense strand
ggaauggaauggugugaug

SEQ ID NO: 1340865 - RNA, 19 nt, Homo sapiens
  misc_RNA (1)...(19): siRNA sense strand
acacagaacuaguuucaga

SEQ ID NO: 1340866 - RNA, 19 nt, Homo sapiens
  misc_RNA (1)...(19): siRNA sense strand
gaaguugccuauaaucaag

SEQ ID NO: 1340867 - RNA, 19 nt, Homo sapiens
  misc_RNA (1)...(19): siRNA sense strand
caaauacagucccagaguu

SEQ ID NO: 1340868 - RNA, 19 nt, Homo sapiens
  misc_RNA (1)...(19): siRNA sense strand
ccaagaaguugccuauaau

SEQ ID NO: 1340869 - RNA, 19 nt, Homo sapiens
  misc_RNA (1)...(19): siRNA sense strand
caaaugauacugaagagaa

SEQ ID NO: 1340870 - RNA, 19 nt, Homo sapiens
  misc_RNA (1)...(19): siRNA sense strand
ggcaagaagcacagaauua

SEQ ID NO: 1340871 - RNA, 19 nt, Homo sapiens
  misc_RNA (1)...(19): siRNA sense strand
ggagaaugcuggguuuaug

SEQ ID NO: 1340872 - RNA, 19 nt, Homo sapiens
  misc_RNA (1)...(19): siRNA sense strand
ggaaggagaaggaaauuca

SEQ ID NO: 1340873 - RNA, 19 nt, Homo sapiens
  misc_RNA (1)...(19): siRNA sense strand
cacagcagcucgggaaaua

SEQ ID NO: 1340874 - RNA, 19 nt, Homo sapiens
  misc_RNA (1)...(19): siRNA sense strand
gaaauucagugggagacaa

SEQ ID NO: 1340875 - RNA, 19 nt, Homo sapiens
  misc_RNA (1)...(19): siRNA sense strand
cagaauuacugccgagauu

SEQ ID NO: 1340876 - RNA, 19 nt, Homo sapiens
  misc_RNA (1)...(19): siRNA sense strand
ggaaggaaaggaucaguug

SEQ ID NO: 1340877 - RNA, 19 nt, Homo sapiens
  misc_RNA (1)...(19): siRNA sense strand
ggaauggugugauguaugc

SEQ ID NO: 1340878 - RNA, 19 nt, Homo sapiens
  misc_RNA (1)...(19): siRNA sense strand
gaaggucuauccucacagu

SEQ ID NO: 1340879 - RNA, 19 nt, Homo sapiens
  misc_RNA (1)...(19): siRNA sense strand
gcacaagagcguuaucaug

SEQ ID NO: 1340880 - RNA, 19 nt, Homo sapiens
  misc_RNA (1)...(19): siRNA sense strand
gauggagaaugcuggguuu

SEQ ID NO: 1340881 - RNA, 19 nt, Homo sapiens
  misc_RNA (1)...(19): siRNA sense strand
gaugucacuuucaacuuaa

SEQ ID NO: 1340882 - RNA, 19 nt, Homo sapiens
  misc_RNA (1)...(19): siRNA sense strand
accaagaaguugccuauaa

SEQ ID NO: 1340883 - RNA, 19 nt, Homo sapiens
  misc_RNA (1)...(19): siRNA sense strand
gaagagaacacagaacuag

SEQ ID NO: 1340884 - RNA, 19 nt, Homo sapiens
  misc_RNA (1)...(19): siRNA sense strand
agacaagguuauuucauga

SEQ ID NO: 1340885 - RNA, 19 nt, Homo sapiens
  misc_RNA (1)...(19): siRNA sense strand
gugaacuugucuccaaaua

SEQ ID NO: 1340886 - RNA, 19 nt, Homo sapiens
  misc_RNA (1)...(19): siRNA sense strand
aauaucaucuuccacacua

SEQ ID NO: 1340887 - RNA, 19 nt, Homo sapiens
  misc_RNA (1)...(19): siRNA sense strand
gaggagaaugcaauauuaa

SEQ ID NO: 1340888 - RNA, 19 nt, Homo sapiens
  misc_RNA (1)...(19): siRNA sense strand
gaugcaauauaucaaccua

SEQ ID NO: 1340889 - RNA, 19 nt, Homo sapiens
  misc_RNA (1)...(19): siRNA sense strand
gaaaggaaggagaaggaaa

SEQ ID NO: 1340890 - RNA, 19 nt, Homo sapiens
  misc_RNA (1)...(19): siRNA sense strand
ucccguagaugcaauauau

SEQ ID NO: 1340891 - RNA, 19 nt, Homo sapiens
  misc_RNA (1)...(19): siRNA sense strand
gaucagaacgaguaugaau

SEQ ID NO: 1340892 - RNA, 19 nt, Homo sapiens
  misc_RNA (1)...(19): siRNA sense strand
gcagggcugugucucaugu

SEQ ID NO: 1340893 - RNA, 19 nt, Homo sapiens
  misc_RNA (1)...(19): siRNA sense strand
ugaggaaguuggaagauca

SEQ ID NO: 1340894 - RNA, 19 nt, Homo sapiens
  misc_RNA (1)...(19): siRNA sense strand
ggaauuaggaggagaaugc

SEQ ID NO: 1340895 - RNA, 19 nt, Homo sapiens
  misc_RNA (1)...(19): siRNA sense strand
caacguuuauucuugaaag

SEQ ID NO: 1340896 - RNA, 19 nt, Homo sapiens
  misc_RNA (1)...(19): siRNA sense strand
gagaaaggaaggagaagga

SEQ ID NO: 1340897 - RNA, 19 nt, Homo sapiens
  misc_RNA (1)...(19): siRNA sense strand
agaagaaagugaggaaguu

SEQ ID NO: 1340898 - RNA, 19 nt, Homo sapiens
  misc_RNA (1)...(19): siRNA sense strand
gcaagaagcacagaauuac

SEQ ID NO: 1340899 - RNA, 19 nt, Homo sapiens
  misc_RNA (1)...(19): siRNA sense strand
gagaacacagaacuaguuu

SEQ ID NO: 1340900 - RNA, 19 nt, Homo sapiens
  misc_RNA (1)...(19): siRNA sense strand
agaacuaguuucagaagga

SEQ ID NO: 1340901 - RNA, 19 nt, Homo sapiens
  misc_RNA (1)...(19): siRNA sense strand
gaugaaccauuacugaaac

SEQ ID NO: 1340902 - RNA, 19 nt, Homo sapiens
  misc_RNA (1)...(19): siRNA sense strand
gagaaugcuggguuuauga

SEQ ID NO: 1340903 - RNA, 19 nt, Homo sapiens
  misc_RNA (1)...(19): siRNA sense strand
gaacauuacauucucacau

SEQ ID NO: 1340904 - RNA, 19 nt, Homo sapiens
  misc_RNA (1)...(19): siRNA sense strand
gaugaacauuacauucuca

SEQ ID NO: 1340905 - RNA, 19 nt, Homo sapiens
  misc_RNA (1)...(19): siRNA sense strand
gagcagguuucccaucauc

SEQ ID NO: 1340906 - RNA, 19 nt, Homo sapiens
  misc_RNA (1)...(19): siRNA sense strand
ucacuuaauucuuccuugu

SEQ ID NO: 1340907 - RNA, 19 nt, Homo sapiens
  misc_RNA (1)...(19): siRNA sense strand
gaggagcacaagagcguua

SEQ ID NO: 1340908 - RNA, 19 nt, Homo sapiens
  misc_RNA (1)...(19): siRNA sense strand
cagcagugaagaugaauuu

SEQ ID NO: 1340909 - RNA, 19 nt, Homo sapiens
  misc_RNA (1)...(19): siRNA sense strand
gaagaaagugaggaaguug

SEQ ID NO: 1340910 - RNA, 19 nt, Homo sapiens
  misc_RNA (1)...(19): siRNA sense strand
gcagugaagaugaauuuua

SEQ ID NO: 1340911 - RNA, 19 nt, Homo sapiens
  misc_RNA (1)...(19): siRNA sense strand
gagcauuagugaccagaag

SEQ ID NO: 1340912 - RNA, 19 nt, Homo sapiens
  misc_RNA (1)...(19): siRNA sense strand
guaguucuuccaacguuua

SEQ ID NO: 1340913 - RNA, 19 nt, Homo sapiens
  misc_RNA (1)...(19): siRNA sense strand
uggaagaucagaacgagua

SEQ ID NO: 1340914 - RNA, 19 nt, Homo sapiens
  misc_RNA (1)...(19): siRNA sense strand
ggacaucaucagacuccua

SEQ ID NO: 1340915 - RNA, 19 nt, Homo sapiens
  misc_RNA (1)...(19): siRNA sense strand
caagguuauuucaugaaga

SEQ ID NO: 1340916 - RNA, 19 nt, Homo sapiens
  misc_RNA (1)...(19): siRNA sense strand
acacuaaacccuucuaugg

SEQ ID NO: 1340917 - RNA, 19 nt, Homo sapiens
  misc_RNA (1)...(19): siRNA sense strand
gauaccacagaaucacuua

SEQ ID NO: 1340918 - RNA, 19 nt, Homo sapiens
  misc_RNA (1)...(19): siRNA sense strand
gcagaagcccgagaaagga

SEQ ID NO: 1340919 - RNA, 19 nt, Homo sapiens
  misc_RNA (1)...(19): siRNA sense strand
gugcaaauaucaucuucca

SEQ ID NO: 1340920 - RNA, 19 nt, Homo sapiens
  misc_RNA (1)...(19): siRNA sense strand
acaauucaaugcucauauc

SEQ ID NO: 1340921 - RNA, 19 nt, Homo sapiens
  misc_RNA (1)...(19): siRNA sense strand
gaagauacaauucaaugcu

SEQ ID NO: 1340922 - RNA, 19 nt, Homo sapiens
  misc_RNA (1)...(19): siRNA sense strand
gaugcugaccuguuugauu

SEQ ID NO: 1340923 - RNA, 19 nt, Homo sapiens
  misc_RNA (1)...(19): siRNA sense strand
cacgugaacuugucuccaa

SEQ ID NO: 1340924 - RNA, 19 nt, Homo sapiens
  misc_RNA (1)...(19): siRNA sense strand
ucaugaagauggagaaugc

SEQ ID NO: 1340925 - RNA, 19 nt, Homo sapiens
  misc_RNA (1)...(19): siRNA sense strand
uuaugaugcugaugaauuc

SEQ ID NO: 1340926 - RNA, 19 nt, Homo sapiens
  misc_RNA (1)...(19): siRNA sense strand
caucucuugucgcagguua

SEQ ID NO: 1340927 - RNA, 19 nt, Homo sapiens
  misc_RNA (1)...(19): siRNA sense strand
gguaguucuuccaacguuu

SEQ ID NO: 1340928 - RNA, 19 nt, Homo sapiens
  misc_RNA (1)...(19): siRNA sense strand
caaagcgcuuaauagauuc

SEQ ID NO: 1340929 - RNA, 19 nt, Homo sapiens
  misc_RNA (1)...(19): siRNA sense strand
caagugaugcugaccuguu

SEQ ID NO: 1340930 - RNA, 19 nt, Homo sapiens
  misc_RNA (1)...(19): siRNA sense strand
ugaugaaccauuacugaaa

SEQ ID NO: 1340931 - RNA, 19 nt, Homo sapiens
  misc_RNA (1)...(19): siRNA sense strand
gggcaagaagcacagaauu

SEQ ID NO: 1340932 - RNA, 19 nt, Homo sapiens
  misc_RNA (1)...(19): siRNA sense strand
cuuccaacguuuauucuug

SEQ ID NO: 1340933 - RNA, 19 nt, Homo sapiens
  misc_RNA (1)...(19): siRNA sense strand
agacuuggaauggaucuua

SEQ ID NO: 1340934 - RNA, 19 nt, Homo sapiens
  misc_RNA (1)...(19): siRNA sense strand
caagagcguuaucaugcau

SEQ ID NO: 1340935 - RNA, 19 nt, Homo sapiens
  misc_RNA (1)...(19): siRNA sense strand
aagugaugcugaccuguuu

SEQ ID NO: 1340936 - RNA, 19 nt, Homo sapiens
  misc_RNA (1)...(19): siRNA sense strand
augcugaccuguuugauuc

SEQ ID NO: 1340937 - RNA, 19 nt, Homo sapiens
  misc_RNA (1)...(19): siRNA sense strand
aaugcuggguuuaugauga

SEQ ID NO: 1340938 - RNA, 19 nt, Homo sapiens
  misc_RNA (1)...(19): siRNA sense strand
gaaguuggaagaucagaac

SEQ ID NO: 1340939 - RNA, 19 nt, Homo sapiens
  misc_RNA (1)...(19): siRNA sense strand
agacuaugaugaacauuac

SEQ ID NO: 1340940 - RNA, 19 nt, Homo sapiens
  misc_RNA (1)...(19): siRNA sense strand
agagaacacagaacuaguu

SEQ ID NO: 1340941 - RNA, 19 nt, Homo sapiens
  misc_RNA (1)...(19): siRNA sense strand
ucccaaggaucgaaugguu

SEQ ID NO: 1340942 - RNA, 19 nt, Homo sapiens
  misc_RNA (1)...(19): siRNA sense strand
ggaccuguuugugagcauu

SEQ ID NO: 1340943 - RNA, 19 nt, Homo sapiens
  misc_RNA (1)...(19): siRNA sense strand
ugauucacaugaugacaga

SEQ ID NO: 1340944 - RNA, 19 nt, Homo sapiens
  misc_RNA (1)...(19): siRNA sense strand
ccaaauacagucccagagu

SEQ ID NO: 1340945 - RNA, 19 nt, Homo sapiens
  misc_RNA (1)...(19): siRNA sense strand
uaugaugaaccauuacuga

SEQ ID NO: 1340946 - RNA, 19 nt, Homo sapiens
  misc_RNA (1)...(19): siRNA sense strand
ucaagaagaaagugaggaa

SEQ ID NO: 1340947 - RNA, 19 nt, Homo sapiens
  misc_RNA (1)...(19): siRNA sense strand
gguuagacuuggaauggau

SEQ ID NO: 1340948 - RNA, 19 nt, Homo sapiens
  misc_RNA (1)...(19): siRNA sense strand
gcacauccggaccuguuug

SEQ ID NO: 1340949 - RNA, 19 nt, Homo sapiens
  misc_RNA (1)...(19): siRNA sense strand
aaaggaaggagaaggaaau

SEQ ID NO: 1340950 - RNA, 19 nt, Homo sapiens
  misc_RNA (1)...(19): siRNA sense strand
ugaagagaacacagaacua

SEQ ID NO: 1340951 - RNA, 19 nt, Homo sapiens
  misc_RNA (1)...(19): siRNA sense strand
ggaaguuggaagaucagaa

SEQ ID NO: 1340952 - RNA, 19 nt, Homo sapiens
  misc_RNA (1)...(19): siRNA sense strand
aagaucagaacgaguauga

SEQ ID NO: 1340953 - RNA, 19 nt, Homo sapiens
  misc_RNA (1)...(19): siRNA sense strand
ggaggagaaugcaauauua

SEQ ID NO: 1340954 - RNA, 19 nt, Homo sapiens
  misc_RNA (1)...(19): siRNA sense strand
ccaaagcgcuuaauagauu

SEQ ID NO: 1340955 - RNA, 19 nt, Homo sapiens
  misc_RNA (1)...(19): siRNA sense strand
ggaugucacuuucaacuua

SEQ ID NO: 1340956 - RNA, 19 nt, Homo sapiens
  misc_RNA (1)...(19): siRNA sense strand
caaagaagaugaacagaga

SEQ ID NO: 1340957 - RNA, 19 nt, Homo sapiens
  misc_RNA (1)...(19): siRNA sense strand
gaacuugucuccaaauaca

SEQ ID NO: 1340958 - RNA, 19 nt, Homo sapiens
  misc_RNA (1)...(19): siRNA sense strand
gcucauaucuggaccaaau

SEQ ID NO: 1340959 - RNA, 19 nt, Homo sapiens
  misc_RNA (1)...(19): siRNA sense strand
ggaaggaugucacuuucaa

SEQ ID NO: 1340960 - RNA, 19 nt, Homo sapiens
  misc_RNA (1)...(19): siRNA sense strand
gcacaggcuugaagaaaga

SEQ ID NO: 1340961 - RNA, 19 nt, Homo sapiens
  misc_RNA (1)...(19): siRNA sense strand
gaaaggaucaguugccaaa

SEQ ID NO: 1340962 - RNA, 19 nt, Homo sapiens
  misc_RNA (1)...(19): siRNA sense strand
gagacaagguuauuucaug

SEQ ID NO: 1340963 - RNA, 19 nt, Homo sapiens
  misc_RNA (1)...(19): siRNA sense strand
agaaauguaugcagacuuu

SEQ ID NO: 1340964 - RNA, 19 nt, Homo sapiens
  misc_RNA (1)...(19): siRNA sense strand
gaacacagaacuaguuuca

SEQ ID NO: 1340965 - RNA, 19 nt, Homo sapiens
  misc_RNA (1)...(19): siRNA sense strand
ggaauggaauggugugaug

SEQ ID NO: 1340966 - RNA, 19 nt, Homo sapiens
  misc_RNA (1)...(19): siRNA sense strand
acacagaacuaguuucaga

SEQ ID NO: 1340967 - RNA, 19 nt, Homo sapiens
  misc_RNA (1)...(19): siRNA sense strand
gaaguugccuauaaucaag

SEQ ID NO: 1340968 - RNA, 19 nt, Homo sapiens
  misc_RNA (1)...(19): siRNA sense strand
caaauacagucccagaguu

SEQ ID NO: 1340969 - RNA, 19 nt, Homo sapiens
  misc_RNA (1)...(19): siRNA sense strand
ccaagaaguugccuauaau

SEQ ID NO: 1340970 - RNA, 19 nt, Homo sapiens
  misc_RNA (1)...(19): siRNA sense strand
gacaacaaauagcauggua

SEQ ID NO: 1340971 - RNA, 19 nt, Homo sapiens
  misc_RNA (1)...(19): siRNA sense strand
caaaugauacugaagagaa

SEQ ID NO: 1340972 - RNA, 19 nt, Homo sapiens
  misc_RNA (1)...(19): siRNA sense strand
ggcaagaagcacagaauua

SEQ ID NO: 1340973 - RNA, 19 nt, Homo sapiens
  misc_RNA (1)...(19): siRNA sense strand
ggagaaugcuggguuuaug

SEQ ID NO: 1340974 - RNA, 19 nt, Homo sapiens
  misc_RNA (1)...(19): siRNA sense strand
caaauagcaugguagaauc

SEQ ID NO: 1340975 - RNA, 19 nt, Homo sapiens
  misc_RNA (1)...(19): siRNA sense strand
ggaaggagaaggaaauuca

SEQ ID NO: 1340976 - RNA, 19 nt, Homo sapiens
  misc_RNA (1)...(19): siRNA sense strand
gaagaugaacagagaaaga

SEQ ID NO: 1340977 - RNA, 19 nt, Homo sapiens
  misc_RNA (1)...(19): siRNA sense strand
cacagcagcucgggaaaua

SEQ ID NO: 1340978 - RNA, 19 nt, Homo sapiens
  misc_RNA (1)...(19): siRNA sense strand
gaaauucagugggagacaa

SEQ ID NO: 1340979 - RNA, 19 nt, Homo sapiens
  misc_RNA (1)...(19): siRNA sense strand
cagaauuacugccgagauu

SEQ ID NO: 1340980 - RNA, 19 nt, Homo sapiens
  misc_RNA (1)...(19): siRNA sense strand
ggaaggaaaggaucaguug

SEQ ID NO: 1340981 - RNA, 19 nt, Homo sapiens
  misc_RNA (1)...(19): siRNA sense strand
ggaauggugugauguaugc

SEQ ID NO: 1340982 - RNA, 19 nt, Homo sapiens
  misc_RNA (1)...(19): siRNA sense strand
gaaggucuauccucacagu

SEQ ID NO: 1340983 - RNA, 19 nt, Homo sapiens
  misc_RNA (1)...(19): siRNA sense strand
gcacaagagcguuaucaug

SEQ ID NO: 1340984 - RNA, 19 nt, Homo sapiens
  misc_RNA (1)...(19): siRNA sense strand
gauggagaaugcuggguuu

SEQ ID NO: 1340985 - RNA, 19 nt, Homo sapiens
  misc_RNA (1)...(19): siRNA sense strand
gaugucacuuucaacuuaa

SEQ ID NO: 1340986 - RNA, 19 nt, Homo sapiens
  misc_RNA (1)...(19): siRNA sense strand
gaacagagaaagaaaauug

SEQ ID NO: 1340987 - RNA, 19 nt, Homo sapiens
  misc_RNA (1)...(19): siRNA sense strand
ucaaagagacaacaaauag

SEQ ID NO: 1340988 - RNA, 19 nt, Homo sapiens
  misc_RNA (1)...(19): siRNA sense strand
accaagaaguugccuauaa

SEQ ID NO: 1340989 - RNA, 19 nt, Homo sapiens
  misc_RNA (1)...(19): siRNA sense strand
gaagagaacacagaacuag

SEQ ID NO: 1340990 - RNA, 19 nt, Homo sapiens
  misc_RNA (1)...(19): siRNA sense strand
agacaagguuauuucauga

SEQ ID NO: 1340991 - RNA, 19 nt, Homo sapiens
  misc_RNA (1)...(19): siRNA sense strand
gugaacuugucuccaaaua

SEQ ID NO: 1340992 - RNA, 19 nt, Homo sapiens
  misc_RNA (1)...(19): siRNA sense strand
aauaucaucuuccacacua

SEQ ID NO: 1340993 - RNA, 19 nt, Homo sapiens
  misc_RNA (1)...(19): siRNA sense strand
gaggagaaugcaauauuaa

SEQ ID NO: 1340994 - RNA, 19 nt, Homo sapiens
  misc_RNA (1)...(19): siRNA sense strand
gaugcaauauaucaaccua

SEQ ID NO: 1340995 - RNA, 19 nt, Homo sapiens
  misc_RNA (1)...(19): siRNA sense strand
gaaaggaaggagaaggaaa

SEQ ID NO: 1340996 - RNA, 19 nt, Homo sapiens
  misc_RNA (1)...(19): siRNA sense strand
ucccguagaugcaauauau

SEQ ID NO: 1340997 - RNA, 19 nt, Homo sapiens
  misc_RNA (1)...(19): siRNA sense strand
gaucagaacgaguaugaau

SEQ ID NO: 1340998 - RNA, 19 nt, Homo sapiens
  misc_RNA (1)...(19): siRNA sense strand
caacaaauagcaugguaga

SEQ ID NO: 1340999 - RNA, 19 nt, Homo sapiens
  misc_RNA (1)...(19): siRNA sense strand
gcagggcugugucucaugu

SEQ ID NO: 1341000 - RNA, 19 nt, Homo sapiens
  misc_RNA (1)...(19): siRNA sense strand
ugaggaaguuggaagauca

SEQ ID NO: 1341001 - RNA, 19 nt, Homo sapiens
  misc_RNA (1)...(19): siRNA sense strand
ggaauuaggaggagaaugc

SEQ ID NO: 1341002 - RNA, 19 nt, Homo sapiens
  misc_RNA (1)...(19): siRNA sense strand
caacguuuauucuugaaag

SEQ ID NO: 1341003 - RNA, 19 nt, Homo sapiens
  misc_RNA (1)...(19): siRNA sense strand
gagaaaggaaggagaagga

SEQ ID NO: 1341004 - RNA, 19 nt, Homo sapiens
  misc_RNA (1)...(19): siRNA sense strand
agaagaaagugaggaaguu

SEQ ID NO: 1341005 - RNA, 19 nt, Homo sapiens
  misc_RNA (1)...(19): siRNA sense strand
gcaagaagcacagaauuac

SEQ ID NO: 1341006 - RNA, 19 nt, Homo sapiens
  misc_RNA (1)...(19): siRNA sense strand
gagaacacagaacuaguuu

SEQ ID NO: 1341007 - RNA, 19 nt, Homo sapiens
  misc_RNA (1)...(19): siRNA sense strand
agaacuaguuucagaagga

SEQ ID NO: 1341008 - RNA, 19 nt, Homo sapiens
  misc_RNA (1)...(19): siRNA sense strand
gaugaaccauuacugaaac

SEQ ID NO: 1341009 - RNA, 19 nt, Homo sapiens
  misc_RNA (1)...(19): siRNA sense strand
gagaaugcuggguuuauga

SEQ ID NO: 1341010 - RNA, 19 nt, Homo sapiens
  misc_RNA (1)...(19): siRNA sense strand
gaacauuacauucucacau

SEQ ID NO: 1341011 - RNA, 19 nt, Homo sapiens
  misc_RNA (1)...(19): siRNA sense strand
gaugaacauuacauucuca

SEQ ID NO: 1341012 - RNA, 19 nt, Homo sapiens
  misc_RNA (1)...(19): siRNA sense strand
gagcagguuucccaucauc

SEQ ID NO: 1341013 - RNA, 19 nt, Homo sapiens
  misc_RNA (1)...(19): siRNA sense strand
ucacuuaauucuuccuugu

SEQ ID NO: 1341014 - RNA, 19 nt, Homo sapiens
  misc_RNA (1)...(19): siRNA sense strand
gaggagcacaagagcguua

SEQ ID NO: 1341015 - RNA, 19 nt, Homo sapiens
  misc_RNA (1)...(19): siRNA sense strand
cagcagugaagaugaauuu

SEQ ID NO: 1341016 - RNA, 19 nt, Homo sapiens
  misc_RNA (1)...(19): siRNA sense strand
gaagaaagugaggaaguug

SEQ ID NO: 1341017 - RNA, 19 nt, Homo sapiens
  misc_RNA (1)...(19): siRNA sense strand
gcagugaagaugaauuuua

SEQ ID NO: 1341018 - RNA, 19 nt, Homo sapiens
  misc_RNA (1)...(19): siRNA sense strand
gagcauuagugaccagaag

SEQ ID NO: 1341019 - RNA, 19 nt, Homo sapiens
  misc_RNA (1)...(19): siRNA sense strand
guaguucuuccaacguuua

SEQ ID NO: 1341020 - RNA, 19 nt, Homo sapiens
  misc_RNA (1)...(19): siRNA sense strand
uggaagaucagaacgagua

SEQ ID NO: 1341021 - RNA, 19 nt, Homo sapiens
  misc_RNA (1)...(19): siRNA sense strand
ggacaucaucagacuccua

SEQ ID NO: 1341022 - RNA, 19 nt, Homo sapiens
  misc_RNA (1)...(19): siRNA sense strand
caagguuauuucaugaaga

SEQ ID NO: 1341023 - RNA, 19 nt, Homo sapiens
  misc_RNA (1)...(19): siRNA sense strand
acacuaaacccuucuaugg

SEQ ID NO: 1341024 - RNA, 19 nt, Homo sapiens
  misc_RNA (1)...(19): siRNA sense strand
gauaccacagaaucacuua

SEQ ID NO: 1341025 - RNA, 19 nt, Homo sapiens
  misc_RNA (1)...(19): siRNA sense strand
gcagaagcccgagaaagga

SEQ ID NO: 1341026 - RNA, 19 nt, Homo sapiens
  misc_RNA (1)...(19): siRNA sense strand
acaaauagcaugguagaau

SEQ ID NO: 1341027 - RNA, 19 nt, Homo sapiens
  misc_RNA (1)...(19): siRNA sense strand
gugcaaauaucaucuucca

SEQ ID NO: 1341028 - RNA, 19 nt, Homo sapiens
  misc_RNA (1)...(19): siRNA sense strand
acaauucaaugcucauauc

SEQ ID NO: 1341029 - RNA, 19 nt, Homo sapiens
  misc_RNA (1)...(19): siRNA sense strand
gaagauacaauucaaugcu

SEQ ID NO: 1341030 - RNA, 19 nt, Homo sapiens
  misc_RNA (1)...(19): siRNA sense strand
gaugcugaccuguuugauu

SEQ ID NO: 1341031 - RNA, 19 nt, Homo sapiens
  misc_RNA (1)...(19): siRNA sense strand
cacgugaacuugucuccaa

SEQ ID NO: 1341032 - RNA, 19 nt, Homo sapiens
  misc_RNA (1)...(19): siRNA sense strand
ucaugaagauggagaaugc

SEQ ID NO: 1341033 - RNA, 19 nt, Homo sapiens
  misc_RNA (1)...(19): siRNA sense strand
uuaugaugcugaugaauuc

SEQ ID NO: 1341034 - RNA, 19 nt, Homo sapiens
  misc_RNA (1)...(19): siRNA sense strand
caucucuugucgcagguua

SEQ ID NO: 1341035 - RNA, 19 nt, Homo sapiens
  misc_RNA (1)...(19): siRNA sense strand
gguaguucuuccaacguuu

SEQ ID NO: 1341036 - RNA, 19 nt, Homo sapiens
  misc_RNA (1)...(19): siRNA sense strand
caaagcgcuuaauagauuc

SEQ ID NO: 1341037 - RNA, 19 nt, Homo sapiens
  misc_RNA (1)...(19): siRNA sense strand
caagugaugcugaccuguu

SEQ ID NO: 1341038 - RNA, 19 nt, Homo sapiens
  misc_RNA (1)...(19): siRNA sense strand
ugaugaaccauuacugaaa

SEQ ID NO: 1341039 - RNA, 19 nt, Homo sapiens
  misc_RNA (1)...(19): siRNA sense strand
gggcaagaagcacagaauu

SEQ ID NO: 1341040 - RNA, 19 nt, Homo sapiens
  misc_RNA (1)...(19): siRNA sense strand
cuuccaacguuuauucuug

SEQ ID NO: 1341041 - RNA, 19 nt, Homo sapiens
  misc_RNA (1)...(19): siRNA sense strand
agacuuggaauggaucuua

SEQ ID NO: 1341042 - RNA, 19 nt, Homo sapiens
  misc_RNA (1)...(19): siRNA sense strand
caagagcguuaucaugcau

SEQ ID NO: 1341043 - RNA, 19 nt, Homo sapiens
  misc_RNA (1)...(19): siRNA sense strand
aagugaugcugaccuguuu

SEQ ID NO: 1341044 - RNA, 19 nt, Homo sapiens
  misc_RNA (1)...(19): siRNA sense strand
augcugaccuguuugauuc

SEQ ID NO: 1341045 - RNA, 19 nt, Homo sapiens
  misc_RNA (1)...(19): siRNA sense strand
aaugcuggguuuaugauga

SEQ ID NO: 1341046 - RNA, 19 nt, Homo sapiens
  misc_RNA (1)...(19): siRNA sense strand
gaaguuggaagaucagaac

SEQ ID NO: 1341047 - RNA, 19 nt, Homo sapiens
  misc_RNA (1)...(19): siRNA sense strand
agacuaugaugaacauuac

SEQ ID NO: 1341048 - RNA, 19 nt, Homo sapiens
  misc_RNA (1)...(19): siRNA sense strand
agagaacacagaacuaguu

SEQ ID NO: 1341049 - RNA, 19 nt, Homo sapiens
  misc_RNA (1)...(19): siRNA sense strand
ucccaaggaucgaaugguu

SEQ ID NO: 1341050 - RNA, 19 nt, Homo sapiens
  misc_RNA (1)...(19): siRNA sense strand
ggaccuguuugugagcauu

SEQ ID NO: 1341051 - RNA, 19 nt, Homo sapiens
  misc_RNA (1)...(19): siRNA sense strand
ugauucacaugaugacaga

SEQ ID NO: 1341052 - RNA, 19 nt, Homo sapiens
  misc_RNA (1)...(19): siRNA sense strand
uaugaugaaccauuacuga

SEQ ID NO: 1341053 - RNA, 19 nt, Homo sapiens
  misc_RNA (1)...(19): siRNA sense strand
ggaggagaaugcaauauua

SEQ ID NO: 1341054 - RNA, 19 nt, Homo sapiens
  misc_RNA (1)...(19): siRNA sense strand
ccaaagcgcuuaauagauu

SEQ ID NO: 1341055 - RNA, 19 nt, Homo sapiens
  misc_RNA (1)...(19): siRNA sense strand
ggaugucacuuucaacuua

SEQ ID NO: 1341056 - RNA, 19 nt, Homo sapiens
  misc_RNA (1)...(19): siRNA sense strand
caaagaagaugaacagaga

SEQ ID NO: 1341057 - RNA, 19 nt, Homo sapiens
  misc_RNA (1)...(19): siRNA sense strand
gaacuugucuccaaauaca

SEQ ID NO: 1341058 - RNA, 19 nt, Homo sapiens
  misc_RNA (1)...(19): siRNA sense strand
gcucauaucuggaccaaau

SEQ ID NO: 1341059 - RNA, 19 nt, Homo sapiens
  misc_RNA (1)...(19): siRNA sense strand
ggaaggaugucacuuucaa

SEQ ID NO: 1341060 - RNA, 19 nt, Homo sapiens
  misc_RNA (1)...(19): siRNA sense strand
gcacaggcuugaagaaaga

SEQ ID NO: 1341061 - RNA, 19 nt, Homo sapiens
  misc_RNA (1)...(19): siRNA sense strand
gaaaggaucaguugccaaa

SEQ ID NO: 1341062 - RNA, 19 nt, Homo sapiens
  misc_RNA (1)...(19): siRNA sense strand
gagacaagguuauuucaug

SEQ ID NO: 1341063 - RNA, 19 nt, Homo sapiens
  misc_RNA (1)...(19): siRNA sense strand
agaaauguaugcagacuuu

SEQ ID NO: 1341064 - RNA, 19 nt, Homo sapiens
  misc_RNA (1)...(19): siRNA sense strand
gaacacagaacuaguuuca

SEQ ID NO: 1341065 - RNA, 19 nt, Homo sapiens
  misc_RNA (1)...(19): siRNA sense strand
ggaauggaauggugugaug

SEQ ID NO: 1341066 - RNA, 19 nt, Homo sapiens
  misc_RNA (1)...(19): siRNA sense strand
acacagaacuaguuucaga

SEQ ID NO: 1341067 - RNA, 19 nt, Homo sapiens
  misc_RNA (1)...(19): siRNA sense strand
gaaguugccuauaaucaag

SEQ ID NO: 1341068 - RNA, 19 nt, Homo sapiens
  misc_RNA (1)...(19): siRNA sense strand
caaauacagucccagaguu

SEQ ID NO: 1341069 - RNA, 19 nt, Homo sapiens
  misc_RNA (1)...(19): siRNA sense strand
ccaagaaguugccuauaau

SEQ ID NO: 1341070 - RNA, 19 nt, Homo sapiens
  misc_RNA (1)...(19): siRNA sense strand
gacaacaaauagcauggua

SEQ ID NO: 1341071 - RNA, 19 nt, Homo sapiens
  misc_RNA (1)...(19): siRNA sense strand
caaaugauacugaagagaa

SEQ ID NO: 1341072 - RNA, 19 nt, Homo sapiens
  misc_RNA (1)...(19): siRNA sense strand
ggcaagaagcacagaauua

SEQ ID NO: 1341073 - RNA, 19 nt, Homo sapiens
  misc_RNA (1)...(19): siRNA sense strand
ggagaaugcuggguuuaug

SEQ ID NO: 1341074 - RNA, 19 nt, Homo sapiens
  misc_RNA (1)...(19): siRNA sense strand
caaauagcaugguagaauc

SEQ ID NO: 1341075 - RNA, 19 nt, Homo sapiens
  misc_RNA (1)...(19): siRNA sense strand
ggaaggagaaggaaauuca

SEQ ID NO: 1341076 - RNA, 19 nt, Homo sapiens
  misc_RNA (1)...(19): siRNA sense strand
gaagaugaacagagaaaga

SEQ ID NO: 1341077 - RNA, 19 nt, Homo sapiens
  misc_RNA (1)...(19): siRNA sense strand
cacagcagcucgggaaaua

SEQ ID NO: 1341078 - RNA, 19 nt, Homo sapiens
  misc_RNA (1)...(19): siRNA sense strand
gaaauucagugggagacaa

SEQ ID NO: 1341079 - RNA, 19 nt, Homo sapiens
  misc_RNA (1)...(19): siRNA sense strand
cagaauuacugccgagauu

SEQ ID NO: 1341080 - RNA, 19 nt, Homo sapiens
  misc_RNA (1)...(19): siRNA sense strand
ggaaggaaaggaucaguug

SEQ ID NO: 1341081 - RNA, 19 nt, Homo sapiens
  misc_RNA (1)...(19): siRNA sense strand
ggaauggugugauguaugc

SEQ ID NO: 1341082 - RNA, 19 nt, Homo sapiens
  misc_RNA (1)...(19): siRNA sense strand
gaaggucuauccucacagu

SEQ ID NO: 1341083 - RNA, 19 nt, Homo sapiens
  misc_RNA (1)...(19): siRNA sense strand
gcacaagagcguuaucaug

SEQ ID NO: 1341084 - RNA, 19 nt, Homo sapiens
  misc_RNA (1)...(19): siRNA sense strand
gauggagaaugcuggguuu

SEQ ID NO: 1341085 - RNA, 19 nt, Homo sapiens
  misc_RNA (1)...(19): siRNA sense strand
gaugucacuuucaacuuaa

SEQ ID NO: 1341086 - RNA, 19 nt, Homo sapiens
  misc_RNA (1)...(19): siRNA sense strand
gaacagagaaagaaaauug

SEQ ID NO: 1341087 - RNA, 19 nt, Homo sapiens
  misc_RNA (1)...(19): siRNA sense strand
ucaaagagacaacaaauag

SEQ ID NO: 1341088 - RNA, 19 nt, Homo sapiens
  misc_RNA (1)...(19): siRNA sense strand
accaagaaguugccuauaa

SEQ ID NO: 1341089 - RNA, 19 nt, Homo sapiens
  misc_RNA (1)...(19): siRNA sense strand
gaagagaacacagaacuag

SEQ ID NO: 1341090 - RNA, 19 nt, Homo sapiens
  misc_RNA (1)...(19): siRNA sense strand
agacaagguuauuucauga

SEQ ID NO: 1341091 - RNA, 19 nt, Homo sapiens
  misc_RNA (1)...(19): siRNA sense strand
gugaacuugucuccaaaua

SEQ ID NO: 1341092 - RNA, 19 nt, Homo sapiens
  misc_RNA (1)...(19): siRNA sense strand
aauaucaucuuccacacua

SEQ ID NO: 1341093 - RNA, 19 nt, Homo sapiens
  misc_RNA (1)...(19): siRNA sense strand
gaggagaaugcaauauuaa

SEQ ID NO: 1341094 - RNA, 19 nt, Homo sapiens
  misc_RNA (1)...(19): siRNA sense strand
gaugcaauauaucaaccua

SEQ ID NO: 1341095 - RNA, 19 nt, Homo sapiens
  misc_RNA (1)...(19): siRNA sense strand
gaaaggaaggagaaggaaa

SEQ ID NO: 1341096 - RNA, 19 nt, Homo sapiens
  misc_RNA (1)...(19): siRNA sense strand
ucccguagaugcaauauau

SEQ ID NO: 1341097 - RNA, 19 nt, Homo sapiens
  misc_RNA (1)...(19): siRNA sense strand
gaucagaacgaguaugaau

SEQ ID NO: 1341098 - RNA, 19 nt, Homo sapiens
  misc_RNA (1)...(19): siRNA sense strand
caacaaauagcaugguaga

SEQ ID NO: 1341099 - RNA, 19 nt, Homo sapiens
  misc_RNA (1)...(19): siRNA sense strand
gcagggcugugucucaugu

SEQ ID NO: 1341100 - RNA, 19 nt, Homo sapiens
  misc_RNA (1)...(19): siRNA sense strand
ugaggaaguuggaagauca

SEQ ID NO: 1341101 - RNA, 19 nt, Homo sapiens
  misc_RNA (1)...(19): siRNA sense strand
ggaauuaggaggagaaugc

SEQ ID NO: 1341102 - RNA, 19 nt, Homo sapiens
  misc_RNA (1)...(19): siRNA sense strand
caacguuuauucuugaaag

SEQ ID NO: 1341103 - RNA, 19 nt, Homo sapiens
  misc_RNA (1)...(19): siRNA sense strand
gagaaaggaaggagaagga

SEQ ID NO: 1341104 - RNA, 19 nt, Homo sapiens
  misc_RNA (1)...(19): siRNA sense strand
agaagaaagugaggaaguu

SEQ ID NO: 1341105 - RNA, 19 nt, Homo sapiens
  misc_RNA (1)...(19): siRNA sense strand
gcaagaagcacagaauuac

SEQ ID NO: 1341106 - RNA, 19 nt, Homo sapiens
  misc_RNA (1)...(19): siRNA sense strand
gagaacacagaacuaguuu

SEQ ID NO: 1341107 - RNA, 19 nt, Homo sapiens
  misc_RNA (1)...(19): siRNA sense strand
agaacuaguuucagaagga

SEQ ID NO: 1341108 - RNA, 19 nt, Homo sapiens
  misc_RNA (1)...(19): siRNA sense strand
gaugaaccauuacugaaac

SEQ ID NO: 1341109 - RNA, 19 nt, Homo sapiens
  misc_RNA (1)...(19): siRNA sense strand
gagaaugcuggguuuauga

SEQ ID NO: 1341110 - RNA, 19 nt, Homo sapiens
  misc_RNA (1)...(19): siRNA sense strand
gaacauuacauucucacau

SEQ ID NO: 1341111 - RNA, 19 nt, Homo sapiens
  misc_RNA (1)...(19): siRNA sense strand
gaugaacauuacauucuca

SEQ ID NO: 1341112 - RNA, 19 nt, Homo sapiens
  misc_RNA (1)...(19): siRNA sense strand
gagcagguuucccaucauc

SEQ ID NO: 1341113 - RNA, 19 nt, Homo sapiens
  misc_RNA (1)...(19): siRNA sense strand
ucacuuaauucuuccuugu

SEQ ID NO: 1341114 - RNA, 19 nt, Homo sapiens
  misc_RNA (1)...(19): siRNA sense strand
gaggagcacaagagcguua

SEQ ID NO: 1341115 - RNA, 19 nt, Homo sapiens
  misc_RNA (1)...(19): siRNA sense strand
cagcagugaagaugaauuu

SEQ ID NO: 1341116 - RNA, 19 nt, Homo sapiens
  misc_RNA (1)...(19): siRNA sense strand
gaagaaagugaggaaguug

SEQ ID NO: 1341117 - RNA, 19 nt, Homo sapiens
  misc_RNA (1)...(19): siRNA sense strand
gcagugaagaugaauuuua

SEQ ID NO: 1341118 - RNA, 19 nt, Homo sapiens
  misc_RNA (1)...(19): siRNA sense strand
gagcauuagugaccagaag

SEQ ID NO: 1341119 - RNA, 19 nt, Homo sapiens
  misc_RNA (1)...(19): siRNA sense strand
guaguucuuccaacguuua

SEQ ID NO: 1341120 - RNA, 19 nt, Homo sapiens
  misc_RNA (1)...(19): siRNA sense strand
uggaagaucagaacgagua

SEQ ID NO: 1341121 - RNA, 19 nt, Homo sapiens
  misc_RNA (1)...(19): siRNA sense strand
ggacaucaucagacuccua

SEQ ID NO: 1341122 - RNA, 19 nt, Homo sapiens
  misc_RNA (1)...(19): siRNA sense strand
caagguuauuucaugaaga

SEQ ID NO: 1341123 - RNA, 19 nt, Homo sapiens
  misc_RNA (1)...(19): siRNA sense strand
acacuaaacccuucuaugg

SEQ ID NO: 1341124 - RNA, 19 nt, Homo sapiens
  misc_RNA (1)...(19): siRNA sense strand
gauaccacagaaucacuua

SEQ ID NO: 1341125 - RNA, 19 nt, Homo sapiens
  misc_RNA (1)...(19): siRNA sense strand
gcagaagcccgagaaagga

SEQ ID NO: 1341126 - RNA, 19 nt, Homo sapiens
  misc_RNA (1)...(19): siRNA sense strand
acaaauagcaugguagaau

SEQ ID NO: 1341127 - RNA, 19 nt, Homo sapiens
  misc_RNA (1)...(19): siRNA sense strand
gugcaaauaucaucuucca

SEQ ID NO: 1341128 - RNA, 19 nt, Homo sapiens
  misc_RNA (1)...(19): siRNA sense strand
acaauucaaugcucauauc

SEQ ID NO: 1341129 - RNA, 19 nt, Homo sapiens
  misc_RNA (1)...(19): siRNA sense strand
gaagauacaauucaaugcu

SEQ ID NO: 1341130 - RNA, 19 nt, Homo sapiens
  misc_RNA (1)...(19): siRNA sense strand
gaugcugaccuguuugauu

SEQ ID NO: 1341131 - RNA, 19 nt, Homo sapiens
  misc_RNA (1)...(19): siRNA sense strand
cacgugaacuugucuccaa

SEQ ID NO: 1341132 - RNA, 19 nt, Homo sapiens
  misc_RNA (1)...(19): siRNA sense strand
ucaugaagauggagaaugc

SEQ ID NO: 1341133 - RNA, 19 nt, Homo sapiens
  misc_RNA (1)...(19): siRNA sense strand
uuaugaugcugaugaauuc

SEQ ID NO: 1341134 - RNA, 19 nt, Homo sapiens
  misc_RNA (1)...(19): siRNA sense strand
caucucuugucgcagguua

SEQ ID NO: 1341135 - RNA, 19 nt, Homo sapiens
  misc_RNA (1)...(19): siRNA sense strand
gguaguucuuccaacguuu

SEQ ID NO: 1341136 - RNA, 19 nt, Homo sapiens
  misc_RNA (1)...(19): siRNA sense strand
caaagcgcuuaauagauuc

SEQ ID NO: 1341137 - RNA, 19 nt, Homo sapiens
  misc_RNA (1)...(19): siRNA sense strand
caagugaugcugaccuguu

SEQ ID NO: 1341138 - RNA, 19 nt, Homo sapiens
  misc_RNA (1)...(19): siRNA sense strand
ugaugaaccauuacugaaa

SEQ ID NO: 1341139 - RNA, 19 nt, Homo sapiens
  misc_RNA (1)...(19): siRNA sense strand
gggcaagaagcacagaauu

SEQ ID NO: 1341140 - RNA, 19 nt, Homo sapiens
  misc_RNA (1)...(19): siRNA sense strand
cuuccaacguuuauucuug

SEQ ID NO: 1341141 - RNA, 19 nt, Homo sapiens
  misc_RNA (1)...(19): siRNA sense strand
agacuuggaauggaucuua

SEQ ID NO: 1341142 - RNA, 19 nt, Homo sapiens
  misc_RNA (1)...(19): siRNA sense strand
caagagcguuaucaugcau

SEQ ID NO: 1341143 - RNA, 19 nt, Homo sapiens
  misc_RNA (1)...(19): siRNA sense strand
aagugaugcugaccuguuu

SEQ ID NO: 1341144 - RNA, 19 nt, Homo sapiens
  misc_RNA (1)...(19): siRNA sense strand
augcugaccuguuugauuc

SEQ ID NO: 1341145 - RNA, 19 nt, Homo sapiens
  misc_RNA (1)...(19): siRNA sense strand
aaugcuggguuuaugauga

SEQ ID NO: 1341146 - RNA, 19 nt, Homo sapiens
  misc_RNA (1)...(19): siRNA sense strand
gaaguuggaagaucagaac

SEQ ID NO: 1341147 - RNA, 19 nt, Homo sapiens
  misc_RNA (1)...(19): siRNA sense strand
agacuaugaugaacauuac

SEQ ID NO: 1341148 - RNA, 19 nt, Homo sapiens
  misc_RNA (1)...(19): siRNA sense strand
agagaacacagaacuaguu

SEQ ID NO: 1341149 - RNA, 19 nt, Homo sapiens
  misc_RNA (1)...(19): siRNA sense strand
ucccaaggaucgaaugguu

SEQ ID NO: 1341150 - RNA, 19 nt, Homo sapiens
  misc_RNA (1)...(19): siRNA sense strand
ggaccuguuugugagcauu

SEQ ID NO: 1341151 - RNA, 19 nt, Homo sapiens
  misc_RNA (1)...(19): siRNA sense strand
ugauucacaugaugacaga

SEQ ID NO: 1341152 - RNA, 19 nt, Homo sapiens
  misc_RNA (1)...(19): siRNA sense strand
uaugaugaaccauuacuga

SEQ ID NO: 1341153 - RNA, 19 nt, Homo sapiens
  misc_RNA (1)...(19): siRNA sense strand
ggaggagaaugcaauauua

SEQ ID NO: 1341154 - RNA, 19 nt, Homo sapiens
  misc_RNA (1)...(19): siRNA sense strand
ccaaagcgcuuaauagauu

SEQ ID NO: 1341155 - RNA, 19 nt, Homo sapiens
  misc_RNA (1)...(19): siRNA sense strand
ggaugucacuuucaacuua

SEQ ID NO: 1341156 - RNA, 19 nt, Homo sapiens
  misc_RNA (1)...(19): siRNA sense strand
caaagaagaugaacagaga

SEQ ID NO: 1341157 - RNA, 19 nt, Homo sapiens
  misc_RNA (1)...(19): siRNA sense strand
gaacuugucuccaaauaca

SEQ ID NO: 1341158 - RNA, 19 nt, Homo sapiens
  misc_RNA (1)...(19): siRNA sense strand
gcucauaucuggaccaaau

SEQ ID NO: 1341159 - RNA, 19 nt, Homo sapiens
  misc_RNA (1)...(19): siRNA sense strand
ggaaggaugucacuuucaa

SEQ ID NO: 1341160 - RNA, 19 nt, Homo sapiens
  misc_RNA (1)...(19): siRNA sense strand
gcacaggcuugaagaaaga

SEQ ID NO: 1341161 - RNA, 19 nt, Homo sapiens
  misc_RNA (1)...(19): siRNA sense strand
gaaaggaucaguugccaaa

SEQ ID NO: 1341162 - RNA, 19 nt, Homo sapiens
  misc_RNA (1)...(19): siRNA sense strand
gagacaagguuauuucaug

SEQ ID NO: 1341163 - RNA, 19 nt, Homo sapiens
  misc_RNA (1)...(19): siRNA sense strand
agaaauguaugcagacuuu

SEQ ID NO: 1341164 - RNA, 19 nt, Homo sapiens
  misc_RNA (1)...(19): siRNA sense strand
gaacacagaacuaguuuca

SEQ ID NO: 1341165 - RNA, 19 nt, Homo sapiens
  misc_RNA (1)...(19): siRNA sense strand
ggaauggaauggugugaug

SEQ ID NO: 1341166 - RNA, 19 nt, Homo sapiens
  misc_RNA (1)...(19): siRNA sense strand
acacagaacuaguuucaga

SEQ ID NO: 1341167 - RNA, 19 nt, Homo sapiens
  misc_RNA (1)...(19): siRNA sense strand
gaaguugccuauaaucaag

SEQ ID NO: 1341168 - RNA, 19 nt, Homo sapiens
  misc_RNA (1)...(19): siRNA sense strand
caaauacagucccagaguu

SEQ ID NO: 1341169 - RNA, 19 nt, Homo sapiens
  misc_RNA (1)...(19): siRNA sense strand
ccaagaaguugccuauaau

SEQ ID NO: 1341170 - RNA, 19 nt, Homo sapiens
  misc_RNA (1)...(19): siRNA sense strand
gacaacaaauagcauggua

SEQ ID NO: 1341171 - RNA, 19 nt, Homo sapiens
  misc_RNA (1)...(19): siRNA sense strand
caaaugauacugaagagaa

SEQ ID NO: 1341172 - RNA, 19 nt, Homo sapiens
  misc_RNA (1)...(19): siRNA sense strand
ggcaagaagcacagaauua

SEQ ID NO: 1341173 - RNA, 19 nt, Homo sapiens
  misc_RNA (1)...(19): siRNA sense strand
ggagaaugcuggguuuaug

SEQ ID NO: 1341174 - RNA, 19 nt, Homo sapiens
  misc_RNA (1)...(19): siRNA sense strand
caaauagcaugguagaauc

SEQ ID NO: 1341175 - RNA, 19 nt, Homo sapiens
  misc_RNA (1)...(19): siRNA sense strand
ggaaggagaaggaaauuca

SEQ ID NO: 1341176 - RNA, 19 nt, Homo sapiens
  misc_RNA (1)...(19): siRNA sense strand
gaagaugaacagagaaaga

SEQ ID NO: 1341177 - RNA, 19 nt, Homo sapiens
  misc_RNA (1)...(19): siRNA sense strand
cacagcagcucgggaaaua

SEQ ID NO: 1341178 - RNA, 19 nt, Homo sapiens
  misc_RNA (1)...(19): siRNA sense strand
gaaauucagugggagacaa

SEQ ID NO: 1341179 - RNA, 19 nt, Homo sapiens
  misc_RNA (1)...(19): siRNA sense strand
cagaauuacugccgagauu

SEQ ID NO: 1341180 - RNA, 19 nt, Homo sapiens
  misc_RNA (1)...(19): siRNA sense strand
ggaaggaaaggaucaguug

SEQ ID NO: 1341181 - RNA, 19 nt, Homo sapiens
  misc_RNA (1)...(19): siRNA sense strand
ggaauggugugauguaugc

SEQ ID NO: 1341182 - RNA, 19 nt, Homo sapiens
  misc_RNA (1)...(19): siRNA sense strand
gaaggucuauccucacagu

SEQ ID NO: 1341183 - RNA, 19 nt, Homo sapiens
  misc_RNA (1)...(19): siRNA sense strand
gcacaagagcguuaucaug

SEQ ID NO: 1341184 - RNA, 19 nt, Homo sapiens
  misc_RNA (1)...(19): siRNA sense strand
gauggagaaugcuggguuu

SEQ ID NO: 1341185 - RNA, 19 nt, Homo sapiens
  misc_RNA (1)...(19): siRNA sense strand
gaugucacuuucaacuuaa

SEQ ID NO: 1341186 - RNA, 19 nt, Homo sapiens
  misc_RNA (1)...(19): siRNA sense strand
gaacagagaaagaaaauug

SEQ ID NO: 1341187 - RNA, 19 nt, Homo sapiens
  misc_RNA (1)...(19): siRNA sense strand
ucaaagagacaacaaauag

SEQ ID NO: 1341188 - RNA, 19 nt, Homo sapiens
  misc_RNA (1)...(19): siRNA sense strand
accaagaaguugccuauaa

SEQ ID NO: 1341189 - RNA, 19 nt, Homo sapiens
  misc_RNA (1)...(19): siRNA sense strand
gaagagaacacagaacuag

SEQ ID NO: 1341190 - RNA, 19 nt, Homo sapiens
  misc_RNA (1)...(19): siRNA sense strand
agacaagguuauuucauga

SEQ ID NO: 1341191 - RNA, 19 nt, Homo sapiens
  misc_RNA (1)...(19): siRNA sense strand
gugaacuugucuccaaaua

SEQ ID NO: 1341192 - RNA, 19 nt, Homo sapiens
  misc_RNA (1)...(19): siRNA sense strand
aauaucaucuuccacacua

SEQ ID NO: 1341193 - RNA, 19 nt, Homo sapiens
  misc_RNA (1)...(19): siRNA sense strand
gaggagaaugcaauauuaa

SEQ ID NO: 1341194 - RNA, 19 nt, Homo sapiens
  misc_RNA (1)...(19): siRNA sense strand
gaugcaauauaucaaccua

SEQ ID NO: 1341195 - RNA, 19 nt, Homo sapiens
  misc_RNA (1)...(19): siRNA sense strand
gaaaggaaggagaaggaaa

SEQ ID NO: 1341196 - RNA, 19 nt, Homo sapiens
  misc_RNA (1)...(19): siRNA sense strand
ucccguagaugcaauauau

SEQ ID NO: 1341197 - RNA, 19 nt, Homo sapiens
  misc_RNA (1)...(19): siRNA sense strand
gaucagaacgaguaugaau

SEQ ID NO: 1341198 - RNA, 19 nt, Homo sapiens
  misc_RNA (1)...(19): siRNA sense strand
caacaaauagcaugguaga

SEQ ID NO: 1341199 - RNA, 19 nt, Homo sapiens
  misc_RNA (1)...(19): siRNA sense strand
gcagggcugugucucaugu

SEQ ID NO: 1341200 - RNA, 19 nt, Homo sapiens
  misc_RNA (1)...(19): siRNA sense strand
ugaggaaguuggaagauca

SEQ ID NO: 1341201 - RNA, 19 nt, Homo sapiens
  misc_RNA (1)...(19): siRNA sense strand
ggaauuaggaggagaaugc

SEQ ID NO: 1341202 - RNA, 19 nt, Homo sapiens
  misc_RNA (1)...(19): siRNA sense strand
caacguuuauucuugaaag

SEQ ID NO: 1341203 - RNA, 19 nt, Homo sapiens
  misc_RNA (1)...(19): siRNA sense strand
gagaaaggaaggagaagga

SEQ ID NO: 1341204 - RNA, 19 nt, Homo sapiens
  misc_RNA (1)...(19): siRNA sense strand
agaagaaagugaggaaguu

SEQ ID NO: 1341205 - RNA, 19 nt, Homo sapiens
  misc_RNA (1)...(19): siRNA sense strand
gcaagaagcacagaauuac

SEQ ID NO: 1341206 - RNA, 19 nt, Homo sapiens
  misc_RNA (1)...(19): siRNA sense strand
gagaacacagaacuaguuu

SEQ ID NO: 1341207 - RNA, 19 nt, Homo sapiens
  misc_RNA (1)...(19): siRNA sense strand
agaacuaguuucagaagga

SEQ ID NO: 1341208 - RNA, 19 nt, Homo sapiens
  misc_RNA (1)...(19): siRNA sense strand
gaugaaccauuacugaaac

SEQ ID NO: 1341209 - RNA, 19 nt, Homo sapiens
  misc_RNA (1)...(19): siRNA sense strand
gagaaugcuggguuuauga

SEQ ID NO: 1341210 - RNA, 19 nt, Homo sapiens
  misc_RNA (1)...(19): siRNA sense strand
gaacauuacauucucacau

SEQ ID NO: 1341211 - RNA, 19 nt, Homo sapiens
  misc_RNA (1)...(19): siRNA sense strand
gaugaacauuacauucuca

SEQ ID NO: 1341212 - RNA, 19 nt, Homo sapiens
  misc_RNA (1)...(19): siRNA sense strand
gagcagguuucccaucauc

SEQ ID NO: 1341213 - RNA, 19 nt, Homo sapiens
  misc_RNA (1)...(19): siRNA sense strand
ucacuuaauucuuccuugu

SEQ ID NO: 1341214 - RNA, 19 nt, Homo sapiens
  misc_RNA (1)...(19): siRNA sense strand
gaggagcacaagagcguua

SEQ ID NO: 1341215 - RNA, 19 nt, Homo sapiens
  misc_RNA (1)...(19): siRNA sense strand
cagcagugaagaugaauuu

SEQ ID NO: 1341216 - RNA, 19 nt, Homo sapiens
  misc_RNA (1)...(19): siRNA sense strand
gaagaaagugaggaaguug

SEQ ID NO: 1341217 - RNA, 19 nt, Homo sapiens
  misc_RNA (1)...(19): siRNA sense strand
gcagugaagaugaauuuua

SEQ ID NO: 1341218 - RNA, 19 nt, Homo sapiens
  misc_RNA (1)...(19): siRNA sense strand
gagcauuagugaccagaag

SEQ ID NO: 1341219 - RNA, 19 nt, Homo sapiens
  misc_RNA (1)...(19): siRNA sense strand
guaguucuuccaacguuua

SEQ ID NO: 1341220 - RNA, 19 nt, Homo sapiens
  misc_RNA (1)...(19): siRNA sense strand
uggaagaucagaacgagua

SEQ ID NO: 1341221 - RNA, 19 nt, Homo sapiens
  misc_RNA (1)...(19): siRNA sense strand
ggacaucaucagacuccua

SEQ ID NO: 1341222 - RNA, 19 nt, Homo sapiens
  misc_RNA (1)...(19): siRNA sense strand
caagguuauuucaugaaga

SEQ ID NO: 1341223 - RNA, 19 nt, Homo sapiens
  misc_RNA (1)...(19): siRNA sense strand
acacuaaacccuucuaugg

SEQ ID NO: 1341224 - RNA, 19 nt, Homo sapiens
  misc_RNA (1)...(19): siRNA sense strand
gauaccacagaaucacuua

SEQ ID NO: 1341225 - RNA, 19 nt, Homo sapiens
  misc_RNA (1)...(19): siRNA sense strand
gcagaagcccgagaaagga

SEQ ID NO: 1341226 - RNA, 19 nt, Homo sapiens
  misc_RNA (1)...(19): siRNA sense strand
acaaauagcaugguagaau

SEQ ID NO: 1341227 - RNA, 19 nt, Homo sapiens
  misc_RNA (1)...(19): siRNA sense strand
gugcaaauaucaucuucca

SEQ ID NO: 1341228 - RNA, 19 nt, Homo sapiens
  misc_RNA (1)...(19): siRNA sense strand
acaauucaaugcucauauc

SEQ ID NO: 1341229 - RNA, 19 nt, Homo sapiens
  misc_RNA (1)...(19): siRNA sense strand
gaagauacaauucaaugcu

SEQ ID NO: 1341230 - RNA, 19 nt, Homo sapiens
  misc_RNA (1)...(19): siRNA sense strand
gaugcugaccuguuugauu

SEQ ID NO: 1341231 - RNA, 19 nt, Homo sapiens
  misc_RNA (1)...(19): siRNA sense strand
cacgugaacuugucuccaa

SEQ ID NO: 1341232 - RNA, 19 nt, Homo sapiens
  misc_RNA (1)...(19): siRNA sense strand
ucaugaagauggagaaugc

SEQ ID NO: 1341233 - RNA, 19 nt, Homo sapiens
  misc_RNA (1)...(19): siRNA sense strand
uuaugaugcugaugaauuc

SEQ ID NO: 1341234 - RNA, 19 nt, Homo sapiens
  misc_RNA (1)...(19): siRNA sense strand
caucucuugucgcagguua

SEQ ID NO: 1341235 - RNA, 19 nt, Homo sapiens
  misc_RNA (1)...(19): siRNA sense strand
gguaguucuuccaacguuu

SEQ ID NO: 1341236 - RNA, 19 nt, Homo sapiens
  misc_RNA (1)...(19): siRNA sense strand
caaagcgcuuaauagauuc

SEQ ID NO: 1341237 - RNA, 19 nt, Homo sapiens
  misc_RNA (1)...(19): siRNA sense strand
caagugaugcugaccuguu

SEQ ID NO: 1341238 - RNA, 19 nt, Homo sapiens
  misc_RNA (1)...(19): siRNA sense strand
ugaugaaccauuacugaaa

SEQ ID NO: 1341239 - RNA, 19 nt, Homo sapiens
  misc_RNA (1)...(19): siRNA sense strand
gggcaagaagcacagaauu

SEQ ID NO: 1341240 - RNA, 19 nt, Homo sapiens
  misc_RNA (1)...(19): siRNA sense strand
cuuccaacguuuauucuug

SEQ ID NO: 1341241 - RNA, 19 nt, Homo sapiens
  misc_RNA (1)...(19): siRNA sense strand
agacuuggaauggaucuua

SEQ ID NO: 1341242 - RNA, 19 nt, Homo sapiens
  misc_RNA (1)...(19): siRNA sense strand
caagagcguuaucaugcau

SEQ ID NO: 1341243 - RNA, 19 nt, Homo sapiens
  misc_RNA (1)...(19): siRNA sense strand
aagugaugcugaccuguuu

SEQ ID NO: 1341244 - RNA, 19 nt, Homo sapiens
  misc_RNA (1)...(19): siRNA sense strand
augcugaccuguuugauuc

SEQ ID NO: 1341245 - RNA, 19 nt, Homo sapiens
  misc_RNA (1)...(19): siRNA sense strand
aaugcuggguuuaugauga

SEQ ID NO: 1341246 - RNA, 19 nt, Homo sapiens
  misc_RNA (1)...(19): siRNA sense strand
gaaguuggaagaucagaac

SEQ ID NO: 1341247 - RNA, 19 nt, Homo sapiens
  misc_RNA (1)...(19): siRNA sense strand
agacuaugaugaacauuac

SEQ ID NO: 1341248 - RNA, 19 nt, Homo sapiens
  misc_RNA (1)...(19): siRNA sense strand
agagaacacagaacuaguu

SEQ ID NO: 1341249 - RNA, 19 nt, Homo sapiens
  misc_RNA (1)...(19): siRNA sense strand
ucccaaggaucgaaugguu

SEQ ID NO: 1341250 - RNA, 19 nt, Homo sapiens
  misc_RNA (1)...(19): siRNA sense strand
ggaccuguuugugagcauu

SEQ ID NO: 1341251 - RNA, 19 nt, Homo sapiens
  misc_RNA (1)...(19): siRNA sense strand
ugauucacaugaugacaga

SEQ ID NO: 1341252 - RNA, 19 nt, Homo sapiens
  misc_RNA (1)...(19): siRNA sense strand
uaugaugaaccauuacuga

SEQ ID NO: 1341253 - RNA, 19 nt, Homo sapiens
  misc_RNA (1)...(19): siRNA sense strand
ggaggagaaugcaauauua

SEQ ID NO: 1341254 - RNA, 19 nt, Homo sapiens
  misc_RNA (1)...(19): siRNA sense strand
ccaaagcgcuuaauagauu

SEQ ID NO: 1341255 - RNA, 19 nt, Homo sapiens
  misc_RNA (1)...(19): siRNA sense strand
ggaugucacuuucaacuua

SEQ ID NO: 1341256 - RNA, 19 nt, Homo sapiens
  misc_RNA (1)...(19): siRNA sense strand
caaagaagaugaacagaga

SEQ ID NO: 1341257 - RNA, 19 nt, Homo sapiens
  misc_RNA (1)...(19): siRNA sense strand
gaacuugucuccaaauaca

SEQ ID NO: 1341258 - RNA, 19 nt, Homo sapiens
  misc_RNA (1)...(19): siRNA sense strand
gcucauaucuggaccaaau

SEQ ID NO: 1341259 - RNA, 19 nt, Homo sapiens
  misc_RNA (1)...(19): siRNA sense strand
ggaaggaugucacuuucaa

SEQ ID NO: 1341260 - RNA, 19 nt, Homo sapiens
  misc_RNA (1)...(19): siRNA sense strand
gcacaggcuugaagaaaga

SEQ ID NO: 1341261 - RNA, 19 nt, Homo sapiens
  misc_RNA (1)...(19): siRNA sense strand
gaaaggaucaguugccaaa

SEQ ID NO: 1341262 - RNA, 19 nt, Homo sapiens
  misc_RNA (1)...(19): siRNA sense strand
gagacaagguuauuucaug

SEQ ID NO: 1341263 - RNA, 19 nt, Homo sapiens
  misc_RNA (1)...(19): siRNA sense strand
agaaauguaugcagacuuu

SEQ ID NO: 1341264 - RNA, 19 nt, Homo sapiens
  misc_RNA (1)...(19): siRNA sense strand
gaacacagaacuaguuuca

SEQ ID NO: 1341265 - RNA, 19 nt, Homo sapiens
  misc_RNA (1)...(19): siRNA sense strand
ggaauggaauggugugaug

SEQ ID NO: 1341266 - RNA, 19 nt, Homo sapiens
  misc_RNA (1)...(19): siRNA sense strand
acacagaacuaguuucaga

SEQ ID NO: 1341267 - RNA, 19 nt, Homo sapiens
  misc_RNA (1)...(19): siRNA sense strand
gaaguugccuauaaucaag

SEQ ID NO: 1341268 - RNA, 19 nt, Homo sapiens
  misc_RNA (1)...(19): siRNA sense strand
caaauacagucccagaguu

SEQ ID NO: 1341269 - RNA, 19 nt, Homo sapiens
  misc_RNA (1)...(19): siRNA sense strand
ccaagaaguugccuauaau

SEQ ID NO: 1341270 - RNA, 19 nt, Homo sapiens
  misc_RNA (1)...(19): siRNA sense strand
gacaacaaauagcauggua

SEQ ID NO: 1341271 - RNA, 19 nt, Homo sapiens
  misc_RNA (1)...(19): siRNA sense strand
caaaugauacugaagagaa

SEQ ID NO: 1341272 - RNA, 19 nt, Homo sapiens
  misc_RNA (1)...(19): siRNA sense strand
ggcaagaagcacagaauua

SEQ ID NO: 1341273 - RNA, 19 nt, Homo sapiens
  misc_RNA (1)...(19): siRNA sense strand
ggagaaugcuggguuuaug

SEQ ID NO: 1341274 - RNA, 19 nt, Homo sapiens
  misc_RNA (1)...(19): siRNA sense strand
caaauagcaugguagaauc

SEQ ID NO: 1341275 - RNA, 19 nt, Homo sapiens
  misc_RNA (1)...(19): siRNA sense strand
ggaaggagaaggaaauuca

SEQ ID NO: 1341276 - RNA, 19 nt, Homo sapiens
  misc_RNA (1)...(19): siRNA sense strand
gaagaugaacagagaaaga

SEQ ID NO: 1341277 - RNA, 19 nt, Homo sapiens
  misc_RNA (1)...(19): siRNA sense strand
cacagcagcucgggaaaua

SEQ ID NO: 1341278 - RNA, 19 nt, Homo sapiens
  misc_RNA (1)...(19): siRNA sense strand
gaaauucagugggagacaa

SEQ ID NO: 1341279 - RNA, 19 nt, Homo sapiens
  misc_RNA (1)...(19): siRNA sense strand
cagaauuacugccgagauu

SEQ ID NO: 1341280 - RNA, 19 nt, Homo sapiens
  misc_RNA (1)...(19): siRNA sense strand
ggaaggaaaggaucaguug

SEQ ID NO: 1341281 - RNA, 19 nt, Homo sapiens
  misc_RNA (1)...(19): siRNA sense strand
ggaauggugugauguaugc

SEQ ID NO: 1341282 - RNA, 19 nt, Homo sapiens
  misc_RNA (1)...(19): siRNA sense strand
gaaggucuauccucacagu

SEQ ID NO: 1341283 - RNA, 19 nt, Homo sapiens
  misc_RNA (1)...(19): siRNA sense strand
gcacaagagcguuaucaug

SEQ ID NO: 1341284 - RNA, 19 nt, Homo sapiens
  misc_RNA (1)...(19): siRNA sense strand
gauggagaaugcuggguuu

SEQ ID NO: 1341285 - RNA, 19 nt, Homo sapiens
  misc_RNA (1)...(19): siRNA sense strand
gaugucacuuucaacuuaa

SEQ ID NO: 1341286 - RNA, 19 nt, Homo sapiens
  misc_RNA (1)...(19): siRNA sense strand
gaacagagaaagaaaauug

SEQ ID NO: 1341287 - RNA, 19 nt, Homo sapiens
  misc_RNA (1)...(19): siRNA sense strand
ucaaagagacaacaaauag

SEQ ID NO: 1341288 - RNA, 19 nt, Homo sapiens
  misc_RNA (1)...(19): siRNA sense strand
accaagaaguugccuauaa

SEQ ID NO: 1341289 - RNA, 19 nt, Homo sapiens
  misc_RNA (1)...(19): siRNA sense strand
gaagagaacacagaacuag

SEQ ID NO: 1341290 - RNA, 19 nt, Homo sapiens
  misc_RNA (1)...(19): siRNA sense strand
agacaagguuauuucauga

SEQ ID NO: 1341291 - RNA, 19 nt, Homo sapiens
  misc_RNA (1)...(19): siRNA sense strand
gugaacuugucuccaaaua

SEQ ID NO: 1341292 - RNA, 19 nt, Homo sapiens
  misc_RNA (1)...(19): siRNA sense strand
aauaucaucuuccacacua

SEQ ID NO: 1341293 - RNA, 19 nt, Homo sapiens
  misc_RNA (1)...(19): siRNA sense strand
gaggagaaugcaauauuaa

SEQ ID NO: 1341294 - RNA, 19 nt, Homo sapiens
  misc_RNA (1)...(19): siRNA sense strand
gaugcaauauaucaaccua

SEQ ID NO: 1341295 - RNA, 19 nt, Homo sapiens
  misc_RNA (1)...(19): siRNA sense strand
gaaaggaaggagaaggaaa

SEQ ID NO: 1341296 - RNA, 19 nt, Homo sapiens
  misc_RNA (1)...(19): siRNA sense strand
ucccguagaugcaauauau

SEQ ID NO: 1341297 - RNA, 19 nt, Homo sapiens
  misc_RNA (1)...(19): siRNA sense strand
gaucagaacgaguaugaau

SEQ ID NO: 1341298 - RNA, 19 nt, Homo sapiens
  misc_RNA (1)...(19): siRNA sense strand
caacaaauagcaugguaga

SEQ ID NO: 1341299 - RNA, 19 nt, Homo sapiens
  misc_RNA (1)...(19): siRNA sense strand
gcagggcugugucucaugu

SEQ ID NO: 1341300 - RNA, 19 nt, Homo sapiens
  misc_RNA (1)...(19): siRNA sense strand
ugaggaaguuggaagauca

SEQ ID NO: 1341301 - RNA, 19 nt, Homo sapiens
  misc_RNA (1)...(19): siRNA sense strand
ggaauuaggaggagaaugc

SEQ ID NO: 1341302 - RNA, 19 nt, Homo sapiens
  misc_RNA (1)...(19): siRNA sense strand
caacguuuauucuugaaag

SEQ ID NO: 1341303 - RNA, 19 nt, Homo sapiens
  misc_RNA (1)...(19): siRNA sense strand
gagaaaggaaggagaagga

SEQ ID NO: 1341304 - RNA, 19 nt, Homo sapiens
  misc_RNA (1)...(19): siRNA sense strand
agaagaaagugaggaaguu

SEQ ID NO: 1341305 - RNA, 19 nt, Homo sapiens
  misc_RNA (1)...(19): siRNA sense strand
gcaagaagcacagaauuac

SEQ ID NO: 1341306 - RNA, 19 nt, Homo sapiens
  misc_RNA (1)...(19): siRNA sense strand
gagaacacagaacuaguuu

SEQ ID NO: 1341307 - RNA, 19 nt, Homo sapiens
  misc_RNA (1)...(19): siRNA sense strand
agaacuaguuucagaagga

SEQ ID NO: 1341308 - RNA, 19 nt, Homo sapiens
  misc_RNA (1)...(19): siRNA sense strand
gaugaaccauuacugaaac

SEQ ID NO: 1341309 - RNA, 19 nt, Homo sapiens
  misc_RNA (1)...(19): siRNA sense strand
gagaaugcuggguuuauga

SEQ ID NO: 1341310 - RNA, 19 nt, Homo sapiens
  misc_RNA (1)...(19): siRNA sense strand
gaacauuacauucucacau

SEQ ID NO: 1341311 - RNA, 19 nt, Homo sapiens
  misc_RNA (1)...(19): siRNA sense strand
gaugaacauuacauucuca

SEQ ID NO: 1341312 - RNA, 19 nt, Homo sapiens
  misc_RNA (1)...(19): siRNA sense strand
gagcagguuucccaucauc

SEQ ID NO: 1341313 - RNA, 19 nt, Homo sapiens
  misc_RNA (1)...(19): siRNA sense strand
ucacuuaauucuuccuugu

SEQ ID NO: 1341314 - RNA, 19 nt, Homo sapiens
  misc_RNA (1)...(19): siRNA sense strand
gaggagcacaagagcguua

SEQ ID NO: 1341315 - RNA, 19 nt, Homo sapiens
  misc_RNA (1)...(19): siRNA sense strand
cagcagugaagaugaauuu

SEQ ID NO: 1341316 - RNA, 19 nt, Homo sapiens
  misc_RNA (1)...(19): siRNA sense strand
gaagaaagugaggaaguug

SEQ ID NO: 1341317 - RNA, 19 nt, Homo sapiens
  misc_RNA (1)...(19): siRNA sense strand
gcagugaagaugaauuuua

SEQ ID NO: 1341318 - RNA, 19 nt, Homo sapiens
  misc_RNA (1)...(19): siRNA sense strand
gagcauuagugaccagaag

SEQ ID NO: 1341319 - RNA, 19 nt, Homo sapiens
  misc_RNA (1)...(19): siRNA sense strand
guaguucuuccaacguuua

SEQ ID NO: 1341320 - RNA, 19 nt, Homo sapiens
  misc_RNA (1)...(19): siRNA sense strand
uggaagaucagaacgagua

SEQ ID NO: 1341321 - RNA, 19 nt, Homo sapiens
  misc_RNA (1)...(19): siRNA sense strand
ggacaucaucagacuccua

SEQ ID NO: 1341322 - RNA, 19 nt, Homo sapiens
  misc_RNA (1)...(19): siRNA sense strand
caagguuauuucaugaaga

SEQ ID NO: 1341323 - RNA, 19 nt, Homo sapiens
  misc_RNA (1)...(19): siRNA sense strand
acacuaaacccuucuaugg

SEQ ID NO: 1341324 - RNA, 19 nt, Homo sapiens
  misc_RNA (1)...(19): siRNA sense strand
gauaccacagaaucacuua

SEQ ID NO: 1341325 - RNA, 19 nt, Homo sapiens
  misc_RNA (1)...(19): siRNA sense strand
gcagaagcccgagaaagga

SEQ ID NO: 1341326 - RNA, 19 nt, Homo sapiens
  misc_RNA (1)...(19): siRNA sense strand
acaaauagcaugguagaau

SEQ ID NO: 1341327 - RNA, 19 nt, Homo sapiens
  misc_RNA (1)...(19): siRNA sense strand
gugcaaauaucaucuucca

SEQ ID NO: 1341328 - RNA, 19 nt, Homo sapiens
  misc_RNA (1)...(19): siRNA sense strand
acaauucaaugcucauauc

SEQ ID NO: 1341329 - RNA, 19 nt, Homo sapiens
  misc_RNA (1)...(19): siRNA sense strand
gaagauacaauucaaugcu

SEQ ID NO: 1341330 - RNA, 19 nt, Homo sapiens
  misc_RNA (1)...(19): siRNA sense strand
gaugcugaccuguuugauu

SEQ ID NO: 1341331 - RNA, 19 nt, Homo sapiens
  misc_RNA (1)...(19): siRNA sense strand
cacgugaacuugucuccaa

SEQ ID NO: 1341332 - RNA, 19 nt, Homo sapiens
  misc_RNA (1)...(19): siRNA sense strand
ucaugaagauggagaaugc

SEQ ID NO: 1341333 - RNA, 19 nt, Homo sapiens
  misc_RNA (1)...(19): siRNA sense strand
uuaugaugcugaugaauuc

SEQ ID NO: 1341334 - RNA, 19 nt, Homo sapiens
  misc_RNA (1)...(19): siRNA sense strand
caucucuugucgcagguua

SEQ ID NO: 1341335 - RNA, 19 nt, Homo sapiens
  misc_RNA (1)...(19): siRNA sense strand
gguaguucuuccaacguuu

SEQ ID NO: 1341336 - RNA, 19 nt, Homo sapiens
  misc_RNA (1)...(19): siRNA sense strand
caaagcgcuuaauagauuc

SEQ ID NO: 1341337 - RNA, 19 nt, Homo sapiens
  misc_RNA (1)...(19): siRNA sense strand
caagugaugcugaccuguu

SEQ ID NO: 1341338 - RNA, 19 nt, Homo sapiens
  misc_RNA (1)...(19): siRNA sense strand
ugaugaaccauuacugaaa

SEQ ID NO: 1341339 - RNA, 19 nt, Homo sapiens
  misc_RNA (1)...(19): siRNA sense strand
gggcaagaagcacagaauu

SEQ ID NO: 1341340 - RNA, 19 nt, Homo sapiens
  misc_RNA (1)...(19): siRNA sense strand
cuuccaacguuuauucuug

SEQ ID NO: 1341341 - RNA, 19 nt, Homo sapiens
  misc_RNA (1)...(19): siRNA sense strand
agacuuggaauggaucuua

SEQ ID NO: 1341342 - RNA, 19 nt, Homo sapiens
  misc_RNA (1)...(19): siRNA sense strand
caagagcguuaucaugcau

SEQ ID NO: 1341343 - RNA, 19 nt, Homo sapiens
  misc_RNA (1)...(19): siRNA sense strand
aagugaugcugaccuguuu

SEQ ID NO: 1341344 - RNA, 19 nt, Homo sapiens
  misc_RNA (1)...(19): siRNA sense strand
augcugaccuguuugauuc

SEQ ID NO: 1341345 - RNA, 19 nt, Homo sapiens
  misc_RNA (1)...(19): siRNA sense strand
aaugcuggguuuaugauga

SEQ ID NO: 1341346 - RNA, 19 nt, Homo sapiens
  misc_RNA (1)...(19): siRNA sense strand
gaaguuggaagaucagaac

SEQ ID NO: 1341347 - RNA, 19 nt, Homo sapiens
  misc_RNA (1)...(19): siRNA sense strand
agacuaugaugaacauuac

SEQ ID NO: 1341348 - RNA, 19 nt, Homo sapiens
  misc_RNA (1)...(19): siRNA sense strand
agagaacacagaacuaguu

SEQ ID NO: 1341349 - RNA, 19 nt, Homo sapiens
  misc_RNA (1)...(19): siRNA sense strand
ucccaaggaucgaaugguu

SEQ ID NO: 1341350 - RNA, 19 nt, Homo sapiens
  misc_RNA (1)...(19): siRNA sense strand
ggaccuguuugugagcauu

SEQ ID NO: 1341351 - RNA, 19 nt, Homo sapiens
  misc_RNA (1)...(19): siRNA sense strand
ugauucacaugaugacaga

SEQ ID NO: 1341352 - RNA, 19 nt, Homo sapiens
  misc_RNA (1)...(19): siRNA sense strand
uaugaugaaccauuacuga

SEQ ID NO: 1341353 - RNA, 19 nt, Homo sapiens
  misc_RNA (1)...(19): siRNA sense strand
ggaggagaaugcaauauua

SEQ ID NO: 1341354 - RNA, 19 nt, Homo sapiens
  misc_RNA (1)...(19): siRNA sense strand
ccaaagcgcuuaauagauu

SEQ ID NO: 1341355 - RNA, 19 nt, Homo sapiens
  misc_RNA (1)...(19): siRNA sense strand
ggaugucacuuucaacuua

SEQ ID NO: 1341356 - RNA, 19 nt, Homo sapiens
  misc_RNA (1)...(19): siRNA sense strand
gaacuugucuccaaauaca

SEQ ID NO: 1341357 - RNA, 19 nt, Homo sapiens
  misc_RNA (1)...(19): siRNA sense strand
gcucauaucuggaccaaau

SEQ ID NO: 1341358 - RNA, 19 nt, Homo sapiens
  misc_RNA (1)...(19): siRNA sense strand
ggaaggaugucacuuucaa

SEQ ID NO: 1341359 - RNA, 19 nt, Homo sapiens
  misc_RNA (1)...(19): siRNA sense strand
gcacaggcuugaagaaaga

SEQ ID NO: 1341360 - RNA, 19 nt, Homo sapiens
  misc_RNA (1)...(19): siRNA sense strand
gaaaggaucaguugccaaa

SEQ ID NO: 1341361 - RNA, 19 nt, Homo sapiens
  misc_RNA (1)...(19): siRNA sense strand
gagacaagguuauuucaug

SEQ ID NO: 1341362 - RNA, 19 nt, Homo sapiens
  misc_RNA (1)...(19): siRNA sense strand
agaaauguaugcagacuuu

SEQ ID NO: 1341363 - RNA, 19 nt, Homo sapiens
  misc_RNA (1)...(19): siRNA sense strand
gaacacagaacuaguuuca

SEQ ID NO: 1341364 - RNA, 19 nt, Homo sapiens
  misc_RNA (1)...(19): siRNA sense strand
ggaauggaauggugugaug

SEQ ID NO: 1341365 - RNA, 19 nt, Homo sapiens
  misc_RNA (1)...(19): siRNA sense strand
acacagaacuaguuucaga

SEQ ID NO: 1341366 - RNA, 19 nt, Homo sapiens
  misc_RNA (1)...(19): siRNA sense strand
gaaguugccuauaaucaag

SEQ ID NO: 1341367 - RNA, 19 nt, Homo sapiens
  misc_RNA (1)...(19): siRNA sense strand
caaauacagucccagaguu

SEQ ID NO: 1341368 - RNA, 19 nt, Homo sapiens
  misc_RNA (1)...(19): siRNA sense strand
ccaagaaguugccuauaau

SEQ ID NO: 1341369 - RNA, 19 nt, Homo sapiens
  misc_RNA (1)...(19): siRNA sense strand
caaaugauacugaagagaa

SEQ ID NO: 1341370 - RNA, 19 nt, Homo sapiens
  misc_RNA (1)...(19): siRNA sense strand
ggcaagaagcacagaauua

SEQ ID NO: 1341371 - RNA, 19 nt, Homo sapiens
  misc_RNA (1)...(19): siRNA sense strand
ggagaaugcuggguuuaug

SEQ ID NO: 1341372 - RNA, 19 nt, Homo sapiens
  misc_RNA (1)...(19): siRNA sense strand
ggaaggagaaggaaauuca

SEQ ID NO: 1341373 - RNA, 19 nt, Homo sapiens
  misc_RNA (1)...(19): siRNA sense strand
cacagcagcucgggaaaua

SEQ ID NO: 1341374 - RNA, 19 nt, Homo sapiens
  misc_RNA (1)...(19): siRNA sense strand
gaaauucagugggagacaa

SEQ ID NO: 1341375 - RNA, 19 nt, Homo sapiens
  misc_RNA (1)...(19): siRNA sense strand
cagaauuacugccgagauu

SEQ ID NO: 1341376 - RNA, 19 nt, Homo sapiens
  misc_RNA (1)...(19): siRNA sense strand
ggaaggaaaggaucaguug

SEQ ID NO: 1341377 - RNA, 19 nt, Homo sapiens
  misc_RNA (1)...(19): siRNA sense strand
ggaauggugugauguaugc

SEQ ID NO: 1341378 - RNA, 19 nt, Homo sapiens
  misc_RNA (1)...(19): siRNA sense strand
gaaggucuauccucacagu

SEQ ID NO: 1341379 - RNA, 19 nt, Homo sapiens
  misc_RNA (1)...(19): siRNA sense strand
gcacaagagcguuaucaug

SEQ ID NO: 1341380 - RNA, 19 nt, Homo sapiens
  misc_RNA (1)...(19): siRNA sense strand
gauggagaaugcuggguuu

SEQ ID NO: 1341381 - RNA, 19 nt, Homo sapiens
  misc_RNA (1)...(19): siRNA sense strand
gaugucacuuucaacuuaa

SEQ ID NO: 1341382 - RNA, 19 nt, Homo sapiens
  misc_RNA (1)...(19): siRNA sense strand
accaagaaguugccuauaa

SEQ ID NO: 1341383 - RNA, 19 nt, Homo sapiens
  misc_RNA (1)...(19): siRNA sense strand
gaagagaacacagaacuag

SEQ ID NO: 1341384 - RNA, 19 nt, Homo sapiens
  misc_RNA (1)...(19): siRNA sense strand
agacaagguuauuucauga

SEQ ID NO: 1341385 - RNA, 19 nt, Homo sapiens
  misc_RNA (1)...(19): siRNA sense strand
gugaacuugucuccaaaua

SEQ ID NO: 1341386 - RNA, 19 nt, Homo sapiens
  misc_RNA (1)...(19): siRNA sense strand
aauaucaucuuccacacua

SEQ ID NO: 1341387 - RNA, 19 nt, Homo sapiens
  misc_RNA (1)...(19): siRNA sense strand
gaggagaaugcaauauuaa

SEQ ID NO: 1341388 - RNA, 19 nt, Homo sapiens
  misc_RNA (1)...(19): siRNA sense strand
gaugcaauauaucaaccua

SEQ ID NO: 1341389 - RNA, 19 nt, Homo sapiens
  misc_RNA (1)...(19): siRNA sense strand
gaaaggaaggagaaggaaa

SEQ ID NO: 1341390 - RNA, 19 nt, Homo sapiens
  misc_RNA (1)...(19): siRNA sense strand
ucccguagaugcaauauau

SEQ ID NO: 1341391 - RNA, 19 nt, Homo sapiens
  misc_RNA (1)...(19): siRNA sense strand
gaucagaacgaguaugaau

SEQ ID NO: 1341392 - RNA, 19 nt, Homo sapiens
  misc_RNA (1)...(19): siRNA sense strand
gcagggcugugucucaugu

SEQ ID NO: 1341393 - RNA, 19 nt, Homo sapiens
  misc_RNA (1)...(19): siRNA sense strand
ugaggaaguuggaagauca

SEQ ID NO: 1341394 - RNA, 19 nt, Homo sapiens
  misc_RNA (1)...(19): siRNA sense strand
ggaauuaggaggagaaugc

SEQ ID NO: 1341395 - RNA, 19 nt, Homo sapiens
  misc_RNA (1)...(19): siRNA sense strand
caacguuuauucuugaaag

SEQ ID NO: 1341396 - RNA, 19 nt, Homo sapiens
  misc_RNA (1)...(19): siRNA sense strand
gagaaaggaaggagaagga

SEQ ID NO: 1341397 - RNA, 19 nt, Homo sapiens
  misc_RNA (1)...(19): siRNA sense strand
agaagaaagugaggaaguu

SEQ ID NO: 1341398 - RNA, 19 nt, Homo sapiens
  misc_RNA (1)...(19): siRNA sense strand
gcaagaagcacagaauuac

SEQ ID NO: 1341399 - RNA, 19 nt, Homo sapiens
  misc_RNA (1)...(19): siRNA sense strand
gagaacacagaacuaguuu

SEQ ID NO: 1341400 - RNA, 19 nt, Homo sapiens
  misc_RNA (1)...(19): siRNA sense strand
agaacuaguuucagaagga

SEQ ID NO: 1341401 - RNA, 19 nt, Homo sapiens
  misc_RNA (1)...(19): siRNA sense strand
gaugaaccauuacugaaac

SEQ ID NO: 1341402 - RNA, 19 nt, Homo sapiens
  misc_RNA (1)...(19): siRNA sense strand
gagaaugcuggguuuauga

SEQ ID NO: 1341403 - RNA, 19 nt, Homo sapiens
  misc_RNA (1)...(19): siRNA sense strand
gaacauuacauucucacau

SEQ ID NO: 1341404 - RNA, 19 nt, Homo sapiens
  misc_RNA (1)...(19): siRNA sense strand
gaugaacauuacauucuca

SEQ ID NO: 1341405 - RNA, 19 nt, Homo sapiens
  misc_RNA (1)...(19): siRNA sense strand
gagcagguuucccaucauc

SEQ ID NO: 1341406 - RNA, 19 nt, Homo sapiens
  misc_RNA (1)...(19): siRNA sense strand
ucacuuaauucuuccuugu

SEQ ID NO: 1341407 - RNA, 19 nt, Homo sapiens
  misc_RNA (1)...(19): siRNA sense strand
gaggagcacaagagcguua

SEQ ID NO: 1341408 - RNA, 19 nt, Homo sapiens
  misc_RNA (1)...(19): siRNA sense strand
cagcagugaagaugaauuu

SEQ ID NO: 1341409 - RNA, 19 nt, Homo sapiens
  misc_RNA (1)...(19): siRNA sense strand
gaagaaagugaggaaguug

SEQ ID NO: 1341410 - RNA, 19 nt, Homo sapiens
  misc_RNA (1)...(19): siRNA sense strand
gcagugaagaugaauuuua

SEQ ID NO: 1341411 - RNA, 19 nt, Homo sapiens
  misc_RNA (1)...(19): siRNA sense strand
gagcauuagugaccagaag

SEQ ID NO: 1341412 - RNA, 19 nt, Homo sapiens
  misc_RNA (1)...(19): siRNA sense strand
guaguucuuccaacguuua

SEQ ID NO: 1341413 - RNA, 19 nt, Homo sapiens
  misc_RNA (1)...(19): siRNA sense strand
uggaagaucagaacgagua

SEQ ID NO: 1341414 - RNA, 19 nt, Homo sapiens
  misc_RNA (1)...(19): siRNA sense strand
ggacaucaucagacuccua

SEQ ID NO: 1341415 - RNA, 19 nt, Homo sapiens
  misc_RNA (1)...(19): siRNA sense strand
caagguuauuucaugaaga

SEQ ID NO: 1341416 - RNA, 19 nt, Homo sapiens
  misc_RNA (1)...(19): siRNA sense strand
acacuaaacccuucuaugg

SEQ ID NO: 1341417 - RNA, 19 nt, Homo sapiens
  misc_RNA (1)...(19): siRNA sense strand
gauaccacagaaucacuua

SEQ ID NO: 1341418 - RNA, 19 nt, Homo sapiens
  misc_RNA (1)...(19): siRNA sense strand
gcagaagcccgagaaagga

SEQ ID NO: 1341419 - RNA, 19 nt, Homo sapiens
  misc_RNA (1)...(19): siRNA sense strand
gugcaaauaucaucuucca

SEQ ID NO: 1341420 - RNA, 19 nt, Homo sapiens
  misc_RNA (1)...(19): siRNA sense strand
acaauucaaugcucauauc

SEQ ID NO: 1341421 - RNA, 19 nt, Homo sapiens
  misc_RNA (1)...(19): siRNA sense strand
gaagauacaauucaaugcu

SEQ ID NO: 1341422 - RNA, 19 nt, Homo sapiens
  misc_RNA (1)...(19): siRNA sense strand
gaugcugaccuguuugauu

SEQ ID NO: 1341423 - RNA, 19 nt, Homo sapiens
  misc_RNA (1)...(19): siRNA sense strand
cacgugaacuugucuccaa

SEQ ID NO: 1341424 - RNA, 19 nt, Homo sapiens
  misc_RNA (1)...(19): siRNA sense strand
ucaugaagauggagaaugc

SEQ ID NO: 1341425 - RNA, 19 nt, Homo sapiens
  misc_RNA (1)...(19): siRNA sense strand
uuaugaugcugaugaauuc

SEQ ID NO: 1341426 - RNA, 19 nt, Homo sapiens
  misc_RNA (1)...(19): siRNA sense strand
caucucuugucgcagguua

SEQ ID NO: 1341427 - RNA, 19 nt, Homo sapiens
  misc_RNA (1)...(19): siRNA sense strand
gguaguucuuccaacguuu

SEQ ID NO: 1341428 - RNA, 19 nt, Homo sapiens
  misc_RNA (1)...(19): siRNA sense strand
caaagcgcuuaauagauuc

SEQ ID NO: 1341429 - RNA, 19 nt, Homo sapiens
  misc_RNA (1)...(19): siRNA sense strand
caagugaugcugaccuguu

SEQ ID NO: 1341430 - RNA, 19 nt, Homo sapiens
  misc_RNA (1)...(19): siRNA sense strand
ugaugaaccauuacugaaa

SEQ ID NO: 1341431 - RNA, 19 nt, Homo sapiens
  misc_RNA (1)...(19): siRNA sense strand
gggcaagaagcacagaauu

SEQ ID NO: 1341432 - RNA, 19 nt, Homo sapiens
  misc_RNA (1)...(19): siRNA sense strand
cuuccaacguuuauucuug

SEQ ID NO: 1341433 - RNA, 19 nt, Homo sapiens
  misc_RNA (1)...(19): siRNA sense strand
agacuuggaauggaucuua

SEQ ID NO: 1341434 - RNA, 19 nt, Homo sapiens
  misc_RNA (1)...(19): siRNA sense strand
caagagcguuaucaugcau

SEQ ID NO: 1341435 - RNA, 19 nt, Homo sapiens
  misc_RNA (1)...(19): siRNA sense strand
aagugaugcugaccuguuu

SEQ ID NO: 1341436 - RNA, 19 nt, Homo sapiens
  misc_RNA (1)...(19): siRNA sense strand
augcugaccuguuugauuc

SEQ ID NO: 1341437 - RNA, 19 nt, Homo sapiens
  misc_RNA (1)...(19): siRNA sense strand
aaugcuggguuuaugauga

SEQ ID NO: 1341438 - RNA, 19 nt, Homo sapiens
  misc_RNA (1)...(19): siRNA sense strand
gaaguuggaagaucagaac

SEQ ID NO: 1341439 - RNA, 19 nt, Homo sapiens
  misc_RNA (1)...(19): siRNA sense strand
agacuaugaugaacauuac

SEQ ID NO: 1341440 - RNA, 19 nt, Homo sapiens
  misc_RNA (1)...(19): siRNA sense strand
agagaacacagaacuaguu

SEQ ID NO: 1341441 - RNA, 19 nt, Homo sapiens
  misc_RNA (1)...(19): siRNA sense strand
ucccaaggaucgaaugguu

SEQ ID NO: 1341442 - RNA, 19 nt, Homo sapiens
  misc_RNA (1)...(19): siRNA sense strand
ggaccuguuugugagcauu

SEQ ID NO: 1341443 - RNA, 19 nt, Homo sapiens
  misc_RNA (1)...(19): siRNA sense strand
ugauucacaugaugacaga

SEQ ID NO: 1341444 - RNA, 19 nt, Homo sapiens
  misc_RNA (1)...(19): siRNA sense strand
ccaaauacagucccagagu

SEQ ID NO: 1341445 - RNA, 19 nt, Homo sapiens
  misc_RNA (1)...(19): siRNA sense strand
uaugaugaaccauuacuga

SEQ ID NO: 1341446 - RNA, 19 nt, Homo sapiens
  misc_RNA (1)...(19): siRNA sense strand
ucaagaagaaagugaggaa

SEQ ID NO: 1341447 - RNA, 19 nt, Homo sapiens
  misc_RNA (1)...(19): siRNA sense strand
gguuagacuuggaauggau

SEQ ID NO: 1341448 - RNA, 19 nt, Homo sapiens
  misc_RNA (1)...(19): siRNA sense strand
gcacauccggaccuguuug

SEQ ID NO: 1341449 - RNA, 19 nt, Homo sapiens
  misc_RNA (1)...(19): siRNA sense strand
aaaggaaggagaaggaaau

SEQ ID NO: 1341450 - RNA, 19 nt, Homo sapiens
  misc_RNA (1)...(19): siRNA sense strand
ugaagagaacacagaacua

SEQ ID NO: 1341451 - RNA, 19 nt, Homo sapiens
  misc_RNA (1)...(19): siRNA sense strand
ggaaguuggaagaucagaa

SEQ ID NO: 1341452 - RNA, 19 nt, Homo sapiens
  misc_RNA (1)...(19): siRNA sense strand
aagaucagaacgaguauga

SEQ ID NO: 1341453 - RNA, 19 nt, Homo sapiens
  misc_RNA (1)...(19): siRNA sense strand
ggaggagaaugcaauauua

SEQ ID NO: 1341454 - RNA, 19 nt, Homo sapiens
  misc_RNA (1)...(19): siRNA sense strand
ccaaagcgcuuaauagauu

SEQ ID NO: 1341455 - RNA, 19 nt, Homo sapiens
  misc_RNA (1)...(19): siRNA sense strand
ggaugucacuuucaacuua

SEQ ID NO: 1341456 - RNA, 19 nt, Homo sapiens
  misc_RNA (1)...(19): siRNA sense strand
gaacuugucuccaaauaca

SEQ ID NO: 1341457 - RNA, 19 nt, Homo sapiens
  misc_RNA (1)...(19): siRNA sense strand
gcucauaucuggaccaaau

SEQ ID NO: 1341458 - RNA, 19 nt, Homo sapiens
  misc_RNA (1)...(19): siRNA sense strand
ggaaggaugucacuuucaa

SEQ ID NO: 1341459 - RNA, 19 nt, Homo sapiens
  misc_RNA (1)...(19): siRNA sense strand
gcacaggcuugaagaaaga

SEQ ID NO: 1341460 - RNA, 19 nt, Homo sapiens
  misc_RNA (1)...(19): siRNA sense strand
gaaaggaucaguugccaaa

SEQ ID NO: 1341461 - RNA, 19 nt, Homo sapiens
  misc_RNA (1)...(19): siRNA sense strand
gagacaagguuauuucaug

SEQ ID NO: 1341462 - RNA, 19 nt, Homo sapiens
  misc_RNA (1)...(19): siRNA sense strand
agaaauguaugcagacuuu

SEQ ID NO: 1341463 - RNA, 19 nt, Homo sapiens
  misc_RNA (1)...(19): siRNA sense strand
gaacacagaacuaguuuca

SEQ ID NO: 1341464 - RNA, 19 nt, Homo sapiens
  misc_RNA (1)...(19): siRNA sense strand
ggaauggaauggugugaug

SEQ ID NO: 1341465 - RNA, 19 nt, Homo sapiens
  misc_RNA (1)...(19): siRNA sense strand
acacagaacuaguuucaga

SEQ ID NO: 1341466 - RNA, 19 nt, Homo sapiens
  misc_RNA (1)...(19): siRNA sense strand
gaaguugccuauaaucaag

SEQ ID NO: 1341467 - RNA, 19 nt, Homo sapiens
  misc_RNA (1)...(19): siRNA sense strand
caaauacagucccagaguu

SEQ ID NO: 1341468 - RNA, 19 nt, Homo sapiens
  misc_RNA (1)...(19): siRNA sense strand
ccaagaaguugccuauaau

SEQ ID NO: 1341469 - RNA, 19 nt, Homo sapiens
  misc_RNA (1)...(19): siRNA sense strand
caaaugauacugaagagaa

SEQ ID NO: 1341470 - RNA, 19 nt, Homo sapiens
  misc_RNA (1)...(19): siRNA sense strand
ggcaagaagcacagaauua

SEQ ID NO: 1341471 - RNA, 19 nt, Homo sapiens
  misc_RNA (1)...(19): siRNA sense strand
ggagaaugcuggguuuaug

SEQ ID NO: 1341472 - RNA, 19 nt, Homo sapiens
  misc_RNA (1)...(19): siRNA sense strand
ggaaggagaaggaaauuca

SEQ ID NO: 1341473 - RNA, 19 nt, Homo sapiens
  misc_RNA (1)...(19): siRNA sense strand
cacagcagcucgggaaaua

SEQ ID NO: 1341474 - RNA, 19 nt, Homo sapiens
  misc_RNA (1)...(19): siRNA sense strand
gaaauucagugggagacaa

SEQ ID NO: 1341475 - RNA, 19 nt, Homo sapiens
  misc_RNA (1)...(19): siRNA sense strand
cagaauuacugccgagauu

SEQ ID NO: 1341476 - RNA, 19 nt, Homo sapiens
  misc_RNA (1)...(19): siRNA sense strand
ggaaggaaaggaucaguug

SEQ ID NO: 1341477 - RNA, 19 nt, Homo sapiens
  misc_RNA (1)...(19): siRNA sense strand
ggaauggugugauguaugc

SEQ ID NO: 1341478 - RNA, 19 nt, Homo sapiens
  misc_RNA (1)...(19): siRNA sense strand
gaaggucuauccucacagu

SEQ ID NO: 1341479 - RNA, 19 nt, Homo sapiens
  misc_RNA (1)...(19): siRNA sense strand
gcacaagagcguuaucaug

SEQ ID NO: 1341480 - RNA, 19 nt, Homo sapiens
  misc_RNA (1)...(19): siRNA sense strand
gauggagaaugcuggguuu

SEQ ID NO: 1341481 - RNA, 19 nt, Homo sapiens
  misc_RNA (1)...(19): siRNA sense strand
gaugucacuuucaacuuaa

SEQ ID NO: 1341482 - RNA, 19 nt, Homo sapiens
  misc_RNA (1)...(19): siRNA sense strand
accaagaaguugccuauaa

SEQ ID NO: 1341483 - RNA, 19 nt, Homo sapiens
  misc_RNA (1)...(19): siRNA sense strand
gaagagaacacagaacuag

SEQ ID NO: 1341484 - RNA, 19 nt, Homo sapiens
  misc_RNA (1)...(19): siRNA sense strand
agacaagguuauuucauga

SEQ ID NO: 1341485 - RNA, 19 nt, Homo sapiens
  misc_RNA (1)...(19): siRNA sense strand
gugaacuugucuccaaaua

SEQ ID NO: 1341486 - RNA, 19 nt, Homo sapiens
  misc_RNA (1)...(19): siRNA sense strand
aauaucaucuuccacacua

SEQ ID NO: 1341487 - RNA, 19 nt, Homo sapiens
  misc_RNA (1)...(19): siRNA sense strand
gaggagaaugcaauauuaa

SEQ ID NO: 1341488 - RNA, 19 nt, Homo sapiens
  misc_RNA (1)...(19): siRNA sense strand
gaugcaauauaucaaccua

SEQ ID NO: 1341489 - RNA, 19 nt, Homo sapiens
  misc_RNA (1)...(19): siRNA sense strand
gaaaggaaggagaaggaaa

SEQ ID NO: 1341490 - RNA, 19 nt, Homo sapiens
  misc_RNA (1)...(19): siRNA sense strand
ucccguagaugcaauauau

SEQ ID NO: 1341491 - RNA, 19 nt, Homo sapiens
  misc_RNA (1)...(19): siRNA sense strand
gaucagaacgaguaugaau

SEQ ID NO: 1341492 - RNA, 19 nt, Homo sapiens
  misc_RNA (1)...(19): siRNA sense strand
gcagggcugugucucaugu

SEQ ID NO: 1341493 - RNA, 19 nt, Homo sapiens
  misc_RNA (1)...(19): siRNA sense strand
ugaggaaguuggaagauca

SEQ ID NO: 1341494 - RNA, 19 nt, Homo sapiens
  misc_RNA (1)...(19): siRNA sense strand
ggaauuaggaggagaaugc

SEQ ID NO: 1341495 - RNA, 19 nt, Homo sapiens
  misc_RNA (1)...(19): siRNA sense strand
caacguuuauucuugaaag

SEQ ID NO: 1341496 - RNA, 19 nt, Homo sapiens
  misc_RNA (1)...(19): siRNA sense strand
gagaaaggaaggagaagga

SEQ ID NO: 1341497 - RNA, 19 nt, Homo sapiens
  misc_RNA (1)...(19): siRNA sense strand
agaagaaagugaggaaguu

SEQ ID NO: 1341498 - RNA, 19 nt, Homo sapiens
  misc_RNA (1)...(19): siRNA sense strand
gcaagaagcacagaauuac

SEQ ID NO: 1341499 - RNA, 19 nt, Homo sapiens
  misc_RNA (1)...(19): siRNA sense strand
gagaacacagaacuaguuu

SEQ ID NO: 1341500 - RNA, 19 nt, Homo sapiens
  misc_RNA (1)...(19): siRNA sense strand
agaacuaguuucagaagga

SEQ ID NO: 1341501 - RNA, 19 nt, Homo sapiens
  misc_RNA (1)...(19): siRNA sense strand
gaugaaccauuacugaaac

SEQ ID NO: 1341502 - RNA, 19 nt, Homo sapiens
  misc_RNA (1)...(19): siRNA sense strand
gagaaugcuggguuuauga

SEQ ID NO: 1341503 - RNA, 19 nt, Homo sapiens
  misc_RNA (1)...(19): siRNA sense strand
gaacauuacauucucacau

SEQ ID NO: 1341504 - RNA, 19 nt, Homo sapiens
  misc_RNA (1)...(19): siRNA sense strand
gaugaacauuacauucuca

SEQ ID NO: 1341505 - RNA, 19 nt, Homo sapiens
  misc_RNA (1)...(19): siRNA sense strand
gagcagguuucccaucauc

SEQ ID NO: 1341506 - RNA, 19 nt, Homo sapiens
  misc_RNA (1)...(19): siRNA sense strand
ucacuuaauucuuccuugu

SEQ ID NO: 1341507 - RNA, 19 nt, Homo sapiens
  misc_RNA (1)...(19): siRNA sense strand
gaggagcacaagagcguua

SEQ ID NO: 1341508 - RNA, 19 nt, Homo sapiens
  misc_RNA (1)...(19): siRNA sense strand
cagcagugaagaugaauuu

SEQ ID NO: 1341509 - RNA, 19 nt, Homo sapiens
  misc_RNA (1)...(19): siRNA sense strand
gaagaaagugaggaaguug

SEQ ID NO: 1341510 - RNA, 19 nt, Homo sapiens
  misc_RNA (1)...(19): siRNA sense strand
gcagugaagaugaauuuua

SEQ ID NO: 1341511 - RNA, 19 nt, Homo sapiens
  misc_RNA (1)...(19): siRNA sense strand
gagcauuagugaccagaag

SEQ ID NO: 1341512 - RNA, 19 nt, Homo sapiens
  misc_RNA (1)...(19): siRNA sense strand
guaguucuuccaacguuua

SEQ ID NO: 1341513 - RNA, 19 nt, Homo sapiens
  misc_RNA (1)...(19): siRNA sense strand
uggaagaucagaacgagua

SEQ ID NO: 1341514 - RNA, 19 nt, Homo sapiens
  misc_RNA (1)...(19): siRNA sense strand
ggacaucaucagacuccua

SEQ ID NO: 1341515 - RNA, 19 nt, Homo sapiens
  misc_RNA (1)...(19): siRNA sense strand
caagguuauuucaugaaga

SEQ ID NO: 1341516 - RNA, 19 nt, Homo sapiens
  misc_RNA (1)...(19): siRNA sense strand
acacuaaacccuucuaugg

SEQ ID NO: 1341517 - RNA, 19 nt, Homo sapiens
  misc_RNA (1)...(19): siRNA sense strand
gauaccacagaaucacuua

SEQ ID NO: 1341518 - RNA, 19 nt, Homo sapiens
  misc_RNA (1)...(19): siRNA sense strand
gcagaagcccgagaaagga

SEQ ID NO: 1341519 - RNA, 19 nt, Homo sapiens
  misc_RNA (1)...(19): siRNA sense strand
gugcaaauaucaucuucca

SEQ ID NO: 1341520 - RNA, 19 nt, Homo sapiens
  misc_RNA (1)...(19): siRNA sense strand
acaauucaaugcucauauc

SEQ ID NO: 1341521 - RNA, 19 nt, Homo sapiens
  misc_RNA (1)...(19): siRNA sense strand
gaagauacaauucaaugcu

SEQ ID NO: 1341522 - RNA, 19 nt, Homo sapiens
  misc_RNA (1)...(19): siRNA sense strand
gaugcugaccuguuugauu

SEQ ID NO: 1341523 - RNA, 19 nt, Homo sapiens
  misc_RNA (1)...(19): siRNA sense strand
cacgugaacuugucuccaa

SEQ ID NO: 1341524 - RNA, 19 nt, Homo sapiens
  misc_RNA (1)...(19): siRNA sense strand
ucaugaagauggagaaugc

SEQ ID NO: 1341525 - RNA, 19 nt, Homo sapiens
  misc_RNA (1)...(19): siRNA sense strand
uuaugaugcugaugaauuc

SEQ ID NO: 1341526 - RNA, 19 nt, Homo sapiens
  misc_RNA (1)...(19): siRNA sense strand
caucucuugucgcagguua

SEQ ID NO: 1341527 - RNA, 19 nt, Homo sapiens
  misc_RNA (1)...(19): siRNA sense strand
gguaguucuuccaacguuu

SEQ ID NO: 1341528 - RNA, 19 nt, Homo sapiens
  misc_RNA (1)...(19): siRNA sense strand
caaagcgcuuaauagauuc

SEQ ID NO: 1341529 - RNA, 19 nt, Homo sapiens
  misc_RNA (1)...(19): siRNA sense strand
caagugaugcugaccuguu

SEQ ID NO: 1341530 - RNA, 19 nt, Homo sapiens
  misc_RNA (1)...(19): siRNA sense strand
ugaugaaccauuacugaaa

SEQ ID NO: 1341531 - RNA, 19 nt, Homo sapiens
  misc_RNA (1)...(19): siRNA sense strand
gggcaagaagcacagaauu

SEQ ID NO: 1341532 - RNA, 19 nt, Homo sapiens
  misc_RNA (1)...(19): siRNA sense strand
cuuccaacguuuauucuug

SEQ ID NO: 1341533 - RNA, 19 nt, Homo sapiens
  misc_RNA (1)...(19): siRNA sense strand
agacuuggaauggaucuua

SEQ ID NO: 1341534 - RNA, 19 nt, Homo sapiens
  misc_RNA (1)...(19): siRNA sense strand
caagagcguuaucaugcau

SEQ ID NO: 1341535 - RNA, 19 nt, Homo sapiens
  misc_RNA (1)...(19): siRNA sense strand
aagugaugcugaccuguuu

SEQ ID NO: 1341536 - RNA, 19 nt, Homo sapiens
  misc_RNA (1)...(19): siRNA sense strand
augcugaccuguuugauuc

SEQ ID NO: 1341537 - RNA, 19 nt, Homo sapiens
  misc_RNA (1)...(19): siRNA sense strand
aaugcuggguuuaugauga

SEQ ID NO: 1341538 - RNA, 19 nt, Homo sapiens
  misc_RNA (1)...(19): siRNA sense strand
gaaguuggaagaucagaac

SEQ ID NO: 1341539 - RNA, 19 nt, Homo sapiens
  misc_RNA (1)...(19): siRNA sense strand
agacuaugaugaacauuac

SEQ ID NO: 1341540 - RNA, 19 nt, Homo sapiens
  misc_RNA (1)...(19): siRNA sense strand
agagaacacagaacuaguu

SEQ ID NO: 1341541 - RNA, 19 nt, Homo sapiens
  misc_RNA (1)...(19): siRNA sense strand
ucccaaggaucgaaugguu

SEQ ID NO: 1341542 - RNA, 19 nt, Homo sapiens
  misc_RNA (1)...(19): siRNA sense strand
ggaccuguuugugagcauu

SEQ ID NO: 1341543 - RNA, 19 nt, Homo sapiens
  misc_RNA (1)...(19): siRNA sense strand
ugauucacaugaugacaga

SEQ ID NO: 1341544 - RNA, 19 nt, Homo sapiens
  misc_RNA (1)...(19): siRNA sense strand
ccaaauacagucccagagu

SEQ ID NO: 1341545 - RNA, 19 nt, Homo sapiens
  misc_RNA (1)...(19): siRNA sense strand
uaugaugaaccauuacuga

SEQ ID NO: 1341546 - RNA, 19 nt, Homo sapiens
  misc_RNA (1)...(19): siRNA sense strand
ucaagaagaaagugaggaa

SEQ ID NO: 1341547 - RNA, 19 nt, Homo sapiens
  misc_RNA (1)...(19): siRNA sense strand
gguuagacuuggaauggau

SEQ ID NO: 1341548 - RNA, 19 nt, Homo sapiens
  misc_RNA (1)...(19): siRNA sense strand
gcacauccggaccuguuug

SEQ ID NO: 1341549 - RNA, 19 nt, Homo sapiens
  misc_RNA (1)...(19): siRNA sense strand
aaaggaaggagaaggaaau

SEQ ID NO: 1341550 - RNA, 19 nt, Homo sapiens
  misc_RNA (1)...(19): siRNA sense strand
ugaagagaacacagaacua

SEQ ID NO: 1341551 - RNA, 19 nt, Homo sapiens
  misc_RNA (1)...(19): siRNA sense strand
ggaaguuggaagaucagaa

SEQ ID NO: 1341552 - RNA, 19 nt, Homo sapiens
  misc_RNA (1)...(19): siRNA sense strand
aagaucagaacgaguauga

SEQ ID NO: 1341553 - RNA, 19 nt, Homo sapiens
  misc_RNA (1)...(19): siRNA sense strand
ggaggagaaugcaauauua

SEQ ID NO: 1341554 - RNA, 19 nt, Homo sapiens
  misc_RNA (1)...(19): siRNA sense strand
ccaaagcgcuuaauagauu

SEQ ID NO: 1341555 - RNA, 19 nt, Homo sapiens
  misc_RNA (1)...(19): siRNA sense strand
ggaugucacuuucaacuua

SEQ ID NO: 1341556 - RNA, 19 nt, Homo sapiens
  misc_RNA (1)...(19): siRNA sense strand
gaacuugucuccaaauaca

SEQ ID NO: 1341557 - RNA, 19 nt, Homo sapiens
  misc_RNA (1)...(19): siRNA sense strand
gcucauaucuggaccaaau

SEQ ID NO: 1341558 - RNA, 19 nt, Homo sapiens
  misc_RNA (1)...(19): siRNA sense strand
ggaaggaugucacuuucaa

SEQ ID NO: 1341559 - RNA, 19 nt, Homo sapiens
  misc_RNA (1)...(19): siRNA sense strand
gcacaggcuugaagaaaga

SEQ ID NO: 1341560 - RNA, 19 nt, Homo sapiens
  misc_RNA (1)...(19): siRNA sense strand
gaaaggaucaguugccaaa

SEQ ID NO: 1341561 - RNA, 19 nt, Homo sapiens
  misc_RNA (1)...(19): siRNA sense strand
gagacaagguuauuucaug

SEQ ID NO: 1341562 - RNA, 19 nt, Homo sapiens
  misc_RNA (1)...(19): siRNA sense strand
agaaauguaugcagacuuu

SEQ ID NO: 1341563 - RNA, 19 nt, Homo sapiens
  misc_RNA (1)...(19): siRNA sense strand
gaacacagaacuaguuuca

SEQ ID NO: 1341564 - RNA, 19 nt, Homo sapiens
  misc_RNA (1)...(19): siRNA sense strand
ggaauggaauggugugaug

SEQ ID NO: 1341565 - RNA, 19 nt, Homo sapiens
  misc_RNA (1)...(19): siRNA sense strand
acacagaacuaguuucaga

SEQ ID NO: 1341566 - RNA, 19 nt, Homo sapiens
  misc_RNA (1)...(19): siRNA sense strand
gaaguugccuauaaucaag

SEQ ID NO: 1341567 - RNA, 19 nt, Homo sapiens
  misc_RNA (1)...(19): siRNA sense strand
caaauacagucccagaguu

SEQ ID NO: 1341568 - RNA, 19 nt, Homo sapiens
  misc_RNA (1)...(19): siRNA sense strand
ccaagaaguugccuauaau

SEQ ID NO: 1341569 - RNA, 19 nt, Homo sapiens
  misc_RNA (1)...(19): siRNA sense strand
caaaugauacugaagagaa

SEQ ID NO: 1341570 - RNA, 19 nt, Homo sapiens
  misc_RNA (1)...(19): siRNA sense strand
ggcaagaagcacagaauua

SEQ ID NO: 1341571 - RNA, 19 nt, Homo sapiens
  misc_RNA (1)...(19): siRNA sense strand
ggagaaugcuggguuuaug

SEQ ID NO: 1341572 - RNA, 19 nt, Homo sapiens
  misc_RNA (1)...(19): siRNA sense strand
ggaaggagaaggaaauuca

SEQ ID NO: 1341573 - RNA, 19 nt, Homo sapiens
  misc_RNA (1)...(19): siRNA sense strand
cacagcagcucgggaaaua

SEQ ID NO: 1341574 - RNA, 19 nt, Homo sapiens
  misc_RNA (1)...(19): siRNA sense strand
gaaauucagugggagacaa

SEQ ID NO: 1341575 - RNA, 19 nt, Homo sapiens
  misc_RNA (1)...(19): siRNA sense strand
cagaauuacugccgagauu

SEQ ID NO: 1341576 - RNA, 19 nt, Homo sapiens
  misc_RNA (1)...(19): siRNA sense strand
ggaaggaaaggaucaguug

SEQ ID NO: 1341577 - RNA, 19 nt, Homo sapiens
  misc_RNA (1)...(19): siRNA sense strand
ggaauggugugauguaugc

SEQ ID NO: 1341578 - RNA, 19 nt, Homo sapiens
  misc_RNA (1)...(19): siRNA sense strand
gaaggucuauccucacagu

SEQ ID NO: 1341579 - RNA, 19 nt, Homo sapiens
  misc_RNA (1)...(19): siRNA sense strand
gcacaagagcguuaucaug

SEQ ID NO: 1341580 - RNA, 19 nt, Homo sapiens
  misc_RNA (1)...(19): siRNA sense strand
gauggagaaugcuggguuu

SEQ ID NO: 1341581 - RNA, 19 nt, Homo sapiens
  misc_RNA (1)...(19): siRNA sense strand
gaugucacuuucaacuuaa

SEQ ID NO: 1341582 - RNA, 19 nt, Homo sapiens
  misc_RNA (1)...(19): siRNA sense strand
accaagaaguugccuauaa

SEQ ID NO: 1341583 - RNA, 19 nt, Homo sapiens
  misc_RNA (1)...(19): siRNA sense strand
gaagagaacacagaacuag

SEQ ID NO: 1341584 - RNA, 19 nt, Homo sapiens
  misc_RNA (1)...(19): siRNA sense strand
agacaagguuauuucauga

SEQ ID NO: 1341585 - RNA, 19 nt, Homo sapiens
  misc_RNA (1)...(19): siRNA sense strand
gugaacuugucuccaaaua

SEQ ID NO: 1341586 - RNA, 19 nt, Homo sapiens
  misc_RNA (1)...(19): siRNA sense strand
aauaucaucuuccacacua

SEQ ID NO: 1341587 - RNA, 19 nt, Homo sapiens
  misc_RNA (1)...(19): siRNA sense strand
gaggagaaugcaauauuaa

SEQ ID NO: 1341588 - RNA, 19 nt, Homo sapiens
  misc_RNA (1)...(19): siRNA sense strand
gaugcaauauaucaaccua

SEQ ID NO: 1341589 - RNA, 19 nt, Homo sapiens
  misc_RNA (1)...(19): siRNA sense strand
gaaaggaaggagaaggaaa

SEQ ID NO: 1341590 - RNA, 19 nt, Homo sapiens
  misc_RNA (1)...(19): siRNA sense strand
ucccguagaugcaauauau

SEQ ID NO: 1341591 - RNA, 19 nt, Homo sapiens
  misc_RNA (1)...(19): siRNA sense strand
gaucagaacgaguaugaau

SEQ ID NO: 1341592 - RNA, 19 nt, Homo sapiens
  misc_RNA (1)...(19): siRNA sense strand
gcagggcugugucucaugu

SEQ ID NO: 1341593 - RNA, 19 nt, Homo sapiens
  misc_RNA (1)...(19): siRNA sense strand
ugaggaaguuggaagauca

SEQ ID NO: 1341594 - RNA, 19 nt, Homo sapiens
  misc_RNA (1)...(19): siRNA sense strand
ggaauuaggaggagaaugc

SEQ ID NO: 1341595 - RNA, 19 nt, Homo sapiens
  misc_RNA (1)...(19): siRNA sense strand
caacguuuauucuugaaag

SEQ ID NO: 1341596 - RNA, 19 nt, Homo sapiens
  misc_RNA (1)...(19): siRNA sense strand
gagaaaggaaggagaagga

SEQ ID NO: 1341597 - RNA, 19 nt, Homo sapiens
  misc_RNA (1)...(19): siRNA sense strand
agaagaaagugaggaaguu

SEQ ID NO: 1341598 - RNA, 19 nt, Homo sapiens
  misc_RNA (1)...(19): siRNA sense strand
gcaagaagcacagaauuac

SEQ ID NO: 1341599 - RNA, 19 nt, Homo sapiens
  misc_RNA (1)...(19): siRNA sense strand
gagaacacagaacuaguuu

SEQ ID NO: 1341600 - RNA, 19 nt, Homo sapiens
  misc_RNA (1)...(19): siRNA sense strand
agaacuaguuucagaagga

SEQ ID NO: 1341601 - RNA, 19 nt, Homo sapiens
  misc_RNA (1)...(19): siRNA sense strand
gaugaaccauuacugaaac

SEQ ID NO: 1341602 - RNA, 19 nt, Homo sapiens
  misc_RNA (1)...(19): siRNA sense strand
gagaaugcuggguuuauga

SEQ ID NO: 1341603 - RNA, 19 nt, Homo sapiens
  misc_RNA (1)...(19): siRNA sense strand
gaacauuacauucucacau

SEQ ID NO: 1341604 - RNA, 19 nt, Homo sapiens
  misc_RNA (1)...(19): siRNA sense strand
gaugaacauuacauucuca

SEQ ID NO: 1341605 - RNA, 19 nt, Homo sapiens
  misc_RNA (1)...(19): siRNA sense strand
gagcagguuucccaucauc

SEQ ID NO: 1341606 - RNA, 19 nt, Homo sapiens
  misc_RNA (1)...(19): siRNA sense strand
ucacuuaauucuuccuugu

SEQ ID NO: 1341607 - RNA, 19 nt, Homo sapiens
  misc_RNA (1)...(19): siRNA sense strand
gaggagcacaagagcguua

SEQ ID NO: 1341608 - RNA, 19 nt, Homo sapiens
  misc_RNA (1)...(19): siRNA sense strand
cagcagugaagaugaauuu

SEQ ID NO: 1341609 - RNA, 19 nt, Homo sapiens
  misc_RNA (1)...(19): siRNA sense strand
gaagaaagugaggaaguug

SEQ ID NO: 1341610 - RNA, 19 nt, Homo sapiens
  misc_RNA (1)...(19): siRNA sense strand
gcagugaagaugaauuuua

SEQ ID NO: 1341611 - RNA, 19 nt, Homo sapiens
  misc_RNA (1)...(19): siRNA sense strand
gagcauuagugaccagaag

SEQ ID NO: 1341612 - RNA, 19 nt, Homo sapiens
  misc_RNA (1)...(19): siRNA sense strand
guaguucuuccaacguuua

SEQ ID NO: 1341613 - RNA, 19 nt, Homo sapiens
  misc_RNA (1)...(19): siRNA sense strand
uggaagaucagaacgagua

SEQ ID NO: 1341614 - RNA, 19 nt, Homo sapiens
  misc_RNA (1)...(19): siRNA sense strand
ggacaucaucagacuccua

SEQ ID NO: 1341615 - RNA, 19 nt, Homo sapiens
  misc_RNA (1)...(19): siRNA sense strand
caagguuauuucaugaaga

SEQ ID NO: 1341616 - RNA, 19 nt, Homo sapiens
  misc_RNA (1)...(19): siRNA sense strand
acacuaaacccuucuaugg

SEQ ID NO: 1341617 - RNA, 19 nt, Homo sapiens
  misc_RNA (1)...(19): siRNA sense strand
gauaccacagaaucacuua

SEQ ID NO: 1341618 - RNA, 19 nt, Homo sapiens
  misc_RNA (1)...(19): siRNA sense strand
gcagaagcccgagaaagga

SEQ ID NO: 1341619 - RNA, 19 nt, Homo sapiens
  misc_RNA (1)...(19): siRNA sense strand
gugcaaauaucaucuucca

SEQ ID NO: 1341620 - RNA, 19 nt, Homo sapiens
  misc_RNA (1)...(19): siRNA sense strand
acaauucaaugcucauauc

SEQ ID NO: 1341621 - RNA, 19 nt, Homo sapiens
  misc_RNA (1)...(19): siRNA sense strand
gaagauacaauucaaugcu

SEQ ID NO: 1341622 - RNA, 19 nt, Homo sapiens
  misc_RNA (1)...(19): siRNA sense strand
gaugcugaccuguuugauu

SEQ ID NO: 1341623 - RNA, 19 nt, Homo sapiens
  misc_RNA (1)...(19): siRNA sense strand
cacgugaacuugucuccaa

SEQ ID NO: 1341624 - RNA, 19 nt, Homo sapiens
  misc_RNA (1)...(19): siRNA sense strand
ucaugaagauggagaaugc

SEQ ID NO: 1341625 - RNA, 19 nt, Homo sapiens
  misc_RNA (1)...(19): siRNA sense strand
uuaugaugcugaugaauuc

SEQ ID NO: 1341626 - RNA, 19 nt, Homo sapiens
  misc_RNA (1)...(19): siRNA sense strand
caucucuugucgcagguua

SEQ ID NO: 1341627 - RNA, 19 nt, Homo sapiens
  misc_RNA (1)...(19): siRNA sense strand
gguaguucuuccaacguuu

SEQ ID NO: 1341628 - RNA, 19 nt, Homo sapiens
  misc_RNA (1)...(19): siRNA sense strand
caaagcgcuuaauagauuc

SEQ ID NO: 1341629 - RNA, 19 nt, Homo sapiens
  misc_RNA (1)...(19): siRNA sense strand
caagugaugcugaccuguu

SEQ ID NO: 1341630 - RNA, 19 nt, Homo sapiens
  misc_RNA (1)...(19): siRNA sense strand
ugaugaaccauuacugaaa

SEQ ID NO: 1341631 - RNA, 19 nt, Homo sapiens
  misc_RNA (1)...(19): siRNA sense strand
gggcaagaagcacagaauu

SEQ ID NO: 1341632 - RNA, 19 nt, Homo sapiens
  misc_RNA (1)...(19): siRNA sense strand
cuuccaacguuuauucuug

SEQ ID NO: 1341633 - RNA, 19 nt, Homo sapiens
  misc_RNA (1)...(19): siRNA sense strand
agacuuggaauggaucuua

SEQ ID NO: 1341634 - RNA, 19 nt, Homo sapiens
  misc_RNA (1)...(19): siRNA sense strand
caagagcguuaucaugcau

SEQ ID NO: 1341635 - RNA, 19 nt, Homo sapiens
  misc_RNA (1)...(19): siRNA sense strand
aagugaugcugaccuguuu

SEQ ID NO: 1341636 - RNA, 19 nt, Homo sapiens
  misc_RNA (1)...(19): siRNA sense strand
augcugaccuguuugauuc

SEQ ID NO: 1341637 - RNA, 19 nt, Homo sapiens
  misc_RNA (1)...(19): siRNA sense strand
aaugcuggguuuaugauga

SEQ ID NO: 1341638 - RNA, 19 nt, Homo sapiens
  misc_RNA (1)...(19): siRNA sense strand
gaaguuggaagaucagaac

SEQ ID NO: 1341639 - RNA, 19 nt, Homo sapiens
  misc_RNA (1)...(19): siRNA sense strand
agacuaugaugaacauuac

SEQ ID NO: 1341640 - RNA, 19 nt, Homo sapiens
  misc_RNA (1)...(19): siRNA sense strand
agagaacacagaacuaguu

SEQ ID NO: 1341641 - RNA, 19 nt, Homo sapiens
  misc_RNA (1)...(19): siRNA sense strand
ucccaaggaucgaaugguu

SEQ ID NO: 1341642 - RNA, 19 nt, Homo sapiens
  misc_RNA (1)...(19): siRNA sense strand
ggaccuguuugugagcauu

SEQ ID NO: 1341643 - RNA, 19 nt, Homo sapiens
  misc_RNA (1)...(19): siRNA sense strand
ugauucacaugaugacaga

SEQ ID NO: 1341644 - RNA, 19 nt, Homo sapiens
  misc_RNA (1)...(19): siRNA sense strand
ccaaauacagucccagagu

SEQ ID NO: 1341645 - RNA, 19 nt, Homo sapiens
  misc_RNA (1)...(19): siRNA sense strand
uaugaugaaccauuacuga

SEQ ID NO: 1341646 - RNA, 19 nt, Homo sapiens
  misc_RNA (1)...(19): siRNA sense strand
ucaagaagaaagugaggaa

SEQ ID NO: 1341647 - RNA, 19 nt, Homo sapiens
  misc_RNA (1)...(19): siRNA sense strand
gguuagacuuggaauggau

SEQ ID NO: 1341648 - RNA, 19 nt, Homo sapiens
  misc_RNA (1)...(19): siRNA sense strand
gcacauccggaccuguuug

SEQ ID NO: 1341649 - RNA, 19 nt, Homo sapiens
  misc_RNA (1)...(19): siRNA sense strand
aaaggaaggagaaggaaau

SEQ ID NO: 1341650 - RNA, 19 nt, Homo sapiens
  misc_RNA (1)...(19): siRNA sense strand
ugaagagaacacagaacua

SEQ ID NO: 1341651 - RNA, 19 nt, Homo sapiens
  misc_RNA (1)...(19): siRNA sense strand
ggaaguuggaagaucagaa

SEQ ID NO: 1341652 - RNA, 19 nt, Homo sapiens
  misc_RNA (1)...(19): siRNA sense strand
aagaucagaacgaguauga

SEQ ID NO: 1341653 - RNA, 19 nt, Homo sapiens
  misc_RNA (1)...(19): siRNA sense strand
ggaggagaaugcaauauua

SEQ ID NO: 1341654 - RNA, 19 nt, Homo sapiens
  misc_RNA (1)...(19): siRNA sense strand
ccaaagcgcuuaauagauu

SEQ ID NO: 1341655 - RNA, 19 nt, Homo sapiens
  misc_RNA (1)...(19): siRNA sense strand
ggaugucacuuucaacuua

SEQ ID NO: 1341656 - RNA, 19 nt, Homo sapiens
  misc_RNA (1)...(19): siRNA sense strand
caaagaagaugaacagaga

SEQ ID NO: 1341657 - RNA, 19 nt, Homo sapiens
  misc_RNA (1)...(19): siRNA sense strand
gaacuugucuccaaauaca

SEQ ID NO: 1341658 - RNA, 19 nt, Homo sapiens
  misc_RNA (1)...(19): siRNA sense strand
gcucauaucuggaccaaau

SEQ ID NO: 1341659 - RNA, 19 nt, Homo sapiens
  misc_RNA (1)...(19): siRNA sense strand
ggaaggaugucacuuucaa

SEQ ID NO: 1341660 - RNA, 19 nt, Homo sapiens
  misc_RNA (1)...(19): siRNA sense strand
gcacaggcuugaagaaaga

SEQ ID NO: 1341661 - RNA, 19 nt, Homo sapiens
  misc_RNA (1)...(19): siRNA sense strand
gaaaggaucaguugccaaa

SEQ ID NO: 1341662 - RNA, 19 nt, Homo sapiens
  misc_RNA (1)...(19): siRNA sense strand
gagacaagguuauuucaug

SEQ ID NO: 1341663 - RNA, 19 nt, Homo sapiens
  misc_RNA (1)...(19): siRNA sense strand
agaaauguaugcagacuuu

SEQ ID NO: 1341664 - RNA, 19 nt, Homo sapiens
  misc_RNA (1)...(19): siRNA sense strand
gaacacagaacuaguuuca

SEQ ID NO: 1341665 - RNA, 19 nt, Homo sapiens
  misc_RNA (1)...(19): siRNA sense strand
ggaauggaauggugugaug

SEQ ID NO: 1341666 - RNA, 19 nt, Homo sapiens
  misc_RNA (1)...(19): siRNA sense strand
acacagaacuaguuucaga

SEQ ID NO: 1341667 - RNA, 19 nt, Homo sapiens
  misc_RNA (1)...(19): siRNA sense strand
gaaguugccuauaaucaag

SEQ ID NO: 1341668 - RNA, 19 nt, Homo sapiens
  misc_RNA (1)...(19): siRNA sense strand
caaauacagucccagaguu

SEQ ID NO: 1341669 - RNA, 19 nt, Homo sapiens
  misc_RNA (1)...(19): siRNA sense strand
ccaagaaguugccuauaau

SEQ ID NO: 1341670 - RNA, 19 nt, Homo sapiens
  misc_RNA (1)...(19): siRNA sense strand
gacaacaaauagcauggua

SEQ ID NO: 1341671 - RNA, 19 nt, Homo sapiens
  misc_RNA (1)...(19): siRNA sense strand
caaaugauacugaagagaa

SEQ ID NO: 1341672 - RNA, 19 nt, Homo sapiens
  misc_RNA (1)...(19): siRNA sense strand
ggcaagaagcacagaauua

SEQ ID NO: 1341673 - RNA, 19 nt, Homo sapiens
  misc_RNA (1)...(19): siRNA sense strand
ggagaaugcuggguuuaug

SEQ ID NO: 1341674 - RNA, 19 nt, Homo sapiens
  misc_RNA (1)...(19): siRNA sense strand
caaauagcaugguagaauc

SEQ ID NO: 1341675 - RNA, 19 nt, Homo sapiens
  misc_RNA (1)...(19): siRNA sense strand
ggaaggagaaggaaauuca

SEQ ID NO: 1341676 - RNA, 19 nt, Homo sapiens
  misc_RNA (1)...(19): siRNA sense strand
gaagaugaacagagaaaga

SEQ ID NO: 1341677 - RNA, 19 nt, Homo sapiens
  misc_RNA (1)...(19): siRNA sense strand
cacagcagcucgggaaaua

SEQ ID NO: 1341678 - RNA, 19 nt, Homo sapiens
  misc_RNA (1)...(19): siRNA sense strand
gaaauucagugggagacaa

SEQ ID NO: 1341679 - RNA, 19 nt, Homo sapiens
  misc_RNA (1)...(19): siRNA sense strand
cagaauuacugccgagauu

SEQ ID NO: 1341680 - RNA, 19 nt, Homo sapiens
  misc_RNA (1)...(19): siRNA sense strand
ggaaggaaaggaucaguug

SEQ ID NO: 1341681 - RNA, 19 nt, Homo sapiens
  misc_RNA (1)...(19): siRNA sense strand
ggaauggugugauguaugc

SEQ ID NO: 1341682 - RNA, 19 nt, Homo sapiens
  misc_RNA (1)...(19): siRNA sense strand
gaaggucuauccucacagu

SEQ ID NO: 1341683 - RNA, 19 nt, Homo sapiens
  misc_RNA (1)...(19): siRNA sense strand
gcacaagagcguuaucaug

SEQ ID NO: 1341684 - RNA, 19 nt, Homo sapiens
  misc_RNA (1)...(19): siRNA sense strand
gauggagaaugcuggguuu

SEQ ID NO: 1341685 - RNA, 19 nt, Homo sapiens
  misc_RNA (1)...(19): siRNA sense strand
gaugucacuuucaacuuaa

SEQ ID NO: 1341686 - RNA, 19 nt, Homo sapiens
  misc_RNA (1)...(19): siRNA sense strand
gaacagagaaagaaaauug

SEQ ID NO: 1341687 - RNA, 19 nt, Homo sapiens
  misc_RNA (1)...(19): siRNA sense strand
ucaaagagacaacaaauag

SEQ ID NO: 1341688 - RNA, 19 nt, Homo sapiens
  misc_RNA (1)...(19): siRNA sense strand
accaagaaguugccuauaa

SEQ ID NO: 1341689 - RNA, 19 nt, Homo sapiens
  misc_RNA (1)...(19): siRNA sense strand
gaagagaacacagaacuag

SEQ ID NO: 1341690 - RNA, 19 nt, Homo sapiens
  misc_RNA (1)...(19): siRNA sense strand
agacaagguuauuucauga

SEQ ID NO: 1341691 - RNA, 19 nt, Homo sapiens
  misc_RNA (1)...(19): siRNA sense strand
gugaacuugucuccaaaua

SEQ ID NO: 1341692 - RNA, 19 nt, Homo sapiens
  misc_RNA (1)...(19): siRNA sense strand
aauaucaucuuccacacua

SEQ ID NO: 1341693 - RNA, 19 nt, Homo sapiens
  misc_RNA (1)...(19): siRNA sense strand
gaggagaaugcaauauuaa

SEQ ID NO: 1341694 - RNA, 19 nt, Homo sapiens
  misc_RNA (1)...(19): siRNA sense strand
gaugcaauauaucaaccua

SEQ ID NO: 1341695 - RNA, 19 nt, Homo sapiens
  misc_RNA (1)...(19): siRNA sense strand
gaaaggaaggagaaggaaa

SEQ ID NO: 1341696 - RNA, 19 nt, Homo sapiens
  misc_RNA (1)...(19): siRNA sense strand
ucccguagaugcaauauau

SEQ ID NO: 1341697 - RNA, 19 nt, Homo sapiens
  misc_RNA (1)...(19): siRNA sense strand
gaucagaacgaguaugaau

SEQ ID NO: 1341698 - RNA, 19 nt, Homo sapiens
  misc_RNA (1)...(19): siRNA sense strand
caacaaauagcaugguaga

SEQ ID NO: 1341699 - RNA, 19 nt, Homo sapiens
  misc_RNA (1)...(19): siRNA sense strand
gcagggcugugucucaugu

SEQ ID NO: 1341700 - RNA, 19 nt, Homo sapiens
  misc_RNA (1)...(19): siRNA sense strand
ugaggaaguuggaagauca

SEQ ID NO: 1341701 - RNA, 19 nt, Homo sapiens
  misc_RNA (1)...(19): siRNA sense strand
ggaauuaggaggagaaugc

SEQ ID NO: 1341702 - RNA, 19 nt, Homo sapiens
  misc_RNA (1)...(19): siRNA sense strand
caacguuuauucuugaaag

SEQ ID NO: 1341703 - RNA, 19 nt, Homo sapiens
  misc_RNA (1)...(19): siRNA sense strand
gagaaaggaaggagaagga

SEQ ID NO: 1341704 - RNA, 19 nt, Homo sapiens
  misc_RNA (1)...(19): siRNA sense strand
agaagaaagugaggaaguu

SEQ ID NO: 1341705 - RNA, 19 nt, Homo sapiens
  misc_RNA (1)...(19): siRNA sense strand
gcaagaagcacagaauuac

SEQ ID NO: 1341706 - RNA, 19 nt, Homo sapiens
  misc_RNA (1)...(19): siRNA sense strand
gagaacacagaacuaguuu

SEQ ID NO: 1341707 - RNA, 19 nt, Homo sapiens
  misc_RNA (1)...(19): siRNA sense strand
agaacuaguuucagaagga

SEQ ID NO: 1341708 - RNA, 19 nt, Homo sapiens
  misc_RNA (1)...(19): siRNA sense strand
gaugaaccauuacugaaac

SEQ ID NO: 1341709 - RNA, 19 nt, Homo sapiens
  misc_RNA (1)...(19): siRNA sense strand
gagaaugcuggguuuauga

SEQ ID NO: 1341710 - RNA, 19 nt, Homo sapiens
  misc_RNA (1)...(19): siRNA sense strand
gaacauuacauucucacau

SEQ ID NO: 1341711 - RNA, 19 nt, Homo sapiens
  misc_RNA (1)...(19): siRNA sense strand
gaugaacauuacauucuca

SEQ ID NO: 1341712 - RNA, 19 nt, Homo sapiens
  misc_RNA (1)...(19): siRNA sense strand
gagcagguuucccaucauc

SEQ ID NO: 1341713 - RNA, 19 nt, Homo sapiens
  misc_RNA (1)...(19): siRNA sense strand
ucacuuaauucuuccuugu

SEQ ID NO: 1341714 - RNA, 19 nt, Homo sapiens
  misc_RNA (1)...(19): siRNA sense strand
gaggagcacaagagcguua

SEQ ID NO: 1341715 - RNA, 19 nt, Homo sapiens
  misc_RNA (1)...(19): siRNA sense strand
cagcagugaagaugaauuu

SEQ ID NO: 1341716 - RNA, 19 nt, Homo sapiens
  misc_RNA (1)...(19): siRNA sense strand
gaagaaagugaggaaguug

SEQ ID NO: 1341717 - RNA, 19 nt, Homo sapiens
  misc_RNA (1)...(19): siRNA sense strand
gcagugaagaugaauuuua

SEQ ID NO: 1341718 - RNA, 19 nt, Homo sapiens
  misc_RNA (1)...(19): siRNA sense strand
gagcauuagugaccagaag

SEQ ID NO: 1341719 - RNA, 19 nt, Homo sapiens
  misc_RNA (1)...(19): siRNA sense strand
guaguucuuccaacguuua

SEQ ID NO: 1341720 - RNA, 19 nt, Homo sapiens
  misc_RNA (1)...(19): siRNA sense strand
uggaagaucagaacgagua

SEQ ID NO: 1341721 - RNA, 19 nt, Homo sapiens
  misc_RNA (1)...(19): siRNA sense strand
ggacaucaucagacuccua

SEQ ID NO: 1341722 - RNA, 19 nt, Homo sapiens
  misc_RNA (1)...(19): siRNA sense strand
caagguuauuucaugaaga

SEQ ID NO: 1341723 - RNA, 19 nt, Homo sapiens
  misc_RNA (1)...(19): siRNA sense strand
acacuaaacccuucuaugg

SEQ ID NO: 1341724 - RNA, 19 nt, Homo sapiens
  misc_RNA (1)...(19): siRNA sense strand
gauaccacagaaucacuua

SEQ ID NO: 1341725 - RNA, 19 nt, Homo sapiens
  misc_RNA (1)...(19): siRNA sense strand
gcagaagcccgagaaagga

SEQ ID NO: 1341726 - RNA, 19 nt, Homo sapiens
  misc_RNA (1)...(19): siRNA sense strand
acaaauagcaugguagaau

SEQ ID NO: 1341727 - RNA, 19 nt, Homo sapiens
  misc_RNA (1)...(19): siRNA sense strand
gugcaaauaucaucuucca

SEQ ID NO: 1341728 - RNA, 19 nt, Homo sapiens
  misc_RNA (1)...(19): siRNA sense strand
acaauucaaugcucauauc

SEQ ID NO: 1341729 - RNA, 19 nt, Homo sapiens
  misc_RNA (1)...(19): siRNA sense strand
gaagauacaauucaaugcu

SEQ ID NO: 1341730 - RNA, 19 nt, Homo sapiens
  misc_RNA (1)...(19): siRNA sense strand
gaugcugaccuguuugauu

SEQ ID NO: 1341731 - RNA, 19 nt, Homo sapiens
  misc_RNA (1)...(19): siRNA sense strand
cacgugaacuugucuccaa

SEQ ID NO: 1341732 - RNA, 19 nt, Homo sapiens
  misc_RNA (1)...(19): siRNA sense strand
ucaugaagauggagaaugc

SEQ ID NO: 1341733 - RNA, 19 nt, Homo sapiens
  misc_RNA (1)...(19): siRNA sense strand
uuaugaugcugaugaauuc

SEQ ID NO: 1341734 - RNA, 19 nt, Homo sapiens
  misc_RNA (1)...(19): siRNA sense strand
caucucuugucgcagguua

SEQ ID NO: 1341735 - RNA, 19 nt, Homo sapiens
  misc_RNA (1)...(19): siRNA sense strand
gguaguucuuccaacguuu

SEQ ID NO: 1341736 - RNA, 19 nt, Homo sapiens
  misc_RNA (1)...(19): siRNA sense strand
caaagcgcuuaauagauuc

SEQ ID NO: 1341737 - RNA, 19 nt, Homo sapiens
  misc_RNA (1)...(19): siRNA sense strand
caagugaugcugaccuguu

SEQ ID NO: 1341738 - RNA, 19 nt, Homo sapiens
  misc_RNA (1)...(19): siRNA sense strand
ugaugaaccauuacugaaa

SEQ ID NO: 1341739 - RNA, 19 nt, Homo sapiens
  misc_RNA (1)...(19): siRNA sense strand
gggcaagaagcacagaauu

SEQ ID NO: 1341740 - RNA, 19 nt, Homo sapiens
  misc_RNA (1)...(19): siRNA sense strand
cuuccaacguuuauucuug

SEQ ID NO: 1341741 - RNA, 19 nt, Homo sapiens
  misc_RNA (1)...(19): siRNA sense strand
agacuuggaauggaucuua

SEQ ID NO: 1341742 - RNA, 19 nt, Homo sapiens
  misc_RNA (1)...(19): siRNA sense strand
caagagcguuaucaugcau

SEQ ID NO: 1341743 - RNA, 19 nt, Homo sapiens
  misc_RNA (1)...(19): siRNA sense strand
aagugaugcugaccuguuu

SEQ ID NO: 1341744 - RNA, 19 nt, Homo sapiens
  misc_RNA (1)...(19): siRNA sense strand
augcugaccuguuugauuc

SEQ ID NO: 1341745 - RNA, 19 nt, Homo sapiens
  misc_RNA (1)...(19): siRNA sense strand
aaugcuggguuuaugauga

SEQ ID NO: 1341746 - RNA, 19 nt, Homo sapiens
  misc_RNA (1)...(19): siRNA sense strand
gaaguuggaagaucagaac

SEQ ID NO: 1341747 - RNA, 19 nt, Homo sapiens
  misc_RNA (1)...(19): siRNA sense strand
agacuaugaugaacauuac

SEQ ID NO: 1341748 - RNA, 19 nt, Homo sapiens
  misc_RNA (1)...(19): siRNA sense strand
agagaacacagaacuaguu

SEQ ID NO: 1341749 - RNA, 19 nt, Homo sapiens
  misc_RNA (1)...(19): siRNA sense strand
ucccaaggaucgaaugguu

SEQ ID NO: 1341750 - RNA, 19 nt, Homo sapiens
  misc_RNA (1)...(19): siRNA sense strand
ggaccuguuugugagcauu

SEQ ID NO: 1341751 - RNA, 19 nt, Homo sapiens
  misc_RNA (1)...(19): siRNA sense strand
ugauucacaugaugacaga

SEQ ID NO: 1341752 - RNA, 19 nt, Homo sapiens
  misc_RNA (1)...(19): siRNA sense strand
uaugaugaaccauuacuga

SEQ ID NO: 1341753 - RNA, 19 nt, Homo sapiens
  misc_RNA (1)...(19): siRNA sense strand
ggaggagaaugcaauauua

SEQ ID NO: 1341754 - RNA, 19 nt, Homo sapiens
  misc_RNA (1)...(19): siRNA sense strand
ccaaagcgcuuaauagauu

SEQ ID NO: 1341755 - RNA, 19 nt, Homo sapiens
  misc_RNA (1)...(19): siRNA sense strand
ggaugucacuuucaacuua

SEQ ID NO: 1341756 - RNA, 19 nt, Homo sapiens
  misc_RNA (1)...(19): siRNA sense strand
caaagaagaugaacagaga

SEQ ID NO: 1341757 - RNA, 19 nt, Homo sapiens
  misc_RNA (1)...(19): siRNA sense strand
gaacuugucuccaaauaca

SEQ ID NO: 1341758 - RNA, 19 nt, Homo sapiens
  misc_RNA (1)...(19): siRNA sense strand
gcucauaucuggaccaaau

SEQ ID NO: 1341759 - RNA, 19 nt, Homo sapiens
  misc_RNA (1)...(19): siRNA sense strand
ggaaggaugucacuuucaa

SEQ ID NO: 1341760 - RNA, 19 nt, Homo sapiens
  misc_RNA (1)...(19): siRNA sense strand
gcacaggcuugaagaaaga

SEQ ID NO: 1341761 - RNA, 19 nt, Homo sapiens
  misc_RNA (1)...(19): siRNA sense strand
gaaaggaucaguugccaaa

SEQ ID NO: 1341762 - RNA, 19 nt, Homo sapiens
  misc_RNA (1)...(19): siRNA sense strand
gagacaagguuauuucaug

SEQ ID NO: 1341763 - RNA, 19 nt, Homo sapiens
  misc_RNA (1)...(19): siRNA sense strand
agaaauguaugcagacuuu

SEQ ID NO: 1341764 - RNA, 19 nt, Homo sapiens
  misc_RNA (1)...(19): siRNA sense strand
gaacacagaacuaguuuca

SEQ ID NO: 1341765 - RNA, 19 nt, Homo sapiens
  misc_RNA (1)...(19): siRNA sense strand
ggaauggaauggugugaug

SEQ ID NO: 1341766 - RNA, 19 nt, Homo sapiens
  misc_RNA (1)...(19): siRNA sense strand
acacagaacuaguuucaga

SEQ ID NO: 1341767 - RNA, 19 nt, Homo sapiens
  misc_RNA (1)...(19): siRNA sense strand
gaaguugccuauaaucaag

SEQ ID NO: 1341768 - RNA, 19 nt, Homo sapiens
  misc_RNA (1)...(19): siRNA sense strand
caaauacagucccagaguu

SEQ ID NO: 1341769 - RNA, 19 nt, Homo sapiens
  misc_RNA (1)...(19): siRNA sense strand
ccaagaaguugccuauaau

SEQ ID NO: 1341770 - RNA, 19 nt, Homo sapiens
  misc_RNA (1)...(19): siRNA sense strand
gacaacaaauagcauggua

SEQ ID NO: 1341771 - RNA, 19 nt, Homo sapiens
  misc_RNA (1)...(19): siRNA sense strand
caaaugauacugaagagaa

SEQ ID NO: 1341772 - RNA, 19 nt, Homo sapiens
  misc_RNA (1)...(19): siRNA sense strand
ggcaagaagcacagaauua

SEQ ID NO: 1341773 - RNA, 19 nt, Homo sapiens
  misc_RNA (1)...(19): siRNA sense strand
ggagaaugcuggguuuaug

SEQ ID NO: 1341774 - RNA, 19 nt, Homo sapiens
  misc_RNA (1)...(19): siRNA sense strand
caaauagcaugguagaauc

SEQ ID NO: 1341775 - RNA, 19 nt, Homo sapiens
  misc_RNA (1)...(19): siRNA sense strand
ggaaggagaaggaaauuca

SEQ ID NO: 1341776 - RNA, 19 nt, Homo sapiens
  misc_RNA (1)...(19): siRNA sense strand
gaagaugaacagagaaaga

SEQ ID NO: 1341777 - RNA, 19 nt, Homo sapiens
  misc_RNA (1)...(19): siRNA sense strand
cacagcagcucgggaaaua

SEQ ID NO: 1341778 - RNA, 19 nt, Homo sapiens
  misc_RNA (1)...(19): siRNA sense strand
gaaauucagugggagacaa

SEQ ID NO: 1341779 - RNA, 19 nt, Homo sapiens
  misc_RNA (1)...(19): siRNA sense strand
cagaauuacugccgagauu

SEQ ID NO: 1341780 - RNA, 19 nt, Homo sapiens
  misc_RNA (1)...(19): siRNA sense strand
ggaaggaaaggaucaguug

SEQ ID NO: 1341781 - RNA, 19 nt, Homo sapiens
  misc_RNA (1)...(19): siRNA sense strand
ggaauggugugauguaugc

SEQ ID NO: 1341782 - RNA, 19 nt, Homo sapiens
  misc_RNA (1)...(19): siRNA sense strand
gaaggucuauccucacagu

SEQ ID NO: 1341783 - RNA, 19 nt, Homo sapiens
  misc_RNA (1)...(19): siRNA sense strand
gcacaagagcguuaucaug

SEQ ID NO: 1341784 - RNA, 19 nt, Homo sapiens
  misc_RNA (1)...(19): siRNA sense strand
gauggagaaugcuggguuu

SEQ ID NO: 1341785 - RNA, 19 nt, Homo sapiens
  misc_RNA (1)...(19): siRNA sense strand
gaugucacuuucaacuuaa

SEQ ID NO: 1341786 - RNA, 19 nt, Homo sapiens
  misc_RNA (1)...(19): siRNA sense strand
gaacagagaaagaaaauug

SEQ ID NO: 1341787 - RNA, 19 nt, Homo sapiens
  misc_RNA (1)...(19): siRNA sense strand
ucaaagagacaacaaauag

SEQ ID NO: 1341788 - RNA, 19 nt, Homo sapiens
  misc_RNA (1)...(19): siRNA sense strand
accaagaaguugccuauaa

SEQ ID NO: 1341789 - RNA, 19 nt, Homo sapiens
  misc_RNA (1)...(19): siRNA sense strand
gaagagaacacagaacuag

SEQ ID NO: 1341790 - RNA, 19 nt, Homo sapiens
  misc_RNA (1)...(19): siRNA sense strand
agacaagguuauuucauga

SEQ ID NO: 1341791 - RNA, 19 nt, Homo sapiens
  misc_RNA (1)...(19): siRNA sense strand
gugaacuugucuccaaaua

SEQ ID NO: 1341792 - RNA, 19 nt, Homo sapiens
  misc_RNA (1)...(19): siRNA sense strand
aauaucaucuuccacacua

SEQ ID NO: 1341793 - RNA, 19 nt, Homo sapiens
  misc_RNA (1)...(19): siRNA sense strand
gaggagaaugcaauauuaa

SEQ ID NO: 1341794 - RNA, 19 nt, Homo sapiens
  misc_RNA (1)...(19): siRNA sense strand
gaugcaauauaucaaccua

SEQ ID NO: 1341795 - RNA, 19 nt, Homo sapiens
  misc_RNA (1)...(19): siRNA sense strand
gaaaggaaggagaaggaaa

SEQ ID NO: 1341796 - RNA, 19 nt, Homo sapiens
  misc_RNA (1)...(19): siRNA sense strand
ucccguagaugcaauauau

SEQ ID NO: 1341797 - RNA, 19 nt, Homo sapiens
  misc_RNA (1)...(19): siRNA sense strand
gaucagaacgaguaugaau

SEQ ID NO: 1341798 - RNA, 19 nt, Homo sapiens
  misc_RNA (1)...(19): siRNA sense strand
caacaaauagcaugguaga

SEQ ID NO: 1341799 - RNA, 19 nt, Homo sapiens
  misc_RNA (1)...(19): siRNA sense strand
gcagggcugugucucaugu

SEQ ID NO: 1341800 - RNA, 19 nt, Homo sapiens
  misc_RNA (1)...(19): siRNA sense strand
ugaggaaguuggaagauca

SEQ ID NO: 1341801 - RNA, 19 nt, Homo sapiens
  misc_RNA (1)...(19): siRNA sense strand
ggaauuaggaggagaaugc

SEQ ID NO: 1341802 - RNA, 19 nt, Homo sapiens
  misc_RNA (1)...(19): siRNA sense strand
caacguuuauucuugaaag

SEQ ID NO: 1341803 - RNA, 19 nt, Homo sapiens
  misc_RNA (1)...(19): siRNA sense strand
gagaaaggaaggagaagga

SEQ ID NO: 1341804 - RNA, 19 nt, Homo sapiens
  misc_RNA (1)...(19): siRNA sense strand
agaagaaagugaggaaguu

SEQ ID NO: 1341805 - RNA, 19 nt, Homo sapiens
  misc_RNA (1)...(19): siRNA sense strand
gcaagaagcacagaauuac

SEQ ID NO: 1341806 - RNA, 19 nt, Homo sapiens
  misc_RNA (1)...(19): siRNA sense strand
gagaacacagaacuaguuu

SEQ ID NO: 1341807 - RNA, 19 nt, Homo sapiens
  misc_RNA (1)...(19): siRNA sense strand
agaacuaguuucagaagga

SEQ ID NO: 1341808 - RNA, 19 nt, Homo sapiens
  misc_RNA (1)...(19): siRNA sense strand
gaugaaccauuacugaaac

SEQ ID NO: 1341809 - RNA, 19 nt, Homo sapiens
  misc_RNA (1)...(19): siRNA sense strand
gagaaugcuggguuuauga

SEQ ID NO: 1341810 - RNA, 19 nt, Homo sapiens
  misc_RNA (1)...(19): siRNA sense strand
gaacauuacauucucacau

SEQ ID NO: 1341811 - RNA, 19 nt, Homo sapiens
  misc_RNA (1)...(19): siRNA sense strand
gaugaacauuacauucuca

SEQ ID NO: 1341812 - RNA, 19 nt, Homo sapiens
  misc_RNA (1)...(19): siRNA sense strand
gagcagguuucccaucauc

SEQ ID NO: 1341813 - RNA, 19 nt, Homo sapiens
  misc_RNA (1)...(19): siRNA sense strand
ucacuuaauucuuccuugu

SEQ ID NO: 1341814 - RNA, 19 nt, Homo sapiens
  misc_RNA (1)...(19): siRNA sense strand
gaggagcacaagagcguua

SEQ ID NO: 1341815 - RNA, 19 nt, Homo sapiens
  misc_RNA (1)...(19): siRNA sense strand
cagcagugaagaugaauuu

SEQ ID NO: 1341816 - RNA, 19 nt, Homo sapiens
  misc_RNA (1)...(19): siRNA sense strand
gaagaaagugaggaaguug

SEQ ID NO: 1341817 - RNA, 19 nt, Homo sapiens
  misc_RNA (1)...(19): siRNA sense strand
gcagugaagaugaauuuua

SEQ ID NO: 1341818 - RNA, 19 nt, Homo sapiens
  misc_RNA (1)...(19): siRNA sense strand
gagcauuagugaccagaag

SEQ ID NO: 1341819 - RNA, 19 nt, Homo sapiens
  misc_RNA (1)...(19): siRNA sense strand
guaguucuuccaacguuua

SEQ ID NO: 1341820 - RNA, 19 nt, Homo sapiens
  misc_RNA (1)...(19): siRNA sense strand
uggaagaucagaacgagua

SEQ ID NO: 1341821 - RNA, 19 nt, Homo sapiens
  misc_RNA (1)...(19): siRNA sense strand
ggacaucaucagacuccua

SEQ ID NO: 1341822 - RNA, 19 nt, Homo sapiens
  misc_RNA (1)...(19): siRNA sense strand
caagguuauuucaugaaga

SEQ ID NO: 1341823 - RNA, 19 nt, Homo sapiens
  misc_RNA (1)...(19): siRNA sense strand
acacuaaacccuucuaugg

SEQ ID NO: 1341824 - RNA, 19 nt, Homo sapiens
  misc_RNA (1)...(19): siRNA sense strand
gauaccacagaaucacuua

SEQ ID NO: 1341825 - RNA, 19 nt, Homo sapiens
  misc_RNA (1)...(19): siRNA sense strand
gcagaagcccgagaaagga

SEQ ID NO: 1341826 - RNA, 19 nt, Homo sapiens
  misc_RNA (1)...(19): siRNA sense strand
acaaauagcaugguagaau

SEQ ID NO: 1341827 - RNA, 19 nt, Homo sapiens
  misc_RNA (1)...(19): siRNA sense strand
gugcaaauaucaucuucca

SEQ ID NO: 1341828 - RNA, 19 nt, Homo sapiens
  misc_RNA (1)...(19): siRNA sense strand
acaauucaaugcucauauc

SEQ ID NO: 1341829 - RNA, 19 nt, Homo sapiens
  misc_RNA (1)...(19): siRNA sense strand
gaagauacaauucaaugcu

SEQ ID NO: 1341830 - RNA, 19 nt, Homo sapiens
  misc_RNA (1)...(19): siRNA sense strand
gaugcugaccuguuugauu

SEQ ID NO: 1341831 - RNA, 19 nt, Homo sapiens
  misc_RNA (1)...(19): siRNA sense strand
cacgugaacuugucuccaa

SEQ ID NO: 1341832 - RNA, 19 nt, Homo sapiens
  misc_RNA (1)...(19): siRNA sense strand
ucaugaagauggagaaugc

SEQ ID NO: 1341833 - RNA, 19 nt, Homo sapiens
  misc_RNA (1)...(19): siRNA sense strand
uuaugaugcugaugaauuc

SEQ ID NO: 1341834 - RNA, 19 nt, Homo sapiens
  misc_RNA (1)...(19): siRNA sense strand
caucucuugucgcagguua

SEQ ID NO: 1341835 - RNA, 19 nt, Homo sapiens
  misc_RNA (1)...(19): siRNA sense strand
gguaguucuuccaacguuu

SEQ ID NO: 1341836 - RNA, 19 nt, Homo sapiens
  misc_RNA (1)...(19): siRNA sense strand
caaagcgcuuaauagauuc

SEQ ID NO: 1341837 - RNA, 19 nt, Homo sapiens
  misc_RNA (1)...(19): siRNA sense strand
caagugaugcugaccuguu

SEQ ID NO: 1341838 - RNA, 19 nt, Homo sapiens
  misc_RNA (1)...(19): siRNA sense strand
ugaugaaccauuacugaaa

SEQ ID NO: 1341839 - RNA, 19 nt, Homo sapiens
  misc_RNA (1)...(19): siRNA sense strand
gggcaagaagcacagaauu

SEQ ID NO: 1341840 - RNA, 19 nt, Homo sapiens
  misc_RNA (1)...(19): siRNA sense strand
cuuccaacguuuauucuug

SEQ ID NO: 1341841 - RNA, 19 nt, Homo sapiens
  misc_RNA (1)...(19): siRNA sense strand
agacuuggaauggaucuua

SEQ ID NO: 1341842 - RNA, 19 nt, Homo sapiens
  misc_RNA (1)...(19): siRNA sense strand
caagagcguuaucaugcau

SEQ ID NO: 1341843 - RNA, 19 nt, Homo sapiens
  misc_RNA (1)...(19): siRNA sense strand
aagugaugcugaccuguuu

SEQ ID NO: 1341844 - RNA, 19 nt, Homo sapiens
  misc_RNA (1)...(19): siRNA sense strand
augcugaccuguuugauuc

SEQ ID NO: 1341845 - RNA, 19 nt, Homo sapiens
  misc_RNA (1)...(19): siRNA sense strand
aaugcuggguuuaugauga

SEQ ID NO: 1341846 - RNA, 19 nt, Homo sapiens
  misc_RNA (1)...(19): siRNA sense strand
gaaguuggaagaucagaac

SEQ ID NO: 1341847 - RNA, 19 nt, Homo sapiens
  misc_RNA (1)...(19): siRNA sense strand
agacuaugaugaacauuac

SEQ ID NO: 1341848 - RNA, 19 nt, Homo sapiens
  misc_RNA (1)...(19): siRNA sense strand
agagaacacagaacuaguu

SEQ ID NO: 1341849 - RNA, 19 nt, Homo sapiens
  misc_RNA (1)...(19): siRNA sense strand
ucccaaggaucgaaugguu

SEQ ID NO: 1341850 - RNA, 19 nt, Homo sapiens
  misc_RNA (1)...(19): siRNA sense strand
ggaccuguuugugagcauu

SEQ ID NO: 1341851 - RNA, 19 nt, Homo sapiens
  misc_RNA (1)...(19): siRNA sense strand
ugauucacaugaugacaga

SEQ ID NO: 1341852 - RNA, 19 nt, Homo sapiens
  misc_RNA (1)...(19): siRNA sense strand
uaugaugaaccauuacuga

SEQ ID NO: 1341853 - RNA, 19 nt, Homo sapiens
  misc_RNA (1)...(19): siRNA sense strand
ggaggagaaugcaauauua

SEQ ID NO: 1341854 - RNA, 19 nt, Homo sapiens
  misc_RNA (1)...(19): siRNA sense strand
ccaaagcgcuuaauagauu

SEQ ID NO: 1341855 - RNA, 19 nt, Homo sapiens
  misc_RNA (1)...(19): siRNA sense strand
ggaugucacuuucaacuua

SEQ ID NO: 1341856 - RNA, 19 nt, Homo sapiens
  misc_RNA (1)...(19): siRNA sense strand
caaagaagaugaacagaga

SEQ ID NO: 1341857 - RNA, 19 nt, Homo sapiens
  misc_RNA (1)...(19): siRNA sense strand
gaacuugucuccaaauaca

SEQ ID NO: 1341858 - RNA, 19 nt, Homo sapiens
  misc_RNA (1)...(19): siRNA sense strand
gcucauaucuggaccaaau

SEQ ID NO: 1341859 - RNA, 19 nt, Homo sapiens
  misc_RNA (1)...(19): siRNA sense strand
ggaaggaugucacuuucaa

SEQ ID NO: 1341860 - RNA, 19 nt, Homo sapiens
  misc_RNA (1)...(19): siRNA sense strand
gcacaggcuugaagaaaga

SEQ ID NO: 1341861 - RNA, 19 nt, Homo sapiens
  misc_RNA (1)...(19): siRNA sense strand
gaaaggaucaguugccaaa

SEQ ID NO: 1341862 - RNA, 19 nt, Homo sapiens
  misc_RNA (1)...(19): siRNA sense strand
gagacaagguuauuucaug

SEQ ID NO: 1341863 - RNA, 19 nt, Homo sapiens
  misc_RNA (1)...(19): siRNA sense strand
agaaauguaugcagacuuu

SEQ ID NO: 1341864 - RNA, 19 nt, Homo sapiens
  misc_RNA (1)...(19): siRNA sense strand
gaacacagaacuaguuuca

SEQ ID NO: 1341865 - RNA, 19 nt, Homo sapiens
  misc_RNA (1)...(19): siRNA sense strand
ggaauggaauggugugaug

SEQ ID NO: 1341866 - RNA, 19 nt, Homo sapiens
  misc_RNA (1)...(19): siRNA sense strand
acacagaacuaguuucaga

SEQ ID NO: 1341867 - RNA, 19 nt, Homo sapiens
  misc_RNA (1)...(19): siRNA sense strand
gaaguugccuauaaucaag

SEQ ID NO: 1341868 - RNA, 19 nt, Homo sapiens
  misc_RNA (1)...(19): siRNA sense strand
caaauacagucccagaguu

SEQ ID NO: 1341869 - RNA, 19 nt, Homo sapiens
  misc_RNA (1)...(19): siRNA sense strand
ccaagaaguugccuauaau

SEQ ID NO: 1341870 - RNA, 19 nt, Homo sapiens
  misc_RNA (1)...(19): siRNA sense strand
gacaacaaauagcauggua

SEQ ID NO: 1341871 - RNA, 19 nt, Homo sapiens
  misc_RNA (1)...(19): siRNA sense strand
caaaugauacugaagagaa

SEQ ID NO: 1341872 - RNA, 19 nt, Homo sapiens
  misc_RNA (1)...(19): siRNA sense strand
ggcaagaagcacagaauua

SEQ ID NO: 1341873 - RNA, 19 nt, Homo sapiens
  misc_RNA (1)...(19): siRNA sense strand
ggagaaugcuggguuuaug

SEQ ID NO: 1341874 - RNA, 19 nt, Homo sapiens
  misc_RNA (1)...(19): siRNA sense strand
caaauagcaugguagaauc

SEQ ID NO: 1341875 - RNA, 19 nt, Homo sapiens
  misc_RNA (1)...(19): siRNA sense strand
ggaaggagaaggaaauuca

SEQ ID NO: 1341876 - RNA, 19 nt, Homo sapiens
  misc_RNA (1)...(19): siRNA sense strand
gaagaugaacagagaaaga

SEQ ID NO: 1341877 - RNA, 19 nt, Homo sapiens
  misc_RNA (1)...(19): siRNA sense strand
cacagcagcucgggaaaua

SEQ ID NO: 1341878 - RNA, 19 nt, Homo sapiens
  misc_RNA (1)...(19): siRNA sense strand
gaaauucagugggagacaa

SEQ ID NO: 1341879 - RNA, 19 nt, Homo sapiens
  misc_RNA (1)...(19): siRNA sense strand
cagaauuacugccgagauu

SEQ ID NO: 1341880 - RNA, 19 nt, Homo sapiens
  misc_RNA (1)...(19): siRNA sense strand
ggaaggaaaggaucaguug

SEQ ID NO: 1341881 - RNA, 19 nt, Homo sapiens
  misc_RNA (1)...(19): siRNA sense strand
ggaauggugugauguaugc

SEQ ID NO: 1341882 - RNA, 19 nt, Homo sapiens
  misc_RNA (1)...(19): siRNA sense strand
gaaggucuauccucacagu

SEQ ID NO: 1341883 - RNA, 19 nt, Homo sapiens
  misc_RNA (1)...(19): siRNA sense strand
gcacaagagcguuaucaug

SEQ ID NO: 1341884 - RNA, 19 nt, Homo sapiens
  misc_RNA (1)...(19): siRNA sense strand
gauggagaaugcuggguuu

SEQ ID NO: 1341885 - RNA, 19 nt, Homo sapiens
  misc_RNA (1)...(19): siRNA sense strand
gaugucacuuucaacuuaa

SEQ ID NO: 1341886 - RNA, 19 nt, Homo sapiens
  misc_RNA (1)...(19): siRNA sense strand
gaacagagaaagaaaauug

SEQ ID NO: 1341887 - RNA, 19 nt, Homo sapiens
  misc_RNA (1)...(19): siRNA sense strand
ucaaagagacaacaaauag

SEQ ID NO: 1341888 - RNA, 19 nt, Homo sapiens
  misc_RNA (1)...(19): siRNA sense strand
accaagaaguugccuauaa

SEQ ID NO: 1341889 - RNA, 19 nt, Homo sapiens
  misc_RNA (1)...(19): siRNA sense strand
gaagagaacacagaacuag

SEQ ID NO: 1341890 - RNA, 19 nt, Homo sapiens
  misc_RNA (1)...(19): siRNA sense strand
agacaagguuauuucauga

SEQ ID NO: 1341891 - RNA, 19 nt, Homo sapiens
  misc_RNA (1)...(19): siRNA sense strand
gugaacuugucuccaaaua

SEQ ID NO: 1341892 - RNA, 19 nt, Homo sapiens
  misc_RNA (1)...(19): siRNA sense strand
aauaucaucuuccacacua

SEQ ID NO: 1341893 - RNA, 19 nt, Homo sapiens
  misc_RNA (1)...(19): siRNA sense strand
gaggagaaugcaauauuaa

SEQ ID NO: 1341894 - RNA, 19 nt, Homo sapiens
  misc_RNA (1)...(19): siRNA sense strand
gaugcaauauaucaaccua

SEQ ID NO: 1341895 - RNA, 19 nt, Homo sapiens
  misc_RNA (1)...(19): siRNA sense strand
gaaaggaaggagaaggaaa

SEQ ID NO: 1341896 - RNA, 19 nt, Homo sapiens
  misc_RNA (1)...(19): siRNA sense strand
ucccguagaugcaauauau

SEQ ID NO: 1341897 - RNA, 19 nt, Homo sapiens
  misc_RNA (1)...(19): siRNA sense strand
gaucagaacgaguaugaau

SEQ ID NO: 1341898 - RNA, 19 nt, Homo sapiens
  misc_RNA (1)...(19): siRNA sense strand
caacaaauagcaugguaga

SEQ ID NO: 1341899 - RNA, 19 nt, Homo sapiens
  misc_RNA (1)...(19): siRNA sense strand
gcagggcugugucucaugu

SEQ ID NO: 1341900 - RNA, 19 nt, Homo sapiens
  misc_RNA (1)...(19): siRNA sense strand
ugaggaaguuggaagauca

SEQ ID NO: 1341901 - RNA, 19 nt, Homo sapiens
  misc_RNA (1)...(19): siRNA sense strand
ggaauuaggaggagaaugc

SEQ ID NO: 1341902 - RNA, 19 nt, Homo sapiens
  misc_RNA (1)...(19): siRNA sense strand
caacguuuauucuugaaag

SEQ ID NO: 1341903 - RNA, 19 nt, Homo sapiens
  misc_RNA (1)...(19): siRNA sense strand
gagaaaggaaggagaagga

SEQ ID NO: 1341904 - RNA, 19 nt, Homo sapiens
  misc_RNA (1)...(19): siRNA sense strand
agaagaaagugaggaaguu

SEQ ID NO: 1341905 - RNA, 19 nt, Homo sapiens
  misc_RNA (1)...(19): siRNA sense strand
gcaagaagcacagaauuac

SEQ ID NO: 1341906 - RNA, 19 nt, Homo sapiens
  misc_RNA (1)...(19): siRNA sense strand
gagaacacagaacuaguuu

SEQ ID NO: 1341907 - RNA, 19 nt, Homo sapiens
  misc_RNA (1)...(19): siRNA sense strand
agaacuaguuucagaagga

SEQ ID NO: 1341908 - RNA, 19 nt, Homo sapiens
  misc_RNA (1)...(19): siRNA sense strand
gaugaaccauuacugaaac

SEQ ID NO: 1341909 - RNA, 19 nt, Homo sapiens
  misc_RNA (1)...(19): siRNA sense strand
gagaaugcuggguuuauga

SEQ ID NO: 1341910 - RNA, 19 nt, Homo sapiens
  misc_RNA (1)...(19): siRNA sense strand
gaacauuacauucucacau

SEQ ID NO: 1341911 - RNA, 19 nt, Homo sapiens
  misc_RNA (1)...(19): siRNA sense strand
gaugaacauuacauucuca

SEQ ID NO: 1341912 - RNA, 19 nt, Homo sapiens
  misc_RNA (1)...(19): siRNA sense strand
gagcagguuucccaucauc

SEQ ID NO: 1341913 - RNA, 19 nt, Homo sapiens
  misc_RNA (1)...(19): siRNA sense strand
ucacuuaauucuuccuugu

SEQ ID NO: 1341914 - RNA, 19 nt, Homo sapiens
  misc_RNA (1)...(19): siRNA sense strand
gaggagcacaagagcguua

SEQ ID NO: 1341915 - RNA, 19 nt, Homo sapiens
  misc_RNA (1)...(19): siRNA sense strand
cagcagugaagaugaauuu

SEQ ID NO: 1341916 - RNA, 19 nt, Homo sapiens
  misc_RNA (1)...(19): siRNA sense strand
gaagaaagugaggaaguug

SEQ ID NO: 1341917 - RNA, 19 nt, Homo sapiens
  misc_RNA (1)...(19): siRNA sense strand
gcagugaagaugaauuuua

SEQ ID NO: 1341918 - RNA, 19 nt, Homo sapiens
  misc_RNA (1)...(19): siRNA sense strand
gagcauuagugaccagaag

SEQ ID NO: 1341919 - RNA, 19 nt, Homo sapiens
  misc_RNA (1)...(19): siRNA sense strand
guaguucuuccaacguuua

SEQ ID NO: 1341920 - RNA, 19 nt, Homo sapiens
  misc_RNA (1)...(19): siRNA sense strand
uggaagaucagaacgagua

SEQ ID NO: 1341921 - RNA, 19 nt, Homo sapiens
  misc_RNA (1)...(19): siRNA sense strand
ggacaucaucagacuccua

SEQ ID NO: 1341922 - RNA, 19 nt, Homo sapiens
  misc_RNA (1)...(19): siRNA sense strand
caagguuauuucaugaaga

SEQ ID NO: 1341923 - RNA, 19 nt, Homo sapiens
  misc_RNA (1)...(19): siRNA sense strand
acacuaaacccuucuaugg

SEQ ID NO: 1341924 - RNA, 19 nt, Homo sapiens
  misc_RNA (1)...(19): siRNA sense strand
gauaccacagaaucacuua

SEQ ID NO: 1341925 - RNA, 19 nt, Homo sapiens
  misc_RNA (1)...(19): siRNA sense strand
gcagaagcccgagaaagga

SEQ ID NO: 1341926 - RNA, 19 nt, Homo sapiens
  misc_RNA (1)...(19): siRNA sense strand
acaaauagcaugguagaau

SEQ ID NO: 1341927 - RNA, 19 nt, Homo sapiens
  misc_RNA (1)...(19): siRNA sense strand
gugcaaauaucaucuucca

SEQ ID NO: 1341928 - RNA, 19 nt, Homo sapiens
  misc_RNA (1)...(19): siRNA sense strand
acaauucaaugcucauauc

SEQ ID NO: 1341929 - RNA, 19 nt, Homo sapiens
  misc_RNA (1)...(19): siRNA sense strand
gaagauacaauucaaugcu

SEQ ID NO: 1341930 - RNA, 19 nt, Homo sapiens
  misc_RNA (1)...(19): siRNA sense strand
gaugcugaccuguuugauu

SEQ ID NO: 1341931 - RNA, 19 nt, Homo sapiens
  misc_RNA (1)...(19): siRNA sense strand
cacgugaacuugucuccaa

SEQ ID NO: 1341932 - RNA, 19 nt, Homo sapiens
  misc_RNA (1)...(19): siRNA sense strand
ucaugaagauggagaaugc

SEQ ID NO: 1341933 - RNA, 19 nt, Homo sapiens
  misc_RNA (1)...(19): siRNA sense strand
uuaugaugcugaugaauuc

SEQ ID NO: 1341934 - RNA, 19 nt, Homo sapiens
  misc_RNA (1)...(19): siRNA sense strand
caucucuugucgcagguua

SEQ ID NO: 1341935 - RNA, 19 nt, Homo sapiens
  misc_RNA (1)...(19): siRNA sense strand
gguaguucuuccaacguuu

SEQ ID NO: 1341936 - RNA, 19 nt, Homo sapiens
  misc_RNA (1)...(19): siRNA sense strand
caaagcgcuuaauagauuc

SEQ ID NO: 1341937 - RNA, 19 nt, Homo sapiens
  misc_RNA (1)...(19): siRNA sense strand
caagugaugcugaccuguu

SEQ ID NO: 1341938 - RNA, 19 nt, Homo sapiens
  misc_RNA (1)...(19): siRNA sense strand
ugaugaaccauuacugaaa

SEQ ID NO: 1341939 - RNA, 19 nt, Homo sapiens
  misc_RNA (1)...(19): siRNA sense strand
gggcaagaagcacagaauu

SEQ ID NO: 1341940 - RNA, 19 nt, Homo sapiens
  misc_RNA (1)...(19): siRNA sense strand
cuuccaacguuuauucuug

SEQ ID NO: 1341941 - RNA, 19 nt, Homo sapiens
  misc_RNA (1)...(19): siRNA sense strand
agacuuggaauggaucuua

SEQ ID NO: 1341942 - RNA, 19 nt, Homo sapiens
  misc_RNA (1)...(19): siRNA sense strand
caagagcguuaucaugcau

SEQ ID NO: 1341943 - RNA, 19 nt, Homo sapiens
  misc_RNA (1)...(19): siRNA sense strand
aagugaugcugaccuguuu

SEQ ID NO: 1341944 - RNA, 19 nt, Homo sapiens
  misc_RNA (1)...(19): siRNA sense strand
augcugaccuguuugauuc

SEQ ID NO: 1341945 - RNA, 19 nt, Homo sapiens
  misc_RNA (1)...(19): siRNA sense strand
aaugcuggguuuaugauga

SEQ ID NO: 1341946 - RNA, 19 nt, Homo sapiens
  misc_RNA (1)...(19): siRNA sense strand
gaaguuggaagaucagaac

SEQ ID NO: 1341947 - RNA, 19 nt, Homo sapiens
  misc_RNA (1)...(19): siRNA sense strand
agacuaugaugaacauuac

SEQ ID NO: 1341948 - RNA, 19 nt, Homo sapiens
  misc_RNA (1)...(19): siRNA sense strand
agagaacacagaacuaguu

SEQ ID NO: 1341949 - RNA, 19 nt, Homo sapiens
  misc_RNA (1)...(19): siRNA sense strand
ucccaaggaucgaaugguu

SEQ ID NO: 1341950 - RNA, 19 nt, Homo sapiens
  misc_RNA (1)...(19): siRNA sense strand
ggaccuguuugugagcauu

SEQ ID NO: 1341951 - RNA, 19 nt, Homo sapiens
  misc_RNA (1)...(19): siRNA sense strand
ugauucacaugaugacaga

SEQ ID NO: 1341952 - RNA, 19 nt, Homo sapiens
  misc_RNA (1)...(19): siRNA sense strand
uaugaugaaccauuacuga

SEQ ID NO: 1341953 - RNA, 19 nt, Homo sapiens
  misc_RNA (1)...(19): siRNA sense strand
ggaggagaaugcaauauua

SEQ ID NO: 1341954 - RNA, 19 nt, Homo sapiens
  misc_RNA (1)...(19): siRNA sense strand
ccaaagcgcuuaauagauu

SEQ ID NO: 1341955 - RNA, 19 nt, Homo sapiens
  misc_RNA (1)...(19): siRNA sense strand
ggaugucacuuucaacuua

SEQ ID NO: 1341956 - RNA, 19 nt, Homo sapiens
  misc_RNA (1)...(19): siRNA sense strand
caaagaagaugaacagaga

SEQ ID NO: 1341957 - RNA, 19 nt, Homo sapiens
  misc_RNA (1)...(19): siRNA sense strand
gaacuugucuccaaauaca

SEQ ID NO: 1341958 - RNA, 19 nt, Homo sapiens
  misc_RNA (1)...(19): siRNA sense strand
gcucauaucuggaccaaau

SEQ ID NO: 1341959 - RNA, 19 nt, Homo sapiens
  misc_RNA (1)...(19): siRNA sense strand
ggaaggaugucacuuucaa

SEQ ID NO: 1341960 - RNA, 19 nt, Homo sapiens
  misc_RNA (1)...(19): siRNA sense strand
gcacaggcuugaagaaaga

SEQ ID NO: 1341961 - RNA, 19 nt, Homo sapiens
  misc_RNA (1)...(19): siRNA sense strand
gaaaggaucaguugccaaa

SEQ ID NO: 1341962 - RNA, 19 nt, Homo sapiens
  misc_RNA (1)...(19): siRNA sense strand
gagacaagguuauuucaug

SEQ ID NO: 1341963 - RNA, 19 nt, Homo sapiens
  misc_RNA (1)...(19): siRNA sense strand
agaaauguaugcagacuuu

SEQ ID NO: 1341964 - RNA, 19 nt, Homo sapiens
  misc_RNA (1)...(19): siRNA sense strand
gaacacagaacuaguuuca

SEQ ID NO: 1341965 - RNA, 19 nt, Homo sapiens
  misc_RNA (1)...(19): siRNA sense strand
ggaauggaauggugugaug

SEQ ID NO: 1341966 - RNA, 19 nt, Homo sapiens
  misc_RNA (1)...(19): siRNA sense strand
acacagaacuaguuucaga

SEQ ID NO: 1341967 - RNA, 19 nt, Homo sapiens
  misc_RNA (1)...(19): siRNA sense strand
gaaguugccuauaaucaag

SEQ ID NO: 1341968 - RNA, 19 nt, Homo sapiens
  misc_RNA (1)...(19): siRNA sense strand
caaauacagucccagaguu

SEQ ID NO: 1341969 - RNA, 19 nt, Homo sapiens
  misc_RNA (1)...(19): siRNA sense strand
ccaagaaguugccuauaau

SEQ ID NO: 1341970 - RNA, 19 nt, Homo sapiens
  misc_RNA (1)...(19): siRNA sense strand
gacaacaaauagcauggua

SEQ ID NO: 1341971 - RNA, 19 nt, Homo sapiens
  misc_RNA (1)...(19): siRNA sense strand
caaaugauacugaagagaa

SEQ ID NO: 1341972 - RNA, 19 nt, Homo sapiens
  misc_RNA (1)...(19): siRNA sense strand
ggcaagaagcacagaauua

SEQ ID NO: 1341973 - RNA, 19 nt, Homo sapiens
  misc_RNA (1)...(19): siRNA sense strand
ggagaaugcuggguuuaug

SEQ ID NO: 1341974 - RNA, 19 nt, Homo sapiens
  misc_RNA (1)...(19): siRNA sense strand
caaauagcaugguagaauc

SEQ ID NO: 1341975 - RNA, 19 nt, Homo sapiens
  misc_RNA (1)...(19): siRNA sense strand
ggaaggagaaggaaauuca

SEQ ID NO: 1341976 - RNA, 19 nt, Homo sapiens
  misc_RNA (1)...(19): siRNA sense strand
gaagaugaacagagaaaga

SEQ ID NO: 1341977 - RNA, 19 nt, Homo sapiens
  misc_RNA (1)...(19): siRNA sense strand
cacagcagcucgggaaaua

SEQ ID NO: 1341978 - RNA, 19 nt, Homo sapiens
  misc_RNA (1)...(19): siRNA sense strand
gaaauucagugggagacaa

SEQ ID NO: 1341979 - RNA, 19 nt, Homo sapiens
  misc_RNA (1)...(19): siRNA sense strand
cagaauuacugccgagauu

SEQ ID NO: 1341980 - RNA, 19 nt, Homo sapiens
  misc_RNA (1)...(19): siRNA sense strand
ggaaggaaaggaucaguug

SEQ ID NO: 1341981 - RNA, 19 nt, Homo sapiens
  misc_RNA (1)...(19): siRNA sense strand
ggaauggugugauguaugc

SEQ ID NO: 1341982 - RNA, 19 nt, Homo sapiens
  misc_RNA (1)...(19): siRNA sense strand
gaaggucuauccucacagu

SEQ ID NO: 1341983 - RNA, 19 nt, Homo sapiens
  misc_RNA (1)...(19): siRNA sense strand
gcacaagagcguuaucaug

SEQ ID NO: 1341984 - RNA, 19 nt, Homo sapiens
  misc_RNA (1)...(19): siRNA sense strand
gauggagaaugcuggguuu

SEQ ID NO: 1341985 - RNA, 19 nt, Homo sapiens
  misc_RNA (1)...(19): siRNA sense strand
gaugucacuuucaacuuaa

SEQ ID NO: 1341986 - RNA, 19 nt, Homo sapiens
  misc_RNA (1)...(19): siRNA sense strand
gaacagagaaagaaaauug

SEQ ID NO: 1341987 - RNA, 19 nt, Homo sapiens
  misc_RNA (1)...(19): siRNA sense strand
ucaaagagacaacaaauag

SEQ ID NO: 1341988 - RNA, 19 nt, Homo sapiens
  misc_RNA (1)...(19): siRNA sense strand
accaagaaguugccuauaa

SEQ ID NO: 1341989 - RNA, 19 nt, Homo sapiens
  misc_RNA (1)...(19): siRNA sense strand
gaagagaacacagaacuag

SEQ ID NO: 1341990 - RNA, 19 nt, Homo sapiens
  misc_RNA (1)...(19): siRNA sense strand
agacaagguuauuucauga

SEQ ID NO: 1341991 - RNA, 19 nt, Homo sapiens
  misc_RNA (1)...(19): siRNA sense strand
gugaacuugucuccaaaua

SEQ ID NO: 1341992 - RNA, 19 nt, Homo sapiens
  misc_RNA (1)...(19): siRNA sense strand
aauaucaucuuccacacua

SEQ ID NO: 1341993 - RNA, 19 nt, Homo sapiens
  misc_RNA (1)...(19): siRNA sense strand
gaggagaaugcaauauuaa

SEQ ID NO: 1341994 - RNA, 19 nt, Homo sapiens
  misc_RNA (1)...(19): siRNA sense strand
gaugcaauauaucaaccua

SEQ ID NO: 1341995 - RNA, 19 nt, Homo sapiens
  misc_RNA (1)...(19): siRNA sense strand
gaaaggaaggagaaggaaa

SEQ ID NO: 1341996 - RNA, 19 nt, Homo sapiens
  misc_RNA (1)...(19): siRNA sense strand
ucccguagaugcaauauau

SEQ ID NO: 1341997 - RNA, 19 nt, Homo sapiens
  misc_RNA (1)...(19): siRNA sense strand
gaucagaacgaguaugaau

SEQ ID NO: 1341998 - RNA, 19 nt, Homo sapiens
  misc_RNA (1)...(19): siRNA sense strand
caacaaauagcaugguaga

SEQ ID NO: 1341999 - RNA, 19 nt, Homo sapiens
  misc_RNA (1)...(19): siRNA sense strand
gcagggcugugucucaugu

SEQ ID NO: 1342000 - RNA, 19 nt, Homo sapiens
  misc_RNA (1)...(19): siRNA sense strand
ugaggaaguuggaagauca

SEQ ID NO: 1342001 - RNA, 19 nt, Homo sapiens
  misc_RNA (1)...(19): siRNA sense strand
ggaauuaggaggagaaugc

SEQ ID NO: 1342002 - RNA, 19 nt, Homo sapiens
  misc_RNA (1)...(19): siRNA sense strand
caacguuuauucuugaaag

SEQ ID NO: 1342003 - RNA, 19 nt, Homo sapiens
  misc_RNA (1)...(19): siRNA sense strand
gagaaaggaaggagaagga

SEQ ID NO: 1342004 - RNA, 19 nt, Homo sapiens
  misc_RNA (1)...(19): siRNA sense strand
agaagaaagugaggaaguu

SEQ ID NO: 1342005 - RNA, 19 nt, Homo sapiens
  misc_RNA (1)...(19): siRNA sense strand
gcaagaagcacagaauuac

SEQ ID NO: 1342006 - RNA, 19 nt, Homo sapiens
  misc_RNA (1)...(19): siRNA sense strand
gagaacacagaacuaguuu

SEQ ID NO: 1342007 - RNA, 19 nt, Homo sapiens
  misc_RNA (1)...(19): siRNA sense strand
agaacuaguuucagaagga

SEQ ID NO: 1342008 - RNA, 19 nt, Homo sapiens
  misc_RNA (1)...(19): siRNA sense strand
gaugaaccauuacugaaac

SEQ ID NO: 1342009 - RNA, 19 nt, Homo sapiens
  misc_RNA (1)...(19): siRNA sense strand
gagaaugcuggguuuauga

SEQ ID NO: 1342010 - RNA, 19 nt, Homo sapiens
  misc_RNA (1)...(19): siRNA sense strand
gaacauuacauucucacau

SEQ ID NO: 1342011 - RNA, 19 nt, Homo sapiens
  misc_RNA (1)...(19): siRNA sense strand
gaugaacauuacauucuca

SEQ ID NO: 1342012 - RNA, 19 nt, Homo sapiens
  misc_RNA (1)...(19): siRNA sense strand
gagcagguuucccaucauc

SEQ ID NO: 1342013 - RNA, 19 nt, Homo sapiens
  misc_RNA (1)...(19): siRNA sense strand
ucacuuaauucuuccuugu

SEQ ID NO: 1342014 - RNA, 19 nt, Homo sapiens
  misc_RNA (1)...(19): siRNA sense strand
gaggagcacaagagcguua

SEQ ID NO: 1342015 - RNA, 19 nt, Homo sapiens
  misc_RNA (1)...(19): siRNA sense strand
cagcagugaagaugaauuu

SEQ ID NO: 1342016 - RNA, 19 nt, Homo sapiens
  misc_RNA (1)...(19): siRNA sense strand
gaagaaagugaggaaguug

SEQ ID NO: 1342017 - RNA, 19 nt, Homo sapiens
  misc_RNA (1)...(19): siRNA sense strand
gcagugaagaugaauuuua

SEQ ID NO: 1342018 - RNA, 19 nt, Homo sapiens
  misc_RNA (1)...(19): siRNA sense strand
gagcauuagugaccagaag

SEQ ID NO: 1342019 - RNA, 19 nt, Homo sapiens
  misc_RNA (1)...(19): siRNA sense strand
guaguucuuccaacguuua

SEQ ID NO: 1342020 - RNA, 19 nt, Homo sapiens
  misc_RNA (1)...(19): siRNA sense strand
uggaagaucagaacgagua

SEQ ID NO: 1342021 - RNA, 19 nt, Homo sapiens
  misc_RNA (1)...(19): siRNA sense strand
ggacaucaucagacuccua

SEQ ID NO: 1342022 - RNA, 19 nt, Homo sapiens
  misc_RNA (1)...(19): siRNA sense strand
caagguuauuucaugaaga

SEQ ID NO: 1342023 - RNA, 19 nt, Homo sapiens
  misc_RNA (1)...(19): siRNA sense strand
acacuaaacccuucuaugg

SEQ ID NO: 1342024 - RNA, 19 nt, Homo sapiens
  misc_RNA (1)...(19): siRNA sense strand
gauaccacagaaucacuua

SEQ ID NO: 1342025 - RNA, 19 nt, Homo sapiens
  misc_RNA (1)...(19): siRNA sense strand
gcagaagcccgagaaagga

SEQ ID NO: 1342026 - RNA, 19 nt, Homo sapiens
  misc_RNA (1)...(19): siRNA sense strand
acaaauagcaugguagaau

SEQ ID NO: 1342027 - RNA, 19 nt, Homo sapiens
  misc_RNA (1)...(19): siRNA sense strand
gugcaaauaucaucuucca

SEQ ID NO: 1342028 - RNA, 19 nt, Homo sapiens
  misc_RNA (1)...(19): siRNA sense strand
acaauucaaugcucauauc

SEQ ID NO: 1342029 - RNA, 19 nt, Homo sapiens
  misc_RNA (1)...(19): siRNA sense strand
gaagauacaauucaaugcu

SEQ ID NO: 1342030 - RNA, 19 nt, Homo sapiens
  misc_RNA (1)...(19): siRNA sense strand
gaugcugaccuguuugauu

SEQ ID NO: 1342031 - RNA, 19 nt, Homo sapiens
  misc_RNA (1)...(19): siRNA sense strand
cacgugaacuugucuccaa

SEQ ID NO: 1342032 - RNA, 19 nt, Homo sapiens
  misc_RNA (1)...(19): siRNA sense strand
ucaugaagauggagaaugc

SEQ ID NO: 1342033 - RNA, 19 nt, Homo sapiens
  misc_RNA (1)...(19): siRNA sense strand
uuaugaugcugaugaauuc

SEQ ID NO: 1342034 - RNA, 19 nt, Homo sapiens
  misc_RNA (1)...(19): siRNA sense strand
caucucuugucgcagguua

SEQ ID NO: 1342035 - RNA, 19 nt, Homo sapiens
  misc_RNA (1)...(19): siRNA sense strand
gguaguucuuccaacguuu

SEQ ID NO: 1342036 - RNA, 19 nt, Homo sapiens
  misc_RNA (1)...(19): siRNA sense strand
caaagcgcuuaauagauuc

SEQ ID NO: 1342037 - RNA, 19 nt, Homo sapiens
  misc_RNA (1)...(19): siRNA sense strand
caagugaugcugaccuguu

SEQ ID NO: 1342038 - RNA, 19 nt, Homo sapiens
  misc_RNA (1)...(19): siRNA sense strand
ugaugaaccauuacugaaa

SEQ ID NO: 1342039 - RNA, 19 nt, Homo sapiens
  misc_RNA (1)...(19): siRNA sense strand
gggcaagaagcacagaauu

SEQ ID NO: 1342040 - RNA, 19 nt, Homo sapiens
  misc_RNA (1)...(19): siRNA sense strand
cuuccaacguuuauucuug

SEQ ID NO: 1342041 - RNA, 19 nt, Homo sapiens
  misc_RNA (1)...(19): siRNA sense strand
agacuuggaauggaucuua

SEQ ID NO: 1342042 - RNA, 19 nt, Homo sapiens
  misc_RNA (1)...(19): siRNA sense strand
caagagcguuaucaugcau

SEQ ID NO: 1342043 - RNA, 19 nt, Homo sapiens
  misc_RNA (1)...(19): siRNA sense strand
aagugaugcugaccuguuu

SEQ ID NO: 1342044 - RNA, 19 nt, Homo sapiens
  misc_RNA (1)...(19): siRNA sense strand
augcugaccuguuugauuc

SEQ ID NO: 1342045 - RNA, 19 nt, Homo sapiens
  misc_RNA (1)...(19): siRNA sense strand
aaugcuggguuuaugauga

SEQ ID NO: 1342046 - RNA, 19 nt, Homo sapiens
  misc_RNA (1)...(19): siRNA sense strand
gaaguuggaagaucagaac

SEQ ID NO: 1342047 - RNA, 19 nt, Homo sapiens
  misc_RNA (1)...(19): siRNA sense strand
agacuaugaugaacauuac

SEQ ID NO: 1342048 - RNA, 19 nt, Homo sapiens
  misc_RNA (1)...(19): siRNA sense strand
agagaacacagaacuaguu

SEQ ID NO: 1342049 - RNA, 19 nt, Homo sapiens
  misc_RNA (1)...(19): siRNA sense strand
ucccaaggaucgaaugguu

SEQ ID NO: 1342050 - RNA, 19 nt, Homo sapiens
  misc_RNA (1)...(19): siRNA sense strand
ggaccuguuugugagcauu

SEQ ID NO: 1342051 - RNA, 19 nt, Homo sapiens
  misc_RNA (1)...(19): siRNA sense strand
ugauucacaugaugacaga

SEQ ID NO: 1342052 - RNA, 19 nt, Homo sapiens
  misc_RNA (1)...(19): siRNA sense strand
uaugaugaaccauuacuga

SEQ ID NO: 1342053 - RNA, 19 nt, Homo sapiens
  misc_RNA (1)...(19): siRNA sense strand
ggaggagaaugcaauauua

SEQ ID NO: 1342054 - RNA, 19 nt, Homo sapiens
  misc_RNA (1)...(19): siRNA sense strand
ccaaagcgcuuaauagauu

SEQ ID NO: 1342055 - RNA, 19 nt, Homo sapiens
  misc_RNA (1)...(19): siRNA sense strand
ggaugucacuuucaacuua

SEQ ID NO: 1342056 - RNA, 19 nt, Homo sapiens
  misc_RNA (1)...(19): siRNA sense strand
gaacuugucuccaaauaca

SEQ ID NO: 1342057 - RNA, 19 nt, Homo sapiens
  misc_RNA (1)...(19): siRNA sense strand
gcucauaucuggaccaaau

SEQ ID NO: 1342058 - RNA, 19 nt, Homo sapiens
  misc_RNA (1)...(19): siRNA sense strand
ggaaggaugucacuuucaa

SEQ ID NO: 1342059 - RNA, 19 nt, Homo sapiens
  misc_RNA (1)...(19): siRNA sense strand
gcacaggcuugaagaaaga

SEQ ID NO: 1342060 - RNA, 19 nt, Homo sapiens
  misc_RNA (1)...(19): siRNA sense strand
gaaaggaucaguugccaaa

SEQ ID NO: 1342061 - RNA, 19 nt, Homo sapiens
  misc_RNA (1)...(19): siRNA sense strand
gagacaagguuauuucaug

SEQ ID NO: 1342062 - RNA, 19 nt, Homo sapiens
  misc_RNA (1)...(19): siRNA sense strand
agaaauguaugcagacuuu

SEQ ID NO: 1342063 - RNA, 19 nt, Homo sapiens
  misc_RNA (1)...(19): siRNA sense strand
gaacacagaacuaguuuca

SEQ ID NO: 1342064 - RNA, 19 nt, Homo sapiens
  misc_RNA (1)...(19): siRNA sense strand
ggaauggaauggugugaug

SEQ ID NO: 1342065 - RNA, 19 nt, Homo sapiens
  misc_RNA (1)...(19): siRNA sense strand
acacagaacuaguuucaga

SEQ ID NO: 1342066 - RNA, 19 nt, Homo sapiens
  misc_RNA (1)...(19): siRNA sense strand
gaaguugccuauaaucaag

SEQ ID NO: 1342067 - RNA, 19 nt, Homo sapiens
  misc_RNA (1)...(19): siRNA sense strand
caaauacagucccagaguu

SEQ ID NO: 1342068 - RNA, 19 nt, Homo sapiens
  misc_RNA (1)...(19): siRNA sense strand
ccaagaaguugccuauaau

SEQ ID NO: 1342069 - RNA, 19 nt, Homo sapiens
  misc_RNA (1)...(19): siRNA sense strand
caaaugauacugaagagaa

SEQ ID NO: 1342070 - RNA, 19 nt, Homo sapiens
  misc_RNA (1)...(19): siRNA sense strand
ggcaagaagcacagaauua

SEQ ID NO: 1342071 - RNA, 19 nt, Homo sapiens
  misc_RNA (1)...(19): siRNA sense strand
ggagaaugcuggguuuaug

SEQ ID NO: 1342072 - RNA, 19 nt, Homo sapiens
  misc_RNA (1)...(19): siRNA sense strand
ggaaggagaaggaaauuca

SEQ ID NO: 1342073 - RNA, 19 nt, Homo sapiens
  misc_RNA (1)...(19): siRNA sense strand
cacagcagcucgggaaaua

SEQ ID NO: 1342074 - RNA, 19 nt, Homo sapiens
  misc_RNA (1)...(19): siRNA sense strand
gaaauucagugggagacaa

SEQ ID NO: 1342075 - RNA, 19 nt, Homo sapiens
  misc_RNA (1)...(19): siRNA sense strand
cagaauuacugccgagauu

SEQ ID NO: 1342076 - RNA, 19 nt, Homo sapiens
  misc_RNA (1)...(19): siRNA sense strand
ggaaggaaaggaucaguug

SEQ ID NO: 1342077 - RNA, 19 nt, Homo sapiens
  misc_RNA (1)...(19): siRNA sense strand
ggaauggugugauguaugc

SEQ ID NO: 1342078 - RNA, 19 nt, Homo sapiens
  misc_RNA (1)...(19): siRNA sense strand
gaaggucuauccucacagu

SEQ ID NO: 1342079 - RNA, 19 nt, Homo sapiens
  misc_RNA (1)...(19): siRNA sense strand
gcacaagagcguuaucaug

SEQ ID NO: 1342080 - RNA, 19 nt, Homo sapiens
  misc_RNA (1)...(19): siRNA sense strand
gauggagaaugcuggguuu

SEQ ID NO: 1342081 - RNA, 19 nt, Homo sapiens
  misc_RNA (1)...(19): siRNA sense strand
gaugucacuuucaacuuaa

SEQ ID NO: 1342082 - RNA, 19 nt, Homo sapiens
  misc_RNA (1)...(19): siRNA sense strand
accaagaaguugccuauaa

SEQ ID NO: 1342083 - RNA, 19 nt, Homo sapiens
  misc_RNA (1)...(19): siRNA sense strand
gaagagaacacagaacuag

SEQ ID NO: 1342084 - RNA, 19 nt, Homo sapiens
  misc_RNA (1)...(19): siRNA sense strand
agacaagguuauuucauga

SEQ ID NO: 1342085 - RNA, 19 nt, Homo sapiens
  misc_RNA (1)...(19): siRNA sense strand
gugaacuugucuccaaaua

SEQ ID NO: 1342086 - RNA, 19 nt, Homo sapiens
  misc_RNA (1)...(19): siRNA sense strand
aauaucaucuuccacacua

SEQ ID NO: 1342087 - RNA, 19 nt, Homo sapiens
  misc_RNA (1)...(19): siRNA sense strand
gaggagaaugcaauauuaa

SEQ ID NO: 1342088 - RNA, 19 nt, Homo sapiens
  misc_RNA (1)...(19): siRNA sense strand
gaugcaauauaucaaccua

SEQ ID NO: 1342089 - RNA, 19 nt, Homo sapiens
  misc_RNA (1)...(19): siRNA sense strand
gaaaggaaggagaaggaaa

SEQ ID NO: 1342090 - RNA, 19 nt, Homo sapiens
  misc_RNA (1)...(19): siRNA sense strand
ucccguagaugcaauauau

SEQ ID NO: 1342091 - RNA, 19 nt, Homo sapiens
  misc_RNA (1)...(19): siRNA sense strand
gaucagaacgaguaugaau

SEQ ID NO: 1342092 - RNA, 19 nt, Homo sapiens
  misc_RNA (1)...(19): siRNA sense strand
gcagggcugugucucaugu

SEQ ID NO: 1342093 - RNA, 19 nt, Homo sapiens
  misc_RNA (1)...(19): siRNA sense strand
ugaggaaguuggaagauca

SEQ ID NO: 1342094 - RNA, 19 nt, Homo sapiens
  misc_RNA (1)...(19): siRNA sense strand
ggaauuaggaggagaaugc

SEQ ID NO: 1342095 - RNA, 19 nt, Homo sapiens
  misc_RNA (1)...(19): siRNA sense strand
caacguuuauucuugaaag

SEQ ID NO: 1342096 - RNA, 19 nt, Homo sapiens
  misc_RNA (1)...(19): siRNA sense strand
gagaaaggaaggagaagga

SEQ ID NO: 1342097 - RNA, 19 nt, Homo sapiens
  misc_RNA (1)...(19): siRNA sense strand
agaagaaagugaggaaguu

SEQ ID NO: 1342098 - RNA, 19 nt, Homo sapiens
  misc_RNA (1)...(19): siRNA sense strand
gcaagaagcacagaauuac

SEQ ID NO: 1342099 - RNA, 19 nt, Homo sapiens
  misc_RNA (1)...(19): siRNA sense strand
gagaacacagaacuaguuu

SEQ ID NO: 1342100 - RNA, 19 nt, Homo sapiens
  misc_RNA (1)...(19): siRNA sense strand
agaacuaguuucagaagga

SEQ ID NO: 1342101 - RNA, 19 nt, Homo sapiens
  misc_RNA (1)...(19): siRNA sense strand
gaugaaccauuacugaaac

SEQ ID NO: 1342102 - RNA, 19 nt, Homo sapiens
  misc_RNA (1)...(19): siRNA sense strand
gagaaugcuggguuuauga

SEQ ID NO: 1342103 - RNA, 19 nt, Homo sapiens
  misc_RNA (1)...(19): siRNA sense strand
gaacauuacauucucacau

SEQ ID NO: 1342104 - RNA, 19 nt, Homo sapiens
  misc_RNA (1)...(19): siRNA sense strand
gaugaacauuacauucuca

SEQ ID NO: 1342105 - RNA, 19 nt, Homo sapiens
  misc_RNA (1)...(19): siRNA sense strand
gagcagguuucccaucauc

SEQ ID NO: 1342106 - RNA, 19 nt, Homo sapiens
  misc_RNA (1)...(19): siRNA sense strand
ucacuuaauucuuccuugu

SEQ ID NO: 1342107 - RNA, 19 nt, Homo sapiens
  misc_RNA (1)...(19): siRNA sense strand
gaggagcacaagagcguua

SEQ ID NO: 1342108 - RNA, 19 nt, Homo sapiens
  misc_RNA (1)...(19): siRNA sense strand
cagcagugaagaugaauuu

SEQ ID NO: 1342109 - RNA, 19 nt, Homo sapiens
  misc_RNA (1)...(19): siRNA sense strand
gaagaaagugaggaaguug

SEQ ID NO: 1342110 - RNA, 19 nt, Homo sapiens
  misc_RNA (1)...(19): siRNA sense strand
gcagugaagaugaauuuua

SEQ ID NO: 1342111 - RNA, 19 nt, Homo sapiens
  misc_RNA (1)...(19): siRNA sense strand
gagcauuagugaccagaag

SEQ ID NO: 1342112 - RNA, 19 nt, Homo sapiens
  misc_RNA (1)...(19): siRNA sense strand
guaguucuuccaacguuua

SEQ ID NO: 1342113 - RNA, 19 nt, Homo sapiens
  misc_RNA (1)...(19): siRNA sense strand
uggaagaucagaacgagua

SEQ ID NO: 1342114 - RNA, 19 nt, Homo sapiens
  misc_RNA (1)...(19): siRNA sense strand
ggacaucaucagacuccua

SEQ ID NO: 1342115 - RNA, 19 nt, Homo sapiens
  misc_RNA (1)...(19): siRNA sense strand
caagguuauuucaugaaga

SEQ ID NO: 1342116 - RNA, 19 nt, Homo sapiens
  misc_RNA (1)...(19): siRNA sense strand
acacuaaacccuucuaugg

SEQ ID NO: 1342117 - RNA, 19 nt, Homo sapiens
  misc_RNA (1)...(19): siRNA sense strand
gauaccacagaaucacuua

SEQ ID NO: 1342118 - RNA, 19 nt, Homo sapiens
  misc_RNA (1)...(19): siRNA sense strand
gcagaagcccgagaaagga

SEQ ID NO: 1342119 - RNA, 19 nt, Homo sapiens
  misc_RNA (1)...(19): siRNA sense strand
gugcaaauaucaucuucca

SEQ ID NO: 1342120 - RNA, 19 nt, Homo sapiens
  misc_RNA (1)...(19): siRNA sense strand
acaauucaaugcucauauc

SEQ ID NO: 1342121 - RNA, 19 nt, Homo sapiens
  misc_RNA (1)...(19): siRNA sense strand
gaagauacaauucaaugcu

SEQ ID NO: 1342122 - RNA, 19 nt, Homo sapiens
  misc_RNA (1)...(19): siRNA sense strand
gaugcugaccuguuugauu

SEQ ID NO: 1342123 - RNA, 19 nt, Homo sapiens
  misc_RNA (1)...(19): siRNA sense strand
cacgugaacuugucuccaa

SEQ ID NO: 1342124 - RNA, 19 nt, Homo sapiens
  misc_RNA (1)...(19): siRNA sense strand
ucaugaagauggagaaugc

SEQ ID NO: 1342125 - RNA, 19 nt, Homo sapiens
  misc_RNA (1)...(19): siRNA sense strand
uuaugaugcugaugaauuc

SEQ ID NO: 1342126 - RNA, 19 nt, Homo sapiens
  misc_RNA (1)...(19): siRNA sense strand
caucucuugucgcagguua

SEQ ID NO: 1342127 - RNA, 19 nt, Homo sapiens
  misc_RNA (1)...(19): siRNA sense strand
gguaguucuuccaacguuu

SEQ ID NO: 1342128 - RNA, 19 nt, Homo sapiens
  misc_RNA (1)...(19): siRNA sense strand
caaagcgcuuaauagauuc

SEQ ID NO: 1342129 - RNA, 19 nt, Homo sapiens
  misc_RNA (1)...(19): siRNA sense strand
caagugaugcugaccuguu

SEQ ID NO: 1342130 - RNA, 19 nt, Homo sapiens
  misc_RNA (1)...(19): siRNA sense strand
ugaugaaccauuacugaaa

SEQ ID NO: 1342131 - RNA, 19 nt, Homo sapiens
  misc_RNA (1)...(19): siRNA sense strand
gggcaagaagcacagaauu

SEQ ID NO: 1342132 - RNA, 19 nt, Homo sapiens
  misc_RNA (1)...(19): siRNA sense strand
cuuccaacguuuauucuug

SEQ ID NO: 1342133 - RNA, 19 nt, Homo sapiens
  misc_RNA (1)...(19): siRNA sense strand
agacuuggaauggaucuua

SEQ ID NO: 1342134 - RNA, 19 nt, Homo sapiens
  misc_RNA (1)...(19): siRNA sense strand
caagagcguuaucaugcau

SEQ ID NO: 1342135 - RNA, 19 nt, Homo sapiens
  misc_RNA (1)...(19): siRNA sense strand
aagugaugcugaccuguuu

SEQ ID NO: 1342136 - RNA, 19 nt, Homo sapiens
  misc_RNA (1)...(19): siRNA sense strand
augcugaccuguuugauuc

SEQ ID NO: 1342137 - RNA, 19 nt, Homo sapiens
  misc_RNA (1)...(19): siRNA sense strand
aaugcuggguuuaugauga

SEQ ID NO: 1342138 - RNA, 19 nt, Homo sapiens
  misc_RNA (1)...(19): siRNA sense strand
gaaguuggaagaucagaac

SEQ ID NO: 1342139 - RNA, 19 nt, Homo sapiens
  misc_RNA (1)...(19): siRNA sense strand
agacuaugaugaacauuac

SEQ ID NO: 1342140 - RNA, 19 nt, Homo sapiens
  misc_RNA (1)...(19): siRNA sense strand
agagaacacagaacuaguu

SEQ ID NO: 1342141 - RNA, 19 nt, Homo sapiens
  misc_RNA (1)...(19): siRNA sense strand
ucccaaggaucgaaugguu

SEQ ID NO: 1342142 - RNA, 19 nt, Homo sapiens
  misc_RNA (1)...(19): siRNA sense strand
ggaccuguuugugagcauu

SEQ ID NO: 1342143 - RNA, 19 nt, Homo sapiens
  misc_RNA (1)...(19): siRNA sense strand
ugauucacaugaugacaga

SEQ ID NO: 1342144 - RNA, 19 nt, Homo sapiens
  misc_RNA (1)...(19): siRNA sense strand
ccaaauacagucccagagu

SEQ ID NO: 1342145 - RNA, 19 nt, Homo sapiens
  misc_RNA (1)...(19): siRNA sense strand
uaugaugaaccauuacuga

SEQ ID NO: 1342146 - RNA, 19 nt, Homo sapiens
  misc_RNA (1)...(19): siRNA sense strand
ucaagaagaaagugaggaa

SEQ ID NO: 1342147 - RNA, 19 nt, Homo sapiens
  misc_RNA (1)...(19): siRNA sense strand
gguuagacuuggaauggau

SEQ ID NO: 1342148 - RNA, 19 nt, Homo sapiens
  misc_RNA (1)...(19): siRNA sense strand
gcacauccggaccuguuug

SEQ ID NO: 1342149 - RNA, 19 nt, Homo sapiens
  misc_RNA (1)...(19): siRNA sense strand
aaaggaaggagaaggaaau

SEQ ID NO: 1342150 - RNA, 19 nt, Homo sapiens
  misc_RNA (1)...(19): siRNA sense strand
ugaagagaacacagaacua

SEQ ID NO: 1342151 - RNA, 19 nt, Homo sapiens
  misc_RNA (1)...(19): siRNA sense strand
ggaaguuggaagaucagaa

SEQ ID NO: 1342152 - RNA, 19 nt, Homo sapiens
  misc_RNA (1)...(19): siRNA sense strand
aagaucagaacgaguauga

SEQ ID NO: 1342153 - RNA, 19 nt, Homo sapiens
  misc_RNA (1)...(19): siRNA sense strand
ggaggagaaugcaauauua

SEQ ID NO: 1342154 - RNA, 19 nt, Homo sapiens
  misc_RNA (1)...(19): siRNA sense strand
ccaaagcgcuuaauagauu

SEQ ID NO: 1342155 - RNA, 19 nt, Homo sapiens
  misc_RNA (1)...(19): siRNA sense strand
ggaugucacuuucaacuua

SEQ ID NO: 1342156 - RNA, 19 nt, Homo sapiens
  misc_RNA (1)...(19): siRNA sense strand
gaacuugucuccaaauaca

SEQ ID NO: 1342157 - RNA, 19 nt, Homo sapiens
  misc_RNA (1)...(19): siRNA sense strand
gcucauaucuggaccaaau

SEQ ID NO: 1342158 - RNA, 19 nt, Homo sapiens
  misc_RNA (1)...(19): siRNA sense strand
ggaaggaugucacuuucaa

SEQ ID NO: 1342159 - RNA, 19 nt, Homo sapiens
  misc_RNA (1)...(19): siRNA sense strand
gcacaggcuugaagaaaga

SEQ ID NO: 1342160 - RNA, 19 nt, Homo sapiens
  misc_RNA (1)...(19): siRNA sense strand
gaaaggaucaguugccaaa

SEQ ID NO: 1342161 - RNA, 19 nt, Homo sapiens
  misc_RNA (1)...(19): siRNA sense strand
gagacaagguuauuucaug

SEQ ID NO: 1342162 - RNA, 19 nt, Homo sapiens
  misc_RNA (1)...(19): siRNA sense strand
agaaauguaugcagacuuu

SEQ ID NO: 1342163 - RNA, 19 nt, Homo sapiens
  misc_RNA (1)...(19): siRNA sense strand
gaacacagaacuaguuuca

SEQ ID NO: 1342164 - RNA, 19 nt, Homo sapiens
  misc_RNA (1)...(19): siRNA sense strand
ggaauggaauggugugaug

SEQ ID NO: 1342165 - RNA, 19 nt, Homo sapiens
  misc_RNA (1)...(19): siRNA sense strand
acacagaacuaguuucaga

SEQ ID NO: 1342166 - RNA, 19 nt, Homo sapiens
  misc_RNA (1)...(19): siRNA sense strand
gaaguugccuauaaucaag

SEQ ID NO: 1342167 - RNA, 19 nt, Homo sapiens
  misc_RNA (1)...(19): siRNA sense strand
caaauacagucccagaguu

SEQ ID NO: 1342168 - RNA, 19 nt, Homo sapiens
  misc_RNA (1)...(19): siRNA sense strand
ccaagaaguugccuauaau

SEQ ID NO: 1342169 - RNA, 19 nt, Homo sapiens
  misc_RNA (1)...(19): siRNA sense strand
caaaugauacugaagagaa

SEQ ID NO: 1342170 - RNA, 19 nt, Homo sapiens
  misc_RNA (1)...(19): siRNA sense strand
ggcaagaagcacagaauua

SEQ ID NO: 1342171 - RNA, 19 nt, Homo sapiens
  misc_RNA (1)...(19): siRNA sense strand
ggagaaugcuggguuuaug

SEQ ID NO: 1342172 - RNA, 19 nt, Homo sapiens
  misc_RNA (1)...(19): siRNA sense strand
ggaaggagaaggaaauuca

SEQ ID NO: 1342173 - RNA, 19 nt, Homo sapiens
  misc_RNA (1)...(19): siRNA sense strand
cacagcagcucgggaaaua

SEQ ID NO: 1342174 - RNA, 19 nt, Homo sapiens
  misc_RNA (1)...(19): siRNA sense strand
gaaauucagugggagacaa

SEQ ID NO: 1342175 - RNA, 19 nt, Homo sapiens
  misc_RNA (1)...(19): siRNA sense strand
cagaauuacugccgagauu

SEQ ID NO: 1342176 - RNA, 19 nt, Homo sapiens
  misc_RNA (1)...(19): siRNA sense strand
ggaaggaaaggaucaguug

SEQ ID NO: 1342177 - RNA, 19 nt, Homo sapiens
  misc_RNA (1)...(19): siRNA sense strand
ggaauggugugauguaugc

SEQ ID NO: 1342178 - RNA, 19 nt, Homo sapiens
  misc_RNA (1)...(19): siRNA sense strand
gaaggucuauccucacagu

SEQ ID NO: 1342179 - RNA, 19 nt, Homo sapiens
  misc_RNA (1)...(19): siRNA sense strand
gcacaagagcguuaucaug

SEQ ID NO: 1342180 - RNA, 19 nt, Homo sapiens
  misc_RNA (1)...(19): siRNA sense strand
gauggagaaugcuggguuu

SEQ ID NO: 1342181 - RNA, 19 nt, Homo sapiens
  misc_RNA (1)...(19): siRNA sense strand
gaugucacuuucaacuuaa

SEQ ID NO: 1342182 - RNA, 19 nt, Homo sapiens
  misc_RNA (1)...(19): siRNA sense strand
accaagaaguugccuauaa

SEQ ID NO: 1342183 - RNA, 19 nt, Homo sapiens
  misc_RNA (1)...(19): siRNA sense strand
gaagagaacacagaacuag

SEQ ID NO: 1342184 - RNA, 19 nt, Homo sapiens
  misc_RNA (1)...(19): siRNA sense strand
agacaagguuauuucauga

SEQ ID NO: 1342185 - RNA, 19 nt, Homo sapiens
  misc_RNA (1)...(19): siRNA sense strand
gugaacuugucuccaaaua

SEQ ID NO: 1342186 - RNA, 19 nt, Homo sapiens
  misc_RNA (1)...(19): siRNA sense strand
aauaucaucuuccacacua

SEQ ID NO: 1342187 - RNA, 19 nt, Homo sapiens
  misc_RNA (1)...(19): siRNA sense strand
gaggagaaugcaauauuaa

SEQ ID NO: 1342188 - RNA, 19 nt, Homo sapiens
  misc_RNA (1)...(19): siRNA sense strand
gaugcaauauaucaaccua

SEQ ID NO: 1342189 - RNA, 19 nt, Homo sapiens
  misc_RNA (1)...(19): siRNA sense strand
gaaaggaaggagaaggaaa

SEQ ID NO: 1342190 - RNA, 19 nt, Homo sapiens
  misc_RNA (1)...(19): siRNA sense strand
ucccguagaugcaauauau

SEQ ID NO: 1342191 - RNA, 19 nt, Homo sapiens
  misc_RNA (1)...(19): siRNA sense strand
gaucagaacgaguaugaau

SEQ ID NO: 1342192 - RNA, 19 nt, Homo sapiens
  misc_RNA (1)...(19): siRNA sense strand
gcagggcugugucucaugu

SEQ ID NO: 1342193 - RNA, 19 nt, Homo sapiens
  misc_RNA (1)...(19): siRNA sense strand
ugaggaaguuggaagauca

SEQ ID NO: 1342194 - RNA, 19 nt, Homo sapiens
  misc_RNA (1)...(19): siRNA sense strand
ggaauuaggaggagaaugc

SEQ ID NO: 1342195 - RNA, 19 nt, Homo sapiens
  misc_RNA (1)...(19): siRNA sense strand
caacguuuauucuugaaag

SEQ ID NO: 1342196 - RNA, 19 nt, Homo sapiens
  misc_RNA (1)...(19): siRNA sense strand
gagaaaggaaggagaagga

SEQ ID NO: 1342197 - RNA, 19 nt, Homo sapiens
  misc_RNA (1)...(19): siRNA sense strand
agaagaaagugaggaaguu

SEQ ID NO: 1342198 - RNA, 19 nt, Homo sapiens
  misc_RNA (1)...(19): siRNA sense strand
gcaagaagcacagaauuac

SEQ ID NO: 1342199 - RNA, 19 nt, Homo sapiens
  misc_RNA (1)...(19): siRNA sense strand
gagaacacagaacuaguuu

SEQ ID NO: 1342200 - RNA, 19 nt, Homo sapiens
  misc_RNA (1)...(19): siRNA sense strand
agaacuaguuucagaagga

SEQ ID NO: 1342201 - RNA, 19 nt, Homo sapiens
  misc_RNA (1)...(19): siRNA sense strand
gaugaaccauuacugaaac

SEQ ID NO: 1342202 - RNA, 19 nt, Homo sapiens
  misc_RNA (1)...(19): siRNA sense strand
gagaaugcuggguuuauga

SEQ ID NO: 1342203 - RNA, 19 nt, Homo sapiens
  misc_RNA (1)...(19): siRNA sense strand
gaacauuacauucucacau

SEQ ID NO: 1342204 - RNA, 19 nt, Homo sapiens
  misc_RNA (1)...(19): siRNA sense strand
gaugaacauuacauucuca

SEQ ID NO: 1342205 - RNA, 19 nt, Homo sapiens
  misc_RNA (1)...(19): siRNA sense strand
gagcagguuucccaucauc

SEQ ID NO: 1342206 - RNA, 19 nt, Homo sapiens
  misc_RNA (1)...(19): siRNA sense strand
ucacuuaauucuuccuugu

SEQ ID NO: 1342207 - RNA, 19 nt, Homo sapiens
  misc_RNA (1)...(19): siRNA sense strand
gaggagcacaagagcguua

SEQ ID NO: 1342208 - RNA, 19 nt, Homo sapiens
  misc_RNA (1)...(19): siRNA sense strand
cagcagugaagaugaauuu

SEQ ID NO: 1342209 - RNA, 19 nt, Homo sapiens
  misc_RNA (1)...(19): siRNA sense strand
gaagaaagugaggaaguug

SEQ ID NO: 1342210 - RNA, 19 nt, Homo sapiens
  misc_RNA (1)...(19): siRNA sense strand
gcagugaagaugaauuuua

SEQ ID NO: 1342211 - RNA, 19 nt, Homo sapiens
  misc_RNA (1)...(19): siRNA sense strand
gagcauuagugaccagaag

SEQ ID NO: 1342212 - RNA, 19 nt, Homo sapiens
  misc_RNA (1)...(19): siRNA sense strand
guaguucuuccaacguuua

SEQ ID NO: 1342213 - RNA, 19 nt, Homo sapiens
  misc_RNA (1)...(19): siRNA sense strand
uggaagaucagaacgagua

SEQ ID NO: 1342214 - RNA, 19 nt, Homo sapiens
  misc_RNA (1)...(19): siRNA sense strand
ggacaucaucagacuccua

SEQ ID NO: 1342215 - RNA, 19 nt, Homo sapiens
  misc_RNA (1)...(19): siRNA sense strand
caagguuauuucaugaaga

SEQ ID NO: 1342216 - RNA, 19 nt, Homo sapiens
  misc_RNA (1)...(19): siRNA sense strand
acacuaaacccuucuaugg

SEQ ID NO: 1342217 - RNA, 19 nt, Homo sapiens
  misc_RNA (1)...(19): siRNA sense strand
gauaccacagaaucacuua

SEQ ID NO: 1342218 - RNA, 19 nt, Homo sapiens
  misc_RNA (1)...(19): siRNA sense strand
gcagaagcccgagaaagga

SEQ ID NO: 1342219 - RNA, 19 nt, Homo sapiens
  misc_RNA (1)...(19): siRNA sense strand
gugcaaauaucaucuucca

SEQ ID NO: 1342220 - RNA, 19 nt, Homo sapiens
  misc_RNA (1)...(19): siRNA sense strand
acaauucaaugcucauauc

SEQ ID NO: 1342221 - RNA, 19 nt, Homo sapiens
  misc_RNA (1)...(19): siRNA sense strand
gaagauacaauucaaugcu

SEQ ID NO: 1342222 - RNA, 19 nt, Homo sapiens
  misc_RNA (1)...(19): siRNA sense strand
gaugcugaccuguuugauu

SEQ ID NO: 1342223 - RNA, 19 nt, Homo sapiens
  misc_RNA (1)...(19): siRNA sense strand
cacgugaacuugucuccaa

SEQ ID NO: 1342224 - RNA, 19 nt, Homo sapiens
  misc_RNA (1)...(19): siRNA sense strand
ucaugaagauggagaaugc

SEQ ID NO: 1342225 - RNA, 19 nt, Homo sapiens
  misc_RNA (1)...(19): siRNA sense strand
uuaugaugcugaugaauuc

SEQ ID NO: 1342226 - RNA, 19 nt, Homo sapiens
  misc_RNA (1)...(19): siRNA sense strand
caucucuugucgcagguua

SEQ ID NO: 1342227 - RNA, 19 nt, Homo sapiens
  misc_RNA (1)...(19): siRNA sense strand
gguaguucuuccaacguuu

SEQ ID NO: 1342228 - RNA, 19 nt, Homo sapiens
  misc_RNA (1)...(19): siRNA sense strand
caaagcgcuuaauagauuc

SEQ ID NO: 1342229 - RNA, 19 nt, Homo sapiens
  misc_RNA (1)...(19): siRNA sense strand
caagugaugcugaccuguu

SEQ ID NO: 1342230 - RNA, 19 nt, Homo sapiens
  misc_RNA (1)...(19): siRNA sense strand
ugaugaaccauuacugaaa

SEQ ID NO: 1342231 - RNA, 19 nt, Homo sapiens
  misc_RNA (1)...(19): siRNA sense strand
gggcaagaagcacagaauu

SEQ ID NO: 1342232 - RNA, 19 nt, Homo sapiens
  misc_RNA (1)...(19): siRNA sense strand
cuuccaacguuuauucuug

SEQ ID NO: 1342233 - RNA, 19 nt, Homo sapiens
  misc_RNA (1)...(19): siRNA sense strand
agacuuggaauggaucuua

SEQ ID NO: 1342234 - RNA, 19 nt, Homo sapiens
  misc_RNA (1)...(19): siRNA sense strand
caagagcguuaucaugcau

SEQ ID NO: 1342235 - RNA, 19 nt, Homo sapiens
  misc_RNA (1)...(19): siRNA sense strand
aagugaugcugaccuguuu

SEQ ID NO: 1342236 - RNA, 19 nt, Homo sapiens
  misc_RNA (1)...(19): siRNA sense strand
augcugaccuguuugauuc

SEQ ID NO: 1342237 - RNA, 19 nt, Homo sapiens
  misc_RNA (1)...(19): siRNA sense strand
aaugcuggguuuaugauga

SEQ ID NO: 1342238 - RNA, 19 nt, Homo sapiens
  misc_RNA (1)...(19): siRNA sense strand
gaaguuggaagaucagaac

SEQ ID NO: 1342239 - RNA, 19 nt, Homo sapiens
  misc_RNA (1)...(19): siRNA sense strand
agacuaugaugaacauuac

SEQ ID NO: 1342240 - RNA, 19 nt, Homo sapiens
  misc_RNA (1)...(19): siRNA sense strand
agagaacacagaacuaguu

SEQ ID NO: 1342241 - RNA, 19 nt, Homo sapiens
  misc_RNA (1)...(19): siRNA sense strand
ucccaaggaucgaaugguu

SEQ ID NO: 1342242 - RNA, 19 nt, Homo sapiens
  misc_RNA (1)...(19): siRNA sense strand
ggaccuguuugugagcauu

SEQ ID NO: 1342243 - RNA, 19 nt, Homo sapiens
  misc_RNA (1)...(19): siRNA sense strand
ugauucacaugaugacaga

SEQ ID NO: 1342244 - RNA, 19 nt, Homo sapiens
  misc_RNA (1)...(19): siRNA sense strand
ccaaauacagucccagagu

SEQ ID NO: 1342245 - RNA, 19 nt, Homo sapiens
  misc_RNA (1)...(19): siRNA sense strand
uaugaugaaccauuacuga

SEQ ID NO: 1342246 - RNA, 19 nt, Homo sapiens
  misc_RNA (1)...(19): siRNA sense strand
ucaagaagaaagugaggaa

SEQ ID NO: 1342247 - RNA, 19 nt, Homo sapiens
  misc_RNA (1)...(19): siRNA sense strand
gguuagacuuggaauggau

SEQ ID NO: 1342248 - RNA, 19 nt, Homo sapiens
  misc_RNA (1)...(19): siRNA sense strand
gcacauccggaccuguuug

SEQ ID NO: 1342249 - RNA, 19 nt, Homo sapiens
  misc_RNA (1)...(19): siRNA sense strand
aaaggaaggagaaggaaau

SEQ ID NO: 1342250 - RNA, 19 nt, Homo sapiens
  misc_RNA (1)...(19): siRNA sense strand
ugaagagaacacagaacua

SEQ ID NO: 1342251 - RNA, 19 nt, Homo sapiens
  misc_RNA (1)...(19): siRNA sense strand
ggaaguuggaagaucagaa

SEQ ID NO: 1342252 - RNA, 19 nt, Homo sapiens
  misc_RNA (1)...(19): siRNA sense strand
aagaucagaacgaguauga

SEQ ID NO: 1342253 - RNA, 19 nt, Homo sapiens
  misc_RNA (1)...(19): siRNA sense strand
ggaggagaaugcaauauua

SEQ ID NO: 1342254 - RNA, 19 nt, Homo sapiens
  misc_RNA (1)...(19): siRNA sense strand
ccaaagcgcuuaauagauu

SEQ ID NO: 1342255 - RNA, 19 nt, Homo sapiens
  misc_RNA (1)...(19): siRNA sense strand
ggaugucacuuucaacuua

SEQ ID NO: 1342256 - RNA, 19 nt, Homo sapiens
  misc_RNA (1)...(19): siRNA sense strand
gaacuugucuccaaauaca

SEQ ID NO: 1342257 - RNA, 19 nt, Homo sapiens
  misc_RNA (1)...(19): siRNA sense strand
gcucauaucuggaccaaau

SEQ ID NO: 1342258 - RNA, 19 nt, Homo sapiens
  misc_RNA (1)...(19): siRNA sense strand
ggaaggaugucacuuucaa

SEQ ID NO: 1342259 - RNA, 19 nt, Homo sapiens
  misc_RNA (1)...(19): siRNA sense strand
gcacaggcuugaagaaaga

SEQ ID NO: 1342260 - RNA, 19 nt, Homo sapiens
  misc_RNA (1)...(19): siRNA sense strand
gaaaggaucaguugccaaa

SEQ ID NO: 1342261 - RNA, 19 nt, Homo sapiens
  misc_RNA (1)...(19): siRNA sense strand
gagacaagguuauuucaug

SEQ ID NO: 1342262 - RNA, 19 nt, Homo sapiens
  misc_RNA (1)...(19): siRNA sense strand
agaaauguaugcagacuuu

SEQ ID NO: 1342263 - RNA, 19 nt, Homo sapiens
  misc_RNA (1)...(19): siRNA sense strand
gaacacagaacuaguuuca

SEQ ID NO: 1342264 - RNA, 19 nt, Homo sapiens
  misc_RNA (1)...(19): siRNA sense strand
ggaauggaauggugugaug

SEQ ID NO: 1342265 - RNA, 19 nt, Homo sapiens
  misc_RNA (1)...(19): siRNA sense strand
acacagaacuaguuucaga

SEQ ID NO: 1342266 - RNA, 19 nt, Homo sapiens
  misc_RNA (1)...(19): siRNA sense strand
gaaguugccuauaaucaag

SEQ ID NO: 1342267 - RNA, 19 nt, Homo sapiens
  misc_RNA (1)...(19): siRNA sense strand
caaauacagucccagaguu

SEQ ID NO: 1342268 - RNA, 19 nt, Homo sapiens
  misc_RNA (1)...(19): siRNA sense strand
ccaagaaguugccuauaau

SEQ ID NO: 1342269 - RNA, 19 nt, Homo sapiens
  misc_RNA (1)...(19): siRNA sense strand
caaaugauacugaagagaa

SEQ ID NO: 1342270 - RNA, 19 nt, Homo sapiens
  misc_RNA (1)...(19): siRNA sense strand
ggcaagaagcacagaauua

SEQ ID NO: 1342271 - RNA, 19 nt, Homo sapiens
  misc_RNA (1)...(19): siRNA sense strand
ggagaaugcuggguuuaug

SEQ ID NO: 1342272 - RNA, 19 nt, Homo sapiens
  misc_RNA (1)...(19): siRNA sense strand
ggaaggagaaggaaauuca

SEQ ID NO: 1342273 - RNA, 19 nt, Homo sapiens
  misc_RNA (1)...(19): siRNA sense strand
cacagcagcucgggaaaua

SEQ ID NO: 1342274 - RNA, 19 nt, Homo sapiens
  misc_RNA (1)...(19): siRNA sense strand
gaaauucagugggagacaa

SEQ ID NO: 1342275 - RNA, 19 nt, Homo sapiens
  misc_RNA (1)...(19): siRNA sense strand
cagaauuacugccgagauu

SEQ ID NO: 1342276 - RNA, 19 nt, Homo sapiens
  misc_RNA (1)...(19): siRNA sense strand
ggaaggaaaggaucaguug

SEQ ID NO: 1342277 - RNA, 19 nt, Homo sapiens
  misc_RNA (1)...(19): siRNA sense strand
ggaauggugugauguaugc

SEQ ID NO: 1342278 - RNA, 19 nt, Homo sapiens
  misc_RNA (1)...(19): siRNA sense strand
gaaggucuauccucacagu

SEQ ID NO: 1342279 - RNA, 19 nt, Homo sapiens
  misc_RNA (1)...(19): siRNA sense strand
gcacaagagcguuaucaug

SEQ ID NO: 1342280 - RNA, 19 nt, Homo sapiens
  misc_RNA (1)...(19): siRNA sense strand
gauggagaaugcuggguuu

SEQ ID NO: 1342281 - RNA, 19 nt, Homo sapiens
  misc_RNA (1)...(19): siRNA sense strand
gaugucacuuucaacuuaa

SEQ ID NO: 1342282 - RNA, 19 nt, Homo sapiens
  misc_RNA (1)...(19): siRNA sense strand
accaagaaguugccuauaa

SEQ ID NO: 1342283 - RNA, 19 nt, Homo sapiens
  misc_RNA (1)...(19): siRNA sense strand
gaagagaacacagaacuag

SEQ ID NO: 1342284 - RNA, 19 nt, Homo sapiens
  misc_RNA (1)...(19): siRNA sense strand
agacaagguuauuucauga

SEQ ID NO: 1342285 - RNA, 19 nt, Homo sapiens
  misc_RNA (1)...(19): siRNA sense strand
gugaacuugucuccaaaua

SEQ ID NO: 1342286 - RNA, 19 nt, Homo sapiens
  misc_RNA (1)...(19): siRNA sense strand
aauaucaucuuccacacua

SEQ ID NO: 1342287 - RNA, 19 nt, Homo sapiens
  misc_RNA (1)...(19): siRNA sense strand
gaggagaaugcaauauuaa

SEQ ID NO: 1342288 - RNA, 19 nt, Homo sapiens
  misc_RNA (1)...(19): siRNA sense strand
gaugcaauauaucaaccua

SEQ ID NO: 1342289 - RNA, 19 nt, Homo sapiens
  misc_RNA (1)...(19): siRNA sense strand
gaaaggaaggagaaggaaa

SEQ ID NO: 1342290 - RNA, 19 nt, Homo sapiens
  misc_RNA (1)...(19): siRNA sense strand
ucccguagaugcaauauau

SEQ ID NO: 1342291 - RNA, 19 nt, Homo sapiens
  misc_RNA (1)...(19): siRNA sense strand
gaucagaacgaguaugaau

SEQ ID NO: 1342292 - RNA, 19 nt, Homo sapiens
  misc_RNA (1)...(19): siRNA sense strand
gcagggcugugucucaugu

SEQ ID NO: 1342293 - RNA, 19 nt, Homo sapiens
  misc_RNA (1)...(19): siRNA sense strand
ugaggaaguuggaagauca

SEQ ID NO: 1342294 - RNA, 19 nt, Homo sapiens
  misc_RNA (1)...(19): siRNA sense strand
ggaauuaggaggagaaugc

SEQ ID NO: 1342295 - RNA, 19 nt, Homo sapiens
  misc_RNA (1)...(19): siRNA sense strand
caacguuuauucuugaaag

SEQ ID NO: 1342296 - RNA, 19 nt, Homo sapiens
  misc_RNA (1)...(19): siRNA sense strand
gagaaaggaaggagaagga

SEQ ID NO: 1342297 - RNA, 19 nt, Homo sapiens
  misc_RNA (1)...(19): siRNA sense strand
agaagaaagugaggaaguu

SEQ ID NO: 1342298 - RNA, 19 nt, Homo sapiens
  misc_RNA (1)...(19): siRNA sense strand
gcaagaagcacagaauuac

SEQ ID NO: 1342299 - RNA, 19 nt, Homo sapiens
  misc_RNA (1)...(19): siRNA sense strand
gagaacacagaacuaguuu

SEQ ID NO: 1342300 - RNA, 19 nt, Homo sapiens
  misc_RNA (1)...(19): siRNA sense strand
agaacuaguuucagaagga

SEQ ID NO: 1342301 - RNA, 19 nt, Homo sapiens
  misc_RNA (1)...(19): siRNA sense strand
gaugaaccauuacugaaac

SEQ ID NO: 1342302 - RNA, 19 nt, Homo sapiens
  misc_RNA (1)...(19): siRNA sense strand
gagaaugcuggguuuauga

SEQ ID NO: 1342303 - RNA, 19 nt, Homo sapiens
  misc_RNA (1)...(19): siRNA sense strand
gaacauuacauucucacau

SEQ ID NO: 1342304 - RNA, 19 nt, Homo sapiens
  misc_RNA (1)...(19): siRNA sense strand
gaugaacauuacauucuca

SEQ ID NO: 1342305 - RNA, 19 nt, Homo sapiens
  misc_RNA (1)...(19): siRNA sense strand
gagcagguuucccaucauc

SEQ ID NO: 1342306 - RNA, 19 nt, Homo sapiens
  misc_RNA (1)...(19): siRNA sense strand
ucacuuaauucuuccuugu

SEQ ID NO: 1342307 - RNA, 19 nt, Homo sapiens
  misc_RNA (1)...(19): siRNA sense strand
gaggagcacaagagcguua

SEQ ID NO: 1342308 - RNA, 19 nt, Homo sapiens
  misc_RNA (1)...(19): siRNA sense strand
cagcagugaagaugaauuu

SEQ ID NO: 1342309 - RNA, 19 nt, Homo sapiens
  misc_RNA (1)...(19): siRNA sense strand
gaagaaagugaggaaguug

SEQ ID NO: 1342310 - RNA, 19 nt, Homo sapiens
  misc_RNA (1)...(19): siRNA sense strand
gcagugaagaugaauuuua

SEQ ID NO: 1342311 - RNA, 19 nt, Homo sapiens
  misc_RNA (1)...(19): siRNA sense strand
gagcauuagugaccagaag

SEQ ID NO: 1342312 - RNA, 19 nt, Homo sapiens
  misc_RNA (1)...(19): siRNA sense strand
guaguucuuccaacguuua

SEQ ID NO: 1342313 - RNA, 19 nt, Homo sapiens
  misc_RNA (1)...(19): siRNA sense strand
uggaagaucagaacgagua

SEQ ID NO: 1342314 - RNA, 19 nt, Homo sapiens
  misc_RNA (1)...(19): siRNA sense strand
ggacaucaucagacuccua

SEQ ID NO: 1342315 - RNA, 19 nt, Homo sapiens
  misc_RNA (1)...(19): siRNA sense strand
caagguuauuucaugaaga

SEQ ID NO: 1342316 - RNA, 19 nt, Homo sapiens
  misc_RNA (1)...(19): siRNA sense strand
acacuaaacccuucuaugg

SEQ ID NO: 1342317 - RNA, 19 nt, Homo sapiens
  misc_RNA (1)...(19): siRNA sense strand
gauaccacagaaucacuua

SEQ ID NO: 1342318 - RNA, 19 nt, Homo sapiens
  misc_RNA (1)...(19): siRNA sense strand
gcagaagcccgagaaagga

SEQ ID NO: 1342319 - RNA, 19 nt, Homo sapiens
  misc_RNA (1)...(19): siRNA sense strand
gugcaaauaucaucuucca

SEQ ID NO: 1342320 - RNA, 19 nt, Homo sapiens
  misc_RNA (1)...(19): siRNA sense strand
acaauucaaugcucauauc

SEQ ID NO: 1342321 - RNA, 19 nt, Homo sapiens
  misc_RNA (1)...(19): siRNA sense strand
gaagauacaauucaaugcu

SEQ ID NO: 1342322 - RNA, 19 nt, Homo sapiens
  misc_RNA (1)...(19): siRNA sense strand
gaugcugaccuguuugauu

SEQ ID NO: 1342323 - RNA, 19 nt, Homo sapiens
  misc_RNA (1)...(19): siRNA sense strand
cacgugaacuugucuccaa

SEQ ID NO: 1342324 - RNA, 19 nt, Homo sapiens
  misc_RNA (1)...(19): siRNA sense strand
ucaugaagauggagaaugc

SEQ ID NO: 1342325 - RNA, 19 nt, Homo sapiens
  misc_RNA (1)...(19): siRNA sense strand
uuaugaugcugaugaauuc

SEQ ID NO: 1342326 - RNA, 19 nt, Homo sapiens
  misc_RNA (1)...(19): siRNA sense strand
caucucuugucgcagguua

SEQ ID NO: 1342327 - RNA, 19 nt, Homo sapiens
  misc_RNA (1)...(19): siRNA sense strand
gguaguucuuccaacguuu

SEQ ID NO: 1342328 - RNA, 19 nt, Homo sapiens
  misc_RNA (1)...(19): siRNA sense strand
caaagcgcuuaauagauuc

SEQ ID NO: 1342329 - RNA, 19 nt, Homo sapiens
  misc_RNA (1)...(19): siRNA sense strand
caagugaugcugaccuguu

SEQ ID NO: 1342330 - RNA, 19 nt, Homo sapiens
  misc_RNA (1)...(19): siRNA sense strand
ugaugaaccauuacugaaa

SEQ ID NO: 1342331 - RNA, 19 nt, Homo sapiens
  misc_RNA (1)...(19): siRNA sense strand
gggcaagaagcacagaauu

SEQ ID NO: 1342332 - RNA, 19 nt, Homo sapiens
  misc_RNA (1)...(19): siRNA sense strand
cuuccaacguuuauucuug

SEQ ID NO: 1342333 - RNA, 19 nt, Homo sapiens
  misc_RNA (1)...(19): siRNA sense strand
agacuuggaauggaucuua

SEQ ID NO: 1342334 - RNA, 19 nt, Homo sapiens
  misc_RNA (1)...(19): siRNA sense strand
caagagcguuaucaugcau

SEQ ID NO: 1342335 - RNA, 19 nt, Homo sapiens
  misc_RNA (1)...(19): siRNA sense strand
aagugaugcugaccuguuu

SEQ ID NO: 1342336 - RNA, 19 nt, Homo sapiens
  misc_RNA (1)...(19): siRNA sense strand
augcugaccuguuugauuc

SEQ ID NO: 1342337 - RNA, 19 nt, Homo sapiens
  misc_RNA (1)...(19): siRNA sense strand
aaugcuggguuuaugauga

SEQ ID NO: 1342338 - RNA, 19 nt, Homo sapiens
  misc_RNA (1)...(19): siRNA sense strand
gaaguuggaagaucagaac

SEQ ID NO: 1342339 - RNA, 19 nt, Homo sapiens
  misc_RNA (1)...(19): siRNA sense strand
agacuaugaugaacauuac

SEQ ID NO: 1342340 - RNA, 19 nt, Homo sapiens
  misc_RNA (1)...(19): siRNA sense strand
agagaacacagaacuaguu

SEQ ID NO: 1342341 - RNA, 19 nt, Homo sapiens
  misc_RNA (1)...(19): siRNA sense strand
ucccaaggaucgaaugguu

SEQ ID NO: 1342342 - RNA, 19 nt, Homo sapiens
  misc_RNA (1)...(19): siRNA sense strand
ggaccuguuugugagcauu

SEQ ID NO: 1342343 - RNA, 19 nt, Homo sapiens
  misc_RNA (1)...(19): siRNA sense strand
ugauucacaugaugacaga

SEQ ID NO: 1342344 - RNA, 19 nt, Homo sapiens
  misc_RNA (1)...(19): siRNA sense strand
ccaaauacagucccagagu

SEQ ID NO: 1342345 - RNA, 19 nt, Homo sapiens
  misc_RNA (1)...(19): siRNA sense strand
uaugaugaaccauuacuga

SEQ ID NO: 1342346 - RNA, 19 nt, Homo sapiens
  misc_RNA (1)...(19): siRNA sense strand
ucaagaagaaagugaggaa

SEQ ID NO: 1342347 - RNA, 19 nt, Homo sapiens
  misc_RNA (1)...(19): siRNA sense strand
gguuagacuuggaauggau

SEQ ID NO: 1342348 - RNA, 19 nt, Homo sapiens
  misc_RNA (1)...(19): siRNA sense strand
gcacauccggaccuguuug

SEQ ID NO: 1342349 - RNA, 19 nt, Homo sapiens
  misc_RNA (1)...(19): siRNA sense strand
aaaggaaggagaaggaaau

SEQ ID NO: 1342350 - RNA, 19 nt, Homo sapiens
  misc_RNA (1)...(19): siRNA sense strand
ugaagagaacacagaacua

SEQ ID NO: 1342351 - RNA, 19 nt, Homo sapiens
  misc_RNA (1)...(19): siRNA sense strand
ggaaguuggaagaucagaa

SEQ ID NO: 1342352 - RNA, 19 nt, Homo sapiens
  misc_RNA (1)...(19): siRNA sense strand
aagaucagaacgaguauga

SEQ ID NO: 1342353 - RNA, 19 nt, Homo sapiens
  misc_RNA (1)...(19): siRNA sense strand
ggaggagaaugcaauauua

SEQ ID NO: 1342354 - RNA, 19 nt, Homo sapiens
  misc_RNA (1)...(19): siRNA sense strand
ccaaagcgcuuaauagauu

SEQ ID NO: 1342355 - RNA, 19 nt, Homo sapiens
  misc_RNA (1)...(19): siRNA sense strand
ggaugucacuuucaacuua

SEQ ID NO: 1342356 - RNA, 19 nt, Homo sapiens
  misc_RNA (1)...(19): siRNA sense strand
caaagaagaugaacagaga

SEQ ID NO: 1342357 - RNA, 19 nt, Homo sapiens
  misc_RNA (1)...(19): siRNA sense strand
gaacuugucuccaaauaca

SEQ ID NO: 1342358 - RNA, 19 nt, Homo sapiens
  misc_RNA (1)...(19): siRNA sense strand
gcucauaucuggaccaaau

SEQ ID NO: 1342359 - RNA, 19 nt, Homo sapiens
  misc_RNA (1)...(19): siRNA sense strand
ggaaggaugucacuuucaa

SEQ ID NO: 1342360 - RNA, 19 nt, Homo sapiens
  misc_RNA (1)...(19): siRNA sense strand
gcacaggcuugaagaaaga

SEQ ID NO: 1342361 - RNA, 19 nt, Homo sapiens
  misc_RNA (1)...(19): siRNA sense strand
gaaaggaucaguugccaaa

SEQ ID NO: 1342362 - RNA, 19 nt, Homo sapiens
  misc_RNA (1)...(19): siRNA sense strand
gagacaagguuauuucaug

SEQ ID NO: 1342363 - RNA, 19 nt, Homo sapiens
  misc_RNA (1)...(19): siRNA sense strand
agaaauguaugcagacuuu

SEQ ID NO: 1342364 - RNA, 19 nt, Homo sapiens
  misc_RNA (1)...(19): siRNA sense strand
gaacacagaacuaguuuca

SEQ ID NO: 1342365 - RNA, 19 nt, Homo sapiens
  misc_RNA (1)...(19): siRNA sense strand
ggaauggaauggugugaug

SEQ ID NO: 1342366 - RNA, 19 nt, Homo sapiens
  misc_RNA (1)...(19): siRNA sense strand
acacagaacuaguuucaga

SEQ ID NO: 1342367 - RNA, 19 nt, Homo sapiens
  misc_RNA (1)...(19): siRNA sense strand
gaaguugccuauaaucaag

SEQ ID NO: 1342368 - RNA, 19 nt, Homo sapiens
  misc_RNA (1)...(19): siRNA sense strand
caaauacagucccagaguu

SEQ ID NO: 1342369 - RNA, 19 nt, Homo sapiens
  misc_RNA (1)...(19): siRNA sense strand
ccaagaaguugccuauaau

SEQ ID NO: 1342370 - RNA, 19 nt, Homo sapiens
  misc_RNA (1)...(19): siRNA sense strand
gacaacaaauagcauggua

SEQ ID NO: 1342371 - RNA, 19 nt, Homo sapiens
  misc_RNA (1)...(19): siRNA sense strand
caaaugauacugaagagaa

SEQ ID NO: 1342372 - RNA, 19 nt, Homo sapiens
  misc_RNA (1)...(19): siRNA sense strand
ggcaagaagcacagaauua

SEQ ID NO: 1342373 - RNA, 19 nt, Homo sapiens
  misc_RNA (1)...(19): siRNA sense strand
ggagaaugcuggguuuaug

SEQ ID NO: 1342374 - RNA, 19 nt, Homo sapiens
  misc_RNA (1)...(19): siRNA sense strand
caaauagcaugguagaauc

SEQ ID NO: 1342375 - RNA, 19 nt, Homo sapiens
  misc_RNA (1)...(19): siRNA sense strand
ggaaggagaaggaaauuca

SEQ ID NO: 1342376 - RNA, 19 nt, Homo sapiens
  misc_RNA (1)...(19): siRNA sense strand
gaagaugaacagagaaaga

SEQ ID NO: 1342377 - RNA, 19 nt, Homo sapiens
  misc_RNA (1)...(19): siRNA sense strand
cacagcagcucgggaaaua

SEQ ID NO: 1342378 - RNA, 19 nt, Homo sapiens
  misc_RNA (1)...(19): siRNA sense strand
gaaauucagugggagacaa

SEQ ID NO: 1342379 - RNA, 19 nt, Homo sapiens
  misc_RNA (1)...(19): siRNA sense strand
cagaauuacugccgagauu

SEQ ID NO: 1342380 - RNA, 19 nt, Homo sapiens
  misc_RNA (1)...(19): siRNA sense strand
ggaaggaaaggaucaguug

SEQ ID NO: 1342381 - RNA, 19 nt, Homo sapiens
  misc_RNA (1)...(19): siRNA sense strand
ggaauggugugauguaugc

SEQ ID NO: 1342382 - RNA, 19 nt, Homo sapiens
  misc_RNA (1)...(19): siRNA sense strand
gaaggucuauccucacagu

SEQ ID NO: 1342383 - RNA, 19 nt, Homo sapiens
  misc_RNA (1)...(19): siRNA sense strand
gcacaagagcguuaucaug

SEQ ID NO: 1342384 - RNA, 19 nt, Homo sapiens
  misc_RNA (1)...(19): siRNA sense strand
gauggagaaugcuggguuu

SEQ ID NO: 1342385 - RNA, 19 nt, Homo sapiens
  misc_RNA (1)...(19): siRNA sense strand
gaugucacuuucaacuuaa

SEQ ID NO: 1342386 - RNA, 19 nt, Homo sapiens
  misc_RNA (1)...(19): siRNA sense strand
gaacagagaaagaaaauug

SEQ ID NO: 1342387 - RNA, 19 nt, Homo sapiens
  misc_RNA (1)...(19): siRNA sense strand
ucaaagagacaacaaauag

SEQ ID NO: 1342388 - RNA, 19 nt, Homo sapiens
  misc_RNA (1)...(19): siRNA sense strand
accaagaaguugccuauaa

SEQ ID NO: 1342389 - RNA, 19 nt, Homo sapiens
  misc_RNA (1)...(19): siRNA sense strand
gaagagaacacagaacuag

SEQ ID NO: 1342390 - RNA, 19 nt, Homo sapiens
  misc_RNA (1)...(19): siRNA sense strand
agacaagguuauuucauga

SEQ ID NO: 1342391 - RNA, 19 nt, Homo sapiens
  misc_RNA (1)...(19): siRNA sense strand
gugaacuugucuccaaaua

SEQ ID NO: 1342392 - RNA, 19 nt, Homo sapiens
  misc_RNA (1)...(19): siRNA sense strand
aauaucaucuuccacacua

SEQ ID NO: 1342393 - RNA, 19 nt, Homo sapiens
  misc_RNA (1)...(19): siRNA sense strand
gaggagaaugcaauauuaa

SEQ ID NO: 1342394 - RNA, 19 nt, Homo sapiens
  misc_RNA (1)...(19): siRNA sense strand
gaugcaauauaucaaccua

SEQ ID NO: 1342395 - RNA, 19 nt, Homo sapiens
  misc_RNA (1)...(19): siRNA sense strand
gaaaggaaggagaaggaaa

SEQ ID NO: 1342396 - RNA, 19 nt, Homo sapiens
  misc_RNA (1)...(19): siRNA sense strand
ucccguagaugcaauauau

SEQ ID NO: 1342397 - RNA, 19 nt, Homo sapiens
  misc_RNA (1)...(19): siRNA sense strand
gaucagaacgaguaugaau

SEQ ID NO: 1342398 - RNA, 19 nt, Homo sapiens
  misc_RNA (1)...(19): siRNA sense strand
caacaaauagcaugguaga

SEQ ID NO: 1342399 - RNA, 19 nt, Homo sapiens
  misc_RNA (1)...(19): siRNA sense strand
gcagggcugugucucaugu

SEQ ID NO: 1342400 - RNA, 19 nt, Homo sapiens
  misc_RNA (1)...(19): siRNA sense strand
ugaggaaguuggaagauca

SEQ ID NO: 1342401 - RNA, 19 nt, Homo sapiens
  misc_RNA (1)...(19): siRNA sense strand
ggaauuaggaggagaaugc

SEQ ID NO: 1342402 - RNA, 19 nt, Homo sapiens
  misc_RNA (1)...(19): siRNA sense strand
caacguuuauucuugaaag

SEQ ID NO: 1342403 - RNA, 19 nt, Homo sapiens
  misc_RNA (1)...(19): siRNA sense strand
gagaaaggaaggagaagga

SEQ ID NO: 1342404 - RNA, 19 nt, Homo sapiens
  misc_RNA (1)...(19): siRNA sense strand
agaagaaagugaggaaguu

SEQ ID NO: 1342405 - RNA, 19 nt, Homo sapiens
  misc_RNA (1)...(19): siRNA sense strand
gcaagaagcacagaauuac

SEQ ID NO: 1342406 - RNA, 19 nt, Homo sapiens
  misc_RNA (1)...(19): siRNA sense strand
gagaacacagaacuaguuu

SEQ ID NO: 1342407 - RNA, 19 nt, Homo sapiens
  misc_RNA (1)...(19): siRNA sense strand
agaacuaguuucagaagga

SEQ ID NO: 1342408 - RNA, 19 nt, Homo sapiens
  misc_RNA (1)...(19): siRNA sense strand
gaugaaccauuacugaaac

SEQ ID NO: 1342409 - RNA, 19 nt, Homo sapiens
  misc_RNA (1)...(19): siRNA sense strand
gagaaugcuggguuuauga

SEQ ID NO: 1342410 - RNA, 19 nt, Homo sapiens
  misc_RNA (1)...(19): siRNA sense strand
gaacauuacauucucacau

SEQ ID NO: 1342411 - RNA, 19 nt, Homo sapiens
  misc_RNA (1)...(19): siRNA sense strand
gaugaacauuacauucuca

SEQ ID NO: 1342412 - RNA, 19 nt, Homo sapiens
  misc_RNA (1)...(19): siRNA sense strand
gagcagguuucccaucauc

SEQ ID NO: 1342413 - RNA, 19 nt, Homo sapiens
  misc_RNA (1)...(19): siRNA sense strand
ucacuuaauucuuccuugu

SEQ ID NO: 1342414 - RNA, 19 nt, Homo sapiens
  misc_RNA (1)...(19): siRNA sense strand
gaggagcacaagagcguua

SEQ ID NO: 1342415 - RNA, 19 nt, Homo sapiens
  misc_RNA (1)...(19): siRNA sense strand
cagcagugaagaugaauuu

SEQ ID NO: 1342416 - RNA, 19 nt, Homo sapiens
  misc_RNA (1)...(19): siRNA sense strand
gaagaaagugaggaaguug

SEQ ID NO: 1342417 - RNA, 19 nt, Homo sapiens
  misc_RNA (1)...(19): siRNA sense strand
gcagugaagaugaauuuua

SEQ ID NO: 1342418 - RNA, 19 nt, Homo sapiens
  misc_RNA (1)...(19): siRNA sense strand
gagcauuagugaccagaag

SEQ ID NO: 1342419 - RNA, 19 nt, Homo sapiens
  misc_RNA (1)...(19): siRNA sense strand
guaguucuuccaacguuua

SEQ ID NO: 1342420 - RNA, 19 nt, Homo sapiens
  misc_RNA (1)...(19): siRNA sense strand
uggaagaucagaacgagua

SEQ ID NO: 1342421 - RNA, 19 nt, Homo sapiens
  misc_RNA (1)...(19): siRNA sense strand
ggacaucaucagacuccua

SEQ ID NO: 1342422 - RNA, 19 nt, Homo sapiens
  misc_RNA (1)...(19): siRNA sense strand
caagguuauuucaugaaga

SEQ ID NO: 1342423 - RNA, 19 nt, Homo sapiens
  misc_RNA (1)...(19): siRNA sense strand
acacuaaacccuucuaugg

SEQ ID NO: 1342424 - RNA, 19 nt, Homo sapiens
  misc_RNA (1)...(19): siRNA sense strand
gauaccacagaaucacuua

SEQ ID NO: 1342425 - RNA, 19 nt, Homo sapiens
  misc_RNA (1)...(19): siRNA sense strand
gcagaagcccgagaaagga

SEQ ID NO: 1342426 - RNA, 19 nt, Homo sapiens
  misc_RNA (1)...(19): siRNA sense strand
acaaauagcaugguagaau

SEQ ID NO: 1342427 - RNA, 19 nt, Homo sapiens
  misc_RNA (1)...(19): siRNA sense strand
gugcaaauaucaucuucca

SEQ ID NO: 1342428 - RNA, 19 nt, Homo sapiens
  misc_RNA (1)...(19): siRNA sense strand
acaauucaaugcucauauc

SEQ ID NO: 1342429 - RNA, 19 nt, Homo sapiens
  misc_RNA (1)...(19): siRNA sense strand
gaagauacaauucaaugcu

SEQ ID NO: 1342430 - RNA, 19 nt, Homo sapiens
  misc_RNA (1)...(19): siRNA sense strand
gaugcugaccuguuugauu

SEQ ID NO: 1342431 - RNA, 19 nt, Homo sapiens
  misc_RNA (1)...(19): siRNA sense strand
cacgugaacuugucuccaa

SEQ ID NO: 1342432 - RNA, 19 nt, Homo sapiens
  misc_RNA (1)...(19): siRNA sense strand
ucaugaagauggagaaugc

SEQ ID NO: 1342433 - RNA, 19 nt, Homo sapiens
  misc_RNA (1)...(19): siRNA sense strand
uuaugaugcugaugaauuc

SEQ ID NO: 1342434 - RNA, 19 nt, Homo sapiens
  misc_RNA (1)...(19): siRNA sense strand
caucucuugucgcagguua

SEQ ID NO: 1342435 - RNA, 19 nt, Homo sapiens
  misc_RNA (1)...(19): siRNA sense strand
gguaguucuuccaacguuu

SEQ ID NO: 1342436 - RNA, 19 nt, Homo sapiens
  misc_RNA (1)...(19): siRNA sense strand
caaagcgcuuaauagauuc

SEQ ID NO: 1342437 - RNA, 19 nt, Homo sapiens
  misc_RNA (1)...(19): siRNA sense strand
caagugaugcugaccuguu

SEQ ID NO: 1342438 - RNA, 19 nt, Homo sapiens
  misc_RNA (1)...(19): siRNA sense strand
ugaugaaccauuacugaaa

SEQ ID NO: 1342439 - RNA, 19 nt, Homo sapiens
  misc_RNA (1)...(19): siRNA sense strand
gggcaagaagcacagaauu

SEQ ID NO: 1342440 - RNA, 19 nt, Homo sapiens
  misc_RNA (1)...(19): siRNA sense strand
cuuccaacguuuauucuug

SEQ ID NO: 1342441 - RNA, 19 nt, Homo sapiens
  misc_RNA (1)...(19): siRNA sense strand
agacuuggaauggaucuua

SEQ ID NO: 1342442 - RNA, 19 nt, Homo sapiens
  misc_RNA (1)...(19): siRNA sense strand
caagagcguuaucaugcau

SEQ ID NO: 1342443 - RNA, 19 nt, Homo sapiens
  misc_RNA (1)...(19): siRNA sense strand
aagugaugcugaccuguuu

SEQ ID NO: 1342444 - RNA, 19 nt, Homo sapiens
  misc_RNA (1)...(19): siRNA sense strand
augcugaccuguuugauuc

SEQ ID NO: 1342445 - RNA, 19 nt, Homo sapiens
  misc_RNA (1)...(19): siRNA sense strand
aaugcuggguuuaugauga

SEQ ID NO: 1342446 - RNA, 19 nt, Homo sapiens
  misc_RNA (1)...(19): siRNA sense strand
gaaguuggaagaucagaac

SEQ ID NO: 1342447 - RNA, 19 nt, Homo sapiens
  misc_RNA (1)...(19): siRNA sense strand
agacuaugaugaacauuac

SEQ ID NO: 1342448 - RNA, 19 nt, Homo sapiens
  misc_RNA (1)...(19): siRNA sense strand
agagaacacagaacuaguu

SEQ ID NO: 1342449 - RNA, 19 nt, Homo sapiens
  misc_RNA (1)...(19): siRNA sense strand
ucccaaggaucgaaugguu

SEQ ID NO: 1342450 - RNA, 19 nt, Homo sapiens
  misc_RNA (1)...(19): siRNA sense strand
ggaccuguuugugagcauu

SEQ ID NO: 1342451 - RNA, 19 nt, Homo sapiens
  misc_RNA (1)...(19): siRNA sense strand
ugauucacaugaugacaga

SEQ ID NO: 1342452 - RNA, 19 nt, Homo sapiens
  misc_RNA (1)...(19): siRNA sense strand
uaugaugaaccauuacuga

SEQ ID NO: 1342453 - RNA, 19 nt, Homo sapiens
  misc_RNA (1)...(19): siRNA sense strand
ggaggagaaugcaauauua

SEQ ID NO: 1342454 - RNA, 19 nt, Homo sapiens
  misc_RNA (1)...(19): siRNA sense strand
ccaaagcgcuuaauagauu

SEQ ID NO: 1342455 - RNA, 19 nt, Homo sapiens
  misc_RNA (1)...(19): siRNA sense strand
ggaugucacuuucaacuua

SEQ ID NO: 1342456 - RNA, 19 nt, Homo sapiens
  misc_RNA (1)...(19): siRNA sense strand
caaagaagaugaacagaga

SEQ ID NO: 1342457 - RNA, 19 nt, Homo sapiens
  misc_RNA (1)...(19): siRNA sense strand
gaacuugucuccaaauaca

SEQ ID NO: 1342458 - RNA, 19 nt, Homo sapiens
  misc_RNA (1)...(19): siRNA sense strand
gcucauaucuggaccaaau

SEQ ID NO: 1342459 - RNA, 19 nt, Homo sapiens
  misc_RNA (1)...(19): siRNA sense strand
ggaaggaugucacuuucaa

SEQ ID NO: 1342460 - RNA, 19 nt, Homo sapiens
  misc_RNA (1)...(19): siRNA sense strand
gcacaggcuugaagaaaga

SEQ ID NO: 1342461 - RNA, 19 nt, Homo sapiens
  misc_RNA (1)...(19): siRNA sense strand
gaaaggaucaguugccaaa

SEQ ID NO: 1342462 - RNA, 19 nt, Homo sapiens
  misc_RNA (1)...(19): siRNA sense strand
gagacaagguuauuucaug

SEQ ID NO: 1342463 - RNA, 19 nt, Homo sapiens
  misc_RNA (1)...(19): siRNA sense strand
agaaauguaugcagacuuu

SEQ ID NO: 1342464 - RNA, 19 nt, Homo sapiens
  misc_RNA (1)...(19): siRNA sense strand
gaacacagaacuaguuuca

SEQ ID NO: 1342465 - RNA, 19 nt, Homo sapiens
  misc_RNA (1)...(19): siRNA sense strand
ggaauggaauggugugaug

SEQ ID NO: 1342466 - RNA, 19 nt, Homo sapiens
  misc_RNA (1)...(19): siRNA sense strand
acacagaacuaguuucaga

SEQ ID NO: 1342467 - RNA, 19 nt, Homo sapiens
  misc_RNA (1)...(19): siRNA sense strand
gaaguugccuauaaucaag

SEQ ID NO: 1342468 - RNA, 19 nt, Homo sapiens
  misc_RNA (1)...(19): siRNA sense strand
caaauacagucccagaguu

SEQ ID NO: 1342469 - RNA, 19 nt, Homo sapiens
  misc_RNA (1)...(19): siRNA sense strand
ccaagaaguugccuauaau

SEQ ID NO: 1342470 - RNA, 19 nt, Homo sapiens
  misc_RNA (1)...(19): siRNA sense strand
gacaacaaauagcauggua

SEQ ID NO: 1342471 - RNA, 19 nt, Homo sapiens
  misc_RNA (1)...(19): siRNA sense strand
caaaugauacugaagagaa

SEQ ID NO: 1342472 - RNA, 19 nt, Homo sapiens
  misc_RNA (1)...(19): siRNA sense strand
ggcaagaagcacagaauua

SEQ ID NO: 1342473 - RNA, 19 nt, Homo sapiens
  misc_RNA (1)...(19): siRNA sense strand
ggagaaugcuggguuuaug

SEQ ID NO: 1342474 - RNA, 19 nt, Homo sapiens
  misc_RNA (1)...(19): siRNA sense strand
caaauagcaugguagaauc

SEQ ID NO: 1342475 - RNA, 19 nt, Homo sapiens
  misc_RNA (1)...(19): siRNA sense strand
ggaaggagaaggaaauuca

SEQ ID NO: 1342476 - RNA, 19 nt, Homo sapiens
  misc_RNA (1)...(19): siRNA sense strand
gaagaugaacagagaaaga

SEQ ID NO: 1342477 - RNA, 19 nt, Homo sapiens
  misc_RNA (1)...(19): siRNA sense strand
cacagcagcucgggaaaua

SEQ ID NO: 1342478 - RNA, 19 nt, Homo sapiens
  misc_RNA (1)...(19): siRNA sense strand
gaaauucagugggagacaa

SEQ ID NO: 1342479 - RNA, 19 nt, Homo sapiens
  misc_RNA (1)...(19): siRNA sense strand
cagaauuacugccgagauu

SEQ ID NO: 1342480 - RNA, 19 nt, Homo sapiens
  misc_RNA (1)...(19): siRNA sense strand
ggaaggaaaggaucaguug

SEQ ID NO: 1342481 - RNA, 19 nt, Homo sapiens
  misc_RNA (1)...(19): siRNA sense strand
ggaauggugugauguaugc

SEQ ID NO: 1342482 - RNA, 19 nt, Homo sapiens
  misc_RNA (1)...(19): siRNA sense strand
gaaggucuauccucacagu

SEQ ID NO: 1342483 - RNA, 19 nt, Homo sapiens
  misc_RNA (1)...(19): siRNA sense strand
gcacaagagcguuaucaug

SEQ ID NO: 1342484 - RNA, 19 nt, Homo sapiens
  misc_RNA (1)...(19): siRNA sense strand
gauggagaaugcuggguuu

SEQ ID NO: 1342485 - RNA, 19 nt, Homo sapiens
  misc_RNA (1)...(19): siRNA sense strand
gaugucacuuucaacuuaa

SEQ ID NO: 1342486 - RNA, 19 nt, Homo sapiens
  misc_RNA (1)...(19): siRNA sense strand
gaacagagaaagaaaauug

SEQ ID NO: 1342487 - RNA, 19 nt, Homo sapiens
  misc_RNA (1)...(19): siRNA sense strand
ucaaagagacaacaaauag

SEQ ID NO: 1342488 - RNA, 19 nt, Homo sapiens
  misc_RNA (1)...(19): siRNA sense strand
accaagaaguugccuauaa

SEQ ID NO: 1342489 - RNA, 19 nt, Homo sapiens
  misc_RNA (1)...(19): siRNA sense strand
gaagagaacacagaacuag

SEQ ID NO: 1342490 - RNA, 19 nt, Homo sapiens
  misc_RNA (1)...(19): siRNA sense strand
agacaagguuauuucauga

SEQ ID NO: 1342491 - RNA, 19 nt, Homo sapiens
  misc_RNA (1)...(19): siRNA sense strand
gugaacuugucuccaaaua

SEQ ID NO: 1342492 - RNA, 19 nt, Homo sapiens
  misc_RNA (1)...(19): siRNA sense strand
aauaucaucuuccacacua

SEQ ID NO: 1342493 - RNA, 19 nt, Homo sapiens
  misc_RNA (1)...(19): siRNA sense strand
gaggagaaugcaauauuaa

SEQ ID NO: 1342494 - RNA, 19 nt, Homo sapiens
  misc_RNA (1)...(19): siRNA sense strand
gaugcaauauaucaaccua

SEQ ID NO: 1342495 - RNA, 19 nt, Homo sapiens
  misc_RNA (1)...(19): siRNA sense strand
gaaaggaaggagaaggaaa

SEQ ID NO: 1342496 - RNA, 19 nt, Homo sapiens
  misc_RNA (1)...(19): siRNA sense strand
ucccguagaugcaauauau

SEQ ID NO: 1342497 - RNA, 19 nt, Homo sapiens
  misc_RNA (1)...(19): siRNA sense strand
gaucagaacgaguaugaau

SEQ ID NO: 1342498 - RNA, 19 nt, Homo sapiens
  misc_RNA (1)...(19): siRNA sense strand
caacaaauagcaugguaga

SEQ ID NO: 1342499 - RNA, 19 nt, Homo sapiens
  misc_RNA (1)...(19): siRNA sense strand
gcagggcugugucucaugu

SEQ ID NO: 1342500 - RNA, 19 nt, Homo sapiens
  misc_RNA (1)...(19): siRNA sense strand
ugaggaaguuggaagauca

SEQ ID NO: 1342501 - RNA, 19 nt, Homo sapiens
  misc_RNA (1)...(19): siRNA sense strand
ggaauuaggaggagaaugc

SEQ ID NO: 1342502 - RNA, 19 nt, Homo sapiens
  misc_RNA (1)...(19): siRNA sense strand
caacguuuauucuugaaag

SEQ ID NO: 1342503 - RNA, 19 nt, Homo sapiens
  misc_RNA (1)...(19): siRNA sense strand
gagaaaggaaggagaagga

SEQ ID NO: 1342504 - RNA, 19 nt, Homo sapiens
  misc_RNA (1)...(19): siRNA sense strand
agaagaaagugaggaaguu

SEQ ID NO: 1342505 - RNA, 19 nt, Homo sapiens
  misc_RNA (1)...(19): siRNA sense strand
gcaagaagcacagaauuac

SEQ ID NO: 1342506 - RNA, 19 nt, Homo sapiens
  misc_RNA (1)...(19): siRNA sense strand
gagaacacagaacuaguuu

SEQ ID NO: 1342507 - RNA, 19 nt, Homo sapiens
  misc_RNA (1)...(19): siRNA sense strand
agaacuaguuucagaagga

SEQ ID NO: 1342508 - RNA, 19 nt, Homo sapiens
  misc_RNA (1)...(19): siRNA sense strand
gaugaaccauuacugaaac

SEQ ID NO: 1342509 - RNA, 19 nt, Homo sapiens
  misc_RNA (1)...(19): siRNA sense strand
gagaaugcuggguuuauga

SEQ ID NO: 1342510 - RNA, 19 nt, Homo sapiens
  misc_RNA (1)...(19): siRNA sense strand
gaacauuacauucucacau

SEQ ID NO: 1342511 - RNA, 19 nt, Homo sapiens
  misc_RNA (1)...(19): siRNA sense strand
gaugaacauuacauucuca

SEQ ID NO: 1342512 - RNA, 19 nt, Homo sapiens
  misc_RNA (1)...(19): siRNA sense strand
gagcagguuucccaucauc

SEQ ID NO: 1342513 - RNA, 19 nt, Homo sapiens
  misc_RNA (1)...(19): siRNA sense strand
ucacuuaauucuuccuugu

SEQ ID NO: 1342514 - RNA, 19 nt, Homo sapiens
  misc_RNA (1)...(19): siRNA sense strand
gaggagcacaagagcguua

SEQ ID NO: 1342515 - RNA, 19 nt, Homo sapiens
  misc_RNA (1)...(19): siRNA sense strand
cagcagugaagaugaauuu

SEQ ID NO: 1342516 - RNA, 19 nt, Homo sapiens
  misc_RNA (1)...(19): siRNA sense strand
gaagaaagugaggaaguug

SEQ ID NO: 1342517 - RNA, 19 nt, Homo sapiens
  misc_RNA (1)...(19): siRNA sense strand
gcagugaagaugaauuuua

SEQ ID NO: 1342518 - RNA, 19 nt, Homo sapiens
  misc_RNA (1)...(19): siRNA sense strand
gagcauuagugaccagaag

SEQ ID NO: 1342519 - RNA, 19 nt, Homo sapiens
  misc_RNA (1)...(19): siRNA sense strand
guaguucuuccaacguuua

SEQ ID NO: 1342520 - RNA, 19 nt, Homo sapiens
  misc_RNA (1)...(19): siRNA sense strand
uggaagaucagaacgagua

SEQ ID NO: 1342521 - RNA, 19 nt, Homo sapiens
  misc_RNA (1)...(19): siRNA sense strand
ggacaucaucagacuccua

SEQ ID NO: 1342522 - RNA, 19 nt, Homo sapiens
  misc_RNA (1)...(19): siRNA sense strand
caagguuauuucaugaaga

SEQ ID NO: 1342523 - RNA, 19 nt, Homo sapiens
  misc_RNA (1)...(19): siRNA sense strand
acacuaaacccuucuaugg

SEQ ID NO: 1342524 - RNA, 19 nt, Homo sapiens
  misc_RNA (1)...(19): siRNA sense strand
gauaccacagaaucacuua

SEQ ID NO: 1342525 - RNA, 19 nt, Homo sapiens
  misc_RNA (1)...(19): siRNA sense strand
gcagaagcccgagaaagga

SEQ ID NO: 1342526 - RNA, 19 nt, Homo sapiens
  misc_RNA (1)...(19): siRNA sense strand
acaaauagcaugguagaau

SEQ ID NO: 1342527 - RNA, 19 nt, Homo sapiens
  misc_RNA (1)...(19): siRNA sense strand
gugcaaauaucaucuucca

SEQ ID NO: 1342528 - RNA, 19 nt, Homo sapiens
  misc_RNA (1)...(19): siRNA sense strand
acaauucaaugcucauauc

SEQ ID NO: 1342529 - RNA, 19 nt, Homo sapiens
  misc_RNA (1)...(19): siRNA sense strand
gaagauacaauucaaugcu

SEQ ID NO: 1342530 - RNA, 19 nt, Homo sapiens
  misc_RNA (1)...(19): siRNA sense strand
gaugcugaccuguuugauu

SEQ ID NO: 1342531 - RNA, 19 nt, Homo sapiens
  misc_RNA (1)...(19): siRNA sense strand
cacgugaacuugucuccaa

SEQ ID NO: 1342532 - RNA, 19 nt, Homo sapiens
  misc_RNA (1)...(19): siRNA sense strand
ucaugaagauggagaaugc

SEQ ID NO: 1342533 - RNA, 19 nt, Homo sapiens
  misc_RNA (1)...(19): siRNA sense strand
uuaugaugcugaugaauuc

SEQ ID NO: 1342534 - RNA, 19 nt, Homo sapiens
  misc_RNA (1)...(19): siRNA sense strand
caucucuugucgcagguua

SEQ ID NO: 1342535 - RNA, 19 nt, Homo sapiens
  misc_RNA (1)...(19): siRNA sense strand
gguaguucuuccaacguuu

SEQ ID NO: 1342536 - RNA, 19 nt, Homo sapiens
  misc_RNA (1)...(19): siRNA sense strand
caaagcgcuuaauagauuc

SEQ ID NO: 1342537 - RNA, 19 nt, Homo sapiens
  misc_RNA (1)...(19): siRNA sense strand
caagugaugcugaccuguu

SEQ ID NO: 1342538 - RNA, 19 nt, Homo sapiens
  misc_RNA (1)...(19): siRNA sense strand
ugaugaaccauuacugaaa

SEQ ID NO: 1342539 - RNA, 19 nt, Homo sapiens
  misc_RNA (1)...(19): siRNA sense strand
gggcaagaagcacagaauu

SEQ ID NO: 1342540 - RNA, 19 nt, Homo sapiens
  misc_RNA (1)...(19): siRNA sense strand
cuuccaacguuuauucuug

SEQ ID NO: 1342541 - RNA, 19 nt, Homo sapiens
  misc_RNA (1)...(19): siRNA sense strand
agacuuggaauggaucuua

SEQ ID NO: 1342542 - RNA, 19 nt, Homo sapiens
  misc_RNA (1)...(19): siRNA sense strand
caagagcguuaucaugcau

SEQ ID NO: 1342543 - RNA, 19 nt, Homo sapiens
  misc_RNA (1)...(19): siRNA sense strand
aagugaugcugaccuguuu

SEQ ID NO: 1342544 - RNA, 19 nt, Homo sapiens
  misc_RNA (1)...(19): siRNA sense strand
augcugaccuguuugauuc

SEQ ID NO: 1342545 - RNA, 19 nt, Homo sapiens
  misc_RNA (1)...(19): siRNA sense strand
aaugcuggguuuaugauga

SEQ ID NO: 1342546 - RNA, 19 nt, Homo sapiens
  misc_RNA (1)...(19): siRNA sense strand
gaaguuggaagaucagaac

SEQ ID NO: 1342547 - RNA, 19 nt, Homo sapiens
  misc_RNA (1)...(19): siRNA sense strand
agacuaugaugaacauuac

SEQ ID NO: 1342548 - RNA, 19 nt, Homo sapiens
  misc_RNA (1)...(19): siRNA sense strand
agagaacacagaacuaguu

SEQ ID NO: 1342549 - RNA, 19 nt, Homo sapiens
  misc_RNA (1)...(19): siRNA sense strand
ucccaaggaucgaaugguu

SEQ ID NO: 1342550 - RNA, 19 nt, Homo sapiens
  misc_RNA (1)...(19): siRNA sense strand
ggaccuguuugugagcauu

SEQ ID NO: 1342551 - RNA, 19 nt, Homo sapiens
  misc_RNA (1)...(19): siRNA sense strand
ugauucacaugaugacaga

SEQ ID NO: 1342552 - RNA, 19 nt, Homo sapiens
  misc_RNA (1)...(19): siRNA sense strand
uaugaugaaccauuacuga

SEQ ID NO: 1342553 - RNA, 19 nt, Homo sapiens
  misc_RNA (1)...(19): siRNA sense strand
ggaggagaaugcaauauua

SEQ ID NO: 1342554 - RNA, 19 nt, Homo sapiens
  misc_RNA (1)...(19): siRNA sense strand
ccaaagcgcuuaauagauu

SEQ ID NO: 1342555 - RNA, 19 nt, Homo sapiens
  misc_RNA (1)...(19): siRNA sense strand
ggaugucacuuucaacuua

SEQ ID NO: 1342556 - RNA, 19 nt, Homo sapiens
  misc_RNA (1)...(19): siRNA sense strand
caaagaagaugaacagaga

SEQ ID NO: 1342557 - RNA, 19 nt, Homo sapiens
  misc_RNA (1)...(19): siRNA sense strand
gaacuugucuccaaauaca

SEQ ID NO: 1342558 - RNA, 19 nt, Homo sapiens
  misc_RNA (1)...(19): siRNA sense strand
gcucauaucuggaccaaau

SEQ ID NO: 1342559 - RNA, 19 nt, Homo sapiens
  misc_RNA (1)...(19): siRNA sense strand
ggaaggaugucacuuucaa

SEQ ID NO: 1342560 - RNA, 19 nt, Homo sapiens
  misc_RNA (1)...(19): siRNA sense strand
gcacaggcuugaagaaaga

SEQ ID NO: 1342561 - RNA, 19 nt, Homo sapiens
  misc_RNA (1)...(19): siRNA sense strand
gaaaggaucaguugccaaa

SEQ ID NO: 1342562 - RNA, 19 nt, Homo sapiens
  misc_RNA (1)...(19): siRNA sense strand
gagacaagguuauuucaug

SEQ ID NO: 1342563 - RNA, 19 nt, Homo sapiens
  misc_RNA (1)...(19): siRNA sense strand
agaaauguaugcagacuuu

SEQ ID NO: 1342564 - RNA, 19 nt, Homo sapiens
  misc_RNA (1)...(19): siRNA sense strand
gaacacagaacuaguuuca

SEQ ID NO: 1342565 - RNA, 19 nt, Homo sapiens
  misc_RNA (1)...(19): siRNA sense strand
ggaauggaauggugugaug

SEQ ID NO: 1342566 - RNA, 19 nt, Homo sapiens
  misc_RNA (1)...(19): siRNA sense strand
acacagaacuaguuucaga

SEQ ID NO: 1342567 - RNA, 19 nt, Homo sapiens
  misc_RNA (1)...(19): siRNA sense strand
gaaguugccuauaaucaag

SEQ ID NO: 1342568 - RNA, 19 nt, Homo sapiens
  misc_RNA (1)...(19): siRNA sense strand
caaauacagucccagaguu

SEQ ID NO: 1342569 - RNA, 19 nt, Homo sapiens
  misc_RNA (1)...(19): siRNA sense strand
ccaagaaguugccuauaau

SEQ ID NO: 1342570 - RNA, 19 nt, Homo sapiens
  misc_RNA (1)...(19): siRNA sense strand
gacaacaaauagcauggua

SEQ ID NO: 1342571 - RNA, 19 nt, Homo sapiens
  misc_RNA (1)...(19): siRNA sense strand
caaaugauacugaagagaa

SEQ ID NO: 1342572 - RNA, 19 nt, Homo sapiens
  misc_RNA (1)...(19): siRNA sense strand
ggcaagaagcacagaauua

SEQ ID NO: 1342573 - RNA, 19 nt, Homo sapiens
  misc_RNA (1)...(19): siRNA sense strand
ggagaaugcuggguuuaug

SEQ ID NO: 1342574 - RNA, 19 nt, Homo sapiens
  misc_RNA (1)...(19): siRNA sense strand
caaauagcaugguagaauc

SEQ ID NO: 1342575 - RNA, 19 nt, Homo sapiens
  misc_RNA (1)...(19): siRNA sense strand
ggaaggagaaggaaauuca

SEQ ID NO: 1342576 - RNA, 19 nt, Homo sapiens
  misc_RNA (1)...(19): siRNA sense strand
gaagaugaacagagaaaga

SEQ ID NO: 1342577 - RNA, 19 nt, Homo sapiens
  misc_RNA (1)...(19): siRNA sense strand
cacagcagcucgggaaaua

SEQ ID NO: 1342578 - RNA, 19 nt, Homo sapiens
  misc_RNA (1)...(19): siRNA sense strand
gaaauucagugggagacaa

SEQ ID NO: 1342579 - RNA, 19 nt, Homo sapiens
  misc_RNA (1)...(19): siRNA sense strand
cagaauuacugccgagauu

SEQ ID NO: 1342580 - RNA, 19 nt, Homo sapiens
  misc_RNA (1)...(19): siRNA sense strand
ggaaggaaaggaucaguug

SEQ ID NO: 1342581 - RNA, 19 nt, Homo sapiens
  misc_RNA (1)...(19): siRNA sense strand
ggaauggugugauguaugc

SEQ ID NO: 1342582 - RNA, 19 nt, Homo sapiens
  misc_RNA (1)...(19): siRNA sense strand
gaaggucuauccucacagu

SEQ ID NO: 1342583 - RNA, 19 nt, Homo sapiens
  misc_RNA (1)...(19): siRNA sense strand
gcacaagagcguuaucaug

SEQ ID NO: 1342584 - RNA, 19 nt, Homo sapiens
  misc_RNA (1)...(19): siRNA sense strand
gauggagaaugcuggguuu

SEQ ID NO: 1342585 - RNA, 19 nt, Homo sapiens
  misc_RNA (1)...(19): siRNA sense strand
gaugucacuuucaacuuaa

SEQ ID NO: 1342586 - RNA, 19 nt, Homo sapiens
  misc_RNA (1)...(19): siRNA sense strand
gaacagagaaagaaaauug

SEQ ID NO: 1342587 - RNA, 19 nt, Homo sapiens
  misc_RNA (1)...(19): siRNA sense strand
ucaaagagacaacaaauag

SEQ ID NO: 1342588 - RNA, 19 nt, Homo sapiens
  misc_RNA (1)...(19): siRNA sense strand
accaagaaguugccuauaa

SEQ ID NO: 1342589 - RNA, 19 nt, Homo sapiens
  misc_RNA (1)...(19): siRNA sense strand
gaagagaacacagaacuag

SEQ ID NO: 1342590 - RNA, 19 nt, Homo sapiens
  misc_RNA (1)...(19): siRNA sense strand
agacaagguuauuucauga

SEQ ID NO: 1342591 - RNA, 19 nt, Homo sapiens
  misc_RNA (1)...(19): siRNA sense strand
gugaacuugucuccaaaua

SEQ ID NO: 1342592 - RNA, 19 nt, Homo sapiens
  misc_RNA (1)...(19): siRNA sense strand
aauaucaucuuccacacua

SEQ ID NO: 1342593 - RNA, 19 nt, Homo sapiens
  misc_RNA (1)...(19): siRNA sense strand
gaggagaaugcaauauuaa

SEQ ID NO: 1342594 - RNA, 19 nt, Homo sapiens
  misc_RNA (1)...(19): siRNA sense strand
gaugcaauauaucaaccua

SEQ ID NO: 1342595 - RNA, 19 nt, Homo sapiens
  misc_RNA (1)...(19): siRNA sense strand
gaaaggaaggagaaggaaa

SEQ ID NO: 1342596 - RNA, 19 nt, Homo sapiens
  misc_RNA (1)...(19): siRNA sense strand
ucccguagaugcaauauau

SEQ ID NO: 1342597 - RNA, 19 nt, Homo sapiens
  misc_RNA (1)...(19): siRNA sense strand
gaucagaacgaguaugaau

SEQ ID NO: 1342598 - RNA, 19 nt, Homo sapiens
  misc_RNA (1)...(19): siRNA sense strand
caacaaauagcaugguaga

SEQ ID NO: 1342599 - RNA, 19 nt, Homo sapiens
  misc_RNA (1)...(19): siRNA sense strand
gcagggcugugucucaugu

SEQ ID NO: 1342600 - RNA, 19 nt, Homo sapiens
  misc_RNA (1)...(19): siRNA sense strand
ugaggaaguuggaagauca

SEQ ID NO: 1342601 - RNA, 19 nt, Homo sapiens
  misc_RNA (1)...(19): siRNA sense strand
ggaauuaggaggagaaugc

SEQ ID NO: 1342602 - RNA, 19 nt, Homo sapiens
  misc_RNA (1)...(19): siRNA sense strand
caacguuuauucuugaaag

SEQ ID NO: 1342603 - RNA, 19 nt, Homo sapiens
  misc_RNA (1)...(19): siRNA sense strand
gagaaaggaaggagaagga

SEQ ID NO: 1342604 - RNA, 19 nt, Homo sapiens
  misc_RNA (1)...(19): siRNA sense strand
agaagaaagugaggaaguu

SEQ ID NO: 1342605 - RNA, 19 nt, Homo sapiens
  misc_RNA (1)...(19): siRNA sense strand
gcaagaagcacagaauuac

SEQ ID NO: 1342606 - RNA, 19 nt, Homo sapiens
  misc_RNA (1)...(19): siRNA sense strand
gagaacacagaacuaguuu

SEQ ID NO: 1342607 - RNA, 19 nt, Homo sapiens
  misc_RNA (1)...(19): siRNA sense strand
agaacuaguuucagaagga

SEQ ID NO: 1342608 - RNA, 19 nt, Homo sapiens
  misc_RNA (1)...(19): siRNA sense strand
gaugaaccauuacugaaac

SEQ ID NO: 1342609 - RNA, 19 nt, Homo sapiens
  misc_RNA (1)...(19): siRNA sense strand
gagaaugcuggguuuauga

SEQ ID NO: 1342610 - RNA, 19 nt, Homo sapiens
  misc_RNA (1)...(19): siRNA sense strand
gaacauuacauucucacau

SEQ ID NO: 1342611 - RNA, 19 nt, Homo sapiens
  misc_RNA (1)...(19): siRNA sense strand
gaugaacauuacauucuca

SEQ ID NO: 1342612 - RNA, 19 nt, Homo sapiens
  misc_RNA (1)...(19): siRNA sense strand
gagcagguuucccaucauc

SEQ ID NO: 1342613 - RNA, 19 nt, Homo sapiens
  misc_RNA (1)...(19): siRNA sense strand
ucacuuaauucuuccuugu

SEQ ID NO: 1342614 - RNA, 19 nt, Homo sapiens
  misc_RNA (1)...(19): siRNA sense strand
gaggagcacaagagcguua

SEQ ID NO: 1342615 - RNA, 19 nt, Homo sapiens
  misc_RNA (1)...(19): siRNA sense strand
cagcagugaagaugaauuu

SEQ ID NO: 1342616 - RNA, 19 nt, Homo sapiens
  misc_RNA (1)...(19): siRNA sense strand
gaagaaagugaggaaguug

SEQ ID NO: 1342617 - RNA, 19 nt, Homo sapiens
  misc_RNA (1)...(19): siRNA sense strand
gcagugaagaugaauuuua

SEQ ID NO: 1342618 - RNA, 19 nt, Homo sapiens
  misc_RNA (1)...(19): siRNA sense strand
gagcauuagugaccagaag

SEQ ID NO: 1342619 - RNA, 19 nt, Homo sapiens
  misc_RNA (1)...(19): siRNA sense strand
guaguucuuccaacguuua

SEQ ID NO: 1342620 - RNA, 19 nt, Homo sapiens
  misc_RNA (1)...(19): siRNA sense strand
uggaagaucagaacgagua

SEQ ID NO: 1342621 - RNA, 19 nt, Homo sapiens
  misc_RNA (1)...(19): siRNA sense strand
ggacaucaucagacuccua

SEQ ID NO: 1342622 - RNA, 19 nt, Homo sapiens
  misc_RNA (1)...(19): siRNA sense strand
caagguuauuucaugaaga

SEQ ID NO: 1342623 - RNA, 19 nt, Homo sapiens
  misc_RNA (1)...(19): siRNA sense strand
acacuaaacccuucuaugg

SEQ ID NO: 1342624 - RNA, 19 nt, Homo sapiens
  misc_RNA (1)...(19): siRNA sense strand
gauaccacagaaucacuua

SEQ ID NO: 1342625 - RNA, 19 nt, Homo sapiens
  misc_RNA (1)...(19): siRNA sense strand
gcagaagcccgagaaagga

SEQ ID NO: 1342626 - RNA, 19 nt, Homo sapiens
  misc_RNA (1)...(19): siRNA sense strand
acaaauagcaugguagaau

SEQ ID NO: 1342627 - RNA, 19 nt, Homo sapiens
  misc_RNA (1)...(19): siRNA sense strand
gugcaaauaucaucuucca

SEQ ID NO: 1342628 - RNA, 19 nt, Homo sapiens
  misc_RNA (1)...(19): siRNA sense strand
acaauucaaugcucauauc

SEQ ID NO: 1342629 - RNA, 19 nt, Homo sapiens
  misc_RNA (1)...(19): siRNA sense strand
gaagauacaauucaaugcu

SEQ ID NO: 1342630 - RNA, 19 nt, Homo sapiens
  misc_RNA (1)...(19): siRNA sense strand
gaugcugaccuguuugauu

SEQ ID NO: 1342631 - RNA, 19 nt, Homo sapiens
  misc_RNA (1)...(19): siRNA sense strand
cacgugaacuugucuccaa

SEQ ID NO: 1342632 - RNA, 19 nt, Homo sapiens
  misc_RNA (1)...(19): siRNA sense strand
ucaugaagauggagaaugc

SEQ ID NO: 1342633 - RNA, 19 nt, Homo sapiens
  misc_RNA (1)...(19): siRNA sense strand
uuaugaugcugaugaauuc

SEQ ID NO: 1342634 - RNA, 19 nt, Homo sapiens
  misc_RNA (1)...(19): siRNA sense strand
caucucuugucgcagguua

SEQ ID NO: 1342635 - RNA, 19 nt, Homo sapiens
  misc_RNA (1)...(19): siRNA sense strand
gguaguucuuccaacguuu

SEQ ID NO: 1342636 - RNA, 19 nt, Homo sapiens
  misc_RNA (1)...(19): siRNA sense strand
caaagcgcuuaauagauuc

SEQ ID NO: 1342637 - RNA, 19 nt, Homo sapiens
  misc_RNA (1)...(19): siRNA sense strand
caagugaugcugaccuguu

SEQ ID NO: 1342638 - RNA, 19 nt, Homo sapiens
  misc_RNA (1)...(19): siRNA sense strand
ugaugaaccauuacugaaa

SEQ ID NO: 1342639 - RNA, 19 nt, Homo sapiens
  misc_RNA (1)...(19): siRNA sense strand
gggcaagaagcacagaauu

SEQ ID NO: 1342640 - RNA, 19 nt, Homo sapiens
  misc_RNA (1)...(19): siRNA sense strand
cuuccaacguuuauucuug

SEQ ID NO: 1342641 - RNA, 19 nt, Homo sapiens
  misc_RNA (1)...(19): siRNA sense strand
agacuuggaauggaucuua

SEQ ID NO: 1342642 - RNA, 19 nt, Homo sapiens
  misc_RNA (1)...(19): siRNA sense strand
caagagcguuaucaugcau

SEQ ID NO: 1342643 - RNA, 19 nt, Homo sapiens
  misc_RNA (1)...(19): siRNA sense strand
aagugaugcugaccuguuu

SEQ ID NO: 1342644 - RNA, 19 nt, Homo sapiens
  misc_RNA (1)...(19): siRNA sense strand
augcugaccuguuugauuc

SEQ ID NO: 1342645 - RNA, 19 nt, Homo sapiens
  misc_RNA (1)...(19): siRNA sense strand
aaugcuggguuuaugauga

SEQ ID NO: 1342646 - RNA, 19 nt, Homo sapiens
  misc_RNA (1)...(19): siRNA sense strand
gaaguuggaagaucagaac

SEQ ID NO: 1342647 - RNA, 19 nt, Homo sapiens
  misc_RNA (1)...(19): siRNA sense strand
agacuaugaugaacauuac

SEQ ID NO: 1342648 - RNA, 19 nt, Homo sapiens
  misc_RNA (1)...(19): siRNA sense strand
agagaacacagaacuaguu

SEQ ID NO: 1342649 - RNA, 19 nt, Homo sapiens
  misc_RNA (1)...(19): siRNA sense strand
ucccaaggaucgaaugguu

SEQ ID NO: 1342650 - RNA, 19 nt, Homo sapiens
  misc_RNA (1)...(19): siRNA sense strand
ggaccuguuugugagcauu

SEQ ID NO: 1342651 - RNA, 19 nt, Homo sapiens
  misc_RNA (1)...(19): siRNA sense strand
ugauucacaugaugacaga

SEQ ID NO: 1342652 - RNA, 19 nt, Homo sapiens
  misc_RNA (1)...(19): siRNA sense strand
uaugaugaaccauuacuga

SEQ ID NO: 1342653 - RNA, 19 nt, Homo sapiens
  misc_RNA (1)...(19): siRNA sense strand
gaugguggcuuucgucaag

SEQ ID NO: 1342654 - RNA, 19 nt, Homo sapiens
  misc_RNA (1)...(19): siRNA sense strand
ugaagaagcccaagaagag

SEQ ID NO: 1342655 - RNA, 19 nt, Homo sapiens
  misc_RNA (1)...(19): siRNA sense strand
gcaagauggcugacugguu

SEQ ID NO: 1342656 - RNA, 19 nt, Homo sapiens
  misc_RNA (1)...(19): siRNA sense strand
gagcuccgauucauguacu

SEQ ID NO: 1342657 - RNA, 19 nt, Homo sapiens
  misc_RNA (1)...(19): siRNA sense strand
aguagucgcuggagcaaag

SEQ ID NO: 1342658 - RNA, 19 nt, Homo sapiens
  misc_RNA (1)...(19): siRNA sense strand
caccugagcuccgauucau

SEQ ID NO: 1342659 - RNA, 19 nt, Homo sapiens
  misc_RNA (1)...(19): siRNA sense strand
uggcuuucgucaagucaaa

SEQ ID NO: 1342660 - RNA, 19 nt, Homo sapiens
  misc_RNA (1)...(19): siRNA sense strand
ccaagaagaggcccaacuc

SEQ ID NO: 1342661 - RNA, 19 nt, Homo sapiens
  misc_RNA (1)...(19): siRNA sense strand
gggcccugaugguggcuuu

SEQ ID NO: 1342662 - RNA, 19 nt, Homo sapiens
  misc_RNA (1)...(19): siRNA sense strand
cugaagaagcccaagaaga

SEQ ID NO: 1342663 - RNA, 19 nt, Homo sapiens
  misc_RNA (1)...(19): siRNA sense strand
agucaaagaagcugucaug

SEQ ID NO: 1342664 - RNA, 19 nt, Homo sapiens
  misc_RNA (1)...(19): siRNA sense strand
gcgagugacaguggcagua

SEQ ID NO: 1342665 - RNA, 19 nt, Homo sapiens
  misc_RNA (1)...(19): siRNA sense strand
cuucacagccuaccucaca

SEQ ID NO: 1342666 - RNA, 19 nt, Homo sapiens
  misc_RNA (1)...(19): siRNA sense strand
ccugagcuccgauucaugu

SEQ ID NO: 1342667 - RNA, 19 nt, Homo sapiens
  misc_RNA (1)...(19): siRNA sense strand
gagugacaguggcaguagu

SEQ ID NO: 1342668 - RNA, 19 nt, Homo sapiens
  misc_RNA (1)...(19): siRNA sense strand
ccaagccucagcucaguca

SEQ ID NO: 1342669 - RNA, 19 nt, Homo sapiens
  misc_RNA (1)...(19): siRNA sense strand
gcaguagucgcuggagcaa

SEQ ID NO: 1342670 - RNA, 19 nt, Homo sapiens
  misc_RNA (1)...(19): siRNA sense strand
gcuggagcaaagacuauga

SEQ ID NO: 1342671 - RNA, 19 nt, Homo sapiens
  misc_RNA (1)...(19): siRNA sense strand
ccuggucuccuacuuggaa

SEQ ID NO: 1342672 - RNA, 19 nt, Homo sapiens
  misc_RNA (1)...(19): siRNA sense strand
gaugguggcuuucgucaag

SEQ ID NO: 1342673 - RNA, 19 nt, Homo sapiens
  misc_RNA (1)...(19): siRNA sense strand
ugaagaagcccaagaagag

SEQ ID NO: 1342674 - RNA, 19 nt, Homo sapiens
  misc_RNA (1)...(19): siRNA sense strand
gcaagauggcugacugguu

SEQ ID NO: 1342675 - RNA, 19 nt, Homo sapiens
  misc_RNA (1)...(19): siRNA sense strand
gagcuccgauucauguacu

SEQ ID NO: 1342676 - RNA, 19 nt, Homo sapiens
  misc_RNA (1)...(19): siRNA sense strand
aguagucgcuggagcaaag

SEQ ID NO: 1342677 - RNA, 19 nt, Homo sapiens
  misc_RNA (1)...(19): siRNA sense strand
caccugagcuccgauucau

SEQ ID NO: 1342678 - RNA, 19 nt, Homo sapiens
  misc_RNA (1)...(19): siRNA sense strand
uggcuuucgucaagucaaa

SEQ ID NO: 1342679 - RNA, 19 nt, Homo sapiens
  misc_RNA (1)...(19): siRNA sense strand
ccaagaagaggcccaacuc

SEQ ID NO: 1342680 - RNA, 19 nt, Homo sapiens
  misc_RNA (1)...(19): siRNA sense strand
gggcccugaugguggcuuu

SEQ ID NO: 1342681 - RNA, 19 nt, Homo sapiens
  misc_RNA (1)...(19): siRNA sense strand
cugaagaagcccaagaaga

SEQ ID NO: 1342682 - RNA, 19 nt, Homo sapiens
  misc_RNA (1)...(19): siRNA sense strand
agucaaagaagcugucaug

SEQ ID NO: 1342683 - RNA, 19 nt, Homo sapiens
  misc_RNA (1)...(19): siRNA sense strand
gcgagugacaguggcagua

SEQ ID NO: 1342684 - RNA, 19 nt, Homo sapiens
  misc_RNA (1)...(19): siRNA sense strand
cuucacagccuaccucaca

SEQ ID NO: 1342685 - RNA, 19 nt, Homo sapiens
  misc_RNA (1)...(19): siRNA sense strand
ccugagcuccgauucaugu

SEQ ID NO: 1342686 - RNA, 19 nt, Homo sapiens
  misc_RNA (1)...(19): siRNA sense strand
gagugacaguggcaguagu

SEQ ID NO: 1342687 - RNA, 19 nt, Homo sapiens
  misc_RNA (1)...(19): siRNA sense strand
ccaagccucagcucaguca

SEQ ID NO: 1342688 - RNA, 19 nt, Homo sapiens
  misc_RNA (1)...(19): siRNA sense strand
gcaguagucgcuggagcaa

SEQ ID NO: 1342689 - RNA, 19 nt, Homo sapiens
  misc_RNA (1)...(19): siRNA sense strand
gcuggagcaaagacuauga

SEQ ID NO: 1342690 - RNA, 19 nt, Homo sapiens
  misc_RNA (1)...(19): siRNA sense strand
ccuggucuccuacuuggaa

SEQ ID NO: 1342691 - RNA, 19 nt, Homo sapiens
  misc_RNA (1)...(19): siRNA sense strand
gcaggacgcucuacuaugg

SEQ ID NO: 1342692 - RNA, 19 nt, Homo sapiens
  misc_RNA (1)...(19): siRNA sense strand
gcagauaucaguggcuaua

SEQ ID NO: 1342693 - RNA, 19 nt, Homo sapiens
  misc_RNA (1)...(19): siRNA sense strand
ggagugaaagguucuauga

SEQ ID NO: 1342694 - RNA, 19 nt, Homo sapiens
  misc_RNA (1)...(19): siRNA sense strand
gcugcaaacugcgauauug

SEQ ID NO: 1342695 - RNA, 19 nt, Homo sapiens
  misc_RNA (1)...(19): siRNA sense strand
gaggagguccgcuacauug

SEQ ID NO: 1342696 - RNA, 19 nt, Homo sapiens
  misc_RNA (1)...(19): siRNA sense strand
gcaagaggagugaaagguu

SEQ ID NO: 1342697 - RNA, 19 nt, Homo sapiens
  misc_RNA (1)...(19): siRNA sense strand
gcucguggcugagaucaug

SEQ ID NO: 1342698 - RNA, 19 nt, Homo sapiens
  misc_RNA (1)...(19): siRNA sense strand
ccaggcauauucaagaguu

SEQ ID NO: 1342699 - RNA, 19 nt, Homo sapiens
  misc_RNA (1)...(19): siRNA sense strand
aaagagcccuacccugaug

SEQ ID NO: 1342700 - RNA, 19 nt, Homo sapiens
  misc_RNA (1)...(19): siRNA sense strand
guacgcugguuucccuuug

SEQ ID NO: 1342701 - RNA, 19 nt, Homo sapiens
  misc_RNA (1)...(19): siRNA sense strand
ggaggagguccgcuacauu

SEQ ID NO: 1342702 - RNA, 19 nt, Homo sapiens
  misc_RNA (1)...(19): siRNA sense strand
gauaacagucuuacucucu

SEQ ID NO: 1342703 - RNA, 19 nt, Homo sapiens
  misc_RNA (1)...(19): siRNA sense strand
gcaggaggcagauaucagu

SEQ ID NO: 1342704 - RNA, 19 nt, Homo sapiens
  misc_RNA (1)...(19): siRNA sense strand
agugaaagguucuaugagu

SEQ ID NO: 1342705 - RNA, 19 nt, Homo sapiens
  misc_RNA (1)...(19): siRNA sense strand
gcaacgggaaccugcugua

SEQ ID NO: 1342706 - RNA, 19 nt, Homo sapiens
  misc_RNA (1)...(19): siRNA sense strand
aaacugcgauauugcugau

SEQ ID NO: 1342707 - RNA, 19 nt, Homo sapiens
  misc_RNA (1)...(19): siRNA sense strand
ggaccagagucauccuucu

SEQ ID NO: 1342708 - RNA, 19 nt, Homo sapiens
  misc_RNA (1)...(19): siRNA sense strand
uaccauugauagcccagua

SEQ ID NO: 1342709 - RNA, 19 nt, Homo sapiens
  misc_RNA (1)...(19): siRNA sense strand
caagaguuccugcuacauc

SEQ ID NO: 1342710 - RNA, 19 nt, Homo sapiens
  misc_RNA (1)...(19): siRNA sense strand
caaagagcccuacccugau

SEQ ID NO: 1342711 - RNA, 19 nt, Homo sapiens
  misc_RNA (1)...(19): siRNA sense strand
gacgccacauuccacacua

SEQ ID NO: 1342712 - RNA, 19 nt, Homo sapiens
  misc_RNA (1)...(19): siRNA sense strand
gcgcgugguuccugcgaau

SEQ ID NO: 1342713 - RNA, 19 nt, Homo sapiens
  misc_RNA (1)...(19): siRNA sense strand
gcucuacuauggccucaac

SEQ ID NO: 1342714 - RNA, 19 nt, Homo sapiens
  misc_RNA (1)...(19): siRNA sense strand
cuaacguguuggugaauuc

SEQ ID NO: 1342715 - RNA, 19 nt, Homo sapiens
  misc_RNA (1)...(19): siRNA sense strand
acugcgauauugcugauga

SEQ ID NO: 1342716 - RNA, 19 nt, Homo sapiens
  misc_RNA (1)...(19): siRNA sense strand
caaguggaccagagucauc

SEQ ID NO: 1342717 - RNA, 19 nt, Homo sapiens
  misc_RNA (1)...(19): siRNA sense strand
uaacagucuuacucucucu

SEQ ID NO: 1342718 - RNA, 19 nt, Homo sapiens
  misc_RNA (1)...(19): siRNA sense strand
caauggagaaugggaccua

SEQ ID NO: 1342719 - RNA, 19 nt, Homo sapiens
  misc_RNA (1)...(19): siRNA sense strand
gggauaacagucuuacucu

SEQ ID NO: 1342720 - RNA, 19 nt, Homo sapiens
  misc_RNA (1)...(19): siRNA sense strand
ccgcaggacgcucuacuau

SEQ ID NO: 1342721 - RNA, 19 nt, Homo sapiens
  misc_RNA (1)...(19): siRNA sense strand
aaugggaccuagugggaau

SEQ ID NO: 1342722 - RNA, 19 nt, Homo sapiens
  misc_RNA (1)...(19): siRNA sense strand
gcgcuuugacgccacauuc

SEQ ID NO: 1342723 - RNA, 19 nt, Homo sapiens
  misc_RNA (1)...(19): siRNA sense strand
gagucauccuucugaacug

SEQ ID NO: 1342724 - RNA, 19 nt, Homo sapiens
  misc_RNA (1)...(19): siRNA sense strand
acagucuuacucucucuua

SEQ ID NO: 1342725 - RNA, 19 nt, Homo sapiens
  misc_RNA (1)...(19): siRNA sense strand
acgggaaccugcuguacau

SEQ ID NO: 1342726 - RNA, 19 nt, Homo sapiens
  misc_RNA (1)...(19): siRNA sense strand
gcgugguuccugcgaauga

SEQ ID NO: 1342727 - RNA, 19 nt, Homo sapiens
  misc_RNA (1)...(19): siRNA sense strand
gcugguuucccuuugaugu

SEQ ID NO: 1342728 - RNA, 19 nt, Homo sapiens
  misc_RNA (1)...(19): siRNA sense strand
ccuccaggcauauucaaga

SEQ ID NO: 1342729 - RNA, 19 nt, Homo sapiens
  misc_RNA (1)...(19): siRNA sense strand
acuaacguguuggugaauu

SEQ ID NO: 1342730 - RNA, 19 nt, Homo sapiens
  misc_RNA (1)...(19): siRNA sense strand
acgccacauuccacacuaa

SEQ ID NO: 1342731 - RNA, 19 nt, Homo sapiens
  misc_RNA (1)...(19): siRNA sense strand
cgauucgguaccauugaua

SEQ ID NO: 1342732 - RNA, 19 nt, Homo sapiens
  misc_RNA (1)...(19): siRNA sense strand
gcaggacgcucuacuaugg

SEQ ID NO: 1342733 - RNA, 19 nt, Homo sapiens
  misc_RNA (1)...(19): siRNA sense strand
gcagauaucaguggcuaua

SEQ ID NO: 1342734 - RNA, 19 nt, Homo sapiens
  misc_RNA (1)...(19): siRNA sense strand
ggagugaaagguucuauga

SEQ ID NO: 1342735 - RNA, 19 nt, Homo sapiens
  misc_RNA (1)...(19): siRNA sense strand
gaggagguccgcuacauug

SEQ ID NO: 1342736 - RNA, 19 nt, Homo sapiens
  misc_RNA (1)...(19): siRNA sense strand
gcaagaggagugaaagguu

SEQ ID NO: 1342737 - RNA, 19 nt, Homo sapiens
  misc_RNA (1)...(19): siRNA sense strand
gcucguggcugagaucaug

SEQ ID NO: 1342738 - RNA, 19 nt, Homo sapiens
  misc_RNA (1)...(19): siRNA sense strand
aaagagcccuacccugaug

SEQ ID NO: 1342739 - RNA, 19 nt, Homo sapiens
  misc_RNA (1)...(19): siRNA sense strand
gauaacagucuuacucucu

SEQ ID NO: 1342740 - RNA, 19 nt, Homo sapiens
  misc_RNA (1)...(19): siRNA sense strand
ggaggagguccgcuacauu

SEQ ID NO: 1342741 - RNA, 19 nt, Homo sapiens
  misc_RNA (1)...(19): siRNA sense strand
gcaggaggcagauaucagu

SEQ ID NO: 1342742 - RNA, 19 nt, Homo sapiens
  misc_RNA (1)...(19): siRNA sense strand
agugaaagguucuaugagu

SEQ ID NO: 1342743 - RNA, 19 nt, Homo sapiens
  misc_RNA (1)...(19): siRNA sense strand
gcaacgggaaccugcugua

SEQ ID NO: 1342744 - RNA, 19 nt, Homo sapiens
  misc_RNA (1)...(19): siRNA sense strand
ggaccagagucauccuucu

SEQ ID NO: 1342745 - RNA, 19 nt, Homo sapiens
  misc_RNA (1)...(19): siRNA sense strand
uaccauugauagcccagua

SEQ ID NO: 1342746 - RNA, 19 nt, Homo sapiens
  misc_RNA (1)...(19): siRNA sense strand
caaagagcccuacccugau

SEQ ID NO: 1342747 - RNA, 19 nt, Homo sapiens
  misc_RNA (1)...(19): siRNA sense strand
gcgcgugguuccugcgaau

SEQ ID NO: 1342748 - RNA, 19 nt, Homo sapiens
  misc_RNA (1)...(19): siRNA sense strand
gcucuacuauggccucaac

SEQ ID NO: 1342749 - RNA, 19 nt, Homo sapiens
  misc_RNA (1)...(19): siRNA sense strand
uaacagucuuacucucucu

SEQ ID NO: 1342750 - RNA, 19 nt, Homo sapiens
  misc_RNA (1)...(19): siRNA sense strand
caaguggaccagagucauc

SEQ ID NO: 1342751 - RNA, 19 nt, Homo sapiens
  misc_RNA (1)...(19): siRNA sense strand
caauggagaaugggaccua

SEQ ID NO: 1342752 - RNA, 19 nt, Homo sapiens
  misc_RNA (1)...(19): siRNA sense strand
gggauaacagucuuacucu

SEQ ID NO: 1342753 - RNA, 19 nt, Homo sapiens
  misc_RNA (1)...(19): siRNA sense strand
ccgcaggacgcucuacuau

SEQ ID NO: 1342754 - RNA, 19 nt, Homo sapiens
  misc_RNA (1)...(19): siRNA sense strand
aaugggaccuagugggaau

SEQ ID NO: 1342755 - RNA, 19 nt, Homo sapiens
  misc_RNA (1)...(19): siRNA sense strand
gagucauccuucugaacug

SEQ ID NO: 1342756 - RNA, 19 nt, Homo sapiens
  misc_RNA (1)...(19): siRNA sense strand
acagucuuacucucucuua

SEQ ID NO: 1342757 - RNA, 19 nt, Homo sapiens
  misc_RNA (1)...(19): siRNA sense strand
acgggaaccugcuguacau

SEQ ID NO: 1342758 - RNA, 19 nt, Homo sapiens
  misc_RNA (1)...(19): siRNA sense strand
gcgugguuccugcgaauga

SEQ ID NO: 1342759 - RNA, 19 nt, Homo sapiens
  misc_RNA (1)...(19): siRNA sense strand
cgauucgguaccauugaua

SEQ ID NO: 1342760 - RNA, 19 nt, Homo sapiens
  misc_RNA (1)...(19): siRNA sense strand
gaagaugauucucaauaag

SEQ ID NO: 1342761 - RNA, 19 nt, Homo sapiens
  misc_RNA (1)...(19): siRNA sense strand
ucaauaagcugagccaaug

SEQ ID NO: 1342762 - RNA, 19 nt, Homo sapiens
  misc_RNA (1)...(19): siRNA sense strand
gugaagaugauucucaaua

SEQ ID NO: 1342763 - RNA, 19 nt, Homo sapiens
  misc_RNA (1)...(19): siRNA sense strand
uugcuaaccuucagggaua

SEQ ID NO: 1342764 - RNA, 19 nt, Homo sapiens
  misc_RNA (1)...(19): siRNA sense strand
gggugaagaugauucucaa

SEQ ID NO: 1342765 - RNA, 19 nt, Homo sapiens
  misc_RNA (1)...(19): siRNA sense strand
agacugcacuccugguugu

SEQ ID NO: 1342766 - RNA, 19 nt, Homo sapiens
  misc_RNA (1)...(19): siRNA sense strand
agagugcccugggugaaga

SEQ ID NO: 1342767 - RNA, 19 nt, Homo sapiens
  misc_RNA (1)...(19): siRNA sense strand
caauaagcugagccaauga

SEQ ID NO: 1342768 - RNA, 19 nt, Homo sapiens
  misc_RNA (1)...(19): siRNA sense strand
gccgugauuacguccguua

SEQ ID NO: 1342769 - RNA, 19 nt, Homo sapiens
  misc_RNA (1)...(19): siRNA sense strand
aaacuaacuucaacuccau

SEQ ID NO: 1342770 - RNA, 19 nt, Homo sapiens
  misc_RNA (1)...(19): siRNA sense strand
ucaacuccaucgccaagau

SEQ ID NO: 1342771 - RNA, 19 nt, Homo sapiens
  misc_RNA (1)...(19): siRNA sense strand
gaucuuggcccagcagaca

SEQ ID NO: 1342772 - RNA, 19 nt, Homo sapiens
  misc_RNA (1)...(19): siRNA sense strand
cagcaaaacuaacuucaac

SEQ ID NO: 1342773 - RNA, 19 nt, Homo sapiens
  misc_RNA (1)...(19): siRNA sense strand
aaacuaacuucaacuccau

SEQ ID NO: 1342774 - RNA, 19 nt, Homo sapiens
  misc_RNA (1)...(19): siRNA sense strand
ucaacuccaucgccaagau

SEQ ID NO: 1342775 - RNA, 19 nt, Homo sapiens
  misc_RNA (1)...(19): siRNA sense strand
gaucuuggcccagcagaca

SEQ ID NO: 1342776 - RNA, 19 nt, Homo sapiens
  misc_RNA (1)...(19): siRNA sense strand
cagcaaaacuaacuucaac

SEQ ID NO: 1342777 - RNA, 19 nt, Homo sapiens
  misc_RNA (1)...(19): siRNA sense strand
aaacuaacuucaacuccau

SEQ ID NO: 1342778 - RNA, 19 nt, Homo sapiens
  misc_RNA (1)...(19): siRNA sense strand
ucaacuccaucgccaagau

SEQ ID NO: 1342779 - RNA, 19 nt, Homo sapiens
  misc_RNA (1)...(19): siRNA sense strand
gaucuuggcccagcagaca

SEQ ID NO: 1342780 - RNA, 19 nt, Homo sapiens
  misc_RNA (1)...(19): siRNA sense strand
cagcaaaacuaacuucaac

SEQ ID NO: 1342781 - RNA, 19 nt, Homo sapiens
  misc_RNA (1)...(19): siRNA sense strand
aaacuaacuucaacuccau

SEQ ID NO: 1342782 - RNA, 19 nt, Homo sapiens
  misc_RNA (1)...(19): siRNA sense strand
ucaacuccaucgccaagau

SEQ ID NO: 1342783 - RNA, 19 nt, Homo sapiens
  misc_RNA (1)...(19): siRNA sense strand
gaucuuggcccagcagaca

SEQ ID NO: 1342784 - RNA, 19 nt, Homo sapiens
  misc_RNA (1)...(19): siRNA sense strand
cagcaaaacuaacuucaac

SEQ ID NO: 1342785 - RNA, 19 nt, Homo sapiens
  misc_RNA (1)...(19): siRNA sense strand
aaacuaacuucaacuccau

SEQ ID NO: 1342786 - RNA, 19 nt, Homo sapiens
  misc_RNA (1)...(19): siRNA sense strand
ucaacuccaucgccaagau

SEQ ID NO: 1342787 - RNA, 19 nt, Homo sapiens
  misc_RNA (1)...(19): siRNA sense strand
gaucuuggcccagcagaca

SEQ ID NO: 1342788 - RNA, 19 nt, Homo sapiens
  misc_RNA (1)...(19): siRNA sense strand
cagcaaaacuaacuucaac

SEQ ID NO: 1342789 - RNA, 19 nt, Homo sapiens
  misc_RNA (1)...(19): siRNA sense strand
aaacuaacuucaacuccau

SEQ ID NO: 1342790 - RNA, 19 nt, Homo sapiens
  misc_RNA (1)...(19): siRNA sense strand
ucaacuccaucgccaagau

SEQ ID NO: 1342791 - RNA, 19 nt, Homo sapiens
  misc_RNA (1)...(19): siRNA sense strand
gaucuuggcccagcagaca

SEQ ID NO: 1342792 - RNA, 19 nt, Homo sapiens
  misc_RNA (1)...(19): siRNA sense strand
cagcaaaacuaacuucaac

SEQ ID NO: 1342793 - RNA, 19 nt, Homo sapiens
  misc_RNA (1)...(19): siRNA sense strand
gacaaggacuggaauauuu

SEQ ID NO: 1342794 - RNA, 19 nt, Homo sapiens
  misc_RNA (1)...(19): siRNA sense strand
caaagaaucuccuugacaa

SEQ ID NO: 1342795 - RNA, 19 nt, Homo sapiens
  misc_RNA (1)...(19): siRNA sense strand
gaaggcauuucuccuggua

SEQ ID NO: 1342796 - RNA, 19 nt, Homo sapiens
  misc_RNA (1)...(19): siRNA sense strand
gauccagugugcuaccuua

SEQ ID NO: 1342797 - RNA, 19 nt, Homo sapiens
  misc_RNA (1)...(19): siRNA sense strand
aaacaaagaaucuccuuga

SEQ ID NO: 1342798 - RNA, 19 nt, Homo sapiens
  misc_RNA (1)...(19): siRNA sense strand
gaacugcaacaacagcuuu

SEQ ID NO: 1342799 - RNA, 19 nt, Homo sapiens
  misc_RNA (1)...(19): siRNA sense strand
gagaccucgugccaaauua

SEQ ID NO: 1342800 - RNA, 19 nt, Homo sapiens
  misc_RNA (1)...(19): siRNA sense strand
ugaaagauccagugugcua

SEQ ID NO: 1342801 - RNA, 19 nt, Homo sapiens
  misc_RNA (1)...(19): siRNA sense strand
uggagaaggucaagaaugu

SEQ ID NO: 1342802 - RNA, 19 nt, Homo sapiens
  misc_RNA (1)...(19): siRNA sense strand
ggagaccucgugccaaauu

SEQ ID NO: 1342803 - RNA, 19 nt, Homo sapiens
  misc_RNA (1)...(19): siRNA sense strand
ccagugugcuaccuuaaga

SEQ ID NO: 1342804 - RNA, 19 nt, Homo sapiens
  misc_RNA (1)...(19): siRNA sense strand
accaugcgcuucagagaua

SEQ ID NO: 1342805 - RNA, 19 nt, Homo sapiens
  misc_RNA (1)...(19): siRNA sense strand
ggaguacuguagccacaug

SEQ ID NO: 1342806 - RNA, 19 nt, Homo sapiens
  misc_RNA (1)...(19): siRNA sense strand
caccaaggauuaugaagag

SEQ ID NO: 1342807 - RNA, 19 nt, Homo sapiens
  misc_RNA (1)...(19): siRNA sense strand
ggaggccucuuguucuaca

SEQ ID NO: 1342808 - RNA, 19 nt, Homo sapiens
  misc_RNA (1)...(19): siRNA sense strand
ugacaaggacuggaauauu

SEQ ID NO: 1342809 - RNA, 19 nt, Homo sapiens
  misc_RNA (1)...(19): siRNA sense strand
caggaacaguugaaagauc

SEQ ID NO: 1342810 - RNA, 19 nt, Homo sapiens
  misc_RNA (1)...(19): siRNA sense strand
ucggaggccucuuguucua

SEQ ID NO: 1342811 - RNA, 19 nt, Homo sapiens
  misc_RNA (1)...(19): siRNA sense strand
agcaagaacugcaacaaca

SEQ ID NO: 1342812 - RNA, 19 nt, Homo sapiens
  misc_RNA (1)...(19): siRNA sense strand
guacuguagccacaugauu

SEQ ID NO: 1342813 - RNA, 19 nt, Homo sapiens
  misc_RNA (1)...(19): siRNA sense strand
ucaccaaggauuaugaaga

SEQ ID NO: 1342814 - RNA, 19 nt, Homo sapiens
  misc_RNA (1)...(19): siRNA sense strand
guccgaacuuucuaugaga

SEQ ID NO: 1342815 - RNA, 19 nt, Homo sapiens
  misc_RNA (1)...(19): siRNA sense strand
guggacaccugcagucucu

SEQ ID NO: 1342816 - RNA, 19 nt, Homo sapiens
  misc_RNA (1)...(19): siRNA sense strand
caaggauuaugaagagcau

SEQ ID NO: 1342817 - RNA, 19 nt, Homo sapiens
  misc_RNA (1)...(19): siRNA sense strand
gagaaggucaagaaugucu

SEQ ID NO: 1342818 - RNA, 19 nt, Homo sapiens
  misc_RNA (1)...(19): siRNA sense strand
auggagaccucgugccaaa

SEQ ID NO: 1342819 - RNA, 19 nt, Homo sapiens
  misc_RNA (1)...(19): siRNA sense strand
cguccgaacuuucuaugag

SEQ ID NO: 1342820 - RNA, 19 nt, Homo sapiens
  misc_RNA (1)...(19): siRNA sense strand
acaaagaaucuccuugaca

SEQ ID NO: 1342821 - RNA, 19 nt, Homo sapiens
  misc_RNA (1)...(19): siRNA sense strand
gaggacaccaugcgcuuca

SEQ ID NO: 1342822 - RNA, 19 nt, Homo sapiens
  misc_RNA (1)...(19): siRNA sense strand
ggacaccaugcgcuucaga

SEQ ID NO: 1342823 - RNA, 19 nt, Homo sapiens
  misc_RNA (1)...(19): siRNA sense strand
gcaagaacugcaacaacag

SEQ ID NO: 1342824 - RNA, 19 nt, Homo sapiens
  misc_RNA (1)...(19): siRNA sense strand
gcugcuucaccaaggauua

SEQ ID NO: 1342825 - RNA, 19 nt, Homo sapiens
  misc_RNA (1)...(19): siRNA sense strand
ugcaggaacucucuuugag

SEQ ID NO: 1342826 - RNA, 19 nt, Homo sapiens
  misc_RNA (1)...(19): siRNA sense strand
ggaggugucggaguacugu

SEQ ID NO: 1342827 - RNA, 19 nt, Homo sapiens
  misc_RNA (1)...(19): siRNA sense strand
cugcaggaacucucuuuga

SEQ ID NO: 1342828 - RNA, 19 nt, Homo sapiens
  misc_RNA (1)...(19): siRNA sense strand
agacaccucuccaguugcu

SEQ ID NO: 1342829 - RNA, 19 nt, Homo sapiens
  misc_RNA (1)...(19): siRNA sense strand
ugaaacaaagaaucuccuu

SEQ ID NO: 1342830 - RNA, 19 nt, Homo sapiens
  misc_RNA (1)...(19): siRNA sense strand
uacuguagccacaugauug

SEQ ID NO: 1342831 - RNA, 19 nt, Homo sapiens
  misc_RNA (1)...(19): siRNA sense strand
ggaauauuuucagcaagaa

SEQ ID NO: 1342832 - RNA, 19 nt, Homo sapiens
  misc_RNA (1)...(19): siRNA sense strand
gaccaggaacaguugaaag

SEQ ID NO: 1342833 - RNA, 19 nt, Homo sapiens
  misc_RNA (1)...(19): siRNA sense strand
uggaauauuuucagcaaga

SEQ ID NO: 1342834 - RNA, 19 nt, Homo sapiens
  misc_RNA (1)...(19): siRNA sense strand
ccucgugccaaauuacauu

SEQ ID NO: 1342835 - RNA, 19 nt, Homo sapiens
  misc_RNA (1)...(19): siRNA sense strand
gacaaggacuggaauauuu

SEQ ID NO: 1342836 - RNA, 19 nt, Homo sapiens
  misc_RNA (1)...(19): siRNA sense strand
caaagaaucuccuugacaa

SEQ ID NO: 1342837 - RNA, 19 nt, Homo sapiens
  misc_RNA (1)...(19): siRNA sense strand
gaaggcauuucuccuggua

SEQ ID NO: 1342838 - RNA, 19 nt, Homo sapiens
  misc_RNA (1)...(19): siRNA sense strand
gauccagugugcuaccuua

SEQ ID NO: 1342839 - RNA, 19 nt, Homo sapiens
  misc_RNA (1)...(19): siRNA sense strand
aaacaaagaaucuccuuga

SEQ ID NO: 1342840 - RNA, 19 nt, Homo sapiens
  misc_RNA (1)...(19): siRNA sense strand
gaacugcaacaacagcuuu

SEQ ID NO: 1342841 - RNA, 19 nt, Homo sapiens
  misc_RNA (1)...(19): siRNA sense strand
gagaccucgugccaaauua

SEQ ID NO: 1342842 - RNA, 19 nt, Homo sapiens
  misc_RNA (1)...(19): siRNA sense strand
ugaaagauccagugugcua

SEQ ID NO: 1342843 - RNA, 19 nt, Homo sapiens
  misc_RNA (1)...(19): siRNA sense strand
uggagaaggucaagaaugu

SEQ ID NO: 1342844 - RNA, 19 nt, Homo sapiens
  misc_RNA (1)...(19): siRNA sense strand
ggagaccucgugccaaauu

SEQ ID NO: 1342845 - RNA, 19 nt, Homo sapiens
  misc_RNA (1)...(19): siRNA sense strand
ccagugugcuaccuuaaga

SEQ ID NO: 1342846 - RNA, 19 nt, Homo sapiens
  misc_RNA (1)...(19): siRNA sense strand
accaugcgcuucagagaua

SEQ ID NO: 1342847 - RNA, 19 nt, Homo sapiens
  misc_RNA (1)...(19): siRNA sense strand
ggaguacuguagccacaug

SEQ ID NO: 1342848 - RNA, 19 nt, Homo sapiens
  misc_RNA (1)...(19): siRNA sense strand
caccaaggauuaugaagag

SEQ ID NO: 1342849 - RNA, 19 nt, Homo sapiens
  misc_RNA (1)...(19): siRNA sense strand
ggaggccucuuguucuaca

SEQ ID NO: 1342850 - RNA, 19 nt, Homo sapiens
  misc_RNA (1)...(19): siRNA sense strand
ugacaaggacuggaauauu

SEQ ID NO: 1342851 - RNA, 19 nt, Homo sapiens
  misc_RNA (1)...(19): siRNA sense strand
caggaacaguugaaagauc

SEQ ID NO: 1342852 - RNA, 19 nt, Homo sapiens
  misc_RNA (1)...(19): siRNA sense strand
ucggaggccucuuguucua

SEQ ID NO: 1342853 - RNA, 19 nt, Homo sapiens
  misc_RNA (1)...(19): siRNA sense strand
agcaagaacugcaacaaca

SEQ ID NO: 1342854 - RNA, 19 nt, Homo sapiens
  misc_RNA (1)...(19): siRNA sense strand
guacuguagccacaugauu

SEQ ID NO: 1342855 - RNA, 19 nt, Homo sapiens
  misc_RNA (1)...(19): siRNA sense strand
ucaccaaggauuaugaaga

SEQ ID NO: 1342856 - RNA, 19 nt, Homo sapiens
  misc_RNA (1)...(19): siRNA sense strand
guccgaacuuucuaugaga

SEQ ID NO: 1342857 - RNA, 19 nt, Homo sapiens
  misc_RNA (1)...(19): siRNA sense strand
guggacaccugcagucucu

SEQ ID NO: 1342858 - RNA, 19 nt, Homo sapiens
  misc_RNA (1)...(19): siRNA sense strand
caaggauuaugaagagcau

SEQ ID NO: 1342859 - RNA, 19 nt, Homo sapiens
  misc_RNA (1)...(19): siRNA sense strand
gagaaggucaagaaugucu

SEQ ID NO: 1342860 - RNA, 19 nt, Homo sapiens
  misc_RNA (1)...(19): siRNA sense strand
auggagaccucgugccaaa

SEQ ID NO: 1342861 - RNA, 19 nt, Homo sapiens
  misc_RNA (1)...(19): siRNA sense strand
cguccgaacuuucuaugag

SEQ ID NO: 1342862 - RNA, 19 nt, Homo sapiens
  misc_RNA (1)...(19): siRNA sense strand
acaaagaaucuccuugaca

SEQ ID NO: 1342863 - RNA, 19 nt, Homo sapiens
  misc_RNA (1)...(19): siRNA sense strand
gaggacaccaugcgcuuca

SEQ ID NO: 1342864 - RNA, 19 nt, Homo sapiens
  misc_RNA (1)...(19): siRNA sense strand
ggacaccaugcgcuucaga

SEQ ID NO: 1342865 - RNA, 19 nt, Homo sapiens
  misc_RNA (1)...(19): siRNA sense strand
gcaagaacugcaacaacag

SEQ ID NO: 1342866 - RNA, 19 nt, Homo sapiens
  misc_RNA (1)...(19): siRNA sense strand
gcugcuucaccaaggauua

SEQ ID NO: 1342867 - RNA, 19 nt, Homo sapiens
  misc_RNA (1)...(19): siRNA sense strand
ugcaggaacucucuuugag

SEQ ID NO: 1342868 - RNA, 19 nt, Homo sapiens
  misc_RNA (1)...(19): siRNA sense strand
ggaggugucggaguacugu

SEQ ID NO: 1342869 - RNA, 19 nt, Homo sapiens
  misc_RNA (1)...(19): siRNA sense strand
cugcaggaacucucuuuga

SEQ ID NO: 1342870 - RNA, 19 nt, Homo sapiens
  misc_RNA (1)...(19): siRNA sense strand
agacaccucuccaguugcu

SEQ ID NO: 1342871 - RNA, 19 nt, Homo sapiens
  misc_RNA (1)...(19): siRNA sense strand
ugaaacaaagaaucuccuu

SEQ ID NO: 1342872 - RNA, 19 nt, Homo sapiens
  misc_RNA (1)...(19): siRNA sense strand
uacuguagccacaugauug

SEQ ID NO: 1342873 - RNA, 19 nt, Homo sapiens
  misc_RNA (1)...(19): siRNA sense strand
ggaauauuuucagcaagaa

SEQ ID NO: 1342874 - RNA, 19 nt, Homo sapiens
  misc_RNA (1)...(19): siRNA sense strand
gaccaggaacaguugaaag

SEQ ID NO: 1342875 - RNA, 19 nt, Homo sapiens
  misc_RNA (1)...(19): siRNA sense strand
uggaauauuuucagcaaga

SEQ ID NO: 1342876 - RNA, 19 nt, Homo sapiens
  misc_RNA (1)...(19): siRNA sense strand
ccucgugccaaauuacauu

SEQ ID NO: 1342877 - RNA, 19 nt, Homo sapiens
  misc_RNA (1)...(19): siRNA sense strand
gacaaggacuggaauauuu

SEQ ID NO: 1342878 - RNA, 19 nt, Homo sapiens
  misc_RNA (1)...(19): siRNA sense strand
caaagaaucuccuugacaa

SEQ ID NO: 1342879 - RNA, 19 nt, Homo sapiens
  misc_RNA (1)...(19): siRNA sense strand
gaaggcauuucuccuggua

SEQ ID NO: 1342880 - RNA, 19 nt, Homo sapiens
  misc_RNA (1)...(19): siRNA sense strand
gauccagugugcuaccuua

SEQ ID NO: 1342881 - RNA, 19 nt, Homo sapiens
  misc_RNA (1)...(19): siRNA sense strand
aaacaaagaaucuccuuga

SEQ ID NO: 1342882 - RNA, 19 nt, Homo sapiens
  misc_RNA (1)...(19): siRNA sense strand
gaacugcaacaacagcuuu

SEQ ID NO: 1342883 - RNA, 19 nt, Homo sapiens
  misc_RNA (1)...(19): siRNA sense strand
gagaccucgugccaaauua

SEQ ID NO: 1342884 - RNA, 19 nt, Homo sapiens
  misc_RNA (1)...(19): siRNA sense strand
ugaaagauccagugugcua

SEQ ID NO: 1342885 - RNA, 19 nt, Homo sapiens
  misc_RNA (1)...(19): siRNA sense strand
uggagaaggucaagaaugu

SEQ ID NO: 1342886 - RNA, 19 nt, Homo sapiens
  misc_RNA (1)...(19): siRNA sense strand
ggagaccucgugccaaauu

SEQ ID NO: 1342887 - RNA, 19 nt, Homo sapiens
  misc_RNA (1)...(19): siRNA sense strand
ccagugugcuaccuuaaga

SEQ ID NO: 1342888 - RNA, 19 nt, Homo sapiens
  misc_RNA (1)...(19): siRNA sense strand
accaugcgcuucagagaua

SEQ ID NO: 1342889 - RNA, 19 nt, Homo sapiens
  misc_RNA (1)...(19): siRNA sense strand
ggaguacuguagccacaug

SEQ ID NO: 1342890 - RNA, 19 nt, Homo sapiens
  misc_RNA (1)...(19): siRNA sense strand
caccaaggauuaugaagag

SEQ ID NO: 1342891 - RNA, 19 nt, Homo sapiens
  misc_RNA (1)...(19): siRNA sense strand
ggaggccucuuguucuaca

SEQ ID NO: 1342892 - RNA, 19 nt, Homo sapiens
  misc_RNA (1)...(19): siRNA sense strand
ugacaaggacuggaauauu

SEQ ID NO: 1342893 - RNA, 19 nt, Homo sapiens
  misc_RNA (1)...(19): siRNA sense strand
caggaacaguugaaagauc

SEQ ID NO: 1342894 - RNA, 19 nt, Homo sapiens
  misc_RNA (1)...(19): siRNA sense strand
ucggaggccucuuguucua

SEQ ID NO: 1342895 - RNA, 19 nt, Homo sapiens
  misc_RNA (1)...(19): siRNA sense strand
agcaagaacugcaacaaca

SEQ ID NO: 1342896 - RNA, 19 nt, Homo sapiens
  misc_RNA (1)...(19): siRNA sense strand
guacuguagccacaugauu

SEQ ID NO: 1342897 - RNA, 19 nt, Homo sapiens
  misc_RNA (1)...(19): siRNA sense strand
ucaccaaggauuaugaaga

SEQ ID NO: 1342898 - RNA, 19 nt, Homo sapiens
  misc_RNA (1)...(19): siRNA sense strand
guccgaacuuucuaugaga

SEQ ID NO: 1342899 - RNA, 19 nt, Homo sapiens
  misc_RNA (1)...(19): siRNA sense strand
guggacaccugcagucucu

SEQ ID NO: 1342900 - RNA, 19 nt, Homo sapiens
  misc_RNA (1)...(19): siRNA sense strand
caaggauuaugaagagcau

SEQ ID NO: 1342901 - RNA, 19 nt, Homo sapiens
  misc_RNA (1)...(19): siRNA sense strand
gagaaggucaagaaugucu

SEQ ID NO: 1342902 - RNA, 19 nt, Homo sapiens
  misc_RNA (1)...(19): siRNA sense strand
auggagaccucgugccaaa

SEQ ID NO: 1342903 - RNA, 19 nt, Homo sapiens
  misc_RNA (1)...(19): siRNA sense strand
cguccgaacuuucuaugag

SEQ ID NO: 1342904 - RNA, 19 nt, Homo sapiens
  misc_RNA (1)...(19): siRNA sense strand
acaaagaaucuccuugaca

SEQ ID NO: 1342905 - RNA, 19 nt, Homo sapiens
  misc_RNA (1)...(19): siRNA sense strand
gaggacaccaugcgcuuca

SEQ ID NO: 1342906 - RNA, 19 nt, Homo sapiens
  misc_RNA (1)...(19): siRNA sense strand
ggacaccaugcgcuucaga

SEQ ID NO: 1342907 - RNA, 19 nt, Homo sapiens
  misc_RNA (1)...(19): siRNA sense strand
gcaagaacugcaacaacag

SEQ ID NO: 1342908 - RNA, 19 nt, Homo sapiens
  misc_RNA (1)...(19): siRNA sense strand
gcugcuucaccaaggauua

SEQ ID NO: 1342909 - RNA, 19 nt, Homo sapiens
  misc_RNA (1)...(19): siRNA sense strand
ugcaggaacucucuuugag

SEQ ID NO: 1342910 - RNA, 19 nt, Homo sapiens
  misc_RNA (1)...(19): siRNA sense strand
ggaggugucggaguacugu

SEQ ID NO: 1342911 - RNA, 19 nt, Homo sapiens
  misc_RNA (1)...(19): siRNA sense strand
cugcaggaacucucuuuga

SEQ ID NO: 1342912 - RNA, 19 nt, Homo sapiens
  misc_RNA (1)...(19): siRNA sense strand
agacaccucuccaguugcu

SEQ ID NO: 1342913 - RNA, 19 nt, Homo sapiens
  misc_RNA (1)...(19): siRNA sense strand
ugaaacaaagaaucuccuu

SEQ ID NO: 1342914 - RNA, 19 nt, Homo sapiens
  misc_RNA (1)...(19): siRNA sense strand
uacuguagccacaugauug

SEQ ID NO: 1342915 - RNA, 19 nt, Homo sapiens
  misc_RNA (1)...(19): siRNA sense strand
ggaauauuuucagcaagaa

SEQ ID NO: 1342916 - RNA, 19 nt, Homo sapiens
  misc_RNA (1)...(19): siRNA sense strand
gaccaggaacaguugaaag

SEQ ID NO: 1342917 - RNA, 19 nt, Homo sapiens
  misc_RNA (1)...(19): siRNA sense strand
uggaauauuuucagcaaga

SEQ ID NO: 1342918 - RNA, 19 nt, Homo sapiens
  misc_RNA (1)...(19): siRNA sense strand
ccucgugccaaauuacauu

SEQ ID NO: 1342919 - RNA, 19 nt, Homo sapiens
  misc_RNA (1)...(19): siRNA sense strand
gacaaggacuggaauauuu

SEQ ID NO: 1342920 - RNA, 19 nt, Homo sapiens
  misc_RNA (1)...(19): siRNA sense strand
caaagaaucuccuugacaa

SEQ ID NO: 1342921 - RNA, 19 nt, Homo sapiens
  misc_RNA (1)...(19): siRNA sense strand
gaaggcauuucuccuggua

SEQ ID NO: 1342922 - RNA, 19 nt, Homo sapiens
  misc_RNA (1)...(19): siRNA sense strand
gauccagugugcuaccuua

SEQ ID NO: 1342923 - RNA, 19 nt, Homo sapiens
  misc_RNA (1)...(19): siRNA sense strand
aaacaaagaaucuccuuga

SEQ ID NO: 1342924 - RNA, 19 nt, Homo sapiens
  misc_RNA (1)...(19): siRNA sense strand
gaacugcaacaacagcuuu

SEQ ID NO: 1342925 - RNA, 19 nt, Homo sapiens
  misc_RNA (1)...(19): siRNA sense strand
gagaccucgugccaaauua

SEQ ID NO: 1342926 - RNA, 19 nt, Homo sapiens
  misc_RNA (1)...(19): siRNA sense strand
ugaaagauccagugugcua

SEQ ID NO: 1342927 - RNA, 19 nt, Homo sapiens
  misc_RNA (1)...(19): siRNA sense strand
uggagaaggucaagaaugu

SEQ ID NO: 1342928 - RNA, 19 nt, Homo sapiens
  misc_RNA (1)...(19): siRNA sense strand
ggagaccucgugccaaauu

SEQ ID NO: 1342929 - RNA, 19 nt, Homo sapiens
  misc_RNA (1)...(19): siRNA sense strand
ccagugugcuaccuuaaga

SEQ ID NO: 1342930 - RNA, 19 nt, Homo sapiens
  misc_RNA (1)...(19): siRNA sense strand
accaugcgcuucagagaua

SEQ ID NO: 1342931 - RNA, 19 nt, Homo sapiens
  misc_RNA (1)...(19): siRNA sense strand
ggaguacuguagccacaug

SEQ ID NO: 1342932 - RNA, 19 nt, Homo sapiens
  misc_RNA (1)...(19): siRNA sense strand
caccaaggauuaugaagag

SEQ ID NO: 1342933 - RNA, 19 nt, Homo sapiens
  misc_RNA (1)...(19): siRNA sense strand
ggaggccucuuguucuaca

SEQ ID NO: 1342934 - RNA, 19 nt, Homo sapiens
  misc_RNA (1)...(19): siRNA sense strand
ugacaaggacuggaauauu

SEQ ID NO: 1342935 - RNA, 19 nt, Homo sapiens
  misc_RNA (1)...(19): siRNA sense strand
caggaacaguugaaagauc

SEQ ID NO: 1342936 - RNA, 19 nt, Homo sapiens
  misc_RNA (1)...(19): siRNA sense strand
ucggaggccucuuguucua

SEQ ID NO: 1342937 - RNA, 19 nt, Homo sapiens
  misc_RNA (1)...(19): siRNA sense strand
agcaagaacugcaacaaca

SEQ ID NO: 1342938 - RNA, 19 nt, Homo sapiens
  misc_RNA (1)...(19): siRNA sense strand
guacuguagccacaugauu

SEQ ID NO: 1342939 - RNA, 19 nt, Homo sapiens
  misc_RNA (1)...(19): siRNA sense strand
ucaccaaggauuaugaaga

SEQ ID NO: 1342940 - RNA, 19 nt, Homo sapiens
  misc_RNA (1)...(19): siRNA sense strand
guccgaacuuucuaugaga

SEQ ID NO: 1342941 - RNA, 19 nt, Homo sapiens
  misc_RNA (1)...(19): siRNA sense strand
guggacaccugcagucucu

SEQ ID NO: 1342942 - RNA, 19 nt, Homo sapiens
  misc_RNA (1)...(19): siRNA sense strand
caaggauuaugaagagcau

SEQ ID NO: 1342943 - RNA, 19 nt, Homo sapiens
  misc_RNA (1)...(19): siRNA sense strand
gagaaggucaagaaugucu

SEQ ID NO: 1342944 - RNA, 19 nt, Homo sapiens
  misc_RNA (1)...(19): siRNA sense strand
auggagaccucgugccaaa

SEQ ID NO: 1342945 - RNA, 19 nt, Homo sapiens
  misc_RNA (1)...(19): siRNA sense strand
cguccgaacuuucuaugag

SEQ ID NO: 1342946 - RNA, 19 nt, Homo sapiens
  misc_RNA (1)...(19): siRNA sense strand
acaaagaaucuccuugaca

SEQ ID NO: 1342947 - RNA, 19 nt, Homo sapiens
  misc_RNA (1)...(19): siRNA sense strand
gaggacaccaugcgcuuca

SEQ ID NO: 1342948 - RNA, 19 nt, Homo sapiens
  misc_RNA (1)...(19): siRNA sense strand
ggacaccaugcgcuucaga

SEQ ID NO: 1342949 - RNA, 19 nt, Homo sapiens
  misc_RNA (1)...(19): siRNA sense strand
gcaagaacugcaacaacag

SEQ ID NO: 1342950 - RNA, 19 nt, Homo sapiens
  misc_RNA (1)...(19): siRNA sense strand
gcugcuucaccaaggauua

SEQ ID NO: 1342951 - RNA, 19 nt, Homo sapiens
  misc_RNA (1)...(19): siRNA sense strand
ugcaggaacucucuuugag

SEQ ID NO: 1342952 - RNA, 19 nt, Homo sapiens
  misc_RNA (1)...(19): siRNA sense strand
ggaggugucggaguacugu

SEQ ID NO: 1342953 - RNA, 19 nt, Homo sapiens
  misc_RNA (1)...(19): siRNA sense strand
cugcaggaacucucuuuga

SEQ ID NO: 1342954 - RNA, 19 nt, Homo sapiens
  misc_RNA (1)...(19): siRNA sense strand
agacaccucuccaguugcu

SEQ ID NO: 1342955 - RNA, 19 nt, Homo sapiens
  misc_RNA (1)...(19): siRNA sense strand
ugaaacaaagaaucuccuu

SEQ ID NO: 1342956 - RNA, 19 nt, Homo sapiens
  misc_RNA (1)...(19): siRNA sense strand
uacuguagccacaugauug

SEQ ID NO: 1342957 - RNA, 19 nt, Homo sapiens
  misc_RNA (1)...(19): siRNA sense strand
ggaauauuuucagcaagaa

SEQ ID NO: 1342958 - RNA, 19 nt, Homo sapiens
  misc_RNA (1)...(19): siRNA sense strand
gaccaggaacaguugaaag

SEQ ID NO: 1342959 - RNA, 19 nt, Homo sapiens
  misc_RNA (1)...(19): siRNA sense strand
uggaauauuuucagcaaga

SEQ ID NO: 1342960 - RNA, 19 nt, Homo sapiens
  misc_RNA (1)...(19): siRNA sense strand
ccucgugccaaauuacauu

SEQ ID NO: 1342961 - RNA, 19 nt, Homo sapiens
  misc_RNA (1)...(19): siRNA sense strand
gacaaggacuggaauauuu

SEQ ID NO: 1342962 - RNA, 19 nt, Homo sapiens
  misc_RNA (1)...(19): siRNA sense strand
caaagaaucuccuugacaa

SEQ ID NO: 1342963 - RNA, 19 nt, Homo sapiens
  misc_RNA (1)...(19): siRNA sense strand
gaaggcauuucuccuggua

SEQ ID NO: 1342964 - RNA, 19 nt, Homo sapiens
  misc_RNA (1)...(19): siRNA sense strand
gauccagugugcuaccuua

SEQ ID NO: 1342965 - RNA, 19 nt, Homo sapiens
  misc_RNA (1)...(19): siRNA sense strand
aaacaaagaaucuccuuga

SEQ ID NO: 1342966 - RNA, 19 nt, Homo sapiens
  misc_RNA (1)...(19): siRNA sense strand
gaacugcaacaacagcuuu

SEQ ID NO: 1342967 - RNA, 19 nt, Homo sapiens
  misc_RNA (1)...(19): siRNA sense strand
gagaccucgugccaaauua

SEQ ID NO: 1342968 - RNA, 19 nt, Homo sapiens
  misc_RNA (1)...(19): siRNA sense strand
ugaaagauccagugugcua

SEQ ID NO: 1342969 - RNA, 19 nt, Homo sapiens
  misc_RNA (1)...(19): siRNA sense strand
uggagaaggucaagaaugu

SEQ ID NO: 1342970 - RNA, 19 nt, Homo sapiens
  misc_RNA (1)...(19): siRNA sense strand
ggagaccucgugccaaauu

SEQ ID NO: 1342971 - RNA, 19 nt, Homo sapiens
  misc_RNA (1)...(19): siRNA sense strand
ccagugugcuaccuuaaga

SEQ ID NO: 1342972 - RNA, 19 nt, Homo sapiens
  misc_RNA (1)...(19): siRNA sense strand
accaugcgcuucagagaua

SEQ ID NO: 1342973 - RNA, 19 nt, Homo sapiens
  misc_RNA (1)...(19): siRNA sense strand
ggaguacuguagccacaug

SEQ ID NO: 1342974 - RNA, 19 nt, Homo sapiens
  misc_RNA (1)...(19): siRNA sense strand
caccaaggauuaugaagag

SEQ ID NO: 1342975 - RNA, 19 nt, Homo sapiens
  misc_RNA (1)...(19): siRNA sense strand
ggaggccucuuguucuaca

SEQ ID NO: 1342976 - RNA, 19 nt, Homo sapiens
  misc_RNA (1)...(19): siRNA sense strand
ugacaaggacuggaauauu

SEQ ID NO: 1342977 - RNA, 19 nt, Homo sapiens
  misc_RNA (1)...(19): siRNA sense strand
caggaacaguugaaagauc

SEQ ID NO: 1342978 - RNA, 19 nt, Homo sapiens
  misc_RNA (1)...(19): siRNA sense strand
ucggaggccucuuguucua

SEQ ID NO: 1342979 - RNA, 19 nt, Homo sapiens
  misc_RNA (1)...(19): siRNA sense strand
agcaagaacugcaacaaca

SEQ ID NO: 1342980 - RNA, 19 nt, Homo sapiens
  misc_RNA (1)...(19): siRNA sense strand
guacuguagccacaugauu

SEQ ID NO: 1342981 - RNA, 19 nt, Homo sapiens
  misc_RNA (1)...(19): siRNA sense strand
ucaccaaggauuaugaaga

SEQ ID NO: 1342982 - RNA, 19 nt, Homo sapiens
  misc_RNA (1)...(19): siRNA sense strand
guccgaacuuucuaugaga

SEQ ID NO: 1342983 - RNA, 19 nt, Homo sapiens
  misc_RNA (1)...(19): siRNA sense strand
guggacaccugcagucucu

SEQ ID NO: 1342984 - RNA, 19 nt, Homo sapiens
  misc_RNA (1)...(19): siRNA sense strand
caaggauuaugaagagcau

SEQ ID NO: 1342985 - RNA, 19 nt, Homo sapiens
  misc_RNA (1)...(19): siRNA sense strand
gagaaggucaagaaugucu

SEQ ID NO: 1342986 - RNA, 19 nt, Homo sapiens
  misc_RNA (1)...(19): siRNA sense strand
auggagaccucgugccaaa

SEQ ID NO: 1342987 - RNA, 19 nt, Homo sapiens
  misc_RNA (1)...(19): siRNA sense strand
cguccgaacuuucuaugag

SEQ ID NO: 1342988 - RNA, 19 nt, Homo sapiens
  misc_RNA (1)...(19): siRNA sense strand
acaaagaaucuccuugaca

SEQ ID NO: 1342989 - RNA, 19 nt, Homo sapiens
  misc_RNA (1)...(19): siRNA sense strand
gaggacaccaugcgcuuca

SEQ ID NO: 1342990 - RNA, 19 nt, Homo sapiens
  misc_RNA (1)...(19): siRNA sense strand
ggacaccaugcgcuucaga

SEQ ID NO: 1342991 - RNA, 19 nt, Homo sapiens
  misc_RNA (1)...(19): siRNA sense strand
gcaagaacugcaacaacag

SEQ ID NO: 1342992 - RNA, 19 nt, Homo sapiens
  misc_RNA (1)...(19): siRNA sense strand
gcugcuucaccaaggauua

SEQ ID NO: 1342993 - RNA, 19 nt, Homo sapiens
  misc_RNA (1)...(19): siRNA sense strand
ugcaggaacucucuuugag

SEQ ID NO: 1342994 - RNA, 19 nt, Homo sapiens
  misc_RNA (1)...(19): siRNA sense strand
ggaggugucggaguacugu

SEQ ID NO: 1342995 - RNA, 19 nt, Homo sapiens
  misc_RNA (1)...(19): siRNA sense strand
cugcaggaacucucuuuga

SEQ ID NO: 1342996 - RNA, 19 nt, Homo sapiens
  misc_RNA (1)...(19): siRNA sense strand
agacaccucuccaguugcu

SEQ ID NO: 1342997 - RNA, 19 nt, Homo sapiens
  misc_RNA (1)...(19): siRNA sense strand
ugaaacaaagaaucuccuu

SEQ ID NO: 1342998 - RNA, 19 nt, Homo sapiens
  misc_RNA (1)...(19): siRNA sense strand
uacuguagccacaugauug

SEQ ID NO: 1342999 - RNA, 19 nt, Homo sapiens
  misc_RNA (1)...(19): siRNA sense strand
ggaauauuuucagcaagaa

SEQ ID NO: 1343000 - RNA, 19 nt, Homo sapiens
  misc_RNA (1)...(19): siRNA sense strand
gaccaggaacaguugaaag

SEQ ID NO: 1343001 - RNA, 19 nt, Homo sapiens
  misc_RNA (1)...(19): siRNA sense strand
uggaauauuuucagcaaga

SEQ ID NO: 1343002 - RNA, 19 nt, Homo sapiens
  misc_RNA (1)...(19): siRNA sense strand
ccucgugccaaauuacauu

SEQ ID NO: 1343003 - RNA, 19 nt, Homo sapiens
  misc_RNA (1)...(19): siRNA sense strand
gacaaggacuggaauauuu

SEQ ID NO: 1343004 - RNA, 19 nt, Homo sapiens
  misc_RNA (1)...(19): siRNA sense strand
caaagaaucuccuugacaa

SEQ ID NO: 1343005 - RNA, 19 nt, Homo sapiens
  misc_RNA (1)...(19): siRNA sense strand
gaaggcauuucuccuggua

SEQ ID NO: 1343006 - RNA, 19 nt, Homo sapiens
  misc_RNA (1)...(19): siRNA sense strand
gauccagugugcuaccuua

SEQ ID NO: 1343007 - RNA, 19 nt, Homo sapiens
  misc_RNA (1)...(19): siRNA sense strand
aaacaaagaaucuccuuga

SEQ ID NO: 1343008 - RNA, 19 nt, Homo sapiens
  misc_RNA (1)...(19): siRNA sense strand
gaacugcaacaacagcuuu

SEQ ID NO: 1343009 - RNA, 19 nt, Homo sapiens
  misc_RNA (1)...(19): siRNA sense strand
gagaccucgugccaaauua

SEQ ID NO: 1343010 - RNA, 19 nt, Homo sapiens
  misc_RNA (1)...(19): siRNA sense strand
ugaaagauccagugugcua

SEQ ID NO: 1343011 - RNA, 19 nt, Homo sapiens
  misc_RNA (1)...(19): siRNA sense strand
uggagaaggucaagaaugu

SEQ ID NO: 1343012 - RNA, 19 nt, Homo sapiens
  misc_RNA (1)...(19): siRNA sense strand
ggagaccucgugccaaauu

SEQ ID NO: 1343013 - RNA, 19 nt, Homo sapiens
  misc_RNA (1)...(19): siRNA sense strand
ccagugugcuaccuuaaga

SEQ ID NO: 1343014 - RNA, 19 nt, Homo sapiens
  misc_RNA (1)...(19): siRNA sense strand
accaugcgcuucagagaua

SEQ ID NO: 1343015 - RNA, 19 nt, Homo sapiens
  misc_RNA (1)...(19): siRNA sense strand
ggaguacuguagccacaug

SEQ ID NO: 1343016 - RNA, 19 nt, Homo sapiens
  misc_RNA (1)...(19): siRNA sense strand
caccaaggauuaugaagag

SEQ ID NO: 1343017 - RNA, 19 nt, Homo sapiens
  misc_RNA (1)...(19): siRNA sense strand
ggaggccucuuguucuaca

SEQ ID NO: 1343018 - RNA, 19 nt, Homo sapiens
  misc_RNA (1)...(19): siRNA sense strand
ugacaaggacuggaauauu

SEQ ID NO: 1343019 - RNA, 19 nt, Homo sapiens
  misc_RNA (1)...(19): siRNA sense strand
caggaacaguugaaagauc

SEQ ID NO: 1343020 - RNA, 19 nt, Homo sapiens
  misc_RNA (1)...(19): siRNA sense strand
ucggaggccucuuguucua

SEQ ID NO: 1343021 - RNA, 19 nt, Homo sapiens
  misc_RNA (1)...(19): siRNA sense strand
agcaagaacugcaacaaca

SEQ ID NO: 1343022 - RNA, 19 nt, Homo sapiens
  misc_RNA (1)...(19): siRNA sense strand
guacuguagccacaugauu

SEQ ID NO: 1343023 - RNA, 19 nt, Homo sapiens
  misc_RNA (1)...(19): siRNA sense strand
ucaccaaggauuaugaaga

SEQ ID NO: 1343024 - RNA, 19 nt, Homo sapiens
  misc_RNA (1)...(19): siRNA sense strand
guccgaacuuucuaugaga

SEQ ID NO: 1343025 - RNA, 19 nt, Homo sapiens
  misc_RNA (1)...(19): siRNA sense strand
guggacaccugcagucucu

SEQ ID NO: 1343026 - RNA, 19 nt, Homo sapiens
  misc_RNA (1)...(19): siRNA sense strand
caaggauuaugaagagcau

SEQ ID NO: 1343027 - RNA, 19 nt, Homo sapiens
  misc_RNA (1)...(19): siRNA sense strand
gagaaggucaagaaugucu

SEQ ID NO: 1343028 - RNA, 19 nt, Homo sapiens
  misc_RNA (1)...(19): siRNA sense strand
auggagaccucgugccaaa

SEQ ID NO: 1343029 - RNA, 19 nt, Homo sapiens
  misc_RNA (1)...(19): siRNA sense strand
cguccgaacuuucuaugag

SEQ ID NO: 1343030 - RNA, 19 nt, Homo sapiens
  misc_RNA (1)...(19): siRNA sense strand
acaaagaaucuccuugaca

SEQ ID NO: 1343031 - RNA, 19 nt, Homo sapiens
  misc_RNA (1)...(19): siRNA sense strand
gaggacaccaugcgcuuca

SEQ ID NO: 1343032 - RNA, 19 nt, Homo sapiens
  misc_RNA (1)...(19): siRNA sense strand
ggacaccaugcgcuucaga

SEQ ID NO: 1343033 - RNA, 19 nt, Homo sapiens
  misc_RNA (1)...(19): siRNA sense strand
gcaagaacugcaacaacag

SEQ ID NO: 1343034 - RNA, 19 nt, Homo sapiens
  misc_RNA (1)...(19): siRNA sense strand
gcugcuucaccaaggauua

SEQ ID NO: 1343035 - RNA, 19 nt, Homo sapiens
  misc_RNA (1)...(19): siRNA sense strand
ugcaggaacucucuuugag

SEQ ID NO: 1343036 - RNA, 19 nt, Homo sapiens
  misc_RNA (1)...(19): siRNA sense strand
ggaggugucggaguacugu

SEQ ID NO: 1343037 - RNA, 19 nt, Homo sapiens
  misc_RNA (1)...(19): siRNA sense strand
cugcaggaacucucuuuga

SEQ ID NO: 1343038 - RNA, 19 nt, Homo sapiens
  misc_RNA (1)...(19): siRNA sense strand
agacaccucuccaguugcu

SEQ ID NO: 1343039 - RNA, 19 nt, Homo sapiens
  misc_RNA (1)...(19): siRNA sense strand
ugaaacaaagaaucuccuu

SEQ ID NO: 1343040 - RNA, 19 nt, Homo sapiens
  misc_RNA (1)...(19): siRNA sense strand
uacuguagccacaugauug

SEQ ID NO: 1343041 - RNA, 19 nt, Homo sapiens
  misc_RNA (1)...(19): siRNA sense strand
ggaauauuuucagcaagaa

SEQ ID NO: 1343042 - RNA, 19 nt, Homo sapiens
  misc_RNA (1)...(19): siRNA sense strand
gaccaggaacaguugaaag

SEQ ID NO: 1343043 - RNA, 19 nt, Homo sapiens
  misc_RNA (1)...(19): siRNA sense strand
uggaauauuuucagcaaga

SEQ ID NO: 1343044 - RNA, 19 nt, Homo sapiens
  misc_RNA (1)...(19): siRNA sense strand
ccucgugccaaauuacauu

SEQ ID NO: 1343045 - RNA, 19 nt, Homo sapiens
  misc_RNA (1)...(19): siRNA sense strand
gacaaggacuggaauauuu

SEQ ID NO: 1343046 - RNA, 19 nt, Homo sapiens
  misc_RNA (1)...(19): siRNA sense strand
caaagaaucuccuugacaa

SEQ ID NO: 1343047 - RNA, 19 nt, Homo sapiens
  misc_RNA (1)...(19): siRNA sense strand
gaaggcauuucuccuggua

SEQ ID NO: 1343048 - RNA, 19 nt, Homo sapiens
  misc_RNA (1)...(19): siRNA sense strand
gauccagugugcuaccuua

SEQ ID NO: 1343049 - RNA, 19 nt, Homo sapiens
  misc_RNA (1)...(19): siRNA sense strand
aaacaaagaaucuccuuga

SEQ ID NO: 1343050 - RNA, 19 nt, Homo sapiens
  misc_RNA (1)...(19): siRNA sense strand
gaacugcaacaacagcuuu

SEQ ID NO: 1343051 - RNA, 19 nt, Homo sapiens
  misc_RNA (1)...(19): siRNA sense strand
gagaccucgugccaaauua

SEQ ID NO: 1343052 - RNA, 19 nt, Homo sapiens
  misc_RNA (1)...(19): siRNA sense strand
ugaaagauccagugugcua

SEQ ID NO: 1343053 - RNA, 19 nt, Homo sapiens
  misc_RNA (1)...(19): siRNA sense strand
uggagaaggucaagaaugu

SEQ ID NO: 1343054 - RNA, 19 nt, Homo sapiens
  misc_RNA (1)...(19): siRNA sense strand
ggagaccucgugccaaauu

SEQ ID NO: 1343055 - RNA, 19 nt, Homo sapiens
  misc_RNA (1)...(19): siRNA sense strand
ccagugugcuaccuuaaga

SEQ ID NO: 1343056 - RNA, 19 nt, Homo sapiens
  misc_RNA (1)...(19): siRNA sense strand
accaugcgcuucagagaua

SEQ ID NO: 1343057 - RNA, 19 nt, Homo sapiens
  misc_RNA (1)...(19): siRNA sense strand
ggaguacuguagccacaug

SEQ ID NO: 1343058 - RNA, 19 nt, Homo sapiens
  misc_RNA (1)...(19): siRNA sense strand
caccaaggauuaugaagag

SEQ ID NO: 1343059 - RNA, 19 nt, Homo sapiens
  misc_RNA (1)...(19): siRNA sense strand
ggaggccucuuguucuaca

SEQ ID NO: 1343060 - RNA, 19 nt, Homo sapiens
  misc_RNA (1)...(19): siRNA sense strand
ugacaaggacuggaauauu

SEQ ID NO: 1343061 - RNA, 19 nt, Homo sapiens
  misc_RNA (1)...(19): siRNA sense strand
caggaacaguugaaagauc

SEQ ID NO: 1343062 - RNA, 19 nt, Homo sapiens
  misc_RNA (1)...(19): siRNA sense strand
ucggaggccucuuguucua

SEQ ID NO: 1343063 - RNA, 19 nt, Homo sapiens
  misc_RNA (1)...(19): siRNA sense strand
agcaagaacugcaacaaca

SEQ ID NO: 1343064 - RNA, 19 nt, Homo sapiens
  misc_RNA (1)...(19): siRNA sense strand
guacuguagccacaugauu

SEQ ID NO: 1343065 - RNA, 19 nt, Homo sapiens
  misc_RNA (1)...(19): siRNA sense strand
ucaccaaggauuaugaaga

SEQ ID NO: 1343066 - RNA, 19 nt, Homo sapiens
  misc_RNA (1)...(19): siRNA sense strand
guccgaacuuucuaugaga

SEQ ID NO: 1343067 - RNA, 19 nt, Homo sapiens
  misc_RNA (1)...(19): siRNA sense strand
guggacaccugcagucucu

SEQ ID NO: 1343068 - RNA, 19 nt, Homo sapiens
  misc_RNA (1)...(19): siRNA sense strand
caaggauuaugaagagcau

SEQ ID NO: 1343069 - RNA, 19 nt, Homo sapiens
  misc_RNA (1)...(19): siRNA sense strand
gagaaggucaagaaugucu

SEQ ID NO: 1343070 - RNA, 19 nt, Homo sapiens
  misc_RNA (1)...(19): siRNA sense strand
auggagaccucgugccaaa

SEQ ID NO: 1343071 - RNA, 19 nt, Homo sapiens
  misc_RNA (1)...(19): siRNA sense strand
cguccgaacuuucuaugag

SEQ ID NO: 1343072 - RNA, 19 nt, Homo sapiens
  misc_RNA (1)...(19): siRNA sense strand
acaaagaaucuccuugaca

SEQ ID NO: 1343073 - RNA, 19 nt, Homo sapiens
  misc_RNA (1)...(19): siRNA sense strand
gaggacaccaugcgcuuca

SEQ ID NO: 1343074 - RNA, 19 nt, Homo sapiens
  misc_RNA (1)...(19): siRNA sense strand
ggacaccaugcgcuucaga

SEQ ID NO: 1343075 - RNA, 19 nt, Homo sapiens
  misc_RNA (1)...(19): siRNA sense strand
gcaagaacugcaacaacag

SEQ ID NO: 1343076 - RNA, 19 nt, Homo sapiens
  misc_RNA (1)...(19): siRNA sense strand
gcugcuucaccaaggauua

SEQ ID NO: 1343077 - RNA, 19 nt, Homo sapiens
  misc_RNA (1)...(19): siRNA sense strand
ugcaggaacucucuuugag

SEQ ID NO: 1343078 - RNA, 19 nt, Homo sapiens
  misc_RNA (1)...(19): siRNA sense strand
ggaggugucggaguacugu

SEQ ID NO: 1343079 - RNA, 19 nt, Homo sapiens
  misc_RNA (1)...(19): siRNA sense strand
cugcaggaacucucuuuga

SEQ ID NO: 1343080 - RNA, 19 nt, Homo sapiens
  misc_RNA (1)...(19): siRNA sense strand
agacaccucuccaguugcu

SEQ ID NO: 1343081 - RNA, 19 nt, Homo sapiens
  misc_RNA (1)...(19): siRNA sense strand
ugaaacaaagaaucuccuu

SEQ ID NO: 1343082 - RNA, 19 nt, Homo sapiens
  misc_RNA (1)...(19): siRNA sense strand
uacuguagccacaugauug

SEQ ID NO: 1343083 - RNA, 19 nt, Homo sapiens
  misc_RNA (1)...(19): siRNA sense strand
ggaauauuuucagcaagaa

SEQ ID NO: 1343084 - RNA, 19 nt, Homo sapiens
  misc_RNA (1)...(19): siRNA sense strand
gaccaggaacaguugaaag

SEQ ID NO: 1343085 - RNA, 19 nt, Homo sapiens
  misc_RNA (1)...(19): siRNA sense strand
uggaauauuuucagcaaga

SEQ ID NO: 1343086 - RNA, 19 nt, Homo sapiens
  misc_RNA (1)...(19): siRNA sense strand
ccucgugccaaauuacauu

SEQ ID NO: 1343087 - RNA, 19 nt, Homo sapiens
  misc_RNA (1)...(19): siRNA sense strand
gacaaggacuggaauauuu

SEQ ID NO: 1343088 - RNA, 19 nt, Homo sapiens
  misc_RNA (1)...(19): siRNA sense strand
caaagaaucuccuugacaa

SEQ ID NO: 1343089 - RNA, 19 nt, Homo sapiens
  misc_RNA (1)...(19): siRNA sense strand
gaaggcauuucuccuggua

SEQ ID NO: 1343090 - RNA, 19 nt, Homo sapiens
  misc_RNA (1)...(19): siRNA sense strand
gauccagugugcuaccuua

SEQ ID NO: 1343091 - RNA, 19 nt, Homo sapiens
  misc_RNA (1)...(19): siRNA sense strand
aaacaaagaaucuccuuga

SEQ ID NO: 1343092 - RNA, 19 nt, Homo sapiens
  misc_RNA (1)...(19): siRNA sense strand
gaacugcaacaacagcuuu

SEQ ID NO: 1343093 - RNA, 19 nt, Homo sapiens
  misc_RNA (1)...(19): siRNA sense strand
gagaccucgugccaaauua

SEQ ID NO: 1343094 - RNA, 19 nt, Homo sapiens
  misc_RNA (1)...(19): siRNA sense strand
ugaaagauccagugugcua

SEQ ID NO: 1343095 - RNA, 19 nt, Homo sapiens
  misc_RNA (1)...(19): siRNA sense strand
uggagaaggucaagaaugu

SEQ ID NO: 1343096 - RNA, 19 nt, Homo sapiens
  misc_RNA (1)...(19): siRNA sense strand
ggagaccucgugccaaauu

SEQ ID NO: 1343097 - RNA, 19 nt, Homo sapiens
  misc_RNA (1)...(19): siRNA sense strand
ccagugugcuaccuuaaga

SEQ ID NO: 1343098 - RNA, 19 nt, Homo sapiens
  misc_RNA (1)...(19): siRNA sense strand
accaugcgcuucagagaua

SEQ ID NO: 1343099 - RNA, 19 nt, Homo sapiens
  misc_RNA (1)...(19): siRNA sense strand
ggaguacuguagccacaug

SEQ ID NO: 1343100 - RNA, 19 nt, Homo sapiens
  misc_RNA (1)...(19): siRNA sense strand
caccaaggauuaugaagag

SEQ ID NO: 1343101 - RNA, 19 nt, Homo sapiens
  misc_RNA (1)...(19): siRNA sense strand
ggaggccucuuguucuaca

SEQ ID NO: 1343102 - RNA, 19 nt, Homo sapiens
  misc_RNA (1)...(19): siRNA sense strand
ugacaaggacuggaauauu

SEQ ID NO: 1343103 - RNA, 19 nt, Homo sapiens
  misc_RNA (1)...(19): siRNA sense strand
caggaacaguugaaagauc

SEQ ID NO: 1343104 - RNA, 19 nt, Homo sapiens
  misc_RNA (1)...(19): siRNA sense strand
ucggaggccucuuguucua

SEQ ID NO: 1343105 - RNA, 19 nt, Homo sapiens
  misc_RNA (1)...(19): siRNA sense strand
agcaagaacugcaacaaca

SEQ ID NO: 1343106 - RNA, 19 nt, Homo sapiens
  misc_RNA (1)...(19): siRNA sense strand
guacuguagccacaugauu

SEQ ID NO: 1343107 - RNA, 19 nt, Homo sapiens
  misc_RNA (1)...(19): siRNA sense strand
ucaccaaggauuaugaaga

SEQ ID NO: 1343108 - RNA, 19 nt, Homo sapiens
  misc_RNA (1)...(19): siRNA sense strand
guccgaacuuucuaugaga

SEQ ID NO: 1343109 - RNA, 19 nt, Homo sapiens
  misc_RNA (1)...(19): siRNA sense strand
guggacaccugcagucucu

SEQ ID NO: 1343110 - RNA, 19 nt, Homo sapiens
  misc_RNA (1)...(19): siRNA sense strand
caaggauuaugaagagcau

SEQ ID NO: 1343111 - RNA, 19 nt, Homo sapiens
  misc_RNA (1)...(19): siRNA sense strand
gagaaggucaagaaugucu

SEQ ID NO: 1343112 - RNA, 19 nt, Homo sapiens
  misc_RNA (1)...(19): siRNA sense strand
auggagaccucgugccaaa

SEQ ID NO: 1343113 - RNA, 19 nt, Homo sapiens
  misc_RNA (1)...(19): siRNA sense strand
cguccgaacuuucuaugag

SEQ ID NO: 1343114 - RNA, 19 nt, Homo sapiens
  misc_RNA (1)...(19): siRNA sense strand
acaaagaaucuccuugaca

SEQ ID NO: 1343115 - RNA, 19 nt, Homo sapiens
  misc_RNA (1)...(19): siRNA sense strand
gaggacaccaugcgcuuca

SEQ ID NO: 1343116 - RNA, 19 nt, Homo sapiens
  misc_RNA (1)...(19): siRNA sense strand
ggacaccaugcgcuucaga

SEQ ID NO: 1343117 - RNA, 19 nt, Homo sapiens
  misc_RNA (1)...(19): siRNA sense strand
gcaagaacugcaacaacag

SEQ ID NO: 1343118 - RNA, 19 nt, Homo sapiens
  misc_RNA (1)...(19): siRNA sense strand
gcugcuucaccaaggauua

SEQ ID NO: 1343119 - RNA, 19 nt, Homo sapiens
  misc_RNA (1)...(19): siRNA sense strand
ugcaggaacucucuuugag

SEQ ID NO: 1343120 - RNA, 19 nt, Homo sapiens
  misc_RNA (1)...(19): siRNA sense strand
ggaggugucggaguacugu

SEQ ID NO: 1343121 - RNA, 19 nt, Homo sapiens
  misc_RNA (1)...(19): siRNA sense strand
cugcaggaacucucuuuga

SEQ ID NO: 1343122 - RNA, 19 nt, Homo sapiens
  misc_RNA (1)...(19): siRNA sense strand
agacaccucuccaguugcu

SEQ ID NO: 1343123 - RNA, 19 nt, Homo sapiens
  misc_RNA (1)...(19): siRNA sense strand
ugaaacaaagaaucuccuu

SEQ ID NO: 1343124 - RNA, 19 nt, Homo sapiens
  misc_RNA (1)...(19): siRNA sense strand
uacuguagccacaugauug

SEQ ID NO: 1343125 - RNA, 19 nt, Homo sapiens
  misc_RNA (1)...(19): siRNA sense strand
ggaauauuuucagcaagaa

SEQ ID NO: 1343126 - RNA, 19 nt, Homo sapiens
  misc_RNA (1)...(19): siRNA sense strand
gaccaggaacaguugaaag

SEQ ID NO: 1343127 - RNA, 19 nt, Homo sapiens
  misc_RNA (1)...(19): siRNA sense strand
uggaauauuuucagcaaga

SEQ ID NO: 1343128 - RNA, 19 nt, Homo sapiens
  misc_RNA (1)...(19): siRNA sense strand
ccucgugccaaauuacauu

SEQ ID NO: 1343129 - RNA, 19 nt, Homo sapiens
  misc_RNA (1)...(19): siRNA sense strand
gaagaugacucggacauuu

SEQ ID NO: 1343130 - RNA, 19 nt, Homo sapiens
  misc_RNA (1)...(19): siRNA sense strand
gcaaugaucccucugauaa

SEQ ID NO: 1343131 - RNA, 19 nt, Homo sapiens
  misc_RNA (1)...(19): siRNA sense strand
gaagauggcugugguagau

SEQ ID NO: 1343132 - RNA, 19 nt, Homo sapiens
  misc_RNA (1)...(19): siRNA sense strand
uauaagagaccauggauua

SEQ ID NO: 1343133 - RNA, 19 nt, Homo sapiens
  misc_RNA (1)...(19): siRNA sense strand
ucaaagcgaucauacuuau

SEQ ID NO: 1343134 - RNA, 19 nt, Homo sapiens
  misc_RNA (1)...(19): siRNA sense strand
ugacacagccauuccauuu

SEQ ID NO: 1343135 - RNA, 19 nt, Homo sapiens
  misc_RNA (1)...(19): siRNA sense strand
ggaccuguaugaaacaaug

SEQ ID NO: 1343136 - RNA, 19 nt, Homo sapiens
  misc_RNA (1)...(19): siRNA sense strand
gaaugggacuugagagaca

SEQ ID NO: 1343137 - RNA, 19 nt, Homo sapiens
  misc_RNA (1)...(19): siRNA sense strand
ggauguagccaaucaaaug

SEQ ID NO: 1343138 - RNA, 19 nt, Homo sapiens
  misc_RNA (1)...(19): siRNA sense strand
cagcuggacugcucaagaa

SEQ ID NO: 1343139 - RNA, 19 nt, Homo sapiens
  misc_RNA (1)...(19): siRNA sense strand
gaaacaaugaggcgauuug

SEQ ID NO: 1343140 - RNA, 19 nt, Homo sapiens
  misc_RNA (1)...(19): siRNA sense strand
aaucaaaugugcaccaaga

SEQ ID NO: 1343141 - RNA, 19 nt, Homo sapiens
  misc_RNA (1)...(19): siRNA sense strand
uaucaagugugcugaaugu

SEQ ID NO: 1343142 - RNA, 19 nt, Homo sapiens
  misc_RNA (1)...(19): siRNA sense strand
gacuguggcuuuggaaauu

SEQ ID NO: 1343143 - RNA, 19 nt, Homo sapiens
  misc_RNA (1)...(19): siRNA sense strand
uaucuaucauuccagguua

SEQ ID NO: 1343144 - RNA, 19 nt, Homo sapiens
  misc_RNA (1)...(19): siRNA sense strand
gaggcgauuugcaagaauu

SEQ ID NO: 1343145 - RNA, 19 nt, Homo sapiens
  misc_RNA (1)...(19): siRNA sense strand
caucaaagcgaucauacuu

SEQ ID NO: 1343146 - RNA, 19 nt, Homo sapiens
  misc_RNA (1)...(19): siRNA sense strand
ggauuaaucaaccuuagaa

SEQ ID NO: 1343147 - RNA, 19 nt, Homo sapiens
  misc_RNA (1)...(19): siRNA sense strand
ccauuucacucuacagaug

SEQ ID NO: 1343148 - RNA, 19 nt, Homo sapiens
  misc_RNA (1)...(19): siRNA sense strand
acacagccauuccauuuca

SEQ ID NO: 1343149 - RNA, 19 nt, Homo sapiens
  misc_RNA (1)...(19): siRNA sense strand
gaaacaagcagaggaagca

SEQ ID NO: 1343150 - RNA, 19 nt, Homo sapiens
  misc_RNA (1)...(19): siRNA sense strand
cagauuucauugaggaauu

SEQ ID NO: 1343151 - RNA, 19 nt, Homo sapiens
  misc_RNA (1)...(19): siRNA sense strand
ugacaauuaugcagaaugg

SEQ ID NO: 1343152 - RNA, 19 nt, Homo sapiens
  misc_RNA (1)...(19): siRNA sense strand
ggacuguggcuuuggaaau

SEQ ID NO: 1343153 - RNA, 19 nt, Homo sapiens
  misc_RNA (1)...(19): siRNA sense strand
ggcaggauguagccaauca

SEQ ID NO: 1343154 - RNA, 19 nt, Homo sapiens
  misc_RNA (1)...(19): siRNA sense strand
gauggacuguggcuuugga

SEQ ID NO: 1343155 - RNA, 19 nt, Homo sapiens
  misc_RNA (1)...(19): siRNA sense strand
aaacaucaaagcgaucaua

SEQ ID NO: 1343156 - RNA, 19 nt, Homo sapiens
  misc_RNA (1)...(19): siRNA sense strand
gccauuccauuucacucua

SEQ ID NO: 1343157 - RNA, 19 nt, Homo sapiens
  misc_RNA (1)...(19): siRNA sense strand
ggacugcucaagaagaaau

SEQ ID NO: 1343158 - RNA, 19 nt, Homo sapiens
  misc_RNA (1)...(19): siRNA sense strand
guguuucacucgaggcuuu

SEQ ID NO: 1343159 - RNA, 19 nt, Homo sapiens
  misc_RNA (1)...(19): siRNA sense strand
caucaauaacccucuguuu

SEQ ID NO: 1343160 - RNA, 19 nt, Homo sapiens
  misc_RNA (1)...(19): siRNA sense strand
cauggagccuuauaucaag

SEQ ID NO: 1343161 - RNA, 19 nt, Homo sapiens
  misc_RNA (1)...(19): siRNA sense strand
ucauggagccuuauaucaa

SEQ ID NO: 1343162 - RNA, 19 nt, Homo sapiens
  misc_RNA (1)...(19): siRNA sense strand
uaagagaccauggauuaau

SEQ ID NO: 1343163 - RNA, 19 nt, Homo sapiens
  misc_RNA (1)...(19): siRNA sense strand
acaaugaggcgauuugcaa

SEQ ID NO: 1343164 - RNA, 19 nt, Homo sapiens
  misc_RNA (1)...(19): siRNA sense strand
ccaaucaaaugugcaccaa

SEQ ID NO: 1343165 - RNA, 19 nt, Homo sapiens
  misc_RNA (1)...(19): siRNA sense strand
aguggaacaugacaaauuc

SEQ ID NO: 1343166 - RNA, 19 nt, Homo sapiens
  misc_RNA (1)...(19): siRNA sense strand
caguggaacaugacaaauu

SEQ ID NO: 1343167 - RNA, 19 nt, Homo sapiens
  misc_RNA (1)...(19): siRNA sense strand
caauaacccucuguuugca

SEQ ID NO: 1343168 - RNA, 19 nt, Homo sapiens
  misc_RNA (1)...(19): siRNA sense strand
aagagaccauggauuaauc

SEQ ID NO: 1343169 - RNA, 19 nt, Homo sapiens
  misc_RNA (1)...(19): siRNA sense strand
ucaauaacccucuguuugc

SEQ ID NO: 1343170 - RNA, 19 nt, Homo sapiens
  misc_RNA (1)...(19): siRNA sense strand
gugauggacuguggcuuug

SEQ ID NO: 1343171 - RNA, 19 nt, Homo sapiens
  misc_RNA (1)...(19): siRNA sense strand
cagaaugggacuugagaga

SEQ ID NO: 1343172 - RNA, 19 nt, Homo sapiens
  misc_RNA (1)...(19): siRNA sense strand
agaaauggcccuuuuagaa

SEQ ID NO: 1343173 - RNA, 19 nt, Homo sapiens
  misc_RNA (1)...(19): siRNA sense strand
guuaaaggagagacaaaga

SEQ ID NO: 1343174 - RNA, 19 nt, Homo sapiens
  misc_RNA (1)...(19): siRNA sense strand
ggacuugagagacauugau

SEQ ID NO: 1343175 - RNA, 19 nt, Homo sapiens
  misc_RNA (1)...(19): siRNA sense strand
gaccuaccuuugacuccuu

SEQ ID NO: 1343176 - RNA, 19 nt, Homo sapiens
  misc_RNA (1)...(19): siRNA sense strand
gauguagccaaucaaaugu

SEQ ID NO: 1343177 - RNA, 19 nt, Homo sapiens
  misc_RNA (1)...(19): siRNA sense strand
gaaauggcccuuuuagaag

SEQ ID NO: 1343178 - RNA, 19 nt, Homo sapiens
  misc_RNA (1)...(19): siRNA sense strand
ugagagacauugauuuugu

SEQ ID NO: 1343179 - RNA, 19 nt, Homo sapiens
  misc_RNA (1)...(19): siRNA sense strand
aagaagaaauggcccuuuu

SEQ ID NO: 1343180 - RNA, 19 nt, Homo sapiens
  misc_RNA (1)...(19): siRNA sense strand
cuggacugcucaagaagaa

SEQ ID NO: 1343181 - RNA, 19 nt, Homo sapiens
  misc_RNA (1)...(19): siRNA sense strand
caugccagcucgagcagau

SEQ ID NO: 1343182 - RNA, 19 nt, Homo sapiens
  misc_RNA (1)...(19): siRNA sense strand
caagaagaaauggcccuuu

SEQ ID NO: 1343183 - RNA, 19 nt, Homo sapiens
  misc_RNA (1)...(19): siRNA sense strand
gaagaaauggcccuuuuag

SEQ ID NO: 1343184 - RNA, 19 nt, Homo sapiens
  misc_RNA (1)...(19): siRNA sense strand
gccaguggaacaugacaaa

SEQ ID NO: 1343185 - RNA, 19 nt, Homo sapiens
  misc_RNA (1)...(19): siRNA sense strand
agauggcugugguagauau

SEQ ID NO: 1343186 - RNA, 19 nt, Homo sapiens
  misc_RNA (1)...(19): siRNA sense strand
ccaaggaggagugugagaa

SEQ ID NO: 1343187 - RNA, 19 nt, Homo sapiens
  misc_RNA (1)...(19): siRNA sense strand
ggaaauuggcaggauguag

SEQ ID NO: 1343188 - RNA, 19 nt, Homo sapiens
  misc_RNA (1)...(19): siRNA sense strand
uagcaaugaucccucugau

SEQ ID NO: 1343189 - RNA, 19 nt, Homo sapiens
  misc_RNA (1)...(19): siRNA sense strand
uauaucaagugugcugaau

SEQ ID NO: 1343190 - RNA, 19 nt, Homo sapiens
  misc_RNA (1)...(19): siRNA sense strand
gagagacauugauuuuguu

SEQ ID NO: 1343191 - RNA, 19 nt, Homo sapiens
  misc_RNA (1)...(19): siRNA sense strand
gaguacaagaaacaucaaa

SEQ ID NO: 1343192 - RNA, 19 nt, Homo sapiens
  misc_RNA (1)...(19): siRNA sense strand
guacaagaaacaucaaagc

SEQ ID NO: 1343193 - RNA, 19 nt, Homo sapiens
  misc_RNA (1)...(19): siRNA sense strand
agaccaaggaggaguguga

SEQ ID NO: 1343194 - RNA, 19 nt, Homo sapiens
  misc_RNA (1)...(19): siRNA sense strand
caggauguagccaaucaaa

SEQ ID NO: 1343195 - RNA, 19 nt, Homo sapiens
  misc_RNA (1)...(19): siRNA sense strand
gaccguuuggguuccuuua

SEQ ID NO: 1343196 - RNA, 19 nt, Homo sapiens
  misc_RNA (1)...(19): siRNA sense strand
ugugauggacuguggcuuu

SEQ ID NO: 1343197 - RNA, 19 nt, Homo sapiens
  misc_RNA (1)...(19): siRNA sense strand
caucuacccugcugaaccu

SEQ ID NO: 1343198 - RNA, 19 nt, Homo sapiens
  misc_RNA (1)...(19): siRNA sense strand
gacuugagagacauugauu

SEQ ID NO: 1343199 - RNA, 19 nt, Homo sapiens
  misc_RNA (1)...(19): siRNA sense strand
aaggagagacaaagacgaa

SEQ ID NO: 1343200 - RNA, 19 nt, Homo sapiens
  misc_RNA (1)...(19): siRNA sense strand
ucgagcagauuucauugag

SEQ ID NO: 1343201 - RNA, 19 nt, Homo sapiens
  misc_RNA (1)...(19): siRNA sense strand
caaggaggagugugagaag

SEQ ID NO: 1343202 - RNA, 19 nt, Homo sapiens
  misc_RNA (1)...(19): siRNA sense strand
cauggauuaaucaaccuua

SEQ ID NO: 1343203 - RNA, 19 nt, Homo sapiens
  misc_RNA (1)...(19): siRNA sense strand
cuacccugcugaaccugaa

SEQ ID NO: 1343204 - RNA, 19 nt, Homo sapiens
  misc_RNA (1)...(19): siRNA sense strand
gcagauuucauugaggaau

SEQ ID NO: 1343205 - RNA, 19 nt, Homo sapiens
  misc_RNA (1)...(19): siRNA sense strand
gcuggacugcucaagaaga

SEQ ID NO: 1343206 - RNA, 19 nt, Homo sapiens
  misc_RNA (1)...(19): siRNA sense strand
gacacagccauuccauuuc

SEQ ID NO: 1343207 - RNA, 19 nt, Homo sapiens
  misc_RNA (1)...(19): siRNA sense strand
ggagagacaaagacgaaaa

SEQ ID NO: 1343208 - RNA, 19 nt, Homo sapiens
  misc_RNA (1)...(19): siRNA sense strand
ccagcuggacugcucaaga

SEQ ID NO: 1343209 - RNA, 19 nt, Homo sapiens
  misc_RNA (1)...(19): siRNA sense strand
gcucgagcagauuucauug

SEQ ID NO: 1343210 - RNA, 19 nt, Homo sapiens
  misc_RNA (1)...(19): siRNA sense strand
ugaagaugacucggacauu

SEQ ID NO: 1343211 - RNA, 19 nt, Homo sapiens
  misc_RNA (1)...(19): siRNA sense strand
auaagagaccauggauuaa

SEQ ID NO: 1343212 - RNA, 19 nt, Homo sapiens
  misc_RNA (1)...(19): siRNA sense strand
ggagccuuauaucaagugu

SEQ ID NO: 1343213 - RNA, 19 nt, Homo sapiens
  misc_RNA (1)...(19): siRNA sense strand
ugaggcgauuugcaagaau

SEQ ID NO: 1343214 - RNA, 19 nt, Homo sapiens
  misc_RNA (1)...(19): siRNA sense strand
ugaagauggcugugguaga

SEQ ID NO: 1343215 - RNA, 19 nt, Homo sapiens
  misc_RNA (1)...(19): siRNA sense strand
ccuaccucauggagccuua

SEQ ID NO: 1343216 - RNA, 19 nt, Homo sapiens
  misc_RNA (1)...(19): siRNA sense strand
gcuuugaguacaagaaaca

SEQ ID NO: 1343217 - RNA, 19 nt, Homo sapiens
  misc_RNA (1)...(19): siRNA sense strand
ccugaaacaagcagaggaa

SEQ ID NO: 1343218 - RNA, 19 nt, Homo sapiens
  misc_RNA (1)...(19): siRNA sense strand
ccucauggagccuuauauc

SEQ ID NO: 1343219 - RNA, 19 nt, Homo sapiens
  misc_RNA (1)...(19): siRNA sense strand
aucaauaacccucuguuug

SEQ ID NO: 1343220 - RNA, 19 nt, Homo sapiens
  misc_RNA (1)...(19): siRNA sense strand
gaagaugacucggacauuu

SEQ ID NO: 1343221 - RNA, 19 nt, Homo sapiens
  misc_RNA (1)...(19): siRNA sense strand
gcaaugaucccucugauaa

SEQ ID NO: 1343222 - RNA, 19 nt, Homo sapiens
  misc_RNA (1)...(19): siRNA sense strand
gaagauggcugugguagau

SEQ ID NO: 1343223 - RNA, 19 nt, Homo sapiens
  misc_RNA (1)...(19): siRNA sense strand
uauaagagaccauggauua

SEQ ID NO: 1343224 - RNA, 19 nt, Homo sapiens
  misc_RNA (1)...(19): siRNA sense strand
ucaaagcgaucauacuuau

SEQ ID NO: 1343225 - RNA, 19 nt, Homo sapiens
  misc_RNA (1)...(19): siRNA sense strand
ugacacagccauuccauuu

SEQ ID NO: 1343226 - RNA, 19 nt, Homo sapiens
  misc_RNA (1)...(19): siRNA sense strand
ggaccuguaugaaacaaug

SEQ ID NO: 1343227 - RNA, 19 nt, Homo sapiens
  misc_RNA (1)...(19): siRNA sense strand
gaaugggacuugagagaca

SEQ ID NO: 1343228 - RNA, 19 nt, Homo sapiens
  misc_RNA (1)...(19): siRNA sense strand
ggauguagccaaucaaaug

SEQ ID NO: 1343229 - RNA, 19 nt, Homo sapiens
  misc_RNA (1)...(19): siRNA sense strand
cagcuggacugcucaagaa

SEQ ID NO: 1343230 - RNA, 19 nt, Homo sapiens
  misc_RNA (1)...(19): siRNA sense strand
gaaacaaugaggcgauuug

SEQ ID NO: 1343231 - RNA, 19 nt, Homo sapiens
  misc_RNA (1)...(19): siRNA sense strand
aaucaaaugugcaccaaga

SEQ ID NO: 1343232 - RNA, 19 nt, Homo sapiens
  misc_RNA (1)...(19): siRNA sense strand
uaucaagugugcugaaugu

SEQ ID NO: 1343233 - RNA, 19 nt, Homo sapiens
  misc_RNA (1)...(19): siRNA sense strand
gacuguggcuuuggaaauu

SEQ ID NO: 1343234 - RNA, 19 nt, Homo sapiens
  misc_RNA (1)...(19): siRNA sense strand
uaucuaucauuccagguua

SEQ ID NO: 1343235 - RNA, 19 nt, Homo sapiens
  misc_RNA (1)...(19): siRNA sense strand
gaggcgauuugcaagaauu

SEQ ID NO: 1343236 - RNA, 19 nt, Homo sapiens
  misc_RNA (1)...(19): siRNA sense strand
caucaaagcgaucauacuu

SEQ ID NO: 1343237 - RNA, 19 nt, Homo sapiens
  misc_RNA (1)...(19): siRNA sense strand
ggauuaaucaaccuuagaa

SEQ ID NO: 1343238 - RNA, 19 nt, Homo sapiens
  misc_RNA (1)...(19): siRNA sense strand
ccauuucacucuacagaug

SEQ ID NO: 1343239 - RNA, 19 nt, Homo sapiens
  misc_RNA (1)...(19): siRNA sense strand
acacagccauuccauuuca

SEQ ID NO: 1343240 - RNA, 19 nt, Homo sapiens
  misc_RNA (1)...(19): siRNA sense strand
gaaacaagcagaggaagca

SEQ ID NO: 1343241 - RNA, 19 nt, Homo sapiens
  misc_RNA (1)...(19): siRNA sense strand
cagauuucauugaggaauu

SEQ ID NO: 1343242 - RNA, 19 nt, Homo sapiens
  misc_RNA (1)...(19): siRNA sense strand
ugacaauuaugcagaaugg

SEQ ID NO: 1343243 - RNA, 19 nt, Homo sapiens
  misc_RNA (1)...(19): siRNA sense strand
ggacuguggcuuuggaaau

SEQ ID NO: 1343244 - RNA, 19 nt, Homo sapiens
  misc_RNA (1)...(19): siRNA sense strand
ggcaggauguagccaauca

SEQ ID NO: 1343245 - RNA, 19 nt, Homo sapiens
  misc_RNA (1)...(19): siRNA sense strand
gauggacuguggcuuugga

SEQ ID NO: 1343246 - RNA, 19 nt, Homo sapiens
  misc_RNA (1)...(19): siRNA sense strand
aaacaucaaagcgaucaua

SEQ ID NO: 1343247 - RNA, 19 nt, Homo sapiens
  misc_RNA (1)...(19): siRNA sense strand
gccauuccauuucacucua

SEQ ID NO: 1343248 - RNA, 19 nt, Homo sapiens
  misc_RNA (1)...(19): siRNA sense strand
ggacugcucaagaagaaau

SEQ ID NO: 1343249 - RNA, 19 nt, Homo sapiens
  misc_RNA (1)...(19): siRNA sense strand
guguuucacucgaggcuuu

SEQ ID NO: 1343250 - RNA, 19 nt, Homo sapiens
  misc_RNA (1)...(19): siRNA sense strand
caucaauaacccucuguuu

SEQ ID NO: 1343251 - RNA, 19 nt, Homo sapiens
  misc_RNA (1)...(19): siRNA sense strand
cauggagccuuauaucaag

SEQ ID NO: 1343252 - RNA, 19 nt, Homo sapiens
  misc_RNA (1)...(19): siRNA sense strand
ucauggagccuuauaucaa

SEQ ID NO: 1343253 - RNA, 19 nt, Homo sapiens
  misc_RNA (1)...(19): siRNA sense strand
uaagagaccauggauuaau

SEQ ID NO: 1343254 - RNA, 19 nt, Homo sapiens
  misc_RNA (1)...(19): siRNA sense strand
acaaugaggcgauuugcaa

SEQ ID NO: 1343255 - RNA, 19 nt, Homo sapiens
  misc_RNA (1)...(19): siRNA sense strand
ccaaucaaaugugcaccaa

SEQ ID NO: 1343256 - RNA, 19 nt, Homo sapiens
  misc_RNA (1)...(19): siRNA sense strand
aguggaacaugacaaauuc

SEQ ID NO: 1343257 - RNA, 19 nt, Homo sapiens
  misc_RNA (1)...(19): siRNA sense strand
caguggaacaugacaaauu

SEQ ID NO: 1343258 - RNA, 19 nt, Homo sapiens
  misc_RNA (1)...(19): siRNA sense strand
caauaacccucuguuugca

SEQ ID NO: 1343259 - RNA, 19 nt, Homo sapiens
  misc_RNA (1)...(19): siRNA sense strand
aagagaccauggauuaauc

SEQ ID NO: 1343260 - RNA, 19 nt, Homo sapiens
  misc_RNA (1)...(19): siRNA sense strand
ucaauaacccucuguuugc

SEQ ID NO: 1343261 - RNA, 19 nt, Homo sapiens
  misc_RNA (1)...(19): siRNA sense strand
gugauggacuguggcuuug

SEQ ID NO: 1343262 - RNA, 19 nt, Homo sapiens
  misc_RNA (1)...(19): siRNA sense strand
cagaaugggacuugagaga

SEQ ID NO: 1343263 - RNA, 19 nt, Homo sapiens
  misc_RNA (1)...(19): siRNA sense strand
agaaauggcccuuuuagaa

SEQ ID NO: 1343264 - RNA, 19 nt, Homo sapiens
  misc_RNA (1)...(19): siRNA sense strand
guuaaaggagagacaaaga

SEQ ID NO: 1343265 - RNA, 19 nt, Homo sapiens
  misc_RNA (1)...(19): siRNA sense strand
ggacuugagagacauugau

SEQ ID NO: 1343266 - RNA, 19 nt, Homo sapiens
  misc_RNA (1)...(19): siRNA sense strand
gaccuaccuuugacuccuu

SEQ ID NO: 1343267 - RNA, 19 nt, Homo sapiens
  misc_RNA (1)...(19): siRNA sense strand
gauguagccaaucaaaugu

SEQ ID NO: 1343268 - RNA, 19 nt, Homo sapiens
  misc_RNA (1)...(19): siRNA sense strand
gaaauggcccuuuuagaag

SEQ ID NO: 1343269 - RNA, 19 nt, Homo sapiens
  misc_RNA (1)...(19): siRNA sense strand
ugagagacauugauuuugu

SEQ ID NO: 1343270 - RNA, 19 nt, Homo sapiens
  misc_RNA (1)...(19): siRNA sense strand
aagaagaaauggcccuuuu

SEQ ID NO: 1343271 - RNA, 19 nt, Homo sapiens
  misc_RNA (1)...(19): siRNA sense strand
cuggacugcucaagaagaa

SEQ ID NO: 1343272 - RNA, 19 nt, Homo sapiens
  misc_RNA (1)...(19): siRNA sense strand
caugccagcucgagcagau

SEQ ID NO: 1343273 - RNA, 19 nt, Homo sapiens
  misc_RNA (1)...(19): siRNA sense strand
caagaagaaauggcccuuu

SEQ ID NO: 1343274 - RNA, 19 nt, Homo sapiens
  misc_RNA (1)...(19): siRNA sense strand
gaagaaauggcccuuuuag

SEQ ID NO: 1343275 - RNA, 19 nt, Homo sapiens
  misc_RNA (1)...(19): siRNA sense strand
gccaguggaacaugacaaa

SEQ ID NO: 1343276 - RNA, 19 nt, Homo sapiens
  misc_RNA (1)...(19): siRNA sense strand
agauggcugugguagauau

SEQ ID NO: 1343277 - RNA, 19 nt, Homo sapiens
  misc_RNA (1)...(19): siRNA sense strand
ccaaggaggagugugagaa

SEQ ID NO: 1343278 - RNA, 19 nt, Homo sapiens
  misc_RNA (1)...(19): siRNA sense strand
ggaaauuggcaggauguag

SEQ ID NO: 1343279 - RNA, 19 nt, Homo sapiens
  misc_RNA (1)...(19): siRNA sense strand
uagcaaugaucccucugau

SEQ ID NO: 1343280 - RNA, 19 nt, Homo sapiens
  misc_RNA (1)...(19): siRNA sense strand
uauaucaagugugcugaau

SEQ ID NO: 1343281 - RNA, 19 nt, Homo sapiens
  misc_RNA (1)...(19): siRNA sense strand
gagagacauugauuuuguu

SEQ ID NO: 1343282 - RNA, 19 nt, Homo sapiens
  misc_RNA (1)...(19): siRNA sense strand
gaguacaagaaacaucaaa

SEQ ID NO: 1343283 - RNA, 19 nt, Homo sapiens
  misc_RNA (1)...(19): siRNA sense strand
guacaagaaacaucaaagc

SEQ ID NO: 1343284 - RNA, 19 nt, Homo sapiens
  misc_RNA (1)...(19): siRNA sense strand
agaccaaggaggaguguga

SEQ ID NO: 1343285 - RNA, 19 nt, Homo sapiens
  misc_RNA (1)...(19): siRNA sense strand
caggauguagccaaucaaa

SEQ ID NO: 1343286 - RNA, 19 nt, Homo sapiens
  misc_RNA (1)...(19): siRNA sense strand
gaccguuuggguuccuuua

SEQ ID NO: 1343287 - RNA, 19 nt, Homo sapiens
  misc_RNA (1)...(19): siRNA sense strand
ugugauggacuguggcuuu

SEQ ID NO: 1343288 - RNA, 19 nt, Homo sapiens
  misc_RNA (1)...(19): siRNA sense strand
caucuacccugcugaaccu

SEQ ID NO: 1343289 - RNA, 19 nt, Homo sapiens
  misc_RNA (1)...(19): siRNA sense strand
gacuugagagacauugauu

SEQ ID NO: 1343290 - RNA, 19 nt, Homo sapiens
  misc_RNA (1)...(19): siRNA sense strand
aaggagagacaaagacgaa

SEQ ID NO: 1343291 - RNA, 19 nt, Homo sapiens
  misc_RNA (1)...(19): siRNA sense strand
ucgagcagauuucauugag

SEQ ID NO: 1343292 - RNA, 19 nt, Homo sapiens
  misc_RNA (1)...(19): siRNA sense strand
caaggaggagugugagaag

SEQ ID NO: 1343293 - RNA, 19 nt, Homo sapiens
  misc_RNA (1)...(19): siRNA sense strand
cauggauuaaucaaccuua

SEQ ID NO: 1343294 - RNA, 19 nt, Homo sapiens
  misc_RNA (1)...(19): siRNA sense strand
cuacccugcugaaccugaa

SEQ ID NO: 1343295 - RNA, 19 nt, Homo sapiens
  misc_RNA (1)...(19): siRNA sense strand
gcagauuucauugaggaau

SEQ ID NO: 1343296 - RNA, 19 nt, Homo sapiens
  misc_RNA (1)...(19): siRNA sense strand
gcuggacugcucaagaaga

SEQ ID NO: 1343297 - RNA, 19 nt, Homo sapiens
  misc_RNA (1)...(19): siRNA sense strand
gacacagccauuccauuuc

SEQ ID NO: 1343298 - RNA, 19 nt, Homo sapiens
  misc_RNA (1)...(19): siRNA sense strand
ggagagacaaagacgaaaa

SEQ ID NO: 1343299 - RNA, 19 nt, Homo sapiens
  misc_RNA (1)...(19): siRNA sense strand
ccagcuggacugcucaaga

SEQ ID NO: 1343300 - RNA, 19 nt, Homo sapiens
  misc_RNA (1)...(19): siRNA sense strand
gcucgagcagauuucauug

SEQ ID NO: 1343301 - RNA, 19 nt, Homo sapiens
  misc_RNA (1)...(19): siRNA sense strand
ugaagaugacucggacauu

SEQ ID NO: 1343302 - RNA, 19 nt, Homo sapiens
  misc_RNA (1)...(19): siRNA sense strand
auaagagaccauggauuaa

SEQ ID NO: 1343303 - RNA, 19 nt, Homo sapiens
  misc_RNA (1)...(19): siRNA sense strand
ggagccuuauaucaagugu

SEQ ID NO: 1343304 - RNA, 19 nt, Homo sapiens
  misc_RNA (1)...(19): siRNA sense strand
ugaggcgauuugcaagaau

SEQ ID NO: 1343305 - RNA, 19 nt, Homo sapiens
  misc_RNA (1)...(19): siRNA sense strand
ugaagauggcugugguaga

SEQ ID NO: 1343306 - RNA, 19 nt, Homo sapiens
  misc_RNA (1)...(19): siRNA sense strand
ccuaccucauggagccuua

SEQ ID NO: 1343307 - RNA, 19 nt, Homo sapiens
  misc_RNA (1)...(19): siRNA sense strand
gcuuugaguacaagaaaca

SEQ ID NO: 1343308 - RNA, 19 nt, Homo sapiens
  misc_RNA (1)...(19): siRNA sense strand
ccugaaacaagcagaggaa

SEQ ID NO: 1343309 - RNA, 19 nt, Homo sapiens
  misc_RNA (1)...(19): siRNA sense strand
ccucauggagccuuauauc

SEQ ID NO: 1343310 - RNA, 19 nt, Homo sapiens
  misc_RNA (1)...(19): siRNA sense strand
aucaauaacccucuguuug

SEQ ID NO: 1343311 - RNA, 19 nt, Homo sapiens
  misc_RNA (1)...(19): siRNA sense strand
ggaaauacaucuuuaguga

SEQ ID NO: 1343312 - RNA, 19 nt, Homo sapiens
  misc_RNA (1)...(19): siRNA sense strand
gaagaacgauccagagaaa

SEQ ID NO: 1343313 - RNA, 19 nt, Homo sapiens
  misc_RNA (1)...(19): siRNA sense strand
acaaagcccuucuggauua

SEQ ID NO: 1343314 - RNA, 19 nt, Homo sapiens
  misc_RNA (1)...(19): siRNA sense strand
aaacggagcuggaggagua

SEQ ID NO: 1343315 - RNA, 19 nt, Homo sapiens
  misc_RNA (1)...(19): siRNA sense strand
gcacaucacugccgucuuc

SEQ ID NO: 1343316 - RNA, 19 nt, Homo sapiens
  misc_RNA (1)...(19): siRNA sense strand
ucacauggguuuauggaua

SEQ ID NO: 1343317 - RNA, 19 nt, Homo sapiens
  misc_RNA (1)...(19): siRNA sense strand
cgacggaaauacaucuuua

SEQ ID NO: 1343318 - RNA, 19 nt, Homo sapiens
  misc_RNA (1)...(19): siRNA sense strand
gaagaucuaugaagagcuu

SEQ ID NO: 1343319 - RNA, 19 nt, Homo sapiens
  misc_RNA (1)...(19): siRNA sense strand
gaaagauugucauggacua

SEQ ID NO: 1343320 - RNA, 19 nt, Homo sapiens
  misc_RNA (1)...(19): siRNA sense strand
ggacaaagcccuucuggau

SEQ ID NO: 1343321 - RNA, 19 nt, Homo sapiens
  misc_RNA (1)...(19): siRNA sense strand
cagaagacaugaacuuuga

SEQ ID NO: 1343322 - RNA, 19 nt, Homo sapiens
  misc_RNA (1)...(19): siRNA sense strand
ggagccaggugauagauuu

SEQ ID NO: 1343323 - RNA, 19 nt, Homo sapiens
  misc_RNA (1)...(19): siRNA sense strand
gaaagcagacucccuaaau

SEQ ID NO: 1343324 - RNA, 19 nt, Homo sapiens
  misc_RNA (1)...(19): siRNA sense strand
caagggagguagaugauga

SEQ ID NO: 1343325 - RNA, 19 nt, Homo sapiens
  misc_RNA (1)...(19): siRNA sense strand
caaccugucuuuggaagua

SEQ ID NO: 1343326 - RNA, 19 nt, Homo sapiens
  misc_RNA (1)...(19): siRNA sense strand
aaacuuggcugcugucaug

SEQ ID NO: 1343327 - RNA, 19 nt, Homo sapiens
  misc_RNA (1)...(19): siRNA sense strand
gugagaagaucuaugaaga

SEQ ID NO: 1343328 - RNA, 19 nt, Homo sapiens
  misc_RNA (1)...(19): siRNA sense strand
ucccagagaugcaugaaua

SEQ ID NO: 1343329 - RNA, 19 nt, Homo sapiens
  misc_RNA (1)...(19): siRNA sense strand
gaaauuacaacccaguuug

SEQ ID NO: 1343330 - RNA, 19 nt, Homo sapiens
  misc_RNA (1)...(19): siRNA sense strand
agacaaaguuucccagaga

SEQ ID NO: 1343331 - RNA, 19 nt, Homo sapiens
  misc_RNA (1)...(19): siRNA sense strand
gagauuacacagagcaaua

SEQ ID NO: 1343332 - RNA, 19 nt, Homo sapiens
  misc_RNA (1)...(19): siRNA sense strand
gagagggacugcccacaug

SEQ ID NO: 1343333 - RNA, 19 nt, Homo sapiens
  misc_RNA (1)...(19): siRNA sense strand
ugaagagcuuucuggaaua

SEQ ID NO: 1343334 - RNA, 19 nt, Homo sapiens
  misc_RNA (1)...(19): siRNA sense strand
ggaagaguccauuugguuu

SEQ ID NO: 1343335 - RNA, 19 nt, Homo sapiens
  misc_RNA (1)...(19): siRNA sense strand
gaaacuagacgccuucauc

SEQ ID NO: 1343336 - RNA, 19 nt, Homo sapiens
  misc_RNA (1)...(19): siRNA sense strand
caacauauccgagcuaauc

SEQ ID NO: 1343337 - RNA, 19 nt, Homo sapiens
  misc_RNA (1)...(19): siRNA sense strand
gaagccauuugccauagaa

SEQ ID NO: 1343338 - RNA, 19 nt, Homo sapiens
  misc_RNA (1)...(19): siRNA sense strand
gcagaacaguggccaucaa

SEQ ID NO: 1343339 - RNA, 19 nt, Homo sapiens
  misc_RNA (1)...(19): siRNA sense strand
ccacccaacucuccauuga

SEQ ID NO: 1343340 - RNA, 19 nt, Homo sapiens
  misc_RNA (1)...(19): siRNA sense strand
cagcuuaccguauggaaua

SEQ ID NO: 1343341 - RNA, 19 nt, Homo sapiens
  misc_RNA (1)...(19): siRNA sense strand
gcauggagguggaaacuac

SEQ ID NO: 1343342 - RNA, 19 nt, Homo sapiens
  misc_RNA (1)...(19): siRNA sense strand
aaagauagcagaagacaug

SEQ ID NO: 1343343 - RNA, 19 nt, Homo sapiens
  misc_RNA (1)...(19): siRNA sense strand
ucuggaaucuucaacauga

SEQ ID NO: 1343344 - RNA, 19 nt, Homo sapiens
  misc_RNA (1)...(19): siRNA sense strand
gaagugcugcuauggauau

SEQ ID NO: 1343345 - RNA, 19 nt, Homo sapiens
  misc_RNA (1)...(19): siRNA sense strand
ggacaauauuuaucaaggu

SEQ ID NO: 1343346 - RNA, 19 nt, Homo sapiens
  misc_RNA (1)...(19): siRNA sense strand
gcuaaucagucaauacaag

SEQ ID NO: 1343347 - RNA, 19 nt, Homo sapiens
  misc_RNA (1)...(19): siRNA sense strand
gcagaagacaugaacuuug

SEQ ID NO: 1343348 - RNA, 19 nt, Homo sapiens
  misc_RNA (1)...(19): siRNA sense strand
gagagugguuacccugauu

SEQ ID NO: 1343349 - RNA, 19 nt, Homo sapiens
  misc_RNA (1)...(19): siRNA sense strand
caggaagacuggaacauca

SEQ ID NO: 1343350 - RNA, 19 nt, Homo sapiens
  misc_RNA (1)...(19): siRNA sense strand
acuggaagguuucuaauga

SEQ ID NO: 1343351 - RNA, 19 nt, Homo sapiens
  misc_RNA (1)...(19): siRNA sense strand
gcagugacccuuucuccuu

SEQ ID NO: 1343352 - RNA, 19 nt, Homo sapiens
  misc_RNA (1)...(19): siRNA sense strand
gaagagcuuucuggaauac

SEQ ID NO: 1343353 - RNA, 19 nt, Homo sapiens
  misc_RNA (1)...(19): siRNA sense strand
gcauugaucugcuggaaaa

SEQ ID NO: 1343354 - RNA, 19 nt, Homo sapiens
  misc_RNA (1)...(19): siRNA sense strand
gaugcugacugcaaacuuc

SEQ ID NO: 1343355 - RNA, 19 nt, Homo sapiens
  misc_RNA (1)...(19): siRNA sense strand
ggaguggaguaucugaaga

SEQ ID NO: 1343356 - RNA, 19 nt, Homo sapiens
  misc_RNA (1)...(19): siRNA sense strand
ccacauacacggcaaacuu

SEQ ID NO: 1343357 - RNA, 19 nt, Homo sapiens
  misc_RNA (1)...(19): siRNA sense strand
caucaaaccuccaaaaugu

SEQ ID NO: 1343358 - RNA, 19 nt, Homo sapiens
  misc_RNA (1)...(19): siRNA sense strand
gaagaguccauuugguuug

SEQ ID NO: 1343359 - RNA, 19 nt, Homo sapiens
  misc_RNA (1)...(19): siRNA sense strand
aaagcagacucccuaaaug

SEQ ID NO: 1343360 - RNA, 19 nt, Homo sapiens
  misc_RNA (1)...(19): siRNA sense strand
acacuucucugggcucuuu

SEQ ID NO: 1343361 - RNA, 19 nt, Homo sapiens
  misc_RNA (1)...(19): siRNA sense strand
ugucauggacuauggaaua

SEQ ID NO: 1343362 - RNA, 19 nt, Homo sapiens
  misc_RNA (1)...(19): siRNA sense strand
ggaagccauuugccauaga

SEQ ID NO: 1343363 - RNA, 19 nt, Homo sapiens
  misc_RNA (1)...(19): siRNA sense strand
cgaaauagaaguaaagucu

SEQ ID NO: 1343364 - RNA, 19 nt, Homo sapiens
  misc_RNA (1)...(19): siRNA sense strand
gaacaacugguacaauuuu

SEQ ID NO: 1343365 - RNA, 19 nt, Homo sapiens
  misc_RNA (1)...(19): siRNA sense strand
ggaaagcagacucccuaaa

SEQ ID NO: 1343366 - RNA, 19 nt, Homo sapiens
  misc_RNA (1)...(19): siRNA sense strand
gagcuaaucagucaauaca

SEQ ID NO: 1343367 - RNA, 19 nt, Homo sapiens
  misc_RNA (1)...(19): siRNA sense strand
uauccgagcuaaucaguca

SEQ ID NO: 1343368 - RNA, 19 nt, Homo sapiens
  misc_RNA (1)...(19): siRNA sense strand
gacaaagcccuucuggauu

SEQ ID NO: 1343369 - RNA, 19 nt, Homo sapiens
  misc_RNA (1)...(19): siRNA sense strand
agagaugcaugaauauaug

SEQ ID NO: 1343370 - RNA, 19 nt, Homo sapiens
  misc_RNA (1)...(19): siRNA sense strand
cuccauagcaguaaugaua

SEQ ID NO: 1343371 - RNA, 19 nt, Homo sapiens
  misc_RNA (1)...(19): siRNA sense strand
ggauuuggucuguccauuu

SEQ ID NO: 1343372 - RNA, 19 nt, Homo sapiens
  misc_RNA (1)...(19): siRNA sense strand
ugacuucgaccucuauauu

SEQ ID NO: 1343373 - RNA, 19 nt, Homo sapiens
  misc_RNA (1)...(19): siRNA sense strand
auacagugcccauuaaauu

SEQ ID NO: 1343374 - RNA, 19 nt, Homo sapiens
  misc_RNA (1)...(19): siRNA sense strand
gcucauugcucauggaaaa

SEQ ID NO: 1343375 - RNA, 19 nt, Homo sapiens
  misc_RNA (1)...(19): siRNA sense strand
aauccaagcugcaauacug

SEQ ID NO: 1343376 - RNA, 19 nt, Homo sapiens
  misc_RNA (1)...(19): siRNA sense strand
gaacgauccagagaaacua

SEQ ID NO: 1343377 - RNA, 19 nt, Homo sapiens
  misc_RNA (1)...(19): siRNA sense strand
uggaguaucugaagaacga

SEQ ID NO: 1343378 - RNA, 19 nt, Homo sapiens
  misc_RNA (1)...(19): siRNA sense strand
augaacaacugguacaauu

SEQ ID NO: 1343379 - RNA, 19 nt, Homo sapiens
  misc_RNA (1)...(19): siRNA sense strand
ucacggagacuuugcaaau

SEQ ID NO: 1343380 - RNA, 19 nt, Homo sapiens
  misc_RNA (1)...(19): siRNA sense strand
aauagaugcugacugcaaa

SEQ ID NO: 1343381 - RNA, 19 nt, Homo sapiens
  misc_RNA (1)...(19): siRNA sense strand
uaugaagugucaauagaug

SEQ ID NO: 1343382 - RNA, 19 nt, Homo sapiens
  misc_RNA (1)...(19): siRNA sense strand
augaagagcuuucuggaau

SEQ ID NO: 1343383 - RNA, 19 nt, Homo sapiens
  misc_RNA (1)...(19): siRNA sense strand
ccauuaaauucaagaagug

SEQ ID NO: 1343384 - RNA, 19 nt, Homo sapiens
  misc_RNA (1)...(19): siRNA sense strand
gcugcgacauggaaaguau

SEQ ID NO: 1343385 - RNA, 19 nt, Homo sapiens
  misc_RNA (1)...(19): siRNA sense strand
gaagauuaugugagacaaa

SEQ ID NO: 1343386 - RNA, 19 nt, Homo sapiens
  misc_RNA (1)...(19): siRNA sense strand
gcagacucccuaaauguau

SEQ ID NO: 1343387 - RNA, 19 nt, Homo sapiens
  misc_RNA (1)...(19): siRNA sense strand
cuacagauccagcuugaga

SEQ ID NO: 1343388 - RNA, 19 nt, Homo sapiens
  misc_RNA (1)...(19): siRNA sense strand
acaaauccaagcugcaaua

SEQ ID NO: 1343389 - RNA, 19 nt, Homo sapiens
  misc_RNA (1)...(19): siRNA sense strand
gcacggagccaggugauag

SEQ ID NO: 1343390 - RNA, 19 nt, Homo sapiens
  misc_RNA (1)...(19): siRNA sense strand
gcagucacuuccuuuagca

SEQ ID NO: 1343391 - RNA, 19 nt, Homo sapiens
  misc_RNA (1)...(19): siRNA sense strand
ucacaagggagguagauga

SEQ ID NO: 1343392 - RNA, 19 nt, Homo sapiens
  misc_RNA (1)...(19): siRNA sense strand
ccagagaugcaugaauaua

SEQ ID NO: 1343393 - RNA, 19 nt, Homo sapiens
  misc_RNA (1)...(19): siRNA sense strand
aaauguaucucggaacuca

SEQ ID NO: 1343394 - RNA, 19 nt, Homo sapiens
  misc_RNA (1)...(19): siRNA sense strand
cacauggguuuauggauau

SEQ ID NO: 1343395 - RNA, 19 nt, Homo sapiens
  misc_RNA (1)...(19): siRNA sense strand
gccaacauauccgagcuaa

SEQ ID NO: 1343396 - RNA, 19 nt, Homo sapiens
  misc_RNA (1)...(19): siRNA sense strand
gaauauaugagaagguaca

SEQ ID NO: 1343397 - RNA, 19 nt, Homo sapiens
  misc_RNA (1)...(19): siRNA sense strand
cgaaauuacaacccaguuu

SEQ ID NO: 1343398 - RNA, 19 nt, Homo sapiens
  misc_RNA (1)...(19): siRNA sense strand
caagucacauggguuuaug

SEQ ID NO: 1343399 - RNA, 19 nt, Homo sapiens
  misc_RNA (1)...(19): siRNA sense strand
cagagaugcaugaauauau

SEQ ID NO: 1343400 - RNA, 19 nt, Homo sapiens
  misc_RNA (1)...(19): siRNA sense strand
caagguuucuagccaauac

SEQ ID NO: 1343401 - RNA, 19 nt, Homo sapiens
  misc_RNA (1)...(19): siRNA sense strand
gaaacuacaaaucucacuu

SEQ ID NO: 1343402 - RNA, 19 nt, Homo sapiens
  misc_RNA (1)...(19): siRNA sense strand
acacagagcaauaaauaca

SEQ ID NO: 1343403 - RNA, 19 nt, Homo sapiens
  misc_RNA (1)...(19): siRNA sense strand
gacaaaguuucccagagau

SEQ ID NO: 1343404 - RNA, 19 nt, Homo sapiens
  misc_RNA (1)...(19): siRNA sense strand
guuaugcccucuuguuugg

SEQ ID NO: 1343405 - RNA, 19 nt, Homo sapiens
  misc_RNA (1)...(19): siRNA sense strand
ccuacaaccugucuuugga

SEQ ID NO: 1343406 - RNA, 19 nt, Homo sapiens
  misc_RNA (1)...(19): siRNA sense strand
aagaagugcugcuauggau

SEQ ID NO: 1343407 - RNA, 19 nt, Homo sapiens
  misc_RNA (1)...(19): siRNA sense strand
ccacaccagccagagauua

SEQ ID NO: 1343408 - RNA, 19 nt, Homo sapiens
  misc_RNA (1)...(19): siRNA sense strand
gauuuggucuguccauuuu

SEQ ID NO: 1343409 - RNA, 19 nt, Homo sapiens
  misc_RNA (1)...(19): siRNA sense strand
caauagaugcugacugcaa

SEQ ID NO: 1343410 - RNA, 19 nt, Homo sapiens
  misc_RNA (1)...(19): siRNA sense strand
uaggugagaagaucuauga

SEQ ID NO: 1343411 - RNA, 19 nt, Homo sapiens
  misc_RNA (1)...(19): siRNA sense strand
aaacuaacuucaacuccau

SEQ ID NO: 1343412 - RNA, 19 nt, Homo sapiens
  misc_RNA (1)...(19): siRNA sense strand
ucaacuccaucgccaagau

SEQ ID NO: 1343413 - RNA, 19 nt, Homo sapiens
  misc_RNA (1)...(19): siRNA sense strand
gaucuuggcccagcagaca

SEQ ID NO: 1343414 - RNA, 19 nt, Homo sapiens
  misc_RNA (1)...(19): siRNA sense strand
cagcaaaacuaacuucaac

SEQ ID NO: 1343415 - RNA, 19 nt, Homo sapiens
  misc_RNA (1)...(19): siRNA sense strand
aaacuaacuucaacuccau

SEQ ID NO: 1343416 - RNA, 19 nt, Homo sapiens
  misc_RNA (1)...(19): siRNA sense strand
ucaacuccaucgccaagau

SEQ ID NO: 1343417 - RNA, 19 nt, Homo sapiens
  misc_RNA (1)...(19): siRNA sense strand
gaucuuggcccagcagaca

SEQ ID NO: 1343418 - RNA, 19 nt, Homo sapiens
  misc_RNA (1)...(19): siRNA sense strand
cagcaaaacuaacuucaac

SEQ ID NO: 1343419 - RNA, 19 nt, Homo sapiens
  misc_RNA (1)...(19): siRNA sense strand
aaacuaacuucaacuccau

SEQ ID NO: 1343420 - RNA, 19 nt, Homo sapiens
  misc_RNA (1)...(19): siRNA sense strand
ucaacuccaucgccaagau

SEQ ID NO: 1343421 - RNA, 19 nt, Homo sapiens
  misc_RNA (1)...(19): siRNA sense strand
gaucuuggcccagcagaca

SEQ ID NO: 1343422 - RNA, 19 nt, Homo sapiens
  misc_RNA (1)...(19): siRNA sense strand
cagcaaaacuaacuucaac

SEQ ID NO: 1343423 - RNA, 19 nt, Homo sapiens
  misc_RNA (1)...(19): siRNA sense strand
aaacuaacuucaacuccau

SEQ ID NO: 1343424 - RNA, 19 nt, Homo sapiens
  misc_RNA (1)...(19): siRNA sense strand
ucaacuccaucgccaagau

SEQ ID NO: 1343425 - RNA, 19 nt, Homo sapiens
  misc_RNA (1)...(19): siRNA sense strand
gaucuuggcccagcagaca

SEQ ID NO: 1343426 - RNA, 19 nt, Homo sapiens
  misc_RNA (1)...(19): siRNA sense strand
cagcaaaacuaacuucaac

SEQ ID NO: 1343427 - RNA, 19 nt, Homo sapiens
  misc_RNA (1)...(19): siRNA sense strand
aaacuaacuucaacuccau

SEQ ID NO: 1343428 - RNA, 19 nt, Homo sapiens
  misc_RNA (1)...(19): siRNA sense strand
ucaacuccaucgccaagau

SEQ ID NO: 1343429 - RNA, 19 nt, Homo sapiens
  misc_RNA (1)...(19): siRNA sense strand
gaucuuggcccagcagaca

SEQ ID NO: 1343430 - RNA, 19 nt, Homo sapiens
  misc_RNA (1)...(19): siRNA sense strand
cagcaaaacuaacuucaac

SEQ ID NO: 1343431 - RNA, 19 nt, Homo sapiens
  misc_RNA (1)...(19): siRNA sense strand
aaacuaacuucaacuccau

SEQ ID NO: 1343432 - RNA, 19 nt, Homo sapiens
  misc_RNA (1)...(19): siRNA sense strand
ucaacuccaucgccaagau

SEQ ID NO: 1343433 - RNA, 19 nt, Homo sapiens
  misc_RNA (1)...(19): siRNA sense strand
gaucuuggcccagcagaca

SEQ ID NO: 1343434 - RNA, 19 nt, Homo sapiens
  misc_RNA (1)...(19): siRNA sense strand
cagcaaaacuaacuucaac

SEQ ID NO: 1343435 - RNA, 19 nt, Homo sapiens
  misc_RNA (1)...(19): siRNA sense strand
aaacuaacuucaacuccau

SEQ ID NO: 1343436 - RNA, 19 nt, Homo sapiens
  misc_RNA (1)...(19): siRNA sense strand
ucaacuccaucgccaagau

SEQ ID NO: 1343437 - RNA, 19 nt, Homo sapiens
  misc_RNA (1)...(19): siRNA sense strand
gaucuuggcccagcagaca

SEQ ID NO: 1343438 - RNA, 19 nt, Homo sapiens
  misc_RNA (1)...(19): siRNA sense strand
cagcaaaacuaacuucaac

SEQ ID NO: 1343439 - RNA, 19 nt, Homo sapiens
  misc_RNA (1)...(19): siRNA sense strand
aaacuaacuucaacuccau

SEQ ID NO: 1343440 - RNA, 19 nt, Homo sapiens
  misc_RNA (1)...(19): siRNA sense strand
ucaacuccaucgccaagau

SEQ ID NO: 1343441 - RNA, 19 nt, Homo sapiens
  misc_RNA (1)...(19): siRNA sense strand
gaucuuggcccagcagaca

SEQ ID NO: 1343442 - RNA, 19 nt, Homo sapiens
  misc_RNA (1)...(19): siRNA sense strand
cagcaaaacuaacuucaac

SEQ ID NO: 1343443 - RNA, 19 nt, Homo sapiens
  misc_RNA (1)...(19): siRNA sense strand
aaacuaacuucaacuccau

SEQ ID NO: 1343444 - RNA, 19 nt, Homo sapiens
  misc_RNA (1)...(19): siRNA sense strand
ucaacuccaucgccaagau

SEQ ID NO: 1343445 - RNA, 19 nt, Homo sapiens
  misc_RNA (1)...(19): siRNA sense strand
gaucuuggcccagcagaca

SEQ ID NO: 1343446 - RNA, 19 nt, Homo sapiens
  misc_RNA (1)...(19): siRNA sense strand
cagcaaaacuaacuucaac

SEQ ID NO: 1343447 - RNA, 19 nt, Homo sapiens
  misc_RNA (1)...(19): siRNA sense strand
aaacuaacuucaacuccau

SEQ ID NO: 1343448 - RNA, 19 nt, Homo sapiens
  misc_RNA (1)...(19): siRNA sense strand
ucaacuccaucgccaagau

SEQ ID NO: 1343449 - RNA, 19 nt, Homo sapiens
  misc_RNA (1)...(19): siRNA sense strand
gaucuuggcccagcagaca

SEQ ID NO: 1343450 - RNA, 19 nt, Homo sapiens
  misc_RNA (1)...(19): siRNA sense strand
cagcaaaacuaacuucaac

SEQ ID NO: 1343451 - RNA, 19 nt, Homo sapiens
  misc_RNA (1)...(19): siRNA sense strand
aaacuaacuucaacuccau

SEQ ID NO: 1343452 - RNA, 19 nt, Homo sapiens
  misc_RNA (1)...(19): siRNA sense strand
ucaacuccaucgccaagau

SEQ ID NO: 1343453 - RNA, 19 nt, Homo sapiens
  misc_RNA (1)...(19): siRNA sense strand
gaucuuggcccagcagaca

SEQ ID NO: 1343454 - RNA, 19 nt, Homo sapiens
  misc_RNA (1)...(19): siRNA sense strand
cagcaaaacuaacuucaac

SEQ ID NO: 1343455 - RNA, 19 nt, Homo sapiens
  misc_RNA (1)...(19): siRNA sense strand
aaacuaacuucaacuccau

SEQ ID NO: 1343456 - RNA, 19 nt, Homo sapiens
  misc_RNA (1)...(19): siRNA sense strand
ucaacuccaucgccaagau

SEQ ID NO: 1343457 - RNA, 19 nt, Homo sapiens
  misc_RNA (1)...(19): siRNA sense strand
gaucuuggcccagcagaca

SEQ ID NO: 1343458 - RNA, 19 nt, Homo sapiens
  misc_RNA (1)...(19): siRNA sense strand
cagcaaaacuaacuucaac

SEQ ID NO: 1343459 - RNA, 19 nt, Homo sapiens
  misc_RNA (1)...(19): siRNA sense strand
gacaaggacuggaauauuu

SEQ ID NO: 1343460 - RNA, 19 nt, Homo sapiens
  misc_RNA (1)...(19): siRNA sense strand
caaagaaucuccuugacaa

SEQ ID NO: 1343461 - RNA, 19 nt, Homo sapiens
  misc_RNA (1)...(19): siRNA sense strand
gaaggcauuucuccuggua

SEQ ID NO: 1343462 - RNA, 19 nt, Homo sapiens
  misc_RNA (1)...(19): siRNA sense strand
gauccagugugcuaccuua

SEQ ID NO: 1343463 - RNA, 19 nt, Homo sapiens
  misc_RNA (1)...(19): siRNA sense strand
aaacaaagaaucuccuuga

SEQ ID NO: 1343464 - RNA, 19 nt, Homo sapiens
  misc_RNA (1)...(19): siRNA sense strand
gaacugcaacaacagcuuu

SEQ ID NO: 1343465 - RNA, 19 nt, Homo sapiens
  misc_RNA (1)...(19): siRNA sense strand
gagaccucgugccaaauua

SEQ ID NO: 1343466 - RNA, 19 nt, Homo sapiens
  misc_RNA (1)...(19): siRNA sense strand
ugaaagauccagugugcua

SEQ ID NO: 1343467 - RNA, 19 nt, Homo sapiens
  misc_RNA (1)...(19): siRNA sense strand
uggagaaggucaagaaugu

SEQ ID NO: 1343468 - RNA, 19 nt, Homo sapiens
  misc_RNA (1)...(19): siRNA sense strand
ggagaccucgugccaaauu

SEQ ID NO: 1343469 - RNA, 19 nt, Homo sapiens
  misc_RNA (1)...(19): siRNA sense strand
ccagugugcuaccuuaaga

SEQ ID NO: 1343470 - RNA, 19 nt, Homo sapiens
  misc_RNA (1)...(19): siRNA sense strand
accaugcgcuucagagaua

SEQ ID NO: 1343471 - RNA, 19 nt, Homo sapiens
  misc_RNA (1)...(19): siRNA sense strand
ggaguacuguagccacaug

SEQ ID NO: 1343472 - RNA, 19 nt, Homo sapiens
  misc_RNA (1)...(19): siRNA sense strand
caccaaggauuaugaagag

SEQ ID NO: 1343473 - RNA, 19 nt, Homo sapiens
  misc_RNA (1)...(19): siRNA sense strand
ggaggccucuuguucuaca

SEQ ID NO: 1343474 - RNA, 19 nt, Homo sapiens
  misc_RNA (1)...(19): siRNA sense strand
ugacaaggacuggaauauu

SEQ ID NO: 1343475 - RNA, 19 nt, Homo sapiens
  misc_RNA (1)...(19): siRNA sense strand
caggaacaguugaaagauc

SEQ ID NO: 1343476 - RNA, 19 nt, Homo sapiens
  misc_RNA (1)...(19): siRNA sense strand
ucggaggccucuuguucua

SEQ ID NO: 1343477 - RNA, 19 nt, Homo sapiens
  misc_RNA (1)...(19): siRNA sense strand
agcaagaacugcaacaaca

SEQ ID NO: 1343478 - RNA, 19 nt, Homo sapiens
  misc_RNA (1)...(19): siRNA sense strand
guacuguagccacaugauu

SEQ ID NO: 1343479 - RNA, 19 nt, Homo sapiens
  misc_RNA (1)...(19): siRNA sense strand
ucaccaaggauuaugaaga

SEQ ID NO: 1343480 - RNA, 19 nt, Homo sapiens
  misc_RNA (1)...(19): siRNA sense strand
guccgaacuuucuaugaga

SEQ ID NO: 1343481 - RNA, 19 nt, Homo sapiens
  misc_RNA (1)...(19): siRNA sense strand
guggacaccugcagucucu

SEQ ID NO: 1343482 - RNA, 19 nt, Homo sapiens
  misc_RNA (1)...(19): siRNA sense strand
caaggauuaugaagagcau

SEQ ID NO: 1343483 - RNA, 19 nt, Homo sapiens
  misc_RNA (1)...(19): siRNA sense strand
gagaaggucaagaaugucu

SEQ ID NO: 1343484 - RNA, 19 nt, Homo sapiens
  misc_RNA (1)...(19): siRNA sense strand
auggagaccucgugccaaa

SEQ ID NO: 1343485 - RNA, 19 nt, Homo sapiens
  misc_RNA (1)...(19): siRNA sense strand
cguccgaacuuucuaugag

SEQ ID NO: 1343486 - RNA, 19 nt, Homo sapiens
  misc_RNA (1)...(19): siRNA sense strand
acaaagaaucuccuugaca

SEQ ID NO: 1343487 - RNA, 19 nt, Homo sapiens
  misc_RNA (1)...(19): siRNA sense strand
gaggacaccaugcgcuuca

SEQ ID NO: 1343488 - RNA, 19 nt, Homo sapiens
  misc_RNA (1)...(19): siRNA sense strand
ggacaccaugcgcuucaga

SEQ ID NO: 1343489 - RNA, 19 nt, Homo sapiens
  misc_RNA (1)...(19): siRNA sense strand
gcaagaacugcaacaacag

SEQ ID NO: 1343490 - RNA, 19 nt, Homo sapiens
  misc_RNA (1)...(19): siRNA sense strand
gcugcuucaccaaggauua

SEQ ID NO: 1343491 - RNA, 19 nt, Homo sapiens
  misc_RNA (1)...(19): siRNA sense strand
ugcaggaacucucuuugag

SEQ ID NO: 1343492 - RNA, 19 nt, Homo sapiens
  misc_RNA (1)...(19): siRNA sense strand
ggaggugucggaguacugu

SEQ ID NO: 1343493 - RNA, 19 nt, Homo sapiens
  misc_RNA (1)...(19): siRNA sense strand
cugcaggaacucucuuuga

SEQ ID NO: 1343494 - RNA, 19 nt, Homo sapiens
  misc_RNA (1)...(19): siRNA sense strand
agacaccucuccaguugcu

SEQ ID NO: 1343495 - RNA, 19 nt, Homo sapiens
  misc_RNA (1)...(19): siRNA sense strand
ugaaacaaagaaucuccuu

SEQ ID NO: 1343496 - RNA, 19 nt, Homo sapiens
  misc_RNA (1)...(19): siRNA sense strand
uacuguagccacaugauug

SEQ ID NO: 1343497 - RNA, 19 nt, Homo sapiens
  misc_RNA (1)...(19): siRNA sense strand
ggaauauuuucagcaagaa

SEQ ID NO: 1343498 - RNA, 19 nt, Homo sapiens
  misc_RNA (1)...(19): siRNA sense strand
gaccaggaacaguugaaag

SEQ ID NO: 1343499 - RNA, 19 nt, Homo sapiens
  misc_RNA (1)...(19): siRNA sense strand
uggaauauuuucagcaaga

SEQ ID NO: 1343500 - RNA, 19 nt, Homo sapiens
  misc_RNA (1)...(19): siRNA sense strand
ccucgugccaaauuacauu

SEQ ID NO: 1343501 - RNA, 19 nt, Homo sapiens
  misc_RNA (1)...(19): siRNA sense strand
gacaaggacuggaauauuu

SEQ ID NO: 1343502 - RNA, 19 nt, Homo sapiens
  misc_RNA (1)...(19): siRNA sense strand
caaagaaucuccuugacaa

SEQ ID NO: 1343503 - RNA, 19 nt, Homo sapiens
  misc_RNA (1)...(19): siRNA sense strand
gaaggcauuucuccuggua

SEQ ID NO: 1343504 - RNA, 19 nt, Homo sapiens
  misc_RNA (1)...(19): siRNA sense strand
gauccagugugcuaccuua

SEQ ID NO: 1343505 - RNA, 19 nt, Homo sapiens
  misc_RNA (1)...(19): siRNA sense strand
aaacaaagaaucuccuuga

SEQ ID NO: 1343506 - RNA, 19 nt, Homo sapiens
  misc_RNA (1)...(19): siRNA sense strand
gaacugcaacaacagcuuu

SEQ ID NO: 1343507 - RNA, 19 nt, Homo sapiens
  misc_RNA (1)...(19): siRNA sense strand
gagaccucgugccaaauua

SEQ ID NO: 1343508 - RNA, 19 nt, Homo sapiens
  misc_RNA (1)...(19): siRNA sense strand
ugaaagauccagugugcua

SEQ ID NO: 1343509 - RNA, 19 nt, Homo sapiens
  misc_RNA (1)...(19): siRNA sense strand
uggagaaggucaagaaugu

SEQ ID NO: 1343510 - RNA, 19 nt, Homo sapiens
  misc_RNA (1)...(19): siRNA sense strand
ggagaccucgugccaaauu

SEQ ID NO: 1343511 - RNA, 19 nt, Homo sapiens
  misc_RNA (1)...(19): siRNA sense strand
ccagugugcuaccuuaaga

SEQ ID NO: 1343512 - RNA, 19 nt, Homo sapiens
  misc_RNA (1)...(19): siRNA sense strand
accaugcgcuucagagaua

SEQ ID NO: 1343513 - RNA, 19 nt, Homo sapiens
  misc_RNA (1)...(19): siRNA sense strand
ggaguacuguagccacaug

SEQ ID NO: 1343514 - RNA, 19 nt, Homo sapiens
  misc_RNA (1)...(19): siRNA sense strand
caccaaggauuaugaagag

SEQ ID NO: 1343515 - RNA, 19 nt, Homo sapiens
  misc_RNA (1)...(19): siRNA sense strand
ggaggccucuuguucuaca

SEQ ID NO: 1343516 - RNA, 19 nt, Homo sapiens
  misc_RNA (1)...(19): siRNA sense strand
ugacaaggacuggaauauu

SEQ ID NO: 1343517 - RNA, 19 nt, Homo sapiens
  misc_RNA (1)...(19): siRNA sense strand
caggaacaguugaaagauc

SEQ ID NO: 1343518 - RNA, 19 nt, Homo sapiens
  misc_RNA (1)...(19): siRNA sense strand
ucggaggccucuuguucua

SEQ ID NO: 1343519 - RNA, 19 nt, Homo sapiens
  misc_RNA (1)...(19): siRNA sense strand
agcaagaacugcaacaaca

SEQ ID NO: 1343520 - RNA, 19 nt, Homo sapiens
  misc_RNA (1)...(19): siRNA sense strand
guacuguagccacaugauu

SEQ ID NO: 1343521 - RNA, 19 nt, Homo sapiens
  misc_RNA (1)...(19): siRNA sense strand
ucaccaaggauuaugaaga

SEQ ID NO: 1343522 - RNA, 19 nt, Homo sapiens
  misc_RNA (1)...(19): siRNA sense strand
guccgaacuuucuaugaga

SEQ ID NO: 1343523 - RNA, 19 nt, Homo sapiens
  misc_RNA (1)...(19): siRNA sense strand
guggacaccugcagucucu

SEQ ID NO: 1343524 - RNA, 19 nt, Homo sapiens
  misc_RNA (1)...(19): siRNA sense strand
caaggauuaugaagagcau

SEQ ID NO: 1343525 - RNA, 19 nt, Homo sapiens
  misc_RNA (1)...(19): siRNA sense strand
gagaaggucaagaaugucu

SEQ ID NO: 1343526 - RNA, 19 nt, Homo sapiens
  misc_RNA (1)...(19): siRNA sense strand
auggagaccucgugccaaa

SEQ ID NO: 1343527 - RNA, 19 nt, Homo sapiens
  misc_RNA (1)...(19): siRNA sense strand
cguccgaacuuucuaugag

SEQ ID NO: 1343528 - RNA, 19 nt, Homo sapiens
  misc_RNA (1)...(19): siRNA sense strand
acaaagaaucuccuugaca

SEQ ID NO: 1343529 - RNA, 19 nt, Homo sapiens
  misc_RNA (1)...(19): siRNA sense strand
gaggacaccaugcgcuuca

SEQ ID NO: 1343530 - RNA, 19 nt, Homo sapiens
  misc_RNA (1)...(19): siRNA sense strand
ggacaccaugcgcuucaga

SEQ ID NO: 1343531 - RNA, 19 nt, Homo sapiens
  misc_RNA (1)...(19): siRNA sense strand
gcaagaacugcaacaacag

SEQ ID NO: 1343532 - RNA, 19 nt, Homo sapiens
  misc_RNA (1)...(19): siRNA sense strand
gcugcuucaccaaggauua

SEQ ID NO: 1343533 - RNA, 19 nt, Homo sapiens
  misc_RNA (1)...(19): siRNA sense strand
ugcaggaacucucuuugag

SEQ ID NO: 1343534 - RNA, 19 nt, Homo sapiens
  misc_RNA (1)...(19): siRNA sense strand
ggaggugucggaguacugu

SEQ ID NO: 1343535 - RNA, 19 nt, Homo sapiens
  misc_RNA (1)...(19): siRNA sense strand
cugcaggaacucucuuuga

SEQ ID NO: 1343536 - RNA, 19 nt, Homo sapiens
  misc_RNA (1)...(19): siRNA sense strand
agacaccucuccaguugcu

SEQ ID NO: 1343537 - RNA, 19 nt, Homo sapiens
  misc_RNA (1)...(19): siRNA sense strand
ugaaacaaagaaucuccuu

SEQ ID NO: 1343538 - RNA, 19 nt, Homo sapiens
  misc_RNA (1)...(19): siRNA sense strand
uacuguagccacaugauug

SEQ ID NO: 1343539 - RNA, 19 nt, Homo sapiens
  misc_RNA (1)...(19): siRNA sense strand
ggaauauuuucagcaagaa

SEQ ID NO: 1343540 - RNA, 19 nt, Homo sapiens
  misc_RNA (1)...(19): siRNA sense strand
gaccaggaacaguugaaag

SEQ ID NO: 1343541 - RNA, 19 nt, Homo sapiens
  misc_RNA (1)...(19): siRNA sense strand
uggaauauuuucagcaaga

SEQ ID NO: 1343542 - RNA, 19 nt, Homo sapiens
  misc_RNA (1)...(19): siRNA sense strand
ccucgugccaaauuacauu

SEQ ID NO: 1343543 - RNA, 19 nt, Homo sapiens
  misc_RNA (1)...(19): siRNA sense strand
gacaaggacuggaauauuu

SEQ ID NO: 1343544 - RNA, 19 nt, Homo sapiens
  misc_RNA (1)...(19): siRNA sense strand
caaagaaucuccuugacaa

SEQ ID NO: 1343545 - RNA, 19 nt, Homo sapiens
  misc_RNA (1)...(19): siRNA sense strand
gaaggcauuucuccuggua

SEQ ID NO: 1343546 - RNA, 19 nt, Homo sapiens
  misc_RNA (1)...(19): siRNA sense strand
gauccagugugcuaccuua

SEQ ID NO: 1343547 - RNA, 19 nt, Homo sapiens
  misc_RNA (1)...(19): siRNA sense strand
aaacaaagaaucuccuuga

SEQ ID NO: 1343548 - RNA, 19 nt, Homo sapiens
  misc_RNA (1)...(19): siRNA sense strand
gaacugcaacaacagcuuu

SEQ ID NO: 1343549 - RNA, 19 nt, Homo sapiens
  misc_RNA (1)...(19): siRNA sense strand
gagaccucgugccaaauua

SEQ ID NO: 1343550 - RNA, 19 nt, Homo sapiens
  misc_RNA (1)...(19): siRNA sense strand
ugaaagauccagugugcua

SEQ ID NO: 1343551 - RNA, 19 nt, Homo sapiens
  misc_RNA (1)...(19): siRNA sense strand
uggagaaggucaagaaugu

SEQ ID NO: 1343552 - RNA, 19 nt, Homo sapiens
  misc_RNA (1)...(19): siRNA sense strand
ggagaccucgugccaaauu

SEQ ID NO: 1343553 - RNA, 19 nt, Homo sapiens
  misc_RNA (1)...(19): siRNA sense strand
ccagugugcuaccuuaaga

SEQ ID NO: 1343554 - RNA, 19 nt, Homo sapiens
  misc_RNA (1)...(19): siRNA sense strand
accaugcgcuucagagaua

SEQ ID NO: 1343555 - RNA, 19 nt, Homo sapiens
  misc_RNA (1)...(19): siRNA sense strand
ggaguacuguagccacaug

SEQ ID NO: 1343556 - RNA, 19 nt, Homo sapiens
  misc_RNA (1)...(19): siRNA sense strand
caccaaggauuaugaagag

SEQ ID NO: 1343557 - RNA, 19 nt, Homo sapiens
  misc_RNA (1)...(19): siRNA sense strand
ggaggccucuuguucuaca

SEQ ID NO: 1343558 - RNA, 19 nt, Homo sapiens
  misc_RNA (1)...(19): siRNA sense strand
ugacaaggacuggaauauu

SEQ ID NO: 1343559 - RNA, 19 nt, Homo sapiens
  misc_RNA (1)...(19): siRNA sense strand
caggaacaguugaaagauc

SEQ ID NO: 1343560 - RNA, 19 nt, Homo sapiens
  misc_RNA (1)...(19): siRNA sense strand
ucggaggccucuuguucua

SEQ ID NO: 1343561 - RNA, 19 nt, Homo sapiens
  misc_RNA (1)...(19): siRNA sense strand
agcaagaacugcaacaaca

SEQ ID NO: 1343562 - RNA, 19 nt, Homo sapiens
  misc_RNA (1)...(19): siRNA sense strand
guacuguagccacaugauu

SEQ ID NO: 1343563 - RNA, 19 nt, Homo sapiens
  misc_RNA (1)...(19): siRNA sense strand
ucaccaaggauuaugaaga

SEQ ID NO: 1343564 - RNA, 19 nt, Homo sapiens
  misc_RNA (1)...(19): siRNA sense strand
guccgaacuuucuaugaga

SEQ ID NO: 1343565 - RNA, 19 nt, Homo sapiens
  misc_RNA (1)...(19): siRNA sense strand
guggacaccugcagucucu

SEQ ID NO: 1343566 - RNA, 19 nt, Homo sapiens
  misc_RNA (1)...(19): siRNA sense strand
caaggauuaugaagagcau

SEQ ID NO: 1343567 - RNA, 19 nt, Homo sapiens
  misc_RNA (1)...(19): siRNA sense strand
gagaaggucaagaaugucu

SEQ ID NO: 1343568 - RNA, 19 nt, Homo sapiens
  misc_RNA (1)...(19): siRNA sense strand
auggagaccucgugccaaa

SEQ ID NO: 1343569 - RNA, 19 nt, Homo sapiens
  misc_RNA (1)...(19): siRNA sense strand
cguccgaacuuucuaugag

SEQ ID NO: 1343570 - RNA, 19 nt, Homo sapiens
  misc_RNA (1)...(19): siRNA sense strand
acaaagaaucuccuugaca

SEQ ID NO: 1343571 - RNA, 19 nt, Homo sapiens
  misc_RNA (1)...(19): siRNA sense strand
gaggacaccaugcgcuuca

SEQ ID NO: 1343572 - RNA, 19 nt, Homo sapiens
  misc_RNA (1)...(19): siRNA sense strand
ggacaccaugcgcuucaga

SEQ ID NO: 1343573 - RNA, 19 nt, Homo sapiens
  misc_RNA (1)...(19): siRNA sense strand
gcaagaacugcaacaacag

SEQ ID NO: 1343574 - RNA, 19 nt, Homo sapiens
  misc_RNA (1)...(19): siRNA sense strand
gcugcuucaccaaggauua

SEQ ID NO: 1343575 - RNA, 19 nt, Homo sapiens
  misc_RNA (1)...(19): siRNA sense strand
ugcaggaacucucuuugag

SEQ ID NO: 1343576 - RNA, 19 nt, Homo sapiens
  misc_RNA (1)...(19): siRNA sense strand
ggaggugucggaguacugu

SEQ ID NO: 1343577 - RNA, 19 nt, Homo sapiens
  misc_RNA (1)...(19): siRNA sense strand
cugcaggaacucucuuuga

SEQ ID NO: 1343578 - RNA, 19 nt, Homo sapiens
  misc_RNA (1)...(19): siRNA sense strand
agacaccucuccaguugcu

SEQ ID NO: 1343579 - RNA, 19 nt, Homo sapiens
  misc_RNA (1)...(19): siRNA sense strand
ugaaacaaagaaucuccuu

SEQ ID NO: 1343580 - RNA, 19 nt, Homo sapiens
  misc_RNA (1)...(19): siRNA sense strand
uacuguagccacaugauug

SEQ ID NO: 1343581 - RNA, 19 nt, Homo sapiens
  misc_RNA (1)...(19): siRNA sense strand
ggaauauuuucagcaagaa

SEQ ID NO: 1343582 - RNA, 19 nt, Homo sapiens
  misc_RNA (1)...(19): siRNA sense strand
gaccaggaacaguugaaag

SEQ ID NO: 1343583 - RNA, 19 nt, Homo sapiens
  misc_RNA (1)...(19): siRNA sense strand
uggaauauuuucagcaaga

SEQ ID NO: 1343584 - RNA, 19 nt, Homo sapiens
  misc_RNA (1)...(19): siRNA sense strand
ccucgugccaaauuacauu

SEQ ID NO: 1343585 - RNA, 19 nt, Homo sapiens
  misc_RNA (1)...(19): siRNA sense strand
gacaaggacuggaauauuu

SEQ ID NO: 1343586 - RNA, 19 nt, Homo sapiens
  misc_RNA (1)...(19): siRNA sense strand
caaagaaucuccuugacaa

SEQ ID NO: 1343587 - RNA, 19 nt, Homo sapiens
  misc_RNA (1)...(19): siRNA sense strand
gaaggcauuucuccuggua

SEQ ID NO: 1343588 - RNA, 19 nt, Homo sapiens
  misc_RNA (1)...(19): siRNA sense strand
gauccagugugcuaccuua

SEQ ID NO: 1343589 - RNA, 19 nt, Homo sapiens
  misc_RNA (1)...(19): siRNA sense strand
aaacaaagaaucuccuuga

SEQ ID NO: 1343590 - RNA, 19 nt, Homo sapiens
  misc_RNA (1)...(19): siRNA sense strand
gaacugcaacaacagcuuu

SEQ ID NO: 1343591 - RNA, 19 nt, Homo sapiens
  misc_RNA (1)...(19): siRNA sense strand
gagaccucgugccaaauua

SEQ ID NO: 1343592 - RNA, 19 nt, Homo sapiens
  misc_RNA (1)...(19): siRNA sense strand
ugaaagauccagugugcua

SEQ ID NO: 1343593 - RNA, 19 nt, Homo sapiens
  misc_RNA (1)...(19): siRNA sense strand
uggagaaggucaagaaugu

SEQ ID NO: 1343594 - RNA, 19 nt, Homo sapiens
  misc_RNA (1)...(19): siRNA sense strand
ggagaccucgugccaaauu

SEQ ID NO: 1343595 - RNA, 19 nt, Homo sapiens
  misc_RNA (1)...(19): siRNA sense strand
ccagugugcuaccuuaaga

SEQ ID NO: 1343596 - RNA, 19 nt, Homo sapiens
  misc_RNA (1)...(19): siRNA sense strand
accaugcgcuucagagaua

SEQ ID NO: 1343597 - RNA, 19 nt, Homo sapiens
  misc_RNA (1)...(19): siRNA sense strand
ggaguacuguagccacaug

SEQ ID NO: 1343598 - RNA, 19 nt, Homo sapiens
  misc_RNA (1)...(19): siRNA sense strand
caccaaggauuaugaagag

SEQ ID NO: 1343599 - RNA, 19 nt, Homo sapiens
  misc_RNA (1)...(19): siRNA sense strand
ggaggccucuuguucuaca

SEQ ID NO: 1343600 - RNA, 19 nt, Homo sapiens
  misc_RNA (1)...(19): siRNA sense strand
ugacaaggacuggaauauu

SEQ ID NO: 1343601 - RNA, 19 nt, Homo sapiens
  misc_RNA (1)...(19): siRNA sense strand
caggaacaguugaaagauc

SEQ ID NO: 1343602 - RNA, 19 nt, Homo sapiens
  misc_RNA (1)...(19): siRNA sense strand
ucggaggccucuuguucua

SEQ ID NO: 1343603 - RNA, 19 nt, Homo sapiens
  misc_RNA (1)...(19): siRNA sense strand
agcaagaacugcaacaaca

SEQ ID NO: 1343604 - RNA, 19 nt, Homo sapiens
  misc_RNA (1)...(19): siRNA sense strand
guacuguagccacaugauu

SEQ ID NO: 1343605 - RNA, 19 nt, Homo sapiens
  misc_RNA (1)...(19): siRNA sense strand
ucaccaaggauuaugaaga

SEQ ID NO: 1343606 - RNA, 19 nt, Homo sapiens
  misc_RNA (1)...(19): siRNA sense strand
guccgaacuuucuaugaga

SEQ ID NO: 1343607 - RNA, 19 nt, Homo sapiens
  misc_RNA (1)...(19): siRNA sense strand
guggacaccugcagucucu

SEQ ID NO: 1343608 - RNA, 19 nt, Homo sapiens
  misc_RNA (1)...(19): siRNA sense strand
caaggauuaugaagagcau

SEQ ID NO: 1343609 - RNA, 19 nt, Homo sapiens
  misc_RNA (1)...(19): siRNA sense strand
gagaaggucaagaaugucu

SEQ ID NO: 1343610 - RNA, 19 nt, Homo sapiens
  misc_RNA (1)...(19): siRNA sense strand
auggagaccucgugccaaa

SEQ ID NO: 1343611 - RNA, 19 nt, Homo sapiens
  misc_RNA (1)...(19): siRNA sense strand
cguccgaacuuucuaugag

SEQ ID NO: 1343612 - RNA, 19 nt, Homo sapiens
  misc_RNA (1)...(19): siRNA sense strand
acaaagaaucuccuugaca

SEQ ID NO: 1343613 - RNA, 19 nt, Homo sapiens
  misc_RNA (1)...(19): siRNA sense strand
gaggacaccaugcgcuuca

SEQ ID NO: 1343614 - RNA, 19 nt, Homo sapiens
  misc_RNA (1)...(19): siRNA sense strand
ggacaccaugcgcuucaga

SEQ ID NO: 1343615 - RNA, 19 nt, Homo sapiens
  misc_RNA (1)...(19): siRNA sense strand
gcaagaacugcaacaacag

SEQ ID NO: 1343616 - RNA, 19 nt, Homo sapiens
  misc_RNA (1)...(19): siRNA sense strand
gcugcuucaccaaggauua

SEQ ID NO: 1343617 - RNA, 19 nt, Homo sapiens
  misc_RNA (1)...(19): siRNA sense strand
ugcaggaacucucuuugag

SEQ ID NO: 1343618 - RNA, 19 nt, Homo sapiens
  misc_RNA (1)...(19): siRNA sense strand
ggaggugucggaguacugu

SEQ ID NO: 1343619 - RNA, 19 nt, Homo sapiens
  misc_RNA (1)...(19): siRNA sense strand
cugcaggaacucucuuuga

SEQ ID NO: 1343620 - RNA, 19 nt, Homo sapiens
  misc_RNA (1)...(19): siRNA sense strand
agacaccucuccaguugcu

SEQ ID NO: 1343621 - RNA, 19 nt, Homo sapiens
  misc_RNA (1)...(19): siRNA sense strand
ugaaacaaagaaucuccuu

SEQ ID NO: 1343622 - RNA, 19 nt, Homo sapiens
  misc_RNA (1)...(19): siRNA sense strand
uacuguagccacaugauug

SEQ ID NO: 1343623 - RNA, 19 nt, Homo sapiens
  misc_RNA (1)...(19): siRNA sense strand
ggaauauuuucagcaagaa

SEQ ID NO: 1343624 - RNA, 19 nt, Homo sapiens
  misc_RNA (1)...(19): siRNA sense strand
gaccaggaacaguugaaag

SEQ ID NO: 1343625 - RNA, 19 nt, Homo sapiens
  misc_RNA (1)...(19): siRNA sense strand
uggaauauuuucagcaaga

SEQ ID NO: 1343626 - RNA, 19 nt, Homo sapiens
  misc_RNA (1)...(19): siRNA sense strand
ccucgugccaaauuacauu

SEQ ID NO: 1343627 - RNA, 19 nt, Homo sapiens
  misc_RNA (1)...(19): siRNA sense strand
ucaaggaaaucaagaacua

SEQ ID NO: 1343628 - RNA, 19 nt, Homo sapiens
  misc_RNA (1)...(19): siRNA sense strand
ucaacgagcuccugaagaa

SEQ ID NO: 1343629 - RNA, 19 nt, Homo sapiens
  misc_RNA (1)...(19): siRNA sense strand
cgaaagaacggacacauuu

SEQ ID NO: 1343630 - RNA, 19 nt, Homo sapiens
  misc_RNA (1)...(19): siRNA sense strand
ggaagaagauauccccaua

SEQ ID NO: 1343631 - RNA, 19 nt, Homo sapiens
  misc_RNA (1)...(19): siRNA sense strand
gcaccgugguucuggagua

SEQ ID NO: 1343632 - RNA, 19 nt, Homo sapiens
  misc_RNA (1)...(19): siRNA sense strand
caaagccaaugucgccaaa

SEQ ID NO: 1343633 - RNA, 19 nt, Homo sapiens
  misc_RNA (1)...(19): siRNA sense strand
aagugaagcugaucaagga

SEQ ID NO: 1343634 - RNA, 19 nt, Homo sapiens
  misc_RNA (1)...(19): siRNA sense strand
gcgaaagaacggacacauu

SEQ ID NO: 1343635 - RNA, 19 nt, Homo sapiens
  misc_RNA (1)...(19): siRNA sense strand
cagccucacucucuuggaa

SEQ ID NO: 1343636 - RNA, 19 nt, Homo sapiens
  misc_RNA (1)...(19): siRNA sense strand
ggaaaucucagaccucaac

SEQ ID NO: 1343637 - RNA, 19 nt, Homo sapiens
  misc_RNA (1)...(19): siRNA sense strand
gccgauggguggugugaug

SEQ ID NO: 1343638 - RNA, 19 nt, Homo sapiens
  misc_RNA (1)...(19): siRNA sense strand
ggacaucgccagccucacu

SEQ ID NO: 1343639 - RNA, 19 nt, Homo sapiens
  misc_RNA (1)...(19): siRNA sense strand
ggaaaucaagaacuacauc

SEQ ID NO: 1343640 - RNA, 19 nt, Homo sapiens
  misc_RNA (1)...(19): siRNA sense strand
ggcgacaggugccaugugu

SEQ ID NO: 1343641 - RNA, 19 nt, Homo sapiens
  misc_RNA (1)...(19): siRNA sense strand
ggaaaucaaagccaauguc

SEQ ID NO: 1343642 - RNA, 19 nt, Homo sapiens
  misc_RNA (1)...(19): siRNA sense strand
ugaagcugaucaaggaaau

SEQ ID NO: 1343643 - RNA, 19 nt, Homo sapiens
  misc_RNA (1)...(19): siRNA sense strand
aaagaacggacacauuuca

SEQ ID NO: 1343644 - RNA, 19 nt, Homo sapiens
  misc_RNA (1)...(19): siRNA sense strand
cgaagcccguggacaaagu

SEQ ID NO: 1343645 - RNA, 19 nt, Homo sapiens
  misc_RNA (1)...(19): siRNA sense strand
ggacaaagugaagcugauc

SEQ ID NO: 1343646 - RNA, 19 nt, Homo sapiens
  misc_RNA (1)...(19): siRNA sense strand
ccaaagcugaggcggagaa

SEQ ID NO: 1343647 - RNA, 19 nt, Homo sapiens
  misc_RNA (1)...(19): siRNA sense strand
caacgagcuccugaagaaa

SEQ ID NO: 1343648 - RNA, 19 nt, Homo sapiens
  misc_RNA (1)...(19): siRNA sense strand
gaucaaggaaaucaagaac

SEQ ID NO: 1343649 - RNA, 19 nt, Homo sapiens
  misc_RNA (1)...(19): siRNA sense strand
aggaggcgguggaagaaga

SEQ ID NO: 1343650 - RNA, 19 nt, Homo sapiens
  misc_RNA (1)...(19): siRNA sense strand
gaagaaaacguugaagauc

SEQ ID NO: 1343651 - RNA, 19 nt, Homo sapiens
  misc_RNA (1)...(19): siRNA sense strand
gugaagcugaucaaggaaa

SEQ ID NO: 1343652 - RNA, 19 nt, Homo sapiens
  misc_RNA (1)...(19): siRNA sense strand
aagcugaggcggagaagau

SEQ ID NO: 1343653 - RNA, 19 nt, Homo sapiens
  misc_RNA (1)...(19): siRNA sense strand
ccaggaggcgguggaagaa

SEQ ID NO: 1343654 - RNA, 19 nt, Homo sapiens
  misc_RNA (1)...(19): siRNA sense strand
aaucaagaacuacauccaa

SEQ ID NO: 1343655 - RNA, 19 nt, Homo sapiens
  misc_RNA (1)...(19): siRNA sense strand
gacaaagugaagcugauca

SEQ ID NO: 1343656 - RNA, 19 nt, Homo sapiens
  misc_RNA (1)...(19): siRNA sense strand
gccucacucucuuggaaau

SEQ ID NO: 1343657 - RNA, 19 nt, Homo sapiens
  misc_RNA (1)...(19): siRNA sense strand
gauggguggugugaugucu

SEQ ID NO: 1343658 - RNA, 19 nt, Homo sapiens
  misc_RNA (1)...(19): siRNA sense strand
aggcgaagcccguggacaa

SEQ ID NO: 1343659 - RNA, 19 nt, Homo sapiens
  misc_RNA (1)...(19): siRNA sense strand
gaacaagccuuaauuagga

SEQ ID NO: 1343660 - RNA, 19 nt, Homo sapiens
  misc_RNA (1)...(19): siRNA sense strand
gaaacaagaugcugacaaa

SEQ ID NO: 1343661 - RNA, 19 nt, Homo sapiens
  misc_RNA (1)...(19): siRNA sense strand
gaucaggaauuccauauuu

SEQ ID NO: 1343662 - RNA, 19 nt, Homo sapiens
  misc_RNA (1)...(19): siRNA sense strand
ggaagaaggugaucucuau

SEQ ID NO: 1343663 - RNA, 19 nt, Homo sapiens
  misc_RNA (1)...(19): siRNA sense strand
ggucagaacuuauguagaa

SEQ ID NO: 1343664 - RNA, 19 nt, Homo sapiens
  misc_RNA (1)...(19): siRNA sense strand
gcaggcagaucuucaauuu

SEQ ID NO: 1343665 - RNA, 19 nt, Homo sapiens
  misc_RNA (1)...(19): siRNA sense strand
guggagacauuacauauua

SEQ ID NO: 1343666 - RNA, 19 nt, Homo sapiens
  misc_RNA (1)...(19): siRNA sense strand
gaaaagggcugaaagaauu

SEQ ID NO: 1343667 - RNA, 19 nt, Homo sapiens
  misc_RNA (1)...(19): siRNA sense strand
gaaagaacuucaggacaua

SEQ ID NO: 1343668 - RNA, 19 nt, Homo sapiens
  misc_RNA (1)...(19): siRNA sense strand
gaacagaagagggcuauua

SEQ ID NO: 1343669 - RNA, 19 nt, Homo sapiens
  misc_RNA (1)...(19): siRNA sense strand
gaacuuauguagaagauca

SEQ ID NO: 1343670 - RNA, 19 nt, Homo sapiens
  misc_RNA (1)...(19): siRNA sense strand
gaugaaagaugaugaagga

SEQ ID NO: 1343671 - RNA, 19 nt, Homo sapiens
  misc_RNA (1)...(19): siRNA sense strand
gggagaagcugcccuuaaa

SEQ ID NO: 1343672 - RNA, 19 nt, Homo sapiens
  misc_RNA (1)...(19): siRNA sense strand
caaauuagaugacauugga

SEQ ID NO: 1343673 - RNA, 19 nt, Homo sapiens
  misc_RNA (1)...(19): siRNA sense strand
ccaaagaaguugugaaguu

SEQ ID NO: 1343674 - RNA, 19 nt, Homo sapiens
  misc_RNA (1)...(19): siRNA sense strand
caggaaagcuucaguuuga

SEQ ID NO: 1343675 - RNA, 19 nt, Homo sapiens
  misc_RNA (1)...(19): siRNA sense strand
gaaggcaucucuuacaaau

SEQ ID NO: 1343676 - RNA, 19 nt, Homo sapiens
  misc_RNA (1)...(19): siRNA sense strand
gaugaaagaugaccaggaa

SEQ ID NO: 1343677 - RNA, 19 nt, Homo sapiens
  misc_RNA (1)...(19): siRNA sense strand
ugaaggaacuuacacguuu

SEQ ID NO: 1343678 - RNA, 19 nt, Homo sapiens
  misc_RNA (1)...(19): siRNA sense strand
gguacucaaucacuaauua

SEQ ID NO: 1343679 - RNA, 19 nt, Homo sapiens
  misc_RNA (1)...(19): siRNA sense strand
gaccuuaccuguacagaaa

SEQ ID NO: 1343680 - RNA, 19 nt, Homo sapiens
  misc_RNA (1)...(19): siRNA sense strand
gaagagggcuauuaugaag

SEQ ID NO: 1343681 - RNA, 19 nt, Homo sapiens
  misc_RNA (1)...(19): siRNA sense strand
ugaagaagauggagaagaa

SEQ ID NO: 1343682 - RNA, 19 nt, Homo sapiens
  misc_RNA (1)...(19): siRNA sense strand
gaagagaaacgcuuuguug

SEQ ID NO: 1343683 - RNA, 19 nt, Homo sapiens
  misc_RNA (1)...(19): siRNA sense strand
gaaaucaaaucaacugaca

SEQ ID NO: 1343684 - RNA, 19 nt, Homo sapiens
  misc_RNA (1)...(19): siRNA sense strand
gaagaaugguguggaaauu

SEQ ID NO: 1343685 - RNA, 19 nt, Homo sapiens
  misc_RNA (1)...(19): siRNA sense strand
ggagaaagauaccaaaugg

SEQ ID NO: 1343686 - RNA, 19 nt, Homo sapiens
  misc_RNA (1)...(19): siRNA sense strand
caaagugaguuacaacaaa

SEQ ID NO: 1343687 - RNA, 19 nt, Homo sapiens
  misc_RNA (1)...(19): siRNA sense strand
cuaaagaggugaaacaaga

SEQ ID NO: 1343688 - RNA, 19 nt, Homo sapiens
  misc_RNA (1)...(19): siRNA sense strand
gagaauggcucaugaaggu

SEQ ID NO: 1343689 - RNA, 19 nt, Homo sapiens
  misc_RNA (1)...(19): siRNA sense strand
gaaacaauacugagaacua

SEQ ID NO: 1343690 - RNA, 19 nt, Homo sapiens
  misc_RNA (1)...(19): siRNA sense strand
gcaaauaacucaggagaag

SEQ ID NO: 1343691 - RNA, 19 nt, Homo sapiens
  misc_RNA (1)...(19): siRNA sense strand
gcagagccacuaacaaaua

SEQ ID NO: 1343692 - RNA, 19 nt, Homo sapiens
  misc_RNA (1)...(19): siRNA sense strand
guauaaagauggcauugaa

SEQ ID NO: 1343693 - RNA, 19 nt, Homo sapiens
  misc_RNA (1)...(19): siRNA sense strand
caucaaacauggagaaaga

SEQ ID NO: 1343694 - RNA, 19 nt, Homo sapiens
  misc_RNA (1)...(19): siRNA sense strand
gaaggaaaaugguaucaua

SEQ ID NO: 1343695 - RNA, 19 nt, Homo sapiens
  misc_RNA (1)...(19): siRNA sense strand
gaacaagaaacaauacuga

SEQ ID NO: 1343696 - RNA, 19 nt, Homo sapiens
  misc_RNA (1)...(19): siRNA sense strand
caacauagcuggagaaacc

SEQ ID NO: 1343697 - RNA, 19 nt, Homo sapiens
  misc_RNA (1)...(19): siRNA sense strand
gaagagcgcuuugaaguac

SEQ ID NO: 1343698 - RNA, 19 nt, Homo sapiens
  misc_RNA (1)...(19): siRNA sense strand
gaauugauguccuguggaa

SEQ ID NO: 1343699 - RNA, 19 nt, Homo sapiens
  misc_RNA (1)...(19): siRNA sense strand
gaaagaauccagagccaaa

SEQ ID NO: 1343700 - RNA, 19 nt, Homo sapiens
  misc_RNA (1)...(19): siRNA sense strand
ggauacagauacaaaguga

SEQ ID NO: 1343701 - RNA, 19 nt, Homo sapiens
  misc_RNA (1)...(19): siRNA sense strand
gcagaucacagacagaaua

SEQ ID NO: 1343702 - RNA, 19 nt, Homo sapiens
  misc_RNA (1)...(19): siRNA sense strand
gaaaccaacuguaaucucu

SEQ ID NO: 1343703 - RNA, 19 nt, Homo sapiens
  misc_RNA (1)...(19): siRNA sense strand
ggacauagaaguuccagaa

SEQ ID NO: 1343704 - RNA, 19 nt, Homo sapiens
  misc_RNA (1)...(19): siRNA sense strand
ggauauccauuaccaaaga

SEQ ID NO: 1343705 - RNA, 19 nt, Homo sapiens
  misc_RNA (1)...(19): siRNA sense strand
caaagaaguugugaaguug

SEQ ID NO: 1343706 - RNA, 19 nt, Homo sapiens
  misc_RNA (1)...(19): siRNA sense strand
caucaggaauguucacuuu

SEQ ID NO: 1343707 - RNA, 19 nt, Homo sapiens
  misc_RNA (1)...(19): siRNA sense strand
gaauuagagugcauuguau

SEQ ID NO: 1343708 - RNA, 19 nt, Homo sapiens
  misc_RNA (1)...(19): siRNA sense strand
uaaagaagaugguacucaa

SEQ ID NO: 1343709 - RNA, 19 nt, Homo sapiens
  misc_RNA (1)...(19): siRNA sense strand
uguggaagcucgucauaua

SEQ ID NO: 1343710 - RNA, 19 nt, Homo sapiens
  misc_RNA (1)...(19): siRNA sense strand
gaaaugaaagucagagcua

SEQ ID NO: 1343711 - RNA, 19 nt, Homo sapiens
  misc_RNA (1)...(19): siRNA sense strand
caaauggacuuucuacaag

SEQ ID NO: 1343712 - RNA, 19 nt, Homo sapiens
  misc_RNA (1)...(19): siRNA sense strand
ggaaaugccuguuuaucca

SEQ ID NO: 1343713 - RNA, 19 nt, Homo sapiens
  misc_RNA (1)...(19): siRNA sense strand
acacaaauauguaguggaa

SEQ ID NO: 1343714 - RNA, 19 nt, Homo sapiens
  misc_RNA (1)...(19): siRNA sense strand
ggaagaugcuggaaauuac

SEQ ID NO: 1343715 - RNA, 19 nt, Homo sapiens
  misc_RNA (1)...(19): siRNA sense strand
ccaaagaguuaacugaaga

SEQ ID NO: 1343716 - RNA, 19 nt, Homo sapiens
  misc_RNA (1)...(19): siRNA sense strand
cggaagagcugcgcaguaa

SEQ ID NO: 1343717 - RNA, 19 nt, Homo sapiens
  misc_RNA (1)...(19): siRNA sense strand
uaaggaagaugcuggaaau

SEQ ID NO: 1343718 - RNA, 19 nt, Homo sapiens
  misc_RNA (1)...(19): siRNA sense strand
ucagggaccuauucaguaa

SEQ ID NO: 1343719 - RNA, 19 nt, Homo sapiens
  misc_RNA (1)...(19): siRNA sense strand
gcacggaugucaccugcaa

SEQ ID NO: 1343720 - RNA, 19 nt, Homo sapiens
  misc_RNA (1)...(19): siRNA sense strand
gagaugugguuaugacuga

SEQ ID NO: 1343721 - RNA, 19 nt, Homo sapiens
  misc_RNA (1)...(19): siRNA sense strand
caagaacaaauccaaguua

SEQ ID NO: 1343722 - RNA, 19 nt, Homo sapiens
  misc_RNA (1)...(19): siRNA sense strand
gagaaacuauggcuacuag

SEQ ID NO: 1343723 - RNA, 19 nt, Homo sapiens
  misc_RNA (1)...(19): siRNA sense strand
ggagaagacugcuguaacu

SEQ ID NO: 1343724 - RNA, 19 nt, Homo sapiens
  misc_RNA (1)...(19): siRNA sense strand
gcacauaucaucacagauc

SEQ ID NO: 1343725 - RNA, 19 nt, Homo sapiens
  misc_RNA (1)...(19): siRNA sense strand
ggaaacacauuaaggacau

SEQ ID NO: 1343726 - RNA, 19 nt, Homo sapiens
  misc_RNA (1)...(19): siRNA sense strand
gaaauuaagccaagugaca

SEQ ID NO: 1343727 - RNA, 19 nt, Homo sapiens
  misc_RNA (1)...(19): siRNA sense strand
gaugaaagacggccaagaa

SEQ ID NO: 1343728 - RNA, 19 nt, Homo sapiens
  misc_RNA (1)...(19): siRNA sense strand
guuaaagucuccuuggaaa

SEQ ID NO: 1343729 - RNA, 19 nt, Homo sapiens
  misc_RNA (1)...(19): siRNA sense strand
gagcucaagucucgaaaga

SEQ ID NO: 1343730 - RNA, 19 nt, Homo sapiens
  misc_RNA (1)...(19): siRNA sense strand
gaaagaauuacccaugaaa

SEQ ID NO: 1343731 - RNA, 19 nt, Homo sapiens
  misc_RNA (1)...(19): siRNA sense strand
gaaggaaucuacacugcau

SEQ ID NO: 1343732 - RNA, 19 nt, Homo sapiens
  misc_RNA (1)...(19): siRNA sense strand
gauuaugaguuacugauga

SEQ ID NO: 1343733 - RNA, 19 nt, Homo sapiens
  misc_RNA (1)...(19): siRNA sense strand
ugaagaagcugauuaugag

SEQ ID NO: 1343734 - RNA, 19 nt, Homo sapiens
  misc_RNA (1)...(19): siRNA sense strand
gagaaacgcuuuguugagu

SEQ ID NO: 1343735 - RNA, 19 nt, Homo sapiens
  misc_RNA (1)...(19): siRNA sense strand
gcaggugucagaagaauuu

SEQ ID NO: 1343736 - RNA, 19 nt, Homo sapiens
  misc_RNA (1)...(19): siRNA sense strand
gaaauuuacuacagaagag

SEQ ID NO: 1343737 - RNA, 19 nt, Homo sapiens
  misc_RNA (1)...(19): siRNA sense strand
ggaaauugccgaagcuuau

SEQ ID NO: 1343738 - RNA, 19 nt, Homo sapiens
  misc_RNA (1)...(19): siRNA sense strand
gaaauugagaugagugaaa

SEQ ID NO: 1343739 - RNA, 19 nt, Homo sapiens
  misc_RNA (1)...(19): siRNA sense strand
cauagaaguuccagaauca

SEQ ID NO: 1343740 - RNA, 19 nt, Homo sapiens
  misc_RNA (1)...(19): siRNA sense strand
agacaaacccgaauugaaa

SEQ ID NO: 1343741 - RNA, 19 nt, Homo sapiens
  misc_RNA (1)...(19): siRNA sense strand
ggaacaauuuacucucuga

SEQ ID NO: 1343742 - RNA, 19 nt, Homo sapiens
  misc_RNA (1)...(19): siRNA sense strand
gaaaucaagcccaguucua

SEQ ID NO: 1343743 - RNA, 19 nt, Homo sapiens
  misc_RNA (1)...(19): siRNA sense strand
gaaagacggccaagaagug

SEQ ID NO: 1343744 - RNA, 19 nt, Homo sapiens
  misc_RNA (1)...(19): siRNA sense strand
ccaagcaauugaucacuuu

SEQ ID NO: 1343745 - RNA, 19 nt, Homo sapiens
  misc_RNA (1)...(19): siRNA sense strand
gagaaggcauuacuaccaa

SEQ ID NO: 1343746 - RNA, 19 nt, Homo sapiens
  misc_RNA (1)...(19): siRNA sense strand
gaaaacaguuguaccuaaa

SEQ ID NO: 1343747 - RNA, 19 nt, Homo sapiens
  misc_RNA (1)...(19): siRNA sense strand
caagaaaugcuuuaucaga

SEQ ID NO: 1343748 - RNA, 19 nt, Homo sapiens
  misc_RNA (1)...(19): siRNA sense strand
gaaggaacuuacacguuug

SEQ ID NO: 1343749 - RNA, 19 nt, Homo sapiens
  misc_RNA (1)...(19): siRNA sense strand
aaacagcgacuagucauua

SEQ ID NO: 1343750 - RNA, 19 nt, Homo sapiens
  misc_RNA (1)...(19): siRNA sense strand
caagugagacuccaaguga

SEQ ID NO: 1343751 - RNA, 19 nt, Homo sapiens
  misc_RNA (1)...(19): siRNA sense strand
gaaguugugucuccugauc

SEQ ID NO: 1343752 - RNA, 19 nt, Homo sapiens
  misc_RNA (1)...(19): siRNA sense strand
gaagaagcgagccauguuu

SEQ ID NO: 1343753 - RNA, 19 nt, Homo sapiens
  misc_RNA (1)...(19): siRNA sense strand
ccaggaagcuguguuugaa

SEQ ID NO: 1343754 - RNA, 19 nt, Homo sapiens
  misc_RNA (1)...(19): siRNA sense strand
gaaacaacagaaaccauuu

SEQ ID NO: 1343755 - RNA, 19 nt, Homo sapiens
  misc_RNA (1)...(19): siRNA sense strand
gcaagcuggugauuucuau

SEQ ID NO: 1343756 - RNA, 19 nt, Homo sapiens
  misc_RNA (1)...(19): siRNA sense strand
cauccaaccugcucaagaa

SEQ ID NO: 1343757 - RNA, 19 nt, Homo sapiens
  misc_RNA (1)...(19): siRNA sense strand
gaagauugaagcccacuuu

SEQ ID NO: 1343758 - RNA, 19 nt, Homo sapiens
  misc_RNA (1)...(19): siRNA sense strand
gcucagaucucagaaucaa

SEQ ID NO: 1343759 - RNA, 19 nt, Homo sapiens
  misc_RNA (1)...(19): siRNA sense strand
gaacaagccuuaauuagga

SEQ ID NO: 1343760 - RNA, 19 nt, Homo sapiens
  misc_RNA (1)...(19): siRNA sense strand
gaaacaagaugcugacaaa

SEQ ID NO: 1343761 - RNA, 19 nt, Homo sapiens
  misc_RNA (1)...(19): siRNA sense strand
gaucaggaauuccauauuu

SEQ ID NO: 1343762 - RNA, 19 nt, Homo sapiens
  misc_RNA (1)...(19): siRNA sense strand
ggaagaaggugaucucuau

SEQ ID NO: 1343763 - RNA, 19 nt, Homo sapiens
  misc_RNA (1)...(19): siRNA sense strand
ggucagaacuuauguagaa

SEQ ID NO: 1343764 - RNA, 19 nt, Homo sapiens
  misc_RNA (1)...(19): siRNA sense strand
gcaggcagaucuucaauuu

SEQ ID NO: 1343765 - RNA, 19 nt, Homo sapiens
  misc_RNA (1)...(19): siRNA sense strand
guggagacauuacauauua

SEQ ID NO: 1343766 - RNA, 19 nt, Homo sapiens
  misc_RNA (1)...(19): siRNA sense strand
gaaaagggcugaaagaauu

SEQ ID NO: 1343767 - RNA, 19 nt, Homo sapiens
  misc_RNA (1)...(19): siRNA sense strand
gaaagaacuucaggacaua

SEQ ID NO: 1343768 - RNA, 19 nt, Homo sapiens
  misc_RNA (1)...(19): siRNA sense strand
gaacagaagagggcuauua

SEQ ID NO: 1343769 - RNA, 19 nt, Homo sapiens
  misc_RNA (1)...(19): siRNA sense strand
gaacuuauguagaagauca

SEQ ID NO: 1343770 - RNA, 19 nt, Homo sapiens
  misc_RNA (1)...(19): siRNA sense strand
gaugaaagaugaugaagga

SEQ ID NO: 1343771 - RNA, 19 nt, Homo sapiens
  misc_RNA (1)...(19): siRNA sense strand
gggagaagcugcccuuaaa

SEQ ID NO: 1343772 - RNA, 19 nt, Homo sapiens
  misc_RNA (1)...(19): siRNA sense strand
caaauuagaugacauugga

SEQ ID NO: 1343773 - RNA, 19 nt, Homo sapiens
  misc_RNA (1)...(19): siRNA sense strand
ccaaagaaguugugaaguu

SEQ ID NO: 1343774 - RNA, 19 nt, Homo sapiens
  misc_RNA (1)...(19): siRNA sense strand
caggaaagcuucaguuuga

SEQ ID NO: 1343775 - RNA, 19 nt, Homo sapiens
  misc_RNA (1)...(19): siRNA sense strand
gaaggcaucucuuacaaau

SEQ ID NO: 1343776 - RNA, 19 nt, Homo sapiens
  misc_RNA (1)...(19): siRNA sense strand
gaugaaagaugaccaggaa

SEQ ID NO: 1343777 - RNA, 19 nt, Homo sapiens
  misc_RNA (1)...(19): siRNA sense strand
ugaaggaacuuacacguuu

SEQ ID NO: 1343778 - RNA, 19 nt, Homo sapiens
  misc_RNA (1)...(19): siRNA sense strand
gguacucaaucacuaauua

SEQ ID NO: 1343779 - RNA, 19 nt, Homo sapiens
  misc_RNA (1)...(19): siRNA sense strand
gaccuuaccuguacagaaa

SEQ ID NO: 1343780 - RNA, 19 nt, Homo sapiens
  misc_RNA (1)...(19): siRNA sense strand
gaagagggcuauuaugaag

SEQ ID NO: 1343781 - RNA, 19 nt, Homo sapiens
  misc_RNA (1)...(19): siRNA sense strand
ugaagaagauggagaagaa

SEQ ID NO: 1343782 - RNA, 19 nt, Homo sapiens
  misc_RNA (1)...(19): siRNA sense strand
gaagagaaacgcuuuguug

SEQ ID NO: 1343783 - RNA, 19 nt, Homo sapiens
  misc_RNA (1)...(19): siRNA sense strand
gaaaucaaaucaacugaca

SEQ ID NO: 1343784 - RNA, 19 nt, Homo sapiens
  misc_RNA (1)...(19): siRNA sense strand
gaagaaugguguggaaauu

SEQ ID NO: 1343785 - RNA, 19 nt, Homo sapiens
  misc_RNA (1)...(19): siRNA sense strand
ggagaaagauaccaaaugg

SEQ ID NO: 1343786 - RNA, 19 nt, Homo sapiens
  misc_RNA (1)...(19): siRNA sense strand
caaagugaguuacaacaaa

SEQ ID NO: 1343787 - RNA, 19 nt, Homo sapiens
  misc_RNA (1)...(19): siRNA sense strand
cuaaagaggugaaacaaga

SEQ ID NO: 1343788 - RNA, 19 nt, Homo sapiens
  misc_RNA (1)...(19): siRNA sense strand
gagaauggcucaugaaggu

SEQ ID NO: 1343789 - RNA, 19 nt, Homo sapiens
  misc_RNA (1)...(19): siRNA sense strand
gaaacaauacugagaacua

SEQ ID NO: 1343790 - RNA, 19 nt, Homo sapiens
  misc_RNA (1)...(19): siRNA sense strand
gcaaauaacucaggagaag

SEQ ID NO: 1343791 - RNA, 19 nt, Homo sapiens
  misc_RNA (1)...(19): siRNA sense strand
gcagagccacuaacaaaua

SEQ ID NO: 1343792 - RNA, 19 nt, Homo sapiens
  misc_RNA (1)...(19): siRNA sense strand
guauaaagauggcauugaa

SEQ ID NO: 1343793 - RNA, 19 nt, Homo sapiens
  misc_RNA (1)...(19): siRNA sense strand
caucaaacauggagaaaga

SEQ ID NO: 1343794 - RNA, 19 nt, Homo sapiens
  misc_RNA (1)...(19): siRNA sense strand
gaaggaaaaugguaucaua

SEQ ID NO: 1343795 - RNA, 19 nt, Homo sapiens
  misc_RNA (1)...(19): siRNA sense strand
gaacaagaaacaauacuga

SEQ ID NO: 1343796 - RNA, 19 nt, Homo sapiens
  misc_RNA (1)...(19): siRNA sense strand
caacauagcuggagaaacc

SEQ ID NO: 1343797 - RNA, 19 nt, Homo sapiens
  misc_RNA (1)...(19): siRNA sense strand
gaagagcgcuuugaaguac

SEQ ID NO: 1343798 - RNA, 19 nt, Homo sapiens
  misc_RNA (1)...(19): siRNA sense strand
gaauugauguccuguggaa

SEQ ID NO: 1343799 - RNA, 19 nt, Homo sapiens
  misc_RNA (1)...(19): siRNA sense strand
gaaagaauccagagccaaa

SEQ ID NO: 1343800 - RNA, 19 nt, Homo sapiens
  misc_RNA (1)...(19): siRNA sense strand
ggauacagauacaaaguga

SEQ ID NO: 1343801 - RNA, 19 nt, Homo sapiens
  misc_RNA (1)...(19): siRNA sense strand
gcagaucacagacagaaua

SEQ ID NO: 1343802 - RNA, 19 nt, Homo sapiens
  misc_RNA (1)...(19): siRNA sense strand
gaaaccaacuguaaucucu

SEQ ID NO: 1343803 - RNA, 19 nt, Homo sapiens
  misc_RNA (1)...(19): siRNA sense strand
ggacauagaaguuccagaa

SEQ ID NO: 1343804 - RNA, 19 nt, Homo sapiens
  misc_RNA (1)...(19): siRNA sense strand
ggauauccauuaccaaaga

SEQ ID NO: 1343805 - RNA, 19 nt, Homo sapiens
  misc_RNA (1)...(19): siRNA sense strand
caaagaaguugugaaguug

SEQ ID NO: 1343806 - RNA, 19 nt, Homo sapiens
  misc_RNA (1)...(19): siRNA sense strand
caucaggaauguucacuuu

SEQ ID NO: 1343807 - RNA, 19 nt, Homo sapiens
  misc_RNA (1)...(19): siRNA sense strand
gaauuagagugcauuguau

SEQ ID NO: 1343808 - RNA, 19 nt, Homo sapiens
  misc_RNA (1)...(19): siRNA sense strand
uaaagaagaugguacucaa

SEQ ID NO: 1343809 - RNA, 19 nt, Homo sapiens
  misc_RNA (1)...(19): siRNA sense strand
uguggaagcucgucauaua

SEQ ID NO: 1343810 - RNA, 19 nt, Homo sapiens
  misc_RNA (1)...(19): siRNA sense strand
gaaaugaaagucagagcua

SEQ ID NO: 1343811 - RNA, 19 nt, Homo sapiens
  misc_RNA (1)...(19): siRNA sense strand
caaauggacuuucuacaag

SEQ ID NO: 1343812 - RNA, 19 nt, Homo sapiens
  misc_RNA (1)...(19): siRNA sense strand
ggaaaugccuguuuaucca

SEQ ID NO: 1343813 - RNA, 19 nt, Homo sapiens
  misc_RNA (1)...(19): siRNA sense strand
acacaaauauguaguggaa

SEQ ID NO: 1343814 - RNA, 19 nt, Homo sapiens
  misc_RNA (1)...(19): siRNA sense strand
ggaagaugcuggaaauuac

SEQ ID NO: 1343815 - RNA, 19 nt, Homo sapiens
  misc_RNA (1)...(19): siRNA sense strand
ccaaagaguuaacugaaga

SEQ ID NO: 1343816 - RNA, 19 nt, Homo sapiens
  misc_RNA (1)...(19): siRNA sense strand
cggaagagcugcgcaguaa

SEQ ID NO: 1343817 - RNA, 19 nt, Homo sapiens
  misc_RNA (1)...(19): siRNA sense strand
uaaggaagaugcuggaaau

SEQ ID NO: 1343818 - RNA, 19 nt, Homo sapiens
  misc_RNA (1)...(19): siRNA sense strand
ucagggaccuauucaguaa

SEQ ID NO: 1343819 - RNA, 19 nt, Homo sapiens
  misc_RNA (1)...(19): siRNA sense strand
gcacggaugucaccugcaa

SEQ ID NO: 1343820 - RNA, 19 nt, Homo sapiens
  misc_RNA (1)...(19): siRNA sense strand
gagaugugguuaugacuga

SEQ ID NO: 1343821 - RNA, 19 nt, Homo sapiens
  misc_RNA (1)...(19): siRNA sense strand
caagaacaaauccaaguua

SEQ ID NO: 1343822 - RNA, 19 nt, Homo sapiens
  misc_RNA (1)...(19): siRNA sense strand
gagaaacuauggcuacuag

SEQ ID NO: 1343823 - RNA, 19 nt, Homo sapiens
  misc_RNA (1)...(19): siRNA sense strand
ggagaagacugcuguaacu

SEQ ID NO: 1343824 - RNA, 19 nt, Homo sapiens
  misc_RNA (1)...(19): siRNA sense strand
gcacauaucaucacagauc

SEQ ID NO: 1343825 - RNA, 19 nt, Homo sapiens
  misc_RNA (1)...(19): siRNA sense strand
ggaaacacauuaaggacau

SEQ ID NO: 1343826 - RNA, 19 nt, Homo sapiens
  misc_RNA (1)...(19): siRNA sense strand
gaaauuaagccaagugaca

SEQ ID NO: 1343827 - RNA, 19 nt, Homo sapiens
  misc_RNA (1)...(19): siRNA sense strand
gaugaaagacggccaagaa

SEQ ID NO: 1343828 - RNA, 19 nt, Homo sapiens
  misc_RNA (1)...(19): siRNA sense strand
guuaaagucuccuuggaaa

SEQ ID NO: 1343829 - RNA, 19 nt, Homo sapiens
  misc_RNA (1)...(19): siRNA sense strand
gagcucaagucucgaaaga

SEQ ID NO: 1343830 - RNA, 19 nt, Homo sapiens
  misc_RNA (1)...(19): siRNA sense strand
gaaagaauuacccaugaaa

SEQ ID NO: 1343831 - RNA, 19 nt, Homo sapiens
  misc_RNA (1)...(19): siRNA sense strand
gaaggaaucuacacugcau

SEQ ID NO: 1343832 - RNA, 19 nt, Homo sapiens
  misc_RNA (1)...(19): siRNA sense strand
gauuaugaguuacugauga

SEQ ID NO: 1343833 - RNA, 19 nt, Homo sapiens
  misc_RNA (1)...(19): siRNA sense strand
ugaagaagcugauuaugag

SEQ ID NO: 1343834 - RNA, 19 nt, Homo sapiens
  misc_RNA (1)...(19): siRNA sense strand
gagaaacgcuuuguugagu

SEQ ID NO: 1343835 - RNA, 19 nt, Homo sapiens
  misc_RNA (1)...(19): siRNA sense strand
gcaggugucagaagaauuu

SEQ ID NO: 1343836 - RNA, 19 nt, Homo sapiens
  misc_RNA (1)...(19): siRNA sense strand
gaaauuuacuacagaagag

SEQ ID NO: 1343837 - RNA, 19 nt, Homo sapiens
  misc_RNA (1)...(19): siRNA sense strand
ggaaauugccgaagcuuau

SEQ ID NO: 1343838 - RNA, 19 nt, Homo sapiens
  misc_RNA (1)...(19): siRNA sense strand
gaaauugagaugagugaaa

SEQ ID NO: 1343839 - RNA, 19 nt, Homo sapiens
  misc_RNA (1)...(19): siRNA sense strand
cauagaaguuccagaauca

SEQ ID NO: 1343840 - RNA, 19 nt, Homo sapiens
  misc_RNA (1)...(19): siRNA sense strand
agacaaacccgaauugaaa

SEQ ID NO: 1343841 - RNA, 19 nt, Homo sapiens
  misc_RNA (1)...(19): siRNA sense strand
ggaacaauuuacucucuga

SEQ ID NO: 1343842 - RNA, 19 nt, Homo sapiens
  misc_RNA (1)...(19): siRNA sense strand
gaaaucaagcccaguucua

SEQ ID NO: 1343843 - RNA, 19 nt, Homo sapiens
  misc_RNA (1)...(19): siRNA sense strand
gaaagacggccaagaagug

SEQ ID NO: 1343844 - RNA, 19 nt, Homo sapiens
  misc_RNA (1)...(19): siRNA sense strand
ccaagcaauugaucacuuu

SEQ ID NO: 1343845 - RNA, 19 nt, Homo sapiens
  misc_RNA (1)...(19): siRNA sense strand
gagaaggcauuacuaccaa

SEQ ID NO: 1343846 - RNA, 19 nt, Homo sapiens
  misc_RNA (1)...(19): siRNA sense strand
gaaaacaguuguaccuaaa

SEQ ID NO: 1343847 - RNA, 19 nt, Homo sapiens
  misc_RNA (1)...(19): siRNA sense strand
caagaaaugcuuuaucaga

SEQ ID NO: 1343848 - RNA, 19 nt, Homo sapiens
  misc_RNA (1)...(19): siRNA sense strand
gaaggaacuuacacguuug

SEQ ID NO: 1343849 - RNA, 19 nt, Homo sapiens
  misc_RNA (1)...(19): siRNA sense strand
aaacagcgacuagucauua

SEQ ID NO: 1343850 - RNA, 19 nt, Homo sapiens
  misc_RNA (1)...(19): siRNA sense strand
caagugagacuccaaguga

SEQ ID NO: 1343851 - RNA, 19 nt, Homo sapiens
  misc_RNA (1)...(19): siRNA sense strand
gaaguugugucuccugauc

SEQ ID NO: 1343852 - RNA, 19 nt, Homo sapiens
  misc_RNA (1)...(19): siRNA sense strand
gaagaagcgagccauguuu

SEQ ID NO: 1343853 - RNA, 19 nt, Homo sapiens
  misc_RNA (1)...(19): siRNA sense strand
ccaggaagcuguguuugaa

SEQ ID NO: 1343854 - RNA, 19 nt, Homo sapiens
  misc_RNA (1)...(19): siRNA sense strand
gaaacaacagaaaccauuu

SEQ ID NO: 1343855 - RNA, 19 nt, Homo sapiens
  misc_RNA (1)...(19): siRNA sense strand
gcaagcuggugauuucuau

SEQ ID NO: 1343856 - RNA, 19 nt, Homo sapiens
  misc_RNA (1)...(19): siRNA sense strand
cauccaaccugcucaagaa

SEQ ID NO: 1343857 - RNA, 19 nt, Homo sapiens
  misc_RNA (1)...(19): siRNA sense strand
gaagauugaagcccacuuu

SEQ ID NO: 1343858 - RNA, 19 nt, Homo sapiens
  misc_RNA (1)...(19): siRNA sense strand
gcucagaucucagaaucaa

SEQ ID NO: 1343859 - RNA, 19 nt, Homo sapiens
  misc_RNA (1)...(19): siRNA sense strand
gaacaagccuuaauuagga

SEQ ID NO: 1343860 - RNA, 19 nt, Homo sapiens
  misc_RNA (1)...(19): siRNA sense strand
gaaacaagaugcugacaaa

SEQ ID NO: 1343861 - RNA, 19 nt, Homo sapiens
  misc_RNA (1)...(19): siRNA sense strand
gaucaggaauuccauauuu

SEQ ID NO: 1343862 - RNA, 19 nt, Homo sapiens
  misc_RNA (1)...(19): siRNA sense strand
ggaagaaggugaucucuau

SEQ ID NO: 1343863 - RNA, 19 nt, Homo sapiens
  misc_RNA (1)...(19): siRNA sense strand
ggucagaacuuauguagaa

SEQ ID NO: 1343864 - RNA, 19 nt, Homo sapiens
  misc_RNA (1)...(19): siRNA sense strand
gcaggcagaucuucaauuu

SEQ ID NO: 1343865 - RNA, 19 nt, Homo sapiens
  misc_RNA (1)...(19): siRNA sense strand
guggagacauuacauauua

SEQ ID NO: 1343866 - RNA, 19 nt, Homo sapiens
  misc_RNA (1)...(19): siRNA sense strand
gaaaagggcugaaagaauu

SEQ ID NO: 1343867 - RNA, 19 nt, Homo sapiens
  misc_RNA (1)...(19): siRNA sense strand
gaaagaacuucaggacaua

SEQ ID NO: 1343868 - RNA, 19 nt, Homo sapiens
  misc_RNA (1)...(19): siRNA sense strand
gaacagaagagggcuauua

SEQ ID NO: 1343869 - RNA, 19 nt, Homo sapiens
  misc_RNA (1)...(19): siRNA sense strand
gaacuuauguagaagauca

SEQ ID NO: 1343870 - RNA, 19 nt, Homo sapiens
  misc_RNA (1)...(19): siRNA sense strand
gaugaaagaugaugaagga

SEQ ID NO: 1343871 - RNA, 19 nt, Homo sapiens
  misc_RNA (1)...(19): siRNA sense strand
gggagaagcugcccuuaaa

SEQ ID NO: 1343872 - RNA, 19 nt, Homo sapiens
  misc_RNA (1)...(19): siRNA sense strand
caaauuagaugacauugga

SEQ ID NO: 1343873 - RNA, 19 nt, Homo sapiens
  misc_RNA (1)...(19): siRNA sense strand
ccaaagaaguugugaaguu

SEQ ID NO: 1343874 - RNA, 19 nt, Homo sapiens
  misc_RNA (1)...(19): siRNA sense strand
caggaaagcuucaguuuga

SEQ ID NO: 1343875 - RNA, 19 nt, Homo sapiens
  misc_RNA (1)...(19): siRNA sense strand
gaaggcaucucuuacaaau

SEQ ID NO: 1343876 - RNA, 19 nt, Homo sapiens
  misc_RNA (1)...(19): siRNA sense strand
gaugaaagaugaccaggaa

SEQ ID NO: 1343877 - RNA, 19 nt, Homo sapiens
  misc_RNA (1)...(19): siRNA sense strand
ugaaggaacuuacacguuu

SEQ ID NO: 1343878 - RNA, 19 nt, Homo sapiens
  misc_RNA (1)...(19): siRNA sense strand
gguacucaaucacuaauua

SEQ ID NO: 1343879 - RNA, 19 nt, Homo sapiens
  misc_RNA (1)...(19): siRNA sense strand
gaccuuaccuguacagaaa

SEQ ID NO: 1343880 - RNA, 19 nt, Homo sapiens
  misc_RNA (1)...(19): siRNA sense strand
gaagagggcuauuaugaag

SEQ ID NO: 1343881 - RNA, 19 nt, Homo sapiens
  misc_RNA (1)...(19): siRNA sense strand
ugaagaagauggagaagaa

SEQ ID NO: 1343882 - RNA, 19 nt, Homo sapiens
  misc_RNA (1)...(19): siRNA sense strand
gaagagaaacgcuuuguug

SEQ ID NO: 1343883 - RNA, 19 nt, Homo sapiens
  misc_RNA (1)...(19): siRNA sense strand
gaaaucaaaucaacugaca

SEQ ID NO: 1343884 - RNA, 19 nt, Homo sapiens
  misc_RNA (1)...(19): siRNA sense strand
gaagaaugguguggaaauu

SEQ ID NO: 1343885 - RNA, 19 nt, Homo sapiens
  misc_RNA (1)...(19): siRNA sense strand
ggagaaagauaccaaaugg

SEQ ID NO: 1343886 - RNA, 19 nt, Homo sapiens
  misc_RNA (1)...(19): siRNA sense strand
caaagugaguuacaacaaa

SEQ ID NO: 1343887 - RNA, 19 nt, Homo sapiens
  misc_RNA (1)...(19): siRNA sense strand
cuaaagaggugaaacaaga

SEQ ID NO: 1343888 - RNA, 19 nt, Homo sapiens
  misc_RNA (1)...(19): siRNA sense strand
gagaauggcucaugaaggu

SEQ ID NO: 1343889 - RNA, 19 nt, Homo sapiens
  misc_RNA (1)...(19): siRNA sense strand
gaaacaauacugagaacua

SEQ ID NO: 1343890 - RNA, 19 nt, Homo sapiens
  misc_RNA (1)...(19): siRNA sense strand
gcaaauaacucaggagaag

SEQ ID NO: 1343891 - RNA, 19 nt, Homo sapiens
  misc_RNA (1)...(19): siRNA sense strand
gcagagccacuaacaaaua

SEQ ID NO: 1343892 - RNA, 19 nt, Homo sapiens
  misc_RNA (1)...(19): siRNA sense strand
guauaaagauggcauugaa

SEQ ID NO: 1343893 - RNA, 19 nt, Homo sapiens
  misc_RNA (1)...(19): siRNA sense strand
caucaaacauggagaaaga

SEQ ID NO: 1343894 - RNA, 19 nt, Homo sapiens
  misc_RNA (1)...(19): siRNA sense strand
gaaggaaaaugguaucaua

SEQ ID NO: 1343895 - RNA, 19 nt, Homo sapiens
  misc_RNA (1)...(19): siRNA sense strand
gaacaagaaacaauacuga

SEQ ID NO: 1343896 - RNA, 19 nt, Homo sapiens
  misc_RNA (1)...(19): siRNA sense strand
caacauagcuggagaaacc

SEQ ID NO: 1343897 - RNA, 19 nt, Homo sapiens
  misc_RNA (1)...(19): siRNA sense strand
gaagagcgcuuugaaguac

SEQ ID NO: 1343898 - RNA, 19 nt, Homo sapiens
  misc_RNA (1)...(19): siRNA sense strand
gaauugauguccuguggaa

SEQ ID NO: 1343899 - RNA, 19 nt, Homo sapiens
  misc_RNA (1)...(19): siRNA sense strand
gaaagaauccagagccaaa

SEQ ID NO: 1343900 - RNA, 19 nt, Homo sapiens
  misc_RNA (1)...(19): siRNA sense strand
ggauacagauacaaaguga

SEQ ID NO: 1343901 - RNA, 19 nt, Homo sapiens
  misc_RNA (1)...(19): siRNA sense strand
gcagaucacagacagaaua

SEQ ID NO: 1343902 - RNA, 19 nt, Homo sapiens
  misc_RNA (1)...(19): siRNA sense strand
gaaaccaacuguaaucucu

SEQ ID NO: 1343903 - RNA, 19 nt, Homo sapiens
  misc_RNA (1)...(19): siRNA sense strand
ggacauagaaguuccagaa

SEQ ID NO: 1343904 - RNA, 19 nt, Homo sapiens
  misc_RNA (1)...(19): siRNA sense strand
ggauauccauuaccaaaga

SEQ ID NO: 1343905 - RNA, 19 nt, Homo sapiens
  misc_RNA (1)...(19): siRNA sense strand
caaagaaguugugaaguug

SEQ ID NO: 1343906 - RNA, 19 nt, Homo sapiens
  misc_RNA (1)...(19): siRNA sense strand
caucaggaauguucacuuu

SEQ ID NO: 1343907 - RNA, 19 nt, Homo sapiens
  misc_RNA (1)...(19): siRNA sense strand
gaauuagagugcauuguau

SEQ ID NO: 1343908 - RNA, 19 nt, Homo sapiens
  misc_RNA (1)...(19): siRNA sense strand
uaaagaagaugguacucaa

SEQ ID NO: 1343909 - RNA, 19 nt, Homo sapiens
  misc_RNA (1)...(19): siRNA sense strand
uguggaagcucgucauaua

SEQ ID NO: 1343910 - RNA, 19 nt, Homo sapiens
  misc_RNA (1)...(19): siRNA sense strand
gaaaugaaagucagagcua

SEQ ID NO: 1343911 - RNA, 19 nt, Homo sapiens
  misc_RNA (1)...(19): siRNA sense strand
caaauggacuuucuacaag

SEQ ID NO: 1343912 - RNA, 19 nt, Homo sapiens
  misc_RNA (1)...(19): siRNA sense strand
ggaaaugccuguuuaucca

SEQ ID NO: 1343913 - RNA, 19 nt, Homo sapiens
  misc_RNA (1)...(19): siRNA sense strand
acacaaauauguaguggaa

SEQ ID NO: 1343914 - RNA, 19 nt, Homo sapiens
  misc_RNA (1)...(19): siRNA sense strand
ggaagaugcuggaaauuac

SEQ ID NO: 1343915 - RNA, 19 nt, Homo sapiens
  misc_RNA (1)...(19): siRNA sense strand
ccaaagaguuaacugaaga

SEQ ID NO: 1343916 - RNA, 19 nt, Homo sapiens
  misc_RNA (1)...(19): siRNA sense strand
cggaagagcugcgcaguaa

SEQ ID NO: 1343917 - RNA, 19 nt, Homo sapiens
  misc_RNA (1)...(19): siRNA sense strand
uaaggaagaugcuggaaau

SEQ ID NO: 1343918 - RNA, 19 nt, Homo sapiens
  misc_RNA (1)...(19): siRNA sense strand
ucagggaccuauucaguaa

SEQ ID NO: 1343919 - RNA, 19 nt, Homo sapiens
  misc_RNA (1)...(19): siRNA sense strand
gcacggaugucaccugcaa

SEQ ID NO: 1343920 - RNA, 19 nt, Homo sapiens
  misc_RNA (1)...(19): siRNA sense strand
gagaugugguuaugacuga

SEQ ID NO: 1343921 - RNA, 19 nt, Homo sapiens
  misc_RNA (1)...(19): siRNA sense strand
caagaacaaauccaaguua

SEQ ID NO: 1343922 - RNA, 19 nt, Homo sapiens
  misc_RNA (1)...(19): siRNA sense strand
gagaaacuauggcuacuag

SEQ ID NO: 1343923 - RNA, 19 nt, Homo sapiens
  misc_RNA (1)...(19): siRNA sense strand
ggagaagacugcuguaacu

SEQ ID NO: 1343924 - RNA, 19 nt, Homo sapiens
  misc_RNA (1)...(19): siRNA sense strand
gcacauaucaucacagauc

SEQ ID NO: 1343925 - RNA, 19 nt, Homo sapiens
  misc_RNA (1)...(19): siRNA sense strand
ggaaacacauuaaggacau

SEQ ID NO: 1343926 - RNA, 19 nt, Homo sapiens
  misc_RNA (1)...(19): siRNA sense strand
gaaauuaagccaagugaca

SEQ ID NO: 1343927 - RNA, 19 nt, Homo sapiens
  misc_RNA (1)...(19): siRNA sense strand
gaugaaagacggccaagaa

SEQ ID NO: 1343928 - RNA, 19 nt, Homo sapiens
  misc_RNA (1)...(19): siRNA sense strand
guuaaagucuccuuggaaa

SEQ ID NO: 1343929 - RNA, 19 nt, Homo sapiens
  misc_RNA (1)...(19): siRNA sense strand
gagcucaagucucgaaaga

SEQ ID NO: 1343930 - RNA, 19 nt, Homo sapiens
  misc_RNA (1)...(19): siRNA sense strand
gaaagaauuacccaugaaa

SEQ ID NO: 1343931 - RNA, 19 nt, Homo sapiens
  misc_RNA (1)...(19): siRNA sense strand
gaaggaaucuacacugcau

SEQ ID NO: 1343932 - RNA, 19 nt, Homo sapiens
  misc_RNA (1)...(19): siRNA sense strand
gauuaugaguuacugauga

SEQ ID NO: 1343933 - RNA, 19 nt, Homo sapiens
  misc_RNA (1)...(19): siRNA sense strand
ugaagaagcugauuaugag

SEQ ID NO: 1343934 - RNA, 19 nt, Homo sapiens
  misc_RNA (1)...(19): siRNA sense strand
gagaaacgcuuuguugagu

SEQ ID NO: 1343935 - RNA, 19 nt, Homo sapiens
  misc_RNA (1)...(19): siRNA sense strand
gcaggugucagaagaauuu

SEQ ID NO: 1343936 - RNA, 19 nt, Homo sapiens
  misc_RNA (1)...(19): siRNA sense strand
gaaauuuacuacagaagag

SEQ ID NO: 1343937 - RNA, 19 nt, Homo sapiens
  misc_RNA (1)...(19): siRNA sense strand
ggaaauugccgaagcuuau

SEQ ID NO: 1343938 - RNA, 19 nt, Homo sapiens
  misc_RNA (1)...(19): siRNA sense strand
gaaauugagaugagugaaa

SEQ ID NO: 1343939 - RNA, 19 nt, Homo sapiens
  misc_RNA (1)...(19): siRNA sense strand
cauagaaguuccagaauca

SEQ ID NO: 1343940 - RNA, 19 nt, Homo sapiens
  misc_RNA (1)...(19): siRNA sense strand
agacaaacccgaauugaaa

SEQ ID NO: 1343941 - RNA, 19 nt, Homo sapiens
  misc_RNA (1)...(19): siRNA sense strand
ggaacaauuuacucucuga

SEQ ID NO: 1343942 - RNA, 19 nt, Homo sapiens
  misc_RNA (1)...(19): siRNA sense strand
gaaaucaagcccaguucua

SEQ ID NO: 1343943 - RNA, 19 nt, Homo sapiens
  misc_RNA (1)...(19): siRNA sense strand
gaaagacggccaagaagug

SEQ ID NO: 1343944 - RNA, 19 nt, Homo sapiens
  misc_RNA (1)...(19): siRNA sense strand
ccaagcaauugaucacuuu

SEQ ID NO: 1343945 - RNA, 19 nt, Homo sapiens
  misc_RNA (1)...(19): siRNA sense strand
gagaaggcauuacuaccaa

SEQ ID NO: 1343946 - RNA, 19 nt, Homo sapiens
  misc_RNA (1)...(19): siRNA sense strand
gaaaacaguuguaccuaaa

SEQ ID NO: 1343947 - RNA, 19 nt, Homo sapiens
  misc_RNA (1)...(19): siRNA sense strand
caagaaaugcuuuaucaga

SEQ ID NO: 1343948 - RNA, 19 nt, Homo sapiens
  misc_RNA (1)...(19): siRNA sense strand
gaaggaacuuacacguuug

SEQ ID NO: 1343949 - RNA, 19 nt, Homo sapiens
  misc_RNA (1)...(19): siRNA sense strand
aaacagcgacuagucauua

SEQ ID NO: 1343950 - RNA, 19 nt, Homo sapiens
  misc_RNA (1)...(19): siRNA sense strand
caagugagacuccaaguga

SEQ ID NO: 1343951 - RNA, 19 nt, Homo sapiens
  misc_RNA (1)...(19): siRNA sense strand
gaaguugugucuccugauc

SEQ ID NO: 1343952 - RNA, 19 nt, Homo sapiens
  misc_RNA (1)...(19): siRNA sense strand
gaagaagcgagccauguuu

SEQ ID NO: 1343953 - RNA, 19 nt, Homo sapiens
  misc_RNA (1)...(19): siRNA sense strand
ccaggaagcuguguuugaa

SEQ ID NO: 1343954 - RNA, 19 nt, Homo sapiens
  misc_RNA (1)...(19): siRNA sense strand
gaaacaacagaaaccauuu

SEQ ID NO: 1343955 - RNA, 19 nt, Homo sapiens
  misc_RNA (1)...(19): siRNA sense strand
gcaagcuggugauuucuau

SEQ ID NO: 1343956 - RNA, 19 nt, Homo sapiens
  misc_RNA (1)...(19): siRNA sense strand
cauccaaccugcucaagaa

SEQ ID NO: 1343957 - RNA, 19 nt, Homo sapiens
  misc_RNA (1)...(19): siRNA sense strand
gaagauugaagcccacuuu

SEQ ID NO: 1343958 - RNA, 19 nt, Homo sapiens
  misc_RNA (1)...(19): siRNA sense strand
gcucagaucucagaaucaa

SEQ ID NO: 1343959 - RNA, 19 nt, Homo sapiens
  misc_RNA (1)...(19): siRNA sense strand
gaacaagccuuaauuagga

SEQ ID NO: 1343960 - RNA, 19 nt, Homo sapiens
  misc_RNA (1)...(19): siRNA sense strand
gaaacaagaugcugacaaa

SEQ ID NO: 1343961 - RNA, 19 nt, Homo sapiens
  misc_RNA (1)...(19): siRNA sense strand
gaucaggaauuccauauuu

SEQ ID NO: 1343962 - RNA, 19 nt, Homo sapiens
  misc_RNA (1)...(19): siRNA sense strand
ggaagaaggugaucucuau

SEQ ID NO: 1343963 - RNA, 19 nt, Homo sapiens
  misc_RNA (1)...(19): siRNA sense strand
ggucagaacuuauguagaa

SEQ ID NO: 1343964 - RNA, 19 nt, Homo sapiens
  misc_RNA (1)...(19): siRNA sense strand
gcaggcagaucuucaauuu

SEQ ID NO: 1343965 - RNA, 19 nt, Homo sapiens
  misc_RNA (1)...(19): siRNA sense strand
guggagacauuacauauua

SEQ ID NO: 1343966 - RNA, 19 nt, Homo sapiens
  misc_RNA (1)...(19): siRNA sense strand
gaaaagggcugaaagaauu

SEQ ID NO: 1343967 - RNA, 19 nt, Homo sapiens
  misc_RNA (1)...(19): siRNA sense strand
gaaagaacuucaggacaua

SEQ ID NO: 1343968 - RNA, 19 nt, Homo sapiens
  misc_RNA (1)...(19): siRNA sense strand
gaacagaagagggcuauua

SEQ ID NO: 1343969 - RNA, 19 nt, Homo sapiens
  misc_RNA (1)...(19): siRNA sense strand
gaacuuauguagaagauca

SEQ ID NO: 1343970 - RNA, 19 nt, Homo sapiens
  misc_RNA (1)...(19): siRNA sense strand
gaugaaagaugaugaagga

SEQ ID NO: 1343971 - RNA, 19 nt, Homo sapiens
  misc_RNA (1)...(19): siRNA sense strand
gggagaagcugcccuuaaa

SEQ ID NO: 1343972 - RNA, 19 nt, Homo sapiens
  misc_RNA (1)...(19): siRNA sense strand
caaauuagaugacauugga

SEQ ID NO: 1343973 - RNA, 19 nt, Homo sapiens
  misc_RNA (1)...(19): siRNA sense strand
ccaaagaaguugugaaguu

SEQ ID NO: 1343974 - RNA, 19 nt, Homo sapiens
  misc_RNA (1)...(19): siRNA sense strand
caggaaagcuucaguuuga

SEQ ID NO: 1343975 - RNA, 19 nt, Homo sapiens
  misc_RNA (1)...(19): siRNA sense strand
gaaggcaucucuuacaaau

SEQ ID NO: 1343976 - RNA, 19 nt, Homo sapiens
  misc_RNA (1)...(19): siRNA sense strand
gaugaaagaugaccaggaa

SEQ ID NO: 1343977 - RNA, 19 nt, Homo sapiens
  misc_RNA (1)...(19): siRNA sense strand
ugaaggaacuuacacguuu

SEQ ID NO: 1343978 - RNA, 19 nt, Homo sapiens
  misc_RNA (1)...(19): siRNA sense strand
gguacucaaucacuaauua

SEQ ID NO: 1343979 - RNA, 19 nt, Homo sapiens
  misc_RNA (1)...(19): siRNA sense strand
gaccuuaccuguacagaaa

SEQ ID NO: 1343980 - RNA, 19 nt, Homo sapiens
  misc_RNA (1)...(19): siRNA sense strand
gaagagggcuauuaugaag

SEQ ID NO: 1343981 - RNA, 19 nt, Homo sapiens
  misc_RNA (1)...(19): siRNA sense strand
ugaagaagauggagaagaa

SEQ ID NO: 1343982 - RNA, 19 nt, Homo sapiens
  misc_RNA (1)...(19): siRNA sense strand
gaagagaaacgcuuuguug

SEQ ID NO: 1343983 - RNA, 19 nt, Homo sapiens
  misc_RNA (1)...(19): siRNA sense strand
gaaaucaaaucaacugaca

SEQ ID NO: 1343984 - RNA, 19 nt, Homo sapiens
  misc_RNA (1)...(19): siRNA sense strand
gaagaaugguguggaaauu

SEQ ID NO: 1343985 - RNA, 19 nt, Homo sapiens
  misc_RNA (1)...(19): siRNA sense strand
ggagaaagauaccaaaugg

SEQ ID NO: 1343986 - RNA, 19 nt, Homo sapiens
  misc_RNA (1)...(19): siRNA sense strand
caaagugaguuacaacaaa

SEQ ID NO: 1343987 - RNA, 19 nt, Homo sapiens
  misc_RNA (1)...(19): siRNA sense strand
cuaaagaggugaaacaaga

SEQ ID NO: 1343988 - RNA, 19 nt, Homo sapiens
  misc_RNA (1)...(19): siRNA sense strand
gagaauggcucaugaaggu

SEQ ID NO: 1343989 - RNA, 19 nt, Homo sapiens
  misc_RNA (1)...(19): siRNA sense strand
gaaacaauacugagaacua

SEQ ID NO: 1343990 - RNA, 19 nt, Homo sapiens
  misc_RNA (1)...(19): siRNA sense strand
gcaaauaacucaggagaag

SEQ ID NO: 1343991 - RNA, 19 nt, Homo sapiens
  misc_RNA (1)...(19): siRNA sense strand
gcagagccacuaacaaaua

SEQ ID NO: 1343992 - RNA, 19 nt, Homo sapiens
  misc_RNA (1)...(19): siRNA sense strand
guauaaagauggcauugaa

SEQ ID NO: 1343993 - RNA, 19 nt, Homo sapiens
  misc_RNA (1)...(19): siRNA sense strand
caucaaacauggagaaaga

SEQ ID NO: 1343994 - RNA, 19 nt, Homo sapiens
  misc_RNA (1)...(19): siRNA sense strand
gaaggaaaaugguaucaua

SEQ ID NO: 1343995 - RNA, 19 nt, Homo sapiens
  misc_RNA (1)...(19): siRNA sense strand
gaacaagaaacaauacuga

SEQ ID NO: 1343996 - RNA, 19 nt, Homo sapiens
  misc_RNA (1)...(19): siRNA sense strand
caacauagcuggagaaacc

SEQ ID NO: 1343997 - RNA, 19 nt, Homo sapiens
  misc_RNA (1)...(19): siRNA sense strand
gaagagcgcuuugaaguac

SEQ ID NO: 1343998 - RNA, 19 nt, Homo sapiens
  misc_RNA (1)...(19): siRNA sense strand
gaauugauguccuguggaa

SEQ ID NO: 1343999 - RNA, 19 nt, Homo sapiens
  misc_RNA (1)...(19): siRNA sense strand
gaaagaauccagagccaaa

SEQ ID NO: 1344000 - RNA, 19 nt, Homo sapiens
  misc_RNA (1)...(19): siRNA sense strand
ggauacagauacaaaguga

SEQ ID NO: 1344001 - RNA, 19 nt, Homo sapiens
  misc_RNA (1)...(19): siRNA sense strand
gcagaucacagacagaaua

SEQ ID NO: 1344002 - RNA, 19 nt, Homo sapiens
  misc_RNA (1)...(19): siRNA sense strand
gaaaccaacuguaaucucu

SEQ ID NO: 1344003 - RNA, 19 nt, Homo sapiens
  misc_RNA (1)...(19): siRNA sense strand
ggacauagaaguuccagaa

SEQ ID NO: 1344004 - RNA, 19 nt, Homo sapiens
  misc_RNA (1)...(19): siRNA sense strand
ggauauccauuaccaaaga

SEQ ID NO: 1344005 - RNA, 19 nt, Homo sapiens
  misc_RNA (1)...(19): siRNA sense strand
caaagaaguugugaaguug

SEQ ID NO: 1344006 - RNA, 19 nt, Homo sapiens
  misc_RNA (1)...(19): siRNA sense strand
caucaggaauguucacuuu

SEQ ID NO: 1344007 - RNA, 19 nt, Homo sapiens
  misc_RNA (1)...(19): siRNA sense strand
gaauuagagugcauuguau

SEQ ID NO: 1344008 - RNA, 19 nt, Homo sapiens
  misc_RNA (1)...(19): siRNA sense strand
uaaagaagaugguacucaa

SEQ ID NO: 1344009 - RNA, 19 nt, Homo sapiens
  misc_RNA (1)...(19): siRNA sense strand
uguggaagcucgucauaua

SEQ ID NO: 1344010 - RNA, 19 nt, Homo sapiens
  misc_RNA (1)...(19): siRNA sense strand
gaaaugaaagucagagcua

SEQ ID NO: 1344011 - RNA, 19 nt, Homo sapiens
  misc_RNA (1)...(19): siRNA sense strand
caaauggacuuucuacaag

SEQ ID NO: 1344012 - RNA, 19 nt, Homo sapiens
  misc_RNA (1)...(19): siRNA sense strand
ggaaaugccuguuuaucca

SEQ ID NO: 1344013 - RNA, 19 nt, Homo sapiens
  misc_RNA (1)...(19): siRNA sense strand
acacaaauauguaguggaa

SEQ ID NO: 1344014 - RNA, 19 nt, Homo sapiens
  misc_RNA (1)...(19): siRNA sense strand
ggaagaugcuggaaauuac

SEQ ID NO: 1344015 - RNA, 19 nt, Homo sapiens
  misc_RNA (1)...(19): siRNA sense strand
ccaaagaguuaacugaaga

SEQ ID NO: 1344016 - RNA, 19 nt, Homo sapiens
  misc_RNA (1)...(19): siRNA sense strand
cggaagagcugcgcaguaa

SEQ ID NO: 1344017 - RNA, 19 nt, Homo sapiens
  misc_RNA (1)...(19): siRNA sense strand
uaaggaagaugcuggaaau

SEQ ID NO: 1344018 - RNA, 19 nt, Homo sapiens
  misc_RNA (1)...(19): siRNA sense strand
ucagggaccuauucaguaa

SEQ ID NO: 1344019 - RNA, 19 nt, Homo sapiens
  misc_RNA (1)...(19): siRNA sense strand
gcacggaugucaccugcaa

SEQ ID NO: 1344020 - RNA, 19 nt, Homo sapiens
  misc_RNA (1)...(19): siRNA sense strand
gagaugugguuaugacuga

SEQ ID NO: 1344021 - RNA, 19 nt, Homo sapiens
  misc_RNA (1)...(19): siRNA sense strand
caagaacaaauccaaguua

SEQ ID NO: 1344022 - RNA, 19 nt, Homo sapiens
  misc_RNA (1)...(19): siRNA sense strand
gagaaacuauggcuacuag

SEQ ID NO: 1344023 - RNA, 19 nt, Homo sapiens
  misc_RNA (1)...(19): siRNA sense strand
ggagaagacugcuguaacu

SEQ ID NO: 1344024 - RNA, 19 nt, Homo sapiens
  misc_RNA (1)...(19): siRNA sense strand
gcacauaucaucacagauc

SEQ ID NO: 1344025 - RNA, 19 nt, Homo sapiens
  misc_RNA (1)...(19): siRNA sense strand
ggaaacacauuaaggacau

SEQ ID NO: 1344026 - RNA, 19 nt, Homo sapiens
  misc_RNA (1)...(19): siRNA sense strand
gaaauuaagccaagugaca

SEQ ID NO: 1344027 - RNA, 19 nt, Homo sapiens
  misc_RNA (1)...(19): siRNA sense strand
gaugaaagacggccaagaa

SEQ ID NO: 1344028 - RNA, 19 nt, Homo sapiens
  misc_RNA (1)...(19): siRNA sense strand
guuaaagucuccuuggaaa

SEQ ID NO: 1344029 - RNA, 19 nt, Homo sapiens
  misc_RNA (1)...(19): siRNA sense strand
gagcucaagucucgaaaga

SEQ ID NO: 1344030 - RNA, 19 nt, Homo sapiens
  misc_RNA (1)...(19): siRNA sense strand
gaaagaauuacccaugaaa

SEQ ID NO: 1344031 - RNA, 19 nt, Homo sapiens
  misc_RNA (1)...(19): siRNA sense strand
gaaggaaucuacacugcau

SEQ ID NO: 1344032 - RNA, 19 nt, Homo sapiens
  misc_RNA (1)...(19): siRNA sense strand
gauuaugaguuacugauga

SEQ ID NO: 1344033 - RNA, 19 nt, Homo sapiens
  misc_RNA (1)...(19): siRNA sense strand
ugaagaagcugauuaugag

SEQ ID NO: 1344034 - RNA, 19 nt, Homo sapiens
  misc_RNA (1)...(19): siRNA sense strand
gagaaacgcuuuguugagu

SEQ ID NO: 1344035 - RNA, 19 nt, Homo sapiens
  misc_RNA (1)...(19): siRNA sense strand
gcaggugucagaagaauuu

SEQ ID NO: 1344036 - RNA, 19 nt, Homo sapiens
  misc_RNA (1)...(19): siRNA sense strand
gaaauuuacuacagaagag

SEQ ID NO: 1344037 - RNA, 19 nt, Homo sapiens
  misc_RNA (1)...(19): siRNA sense strand
ggaaauugccgaagcuuau

SEQ ID NO: 1344038 - RNA, 19 nt, Homo sapiens
  misc_RNA (1)...(19): siRNA sense strand
gaaauugagaugagugaaa

SEQ ID NO: 1344039 - RNA, 19 nt, Homo sapiens
  misc_RNA (1)...(19): siRNA sense strand
cauagaaguuccagaauca

SEQ ID NO: 1344040 - RNA, 19 nt, Homo sapiens
  misc_RNA (1)...(19): siRNA sense strand
agacaaacccgaauugaaa

SEQ ID NO: 1344041 - RNA, 19 nt, Homo sapiens
  misc_RNA (1)...(19): siRNA sense strand
ggaacaauuuacucucuga

SEQ ID NO: 1344042 - RNA, 19 nt, Homo sapiens
  misc_RNA (1)...(19): siRNA sense strand
gaaaucaagcccaguucua

SEQ ID NO: 1344043 - RNA, 19 nt, Homo sapiens
  misc_RNA (1)...(19): siRNA sense strand
gaaagacggccaagaagug

SEQ ID NO: 1344044 - RNA, 19 nt, Homo sapiens
  misc_RNA (1)...(19): siRNA sense strand
ccaagcaauugaucacuuu

SEQ ID NO: 1344045 - RNA, 19 nt, Homo sapiens
  misc_RNA (1)...(19): siRNA sense strand
gagaaggcauuacuaccaa

SEQ ID NO: 1344046 - RNA, 19 nt, Homo sapiens
  misc_RNA (1)...(19): siRNA sense strand
gaaaacaguuguaccuaaa

SEQ ID NO: 1344047 - RNA, 19 nt, Homo sapiens
  misc_RNA (1)...(19): siRNA sense strand
caagaaaugcuuuaucaga

SEQ ID NO: 1344048 - RNA, 19 nt, Homo sapiens
  misc_RNA (1)...(19): siRNA sense strand
gaaggaacuuacacguuug

SEQ ID NO: 1344049 - RNA, 19 nt, Homo sapiens
  misc_RNA (1)...(19): siRNA sense strand
aaacagcgacuagucauua

SEQ ID NO: 1344050 - RNA, 19 nt, Homo sapiens
  misc_RNA (1)...(19): siRNA sense strand
caagugagacuccaaguga

SEQ ID NO: 1344051 - RNA, 19 nt, Homo sapiens
  misc_RNA (1)...(19): siRNA sense strand
gaaguugugucuccugauc

SEQ ID NO: 1344052 - RNA, 19 nt, Homo sapiens
  misc_RNA (1)...(19): siRNA sense strand
gaagaagcgagccauguuu

SEQ ID NO: 1344053 - RNA, 19 nt, Homo sapiens
  misc_RNA (1)...(19): siRNA sense strand
ccaggaagcuguguuugaa

SEQ ID NO: 1344054 - RNA, 19 nt, Homo sapiens
  misc_RNA (1)...(19): siRNA sense strand
gaaacaacagaaaccauuu

SEQ ID NO: 1344055 - RNA, 19 nt, Homo sapiens
  misc_RNA (1)...(19): siRNA sense strand
gcaagcuggugauuucuau

SEQ ID NO: 1344056 - RNA, 19 nt, Homo sapiens
  misc_RNA (1)...(19): siRNA sense strand
cauccaaccugcucaagaa

SEQ ID NO: 1344057 - RNA, 19 nt, Homo sapiens
  misc_RNA (1)...(19): siRNA sense strand
gaagauugaagcccacuuu

SEQ ID NO: 1344058 - RNA, 19 nt, Homo sapiens
  misc_RNA (1)...(19): siRNA sense strand
gcucagaucucagaaucaa

SEQ ID NO: 1344059 - RNA, 19 nt, Homo sapiens
  misc_RNA (1)...(19): siRNA sense strand
gaacaagccuuaauuagga

SEQ ID NO: 1344060 - RNA, 19 nt, Homo sapiens
  misc_RNA (1)...(19): siRNA sense strand
gaaacaagaugcugacaaa

SEQ ID NO: 1344061 - RNA, 19 nt, Homo sapiens
  misc_RNA (1)...(19): siRNA sense strand
gaucaggaauuccauauuu

SEQ ID NO: 1344062 - RNA, 19 nt, Homo sapiens
  misc_RNA (1)...(19): siRNA sense strand
ggaagaaggugaucucuau

SEQ ID NO: 1344063 - RNA, 19 nt, Homo sapiens
  misc_RNA (1)...(19): siRNA sense strand
ggucagaacuuauguagaa

SEQ ID NO: 1344064 - RNA, 19 nt, Homo sapiens
  misc_RNA (1)...(19): siRNA sense strand
gcaggcagaucuucaauuu

SEQ ID NO: 1344065 - RNA, 19 nt, Homo sapiens
  misc_RNA (1)...(19): siRNA sense strand
guggagacauuacauauua

SEQ ID NO: 1344066 - RNA, 19 nt, Homo sapiens
  misc_RNA (1)...(19): siRNA sense strand
gaaaagggcugaaagaauu

SEQ ID NO: 1344067 - RNA, 19 nt, Homo sapiens
  misc_RNA (1)...(19): siRNA sense strand
gaaagaacuucaggacaua

SEQ ID NO: 1344068 - RNA, 19 nt, Homo sapiens
  misc_RNA (1)...(19): siRNA sense strand
gaacagaagagggcuauua

SEQ ID NO: 1344069 - RNA, 19 nt, Homo sapiens
  misc_RNA (1)...(19): siRNA sense strand
gaacuuauguagaagauca

SEQ ID NO: 1344070 - RNA, 19 nt, Homo sapiens
  misc_RNA (1)...(19): siRNA sense strand
gaugaaagaugaugaagga

SEQ ID NO: 1344071 - RNA, 19 nt, Homo sapiens
  misc_RNA (1)...(19): siRNA sense strand
gggagaagcugcccuuaaa

SEQ ID NO: 1344072 - RNA, 19 nt, Homo sapiens
  misc_RNA (1)...(19): siRNA sense strand
caaauuagaugacauugga

SEQ ID NO: 1344073 - RNA, 19 nt, Homo sapiens
  misc_RNA (1)...(19): siRNA sense strand
ccaaagaaguugugaaguu

SEQ ID NO: 1344074 - RNA, 19 nt, Homo sapiens
  misc_RNA (1)...(19): siRNA sense strand
caggaaagcuucaguuuga

SEQ ID NO: 1344075 - RNA, 19 nt, Homo sapiens
  misc_RNA (1)...(19): siRNA sense strand
gaaggcaucucuuacaaau

SEQ ID NO: 1344076 - RNA, 19 nt, Homo sapiens
  misc_RNA (1)...(19): siRNA sense strand
gaugaaagaugaccaggaa

SEQ ID NO: 1344077 - RNA, 19 nt, Homo sapiens
  misc_RNA (1)...(19): siRNA sense strand
ugaaggaacuuacacguuu

SEQ ID NO: 1344078 - RNA, 19 nt, Homo sapiens
  misc_RNA (1)...(19): siRNA sense strand
gguacucaaucacuaauua

SEQ ID NO: 1344079 - RNA, 19 nt, Homo sapiens
  misc_RNA (1)...(19): siRNA sense strand
gaccuuaccuguacagaaa

SEQ ID NO: 1344080 - RNA, 19 nt, Homo sapiens
  misc_RNA (1)...(19): siRNA sense strand
gaagagggcuauuaugaag

SEQ ID NO: 1344081 - RNA, 19 nt, Homo sapiens
  misc_RNA (1)...(19): siRNA sense strand
ugaagaagauggagaagaa

SEQ ID NO: 1344082 - RNA, 19 nt, Homo sapiens
  misc_RNA (1)...(19): siRNA sense strand
gaagagaaacgcuuuguug

SEQ ID NO: 1344083 - RNA, 19 nt, Homo sapiens
  misc_RNA (1)...(19): siRNA sense strand
gaaaucaaaucaacugaca

SEQ ID NO: 1344084 - RNA, 19 nt, Homo sapiens
  misc_RNA (1)...(19): siRNA sense strand
gaagaaugguguggaaauu

SEQ ID NO: 1344085 - RNA, 19 nt, Homo sapiens
  misc_RNA (1)...(19): siRNA sense strand
ggagaaagauaccaaaugg

SEQ ID NO: 1344086 - RNA, 19 nt, Homo sapiens
  misc_RNA (1)...(19): siRNA sense strand
caaagugaguuacaacaaa

SEQ ID NO: 1344087 - RNA, 19 nt, Homo sapiens
  misc_RNA (1)...(19): siRNA sense strand
cuaaagaggugaaacaaga

SEQ ID NO: 1344088 - RNA, 19 nt, Homo sapiens
  misc_RNA (1)...(19): siRNA sense strand
gagaauggcucaugaaggu

SEQ ID NO: 1344089 - RNA, 19 nt, Homo sapiens
  misc_RNA (1)...(19): siRNA sense strand
gaaacaauacugagaacua

SEQ ID NO: 1344090 - RNA, 19 nt, Homo sapiens
  misc_RNA (1)...(19): siRNA sense strand
gcaaauaacucaggagaag

SEQ ID NO: 1344091 - RNA, 19 nt, Homo sapiens
  misc_RNA (1)...(19): siRNA sense strand
gcagagccacuaacaaaua

SEQ ID NO: 1344092 - RNA, 19 nt, Homo sapiens
  misc_RNA (1)...(19): siRNA sense strand
guauaaagauggcauugaa

SEQ ID NO: 1344093 - RNA, 19 nt, Homo sapiens
  misc_RNA (1)...(19): siRNA sense strand
caucaaacauggagaaaga

SEQ ID NO: 1344094 - RNA, 19 nt, Homo sapiens
  misc_RNA (1)...(19): siRNA sense strand
gaaggaaaaugguaucaua

SEQ ID NO: 1344095 - RNA, 19 nt, Homo sapiens
  misc_RNA (1)...(19): siRNA sense strand
gaacaagaaacaauacuga

SEQ ID NO: 1344096 - RNA, 19 nt, Homo sapiens
  misc_RNA (1)...(19): siRNA sense strand
caacauagcuggagaaacc

SEQ ID NO: 1344097 - RNA, 19 nt, Homo sapiens
  misc_RNA (1)...(19): siRNA sense strand
gaagagcgcuuugaaguac

SEQ ID NO: 1344098 - RNA, 19 nt, Homo sapiens
  misc_RNA (1)...(19): siRNA sense strand
gaauugauguccuguggaa

SEQ ID NO: 1344099 - RNA, 19 nt, Homo sapiens
  misc_RNA (1)...(19): siRNA sense strand
gaaagaauccagagccaaa

SEQ ID NO: 1344100 - RNA, 19 nt, Homo sapiens
  misc_RNA (1)...(19): siRNA sense strand
ggauacagauacaaaguga

SEQ ID NO: 1344101 - RNA, 19 nt, Homo sapiens
  misc_RNA (1)...(19): siRNA sense strand
gcagaucacagacagaaua

SEQ ID NO: 1344102 - RNA, 19 nt, Homo sapiens
  misc_RNA (1)...(19): siRNA sense strand
gaaaccaacuguaaucucu

SEQ ID NO: 1344103 - RNA, 19 nt, Homo sapiens
  misc_RNA (1)...(19): siRNA sense strand
ggacauagaaguuccagaa

SEQ ID NO: 1344104 - RNA, 19 nt, Homo sapiens
  misc_RNA (1)...(19): siRNA sense strand
ggauauccauuaccaaaga

SEQ ID NO: 1344105 - RNA, 19 nt, Homo sapiens
  misc_RNA (1)...(19): siRNA sense strand
caaagaaguugugaaguug

SEQ ID NO: 1344106 - RNA, 19 nt, Homo sapiens
  misc_RNA (1)...(19): siRNA sense strand
caucaggaauguucacuuu

SEQ ID NO: 1344107 - RNA, 19 nt, Homo sapiens
  misc_RNA (1)...(19): siRNA sense strand
gaauuagagugcauuguau

SEQ ID NO: 1344108 - RNA, 19 nt, Homo sapiens
  misc_RNA (1)...(19): siRNA sense strand
uaaagaagaugguacucaa

SEQ ID NO: 1344109 - RNA, 19 nt, Homo sapiens
  misc_RNA (1)...(19): siRNA sense strand
uguggaagcucgucauaua

SEQ ID NO: 1344110 - RNA, 19 nt, Homo sapiens
  misc_RNA (1)...(19): siRNA sense strand
gaaaugaaagucagagcua

SEQ ID NO: 1344111 - RNA, 19 nt, Homo sapiens
  misc_RNA (1)...(19): siRNA sense strand
caaauggacuuucuacaag

SEQ ID NO: 1344112 - RNA, 19 nt, Homo sapiens
  misc_RNA (1)...(19): siRNA sense strand
ggaaaugccuguuuaucca

SEQ ID NO: 1344113 - RNA, 19 nt, Homo sapiens
  misc_RNA (1)...(19): siRNA sense strand
acacaaauauguaguggaa

SEQ ID NO: 1344114 - RNA, 19 nt, Homo sapiens
  misc_RNA (1)...(19): siRNA sense strand
ggaagaugcuggaaauuac

SEQ ID NO: 1344115 - RNA, 19 nt, Homo sapiens
  misc_RNA (1)...(19): siRNA sense strand
ccaaagaguuaacugaaga

SEQ ID NO: 1344116 - RNA, 19 nt, Homo sapiens
  misc_RNA (1)...(19): siRNA sense strand
cggaagagcugcgcaguaa

SEQ ID NO: 1344117 - RNA, 19 nt, Homo sapiens
  misc_RNA (1)...(19): siRNA sense strand
uaaggaagaugcuggaaau

SEQ ID NO: 1344118 - RNA, 19 nt, Homo sapiens
  misc_RNA (1)...(19): siRNA sense strand
ucagggaccuauucaguaa

SEQ ID NO: 1344119 - RNA, 19 nt, Homo sapiens
  misc_RNA (1)...(19): siRNA sense strand
gcacggaugucaccugcaa

SEQ ID NO: 1344120 - RNA, 19 nt, Homo sapiens
  misc_RNA (1)...(19): siRNA sense strand
gagaugugguuaugacuga

SEQ ID NO: 1344121 - RNA, 19 nt, Homo sapiens
  misc_RNA (1)...(19): siRNA sense strand
caagaacaaauccaaguua

SEQ ID NO: 1344122 - RNA, 19 nt, Homo sapiens
  misc_RNA (1)...(19): siRNA sense strand
gagaaacuauggcuacuag

SEQ ID NO: 1344123 - RNA, 19 nt, Homo sapiens
  misc_RNA (1)...(19): siRNA sense strand
ggagaagacugcuguaacu

SEQ ID NO: 1344124 - RNA, 19 nt, Homo sapiens
  misc_RNA (1)...(19): siRNA sense strand
gcacauaucaucacagauc

SEQ ID NO: 1344125 - RNA, 19 nt, Homo sapiens
  misc_RNA (1)...(19): siRNA sense strand
ggaaacacauuaaggacau

SEQ ID NO: 1344126 - RNA, 19 nt, Homo sapiens
  misc_RNA (1)...(19): siRNA sense strand
gaaauuaagccaagugaca

SEQ ID NO: 1344127 - RNA, 19 nt, Homo sapiens
  misc_RNA (1)...(19): siRNA sense strand
gaugaaagacggccaagaa

SEQ ID NO: 1344128 - RNA, 19 nt, Homo sapiens
  misc_RNA (1)...(19): siRNA sense strand
guuaaagucuccuuggaaa

SEQ ID NO: 1344129 - RNA, 19 nt, Homo sapiens
  misc_RNA (1)...(19): siRNA sense strand
gagcucaagucucgaaaga

SEQ ID NO: 1344130 - RNA, 19 nt, Homo sapiens
  misc_RNA (1)...(19): siRNA sense strand
gaaagaauuacccaugaaa

SEQ ID NO: 1344131 - RNA, 19 nt, Homo sapiens
  misc_RNA (1)...(19): siRNA sense strand
gaaggaaucuacacugcau

SEQ ID NO: 1344132 - RNA, 19 nt, Homo sapiens
  misc_RNA (1)...(19): siRNA sense strand
gauuaugaguuacugauga

SEQ ID NO: 1344133 - RNA, 19 nt, Homo sapiens
  misc_RNA (1)...(19): siRNA sense strand
ugaagaagcugauuaugag

SEQ ID NO: 1344134 - RNA, 19 nt, Homo sapiens
  misc_RNA (1)...(19): siRNA sense strand
gagaaacgcuuuguugagu

SEQ ID NO: 1344135 - RNA, 19 nt, Homo sapiens
  misc_RNA (1)...(19): siRNA sense strand
gcaggugucagaagaauuu

SEQ ID NO: 1344136 - RNA, 19 nt, Homo sapiens
  misc_RNA (1)...(19): siRNA sense strand
gaaauuuacuacagaagag

SEQ ID NO: 1344137 - RNA, 19 nt, Homo sapiens
  misc_RNA (1)...(19): siRNA sense strand
ggaaauugccgaagcuuau

SEQ ID NO: 1344138 - RNA, 19 nt, Homo sapiens
  misc_RNA (1)...(19): siRNA sense strand
gaaauugagaugagugaaa

SEQ ID NO: 1344139 - RNA, 19 nt, Homo sapiens
  misc_RNA (1)...(19): siRNA sense strand
cauagaaguuccagaauca

SEQ ID NO: 1344140 - RNA, 19 nt, Homo sapiens
  misc_RNA (1)...(19): siRNA sense strand
agacaaacccgaauugaaa

SEQ ID NO: 1344141 - RNA, 19 nt, Homo sapiens
  misc_RNA (1)...(19): siRNA sense strand
ggaacaauuuacucucuga

SEQ ID NO: 1344142 - RNA, 19 nt, Homo sapiens
  misc_RNA (1)...(19): siRNA sense strand
gaaaucaagcccaguucua

SEQ ID NO: 1344143 - RNA, 19 nt, Homo sapiens
  misc_RNA (1)...(19): siRNA sense strand
gaaagacggccaagaagug

SEQ ID NO: 1344144 - RNA, 19 nt, Homo sapiens
  misc_RNA (1)...(19): siRNA sense strand
ccaagcaauugaucacuuu

SEQ ID NO: 1344145 - RNA, 19 nt, Homo sapiens
  misc_RNA (1)...(19): siRNA sense strand
gagaaggcauuacuaccaa

SEQ ID NO: 1344146 - RNA, 19 nt, Homo sapiens
  misc_RNA (1)...(19): siRNA sense strand
gaaaacaguuguaccuaaa

SEQ ID NO: 1344147 - RNA, 19 nt, Homo sapiens
  misc_RNA (1)...(19): siRNA sense strand
caagaaaugcuuuaucaga

SEQ ID NO: 1344148 - RNA, 19 nt, Homo sapiens
  misc_RNA (1)...(19): siRNA sense strand
gaaggaacuuacacguuug

SEQ ID NO: 1344149 - RNA, 19 nt, Homo sapiens
  misc_RNA (1)...(19): siRNA sense strand
aaacagcgacuagucauua

SEQ ID NO: 1344150 - RNA, 19 nt, Homo sapiens
  misc_RNA (1)...(19): siRNA sense strand
caagugagacuccaaguga

SEQ ID NO: 1344151 - RNA, 19 nt, Homo sapiens
  misc_RNA (1)...(19): siRNA sense strand
gaaguugugucuccugauc

SEQ ID NO: 1344152 - RNA, 19 nt, Homo sapiens
  misc_RNA (1)...(19): siRNA sense strand
gaagaagcgagccauguuu

SEQ ID NO: 1344153 - RNA, 19 nt, Homo sapiens
  misc_RNA (1)...(19): siRNA sense strand
ccaggaagcuguguuugaa

SEQ ID NO: 1344154 - RNA, 19 nt, Homo sapiens
  misc_RNA (1)...(19): siRNA sense strand
gaaacaacagaaaccauuu

SEQ ID NO: 1344155 - RNA, 19 nt, Homo sapiens
  misc_RNA (1)...(19): siRNA sense strand
gcaagcuggugauuucuau

SEQ ID NO: 1344156 - RNA, 19 nt, Homo sapiens
  misc_RNA (1)...(19): siRNA sense strand
cauccaaccugcucaagaa

SEQ ID NO: 1344157 - RNA, 19 nt, Homo sapiens
  misc_RNA (1)...(19): siRNA sense strand
gaagauugaagcccacuuu

SEQ ID NO: 1344158 - RNA, 19 nt, Homo sapiens
  misc_RNA (1)...(19): siRNA sense strand
gcucagaucucagaaucaa

SEQ ID NO: 1344159 - RNA, 19 nt, Homo sapiens
  misc_RNA (1)...(19): siRNA sense strand
gaagaugacucggacauuu

SEQ ID NO: 1344160 - RNA, 19 nt, Homo sapiens
  misc_RNA (1)...(19): siRNA sense strand
gcaaugaucccucugauaa

SEQ ID NO: 1344161 - RNA, 19 nt, Homo sapiens
  misc_RNA (1)...(19): siRNA sense strand
gaagauggcugugguagau

SEQ ID NO: 1344162 - RNA, 19 nt, Homo sapiens
  misc_RNA (1)...(19): siRNA sense strand
uauaagagaccauggauua

SEQ ID NO: 1344163 - RNA, 19 nt, Homo sapiens
  misc_RNA (1)...(19): siRNA sense strand
ucaaagcgaucauacuuau

SEQ ID NO: 1344164 - RNA, 19 nt, Homo sapiens
  misc_RNA (1)...(19): siRNA sense strand
ugacacagccauuccauuu

SEQ ID NO: 1344165 - RNA, 19 nt, Homo sapiens
  misc_RNA (1)...(19): siRNA sense strand
ggaccuguaugaaacaaug

SEQ ID NO: 1344166 - RNA, 19 nt, Homo sapiens
  misc_RNA (1)...(19): siRNA sense strand
gaaugggacuugagagaca

SEQ ID NO: 1344167 - RNA, 19 nt, Homo sapiens
  misc_RNA (1)...(19): siRNA sense strand
ggauguagccaaucaaaug

SEQ ID NO: 1344168 - RNA, 19 nt, Homo sapiens
  misc_RNA (1)...(19): siRNA sense strand
cagcuggacugcucaagaa

SEQ ID NO: 1344169 - RNA, 19 nt, Homo sapiens
  misc_RNA (1)...(19): siRNA sense strand
gaaacaaugaggcgauuug

SEQ ID NO: 1344170 - RNA, 19 nt, Homo sapiens
  misc_RNA (1)...(19): siRNA sense strand
aaucaaaugugcaccaaga

SEQ ID NO: 1344171 - RNA, 19 nt, Homo sapiens
  misc_RNA (1)...(19): siRNA sense strand
uaucaagugugcugaaugu

SEQ ID NO: 1344172 - RNA, 19 nt, Homo sapiens
  misc_RNA (1)...(19): siRNA sense strand
gacuguggcuuuggaaauu

SEQ ID NO: 1344173 - RNA, 19 nt, Homo sapiens
  misc_RNA (1)...(19): siRNA sense strand
uaucuaucauuccagguua

SEQ ID NO: 1344174 - RNA, 19 nt, Homo sapiens
  misc_RNA (1)...(19): siRNA sense strand
gaggcgauuugcaagaauu

SEQ ID NO: 1344175 - RNA, 19 nt, Homo sapiens
  misc_RNA (1)...(19): siRNA sense strand
caucaaagcgaucauacuu

SEQ ID NO: 1344176 - RNA, 19 nt, Homo sapiens
  misc_RNA (1)...(19): siRNA sense strand
ggauuaaucaaccuuagaa

SEQ ID NO: 1344177 - RNA, 19 nt, Homo sapiens
  misc_RNA (1)...(19): siRNA sense strand
ccauuucacucuacagaug

SEQ ID NO: 1344178 - RNA, 19 nt, Homo sapiens
  misc_RNA (1)...(19): siRNA sense strand
acacagccauuccauuuca

SEQ ID NO: 1344179 - RNA, 19 nt, Homo sapiens
  misc_RNA (1)...(19): siRNA sense strand
gaaacaagcagaggaagca

SEQ ID NO: 1344180 - RNA, 19 nt, Homo sapiens
  misc_RNA (1)...(19): siRNA sense strand
cagauuucauugaggaauu

SEQ ID NO: 1344181 - RNA, 19 nt, Homo sapiens
  misc_RNA (1)...(19): siRNA sense strand
ugacaauuaugcagaaugg

SEQ ID NO: 1344182 - RNA, 19 nt, Homo sapiens
  misc_RNA (1)...(19): siRNA sense strand
ggacuguggcuuuggaaau

SEQ ID NO: 1344183 - RNA, 19 nt, Homo sapiens
  misc_RNA (1)...(19): siRNA sense strand
ggcaggauguagccaauca

SEQ ID NO: 1344184 - RNA, 19 nt, Homo sapiens
  misc_RNA (1)...(19): siRNA sense strand
gauggacuguggcuuugga

SEQ ID NO: 1344185 - RNA, 19 nt, Homo sapiens
  misc_RNA (1)...(19): siRNA sense strand
aaacaucaaagcgaucaua

SEQ ID NO: 1344186 - RNA, 19 nt, Homo sapiens
  misc_RNA (1)...(19): siRNA sense strand
gccauuccauuucacucua

SEQ ID NO: 1344187 - RNA, 19 nt, Homo sapiens
  misc_RNA (1)...(19): siRNA sense strand
ggacugcucaagaagaaau

SEQ ID NO: 1344188 - RNA, 19 nt, Homo sapiens
  misc_RNA (1)...(19): siRNA sense strand
guguuucacucgaggcuuu

SEQ ID NO: 1344189 - RNA, 19 nt, Homo sapiens
  misc_RNA (1)...(19): siRNA sense strand
caucaauaacccucuguuu

SEQ ID NO: 1344190 - RNA, 19 nt, Homo sapiens
  misc_RNA (1)...(19): siRNA sense strand
cauggagccuuauaucaag

SEQ ID NO: 1344191 - RNA, 19 nt, Homo sapiens
  misc_RNA (1)...(19): siRNA sense strand
ucauggagccuuauaucaa

SEQ ID NO: 1344192 - RNA, 19 nt, Homo sapiens
  misc_RNA (1)...(19): siRNA sense strand
uaagagaccauggauuaau

SEQ ID NO: 1344193 - RNA, 19 nt, Homo sapiens
  misc_RNA (1)...(19): siRNA sense strand
acaaugaggcgauuugcaa

SEQ ID NO: 1344194 - RNA, 19 nt, Homo sapiens
  misc_RNA (1)...(19): siRNA sense strand
ccaaucaaaugugcaccaa

SEQ ID NO: 1344195 - RNA, 19 nt, Homo sapiens
  misc_RNA (1)...(19): siRNA sense strand
aguggaacaugacaaauuc

SEQ ID NO: 1344196 - RNA, 19 nt, Homo sapiens
  misc_RNA (1)...(19): siRNA sense strand
caguggaacaugacaaauu

SEQ ID NO: 1344197 - RNA, 19 nt, Homo sapiens
  misc_RNA (1)...(19): siRNA sense strand
caauaacccucuguuugca

SEQ ID NO: 1344198 - RNA, 19 nt, Homo sapiens
  misc_RNA (1)...(19): siRNA sense strand
aagagaccauggauuaauc

SEQ ID NO: 1344199 - RNA, 19 nt, Homo sapiens
  misc_RNA (1)...(19): siRNA sense strand
ucaauaacccucuguuugc

SEQ ID NO: 1344200 - RNA, 19 nt, Homo sapiens
  misc_RNA (1)...(19): siRNA sense strand
gugauggacuguggcuuug

SEQ ID NO: 1344201 - RNA, 19 nt, Homo sapiens
  misc_RNA (1)...(19): siRNA sense strand
cagaaugggacuugagaga

SEQ ID NO: 1344202 - RNA, 19 nt, Homo sapiens
  misc_RNA (1)...(19): siRNA sense strand
agaaauggcccuuuuagaa

SEQ ID NO: 1344203 - RNA, 19 nt, Homo sapiens
  misc_RNA (1)...(19): siRNA sense strand
guuaaaggagagacaaaga

SEQ ID NO: 1344204 - RNA, 19 nt, Homo sapiens
  misc_RNA (1)...(19): siRNA sense strand
ggacuugagagacauugau

SEQ ID NO: 1344205 - RNA, 19 nt, Homo sapiens
  misc_RNA (1)...(19): siRNA sense strand
gaccuaccuuugacuccuu

SEQ ID NO: 1344206 - RNA, 19 nt, Homo sapiens
  misc_RNA (1)...(19): siRNA sense strand
gauguagccaaucaaaugu

SEQ ID NO: 1344207 - RNA, 19 nt, Homo sapiens
  misc_RNA (1)...(19): siRNA sense strand
gaaauggcccuuuuagaag

SEQ ID NO: 1344208 - RNA, 19 nt, Homo sapiens
  misc_RNA (1)...(19): siRNA sense strand
ugagagacauugauuuugu

SEQ ID NO: 1344209 - RNA, 19 nt, Homo sapiens
  misc_RNA (1)...(19): siRNA sense strand
aagaagaaauggcccuuuu

SEQ ID NO: 1344210 - RNA, 19 nt, Homo sapiens
  misc_RNA (1)...(19): siRNA sense strand
cuggacugcucaagaagaa

SEQ ID NO: 1344211 - RNA, 19 nt, Homo sapiens
  misc_RNA (1)...(19): siRNA sense strand
caugccagcucgagcagau

SEQ ID NO: 1344212 - RNA, 19 nt, Homo sapiens
  misc_RNA (1)...(19): siRNA sense strand
caagaagaaauggcccuuu

SEQ ID NO: 1344213 - RNA, 19 nt, Homo sapiens
  misc_RNA (1)...(19): siRNA sense strand
gaagaaauggcccuuuuag

SEQ ID NO: 1344214 - RNA, 19 nt, Homo sapiens
  misc_RNA (1)...(19): siRNA sense strand
gccaguggaacaugacaaa

SEQ ID NO: 1344215 - RNA, 19 nt, Homo sapiens
  misc_RNA (1)...(19): siRNA sense strand
agauggcugugguagauau

SEQ ID NO: 1344216 - RNA, 19 nt, Homo sapiens
  misc_RNA (1)...(19): siRNA sense strand
ccaaggaggagugugagaa

SEQ ID NO: 1344217 - RNA, 19 nt, Homo sapiens
  misc_RNA (1)...(19): siRNA sense strand
ggaaauuggcaggauguag

SEQ ID NO: 1344218 - RNA, 19 nt, Homo sapiens
  misc_RNA (1)...(19): siRNA sense strand
uagcaaugaucccucugau

SEQ ID NO: 1344219 - RNA, 19 nt, Homo sapiens
  misc_RNA (1)...(19): siRNA sense strand
uauaucaagugugcugaau

SEQ ID NO: 1344220 - RNA, 19 nt, Homo sapiens
  misc_RNA (1)...(19): siRNA sense strand
gagagacauugauuuuguu

SEQ ID NO: 1344221 - RNA, 19 nt, Homo sapiens
  misc_RNA (1)...(19): siRNA sense strand
gaguacaagaaacaucaaa

SEQ ID NO: 1344222 - RNA, 19 nt, Homo sapiens
  misc_RNA (1)...(19): siRNA sense strand
guacaagaaacaucaaagc

SEQ ID NO: 1344223 - RNA, 19 nt, Homo sapiens
  misc_RNA (1)...(19): siRNA sense strand
agaccaaggaggaguguga

SEQ ID NO: 1344224 - RNA, 19 nt, Homo sapiens
  misc_RNA (1)...(19): siRNA sense strand
caggauguagccaaucaaa

SEQ ID NO: 1344225 - RNA, 19 nt, Homo sapiens
  misc_RNA (1)...(19): siRNA sense strand
gaccguuuggguuccuuua

SEQ ID NO: 1344226 - RNA, 19 nt, Homo sapiens
  misc_RNA (1)...(19): siRNA sense strand
ugugauggacuguggcuuu

SEQ ID NO: 1344227 - RNA, 19 nt, Homo sapiens
  misc_RNA (1)...(19): siRNA sense strand
caucuacccugcugaaccu

SEQ ID NO: 1344228 - RNA, 19 nt, Homo sapiens
  misc_RNA (1)...(19): siRNA sense strand
gacuugagagacauugauu

SEQ ID NO: 1344229 - RNA, 19 nt, Homo sapiens
  misc_RNA (1)...(19): siRNA sense strand
aaggagagacaaagacgaa

SEQ ID NO: 1344230 - RNA, 19 nt, Homo sapiens
  misc_RNA (1)...(19): siRNA sense strand
ucgagcagauuucauugag

SEQ ID NO: 1344231 - RNA, 19 nt, Homo sapiens
  misc_RNA (1)...(19): siRNA sense strand
caaggaggagugugagaag

SEQ ID NO: 1344232 - RNA, 19 nt, Homo sapiens
  misc_RNA (1)...(19): siRNA sense strand
cauggauuaaucaaccuua

SEQ ID NO: 1344233 - RNA, 19 nt, Homo sapiens
  misc_RNA (1)...(19): siRNA sense strand
cuacccugcugaaccugaa

SEQ ID NO: 1344234 - RNA, 19 nt, Homo sapiens
  misc_RNA (1)...(19): siRNA sense strand
gcagauuucauugaggaau

SEQ ID NO: 1344235 - RNA, 19 nt, Homo sapiens
  misc_RNA (1)...(19): siRNA sense strand
gcuggacugcucaagaaga

SEQ ID NO: 1344236 - RNA, 19 nt, Homo sapiens
  misc_RNA (1)...(19): siRNA sense strand
gacacagccauuccauuuc

SEQ ID NO: 1344237 - RNA, 19 nt, Homo sapiens
  misc_RNA (1)...(19): siRNA sense strand
ggagagacaaagacgaaaa

SEQ ID NO: 1344238 - RNA, 19 nt, Homo sapiens
  misc_RNA (1)...(19): siRNA sense strand
ccagcuggacugcucaaga

SEQ ID NO: 1344239 - RNA, 19 nt, Homo sapiens
  misc_RNA (1)...(19): siRNA sense strand
gcucgagcagauuucauug

SEQ ID NO: 1344240 - RNA, 19 nt, Homo sapiens
  misc_RNA (1)...(19): siRNA sense strand
ugaagaugacucggacauu

SEQ ID NO: 1344241 - RNA, 19 nt, Homo sapiens
  misc_RNA (1)...(19): siRNA sense strand
auaagagaccauggauuaa

SEQ ID NO: 1344242 - RNA, 19 nt, Homo sapiens
  misc_RNA (1)...(19): siRNA sense strand
ggagccuuauaucaagugu

SEQ ID NO: 1344243 - RNA, 19 nt, Homo sapiens
  misc_RNA (1)...(19): siRNA sense strand
ugaggcgauuugcaagaau

SEQ ID NO: 1344244 - RNA, 19 nt, Homo sapiens
  misc_RNA (1)...(19): siRNA sense strand
ugaagauggcugugguaga

SEQ ID NO: 1344245 - RNA, 19 nt, Homo sapiens
  misc_RNA (1)...(19): siRNA sense strand
ccuaccucauggagccuua

SEQ ID NO: 1344246 - RNA, 19 nt, Homo sapiens
  misc_RNA (1)...(19): siRNA sense strand
gcuuugaguacaagaaaca

SEQ ID NO: 1344247 - RNA, 19 nt, Homo sapiens
  misc_RNA (1)...(19): siRNA sense strand
ccugaaacaagcagaggaa

SEQ ID NO: 1344248 - RNA, 19 nt, Homo sapiens
  misc_RNA (1)...(19): siRNA sense strand
ccucauggagccuuauauc

SEQ ID NO: 1344249 - RNA, 19 nt, Homo sapiens
  misc_RNA (1)...(19): siRNA sense strand
aucaauaacccucuguuug

SEQ ID NO: 1344250 - RNA, 19 nt, Homo sapiens
  misc_RNA (1)...(19): siRNA sense strand
gaagaugacucggacauuu

SEQ ID NO: 1344251 - RNA, 19 nt, Homo sapiens
  misc_RNA (1)...(19): siRNA sense strand
gcaaugaucccucugauaa

SEQ ID NO: 1344252 - RNA, 19 nt, Homo sapiens
  misc_RNA (1)...(19): siRNA sense strand
gaagauggcugugguagau

SEQ ID NO: 1344253 - RNA, 19 nt, Homo sapiens
  misc_RNA (1)...(19): siRNA sense strand
uauaagagaccauggauua

SEQ ID NO: 1344254 - RNA, 19 nt, Homo sapiens
  misc_RNA (1)...(19): siRNA sense strand
ucaaagcgaucauacuuau

SEQ ID NO: 1344255 - RNA, 19 nt, Homo sapiens
  misc_RNA (1)...(19): siRNA sense strand
ugacacagccauuccauuu

SEQ ID NO: 1344256 - RNA, 19 nt, Homo sapiens
  misc_RNA (1)...(19): siRNA sense strand
ggaccuguaugaaacaaug

SEQ ID NO: 1344257 - RNA, 19 nt, Homo sapiens
  misc_RNA (1)...(19): siRNA sense strand
gaaugggacuugagagaca

SEQ ID NO: 1344258 - RNA, 19 nt, Homo sapiens
  misc_RNA (1)...(19): siRNA sense strand
ggauguagccaaucaaaug

SEQ ID NO: 1344259 - RNA, 19 nt, Homo sapiens
  misc_RNA (1)...(19): siRNA sense strand
cagcuggacugcucaagaa

SEQ ID NO: 1344260 - RNA, 19 nt, Homo sapiens
  misc_RNA (1)...(19): siRNA sense strand
gaaacaaugaggcgauuug

SEQ ID NO: 1344261 - RNA, 19 nt, Homo sapiens
  misc_RNA (1)...(19): siRNA sense strand
aaucaaaugugcaccaaga

SEQ ID NO: 1344262 - RNA, 19 nt, Homo sapiens
  misc_RNA (1)...(19): siRNA sense strand
uaucaagugugcugaaugu

SEQ ID NO: 1344263 - RNA, 19 nt, Homo sapiens
  misc_RNA (1)...(19): siRNA sense strand
gacuguggcuuuggaaauu

SEQ ID NO: 1344264 - RNA, 19 nt, Homo sapiens
  misc_RNA (1)...(19): siRNA sense strand
uaucuaucauuccagguua

SEQ ID NO: 1344265 - RNA, 19 nt, Homo sapiens
  misc_RNA (1)...(19): siRNA sense strand
gaggcgauuugcaagaauu

SEQ ID NO: 1344266 - RNA, 19 nt, Homo sapiens
  misc_RNA (1)...(19): siRNA sense strand
caucaaagcgaucauacuu

SEQ ID NO: 1344267 - RNA, 19 nt, Homo sapiens
  misc_RNA (1)...(19): siRNA sense strand
ggauuaaucaaccuuagaa

SEQ ID NO: 1344268 - RNA, 19 nt, Homo sapiens
  misc_RNA (1)...(19): siRNA sense strand
ccauuucacucuacagaug

SEQ ID NO: 1344269 - RNA, 19 nt, Homo sapiens
  misc_RNA (1)...(19): siRNA sense strand
acacagccauuccauuuca

SEQ ID NO: 1344270 - RNA, 19 nt, Homo sapiens
  misc_RNA (1)...(19): siRNA sense strand
gaaacaagcagaggaagca

SEQ ID NO: 1344271 - RNA, 19 nt, Homo sapiens
  misc_RNA (1)...(19): siRNA sense strand
cagauuucauugaggaauu

SEQ ID NO: 1344272 - RNA, 19 nt, Homo sapiens
  misc_RNA (1)...(19): siRNA sense strand
ugacaauuaugcagaaugg

SEQ ID NO: 1344273 - RNA, 19 nt, Homo sapiens
  misc_RNA (1)...(19): siRNA sense strand
ggacuguggcuuuggaaau

SEQ ID NO: 1344274 - RNA, 19 nt, Homo sapiens
  misc_RNA (1)...(19): siRNA sense strand
ggcaggauguagccaauca

SEQ ID NO: 1344275 - RNA, 19 nt, Homo sapiens
  misc_RNA (1)...(19): siRNA sense strand
gauggacuguggcuuugga

SEQ ID NO: 1344276 - RNA, 19 nt, Homo sapiens
  misc_RNA (1)...(19): siRNA sense strand
aaacaucaaagcgaucaua

SEQ ID NO: 1344277 - RNA, 19 nt, Homo sapiens
  misc_RNA (1)...(19): siRNA sense strand
gccauuccauuucacucua

SEQ ID NO: 1344278 - RNA, 19 nt, Homo sapiens
  misc_RNA (1)...(19): siRNA sense strand
ggacugcucaagaagaaau

SEQ ID NO: 1344279 - RNA, 19 nt, Homo sapiens
  misc_RNA (1)...(19): siRNA sense strand
guguuucacucgaggcuuu

SEQ ID NO: 1344280 - RNA, 19 nt, Homo sapiens
  misc_RNA (1)...(19): siRNA sense strand
caucaauaacccucuguuu

SEQ ID NO: 1344281 - RNA, 19 nt, Homo sapiens
  misc_RNA (1)...(19): siRNA sense strand
cauggagccuuauaucaag

SEQ ID NO: 1344282 - RNA, 19 nt, Homo sapiens
  misc_RNA (1)...(19): siRNA sense strand
ucauggagccuuauaucaa

SEQ ID NO: 1344283 - RNA, 19 nt, Homo sapiens
  misc_RNA (1)...(19): siRNA sense strand
uaagagaccauggauuaau

SEQ ID NO: 1344284 - RNA, 19 nt, Homo sapiens
  misc_RNA (1)...(19): siRNA sense strand
acaaugaggcgauuugcaa

SEQ ID NO: 1344285 - RNA, 19 nt, Homo sapiens
  misc_RNA (1)...(19): siRNA sense strand
ccaaucaaaugugcaccaa

SEQ ID NO: 1344286 - RNA, 19 nt, Homo sapiens
  misc_RNA (1)...(19): siRNA sense strand
aguggaacaugacaaauuc

SEQ ID NO: 1344287 - RNA, 19 nt, Homo sapiens
  misc_RNA (1)...(19): siRNA sense strand
caguggaacaugacaaauu

SEQ ID NO: 1344288 - RNA, 19 nt, Homo sapiens
  misc_RNA (1)...(19): siRNA sense strand
caauaacccucuguuugca

SEQ ID NO: 1344289 - RNA, 19 nt, Homo sapiens
  misc_RNA (1)...(19): siRNA sense strand
aagagaccauggauuaauc

SEQ ID NO: 1344290 - RNA, 19 nt, Homo sapiens
  misc_RNA (1)...(19): siRNA sense strand
ucaauaacccucuguuugc

SEQ ID NO: 1344291 - RNA, 19 nt, Homo sapiens
  misc_RNA (1)...(19): siRNA sense strand
gugauggacuguggcuuug

SEQ ID NO: 1344292 - RNA, 19 nt, Homo sapiens
  misc_RNA (1)...(19): siRNA sense strand
cagaaugggacuugagaga

SEQ ID NO: 1344293 - RNA, 19 nt, Homo sapiens
  misc_RNA (1)...(19): siRNA sense strand
agaaauggcccuuuuagaa

SEQ ID NO: 1344294 - RNA, 19 nt, Homo sapiens
  misc_RNA (1)...(19): siRNA sense strand
guuaaaggagagacaaaga

SEQ ID NO: 1344295 - RNA, 19 nt, Homo sapiens
  misc_RNA (1)...(19): siRNA sense strand
ggacuugagagacauugau

SEQ ID NO: 1344296 - RNA, 19 nt, Homo sapiens
  misc_RNA (1)...(19): siRNA sense strand
gaccuaccuuugacuccuu

SEQ ID NO: 1344297 - RNA, 19 nt, Homo sapiens
  misc_RNA (1)...(19): siRNA sense strand
gauguagccaaucaaaugu

SEQ ID NO: 1344298 - RNA, 19 nt, Homo sapiens
  misc_RNA (1)...(19): siRNA sense strand
gaaauggcccuuuuagaag

SEQ ID NO: 1344299 - RNA, 19 nt, Homo sapiens
  misc_RNA (1)...(19): siRNA sense strand
ugagagacauugauuuugu

SEQ ID NO: 1344300 - RNA, 19 nt, Homo sapiens
  misc_RNA (1)...(19): siRNA sense strand
aagaagaaauggcccuuuu

SEQ ID NO: 1344301 - RNA, 19 nt, Homo sapiens
  misc_RNA (1)...(19): siRNA sense strand
cuggacugcucaagaagaa

SEQ ID NO: 1344302 - RNA, 19 nt, Homo sapiens
  misc_RNA (1)...(19): siRNA sense strand
caugccagcucgagcagau

SEQ ID NO: 1344303 - RNA, 19 nt, Homo sapiens
  misc_RNA (1)...(19): siRNA sense strand
caagaagaaauggcccuuu

SEQ ID NO: 1344304 - RNA, 19 nt, Homo sapiens
  misc_RNA (1)...(19): siRNA sense strand
gaagaaauggcccuuuuag

SEQ ID NO: 1344305 - RNA, 19 nt, Homo sapiens
  misc_RNA (1)...(19): siRNA sense strand
gccaguggaacaugacaaa

SEQ ID NO: 1344306 - RNA, 19 nt, Homo sapiens
  misc_RNA (1)...(19): siRNA sense strand
agauggcugugguagauau

SEQ ID NO: 1344307 - RNA, 19 nt, Homo sapiens
  misc_RNA (1)...(19): siRNA sense strand
ccaaggaggagugugagaa

SEQ ID NO: 1344308 - RNA, 19 nt, Homo sapiens
  misc_RNA (1)...(19): siRNA sense strand
ggaaauuggcaggauguag

SEQ ID NO: 1344309 - RNA, 19 nt, Homo sapiens
  misc_RNA (1)...(19): siRNA sense strand
uagcaaugaucccucugau

SEQ ID NO: 1344310 - RNA, 19 nt, Homo sapiens
  misc_RNA (1)...(19): siRNA sense strand
uauaucaagugugcugaau

SEQ ID NO: 1344311 - RNA, 19 nt, Homo sapiens
  misc_RNA (1)...(19): siRNA sense strand
gagagacauugauuuuguu

SEQ ID NO: 1344312 - RNA, 19 nt, Homo sapiens
  misc_RNA (1)...(19): siRNA sense strand
gaguacaagaaacaucaaa

SEQ ID NO: 1344313 - RNA, 19 nt, Homo sapiens
  misc_RNA (1)...(19): siRNA sense strand
guacaagaaacaucaaagc

SEQ ID NO: 1344314 - RNA, 19 nt, Homo sapiens
  misc_RNA (1)...(19): siRNA sense strand
agaccaaggaggaguguga

SEQ ID NO: 1344315 - RNA, 19 nt, Homo sapiens
  misc_RNA (1)...(19): siRNA sense strand
caggauguagccaaucaaa

SEQ ID NO: 1344316 - RNA, 19 nt, Homo sapiens
  misc_RNA (1)...(19): siRNA sense strand
gaccguuuggguuccuuua

SEQ ID NO: 1344317 - RNA, 19 nt, Homo sapiens
  misc_RNA (1)...(19): siRNA sense strand
ugugauggacuguggcuuu

SEQ ID NO: 1344318 - RNA, 19 nt, Homo sapiens
  misc_RNA (1)...(19): siRNA sense strand
caucuacccugcugaaccu

SEQ ID NO: 1344319 - RNA, 19 nt, Homo sapiens
  misc_RNA (1)...(19): siRNA sense strand
gacuugagagacauugauu

SEQ ID NO: 1344320 - RNA, 19 nt, Homo sapiens
  misc_RNA (1)...(19): siRNA sense strand
aaggagagacaaagacgaa

SEQ ID NO: 1344321 - RNA, 19 nt, Homo sapiens
  misc_RNA (1)...(19): siRNA sense strand
ucgagcagauuucauugag

SEQ ID NO: 1344322 - RNA, 19 nt, Homo sapiens
  misc_RNA (1)...(19): siRNA sense strand
caaggaggagugugagaag

SEQ ID NO: 1344323 - RNA, 19 nt, Homo sapiens
  misc_RNA (1)...(19): siRNA sense strand
cauggauuaaucaaccuua

SEQ ID NO: 1344324 - RNA, 19 nt, Homo sapiens
  misc_RNA (1)...(19): siRNA sense strand
cuacccugcugaaccugaa

SEQ ID NO: 1344325 - RNA, 19 nt, Homo sapiens
  misc_RNA (1)...(19): siRNA sense strand
gcagauuucauugaggaau

SEQ ID NO: 1344326 - RNA, 19 nt, Homo sapiens
  misc_RNA (1)...(19): siRNA sense strand
gcuggacugcucaagaaga

SEQ ID NO: 1344327 - RNA, 19 nt, Homo sapiens
  misc_RNA (1)...(19): siRNA sense strand
gacacagccauuccauuuc

SEQ ID NO: 1344328 - RNA, 19 nt, Homo sapiens
  misc_RNA (1)...(19): siRNA sense strand
ggagagacaaagacgaaaa

SEQ ID NO: 1344329 - RNA, 19 nt, Homo sapiens
  misc_RNA (1)...(19): siRNA sense strand
ccagcuggacugcucaaga

SEQ ID NO: 1344330 - RNA, 19 nt, Homo sapiens
  misc_RNA (1)...(19): siRNA sense strand
gcucgagcagauuucauug

SEQ ID NO: 1344331 - RNA, 19 nt, Homo sapiens
  misc_RNA (1)...(19): siRNA sense strand
ugaagaugacucggacauu

SEQ ID NO: 1344332 - RNA, 19 nt, Homo sapiens
  misc_RNA (1)...(19): siRNA sense strand
auaagagaccauggauuaa

SEQ ID NO: 1344333 - RNA, 19 nt, Homo sapiens
  misc_RNA (1)...(19): siRNA sense strand
ggagccuuauaucaagugu

SEQ ID NO: 1344334 - RNA, 19 nt, Homo sapiens
  misc_RNA (1)...(19): siRNA sense strand
ugaggcgauuugcaagaau

SEQ ID NO: 1344335 - RNA, 19 nt, Homo sapiens
  misc_RNA (1)...(19): siRNA sense strand
ugaagauggcugugguaga

SEQ ID NO: 1344336 - RNA, 19 nt, Homo sapiens
  misc_RNA (1)...(19): siRNA sense strand
ccuaccucauggagccuua

SEQ ID NO: 1344337 - RNA, 19 nt, Homo sapiens
  misc_RNA (1)...(19): siRNA sense strand
gcuuugaguacaagaaaca

SEQ ID NO: 1344338 - RNA, 19 nt, Homo sapiens
  misc_RNA (1)...(19): siRNA sense strand
ccugaaacaagcagaggaa

SEQ ID NO: 1344339 - RNA, 19 nt, Homo sapiens
  misc_RNA (1)...(19): siRNA sense strand
ccucauggagccuuauauc

SEQ ID NO: 1344340 - RNA, 19 nt, Homo sapiens
  misc_RNA (1)...(19): siRNA sense strand
aucaauaacccucuguuug

SEQ ID NO: 1344341 - RNA, 19 nt, Homo sapiens
  misc_RNA (1)...(19): siRNA sense strand
aaacuaacuucaacuccau

SEQ ID NO: 1344342 - RNA, 19 nt, Homo sapiens
  misc_RNA (1)...(19): siRNA sense strand
ucaacuccaucgccaagau

SEQ ID NO: 1344343 - RNA, 19 nt, Homo sapiens
  misc_RNA (1)...(19): siRNA sense strand
gaucuuggcccagcagaca

SEQ ID NO: 1344344 - RNA, 19 nt, Homo sapiens
  misc_RNA (1)...(19): siRNA sense strand
cagcaaaacuaacuucaac

SEQ ID NO: 1344345 - RNA, 19 nt, Homo sapiens
  misc_RNA (1)...(19): siRNA sense strand
aaacuaacuucaacuccau

SEQ ID NO: 1344346 - RNA, 19 nt, Homo sapiens
  misc_RNA (1)...(19): siRNA sense strand
ucaacuccaucgccaagau

SEQ ID NO: 1344347 - RNA, 19 nt, Homo sapiens
  misc_RNA (1)...(19): siRNA sense strand
gaucuuggcccagcagaca

SEQ ID NO: 1344348 - RNA, 19 nt, Homo sapiens
  misc_RNA (1)...(19): siRNA sense strand
cagcaaaacuaacuucaac

SEQ ID NO: 1344349 - RNA, 19 nt, Homo sapiens
  misc_RNA (1)...(19): siRNA sense strand
aaacuaacuucaacuccau

SEQ ID NO: 1344350 - RNA, 19 nt, Homo sapiens
  misc_RNA (1)...(19): siRNA sense strand
ucaacuccaucgccaagau

SEQ ID NO: 1344351 - RNA, 19 nt, Homo sapiens
  misc_RNA (1)...(19): siRNA sense strand
gaucuuggcccagcagaca

SEQ ID NO: 1344352 - RNA, 19 nt, Homo sapiens
  misc_RNA (1)...(19): siRNA sense strand
cagcaaaacuaacuucaac

SEQ ID NO: 1344353 - RNA, 19 nt, Homo sapiens
  misc_RNA (1)...(19): siRNA sense strand
aaacuaacuucaacuccau

SEQ ID NO: 1344354 - RNA, 19 nt, Homo sapiens
  misc_RNA (1)...(19): siRNA sense strand
ucaacuccaucgccaagau

SEQ ID NO: 1344355 - RNA, 19 nt, Homo sapiens
  misc_RNA (1)...(19): siRNA sense strand
gaucuuggcccagcagaca

SEQ ID NO: 1344356 - RNA, 19 nt, Homo sapiens
  misc_RNA (1)...(19): siRNA sense strand
cagcaaaacuaacuucaac

SEQ ID NO: 1344357 - RNA, 19 nt, Homo sapiens
  misc_RNA (1)...(19): siRNA sense strand
aaacuaacuucaacuccau

SEQ ID NO: 1344358 - RNA, 19 nt, Homo sapiens
  misc_RNA (1)...(19): siRNA sense strand
ucaacuccaucgccaagau

SEQ ID NO: 1344359 - RNA, 19 nt, Homo sapiens
  misc_RNA (1)...(19): siRNA sense strand
gaucuuggcccagcagaca

SEQ ID NO: 1344360 - RNA, 19 nt, Homo sapiens
  misc_RNA (1)...(19): siRNA sense strand
cagcaaaacuaacuucaac

SEQ ID NO: 1344361 - RNA, 19 nt, Homo sapiens
  misc_RNA (1)...(19): siRNA sense strand
aaacuaacuucaacuccau

SEQ ID NO: 1344362 - RNA, 19 nt, Homo sapiens
  misc_RNA (1)...(19): siRNA sense strand
ucaacuccaucgccaagau

SEQ ID NO: 1344363 - RNA, 19 nt, Homo sapiens
  misc_RNA (1)...(19): siRNA sense strand
gaucuuggcccagcagaca

SEQ ID NO: 1344364 - RNA, 19 nt, Homo sapiens
  misc_RNA (1)...(19): siRNA sense strand
cagcaaaacuaacuucaac

SEQ ID NO: 1344365 - RNA, 19 nt, Homo sapiens
  misc_RNA (1)...(19): siRNA sense strand
aaacuaacuucaacuccau

SEQ ID NO: 1344366 - RNA, 19 nt, Homo sapiens
  misc_RNA (1)...(19): siRNA sense strand
ucaacuccaucgccaagau

SEQ ID NO: 1344367 - RNA, 19 nt, Homo sapiens
  misc_RNA (1)...(19): siRNA sense strand
gaucuuggcccagcagaca

SEQ ID NO: 1344368 - RNA, 19 nt, Homo sapiens
  misc_RNA (1)...(19): siRNA sense strand
cagcaaaacuaacuucaac

SEQ ID NO: 1344369 - RNA, 19 nt, Homo sapiens
  misc_RNA (1)...(19): siRNA sense strand
aaacuaacuucaacuccau

SEQ ID NO: 1344370 - RNA, 19 nt, Homo sapiens
  misc_RNA (1)...(19): siRNA sense strand
ucaacuccaucgccaagau

SEQ ID NO: 1344371 - RNA, 19 nt, Homo sapiens
  misc_RNA (1)...(19): siRNA sense strand
gaucuuggcccagcagaca

SEQ ID NO: 1344372 - RNA, 19 nt, Homo sapiens
  misc_RNA (1)...(19): siRNA sense strand
cagcaaaacuaacuucaac

SEQ ID NO: 1344373 - RNA, 19 nt, Homo sapiens
  misc_RNA (1)...(19): siRNA sense strand
aaacuaacuucaacuccau

SEQ ID NO: 1344374 - RNA, 19 nt, Homo sapiens
  misc_RNA (1)...(19): siRNA sense strand
ucaacuccaucgccaagau

SEQ ID NO: 1344375 - RNA, 19 nt, Homo sapiens
  misc_RNA (1)...(19): siRNA sense strand
gaucuuggcccagcagaca

SEQ ID NO: 1344376 - RNA, 19 nt, Homo sapiens
  misc_RNA (1)...(19): siRNA sense strand
cagcaaaacuaacuucaac

SEQ ID NO: 1344377 - RNA, 19 nt, Homo sapiens
  misc_RNA (1)...(19): siRNA sense strand
aaacuaacuucaacuccau

SEQ ID NO: 1344378 - RNA, 19 nt, Homo sapiens
  misc_RNA (1)...(19): siRNA sense strand
ucaacuccaucgccaagau

SEQ ID NO: 1344379 - RNA, 19 nt, Homo sapiens
  misc_RNA (1)...(19): siRNA sense strand
gaucuuggcccagcagaca

SEQ ID NO: 1344380 - RNA, 19 nt, Homo sapiens
  misc_RNA (1)...(19): siRNA sense strand
cagcaaaacuaacuucaac

SEQ ID NO: 1344381 - RNA, 19 nt, Homo sapiens
  misc_RNA (1)...(19): siRNA sense strand
aaacuaacuucaacuccau

SEQ ID NO: 1344382 - RNA, 19 nt, Homo sapiens
  misc_RNA (1)...(19): siRNA sense strand
ucaacuccaucgccaagau

SEQ ID NO: 1344383 - RNA, 19 nt, Homo sapiens
  misc_RNA (1)...(19): siRNA sense strand
gaucuuggcccagcagaca

SEQ ID NO: 1344384 - RNA, 19 nt, Homo sapiens
  misc_RNA (1)...(19): siRNA sense strand
cagcaaaacuaacuucaac

SEQ ID NO: 1344385 - RNA, 19 nt, Homo sapiens
  misc_RNA (1)...(19): siRNA sense strand
aaacuaacuucaacuccau

SEQ ID NO: 1344386 - RNA, 19 nt, Homo sapiens
  misc_RNA (1)...(19): siRNA sense strand
ucaacuccaucgccaagau

SEQ ID NO: 1344387 - RNA, 19 nt, Homo sapiens
  misc_RNA (1)...(19): siRNA sense strand
gaucuuggcccagcagaca

SEQ ID NO: 1344388 - RNA, 19 nt, Homo sapiens
  misc_RNA (1)...(19): siRNA sense strand
cagcaaaacuaacuucaac

SEQ ID NO: 1344389 - RNA, 19 nt, Homo sapiens
  misc_RNA (1)...(19): siRNA sense strand
gaauugcucugccuugugu

SEQ ID NO: 1344390 - RNA, 19 nt, Homo sapiens
  misc_RNA (1)...(19): siRNA sense strand
gcaccacacugcgagauga

SEQ ID NO: 1344391 - RNA, 19 nt, Homo sapiens
  misc_RNA (1)...(19): siRNA sense strand
gcaccuaucuggccaccau

SEQ ID NO: 1344392 - RNA, 19 nt, Homo sapiens
  misc_RNA (1)...(19): siRNA sense strand
gcuccucgcuguggcuuug

SEQ ID NO: 1344393 - RNA, 19 nt, Homo sapiens
  misc_RNA (1)...(19): siRNA sense strand
gccuacaguucaacccuuu

SEQ ID NO: 1344394 - RNA, 19 nt, Homo sapiens
  misc_RNA (1)...(19): siRNA sense strand
gagugagacugggacaaga

SEQ ID NO: 1344395 - RNA, 19 nt, Homo sapiens
  misc_RNA (1)...(19): siRNA sense strand
cccuggagcuugcugugua

SEQ ID NO: 1344396 - RNA, 19 nt, Homo sapiens
  misc_RNA (1)...(19): siRNA sense strand
aagaugcucugcuggacuu

SEQ ID NO: 1344397 - RNA, 19 nt, Homo sapiens
  misc_RNA (1)...(19): siRNA sense strand
gaugccagcagcccaagaa

SEQ ID NO: 1344398 - RNA, 19 nt, Homo sapiens
  misc_RNA (1)...(19): siRNA sense strand
cugcuggacuugagcuuug

SEQ ID NO: 1344399 - RNA, 19 nt, Homo sapiens
  misc_RNA (1)...(19): siRNA sense strand
gacuugagcuuugccuaca

SEQ ID NO: 1344400 - RNA, 19 nt, Homo sapiens
  misc_RNA (1)...(19): siRNA sense strand
ccgcggugaucgaguguug

SEQ ID NO: 1344401 - RNA, 19 nt, Homo sapiens
  misc_RNA (1)...(19): siRNA sense strand
ggaauugcucugccuugug

SEQ ID NO: 1344402 - RNA, 19 nt, Homo sapiens
  misc_RNA (1)...(19): siRNA sense strand
ccucgacccugagcucuau

SEQ ID NO: 1344403 - RNA, 19 nt, Homo sapiens
  misc_RNA (1)...(19): siRNA sense strand
cgcuaugccugucgaauuc

SEQ ID NO: 1344404 - RNA, 19 nt, Homo sapiens
  misc_RNA (1)...(19): siRNA sense strand
cagccucucugggcacuug

SEQ ID NO: 1344405 - RNA, 19 nt, Homo sapiens
  misc_RNA (1)...(19): siRNA sense strand
ccauacaccugccauaccu

SEQ ID NO: 1344406 - RNA, 19 nt, Homo sapiens
  misc_RNA (1)...(19): siRNA sense strand
cggaauugcucugccuugu

SEQ ID NO: 1344407 - RNA, 19 nt, Homo sapiens
  misc_RNA (1)...(19): siRNA sense strand
ccaccauacaccugccaua

SEQ ID NO: 1344408 - RNA, 19 nt, Homo sapiens
  misc_RNA (1)...(19): siRNA sense strand
ugaggucacccuggaggua

SEQ ID NO: 1344409 - RNA, 19 nt, Homo sapiens
  misc_RNA (1)...(19): siRNA sense strand
gcaccuggguaagggacau

SEQ ID NO: 1344410 - RNA, 19 nt, Homo sapiens
  misc_RNA (1)...(19): siRNA sense strand
ggauggggcuuggcugaug

SEQ ID NO: 1344411 - RNA, 19 nt, Homo sapiens
  misc_RNA (1)...(19): siRNA sense strand
acgcuaugccugucgaauu

SEQ ID NO: 1344412 - RNA, 19 nt, Homo sapiens
  misc_RNA (1)...(19): siRNA sense strand
gcaccacacugcgagauga

SEQ ID NO: 1344413 - RNA, 19 nt, Homo sapiens
  misc_RNA (1)...(19): siRNA sense strand
gcaccuaucuggccaccau

SEQ ID NO: 1344414 - RNA, 19 nt, Homo sapiens
  misc_RNA (1)...(19): siRNA sense strand
gcuccucgcuguggcuuug

SEQ ID NO: 1344415 - RNA, 19 nt, Homo sapiens
  misc_RNA (1)...(19): siRNA sense strand
gagugagacugggacaaga

SEQ ID NO: 1344416 - RNA, 19 nt, Homo sapiens
  misc_RNA (1)...(19): siRNA sense strand
cccuggagcuugcugugua

SEQ ID NO: 1344417 - RNA, 19 nt, Homo sapiens
  misc_RNA (1)...(19): siRNA sense strand
aagaugcucugcuggacuu

SEQ ID NO: 1344418 - RNA, 19 nt, Homo sapiens
  misc_RNA (1)...(19): siRNA sense strand
gaugccagcagcccaagaa

SEQ ID NO: 1344419 - RNA, 19 nt, Homo sapiens
  misc_RNA (1)...(19): siRNA sense strand
cugcuggacuugagcuuug

SEQ ID NO: 1344420 - RNA, 19 nt, Homo sapiens
  misc_RNA (1)...(19): siRNA sense strand
gacuugagcuuugccuaca

SEQ ID NO: 1344421 - RNA, 19 nt, Homo sapiens
  misc_RNA (1)...(19): siRNA sense strand
ccgcggugaucgaguguug

SEQ ID NO: 1344422 - RNA, 19 nt, Homo sapiens
  misc_RNA (1)...(19): siRNA sense strand
ccucgacccugagcucuau

SEQ ID NO: 1344423 - RNA, 19 nt, Homo sapiens
  misc_RNA (1)...(19): siRNA sense strand
ccauacaccugccauaccu

SEQ ID NO: 1344424 - RNA, 19 nt, Homo sapiens
  misc_RNA (1)...(19): siRNA sense strand
ccaccauacaccugccaua

SEQ ID NO: 1344425 - RNA, 19 nt, Homo sapiens
  misc_RNA (1)...(19): siRNA sense strand
gcaccuggguaagggacau

SEQ ID NO: 1344426 - RNA, 19 nt, Homo sapiens
  misc_RNA (1)...(19): siRNA sense strand
ggauggggcuuggcugaug

SEQ ID NO: 1344427 - RNA, 19 nt, Homo sapiens
  misc_RNA (1)...(19): siRNA sense strand
gaauugcucugccuugugu

SEQ ID NO: 1344428 - RNA, 19 nt, Homo sapiens
  misc_RNA (1)...(19): siRNA sense strand
gcaccacacugcgagauga

SEQ ID NO: 1344429 - RNA, 19 nt, Homo sapiens
  misc_RNA (1)...(19): siRNA sense strand
gcaccuaucuggccaccau

SEQ ID NO: 1344430 - RNA, 19 nt, Homo sapiens
  misc_RNA (1)...(19): siRNA sense strand
gcuccucgcuguggcuuug

SEQ ID NO: 1344431 - RNA, 19 nt, Homo sapiens
  misc_RNA (1)...(19): siRNA sense strand
gccuacaguucaacccuuu

SEQ ID NO: 1344432 - RNA, 19 nt, Homo sapiens
  misc_RNA (1)...(19): siRNA sense strand
gagugagacugggacaaga

SEQ ID NO: 1344433 - RNA, 19 nt, Homo sapiens
  misc_RNA (1)...(19): siRNA sense strand
cccuggagcuugcugugua

SEQ ID NO: 1344434 - RNA, 19 nt, Homo sapiens
  misc_RNA (1)...(19): siRNA sense strand
aagaugcucugcuggacuu

SEQ ID NO: 1344435 - RNA, 19 nt, Homo sapiens
  misc_RNA (1)...(19): siRNA sense strand
gaugccagcagcccaagaa

SEQ ID NO: 1344436 - RNA, 19 nt, Homo sapiens
  misc_RNA (1)...(19): siRNA sense strand
cugcuggacuugagcuuug

SEQ ID NO: 1344437 - RNA, 19 nt, Homo sapiens
  misc_RNA (1)...(19): siRNA sense strand
gacuugagcuuugccuaca

SEQ ID NO: 1344438 - RNA, 19 nt, Homo sapiens
  misc_RNA (1)...(19): siRNA sense strand
ccgcggugaucgaguguug

SEQ ID NO: 1344439 - RNA, 19 nt, Homo sapiens
  misc_RNA (1)...(19): siRNA sense strand
ggaauugcucugccuugug

SEQ ID NO: 1344440 - RNA, 19 nt, Homo sapiens
  misc_RNA (1)...(19): siRNA sense strand
ccucgacccugagcucuau

SEQ ID NO: 1344441 - RNA, 19 nt, Homo sapiens
  misc_RNA (1)...(19): siRNA sense strand
cgcuaugccugucgaauuc

SEQ ID NO: 1344442 - RNA, 19 nt, Homo sapiens
  misc_RNA (1)...(19): siRNA sense strand
cagccucucugggcacuug

SEQ ID NO: 1344443 - RNA, 19 nt, Homo sapiens
  misc_RNA (1)...(19): siRNA sense strand
ccauacaccugccauaccu

SEQ ID NO: 1344444 - RNA, 19 nt, Homo sapiens
  misc_RNA (1)...(19): siRNA sense strand
cggaauugcucugccuugu

SEQ ID NO: 1344445 - RNA, 19 nt, Homo sapiens
  misc_RNA (1)...(19): siRNA sense strand
ccaccauacaccugccaua

SEQ ID NO: 1344446 - RNA, 19 nt, Homo sapiens
  misc_RNA (1)...(19): siRNA sense strand
ugaggucacccuggaggua

SEQ ID NO: 1344447 - RNA, 19 nt, Homo sapiens
  misc_RNA (1)...(19): siRNA sense strand
gcaccuggguaagggacau

SEQ ID NO: 1344448 - RNA, 19 nt, Homo sapiens
  misc_RNA (1)...(19): siRNA sense strand
ggauggggcuuggcugaug

SEQ ID NO: 1344449 - RNA, 19 nt, Homo sapiens
  misc_RNA (1)...(19): siRNA sense strand
acgcuaugccugucgaauu

SEQ ID NO: 1344450 - RNA, 19 nt, Homo sapiens
  misc_RNA (1)...(19): siRNA sense strand
gaauugcucugccuugugu

SEQ ID NO: 1344451 - RNA, 19 nt, Homo sapiens
  misc_RNA (1)...(19): siRNA sense strand
gcaccacacugcgagauga

SEQ ID NO: 1344452 - RNA, 19 nt, Homo sapiens
  misc_RNA (1)...(19): siRNA sense strand
gcaccuaucuggccaccau

SEQ ID NO: 1344453 - RNA, 19 nt, Homo sapiens
  misc_RNA (1)...(19): siRNA sense strand
gcuccucgcuguggcuuug

SEQ ID NO: 1344454 - RNA, 19 nt, Homo sapiens
  misc_RNA (1)...(19): siRNA sense strand
gccuacaguucaacccuuu

SEQ ID NO: 1344455 - RNA, 19 nt, Homo sapiens
  misc_RNA (1)...(19): siRNA sense strand
gagugagacugggacaaga

SEQ ID NO: 1344456 - RNA, 19 nt, Homo sapiens
  misc_RNA (1)...(19): siRNA sense strand
cccuggagcuugcugugua

SEQ ID NO: 1344457 - RNA, 19 nt, Homo sapiens
  misc_RNA (1)...(19): siRNA sense strand
aagaugcucugcuggacuu

SEQ ID NO: 1344458 - RNA, 19 nt, Homo sapiens
  misc_RNA (1)...(19): siRNA sense strand
gaugccagcagcccaagaa

SEQ ID NO: 1344459 - RNA, 19 nt, Homo sapiens
  misc_RNA (1)...(19): siRNA sense strand
cugcuggacuugagcuuug

SEQ ID NO: 1344460 - RNA, 19 nt, Homo sapiens
  misc_RNA (1)...(19): siRNA sense strand
gacuugagcuuugccuaca

SEQ ID NO: 1344461 - RNA, 19 nt, Homo sapiens
  misc_RNA (1)...(19): siRNA sense strand
ccgcggugaucgaguguug

SEQ ID NO: 1344462 - RNA, 19 nt, Homo sapiens
  misc_RNA (1)...(19): siRNA sense strand
ggaauugcucugccuugug

SEQ ID NO: 1344463 - RNA, 19 nt, Homo sapiens
  misc_RNA (1)...(19): siRNA sense strand
ccucgacccugagcucuau

SEQ ID NO: 1344464 - RNA, 19 nt, Homo sapiens
  misc_RNA (1)...(19): siRNA sense strand
cgcuaugccugucgaauuc

SEQ ID NO: 1344465 - RNA, 19 nt, Homo sapiens
  misc_RNA (1)...(19): siRNA sense strand
cagccucucugggcacuug

SEQ ID NO: 1344466 - RNA, 19 nt, Homo sapiens
  misc_RNA (1)...(19): siRNA sense strand
ccauacaccugccauaccu

SEQ ID NO: 1344467 - RNA, 19 nt, Homo sapiens
  misc_RNA (1)...(19): siRNA sense strand
cggaauugcucugccuugu

SEQ ID NO: 1344468 - RNA, 19 nt, Homo sapiens
  misc_RNA (1)...(19): siRNA sense strand
ccaccauacaccugccaua

SEQ ID NO: 1344469 - RNA, 19 nt, Homo sapiens
  misc_RNA (1)...(19): siRNA sense strand
ugaggucacccuggaggua

SEQ ID NO: 1344470 - RNA, 19 nt, Homo sapiens
  misc_RNA (1)...(19): siRNA sense strand
gcaccuggguaagggacau

SEQ ID NO: 1344471 - RNA, 19 nt, Homo sapiens
  misc_RNA (1)...(19): siRNA sense strand
ggauggggcuuggcugaug

SEQ ID NO: 1344472 - RNA, 19 nt, Homo sapiens
  misc_RNA (1)...(19): siRNA sense strand
acgcuaugccugucgaauu

SEQ ID NO: 1344473 - RNA, 19 nt, Homo sapiens
  misc_RNA (1)...(19): siRNA sense strand
gcaccacacugcgagauga

SEQ ID NO: 1344474 - RNA, 19 nt, Homo sapiens
  misc_RNA (1)...(19): siRNA sense strand
gcaccuaucuggccaccau

SEQ ID NO: 1344475 - RNA, 19 nt, Homo sapiens
  misc_RNA (1)...(19): siRNA sense strand
gcuccucgcuguggcuuug

SEQ ID NO: 1344476 - RNA, 19 nt, Homo sapiens
  misc_RNA (1)...(19): siRNA sense strand
gagugagacugggacaaga

SEQ ID NO: 1344477 - RNA, 19 nt, Homo sapiens
  misc_RNA (1)...(19): siRNA sense strand
cccuggagcuugcugugua

SEQ ID NO: 1344478 - RNA, 19 nt, Homo sapiens
  misc_RNA (1)...(19): siRNA sense strand
aagaugcucugcuggacuu

SEQ ID NO: 1344479 - RNA, 19 nt, Homo sapiens
  misc_RNA (1)...(19): siRNA sense strand
gaugccagcagcccaagaa

SEQ ID NO: 1344480 - RNA, 19 nt, Homo sapiens
  misc_RNA (1)...(19): siRNA sense strand
cugcuggacuugagcuuug

SEQ ID NO: 1344481 - RNA, 19 nt, Homo sapiens
  misc_RNA (1)...(19): siRNA sense strand
gacuugagcuuugccuaca

SEQ ID NO: 1344482 - RNA, 19 nt, Homo sapiens
  misc_RNA (1)...(19): siRNA sense strand
ccgcggugaucgaguguug

SEQ ID NO: 1344483 - RNA, 19 nt, Homo sapiens
  misc_RNA (1)...(19): siRNA sense strand
ccucgacccugagcucuau

SEQ ID NO: 1344484 - RNA, 19 nt, Homo sapiens
  misc_RNA (1)...(19): siRNA sense strand
ccauacaccugccauaccu

SEQ ID NO: 1344485 - RNA, 19 nt, Homo sapiens
  misc_RNA (1)...(19): siRNA sense strand
ccaccauacaccugccaua

SEQ ID NO: 1344486 - RNA, 19 nt, Homo sapiens
  misc_RNA (1)...(19): siRNA sense strand
gcaccuggguaagggacau

SEQ ID NO: 1344487 - RNA, 19 nt, Homo sapiens
  misc_RNA (1)...(19): siRNA sense strand
ggauggggcuuggcugaug

SEQ ID NO: 1344488 - RNA, 19 nt, Homo sapiens
  misc_RNA (1)...(19): siRNA sense strand
gaauugcucugccuugugu

SEQ ID NO: 1344489 - RNA, 19 nt, Homo sapiens
  misc_RNA (1)...(19): siRNA sense strand
gcaccacacugcgagauga

SEQ ID NO: 1344490 - RNA, 19 nt, Homo sapiens
  misc_RNA (1)...(19): siRNA sense strand
gcaccuaucuggccaccau

SEQ ID NO: 1344491 - RNA, 19 nt, Homo sapiens
  misc_RNA (1)...(19): siRNA sense strand
gcuccucgcuguggcuuug

SEQ ID NO: 1344492 - RNA, 19 nt, Homo sapiens
  misc_RNA (1)...(19): siRNA sense strand
gccuacaguucaacccuuu

SEQ ID NO: 1344493 - RNA, 19 nt, Homo sapiens
  misc_RNA (1)...(19): siRNA sense strand
gagugagacugggacaaga

SEQ ID NO: 1344494 - RNA, 19 nt, Homo sapiens
  misc_RNA (1)...(19): siRNA sense strand
cccuggagcuugcugugua

SEQ ID NO: 1344495 - RNA, 19 nt, Homo sapiens
  misc_RNA (1)...(19): siRNA sense strand
aagaugcucugcuggacuu

SEQ ID NO: 1344496 - RNA, 19 nt, Homo sapiens
  misc_RNA (1)...(19): siRNA sense strand
gaugccagcagcccaagaa

SEQ ID NO: 1344497 - RNA, 19 nt, Homo sapiens
  misc_RNA (1)...(19): siRNA sense strand
cugcuggacuugagcuuug

SEQ ID NO: 1344498 - RNA, 19 nt, Homo sapiens
  misc_RNA (1)...(19): siRNA sense strand
gacuugagcuuugccuaca

SEQ ID NO: 1344499 - RNA, 19 nt, Homo sapiens
  misc_RNA (1)...(19): siRNA sense strand
ccgcggugaucgaguguug

SEQ ID NO: 1344500 - RNA, 19 nt, Homo sapiens
  misc_RNA (1)...(19): siRNA sense strand
ggaauugcucugccuugug

SEQ ID NO: 1344501 - RNA, 19 nt, Homo sapiens
  misc_RNA (1)...(19): siRNA sense strand
ccucgacccugagcucuau

SEQ ID NO: 1344502 - RNA, 19 nt, Homo sapiens
  misc_RNA (1)...(19): siRNA sense strand
cgcuaugccugucgaauuc

SEQ ID NO: 1344503 - RNA, 19 nt, Homo sapiens
  misc_RNA (1)...(19): siRNA sense strand
cagccucucugggcacuug

SEQ ID NO: 1344504 - RNA, 19 nt, Homo sapiens
  misc_RNA (1)...(19): siRNA sense strand
ccauacaccugccauaccu

SEQ ID NO: 1344505 - RNA, 19 nt, Homo sapiens
  misc_RNA (1)...(19): siRNA sense strand
cggaauugcucugccuugu

SEQ ID NO: 1344506 - RNA, 19 nt, Homo sapiens
  misc_RNA (1)...(19): siRNA sense strand
ccaccauacaccugccaua

SEQ ID NO: 1344507 - RNA, 19 nt, Homo sapiens
  misc_RNA (1)...(19): siRNA sense strand
ugaggucacccuggaggua

SEQ ID NO: 1344508 - RNA, 19 nt, Homo sapiens
  misc_RNA (1)...(19): siRNA sense strand
gcaccuggguaagggacau

SEQ ID NO: 1344509 - RNA, 19 nt, Homo sapiens
  misc_RNA (1)...(19): siRNA sense strand
ggauggggcuuggcugaug

SEQ ID NO: 1344510 - RNA, 19 nt, Homo sapiens
  misc_RNA (1)...(19): siRNA sense strand
acgcuaugccugucgaauu

SEQ ID NO: 1344511 - RNA, 19 nt, Homo sapiens
  misc_RNA (1)...(19): siRNA sense strand
gcaaagaggcggaaauuaa

SEQ ID NO: 1344512 - RNA, 19 nt, Homo sapiens
  misc_RNA (1)...(19): siRNA sense strand
gcauguaucucuucuaugg

SEQ ID NO: 1344513 - RNA, 19 nt, Homo sapiens
  misc_RNA (1)...(19): siRNA sense strand
ccaagaaggugcagcauuc

SEQ ID NO: 1344514 - RNA, 19 nt, Homo sapiens
  misc_RNA (1)...(19): siRNA sense strand
ccgaugaguugcugaauaa

SEQ ID NO: 1344515 - RNA, 19 nt, Homo sapiens
  misc_RNA (1)...(19): siRNA sense strand
gcaagaagaacccagauga

SEQ ID NO: 1344516 - RNA, 19 nt, Homo sapiens
  misc_RNA (1)...(19): siRNA sense strand
gaacccagaugacuucaag

SEQ ID NO: 1344517 - RNA, 19 nt, Homo sapiens
  misc_RNA (1)...(19): siRNA sense strand
ggacuacaccuacuacuuc

SEQ ID NO: 1344518 - RNA, 19 nt, Homo sapiens
  misc_RNA (1)...(19): siRNA sense strand
cagagaagcaaauagguua

SEQ ID NO: 1344519 - RNA, 19 nt, Homo sapiens
  misc_RNA (1)...(19): siRNA sense strand
ccaccgaccuccaggacua

SEQ ID NO: 1344520 - RNA, 19 nt, Homo sapiens
  misc_RNA (1)...(19): siRNA sense strand
caacaacgccaucaagaau

SEQ ID NO: 1344521 - RNA, 19 nt, Homo sapiens
  misc_RNA (1)...(19): siRNA sense strand
ggacaucggcccucccauu

SEQ ID NO: 1344522 - RNA, 19 nt, Homo sapiens
  misc_RNA (1)...(19): siRNA sense strand
gccgaugaguugcugaaua

SEQ ID NO: 1344523 - RNA, 19 nt, Homo sapiens
  misc_RNA (1)...(19): siRNA sense strand
gagcaaagaggcggaaauu

SEQ ID NO: 1344524 - RNA, 19 nt, Homo sapiens
  misc_RNA (1)...(19): siRNA sense strand
gcuccgaguucucccauga

SEQ ID NO: 1344525 - RNA, 19 nt, Homo sapiens
  misc_RNA (1)...(19): siRNA sense strand
acaaggaacuggccaacau

SEQ ID NO: 1344526 - RNA, 19 nt, Homo sapiens
  misc_RNA (1)...(19): siRNA sense strand
ccgcauguaucucuucuau

SEQ ID NO: 1344527 - RNA, 19 nt, Homo sapiens
  misc_RNA (1)...(19): siRNA sense strand
gcucugcucuccuggacaa

SEQ ID NO: 1344528 - RNA, 19 nt, Homo sapiens
  misc_RNA (1)...(19): siRNA sense strand
caacauccgcuccaaguuc

SEQ ID NO: 1344529 - RNA, 19 nt, Homo sapiens
  misc_RNA (1)...(19): siRNA sense strand
acaacgccaucaagaauga

SEQ ID NO: 1344530 - RNA, 19 nt, Homo sapiens
  misc_RNA (1)...(19): siRNA sense strand
caaagaggcggaaauuaag

SEQ ID NO: 1344531 - RNA, 19 nt, Homo sapiens
  misc_RNA (1)...(19): siRNA sense strand
uuaagagaaucaacaagga

SEQ ID NO: 1344532 - RNA, 19 nt, Homo sapiens
  misc_RNA (1)...(19): siRNA sense strand
gcagaucggagucaaguca

SEQ ID NO: 1344533 - RNA, 19 nt, Homo sapiens
  misc_RNA (1)...(19): siRNA sense strand
ugguacaccugcucaauga

SEQ ID NO: 1344534 - RNA, 19 nt, Homo sapiens
  misc_RNA (1)...(19): siRNA sense strand
ggagaugggcgaggccuuu

SEQ ID NO: 1344535 - RNA, 19 nt, Homo sapiens
  misc_RNA (1)...(19): siRNA sense strand
ccacggugcuggaggagau

SEQ ID NO: 1344536 - RNA, 19 nt, Homo sapiens
  misc_RNA (1)...(19): siRNA sense strand
cugaauaaguuugugugua

SEQ ID NO: 1344537 - RNA, 19 nt, Homo sapiens
  misc_RNA (1)...(19): siRNA sense strand
gccaugacauugacuuugg

SEQ ID NO: 1344538 - RNA, 19 nt, Homo sapiens
  misc_RNA (1)...(19): siRNA sense strand
ucaccugucucugcaagaa

SEQ ID NO: 1344539 - RNA, 19 nt, Homo sapiens
  misc_RNA (1)...(19): siRNA sense strand
gaaguacgccguggacuac

SEQ ID NO: 1344540 - RNA, 19 nt, Homo sapiens
  misc_RNA (1)...(19): siRNA sense strand
caaguucaaaggagacaaa

SEQ ID NO: 1344541 - RNA, 19 nt, Homo sapiens
  misc_RNA (1)...(19): siRNA sense strand
ccaccuacaucaaguucau

SEQ ID NO: 1344542 - RNA, 19 nt, Homo sapiens
  misc_RNA (1)...(19): siRNA sense strand
uuggauggcuacaguaaga

SEQ ID NO: 1344543 - RNA, 19 nt, Homo sapiens
  misc_RNA (1)...(19): siRNA sense strand
ugagugaggagguguggua

SEQ ID NO: 1344544 - RNA, 19 nt, Homo sapiens
  misc_RNA (1)...(19): siRNA sense strand
ucaacaacgccaucaagaa

SEQ ID NO: 1344545 - RNA, 19 nt, Homo sapiens
  misc_RNA (1)...(19): siRNA sense strand
uccaauaaauacacagaga

SEQ ID NO: 1344546 - RNA, 19 nt, Homo sapiens
  misc_RNA (1)...(19): siRNA sense strand
cggugcaguuccagaauuu

SEQ ID NO: 1344547 - RNA, 19 nt, Homo sapiens
  misc_RNA (1)...(19): siRNA sense strand
uaagagaaucaacaaggaa

SEQ ID NO: 1344548 - RNA, 19 nt, Homo sapiens
  misc_RNA (1)...(19): siRNA sense strand
ccaauaaauacacagagaa

SEQ ID NO: 1344549 - RNA, 19 nt, Homo sapiens
  misc_RNA (1)...(19): siRNA sense strand
ucuguugaguuccaauaaa

SEQ ID NO: 1344550 - RNA, 19 nt, Homo sapiens
  misc_RNA (1)...(19): siRNA sense strand
gaauaaguuuguguguaag

SEQ ID NO: 1344551 - RNA, 19 nt, Homo sapiens
  misc_RNA (1)...(19): siRNA sense strand
guaaacugcuuuucaucuu

SEQ ID NO: 1344552 - RNA, 19 nt, Homo sapiens
  misc_RNA (1)...(19): siRNA sense strand
cagugaccaucaacaaguu

SEQ ID NO: 1344553 - RNA, 19 nt, Homo sapiens
  misc_RNA (1)...(19): siRNA sense strand
augaguugcugaauaaguu

SEQ ID NO: 1344554 - RNA, 19 nt, Homo sapiens
  misc_RNA (1)...(19): siRNA sense strand
aggcggaaauuaagagaau

SEQ ID NO: 1344555 - RNA, 19 nt, Homo sapiens
  misc_RNA (1)...(19): siRNA sense strand
gaagguuggcggcuacauc

SEQ ID NO: 1344556 - RNA, 19 nt, Homo sapiens
  misc_RNA (1)...(19): siRNA sense strand
agaaguacgccguggacua

SEQ ID NO: 1344557 - RNA, 19 nt, Homo sapiens
  misc_RNA (1)...(19): siRNA sense strand
ggacgcagaaguuacuaag

SEQ ID NO: 1344558 - RNA, 19 nt, Homo sapiens
  misc_RNA (1)...(19): siRNA sense strand
ggauggcuacaguaagaaa

SEQ ID NO: 1344559 - RNA, 19 nt, Homo sapiens
  misc_RNA (1)...(19): siRNA sense strand
gggacagcauggacagugu

SEQ ID NO: 1344560 - RNA, 19 nt, Homo sapiens
  misc_RNA (1)...(19): siRNA sense strand
caauaaauacacagagaag

SEQ ID NO: 1344561 - RNA, 19 nt, Homo sapiens
  misc_RNA (1)...(19): siRNA sense strand
cugugaaucuguugaguuc

SEQ ID NO: 1344562 - RNA, 19 nt, Homo sapiens
  misc_RNA (1)...(19): siRNA sense strand
gacaucggcccucccauuc

SEQ ID NO: 1344563 - RNA, 19 nt, Homo sapiens
  misc_RNA (1)...(19): siRNA sense strand
cgucaucaaugcccucaag

SEQ ID NO: 1344564 - RNA, 19 nt, Homo sapiens
  misc_RNA (1)...(19): siRNA sense strand
gaugaguugcugaauaagu

SEQ ID NO: 1344565 - RNA, 19 nt, Homo sapiens
  misc_RNA (1)...(19): siRNA sense strand
gugaaucuguugaguucca

SEQ ID NO: 1344566 - RNA, 19 nt, Homo sapiens
  misc_RNA (1)...(19): siRNA sense strand
ccagugaccaucaacaagu

SEQ ID NO: 1344567 - RNA, 19 nt, Homo sapiens
  misc_RNA (1)...(19): siRNA sense strand
ggagcaaugccaagcagau

SEQ ID NO: 1344568 - RNA, 19 nt, Homo sapiens
  misc_RNA (1)...(19): siRNA sense strand
uggagacugugcucaacaa

SEQ ID NO: 1344569 - RNA, 19 nt, Homo sapiens
  misc_RNA (1)...(19): siRNA sense strand
agaagaacccagaugacuu

SEQ ID NO: 1344570 - RNA, 19 nt, Homo sapiens
  misc_RNA (1)...(19): siRNA sense strand
gcugugaaucuguugaguu

SEQ ID NO: 1344571 - RNA, 19 nt, Homo sapiens
  misc_RNA (1)...(19): siRNA sense strand
agucagaguuccgacagaa

SEQ ID NO: 1344572 - RNA, 19 nt, Homo sapiens
  misc_RNA (1)...(19): siRNA sense strand
gaccaucagccucaucauc

SEQ ID NO: 1344573 - RNA, 19 nt, Homo sapiens
  misc_RNA (1)...(19): siRNA sense strand
gagaccaucagccucauca

SEQ ID NO: 1344574 - RNA, 19 nt, Homo sapiens
  misc_RNA (1)...(19): siRNA sense strand
acagagaagcaaauagguu

SEQ ID NO: 1344575 - RNA, 19 nt, Homo sapiens
  misc_RNA (1)...(19): siRNA sense strand
auacacagagaagcaaaua

SEQ ID NO: 1344576 - RNA, 19 nt, Homo sapiens
  misc_RNA (1)...(19): siRNA sense strand
cuguugaguuccaauaaau

SEQ ID NO: 1344577 - RNA, 19 nt, Homo sapiens
  misc_RNA (1)...(19): siRNA sense strand
uaaauacacagagaagcaa

SEQ ID NO: 1344578 - RNA, 19 nt, Homo sapiens
  misc_RNA (1)...(19): siRNA sense strand
ucggugcaguuccagaauu

SEQ ID NO: 1344579 - RNA, 19 nt, Homo sapiens
  misc_RNA (1)...(19): siRNA sense strand
ggaacuguaagagcaaaga

SEQ ID NO: 1344580 - RNA, 19 nt, Homo sapiens
  misc_RNA (1)...(19): siRNA sense strand
ucaaguucaucaaccucuu

SEQ ID NO: 1344581 - RNA, 19 nt, Homo sapiens
  misc_RNA (1)...(19): siRNA sense strand
ggaguuugggaaccugauu

SEQ ID NO: 1344582 - RNA, 19 nt, Homo sapiens
  misc_RNA (1)...(19): siRNA sense strand
acacagagaagcaaauagg

SEQ ID NO: 1344583 - RNA, 19 nt, Homo sapiens
  misc_RNA (1)...(19): siRNA sense strand
ucauuucugugcuggugaa

SEQ ID NO: 1344584 - RNA, 19 nt, Homo sapiens
  misc_RNA (1)...(19): siRNA sense strand
cauggaggcugugaaucug

SEQ ID NO: 1344585 - RNA, 19 nt, Homo sapiens
  misc_RNA (1)...(19): siRNA sense strand
aaagaggcggaaauuaaga

SEQ ID NO: 1344586 - RNA, 19 nt, Homo sapiens
  misc_RNA (1)...(19): siRNA sense strand
gcggaaauuaagagaauca

SEQ ID NO: 1344587 - RNA, 19 nt, Homo sapiens
  misc_RNA (1)...(19): siRNA sense strand
gccaacauccgcuccaagu

SEQ ID NO: 1344588 - RNA, 19 nt, Homo sapiens
  misc_RNA (1)...(19): siRNA sense strand
aacauccgcuccaaguuca

SEQ ID NO: 1344589 - RNA, 19 nt, Homo sapiens
  misc_RNA (1)...(19): siRNA sense strand
uccggaagccgaugaguug

SEQ ID NO: 1344590 - RNA, 19 nt, Homo sapiens
  misc_RNA (1)...(19): siRNA sense strand
acgagaacauggugaaggu

SEQ ID NO: 1344591 - RNA, 19 nt, Homo sapiens
  misc_RNA (1)...(19): siRNA sense strand
cagaggaugcggcugugaa

SEQ ID NO: 1344592 - RNA, 19 nt, Homo sapiens
  misc_RNA (1)...(19): siRNA sense strand
caucaacaacgccaucaag

SEQ ID NO: 1344593 - RNA, 19 nt, Homo sapiens
  misc_RNA (1)...(19): siRNA sense strand
uggaggcugugaaucuguu

SEQ ID NO: 1344594 - RNA, 19 nt, Homo sapiens
  misc_RNA (1)...(19): siRNA sense strand
ucucuucuauggcaacaag

SEQ ID NO: 1344595 - RNA, 19 nt, Homo sapiens
  misc_RNA (1)...(19): siRNA sense strand
ggugugguaccgugugcua

SEQ ID NO: 1344596 - RNA, 19 nt, Homo sapiens
  misc_RNA (1)...(19): siRNA sense strand
gcagaucgugucggagaug

SEQ ID NO: 1344597 - RNA, 19 nt, Homo sapiens
  misc_RNA (1)...(19): siRNA sense strand
gagcaaugccaagcagauc

SEQ ID NO: 1344598 - RNA, 19 nt, Homo sapiens
  misc_RNA (1)...(19): siRNA sense strand
gaguuccaauaaauacaca

SEQ ID NO: 1344599 - RNA, 19 nt, Homo sapiens
  misc_RNA (1)...(19): siRNA sense strand
gugguacaccugcucaaug

SEQ ID NO: 1344600 - RNA, 19 nt, Homo sapiens
  misc_RNA (1)...(19): siRNA sense strand
gaacuguaagagcaaagag

SEQ ID NO: 1344601 - RNA, 19 nt, Homo sapiens
  misc_RNA (1)...(19): siRNA sense strand
auaaauacacagagaagca

SEQ ID NO: 1344602 - RNA, 19 nt, Homo sapiens
  misc_RNA (1)...(19): siRNA sense strand
uuacuaaggccaagcuucu

SEQ ID NO: 1344603 - RNA, 19 nt, Homo sapiens
  misc_RNA (1)...(19): siRNA sense strand
ggaaauuaagagaaucaac

SEQ ID NO: 1344604 - RNA, 19 nt, Homo sapiens
  misc_RNA (1)...(19): siRNA sense strand
gagaaucaacaaggaacug

SEQ ID NO: 1344605 - RNA, 19 nt, Homo sapiens
  misc_RNA (1)...(19): siRNA sense strand
gcucaaugaccagcacaug

SEQ ID NO: 1344606 - RNA, 19 nt, Homo sapiens
  misc_RNA (1)...(19): siRNA sense strand
gguuaccuguucauuucug

SEQ ID NO: 1344607 - RNA, 19 nt, Homo sapiens
  misc_RNA (1)...(19): siRNA sense strand
gagaugggcgaggccuuug

SEQ ID NO: 1344608 - RNA, 19 nt, Homo sapiens
  misc_RNA (1)...(19): siRNA sense strand
caaguucaucaaccucuuc

SEQ ID NO: 1344609 - RNA, 19 nt, Homo sapiens
  misc_RNA (1)...(19): siRNA sense strand
gaguuugggaaccugauug

SEQ ID NO: 1344610 - RNA, 19 nt, Homo sapiens
  misc_RNA (1)...(19): siRNA sense strand
caagaagaacccagaugac

SEQ ID NO: 1344611 - RNA, 19 nt, Homo sapiens
  misc_RNA (1)...(19): siRNA sense strand
gcaaagaggcggaaauuaa

SEQ ID NO: 1344612 - RNA, 19 nt, Homo sapiens
  misc_RNA (1)...(19): siRNA sense strand
gcauguaucucuucuaugg

SEQ ID NO: 1344613 - RNA, 19 nt, Homo sapiens
  misc_RNA (1)...(19): siRNA sense strand
ccaagaaggugcagcauuc

SEQ ID NO: 1344614 - RNA, 19 nt, Homo sapiens
  misc_RNA (1)...(19): siRNA sense strand
ccgaugaguugcugaauaa

SEQ ID NO: 1344615 - RNA, 19 nt, Homo sapiens
  misc_RNA (1)...(19): siRNA sense strand
gcaagaagaacccagauga

SEQ ID NO: 1344616 - RNA, 19 nt, Homo sapiens
  misc_RNA (1)...(19): siRNA sense strand
gaacccagaugacuucaag

SEQ ID NO: 1344617 - RNA, 19 nt, Homo sapiens
  misc_RNA (1)...(19): siRNA sense strand
ggacuacaccuacuacuuc

SEQ ID NO: 1344618 - RNA, 19 nt, Homo sapiens
  misc_RNA (1)...(19): siRNA sense strand
cagagaagcaaauagguua

SEQ ID NO: 1344619 - RNA, 19 nt, Homo sapiens
  misc_RNA (1)...(19): siRNA sense strand
ccaccgaccuccaggacua

SEQ ID NO: 1344620 - RNA, 19 nt, Homo sapiens
  misc_RNA (1)...(19): siRNA sense strand
caacaacgccaucaagaau

SEQ ID NO: 1344621 - RNA, 19 nt, Homo sapiens
  misc_RNA (1)...(19): siRNA sense strand
ggacaucggcccucccauu

SEQ ID NO: 1344622 - RNA, 19 nt, Homo sapiens
  misc_RNA (1)...(19): siRNA sense strand
gccgaugaguugcugaaua

SEQ ID NO: 1344623 - RNA, 19 nt, Homo sapiens
  misc_RNA (1)...(19): siRNA sense strand
gagcaaagaggcggaaauu

SEQ ID NO: 1344624 - RNA, 19 nt, Homo sapiens
  misc_RNA (1)...(19): siRNA sense strand
gcuccgaguucucccauga

SEQ ID NO: 1344625 - RNA, 19 nt, Homo sapiens
  misc_RNA (1)...(19): siRNA sense strand
acaaggaacuggccaacau

SEQ ID NO: 1344626 - RNA, 19 nt, Homo sapiens
  misc_RNA (1)...(19): siRNA sense strand
ccgcauguaucucuucuau

SEQ ID NO: 1344627 - RNA, 19 nt, Homo sapiens
  misc_RNA (1)...(19): siRNA sense strand
gcucugcucuccuggacaa

SEQ ID NO: 1344628 - RNA, 19 nt, Homo sapiens
  misc_RNA (1)...(19): siRNA sense strand
caacauccgcuccaaguuc

SEQ ID NO: 1344629 - RNA, 19 nt, Homo sapiens
  misc_RNA (1)...(19): siRNA sense strand
acaacgccaucaagaauga

SEQ ID NO: 1344630 - RNA, 19 nt, Homo sapiens
  misc_RNA (1)...(19): siRNA sense strand
caaagaggcggaaauuaag

SEQ ID NO: 1344631 - RNA, 19 nt, Homo sapiens
  misc_RNA (1)...(19): siRNA sense strand
uuaagagaaucaacaagga

SEQ ID NO: 1344632 - RNA, 19 nt, Homo sapiens
  misc_RNA (1)...(19): siRNA sense strand
gcagaucggagucaaguca

SEQ ID NO: 1344633 - RNA, 19 nt, Homo sapiens
  misc_RNA (1)...(19): siRNA sense strand
ugguacaccugcucaauga

SEQ ID NO: 1344634 - RNA, 19 nt, Homo sapiens
  misc_RNA (1)...(19): siRNA sense strand
ggagaugggcgaggccuuu

SEQ ID NO: 1344635 - RNA, 19 nt, Homo sapiens
  misc_RNA (1)...(19): siRNA sense strand
ccacggugcuggaggagau

SEQ ID NO: 1344636 - RNA, 19 nt, Homo sapiens
  misc_RNA (1)...(19): siRNA sense strand
cugaauaaguuugugugua

SEQ ID NO: 1344637 - RNA, 19 nt, Homo sapiens
  misc_RNA (1)...(19): siRNA sense strand
gccaugacauugacuuugg

SEQ ID NO: 1344638 - RNA, 19 nt, Homo sapiens
  misc_RNA (1)...(19): siRNA sense strand
ucaccugucucugcaagaa

SEQ ID NO: 1344639 - RNA, 19 nt, Homo sapiens
  misc_RNA (1)...(19): siRNA sense strand
gaaguacgccguggacuac

SEQ ID NO: 1344640 - RNA, 19 nt, Homo sapiens
  misc_RNA (1)...(19): siRNA sense strand
caaguucaaaggagacaaa

SEQ ID NO: 1344641 - RNA, 19 nt, Homo sapiens
  misc_RNA (1)...(19): siRNA sense strand
ccaccuacaucaaguucau

SEQ ID NO: 1344642 - RNA, 19 nt, Homo sapiens
  misc_RNA (1)...(19): siRNA sense strand
uuggauggcuacaguaaga

SEQ ID NO: 1344643 - RNA, 19 nt, Homo sapiens
  misc_RNA (1)...(19): siRNA sense strand
ugagugaggagguguggua

SEQ ID NO: 1344644 - RNA, 19 nt, Homo sapiens
  misc_RNA (1)...(19): siRNA sense strand
ucaacaacgccaucaagaa

SEQ ID NO: 1344645 - RNA, 19 nt, Homo sapiens
  misc_RNA (1)...(19): siRNA sense strand
uccaauaaauacacagaga

SEQ ID NO: 1344646 - RNA, 19 nt, Homo sapiens
  misc_RNA (1)...(19): siRNA sense strand
cggugcaguuccagaauuu

SEQ ID NO: 1344647 - RNA, 19 nt, Homo sapiens
  misc_RNA (1)...(19): siRNA sense strand
uaagagaaucaacaaggaa

SEQ ID NO: 1344648 - RNA, 19 nt, Homo sapiens
  misc_RNA (1)...(19): siRNA sense strand
ccaauaaauacacagagaa

SEQ ID NO: 1344649 - RNA, 19 nt, Homo sapiens
  misc_RNA (1)...(19): siRNA sense strand
ucuguugaguuccaauaaa

SEQ ID NO: 1344650 - RNA, 19 nt, Homo sapiens
  misc_RNA (1)...(19): siRNA sense strand
gaauaaguuuguguguaag

SEQ ID NO: 1344651 - RNA, 19 nt, Homo sapiens
  misc_RNA (1)...(19): siRNA sense strand
guaaacugcuuuucaucuu

SEQ ID NO: 1344652 - RNA, 19 nt, Homo sapiens
  misc_RNA (1)...(19): siRNA sense strand
cagugaccaucaacaaguu

SEQ ID NO: 1344653 - RNA, 19 nt, Homo sapiens
  misc_RNA (1)...(19): siRNA sense strand
augaguugcugaauaaguu

SEQ ID NO: 1344654 - RNA, 19 nt, Homo sapiens
  misc_RNA (1)...(19): siRNA sense strand
aggcggaaauuaagagaau

SEQ ID NO: 1344655 - RNA, 19 nt, Homo sapiens
  misc_RNA (1)...(19): siRNA sense strand
gaagguuggcggcuacauc

SEQ ID NO: 1344656 - RNA, 19 nt, Homo sapiens
  misc_RNA (1)...(19): siRNA sense strand
agaaguacgccguggacua

SEQ ID NO: 1344657 - RNA, 19 nt, Homo sapiens
  misc_RNA (1)...(19): siRNA sense strand
ggacgcagaaguuacuaag

SEQ ID NO: 1344658 - RNA, 19 nt, Homo sapiens
  misc_RNA (1)...(19): siRNA sense strand
ggauggcuacaguaagaaa

SEQ ID NO: 1344659 - RNA, 19 nt, Homo sapiens
  misc_RNA (1)...(19): siRNA sense strand
gggacagcauggacagugu

SEQ ID NO: 1344660 - RNA, 19 nt, Homo sapiens
  misc_RNA (1)...(19): siRNA sense strand
caauaaauacacagagaag

SEQ ID NO: 1344661 - RNA, 19 nt, Homo sapiens
  misc_RNA (1)...(19): siRNA sense strand
cugugaaucuguugaguuc

SEQ ID NO: 1344662 - RNA, 19 nt, Homo sapiens
  misc_RNA (1)...(19): siRNA sense strand
gacaucggcccucccauuc

SEQ ID NO: 1344663 - RNA, 19 nt, Homo sapiens
  misc_RNA (1)...(19): siRNA sense strand
cgucaucaaugcccucaag

SEQ ID NO: 1344664 - RNA, 19 nt, Homo sapiens
  misc_RNA (1)...(19): siRNA sense strand
gaugaguugcugaauaagu

SEQ ID NO: 1344665 - RNA, 19 nt, Homo sapiens
  misc_RNA (1)...(19): siRNA sense strand
gugaaucuguugaguucca

SEQ ID NO: 1344666 - RNA, 19 nt, Homo sapiens
  misc_RNA (1)...(19): siRNA sense strand
ccagugaccaucaacaagu

SEQ ID NO: 1344667 - RNA, 19 nt, Homo sapiens
  misc_RNA (1)...(19): siRNA sense strand
ggagcaaugccaagcagau

SEQ ID NO: 1344668 - RNA, 19 nt, Homo sapiens
  misc_RNA (1)...(19): siRNA sense strand
uggagacugugcucaacaa

SEQ ID NO: 1344669 - RNA, 19 nt, Homo sapiens
  misc_RNA (1)...(19): siRNA sense strand
agaagaacccagaugacuu

SEQ ID NO: 1344670 - RNA, 19 nt, Homo sapiens
  misc_RNA (1)...(19): siRNA sense strand
gcugugaaucuguugaguu

SEQ ID NO: 1344671 - RNA, 19 nt, Homo sapiens
  misc_RNA (1)...(19): siRNA sense strand
agucagaguuccgacagaa

SEQ ID NO: 1344672 - RNA, 19 nt, Homo sapiens
  misc_RNA (1)...(19): siRNA sense strand
gaccaucagccucaucauc

SEQ ID NO: 1344673 - RNA, 19 nt, Homo sapiens
  misc_RNA (1)...(19): siRNA sense strand
gagaccaucagccucauca

SEQ ID NO: 1344674 - RNA, 19 nt, Homo sapiens
  misc_RNA (1)...(19): siRNA sense strand
acagagaagcaaauagguu

SEQ ID NO: 1344675 - RNA, 19 nt, Homo sapiens
  misc_RNA (1)...(19): siRNA sense strand
auacacagagaagcaaaua

SEQ ID NO: 1344676 - RNA, 19 nt, Homo sapiens
  misc_RNA (1)...(19): siRNA sense strand
cuguugaguuccaauaaau

SEQ ID NO: 1344677 - RNA, 19 nt, Homo sapiens
  misc_RNA (1)...(19): siRNA sense strand
uaaauacacagagaagcaa

SEQ ID NO: 1344678 - RNA, 19 nt, Homo sapiens
  misc_RNA (1)...(19): siRNA sense strand
ucggugcaguuccagaauu

SEQ ID NO: 1344679 - RNA, 19 nt, Homo sapiens
  misc_RNA (1)...(19): siRNA sense strand
ggaacuguaagagcaaaga

SEQ ID NO: 1344680 - RNA, 19 nt, Homo sapiens
  misc_RNA (1)...(19): siRNA sense strand
ucaaguucaucaaccucuu

SEQ ID NO: 1344681 - RNA, 19 nt, Homo sapiens
  misc_RNA (1)...(19): siRNA sense strand
ggaguuugggaaccugauu

SEQ ID NO: 1344682 - RNA, 19 nt, Homo sapiens
  misc_RNA (1)...(19): siRNA sense strand
acacagagaagcaaauagg

SEQ ID NO: 1344683 - RNA, 19 nt, Homo sapiens
  misc_RNA (1)...(19): siRNA sense strand
ucauuucugugcuggugaa

SEQ ID NO: 1344684 - RNA, 19 nt, Homo sapiens
  misc_RNA (1)...(19): siRNA sense strand
cauggaggcugugaaucug

SEQ ID NO: 1344685 - RNA, 19 nt, Homo sapiens
  misc_RNA (1)...(19): siRNA sense strand
aaagaggcggaaauuaaga

SEQ ID NO: 1344686 - RNA, 19 nt, Homo sapiens
  misc_RNA (1)...(19): siRNA sense strand
gcggaaauuaagagaauca

SEQ ID NO: 1344687 - RNA, 19 nt, Homo sapiens
  misc_RNA (1)...(19): siRNA sense strand
gccaacauccgcuccaagu

SEQ ID NO: 1344688 - RNA, 19 nt, Homo sapiens
  misc_RNA (1)...(19): siRNA sense strand
aacauccgcuccaaguuca

SEQ ID NO: 1344689 - RNA, 19 nt, Homo sapiens
  misc_RNA (1)...(19): siRNA sense strand
uccggaagccgaugaguug

SEQ ID NO: 1344690 - RNA, 19 nt, Homo sapiens
  misc_RNA (1)...(19): siRNA sense strand
acgagaacauggugaaggu

SEQ ID NO: 1344691 - RNA, 19 nt, Homo sapiens
  misc_RNA (1)...(19): siRNA sense strand
cagaggaugcggcugugaa

SEQ ID NO: 1344692 - RNA, 19 nt, Homo sapiens
  misc_RNA (1)...(19): siRNA sense strand
caucaacaacgccaucaag

SEQ ID NO: 1344693 - RNA, 19 nt, Homo sapiens
  misc_RNA (1)...(19): siRNA sense strand
uggaggcugugaaucuguu

SEQ ID NO: 1344694 - RNA, 19 nt, Homo sapiens
  misc_RNA (1)...(19): siRNA sense strand
ucucuucuauggcaacaag

SEQ ID NO: 1344695 - RNA, 19 nt, Homo sapiens
  misc_RNA (1)...(19): siRNA sense strand
ggugugguaccgugugcua

SEQ ID NO: 1344696 - RNA, 19 nt, Homo sapiens
  misc_RNA (1)...(19): siRNA sense strand
gcagaucgugucggagaug

SEQ ID NO: 1344697 - RNA, 19 nt, Homo sapiens
  misc_RNA (1)...(19): siRNA sense strand
gagcaaugccaagcagauc

SEQ ID NO: 1344698 - RNA, 19 nt, Homo sapiens
  misc_RNA (1)...(19): siRNA sense strand
gaguuccaauaaauacaca

SEQ ID NO: 1344699 - RNA, 19 nt, Homo sapiens
  misc_RNA (1)...(19): siRNA sense strand
gugguacaccugcucaaug

SEQ ID NO: 1344700 - RNA, 19 nt, Homo sapiens
  misc_RNA (1)...(19): siRNA sense strand
gaacuguaagagcaaagag

SEQ ID NO: 1344701 - RNA, 19 nt, Homo sapiens
  misc_RNA (1)...(19): siRNA sense strand
auaaauacacagagaagca

SEQ ID NO: 1344702 - RNA, 19 nt, Homo sapiens
  misc_RNA (1)...(19): siRNA sense strand
uuacuaaggccaagcuucu

SEQ ID NO: 1344703 - RNA, 19 nt, Homo sapiens
  misc_RNA (1)...(19): siRNA sense strand
ggaaauuaagagaaucaac

SEQ ID NO: 1344704 - RNA, 19 nt, Homo sapiens
  misc_RNA (1)...(19): siRNA sense strand
gagaaucaacaaggaacug

SEQ ID NO: 1344705 - RNA, 19 nt, Homo sapiens
  misc_RNA (1)...(19): siRNA sense strand
gcucaaugaccagcacaug

SEQ ID NO: 1344706 - RNA, 19 nt, Homo sapiens
  misc_RNA (1)...(19): siRNA sense strand
gguuaccuguucauuucug

SEQ ID NO: 1344707 - RNA, 19 nt, Homo sapiens
  misc_RNA (1)...(19): siRNA sense strand
gagaugggcgaggccuuug

SEQ ID NO: 1344708 - RNA, 19 nt, Homo sapiens
  misc_RNA (1)...(19): siRNA sense strand
caaguucaucaaccucuuc

SEQ ID NO: 1344709 - RNA, 19 nt, Homo sapiens
  misc_RNA (1)...(19): siRNA sense strand
gaguuugggaaccugauug

SEQ ID NO: 1344710 - RNA, 19 nt, Homo sapiens
  misc_RNA (1)...(19): siRNA sense strand
caagaagaacccagaugac

SEQ ID NO: 1344711 - RNA, 19 nt, Homo sapiens
  misc_RNA (1)...(19): siRNA sense strand
caaaguggauggugagaua

SEQ ID NO: 1344712 - RNA, 19 nt, Homo sapiens
  misc_RNA (1)...(19): siRNA sense strand
gaaaugagaauuccaaaga

SEQ ID NO: 1344713 - RNA, 19 nt, Homo sapiens
  misc_RNA (1)...(19): siRNA sense strand
ggugaaaucuacaaccaua

SEQ ID NO: 1344714 - RNA, 19 nt, Homo sapiens
  misc_RNA (1)...(19): siRNA sense strand
cuaaaggucuuguuacauu

SEQ ID NO: 1344715 - RNA, 19 nt, Homo sapiens
  misc_RNA (1)...(19): siRNA sense strand
guuaagaauuccugguuua

SEQ ID NO: 1344716 - RNA, 19 nt, Homo sapiens
  misc_RNA (1)...(19): siRNA sense strand
guaaagaaacguuugauga

SEQ ID NO: 1344717 - RNA, 19 nt, Homo sapiens
  misc_RNA (1)...(19): siRNA sense strand
gaagcuaaaggucuuguua

SEQ ID NO: 1344718 - RNA, 19 nt, Homo sapiens
  misc_RNA (1)...(19): siRNA sense strand
ggagucagaccuuuguuua

SEQ ID NO: 1344719 - RNA, 19 nt, Homo sapiens
  misc_RNA (1)...(19): siRNA sense strand
gaacugagagucccauuuc

SEQ ID NO: 1344720 - RNA, 19 nt, Homo sapiens
  misc_RNA (1)...(19): siRNA sense strand
caauucgagugaagaaaua

SEQ ID NO: 1344721 - RNA, 19 nt, Homo sapiens
  misc_RNA (1)...(19): siRNA sense strand
ugagggaacucuauuuguu

SEQ ID NO: 1344722 - RNA, 19 nt, Homo sapiens
  misc_RNA (1)...(19): siRNA sense strand
ccaaguauauucggaagaa

SEQ ID NO: 1344723 - RNA, 19 nt, Homo sapiens
  misc_RNA (1)...(19): siRNA sense strand
cuagaaagguggcagauca

SEQ ID NO: 1344724 - RNA, 19 nt, Homo sapiens
  misc_RNA (1)...(19): siRNA sense strand
gaagugaacauuaugaagu

SEQ ID NO: 1344725 - RNA, 19 nt, Homo sapiens
  misc_RNA (1)...(19): siRNA sense strand
caacugcugcuuuggauuu

SEQ ID NO: 1344726 - RNA, 19 nt, Homo sapiens
  misc_RNA (1)...(19): siRNA sense strand
gagagacguuugaggauuc

SEQ ID NO: 1344727 - RNA, 19 nt, Homo sapiens
  misc_RNA (1)...(19): siRNA sense strand
caaaugcagcccagaaauu

SEQ ID NO: 1344728 - RNA, 19 nt, Homo sapiens
  misc_RNA (1)...(19): siRNA sense strand
gcaacagcauuuugaauuu

SEQ ID NO: 1344729 - RNA, 19 nt, Homo sapiens
  misc_RNA (1)...(19): siRNA sense strand
ccagaaauuucccuucaau

SEQ ID NO: 1344730 - RNA, 19 nt, Homo sapiens
  misc_RNA (1)...(19): siRNA sense strand
gguuaaauaucaucacugu

SEQ ID NO: 1344731 - RNA, 19 nt, Homo sapiens
  misc_RNA (1)...(19): siRNA sense strand
ccguggaaaugguuaaaua

SEQ ID NO: 1344732 - RNA, 19 nt, Homo sapiens
  misc_RNA (1)...(19): siRNA sense strand
uauguuggaugguguguuu

SEQ ID NO: 1344733 - RNA, 19 nt, Homo sapiens
  misc_RNA (1)...(19): siRNA sense strand
gauagaaacugugaagaac

SEQ ID NO: 1344734 - RNA, 19 nt, Homo sapiens
  misc_RNA (1)...(19): siRNA sense strand
uuacuaccgucaagucuuu

SEQ ID NO: 1344735 - RNA, 19 nt, Homo sapiens
  misc_RNA (1)...(19): siRNA sense strand
gaacucuauuuguuugaug

SEQ ID NO: 1344736 - RNA, 19 nt, Homo sapiens
  misc_RNA (1)...(19): siRNA sense strand
ggaaacuuaugacauuaca

SEQ ID NO: 1344737 - RNA, 19 nt, Homo sapiens
  misc_RNA (1)...(19): siRNA sense strand
uuaaagcaaugacagaaga

SEQ ID NO: 1344738 - RNA, 19 nt, Homo sapiens
  misc_RNA (1)...(19): siRNA sense strand
ccaaagaaggauauuacua

SEQ ID NO: 1344739 - RNA, 19 nt, Homo sapiens
  misc_RNA (1)...(19): siRNA sense strand
aagaauuccugguuuaaga

SEQ ID NO: 1344740 - RNA, 19 nt, Homo sapiens
  misc_RNA (1)...(19): siRNA sense strand
uagaaacugugaagaacaa

SEQ ID NO: 1344741 - RNA, 19 nt, Homo sapiens
  misc_RNA (1)...(19): siRNA sense strand
gcacacagagguccagaug

SEQ ID NO: 1344742 - RNA, 19 nt, Homo sapiens
  misc_RNA (1)...(19): siRNA sense strand
cuuggaaacuuaugacauu

SEQ ID NO: 1344743 - RNA, 19 nt, Homo sapiens
  misc_RNA (1)...(19): siRNA sense strand
agucagaccuuuguuuaaa

SEQ ID NO: 1344744 - RNA, 19 nt, Homo sapiens
  misc_RNA (1)...(19): siRNA sense strand
gagggaacucuauuuguuu

SEQ ID NO: 1344745 - RNA, 19 nt, Homo sapiens
  misc_RNA (1)...(19): siRNA sense strand
caaagaaggauauuacuac

SEQ ID NO: 1344746 - RNA, 19 nt, Homo sapiens
  misc_RNA (1)...(19): siRNA sense strand
gaaagguggcagaucauau

SEQ ID NO: 1344747 - RNA, 19 nt, Homo sapiens
  misc_RNA (1)...(19): siRNA sense strand
gaugauugccuuucuguuc

SEQ ID NO: 1344748 - RNA, 19 nt, Homo sapiens
  misc_RNA (1)...(19): siRNA sense strand
gcccagaaauuucccuuca

SEQ ID NO: 1344749 - RNA, 19 nt, Homo sapiens
  misc_RNA (1)...(19): siRNA sense strand
uaaaggucuuguuacauug

SEQ ID NO: 1344750 - RNA, 19 nt, Homo sapiens
  misc_RNA (1)...(19): siRNA sense strand
acacagagguccagaugca

SEQ ID NO: 1344751 - RNA, 19 nt, Homo sapiens
  misc_RNA (1)...(19): siRNA sense strand
ccaaagaaugggauagaaa

SEQ ID NO: 1344752 - RNA, 19 nt, Homo sapiens
  misc_RNA (1)...(19): siRNA sense strand
ggaauacguugaacaucag

SEQ ID NO: 1344753 - RNA, 19 nt, Homo sapiens
  misc_RNA (1)...(19): siRNA sense strand
ggguagagauacauaugga

SEQ ID NO: 1344754 - RNA, 19 nt, Homo sapiens
  misc_RNA (1)...(19): siRNA sense strand
ggagaaggaucagaugaac

SEQ ID NO: 1344755 - RNA, 19 nt, Homo sapiens
  misc_RNA (1)...(19): siRNA sense strand
gaugguguguuugcauuug

SEQ ID NO: 1344756 - RNA, 19 nt, Homo sapiens
  misc_RNA (1)...(19): siRNA sense strand
gaaauuucccuucaauacu

SEQ ID NO: 1344757 - RNA, 19 nt, Homo sapiens
  misc_RNA (1)...(19): siRNA sense strand
gcaaaugcagcccagaaau

SEQ ID NO: 1344758 - RNA, 19 nt, Homo sapiens
  misc_RNA (1)...(19): siRNA sense strand
aggaauacguugaacauca

SEQ ID NO: 1344759 - RNA, 19 nt, Homo sapiens
  misc_RNA (1)...(19): siRNA sense strand
gcauucaggcucuggauga

SEQ ID NO: 1344760 - RNA, 19 nt, Homo sapiens
  misc_RNA (1)...(19): siRNA sense strand
gguggcagaucauauugga

SEQ ID NO: 1344761 - RNA, 19 nt, Homo sapiens
  misc_RNA (1)...(19): siRNA sense strand
aaagaaacguuugaugaca

SEQ ID NO: 1344762 - RNA, 19 nt, Homo sapiens
  misc_RNA (1)...(19): siRNA sense strand
gaaaucuacaaccauaaga

SEQ ID NO: 1344763 - RNA, 19 nt, Homo sapiens
  misc_RNA (1)...(19): siRNA sense strand
cuacaagucagcugucaaa

SEQ ID NO: 1344764 - RNA, 19 nt, Homo sapiens
  misc_RNA (1)...(19): siRNA sense strand
cagaucauauuggaaguga

SEQ ID NO: 1344765 - RNA, 19 nt, Homo sapiens
  misc_RNA (1)...(19): siRNA sense strand
aaagguggcagaucauauu

SEQ ID NO: 1344766 - RNA, 19 nt, Homo sapiens
  misc_RNA (1)...(19): siRNA sense strand
caaaguugcauccguggaa

SEQ ID NO: 1344767 - RNA, 19 nt, Homo sapiens
  misc_RNA (1)...(19): siRNA sense strand
ggaacucuauuuguuugau

SEQ ID NO: 1344768 - RNA, 19 nt, Homo sapiens
  misc_RNA (1)...(19): siRNA sense strand
gagucagaccuuuguuuaa

SEQ ID NO: 1344769 - RNA, 19 nt, Homo sapiens
  misc_RNA (1)...(19): siRNA sense strand
gaugacagacagaaggauu

SEQ ID NO: 1344770 - RNA, 19 nt, Homo sapiens
  misc_RNA (1)...(19): siRNA sense strand
ggauacugccaauaagaaa

SEQ ID NO: 1344771 - RNA, 19 nt, Homo sapiens
  misc_RNA (1)...(19): siRNA sense strand
ggauauuacuaccgucaag

SEQ ID NO: 1344772 - RNA, 19 nt, Homo sapiens
  misc_RNA (1)...(19): siRNA sense strand
ccaaucugauacccaaaga

SEQ ID NO: 1344773 - RNA, 19 nt, Homo sapiens
  misc_RNA (1)...(19): siRNA sense strand
gagagucccauuucuagau

SEQ ID NO: 1344774 - RNA, 19 nt, Homo sapiens
  misc_RNA (1)...(19): siRNA sense strand
uuacaauggugaaaucuac

SEQ ID NO: 1344775 - RNA, 19 nt, Homo sapiens
  misc_RNA (1)...(19): siRNA sense strand
agagagacguuugaggauu

SEQ ID NO: 1344776 - RNA, 19 nt, Homo sapiens
  misc_RNA (1)...(19): siRNA sense strand
uuacgcaggguuacauaua

SEQ ID NO: 1344777 - RNA, 19 nt, Homo sapiens
  misc_RNA (1)...(19): siRNA sense strand
ggaagacagccccgauuua

SEQ ID NO: 1344778 - RNA, 19 nt, Homo sapiens
  misc_RNA (1)...(19): siRNA sense strand
gcacuccgcgacucccuuu

SEQ ID NO: 1344779 - RNA, 19 nt, Homo sapiens
  misc_RNA (1)...(19): siRNA sense strand
cauauggagucagaccuuu

SEQ ID NO: 1344780 - RNA, 19 nt, Homo sapiens
  misc_RNA (1)...(19): siRNA sense strand
caaaggaggaauugagcaa

SEQ ID NO: 1344781 - RNA, 19 nt, Homo sapiens
  misc_RNA (1)...(19): siRNA sense strand
gcaauuggcauggaagaca

SEQ ID NO: 1344782 - RNA, 19 nt, Homo sapiens
  misc_RNA (1)...(19): siRNA sense strand
ucagguugaugaugcaaug

SEQ ID NO: 1344783 - RNA, 19 nt, Homo sapiens
  misc_RNA (1)...(19): siRNA sense strand
agaaggaucagaugaacuu

SEQ ID NO: 1344784 - RNA, 19 nt, Homo sapiens
  misc_RNA (1)...(19): siRNA sense strand
guaguugacccgcuguuug

SEQ ID NO: 1344785 - RNA, 19 nt, Homo sapiens
  misc_RNA (1)...(19): siRNA sense strand
ccaauucgagugaagaaau

SEQ ID NO: 1344786 - RNA, 19 nt, Homo sapiens
  misc_RNA (1)...(19): siRNA sense strand
cagaaauuucccuucaaua

SEQ ID NO: 1344787 - RNA, 19 nt, Homo sapiens
  misc_RNA (1)...(19): siRNA sense strand
agauagaaacugugaagaa

SEQ ID NO: 1344788 - RNA, 19 nt, Homo sapiens
  misc_RNA (1)...(19): siRNA sense strand
agauacauauggagucaga

SEQ ID NO: 1344789 - RNA, 19 nt, Homo sapiens
  misc_RNA (1)...(19): siRNA sense strand
agaaacguuugaugacaga

SEQ ID NO: 1344790 - RNA, 19 nt, Homo sapiens
  misc_RNA (1)...(19): siRNA sense strand
aaauuucccuucaauacuc

SEQ ID NO: 1344791 - RNA, 19 nt, Homo sapiens
  misc_RNA (1)...(19): siRNA sense strand
gaauuccugguuuaagauu

SEQ ID NO: 1344792 - RNA, 19 nt, Homo sapiens
  misc_RNA (1)...(19): siRNA sense strand
ggaagugaacauuaugaag

SEQ ID NO: 1344793 - RNA, 19 nt, Homo sapiens
  misc_RNA (1)...(19): siRNA sense strand
ccagaaaugagaauuccaa

SEQ ID NO: 1344794 - RNA, 19 nt, Homo sapiens
  misc_RNA (1)...(19): siRNA sense strand
gagagugagaggcuucuga

SEQ ID NO: 1344795 - RNA, 19 nt, Homo sapiens
  misc_RNA (1)...(19): siRNA sense strand
gaaggaucagaugaacuua

SEQ ID NO: 1344796 - RNA, 19 nt, Homo sapiens
  misc_RNA (1)...(19): siRNA sense strand
caauguggagaaacucuuu

SEQ ID NO: 1344797 - RNA, 19 nt, Homo sapiens
  misc_RNA (1)...(19): siRNA sense strand
uaugaagauugcacacaga

SEQ ID NO: 1344798 - RNA, 19 nt, Homo sapiens
  misc_RNA (1)...(19): siRNA sense strand
gaacuuacgcaggguuaca

SEQ ID NO: 1344799 - RNA, 19 nt, Homo sapiens
  misc_RNA (1)...(19): siRNA sense strand
cuccagacauuugcaauug

SEQ ID NO: 1344800 - RNA, 19 nt, Homo sapiens
  misc_RNA (1)...(19): siRNA sense strand
aaugacagaagauggauuu

SEQ ID NO: 1344801 - RNA, 19 nt, Homo sapiens
  misc_RNA (1)...(19): siRNA sense strand
agaaauuucccuucaauac

SEQ ID NO: 1344802 - RNA, 19 nt, Homo sapiens
  misc_RNA (1)...(19): siRNA sense strand
cuuaugacauuacaacagu

SEQ ID NO: 1344803 - RNA, 19 nt, Homo sapiens
  misc_RNA (1)...(19): siRNA sense strand
uaaagaaacguuugaugac

SEQ ID NO: 1344804 - RNA, 19 nt, Homo sapiens
  misc_RNA (1)...(19): siRNA sense strand
aguauccucuccagacauu

SEQ ID NO: 1344805 - RNA, 19 nt, Homo sapiens
  misc_RNA (1)...(19): siRNA sense strand
ggcaaaugcagcccagaaa

SEQ ID NO: 1344806 - RNA, 19 nt, Homo sapiens
  misc_RNA (1)...(19): siRNA sense strand
gguugaugaugcaaugaug

SEQ ID NO: 1344807 - RNA, 19 nt, Homo sapiens
  misc_RNA (1)...(19): siRNA sense strand
agccuucagugauggaaua

SEQ ID NO: 1344808 - RNA, 19 nt, Homo sapiens
  misc_RNA (1)...(19): siRNA sense strand
ucugauacccaaagagauu

SEQ ID NO: 1344809 - RNA, 19 nt, Homo sapiens
  misc_RNA (1)...(19): siRNA sense strand
gagagagacguuugaggau

SEQ ID NO: 1344810 - RNA, 19 nt, Homo sapiens
  misc_RNA (1)...(19): siRNA sense strand
uacgcaggguuacauauau

SEQ ID NO: 1344811 - RNA, 19 nt, Homo sapiens
  misc_RNA (1)...(19): siRNA sense strand
caaaguggauggugagaua

SEQ ID NO: 1344812 - RNA, 19 nt, Homo sapiens
  misc_RNA (1)...(19): siRNA sense strand
gaaaugagaauuccaaaga

SEQ ID NO: 1344813 - RNA, 19 nt, Homo sapiens
  misc_RNA (1)...(19): siRNA sense strand
ggugaaaucuacaaccaua

SEQ ID NO: 1344814 - RNA, 19 nt, Homo sapiens
  misc_RNA (1)...(19): siRNA sense strand
cuaaaggucuuguuacauu

SEQ ID NO: 1344815 - RNA, 19 nt, Homo sapiens
  misc_RNA (1)...(19): siRNA sense strand
guuaagaauuccugguuua

SEQ ID NO: 1344816 - RNA, 19 nt, Homo sapiens
  misc_RNA (1)...(19): siRNA sense strand
guaaagaaacguuugauga

SEQ ID NO: 1344817 - RNA, 19 nt, Homo sapiens
  misc_RNA (1)...(19): siRNA sense strand
gaagcuaaaggucuuguua

SEQ ID NO: 1344818 - RNA, 19 nt, Homo sapiens
  misc_RNA (1)...(19): siRNA sense strand
ggagucagaccuuuguuua

SEQ ID NO: 1344819 - RNA, 19 nt, Homo sapiens
  misc_RNA (1)...(19): siRNA sense strand
gaacugagagucccauuuc

SEQ ID NO: 1344820 - RNA, 19 nt, Homo sapiens
  misc_RNA (1)...(19): siRNA sense strand
caauucgagugaagaaaua

SEQ ID NO: 1344821 - RNA, 19 nt, Homo sapiens
  misc_RNA (1)...(19): siRNA sense strand
ugagggaacucuauuuguu

SEQ ID NO: 1344822 - RNA, 19 nt, Homo sapiens
  misc_RNA (1)...(19): siRNA sense strand
ccaaguauauucggaagaa

SEQ ID NO: 1344823 - RNA, 19 nt, Homo sapiens
  misc_RNA (1)...(19): siRNA sense strand
cuagaaagguggcagauca

SEQ ID NO: 1344824 - RNA, 19 nt, Homo sapiens
  misc_RNA (1)...(19): siRNA sense strand
gaagugaacauuaugaagu

SEQ ID NO: 1344825 - RNA, 19 nt, Homo sapiens
  misc_RNA (1)...(19): siRNA sense strand
caacugcugcuuuggauuu

SEQ ID NO: 1344826 - RNA, 19 nt, Homo sapiens
  misc_RNA (1)...(19): siRNA sense strand
gagagacguuugaggauuc

SEQ ID NO: 1344827 - RNA, 19 nt, Homo sapiens
  misc_RNA (1)...(19): siRNA sense strand
caaaugcagcccagaaauu

SEQ ID NO: 1344828 - RNA, 19 nt, Homo sapiens
  misc_RNA (1)...(19): siRNA sense strand
gcaacagcauuuugaauuu

SEQ ID NO: 1344829 - RNA, 19 nt, Homo sapiens
  misc_RNA (1)...(19): siRNA sense strand
ccagaaauuucccuucaau

SEQ ID NO: 1344830 - RNA, 19 nt, Homo sapiens
  misc_RNA (1)...(19): siRNA sense strand
gguuaaauaucaucacugu

SEQ ID NO: 1344831 - RNA, 19 nt, Homo sapiens
  misc_RNA (1)...(19): siRNA sense strand
ccguggaaaugguuaaaua

SEQ ID NO: 1344832 - RNA, 19 nt, Homo sapiens
  misc_RNA (1)...(19): siRNA sense strand
uauguuggaugguguguuu

SEQ ID NO: 1344833 - RNA, 19 nt, Homo sapiens
  misc_RNA (1)...(19): siRNA sense strand
gauagaaacugugaagaac

SEQ ID NO: 1344834 - RNA, 19 nt, Homo sapiens
  misc_RNA (1)...(19): siRNA sense strand
uuacuaccgucaagucuuu

SEQ ID NO: 1344835 - RNA, 19 nt, Homo sapiens
  misc_RNA (1)...(19): siRNA sense strand
gaacucuauuuguuugaug

SEQ ID NO: 1344836 - RNA, 19 nt, Homo sapiens
  misc_RNA (1)...(19): siRNA sense strand
ggaaacuuaugacauuaca

SEQ ID NO: 1344837 - RNA, 19 nt, Homo sapiens
  misc_RNA (1)...(19): siRNA sense strand
uuaaagcaaugacagaaga

SEQ ID NO: 1344838 - RNA, 19 nt, Homo sapiens
  misc_RNA (1)...(19): siRNA sense strand
ccaaagaaggauauuacua

SEQ ID NO: 1344839 - RNA, 19 nt, Homo sapiens
  misc_RNA (1)...(19): siRNA sense strand
aagaauuccugguuuaaga

SEQ ID NO: 1344840 - RNA, 19 nt, Homo sapiens
  misc_RNA (1)...(19): siRNA sense strand
uagaaacugugaagaacaa

SEQ ID NO: 1344841 - RNA, 19 nt, Homo sapiens
  misc_RNA (1)...(19): siRNA sense strand
gcacacagagguccagaug

SEQ ID NO: 1344842 - RNA, 19 nt, Homo sapiens
  misc_RNA (1)...(19): siRNA sense strand
cuuggaaacuuaugacauu

SEQ ID NO: 1344843 - RNA, 19 nt, Homo sapiens
  misc_RNA (1)...(19): siRNA sense strand
agucagaccuuuguuuaaa

SEQ ID NO: 1344844 - RNA, 19 nt, Homo sapiens
  misc_RNA (1)...(19): siRNA sense strand
gagggaacucuauuuguuu

SEQ ID NO: 1344845 - RNA, 19 nt, Homo sapiens
  misc_RNA (1)...(19): siRNA sense strand
caaagaaggauauuacuac

SEQ ID NO: 1344846 - RNA, 19 nt, Homo sapiens
  misc_RNA (1)...(19): siRNA sense strand
gaaagguggcagaucauau

SEQ ID NO: 1344847 - RNA, 19 nt, Homo sapiens
  misc_RNA (1)...(19): siRNA sense strand
gaugauugccuuucuguuc

SEQ ID NO: 1344848 - RNA, 19 nt, Homo sapiens
  misc_RNA (1)...(19): siRNA sense strand
gcccagaaauuucccuuca

SEQ ID NO: 1344849 - RNA, 19 nt, Homo sapiens
  misc_RNA (1)...(19): siRNA sense strand
uaaaggucuuguuacauug

SEQ ID NO: 1344850 - RNA, 19 nt, Homo sapiens
  misc_RNA (1)...(19): siRNA sense strand
acacagagguccagaugca

SEQ ID NO: 1344851 - RNA, 19 nt, Homo sapiens
  misc_RNA (1)...(19): siRNA sense strand
ccaaagaaugggauagaaa

SEQ ID NO: 1344852 - RNA, 19 nt, Homo sapiens
  misc_RNA (1)...(19): siRNA sense strand
ggaauacguugaacaucag

SEQ ID NO: 1344853 - RNA, 19 nt, Homo sapiens
  misc_RNA (1)...(19): siRNA sense strand
ggguagagauacauaugga

SEQ ID NO: 1344854 - RNA, 19 nt, Homo sapiens
  misc_RNA (1)...(19): siRNA sense strand
ggagaaggaucagaugaac

SEQ ID NO: 1344855 - RNA, 19 nt, Homo sapiens
  misc_RNA (1)...(19): siRNA sense strand
gaugguguguuugcauuug

SEQ ID NO: 1344856 - RNA, 19 nt, Homo sapiens
  misc_RNA (1)...(19): siRNA sense strand
gaaauuucccuucaauacu

SEQ ID NO: 1344857 - RNA, 19 nt, Homo sapiens
  misc_RNA (1)...(19): siRNA sense strand
gcaaaugcagcccagaaau

SEQ ID NO: 1344858 - RNA, 19 nt, Homo sapiens
  misc_RNA (1)...(19): siRNA sense strand
aggaauacguugaacauca

SEQ ID NO: 1344859 - RNA, 19 nt, Homo sapiens
  misc_RNA (1)...(19): siRNA sense strand
gcauucaggcucuggauga

SEQ ID NO: 1344860 - RNA, 19 nt, Homo sapiens
  misc_RNA (1)...(19): siRNA sense strand
gguggcagaucauauugga

SEQ ID NO: 1344861 - RNA, 19 nt, Homo sapiens
  misc_RNA (1)...(19): siRNA sense strand
aaagaaacguuugaugaca

SEQ ID NO: 1344862 - RNA, 19 nt, Homo sapiens
  misc_RNA (1)...(19): siRNA sense strand
gaaaucuacaaccauaaga

SEQ ID NO: 1344863 - RNA, 19 nt, Homo sapiens
  misc_RNA (1)...(19): siRNA sense strand
cuacaagucagcugucaaa

SEQ ID NO: 1344864 - RNA, 19 nt, Homo sapiens
  misc_RNA (1)...(19): siRNA sense strand
cagaucauauuggaaguga

SEQ ID NO: 1344865 - RNA, 19 nt, Homo sapiens
  misc_RNA (1)...(19): siRNA sense strand
aaagguggcagaucauauu

SEQ ID NO: 1344866 - RNA, 19 nt, Homo sapiens
  misc_RNA (1)...(19): siRNA sense strand
caaaguugcauccguggaa

SEQ ID NO: 1344867 - RNA, 19 nt, Homo sapiens
  misc_RNA (1)...(19): siRNA sense strand
ggaacucuauuuguuugau

SEQ ID NO: 1344868 - RNA, 19 nt, Homo sapiens
  misc_RNA (1)...(19): siRNA sense strand
gagucagaccuuuguuuaa

SEQ ID NO: 1344869 - RNA, 19 nt, Homo sapiens
  misc_RNA (1)...(19): siRNA sense strand
gaugacagacagaaggauu

SEQ ID NO: 1344870 - RNA, 19 nt, Homo sapiens
  misc_RNA (1)...(19): siRNA sense strand
ggauacugccaauaagaaa

SEQ ID NO: 1344871 - RNA, 19 nt, Homo sapiens
  misc_RNA (1)...(19): siRNA sense strand
ggauauuacuaccgucaag

SEQ ID NO: 1344872 - RNA, 19 nt, Homo sapiens
  misc_RNA (1)...(19): siRNA sense strand
ccaaucugauacccaaaga

SEQ ID NO: 1344873 - RNA, 19 nt, Homo sapiens
  misc_RNA (1)...(19): siRNA sense strand
gagagucccauuucuagau

SEQ ID NO: 1344874 - RNA, 19 nt, Homo sapiens
  misc_RNA (1)...(19): siRNA sense strand
uuacaauggugaaaucuac

SEQ ID NO: 1344875 - RNA, 19 nt, Homo sapiens
  misc_RNA (1)...(19): siRNA sense strand
agagagacguuugaggauu

SEQ ID NO: 1344876 - RNA, 19 nt, Homo sapiens
  misc_RNA (1)...(19): siRNA sense strand
uuacgcaggguuacauaua

SEQ ID NO: 1344877 - RNA, 19 nt, Homo sapiens
  misc_RNA (1)...(19): siRNA sense strand
ggaagacagccccgauuua

SEQ ID NO: 1344878 - RNA, 19 nt, Homo sapiens
  misc_RNA (1)...(19): siRNA sense strand
gcacuccgcgacucccuuu

SEQ ID NO: 1344879 - RNA, 19 nt, Homo sapiens
  misc_RNA (1)...(19): siRNA sense strand
cauauggagucagaccuuu

SEQ ID NO: 1344880 - RNA, 19 nt, Homo sapiens
  misc_RNA (1)...(19): siRNA sense strand
caaaggaggaauugagcaa

SEQ ID NO: 1344881 - RNA, 19 nt, Homo sapiens
  misc_RNA (1)...(19): siRNA sense strand
gcaauuggcauggaagaca

SEQ ID NO: 1344882 - RNA, 19 nt, Homo sapiens
  misc_RNA (1)...(19): siRNA sense strand
ucagguugaugaugcaaug

SEQ ID NO: 1344883 - RNA, 19 nt, Homo sapiens
  misc_RNA (1)...(19): siRNA sense strand
agaaggaucagaugaacuu

SEQ ID NO: 1344884 - RNA, 19 nt, Homo sapiens
  misc_RNA (1)...(19): siRNA sense strand
guaguugacccgcuguuug

SEQ ID NO: 1344885 - RNA, 19 nt, Homo sapiens
  misc_RNA (1)...(19): siRNA sense strand
ccaauucgagugaagaaau

SEQ ID NO: 1344886 - RNA, 19 nt, Homo sapiens
  misc_RNA (1)...(19): siRNA sense strand
cagaaauuucccuucaaua

SEQ ID NO: 1344887 - RNA, 19 nt, Homo sapiens
  misc_RNA (1)...(19): siRNA sense strand
agauagaaacugugaagaa

SEQ ID NO: 1344888 - RNA, 19 nt, Homo sapiens
  misc_RNA (1)...(19): siRNA sense strand
agauacauauggagucaga

SEQ ID NO: 1344889 - RNA, 19 nt, Homo sapiens
  misc_RNA (1)...(19): siRNA sense strand
agaaacguuugaugacaga

SEQ ID NO: 1344890 - RNA, 19 nt, Homo sapiens
  misc_RNA (1)...(19): siRNA sense strand
aaauuucccuucaauacuc

SEQ ID NO: 1344891 - RNA, 19 nt, Homo sapiens
  misc_RNA (1)...(19): siRNA sense strand
gaauuccugguuuaagauu

SEQ ID NO: 1344892 - RNA, 19 nt, Homo sapiens
  misc_RNA (1)...(19): siRNA sense strand
ggaagugaacauuaugaag

SEQ ID NO: 1344893 - RNA, 19 nt, Homo sapiens
  misc_RNA (1)...(19): siRNA sense strand
ccagaaaugagaauuccaa

SEQ ID NO: 1344894 - RNA, 19 nt, Homo sapiens
  misc_RNA (1)...(19): siRNA sense strand
gagagugagaggcuucuga

SEQ ID NO: 1344895 - RNA, 19 nt, Homo sapiens
  misc_RNA (1)...(19): siRNA sense strand
gaaggaucagaugaacuua

SEQ ID NO: 1344896 - RNA, 19 nt, Homo sapiens
  misc_RNA (1)...(19): siRNA sense strand
caauguggagaaacucuuu

SEQ ID NO: 1344897 - RNA, 19 nt, Homo sapiens
  misc_RNA (1)...(19): siRNA sense strand
uaugaagauugcacacaga

SEQ ID NO: 1344898 - RNA, 19 nt, Homo sapiens
  misc_RNA (1)...(19): siRNA sense strand
gaacuuacgcaggguuaca

SEQ ID NO: 1344899 - RNA, 19 nt, Homo sapiens
  misc_RNA (1)...(19): siRNA sense strand
cuccagacauuugcaauug

SEQ ID NO: 1344900 - RNA, 19 nt, Homo sapiens
  misc_RNA (1)...(19): siRNA sense strand
aaugacagaagauggauuu

SEQ ID NO: 1344901 - RNA, 19 nt, Homo sapiens
  misc_RNA (1)...(19): siRNA sense strand
agaaauuucccuucaauac

SEQ ID NO: 1344902 - RNA, 19 nt, Homo sapiens
  misc_RNA (1)...(19): siRNA sense strand
cuuaugacauuacaacagu

SEQ ID NO: 1344903 - RNA, 19 nt, Homo sapiens
  misc_RNA (1)...(19): siRNA sense strand
uaaagaaacguuugaugac

SEQ ID NO: 1344904 - RNA, 19 nt, Homo sapiens
  misc_RNA (1)...(19): siRNA sense strand
aguauccucuccagacauu

SEQ ID NO: 1344905 - RNA, 19 nt, Homo sapiens
  misc_RNA (1)...(19): siRNA sense strand
ggcaaaugcagcccagaaa

SEQ ID NO: 1344906 - RNA, 19 nt, Homo sapiens
  misc_RNA (1)...(19): siRNA sense strand
gguugaugaugcaaugaug

SEQ ID NO: 1344907 - RNA, 19 nt, Homo sapiens
  misc_RNA (1)...(19): siRNA sense strand
agccuucagugauggaaua

SEQ ID NO: 1344908 - RNA, 19 nt, Homo sapiens
  misc_RNA (1)...(19): siRNA sense strand
ucugauacccaaagagauu

SEQ ID NO: 1344909 - RNA, 19 nt, Homo sapiens
  misc_RNA (1)...(19): siRNA sense strand
gagagagacguuugaggau

SEQ ID NO: 1344910 - RNA, 19 nt, Homo sapiens
  misc_RNA (1)...(19): siRNA sense strand
uacgcaggguuacauauau

SEQ ID NO: 1344911 - RNA, 19 nt, Homo sapiens
  misc_RNA (1)...(19): siRNA sense strand
caaaguggauggugagaua

SEQ ID NO: 1344912 - RNA, 19 nt, Homo sapiens
  misc_RNA (1)...(19): siRNA sense strand
gaaaugagaauuccaaaga

SEQ ID NO: 1344913 - RNA, 19 nt, Homo sapiens
  misc_RNA (1)...(19): siRNA sense strand
ggugaaaucuacaaccaua

SEQ ID NO: 1344914 - RNA, 19 nt, Homo sapiens
  misc_RNA (1)...(19): siRNA sense strand
cuaaaggucuuguuacauu

SEQ ID NO: 1344915 - RNA, 19 nt, Homo sapiens
  misc_RNA (1)...(19): siRNA sense strand
guuaagaauuccugguuua

SEQ ID NO: 1344916 - RNA, 19 nt, Homo sapiens
  misc_RNA (1)...(19): siRNA sense strand
guaaagaaacguuugauga

SEQ ID NO: 1344917 - RNA, 19 nt, Homo sapiens
  misc_RNA (1)...(19): siRNA sense strand
gaagcuaaaggucuuguua

SEQ ID NO: 1344918 - RNA, 19 nt, Homo sapiens
  misc_RNA (1)...(19): siRNA sense strand
ggagucagaccuuuguuua

SEQ ID NO: 1344919 - RNA, 19 nt, Homo sapiens
  misc_RNA (1)...(19): siRNA sense strand
gaacugagagucccauuuc

SEQ ID NO: 1344920 - RNA, 19 nt, Homo sapiens
  misc_RNA (1)...(19): siRNA sense strand
caauucgagugaagaaaua

SEQ ID NO: 1344921 - RNA, 19 nt, Homo sapiens
  misc_RNA (1)...(19): siRNA sense strand
ugagggaacucuauuuguu

SEQ ID NO: 1344922 - RNA, 19 nt, Homo sapiens
  misc_RNA (1)...(19): siRNA sense strand
ccaaguauauucggaagaa

SEQ ID NO: 1344923 - RNA, 19 nt, Homo sapiens
  misc_RNA (1)...(19): siRNA sense strand
cuagaaagguggcagauca

SEQ ID NO: 1344924 - RNA, 19 nt, Homo sapiens
  misc_RNA (1)...(19): siRNA sense strand
gaagugaacauuaugaagu

SEQ ID NO: 1344925 - RNA, 19 nt, Homo sapiens
  misc_RNA (1)...(19): siRNA sense strand
caacugcugcuuuggauuu

SEQ ID NO: 1344926 - RNA, 19 nt, Homo sapiens
  misc_RNA (1)...(19): siRNA sense strand
gagagacguuugaggauuc

SEQ ID NO: 1344927 - RNA, 19 nt, Homo sapiens
  misc_RNA (1)...(19): siRNA sense strand
caaaugcagcccagaaauu

SEQ ID NO: 1344928 - RNA, 19 nt, Homo sapiens
  misc_RNA (1)...(19): siRNA sense strand
gcaacagcauuuugaauuu

SEQ ID NO: 1344929 - RNA, 19 nt, Homo sapiens
  misc_RNA (1)...(19): siRNA sense strand
ccagaaauuucccuucaau

SEQ ID NO: 1344930 - RNA, 19 nt, Homo sapiens
  misc_RNA (1)...(19): siRNA sense strand
gguuaaauaucaucacugu

SEQ ID NO: 1344931 - RNA, 19 nt, Homo sapiens
  misc_RNA (1)...(19): siRNA sense strand
ccguggaaaugguuaaaua

SEQ ID NO: 1344932 - RNA, 19 nt, Homo sapiens
  misc_RNA (1)...(19): siRNA sense strand
uauguuggaugguguguuu

SEQ ID NO: 1344933 - RNA, 19 nt, Homo sapiens
  misc_RNA (1)...(19): siRNA sense strand
gauagaaacugugaagaac

SEQ ID NO: 1344934 - RNA, 19 nt, Homo sapiens
  misc_RNA (1)...(19): siRNA sense strand
uuacuaccgucaagucuuu

SEQ ID NO: 1344935 - RNA, 19 nt, Homo sapiens
  misc_RNA (1)...(19): siRNA sense strand
gaacucuauuuguuugaug

SEQ ID NO: 1344936 - RNA, 19 nt, Homo sapiens
  misc_RNA (1)...(19): siRNA sense strand
ggaaacuuaugacauuaca

SEQ ID NO: 1344937 - RNA, 19 nt, Homo sapiens
  misc_RNA (1)...(19): siRNA sense strand
uuaaagcaaugacagaaga

SEQ ID NO: 1344938 - RNA, 19 nt, Homo sapiens
  misc_RNA (1)...(19): siRNA sense strand
ccaaagaaggauauuacua

SEQ ID NO: 1344939 - RNA, 19 nt, Homo sapiens
  misc_RNA (1)...(19): siRNA sense strand
aagaauuccugguuuaaga

SEQ ID NO: 1344940 - RNA, 19 nt, Homo sapiens
  misc_RNA (1)...(19): siRNA sense strand
uagaaacugugaagaacaa

SEQ ID NO: 1344941 - RNA, 19 nt, Homo sapiens
  misc_RNA (1)...(19): siRNA sense strand
gcacacagagguccagaug

SEQ ID NO: 1344942 - RNA, 19 nt, Homo sapiens
  misc_RNA (1)...(19): siRNA sense strand
cuuggaaacuuaugacauu

SEQ ID NO: 1344943 - RNA, 19 nt, Homo sapiens
  misc_RNA (1)...(19): siRNA sense strand
agucagaccuuuguuuaaa

SEQ ID NO: 1344944 - RNA, 19 nt, Homo sapiens
  misc_RNA (1)...(19): siRNA sense strand
gagggaacucuauuuguuu

SEQ ID NO: 1344945 - RNA, 19 nt, Homo sapiens
  misc_RNA (1)...(19): siRNA sense strand
caaagaaggauauuacuac

SEQ ID NO: 1344946 - RNA, 19 nt, Homo sapiens
  misc_RNA (1)...(19): siRNA sense strand
gaaagguggcagaucauau

SEQ ID NO: 1344947 - RNA, 19 nt, Homo sapiens
  misc_RNA (1)...(19): siRNA sense strand
gaugauugccuuucuguuc

SEQ ID NO: 1344948 - RNA, 19 nt, Homo sapiens
  misc_RNA (1)...(19): siRNA sense strand
gcccagaaauuucccuuca

SEQ ID NO: 1344949 - RNA, 19 nt, Homo sapiens
  misc_RNA (1)...(19): siRNA sense strand
uaaaggucuuguuacauug

SEQ ID NO: 1344950 - RNA, 19 nt, Homo sapiens
  misc_RNA (1)...(19): siRNA sense strand
acacagagguccagaugca

SEQ ID NO: 1344951 - RNA, 19 nt, Homo sapiens
  misc_RNA (1)...(19): siRNA sense strand
ccaaagaaugggauagaaa

SEQ ID NO: 1344952 - RNA, 19 nt, Homo sapiens
  misc_RNA (1)...(19): siRNA sense strand
ggaauacguugaacaucag

SEQ ID NO: 1344953 - RNA, 19 nt, Homo sapiens
  misc_RNA (1)...(19): siRNA sense strand
ggguagagauacauaugga

SEQ ID NO: 1344954 - RNA, 19 nt, Homo sapiens
  misc_RNA (1)...(19): siRNA sense strand
ggagaaggaucagaugaac

SEQ ID NO: 1344955 - RNA, 19 nt, Homo sapiens
  misc_RNA (1)...(19): siRNA sense strand
gaugguguguuugcauuug

SEQ ID NO: 1344956 - RNA, 19 nt, Homo sapiens
  misc_RNA (1)...(19): siRNA sense strand
gaaauuucccuucaauacu

SEQ ID NO: 1344957 - RNA, 19 nt, Homo sapiens
  misc_RNA (1)...(19): siRNA sense strand
gcaaaugcagcccagaaau

SEQ ID NO: 1344958 - RNA, 19 nt, Homo sapiens
  misc_RNA (1)...(19): siRNA sense strand
aggaauacguugaacauca

SEQ ID NO: 1344959 - RNA, 19 nt, Homo sapiens
  misc_RNA (1)...(19): siRNA sense strand
gcauucaggcucuggauga

SEQ ID NO: 1344960 - RNA, 19 nt, Homo sapiens
  misc_RNA (1)...(19): siRNA sense strand
gguggcagaucauauugga

SEQ ID NO: 1344961 - RNA, 19 nt, Homo sapiens
  misc_RNA (1)...(19): siRNA sense strand
aaagaaacguuugaugaca

SEQ ID NO: 1344962 - RNA, 19 nt, Homo sapiens
  misc_RNA (1)...(19): siRNA sense strand
gaaaucuacaaccauaaga

SEQ ID NO: 1344963 - RNA, 19 nt, Homo sapiens
  misc_RNA (1)...(19): siRNA sense strand
cuacaagucagcugucaaa

SEQ ID NO: 1344964 - RNA, 19 nt, Homo sapiens
  misc_RNA (1)...(19): siRNA sense strand
cagaucauauuggaaguga

SEQ ID NO: 1344965 - RNA, 19 nt, Homo sapiens
  misc_RNA (1)...(19): siRNA sense strand
aaagguggcagaucauauu

SEQ ID NO: 1344966 - RNA, 19 nt, Homo sapiens
  misc_RNA (1)...(19): siRNA sense strand
caaaguugcauccguggaa

SEQ ID NO: 1344967 - RNA, 19 nt, Homo sapiens
  misc_RNA (1)...(19): siRNA sense strand
ggaacucuauuuguuugau

SEQ ID NO: 1344968 - RNA, 19 nt, Homo sapiens
  misc_RNA (1)...(19): siRNA sense strand
gagucagaccuuuguuuaa

SEQ ID NO: 1344969 - RNA, 19 nt, Homo sapiens
  misc_RNA (1)...(19): siRNA sense strand
gaugacagacagaaggauu

SEQ ID NO: 1344970 - RNA, 19 nt, Homo sapiens
  misc_RNA (1)...(19): siRNA sense strand
ggauacugccaauaagaaa

SEQ ID NO: 1344971 - RNA, 19 nt, Homo sapiens
  misc_RNA (1)...(19): siRNA sense strand
ggauauuacuaccgucaag

SEQ ID NO: 1344972 - RNA, 19 nt, Homo sapiens
  misc_RNA (1)...(19): siRNA sense strand
ccaaucugauacccaaaga

SEQ ID NO: 1344973 - RNA, 19 nt, Homo sapiens
  misc_RNA (1)...(19): siRNA sense strand
gagagucccauuucuagau

SEQ ID NO: 1344974 - RNA, 19 nt, Homo sapiens
  misc_RNA (1)...(19): siRNA sense strand
uuacaauggugaaaucuac

SEQ ID NO: 1344975 - RNA, 19 nt, Homo sapiens
  misc_RNA (1)...(19): siRNA sense strand
agagagacguuugaggauu

SEQ ID NO: 1344976 - RNA, 19 nt, Homo sapiens
  misc_RNA (1)...(19): siRNA sense strand
uuacgcaggguuacauaua

SEQ ID NO: 1344977 - RNA, 19 nt, Homo sapiens
  misc_RNA (1)...(19): siRNA sense strand
ggaagacagccccgauuua

SEQ ID NO: 1344978 - RNA, 19 nt, Homo sapiens
  misc_RNA (1)...(19): siRNA sense strand
gcacuccgcgacucccuuu

SEQ ID NO: 1344979 - RNA, 19 nt, Homo sapiens
  misc_RNA (1)...(19): siRNA sense strand
cauauggagucagaccuuu

SEQ ID NO: 1344980 - RNA, 19 nt, Homo sapiens
  misc_RNA (1)...(19): siRNA sense strand
caaaggaggaauugagcaa

SEQ ID NO: 1344981 - RNA, 19 nt, Homo sapiens
  misc_RNA (1)...(19): siRNA sense strand
gcaauuggcauggaagaca

SEQ ID NO: 1344982 - RNA, 19 nt, Homo sapiens
  misc_RNA (1)...(19): siRNA sense strand
ucagguugaugaugcaaug

SEQ ID NO: 1344983 - RNA, 19 nt, Homo sapiens
  misc_RNA (1)...(19): siRNA sense strand
agaaggaucagaugaacuu

SEQ ID NO: 1344984 - RNA, 19 nt, Homo sapiens
  misc_RNA (1)...(19): siRNA sense strand
guaguugacccgcuguuug

SEQ ID NO: 1344985 - RNA, 19 nt, Homo sapiens
  misc_RNA (1)...(19): siRNA sense strand
ccaauucgagugaagaaau

SEQ ID NO: 1344986 - RNA, 19 nt, Homo sapiens
  misc_RNA (1)...(19): siRNA sense strand
cagaaauuucccuucaaua

SEQ ID NO: 1344987 - RNA, 19 nt, Homo sapiens
  misc_RNA (1)...(19): siRNA sense strand
agauagaaacugugaagaa

SEQ ID NO: 1344988 - RNA, 19 nt, Homo sapiens
  misc_RNA (1)...(19): siRNA sense strand
agauacauauggagucaga

SEQ ID NO: 1344989 - RNA, 19 nt, Homo sapiens
  misc_RNA (1)...(19): siRNA sense strand
agaaacguuugaugacaga

SEQ ID NO: 1344990 - RNA, 19 nt, Homo sapiens
  misc_RNA (1)...(19): siRNA sense strand
aaauuucccuucaauacuc

SEQ ID NO: 1344991 - RNA, 19 nt, Homo sapiens
  misc_RNA (1)...(19): siRNA sense strand
gaauuccugguuuaagauu

SEQ ID NO: 1344992 - RNA, 19 nt, Homo sapiens
  misc_RNA (1)...(19): siRNA sense strand
ggaagugaacauuaugaag

SEQ ID NO: 1344993 - RNA, 19 nt, Homo sapiens
  misc_RNA (1)...(19): siRNA sense strand
ccagaaaugagaauuccaa

SEQ ID NO: 1344994 - RNA, 19 nt, Homo sapiens
  misc_RNA (1)...(19): siRNA sense strand
gagagugagaggcuucuga

SEQ ID NO: 1344995 - RNA, 19 nt, Homo sapiens
  misc_RNA (1)...(19): siRNA sense strand
gaaggaucagaugaacuua

SEQ ID NO: 1344996 - RNA, 19 nt, Homo sapiens
  misc_RNA (1)...(19): siRNA sense strand
caauguggagaaacucuuu

SEQ ID NO: 1344997 - RNA, 19 nt, Homo sapiens
  misc_RNA (1)...(19): siRNA sense strand
uaugaagauugcacacaga

SEQ ID NO: 1344998 - RNA, 19 nt, Homo sapiens
  misc_RNA (1)...(19): siRNA sense strand
gaacuuacgcaggguuaca

SEQ ID NO: 1344999 - RNA, 19 nt, Homo sapiens
  misc_RNA (1)...(19): siRNA sense strand
cuccagacauuugcaauug

SEQ ID NO: 1345000 - RNA, 19 nt, Homo sapiens
  misc_RNA (1)...(19): siRNA sense strand
aaugacagaagauggauuu

SEQ ID NO: 1345001 - RNA, 19 nt, Homo sapiens
  misc_RNA (1)...(19): siRNA sense strand
agaaauuucccuucaauac

SEQ ID NO: 1345002 - RNA, 19 nt, Homo sapiens
  misc_RNA (1)...(19): siRNA sense strand
cuuaugacauuacaacagu

SEQ ID NO: 1345003 - RNA, 19 nt, Homo sapiens
  misc_RNA (1)...(19): siRNA sense strand
uaaagaaacguuugaugac

SEQ ID NO: 1345004 - RNA, 19 nt, Homo sapiens
  misc_RNA (1)...(19): siRNA sense strand
aguauccucuccagacauu

SEQ ID NO: 1345005 - RNA, 19 nt, Homo sapiens
  misc_RNA (1)...(19): siRNA sense strand
ggcaaaugcagcccagaaa

SEQ ID NO: 1345006 - RNA, 19 nt, Homo sapiens
  misc_RNA (1)...(19): siRNA sense strand
gguugaugaugcaaugaug

SEQ ID NO: 1345007 - RNA, 19 nt, Homo sapiens
  misc_RNA (1)...(19): siRNA sense strand
agccuucagugauggaaua

SEQ ID NO: 1345008 - RNA, 19 nt, Homo sapiens
  misc_RNA (1)...(19): siRNA sense strand
ucugauacccaaagagauu

SEQ ID NO: 1345009 - RNA, 19 nt, Homo sapiens
  misc_RNA (1)...(19): siRNA sense strand
gagagagacguuugaggau

SEQ ID NO: 1345010 - RNA, 19 nt, Homo sapiens
  misc_RNA (1)...(19): siRNA sense strand
uacgcaggguuacauauau

SEQ ID NO: 1345011 - RNA, 19 nt, Homo sapiens
  misc_RNA (1)...(19): siRNA sense strand
ggacugaguuuauugauga

SEQ ID NO: 1345012 - RNA, 19 nt, Homo sapiens
  misc_RNA (1)...(19): siRNA sense strand
acagugauguugagguuua

SEQ ID NO: 1345013 - RNA, 19 nt, Homo sapiens
  misc_RNA (1)...(19): siRNA sense strand
gcccuaggcucuugcuuaa

SEQ ID NO: 1345014 - RNA, 19 nt, Homo sapiens
  misc_RNA (1)...(19): siRNA sense strand
gagcuggcaugaucuucua

SEQ ID NO: 1345015 - RNA, 19 nt, Homo sapiens
  misc_RNA (1)...(19): siRNA sense strand
ccacguccaucuucuuuga

SEQ ID NO: 1345016 - RNA, 19 nt, Homo sapiens
  misc_RNA (1)...(19): siRNA sense strand
cuaugacucuggaauuuaa

SEQ ID NO: 1345017 - RNA, 19 nt, Homo sapiens
  misc_RNA (1)...(19): siRNA sense strand
ugacggagcugggcuacaa

SEQ ID NO: 1345018 - RNA, 19 nt, Homo sapiens
  misc_RNA (1)...(19): siRNA sense strand
gggaggagguugagagcuu

SEQ ID NO: 1345019 - RNA, 19 nt, Homo sapiens
  misc_RNA (1)...(19): siRNA sense strand
gagccacccugaaagaguu

SEQ ID NO: 1345020 - RNA, 19 nt, Homo sapiens
  misc_RNA (1)...(19): siRNA sense strand
gagcuucgccucucucuuc

SEQ ID NO: 1345021 - RNA, 19 nt, Homo sapiens
  misc_RNA (1)...(19): siRNA sense strand
ccuaggcucuugcuuaaau

SEQ ID NO: 1345022 - RNA, 19 nt, Homo sapiens
  misc_RNA (1)...(19): siRNA sense strand
ggagaacgcacgccucuuc

SEQ ID NO: 1345023 - RNA, 19 nt, Homo sapiens
  misc_RNA (1)...(19): siRNA sense strand
gcacugaagcaagcuauga

SEQ ID NO: 1345024 - RNA, 19 nt, Homo sapiens
  misc_RNA (1)...(19): siRNA sense strand
agacagugauguugagguu

SEQ ID NO: 1345025 - RNA, 19 nt, Homo sapiens
  misc_RNA (1)...(19): siRNA sense strand
uacggaagauugcagauga

SEQ ID NO: 1345026 - RNA, 19 nt, Homo sapiens
  misc_RNA (1)...(19): siRNA sense strand
caaagacagugauguugag

SEQ ID NO: 1345027 - RNA, 19 nt, Homo sapiens
  misc_RNA (1)...(19): siRNA sense strand
gcuaugacucuggaauuua

SEQ ID NO: 1345028 - RNA, 19 nt, Homo sapiens
  misc_RNA (1)...(19): siRNA sense strand
gagguuuacaacaucauua

SEQ ID NO: 1345029 - RNA, 19 nt, Homo sapiens
  misc_RNA (1)...(19): siRNA sense strand
gggacugaguuuauugaug

SEQ ID NO: 1345030 - RNA, 19 nt, Homo sapiens
  misc_RNA (1)...(19): siRNA sense strand
ucauuaagaaggagaguaa

SEQ ID NO: 1345031 - RNA, 19 nt, Homo sapiens
  misc_RNA (1)...(19): siRNA sense strand
gaagauugcagaugagaac

SEQ ID NO: 1345032 - RNA, 19 nt, Homo sapiens
  misc_RNA (1)...(19): siRNA sense strand
gauacuggcuacaucaacu

SEQ ID NO: 1345033 - RNA, 19 nt, Homo sapiens
  misc_RNA (1)...(19): siRNA sense strand
ggcccuaggcucuugcuua

SEQ ID NO: 1345034 - RNA, 19 nt, Homo sapiens
  misc_RNA (1)...(19): siRNA sense strand
gagcugggcuacaaaauag

SEQ ID NO: 1345035 - RNA, 19 nt, Homo sapiens
  misc_RNA (1)...(19): siRNA sense strand
gcucuugcuuaaauaacaa

SEQ ID NO: 1345036 - RNA, 19 nt, Homo sapiens
  misc_RNA (1)...(19): siRNA sense strand
uggccugccugacuucuaa

SEQ ID NO: 1345037 - RNA, 19 nt, Homo sapiens
  misc_RNA (1)...(19): siRNA sense strand
ugacaaccauuugauccuu

SEQ ID NO: 1345038 - RNA, 19 nt, Homo sapiens
  misc_RNA (1)...(19): siRNA sense strand
caucuucuuugaaucuaug

SEQ ID NO: 1345039 - RNA, 19 nt, Homo sapiens
  misc_RNA (1)...(19): siRNA sense strand
ccucaaagacagugauguu

SEQ ID NO: 1345040 - RNA, 19 nt, Homo sapiens
  misc_RNA (1)...(19): siRNA sense strand
guagcccacuuuauucaca

SEQ ID NO: 1345041 - RNA, 19 nt, Homo sapiens
  misc_RNA (1)...(19): siRNA sense strand
cuggcuacaucaacuauga

SEQ ID NO: 1345042 - RNA, 19 nt, Homo sapiens
  misc_RNA (1)...(19): siRNA sense strand
ggagcugggcuacaaaaua

SEQ ID NO: 1345043 - RNA, 19 nt, Homo sapiens
  misc_RNA (1)...(19): siRNA sense strand
gcaugaucuucuacaggaa

SEQ ID NO: 1345044 - RNA, 19 nt, Homo sapiens
  misc_RNA (1)...(19): siRNA sense strand
cccgaaaccuggaauaugc

SEQ ID NO: 1345045 - RNA, 19 nt, Homo sapiens
  misc_RNA (1)...(19): siRNA sense strand
cuaggcucuugcuuaaaua

SEQ ID NO: 1345046 - RNA, 19 nt, Homo sapiens
  misc_RNA (1)...(19): siRNA sense strand
gagcccugcaggccuauaa

SEQ ID NO: 1345047 - RNA, 19 nt, Homo sapiens
  misc_RNA (1)...(19): siRNA sense strand
uugaaucuaugcccuacaa

SEQ ID NO: 1345048 - RNA, 19 nt, Homo sapiens
  misc_RNA (1)...(19): siRNA sense strand
ggaagauugcagaugagaa

SEQ ID NO: 1345049 - RNA, 19 nt, Homo sapiens
  misc_RNA (1)...(19): siRNA sense strand
uggcgggacugaguuuauu

SEQ ID NO: 1345050 - RNA, 19 nt, Homo sapiens
  misc_RNA (1)...(19): siRNA sense strand
aaacuuugcuguguacacu

SEQ ID NO: 1345051 - RNA, 19 nt, Homo sapiens
  misc_RNA (1)...(19): siRNA sense strand
gggcugagaaggugcuaga

SEQ ID NO: 1345052 - RNA, 19 nt, Homo sapiens
  misc_RNA (1)...(19): siRNA sense strand
guccucacaugacaagaug

SEQ ID NO: 1345053 - RNA, 19 nt, Homo sapiens
  misc_RNA (1)...(19): siRNA sense strand
acaacaucauuaagaagga

SEQ ID NO: 1345054 - RNA, 19 nt, Homo sapiens
  misc_RNA (1)...(19): siRNA sense strand
gaaagaguucaaggagaga

SEQ ID NO: 1345055 - RNA, 19 nt, Homo sapiens
  misc_RNA (1)...(19): siRNA sense strand
cugauugccucggagaauu

SEQ ID NO: 1345056 - RNA, 19 nt, Homo sapiens
  misc_RNA (1)...(19): siRNA sense strand
gcacaaccccucaaagaca

SEQ ID NO: 1345057 - RNA, 19 nt, Homo sapiens
  misc_RNA (1)...(19): siRNA sense strand
caacguccagcccuacuca

SEQ ID NO: 1345058 - RNA, 19 nt, Homo sapiens
  misc_RNA (1)...(19): siRNA sense strand
guacacugcccugguggaa

SEQ ID NO: 1345059 - RNA, 19 nt, Homo sapiens
  misc_RNA (1)...(19): siRNA sense strand
ggcucuugcuuaaauaaca

SEQ ID NO: 1345060 - RNA, 19 nt, Homo sapiens
  misc_RNA (1)...(19): siRNA sense strand
agcuaugacucuggaauuu

SEQ ID NO: 1345061 - RNA, 19 nt, Homo sapiens
  misc_RNA (1)...(19): siRNA sense strand
guucaugacagacaagaag

SEQ ID NO: 1345062 - RNA, 19 nt, Homo sapiens
  misc_RNA (1)...(19): siRNA sense strand
ggcagaggguuggauugga

SEQ ID NO: 1345063 - RNA, 19 nt, Homo sapiens
  misc_RNA (1)...(19): siRNA sense strand
gauacuauggcgggacuga

SEQ ID NO: 1345064 - RNA, 19 nt, Homo sapiens
  misc_RNA (1)...(19): siRNA sense strand
ugauugccucggagaauuu

SEQ ID NO: 1345065 - RNA, 19 nt, Homo sapiens
  misc_RNA (1)...(19): siRNA sense strand
caugaucuucuacaggaaa

SEQ ID NO: 1345066 - RNA, 19 nt, Homo sapiens
  misc_RNA (1)...(19): siRNA sense strand
caugacagacaagaagaaa

SEQ ID NO: 1345067 - RNA, 19 nt, Homo sapiens
  misc_RNA (1)...(19): siRNA sense strand
gcgggacugaguuuauuga

SEQ ID NO: 1345068 - RNA, 19 nt, Homo sapiens
  misc_RNA (1)...(19): siRNA sense strand
ucacaggugguucugacaa

SEQ ID NO: 1345069 - RNA, 19 nt, Homo sapiens
  misc_RNA (1)...(19): siRNA sense strand
gacugaguuuauugaugaa

SEQ ID NO: 1345070 - RNA, 19 nt, Homo sapiens
  misc_RNA (1)...(19): siRNA sense strand
gcugagaaggugcuagaag

SEQ ID NO: 1345071 - RNA, 19 nt, Homo sapiens
  misc_RNA (1)...(19): siRNA sense strand
aagcuaugacucuggaauu

SEQ ID NO: 1345072 - RNA, 19 nt, Homo sapiens
  misc_RNA (1)...(19): siRNA sense strand
ggguugcuguggcacugaa

SEQ ID NO: 1345073 - RNA, 19 nt, Homo sapiens
  misc_RNA (1)...(19): siRNA sense strand
gguccucacaugacaagau

SEQ ID NO: 1345074 - RNA, 19 nt, Homo sapiens
  misc_RNA (1)...(19): siRNA sense strand
augaccagcuggaggagaa

SEQ ID NO: 1345075 - RNA, 19 nt, Homo sapiens
  misc_RNA (1)...(19): siRNA sense strand
gcugauugccucggagaau

SEQ ID NO: 1345076 - RNA, 19 nt, Homo sapiens
  misc_RNA (1)...(19): siRNA sense strand
caagcuaugacucuggaau

SEQ ID NO: 1345077 - RNA, 19 nt, Homo sapiens
  misc_RNA (1)...(19): siRNA sense strand
ugaagcaagcuaugacucu

SEQ ID NO: 1345078 - RNA, 19 nt, Homo sapiens
  misc_RNA (1)...(19): siRNA sense strand
ugacagacaagaagaaaau

SEQ ID NO: 1345079 - RNA, 19 nt, Homo sapiens
  misc_RNA (1)...(19): siRNA sense strand
ggacugaguuuauugauga

SEQ ID NO: 1345080 - RNA, 19 nt, Homo sapiens
  misc_RNA (1)...(19): siRNA sense strand
acagugauguugagguuua

SEQ ID NO: 1345081 - RNA, 19 nt, Homo sapiens
  misc_RNA (1)...(19): siRNA sense strand
gcccuaggcucuugcuuaa

SEQ ID NO: 1345082 - RNA, 19 nt, Homo sapiens
  misc_RNA (1)...(19): siRNA sense strand
gagcuggcaugaucuucua

SEQ ID NO: 1345083 - RNA, 19 nt, Homo sapiens
  misc_RNA (1)...(19): siRNA sense strand
ccacguccaucuucuuuga

SEQ ID NO: 1345084 - RNA, 19 nt, Homo sapiens
  misc_RNA (1)...(19): siRNA sense strand
cuaugacucuggaauuuaa

SEQ ID NO: 1345085 - RNA, 19 nt, Homo sapiens
  misc_RNA (1)...(19): siRNA sense strand
ugacggagcugggcuacaa

SEQ ID NO: 1345086 - RNA, 19 nt, Homo sapiens
  misc_RNA (1)...(19): siRNA sense strand
gggaggagguugagagcuu

SEQ ID NO: 1345087 - RNA, 19 nt, Homo sapiens
  misc_RNA (1)...(19): siRNA sense strand
gagccacccugaaagaguu

SEQ ID NO: 1345088 - RNA, 19 nt, Homo sapiens
  misc_RNA (1)...(19): siRNA sense strand
gagcuucgccucucucuuc

SEQ ID NO: 1345089 - RNA, 19 nt, Homo sapiens
  misc_RNA (1)...(19): siRNA sense strand
ccuaggcucuugcuuaaau

SEQ ID NO: 1345090 - RNA, 19 nt, Homo sapiens
  misc_RNA (1)...(19): siRNA sense strand
ggagaacgcacgccucuuc

SEQ ID NO: 1345091 - RNA, 19 nt, Homo sapiens
  misc_RNA (1)...(19): siRNA sense strand
gcacugaagcaagcuauga

SEQ ID NO: 1345092 - RNA, 19 nt, Homo sapiens
  misc_RNA (1)...(19): siRNA sense strand
agacagugauguugagguu

SEQ ID NO: 1345093 - RNA, 19 nt, Homo sapiens
  misc_RNA (1)...(19): siRNA sense strand
uacggaagauugcagauga

SEQ ID NO: 1345094 - RNA, 19 nt, Homo sapiens
  misc_RNA (1)...(19): siRNA sense strand
caaagacagugauguugag

SEQ ID NO: 1345095 - RNA, 19 nt, Homo sapiens
  misc_RNA (1)...(19): siRNA sense strand
gcuaugacucuggaauuua

SEQ ID NO: 1345096 - RNA, 19 nt, Homo sapiens
  misc_RNA (1)...(19): siRNA sense strand
gagguuuacaacaucauua

SEQ ID NO: 1345097 - RNA, 19 nt, Homo sapiens
  misc_RNA (1)...(19): siRNA sense strand
gggacugaguuuauugaug

SEQ ID NO: 1345098 - RNA, 19 nt, Homo sapiens
  misc_RNA (1)...(19): siRNA sense strand
ucauuaagaaggagaguaa

SEQ ID NO: 1345099 - RNA, 19 nt, Homo sapiens
  misc_RNA (1)...(19): siRNA sense strand
gaagauugcagaugagaac

SEQ ID NO: 1345100 - RNA, 19 nt, Homo sapiens
  misc_RNA (1)...(19): siRNA sense strand
gauacuggcuacaucaacu

SEQ ID NO: 1345101 - RNA, 19 nt, Homo sapiens
  misc_RNA (1)...(19): siRNA sense strand
ggcccuaggcucuugcuua

SEQ ID NO: 1345102 - RNA, 19 nt, Homo sapiens
  misc_RNA (1)...(19): siRNA sense strand
gagcugggcuacaaaauag

SEQ ID NO: 1345103 - RNA, 19 nt, Homo sapiens
  misc_RNA (1)...(19): siRNA sense strand
gcucuugcuuaaauaacaa

SEQ ID NO: 1345104 - RNA, 19 nt, Homo sapiens
  misc_RNA (1)...(19): siRNA sense strand
uggccugccugacuucuaa

SEQ ID NO: 1345105 - RNA, 19 nt, Homo sapiens
  misc_RNA (1)...(19): siRNA sense strand
ugacaaccauuugauccuu

SEQ ID NO: 1345106 - RNA, 19 nt, Homo sapiens
  misc_RNA (1)...(19): siRNA sense strand
caucuucuuugaaucuaug

SEQ ID NO: 1345107 - RNA, 19 nt, Homo sapiens
  misc_RNA (1)...(19): siRNA sense strand
ccucaaagacagugauguu

SEQ ID NO: 1345108 - RNA, 19 nt, Homo sapiens
  misc_RNA (1)...(19): siRNA sense strand
guagcccacuuuauucaca

SEQ ID NO: 1345109 - RNA, 19 nt, Homo sapiens
  misc_RNA (1)...(19): siRNA sense strand
cuggcuacaucaacuauga

SEQ ID NO: 1345110 - RNA, 19 nt, Homo sapiens
  misc_RNA (1)...(19): siRNA sense strand
ggagcugggcuacaaaaua

SEQ ID NO: 1345111 - RNA, 19 nt, Homo sapiens
  misc_RNA (1)...(19): siRNA sense strand
gcaugaucuucuacaggaa

SEQ ID NO: 1345112 - RNA, 19 nt, Homo sapiens
  misc_RNA (1)...(19): siRNA sense strand
cccgaaaccuggaauaugc

SEQ ID NO: 1345113 - RNA, 19 nt, Homo sapiens
  misc_RNA (1)...(19): siRNA sense strand
cuaggcucuugcuuaaaua

SEQ ID NO: 1345114 - RNA, 19 nt, Homo sapiens
  misc_RNA (1)...(19): siRNA sense strand
gagcccugcaggccuauaa

SEQ ID NO: 1345115 - RNA, 19 nt, Homo sapiens
  misc_RNA (1)...(19): siRNA sense strand
uugaaucuaugcccuacaa

SEQ ID NO: 1345116 - RNA, 19 nt, Homo sapiens
  misc_RNA (1)...(19): siRNA sense strand
ggaagauugcagaugagaa

SEQ ID NO: 1345117 - RNA, 19 nt, Homo sapiens
  misc_RNA (1)...(19): siRNA sense strand
uggcgggacugaguuuauu

SEQ ID NO: 1345118 - RNA, 19 nt, Homo sapiens
  misc_RNA (1)...(19): siRNA sense strand
aaacuuugcuguguacacu

SEQ ID NO: 1345119 - RNA, 19 nt, Homo sapiens
  misc_RNA (1)...(19): siRNA sense strand
gggcugagaaggugcuaga

SEQ ID NO: 1345120 - RNA, 19 nt, Homo sapiens
  misc_RNA (1)...(19): siRNA sense strand
guccucacaugacaagaug

SEQ ID NO: 1345121 - RNA, 19 nt, Homo sapiens
  misc_RNA (1)...(19): siRNA sense strand
acaacaucauuaagaagga

SEQ ID NO: 1345122 - RNA, 19 nt, Homo sapiens
  misc_RNA (1)...(19): siRNA sense strand
gaaagaguucaaggagaga

SEQ ID NO: 1345123 - RNA, 19 nt, Homo sapiens
  misc_RNA (1)...(19): siRNA sense strand
cugauugccucggagaauu

SEQ ID NO: 1345124 - RNA, 19 nt, Homo sapiens
  misc_RNA (1)...(19): siRNA sense strand
gcacaaccccucaaagaca

SEQ ID NO: 1345125 - RNA, 19 nt, Homo sapiens
  misc_RNA (1)...(19): siRNA sense strand
caacguccagcccuacuca

SEQ ID NO: 1345126 - RNA, 19 nt, Homo sapiens
  misc_RNA (1)...(19): siRNA sense strand
guacacugcccugguggaa

SEQ ID NO: 1345127 - RNA, 19 nt, Homo sapiens
  misc_RNA (1)...(19): siRNA sense strand
ggcucuugcuuaaauaaca

SEQ ID NO: 1345128 - RNA, 19 nt, Homo sapiens
  misc_RNA (1)...(19): siRNA sense strand
agcuaugacucuggaauuu

SEQ ID NO: 1345129 - RNA, 19 nt, Homo sapiens
  misc_RNA (1)...(19): siRNA sense strand
guucaugacagacaagaag

SEQ ID NO: 1345130 - RNA, 19 nt, Homo sapiens
  misc_RNA (1)...(19): siRNA sense strand
ggcagaggguuggauugga

SEQ ID NO: 1345131 - RNA, 19 nt, Homo sapiens
  misc_RNA (1)...(19): siRNA sense strand
gauacuauggcgggacuga

SEQ ID NO: 1345132 - RNA, 19 nt, Homo sapiens
  misc_RNA (1)...(19): siRNA sense strand
ugauugccucggagaauuu

SEQ ID NO: 1345133 - RNA, 19 nt, Homo sapiens
  misc_RNA (1)...(19): siRNA sense strand
caugaucuucuacaggaaa

SEQ ID NO: 1345134 - RNA, 19 nt, Homo sapiens
  misc_RNA (1)...(19): siRNA sense strand
caugacagacaagaagaaa

SEQ ID NO: 1345135 - RNA, 19 nt, Homo sapiens
  misc_RNA (1)...(19): siRNA sense strand
gcgggacugaguuuauuga

SEQ ID NO: 1345136 - RNA, 19 nt, Homo sapiens
  misc_RNA (1)...(19): siRNA sense strand
ucacaggugguucugacaa

SEQ ID NO: 1345137 - RNA, 19 nt, Homo sapiens
  misc_RNA (1)...(19): siRNA sense strand
gacugaguuuauugaugaa

SEQ ID NO: 1345138 - RNA, 19 nt, Homo sapiens
  misc_RNA (1)...(19): siRNA sense strand
gcugagaaggugcuagaag

SEQ ID NO: 1345139 - RNA, 19 nt, Homo sapiens
  misc_RNA (1)...(19): siRNA sense strand
aagcuaugacucuggaauu

SEQ ID NO: 1345140 - RNA, 19 nt, Homo sapiens
  misc_RNA (1)...(19): siRNA sense strand
ggguugcuguggcacugaa

SEQ ID NO: 1345141 - RNA, 19 nt, Homo sapiens
  misc_RNA (1)...(19): siRNA sense strand
gguccucacaugacaagau

SEQ ID NO: 1345142 - RNA, 19 nt, Homo sapiens
  misc_RNA (1)...(19): siRNA sense strand
augaccagcuggaggagaa

SEQ ID NO: 1345143 - RNA, 19 nt, Homo sapiens
  misc_RNA (1)...(19): siRNA sense strand
gcugauugccucggagaau

SEQ ID NO: 1345144 - RNA, 19 nt, Homo sapiens
  misc_RNA (1)...(19): siRNA sense strand
caagcuaugacucuggaau

SEQ ID NO: 1345145 - RNA, 19 nt, Homo sapiens
  misc_RNA (1)...(19): siRNA sense strand
ugaagcaagcuaugacucu

SEQ ID NO: 1345146 - RNA, 19 nt, Homo sapiens
  misc_RNA (1)...(19): siRNA sense strand
ugacagacaagaagaaaau

SEQ ID NO: 1345147 - RNA, 19 nt, Homo sapiens
  misc_RNA (1)...(19): siRNA sense strand
gaaaggaacguucagauug

SEQ ID NO: 1345148 - RNA, 19 nt, Homo sapiens
  misc_RNA (1)...(19): siRNA sense strand
ugauugagauuaacccuua

SEQ ID NO: 1345149 - RNA, 19 nt, Homo sapiens
  misc_RNA (1)...(19): siRNA sense strand
ggacucggcucucaggaaa

SEQ ID NO: 1345150 - RNA, 19 nt, Homo sapiens
  misc_RNA (1)...(19): siRNA sense strand
aaaggaacguucagauuga

SEQ ID NO: 1345151 - RNA, 19 nt, Homo sapiens
  misc_RNA (1)...(19): siRNA sense strand
ucagcuggguccuacauua

SEQ ID NO: 1345152 - RNA, 19 nt, Homo sapiens
  misc_RNA (1)...(19): siRNA sense strand
gaacaaggugauugagauu

SEQ ID NO: 1345153 - RNA, 19 nt, Homo sapiens
  misc_RNA (1)...(19): siRNA sense strand
acaaggugauugagauuaa

SEQ ID NO: 1345154 - RNA, 19 nt, Homo sapiens
  misc_RNA (1)...(19): siRNA sense strand
ggaagaugguugggugaaa

SEQ ID NO: 1345155 - RNA, 19 nt, Homo sapiens
  misc_RNA (1)...(19): siRNA sense strand
gaaaguagaaaguacagau

SEQ ID NO: 1345156 - RNA, 19 nt, Homo sapiens
  misc_RNA (1)...(19): siRNA sense strand
gauuaacccuuaccugcuu

SEQ ID NO: 1345157 - RNA, 19 nt, Homo sapiens
  misc_RNA (1)...(19): siRNA sense strand
gaagaugguugggugaaag

SEQ ID NO: 1345158 - RNA, 19 nt, Homo sapiens
  misc_RNA (1)...(19): siRNA sense strand
ugaacaaggugauugagau

SEQ ID NO: 1345159 - RNA, 19 nt, Homo sapiens
  misc_RNA (1)...(19): siRNA sense strand
ccgggaagccaaucaauaa

SEQ ID NO: 1345160 - RNA, 19 nt, Homo sapiens
  misc_RNA (1)...(19): siRNA sense strand
ccaccacgcucgccuucaa

SEQ ID NO: 1345161 - RNA, 19 nt, Homo sapiens
  misc_RNA (1)...(19): siRNA sense strand
gcagggcuauugcuuaugc

SEQ ID NO: 1345162 - RNA, 19 nt, Homo sapiens
  misc_RNA (1)...(19): siRNA sense strand
ccgcagggcuauugcuuau

SEQ ID NO: 1345163 - RNA, 19 nt, Homo sapiens
  misc_RNA (1)...(19): siRNA sense strand
ggcuaucggccuaaucuua

SEQ ID NO: 1345164 - RNA, 19 nt, Homo sapiens
  misc_RNA (1)...(19): siRNA sense strand
ccuccaagcugcuguccaa

SEQ ID NO: 1345165 - RNA, 19 nt, Homo sapiens
  misc_RNA (1)...(19): siRNA sense strand
acucggcucucaggaaaua

SEQ ID NO: 1345166 - RNA, 19 nt, Homo sapiens
  misc_RNA (1)...(19): siRNA sense strand
agaaaggaacguucagauu

SEQ ID NO: 1345167 - RNA, 19 nt, Homo sapiens
  misc_RNA (1)...(19): siRNA sense strand
gaggcguugucaauaugua

SEQ ID NO: 1345168 - RNA, 19 nt, Homo sapiens
  misc_RNA (1)...(19): siRNA sense strand
ggagaacguauuucagugu

SEQ ID NO: 1345169 - RNA, 19 nt, Homo sapiens
  misc_RNA (1)...(19): siRNA sense strand
gagaaaggaacguucagau

SEQ ID NO: 1345170 - RNA, 19 nt, Homo sapiens
  misc_RNA (1)...(19): siRNA sense strand
ugaagaggccuaugaccuu

SEQ ID NO: 1345171 - RNA, 19 nt, Homo sapiens
  misc_RNA (1)...(19): siRNA sense strand
aagcugcuguccaacauga

SEQ ID NO: 1345172 - RNA, 19 nt, Homo sapiens
  misc_RNA (1)...(19): siRNA sense strand
ccaagcugcuguccaacau

SEQ ID NO: 1345173 - RNA, 19 nt, Homo sapiens
  misc_RNA (1)...(19): siRNA sense strand
ggagaaaggaacguucaga

SEQ ID NO: 1345174 - RNA, 19 nt, Homo sapiens
  misc_RNA (1)...(19): siRNA sense strand
gaaugcaggcuguacuauc

SEQ ID NO: 1345175 - RNA, 19 nt, Homo sapiens
  misc_RNA (1)...(19): siRNA sense strand
ucacagagacagcuauucu

SEQ ID NO: 1345176 - RNA, 19 nt, Homo sapiens
  misc_RNA (1)...(19): siRNA sense strand
cuggaggcguugucaauau

SEQ ID NO: 1345177 - RNA, 19 nt, Homo sapiens
  misc_RNA (1)...(19): siRNA sense strand
ggacggagaaaggaacguu

SEQ ID NO: 1345178 - RNA, 19 nt, Homo sapiens
  misc_RNA (1)...(19): siRNA sense strand
gugaccugcugcaccagua

SEQ ID NO: 1345179 - RNA, 19 nt, Homo sapiens
  misc_RNA (1)...(19): siRNA sense strand
ggucauggacaguggcuau

SEQ ID NO: 1345180 - RNA, 19 nt, Homo sapiens
  misc_RNA (1)...(19): siRNA sense strand
gggcaugggccucucuaug

SEQ ID NO: 1345181 - RNA, 19 nt, Homo sapiens
  misc_RNA (1)...(19): siRNA sense strand
guccuacauuagugccuua

SEQ ID NO: 1345182 - RNA, 19 nt, Homo sapiens
  misc_RNA (1)...(19): siRNA sense strand
ggaaugcaggcuguacuau

SEQ ID NO: 1345183 - RNA, 19 nt, Homo sapiens
  misc_RNA (1)...(19): siRNA sense strand
guagaaaguacagauguca

SEQ ID NO: 1345184 - RNA, 19 nt, Homo sapiens
  misc_RNA (1)...(19): siRNA sense strand
gcccugaagaggccuauga

SEQ ID NO: 1345185 - RNA, 19 nt, Homo sapiens
  misc_RNA (1)...(19): siRNA sense strand
gaacguucagauugagaug

SEQ ID NO: 1345186 - RNA, 19 nt, Homo sapiens
  misc_RNA (1)...(19): siRNA sense strand
aaugcaggcuguacuaucu

SEQ ID NO: 1345187 - RNA, 19 nt, Homo sapiens
  misc_RNA (1)...(19): siRNA sense strand
ggcaugggccucucuaugg

SEQ ID NO: 1345188 - RNA, 19 nt, Homo sapiens
  misc_RNA (1)...(19): siRNA sense strand
gcgaaauggagaacguauu

SEQ ID NO: 1345189 - RNA, 19 nt, Homo sapiens
  misc_RNA (1)...(19): siRNA sense strand
gcuggguccuacauuagug

SEQ ID NO: 1345190 - RNA, 19 nt, Homo sapiens
  misc_RNA (1)...(19): siRNA sense strand
gcuguacuaucugcgaaau

SEQ ID NO: 1345191 - RNA, 19 nt, Homo sapiens
  misc_RNA (1)...(19): siRNA sense strand
uggaggcguugucaauaug

SEQ ID NO: 1345192 - RNA, 19 nt, Homo sapiens
  misc_RNA (1)...(19): siRNA sense strand
aaaguacagaugucaguga

SEQ ID NO: 1345193 - RNA, 19 nt, Homo sapiens
  misc_RNA (1)...(19): siRNA sense strand
uguacuaucugcgaaaugg

SEQ ID NO: 1345194 - RNA, 19 nt, Homo sapiens
  misc_RNA (1)...(19): siRNA sense strand
gggugaaaguagaaaguac

SEQ ID NO: 1345195 - RNA, 19 nt, Homo sapiens
  misc_RNA (1)...(19): siRNA sense strand
gugaacaaggugauugaga

SEQ ID NO: 1345196 - RNA, 19 nt, Homo sapiens
  misc_RNA (1)...(19): siRNA sense strand
gccgcagggcuauugcuua

SEQ ID NO: 1345197 - RNA, 19 nt, Homo sapiens
  misc_RNA (1)...(19): siRNA sense strand
gcucucaggaaauauguuc

SEQ ID NO: 1345198 - RNA, 19 nt, Homo sapiens
  misc_RNA (1)...(19): siRNA sense strand
ucuacuacguggaugaaca

SEQ ID NO: 1345199 - RNA, 19 nt, Homo sapiens
  misc_RNA (1)...(19): siRNA sense strand
ggugaaaguagaaaguaca

SEQ ID NO: 1345200 - RNA, 19 nt, Homo sapiens
  misc_RNA (1)...(19): siRNA sense strand
gggacucggcucucaggaa

SEQ ID NO: 1345201 - RNA, 19 nt, Homo sapiens
  misc_RNA (1)...(19): siRNA sense strand
uguaccacaugaaggaaga

SEQ ID NO: 1345202 - RNA, 19 nt, Homo sapiens
  misc_RNA (1)...(19): siRNA sense strand
ggaacguucagauugagau

SEQ ID NO: 1345203 - RNA, 19 nt, Homo sapiens
  misc_RNA (1)...(19): siRNA sense strand
gggugaacaaggugauuga

SEQ ID NO: 1345204 - RNA, 19 nt, Homo sapiens
  misc_RNA (1)...(19): siRNA sense strand
aaaguagaaaguacagaug

SEQ ID NO: 1345205 - RNA, 19 nt, Homo sapiens
  misc_RNA (1)...(19): siRNA sense strand
aacaaggugauugagauua

SEQ ID NO: 1345206 - RNA, 19 nt, Homo sapiens
  misc_RNA (1)...(19): siRNA sense strand
caaggugauugagauuaac

SEQ ID NO: 1345207 - RNA, 19 nt, Homo sapiens
  misc_RNA (1)...(19): siRNA sense strand
guaccgggaagccaaucaa

SEQ ID NO: 1345208 - RNA, 19 nt, Homo sapiens
  misc_RNA (1)...(19): siRNA sense strand
cagcuggguccuacauuag

SEQ ID NO: 1345209 - RNA, 19 nt, Homo sapiens
  misc_RNA (1)...(19): siRNA sense strand
gaugguugggugaaaguag

SEQ ID NO: 1345210 - RNA, 19 nt, Homo sapiens
  misc_RNA (1)...(19): siRNA sense strand
ccacaugaaggaagauggu

SEQ ID NO: 1345211 - RNA, 19 nt, Homo sapiens
  misc_RNA (1)...(19): siRNA sense strand
ggaggcguugucaauaugu

SEQ ID NO: 1345212 - RNA, 19 nt, Homo sapiens
  misc_RNA (1)...(19): siRNA sense strand
ccacucacagagacagcua

SEQ ID NO: 1345213 - RNA, 19 nt, Homo sapiens
  misc_RNA (1)...(19): siRNA sense strand
gaaaggaacguucagauug

SEQ ID NO: 1345214 - RNA, 19 nt, Homo sapiens
  misc_RNA (1)...(19): siRNA sense strand
ugauugagauuaacccuua

SEQ ID NO: 1345215 - RNA, 19 nt, Homo sapiens
  misc_RNA (1)...(19): siRNA sense strand
ggacucggcucucaggaaa

SEQ ID NO: 1345216 - RNA, 19 nt, Homo sapiens
  misc_RNA (1)...(19): siRNA sense strand
aaaggaacguucagauuga

SEQ ID NO: 1345217 - RNA, 19 nt, Homo sapiens
  misc_RNA (1)...(19): siRNA sense strand
ucagcuggguccuacauua

SEQ ID NO: 1345218 - RNA, 19 nt, Homo sapiens
  misc_RNA (1)...(19): siRNA sense strand
gaacaaggugauugagauu

SEQ ID NO: 1345219 - RNA, 19 nt, Homo sapiens
  misc_RNA (1)...(19): siRNA sense strand
acaaggugauugagauuaa

SEQ ID NO: 1345220 - RNA, 19 nt, Homo sapiens
  misc_RNA (1)...(19): siRNA sense strand
ggaagaugguugggugaaa

SEQ ID NO: 1345221 - RNA, 19 nt, Homo sapiens
  misc_RNA (1)...(19): siRNA sense strand
gaaaguagaaaguacagau

SEQ ID NO: 1345222 - RNA, 19 nt, Homo sapiens
  misc_RNA (1)...(19): siRNA sense strand
gauuaacccuuaccugcuu

SEQ ID NO: 1345223 - RNA, 19 nt, Homo sapiens
  misc_RNA (1)...(19): siRNA sense strand
gaagaugguugggugaaag

SEQ ID NO: 1345224 - RNA, 19 nt, Homo sapiens
  misc_RNA (1)...(19): siRNA sense strand
ugaacaaggugauugagau

SEQ ID NO: 1345225 - RNA, 19 nt, Homo sapiens
  misc_RNA (1)...(19): siRNA sense strand
ccgggaagccaaucaauaa

SEQ ID NO: 1345226 - RNA, 19 nt, Homo sapiens
  misc_RNA (1)...(19): siRNA sense strand
ccaccacgcucgccuucaa

SEQ ID NO: 1345227 - RNA, 19 nt, Homo sapiens
  misc_RNA (1)...(19): siRNA sense strand
gcagggcuauugcuuaugc

SEQ ID NO: 1345228 - RNA, 19 nt, Homo sapiens
  misc_RNA (1)...(19): siRNA sense strand
ccgcagggcuauugcuuau

SEQ ID NO: 1345229 - RNA, 19 nt, Homo sapiens
  misc_RNA (1)...(19): siRNA sense strand
ggcuaucggccuaaucuua

SEQ ID NO: 1345230 - RNA, 19 nt, Homo sapiens
  misc_RNA (1)...(19): siRNA sense strand
ccuccaagcugcuguccaa

SEQ ID NO: 1345231 - RNA, 19 nt, Homo sapiens
  misc_RNA (1)...(19): siRNA sense strand
acucggcucucaggaaaua

SEQ ID NO: 1345232 - RNA, 19 nt, Homo sapiens
  misc_RNA (1)...(19): siRNA sense strand
agaaaggaacguucagauu

SEQ ID NO: 1345233 - RNA, 19 nt, Homo sapiens
  misc_RNA (1)...(19): siRNA sense strand
gaggcguugucaauaugua

SEQ ID NO: 1345234 - RNA, 19 nt, Homo sapiens
  misc_RNA (1)...(19): siRNA sense strand
ggagaacguauuucagugu

SEQ ID NO: 1345235 - RNA, 19 nt, Homo sapiens
  misc_RNA (1)...(19): siRNA sense strand
gagaaaggaacguucagau

SEQ ID NO: 1345236 - RNA, 19 nt, Homo sapiens
  misc_RNA (1)...(19): siRNA sense strand
ugaagaggccuaugaccuu

SEQ ID NO: 1345237 - RNA, 19 nt, Homo sapiens
  misc_RNA (1)...(19): siRNA sense strand
aagcugcuguccaacauga

SEQ ID NO: 1345238 - RNA, 19 nt, Homo sapiens
  misc_RNA (1)...(19): siRNA sense strand
ccaagcugcuguccaacau

SEQ ID NO: 1345239 - RNA, 19 nt, Homo sapiens
  misc_RNA (1)...(19): siRNA sense strand
ggagaaaggaacguucaga

SEQ ID NO: 1345240 - RNA, 19 nt, Homo sapiens
  misc_RNA (1)...(19): siRNA sense strand
gaaugcaggcuguacuauc

SEQ ID NO: 1345241 - RNA, 19 nt, Homo sapiens
  misc_RNA (1)...(19): siRNA sense strand
ucacagagacagcuauucu

SEQ ID NO: 1345242 - RNA, 19 nt, Homo sapiens
  misc_RNA (1)...(19): siRNA sense strand
cuggaggcguugucaauau

SEQ ID NO: 1345243 - RNA, 19 nt, Homo sapiens
  misc_RNA (1)...(19): siRNA sense strand
ggacggagaaaggaacguu

SEQ ID NO: 1345244 - RNA, 19 nt, Homo sapiens
  misc_RNA (1)...(19): siRNA sense strand
gugaccugcugcaccagua

SEQ ID NO: 1345245 - RNA, 19 nt, Homo sapiens
  misc_RNA (1)...(19): siRNA sense strand
ggucauggacaguggcuau

SEQ ID NO: 1345246 - RNA, 19 nt, Homo sapiens
  misc_RNA (1)...(19): siRNA sense strand
gggcaugggccucucuaug

SEQ ID NO: 1345247 - RNA, 19 nt, Homo sapiens
  misc_RNA (1)...(19): siRNA sense strand
guccuacauuagugccuua

SEQ ID NO: 1345248 - RNA, 19 nt, Homo sapiens
  misc_RNA (1)...(19): siRNA sense strand
ggaaugcaggcuguacuau

SEQ ID NO: 1345249 - RNA, 19 nt, Homo sapiens
  misc_RNA (1)...(19): siRNA sense strand
guagaaaguacagauguca

SEQ ID NO: 1345250 - RNA, 19 nt, Homo sapiens
  misc_RNA (1)...(19): siRNA sense strand
gcccugaagaggccuauga

SEQ ID NO: 1345251 - RNA, 19 nt, Homo sapiens
  misc_RNA (1)...(19): siRNA sense strand
gaacguucagauugagaug

SEQ ID NO: 1345252 - RNA, 19 nt, Homo sapiens
  misc_RNA (1)...(19): siRNA sense strand
aaugcaggcuguacuaucu

SEQ ID NO: 1345253 - RNA, 19 nt, Homo sapiens
  misc_RNA (1)...(19): siRNA sense strand
ggcaugggccucucuaugg

SEQ ID NO: 1345254 - RNA, 19 nt, Homo sapiens
  misc_RNA (1)...(19): siRNA sense strand
gcgaaauggagaacguauu

SEQ ID NO: 1345255 - RNA, 19 nt, Homo sapiens
  misc_RNA (1)...(19): siRNA sense strand
gcuggguccuacauuagug

SEQ ID NO: 1345256 - RNA, 19 nt, Homo sapiens
  misc_RNA (1)...(19): siRNA sense strand
gcuguacuaucugcgaaau

SEQ ID NO: 1345257 - RNA, 19 nt, Homo sapiens
  misc_RNA (1)...(19): siRNA sense strand
uggaggcguugucaauaug

SEQ ID NO: 1345258 - RNA, 19 nt, Homo sapiens
  misc_RNA (1)...(19): siRNA sense strand
aaaguacagaugucaguga

SEQ ID NO: 1345259 - RNA, 19 nt, Homo sapiens
  misc_RNA (1)...(19): siRNA sense strand
uguacuaucugcgaaaugg

SEQ ID NO: 1345260 - RNA, 19 nt, Homo sapiens
  misc_RNA (1)...(19): siRNA sense strand
gggugaaaguagaaaguac

SEQ ID NO: 1345261 - RNA, 19 nt, Homo sapiens
  misc_RNA (1)...(19): siRNA sense strand
gugaacaaggugauugaga

SEQ ID NO: 1345262 - RNA, 19 nt, Homo sapiens
  misc_RNA (1)...(19): siRNA sense strand
gccgcagggcuauugcuua

SEQ ID NO: 1345263 - RNA, 19 nt, Homo sapiens
  misc_RNA (1)...(19): siRNA sense strand
gcucucaggaaauauguuc

SEQ ID NO: 1345264 - RNA, 19 nt, Homo sapiens
  misc_RNA (1)...(19): siRNA sense strand
ucuacuacguggaugaaca

SEQ ID NO: 1345265 - RNA, 19 nt, Homo sapiens
  misc_RNA (1)...(19): siRNA sense strand
ggugaaaguagaaaguaca

SEQ ID NO: 1345266 - RNA, 19 nt, Homo sapiens
  misc_RNA (1)...(19): siRNA sense strand
gggacucggcucucaggaa

SEQ ID NO: 1345267 - RNA, 19 nt, Homo sapiens
  misc_RNA (1)...(19): siRNA sense strand
uguaccacaugaaggaaga

SEQ ID NO: 1345268 - RNA, 19 nt, Homo sapiens
  misc_RNA (1)...(19): siRNA sense strand
ggaacguucagauugagau

SEQ ID NO: 1345269 - RNA, 19 nt, Homo sapiens
  misc_RNA (1)...(19): siRNA sense strand
gggugaacaaggugauuga

SEQ ID NO: 1345270 - RNA, 19 nt, Homo sapiens
  misc_RNA (1)...(19): siRNA sense strand
aaaguagaaaguacagaug

SEQ ID NO: 1345271 - RNA, 19 nt, Homo sapiens
  misc_RNA (1)...(19): siRNA sense strand
aacaaggugauugagauua

SEQ ID NO: 1345272 - RNA, 19 nt, Homo sapiens
  misc_RNA (1)...(19): siRNA sense strand
caaggugauugagauuaac

SEQ ID NO: 1345273 - RNA, 19 nt, Homo sapiens
  misc_RNA (1)...(19): siRNA sense strand
guaccgggaagccaaucaa

SEQ ID NO: 1345274 - RNA, 19 nt, Homo sapiens
  misc_RNA (1)...(19): siRNA sense strand
cagcuggguccuacauuag

SEQ ID NO: 1345275 - RNA, 19 nt, Homo sapiens
  misc_RNA (1)...(19): siRNA sense strand
gaugguugggugaaaguag

SEQ ID NO: 1345276 - RNA, 19 nt, Homo sapiens
  misc_RNA (1)...(19): siRNA sense strand
ccacaugaaggaagauggu

SEQ ID NO: 1345277 - RNA, 19 nt, Homo sapiens
  misc_RNA (1)...(19): siRNA sense strand
ggaggcguugucaauaugu

SEQ ID NO: 1345278 - RNA, 19 nt, Homo sapiens
  misc_RNA (1)...(19): siRNA sense strand
ccacucacagagacagcua

SEQ ID NO: 1345279 - RNA, 19 nt, Homo sapiens
  misc_RNA (1)...(19): siRNA sense strand
gaaaggaacguucagauug

SEQ ID NO: 1345280 - RNA, 19 nt, Homo sapiens
  misc_RNA (1)...(19): siRNA sense strand
ugauugagauuaacccuua

SEQ ID NO: 1345281 - RNA, 19 nt, Homo sapiens
  misc_RNA (1)...(19): siRNA sense strand
ggacucggcucucaggaaa

SEQ ID NO: 1345282 - RNA, 19 nt, Homo sapiens
  misc_RNA (1)...(19): siRNA sense strand
aaaggaacguucagauuga

SEQ ID NO: 1345283 - RNA, 19 nt, Homo sapiens
  misc_RNA (1)...(19): siRNA sense strand
ucagcuggguccuacauua

SEQ ID NO: 1345284 - RNA, 19 nt, Homo sapiens
  misc_RNA (1)...(19): siRNA sense strand
gaacaaggugauugagauu

SEQ ID NO: 1345285 - RNA, 19 nt, Homo sapiens
  misc_RNA (1)...(19): siRNA sense strand
acaaggugauugagauuaa

SEQ ID NO: 1345286 - RNA, 19 nt, Homo sapiens
  misc_RNA (1)...(19): siRNA sense strand
ggaagaugguugggugaaa

SEQ ID NO: 1345287 - RNA, 19 nt, Homo sapiens
  misc_RNA (1)...(19): siRNA sense strand
gaaaguagaaaguacagau

SEQ ID NO: 1345288 - RNA, 19 nt, Homo sapiens
  misc_RNA (1)...(19): siRNA sense strand
gauuaacccuuaccugcuu

SEQ ID NO: 1345289 - RNA, 19 nt, Homo sapiens
  misc_RNA (1)...(19): siRNA sense strand
gaagaugguugggugaaag

SEQ ID NO: 1345290 - RNA, 19 nt, Homo sapiens
  misc_RNA (1)...(19): siRNA sense strand
ugaacaaggugauugagau

SEQ ID NO: 1345291 - RNA, 19 nt, Homo sapiens
  misc_RNA (1)...(19): siRNA sense strand
ccgggaagccaaucaauaa

SEQ ID NO: 1345292 - RNA, 19 nt, Homo sapiens
  misc_RNA (1)...(19): siRNA sense strand
ccaccacgcucgccuucaa

SEQ ID NO: 1345293 - RNA, 19 nt, Homo sapiens
  misc_RNA (1)...(19): siRNA sense strand
gcagggcuauugcuuaugc

SEQ ID NO: 1345294 - RNA, 19 nt, Homo sapiens
  misc_RNA (1)...(19): siRNA sense strand
ccgcagggcuauugcuuau

SEQ ID NO: 1345295 - RNA, 19 nt, Homo sapiens
  misc_RNA (1)...(19): siRNA sense strand
ggcuaucggccuaaucuua

SEQ ID NO: 1345296 - RNA, 19 nt, Homo sapiens
  misc_RNA (1)...(19): siRNA sense strand
ccuccaagcugcuguccaa

SEQ ID NO: 1345297 - RNA, 19 nt, Homo sapiens
  misc_RNA (1)...(19): siRNA sense strand
acucggcucucaggaaaua

SEQ ID NO: 1345298 - RNA, 19 nt, Homo sapiens
  misc_RNA (1)...(19): siRNA sense strand
agaaaggaacguucagauu

SEQ ID NO: 1345299 - RNA, 19 nt, Homo sapiens
  misc_RNA (1)...(19): siRNA sense strand
gaggcguugucaauaugua

SEQ ID NO: 1345300 - RNA, 19 nt, Homo sapiens
  misc_RNA (1)...(19): siRNA sense strand
ggagaacguauuucagugu

SEQ ID NO: 1345301 - RNA, 19 nt, Homo sapiens
  misc_RNA (1)...(19): siRNA sense strand
gagaaaggaacguucagau

SEQ ID NO: 1345302 - RNA, 19 nt, Homo sapiens
  misc_RNA (1)...(19): siRNA sense strand
ugaagaggccuaugaccuu

SEQ ID NO: 1345303 - RNA, 19 nt, Homo sapiens
  misc_RNA (1)...(19): siRNA sense strand
aagcugcuguccaacauga

SEQ ID NO: 1345304 - RNA, 19 nt, Homo sapiens
  misc_RNA (1)...(19): siRNA sense strand
ccaagcugcuguccaacau

SEQ ID NO: 1345305 - RNA, 19 nt, Homo sapiens
  misc_RNA (1)...(19): siRNA sense strand
ggagaaaggaacguucaga

SEQ ID NO: 1345306 - RNA, 19 nt, Homo sapiens
  misc_RNA (1)...(19): siRNA sense strand
gaaugcaggcuguacuauc

SEQ ID NO: 1345307 - RNA, 19 nt, Homo sapiens
  misc_RNA (1)...(19): siRNA sense strand
ucacagagacagcuauucu

SEQ ID NO: 1345308 - RNA, 19 nt, Homo sapiens
  misc_RNA (1)...(19): siRNA sense strand
cuggaggcguugucaauau

SEQ ID NO: 1345309 - RNA, 19 nt, Homo sapiens
  misc_RNA (1)...(19): siRNA sense strand
ggacggagaaaggaacguu

SEQ ID NO: 1345310 - RNA, 19 nt, Homo sapiens
  misc_RNA (1)...(19): siRNA sense strand
gugaccugcugcaccagua

SEQ ID NO: 1345311 - RNA, 19 nt, Homo sapiens
  misc_RNA (1)...(19): siRNA sense strand
ggucauggacaguggcuau

SEQ ID NO: 1345312 - RNA, 19 nt, Homo sapiens
  misc_RNA (1)...(19): siRNA sense strand
gggcaugggccucucuaug

SEQ ID NO: 1345313 - RNA, 19 nt, Homo sapiens
  misc_RNA (1)...(19): siRNA sense strand
guccuacauuagugccuua

SEQ ID NO: 1345314 - RNA, 19 nt, Homo sapiens
  misc_RNA (1)...(19): siRNA sense strand
ggaaugcaggcuguacuau

SEQ ID NO: 1345315 - RNA, 19 nt, Homo sapiens
  misc_RNA (1)...(19): siRNA sense strand
guagaaaguacagauguca

SEQ ID NO: 1345316 - RNA, 19 nt, Homo sapiens
  misc_RNA (1)...(19): siRNA sense strand
gcccugaagaggccuauga

SEQ ID NO: 1345317 - RNA, 19 nt, Homo sapiens
  misc_RNA (1)...(19): siRNA sense strand
gaacguucagauugagaug

SEQ ID NO: 1345318 - RNA, 19 nt, Homo sapiens
  misc_RNA (1)...(19): siRNA sense strand
aaugcaggcuguacuaucu

SEQ ID NO: 1345319 - RNA, 19 nt, Homo sapiens
  misc_RNA (1)...(19): siRNA sense strand
ggcaugggccucucuaugg

SEQ ID NO: 1345320 - RNA, 19 nt, Homo sapiens
  misc_RNA (1)...(19): siRNA sense strand
gcgaaauggagaacguauu

SEQ ID NO: 1345321 - RNA, 19 nt, Homo sapiens
  misc_RNA (1)...(19): siRNA sense strand
gcuggguccuacauuagug

SEQ ID NO: 1345322 - RNA, 19 nt, Homo sapiens
  misc_RNA (1)...(19): siRNA sense strand
gcuguacuaucugcgaaau

SEQ ID NO: 1345323 - RNA, 19 nt, Homo sapiens
  misc_RNA (1)...(19): siRNA sense strand
uggaggcguugucaauaug

SEQ ID NO: 1345324 - RNA, 19 nt, Homo sapiens
  misc_RNA (1)...(19): siRNA sense strand
aaaguacagaugucaguga

SEQ ID NO: 1345325 - RNA, 19 nt, Homo sapiens
  misc_RNA (1)...(19): siRNA sense strand
uguacuaucugcgaaaugg

SEQ ID NO: 1345326 - RNA, 19 nt, Homo sapiens
  misc_RNA (1)...(19): siRNA sense strand
gggugaaaguagaaaguac

SEQ ID NO: 1345327 - RNA, 19 nt, Homo sapiens
  misc_RNA (1)...(19): siRNA sense strand
gugaacaaggugauugaga

SEQ ID NO: 1345328 - RNA, 19 nt, Homo sapiens
  misc_RNA (1)...(19): siRNA sense strand
gccgcagggcuauugcuua

SEQ ID NO: 1345329 - RNA, 19 nt, Homo sapiens
  misc_RNA (1)...(19): siRNA sense strand
gcucucaggaaauauguuc

SEQ ID NO: 1345330 - RNA, 19 nt, Homo sapiens
  misc_RNA (1)...(19): siRNA sense strand
ucuacuacguggaugaaca

SEQ ID NO: 1345331 - RNA, 19 nt, Homo sapiens
  misc_RNA (1)...(19): siRNA sense strand
ggugaaaguagaaaguaca

SEQ ID NO: 1345332 - RNA, 19 nt, Homo sapiens
  misc_RNA (1)...(19): siRNA sense strand
gggacucggcucucaggaa

SEQ ID NO: 1345333 - RNA, 19 nt, Homo sapiens
  misc_RNA (1)...(19): siRNA sense strand
uguaccacaugaaggaaga

SEQ ID NO: 1345334 - RNA, 19 nt, Homo sapiens
  misc_RNA (1)...(19): siRNA sense strand
ggaacguucagauugagau

SEQ ID NO: 1345335 - RNA, 19 nt, Homo sapiens
  misc_RNA (1)...(19): siRNA sense strand
gggugaacaaggugauuga

SEQ ID NO: 1345336 - RNA, 19 nt, Homo sapiens
  misc_RNA (1)...(19): siRNA sense strand
aaaguagaaaguacagaug

SEQ ID NO: 1345337 - RNA, 19 nt, Homo sapiens
  misc_RNA (1)...(19): siRNA sense strand
aacaaggugauugagauua

SEQ ID NO: 1345338 - RNA, 19 nt, Homo sapiens
  misc_RNA (1)...(19): siRNA sense strand
caaggugauugagauuaac

SEQ ID NO: 1345339 - RNA, 19 nt, Homo sapiens
  misc_RNA (1)...(19): siRNA sense strand
guaccgggaagccaaucaa

SEQ ID NO: 1345340 - RNA, 19 nt, Homo sapiens
  misc_RNA (1)...(19): siRNA sense strand
cagcuggguccuacauuag

SEQ ID NO: 1345341 - RNA, 19 nt, Homo sapiens
  misc_RNA (1)...(19): siRNA sense strand
gaugguugggugaaaguag

SEQ ID NO: 1345342 - RNA, 19 nt, Homo sapiens
  misc_RNA (1)...(19): siRNA sense strand
ccacaugaaggaagauggu

SEQ ID NO: 1345343 - RNA, 19 nt, Homo sapiens
  misc_RNA (1)...(19): siRNA sense strand
ggaggcguugucaauaugu

SEQ ID NO: 1345344 - RNA, 19 nt, Homo sapiens
  misc_RNA (1)...(19): siRNA sense strand
ccacucacagagacagcua

SEQ ID NO: 1345345 - RNA, 19 nt, Homo sapiens
  misc_RNA (1)...(19): siRNA sense strand
gaaaggaacguucagauug

SEQ ID NO: 1345346 - RNA, 19 nt, Homo sapiens
  misc_RNA (1)...(19): siRNA sense strand
ugauugagauuaacccuua

SEQ ID NO: 1345347 - RNA, 19 nt, Homo sapiens
  misc_RNA (1)...(19): siRNA sense strand
ggacucggcucucaggaaa

SEQ ID NO: 1345348 - RNA, 19 nt, Homo sapiens
  misc_RNA (1)...(19): siRNA sense strand
aaaggaacguucagauuga

SEQ ID NO: 1345349 - RNA, 19 nt, Homo sapiens
  misc_RNA (1)...(19): siRNA sense strand
ucagcuggguccuacauua

SEQ ID NO: 1345350 - RNA, 19 nt, Homo sapiens
  misc_RNA (1)...(19): siRNA sense strand
gaacaaggugauugagauu

SEQ ID NO: 1345351 - RNA, 19 nt, Homo sapiens
  misc_RNA (1)...(19): siRNA sense strand
acaaggugauugagauuaa

SEQ ID NO: 1345352 - RNA, 19 nt, Homo sapiens
  misc_RNA (1)...(19): siRNA sense strand
ggaagaugguugggugaaa

SEQ ID NO: 1345353 - RNA, 19 nt, Homo sapiens
  misc_RNA (1)...(19): siRNA sense strand
gaaaguagaaaguacagau

SEQ ID NO: 1345354 - RNA, 19 nt, Homo sapiens
  misc_RNA (1)...(19): siRNA sense strand
gauuaacccuuaccugcuu

SEQ ID NO: 1345355 - RNA, 19 nt, Homo sapiens
  misc_RNA (1)...(19): siRNA sense strand
gaagaugguugggugaaag

SEQ ID NO: 1345356 - RNA, 19 nt, Homo sapiens
  misc_RNA (1)...(19): siRNA sense strand
ugaacaaggugauugagau

SEQ ID NO: 1345357 - RNA, 19 nt, Homo sapiens
  misc_RNA (1)...(19): siRNA sense strand
ccgggaagccaaucaauaa

SEQ ID NO: 1345358 - RNA, 19 nt, Homo sapiens
  misc_RNA (1)...(19): siRNA sense strand
ccaccacgcucgccuucaa

SEQ ID NO: 1345359 - RNA, 19 nt, Homo sapiens
  misc_RNA (1)...(19): siRNA sense strand
gcagggcuauugcuuaugc

SEQ ID NO: 1345360 - RNA, 19 nt, Homo sapiens
  misc_RNA (1)...(19): siRNA sense strand
ccgcagggcuauugcuuau

SEQ ID NO: 1345361 - RNA, 19 nt, Homo sapiens
  misc_RNA (1)...(19): siRNA sense strand
ggcuaucggccuaaucuua

SEQ ID NO: 1345362 - RNA, 19 nt, Homo sapiens
  misc_RNA (1)...(19): siRNA sense strand
ccuccaagcugcuguccaa

SEQ ID NO: 1345363 - RNA, 19 nt, Homo sapiens
  misc_RNA (1)...(19): siRNA sense strand
acucggcucucaggaaaua

SEQ ID NO: 1345364 - RNA, 19 nt, Homo sapiens
  misc_RNA (1)...(19): siRNA sense strand
agaaaggaacguucagauu

SEQ ID NO: 1345365 - RNA, 19 nt, Homo sapiens
  misc_RNA (1)...(19): siRNA sense strand
gaggcguugucaauaugua

SEQ ID NO: 1345366 - RNA, 19 nt, Homo sapiens
  misc_RNA (1)...(19): siRNA sense strand
ggagaacguauuucagugu

SEQ ID NO: 1345367 - RNA, 19 nt, Homo sapiens
  misc_RNA (1)...(19): siRNA sense strand
gagaaaggaacguucagau

SEQ ID NO: 1345368 - RNA, 19 nt, Homo sapiens
  misc_RNA (1)...(19): siRNA sense strand
ugaagaggccuaugaccuu

SEQ ID NO: 1345369 - RNA, 19 nt, Homo sapiens
  misc_RNA (1)...(19): siRNA sense strand
aagcugcuguccaacauga

SEQ ID NO: 1345370 - RNA, 19 nt, Homo sapiens
  misc_RNA (1)...(19): siRNA sense strand
ccaagcugcuguccaacau

SEQ ID NO: 1345371 - RNA, 19 nt, Homo sapiens
  misc_RNA (1)...(19): siRNA sense strand
ggagaaaggaacguucaga

SEQ ID NO: 1345372 - RNA, 19 nt, Homo sapiens
  misc_RNA (1)...(19): siRNA sense strand
gaaugcaggcuguacuauc

SEQ ID NO: 1345373 - RNA, 19 nt, Homo sapiens
  misc_RNA (1)...(19): siRNA sense strand
ucacagagacagcuauucu

SEQ ID NO: 1345374 - RNA, 19 nt, Homo sapiens
  misc_RNA (1)...(19): siRNA sense strand
cuggaggcguugucaauau

SEQ ID NO: 1345375 - RNA, 19 nt, Homo sapiens
  misc_RNA (1)...(19): siRNA sense strand
ggacggagaaaggaacguu

SEQ ID NO: 1345376 - RNA, 19 nt, Homo sapiens
  misc_RNA (1)...(19): siRNA sense strand
gugaccugcugcaccagua

SEQ ID NO: 1345377 - RNA, 19 nt, Homo sapiens
  misc_RNA (1)...(19): siRNA sense strand
ggucauggacaguggcuau

SEQ ID NO: 1345378 - RNA, 19 nt, Homo sapiens
  misc_RNA (1)...(19): siRNA sense strand
gggcaugggccucucuaug

SEQ ID NO: 1345379 - RNA, 19 nt, Homo sapiens
  misc_RNA (1)...(19): siRNA sense strand
guccuacauuagugccuua

SEQ ID NO: 1345380 - RNA, 19 nt, Homo sapiens
  misc_RNA (1)...(19): siRNA sense strand
ggaaugcaggcuguacuau

SEQ ID NO: 1345381 - RNA, 19 nt, Homo sapiens
  misc_RNA (1)...(19): siRNA sense strand
guagaaaguacagauguca

SEQ ID NO: 1345382 - RNA, 19 nt, Homo sapiens
  misc_RNA (1)...(19): siRNA sense strand
gcccugaagaggccuauga

SEQ ID NO: 1345383 - RNA, 19 nt, Homo sapiens
  misc_RNA (1)...(19): siRNA sense strand
gaacguucagauugagaug

SEQ ID NO: 1345384 - RNA, 19 nt, Homo sapiens
  misc_RNA (1)...(19): siRNA sense strand
aaugcaggcuguacuaucu

SEQ ID NO: 1345385 - RNA, 19 nt, Homo sapiens
  misc_RNA (1)...(19): siRNA sense strand
ggcaugggccucucuaugg

SEQ ID NO: 1345386 - RNA, 19 nt, Homo sapiens
  misc_RNA (1)...(19): siRNA sense strand
gcgaaauggagaacguauu

SEQ ID NO: 1345387 - RNA, 19 nt, Homo sapiens
  misc_RNA (1)...(19): siRNA sense strand
gcuggguccuacauuagug

SEQ ID NO: 1345388 - RNA, 19 nt, Homo sapiens
  misc_RNA (1)...(19): siRNA sense strand
gcuguacuaucugcgaaau

SEQ ID NO: 1345389 - RNA, 19 nt, Homo sapiens
  misc_RNA (1)...(19): siRNA sense strand
uggaggcguugucaauaug

SEQ ID NO: 1345390 - RNA, 19 nt, Homo sapiens
  misc_RNA (1)...(19): siRNA sense strand
aaaguacagaugucaguga

SEQ ID NO: 1345391 - RNA, 19 nt, Homo sapiens
  misc_RNA (1)...(19): siRNA sense strand
uguacuaucugcgaaaugg

SEQ ID NO: 1345392 - RNA, 19 nt, Homo sapiens
  misc_RNA (1)...(19): siRNA sense strand
gggugaaaguagaaaguac

SEQ ID NO: 1345393 - RNA, 19 nt, Homo sapiens
  misc_RNA (1)...(19): siRNA sense strand
gugaacaaggugauugaga

SEQ ID NO: 1345394 - RNA, 19 nt, Homo sapiens
  misc_RNA (1)...(19): siRNA sense strand
gccgcagggcuauugcuua

SEQ ID NO: 1345395 - RNA, 19 nt, Homo sapiens
  misc_RNA (1)...(19): siRNA sense strand
gcucucaggaaauauguuc

SEQ ID NO: 1345396 - RNA, 19 nt, Homo sapiens
  misc_RNA (1)...(19): siRNA sense strand
ucuacuacguggaugaaca

SEQ ID NO: 1345397 - RNA, 19 nt, Homo sapiens
  misc_RNA (1)...(19): siRNA sense strand
ggugaaaguagaaaguaca

SEQ ID NO: 1345398 - RNA, 19 nt, Homo sapiens
  misc_RNA (1)...(19): siRNA sense strand
gggacucggcucucaggaa

SEQ ID NO: 1345399 - RNA, 19 nt, Homo sapiens
  misc_RNA (1)...(19): siRNA sense strand
uguaccacaugaaggaaga

SEQ ID NO: 1345400 - RNA, 19 nt, Homo sapiens
  misc_RNA (1)...(19): siRNA sense strand
ggaacguucagauugagau

SEQ ID NO: 1345401 - RNA, 19 nt, Homo sapiens
  misc_RNA (1)...(19): siRNA sense strand
gggugaacaaggugauuga

SEQ ID NO: 1345402 - RNA, 19 nt, Homo sapiens
  misc_RNA (1)...(19): siRNA sense strand
aaaguagaaaguacagaug

SEQ ID NO: 1345403 - RNA, 19 nt, Homo sapiens
  misc_RNA (1)...(19): siRNA sense strand
aacaaggugauugagauua

SEQ ID NO: 1345404 - RNA, 19 nt, Homo sapiens
  misc_RNA (1)...(19): siRNA sense strand
caaggugauugagauuaac

SEQ ID NO: 1345405 - RNA, 19 nt, Homo sapiens
  misc_RNA (1)...(19): siRNA sense strand
guaccgggaagccaaucaa

SEQ ID NO: 1345406 - RNA, 19 nt, Homo sapiens
  misc_RNA (1)...(19): siRNA sense strand
cagcuggguccuacauuag

SEQ ID NO: 1345407 - RNA, 19 nt, Homo sapiens
  misc_RNA (1)...(19): siRNA sense strand
gaugguugggugaaaguag

SEQ ID NO: 1345408 - RNA, 19 nt, Homo sapiens
  misc_RNA (1)...(19): siRNA sense strand
ccacaugaaggaagauggu

SEQ ID NO: 1345409 - RNA, 19 nt, Homo sapiens
  misc_RNA (1)...(19): siRNA sense strand
ggaggcguugucaauaugu

SEQ ID NO: 1345410 - RNA, 19 nt, Homo sapiens
  misc_RNA (1)...(19): siRNA sense strand
ccacucacagagacagcua

SEQ ID NO: 1345411 - RNA, 19 nt, Homo sapiens
  misc_RNA (1)...(19): siRNA sense strand
gcagugaccgcuuugauga

SEQ ID NO: 1345412 - RNA, 19 nt, Homo sapiens
  misc_RNA (1)...(19): siRNA sense strand
gagccugggugcugucuuc

SEQ ID NO: 1345413 - RNA, 19 nt, Homo sapiens
  misc_RNA (1)...(19): siRNA sense strand
ggacucugcucuucaccau

SEQ ID NO: 1345414 - RNA, 19 nt, Homo sapiens
  misc_RNA (1)...(19): siRNA sense strand
ucaacucccugccgcugua

SEQ ID NO: 1345415 - RNA, 19 nt, Homo sapiens
  misc_RNA (1)...(19): siRNA sense strand
ccgaggagcuccagcaucu

SEQ ID NO: 1345416 - RNA, 19 nt, Homo sapiens
  misc_RNA (1)...(19): siRNA sense strand
ccaacacgguggccucugu

SEQ ID NO: 1345417 - RNA, 19 nt, Homo sapiens
  misc_RNA (1)...(19): siRNA sense strand
gcaccucacgcuaaucuuc

SEQ ID NO: 1345418 - RNA, 19 nt, Homo sapiens
  misc_RNA (1)...(19): siRNA sense strand
caucgggacucugcucuuc

SEQ ID NO: 1345419 - RNA, 19 nt, Homo sapiens
  misc_RNA (1)...(19): siRNA sense strand
guacacggaaggcggagaa

SEQ ID NO: 1345420 - RNA, 19 nt, Homo sapiens
  misc_RNA (1)...(19): siRNA sense strand
ggacuccuguuccuaugac

SEQ ID NO: 1345421 - RNA, 19 nt, Homo sapiens
  misc_RNA (1)...(19): siRNA sense strand
gagcaccucacgcuaaucu

SEQ ID NO: 1345422 - RNA, 19 nt, Homo sapiens
  misc_RNA (1)...(19): siRNA sense strand
cugcccagcugaugaggaa

SEQ ID NO: 1345423 - RNA, 19 nt, Homo sapiens
  misc_RNA (1)...(19): siRNA sense strand
guccugcacuuucccuuca

SEQ ID NO: 1345424 - RNA, 19 nt, Homo sapiens
  misc_RNA (1)...(19): siRNA sense strand
gucagugccugccgagugu

SEQ ID NO: 1345425 - RNA, 19 nt, Homo sapiens
  misc_RNA (1)...(19): siRNA sense strand
ggucaugcucaucuucuau

SEQ ID NO: 1345426 - RNA, 19 nt, Homo sapiens
  misc_RNA (1)...(19): siRNA sense strand
ucccuccucucggacauua

SEQ ID NO: 1345427 - RNA, 19 nt, Homo sapiens
  misc_RNA (1)...(19): siRNA sense strand
uggagcaccucacgcuaau

SEQ ID NO: 1345428 - RNA, 19 nt, Homo sapiens
  misc_RNA (1)...(19): siRNA sense strand
uaaacccacugcccuacag

SEQ ID NO: 1345429 - RNA, 19 nt, Homo sapiens
  misc_RNA (1)...(19): siRNA sense strand
gagagaggcggcacguucu

SEQ ID NO: 1345430 - RNA, 19 nt, Homo sapiens
  misc_RNA (1)...(19): siRNA sense strand
acgcuaaucuucaguacac

SEQ ID NO: 1345431 - RNA, 19 nt, Homo sapiens
  misc_RNA (1)...(19): siRNA sense strand
gaacccugcccagcugaug

SEQ ID NO: 1345432 - RNA, 19 nt, Homo sapiens
  misc_RNA (1)...(19): siRNA sense strand
cuggagcaccucacgcuaa

SEQ ID NO: 1345433 - RNA, 19 nt, Homo sapiens
  misc_RNA (1)...(19): siRNA sense strand
guggacuccuguuccuaug

SEQ ID NO: 1345434 - RNA, 19 nt, Homo sapiens
  misc_RNA (1)...(19): siRNA sense strand
gagccucgggacccauuug

SEQ ID NO: 1345435 - RNA, 19 nt, Homo sapiens
  misc_RNA (1)...(19): siRNA sense strand
gcucguggaccucaucaac

SEQ ID NO: 1345436 - RNA, 19 nt, Homo sapiens
  misc_RNA (1)...(19): siRNA sense strand
ucacgcuaaucuucaguac

SEQ ID NO: 1345437 - RNA, 19 nt, Homo sapiens
  misc_RNA (1)...(19): siRNA sense strand
ggagggaccuugccaggau

SEQ ID NO: 1345438 - RNA, 19 nt, Homo sapiens
  misc_RNA (1)...(19): siRNA sense strand
gcagugaccgcuuugauga

SEQ ID NO: 1345439 - RNA, 19 nt, Homo sapiens
  misc_RNA (1)...(19): siRNA sense strand
gagccugggugcugucuuc

SEQ ID NO: 1345440 - RNA, 19 nt, Homo sapiens
  misc_RNA (1)...(19): siRNA sense strand
ggacucugcucuucaccau

SEQ ID NO: 1345441 - RNA, 19 nt, Homo sapiens
  misc_RNA (1)...(19): siRNA sense strand
ucaacucccugccgcugua

SEQ ID NO: 1345442 - RNA, 19 nt, Homo sapiens
  misc_RNA (1)...(19): siRNA sense strand
ccgaggagcuccagcaucu

SEQ ID NO: 1345443 - RNA, 19 nt, Homo sapiens
  misc_RNA (1)...(19): siRNA sense strand
gaacagcacccugcaucug

SEQ ID NO: 1345444 - RNA, 19 nt, Homo sapiens
  misc_RNA (1)...(19): siRNA sense strand
ccaacacgguggccucugu

SEQ ID NO: 1345445 - RNA, 19 nt, Homo sapiens
  misc_RNA (1)...(19): siRNA sense strand
gcaccucacgcuaaucuuc

SEQ ID NO: 1345446 - RNA, 19 nt, Homo sapiens
  misc_RNA (1)...(19): siRNA sense strand
caucgggacucugcucuuc

SEQ ID NO: 1345447 - RNA, 19 nt, Homo sapiens
  misc_RNA (1)...(19): siRNA sense strand
guacacggaaggcggagaa

SEQ ID NO: 1345448 - RNA, 19 nt, Homo sapiens
  misc_RNA (1)...(19): siRNA sense strand
ggacuccuguuccuaugac

SEQ ID NO: 1345449 - RNA, 19 nt, Homo sapiens
  misc_RNA (1)...(19): siRNA sense strand
gagcaccucacgcuaaucu

SEQ ID NO: 1345450 - RNA, 19 nt, Homo sapiens
  misc_RNA (1)...(19): siRNA sense strand
cuggagaggucgcuuugug

SEQ ID NO: 1345451 - RNA, 19 nt, Homo sapiens
  misc_RNA (1)...(19): siRNA sense strand
cugcccagcugaugaggaa

SEQ ID NO: 1345452 - RNA, 19 nt, Homo sapiens
  misc_RNA (1)...(19): siRNA sense strand
guccugcacuuucccuuca

SEQ ID NO: 1345453 - RNA, 19 nt, Homo sapiens
  misc_RNA (1)...(19): siRNA sense strand
gucagugccugccgagugu

SEQ ID NO: 1345454 - RNA, 19 nt, Homo sapiens
  misc_RNA (1)...(19): siRNA sense strand
ggucaugcucaucuucuau

SEQ ID NO: 1345455 - RNA, 19 nt, Homo sapiens
  misc_RNA (1)...(19): siRNA sense strand
ucccuccucucggacauua

SEQ ID NO: 1345456 - RNA, 19 nt, Homo sapiens
  misc_RNA (1)...(19): siRNA sense strand
uggagcaccucacgcuaau

SEQ ID NO: 1345457 - RNA, 19 nt, Homo sapiens
  misc_RNA (1)...(19): siRNA sense strand
uaaacccacugcccuacag

SEQ ID NO: 1345458 - RNA, 19 nt, Homo sapiens
  misc_RNA (1)...(19): siRNA sense strand
gagagaggcggcacguucu

SEQ ID NO: 1345459 - RNA, 19 nt, Homo sapiens
  misc_RNA (1)...(19): siRNA sense strand
acgcuaaucuucaguacac

SEQ ID NO: 1345460 - RNA, 19 nt, Homo sapiens
  misc_RNA (1)...(19): siRNA sense strand
gaacccugcccagcugaug

SEQ ID NO: 1345461 - RNA, 19 nt, Homo sapiens
  misc_RNA (1)...(19): siRNA sense strand
ggguuuauuugcggauguu

SEQ ID NO: 1345462 - RNA, 19 nt, Homo sapiens
  misc_RNA (1)...(19): siRNA sense strand
gcugcugugugcuccugaa

SEQ ID NO: 1345463 - RNA, 19 nt, Homo sapiens
  misc_RNA (1)...(19): siRNA sense strand
cuggagcaccucacgcuaa

SEQ ID NO: 1345464 - RNA, 19 nt, Homo sapiens
  misc_RNA (1)...(19): siRNA sense strand
guggacuccuguuccuaug

SEQ ID NO: 1345465 - RNA, 19 nt, Homo sapiens
  misc_RNA (1)...(19): siRNA sense strand
gagccucgggacccauuug

SEQ ID NO: 1345466 - RNA, 19 nt, Homo sapiens
  misc_RNA (1)...(19): siRNA sense strand
gcucguggaccucaucaac

SEQ ID NO: 1345467 - RNA, 19 nt, Homo sapiens
  misc_RNA (1)...(19): siRNA sense strand
ucacgcuaaucuucaguac

SEQ ID NO: 1345468 - RNA, 19 nt, Homo sapiens
  misc_RNA (1)...(19): siRNA sense strand
agacuacgcuguuggauuu

SEQ ID NO: 1345469 - RNA, 19 nt, Homo sapiens
  misc_RNA (1)...(19): siRNA sense strand
ccuuugagcucuucaguaa

SEQ ID NO: 1345470 - RNA, 19 nt, Homo sapiens
  misc_RNA (1)...(19): siRNA sense strand
caagccagcugccuccauu

SEQ ID NO: 1345471 - RNA, 19 nt, Homo sapiens
  misc_RNA (1)...(19): siRNA sense strand
gcaaccagaucaccuuugg

SEQ ID NO: 1345472 - RNA, 19 nt, Homo sapiens
  misc_RNA (1)...(19): siRNA sense strand
gggaagccaccuccaauga

SEQ ID NO: 1345473 - RNA, 19 nt, Homo sapiens
  misc_RNA (1)...(19): siRNA sense strand
gcuguuggauuuaauggau

SEQ ID NO: 1345474 - RNA, 19 nt, Homo sapiens
  misc_RNA (1)...(19): siRNA sense strand
ccacugggcccugcaauga

SEQ ID NO: 1345475 - RNA, 19 nt, Homo sapiens
  misc_RNA (1)...(19): siRNA sense strand
agaaguggcugagcaggaa

SEQ ID NO: 1345476 - RNA, 19 nt, Homo sapiens
  misc_RNA (1)...(19): siRNA sense strand
ccaccaagcccgugucugu

SEQ ID NO: 1345477 - RNA, 19 nt, Homo sapiens
  misc_RNA (1)...(19): siRNA sense strand
gaaugaccauggcaagaac

SEQ ID NO: 1345478 - RNA, 19 nt, Homo sapiens
  misc_RNA (1)...(19): siRNA sense strand
gugaugaccucagauuaca

SEQ ID NO: 1345479 - RNA, 19 nt, Homo sapiens
  misc_RNA (1)...(19): siRNA sense strand
gcaucaaugugcgugagaa

SEQ ID NO: 1345480 - RNA, 19 nt, Homo sapiens
  misc_RNA (1)...(19): siRNA sense strand
cccagucccucaacccuuu

SEQ ID NO: 1345481 - RNA, 19 nt, Homo sapiens
  misc_RNA (1)...(19): siRNA sense strand
ugaaugaccauggcaagaa

SEQ ID NO: 1345482 - RNA, 19 nt, Homo sapiens
  misc_RNA (1)...(19): siRNA sense strand
gaugaccucagauuacaga

SEQ ID NO: 1345483 - RNA, 19 nt, Homo sapiens
  misc_RNA (1)...(19): siRNA sense strand
uguggaagcggcugaauga

SEQ ID NO: 1345484 - RNA, 19 nt, Homo sapiens
  misc_RNA (1)...(19): siRNA sense strand
caaccaacccuuuccuucu

SEQ ID NO: 1345485 - RNA, 19 nt, Homo sapiens
  misc_RNA (1)...(19): siRNA sense strand
gggugaugaccucagauua

SEQ ID NO: 1345486 - RNA, 19 nt, Homo sapiens
  misc_RNA (1)...(19): siRNA sense strand
gcaaggaccagggcaucaa

SEQ ID NO: 1345487 - RNA, 19 nt, Homo sapiens
  misc_RNA (1)...(19): siRNA sense strand
gaacuggcggcauguguac

SEQ ID NO: 1345488 - RNA, 19 nt, Homo sapiens
  misc_RNA (1)...(19): siRNA sense strand
uuugagcucuucaguaauc

SEQ ID NO: 1345489 - RNA, 19 nt, Homo sapiens
  misc_RNA (1)...(19): siRNA sense strand
gcagcaaccagaucaccuu

SEQ ID NO: 1345490 - RNA, 19 nt, Homo sapiens
  misc_RNA (1)...(19): siRNA sense strand
gccacugguuccucucuga

SEQ ID NO: 1345491 - RNA, 19 nt, Homo sapiens
  misc_RNA (1)...(19): siRNA sense strand
ggugggcaguguggguaua

SEQ ID NO: 1345492 - RNA, 19 nt, Homo sapiens
  misc_RNA (1)...(19): siRNA sense strand
ggugaugaccucagauuac

SEQ ID NO: 1345493 - RNA, 19 nt, Homo sapiens
  misc_RNA (1)...(19): siRNA sense strand
ggaaaacaccugaguccuu

SEQ ID NO: 1345494 - RNA, 19 nt, Homo sapiens
  misc_RNA (1)...(19): siRNA sense strand
acagauggcccuggaagaa

SEQ ID NO: 1345495 - RNA, 19 nt, Homo sapiens
  misc_RNA (1)...(19): siRNA sense strand
ccgaagggacacaguuaaa

SEQ ID NO: 1345496 - RNA, 19 nt, Homo sapiens
  misc_RNA (1)...(19): siRNA sense strand
gcccugcaaugaugaacau

SEQ ID NO: 1345497 - RNA, 19 nt, Homo sapiens
  misc_RNA (1)...(19): siRNA sense strand
caagacaggcuccgaacgu

SEQ ID NO: 1345498 - RNA, 19 nt, Homo sapiens
  misc_RNA (1)...(19): siRNA sense strand
ccgaaucugugaccucucu

SEQ ID NO: 1345499 - RNA, 19 nt, Homo sapiens
  misc_RNA (1)...(19): siRNA sense strand
caaugugcgugagaaguca

SEQ ID NO: 1345500 - RNA, 19 nt, Homo sapiens
  misc_RNA (1)...(19): siRNA sense strand
gaagggacacaguuaaaau

SEQ ID NO: 1345501 - RNA, 19 nt, Homo sapiens
  misc_RNA (1)...(19): siRNA sense strand
ccaguacauugaccgagau

SEQ ID NO: 1345502 - RNA, 19 nt, Homo sapiens
  misc_RNA (1)...(19): siRNA sense strand
gggaccagcacauccuuug

SEQ ID NO: 1345503 - RNA, 19 nt, Homo sapiens
  misc_RNA (1)...(19): siRNA sense strand
gcccgucagccuccacuaa

SEQ ID NO: 1345504 - RNA, 19 nt, Homo sapiens
  misc_RNA (1)...(19): siRNA sense strand
ucuaucagacggcagauga

SEQ ID NO: 1345505 - RNA, 19 nt, Homo sapiens
  misc_RNA (1)...(19): siRNA sense strand
ggaccagggcaucaaugug

SEQ ID NO: 1345506 - RNA, 19 nt, Homo sapiens
  misc_RNA (1)...(19): siRNA sense strand
uugccgaccugaccuacaa

SEQ ID NO: 1345507 - RNA, 19 nt, Homo sapiens
  misc_RNA (1)...(19): siRNA sense strand
gccgaagggacacaguuaa

SEQ ID NO: 1345508 - RNA, 19 nt, Homo sapiens
  misc_RNA (1)...(19): siRNA sense strand
cagauggcccuggaagaaa

SEQ ID NO: 1345509 - RNA, 19 nt, Homo sapiens
  misc_RNA (1)...(19): siRNA sense strand
agaacuggcggcaugugua

SEQ ID NO: 1345510 - RNA, 19 nt, Homo sapiens
  misc_RNA (1)...(19): siRNA sense strand
cagacuacgcuguuggauu

SEQ ID NO: 1345511 - RNA, 19 nt, Homo sapiens
  misc_RNA (1)...(19): siRNA sense strand
ccacuggcaugggcagcaa

SEQ ID NO: 1345512 - RNA, 19 nt, Homo sapiens
  misc_RNA (1)...(19): siRNA sense strand
uaucagacggcagaugaaa

SEQ ID NO: 1345513 - RNA, 19 nt, Homo sapiens
  misc_RNA (1)...(19): siRNA sense strand
ugacaaccuucggacuuca

SEQ ID NO: 1345514 - RNA, 19 nt, Homo sapiens
  misc_RNA (1)...(19): siRNA sense strand
uggacuaccucaucaagac

SEQ ID NO: 1345515 - RNA, 19 nt, Homo sapiens
  misc_RNA (1)...(19): siRNA sense strand
ggacuaccucaucaagaca

SEQ ID NO: 1345516 - RNA, 19 nt, Homo sapiens
  misc_RNA (1)...(19): siRNA sense strand
cugcuggacuaccucauca

SEQ ID NO: 1345517 - RNA, 19 nt, Homo sapiens
  misc_RNA (1)...(19): siRNA sense strand
ccaacccuuuccuucucua

SEQ ID NO: 1345518 - RNA, 19 nt, Homo sapiens
  misc_RNA (1)...(19): siRNA sense strand
cuacgcuguuggauuuaau

SEQ ID NO: 1345519 - RNA, 19 nt, Homo sapiens
  misc_RNA (1)...(19): siRNA sense strand
cagcaaccagaucaccuuu

SEQ ID NO: 1345520 - RNA, 19 nt, Homo sapiens
  misc_RNA (1)...(19): siRNA sense strand
ucaaugugcgugagaaguc

SEQ ID NO: 1345521 - RNA, 19 nt, Homo sapiens
  misc_RNA (1)...(19): siRNA sense strand
ggaagccaccuccaaugac

SEQ ID NO: 1345522 - RNA, 19 nt, Homo sapiens
  misc_RNA (1)...(19): siRNA sense strand
ggacacaguuaaaauucca

SEQ ID NO: 1345523 - RNA, 19 nt, Homo sapiens
  misc_RNA (1)...(19): siRNA sense strand
agauggcccuggaagaaag

SEQ ID NO: 1345524 - RNA, 19 nt, Homo sapiens
  misc_RNA (1)...(19): siRNA sense strand
uccagacccugaaggacuu

SEQ ID NO: 1345525 - RNA, 19 nt, Homo sapiens
  misc_RNA (1)...(19): siRNA sense strand
gcaagaacuggcggcaugu

SEQ ID NO: 1345526 - RNA, 19 nt, Homo sapiens
  misc_RNA (1)...(19): siRNA sense strand
acugggcccugcaaugaug

SEQ ID NO: 1345527 - RNA, 19 nt, Homo sapiens
  misc_RNA (1)...(19): siRNA sense strand
caucgugaacaauuacuca

SEQ ID NO: 1345528 - RNA, 19 nt, Homo sapiens
  misc_RNA (1)...(19): siRNA sense strand
ggacgaggaacgguugaag

SEQ ID NO: 1345529 - RNA, 19 nt, Homo sapiens
  misc_RNA (1)...(19): siRNA sense strand
uuacucagaggcagaaauc

SEQ ID NO: 1345530 - RNA, 19 nt, Homo sapiens
  misc_RNA (1)...(19): siRNA sense strand
caaggaccagggcaucaau

SEQ ID NO: 1345531 - RNA, 19 nt, Homo sapiens
  misc_RNA (1)...(19): siRNA sense strand
acugguggcucuccucaag

SEQ ID NO: 1345532 - RNA, 19 nt, Homo sapiens
  misc_RNA (1)...(19): siRNA sense strand
aaccaacccuuuccuucuc

SEQ ID NO: 1345533 - RNA, 19 nt, Homo sapiens
  misc_RNA (1)...(19): siRNA sense strand
cacaaucuguccccaagaa

SEQ ID NO: 1345534 - RNA, 19 nt, Homo sapiens
  misc_RNA (1)...(19): siRNA sense strand
ccagacuaguggagaagag

SEQ ID NO: 1345535 - RNA, 19 nt, Homo sapiens
  misc_RNA (1)...(19): siRNA sense strand
ggacuuccaguacauugac

SEQ ID NO: 1345536 - RNA, 19 nt, Homo sapiens
  misc_RNA (1)...(19): siRNA sense strand
aaacaucgugaacaauuac

SEQ ID NO: 1345537 - RNA, 19 nt, Homo sapiens
  misc_RNA (1)...(19): siRNA sense strand
acuacgcuguuggauuuaa

SEQ ID NO: 1345538 - RNA, 19 nt, Homo sapiens
  misc_RNA (1)...(19): siRNA sense strand
agacuacgcuguuggauuu

SEQ ID NO: 1345539 - RNA, 19 nt, Homo sapiens
  misc_RNA (1)...(19): siRNA sense strand
ccuuugagcucuucaguaa

SEQ ID NO: 1345540 - RNA, 19 nt, Homo sapiens
  misc_RNA (1)...(19): siRNA sense strand
caagccagcugccuccauu

SEQ ID NO: 1345541 - RNA, 19 nt, Homo sapiens
  misc_RNA (1)...(19): siRNA sense strand
gcaaccagaucaccuuugg

SEQ ID NO: 1345542 - RNA, 19 nt, Homo sapiens
  misc_RNA (1)...(19): siRNA sense strand
gggaagccaccuccaauga

SEQ ID NO: 1345543 - RNA, 19 nt, Homo sapiens
  misc_RNA (1)...(19): siRNA sense strand
gcuguuggauuuaauggau

SEQ ID NO: 1345544 - RNA, 19 nt, Homo sapiens
  misc_RNA (1)...(19): siRNA sense strand
ccacugggcccugcaauga

SEQ ID NO: 1345545 - RNA, 19 nt, Homo sapiens
  misc_RNA (1)...(19): siRNA sense strand
agaaguggcugagcaggaa

SEQ ID NO: 1345546 - RNA, 19 nt, Homo sapiens
  misc_RNA (1)...(19): siRNA sense strand
ccaccaagcccgugucugu

SEQ ID NO: 1345547 - RNA, 19 nt, Homo sapiens
  misc_RNA (1)...(19): siRNA sense strand
gaaugaccauggcaagaac

SEQ ID NO: 1345548 - RNA, 19 nt, Homo sapiens
  misc_RNA (1)...(19): siRNA sense strand
gugaugaccucagauuaca

SEQ ID NO: 1345549 - RNA, 19 nt, Homo sapiens
  misc_RNA (1)...(19): siRNA sense strand
gcaucaaugugcgugagaa

SEQ ID NO: 1345550 - RNA, 19 nt, Homo sapiens
  misc_RNA (1)...(19): siRNA sense strand
cccagucccucaacccuuu

SEQ ID NO: 1345551 - RNA, 19 nt, Homo sapiens
  misc_RNA (1)...(19): siRNA sense strand
ugaaugaccauggcaagaa

SEQ ID NO: 1345552 - RNA, 19 nt, Homo sapiens
  misc_RNA (1)...(19): siRNA sense strand
gaugaccucagauuacaga

SEQ ID NO: 1345553 - RNA, 19 nt, Homo sapiens
  misc_RNA (1)...(19): siRNA sense strand
uguggaagcggcugaauga

SEQ ID NO: 1345554 - RNA, 19 nt, Homo sapiens
  misc_RNA (1)...(19): siRNA sense strand
caaccaacccuuuccuucu

SEQ ID NO: 1345555 - RNA, 19 nt, Homo sapiens
  misc_RNA (1)...(19): siRNA sense strand
gggugaugaccucagauua

SEQ ID NO: 1345556 - RNA, 19 nt, Homo sapiens
  misc_RNA (1)...(19): siRNA sense strand
gcaaggaccagggcaucaa

SEQ ID NO: 1345557 - RNA, 19 nt, Homo sapiens
  misc_RNA (1)...(19): siRNA sense strand
gaacuggcggcauguguac

SEQ ID NO: 1345558 - RNA, 19 nt, Homo sapiens
  misc_RNA (1)...(19): siRNA sense strand
uuugagcucuucaguaauc

SEQ ID NO: 1345559 - RNA, 19 nt, Homo sapiens
  misc_RNA (1)...(19): siRNA sense strand
gcagcaaccagaucaccuu

SEQ ID NO: 1345560 - RNA, 19 nt, Homo sapiens
  misc_RNA (1)...(19): siRNA sense strand
gccacugguuccucucuga

SEQ ID NO: 1345561 - RNA, 19 nt, Homo sapiens
  misc_RNA (1)...(19): siRNA sense strand
ggugggcaguguggguaua

SEQ ID NO: 1345562 - RNA, 19 nt, Homo sapiens
  misc_RNA (1)...(19): siRNA sense strand
ggugaugaccucagauuac

SEQ ID NO: 1345563 - RNA, 19 nt, Homo sapiens
  misc_RNA (1)...(19): siRNA sense strand
ggaaaacaccugaguccuu

SEQ ID NO: 1345564 - RNA, 19 nt, Homo sapiens
  misc_RNA (1)...(19): siRNA sense strand
acagauggcccuggaagaa

SEQ ID NO: 1345565 - RNA, 19 nt, Homo sapiens
  misc_RNA (1)...(19): siRNA sense strand
ccgaagggacacaguuaaa

SEQ ID NO: 1345566 - RNA, 19 nt, Homo sapiens
  misc_RNA (1)...(19): siRNA sense strand
gcccugcaaugaugaacau

SEQ ID NO: 1345567 - RNA, 19 nt, Homo sapiens
  misc_RNA (1)...(19): siRNA sense strand
caagacaggcuccgaacgu

SEQ ID NO: 1345568 - RNA, 19 nt, Homo sapiens
  misc_RNA (1)...(19): siRNA sense strand
ccgaaucugugaccucucu

SEQ ID NO: 1345569 - RNA, 19 nt, Homo sapiens
  misc_RNA (1)...(19): siRNA sense strand
caaugugcgugagaaguca

SEQ ID NO: 1345570 - RNA, 19 nt, Homo sapiens
  misc_RNA (1)...(19): siRNA sense strand
gaagggacacaguuaaaau

SEQ ID NO: 1345571 - RNA, 19 nt, Homo sapiens
  misc_RNA (1)...(19): siRNA sense strand
ccaguacauugaccgagau

SEQ ID NO: 1345572 - RNA, 19 nt, Homo sapiens
  misc_RNA (1)...(19): siRNA sense strand
gggaccagcacauccuuug

SEQ ID NO: 1345573 - RNA, 19 nt, Homo sapiens
  misc_RNA (1)...(19): siRNA sense strand
gcccgucagccuccacuaa

SEQ ID NO: 1345574 - RNA, 19 nt, Homo sapiens
  misc_RNA (1)...(19): siRNA sense strand
ucuaucagacggcagauga

SEQ ID NO: 1345575 - RNA, 19 nt, Homo sapiens
  misc_RNA (1)...(19): siRNA sense strand
ggaccagggcaucaaugug

SEQ ID NO: 1345576 - RNA, 19 nt, Homo sapiens
  misc_RNA (1)...(19): siRNA sense strand
uugccgaccugaccuacaa

SEQ ID NO: 1345577 - RNA, 19 nt, Homo sapiens
  misc_RNA (1)...(19): siRNA sense strand
gccgaagggacacaguuaa

SEQ ID NO: 1345578 - RNA, 19 nt, Homo sapiens
  misc_RNA (1)...(19): siRNA sense strand
cagauggcccuggaagaaa

SEQ ID NO: 1345579 - RNA, 19 nt, Homo sapiens
  misc_RNA (1)...(19): siRNA sense strand
agaacuggcggcaugugua

SEQ ID NO: 1345580 - RNA, 19 nt, Homo sapiens
  misc_RNA (1)...(19): siRNA sense strand
cagacuacgcuguuggauu

SEQ ID NO: 1345581 - RNA, 19 nt, Homo sapiens
  misc_RNA (1)...(19): siRNA sense strand
ccacuggcaugggcagcaa

SEQ ID NO: 1345582 - RNA, 19 nt, Homo sapiens
  misc_RNA (1)...(19): siRNA sense strand
uaucagacggcagaugaaa

SEQ ID NO: 1345583 - RNA, 19 nt, Homo sapiens
  misc_RNA (1)...(19): siRNA sense strand
ugacaaccuucggacuuca

SEQ ID NO: 1345584 - RNA, 19 nt, Homo sapiens
  misc_RNA (1)...(19): siRNA sense strand
uggacuaccucaucaagac

SEQ ID NO: 1345585 - RNA, 19 nt, Homo sapiens
  misc_RNA (1)...(19): siRNA sense strand
ggacuaccucaucaagaca

SEQ ID NO: 1345586 - RNA, 19 nt, Homo sapiens
  misc_RNA (1)...(19): siRNA sense strand
cugcuggacuaccucauca

SEQ ID NO: 1345587 - RNA, 19 nt, Homo sapiens
  misc_RNA (1)...(19): siRNA sense strand
ccaacccuuuccuucucua

SEQ ID NO: 1345588 - RNA, 19 nt, Homo sapiens
  misc_RNA (1)...(19): siRNA sense strand
cuacgcuguuggauuuaau

SEQ ID NO: 1345589 - RNA, 19 nt, Homo sapiens
  misc_RNA (1)...(19): siRNA sense strand
cagcaaccagaucaccuuu

SEQ ID NO: 1345590 - RNA, 19 nt, Homo sapiens
  misc_RNA (1)...(19): siRNA sense strand
ucaaugugcgugagaaguc

SEQ ID NO: 1345591 - RNA, 19 nt, Homo sapiens
  misc_RNA (1)...(19): siRNA sense strand
ggaagccaccuccaaugac

SEQ ID NO: 1345592 - RNA, 19 nt, Homo sapiens
  misc_RNA (1)...(19): siRNA sense strand
ggacacaguuaaaauucca

SEQ ID NO: 1345593 - RNA, 19 nt, Homo sapiens
  misc_RNA (1)...(19): siRNA sense strand
agauggcccuggaagaaag

SEQ ID NO: 1345594 - RNA, 19 nt, Homo sapiens
  misc_RNA (1)...(19): siRNA sense strand
uccagacccugaaggacuu

SEQ ID NO: 1345595 - RNA, 19 nt, Homo sapiens
  misc_RNA (1)...(19): siRNA sense strand
gcaagaacuggcggcaugu

SEQ ID NO: 1345596 - RNA, 19 nt, Homo sapiens
  misc_RNA (1)...(19): siRNA sense strand
acugggcccugcaaugaug

SEQ ID NO: 1345597 - RNA, 19 nt, Homo sapiens
  misc_RNA (1)...(19): siRNA sense strand
caucgugaacaauuacuca

SEQ ID NO: 1345598 - RNA, 19 nt, Homo sapiens
  misc_RNA (1)...(19): siRNA sense strand
ggacgaggaacgguugaag

SEQ ID NO: 1345599 - RNA, 19 nt, Homo sapiens
  misc_RNA (1)...(19): siRNA sense strand
uuacucagaggcagaaauc

SEQ ID NO: 1345600 - RNA, 19 nt, Homo sapiens
  misc_RNA (1)...(19): siRNA sense strand
caaggaccagggcaucaau

SEQ ID NO: 1345601 - RNA, 19 nt, Homo sapiens
  misc_RNA (1)...(19): siRNA sense strand
acugguggcucuccucaag

SEQ ID NO: 1345602 - RNA, 19 nt, Homo sapiens
  misc_RNA (1)...(19): siRNA sense strand
aaccaacccuuuccuucuc

SEQ ID NO: 1345603 - RNA, 19 nt, Homo sapiens
  misc_RNA (1)...(19): siRNA sense strand
cacaaucuguccccaagaa

SEQ ID NO: 1345604 - RNA, 19 nt, Homo sapiens
  misc_RNA (1)...(19): siRNA sense strand
ccagacuaguggagaagag

SEQ ID NO: 1345605 - RNA, 19 nt, Homo sapiens
  misc_RNA (1)...(19): siRNA sense strand
ggacuuccaguacauugac

SEQ ID NO: 1345606 - RNA, 19 nt, Homo sapiens
  misc_RNA (1)...(19): siRNA sense strand
aaacaucgugaacaauuac

SEQ ID NO: 1345607 - RNA, 19 nt, Homo sapiens
  misc_RNA (1)...(19): siRNA sense strand
acuacgcuguuggauuuaa

SEQ ID NO: 1345608 - RNA, 19 nt, Homo sapiens
  misc_RNA (1)...(19): siRNA sense strand
gcaaauguggugagaaaua

SEQ ID NO: 1345609 - RNA, 19 nt, Homo sapiens
  misc_RNA (1)...(19): siRNA sense strand
gcaaugaacugccaaaauu

SEQ ID NO: 1345610 - RNA, 19 nt, Homo sapiens
  misc_RNA (1)...(19): siRNA sense strand
gcaccuuuaucuaugguua

SEQ ID NO: 1345611 - RNA, 19 nt, Homo sapiens
  misc_RNA (1)...(19): siRNA sense strand
ugaaggaggucagguauau

SEQ ID NO: 1345612 - RNA, 19 nt, Homo sapiens
  misc_RNA (1)...(19): siRNA sense strand
caaauguggugagaaauau

SEQ ID NO: 1345613 - RNA, 19 nt, Homo sapiens
  misc_RNA (1)...(19): siRNA sense strand
ggacuugucugcacaucuc

SEQ ID NO: 1345614 - RNA, 19 nt, Homo sapiens
  misc_RNA (1)...(19): siRNA sense strand
ggugagaaauaucagcuau

SEQ ID NO: 1345615 - RNA, 19 nt, Homo sapiens
  misc_RNA (1)...(19): siRNA sense strand
cugcaaauguggugagaaa

SEQ ID NO: 1345616 - RNA, 19 nt, Homo sapiens
  misc_RNA (1)...(19): siRNA sense strand
ucaucuaccuggucacuau

SEQ ID NO: 1345617 - RNA, 19 nt, Homo sapiens
  misc_RNA (1)...(19): siRNA sense strand
ggcagcaccuuuaucuaug

SEQ ID NO: 1345618 - RNA, 19 nt, Homo sapiens
  misc_RNA (1)...(19): siRNA sense strand
caucauggcaguggaguuu

SEQ ID NO: 1345619 - RNA, 19 nt, Homo sapiens
  misc_RNA (1)...(19): siRNA sense strand
ggagcuccaugggauagaa

SEQ ID NO: 1345620 - RNA, 19 nt, Homo sapiens
  misc_RNA (1)...(19): siRNA sense strand
gaaccgaguguuugacaag

SEQ ID NO: 1345621 - RNA, 19 nt, Homo sapiens
  misc_RNA (1)...(19): siRNA sense strand
cgagucaucuugggcaaug

SEQ ID NO: 1345622 - RNA, 19 nt, Homo sapiens
  misc_RNA (1)...(19): siRNA sense strand
cggcagcaccuuuaucuau

SEQ ID NO: 1345623 - RNA, 19 nt, Homo sapiens
  misc_RNA (1)...(19): siRNA sense strand
gcagcaccuuuaucuaugg

SEQ ID NO: 1345624 - RNA, 19 nt, Homo sapiens
  misc_RNA (1)...(19): siRNA sense strand
ucauggcaguggaguuuga

SEQ ID NO: 1345625 - RNA, 19 nt, Homo sapiens
  misc_RNA (1)...(19): siRNA sense strand
ggaggucagguauauggaa

SEQ ID NO: 1345626 - RNA, 19 nt, Homo sapiens
  misc_RNA (1)...(19): siRNA sense strand
gcaggcgcuucaccacaga

SEQ ID NO: 1345627 - RNA, 19 nt, Homo sapiens
  misc_RNA (1)...(19): siRNA sense strand
gguggugaaccgaguguuu

SEQ ID NO: 1345628 - RNA, 19 nt, Homo sapiens
  misc_RNA (1)...(19): siRNA sense strand
uaucuaugguuauguggau

SEQ ID NO: 1345629 - RNA, 19 nt, Homo sapiens
  misc_RNA (1)...(19): siRNA sense strand
gugagaaauaucagcuaua

SEQ ID NO: 1345630 - RNA, 19 nt, Homo sapiens
  misc_RNA (1)...(19): siRNA sense strand
caucuacugugcacucucu

SEQ ID NO: 1345631 - RNA, 19 nt, Homo sapiens
  misc_RNA (1)...(19): siRNA sense strand
gugaaggaggucagguaua

SEQ ID NO: 1345632 - RNA, 19 nt, Homo sapiens
  misc_RNA (1)...(19): siRNA sense strand
gaaggaggucagguauaug

SEQ ID NO: 1345633 - RNA, 19 nt, Homo sapiens
  misc_RNA (1)...(19): siRNA sense strand
auaaauaucgagaggacuu

SEQ ID NO: 1345634 - RNA, 19 nt, Homo sapiens
  misc_RNA (1)...(19): siRNA sense strand
ugaaccgaguguuugacaa

SEQ ID NO: 1345635 - RNA, 19 nt, Homo sapiens
  misc_RNA (1)...(19): siRNA sense strand
gucugcacaucucauggua

SEQ ID NO: 1345636 - RNA, 19 nt, Homo sapiens
  misc_RNA (1)...(19): siRNA sense strand
ggaccaucgagucaucuug

SEQ ID NO: 1345637 - RNA, 19 nt, Homo sapiens
  misc_RNA (1)...(19): siRNA sense strand
gaggagugcaggcgcuuca

SEQ ID NO: 1345638 - RNA, 19 nt, Homo sapiens
  misc_RNA (1)...(19): siRNA sense strand
gguguggaccaucgaguca

SEQ ID NO: 1345639 - RNA, 19 nt, Homo sapiens
  misc_RNA (1)...(19): siRNA sense strand
gcaaauguggugagaaaua

SEQ ID NO: 1345640 - RNA, 19 nt, Homo sapiens
  misc_RNA (1)...(19): siRNA sense strand
gcaaugaacugccaaaauu

SEQ ID NO: 1345641 - RNA, 19 nt, Homo sapiens
  misc_RNA (1)...(19): siRNA sense strand
gcaccuuuaucuaugguua

SEQ ID NO: 1345642 - RNA, 19 nt, Homo sapiens
  misc_RNA (1)...(19): siRNA sense strand
ugaaggaggucagguauau

SEQ ID NO: 1345643 - RNA, 19 nt, Homo sapiens
  misc_RNA (1)...(19): siRNA sense strand
caaauguggugagaaauau

SEQ ID NO: 1345644 - RNA, 19 nt, Homo sapiens
  misc_RNA (1)...(19): siRNA sense strand
ggacuugucugcacaucuc

SEQ ID NO: 1345645 - RNA, 19 nt, Homo sapiens
  misc_RNA (1)...(19): siRNA sense strand
ggugagaaauaucagcuau

SEQ ID NO: 1345646 - RNA, 19 nt, Homo sapiens
  misc_RNA (1)...(19): siRNA sense strand
cugcaaauguggugagaaa

SEQ ID NO: 1345647 - RNA, 19 nt, Homo sapiens
  misc_RNA (1)...(19): siRNA sense strand
ucaucuaccuggucacuau

SEQ ID NO: 1345648 - RNA, 19 nt, Homo sapiens
  misc_RNA (1)...(19): siRNA sense strand
ggcagcaccuuuaucuaug

SEQ ID NO: 1345649 - RNA, 19 nt, Homo sapiens
  misc_RNA (1)...(19): siRNA sense strand
caucauggcaguggaguuu

SEQ ID NO: 1345650 - RNA, 19 nt, Homo sapiens
  misc_RNA (1)...(19): siRNA sense strand
ggagcuccaugggauagaa

SEQ ID NO: 1345651 - RNA, 19 nt, Homo sapiens
  misc_RNA (1)...(19): siRNA sense strand
gaaccgaguguuugacaag

SEQ ID NO: 1345652 - RNA, 19 nt, Homo sapiens
  misc_RNA (1)...(19): siRNA sense strand
cgagucaucuugggcaaug

SEQ ID NO: 1345653 - RNA, 19 nt, Homo sapiens
  misc_RNA (1)...(19): siRNA sense strand
cggcagcaccuuuaucuau

SEQ ID NO: 1345654 - RNA, 19 nt, Homo sapiens
  misc_RNA (1)...(19): siRNA sense strand
gcagcaccuuuaucuaugg

SEQ ID NO: 1345655 - RNA, 19 nt, Homo sapiens
  misc_RNA (1)...(19): siRNA sense strand
ucauggcaguggaguuuga

SEQ ID NO: 1345656 - RNA, 19 nt, Homo sapiens
  misc_RNA (1)...(19): siRNA sense strand
ggaggucagguauauggaa

SEQ ID NO: 1345657 - RNA, 19 nt, Homo sapiens
  misc_RNA (1)...(19): siRNA sense strand
gcaggcgcuucaccacaga

SEQ ID NO: 1345658 - RNA, 19 nt, Homo sapiens
  misc_RNA (1)...(19): siRNA sense strand
gguggugaaccgaguguuu

SEQ ID NO: 1345659 - RNA, 19 nt, Homo sapiens
  misc_RNA (1)...(19): siRNA sense strand
uaucuaugguuauguggau

SEQ ID NO: 1345660 - RNA, 19 nt, Homo sapiens
  misc_RNA (1)...(19): siRNA sense strand
gugagaaauaucagcuaua

SEQ ID NO: 1345661 - RNA, 19 nt, Homo sapiens
  misc_RNA (1)...(19): siRNA sense strand
caucuacugugcacucucu

SEQ ID NO: 1345662 - RNA, 19 nt, Homo sapiens
  misc_RNA (1)...(19): siRNA sense strand
gugaaggaggucagguaua

SEQ ID NO: 1345663 - RNA, 19 nt, Homo sapiens
  misc_RNA (1)...(19): siRNA sense strand
gaaggaggucagguauaug

SEQ ID NO: 1345664 - RNA, 19 nt, Homo sapiens
  misc_RNA (1)...(19): siRNA sense strand
auaaauaucgagaggacuu

SEQ ID NO: 1345665 - RNA, 19 nt, Homo sapiens
  misc_RNA (1)...(19): siRNA sense strand
ugaaccgaguguuugacaa

SEQ ID NO: 1345666 - RNA, 19 nt, Homo sapiens
  misc_RNA (1)...(19): siRNA sense strand
gucugcacaucucauggua

SEQ ID NO: 1345667 - RNA, 19 nt, Homo sapiens
  misc_RNA (1)...(19): siRNA sense strand
ggaccaucgagucaucuug

SEQ ID NO: 1345668 - RNA, 19 nt, Homo sapiens
  misc_RNA (1)...(19): siRNA sense strand
gaggagugcaggcgcuuca

SEQ ID NO: 1345669 - RNA, 19 nt, Homo sapiens
  misc_RNA (1)...(19): siRNA sense strand
gguguggaccaucgaguca

SEQ ID NO: 1345670 - RNA, 19 nt, Homo sapiens
  misc_RNA (1)...(19): siRNA sense strand
ggaaagagcuagcgcugaa

SEQ ID NO: 1345671 - RNA, 19 nt, Homo sapiens
  misc_RNA (1)...(19): siRNA sense strand
gaaacugcaugcuguugua

SEQ ID NO: 1345672 - RNA, 19 nt, Homo sapiens
  misc_RNA (1)...(19): siRNA sense strand
aaacaucagucuccaaaga

SEQ ID NO: 1345673 - RNA, 19 nt, Homo sapiens
  misc_RNA (1)...(19): siRNA sense strand
gagcagcgcuuacggaaac

SEQ ID NO: 1345674 - RNA, 19 nt, Homo sapiens
  misc_RNA (1)...(19): siRNA sense strand
gaagugauacgguuugaga

SEQ ID NO: 1345675 - RNA, 19 nt, Homo sapiens
  misc_RNA (1)...(19): siRNA sense strand
aacaauggcuccaaagaaa

SEQ ID NO: 1345676 - RNA, 19 nt, Homo sapiens
  misc_RNA (1)...(19): siRNA sense strand
caacaauggcuccaaagaa

SEQ ID NO: 1345677 - RNA, 19 nt, Homo sapiens
  misc_RNA (1)...(19): siRNA sense strand
gaaacucuagucaaccaua

SEQ ID NO: 1345678 - RNA, 19 nt, Homo sapiens
  misc_RNA (1)...(19): siRNA sense strand
guaaacaucagucuccaaa

SEQ ID NO: 1345679 - RNA, 19 nt, Homo sapiens
  misc_RNA (1)...(19): siRNA sense strand
caucaacaauggcuccaaa

SEQ ID NO: 1345680 - RNA, 19 nt, Homo sapiens
  misc_RNA (1)...(19): siRNA sense strand
uaaaucauccuaccauguu

SEQ ID NO: 1345681 - RNA, 19 nt, Homo sapiens
  misc_RNA (1)...(19): siRNA sense strand
gaacacagcccaguuugca

SEQ ID NO: 1345682 - RNA, 19 nt, Homo sapiens
  misc_RNA (1)...(19): siRNA sense strand
uugcugagcuccugaguga

SEQ ID NO: 1345683 - RNA, 19 nt, Homo sapiens
  misc_RNA (1)...(19): siRNA sense strand
aaucagacauuugguuuga

SEQ ID NO: 1345684 - RNA, 19 nt, Homo sapiens
  misc_RNA (1)...(19): siRNA sense strand
agaaccacgugaucaagua

SEQ ID NO: 1345685 - RNA, 19 nt, Homo sapiens
  misc_RNA (1)...(19): siRNA sense strand
ggccaacaaugacuucuuc

SEQ ID NO: 1345686 - RNA, 19 nt, Homo sapiens
  misc_RNA (1)...(19): siRNA sense strand
acaucagucuccaaagaua

SEQ ID NO: 1345687 - RNA, 19 nt, Homo sapiens
  misc_RNA (1)...(19): siRNA sense strand
gcuccugagugacuacauu

SEQ ID NO: 1345688 - RNA, 19 nt, Homo sapiens
  misc_RNA (1)...(19): siRNA sense strand
augagaagcuuuccgagaa

SEQ ID NO: 1345689 - RNA, 19 nt, Homo sapiens
  misc_RNA (1)...(19): siRNA sense strand
ggcaaaggccaucuccuaa

SEQ ID NO: 1345690 - RNA, 19 nt, Homo sapiens
  misc_RNA (1)...(19): siRNA sense strand
gugcuggucuccucaagau

SEQ ID NO: 1345691 - RNA, 19 nt, Homo sapiens
  misc_RNA (1)...(19): siRNA sense strand
aaaucauccuaccauguua

SEQ ID NO: 1345692 - RNA, 19 nt, Homo sapiens
  misc_RNA (1)...(19): siRNA sense strand
ugaaucagacauuugguuu

SEQ ID NO: 1345693 - RNA, 19 nt, Homo sapiens
  misc_RNA (1)...(19): siRNA sense strand
guaaaucauccuaccaugu

SEQ ID NO: 1345694 - RNA, 19 nt, Homo sapiens
  misc_RNA (1)...(19): siRNA sense strand
ccacagaugccgucagcaa

SEQ ID NO: 1345695 - RNA, 19 nt, Homo sapiens
  misc_RNA (1)...(19): siRNA sense strand
ucagagaguucuuggaaaa

SEQ ID NO: 1345696 - RNA, 19 nt, Homo sapiens
  misc_RNA (1)...(19): siRNA sense strand
ccaaggacuucaagaacca

SEQ ID NO: 1345697 - RNA, 19 nt, Homo sapiens
  misc_RNA (1)...(19): siRNA sense strand
ugauacgguuugagaaaga

SEQ ID NO: 1345698 - RNA, 19 nt, Homo sapiens
  misc_RNA (1)...(19): siRNA sense strand
gaacaggccaacaaugacu

SEQ ID NO: 1345699 - RNA, 19 nt, Homo sapiens
  misc_RNA (1)...(19): siRNA sense strand
gaaucagacauuugguuug

SEQ ID NO: 1345700 - RNA, 19 nt, Homo sapiens
  misc_RNA (1)...(19): siRNA sense strand
cgucagagaguucuuggaa

SEQ ID NO: 1345701 - RNA, 19 nt, Homo sapiens
  misc_RNA (1)...(19): siRNA sense strand
agaaagagaaauccaagga

SEQ ID NO: 1345702 - RNA, 19 nt, Homo sapiens
  misc_RNA (1)...(19): siRNA sense strand
caaagagucuagccaugcu

SEQ ID NO: 1345703 - RNA, 19 nt, Homo sapiens
  misc_RNA (1)...(19): siRNA sense strand
ggaaacugcaugcuguugu

SEQ ID NO: 1345704 - RNA, 19 nt, Homo sapiens
  misc_RNA (1)...(19): siRNA sense strand
auaacuacaucccuucuuc

SEQ ID NO: 1345705 - RNA, 19 nt, Homo sapiens
  misc_RNA (1)...(19): siRNA sense strand
ucaagaaccacgugaucaa

SEQ ID NO: 1345706 - RNA, 19 nt, Homo sapiens
  misc_RNA (1)...(19): siRNA sense strand
gugacuuucugggucuuua

SEQ ID NO: 1345707 - RNA, 19 nt, Homo sapiens
  misc_RNA (1)...(19): siRNA sense strand
ucgggugacucaauaugaa

SEQ ID NO: 1345708 - RNA, 19 nt, Homo sapiens
  misc_RNA (1)...(19): siRNA sense strand
aggaacaggccaacaauga

SEQ ID NO: 1345709 - RNA, 19 nt, Homo sapiens
  misc_RNA (1)...(19): siRNA sense strand
ccuacaaaguuacaacaca

SEQ ID NO: 1345710 - RNA, 19 nt, Homo sapiens
  misc_RNA (1)...(19): siRNA sense strand
gucagagaguucuuggaaa

SEQ ID NO: 1345711 - RNA, 19 nt, Homo sapiens
  misc_RNA (1)...(19): siRNA sense strand
gaagauuuagugacuuucu

SEQ ID NO: 1345712 - RNA, 19 nt, Homo sapiens
  misc_RNA (1)...(19): siRNA sense strand
uccaggagguagaguguga

SEQ ID NO: 1345713 - RNA, 19 nt, Homo sapiens
  misc_RNA (1)...(19): siRNA sense strand
agacacuccuuuacucaca

SEQ ID NO: 1345714 - RNA, 19 nt, Homo sapiens
  misc_RNA (1)...(19): siRNA sense strand
gaaauccaaggacuucaag

SEQ ID NO: 1345715 - RNA, 19 nt, Homo sapiens
  misc_RNA (1)...(19): siRNA sense strand
acacagcccaguuugcaaa

SEQ ID NO: 1345716 - RNA, 19 nt, Homo sapiens
  misc_RNA (1)...(19): siRNA sense strand
acagacaagcuuaccauug

SEQ ID NO: 1345717 - RNA, 19 nt, Homo sapiens
  misc_RNA (1)...(19): siRNA sense strand
aggcaaaggccaucuccua

SEQ ID NO: 1345718 - RNA, 19 nt, Homo sapiens
  misc_RNA (1)...(19): siRNA sense strand
caucagucuccaaagauaa

SEQ ID NO: 1345719 - RNA, 19 nt, Homo sapiens
  misc_RNA (1)...(19): siRNA sense strand
ugggauccaugaagaacaa

SEQ ID NO: 1345720 - RNA, 19 nt, Homo sapiens
  misc_RNA (1)...(19): siRNA sense strand
cuccaaagauaacuacauc

SEQ ID NO: 1345721 - RNA, 19 nt, Homo sapiens
  misc_RNA (1)...(19): siRNA sense strand
ucgagaggauuucaacagu

SEQ ID NO: 1345722 - RNA, 19 nt, Homo sapiens
  misc_RNA (1)...(19): siRNA sense strand
acauuugguuugaggagaa

SEQ ID NO: 1345723 - RNA, 19 nt, Homo sapiens
  misc_RNA (1)...(19): siRNA sense strand
caacagugguccgaaaaga

SEQ ID NO: 1345724 - RNA, 19 nt, Homo sapiens
  misc_RNA (1)...(19): siRNA sense strand
ucaacaauggcuccaaaga

SEQ ID NO: 1345725 - RNA, 19 nt, Homo sapiens
  misc_RNA (1)...(19): siRNA sense strand
aaacucuagucaaccauag

SEQ ID NO: 1345726 - RNA, 19 nt, Homo sapiens
  misc_RNA (1)...(19): siRNA sense strand
gcuggucuccucaagaugu

SEQ ID NO: 1345727 - RNA, 19 nt, Homo sapiens
  misc_RNA (1)...(19): siRNA sense strand
ugagaagcuuuccgagaag

SEQ ID NO: 1345728 - RNA, 19 nt, Homo sapiens
  misc_RNA (1)...(19): siRNA sense strand
gugauacgguuugagaaag

SEQ ID NO: 1345729 - RNA, 19 nt, Homo sapiens
  misc_RNA (1)...(19): siRNA sense strand
gcaaaaugaccaucaagau

SEQ ID NO: 1345730 - RNA, 19 nt, Homo sapiens
  misc_RNA (1)...(19): siRNA sense strand
aaagaagugauacgguuug

SEQ ID NO: 1345731 - RNA, 19 nt, Homo sapiens
  misc_RNA (1)...(19): siRNA sense strand
ggagcagcgcuuacggaaa

SEQ ID NO: 1345732 - RNA, 19 nt, Homo sapiens
  misc_RNA (1)...(19): siRNA sense strand
aaaguuacaacacagacaa

SEQ ID NO: 1345733 - RNA, 19 nt, Homo sapiens
  misc_RNA (1)...(19): siRNA sense strand
gauaacuacaucccuucuu

SEQ ID NO: 1345734 - RNA, 19 nt, Homo sapiens
  misc_RNA (1)...(19): siRNA sense strand
ucaagaugaaugaaucaga

SEQ ID NO: 1345735 - RNA, 19 nt, Homo sapiens
  misc_RNA (1)...(19): siRNA sense strand
uuacaacacagacaagcuu

SEQ ID NO: 1345736 - RNA, 19 nt, Homo sapiens
  misc_RNA (1)...(19): siRNA sense strand
uggcugagguggaagaaaa

SEQ ID NO: 1345737 - RNA, 19 nt, Homo sapiens
  misc_RNA (1)...(19): siRNA sense strand
aauccaaggacuucaagaa

SEQ ID NO: 1345738 - RNA, 19 nt, Homo sapiens
  misc_RNA (1)...(19): siRNA sense strand
aagaagugauacgguuuga

SEQ ID NO: 1345739 - RNA, 19 nt, Homo sapiens
  misc_RNA (1)...(19): siRNA sense strand
ccaugaagaacaagaccaa

SEQ ID NO: 1345740 - RNA, 19 nt, Homo sapiens
  misc_RNA (1)...(19): siRNA sense strand
agugaaaguugggaaggaa

SEQ ID NO: 1345741 - RNA, 19 nt, Homo sapiens
  misc_RNA (1)...(19): siRNA sense strand
ggaacaggccaacaaugac

SEQ ID NO: 1345742 - RNA, 19 nt, Homo sapiens
  misc_RNA (1)...(19): siRNA sense strand
acugcaugcuguuguagaa

SEQ ID NO: 1345743 - RNA, 19 nt, Homo sapiens
  misc_RNA (1)...(19): siRNA sense strand
gaaaguugggaaggaagau

SEQ ID NO: 1345744 - RNA, 19 nt, Homo sapiens
  misc_RNA (1)...(19): siRNA sense strand
agagaaauccaaggacuuc

SEQ ID NO: 1345745 - RNA, 19 nt, Homo sapiens
  misc_RNA (1)...(19): siRNA sense strand
ugaagaacaagaccaagag

SEQ ID NO: 1345746 - RNA, 19 nt, Homo sapiens
  misc_RNA (1)...(19): siRNA sense strand
ccaggaacaggccaacaau

SEQ ID NO: 1345747 - RNA, 19 nt, Homo sapiens
  misc_RNA (1)...(19): siRNA sense strand
uacaacacagacaagcuua

SEQ ID NO: 1345748 - RNA, 19 nt, Homo sapiens
  misc_RNA (1)...(19): siRNA sense strand
gccacaggaucucuuugca

SEQ ID NO: 1345749 - RNA, 19 nt, Homo sapiens
  misc_RNA (1)...(19): siRNA sense strand
cacagaugccgucagcaaa

SEQ ID NO: 1345750 - RNA, 19 nt, Homo sapiens
  misc_RNA (1)...(19): siRNA sense strand
caaaguuacaacacagaca

SEQ ID NO: 1345751 - RNA, 19 nt, Homo sapiens
  misc_RNA (1)...(19): siRNA sense strand
cagcccaguuugcaaagag

SEQ ID NO: 1345752 - RNA, 19 nt, Homo sapiens
  misc_RNA (1)...(19): siRNA sense strand
ugaaaguugggaaggaaga

SEQ ID NO: 1345753 - RNA, 19 nt, Homo sapiens
  misc_RNA (1)...(19): siRNA sense strand
gaaccacgugaucaaguac

SEQ ID NO: 1345754 - RNA, 19 nt, Homo sapiens
  misc_RNA (1)...(19): siRNA sense strand
agaaauccaaggacuucaa

SEQ ID NO: 1345755 - RNA, 19 nt, Homo sapiens
  misc_RNA (1)...(19): siRNA sense strand
uaccuucagaggauuguaa

SEQ ID NO: 1345756 - RNA, 19 nt, Homo sapiens
  misc_RNA (1)...(19): siRNA sense strand
caagaaccacgugaucaag

SEQ ID NO: 1345757 - RNA, 19 nt, Homo sapiens
  misc_RNA (1)...(19): siRNA sense strand
gguuugagaaagagaaauc

SEQ ID NO: 1345758 - RNA, 19 nt, Homo sapiens
  misc_RNA (1)...(19): siRNA sense strand
gauacgguuugagaaagag

SEQ ID NO: 1345759 - RNA, 19 nt, Homo sapiens
  misc_RNA (1)...(19): siRNA sense strand
agugauacgguuugagaaa

SEQ ID NO: 1345760 - RNA, 19 nt, Homo sapiens
  misc_RNA (1)...(19): siRNA sense strand
gcaugcuguuguagaaacu

SEQ ID NO: 1345761 - RNA, 19 nt, Homo sapiens
  misc_RNA (1)...(19): siRNA sense strand
gcugagcuccugagugacu

SEQ ID NO: 1345762 - RNA, 19 nt, Homo sapiens
  misc_RNA (1)...(19): siRNA sense strand
uugagacacuccuuuacuc

SEQ ID NO: 1345763 - RNA, 19 nt, Homo sapiens
  misc_RNA (1)...(19): siRNA sense strand
ggaaagagcuagcgcugaa

SEQ ID NO: 1345764 - RNA, 19 nt, Homo sapiens
  misc_RNA (1)...(19): siRNA sense strand
gaaacugcaugcuguugua

SEQ ID NO: 1345765 - RNA, 19 nt, Homo sapiens
  misc_RNA (1)...(19): siRNA sense strand
aaacaucagucuccaaaga

SEQ ID NO: 1345766 - RNA, 19 nt, Homo sapiens
  misc_RNA (1)...(19): siRNA sense strand
gagcagcgcuuacggaaac

SEQ ID NO: 1345767 - RNA, 19 nt, Homo sapiens
  misc_RNA (1)...(19): siRNA sense strand
gaagugauacgguuugaga

SEQ ID NO: 1345768 - RNA, 19 nt, Homo sapiens
  misc_RNA (1)...(19): siRNA sense strand
aacaauggcuccaaagaaa

SEQ ID NO: 1345769 - RNA, 19 nt, Homo sapiens
  misc_RNA (1)...(19): siRNA sense strand
caacaauggcuccaaagaa

SEQ ID NO: 1345770 - RNA, 19 nt, Homo sapiens
  misc_RNA (1)...(19): siRNA sense strand
gaaacucuagucaaccaua

SEQ ID NO: 1345771 - RNA, 19 nt, Homo sapiens
  misc_RNA (1)...(19): siRNA sense strand
guaaacaucagucuccaaa

SEQ ID NO: 1345772 - RNA, 19 nt, Homo sapiens
  misc_RNA (1)...(19): siRNA sense strand
caucaacaauggcuccaaa

SEQ ID NO: 1345773 - RNA, 19 nt, Homo sapiens
  misc_RNA (1)...(19): siRNA sense strand
uaaaucauccuaccauguu

SEQ ID NO: 1345774 - RNA, 19 nt, Homo sapiens
  misc_RNA (1)...(19): siRNA sense strand
gaacacagcccaguuugca

SEQ ID NO: 1345775 - RNA, 19 nt, Homo sapiens
  misc_RNA (1)...(19): siRNA sense strand
uugcugagcuccugaguga

SEQ ID NO: 1345776 - RNA, 19 nt, Homo sapiens
  misc_RNA (1)...(19): siRNA sense strand
aaucagacauuugguuuga

SEQ ID NO: 1345777 - RNA, 19 nt, Homo sapiens
  misc_RNA (1)...(19): siRNA sense strand
agaaccacgugaucaagua

SEQ ID NO: 1345778 - RNA, 19 nt, Homo sapiens
  misc_RNA (1)...(19): siRNA sense strand
ggccaacaaugacuucuuc

SEQ ID NO: 1345779 - RNA, 19 nt, Homo sapiens
  misc_RNA (1)...(19): siRNA sense strand
acaucagucuccaaagaua

SEQ ID NO: 1345780 - RNA, 19 nt, Homo sapiens
  misc_RNA (1)...(19): siRNA sense strand
gcuccugagugacuacauu

SEQ ID NO: 1345781 - RNA, 19 nt, Homo sapiens
  misc_RNA (1)...(19): siRNA sense strand
augagaagcuuuccgagaa

SEQ ID NO: 1345782 - RNA, 19 nt, Homo sapiens
  misc_RNA (1)...(19): siRNA sense strand
ggcaaaggccaucuccuaa

SEQ ID NO: 1345783 - RNA, 19 nt, Homo sapiens
  misc_RNA (1)...(19): siRNA sense strand
gugcuggucuccucaagau

SEQ ID NO: 1345784 - RNA, 19 nt, Homo sapiens
  misc_RNA (1)...(19): siRNA sense strand
aaaucauccuaccauguua

SEQ ID NO: 1345785 - RNA, 19 nt, Homo sapiens
  misc_RNA (1)...(19): siRNA sense strand
ugaaucagacauuugguuu

SEQ ID NO: 1345786 - RNA, 19 nt, Homo sapiens
  misc_RNA (1)...(19): siRNA sense strand
guaaaucauccuaccaugu

SEQ ID NO: 1345787 - RNA, 19 nt, Homo sapiens
  misc_RNA (1)...(19): siRNA sense strand
ccacagaugccgucagcaa

SEQ ID NO: 1345788 - RNA, 19 nt, Homo sapiens
  misc_RNA (1)...(19): siRNA sense strand
ucagagaguucuuggaaaa

SEQ ID NO: 1345789 - RNA, 19 nt, Homo sapiens
  misc_RNA (1)...(19): siRNA sense strand
ccaaggacuucaagaacca

SEQ ID NO: 1345790 - RNA, 19 nt, Homo sapiens
  misc_RNA (1)...(19): siRNA sense strand
ugauacgguuugagaaaga

SEQ ID NO: 1345791 - RNA, 19 nt, Homo sapiens
  misc_RNA (1)...(19): siRNA sense strand
gaacaggccaacaaugacu

SEQ ID NO: 1345792 - RNA, 19 nt, Homo sapiens
  misc_RNA (1)...(19): siRNA sense strand
gaaucagacauuugguuug

SEQ ID NO: 1345793 - RNA, 19 nt, Homo sapiens
  misc_RNA (1)...(19): siRNA sense strand
cgucagagaguucuuggaa

SEQ ID NO: 1345794 - RNA, 19 nt, Homo sapiens
  misc_RNA (1)...(19): siRNA sense strand
agaaagagaaauccaagga

SEQ ID NO: 1345795 - RNA, 19 nt, Homo sapiens
  misc_RNA (1)...(19): siRNA sense strand
caaagagucuagccaugcu

SEQ ID NO: 1345796 - RNA, 19 nt, Homo sapiens
  misc_RNA (1)...(19): siRNA sense strand
ggaaacugcaugcuguugu

SEQ ID NO: 1345797 - RNA, 19 nt, Homo sapiens
  misc_RNA (1)...(19): siRNA sense strand
auaacuacaucccuucuuc

SEQ ID NO: 1345798 - RNA, 19 nt, Homo sapiens
  misc_RNA (1)...(19): siRNA sense strand
ucaagaaccacgugaucaa

SEQ ID NO: 1345799 - RNA, 19 nt, Homo sapiens
  misc_RNA (1)...(19): siRNA sense strand
gugacuuucugggucuuua

SEQ ID NO: 1345800 - RNA, 19 nt, Homo sapiens
  misc_RNA (1)...(19): siRNA sense strand
ucgggugacucaauaugaa

SEQ ID NO: 1345801 - RNA, 19 nt, Homo sapiens
  misc_RNA (1)...(19): siRNA sense strand
aggaacaggccaacaauga

SEQ ID NO: 1345802 - RNA, 19 nt, Homo sapiens
  misc_RNA (1)...(19): siRNA sense strand
ccuacaaaguuacaacaca

SEQ ID NO: 1345803 - RNA, 19 nt, Homo sapiens
  misc_RNA (1)...(19): siRNA sense strand
gucagagaguucuuggaaa

SEQ ID NO: 1345804 - RNA, 19 nt, Homo sapiens
  misc_RNA (1)...(19): siRNA sense strand
gaagauuuagugacuuucu

SEQ ID NO: 1345805 - RNA, 19 nt, Homo sapiens
  misc_RNA (1)...(19): siRNA sense strand
uccaggagguagaguguga

SEQ ID NO: 1345806 - RNA, 19 nt, Homo sapiens
  misc_RNA (1)...(19): siRNA sense strand
agacacuccuuuacucaca

SEQ ID NO: 1345807 - RNA, 19 nt, Homo sapiens
  misc_RNA (1)...(19): siRNA sense strand
gaaauccaaggacuucaag

SEQ ID NO: 1345808 - RNA, 19 nt, Homo sapiens
  misc_RNA (1)...(19): siRNA sense strand
acacagcccaguuugcaaa

SEQ ID NO: 1345809 - RNA, 19 nt, Homo sapiens
  misc_RNA (1)...(19): siRNA sense strand
acagacaagcuuaccauug

SEQ ID NO: 1345810 - RNA, 19 nt, Homo sapiens
  misc_RNA (1)...(19): siRNA sense strand
aggcaaaggccaucuccua

SEQ ID NO: 1345811 - RNA, 19 nt, Homo sapiens
  misc_RNA (1)...(19): siRNA sense strand
caucagucuccaaagauaa

SEQ ID NO: 1345812 - RNA, 19 nt, Homo sapiens
  misc_RNA (1)...(19): siRNA sense strand
ugggauccaugaagaacaa

SEQ ID NO: 1345813 - RNA, 19 nt, Homo sapiens
  misc_RNA (1)...(19): siRNA sense strand
cuccaaagauaacuacauc

SEQ ID NO: 1345814 - RNA, 19 nt, Homo sapiens
  misc_RNA (1)...(19): siRNA sense strand
ucgagaggauuucaacagu

SEQ ID NO: 1345815 - RNA, 19 nt, Homo sapiens
  misc_RNA (1)...(19): siRNA sense strand
acauuugguuugaggagaa

SEQ ID NO: 1345816 - RNA, 19 nt, Homo sapiens
  misc_RNA (1)...(19): siRNA sense strand
caacagugguccgaaaaga

SEQ ID NO: 1345817 - RNA, 19 nt, Homo sapiens
  misc_RNA (1)...(19): siRNA sense strand
ucaacaauggcuccaaaga

SEQ ID NO: 1345818 - RNA, 19 nt, Homo sapiens
  misc_RNA (1)...(19): siRNA sense strand
aaacucuagucaaccauag

SEQ ID NO: 1345819 - RNA, 19 nt, Homo sapiens
  misc_RNA (1)...(19): siRNA sense strand
gcuggucuccucaagaugu

SEQ ID NO: 1345820 - RNA, 19 nt, Homo sapiens
  misc_RNA (1)...(19): siRNA sense strand
ugagaagcuuuccgagaag

SEQ ID NO: 1345821 - RNA, 19 nt, Homo sapiens
  misc_RNA (1)...(19): siRNA sense strand
gugauacgguuugagaaag

SEQ ID NO: 1345822 - RNA, 19 nt, Homo sapiens
  misc_RNA (1)...(19): siRNA sense strand
gcaaaaugaccaucaagau

SEQ ID NO: 1345823 - RNA, 19 nt, Homo sapiens
  misc_RNA (1)...(19): siRNA sense strand
aaagaagugauacgguuug

SEQ ID NO: 1345824 - RNA, 19 nt, Homo sapiens
  misc_RNA (1)...(19): siRNA sense strand
ggagcagcgcuuacggaaa

SEQ ID NO: 1345825 - RNA, 19 nt, Homo sapiens
  misc_RNA (1)...(19): siRNA sense strand
aaaguuacaacacagacaa

SEQ ID NO: 1345826 - RNA, 19 nt, Homo sapiens
  misc_RNA (1)...(19): siRNA sense strand
gauaacuacaucccuucuu

SEQ ID NO: 1345827 - RNA, 19 nt, Homo sapiens
  misc_RNA (1)...(19): siRNA sense strand
ucaagaugaaugaaucaga

SEQ ID NO: 1345828 - RNA, 19 nt, Homo sapiens
  misc_RNA (1)...(19): siRNA sense strand
uuacaacacagacaagcuu

SEQ ID NO: 1345829 - RNA, 19 nt, Homo sapiens
  misc_RNA (1)...(19): siRNA sense strand
uggcugagguggaagaaaa

SEQ ID NO: 1345830 - RNA, 19 nt, Homo sapiens
  misc_RNA (1)...(19): siRNA sense strand
aauccaaggacuucaagaa

SEQ ID NO: 1345831 - RNA, 19 nt, Homo sapiens
  misc_RNA (1)...(19): siRNA sense strand
aagaagugauacgguuuga

SEQ ID NO: 1345832 - RNA, 19 nt, Homo sapiens
  misc_RNA (1)...(19): siRNA sense strand
ccaugaagaacaagaccaa

SEQ ID NO: 1345833 - RNA, 19 nt, Homo sapiens
  misc_RNA (1)...(19): siRNA sense strand
agugaaaguugggaaggaa

SEQ ID NO: 1345834 - RNA, 19 nt, Homo sapiens
  misc_RNA (1)...(19): siRNA sense strand
ggaacaggccaacaaugac

SEQ ID NO: 1345835 - RNA, 19 nt, Homo sapiens
  misc_RNA (1)...(19): siRNA sense strand
acugcaugcuguuguagaa

SEQ ID NO: 1345836 - RNA, 19 nt, Homo sapiens
  misc_RNA (1)...(19): siRNA sense strand
gaaaguugggaaggaagau

SEQ ID NO: 1345837 - RNA, 19 nt, Homo sapiens
  misc_RNA (1)...(19): siRNA sense strand
agagaaauccaaggacuuc

SEQ ID NO: 1345838 - RNA, 19 nt, Homo sapiens
  misc_RNA (1)...(19): siRNA sense strand
ugaagaacaagaccaagag

SEQ ID NO: 1345839 - RNA, 19 nt, Homo sapiens
  misc_RNA (1)...(19): siRNA sense strand
ccaggaacaggccaacaau

SEQ ID NO: 1345840 - RNA, 19 nt, Homo sapiens
  misc_RNA (1)...(19): siRNA sense strand
uacaacacagacaagcuua

SEQ ID NO: 1345841 - RNA, 19 nt, Homo sapiens
  misc_RNA (1)...(19): siRNA sense strand
gccacaggaucucuuugca

SEQ ID NO: 1345842 - RNA, 19 nt, Homo sapiens
  misc_RNA (1)...(19): siRNA sense strand
cacagaugccgucagcaaa

SEQ ID NO: 1345843 - RNA, 19 nt, Homo sapiens
  misc_RNA (1)...(19): siRNA sense strand
caaaguuacaacacagaca

SEQ ID NO: 1345844 - RNA, 19 nt, Homo sapiens
  misc_RNA (1)...(19): siRNA sense strand
cagcccaguuugcaaagag

SEQ ID NO: 1345845 - RNA, 19 nt, Homo sapiens
  misc_RNA (1)...(19): siRNA sense strand
ugaaaguugggaaggaaga

SEQ ID NO: 1345846 - RNA, 19 nt, Homo sapiens
  misc_RNA (1)...(19): siRNA sense strand
gaaccacgugaucaaguac

SEQ ID NO: 1345847 - RNA, 19 nt, Homo sapiens
  misc_RNA (1)...(19): siRNA sense strand
agaaauccaaggacuucaa

SEQ ID NO: 1345848 - RNA, 19 nt, Homo sapiens
  misc_RNA (1)...(19): siRNA sense strand
uaccuucagaggauuguaa

SEQ ID NO: 1345849 - RNA, 19 nt, Homo sapiens
  misc_RNA (1)...(19): siRNA sense strand
caagaaccacgugaucaag

SEQ ID NO: 1345850 - RNA, 19 nt, Homo sapiens
  misc_RNA (1)...(19): siRNA sense strand
gguuugagaaagagaaauc

SEQ ID NO: 1345851 - RNA, 19 nt, Homo sapiens
  misc_RNA (1)...(19): siRNA sense strand
gauacgguuugagaaagag

SEQ ID NO: 1345852 - RNA, 19 nt, Homo sapiens
  misc_RNA (1)...(19): siRNA sense strand
agugauacgguuugagaaa

SEQ ID NO: 1345853 - RNA, 19 nt, Homo sapiens
  misc_RNA (1)...(19): siRNA sense strand
gcaugcuguuguagaaacu

SEQ ID NO: 1345854 - RNA, 19 nt, Homo sapiens
  misc_RNA (1)...(19): siRNA sense strand
gcugagcuccugagugacu

SEQ ID NO: 1345855 - RNA, 19 nt, Homo sapiens
  misc_RNA (1)...(19): siRNA sense strand
uugagacacuccuuuacuc

SEQ ID NO: 1345856 - RNA, 19 nt, Homo sapiens
  misc_RNA (1)...(19): siRNA sense strand
ggaaagagcuagcgcugaa

SEQ ID NO: 1345857 - RNA, 19 nt, Homo sapiens
  misc_RNA (1)...(19): siRNA sense strand
gaaacugcaugcuguugua

SEQ ID NO: 1345858 - RNA, 19 nt, Homo sapiens
  misc_RNA (1)...(19): siRNA sense strand
aaacaucagucuccaaaga

SEQ ID NO: 1345859 - RNA, 19 nt, Homo sapiens
  misc_RNA (1)...(19): siRNA sense strand
gagcagcgcuuacggaaac

SEQ ID NO: 1345860 - RNA, 19 nt, Homo sapiens
  misc_RNA (1)...(19): siRNA sense strand
gaagugauacgguuugaga

SEQ ID NO: 1345861 - RNA, 19 nt, Homo sapiens
  misc_RNA (1)...(19): siRNA sense strand
aacaauggcuccaaagaaa

SEQ ID NO: 1345862 - RNA, 19 nt, Homo sapiens
  misc_RNA (1)...(19): siRNA sense strand
caacaauggcuccaaagaa

SEQ ID NO: 1345863 - RNA, 19 nt, Homo sapiens
  misc_RNA (1)...(19): siRNA sense strand
gaaacucuagucaaccaua

SEQ ID NO: 1345864 - RNA, 19 nt, Homo sapiens
  misc_RNA (1)...(19): siRNA sense strand
guaaacaucagucuccaaa

SEQ ID NO: 1345865 - RNA, 19 nt, Homo sapiens
  misc_RNA (1)...(19): siRNA sense strand
caucaacaauggcuccaaa

SEQ ID NO: 1345866 - RNA, 19 nt, Homo sapiens
  misc_RNA (1)...(19): siRNA sense strand
uaaaucauccuaccauguu

SEQ ID NO: 1345867 - RNA, 19 nt, Homo sapiens
  misc_RNA (1)...(19): siRNA sense strand
gaacacagcccaguuugca

SEQ ID NO: 1345868 - RNA, 19 nt, Homo sapiens
  misc_RNA (1)...(19): siRNA sense strand
uugcugagcuccugaguga

SEQ ID NO: 1345869 - RNA, 19 nt, Homo sapiens
  misc_RNA (1)...(19): siRNA sense strand
aaucagacauuugguuuga

SEQ ID NO: 1345870 - RNA, 19 nt, Homo sapiens
  misc_RNA (1)...(19): siRNA sense strand
agaaccacgugaucaagua

SEQ ID NO: 1345871 - RNA, 19 nt, Homo sapiens
  misc_RNA (1)...(19): siRNA sense strand
ggccaacaaugacuucuuc

SEQ ID NO: 1345872 - RNA, 19 nt, Homo sapiens
  misc_RNA (1)...(19): siRNA sense strand
acaucagucuccaaagaua

SEQ ID NO: 1345873 - RNA, 19 nt, Homo sapiens
  misc_RNA (1)...(19): siRNA sense strand
gcuccugagugacuacauu

SEQ ID NO: 1345874 - RNA, 19 nt, Homo sapiens
  misc_RNA (1)...(19): siRNA sense strand
augagaagcuuuccgagaa

SEQ ID NO: 1345875 - RNA, 19 nt, Homo sapiens
  misc_RNA (1)...(19): siRNA sense strand
ggcaaaggccaucuccuaa

SEQ ID NO: 1345876 - RNA, 19 nt, Homo sapiens
  misc_RNA (1)...(19): siRNA sense strand
gugcuggucuccucaagau

SEQ ID NO: 1345877 - RNA, 19 nt, Homo sapiens
  misc_RNA (1)...(19): siRNA sense strand
aaaucauccuaccauguua

SEQ ID NO: 1345878 - RNA, 19 nt, Homo sapiens
  misc_RNA (1)...(19): siRNA sense strand
ugaaucagacauuugguuu

SEQ ID NO: 1345879 - RNA, 19 nt, Homo sapiens
  misc_RNA (1)...(19): siRNA sense strand
guaaaucauccuaccaugu

SEQ ID NO: 1345880 - RNA, 19 nt, Homo sapiens
  misc_RNA (1)...(19): siRNA sense strand
ccacagaugccgucagcaa

SEQ ID NO: 1345881 - RNA, 19 nt, Homo sapiens
  misc_RNA (1)...(19): siRNA sense strand
ucagagaguucuuggaaaa

SEQ ID NO: 1345882 - RNA, 19 nt, Homo sapiens
  misc_RNA (1)...(19): siRNA sense strand
ccaaggacuucaagaacca

SEQ ID NO: 1345883 - RNA, 19 nt, Homo sapiens
  misc_RNA (1)...(19): siRNA sense strand
ugauacgguuugagaaaga

SEQ ID NO: 1345884 - RNA, 19 nt, Homo sapiens
  misc_RNA (1)...(19): siRNA sense strand
gaacaggccaacaaugacu

SEQ ID NO: 1345885 - RNA, 19 nt, Homo sapiens
  misc_RNA (1)...(19): siRNA sense strand
gaaucagacauuugguuug

SEQ ID NO: 1345886 - RNA, 19 nt, Homo sapiens
  misc_RNA (1)...(19): siRNA sense strand
cgucagagaguucuuggaa

SEQ ID NO: 1345887 - RNA, 19 nt, Homo sapiens
  misc_RNA (1)...(19): siRNA sense strand
agaaagagaaauccaagga

SEQ ID NO: 1345888 - RNA, 19 nt, Homo sapiens
  misc_RNA (1)...(19): siRNA sense strand
caaagagucuagccaugcu

SEQ ID NO: 1345889 - RNA, 19 nt, Homo sapiens
  misc_RNA (1)...(19): siRNA sense strand
ggaaacugcaugcuguugu

SEQ ID NO: 1345890 - RNA, 19 nt, Homo sapiens
  misc_RNA (1)...(19): siRNA sense strand
auaacuacaucccuucuuc

SEQ ID NO: 1345891 - RNA, 19 nt, Homo sapiens
  misc_RNA (1)...(19): siRNA sense strand
ucaagaaccacgugaucaa

SEQ ID NO: 1345892 - RNA, 19 nt, Homo sapiens
  misc_RNA (1)...(19): siRNA sense strand
gugacuuucugggucuuua

SEQ ID NO: 1345893 - RNA, 19 nt, Homo sapiens
  misc_RNA (1)...(19): siRNA sense strand
ucgggugacucaauaugaa

SEQ ID NO: 1345894 - RNA, 19 nt, Homo sapiens
  misc_RNA (1)...(19): siRNA sense strand
aggaacaggccaacaauga

SEQ ID NO: 1345895 - RNA, 19 nt, Homo sapiens
  misc_RNA (1)...(19): siRNA sense strand
ccuacaaaguuacaacaca

SEQ ID NO: 1345896 - RNA, 19 nt, Homo sapiens
  misc_RNA (1)...(19): siRNA sense strand
gucagagaguucuuggaaa

SEQ ID NO: 1345897 - RNA, 19 nt, Homo sapiens
  misc_RNA (1)...(19): siRNA sense strand
gaagauuuagugacuuucu

SEQ ID NO: 1345898 - RNA, 19 nt, Homo sapiens
  misc_RNA (1)...(19): siRNA sense strand
uccaggagguagaguguga

SEQ ID NO: 1345899 - RNA, 19 nt, Homo sapiens
  misc_RNA (1)...(19): siRNA sense strand
agacacuccuuuacucaca

SEQ ID NO: 1345900 - RNA, 19 nt, Homo sapiens
  misc_RNA (1)...(19): siRNA sense strand
gaaauccaaggacuucaag

SEQ ID NO: 1345901 - RNA, 19 nt, Homo sapiens
  misc_RNA (1)...(19): siRNA sense strand
acacagcccaguuugcaaa

SEQ ID NO: 1345902 - RNA, 19 nt, Homo sapiens
  misc_RNA (1)...(19): siRNA sense strand
acagacaagcuuaccauug

SEQ ID NO: 1345903 - RNA, 19 nt, Homo sapiens
  misc_RNA (1)...(19): siRNA sense strand
aggcaaaggccaucuccua

SEQ ID NO: 1345904 - RNA, 19 nt, Homo sapiens
  misc_RNA (1)...(19): siRNA sense strand
caucagucuccaaagauaa

SEQ ID NO: 1345905 - RNA, 19 nt, Homo sapiens
  misc_RNA (1)...(19): siRNA sense strand
ugggauccaugaagaacaa

SEQ ID NO: 1345906 - RNA, 19 nt, Homo sapiens
  misc_RNA (1)...(19): siRNA sense strand
cuccaaagauaacuacauc

SEQ ID NO: 1345907 - RNA, 19 nt, Homo sapiens
  misc_RNA (1)...(19): siRNA sense strand
ucgagaggauuucaacagu

SEQ ID NO: 1345908 - RNA, 19 nt, Homo sapiens
  misc_RNA (1)...(19): siRNA sense strand
acauuugguuugaggagaa

SEQ ID NO: 1345909 - RNA, 19 nt, Homo sapiens
  misc_RNA (1)...(19): siRNA sense strand
caacagugguccgaaaaga

SEQ ID NO: 1345910 - RNA, 19 nt, Homo sapiens
  misc_RNA (1)...(19): siRNA sense strand
ucaacaauggcuccaaaga

SEQ ID NO: 1345911 - RNA, 19 nt, Homo sapiens
  misc_RNA (1)...(19): siRNA sense strand
aaacucuagucaaccauag

SEQ ID NO: 1345912 - RNA, 19 nt, Homo sapiens
  misc_RNA (1)...(19): siRNA sense strand
gcuggucuccucaagaugu

SEQ ID NO: 1345913 - RNA, 19 nt, Homo sapiens
  misc_RNA (1)...(19): siRNA sense strand
ugagaagcuuuccgagaag

SEQ ID NO: 1345914 - RNA, 19 nt, Homo sapiens
  misc_RNA (1)...(19): siRNA sense strand
gugauacgguuugagaaag

SEQ ID NO: 1345915 - RNA, 19 nt, Homo sapiens
  misc_RNA (1)...(19): siRNA sense strand
gcaaaaugaccaucaagau

SEQ ID NO: 1345916 - RNA, 19 nt, Homo sapiens
  misc_RNA (1)...(19): siRNA sense strand
aaagaagugauacgguuug

SEQ ID NO: 1345917 - RNA, 19 nt, Homo sapiens
  misc_RNA (1)...(19): siRNA sense strand
ggagcagcgcuuacggaaa

SEQ ID NO: 1345918 - RNA, 19 nt, Homo sapiens
  misc_RNA (1)...(19): siRNA sense strand
aaaguuacaacacagacaa

SEQ ID NO: 1345919 - RNA, 19 nt, Homo sapiens
  misc_RNA (1)...(19): siRNA sense strand
gauaacuacaucccuucuu

SEQ ID NO: 1345920 - RNA, 19 nt, Homo sapiens
  misc_RNA (1)...(19): siRNA sense strand
ucaagaugaaugaaucaga

SEQ ID NO: 1345921 - RNA, 19 nt, Homo sapiens
  misc_RNA (1)...(19): siRNA sense strand
uuacaacacagacaagcuu

SEQ ID NO: 1345922 - RNA, 19 nt, Homo sapiens
  misc_RNA (1)...(19): siRNA sense strand
uggcugagguggaagaaaa

SEQ ID NO: 1345923 - RNA, 19 nt, Homo sapiens
  misc_RNA (1)...(19): siRNA sense strand
aauccaaggacuucaagaa

SEQ ID NO: 1345924 - RNA, 19 nt, Homo sapiens
  misc_RNA (1)...(19): siRNA sense strand
aagaagugauacgguuuga

SEQ ID NO: 1345925 - RNA, 19 nt, Homo sapiens
  misc_RNA (1)...(19): siRNA sense strand
ccaugaagaacaagaccaa

SEQ ID NO: 1345926 - RNA, 19 nt, Homo sapiens
  misc_RNA (1)...(19): siRNA sense strand
agugaaaguugggaaggaa

SEQ ID NO: 1345927 - RNA, 19 nt, Homo sapiens
  misc_RNA (1)...(19): siRNA sense strand
ggaacaggccaacaaugac

SEQ ID NO: 1345928 - RNA, 19 nt, Homo sapiens
  misc_RNA (1)...(19): siRNA sense strand
acugcaugcuguuguagaa

SEQ ID NO: 1345929 - RNA, 19 nt, Homo sapiens
  misc_RNA (1)...(19): siRNA sense strand
gaaaguugggaaggaagau

SEQ ID NO: 1345930 - RNA, 19 nt, Homo sapiens
  misc_RNA (1)...(19): siRNA sense strand
agagaaauccaaggacuuc

SEQ ID NO: 1345931 - RNA, 19 nt, Homo sapiens
  misc_RNA (1)...(19): siRNA sense strand
ugaagaacaagaccaagag

SEQ ID NO: 1345932 - RNA, 19 nt, Homo sapiens
  misc_RNA (1)...(19): siRNA sense strand
ccaggaacaggccaacaau

SEQ ID NO: 1345933 - RNA, 19 nt, Homo sapiens
  misc_RNA (1)...(19): siRNA sense strand
uacaacacagacaagcuua

SEQ ID NO: 1345934 - RNA, 19 nt, Homo sapiens
  misc_RNA (1)...(19): siRNA sense strand
gccacaggaucucuuugca

SEQ ID NO: 1345935 - RNA, 19 nt, Homo sapiens
  misc_RNA (1)...(19): siRNA sense strand
cacagaugccgucagcaaa

SEQ ID NO: 1345936 - RNA, 19 nt, Homo sapiens
  misc_RNA (1)...(19): siRNA sense strand
caaaguuacaacacagaca

SEQ ID NO: 1345937 - RNA, 19 nt, Homo sapiens
  misc_RNA (1)...(19): siRNA sense strand
cagcccaguuugcaaagag

SEQ ID NO: 1345938 - RNA, 19 nt, Homo sapiens
  misc_RNA (1)...(19): siRNA sense strand
ugaaaguugggaaggaaga

SEQ ID NO: 1345939 - RNA, 19 nt, Homo sapiens
  misc_RNA (1)...(19): siRNA sense strand
gaaccacgugaucaaguac

SEQ ID NO: 1345940 - RNA, 19 nt, Homo sapiens
  misc_RNA (1)...(19): siRNA sense strand
agaaauccaaggacuucaa

SEQ ID NO: 1345941 - RNA, 19 nt, Homo sapiens
  misc_RNA (1)...(19): siRNA sense strand
uaccuucagaggauuguaa

SEQ ID NO: 1345942 - RNA, 19 nt, Homo sapiens
  misc_RNA (1)...(19): siRNA sense strand
caagaaccacgugaucaag

SEQ ID NO: 1345943 - RNA, 19 nt, Homo sapiens
  misc_RNA (1)...(19): siRNA sense strand
gguuugagaaagagaaauc

SEQ ID NO: 1345944 - RNA, 19 nt, Homo sapiens
  misc_RNA (1)...(19): siRNA sense strand
gauacgguuugagaaagag

SEQ ID NO: 1345945 - RNA, 19 nt, Homo sapiens
  misc_RNA (1)...(19): siRNA sense strand
agugauacgguuugagaaa

SEQ ID NO: 1345946 - RNA, 19 nt, Homo sapiens
  misc_RNA (1)...(19): siRNA sense strand
gcaugcuguuguagaaacu

SEQ ID NO: 1345947 - RNA, 19 nt, Homo sapiens
  misc_RNA (1)...(19): siRNA sense strand
gcugagcuccugagugacu

SEQ ID NO: 1345948 - RNA, 19 nt, Homo sapiens
  misc_RNA (1)...(19): siRNA sense strand
uugagacacuccuuuacuc

SEQ ID NO: 1345949 - RNA, 19 nt, Homo sapiens
  misc_RNA (1)...(19): siRNA sense strand
gaggugguguccauucaaa

SEQ ID NO: 1345950 - RNA, 19 nt, Homo sapiens
  misc_RNA (1)...(19): siRNA sense strand
gaaggugucucggaagauc

SEQ ID NO: 1345951 - RNA, 19 nt, Homo sapiens
  misc_RNA (1)...(19): siRNA sense strand
ggacagcaaauacauccua

SEQ ID NO: 1345952 - RNA, 19 nt, Homo sapiens
  misc_RNA (1)...(19): siRNA sense strand
ggacaauacucuucuucag

SEQ ID NO: 1345953 - RNA, 19 nt, Homo sapiens
  misc_RNA (1)...(19): siRNA sense strand
cgacggcccugugcaauau

SEQ ID NO: 1345954 - RNA, 19 nt, Homo sapiens
  misc_RNA (1)...(19): siRNA sense strand
gucuagagcuguucauuca

SEQ ID NO: 1345955 - RNA, 19 nt, Homo sapiens
  misc_RNA (1)...(19): siRNA sense strand
ggaugacccugaguauaga

SEQ ID NO: 1345956 - RNA, 19 nt, Homo sapiens
  misc_RNA (1)...(19): siRNA sense strand
uuucauuccugccuuguaa

SEQ ID NO: 1345957 - RNA, 19 nt, Homo sapiens
  misc_RNA (1)...(19): siRNA sense strand
agaugucucucuucaguau

SEQ ID NO: 1345958 - RNA, 19 nt, Homo sapiens
  misc_RNA (1)...(19): siRNA sense strand
acagagaccuggagagcau

SEQ ID NO: 1345959 - RNA, 19 nt, Homo sapiens
  misc_RNA (1)...(19): siRNA sense strand
ggaggacgcugaggagcau

SEQ ID NO: 1345960 - RNA, 19 nt, Homo sapiens
  misc_RNA (1)...(19): siRNA sense strand
ugguguccauucaaaguua

SEQ ID NO: 1345961 - RNA, 19 nt, Homo sapiens
  misc_RNA (1)...(19): siRNA sense strand
agacggaggugguguccau

SEQ ID NO: 1345962 - RNA, 19 nt, Homo sapiens
  misc_RNA (1)...(19): siRNA sense strand
uggaaggugucucggaaga

SEQ ID NO: 1345963 - RNA, 19 nt, Homo sapiens
  misc_RNA (1)...(19): siRNA sense strand
ggagggacagcaaauacau

SEQ ID NO: 1345964 - RNA, 19 nt, Homo sapiens
  misc_RNA (1)...(19): siRNA sense strand
cagcaaauacauccuacga

SEQ ID NO: 1345965 - RNA, 19 nt, Homo sapiens
  misc_RNA (1)...(19): siRNA sense strand
aggaugacccugaguauag

SEQ ID NO: 1345966 - RNA, 19 nt, Homo sapiens
  misc_RNA (1)...(19): siRNA sense strand
ucucuucaguauuucauuc

SEQ ID NO: 1345967 - RNA, 19 nt, Homo sapiens
  misc_RNA (1)...(19): siRNA sense strand
cggcaaaggcugucuagag

SEQ ID NO: 1345968 - RNA, 19 nt, Homo sapiens
  misc_RNA (1)...(19): siRNA sense strand
gaaguuucgcgccaagauc

SEQ ID NO: 1345969 - RNA, 19 nt, Homo sapiens
  misc_RNA (1)...(19): siRNA sense strand
gggacaauacucuucuuca

SEQ ID NO: 1345970 - RNA, 19 nt, Homo sapiens
  misc_RNA (1)...(19): siRNA sense strand
gguguccauucaaaguuau

SEQ ID NO: 1345971 - RNA, 19 nt, Homo sapiens
  misc_RNA (1)...(19): siRNA sense strand
cggaggugguguccauuca

SEQ ID NO: 1345972 - RNA, 19 nt, Homo sapiens
  misc_RNA (1)...(19): siRNA sense strand
ccagcaguuucgcauggaa

SEQ ID NO: 1345973 - RNA, 19 nt, Homo sapiens
  misc_RNA (1)...(19): siRNA sense strand
ggaggugguguccauucaa

SEQ ID NO: 1345974 - RNA, 19 nt, Homo sapiens
  misc_RNA (1)...(19): siRNA sense strand
aucggaagcuucugcaguu

SEQ ID NO: 1345975 - RNA, 19 nt, Homo sapiens
  misc_RNA (1)...(19): siRNA sense strand
ggagcaucguggagaggau

SEQ ID NO: 1345976 - RNA, 19 nt, Homo sapiens
  misc_RNA (1)...(19): siRNA sense strand
augucucucuucaguauuu

SEQ ID NO: 1345977 - RNA, 19 nt, Homo sapiens
  misc_RNA (1)...(19): siRNA sense strand
gguggaagcaaaccucagu

SEQ ID NO: 1345978 - RNA, 19 nt, Homo sapiens
  misc_RNA (1)...(19): siRNA sense strand
ggugguguccauucaaagu

SEQ ID NO: 1345979 - RNA, 19 nt, Homo sapiens
  misc_RNA (1)...(19): siRNA sense strand
caauacucuucuucagcuu

SEQ ID NO: 1345980 - RNA, 19 nt, Homo sapiens
  misc_RNA (1)...(19): siRNA sense strand
gguggacaaucggaagcuu

SEQ ID NO: 1345981 - RNA, 19 nt, Homo sapiens
  misc_RNA (1)...(19): siRNA sense strand
ucucggaagaucucgauga

SEQ ID NO: 1345982 - RNA, 19 nt, Homo sapiens
  misc_RNA (1)...(19): siRNA sense strand
ucggaagcuucugcaguuu

SEQ ID NO: 1345983 - RNA, 19 nt, Homo sapiens
  misc_RNA (1)...(19): siRNA sense strand
gcaagugcggguggacaau

SEQ ID NO: 1345984 - RNA, 19 nt, Homo sapiens
  misc_RNA (1)...(19): siRNA sense strand
cuacgacggcccugugcaa

SEQ ID NO: 1345985 - RNA, 19 nt, Homo sapiens
  misc_RNA (1)...(19): siRNA sense strand
ggaaagagcuagcgcugaa

SEQ ID NO: 1345986 - RNA, 19 nt, Homo sapiens
  misc_RNA (1)...(19): siRNA sense strand
gaaacugcaugcuguugua

SEQ ID NO: 1345987 - RNA, 19 nt, Homo sapiens
  misc_RNA (1)...(19): siRNA sense strand
aaacaucagucuccaaaga

SEQ ID NO: 1345988 - RNA, 19 nt, Homo sapiens
  misc_RNA (1)...(19): siRNA sense strand
gagcagcgcuuacggaaac

SEQ ID NO: 1345989 - RNA, 19 nt, Homo sapiens
  misc_RNA (1)...(19): siRNA sense strand
gaagugauacgguuugaga

SEQ ID NO: 1345990 - RNA, 19 nt, Homo sapiens
  misc_RNA (1)...(19): siRNA sense strand
aacaauggcuccaaagaaa

SEQ ID NO: 1345991 - RNA, 19 nt, Homo sapiens
  misc_RNA (1)...(19): siRNA sense strand
caacaauggcuccaaagaa

SEQ ID NO: 1345992 - RNA, 19 nt, Homo sapiens
  misc_RNA (1)...(19): siRNA sense strand
gaaacucuagucaaccaua

SEQ ID NO: 1345993 - RNA, 19 nt, Homo sapiens
  misc_RNA (1)...(19): siRNA sense strand
guaaacaucagucuccaaa

SEQ ID NO: 1345994 - RNA, 19 nt, Homo sapiens
  misc_RNA (1)...(19): siRNA sense strand
caucaacaauggcuccaaa

SEQ ID NO: 1345995 - RNA, 19 nt, Homo sapiens
  misc_RNA (1)...(19): siRNA sense strand
uaaaucauccuaccauguu

SEQ ID NO: 1345996 - RNA, 19 nt, Homo sapiens
  misc_RNA (1)...(19): siRNA sense strand
gaacacagcccaguuugca

SEQ ID NO: 1345997 - RNA, 19 nt, Homo sapiens
  misc_RNA (1)...(19): siRNA sense strand
uugcugagcuccugaguga

SEQ ID NO: 1345998 - RNA, 19 nt, Homo sapiens
  misc_RNA (1)...(19): siRNA sense strand
aaucagacauuugguuuga

SEQ ID NO: 1345999 - RNA, 19 nt, Homo sapiens
  misc_RNA (1)...(19): siRNA sense strand
agaaccacgugaucaagua

SEQ ID NO: 1346000 - RNA, 19 nt, Homo sapiens
  misc_RNA (1)...(19): siRNA sense strand
ggccaacaaugacuucuuc

SEQ ID NO: 1346001 - RNA, 19 nt, Homo sapiens
  misc_RNA (1)...(19): siRNA sense strand
acaucagucuccaaagaua

SEQ ID NO: 1346002 - RNA, 19 nt, Homo sapiens
  misc_RNA (1)...(19): siRNA sense strand
gcuccugagugacuacauu

SEQ ID NO: 1346003 - RNA, 19 nt, Homo sapiens
  misc_RNA (1)...(19): siRNA sense strand
augagaagcuuuccgagaa

SEQ ID NO: 1346004 - RNA, 19 nt, Homo sapiens
  misc_RNA (1)...(19): siRNA sense strand
ggcaaaggccaucuccuaa

SEQ ID NO: 1346005 - RNA, 19 nt, Homo sapiens
  misc_RNA (1)...(19): siRNA sense strand
gugcuggucuccucaagau

SEQ ID NO: 1346006 - RNA, 19 nt, Homo sapiens
  misc_RNA (1)...(19): siRNA sense strand
aaaucauccuaccauguua

SEQ ID NO: 1346007 - RNA, 19 nt, Homo sapiens
  misc_RNA (1)...(19): siRNA sense strand
ugaaucagacauuugguuu

SEQ ID NO: 1346008 - RNA, 19 nt, Homo sapiens
  misc_RNA (1)...(19): siRNA sense strand
guaaaucauccuaccaugu

SEQ ID NO: 1346009 - RNA, 19 nt, Homo sapiens
  misc_RNA (1)...(19): siRNA sense strand
ccacagaugccgucagcaa

SEQ ID NO: 1346010 - RNA, 19 nt, Homo sapiens
  misc_RNA (1)...(19): siRNA sense strand
ucagagaguucuuggaaaa

SEQ ID NO: 1346011 - RNA, 19 nt, Homo sapiens
  misc_RNA (1)...(19): siRNA sense strand
ccaaggacuucaagaacca

SEQ ID NO: 1346012 - RNA, 19 nt, Homo sapiens
  misc_RNA (1)...(19): siRNA sense strand
ugauacgguuugagaaaga

SEQ ID NO: 1346013 - RNA, 19 nt, Homo sapiens
  misc_RNA (1)...(19): siRNA sense strand
gaacaggccaacaaugacu

SEQ ID NO: 1346014 - RNA, 19 nt, Homo sapiens
  misc_RNA (1)...(19): siRNA sense strand
gaaucagacauuugguuug

SEQ ID NO: 1346015 - RNA, 19 nt, Homo sapiens
  misc_RNA (1)...(19): siRNA sense strand
cgucagagaguucuuggaa

SEQ ID NO: 1346016 - RNA, 19 nt, Homo sapiens
  misc_RNA (1)...(19): siRNA sense strand
agaaagagaaauccaagga

SEQ ID NO: 1346017 - RNA, 19 nt, Homo sapiens
  misc_RNA (1)...(19): siRNA sense strand
caaagagucuagccaugcu

SEQ ID NO: 1346018 - RNA, 19 nt, Homo sapiens
  misc_RNA (1)...(19): siRNA sense strand
ggaaacugcaugcuguugu

SEQ ID NO: 1346019 - RNA, 19 nt, Homo sapiens
  misc_RNA (1)...(19): siRNA sense strand
auaacuacaucccuucuuc

SEQ ID NO: 1346020 - RNA, 19 nt, Homo sapiens
  misc_RNA (1)...(19): siRNA sense strand
ucaagaaccacgugaucaa

SEQ ID NO: 1346021 - RNA, 19 nt, Homo sapiens
  misc_RNA (1)...(19): siRNA sense strand
gugacuuucugggucuuua

SEQ ID NO: 1346022 - RNA, 19 nt, Homo sapiens
  misc_RNA (1)...(19): siRNA sense strand
ucgggugacucaauaugaa

SEQ ID NO: 1346023 - RNA, 19 nt, Homo sapiens
  misc_RNA (1)...(19): siRNA sense strand
aggaacaggccaacaauga

SEQ ID NO: 1346024 - RNA, 19 nt, Homo sapiens
  misc_RNA (1)...(19): siRNA sense strand
ccuacaaaguuacaacaca

SEQ ID NO: 1346025 - RNA, 19 nt, Homo sapiens
  misc_RNA (1)...(19): siRNA sense strand
gucagagaguucuuggaaa

SEQ ID NO: 1346026 - RNA, 19 nt, Homo sapiens
  misc_RNA (1)...(19): siRNA sense strand
gaagauuuagugacuuucu

SEQ ID NO: 1346027 - RNA, 19 nt, Homo sapiens
  misc_RNA (1)...(19): siRNA sense strand
uccaggagguagaguguga

SEQ ID NO: 1346028 - RNA, 19 nt, Homo sapiens
  misc_RNA (1)...(19): siRNA sense strand
agacacuccuuuacucaca

SEQ ID NO: 1346029 - RNA, 19 nt, Homo sapiens
  misc_RNA (1)...(19): siRNA sense strand
gaaauccaaggacuucaag

SEQ ID NO: 1346030 - RNA, 19 nt, Homo sapiens
  misc_RNA (1)...(19): siRNA sense strand
acacagcccaguuugcaaa

SEQ ID NO: 1346031 - RNA, 19 nt, Homo sapiens
  misc_RNA (1)...(19): siRNA sense strand
acagacaagcuuaccauug

SEQ ID NO: 1346032 - RNA, 19 nt, Homo sapiens
  misc_RNA (1)...(19): siRNA sense strand
aggcaaaggccaucuccua

SEQ ID NO: 1346033 - RNA, 19 nt, Homo sapiens
  misc_RNA (1)...(19): siRNA sense strand
caucagucuccaaagauaa

SEQ ID NO: 1346034 - RNA, 19 nt, Homo sapiens
  misc_RNA (1)...(19): siRNA sense strand
ugggauccaugaagaacaa

SEQ ID NO: 1346035 - RNA, 19 nt, Homo sapiens
  misc_RNA (1)...(19): siRNA sense strand
cuccaaagauaacuacauc

SEQ ID NO: 1346036 - RNA, 19 nt, Homo sapiens
  misc_RNA (1)...(19): siRNA sense strand
ucgagaggauuucaacagu

SEQ ID NO: 1346037 - RNA, 19 nt, Homo sapiens
  misc_RNA (1)...(19): siRNA sense strand
acauuugguuugaggagaa

SEQ ID NO: 1346038 - RNA, 19 nt, Homo sapiens
  misc_RNA (1)...(19): siRNA sense strand
caacagugguccgaaaaga

SEQ ID NO: 1346039 - RNA, 19 nt, Homo sapiens
  misc_RNA (1)...(19): siRNA sense strand
ucaacaauggcuccaaaga

SEQ ID NO: 1346040 - RNA, 19 nt, Homo sapiens
  misc_RNA (1)...(19): siRNA sense strand
aaacucuagucaaccauag

SEQ ID NO: 1346041 - RNA, 19 nt, Homo sapiens
  misc_RNA (1)...(19): siRNA sense strand
gcuggucuccucaagaugu

SEQ ID NO: 1346042 - RNA, 19 nt, Homo sapiens
  misc_RNA (1)...(19): siRNA sense strand
ugagaagcuuuccgagaag

SEQ ID NO: 1346043 - RNA, 19 nt, Homo sapiens
  misc_RNA (1)...(19): siRNA sense strand
gugauacgguuugagaaag

SEQ ID NO: 1346044 - RNA, 19 nt, Homo sapiens
  misc_RNA (1)...(19): siRNA sense strand
gcaaaaugaccaucaagau

SEQ ID NO: 1346045 - RNA, 19 nt, Homo sapiens
  misc_RNA (1)...(19): siRNA sense strand
aaagaagugauacgguuug

SEQ ID NO: 1346046 - RNA, 19 nt, Homo sapiens
  misc_RNA (1)...(19): siRNA sense strand
ggagcagcgcuuacggaaa

SEQ ID NO: 1346047 - RNA, 19 nt, Homo sapiens
  misc_RNA (1)...(19): siRNA sense strand
aaaguuacaacacagacaa

SEQ ID NO: 1346048 - RNA, 19 nt, Homo sapiens
  misc_RNA (1)...(19): siRNA sense strand
gauaacuacaucccuucuu

SEQ ID NO: 1346049 - RNA, 19 nt, Homo sapiens
  misc_RNA (1)...(19): siRNA sense strand
ucaagaugaaugaaucaga

SEQ ID NO: 1346050 - RNA, 19 nt, Homo sapiens
  misc_RNA (1)...(19): siRNA sense strand
uuacaacacagacaagcuu

SEQ ID NO: 1346051 - RNA, 19 nt, Homo sapiens
  misc_RNA (1)...(19): siRNA sense strand
uggcugagguggaagaaaa

SEQ ID NO: 1346052 - RNA, 19 nt, Homo sapiens
  misc_RNA (1)...(19): siRNA sense strand
aauccaaggacuucaagaa

SEQ ID NO: 1346053 - RNA, 19 nt, Homo sapiens
  misc_RNA (1)...(19): siRNA sense strand
aagaagugauacgguuuga

SEQ ID NO: 1346054 - RNA, 19 nt, Homo sapiens
  misc_RNA (1)...(19): siRNA sense strand
ccaugaagaacaagaccaa

SEQ ID NO: 1346055 - RNA, 19 nt, Homo sapiens
  misc_RNA (1)...(19): siRNA sense strand
agugaaaguugggaaggaa

SEQ ID NO: 1346056 - RNA, 19 nt, Homo sapiens
  misc_RNA (1)...(19): siRNA sense strand
ggaacaggccaacaaugac

SEQ ID NO: 1346057 - RNA, 19 nt, Homo sapiens
  misc_RNA (1)...(19): siRNA sense strand
acugcaugcuguuguagaa

SEQ ID NO: 1346058 - RNA, 19 nt, Homo sapiens
  misc_RNA (1)...(19): siRNA sense strand
gaaaguugggaaggaagau

SEQ ID NO: 1346059 - RNA, 19 nt, Homo sapiens
  misc_RNA (1)...(19): siRNA sense strand
agagaaauccaaggacuuc

SEQ ID NO: 1346060 - RNA, 19 nt, Homo sapiens
  misc_RNA (1)...(19): siRNA sense strand
ugaagaacaagaccaagag

SEQ ID NO: 1346061 - RNA, 19 nt, Homo sapiens
  misc_RNA (1)...(19): siRNA sense strand
ccaggaacaggccaacaau

SEQ ID NO: 1346062 - RNA, 19 nt, Homo sapiens
  misc_RNA (1)...(19): siRNA sense strand
uacaacacagacaagcuua

SEQ ID NO: 1346063 - RNA, 19 nt, Homo sapiens
  misc_RNA (1)...(19): siRNA sense strand
gccacaggaucucuuugca

SEQ ID NO: 1346064 - RNA, 19 nt, Homo sapiens
  misc_RNA (1)...(19): siRNA sense strand
cacagaugccgucagcaaa

SEQ ID NO: 1346065 - RNA, 19 nt, Homo sapiens
  misc_RNA (1)...(19): siRNA sense strand
caaaguuacaacacagaca

SEQ ID NO: 1346066 - RNA, 19 nt, Homo sapiens
  misc_RNA (1)...(19): siRNA sense strand
cagcccaguuugcaaagag

SEQ ID NO: 1346067 - RNA, 19 nt, Homo sapiens
  misc_RNA (1)...(19): siRNA sense strand
ugaaaguugggaaggaaga

SEQ ID NO: 1346068 - RNA, 19 nt, Homo sapiens
  misc_RNA (1)...(19): siRNA sense strand
gaaccacgugaucaaguac

SEQ ID NO: 1346069 - RNA, 19 nt, Homo sapiens
  misc_RNA (1)...(19): siRNA sense strand
agaaauccaaggacuucaa

SEQ ID NO: 1346070 - RNA, 19 nt, Homo sapiens
  misc_RNA (1)...(19): siRNA sense strand
uaccuucagaggauuguaa

SEQ ID NO: 1346071 - RNA, 19 nt, Homo sapiens
  misc_RNA (1)...(19): siRNA sense strand
caagaaccacgugaucaag

SEQ ID NO: 1346072 - RNA, 19 nt, Homo sapiens
  misc_RNA (1)...(19): siRNA sense strand
gguuugagaaagagaaauc

SEQ ID NO: 1346073 - RNA, 19 nt, Homo sapiens
  misc_RNA (1)...(19): siRNA sense strand
gauacgguuugagaaagag

SEQ ID NO: 1346074 - RNA, 19 nt, Homo sapiens
  misc_RNA (1)...(19): siRNA sense strand
agugauacgguuugagaaa

SEQ ID NO: 1346075 - RNA, 19 nt, Homo sapiens
  misc_RNA (1)...(19): siRNA sense strand
gcaugcuguuguagaaacu

SEQ ID NO: 1346076 - RNA, 19 nt, Homo sapiens
  misc_RNA (1)...(19): siRNA sense strand
gcugagcuccugagugacu

SEQ ID NO: 1346077 - RNA, 19 nt, Homo sapiens
  misc_RNA (1)...(19): siRNA sense strand
uugagacacuccuuuacuc

SEQ ID NO: 1346078 - RNA, 19 nt, Homo sapiens
  misc_RNA (1)...(19): siRNA sense strand
ggaaagagcuagcgcugaa

SEQ ID NO: 1346079 - RNA, 19 nt, Homo sapiens
  misc_RNA (1)...(19): siRNA sense strand
gaaacugcaugcuguugua

SEQ ID NO: 1346080 - RNA, 19 nt, Homo sapiens
  misc_RNA (1)...(19): siRNA sense strand
aaacaucagucuccaaaga

SEQ ID NO: 1346081 - RNA, 19 nt, Homo sapiens
  misc_RNA (1)...(19): siRNA sense strand
gagcagcgcuuacggaaac

SEQ ID NO: 1346082 - RNA, 19 nt, Homo sapiens
  misc_RNA (1)...(19): siRNA sense strand
gaagugauacgguuugaga

SEQ ID NO: 1346083 - RNA, 19 nt, Homo sapiens
  misc_RNA (1)...(19): siRNA sense strand
aacaauggcuccaaagaaa

SEQ ID NO: 1346084 - RNA, 19 nt, Homo sapiens
  misc_RNA (1)...(19): siRNA sense strand
caacaauggcuccaaagaa

SEQ ID NO: 1346085 - RNA, 19 nt, Homo sapiens
  misc_RNA (1)...(19): siRNA sense strand
gaaacucuagucaaccaua

SEQ ID NO: 1346086 - RNA, 19 nt, Homo sapiens
  misc_RNA (1)...(19): siRNA sense strand
guaaacaucagucuccaaa

SEQ ID NO: 1346087 - RNA, 19 nt, Homo sapiens
  misc_RNA (1)...(19): siRNA sense strand
caucaacaauggcuccaaa

SEQ ID NO: 1346088 - RNA, 19 nt, Homo sapiens
  misc_RNA (1)...(19): siRNA sense strand
uaaaucauccuaccauguu

SEQ ID NO: 1346089 - RNA, 19 nt, Homo sapiens
  misc_RNA (1)...(19): siRNA sense strand
gaacacagcccaguuugca

SEQ ID NO: 1346090 - RNA, 19 nt, Homo sapiens
  misc_RNA (1)...(19): siRNA sense strand
uugcugagcuccugaguga

SEQ ID NO: 1346091 - RNA, 19 nt, Homo sapiens
  misc_RNA (1)...(19): siRNA sense strand
aaucagacauuugguuuga

SEQ ID NO: 1346092 - RNA, 19 nt, Homo sapiens
  misc_RNA (1)...(19): siRNA sense strand
agaaccacgugaucaagua

SEQ ID NO: 1346093 - RNA, 19 nt, Homo sapiens
  misc_RNA (1)...(19): siRNA sense strand
ggccaacaaugacuucuuc

SEQ ID NO: 1346094 - RNA, 19 nt, Homo sapiens
  misc_RNA (1)...(19): siRNA sense strand
acaucagucuccaaagaua

SEQ ID NO: 1346095 - RNA, 19 nt, Homo sapiens
  misc_RNA (1)...(19): siRNA sense strand
gcuccugagugacuacauu

SEQ ID NO: 1346096 - RNA, 19 nt, Homo sapiens
  misc_RNA (1)...(19): siRNA sense strand
augagaagcuuuccgagaa

SEQ ID NO: 1346097 - RNA, 19 nt, Homo sapiens
  misc_RNA (1)...(19): siRNA sense strand
ggcaaaggccaucuccuaa

SEQ ID NO: 1346098 - RNA, 19 nt, Homo sapiens
  misc_RNA (1)...(19): siRNA sense strand
gugcuggucuccucaagau

SEQ ID NO: 1346099 - RNA, 19 nt, Homo sapiens
  misc_RNA (1)...(19): siRNA sense strand
aaaucauccuaccauguua

SEQ ID NO: 1346100 - RNA, 19 nt, Homo sapiens
  misc_RNA (1)...(19): siRNA sense strand
ugaaucagacauuugguuu

SEQ ID NO: 1346101 - RNA, 19 nt, Homo sapiens
  misc_RNA (1)...(19): siRNA sense strand
guaaaucauccuaccaugu

SEQ ID NO: 1346102 - RNA, 19 nt, Homo sapiens
  misc_RNA (1)...(19): siRNA sense strand
ccacagaugccgucagcaa

SEQ ID NO: 1346103 - RNA, 19 nt, Homo sapiens
  misc_RNA (1)...(19): siRNA sense strand
ucagagaguucuuggaaaa

SEQ ID NO: 1346104 - RNA, 19 nt, Homo sapiens
  misc_RNA (1)...(19): siRNA sense strand
ccaaggacuucaagaacca

SEQ ID NO: 1346105 - RNA, 19 nt, Homo sapiens
  misc_RNA (1)...(19): siRNA sense strand
ugauacgguuugagaaaga

SEQ ID NO: 1346106 - RNA, 19 nt, Homo sapiens
  misc_RNA (1)...(19): siRNA sense strand
gaacaggccaacaaugacu

SEQ ID NO: 1346107 - RNA, 19 nt, Homo sapiens
  misc_RNA (1)...(19): siRNA sense strand
gaaucagacauuugguuug

SEQ ID NO: 1346108 - RNA, 19 nt, Homo sapiens
  misc_RNA (1)...(19): siRNA sense strand
cgucagagaguucuuggaa

SEQ ID NO: 1346109 - RNA, 19 nt, Homo sapiens
  misc_RNA (1)...(19): siRNA sense strand
agaaagagaaauccaagga

SEQ ID NO: 1346110 - RNA, 19 nt, Homo sapiens
  misc_RNA (1)...(19): siRNA sense strand
caaagagucuagccaugcu

SEQ ID NO: 1346111 - RNA, 19 nt, Homo sapiens
  misc_RNA (1)...(19): siRNA sense strand
ggaaacugcaugcuguugu

SEQ ID NO: 1346112 - RNA, 19 nt, Homo sapiens
  misc_RNA (1)...(19): siRNA sense strand
auaacuacaucccuucuuc

SEQ ID NO: 1346113 - RNA, 19 nt, Homo sapiens
  misc_RNA (1)...(19): siRNA sense strand
ucaagaaccacgugaucaa

SEQ ID NO: 1346114 - RNA, 19 nt, Homo sapiens
  misc_RNA (1)...(19): siRNA sense strand
gugacuuucugggucuuua

SEQ ID NO: 1346115 - RNA, 19 nt, Homo sapiens
  misc_RNA (1)...(19): siRNA sense strand
ucgggugacucaauaugaa

SEQ ID NO: 1346116 - RNA, 19 nt, Homo sapiens
  misc_RNA (1)...(19): siRNA sense strand
aggaacaggccaacaauga

SEQ ID NO: 1346117 - RNA, 19 nt, Homo sapiens
  misc_RNA (1)...(19): siRNA sense strand
ccuacaaaguuacaacaca

SEQ ID NO: 1346118 - RNA, 19 nt, Homo sapiens
  misc_RNA (1)...(19): siRNA sense strand
gucagagaguucuuggaaa

SEQ ID NO: 1346119 - RNA, 19 nt, Homo sapiens
  misc_RNA (1)...(19): siRNA sense strand
gaagauuuagugacuuucu

SEQ ID NO: 1346120 - RNA, 19 nt, Homo sapiens
  misc_RNA (1)...(19): siRNA sense strand
uccaggagguagaguguga

SEQ ID NO: 1346121 - RNA, 19 nt, Homo sapiens
  misc_RNA (1)...(19): siRNA sense strand
agacacuccuuuacucaca

SEQ ID NO: 1346122 - RNA, 19 nt, Homo sapiens
  misc_RNA (1)...(19): siRNA sense strand
gaaauccaaggacuucaag

SEQ ID NO: 1346123 - RNA, 19 nt, Homo sapiens
  misc_RNA (1)...(19): siRNA sense strand
acacagcccaguuugcaaa

SEQ ID NO: 1346124 - RNA, 19 nt, Homo sapiens
  misc_RNA (1)...(19): siRNA sense strand
acagacaagcuuaccauug

SEQ ID NO: 1346125 - RNA, 19 nt, Homo sapiens
  misc_RNA (1)...(19): siRNA sense strand
aggcaaaggccaucuccua

SEQ ID NO: 1346126 - RNA, 19 nt, Homo sapiens
  misc_RNA (1)...(19): siRNA sense strand
caucagucuccaaagauaa

SEQ ID NO: 1346127 - RNA, 19 nt, Homo sapiens
  misc_RNA (1)...(19): siRNA sense strand
ugggauccaugaagaacaa

SEQ ID NO: 1346128 - RNA, 19 nt, Homo sapiens
  misc_RNA (1)...(19): siRNA sense strand
cuccaaagauaacuacauc

SEQ ID NO: 1346129 - RNA, 19 nt, Homo sapiens
  misc_RNA (1)...(19): siRNA sense strand
ucgagaggauuucaacagu

SEQ ID NO: 1346130 - RNA, 19 nt, Homo sapiens
  misc_RNA (1)...(19): siRNA sense strand
acauuugguuugaggagaa

SEQ ID NO: 1346131 - RNA, 19 nt, Homo sapiens
  misc_RNA (1)...(19): siRNA sense strand
caacagugguccgaaaaga

SEQ ID NO: 1346132 - RNA, 19 nt, Homo sapiens
  misc_RNA (1)...(19): siRNA sense strand
ucaacaauggcuccaaaga

SEQ ID NO: 1346133 - RNA, 19 nt, Homo sapiens
  misc_RNA (1)...(19): siRNA sense strand
aaacucuagucaaccauag

SEQ ID NO: 1346134 - RNA, 19 nt, Homo sapiens
  misc_RNA (1)...(19): siRNA sense strand
gcuggucuccucaagaugu

SEQ ID NO: 1346135 - RNA, 19 nt, Homo sapiens
  misc_RNA (1)...(19): siRNA sense strand
ugagaagcuuuccgagaag

SEQ ID NO: 1346136 - RNA, 19 nt, Homo sapiens
  misc_RNA (1)...(19): siRNA sense strand
gugauacgguuugagaaag

SEQ ID NO: 1346137 - RNA, 19 nt, Homo sapiens
  misc_RNA (1)...(19): siRNA sense strand
gcaaaaugaccaucaagau

SEQ ID NO: 1346138 - RNA, 19 nt, Homo sapiens
  misc_RNA (1)...(19): siRNA sense strand
aaagaagugauacgguuug

SEQ ID NO: 1346139 - RNA, 19 nt, Homo sapiens
  misc_RNA (1)...(19): siRNA sense strand
ggagcagcgcuuacggaaa

SEQ ID NO: 1346140 - RNA, 19 nt, Homo sapiens
  misc_RNA (1)...(19): siRNA sense strand
aaaguuacaacacagacaa

SEQ ID NO: 1346141 - RNA, 19 nt, Homo sapiens
  misc_RNA (1)...(19): siRNA sense strand
gauaacuacaucccuucuu

SEQ ID NO: 1346142 - RNA, 19 nt, Homo sapiens
  misc_RNA (1)...(19): siRNA sense strand
ucaagaugaaugaaucaga

SEQ ID NO: 1346143 - RNA, 19 nt, Homo sapiens
  misc_RNA (1)...(19): siRNA sense strand
uuacaacacagacaagcuu

SEQ ID NO: 1346144 - RNA, 19 nt, Homo sapiens
  misc_RNA (1)...(19): siRNA sense strand
uggcugagguggaagaaaa

SEQ ID NO: 1346145 - RNA, 19 nt, Homo sapiens
  misc_RNA (1)...(19): siRNA sense strand
aauccaaggacuucaagaa

SEQ ID NO: 1346146 - RNA, 19 nt, Homo sapiens
  misc_RNA (1)...(19): siRNA sense strand
aagaagugauacgguuuga

SEQ ID NO: 1346147 - RNA, 19 nt, Homo sapiens
  misc_RNA (1)...(19): siRNA sense strand
ccaugaagaacaagaccaa

SEQ ID NO: 1346148 - RNA, 19 nt, Homo sapiens
  misc_RNA (1)...(19): siRNA sense strand
agugaaaguugggaaggaa

SEQ ID NO: 1346149 - RNA, 19 nt, Homo sapiens
  misc_RNA (1)...(19): siRNA sense strand
ggaacaggccaacaaugac

SEQ ID NO: 1346150 - RNA, 19 nt, Homo sapiens
  misc_RNA (1)...(19): siRNA sense strand
acugcaugcuguuguagaa

SEQ ID NO: 1346151 - RNA, 19 nt, Homo sapiens
  misc_RNA (1)...(19): siRNA sense strand
gaaaguugggaaggaagau

SEQ ID NO: 1346152 - RNA, 19 nt, Homo sapiens
  misc_RNA (1)...(19): siRNA sense strand
agagaaauccaaggacuuc

SEQ ID NO: 1346153 - RNA, 19 nt, Homo sapiens
  misc_RNA (1)...(19): siRNA sense strand
ugaagaacaagaccaagag

SEQ ID NO: 1346154 - RNA, 19 nt, Homo sapiens
  misc_RNA (1)...(19): siRNA sense strand
ccaggaacaggccaacaau

SEQ ID NO: 1346155 - RNA, 19 nt, Homo sapiens
  misc_RNA (1)...(19): siRNA sense strand
uacaacacagacaagcuua

SEQ ID NO: 1346156 - RNA, 19 nt, Homo sapiens
  misc_RNA (1)...(19): siRNA sense strand
gccacaggaucucuuugca

SEQ ID NO: 1346157 - RNA, 19 nt, Homo sapiens
  misc_RNA (1)...(19): siRNA sense strand
cacagaugccgucagcaaa

SEQ ID NO: 1346158 - RNA, 19 nt, Homo sapiens
  misc_RNA (1)...(19): siRNA sense strand
caaaguuacaacacagaca

SEQ ID NO: 1346159 - RNA, 19 nt, Homo sapiens
  misc_RNA (1)...(19): siRNA sense strand
cagcccaguuugcaaagag

SEQ ID NO: 1346160 - RNA, 19 nt, Homo sapiens
  misc_RNA (1)...(19): siRNA sense strand
ugaaaguugggaaggaaga

SEQ ID NO: 1346161 - RNA, 19 nt, Homo sapiens
  misc_RNA (1)...(19): siRNA sense strand
gaaccacgugaucaaguac

SEQ ID NO: 1346162 - RNA, 19 nt, Homo sapiens
  misc_RNA (1)...(19): siRNA sense strand
agaaauccaaggacuucaa

SEQ ID NO: 1346163 - RNA, 19 nt, Homo sapiens
  misc_RNA (1)...(19): siRNA sense strand
uaccuucagaggauuguaa

SEQ ID NO: 1346164 - RNA, 19 nt, Homo sapiens
  misc_RNA (1)...(19): siRNA sense strand
caagaaccacgugaucaag

SEQ ID NO: 1346165 - RNA, 19 nt, Homo sapiens
  misc_RNA (1)...(19): siRNA sense strand
gguuugagaaagagaaauc

SEQ ID NO: 1346166 - RNA, 19 nt, Homo sapiens
  misc_RNA (1)...(19): siRNA sense strand
gauacgguuugagaaagag

SEQ ID NO: 1346167 - RNA, 19 nt, Homo sapiens
  misc_RNA (1)...(19): siRNA sense strand
agugauacgguuugagaaa

SEQ ID NO: 1346168 - RNA, 19 nt, Homo sapiens
  misc_RNA (1)...(19): siRNA sense strand
gcaugcuguuguagaaacu

SEQ ID NO: 1346169 - RNA, 19 nt, Homo sapiens
  misc_RNA (1)...(19): siRNA sense strand
gcugagcuccugagugacu

SEQ ID NO: 1346170 - RNA, 19 nt, Homo sapiens
  misc_RNA (1)...(19): siRNA sense strand
uugagacacuccuuuacuc

SEQ ID NO: 1346171 - RNA, 19 nt, Homo sapiens
  misc_RNA (1)...(19): siRNA sense strand
ggaaagagcuagcgcugaa

SEQ ID NO: 1346172 - RNA, 19 nt, Homo sapiens
  misc_RNA (1)...(19): siRNA sense strand
gaaacugcaugcuguugua

SEQ ID NO: 1346173 - RNA, 19 nt, Homo sapiens
  misc_RNA (1)...(19): siRNA sense strand
aaacaucagucuccaaaga

SEQ ID NO: 1346174 - RNA, 19 nt, Homo sapiens
  misc_RNA (1)...(19): siRNA sense strand
gagcagcgcuuacggaaac

SEQ ID NO: 1346175 - RNA, 19 nt, Homo sapiens
  misc_RNA (1)...(19): siRNA sense strand
gaagugauacgguuugaga

SEQ ID NO: 1346176 - RNA, 19 nt, Homo sapiens
  misc_RNA (1)...(19): siRNA sense strand
aacaauggcuccaaagaaa

SEQ ID NO: 1346177 - RNA, 19 nt, Homo sapiens
  misc_RNA (1)...(19): siRNA sense strand
caacaauggcuccaaagaa

SEQ ID NO: 1346178 - RNA, 19 nt, Homo sapiens
  misc_RNA (1)...(19): siRNA sense strand
gaaacucuagucaaccaua

SEQ ID NO: 1346179 - RNA, 19 nt, Homo sapiens
  misc_RNA (1)...(19): siRNA sense strand
guaaacaucagucuccaaa

SEQ ID NO: 1346180 - RNA, 19 nt, Homo sapiens
  misc_RNA (1)...(19): siRNA sense strand
caucaacaauggcuccaaa

SEQ ID NO: 1346181 - RNA, 19 nt, Homo sapiens
  misc_RNA (1)...(19): siRNA sense strand
uaaaucauccuaccauguu

SEQ ID NO: 1346182 - RNA, 19 nt, Homo sapiens
  misc_RNA (1)...(19): siRNA sense strand
gaacacagcccaguuugca

SEQ ID NO: 1346183 - RNA, 19 nt, Homo sapiens
  misc_RNA (1)...(19): siRNA sense strand
uugcugagcuccugaguga

SEQ ID NO: 1346184 - RNA, 19 nt, Homo sapiens
  misc_RNA (1)...(19): siRNA sense strand
aaucagacauuugguuuga

SEQ ID NO: 1346185 - RNA, 19 nt, Homo sapiens
  misc_RNA (1)...(19): siRNA sense strand
agaaccacgugaucaagua

SEQ ID NO: 1346186 - RNA, 19 nt, Homo sapiens
  misc_RNA (1)...(19): siRNA sense strand
ggccaacaaugacuucuuc

SEQ ID NO: 1346187 - RNA, 19 nt, Homo sapiens
  misc_RNA (1)...(19): siRNA sense strand
acaucagucuccaaagaua

SEQ ID NO: 1346188 - RNA, 19 nt, Homo sapiens
  misc_RNA (1)...(19): siRNA sense strand
gcuccugagugacuacauu

SEQ ID NO: 1346189 - RNA, 19 nt, Homo sapiens
  misc_RNA (1)...(19): siRNA sense strand
augagaagcuuuccgagaa

SEQ ID NO: 1346190 - RNA, 19 nt, Homo sapiens
  misc_RNA (1)...(19): siRNA sense strand
ggcaaaggccaucuccuaa

SEQ ID NO: 1346191 - RNA, 19 nt, Homo sapiens
  misc_RNA (1)...(19): siRNA sense strand
gugcuggucuccucaagau

SEQ ID NO: 1346192 - RNA, 19 nt, Homo sapiens
  misc_RNA (1)...(19): siRNA sense strand
aaaucauccuaccauguua

SEQ ID NO: 1346193 - RNA, 19 nt, Homo sapiens
  misc_RNA (1)...(19): siRNA sense strand
ugaaucagacauuugguuu

SEQ ID NO: 1346194 - RNA, 19 nt, Homo sapiens
  misc_RNA (1)...(19): siRNA sense strand
guaaaucauccuaccaugu

SEQ ID NO: 1346195 - RNA, 19 nt, Homo sapiens
  misc_RNA (1)...(19): siRNA sense strand
ccacagaugccgucagcaa

SEQ ID NO: 1346196 - RNA, 19 nt, Homo sapiens
  misc_RNA (1)...(19): siRNA sense strand
ucagagaguucuuggaaaa

SEQ ID NO: 1346197 - RNA, 19 nt, Homo sapiens
  misc_RNA (1)...(19): siRNA sense strand
ccaaggacuucaagaacca

SEQ ID NO: 1346198 - RNA, 19 nt, Homo sapiens
  misc_RNA (1)...(19): siRNA sense strand
ugauacgguuugagaaaga

SEQ ID NO: 1346199 - RNA, 19 nt, Homo sapiens
  misc_RNA (1)...(19): siRNA sense strand
gaacaggccaacaaugacu

SEQ ID NO: 1346200 - RNA, 19 nt, Homo sapiens
  misc_RNA (1)...(19): siRNA sense strand
gaaucagacauuugguuug

SEQ ID NO: 1346201 - RNA, 19 nt, Homo sapiens
  misc_RNA (1)...(19): siRNA sense strand
cgucagagaguucuuggaa

SEQ ID NO: 1346202 - RNA, 19 nt, Homo sapiens
  misc_RNA (1)...(19): siRNA sense strand
agaaagagaaauccaagga

SEQ ID NO: 1346203 - RNA, 19 nt, Homo sapiens
  misc_RNA (1)...(19): siRNA sense strand
caaagagucuagccaugcu

SEQ ID NO: 1346204 - RNA, 19 nt, Homo sapiens
  misc_RNA (1)...(19): siRNA sense strand
ggaaacugcaugcuguugu

SEQ ID NO: 1346205 - RNA, 19 nt, Homo sapiens
  misc_RNA (1)...(19): siRNA sense strand
auaacuacaucccuucuuc

SEQ ID NO: 1346206 - RNA, 19 nt, Homo sapiens
  misc_RNA (1)...(19): siRNA sense strand
ucaagaaccacgugaucaa

SEQ ID NO: 1346207 - RNA, 19 nt, Homo sapiens
  misc_RNA (1)...(19): siRNA sense strand
gugacuuucugggucuuua

SEQ ID NO: 1346208 - RNA, 19 nt, Homo sapiens
  misc_RNA (1)...(19): siRNA sense strand
ucgggugacucaauaugaa

SEQ ID NO: 1346209 - RNA, 19 nt, Homo sapiens
  misc_RNA (1)...(19): siRNA sense strand
aggaacaggccaacaauga

SEQ ID NO: 1346210 - RNA, 19 nt, Homo sapiens
  misc_RNA (1)...(19): siRNA sense strand
ccuacaaaguuacaacaca

SEQ ID NO: 1346211 - RNA, 19 nt, Homo sapiens
  misc_RNA (1)...(19): siRNA sense strand
gucagagaguucuuggaaa

SEQ ID NO: 1346212 - RNA, 19 nt, Homo sapiens
  misc_RNA (1)...(19): siRNA sense strand
gaagauuuagugacuuucu

SEQ ID NO: 1346213 - RNA, 19 nt, Homo sapiens
  misc_RNA (1)...(19): siRNA sense strand
uccaggagguagaguguga

SEQ ID NO: 1346214 - RNA, 19 nt, Homo sapiens
  misc_RNA (1)...(19): siRNA sense strand
agacacuccuuuacucaca

SEQ ID NO: 1346215 - RNA, 19 nt, Homo sapiens
  misc_RNA (1)...(19): siRNA sense strand
gaaauccaaggacuucaag

SEQ ID NO: 1346216 - RNA, 19 nt, Homo sapiens
  misc_RNA (1)...(19): siRNA sense strand
acacagcccaguuugcaaa

SEQ ID NO: 1346217 - RNA, 19 nt, Homo sapiens
  misc_RNA (1)...(19): siRNA sense strand
acagacaagcuuaccauug

SEQ ID NO: 1346218 - RNA, 19 nt, Homo sapiens
  misc_RNA (1)...(19): siRNA sense strand
aggcaaaggccaucuccua

SEQ ID NO: 1346219 - RNA, 19 nt, Homo sapiens
  misc_RNA (1)...(19): siRNA sense strand
caucagucuccaaagauaa

SEQ ID NO: 1346220 - RNA, 19 nt, Homo sapiens
  misc_RNA (1)...(19): siRNA sense strand
ugggauccaugaagaacaa

SEQ ID NO: 1346221 - RNA, 19 nt, Homo sapiens
  misc_RNA (1)...(19): siRNA sense strand
cuccaaagauaacuacauc

SEQ ID NO: 1346222 - RNA, 19 nt, Homo sapiens
  misc_RNA (1)...(19): siRNA sense strand
ucgagaggauuucaacagu

SEQ ID NO: 1346223 - RNA, 19 nt, Homo sapiens
  misc_RNA (1)...(19): siRNA sense strand
acauuugguuugaggagaa

SEQ ID NO: 1346224 - RNA, 19 nt, Homo sapiens
  misc_RNA (1)...(19): siRNA sense strand
caacagugguccgaaaaga

SEQ ID NO: 1346225 - RNA, 19 nt, Homo sapiens
  misc_RNA (1)...(19): siRNA sense strand
ucaacaauggcuccaaaga

SEQ ID NO: 1346226 - RNA, 19 nt, Homo sapiens
  misc_RNA (1)...(19): siRNA sense strand
aaacucuagucaaccauag

SEQ ID NO: 1346227 - RNA, 19 nt, Homo sapiens
  misc_RNA (1)...(19): siRNA sense strand
gcuggucuccucaagaugu

SEQ ID NO: 1346228 - RNA, 19 nt, Homo sapiens
  misc_RNA (1)...(19): siRNA sense strand
ugagaagcuuuccgagaag

SEQ ID NO: 1346229 - RNA, 19 nt, Homo sapiens
  misc_RNA (1)...(19): siRNA sense strand
gugauacgguuugagaaag

SEQ ID NO: 1346230 - RNA, 19 nt, Homo sapiens
  misc_RNA (1)...(19): siRNA sense strand
gcaaaaugaccaucaagau

SEQ ID NO: 1346231 - RNA, 19 nt, Homo sapiens
  misc_RNA (1)...(19): siRNA sense strand
aaagaagugauacgguuug

SEQ ID NO: 1346232 - RNA, 19 nt, Homo sapiens
  misc_RNA (1)...(19): siRNA sense strand
ggagcagcgcuuacggaaa

SEQ ID NO: 1346233 - RNA, 19 nt, Homo sapiens
  misc_RNA (1)...(19): siRNA sense strand
aaaguuacaacacagacaa

SEQ ID NO: 1346234 - RNA, 19 nt, Homo sapiens
  misc_RNA (1)...(19): siRNA sense strand
gauaacuacaucccuucuu

SEQ ID NO: 1346235 - RNA, 19 nt, Homo sapiens
  misc_RNA (1)...(19): siRNA sense strand
ucaagaugaaugaaucaga

SEQ ID NO: 1346236 - RNA, 19 nt, Homo sapiens
  misc_RNA (1)...(19): siRNA sense strand
uuacaacacagacaagcuu

SEQ ID NO: 1346237 - RNA, 19 nt, Homo sapiens
  misc_RNA (1)...(19): siRNA sense strand
uggcugagguggaagaaaa

SEQ ID NO: 1346238 - RNA, 19 nt, Homo sapiens
  misc_RNA (1)...(19): siRNA sense strand
aauccaaggacuucaagaa

SEQ ID NO: 1346239 - RNA, 19 nt, Homo sapiens
  misc_RNA (1)...(19): siRNA sense strand
aagaagugauacgguuuga

SEQ ID NO: 1346240 - RNA, 19 nt, Homo sapiens
  misc_RNA (1)...(19): siRNA sense strand
ccaugaagaacaagaccaa

SEQ ID NO: 1346241 - RNA, 19 nt, Homo sapiens
  misc_RNA (1)...(19): siRNA sense strand
agugaaaguugggaaggaa

SEQ ID NO: 1346242 - RNA, 19 nt, Homo sapiens
  misc_RNA (1)...(19): siRNA sense strand
ggaacaggccaacaaugac

SEQ ID NO: 1346243 - RNA, 19 nt, Homo sapiens
  misc_RNA (1)...(19): siRNA sense strand
acugcaugcuguuguagaa

SEQ ID NO: 1346244 - RNA, 19 nt, Homo sapiens
  misc_RNA (1)...(19): siRNA sense strand
gaaaguugggaaggaagau

SEQ ID NO: 1346245 - RNA, 19 nt, Homo sapiens
  misc_RNA (1)...(19): siRNA sense strand
agagaaauccaaggacuuc

SEQ ID NO: 1346246 - RNA, 19 nt, Homo sapiens
  misc_RNA (1)...(19): siRNA sense strand
ugaagaacaagaccaagag

SEQ ID NO: 1346247 - RNA, 19 nt, Homo sapiens
  misc_RNA (1)...(19): siRNA sense strand
ccaggaacaggccaacaau

SEQ ID NO: 1346248 - RNA, 19 nt, Homo sapiens
  misc_RNA (1)...(19): siRNA sense strand
uacaacacagacaagcuua

SEQ ID NO: 1346249 - RNA, 19 nt, Homo sapiens
  misc_RNA (1)...(19): siRNA sense strand
gccacaggaucucuuugca

SEQ ID NO: 1346250 - RNA, 19 nt, Homo sapiens
  misc_RNA (1)...(19): siRNA sense strand
cacagaugccgucagcaaa

SEQ ID NO: 1346251 - RNA, 19 nt, Homo sapiens
  misc_RNA (1)...(19): siRNA sense strand
caaaguuacaacacagaca

SEQ ID NO: 1346252 - RNA, 19 nt, Homo sapiens
  misc_RNA (1)...(19): siRNA sense strand
cagcccaguuugcaaagag

SEQ ID NO: 1346253 - RNA, 19 nt, Homo sapiens
  misc_RNA (1)...(19): siRNA sense strand
ugaaaguugggaaggaaga

SEQ ID NO: 1346254 - RNA, 19 nt, Homo sapiens
  misc_RNA (1)...(19): siRNA sense strand
gaaccacgugaucaaguac

SEQ ID NO: 1346255 - RNA, 19 nt, Homo sapiens
  misc_RNA (1)...(19): siRNA sense strand
agaaauccaaggacuucaa

SEQ ID NO: 1346256 - RNA, 19 nt, Homo sapiens
  misc_RNA (1)...(19): siRNA sense strand
uaccuucagaggauuguaa

SEQ ID NO: 1346257 - RNA, 19 nt, Homo sapiens
  misc_RNA (1)...(19): siRNA sense strand
caagaaccacgugaucaag

SEQ ID NO: 1346258 - RNA, 19 nt, Homo sapiens
  misc_RNA (1)...(19): siRNA sense strand
gguuugagaaagagaaauc

SEQ ID NO: 1346259 - RNA, 19 nt, Homo sapiens
  misc_RNA (1)...(19): siRNA sense strand
gauacgguuugagaaagag

SEQ ID NO: 1346260 - RNA, 19 nt, Homo sapiens
  misc_RNA (1)...(19): siRNA sense strand
agugauacgguuugagaaa

SEQ ID NO: 1346261 - RNA, 19 nt, Homo sapiens
  misc_RNA (1)...(19): siRNA sense strand
gcaugcuguuguagaaacu

SEQ ID NO: 1346262 - RNA, 19 nt, Homo sapiens
  misc_RNA (1)...(19): siRNA sense strand
gcugagcuccugagugacu

SEQ ID NO: 1346263 - RNA, 19 nt, Homo sapiens
  misc_RNA (1)...(19): siRNA sense strand
uugagacacuccuuuacuc

SEQ ID NO: 1346264 - RNA, 19 nt, Homo sapiens
  misc_RNA (1)...(19): siRNA sense strand
gggaagagauugaagaaga

SEQ ID NO: 1346265 - RNA, 19 nt, Homo sapiens
  misc_RNA (1)...(19): siRNA sense strand
ccacagaaguuguauuaga

SEQ ID NO: 1346266 - RNA, 19 nt, Homo sapiens
  misc_RNA (1)...(19): siRNA sense strand
ggaagagauugaagaagaa

SEQ ID NO: 1346267 - RNA, 19 nt, Homo sapiens
  misc_RNA (1)...(19): siRNA sense strand
uaaaagugcugccauguua

SEQ ID NO: 1346268 - RNA, 19 nt, Homo sapiens
  misc_RNA (1)...(19): siRNA sense strand
gcaagcaaauauuuacaug

SEQ ID NO: 1346269 - RNA, 19 nt, Homo sapiens
  misc_RNA (1)...(19): siRNA sense strand
gaacagauaucuaaaacga

SEQ ID NO: 1346270 - RNA, 19 nt, Homo sapiens
  misc_RNA (1)...(19): siRNA sense strand
gaaguuguauuagaugaug

SEQ ID NO: 1346271 - RNA, 19 nt, Homo sapiens
  misc_RNA (1)...(19): siRNA sense strand
guacuuagaaucacuaguu

SEQ ID NO: 1346272 - RNA, 19 nt, Homo sapiens
  misc_RNA (1)...(19): siRNA sense strand
ggaagaugcucaaauuacu

SEQ ID NO: 1346273 - RNA, 19 nt, Homo sapiens
  misc_RNA (1)...(19): siRNA sense strand
gaaaagaagugggaagauu

SEQ ID NO: 1346274 - RNA, 19 nt, Homo sapiens
  misc_RNA (1)...(19): siRNA sense strand
ccaguuacaucaagaacaa

SEQ ID NO: 1346275 - RNA, 19 nt, Homo sapiens
  misc_RNA (1)...(19): siRNA sense strand
caacacagcugccuuugcu

SEQ ID NO: 1346276 - RNA, 19 nt, Homo sapiens
  misc_RNA (1)...(19): siRNA sense strand
gcauauagaguaacaacaa

SEQ ID NO: 1346277 - RNA, 19 nt, Homo sapiens
  misc_RNA (1)...(19): siRNA sense strand
cauagaaauugguguauca

SEQ ID NO: 1346278 - RNA, 19 nt, Homo sapiens
  misc_RNA (1)...(19): siRNA sense strand
gggaagauuugagaaagaa

SEQ ID NO: 1346279 - RNA, 19 nt, Homo sapiens
  misc_RNA (1)...(19): siRNA sense strand
ggagaagauagaccaguua

SEQ ID NO: 1346280 - RNA, 19 nt, Homo sapiens
  misc_RNA (1)...(19): siRNA sense strand
cagaagauauuagugcaaa

SEQ ID NO: 1346281 - RNA, 19 nt, Homo sapiens
  misc_RNA (1)...(19): siRNA sense strand
gaagauagaccaguuacau

SEQ ID NO: 1346282 - RNA, 19 nt, Homo sapiens
  misc_RNA (1)...(19): siRNA sense strand
gaaagggaaccuauccuau

SEQ ID NO: 1346283 - RNA, 19 nt, Homo sapiens
  misc_RNA (1)...(19): siRNA sense strand
uguauuagaugaugacaga

SEQ ID NO: 1346284 - RNA, 19 nt, Homo sapiens
  misc_RNA (1)...(19): siRNA sense strand
gaguggagcaggaauauug

SEQ ID NO: 1346285 - RNA, 19 nt, Homo sapiens
  misc_RNA (1)...(19): siRNA sense strand
ugaaucggaugcaugguuu

SEQ ID NO: 1346286 - RNA, 19 nt, Homo sapiens
  misc_RNA (1)...(19): siRNA sense strand
caaucaagaugaaugaauc

SEQ ID NO: 1346287 - RNA, 19 nt, Homo sapiens
  misc_RNA (1)...(19): siRNA sense strand
ggaaagagauuuugaacag

SEQ ID NO: 1346288 - RNA, 19 nt, Homo sapiens
  misc_RNA (1)...(19): siRNA sense strand
gcaaauuagcaagcaaaua

SEQ ID NO: 1346289 - RNA, 19 nt, Homo sapiens
  misc_RNA (1)...(19): siRNA sense strand
gaagugggaagauuugaga

SEQ ID NO: 1346290 - RNA, 19 nt, Homo sapiens
  misc_RNA (1)...(19): siRNA sense strand
gaaacuucaugucaguguu

SEQ ID NO: 1346291 - RNA, 19 nt, Homo sapiens
  misc_RNA (1)...(19): siRNA sense strand
gaucauacugcuuuaucua

SEQ ID NO: 1346292 - RNA, 19 nt, Homo sapiens
  misc_RNA (1)...(19): siRNA sense strand
aaaccguuaucaucaagua

SEQ ID NO: 1346293 - RNA, 19 nt, Homo sapiens
  misc_RNA (1)...(19): siRNA sense strand
ggucaaaguggguaaagaa

SEQ ID NO: 1346294 - RNA, 19 nt, Homo sapiens
  misc_RNA (1)...(19): siRNA sense strand
ggacggagaggaccuguuc

SEQ ID NO: 1346295 - RNA, 19 nt, Homo sapiens
  misc_RNA (1)...(19): siRNA sense strand
ugacuacauucgucuuauu

SEQ ID NO: 1346296 - RNA, 19 nt, Homo sapiens
  misc_RNA (1)...(19): siRNA sense strand
acucauugcuccuagaauu

SEQ ID NO: 1346297 - RNA, 19 nt, Homo sapiens
  misc_RNA (1)...(19): siRNA sense strand
gagcaggaauauugaggau

SEQ ID NO: 1346298 - RNA, 19 nt, Homo sapiens
  misc_RNA (1)...(19): siRNA sense strand
cacagaaguuguauuagau

SEQ ID NO: 1346299 - RNA, 19 nt, Homo sapiens
  misc_RNA (1)...(19): siRNA sense strand
caacuuaggaaacuucaug

SEQ ID NO: 1346300 - RNA, 19 nt, Homo sapiens
  misc_RNA (1)...(19): siRNA sense strand
gaaauugguguaucagauc

SEQ ID NO: 1346301 - RNA, 19 nt, Homo sapiens
  misc_RNA (1)...(19): siRNA sense strand
ugacauagaaauuggugua

SEQ ID NO: 1346302 - RNA, 19 nt, Homo sapiens
  misc_RNA (1)...(19): siRNA sense strand
gugcugccauguuagguaa

SEQ ID NO: 1346303 - RNA, 19 nt, Homo sapiens
  misc_RNA (1)...(19): siRNA sense strand
aagaacgagugaaggauuu

SEQ ID NO: 1346304 - RNA, 19 nt, Homo sapiens
  misc_RNA (1)...(19): siRNA sense strand
gaaaugggaagaugcucaa

SEQ ID NO: 1346305 - RNA, 19 nt, Homo sapiens
  misc_RNA (1)...(19): siRNA sense strand
cagaaguuguauuagauga

SEQ ID NO: 1346306 - RNA, 19 nt, Homo sapiens
  misc_RNA (1)...(19): siRNA sense strand
caucaaguacuuagaauca

SEQ ID NO: 1346307 - RNA, 19 nt, Homo sapiens
  misc_RNA (1)...(19): siRNA sense strand
aaugaugguugcuaacaaa

SEQ ID NO: 1346308 - RNA, 19 nt, Homo sapiens
  misc_RNA (1)...(19): siRNA sense strand
gaagaugcucaaauuacuu

SEQ ID NO: 1346309 - RNA, 19 nt, Homo sapiens
  misc_RNA (1)...(19): siRNA sense strand
ccacugaguuuguagaaaa

SEQ ID NO: 1346310 - RNA, 19 nt, Homo sapiens
  misc_RNA (1)...(19): siRNA sense strand
guaaagaagacucaucauc

SEQ ID NO: 1346311 - RNA, 19 nt, Homo sapiens
  misc_RNA (1)...(19): siRNA sense strand
caaaguggguaaagaagac

SEQ ID NO: 1346312 - RNA, 19 nt, Homo sapiens
  misc_RNA (1)...(19): siRNA sense strand
gaaucuggaucagcaacuu

SEQ ID NO: 1346313 - RNA, 19 nt, Homo sapiens
  misc_RNA (1)...(19): siRNA sense strand
uugcagagguugaggagaa

SEQ ID NO: 1346314 - RNA, 19 nt, Homo sapiens
  misc_RNA (1)...(19): siRNA sense strand
agaaauugguguaucagau

SEQ ID NO: 1346315 - RNA, 19 nt, Homo sapiens
  misc_RNA (1)...(19): siRNA sense strand
aaagaagacucaucaucca

SEQ ID NO: 1346316 - RNA, 19 nt, Homo sapiens
  misc_RNA (1)...(19): siRNA sense strand
ugaaagggaaccuauccua

SEQ ID NO: 1346317 - RNA, 19 nt, Homo sapiens
  misc_RNA (1)...(19): siRNA sense strand
ugccgacgcugucaacaaa

SEQ ID NO: 1346318 - RNA, 19 nt, Homo sapiens
  misc_RNA (1)...(19): siRNA sense strand
uuaaggcaguucuuggaaa

SEQ ID NO: 1346319 - RNA, 19 nt, Homo sapiens
  misc_RNA (1)...(19): siRNA sense strand
gggaagaugcucaaauuac

SEQ ID NO: 1346320 - RNA, 19 nt, Homo sapiens
  misc_RNA (1)...(19): siRNA sense strand
cuagagcaguuaauacaca

SEQ ID NO: 1346321 - RNA, 19 nt, Homo sapiens
  misc_RNA (1)...(19): siRNA sense strand
augggaagaugcucaaauu

SEQ ID NO: 1346322 - RNA, 19 nt, Homo sapiens
  misc_RNA (1)...(19): siRNA sense strand
ggaagcccaccgacuuuga

SEQ ID NO: 1346323 - RNA, 19 nt, Homo sapiens
  misc_RNA (1)...(19): siRNA sense strand
ucagcgacuuucuugguuu

SEQ ID NO: 1346324 - RNA, 19 nt, Homo sapiens
  misc_RNA (1)...(19): siRNA sense strand
acacaacaacagcugauaa

SEQ ID NO: 1346325 - RNA, 19 nt, Homo sapiens
  misc_RNA (1)...(19): siRNA sense strand
ucuuauugcugcagugaaa

SEQ ID NO: 1346326 - RNA, 19 nt, Homo sapiens
  misc_RNA (1)...(19): siRNA sense strand
ggaucauacugcuuuaucu

SEQ ID NO: 1346327 - RNA, 19 nt, Homo sapiens
  misc_RNA (1)...(19): siRNA sense strand
ugaggaucauacugcuuua

SEQ ID NO: 1346328 - RNA, 19 nt, Homo sapiens
  misc_RNA (1)...(19): siRNA sense strand
uaaggcaguucuuggaaag

SEQ ID NO: 1346329 - RNA, 19 nt, Homo sapiens
  misc_RNA (1)...(19): siRNA sense strand
ugaagaagaagcaaaugga

SEQ ID NO: 1346330 - RNA, 19 nt, Homo sapiens
  misc_RNA (1)...(19): siRNA sense strand
uagaaucacuaguucaaac

SEQ ID NO: 1346331 - RNA, 19 nt, Homo sapiens
  misc_RNA (1)...(19): siRNA sense strand
acccacagaaguuguauua

SEQ ID NO: 1346332 - RNA, 19 nt, Homo sapiens
  misc_RNA (1)...(19): siRNA sense strand
gaaagaacgagugaaggau

SEQ ID NO: 1346333 - RNA, 19 nt, Homo sapiens
  misc_RNA (1)...(19): siRNA sense strand
ucauacugcuuuaucuaga

SEQ ID NO: 1346334 - RNA, 19 nt, Homo sapiens
  misc_RNA (1)...(19): siRNA sense strand
acacagcugccuuugcuaa

SEQ ID NO: 1346335 - RNA, 19 nt, Homo sapiens
  misc_RNA (1)...(19): siRNA sense strand
ggaaacuucaugucagugu

SEQ ID NO: 1346336 - RNA, 19 nt, Homo sapiens
  misc_RNA (1)...(19): siRNA sense strand
ugacaaucaagaugaauga

SEQ ID NO: 1346337 - RNA, 19 nt, Homo sapiens
  misc_RNA (1)...(19): siRNA sense strand
gauugaagaagaagcaaau

SEQ ID NO: 1346338 - RNA, 19 nt, Homo sapiens
  misc_RNA (1)...(19): siRNA sense strand
cacaacaacagcugauaaa

SEQ ID NO: 1346339 - RNA, 19 nt, Homo sapiens
  misc_RNA (1)...(19): siRNA sense strand
aaagaacgagugaaggauu

SEQ ID NO: 1346340 - RNA, 19 nt, Homo sapiens
  misc_RNA (1)...(19): siRNA sense strand
agaaagaacgagugaagga

SEQ ID NO: 1346341 - RNA, 19 nt, Homo sapiens
  misc_RNA (1)...(19): siRNA sense strand
aaaugaugguugcuaacaa

SEQ ID NO: 1346342 - RNA, 19 nt, Homo sapiens
  misc_RNA (1)...(19): siRNA sense strand
gaugcaugguuugaagaaa

SEQ ID NO: 1346343 - RNA, 19 nt, Homo sapiens
  misc_RNA (1)...(19): siRNA sense strand
gaauauugaggauggugaa

SEQ ID NO: 1346344 - RNA, 19 nt, Homo sapiens
  misc_RNA (1)...(19): siRNA sense strand
gaugacagagaagaucuuu

SEQ ID NO: 1346345 - RNA, 19 nt, Homo sapiens
  misc_RNA (1)...(19): siRNA sense strand
cagcgacuuucuugguuug

SEQ ID NO: 1346346 - RNA, 19 nt, Homo sapiens
  misc_RNA (1)...(19): siRNA sense strand
aggagaagauagaccaguu

SEQ ID NO: 1346347 - RNA, 19 nt, Homo sapiens
  misc_RNA (1)...(19): siRNA sense strand
gaaaagcagcagcaauuug

SEQ ID NO: 1346348 - RNA, 19 nt, Homo sapiens
  misc_RNA (1)...(19): siRNA sense strand
ggguaaagaagacucauca

SEQ ID NO: 1346349 - RNA, 19 nt, Homo sapiens
  misc_RNA (1)...(19): siRNA sense strand
aaagaagugggaagauuug

SEQ ID NO: 1346350 - RNA, 19 nt, Homo sapiens
  misc_RNA (1)...(19): siRNA sense strand
gaaagagauuuugaacaga

SEQ ID NO: 1346351 - RNA, 19 nt, Homo sapiens
  misc_RNA (1)...(19): siRNA sense strand
gcugccauguuagguaauu

SEQ ID NO: 1346352 - RNA, 19 nt, Homo sapiens
  misc_RNA (1)...(19): siRNA sense strand
uaggaaacuucaugucagu

SEQ ID NO: 1346353 - RNA, 19 nt, Homo sapiens
  misc_RNA (1)...(19): siRNA sense strand
gaucagcaacuuaggaaac

SEQ ID NO: 1346354 - RNA, 19 nt, Homo sapiens
  misc_RNA (1)...(19): siRNA sense strand
cagcagcaauuugagaauc

SEQ ID NO: 1346355 - RNA, 19 nt, Homo sapiens
  misc_RNA (1)...(19): siRNA sense strand
ggaugcaugguuugaagaa

SEQ ID NO: 1346356 - RNA, 19 nt, Homo sapiens
  misc_RNA (1)...(19): siRNA sense strand
uauugaggauggugaacaa

SEQ ID NO: 1346357 - RNA, 19 nt, Homo sapiens
  misc_RNA (1)...(19): siRNA sense strand
uggcagaaaugggaagaug

SEQ ID NO: 1346358 - RNA, 19 nt, Homo sapiens
  misc_RNA (1)...(19): siRNA sense strand
ugggaagauuugagaaaga

SEQ ID NO: 1346359 - RNA, 19 nt, Homo sapiens
  misc_RNA (1)...(19): siRNA sense strand
gaagauauuagugcaaacu

SEQ ID NO: 1346360 - RNA, 19 nt, Homo sapiens
  misc_RNA (1)...(19): siRNA sense strand
caacaacagcugauaaaau

SEQ ID NO: 1346361 - RNA, 19 nt, Homo sapiens
  misc_RNA (1)...(19): siRNA sense strand
cuaaaacgauucgaaaaga

SEQ ID NO: 1346362 - RNA, 19 nt, Homo sapiens
  misc_RNA (1)...(19): siRNA sense strand
gcagaagauauuagugcaa

SEQ ID NO: 1346363 - RNA, 19 nt, Homo sapiens
  misc_RNA (1)...(19): siRNA sense strand
caucauccacugaguuugu

SEQ ID NO: 1346364 - RNA, 19 nt, Homo sapiens
  misc_RNA (1)...(19): siRNA sense strand
gaacuucacugucaucuuc

SEQ ID NO: 1346365 - RNA, 19 nt, Homo sapiens
  misc_RNA (1)...(19): siRNA sense strand
ggaccagagugccaaggaa

SEQ ID NO: 1346366 - RNA, 19 nt, Homo sapiens
  misc_RNA (1)...(19): siRNA sense strand
caagcuuacuggcagauug

SEQ ID NO: 1346367 - RNA, 19 nt, Homo sapiens
  misc_RNA (1)...(19): siRNA sense strand
ccaagucucuguggaagga

SEQ ID NO: 1346368 - RNA, 19 nt, Homo sapiens
  misc_RNA (1)...(19): siRNA sense strand
gcuacgaccacucccauuu

SEQ ID NO: 1346369 - RNA, 19 nt, Homo sapiens
  misc_RNA (1)...(19): siRNA sense strand
gcaagacgcacagcagguu

SEQ ID NO: 1346370 - RNA, 19 nt, Homo sapiens
  misc_RNA (1)...(19): siRNA sense strand
ggucaaucuuucuccauuc

SEQ ID NO: 1346371 - RNA, 19 nt, Homo sapiens
  misc_RNA (1)...(19): siRNA sense strand
gagcuuguccgggaucauu

SEQ ID NO: 1346372 - RNA, 19 nt, Homo sapiens
  misc_RNA (1)...(19): siRNA sense strand
ggccagcaguuuggagaaa

SEQ ID NO: 1346373 - RNA, 19 nt, Homo sapiens
  misc_RNA (1)...(19): siRNA sense strand
ggacuucguggauggaaug

SEQ ID NO: 1346374 - RNA, 19 nt, Homo sapiens
  misc_RNA (1)...(19): siRNA sense strand
ucaacuacuuggauaugga

SEQ ID NO: 1346375 - RNA, 19 nt, Homo sapiens
  misc_RNA (1)...(19): siRNA sense strand
gcacuagcccagccugcaa

SEQ ID NO: 1346376 - RNA, 19 nt, Homo sapiens
  misc_RNA (1)...(19): siRNA sense strand
ccagccaggucaaucuuuc

SEQ ID NO: 1346377 - RNA, 19 nt, Homo sapiens
  misc_RNA (1)...(19): siRNA sense strand
caugagcaguaacccagaa

SEQ ID NO: 1346378 - RNA, 19 nt, Homo sapiens
  misc_RNA (1)...(19): siRNA sense strand
cucaucaacuacuuggaua

SEQ ID NO: 1346379 - RNA, 19 nt, Homo sapiens
  misc_RNA (1)...(19): siRNA sense strand
cgaccaagucucuguggaa

SEQ ID NO: 1346380 - RNA, 19 nt, Homo sapiens
  misc_RNA (1)...(19): siRNA sense strand
gucaaucuuucuccauuca

SEQ ID NO: 1346381 - RNA, 19 nt, Homo sapiens
  misc_RNA (1)...(19): siRNA sense strand
caacuacuuggauauggaa

SEQ ID NO: 1346382 - RNA, 19 nt, Homo sapiens
  misc_RNA (1)...(19): siRNA sense strand
cuuuguggaugcagaguuu

SEQ ID NO: 1346383 - RNA, 19 nt, Homo sapiens
  misc_RNA (1)...(19): siRNA sense strand
acaacaugauggcucagaa

SEQ ID NO: 1346384 - RNA, 19 nt, Homo sapiens
  misc_RNA (1)...(19): siRNA sense strand
gagccaggccagaccuuug

SEQ ID NO: 1346385 - RNA, 19 nt, Homo sapiens
  misc_RNA (1)...(19): siRNA sense strand
gaugcagaguuugauggaa

SEQ ID NO: 1346386 - RNA, 19 nt, Homo sapiens
  misc_RNA (1)...(19): siRNA sense strand
cuacuuggauauggaauac

SEQ ID NO: 1346387 - RNA, 19 nt, Homo sapiens
  misc_RNA (1)...(19): siRNA sense strand
uggaauacuucggcacuau

SEQ ID NO: 1346388 - RNA, 19 nt, Homo sapiens
  misc_RNA (1)...(19): siRNA sense strand
caaucuuucuccauucagu

SEQ ID NO: 1346389 - RNA, 19 nt, Homo sapiens
  misc_RNA (1)...(19): siRNA sense strand
ucccauaauuuggacauga

SEQ ID NO: 1346390 - RNA, 19 nt, Homo sapiens
  misc_RNA (1)...(19): siRNA sense strand
cagcaguggcuuucaagga

SEQ ID NO: 1346391 - RNA, 19 nt, Homo sapiens
  misc_RNA (1)...(19): siRNA sense strand
ggaauacuucggcacuauc

SEQ ID NO: 1346392 - RNA, 19 nt, Homo sapiens
  misc_RNA (1)...(19): siRNA sense strand
gugccaaccuuaacgucau

SEQ ID NO: 1346393 - RNA, 19 nt, Homo sapiens
  misc_RNA (1)...(19): siRNA sense strand
ugacuccaguauuugacaa

SEQ ID NO: 1346394 - RNA, 19 nt, Homo sapiens
  misc_RNA (1)...(19): siRNA sense strand
gaauucugggccugggaua

SEQ ID NO: 1346395 - RNA, 19 nt, Homo sapiens
  misc_RNA (1)...(19): siRNA sense strand
ggaugcagaguuugaugga

SEQ ID NO: 1346396 - RNA, 19 nt, Homo sapiens
  misc_RNA (1)...(19): siRNA sense strand
ucucugaguucuggaaauc

SEQ ID NO: 1346397 - RNA, 19 nt, Homo sapiens
  misc_RNA (1)...(19): siRNA sense strand
gaauacuucggcacuaucu

SEQ ID NO: 1346398 - RNA, 19 nt, Homo sapiens
  misc_RNA (1)...(19): siRNA sense strand
cucagaaccugguggacuu

SEQ ID NO: 1346399 - RNA, 19 nt, Homo sapiens
  misc_RNA (1)...(19): siRNA sense strand
uccaguauuugacaacaug

SEQ ID NO: 1346400 - RNA, 19 nt, Homo sapiens
  misc_RNA (1)...(19): siRNA sense strand
augcagaguuugauggaau

SEQ ID NO: 1346401 - RNA, 19 nt, Homo sapiens
  misc_RNA (1)...(19): siRNA sense strand
aggcauccgucccucaaga

SEQ ID NO: 1346402 - RNA, 19 nt, Homo sapiens
  misc_RNA (1)...(19): siRNA sense strand
cuucggcacuaucuccauu

SEQ ID NO: 1346403 - RNA, 19 nt, Homo sapiens
  misc_RNA (1)...(19): siRNA sense strand
caucaacuacuuggauaug

SEQ ID NO: 1346404 - RNA, 19 nt, Homo sapiens
  misc_RNA (1)...(19): siRNA sense strand
acuuggauauggaauacuu

SEQ ID NO: 1346405 - RNA, 19 nt, Homo sapiens
  misc_RNA (1)...(19): siRNA sense strand
gagcaguaacccagaaggu

SEQ ID NO: 1346406 - RNA, 19 nt, Homo sapiens
  misc_RNA (1)...(19): siRNA sense strand
ccagcaguuuggagaaagu

SEQ ID NO: 1346407 - RNA, 19 nt, Homo sapiens
  misc_RNA (1)...(19): siRNA sense strand
gagccgaccaagucucugu

SEQ ID NO: 1346408 - RNA, 19 nt, Homo sapiens
  misc_RNA (1)...(19): siRNA sense strand
cccauaauuuggacaugau

SEQ ID NO: 1346409 - RNA, 19 nt, Homo sapiens
  misc_RNA (1)...(19): siRNA sense strand
uggcagauugcacuggaua

SEQ ID NO: 1346410 - RNA, 19 nt, Homo sapiens
  misc_RNA (1)...(19): siRNA sense strand
agaguuugauggaauucug

SEQ ID NO: 1346411 - RNA, 19 nt, Homo sapiens
  misc_RNA (1)...(19): siRNA sense strand
ugcagaguuugauggaauu

SEQ ID NO: 1346412 - RNA, 19 nt, Homo sapiens
  misc_RNA (1)...(19): siRNA sense strand
aggucaaucuuucuccauu

SEQ ID NO: 1346413 - RNA, 19 nt, Homo sapiens
  misc_RNA (1)...(19): siRNA sense strand
uucuggaaaucccauaauu

SEQ ID NO: 1346414 - RNA, 19 nt, Homo sapiens
  misc_RNA (1)...(19): siRNA sense strand
ucucugggagccugaauug

SEQ ID NO: 1346415 - RNA, 19 nt, Homo sapiens
  misc_RNA (1)...(19): siRNA sense strand
cgaccacucccauuucucu

SEQ ID NO: 1346416 - RNA, 19 nt, Homo sapiens
  misc_RNA (1)...(19): siRNA sense strand
auccgucccucaagaagaa

SEQ ID NO: 1346417 - RNA, 19 nt, Homo sapiens
  misc_RNA (1)...(19): siRNA sense strand
gcaagcuuacuggcagauu

SEQ ID NO: 1346418 - RNA, 19 nt, Homo sapiens
  misc_RNA (1)...(19): siRNA sense strand
cuacgaccacucccauuuc

SEQ ID NO: 1346419 - RNA, 19 nt, Homo sapiens
  misc_RNA (1)...(19): siRNA sense strand
caccgaguccugcucaaug

SEQ ID NO: 1346420 - RNA, 19 nt, Homo sapiens
  misc_RNA (1)...(19): siRNA sense strand
cugguggacuugccgaugu

SEQ ID NO: 1346421 - RNA, 19 nt, Homo sapiens
  misc_RNA (1)...(19): siRNA sense strand
ggagugugccaaccuuaac

SEQ ID NO: 1346422 - RNA, 19 nt, Homo sapiens
  misc_RNA (1)...(19): siRNA sense strand
ccucaucaacuacuuggau

SEQ ID NO: 1346423 - RNA, 19 nt, Homo sapiens
  misc_RNA (1)...(19): siRNA sense strand
gaacuucacugucaucuuc

SEQ ID NO: 1346424 - RNA, 19 nt, Homo sapiens
  misc_RNA (1)...(19): siRNA sense strand
gaugucaccuucaccauua

SEQ ID NO: 1346425 - RNA, 19 nt, Homo sapiens
  misc_RNA (1)...(19): siRNA sense strand
ggaccagagugccaaggaa

SEQ ID NO: 1346426 - RNA, 19 nt, Homo sapiens
  misc_RNA (1)...(19): siRNA sense strand
caagcuuacuggcagauug

SEQ ID NO: 1346427 - RNA, 19 nt, Homo sapiens
  misc_RNA (1)...(19): siRNA sense strand
ccaagucucuguggaagga

SEQ ID NO: 1346428 - RNA, 19 nt, Homo sapiens
  misc_RNA (1)...(19): siRNA sense strand
gcuacgaccacucccauuu

SEQ ID NO: 1346429 - RNA, 19 nt, Homo sapiens
  misc_RNA (1)...(19): siRNA sense strand
ggaugucaccuucaccauu

SEQ ID NO: 1346430 - RNA, 19 nt, Homo sapiens
  misc_RNA (1)...(19): siRNA sense strand
gcaagacgcacagcagguu

SEQ ID NO: 1346431 - RNA, 19 nt, Homo sapiens
  misc_RNA (1)...(19): siRNA sense strand
ggucaaucuuucuccauuc

SEQ ID NO: 1346432 - RNA, 19 nt, Homo sapiens
  misc_RNA (1)...(19): siRNA sense strand
gagcuuguccgggaucauu

SEQ ID NO: 1346433 - RNA, 19 nt, Homo sapiens
  misc_RNA (1)...(19): siRNA sense strand
ggccagcaguuuggagaaa

SEQ ID NO: 1346434 - RNA, 19 nt, Homo sapiens
  misc_RNA (1)...(19): siRNA sense strand
ggacuucguggauggaaug

SEQ ID NO: 1346435 - RNA, 19 nt, Homo sapiens
  misc_RNA (1)...(19): siRNA sense strand
ucaacuacuuggauaugga

SEQ ID NO: 1346436 - RNA, 19 nt, Homo sapiens
  misc_RNA (1)...(19): siRNA sense strand
gcacuagcccagccugcaa

SEQ ID NO: 1346437 - RNA, 19 nt, Homo sapiens
  misc_RNA (1)...(19): siRNA sense strand
ccagccaggucaaucuuuc

SEQ ID NO: 1346438 - RNA, 19 nt, Homo sapiens
  misc_RNA (1)...(19): siRNA sense strand
caugagcaguaacccagaa

SEQ ID NO: 1346439 - RNA, 19 nt, Homo sapiens
  misc_RNA (1)...(19): siRNA sense strand
cucaucaacuacuuggaua

SEQ ID NO: 1346440 - RNA, 19 nt, Homo sapiens
  misc_RNA (1)...(19): siRNA sense strand
cgaccaagucucuguggaa

SEQ ID NO: 1346441 - RNA, 19 nt, Homo sapiens
  misc_RNA (1)...(19): siRNA sense strand
gucaaucuuucuccauuca

SEQ ID NO: 1346442 - RNA, 19 nt, Homo sapiens
  misc_RNA (1)...(19): siRNA sense strand
caacuacuuggauauggaa

SEQ ID NO: 1346443 - RNA, 19 nt, Homo sapiens
  misc_RNA (1)...(19): siRNA sense strand
cuuuguggaugcagaguuu

SEQ ID NO: 1346444 - RNA, 19 nt, Homo sapiens
  misc_RNA (1)...(19): siRNA sense strand
acaacaugauggcucagaa

SEQ ID NO: 1346445 - RNA, 19 nt, Homo sapiens
  misc_RNA (1)...(19): siRNA sense strand
gagccaggccagaccuuug

SEQ ID NO: 1346446 - RNA, 19 nt, Homo sapiens
  misc_RNA (1)...(19): siRNA sense strand
gaugcagaguuugauggaa

SEQ ID NO: 1346447 - RNA, 19 nt, Homo sapiens
  misc_RNA (1)...(19): siRNA sense strand
cuacuuggauauggaauac

SEQ ID NO: 1346448 - RNA, 19 nt, Homo sapiens
  misc_RNA (1)...(19): siRNA sense strand
ggaggggccuugugucugu

SEQ ID NO: 1346449 - RNA, 19 nt, Homo sapiens
  misc_RNA (1)...(19): siRNA sense strand
uggaauacuucggcacuau

SEQ ID NO: 1346450 - RNA, 19 nt, Homo sapiens
  misc_RNA (1)...(19): siRNA sense strand
caaucuuucuccauucagu

SEQ ID NO: 1346451 - RNA, 19 nt, Homo sapiens
  misc_RNA (1)...(19): siRNA sense strand
ucccauaauuuggacauga

SEQ ID NO: 1346452 - RNA, 19 nt, Homo sapiens
  misc_RNA (1)...(19): siRNA sense strand
cagcaguggcuuucaagga

SEQ ID NO: 1346453 - RNA, 19 nt, Homo sapiens
  misc_RNA (1)...(19): siRNA sense strand
ggaauacuucggcacuauc

SEQ ID NO: 1346454 - RNA, 19 nt, Homo sapiens
  misc_RNA (1)...(19): siRNA sense strand
gugccaaccuuaacgucau

SEQ ID NO: 1346455 - RNA, 19 nt, Homo sapiens
  misc_RNA (1)...(19): siRNA sense strand
ugacuccaguauuugacaa

SEQ ID NO: 1346456 - RNA, 19 nt, Homo sapiens
  misc_RNA (1)...(19): siRNA sense strand
gaauucugggccugggaua

SEQ ID NO: 1346457 - RNA, 19 nt, Homo sapiens
  misc_RNA (1)...(19): siRNA sense strand
ggaugcagaguuugaugga

SEQ ID NO: 1346458 - RNA, 19 nt, Homo sapiens
  misc_RNA (1)...(19): siRNA sense strand
ucucugaguucuggaaauc

SEQ ID NO: 1346459 - RNA, 19 nt, Homo sapiens
  misc_RNA (1)...(19): siRNA sense strand
gaauacuucggcacuaucu

SEQ ID NO: 1346460 - RNA, 19 nt, Homo sapiens
  misc_RNA (1)...(19): siRNA sense strand
aggcauccgucccucaaga

SEQ ID NO: 1346461 - RNA, 19 nt, Homo sapiens
  misc_RNA (1)...(19): siRNA sense strand
cucagaaccugguggacuu

SEQ ID NO: 1346462 - RNA, 19 nt, Homo sapiens
  misc_RNA (1)...(19): siRNA sense strand
uccaguauuugacaacaug

SEQ ID NO: 1346463 - RNA, 19 nt, Homo sapiens
  misc_RNA (1)...(19): siRNA sense strand
augcagaguuugauggaau

SEQ ID NO: 1346464 - RNA, 19 nt, Homo sapiens
  misc_RNA (1)...(19): siRNA sense strand
cuucggcacuaucuccauu

SEQ ID NO: 1346465 - RNA, 19 nt, Homo sapiens
  misc_RNA (1)...(19): siRNA sense strand
caucaacuacuuggauaug

SEQ ID NO: 1346466 - RNA, 19 nt, Homo sapiens
  misc_RNA (1)...(19): siRNA sense strand
acuuggauauggaauacuu

SEQ ID NO: 1346467 - RNA, 19 nt, Homo sapiens
  misc_RNA (1)...(19): siRNA sense strand
gagcaguaacccagaaggu

SEQ ID NO: 1346468 - RNA, 19 nt, Homo sapiens
  misc_RNA (1)...(19): siRNA sense strand
ccagcaguuuggagaaagu

SEQ ID NO: 1346469 - RNA, 19 nt, Homo sapiens
  misc_RNA (1)...(19): siRNA sense strand
gagccgaccaagucucugu

SEQ ID NO: 1346470 - RNA, 19 nt, Homo sapiens
  misc_RNA (1)...(19): siRNA sense strand
aggucaaucuuucuccauu

SEQ ID NO: 1346471 - RNA, 19 nt, Homo sapiens
  misc_RNA (1)...(19): siRNA sense strand
uggcagauugcacuggaua

SEQ ID NO: 1346472 - RNA, 19 nt, Homo sapiens
  misc_RNA (1)...(19): siRNA sense strand
agaguuugauggaauucug

SEQ ID NO: 1346473 - RNA, 19 nt, Homo sapiens
  misc_RNA (1)...(19): siRNA sense strand
ugcagaguuugauggaauu

SEQ ID NO: 1346474 - RNA, 19 nt, Homo sapiens
  misc_RNA (1)...(19): siRNA sense strand
cccauaauuuggacaugau

SEQ ID NO: 1346475 - RNA, 19 nt, Homo sapiens
  misc_RNA (1)...(19): siRNA sense strand
uucuggaaaucccauaauu

SEQ ID NO: 1346476 - RNA, 19 nt, Homo sapiens
  misc_RNA (1)...(19): siRNA sense strand
ucucugggagccugaauug

SEQ ID NO: 1346477 - RNA, 19 nt, Homo sapiens
  misc_RNA (1)...(19): siRNA sense strand
cgaccacucccauuucucu

SEQ ID NO: 1346478 - RNA, 19 nt, Homo sapiens
  misc_RNA (1)...(19): siRNA sense strand
auccgucccucaagaagaa

SEQ ID NO: 1346479 - RNA, 19 nt, Homo sapiens
  misc_RNA (1)...(19): siRNA sense strand
gcaagcuuacuggcagauu

SEQ ID NO: 1346480 - RNA, 19 nt, Homo sapiens
  misc_RNA (1)...(19): siRNA sense strand
caccgaguccugcucaaug

SEQ ID NO: 1346481 - RNA, 19 nt, Homo sapiens
  misc_RNA (1)...(19): siRNA sense strand
cuacgaccacucccauuuc

SEQ ID NO: 1346482 - RNA, 19 nt, Homo sapiens
  misc_RNA (1)...(19): siRNA sense strand
cugguggacuugccgaugu

SEQ ID NO: 1346483 - RNA, 19 nt, Homo sapiens
  misc_RNA (1)...(19): siRNA sense strand
ggagugugccaaccuuaac

SEQ ID NO: 1346484 - RNA, 19 nt, Homo sapiens
  misc_RNA (1)...(19): siRNA sense strand
ccucaucaacuacuuggau

SEQ ID NO: 1346485 - RNA, 19 nt, Homo sapiens
  misc_RNA (1)...(19): siRNA sense strand
gaacuucacugucaucuuc

SEQ ID NO: 1346486 - RNA, 19 nt, Homo sapiens
  misc_RNA (1)...(19): siRNA sense strand
ggaccagagugccaaggaa

SEQ ID NO: 1346487 - RNA, 19 nt, Homo sapiens
  misc_RNA (1)...(19): siRNA sense strand
caagcuuacuggcagauug

SEQ ID NO: 1346488 - RNA, 19 nt, Homo sapiens
  misc_RNA (1)...(19): siRNA sense strand
ccaagucucuguggaagga

SEQ ID NO: 1346489 - RNA, 19 nt, Homo sapiens
  misc_RNA (1)...(19): siRNA sense strand
gcuacgaccacucccauuu

SEQ ID NO: 1346490 - RNA, 19 nt, Homo sapiens
  misc_RNA (1)...(19): siRNA sense strand
gcaagacgcacagcagguu

SEQ ID NO: 1346491 - RNA, 19 nt, Homo sapiens
  misc_RNA (1)...(19): siRNA sense strand
ggucaaucuuucuccauuc

SEQ ID NO: 1346492 - RNA, 19 nt, Homo sapiens
  misc_RNA (1)...(19): siRNA sense strand
gagcuuguccgggaucauu

SEQ ID NO: 1346493 - RNA, 19 nt, Homo sapiens
  misc_RNA (1)...(19): siRNA sense strand
ggccagcaguuuggagaaa

SEQ ID NO: 1346494 - RNA, 19 nt, Homo sapiens
  misc_RNA (1)...(19): siRNA sense strand
ggacuucguggauggaaug

SEQ ID NO: 1346495 - RNA, 19 nt, Homo sapiens
  misc_RNA (1)...(19): siRNA sense strand
ucaacuacuuggauaugga

SEQ ID NO: 1346496 - RNA, 19 nt, Homo sapiens
  misc_RNA (1)...(19): siRNA sense strand
gcacuagcccagccugcaa

SEQ ID NO: 1346497 - RNA, 19 nt, Homo sapiens
  misc_RNA (1)...(19): siRNA sense strand
ccagccaggucaaucuuuc

SEQ ID NO: 1346498 - RNA, 19 nt, Homo sapiens
  misc_RNA (1)...(19): siRNA sense strand
caugagcaguaacccagaa

SEQ ID NO: 1346499 - RNA, 19 nt, Homo sapiens
  misc_RNA (1)...(19): siRNA sense strand
cucaucaacuacuuggaua

SEQ ID NO: 1346500 - RNA, 19 nt, Homo sapiens
  misc_RNA (1)...(19): siRNA sense strand
cgaccaagucucuguggaa

SEQ ID NO: 1346501 - RNA, 19 nt, Homo sapiens
  misc_RNA (1)...(19): siRNA sense strand
gucaaucuuucuccauuca

SEQ ID NO: 1346502 - RNA, 19 nt, Homo sapiens
  misc_RNA (1)...(19): siRNA sense strand
caacuacuuggauauggaa

SEQ ID NO: 1346503 - RNA, 19 nt, Homo sapiens
  misc_RNA (1)...(19): siRNA sense strand
cuuuguggaugcagaguuu

SEQ ID NO: 1346504 - RNA, 19 nt, Homo sapiens
  misc_RNA (1)...(19): siRNA sense strand
acaacaugauggcucagaa

SEQ ID NO: 1346505 - RNA, 19 nt, Homo sapiens
  misc_RNA (1)...(19): siRNA sense strand
gagccaggccagaccuuug

SEQ ID NO: 1346506 - RNA, 19 nt, Homo sapiens
  misc_RNA (1)...(19): siRNA sense strand
gaugcagaguuugauggaa

SEQ ID NO: 1346507 - RNA, 19 nt, Homo sapiens
  misc_RNA (1)...(19): siRNA sense strand
cuacuuggauauggaauac

SEQ ID NO: 1346508 - RNA, 19 nt, Homo sapiens
  misc_RNA (1)...(19): siRNA sense strand
uggaauacuucggcacuau

SEQ ID NO: 1346509 - RNA, 19 nt, Homo sapiens
  misc_RNA (1)...(19): siRNA sense strand
caaucuuucuccauucagu

SEQ ID NO: 1346510 - RNA, 19 nt, Homo sapiens
  misc_RNA (1)...(19): siRNA sense strand
ucccauaauuuggacauga

SEQ ID NO: 1346511 - RNA, 19 nt, Homo sapiens
  misc_RNA (1)...(19): siRNA sense strand
cagcaguggcuuucaagga

SEQ ID NO: 1346512 - RNA, 19 nt, Homo sapiens
  misc_RNA (1)...(19): siRNA sense strand
ggaauacuucggcacuauc

SEQ ID NO: 1346513 - RNA, 19 nt, Homo sapiens
  misc_RNA (1)...(19): siRNA sense strand
gugccaaccuuaacgucau

SEQ ID NO: 1346514 - RNA, 19 nt, Homo sapiens
  misc_RNA (1)...(19): siRNA sense strand
ugacuccaguauuugacaa

SEQ ID NO: 1346515 - RNA, 19 nt, Homo sapiens
  misc_RNA (1)...(19): siRNA sense strand
gaauucugggccugggaua

SEQ ID NO: 1346516 - RNA, 19 nt, Homo sapiens
  misc_RNA (1)...(19): siRNA sense strand
ggaugcagaguuugaugga

SEQ ID NO: 1346517 - RNA, 19 nt, Homo sapiens
  misc_RNA (1)...(19): siRNA sense strand
ucucugaguucuggaaauc

SEQ ID NO: 1346518 - RNA, 19 nt, Homo sapiens
  misc_RNA (1)...(19): siRNA sense strand
gaauacuucggcacuaucu

SEQ ID NO: 1346519 - RNA, 19 nt, Homo sapiens
  misc_RNA (1)...(19): siRNA sense strand
cucagaaccugguggacuu

SEQ ID NO: 1346520 - RNA, 19 nt, Homo sapiens
  misc_RNA (1)...(19): siRNA sense strand
uccaguauuugacaacaug

SEQ ID NO: 1346521 - RNA, 19 nt, Homo sapiens
  misc_RNA (1)...(19): siRNA sense strand
augcagaguuugauggaau

SEQ ID NO: 1346522 - RNA, 19 nt, Homo sapiens
  misc_RNA (1)...(19): siRNA sense strand
aggcauccgucccucaaga

SEQ ID NO: 1346523 - RNA, 19 nt, Homo sapiens
  misc_RNA (1)...(19): siRNA sense strand
cuucggcacuaucuccauu

SEQ ID NO: 1346524 - RNA, 19 nt, Homo sapiens
  misc_RNA (1)...(19): siRNA sense strand
caucaacuacuuggauaug

SEQ ID NO: 1346525 - RNA, 19 nt, Homo sapiens
  misc_RNA (1)...(19): siRNA sense strand
acuuggauauggaauacuu

SEQ ID NO: 1346526 - RNA, 19 nt, Homo sapiens
  misc_RNA (1)...(19): siRNA sense strand
gagcaguaacccagaaggu

SEQ ID NO: 1346527 - RNA, 19 nt, Homo sapiens
  misc_RNA (1)...(19): siRNA sense strand
ccagcaguuuggagaaagu

SEQ ID NO: 1346528 - RNA, 19 nt, Homo sapiens
  misc_RNA (1)...(19): siRNA sense strand
gagccgaccaagucucugu

SEQ ID NO: 1346529 - RNA, 19 nt, Homo sapiens
  misc_RNA (1)...(19): siRNA sense strand
cccauaauuuggacaugau

SEQ ID NO: 1346530 - RNA, 19 nt, Homo sapiens
  misc_RNA (1)...(19): siRNA sense strand
uggcagauugcacuggaua

SEQ ID NO: 1346531 - RNA, 19 nt, Homo sapiens
  misc_RNA (1)...(19): siRNA sense strand
agaguuugauggaauucug

SEQ ID NO: 1346532 - RNA, 19 nt, Homo sapiens
  misc_RNA (1)...(19): siRNA sense strand
ugcagaguuugauggaauu

SEQ ID NO: 1346533 - RNA, 19 nt, Homo sapiens
  misc_RNA (1)...(19): siRNA sense strand
aggucaaucuuucuccauu

SEQ ID NO: 1346534 - RNA, 19 nt, Homo sapiens
  misc_RNA (1)...(19): siRNA sense strand
uucuggaaaucccauaauu

SEQ ID NO: 1346535 - RNA, 19 nt, Homo sapiens
  misc_RNA (1)...(19): siRNA sense strand
ucucugggagccugaauug

SEQ ID NO: 1346536 - RNA, 19 nt, Homo sapiens
  misc_RNA (1)...(19): siRNA sense strand
cgaccacucccauuucucu

SEQ ID NO: 1346537 - RNA, 19 nt, Homo sapiens
  misc_RNA (1)...(19): siRNA sense strand
auccgucccucaagaagaa

SEQ ID NO: 1346538 - RNA, 19 nt, Homo sapiens
  misc_RNA (1)...(19): siRNA sense strand
gcaagcuuacuggcagauu

SEQ ID NO: 1346539 - RNA, 19 nt, Homo sapiens
  misc_RNA (1)...(19): siRNA sense strand
cuacgaccacucccauuuc

SEQ ID NO: 1346540 - RNA, 19 nt, Homo sapiens
  misc_RNA (1)...(19): siRNA sense strand
caccgaguccugcucaaug

SEQ ID NO: 1346541 - RNA, 19 nt, Homo sapiens
  misc_RNA (1)...(19): siRNA sense strand
cugguggacuugccgaugu

SEQ ID NO: 1346542 - RNA, 19 nt, Homo sapiens
  misc_RNA (1)...(19): siRNA sense strand
ggagugugccaaccuuaac

SEQ ID NO: 1346543 - RNA, 19 nt, Homo sapiens
  misc_RNA (1)...(19): siRNA sense strand
ccucaucaacuacuuggau

SEQ ID NO: 1346544 - RNA, 19 nt, Homo sapiens
  misc_RNA (1)...(19): siRNA sense strand
gaacuucacugucaucuuc

SEQ ID NO: 1346545 - RNA, 19 nt, Homo sapiens
  misc_RNA (1)...(19): siRNA sense strand
gaugucaccuucaccauua

SEQ ID NO: 1346546 - RNA, 19 nt, Homo sapiens
  misc_RNA (1)...(19): siRNA sense strand
ggaccagagugccaaggaa

SEQ ID NO: 1346547 - RNA, 19 nt, Homo sapiens
  misc_RNA (1)...(19): siRNA sense strand
caagcuuacuggcagauug

SEQ ID NO: 1346548 - RNA, 19 nt, Homo sapiens
  misc_RNA (1)...(19): siRNA sense strand
ccaagucucuguggaagga

SEQ ID NO: 1346549 - RNA, 19 nt, Homo sapiens
  misc_RNA (1)...(19): siRNA sense strand
gcuacgaccacucccauuu

SEQ ID NO: 1346550 - RNA, 19 nt, Homo sapiens
  misc_RNA (1)...(19): siRNA sense strand
ggaugucaccuucaccauu

SEQ ID NO: 1346551 - RNA, 19 nt, Homo sapiens
  misc_RNA (1)...(19): siRNA sense strand
gcaagacgcacagcagguu

SEQ ID NO: 1346552 - RNA, 19 nt, Homo sapiens
  misc_RNA (1)...(19): siRNA sense strand
ggucaaucuuucuccauuc

SEQ ID NO: 1346553 - RNA, 19 nt, Homo sapiens
  misc_RNA (1)...(19): siRNA sense strand
gagcuuguccgggaucauu

SEQ ID NO: 1346554 - RNA, 19 nt, Homo sapiens
  misc_RNA (1)...(19): siRNA sense strand
ggccagcaguuuggagaaa

SEQ ID NO: 1346555 - RNA, 19 nt, Homo sapiens
  misc_RNA (1)...(19): siRNA sense strand
ggacuucguggauggaaug

SEQ ID NO: 1346556 - RNA, 19 nt, Homo sapiens
  misc_RNA (1)...(19): siRNA sense strand
ucaacuacuuggauaugga

SEQ ID NO: 1346557 - RNA, 19 nt, Homo sapiens
  misc_RNA (1)...(19): siRNA sense strand
gcacuagcccagccugcaa

SEQ ID NO: 1346558 - RNA, 19 nt, Homo sapiens
  misc_RNA (1)...(19): siRNA sense strand
ccagccaggucaaucuuuc

SEQ ID NO: 1346559 - RNA, 19 nt, Homo sapiens
  misc_RNA (1)...(19): siRNA sense strand
caugagcaguaacccagaa

SEQ ID NO: 1346560 - RNA, 19 nt, Homo sapiens
  misc_RNA (1)...(19): siRNA sense strand
cucaucaacuacuuggaua

SEQ ID NO: 1346561 - RNA, 19 nt, Homo sapiens
  misc_RNA (1)...(19): siRNA sense strand
cgaccaagucucuguggaa

SEQ ID NO: 1346562 - RNA, 19 nt, Homo sapiens
  misc_RNA (1)...(19): siRNA sense strand
gucaaucuuucuccauuca

SEQ ID NO: 1346563 - RNA, 19 nt, Homo sapiens
  misc_RNA (1)...(19): siRNA sense strand
caacuacuuggauauggaa

SEQ ID NO: 1346564 - RNA, 19 nt, Homo sapiens
  misc_RNA (1)...(19): siRNA sense strand
cuuuguggaugcagaguuu

SEQ ID NO: 1346565 - RNA, 19 nt, Homo sapiens
  misc_RNA (1)...(19): siRNA sense strand
acaacaugauggcucagaa

SEQ ID NO: 1346566 - RNA, 19 nt, Homo sapiens
  misc_RNA (1)...(19): siRNA sense strand
gagccaggccagaccuuug

SEQ ID NO: 1346567 - RNA, 19 nt, Homo sapiens
  misc_RNA (1)...(19): siRNA sense strand
gaugcagaguuugauggaa

SEQ ID NO: 1346568 - RNA, 19 nt, Homo sapiens
  misc_RNA (1)...(19): siRNA sense strand
cuacuuggauauggaauac

SEQ ID NO: 1346569 - RNA, 19 nt, Homo sapiens
  misc_RNA (1)...(19): siRNA sense strand
ggaggggccuugugucugu

SEQ ID NO: 1346570 - RNA, 19 nt, Homo sapiens
  misc_RNA (1)...(19): siRNA sense strand
uggaauacuucggcacuau

SEQ ID NO: 1346571 - RNA, 19 nt, Homo sapiens
  misc_RNA (1)...(19): siRNA sense strand
caaucuuucuccauucagu

SEQ ID NO: 1346572 - RNA, 19 nt, Homo sapiens
  misc_RNA (1)...(19): siRNA sense strand
ucccauaauuuggacauga

SEQ ID NO: 1346573 - RNA, 19 nt, Homo sapiens
  misc_RNA (1)...(19): siRNA sense strand
cagcaguggcuuucaagga

SEQ ID NO: 1346574 - RNA, 19 nt, Homo sapiens
  misc_RNA (1)...(19): siRNA sense strand
ggaauacuucggcacuauc

SEQ ID NO: 1346575 - RNA, 19 nt, Homo sapiens
  misc_RNA (1)...(19): siRNA sense strand
gugccaaccuuaacgucau

SEQ ID NO: 1346576 - RNA, 19 nt, Homo sapiens
  misc_RNA (1)...(19): siRNA sense strand
ugacuccaguauuugacaa

SEQ ID NO: 1346577 - RNA, 19 nt, Homo sapiens
  misc_RNA (1)...(19): siRNA sense strand
gaauucugggccugggaua

SEQ ID NO: 1346578 - RNA, 19 nt, Homo sapiens
  misc_RNA (1)...(19): siRNA sense strand
ggaugcagaguuugaugga

SEQ ID NO: 1346579 - RNA, 19 nt, Homo sapiens
  misc_RNA (1)...(19): siRNA sense strand
ucucugaguucuggaaauc

SEQ ID NO: 1346580 - RNA, 19 nt, Homo sapiens
  misc_RNA (1)...(19): siRNA sense strand
gaauacuucggcacuaucu

SEQ ID NO: 1346581 - RNA, 19 nt, Homo sapiens
  misc_RNA (1)...(19): siRNA sense strand
aggcauccgucccucaaga

SEQ ID NO: 1346582 - RNA, 19 nt, Homo sapiens
  misc_RNA (1)...(19): siRNA sense strand
cucagaaccugguggacuu

SEQ ID NO: 1346583 - RNA, 19 nt, Homo sapiens
  misc_RNA (1)...(19): siRNA sense strand
uccaguauuugacaacaug

SEQ ID NO: 1346584 - RNA, 19 nt, Homo sapiens
  misc_RNA (1)...(19): siRNA sense strand
augcagaguuugauggaau

SEQ ID NO: 1346585 - RNA, 19 nt, Homo sapiens
  misc_RNA (1)...(19): siRNA sense strand
cuucggcacuaucuccauu

SEQ ID NO: 1346586 - RNA, 19 nt, Homo sapiens
  misc_RNA (1)...(19): siRNA sense strand
caucaacuacuuggauaug

SEQ ID NO: 1346587 - RNA, 19 nt, Homo sapiens
  misc_RNA (1)...(19): siRNA sense strand
acuuggauauggaauacuu

SEQ ID NO: 1346588 - RNA, 19 nt, Homo sapiens
  misc_RNA (1)...(19): siRNA sense strand
gagcaguaacccagaaggu

SEQ ID NO: 1346589 - RNA, 19 nt, Homo sapiens
  misc_RNA (1)...(19): siRNA sense strand
ccagcaguuuggagaaagu

SEQ ID NO: 1346590 - RNA, 19 nt, Homo sapiens
  misc_RNA (1)...(19): siRNA sense strand
gagccgaccaagucucugu

SEQ ID NO: 1346591 - RNA, 19 nt, Homo sapiens
  misc_RNA (1)...(19): siRNA sense strand
aggucaaucuuucuccauu

SEQ ID NO: 1346592 - RNA, 19 nt, Homo sapiens
  misc_RNA (1)...(19): siRNA sense strand
uggcagauugcacuggaua

SEQ ID NO: 1346593 - RNA, 19 nt, Homo sapiens
  misc_RNA (1)...(19): siRNA sense strand
agaguuugauggaauucug

SEQ ID NO: 1346594 - RNA, 19 nt, Homo sapiens
  misc_RNA (1)...(19): siRNA sense strand
ugcagaguuugauggaauu

SEQ ID NO: 1346595 - RNA, 19 nt, Homo sapiens
  misc_RNA (1)...(19): siRNA sense strand
cccauaauuuggacaugau

SEQ ID NO: 1346596 - RNA, 19 nt, Homo sapiens
  misc_RNA (1)...(19): siRNA sense strand
uucuggaaaucccauaauu

SEQ ID NO: 1346597 - RNA, 19 nt, Homo sapiens
  misc_RNA (1)...(19): siRNA sense strand
ucucugggagccugaauug

SEQ ID NO: 1346598 - RNA, 19 nt, Homo sapiens
  misc_RNA (1)...(19): siRNA sense strand
cgaccacucccauuucucu

SEQ ID NO: 1346599 - RNA, 19 nt, Homo sapiens
  misc_RNA (1)...(19): siRNA sense strand
auccgucccucaagaagaa

SEQ ID NO: 1346600 - RNA, 19 nt, Homo sapiens
  misc_RNA (1)...(19): siRNA sense strand
gcaagcuuacuggcagauu

SEQ ID NO: 1346601 - RNA, 19 nt, Homo sapiens
  misc_RNA (1)...(19): siRNA sense strand
caccgaguccugcucaaug

SEQ ID NO: 1346602 - RNA, 19 nt, Homo sapiens
  misc_RNA (1)...(19): siRNA sense strand
cuacgaccacucccauuuc

SEQ ID NO: 1346603 - RNA, 19 nt, Homo sapiens
  misc_RNA (1)...(19): siRNA sense strand
cugguggacuugccgaugu

SEQ ID NO: 1346604 - RNA, 19 nt, Homo sapiens
  misc_RNA (1)...(19): siRNA sense strand
ggagugugccaaccuuaac

SEQ ID NO: 1346605 - RNA, 19 nt, Homo sapiens
  misc_RNA (1)...(19): siRNA sense strand
ccucaucaacuacuuggau

SEQ ID NO: 1346606 - RNA, 19 nt, Homo sapiens
  misc_RNA (1)...(19): siRNA sense strand
ucaccagggucucaaguuu

SEQ ID NO: 1346607 - RNA, 19 nt, Homo sapiens
  misc_RNA (1)...(19): siRNA sense strand
ggacaacaaugagaagcuu

SEQ ID NO: 1346608 - RNA, 19 nt, Homo sapiens
  misc_RNA (1)...(19): siRNA sense strand
gauaaggacaacaaugaga

SEQ ID NO: 1346609 - RNA, 19 nt, Homo sapiens
  misc_RNA (1)...(19): siRNA sense strand
ucaaacugcuggaucagau

SEQ ID NO: 1346610 - RNA, 19 nt, Homo sapiens
  misc_RNA (1)...(19): siRNA sense strand
gcuucaaacugcuggauca

SEQ ID NO: 1346611 - RNA, 19 nt, Homo sapiens
  misc_RNA (1)...(19): siRNA sense strand
cagcugagcagaagaguca

SEQ ID NO: 1346612 - RNA, 19 nt, Homo sapiens
  misc_RNA (1)...(19): siRNA sense strand
gggaagcaauauaaauguc

SEQ ID NO: 1346613 - RNA, 19 nt, Homo sapiens
  misc_RNA (1)...(19): siRNA sense strand
ggaagcaauauaaauguca

SEQ ID NO: 1346614 - RNA, 19 nt, Homo sapiens
  misc_RNA (1)...(19): siRNA sense strand
uggauaaggacaacaauga

SEQ ID NO: 1346615 - RNA, 19 nt, Homo sapiens
  misc_RNA (1)...(19): siRNA sense strand
caaguuuccugcccuggau

SEQ ID NO: 1346616 - RNA, 19 nt, Homo sapiens
  misc_RNA (1)...(19): siRNA sense strand
ggcaucgucuccuauggaa

SEQ ID NO: 1346617 - RNA, 19 nt, Homo sapiens
  misc_RNA (1)...(19): siRNA sense strand
ccgccacccucaauauaau

SEQ ID NO: 1346618 - RNA, 19 nt, Homo sapiens
  misc_RNA (1)...(19): siRNA sense strand
cagcggaccauccagaaug

SEQ ID NO: 1346619 - RNA, 19 nt, Homo sapiens
  misc_RNA (1)...(19): siRNA sense strand
gaaaacacccagcaacaca

SEQ ID NO: 1346620 - RNA, 19 nt, Homo sapiens
  misc_RNA (1)...(19): siRNA sense strand
caucgucuccuauggaaag

SEQ ID NO: 1346621 - RNA, 19 nt, Homo sapiens
  misc_RNA (1)...(19): siRNA sense strand
ggauaaggacaacaaugag

SEQ ID NO: 1346622 - RNA, 19 nt, Homo sapiens
  misc_RNA (1)...(19): siRNA sense strand
agagucagacggaaucgaa

SEQ ID NO: 1346623 - RNA, 19 nt, Homo sapiens
  misc_RNA (1)...(19): siRNA sense strand
gcagugccuccgcaucuuc

SEQ ID NO: 1346624 - RNA, 19 nt, Homo sapiens
  misc_RNA (1)...(19): siRNA sense strand
cagaagagucagacggaau

SEQ ID NO: 1346625 - RNA, 19 nt, Homo sapiens
  misc_RNA (1)...(19): siRNA sense strand
gagaggugcagcugagagu

SEQ ID NO: 1346626 - RNA, 19 nt, Homo sapiens
  misc_RNA (1)...(19): siRNA sense strand
auaaggacaacaaugagaa

SEQ ID NO: 1346627 - RNA, 19 nt, Homo sapiens
  misc_RNA (1)...(19): siRNA sense strand
uacauggcguaucuucaga

SEQ ID NO: 1346628 - RNA, 19 nt, Homo sapiens
  misc_RNA (1)...(19): siRNA sense strand
aaugagaagcuucaaacug

SEQ ID NO: 1346629 - RNA, 19 nt, Homo sapiens
  misc_RNA (1)...(19): siRNA sense strand
acaaugagaagcuucaaac

SEQ ID NO: 1346630 - RNA, 19 nt, Homo sapiens
  misc_RNA (1)...(19): siRNA sense strand
cauccgccacccucaauau

SEQ ID NO: 1346631 - RNA, 19 nt, Homo sapiens
  misc_RNA (1)...(19): siRNA sense strand
cuacauggcguaucuucag

SEQ ID NO: 1346632 - RNA, 19 nt, Homo sapiens
  misc_RNA (1)...(19): siRNA sense strand
gcaggucagagcagaugug

SEQ ID NO: 1346633 - RNA, 19 nt, Homo sapiens
  misc_RNA (1)...(19): siRNA sense strand
gacggaaucgaaacgugaa

SEQ ID NO: 1346634 - RNA, 19 nt, Homo sapiens
  misc_RNA (1)...(19): siRNA sense strand
ccaaggacggcuggguuua

SEQ ID NO: 1346635 - RNA, 19 nt, Homo sapiens
  misc_RNA (1)...(19): siRNA sense strand
ggacggcuggguuuacuac

SEQ ID NO: 1346636 - RNA, 19 nt, Homo sapiens
  misc_RNA (1)...(19): siRNA sense strand
gggaggagagaaccaccaa

SEQ ID NO: 1346637 - RNA, 19 nt, Homo sapiens
  misc_RNA (1)...(19): siRNA sense strand
ccaaggacggcuggguuua

SEQ ID NO: 1346638 - RNA, 19 nt, Homo sapiens
  misc_RNA (1)...(19): siRNA sense strand
ggacggcuggguuuacuac

SEQ ID NO: 1346639 - RNA, 19 nt, Homo sapiens
  misc_RNA (1)...(19): siRNA sense strand
gggaggagagaaccaccaa

SEQ ID NO: 1346640 - RNA, 19 nt, Homo sapiens
  misc_RNA (1)...(19): siRNA sense strand
ccaaggacggcuggguuua

SEQ ID NO: 1346641 - RNA, 19 nt, Homo sapiens
  misc_RNA (1)...(19): siRNA sense strand
ggacggcuggguuuacuac

SEQ ID NO: 1346642 - RNA, 19 nt, Homo sapiens
  misc_RNA (1)...(19): siRNA sense strand
gggaggagagaaccaccaa

SEQ ID NO: 1346643 - RNA, 19 nt, Homo sapiens
  misc_RNA (1)...(19): siRNA sense strand
ccaaggacggcuggguuua

SEQ ID NO: 1346644 - RNA, 19 nt, Homo sapiens
  misc_RNA (1)...(19): siRNA sense strand
ggacggcuggguuuacuac

SEQ ID NO: 1346645 - RNA, 19 nt, Homo sapiens
  misc_RNA (1)...(19): siRNA sense strand
gggaggagagaaccaccaa

SEQ ID NO: 1346646 - RNA, 19 nt, Homo sapiens
  misc_RNA (1)...(19): siRNA sense strand
ccaaggacggcuggguuua

SEQ ID NO: 1346647 - RNA, 19 nt, Homo sapiens
  misc_RNA (1)...(19): siRNA sense strand
ggacggcuggguuuacuac

SEQ ID NO: 1346648 - RNA, 19 nt, Homo sapiens
  misc_RNA (1)...(19): siRNA sense strand
gggaggagagaaccaccaa

SEQ ID NO: 1346649 - RNA, 19 nt, Homo sapiens
  misc_RNA (1)...(19): siRNA sense strand
ccaaggacggcuggguuua

SEQ ID NO: 1346650 - RNA, 19 nt, Homo sapiens
  misc_RNA (1)...(19): siRNA sense strand
ggacggcuggguuuacuac

SEQ ID NO: 1346651 - RNA, 19 nt, Homo sapiens
  misc_RNA (1)...(19): siRNA sense strand
gggaggagagaaccaccaa

SEQ ID NO: 1346652 - RNA, 19 nt, Homo sapiens
  misc_RNA (1)...(19): siRNA sense strand
ccaaggacggcuggguuua

SEQ ID NO: 1346653 - RNA, 19 nt, Homo sapiens
  misc_RNA (1)...(19): siRNA sense strand
ggacggcuggguuuacuac

SEQ ID NO: 1346654 - RNA, 19 nt, Homo sapiens
  misc_RNA (1)...(19): siRNA sense strand
gggaggagagaaccaccaa

SEQ ID NO: 1346655 - RNA, 19 nt, Homo sapiens
  misc_RNA (1)...(19): siRNA sense strand
gaagagccguuguuuauaa

SEQ ID NO: 1346656 - RNA, 19 nt, Homo sapiens
  misc_RNA (1)...(19): siRNA sense strand
gaagaaagcuuguacucaa

SEQ ID NO: 1346657 - RNA, 19 nt, Homo sapiens
  misc_RNA (1)...(19): siRNA sense strand
gauaagaacuccucaguca

SEQ ID NO: 1346658 - RNA, 19 nt, Homo sapiens
  misc_RNA (1)...(19): siRNA sense strand
gaaaguagauuagcagaau

SEQ ID NO: 1346659 - RNA, 19 nt, Homo sapiens
  misc_RNA (1)...(19): siRNA sense strand
gcccagagcuuugauauuu

SEQ ID NO: 1346660 - RNA, 19 nt, Homo sapiens
  misc_RNA (1)...(19): siRNA sense strand
ggagagaccuuauuaugga

SEQ ID NO: 1346661 - RNA, 19 nt, Homo sapiens
  misc_RNA (1)...(19): siRNA sense strand
cagaagaacuuaaacagaa

SEQ ID NO: 1346662 - RNA, 19 nt, Homo sapiens
  misc_RNA (1)...(19): siRNA sense strand
gaaguucccuuaaaccuau

SEQ ID NO: 1346663 - RNA, 19 nt, Homo sapiens
  misc_RNA (1)...(19): siRNA sense strand
ggauaaagauggcaauguu

SEQ ID NO: 1346664 - RNA, 19 nt, Homo sapiens
  misc_RNA (1)...(19): siRNA sense strand
caacagagauggcuuuaag

SEQ ID NO: 1346665 - RNA, 19 nt, Homo sapiens
  misc_RNA (1)...(19): siRNA sense strand
gaaacaaagugaaaguaga

SEQ ID NO: 1346666 - RNA, 19 nt, Homo sapiens
  misc_RNA (1)...(19): siRNA sense strand
agaacgagcugaagccuua

SEQ ID NO: 1346667 - RNA, 19 nt, Homo sapiens
  misc_RNA (1)...(19): siRNA sense strand
gaacuccucagucaauuua

SEQ ID NO: 1346668 - RNA, 19 nt, Homo sapiens
  misc_RNA (1)...(19): siRNA sense strand
ggaaagccaucuacagaga

SEQ ID NO: 1346669 - RNA, 19 nt, Homo sapiens
  misc_RNA (1)...(19): siRNA sense strand
gaaccuauguauauucaga

SEQ ID NO: 1346670 - RNA, 19 nt, Homo sapiens
  misc_RNA (1)...(19): siRNA sense strand
ggagugacauggcuaauuc

SEQ ID NO: 1346671 - RNA, 19 nt, Homo sapiens
  misc_RNA (1)...(19): siRNA sense strand
gaaguacucuccaucugaa

SEQ ID NO: 1346672 - RNA, 19 nt, Homo sapiens
  misc_RNA (1)...(19): siRNA sense strand
agacgagccuuucuuauuu

SEQ ID NO: 1346673 - RNA, 19 nt, Homo sapiens
  misc_RNA (1)...(19): siRNA sense strand
gaaagaauauuggauacug

SEQ ID NO: 1346674 - RNA, 19 nt, Homo sapiens
  misc_RNA (1)...(19): siRNA sense strand
gaaggacucuaaugcagaa

SEQ ID NO: 1346675 - RNA, 19 nt, Homo sapiens
  misc_RNA (1)...(19): siRNA sense strand
uggauaagcuuucaacuga

SEQ ID NO: 1346676 - RNA, 19 nt, Homo sapiens
  misc_RNA (1)...(19): siRNA sense strand
ugacuaugcucuuguauau

SEQ ID NO: 1346677 - RNA, 19 nt, Homo sapiens
  misc_RNA (1)...(19): siRNA sense strand
acacucagaugaagaagua

SEQ ID NO: 1346678 - RNA, 19 nt, Homo sapiens
  misc_RNA (1)...(19): siRNA sense strand
ugagacaacuggccaaauu

SEQ ID NO: 1346679 - RNA, 19 nt, Homo sapiens
  misc_RNA (1)...(19): siRNA sense strand
gaacacaucaugcaaagga

SEQ ID NO: 1346680 - RNA, 19 nt, Homo sapiens
  misc_RNA (1)...(19): siRNA sense strand
ugacauggcuaauuccaaa

SEQ ID NO: 1346681 - RNA, 19 nt, Homo sapiens
  misc_RNA (1)...(19): siRNA sense strand
cauaaccacuuuguucuua

SEQ ID NO: 1346682 - RNA, 19 nt, Homo sapiens
  misc_RNA (1)...(19): siRNA sense strand
gaggacaaaucaagaaguu

SEQ ID NO: 1346683 - RNA, 19 nt, Homo sapiens
  misc_RNA (1)...(19): siRNA sense strand
gaagagggcauuaagaaau

SEQ ID NO: 1346684 - RNA, 19 nt, Homo sapiens
  misc_RNA (1)...(19): siRNA sense strand
ugauaaagcuugggaauau

SEQ ID NO: 1346685 - RNA, 19 nt, Homo sapiens
  misc_RNA (1)...(19): siRNA sense strand
cagaacaacugaaugcaaa

SEQ ID NO: 1346686 - RNA, 19 nt, Homo sapiens
  misc_RNA (1)...(19): siRNA sense strand
gacagaagaugaugaaagu

SEQ ID NO: 1346687 - RNA, 19 nt, Homo sapiens
  misc_RNA (1)...(19): siRNA sense strand
gagccuuucuuauuucuuu

SEQ ID NO: 1346688 - RNA, 19 nt, Homo sapiens
  misc_RNA (1)...(19): siRNA sense strand
aaccauaccuuaccacuaa

SEQ ID NO: 1346689 - RNA, 19 nt, Homo sapiens
  misc_RNA (1)...(19): siRNA sense strand
cauuaaagaugaacucuga

SEQ ID NO: 1346690 - RNA, 19 nt, Homo sapiens
  misc_RNA (1)...(19): siRNA sense strand
uaacgauacugaagaagaa

SEQ ID NO: 1346691 - RNA, 19 nt, Homo sapiens
  misc_RNA (1)...(19): siRNA sense strand
gaacauggcauuaaaucug

SEQ ID NO: 1346692 - RNA, 19 nt, Homo sapiens
  misc_RNA (1)...(19): siRNA sense strand
agaagcagcaguagaauua

SEQ ID NO: 1346693 - RNA, 19 nt, Homo sapiens
  misc_RNA (1)...(19): siRNA sense strand
gcaacgagguguucaugga

SEQ ID NO: 1346694 - RNA, 19 nt, Homo sapiens
  misc_RNA (1)...(19): siRNA sense strand
gaacuuaaacagaaugaga

SEQ ID NO: 1346695 - RNA, 19 nt, Homo sapiens
  misc_RNA (1)...(19): siRNA sense strand
acacuucacuucuaacaaa

SEQ ID NO: 1346696 - RNA, 19 nt, Homo sapiens
  misc_RNA (1)...(19): siRNA sense strand
caacaauucuucagguuuc

SEQ ID NO: 1346697 - RNA, 19 nt, Homo sapiens
  misc_RNA (1)...(19): siRNA sense strand
gaauaaaccaucaaaguca

SEQ ID NO: 1346698 - RNA, 19 nt, Homo sapiens
  misc_RNA (1)...(19): siRNA sense strand
uaaaggagcuaagccugua

SEQ ID NO: 1346699 - RNA, 19 nt, Homo sapiens
  misc_RNA (1)...(19): siRNA sense strand
gcugaacaguauuaugaua

SEQ ID NO: 1346700 - RNA, 19 nt, Homo sapiens
  misc_RNA (1)...(19): siRNA sense strand
caacagcaagguuaacaua

SEQ ID NO: 1346701 - RNA, 19 nt, Homo sapiens
  misc_RNA (1)...(19): siRNA sense strand
ggucuaggauuugccuuua

SEQ ID NO: 1346702 - RNA, 19 nt, Homo sapiens
  misc_RNA (1)...(19): siRNA sense strand
acauugagauccucuagua

SEQ ID NO: 1346703 - RNA, 19 nt, Homo sapiens
  misc_RNA (1)...(19): siRNA sense strand
gggcuuguuucaauagaua

SEQ ID NO: 1346704 - RNA, 19 nt, Homo sapiens
  misc_RNA (1)...(19): siRNA sense strand
gcaguauucucaagauaug

SEQ ID NO: 1346705 - RNA, 19 nt, Homo sapiens
  misc_RNA (1)...(19): siRNA sense strand
ugaagaagaagaaagguua

SEQ ID NO: 1346706 - RNA, 19 nt, Homo sapiens
  misc_RNA (1)...(19): siRNA sense strand
gauaaagauggcaauguua

SEQ ID NO: 1346707 - RNA, 19 nt, Homo sapiens
  misc_RNA (1)...(19): siRNA sense strand
uaucauuggucuaggauuu

SEQ ID NO: 1346708 - RNA, 19 nt, Homo sapiens
  misc_RNA (1)...(19): siRNA sense strand
gcagaagaagauucaaaua

SEQ ID NO: 1346709 - RNA, 19 nt, Homo sapiens
  misc_RNA (1)...(19): siRNA sense strand
gagaaccuauguauauuca

SEQ ID NO: 1346710 - RNA, 19 nt, Homo sapiens
  misc_RNA (1)...(19): siRNA sense strand
gcuaaauguucuacccaua

SEQ ID NO: 1346711 - RNA, 19 nt, Homo sapiens
  misc_RNA (1)...(19): siRNA sense strand
ugacaguccucguguuaaa

SEQ ID NO: 1346712 - RNA, 19 nt, Homo sapiens
  misc_RNA (1)...(19): siRNA sense strand
cgauauaaauucagugaug

SEQ ID NO: 1346713 - RNA, 19 nt, Homo sapiens
  misc_RNA (1)...(19): siRNA sense strand
gcaaucaacacaugccuaa

SEQ ID NO: 1346714 - RNA, 19 nt, Homo sapiens
  misc_RNA (1)...(19): siRNA sense strand
gauagagacuggaagaaag

SEQ ID NO: 1346715 - RNA, 19 nt, Homo sapiens
  misc_RNA (1)...(19): siRNA sense strand
gcagagauacuggauauga

SEQ ID NO: 1346716 - RNA, 19 nt, Homo sapiens
  misc_RNA (1)...(19): siRNA sense strand
gaaagcauaugaaccaaaa

SEQ ID NO: 1346717 - RNA, 19 nt, Homo sapiens
  misc_RNA (1)...(19): siRNA sense strand
aggcagaauuuccaaguua

SEQ ID NO: 1346718 - RNA, 19 nt, Homo sapiens
  misc_RNA (1)...(19): siRNA sense strand
gaugaaauguuugccagaa

SEQ ID NO: 1346719 - RNA, 19 nt, Homo sapiens
  misc_RNA (1)...(19): siRNA sense strand
guauauagcagacaaucua

SEQ ID NO: 1346720 - RNA, 19 nt, Homo sapiens
  misc_RNA (1)...(19): siRNA sense strand
cauauaaaccugugaagaa

SEQ ID NO: 1346721 - RNA, 19 nt, Homo sapiens
  misc_RNA (1)...(19): siRNA sense strand
uuacuucacuugcaagauu

SEQ ID NO: 1346722 - RNA, 19 nt, Homo sapiens
  misc_RNA (1)...(19): siRNA sense strand
guuagcagcuuaucagaau

SEQ ID NO: 1346723 - RNA, 19 nt, Homo sapiens
  misc_RNA (1)...(19): siRNA sense strand
gagauucacagccucaaua

SEQ ID NO: 1346724 - RNA, 19 nt, Homo sapiens
  misc_RNA (1)...(19): siRNA sense strand
gaaaacaucagcuuaauga

SEQ ID NO: 1346725 - RNA, 19 nt, Homo sapiens
  misc_RNA (1)...(19): siRNA sense strand
ggaaacguguagauucaga

SEQ ID NO: 1346726 - RNA, 19 nt, Homo sapiens
  misc_RNA (1)...(19): siRNA sense strand
cagacaaucuagccuguuu

SEQ ID NO: 1346727 - RNA, 19 nt, Homo sapiens
  misc_RNA (1)...(19): siRNA sense strand
ccaaauaacacuucacuuc

SEQ ID NO: 1346728 - RNA, 19 nt, Homo sapiens
  misc_RNA (1)...(19): siRNA sense strand
caaaggaaauugagacaac

SEQ ID NO: 1346729 - RNA, 19 nt, Homo sapiens
  misc_RNA (1)...(19): siRNA sense strand
ggauguaauugaaagaguu

SEQ ID NO: 1346730 - RNA, 19 nt, Homo sapiens
  misc_RNA (1)...(19): siRNA sense strand
gacgugaccaugauaauaa

SEQ ID NO: 1346731 - RNA, 19 nt, Homo sapiens
  misc_RNA (1)...(19): siRNA sense strand
gaugaugcuugcuugauug

SEQ ID NO: 1346732 - RNA, 19 nt, Homo sapiens
  misc_RNA (1)...(19): siRNA sense strand
gcacugguuuuacaacuua

SEQ ID NO: 1346733 - RNA, 19 nt, Homo sapiens
  misc_RNA (1)...(19): siRNA sense strand
guuagucacugcaguauuc

SEQ ID NO: 1346734 - RNA, 19 nt, Homo sapiens
  misc_RNA (1)...(19): siRNA sense strand
cagauuagauccucaugga

SEQ ID NO: 1346735 - RNA, 19 nt, Homo sapiens
  misc_RNA (1)...(19): siRNA sense strand
caggaugggucaaagcuuu

SEQ ID NO: 1346736 - RNA, 19 nt, Homo sapiens
  misc_RNA (1)...(19): siRNA sense strand
gagcuaagccuguaguugu

SEQ ID NO: 1346737 - RNA, 19 nt, Homo sapiens
  misc_RNA (1)...(19): siRNA sense strand
ccugaagugucuaaacaua

SEQ ID NO: 1346738 - RNA, 19 nt, Homo sapiens
  misc_RNA (1)...(19): siRNA sense strand
aaauucagcuccuuuaauc

SEQ ID NO: 1346739 - RNA, 19 nt, Homo sapiens
  misc_RNA (1)...(19): siRNA sense strand
gacauuacacucucaguuu

SEQ ID NO: 1346740 - RNA, 19 nt, Homo sapiens
  misc_RNA (1)...(19): siRNA sense strand
ucagagacauuuguauuga

SEQ ID NO: 1346741 - RNA, 19 nt, Homo sapiens
  misc_RNA (1)...(19): siRNA sense strand
cauggacgauugauggaua

SEQ ID NO: 1346742 - RNA, 19 nt, Homo sapiens
  misc_RNA (1)...(19): siRNA sense strand
caaaagccaugaaguguuu

SEQ ID NO: 1346743 - RNA, 19 nt, Homo sapiens
  misc_RNA (1)...(19): siRNA sense strand
ccaaacagaagaacuuaaa

SEQ ID NO: 1346744 - RNA, 19 nt, Homo sapiens
  misc_RNA (1)...(19): siRNA sense strand
ggaagagccguuguuuaua

SEQ ID NO: 1346745 - RNA, 19 nt, Homo sapiens
  misc_RNA (1)...(19): siRNA sense strand
gacgauugauggauaauuc

SEQ ID NO: 1346746 - RNA, 19 nt, Homo sapiens
  misc_RNA (1)...(19): siRNA sense strand
gaagaaucaucugaaggaa

SEQ ID NO: 1346747 - RNA, 19 nt, Homo sapiens
  misc_RNA (1)...(19): siRNA sense strand
uaagcaaggugaagaagau

SEQ ID NO: 1346748 - RNA, 19 nt, Homo sapiens
  misc_RNA (1)...(19): siRNA sense strand
gcaauggguauaauggaua

SEQ ID NO: 1346749 - RNA, 19 nt, Homo sapiens
  misc_RNA (1)...(19): siRNA sense strand
ugacauuguuagcagcuua

SEQ ID NO: 1346750 - RNA, 19 nt, Homo sapiens
  misc_RNA (1)...(19): siRNA sense strand
acagcaagguuaacauaaa

SEQ ID NO: 1346751 - RNA, 19 nt, Homo sapiens
  misc_RNA (1)...(19): siRNA sense strand
ugaagcucaucaucaaaua

SEQ ID NO: 1346752 - RNA, 19 nt, Homo sapiens
  misc_RNA (1)...(19): siRNA sense strand
gaacaaccaacauuuccaa

SEQ ID NO: 1346753 - RNA, 19 nt, Homo sapiens
  misc_RNA (1)...(19): siRNA sense strand
ggacucuaaugcagaagaa

SEQ ID NO: 1346754 - RNA, 19 nt, Homo sapiens
  misc_RNA (1)...(19): siRNA sense strand
cuagagauacaacuucuua

SEQ ID NO: 1346755 - RNA, 19 nt, Homo sapiens
  misc_RNA (1)...(19): siRNA sense strand
gaagagccguuguuuauaa

SEQ ID NO: 1346756 - RNA, 19 nt, Homo sapiens
  misc_RNA (1)...(19): siRNA sense strand
gaagaaagcuuguacucaa

SEQ ID NO: 1346757 - RNA, 19 nt, Homo sapiens
  misc_RNA (1)...(19): siRNA sense strand
gauaagaacuccucaguca

SEQ ID NO: 1346758 - RNA, 19 nt, Homo sapiens
  misc_RNA (1)...(19): siRNA sense strand
gaaaguagauuagcagaau

SEQ ID NO: 1346759 - RNA, 19 nt, Homo sapiens
  misc_RNA (1)...(19): siRNA sense strand
gcccagagcuuugauauuu

SEQ ID NO: 1346760 - RNA, 19 nt, Homo sapiens
  misc_RNA (1)...(19): siRNA sense strand
ggagagaccuuauuaugga

SEQ ID NO: 1346761 - RNA, 19 nt, Homo sapiens
  misc_RNA (1)...(19): siRNA sense strand
cagaagaacuuaaacagaa

SEQ ID NO: 1346762 - RNA, 19 nt, Homo sapiens
  misc_RNA (1)...(19): siRNA sense strand
gaaguucccuuaaaccuau

SEQ ID NO: 1346763 - RNA, 19 nt, Homo sapiens
  misc_RNA (1)...(19): siRNA sense strand
ggauaaagauggcaauguu

SEQ ID NO: 1346764 - RNA, 19 nt, Homo sapiens
  misc_RNA (1)...(19): siRNA sense strand
caacagagauggcuuuaag

SEQ ID NO: 1346765 - RNA, 19 nt, Homo sapiens
  misc_RNA (1)...(19): siRNA sense strand
gaaacaaagugaaaguaga

SEQ ID NO: 1346766 - RNA, 19 nt, Homo sapiens
  misc_RNA (1)...(19): siRNA sense strand
agaacgagcugaagccuua

SEQ ID NO: 1346767 - RNA, 19 nt, Homo sapiens
  misc_RNA (1)...(19): siRNA sense strand
gaacuccucagucaauuua

SEQ ID NO: 1346768 - RNA, 19 nt, Homo sapiens
  misc_RNA (1)...(19): siRNA sense strand
ggaaagccaucuacagaga

SEQ ID NO: 1346769 - RNA, 19 nt, Homo sapiens
  misc_RNA (1)...(19): siRNA sense strand
gaaccuauguauauucaga

SEQ ID NO: 1346770 - RNA, 19 nt, Homo sapiens
  misc_RNA (1)...(19): siRNA sense strand
ggagugacauggcuaauuc

SEQ ID NO: 1346771 - RNA, 19 nt, Homo sapiens
  misc_RNA (1)...(19): siRNA sense strand
gaaguacucuccaucugaa

SEQ ID NO: 1346772 - RNA, 19 nt, Homo sapiens
  misc_RNA (1)...(19): siRNA sense strand
agacgagccuuucuuauuu

SEQ ID NO: 1346773 - RNA, 19 nt, Homo sapiens
  misc_RNA (1)...(19): siRNA sense strand
gaaagaauauuggauacug

SEQ ID NO: 1346774 - RNA, 19 nt, Homo sapiens
  misc_RNA (1)...(19): siRNA sense strand
gaaggacucuaaugcagaa

SEQ ID NO: 1346775 - RNA, 19 nt, Homo sapiens
  misc_RNA (1)...(19): siRNA sense strand
uggauaagcuuucaacuga

SEQ ID NO: 1346776 - RNA, 19 nt, Homo sapiens
  misc_RNA (1)...(19): siRNA sense strand
ugacuaugcucuuguauau

SEQ ID NO: 1346777 - RNA, 19 nt, Homo sapiens
  misc_RNA (1)...(19): siRNA sense strand
acacucagaugaagaagua

SEQ ID NO: 1346778 - RNA, 19 nt, Homo sapiens
  misc_RNA (1)...(19): siRNA sense strand
ugagacaacuggccaaauu

SEQ ID NO: 1346779 - RNA, 19 nt, Homo sapiens
  misc_RNA (1)...(19): siRNA sense strand
gaacacaucaugcaaagga

SEQ ID NO: 1346780 - RNA, 19 nt, Homo sapiens
  misc_RNA (1)...(19): siRNA sense strand
ugacauggcuaauuccaaa

SEQ ID NO: 1346781 - RNA, 19 nt, Homo sapiens
  misc_RNA (1)...(19): siRNA sense strand
cauaaccacuuuguucuua

SEQ ID NO: 1346782 - RNA, 19 nt, Homo sapiens
  misc_RNA (1)...(19): siRNA sense strand
gaggacaaaucaagaaguu

SEQ ID NO: 1346783 - RNA, 19 nt, Homo sapiens
  misc_RNA (1)...(19): siRNA sense strand
gaagagggcauuaagaaau

SEQ ID NO: 1346784 - RNA, 19 nt, Homo sapiens
  misc_RNA (1)...(19): siRNA sense strand
ugauaaagcuugggaauau

SEQ ID NO: 1346785 - RNA, 19 nt, Homo sapiens
  misc_RNA (1)...(19): siRNA sense strand
cagaacaacugaaugcaaa

SEQ ID NO: 1346786 - RNA, 19 nt, Homo sapiens
  misc_RNA (1)...(19): siRNA sense strand
gacagaagaugaugaaagu

SEQ ID NO: 1346787 - RNA, 19 nt, Homo sapiens
  misc_RNA (1)...(19): siRNA sense strand
gagccuuucuuauuucuuu

SEQ ID NO: 1346788 - RNA, 19 nt, Homo sapiens
  misc_RNA (1)...(19): siRNA sense strand
aaccauaccuuaccacuaa

SEQ ID NO: 1346789 - RNA, 19 nt, Homo sapiens
  misc_RNA (1)...(19): siRNA sense strand
cauuaaagaugaacucuga

SEQ ID NO: 1346790 - RNA, 19 nt, Homo sapiens
  misc_RNA (1)...(19): siRNA sense strand
uaacgauacugaagaagaa

SEQ ID NO: 1346791 - RNA, 19 nt, Homo sapiens
  misc_RNA (1)...(19): siRNA sense strand
gaacauggcauuaaaucug

SEQ ID NO: 1346792 - RNA, 19 nt, Homo sapiens
  misc_RNA (1)...(19): siRNA sense strand
agaagcagcaguagaauua

SEQ ID NO: 1346793 - RNA, 19 nt, Homo sapiens
  misc_RNA (1)...(19): siRNA sense strand
gcaacgagguguucaugga

SEQ ID NO: 1346794 - RNA, 19 nt, Homo sapiens
  misc_RNA (1)...(19): siRNA sense strand
gaacuuaaacagaaugaga

SEQ ID NO: 1346795 - RNA, 19 nt, Homo sapiens
  misc_RNA (1)...(19): siRNA sense strand
acacuucacuucuaacaaa

SEQ ID NO: 1346796 - RNA, 19 nt, Homo sapiens
  misc_RNA (1)...(19): siRNA sense strand
caacaauucuucagguuuc

SEQ ID NO: 1346797 - RNA, 19 nt, Homo sapiens
  misc_RNA (1)...(19): siRNA sense strand
gaauaaaccaucaaaguca

SEQ ID NO: 1346798 - RNA, 19 nt, Homo sapiens
  misc_RNA (1)...(19): siRNA sense strand
uaaaggagcuaagccugua

SEQ ID NO: 1346799 - RNA, 19 nt, Homo sapiens
  misc_RNA (1)...(19): siRNA sense strand
gcugaacaguauuaugaua

SEQ ID NO: 1346800 - RNA, 19 nt, Homo sapiens
  misc_RNA (1)...(19): siRNA sense strand
caacagcaagguuaacaua

SEQ ID NO: 1346801 - RNA, 19 nt, Homo sapiens
  misc_RNA (1)...(19): siRNA sense strand
ggucuaggauuugccuuua

SEQ ID NO: 1346802 - RNA, 19 nt, Homo sapiens
  misc_RNA (1)...(19): siRNA sense strand
acauugagauccucuagua

SEQ ID NO: 1346803 - RNA, 19 nt, Homo sapiens
  misc_RNA (1)...(19): siRNA sense strand
gggcuuguuucaauagaua

SEQ ID NO: 1346804 - RNA, 19 nt, Homo sapiens
  misc_RNA (1)...(19): siRNA sense strand
gcaguauucucaagauaug

SEQ ID NO: 1346805 - RNA, 19 nt, Homo sapiens
  misc_RNA (1)...(19): siRNA sense strand
ugaagaagaagaaagguua

SEQ ID NO: 1346806 - RNA, 19 nt, Homo sapiens
  misc_RNA (1)...(19): siRNA sense strand
gauaaagauggcaauguua

SEQ ID NO: 1346807 - RNA, 19 nt, Homo sapiens
  misc_RNA (1)...(19): siRNA sense strand
uaucauuggucuaggauuu

SEQ ID NO: 1346808 - RNA, 19 nt, Homo sapiens
  misc_RNA (1)...(19): siRNA sense strand
gcagaagaagauucaaaua

SEQ ID NO: 1346809 - RNA, 19 nt, Homo sapiens
  misc_RNA (1)...(19): siRNA sense strand
gagaaccuauguauauuca

SEQ ID NO: 1346810 - RNA, 19 nt, Homo sapiens
  misc_RNA (1)...(19): siRNA sense strand
gcuaaauguucuacccaua

SEQ ID NO: 1346811 - RNA, 19 nt, Homo sapiens
  misc_RNA (1)...(19): siRNA sense strand
ugacaguccucguguuaaa

SEQ ID NO: 1346812 - RNA, 19 nt, Homo sapiens
  misc_RNA (1)...(19): siRNA sense strand
cgauauaaauucagugaug

SEQ ID NO: 1346813 - RNA, 19 nt, Homo sapiens
  misc_RNA (1)...(19): siRNA sense strand
gcaaucaacacaugccuaa

SEQ ID NO: 1346814 - RNA, 19 nt, Homo sapiens
  misc_RNA (1)...(19): siRNA sense strand
gauagagacuggaagaaag

SEQ ID NO: 1346815 - RNA, 19 nt, Homo sapiens
  misc_RNA (1)...(19): siRNA sense strand
gcagagauacuggauauga

SEQ ID NO: 1346816 - RNA, 19 nt, Homo sapiens
  misc_RNA (1)...(19): siRNA sense strand
gaaagcauaugaaccaaaa

SEQ ID NO: 1346817 - RNA, 19 nt, Homo sapiens
  misc_RNA (1)...(19): siRNA sense strand
aggcagaauuuccaaguua

SEQ ID NO: 1346818 - RNA, 19 nt, Homo sapiens
  misc_RNA (1)...(19): siRNA sense strand
gaugaaauguuugccagaa

SEQ ID NO: 1346819 - RNA, 19 nt, Homo sapiens
  misc_RNA (1)...(19): siRNA sense strand
guauauagcagacaaucua

SEQ ID NO: 1346820 - RNA, 19 nt, Homo sapiens
  misc_RNA (1)...(19): siRNA sense strand
cauauaaaccugugaagaa

SEQ ID NO: 1346821 - RNA, 19 nt, Homo sapiens
  misc_RNA (1)...(19): siRNA sense strand
uuacuucacuugcaagauu

SEQ ID NO: 1346822 - RNA, 19 nt, Homo sapiens
  misc_RNA (1)...(19): siRNA sense strand
guuagcagcuuaucagaau

SEQ ID NO: 1346823 - RNA, 19 nt, Homo sapiens
  misc_RNA (1)...(19): siRNA sense strand
gagauucacagccucaaua

SEQ ID NO: 1346824 - RNA, 19 nt, Homo sapiens
  misc_RNA (1)...(19): siRNA sense strand
gaaaacaucagcuuaauga

SEQ ID NO: 1346825 - RNA, 19 nt, Homo sapiens
  misc_RNA (1)...(19): siRNA sense strand
ggaaacguguagauucaga

SEQ ID NO: 1346826 - RNA, 19 nt, Homo sapiens
  misc_RNA (1)...(19): siRNA sense strand
cagacaaucuagccuguuu

SEQ ID NO: 1346827 - RNA, 19 nt, Homo sapiens
  misc_RNA (1)...(19): siRNA sense strand
ccaaauaacacuucacuuc

SEQ ID NO: 1346828 - RNA, 19 nt, Homo sapiens
  misc_RNA (1)...(19): siRNA sense strand
caaaggaaauugagacaac

SEQ ID NO: 1346829 - RNA, 19 nt, Homo sapiens
  misc_RNA (1)...(19): siRNA sense strand
ggauguaauugaaagaguu

SEQ ID NO: 1346830 - RNA, 19 nt, Homo sapiens
  misc_RNA (1)...(19): siRNA sense strand
gacgugaccaugauaauaa

SEQ ID NO: 1346831 - RNA, 19 nt, Homo sapiens
  misc_RNA (1)...(19): siRNA sense strand
gaugaugcuugcuugauug

SEQ ID NO: 1346832 - RNA, 19 nt, Homo sapiens
  misc_RNA (1)...(19): siRNA sense strand
gcacugguuuuacaacuua

SEQ ID NO: 1346833 - RNA, 19 nt, Homo sapiens
  misc_RNA (1)...(19): siRNA sense strand
guuagucacugcaguauuc

SEQ ID NO: 1346834 - RNA, 19 nt, Homo sapiens
  misc_RNA (1)...(19): siRNA sense strand
cagauuagauccucaugga

SEQ ID NO: 1346835 - RNA, 19 nt, Homo sapiens
  misc_RNA (1)...(19): siRNA sense strand
caggaugggucaaagcuuu

SEQ ID NO: 1346836 - RNA, 19 nt, Homo sapiens
  misc_RNA (1)...(19): siRNA sense strand
gagcuaagccuguaguugu

SEQ ID NO: 1346837 - RNA, 19 nt, Homo sapiens
  misc_RNA (1)...(19): siRNA sense strand
ccugaagugucuaaacaua

SEQ ID NO: 1346838 - RNA, 19 nt, Homo sapiens
  misc_RNA (1)...(19): siRNA sense strand
aaauucagcuccuuuaauc

SEQ ID NO: 1346839 - RNA, 19 nt, Homo sapiens
  misc_RNA (1)...(19): siRNA sense strand
gacauuacacucucaguuu

SEQ ID NO: 1346840 - RNA, 19 nt, Homo sapiens
  misc_RNA (1)...(19): siRNA sense strand
ucagagacauuuguauuga

SEQ ID NO: 1346841 - RNA, 19 nt, Homo sapiens
  misc_RNA (1)...(19): siRNA sense strand
cauggacgauugauggaua

SEQ ID NO: 1346842 - RNA, 19 nt, Homo sapiens
  misc_RNA (1)...(19): siRNA sense strand
caaaagccaugaaguguuu

SEQ ID NO: 1346843 - RNA, 19 nt, Homo sapiens
  misc_RNA (1)...(19): siRNA sense strand
ccaaacagaagaacuuaaa

SEQ ID NO: 1346844 - RNA, 19 nt, Homo sapiens
  misc_RNA (1)...(19): siRNA sense strand
ggaagagccguuguuuaua

SEQ ID NO: 1346845 - RNA, 19 nt, Homo sapiens
  misc_RNA (1)...(19): siRNA sense strand
gacgauugauggauaauuc

SEQ ID NO: 1346846 - RNA, 19 nt, Homo sapiens
  misc_RNA (1)...(19): siRNA sense strand
gaagaaucaucugaaggaa

SEQ ID NO: 1346847 - RNA, 19 nt, Homo sapiens
  misc_RNA (1)...(19): siRNA sense strand
uaagcaaggugaagaagau

SEQ ID NO: 1346848 - RNA, 19 nt, Homo sapiens
  misc_RNA (1)...(19): siRNA sense strand
gcaauggguauaauggaua

SEQ ID NO: 1346849 - RNA, 19 nt, Homo sapiens
  misc_RNA (1)...(19): siRNA sense strand
ugacauuguuagcagcuua

SEQ ID NO: 1346850 - RNA, 19 nt, Homo sapiens
  misc_RNA (1)...(19): siRNA sense strand
acagcaagguuaacauaaa

SEQ ID NO: 1346851 - RNA, 19 nt, Homo sapiens
  misc_RNA (1)...(19): siRNA sense strand
ugaagcucaucaucaaaua

SEQ ID NO: 1346852 - RNA, 19 nt, Homo sapiens
  misc_RNA (1)...(19): siRNA sense strand
gaacaaccaacauuuccaa

SEQ ID NO: 1346853 - RNA, 19 nt, Homo sapiens
  misc_RNA (1)...(19): siRNA sense strand
ggacucuaaugcagaagaa

SEQ ID NO: 1346854 - RNA, 19 nt, Homo sapiens
  misc_RNA (1)...(19): siRNA sense strand
cuagagauacaacuucuua

SEQ ID NO: 1346855 - RNA, 19 nt, Homo sapiens
  misc_RNA (1)...(19): siRNA sense strand
caagaagauuggucuguuu

SEQ ID NO: 1346856 - RNA, 19 nt, Homo sapiens
  misc_RNA (1)...(19): siRNA sense strand
gaucugcaccguccaguug

SEQ ID NO: 1346857 - RNA, 19 nt, Homo sapiens
  misc_RNA (1)...(19): siRNA sense strand
acaagaagauuggucuguu

SEQ ID NO: 1346858 - RNA, 19 nt, Homo sapiens
  misc_RNA (1)...(19): siRNA sense strand
gccggugacuuccacaaga

SEQ ID NO: 1346859 - RNA, 19 nt, Homo sapiens
  misc_RNA (1)...(19): siRNA sense strand
ugacagcagugagaagauc

SEQ ID NO: 1346860 - RNA, 19 nt, Homo sapiens
  misc_RNA (1)...(19): siRNA sense strand
ccggugacuuccacaagaa

SEQ ID NO: 1346861 - RNA, 19 nt, Homo sapiens
  misc_RNA (1)...(19): siRNA sense strand
gaagauuggucuguuuugu

SEQ ID NO: 1346862 - RNA, 19 nt, Homo sapiens
  misc_RNA (1)...(19): siRNA sense strand
ugacugugccggugacuuc

SEQ ID NO: 1346863 - RNA, 19 nt, Homo sapiens
  misc_RNA (1)...(19): siRNA sense strand
gagaccagcaguacgagau

SEQ ID NO: 1346864 - RNA, 19 nt, Homo sapiens
  misc_RNA (1)...(19): siRNA sense strand
gcagcucuacgacgugaug

SEQ ID NO: 1346865 - RNA, 19 nt, Homo sapiens
  misc_RNA (1)...(19): siRNA sense strand
gcgcgaggcagagaucgaa

SEQ ID NO: 1346866 - RNA, 19 nt, Homo sapiens
  misc_RNA (1)...(19): siRNA sense strand
caagaagauuggucuguuu

SEQ ID NO: 1346867 - RNA, 19 nt, Homo sapiens
  misc_RNA (1)...(19): siRNA sense strand
gaucugcaccguccaguug

SEQ ID NO: 1346868 - RNA, 19 nt, Homo sapiens
  misc_RNA (1)...(19): siRNA sense strand
acaagaagauuggucuguu

SEQ ID NO: 1346869 - RNA, 19 nt, Homo sapiens
  misc_RNA (1)...(19): siRNA sense strand
gccggugacuuccacaaga

SEQ ID NO: 1346870 - RNA, 19 nt, Homo sapiens
  misc_RNA (1)...(19): siRNA sense strand
ugacagcagugagaagauc

SEQ ID NO: 1346871 - RNA, 19 nt, Homo sapiens
  misc_RNA (1)...(19): siRNA sense strand
ccggugacuuccacaagaa

SEQ ID NO: 1346872 - RNA, 19 nt, Homo sapiens
  misc_RNA (1)...(19): siRNA sense strand
gaagauuggucuguuuugu

SEQ ID NO: 1346873 - RNA, 19 nt, Homo sapiens
  misc_RNA (1)...(19): siRNA sense strand
ugacugugccggugacuuc

SEQ ID NO: 1346874 - RNA, 19 nt, Homo sapiens
  misc_RNA (1)...(19): siRNA sense strand
gagaccagcaguacgagau

SEQ ID NO: 1346875 - RNA, 19 nt, Homo sapiens
  misc_RNA (1)...(19): siRNA sense strand
gcagcucuacgacgugaug

SEQ ID NO: 1346876 - RNA, 19 nt, Homo sapiens
  misc_RNA (1)...(19): siRNA sense strand
gcgcgaggcagagaucgaa

SEQ ID NO: 1346877 - RNA, 19 nt, Homo sapiens
  misc_RNA (1)...(19): siRNA sense strand
caagaagauuggucuguuu

SEQ ID NO: 1346878 - RNA, 19 nt, Homo sapiens
  misc_RNA (1)...(19): siRNA sense strand
gaucugcaccguccaguug

SEQ ID NO: 1346879 - RNA, 19 nt, Homo sapiens
  misc_RNA (1)...(19): siRNA sense strand
acaagaagauuggucuguu

SEQ ID NO: 1346880 - RNA, 19 nt, Homo sapiens
  misc_RNA (1)...(19): siRNA sense strand
gccggugacuuccacaaga

SEQ ID NO: 1346881 - RNA, 19 nt, Homo sapiens
  misc_RNA (1)...(19): siRNA sense strand
ugacagcagugagaagauc

SEQ ID NO: 1346882 - RNA, 19 nt, Homo sapiens
  misc_RNA (1)...(19): siRNA sense strand
ccggugacuuccacaagaa

SEQ ID NO: 1346883 - RNA, 19 nt, Homo sapiens
  misc_RNA (1)...(19): siRNA sense strand
gaagauuggucuguuuugu

SEQ ID NO: 1346884 - RNA, 19 nt, Homo sapiens
  misc_RNA (1)...(19): siRNA sense strand
ugacugugccggugacuuc

SEQ ID NO: 1346885 - RNA, 19 nt, Homo sapiens
  misc_RNA (1)...(19): siRNA sense strand
gagaccagcaguacgagau

SEQ ID NO: 1346886 - RNA, 19 nt, Homo sapiens
  misc_RNA (1)...(19): siRNA sense strand
gcagcucuacgacgugaug

SEQ ID NO: 1346887 - RNA, 19 nt, Homo sapiens
  misc_RNA (1)...(19): siRNA sense strand
gcgcgaggcagagaucgaa

SEQ ID NO: 1346888 - RNA, 19 nt, Homo sapiens
  misc_RNA (1)...(19): siRNA sense strand
caagaagauuggucuguuu

SEQ ID NO: 1346889 - RNA, 19 nt, Homo sapiens
  misc_RNA (1)...(19): siRNA sense strand
gaucugcaccguccaguug

SEQ ID NO: 1346890 - RNA, 19 nt, Homo sapiens
  misc_RNA (1)...(19): siRNA sense strand
acaagaagauuggucuguu

SEQ ID NO: 1346891 - RNA, 19 nt, Homo sapiens
  misc_RNA (1)...(19): siRNA sense strand
gccggugacuuccacaaga

SEQ ID NO: 1346892 - RNA, 19 nt, Homo sapiens
  misc_RNA (1)...(19): siRNA sense strand
ugacagcagugagaagauc

SEQ ID NO: 1346893 - RNA, 19 nt, Homo sapiens
  misc_RNA (1)...(19): siRNA sense strand
ccggugacuuccacaagaa

SEQ ID NO: 1346894 - RNA, 19 nt, Homo sapiens
  misc_RNA (1)...(19): siRNA sense strand
gaagauuggucuguuuugu

SEQ ID NO: 1346895 - RNA, 19 nt, Homo sapiens
  misc_RNA (1)...(19): siRNA sense strand
ugacugugccggugacuuc

SEQ ID NO: 1346896 - RNA, 19 nt, Homo sapiens
  misc_RNA (1)...(19): siRNA sense strand
gagaccagcaguacgagau

SEQ ID NO: 1346897 - RNA, 19 nt, Homo sapiens
  misc_RNA (1)...(19): siRNA sense strand
gcagcucuacgacgugaug

SEQ ID NO: 1346898 - RNA, 19 nt, Homo sapiens
  misc_RNA (1)...(19): siRNA sense strand
gcgcgaggcagagaucgaa

SEQ ID NO: 1346899 - RNA, 19 nt, Homo sapiens
  misc_RNA (1)...(19): siRNA sense strand
caagaagauuggucuguuu

SEQ ID NO: 1346900 - RNA, 19 nt, Homo sapiens
  misc_RNA (1)...(19): siRNA sense strand
acaagaagauuggucuguu

SEQ ID NO: 1346901 - RNA, 19 nt, Homo sapiens
  misc_RNA (1)...(19): siRNA sense strand
gccggugacuuccacaaga

SEQ ID NO: 1346902 - RNA, 19 nt, Homo sapiens
  misc_RNA (1)...(19): siRNA sense strand
ccggugacuuccacaagaa

SEQ ID NO: 1346903 - RNA, 19 nt, Homo sapiens
  misc_RNA (1)...(19): siRNA sense strand
gaagauuggucuguuuugu

SEQ ID NO: 1346904 - RNA, 19 nt, Homo sapiens
  misc_RNA (1)...(19): siRNA sense strand
ugacugugccggugacuuc

SEQ ID NO: 1346905 - RNA, 19 nt, Homo sapiens
  misc_RNA (1)...(19): siRNA sense strand
caagaagauuggucuguuu

SEQ ID NO: 1346906 - RNA, 19 nt, Homo sapiens
  misc_RNA (1)...(19): siRNA sense strand
acaagaagauuggucuguu

SEQ ID NO: 1346907 - RNA, 19 nt, Homo sapiens
  misc_RNA (1)...(19): siRNA sense strand
gccggugacuuccacaaga

SEQ ID NO: 1346908 - RNA, 19 nt, Homo sapiens
  misc_RNA (1)...(19): siRNA sense strand
ccggugacuuccacaagaa

SEQ ID NO: 1346909 - RNA, 19 nt, Homo sapiens
  misc_RNA (1)...(19): siRNA sense strand
gaagauuggucuguuuugu

SEQ ID NO: 1346910 - RNA, 19 nt, Homo sapiens
  misc_RNA (1)...(19): siRNA sense strand
ugacugugccggugacuuc

SEQ ID NO: 1346911 - RNA, 19 nt, Homo sapiens
  misc_RNA (1)...(19): siRNA sense strand
caagaagauuggucuguuu

SEQ ID NO: 1346912 - RNA, 19 nt, Homo sapiens
  misc_RNA (1)...(19): siRNA sense strand
gaucugcaccguccaguug

SEQ ID NO: 1346913 - RNA, 19 nt, Homo sapiens
  misc_RNA (1)...(19): siRNA sense strand
acaagaagauuggucuguu

SEQ ID NO: 1346914 - RNA, 19 nt, Homo sapiens
  misc_RNA (1)...(19): siRNA sense strand
gccggugacuuccacaaga

SEQ ID NO: 1346915 - RNA, 19 nt, Homo sapiens
  misc_RNA (1)...(19): siRNA sense strand
ugacagcagugagaagauc

SEQ ID NO: 1346916 - RNA, 19 nt, Homo sapiens
  misc_RNA (1)...(19): siRNA sense strand
ccggugacuuccacaagaa

SEQ ID NO: 1346917 - RNA, 19 nt, Homo sapiens
  misc_RNA (1)...(19): siRNA sense strand
gaagauuggucuguuuugu

SEQ ID NO: 1346918 - RNA, 19 nt, Homo sapiens
  misc_RNA (1)...(19): siRNA sense strand
ugacugugccggugacuuc

SEQ ID NO: 1346919 - RNA, 19 nt, Homo sapiens
  misc_RNA (1)...(19): siRNA sense strand
gagaccagcaguacgagau

SEQ ID NO: 1346920 - RNA, 19 nt, Homo sapiens
  misc_RNA (1)...(19): siRNA sense strand
gcagcucuacgacgugaug

SEQ ID NO: 1346921 - RNA, 19 nt, Homo sapiens
  misc_RNA (1)...(19): siRNA sense strand
gcgcgaggcagagaucgaa

SEQ ID NO: 1346922 - RNA, 19 nt, Homo sapiens
  misc_RNA (1)...(19): siRNA sense strand
caagaagauuggucuguuu

SEQ ID NO: 1346923 - RNA, 19 nt, Homo sapiens
  misc_RNA (1)...(19): siRNA sense strand
acaagaagauuggucuguu

SEQ ID NO: 1346924 - RNA, 19 nt, Homo sapiens
  misc_RNA (1)...(19): siRNA sense strand
gccggugacuuccacaaga

SEQ ID NO: 1346925 - RNA, 19 nt, Homo sapiens
  misc_RNA (1)...(19): siRNA sense strand
ccggugacuuccacaagaa

SEQ ID NO: 1346926 - RNA, 19 nt, Homo sapiens
  misc_RNA (1)...(19): siRNA sense strand
gaagauuggucuguuuugu

SEQ ID NO: 1346927 - RNA, 19 nt, Homo sapiens
  misc_RNA (1)...(19): siRNA sense strand
ugacugugccggugacuuc

SEQ ID NO: 1346928 - RNA, 19 nt, Homo sapiens
  misc_RNA (1)...(19): siRNA sense strand
caagaagauuggucuguuu

SEQ ID NO: 1346929 - RNA, 19 nt, Homo sapiens
  misc_RNA (1)...(19): siRNA sense strand
acaagaagauuggucuguu

SEQ ID NO: 1346930 - RNA, 19 nt, Homo sapiens
  misc_RNA (1)...(19): siRNA sense strand
gccggugacuuccacaaga

SEQ ID NO: 1346931 - RNA, 19 nt, Homo sapiens
  misc_RNA (1)...(19): siRNA sense strand
ccggugacuuccacaagaa

SEQ ID NO: 1346932 - RNA, 19 nt, Homo sapiens
  misc_RNA (1)...(19): siRNA sense strand
gaagauuggucuguuuugu

SEQ ID NO: 1346933 - RNA, 19 nt, Homo sapiens
  misc_RNA (1)...(19): siRNA sense strand
ugacugugccggugacuuc

SEQ ID NO: 1346934 - RNA, 19 nt, Homo sapiens
  misc_RNA (1)...(19): siRNA sense strand
caagaagauuggucuguuu

SEQ ID NO: 1346935 - RNA, 19 nt, Homo sapiens
  misc_RNA (1)...(19): siRNA sense strand
acaagaagauuggucuguu

SEQ ID NO: 1346936 - RNA, 19 nt, Homo sapiens
  misc_RNA (1)...(19): siRNA sense strand
gccggugacuuccacaaga

SEQ ID NO: 1346937 - RNA, 19 nt, Homo sapiens
  misc_RNA (1)...(19): siRNA sense strand
ccggugacuuccacaagaa

SEQ ID NO: 1346938 - RNA, 19 nt, Homo sapiens
  misc_RNA (1)...(19): siRNA sense strand
gaagauuggucuguuuugu

SEQ ID NO: 1346939 - RNA, 19 nt, Homo sapiens
  misc_RNA (1)...(19): siRNA sense strand
ugacugugccggugacuuc

SEQ ID NO: 1346940 - RNA, 19 nt, Homo sapiens
  misc_RNA (1)...(19): siRNA sense strand
caagaagauuggucuguuu

SEQ ID NO: 1346941 - RNA, 19 nt, Homo sapiens
  misc_RNA (1)...(19): siRNA sense strand
acaagaagauuggucuguu

SEQ ID NO: 1346942 - RNA, 19 nt, Homo sapiens
  misc_RNA (1)...(19): siRNA sense strand
gccggugacuuccacaaga

SEQ ID NO: 1346943 - RNA, 19 nt, Homo sapiens
  misc_RNA (1)...(19): siRNA sense strand
ccggugacuuccacaagaa

SEQ ID NO: 1346944 - RNA, 19 nt, Homo sapiens
  misc_RNA (1)...(19): siRNA sense strand
gaagauuggucuguuuugu

SEQ ID NO: 1346945 - RNA, 19 nt, Homo sapiens
  misc_RNA (1)...(19): siRNA sense strand
ugacugugccggugacuuc

SEQ ID NO: 1346946 - RNA, 19 nt, Homo sapiens
  misc_RNA (1)...(19): siRNA sense strand
caagaagauuggucuguuu

SEQ ID NO: 1346947 - RNA, 19 nt, Homo sapiens
  misc_RNA (1)...(19): siRNA sense strand
gaucugcaccguccaguug

SEQ ID NO: 1346948 - RNA, 19 nt, Homo sapiens
  misc_RNA (1)...(19): siRNA sense strand
acaagaagauuggucuguu

SEQ ID NO: 1346949 - RNA, 19 nt, Homo sapiens
  misc_RNA (1)...(19): siRNA sense strand
gccggugacuuccacaaga

SEQ ID NO: 1346950 - RNA, 19 nt, Homo sapiens
  misc_RNA (1)...(19): siRNA sense strand
ugacagcagugagaagauc

SEQ ID NO: 1346951 - RNA, 19 nt, Homo sapiens
  misc_RNA (1)...(19): siRNA sense strand
ccggugacuuccacaagaa

SEQ ID NO: 1346952 - RNA, 19 nt, Homo sapiens
  misc_RNA (1)...(19): siRNA sense strand
gaagauuggucuguuuugu

SEQ ID NO: 1346953 - RNA, 19 nt, Homo sapiens
  misc_RNA (1)...(19): siRNA sense strand
ugacugugccggugacuuc

SEQ ID NO: 1346954 - RNA, 19 nt, Homo sapiens
  misc_RNA (1)...(19): siRNA sense strand
gagaccagcaguacgagau

SEQ ID NO: 1346955 - RNA, 19 nt, Homo sapiens
  misc_RNA (1)...(19): siRNA sense strand
gcagcucuacgacgugaug

SEQ ID NO: 1346956 - RNA, 19 nt, Homo sapiens
  misc_RNA (1)...(19): siRNA sense strand
gcgcgaggcagagaucgaa

SEQ ID NO: 1346957 - RNA, 19 nt, Homo sapiens
  misc_RNA (1)...(19): siRNA sense strand
caagaagauuggucuguuu

SEQ ID NO: 1346958 - RNA, 19 nt, Homo sapiens
  misc_RNA (1)...(19): siRNA sense strand
gaucugcaccguccaguug

SEQ ID NO: 1346959 - RNA, 19 nt, Homo sapiens
  misc_RNA (1)...(19): siRNA sense strand
acaagaagauuggucuguu

SEQ ID NO: 1346960 - RNA, 19 nt, Homo sapiens
  misc_RNA (1)...(19): siRNA sense strand
gccggugacuuccacaaga

SEQ ID NO: 1346961 - RNA, 19 nt, Homo sapiens
  misc_RNA (1)...(19): siRNA sense strand
ugacagcagugagaagauc

SEQ ID NO: 1346962 - RNA, 19 nt, Homo sapiens
  misc_RNA (1)...(19): siRNA sense strand
ccggugacuuccacaagaa

SEQ ID NO: 1346963 - RNA, 19 nt, Homo sapiens
  misc_RNA (1)...(19): siRNA sense strand
gaagauuggucuguuuugu

SEQ ID NO: 1346964 - RNA, 19 nt, Homo sapiens
  misc_RNA (1)...(19): siRNA sense strand
ugacugugccggugacuuc

SEQ ID NO: 1346965 - RNA, 19 nt, Homo sapiens
  misc_RNA (1)...(19): siRNA sense strand
gagaccagcaguacgagau

SEQ ID NO: 1346966 - RNA, 19 nt, Homo sapiens
  misc_RNA (1)...(19): siRNA sense strand
gcagcucuacgacgugaug

SEQ ID NO: 1346967 - RNA, 19 nt, Homo sapiens
  misc_RNA (1)...(19): siRNA sense strand
gcgcgaggcagagaucgaa

SEQ ID NO: 1346968 - RNA, 19 nt, Homo sapiens
  misc_RNA (1)...(19): siRNA sense strand
caagaagauuggucuguuu

SEQ ID NO: 1346969 - RNA, 19 nt, Homo sapiens
  misc_RNA (1)...(19): siRNA sense strand
gaucugcaccguccaguug

SEQ ID NO: 1346970 - RNA, 19 nt, Homo sapiens
  misc_RNA (1)...(19): siRNA sense strand
acaagaagauuggucuguu

SEQ ID NO: 1346971 - RNA, 19 nt, Homo sapiens
  misc_RNA (1)...(19): siRNA sense strand
gccggugacuuccacaaga

SEQ ID NO: 1346972 - RNA, 19 nt, Homo sapiens
  misc_RNA (1)...(19): siRNA sense strand
ugacagcagugagaagauc

SEQ ID NO: 1346973 - RNA, 19 nt, Homo sapiens
  misc_RNA (1)...(19): siRNA sense strand
ccggugacuuccacaagaa

SEQ ID NO: 1346974 - RNA, 19 nt, Homo sapiens
  misc_RNA (1)...(19): siRNA sense strand
gaagauuggucuguuuugu

SEQ ID NO: 1346975 - RNA, 19 nt, Homo sapiens
  misc_RNA (1)...(19): siRNA sense strand
ugacugugccggugacuuc

SEQ ID NO: 1346976 - RNA, 19 nt, Homo sapiens
  misc_RNA (1)...(19): siRNA sense strand
gagaccagcaguacgagau

SEQ ID NO: 1346977 - RNA, 19 nt, Homo sapiens
  misc_RNA (1)...(19): siRNA sense strand
gcagcucuacgacgugaug

SEQ ID NO: 1346978 - RNA, 19 nt, Homo sapiens
  misc_RNA (1)...(19): siRNA sense strand
gcgcgaggcagagaucgaa

SEQ ID NO: 1346979 - RNA, 19 nt, Homo sapiens
  misc_RNA (1)...(19): siRNA sense strand
caagaagauuggucuguuu

SEQ ID NO: 1346980 - RNA, 19 nt, Homo sapiens
  misc_RNA (1)...(19): siRNA sense strand
gaucugcaccguccaguug

SEQ ID NO: 1346981 - RNA, 19 nt, Homo sapiens
  misc_RNA (1)...(19): siRNA sense strand
acaagaagauuggucuguu

SEQ ID NO: 1346982 - RNA, 19 nt, Homo sapiens
  misc_RNA (1)...(19): siRNA sense strand
gccggugacuuccacaaga

SEQ ID NO: 1346983 - RNA, 19 nt, Homo sapiens
  misc_RNA (1)...(19): siRNA sense strand
ugacagcagugagaagauc

SEQ ID NO: 1346984 - RNA, 19 nt, Homo sapiens
  misc_RNA (1)...(19): siRNA sense strand
ccggugacuuccacaagaa

SEQ ID NO: 1346985 - RNA, 19 nt, Homo sapiens
  misc_RNA (1)...(19): siRNA sense strand
gaagauuggucuguuuugu

SEQ ID NO: 1346986 - RNA, 19 nt, Homo sapiens
  misc_RNA (1)...(19): siRNA sense strand
ugacugugccggugacuuc

SEQ ID NO: 1346987 - RNA, 19 nt, Homo sapiens
  misc_RNA (1)...(19): siRNA sense strand
gagaccagcaguacgagau

SEQ ID NO: 1346988 - RNA, 19 nt, Homo sapiens
  misc_RNA (1)...(19): siRNA sense strand
gcagcucuacgacgugaug

SEQ ID NO: 1346989 - RNA, 19 nt, Homo sapiens
  misc_RNA (1)...(19): siRNA sense strand
gcgcgaggcagagaucgaa

SEQ ID NO: 1346990 - RNA, 19 nt, Homo sapiens
  misc_RNA (1)...(19): siRNA sense strand
caagaagauuggucuguuu

SEQ ID NO: 1346991 - RNA, 19 nt, Homo sapiens
  misc_RNA (1)...(19): siRNA sense strand
acaagaagauuggucuguu

SEQ ID NO: 1346992 - RNA, 19 nt, Homo sapiens
  misc_RNA (1)...(19): siRNA sense strand
gccggugacuuccacaaga

SEQ ID NO: 1346993 - RNA, 19 nt, Homo sapiens
  misc_RNA (1)...(19): siRNA sense strand
ccggugacuuccacaagaa

SEQ ID NO: 1346994 - RNA, 19 nt, Homo sapiens
  misc_RNA (1)...(19): siRNA sense strand
gaagauuggucuguuuugu

SEQ ID NO: 1346995 - RNA, 19 nt, Homo sapiens
  misc_RNA (1)...(19): siRNA sense strand
ugacugugccggugacuuc

SEQ ID NO: 1346996 - RNA, 19 nt, Homo sapiens
  misc_RNA (1)...(19): siRNA sense strand
caagaagauuggucuguuu

SEQ ID NO: 1346997 - RNA, 19 nt, Homo sapiens
  misc_RNA (1)...(19): siRNA sense strand
acaagaagauuggucuguu

SEQ ID NO: 1346998 - RNA, 19 nt, Homo sapiens
  misc_RNA (1)...(19): siRNA sense strand
gccggugacuuccacaaga

SEQ ID NO: 1346999 - RNA, 19 nt, Homo sapiens
  misc_RNA (1)...(19): siRNA sense strand
ccggugacuuccacaagaa

SEQ ID NO: 1347000 - RNA, 19 nt, Homo sapiens
  misc_RNA (1)...(19): siRNA sense strand
gaagauuggucuguuuugu

SEQ ID NO: 1347001 - RNA, 19 nt, Homo sapiens
  misc_RNA (1)...(19): siRNA sense strand
ugacugugccggugacuuc

SEQ ID NO: 1347002 - RNA, 19 nt, Homo sapiens
  misc_RNA (1)...(19): siRNA sense strand
caagaagauuggucuguuu

SEQ ID NO: 1347003 - RNA, 19 nt, Homo sapiens
  misc_RNA (1)...(19): siRNA sense strand
gaucugcaccguccaguug

SEQ ID NO: 1347004 - RNA, 19 nt, Homo sapiens
  misc_RNA (1)...(19): siRNA sense strand
acaagaagauuggucuguu

SEQ ID NO: 1347005 - RNA, 19 nt, Homo sapiens
  misc_RNA (1)...(19): siRNA sense strand
gccggugacuuccacaaga

SEQ ID NO: 1347006 - RNA, 19 nt, Homo sapiens
  misc_RNA (1)...(19): siRNA sense strand
ugacagcagugagaagauc

SEQ ID NO: 1347007 - RNA, 19 nt, Homo sapiens
  misc_RNA (1)...(19): siRNA sense strand
ccggugacuuccacaagaa

SEQ ID NO: 1347008 - RNA, 19 nt, Homo sapiens
  misc_RNA (1)...(19): siRNA sense strand
gaagauuggucuguuuugu

SEQ ID NO: 1347009 - RNA, 19 nt, Homo sapiens
  misc_RNA (1)...(19): siRNA sense strand
ugacugugccggugacuuc

SEQ ID NO: 1347010 - RNA, 19 nt, Homo sapiens
  misc_RNA (1)...(19): siRNA sense strand
gagaccagcaguacgagau

SEQ ID NO: 1347011 - RNA, 19 nt, Homo sapiens
  misc_RNA (1)...(19): siRNA sense strand
gcagcucuacgacgugaug

SEQ ID NO: 1347012 - RNA, 19 nt, Homo sapiens
  misc_RNA (1)...(19): siRNA sense strand
gcgcgaggcagagaucgaa

SEQ ID NO: 1347013 - RNA, 19 nt, Homo sapiens
  misc_RNA (1)...(19): siRNA sense strand
caagaagauuggucuguuu

SEQ ID NO: 1347014 - RNA, 19 nt, Homo sapiens
  misc_RNA (1)...(19): siRNA sense strand
acaagaagauuggucuguu

SEQ ID NO: 1347015 - RNA, 19 nt, Homo sapiens
  misc_RNA (1)...(19): siRNA sense strand
gccggugacuuccacaaga

SEQ ID NO: 1347016 - RNA, 19 nt, Homo sapiens
  misc_RNA (1)...(19): siRNA sense strand
ccggugacuuccacaagaa

SEQ ID NO: 1347017 - RNA, 19 nt, Homo sapiens
  misc_RNA (1)...(19): siRNA sense strand
gaagauuggucuguuuugu

SEQ ID NO: 1347018 - RNA, 19 nt, Homo sapiens
  misc_RNA (1)...(19): siRNA sense strand
ugacugugccggugacuuc

SEQ ID NO: 1347019 - RNA, 19 nt, Homo sapiens
  misc_RNA (1)...(19): siRNA sense strand
caagaagauuggucuguuu

SEQ ID NO: 1347020 - RNA, 19 nt, Homo sapiens
  misc_RNA (1)...(19): siRNA sense strand
acaagaagauuggucuguu

SEQ ID NO: 1347021 - RNA, 19 nt, Homo sapiens
  misc_RNA (1)...(19): siRNA sense strand
gccggugacuuccacaaga

SEQ ID NO: 1347022 - RNA, 19 nt, Homo sapiens
  misc_RNA (1)...(19): siRNA sense strand
ccggugacuuccacaagaa

SEQ ID NO: 1347023 - RNA, 19 nt, Homo sapiens
  misc_RNA (1)...(19): siRNA sense strand
gaagauuggucuguuuugu

SEQ ID NO: 1347024 - RNA, 19 nt, Homo sapiens
  misc_RNA (1)...(19): siRNA sense strand
ugacugugccggugacuuc

SEQ ID NO: 1347025 - RNA, 19 nt, Homo sapiens
  misc_RNA (1)...(19): siRNA sense strand
caagaagauuggucuguuu

SEQ ID NO: 1347026 - RNA, 19 nt, Homo sapiens
  misc_RNA (1)...(19): siRNA sense strand
acaagaagauuggucuguu

SEQ ID NO: 1347027 - RNA, 19 nt, Homo sapiens
  misc_RNA (1)...(19): siRNA sense strand
gccggugacuuccacaaga

SEQ ID NO: 1347028 - RNA, 19 nt, Homo sapiens
  misc_RNA (1)...(19): siRNA sense strand
ccggugacuuccacaagaa

SEQ ID NO: 1347029 - RNA, 19 nt, Homo sapiens
  misc_RNA (1)...(19): siRNA sense strand
gaagauuggucuguuuugu

SEQ ID NO: 1347030 - RNA, 19 nt, Homo sapiens
  misc_RNA (1)...(19): siRNA sense strand
ugacugugccggugacuuc

SEQ ID NO: 1347031 - RNA, 19 nt, Homo sapiens
  misc_RNA (1)...(19): siRNA sense strand
caagaagauuggucuguuu

SEQ ID NO: 1347032 - RNA, 19 nt, Homo sapiens
  misc_RNA (1)...(19): siRNA sense strand
acaagaagauuggucuguu

SEQ ID NO: 1347033 - RNA, 19 nt, Homo sapiens
  misc_RNA (1)...(19): siRNA sense strand
gccggugacuuccacaaga

SEQ ID NO: 1347034 - RNA, 19 nt, Homo sapiens
  misc_RNA (1)...(19): siRNA sense strand
ccggugacuuccacaagaa

SEQ ID NO: 1347035 - RNA, 19 nt, Homo sapiens
  misc_RNA (1)...(19): siRNA sense strand
gaagauuggucuguuuugu

SEQ ID NO: 1347036 - RNA, 19 nt, Homo sapiens
  misc_RNA (1)...(19): siRNA sense strand
ugacugugccggugacuuc

SEQ ID NO: 1347037 - RNA, 19 nt, Homo sapiens
  misc_RNA (1)...(19): siRNA sense strand
caacgaaagugaagacaga

SEQ ID NO: 1347038 - RNA, 19 nt, Homo sapiens
  misc_RNA (1)...(19): siRNA sense strand
acaggaagaucaagaauga

SEQ ID NO: 1347039 - RNA, 19 nt, Homo sapiens
  misc_RNA (1)...(19): siRNA sense strand
gcccagagccuacuagaaa

SEQ ID NO: 1347040 - RNA, 19 nt, Homo sapiens
  misc_RNA (1)...(19): siRNA sense strand
gcgugcagcugaaccagua

SEQ ID NO: 1347041 - RNA, 19 nt, Homo sapiens
  misc_RNA (1)...(19): siRNA sense strand
ccacuggcgucacguugua

SEQ ID NO: 1347042 - RNA, 19 nt, Homo sapiens
  misc_RNA (1)...(19): siRNA sense strand
gggaaggccuuggauguau

SEQ ID NO: 1347043 - RNA, 19 nt, Homo sapiens
  misc_RNA (1)...(19): siRNA sense strand
gaagacagacacuaugcaa

SEQ ID NO: 1347044 - RNA, 19 nt, Homo sapiens
  misc_RNA (1)...(19): siRNA sense strand
gacagacacuaugcaauga

SEQ ID NO: 1347045 - RNA, 19 nt, Homo sapiens
  misc_RNA (1)...(19): siRNA sense strand
ugacagaggaggagguuaa

SEQ ID NO: 1347046 - RNA, 19 nt, Homo sapiens
  misc_RNA (1)...(19): siRNA sense strand
aguacaagcugcagaguga

SEQ ID NO: 1347047 - RNA, 19 nt, Homo sapiens
  misc_RNA (1)...(19): siRNA sense strand
ggaaggccuuggauguaug

SEQ ID NO: 1347048 - RNA, 19 nt, Homo sapiens
  misc_RNA (1)...(19): siRNA sense strand
gaccugauccugaagaugu

SEQ ID NO: 1347049 - RNA, 19 nt, Homo sapiens
  misc_RNA (1)...(19): siRNA sense strand
ugaaguccaugcugaggaa

SEQ ID NO: 1347050 - RNA, 19 nt, Homo sapiens
  misc_RNA (1)...(19): siRNA sense strand
cagacacuaugcaaugaaa

SEQ ID NO: 1347051 - RNA, 19 nt, Homo sapiens
  misc_RNA (1)...(19): siRNA sense strand
gaaugagcccgugguguuu

SEQ ID NO: 1347052 - RNA, 19 nt, Homo sapiens
  misc_RNA (1)...(19): siRNA sense strand
ggaagugcccugugacaag

SEQ ID NO: 1347053 - RNA, 19 nt, Homo sapiens
  misc_RNA (1)...(19): siRNA sense strand
gaagauguuagacaagaau

SEQ ID NO: 1347054 - RNA, 19 nt, Homo sapiens
  misc_RNA (1)...(19): siRNA sense strand
ucauggaagugcccuguga

SEQ ID NO: 1347055 - RNA, 19 nt, Homo sapiens
  misc_RNA (1)...(19): siRNA sense strand
agacagacacuaugcaaug

SEQ ID NO: 1347056 - RNA, 19 nt, Homo sapiens
  misc_RNA (1)...(19): siRNA sense strand
ugaucgagguccuggauga

SEQ ID NO: 1347057 - RNA, 19 nt, Homo sapiens
  misc_RNA (1)...(19): siRNA sense strand
gagauugccauccugaaga

SEQ ID NO: 1347058 - RNA, 19 nt, Homo sapiens
  misc_RNA (1)...(19): siRNA sense strand
gaagcuggaccacgugaau

SEQ ID NO: 1347059 - RNA, 19 nt, Homo sapiens
  misc_RNA (1)...(19): siRNA sense strand
cagaggaggagguuaagaa

SEQ ID NO: 1347060 - RNA, 19 nt, Homo sapiens
  misc_RNA (1)...(19): siRNA sense strand
agaaugagcccgugguguu

SEQ ID NO: 1347061 - RNA, 19 nt, Homo sapiens
  misc_RNA (1)...(19): siRNA sense strand
uguuugaccuccugagaaa

SEQ ID NO: 1347062 - RNA, 19 nt, Homo sapiens
  misc_RNA (1)...(19): siRNA sense strand
ugaagauguuagacaagaa

SEQ ID NO: 1347063 - RNA, 19 nt, Homo sapiens
  misc_RNA (1)...(19): siRNA sense strand
ccacggugauccuggugaa

SEQ ID NO: 1347064 - RNA, 19 nt, Homo sapiens
  misc_RNA (1)...(19): siRNA sense strand
cugaagauguuagacaaga

SEQ ID NO: 1347065 - RNA, 19 nt, Homo sapiens
  misc_RNA (1)...(19): siRNA sense strand
ggaggagguuaagaacuca

SEQ ID NO: 1347066 - RNA, 19 nt, Homo sapiens
  misc_RNA (1)...(19): siRNA sense strand
ggagauugccauccugaag

SEQ ID NO: 1347067 - RNA, 19 nt, Homo sapiens
  misc_RNA (1)...(19): siRNA sense strand
ggaagugcccauucaucga

SEQ ID NO: 1347068 - RNA, 19 nt, Homo sapiens
  misc_RNA (1)...(19): siRNA sense strand
agauugccauccugaagaa

SEQ ID NO: 1347069 - RNA, 19 nt, Homo sapiens
  misc_RNA (1)...(19): siRNA sense strand
ccgaggccauuucugauuc

SEQ ID NO: 1347070 - RNA, 19 nt, Homo sapiens
  misc_RNA (1)...(19): siRNA sense strand
ugaauguggucaaacugau

SEQ ID NO: 1347071 - RNA, 19 nt, Homo sapiens
  misc_RNA (1)...(19): siRNA sense strand
gugaauguggucaaacuga

SEQ ID NO: 1347072 - RNA, 19 nt, Homo sapiens
  misc_RNA (1)...(19): siRNA sense strand
gggaagagcgauccauguc

SEQ ID NO: 1347073 - RNA, 19 nt, Homo sapiens
  misc_RNA (1)...(19): siRNA sense strand
aggaggagguuaagaacuc

SEQ ID NO: 1347074 - RNA, 19 nt, Homo sapiens
  misc_RNA (1)...(19): siRNA sense strand
gaauguggucaaacugauc

SEQ ID NO: 1347075 - RNA, 19 nt, Homo sapiens
  misc_RNA (1)...(19): siRNA sense strand
ggaagagcgauccaugucu

SEQ ID NO: 1347076 - RNA, 19 nt, Homo sapiens
  misc_RNA (1)...(19): siRNA sense strand
guacuugcacugccagaag

SEQ ID NO: 1347077 - RNA, 19 nt, Homo sapiens
  misc_RNA (1)...(19): siRNA sense strand
gugaagaucgccgacuuug

SEQ ID NO: 1347078 - RNA, 19 nt, Homo sapiens
  misc_RNA (1)...(19): siRNA sense strand
gagguuaagaacucaguca

SEQ ID NO: 1347079 - RNA, 19 nt, Homo sapiens
  misc_RNA (1)...(19): siRNA sense strand
ccacaggaagaucaagaau

SEQ ID NO: 1347080 - RNA, 19 nt, Homo sapiens
  misc_RNA (1)...(19): siRNA sense strand
gaacucagucaggcucauc

SEQ ID NO: 1347081 - RNA, 19 nt, Homo sapiens
  misc_RNA (1)...(19): siRNA sense strand
gaugaugggcacgugaaga

SEQ ID NO: 1347082 - RNA, 19 nt, Homo sapiens
  misc_RNA (1)...(19): siRNA sense strand
ugggaaggccuuggaugua

SEQ ID NO: 1347083 - RNA, 19 nt, Homo sapiens
  misc_RNA (1)...(19): siRNA sense strand
gugggaaggccuuggaugu

SEQ ID NO: 1347084 - RNA, 19 nt, Homo sapiens
  misc_RNA (1)...(19): siRNA sense strand
gacacuaugcaaugaaagu

SEQ ID NO: 1347085 - RNA, 19 nt, Homo sapiens
  misc_RNA (1)...(19): siRNA sense strand
ugccagacaucaaguugca

SEQ ID NO: 1347086 - RNA, 19 nt, Homo sapiens
  misc_RNA (1)...(19): siRNA sense strand
guuguacugcuuugucuau

SEQ ID NO: 1347087 - RNA, 19 nt, Homo sapiens
  misc_RNA (1)...(19): siRNA sense strand
gggaugaugggcacgugaa

SEQ ID NO: 1347088 - RNA, 19 nt, Homo sapiens
  misc_RNA (1)...(19): siRNA sense strand
uacuugcacugccagaaga

SEQ ID NO: 1347089 - RNA, 19 nt, Homo sapiens
  misc_RNA (1)...(19): siRNA sense strand
aaaagaaguuacugaagca

SEQ ID NO: 1347090 - RNA, 19 nt, Homo sapiens
  misc_RNA (1)...(19): siRNA sense strand
uccugaagauguuagacaa

SEQ ID NO: 1347091 - RNA, 19 nt, Homo sapiens
  misc_RNA (1)...(19): siRNA sense strand
ugacccagcugaggacaac

SEQ ID NO: 1347092 - RNA, 19 nt, Homo sapiens
  misc_RNA (1)...(19): siRNA sense strand
cacaggaagaucaagaaug

SEQ ID NO: 1347093 - RNA, 19 nt, Homo sapiens
  misc_RNA (1)...(19): siRNA sense strand
cgugaagaucgccgacuuu

SEQ ID NO: 1347094 - RNA, 19 nt, Homo sapiens
  misc_RNA (1)...(19): siRNA sense strand
gaauuggggugccagacau

SEQ ID NO: 1347095 - RNA, 19 nt, Homo sapiens
  misc_RNA (1)...(19): siRNA sense strand
caacgaaagugaagacaga

SEQ ID NO: 1347096 - RNA, 19 nt, Homo sapiens
  misc_RNA (1)...(19): siRNA sense strand
acaggaagaucaagaauga

SEQ ID NO: 1347097 - RNA, 19 nt, Homo sapiens
  misc_RNA (1)...(19): siRNA sense strand
gcccagagccuacuagaaa

SEQ ID NO: 1347098 - RNA, 19 nt, Homo sapiens
  misc_RNA (1)...(19): siRNA sense strand
gcgugcagcugaaccagua

SEQ ID NO: 1347099 - RNA, 19 nt, Homo sapiens
  misc_RNA (1)...(19): siRNA sense strand
ccacuggcgucacguugua

SEQ ID NO: 1347100 - RNA, 19 nt, Homo sapiens
  misc_RNA (1)...(19): siRNA sense strand
gggaaggccuuggauguau

SEQ ID NO: 1347101 - RNA, 19 nt, Homo sapiens
  misc_RNA (1)...(19): siRNA sense strand
gaagacagacacuaugcaa

SEQ ID NO: 1347102 - RNA, 19 nt, Homo sapiens
  misc_RNA (1)...(19): siRNA sense strand
gacagacacuaugcaauga

SEQ ID NO: 1347103 - RNA, 19 nt, Homo sapiens
  misc_RNA (1)...(19): siRNA sense strand
ugacagaggaggagguuaa

SEQ ID NO: 1347104 - RNA, 19 nt, Homo sapiens
  misc_RNA (1)...(19): siRNA sense strand
aguacaagcugcagaguga

SEQ ID NO: 1347105 - RNA, 19 nt, Homo sapiens
  misc_RNA (1)...(19): siRNA sense strand
ggaaggccuuggauguaug

SEQ ID NO: 1347106 - RNA, 19 nt, Homo sapiens
  misc_RNA (1)...(19): siRNA sense strand
gaccugauccugaagaugu

SEQ ID NO: 1347107 - RNA, 19 nt, Homo sapiens
  misc_RNA (1)...(19): siRNA sense strand
ugaaguccaugcugaggaa

SEQ ID NO: 1347108 - RNA, 19 nt, Homo sapiens
  misc_RNA (1)...(19): siRNA sense strand
cagacacuaugcaaugaaa

SEQ ID NO: 1347109 - RNA, 19 nt, Homo sapiens
  misc_RNA (1)...(19): siRNA sense strand
gaaugagcccgugguguuu

SEQ ID NO: 1347110 - RNA, 19 nt, Homo sapiens
  misc_RNA (1)...(19): siRNA sense strand
ggaagugcccugugacaag

SEQ ID NO: 1347111 - RNA, 19 nt, Homo sapiens
  misc_RNA (1)...(19): siRNA sense strand
gaagauguuagacaagaau

SEQ ID NO: 1347112 - RNA, 19 nt, Homo sapiens
  misc_RNA (1)...(19): siRNA sense strand
ucauggaagugcccuguga

SEQ ID NO: 1347113 - RNA, 19 nt, Homo sapiens
  misc_RNA (1)...(19): siRNA sense strand
agacagacacuaugcaaug

SEQ ID NO: 1347114 - RNA, 19 nt, Homo sapiens
  misc_RNA (1)...(19): siRNA sense strand
ugaucgagguccuggauga

SEQ ID NO: 1347115 - RNA, 19 nt, Homo sapiens
  misc_RNA (1)...(19): siRNA sense strand
gagauugccauccugaaga

SEQ ID NO: 1347116 - RNA, 19 nt, Homo sapiens
  misc_RNA (1)...(19): siRNA sense strand
gaagcuggaccacgugaau

SEQ ID NO: 1347117 - RNA, 19 nt, Homo sapiens
  misc_RNA (1)...(19): siRNA sense strand
cagaggaggagguuaagaa

SEQ ID NO: 1347118 - RNA, 19 nt, Homo sapiens
  misc_RNA (1)...(19): siRNA sense strand
agaaugagcccgugguguu

SEQ ID NO: 1347119 - RNA, 19 nt, Homo sapiens
  misc_RNA (1)...(19): siRNA sense strand
uguuugaccuccugagaaa

SEQ ID NO: 1347120 - RNA, 19 nt, Homo sapiens
  misc_RNA (1)...(19): siRNA sense strand
ugaagauguuagacaagaa

SEQ ID NO: 1347121 - RNA, 19 nt, Homo sapiens
  misc_RNA (1)...(19): siRNA sense strand
ccacggugauccuggugaa

SEQ ID NO: 1347122 - RNA, 19 nt, Homo sapiens
  misc_RNA (1)...(19): siRNA sense strand
cugaagauguuagacaaga

SEQ ID NO: 1347123 - RNA, 19 nt, Homo sapiens
  misc_RNA (1)...(19): siRNA sense strand
ggaggagguuaagaacuca

SEQ ID NO: 1347124 - RNA, 19 nt, Homo sapiens
  misc_RNA (1)...(19): siRNA sense strand
ggagauugccauccugaag

SEQ ID NO: 1347125 - RNA, 19 nt, Homo sapiens
  misc_RNA (1)...(19): siRNA sense strand
ggaagugcccauucaucga

SEQ ID NO: 1347126 - RNA, 19 nt, Homo sapiens
  misc_RNA (1)...(19): siRNA sense strand
agauugccauccugaagaa

SEQ ID NO: 1347127 - RNA, 19 nt, Homo sapiens
  misc_RNA (1)...(19): siRNA sense strand
ccgaggccauuucugauuc

SEQ ID NO: 1347128 - RNA, 19 nt, Homo sapiens
  misc_RNA (1)...(19): siRNA sense strand
ugaauguggucaaacugau

SEQ ID NO: 1347129 - RNA, 19 nt, Homo sapiens
  misc_RNA (1)...(19): siRNA sense strand
gugaauguggucaaacuga

SEQ ID NO: 1347130 - RNA, 19 nt, Homo sapiens
  misc_RNA (1)...(19): siRNA sense strand
gggaagagcgauccauguc

SEQ ID NO: 1347131 - RNA, 19 nt, Homo sapiens
  misc_RNA (1)...(19): siRNA sense strand
aggaggagguuaagaacuc

SEQ ID NO: 1347132 - RNA, 19 nt, Homo sapiens
  misc_RNA (1)...(19): siRNA sense strand
gaauguggucaaacugauc

SEQ ID NO: 1347133 - RNA, 19 nt, Homo sapiens
  misc_RNA (1)...(19): siRNA sense strand
ggaagagcgauccaugucu

SEQ ID NO: 1347134 - RNA, 19 nt, Homo sapiens
  misc_RNA (1)...(19): siRNA sense strand
guacuugcacugccagaag

SEQ ID NO: 1347135 - RNA, 19 nt, Homo sapiens
  misc_RNA (1)...(19): siRNA sense strand
gugaagaucgccgacuuug

SEQ ID NO: 1347136 - RNA, 19 nt, Homo sapiens
  misc_RNA (1)...(19): siRNA sense strand
gagguuaagaacucaguca

SEQ ID NO: 1347137 - RNA, 19 nt, Homo sapiens
  misc_RNA (1)...(19): siRNA sense strand
ccacaggaagaucaagaau

SEQ ID NO: 1347138 - RNA, 19 nt, Homo sapiens
  misc_RNA (1)...(19): siRNA sense strand
gaacucagucaggcucauc

SEQ ID NO: 1347139 - RNA, 19 nt, Homo sapiens
  misc_RNA (1)...(19): siRNA sense strand
gaugaugggcacgugaaga

SEQ ID NO: 1347140 - RNA, 19 nt, Homo sapiens
  misc_RNA (1)...(19): siRNA sense strand
ugggaaggccuuggaugua

SEQ ID NO: 1347141 - RNA, 19 nt, Homo sapiens
  misc_RNA (1)...(19): siRNA sense strand
gugggaaggccuuggaugu

SEQ ID NO: 1347142 - RNA, 19 nt, Homo sapiens
  misc_RNA (1)...(19): siRNA sense strand
gacacuaugcaaugaaagu

SEQ ID NO: 1347143 - RNA, 19 nt, Homo sapiens
  misc_RNA (1)...(19): siRNA sense strand
ugccagacaucaaguugca

SEQ ID NO: 1347144 - RNA, 19 nt, Homo sapiens
  misc_RNA (1)...(19): siRNA sense strand
guuguacugcuuugucuau

SEQ ID NO: 1347145 - RNA, 19 nt, Homo sapiens
  misc_RNA (1)...(19): siRNA sense strand
gggaugaugggcacgugaa

SEQ ID NO: 1347146 - RNA, 19 nt, Homo sapiens
  misc_RNA (1)...(19): siRNA sense strand
uacuugcacugccagaaga

SEQ ID NO: 1347147 - RNA, 19 nt, Homo sapiens
  misc_RNA (1)...(19): siRNA sense strand
aaaagaaguuacugaagca

SEQ ID NO: 1347148 - RNA, 19 nt, Homo sapiens
  misc_RNA (1)...(19): siRNA sense strand
uccugaagauguuagacaa

SEQ ID NO: 1347149 - RNA, 19 nt, Homo sapiens
  misc_RNA (1)...(19): siRNA sense strand
ugacccagcugaggacaac

SEQ ID NO: 1347150 - RNA, 19 nt, Homo sapiens
  misc_RNA (1)...(19): siRNA sense strand
cacaggaagaucaagaaug

SEQ ID NO: 1347151 - RNA, 19 nt, Homo sapiens
  misc_RNA (1)...(19): siRNA sense strand
cgugaagaucgccgacuuu

SEQ ID NO: 1347152 - RNA, 19 nt, Homo sapiens
  misc_RNA (1)...(19): siRNA sense strand
gaauuggggugccagacau

SEQ ID NO: 1347153 - RNA, 19 nt, Homo sapiens
  misc_RNA (1)...(19): siRNA sense strand
caacgaaagugaagacaga

SEQ ID NO: 1347154 - RNA, 19 nt, Homo sapiens
  misc_RNA (1)...(19): siRNA sense strand
acaggaagaucaagaauga

SEQ ID NO: 1347155 - RNA, 19 nt, Homo sapiens
  misc_RNA (1)...(19): siRNA sense strand
gcccagagccuacuagaaa

SEQ ID NO: 1347156 - RNA, 19 nt, Homo sapiens
  misc_RNA (1)...(19): siRNA sense strand
gcgugcagcugaaccagua

SEQ ID NO: 1347157 - RNA, 19 nt, Homo sapiens
  misc_RNA (1)...(19): siRNA sense strand
ccacuggcgucacguugua

SEQ ID NO: 1347158 - RNA, 19 nt, Homo sapiens
  misc_RNA (1)...(19): siRNA sense strand
gggaaggccuuggauguau

SEQ ID NO: 1347159 - RNA, 19 nt, Homo sapiens
  misc_RNA (1)...(19): siRNA sense strand
gaagacagacacuaugcaa

SEQ ID NO: 1347160 - RNA, 19 nt, Homo sapiens
  misc_RNA (1)...(19): siRNA sense strand
gacagacacuaugcaauga

SEQ ID NO: 1347161 - RNA, 19 nt, Homo sapiens
  misc_RNA (1)...(19): siRNA sense strand
ugacagaggaggagguuaa

SEQ ID NO: 1347162 - RNA, 19 nt, Homo sapiens
  misc_RNA (1)...(19): siRNA sense strand
aguacaagcugcagaguga

SEQ ID NO: 1347163 - RNA, 19 nt, Homo sapiens
  misc_RNA (1)...(19): siRNA sense strand
ggaaggccuuggauguaug

SEQ ID NO: 1347164 - RNA, 19 nt, Homo sapiens
  misc_RNA (1)...(19): siRNA sense strand
gaccugauccugaagaugu

SEQ ID NO: 1347165 - RNA, 19 nt, Homo sapiens
  misc_RNA (1)...(19): siRNA sense strand
ugaaguccaugcugaggaa

SEQ ID NO: 1347166 - RNA, 19 nt, Homo sapiens
  misc_RNA (1)...(19): siRNA sense strand
cagacacuaugcaaugaaa

SEQ ID NO: 1347167 - RNA, 19 nt, Homo sapiens
  misc_RNA (1)...(19): siRNA sense strand
gaaugagcccgugguguuu

SEQ ID NO: 1347168 - RNA, 19 nt, Homo sapiens
  misc_RNA (1)...(19): siRNA sense strand
ggaagugcccugugacaag

SEQ ID NO: 1347169 - RNA, 19 nt, Homo sapiens
  misc_RNA (1)...(19): siRNA sense strand
gaagauguuagacaagaau

SEQ ID NO: 1347170 - RNA, 19 nt, Homo sapiens
  misc_RNA (1)...(19): siRNA sense strand
ucauggaagugcccuguga

SEQ ID NO: 1347171 - RNA, 19 nt, Homo sapiens
  misc_RNA (1)...(19): siRNA sense strand
agacagacacuaugcaaug

SEQ ID NO: 1347172 - RNA, 19 nt, Homo sapiens
  misc_RNA (1)...(19): siRNA sense strand
ugaucgagguccuggauga

SEQ ID NO: 1347173 - RNA, 19 nt, Homo sapiens
  misc_RNA (1)...(19): siRNA sense strand
gagauugccauccugaaga

SEQ ID NO: 1347174 - RNA, 19 nt, Homo sapiens
  misc_RNA (1)...(19): siRNA sense strand
gaagcuggaccacgugaau

SEQ ID NO: 1347175 - RNA, 19 nt, Homo sapiens
  misc_RNA (1)...(19): siRNA sense strand
cagaggaggagguuaagaa

SEQ ID NO: 1347176 - RNA, 19 nt, Homo sapiens
  misc_RNA (1)...(19): siRNA sense strand
agaaugagcccgugguguu

SEQ ID NO: 1347177 - RNA, 19 nt, Homo sapiens
  misc_RNA (1)...(19): siRNA sense strand
uguuugaccuccugagaaa

SEQ ID NO: 1347178 - RNA, 19 nt, Homo sapiens
  misc_RNA (1)...(19): siRNA sense strand
ugaagauguuagacaagaa

SEQ ID NO: 1347179 - RNA, 19 nt, Homo sapiens
  misc_RNA (1)...(19): siRNA sense strand
ccacggugauccuggugaa

SEQ ID NO: 1347180 - RNA, 19 nt, Homo sapiens
  misc_RNA (1)...(19): siRNA sense strand
cugaagauguuagacaaga

SEQ ID NO: 1347181 - RNA, 19 nt, Homo sapiens
  misc_RNA (1)...(19): siRNA sense strand
ggaggagguuaagaacuca

SEQ ID NO: 1347182 - RNA, 19 nt, Homo sapiens
  misc_RNA (1)...(19): siRNA sense strand
ggagauugccauccugaag

SEQ ID NO: 1347183 - RNA, 19 nt, Homo sapiens
  misc_RNA (1)...(19): siRNA sense strand
ggaagugcccauucaucga

SEQ ID NO: 1347184 - RNA, 19 nt, Homo sapiens
  misc_RNA (1)...(19): siRNA sense strand
agauugccauccugaagaa

SEQ ID NO: 1347185 - RNA, 19 nt, Homo sapiens
  misc_RNA (1)...(19): siRNA sense strand
ccgaggccauuucugauuc

SEQ ID NO: 1347186 - RNA, 19 nt, Homo sapiens
  misc_RNA (1)...(19): siRNA sense strand
ugaauguggucaaacugau

SEQ ID NO: 1347187 - RNA, 19 nt, Homo sapiens
  misc_RNA (1)...(19): siRNA sense strand
gugaauguggucaaacuga

SEQ ID NO: 1347188 - RNA, 19 nt, Homo sapiens
  misc_RNA (1)...(19): siRNA sense strand
gggaagagcgauccauguc

SEQ ID NO: 1347189 - RNA, 19 nt, Homo sapiens
  misc_RNA (1)...(19): siRNA sense strand
aggaggagguuaagaacuc

SEQ ID NO: 1347190 - RNA, 19 nt, Homo sapiens
  misc_RNA (1)...(19): siRNA sense strand
gaauguggucaaacugauc

SEQ ID NO: 1347191 - RNA, 19 nt, Homo sapiens
  misc_RNA (1)...(19): siRNA sense strand
ggaagagcgauccaugucu

SEQ ID NO: 1347192 - RNA, 19 nt, Homo sapiens
  misc_RNA (1)...(19): siRNA sense strand
guacuugcacugccagaag

SEQ ID NO: 1347193 - RNA, 19 nt, Homo sapiens
  misc_RNA (1)...(19): siRNA sense strand
gugaagaucgccgacuuug

SEQ ID NO: 1347194 - RNA, 19 nt, Homo sapiens
  misc_RNA (1)...(19): siRNA sense strand
gagguuaagaacucaguca

SEQ ID NO: 1347195 - RNA, 19 nt, Homo sapiens
  misc_RNA (1)...(19): siRNA sense strand
ccacaggaagaucaagaau

SEQ ID NO: 1347196 - RNA, 19 nt, Homo sapiens
  misc_RNA (1)...(19): siRNA sense strand
gaacucagucaggcucauc

SEQ ID NO: 1347197 - RNA, 19 nt, Homo sapiens
  misc_RNA (1)...(19): siRNA sense strand
gaugaugggcacgugaaga

SEQ ID NO: 1347198 - RNA, 19 nt, Homo sapiens
  misc_RNA (1)...(19): siRNA sense strand
ugggaaggccuuggaugua

SEQ ID NO: 1347199 - RNA, 19 nt, Homo sapiens
  misc_RNA (1)...(19): siRNA sense strand
gugggaaggccuuggaugu

SEQ ID NO: 1347200 - RNA, 19 nt, Homo sapiens
  misc_RNA (1)...(19): siRNA sense strand
gacacuaugcaaugaaagu

SEQ ID NO: 1347201 - RNA, 19 nt, Homo sapiens
  misc_RNA (1)...(19): siRNA sense strand
ugccagacaucaaguugca

SEQ ID NO: 1347202 - RNA, 19 nt, Homo sapiens
  misc_RNA (1)...(19): siRNA sense strand
guuguacugcuuugucuau

SEQ ID NO: 1347203 - RNA, 19 nt, Homo sapiens
  misc_RNA (1)...(19): siRNA sense strand
gggaugaugggcacgugaa

SEQ ID NO: 1347204 - RNA, 19 nt, Homo sapiens
  misc_RNA (1)...(19): siRNA sense strand
uacuugcacugccagaaga

SEQ ID NO: 1347205 - RNA, 19 nt, Homo sapiens
  misc_RNA (1)...(19): siRNA sense strand
aaaagaaguuacugaagca

SEQ ID NO: 1347206 - RNA, 19 nt, Homo sapiens
  misc_RNA (1)...(19): siRNA sense strand
uccugaagauguuagacaa

SEQ ID NO: 1347207 - RNA, 19 nt, Homo sapiens
  misc_RNA (1)...(19): siRNA sense strand
ugacccagcugaggacaac

SEQ ID NO: 1347208 - RNA, 19 nt, Homo sapiens
  misc_RNA (1)...(19): siRNA sense strand
cacaggaagaucaagaaug

SEQ ID NO: 1347209 - RNA, 19 nt, Homo sapiens
  misc_RNA (1)...(19): siRNA sense strand
cgugaagaucgccgacuuu

SEQ ID NO: 1347210 - RNA, 19 nt, Homo sapiens
  misc_RNA (1)...(19): siRNA sense strand
gaauuggggugccagacau

SEQ ID NO: 1347211 - RNA, 19 nt, Homo sapiens
  misc_RNA (1)...(19): siRNA sense strand
caacgaaagugaagacaga

SEQ ID NO: 1347212 - RNA, 19 nt, Homo sapiens
  misc_RNA (1)...(19): siRNA sense strand
acaggaagaucaagaauga

SEQ ID NO: 1347213 - RNA, 19 nt, Homo sapiens
  misc_RNA (1)...(19): siRNA sense strand
gcccagagccuacuagaaa

SEQ ID NO: 1347214 - RNA, 19 nt, Homo sapiens
  misc_RNA (1)...(19): siRNA sense strand
gcgugcagcugaaccagua

SEQ ID NO: 1347215 - RNA, 19 nt, Homo sapiens
  misc_RNA (1)...(19): siRNA sense strand
ccacuggcgucacguugua

SEQ ID NO: 1347216 - RNA, 19 nt, Homo sapiens
  misc_RNA (1)...(19): siRNA sense strand
gggaaggccuuggauguau

SEQ ID NO: 1347217 - RNA, 19 nt, Homo sapiens
  misc_RNA (1)...(19): siRNA sense strand
gaagacagacacuaugcaa

SEQ ID NO: 1347218 - RNA, 19 nt, Homo sapiens
  misc_RNA (1)...(19): siRNA sense strand
gacagacacuaugcaauga

SEQ ID NO: 1347219 - RNA, 19 nt, Homo sapiens
  misc_RNA (1)...(19): siRNA sense strand
ugacagaggaggagguuaa

SEQ ID NO: 1347220 - RNA, 19 nt, Homo sapiens
  misc_RNA (1)...(19): siRNA sense strand
aguacaagcugcagaguga

SEQ ID NO: 1347221 - RNA, 19 nt, Homo sapiens
  misc_RNA (1)...(19): siRNA sense strand
ggaaggccuuggauguaug

SEQ ID NO: 1347222 - RNA, 19 nt, Homo sapiens
  misc_RNA (1)...(19): siRNA sense strand
gaccugauccugaagaugu

SEQ ID NO: 1347223 - RNA, 19 nt, Homo sapiens
  misc_RNA (1)...(19): siRNA sense strand
ugaaguccaugcugaggaa

SEQ ID NO: 1347224 - RNA, 19 nt, Homo sapiens
  misc_RNA (1)...(19): siRNA sense strand
cagacacuaugcaaugaaa

SEQ ID NO: 1347225 - RNA, 19 nt, Homo sapiens
  misc_RNA (1)...(19): siRNA sense strand
gaaugagcccgugguguuu

SEQ ID NO: 1347226 - RNA, 19 nt, Homo sapiens
  misc_RNA (1)...(19): siRNA sense strand
ggaagugcccugugacaag

SEQ ID NO: 1347227 - RNA, 19 nt, Homo sapiens
  misc_RNA (1)...(19): siRNA sense strand
gaagauguuagacaagaau

SEQ ID NO: 1347228 - RNA, 19 nt, Homo sapiens
  misc_RNA (1)...(19): siRNA sense strand
ucauggaagugcccuguga

SEQ ID NO: 1347229 - RNA, 19 nt, Homo sapiens
  misc_RNA (1)...(19): siRNA sense strand
agacagacacuaugcaaug

SEQ ID NO: 1347230 - RNA, 19 nt, Homo sapiens
  misc_RNA (1)...(19): siRNA sense strand
ugaucgagguccuggauga

SEQ ID NO: 1347231 - RNA, 19 nt, Homo sapiens
  misc_RNA (1)...(19): siRNA sense strand
gagauugccauccugaaga

SEQ ID NO: 1347232 - RNA, 19 nt, Homo sapiens
  misc_RNA (1)...(19): siRNA sense strand
gaagcuggaccacgugaau

SEQ ID NO: 1347233 - RNA, 19 nt, Homo sapiens
  misc_RNA (1)...(19): siRNA sense strand
cagaggaggagguuaagaa

SEQ ID NO: 1347234 - RNA, 19 nt, Homo sapiens
  misc_RNA (1)...(19): siRNA sense strand
agaaugagcccgugguguu

SEQ ID NO: 1347235 - RNA, 19 nt, Homo sapiens
  misc_RNA (1)...(19): siRNA sense strand
uguuugaccuccugagaaa

SEQ ID NO: 1347236 - RNA, 19 nt, Homo sapiens
  misc_RNA (1)...(19): siRNA sense strand
ugaagauguuagacaagaa

SEQ ID NO: 1347237 - RNA, 19 nt, Homo sapiens
  misc_RNA (1)...(19): siRNA sense strand
ccacggugauccuggugaa

SEQ ID NO: 1347238 - RNA, 19 nt, Homo sapiens
  misc_RNA (1)...(19): siRNA sense strand
cugaagauguuagacaaga

SEQ ID NO: 1347239 - RNA, 19 nt, Homo sapiens
  misc_RNA (1)...(19): siRNA sense strand
ggaggagguuaagaacuca

SEQ ID NO: 1347240 - RNA, 19 nt, Homo sapiens
  misc_RNA (1)...(19): siRNA sense strand
ggagauugccauccugaag

SEQ ID NO: 1347241 - RNA, 19 nt, Homo sapiens
  misc_RNA (1)...(19): siRNA sense strand
ggaagugcccauucaucga

SEQ ID NO: 1347242 - RNA, 19 nt, Homo sapiens
  misc_RNA (1)...(19): siRNA sense strand
agauugccauccugaagaa

SEQ ID NO: 1347243 - RNA, 19 nt, Homo sapiens
  misc_RNA (1)...(19): siRNA sense strand
ccgaggccauuucugauuc

SEQ ID NO: 1347244 - RNA, 19 nt, Homo sapiens
  misc_RNA (1)...(19): siRNA sense strand
ugaauguggucaaacugau

SEQ ID NO: 1347245 - RNA, 19 nt, Homo sapiens
  misc_RNA (1)...(19): siRNA sense strand
gugaauguggucaaacuga

SEQ ID NO: 1347246 - RNA, 19 nt, Homo sapiens
  misc_RNA (1)...(19): siRNA sense strand
gggaagagcgauccauguc

SEQ ID NO: 1347247 - RNA, 19 nt, Homo sapiens
  misc_RNA (1)...(19): siRNA sense strand
aggaggagguuaagaacuc

SEQ ID NO: 1347248 - RNA, 19 nt, Homo sapiens
  misc_RNA (1)...(19): siRNA sense strand
gaauguggucaaacugauc

SEQ ID NO: 1347249 - RNA, 19 nt, Homo sapiens
  misc_RNA (1)...(19): siRNA sense strand
ggaagagcgauccaugucu

SEQ ID NO: 1347250 - RNA, 19 nt, Homo sapiens
  misc_RNA (1)...(19): siRNA sense strand
guacuugcacugccagaag

SEQ ID NO: 1347251 - RNA, 19 nt, Homo sapiens
  misc_RNA (1)...(19): siRNA sense strand
gugaagaucgccgacuuug

SEQ ID NO: 1347252 - RNA, 19 nt, Homo sapiens
  misc_RNA (1)...(19): siRNA sense strand
gagguuaagaacucaguca

SEQ ID NO: 1347253 - RNA, 19 nt, Homo sapiens
  misc_RNA (1)...(19): siRNA sense strand
ccacaggaagaucaagaau

SEQ ID NO: 1347254 - RNA, 19 nt, Homo sapiens
  misc_RNA (1)...(19): siRNA sense strand
gaacucagucaggcucauc

SEQ ID NO: 1347255 - RNA, 19 nt, Homo sapiens
  misc_RNA (1)...(19): siRNA sense strand
gaugaugggcacgugaaga

SEQ ID NO: 1347256 - RNA, 19 nt, Homo sapiens
  misc_RNA (1)...(19): siRNA sense strand
ugggaaggccuuggaugua

SEQ ID NO: 1347257 - RNA, 19 nt, Homo sapiens
  misc_RNA (1)...(19): siRNA sense strand
gugggaaggccuuggaugu

SEQ ID NO: 1347258 - RNA, 19 nt, Homo sapiens
  misc_RNA (1)...(19): siRNA sense strand
gacacuaugcaaugaaagu

SEQ ID NO: 1347259 - RNA, 19 nt, Homo sapiens
  misc_RNA (1)...(19): siRNA sense strand
ugccagacaucaaguugca

SEQ ID NO: 1347260 - RNA, 19 nt, Homo sapiens
  misc_RNA (1)...(19): siRNA sense strand
guuguacugcuuugucuau

SEQ ID NO: 1347261 - RNA, 19 nt, Homo sapiens
  misc_RNA (1)...(19): siRNA sense strand
gggaugaugggcacgugaa

SEQ ID NO: 1347262 - RNA, 19 nt, Homo sapiens
  misc_RNA (1)...(19): siRNA sense strand
uacuugcacugccagaaga

SEQ ID NO: 1347263 - RNA, 19 nt, Homo sapiens
  misc_RNA (1)...(19): siRNA sense strand
aaaagaaguuacugaagca

SEQ ID NO: 1347264 - RNA, 19 nt, Homo sapiens
  misc_RNA (1)...(19): siRNA sense strand
uccugaagauguuagacaa

SEQ ID NO: 1347265 - RNA, 19 nt, Homo sapiens
  misc_RNA (1)...(19): siRNA sense strand
ugacccagcugaggacaac

SEQ ID NO: 1347266 - RNA, 19 nt, Homo sapiens
  misc_RNA (1)...(19): siRNA sense strand
cacaggaagaucaagaaug

SEQ ID NO: 1347267 - RNA, 19 nt, Homo sapiens
  misc_RNA (1)...(19): siRNA sense strand
cgugaagaucgccgacuuu

SEQ ID NO: 1347268 - RNA, 19 nt, Homo sapiens
  misc_RNA (1)...(19): siRNA sense strand
gaauuggggugccagacau

SEQ ID NO: 1347269 - RNA, 19 nt, Homo sapiens
  misc_RNA (1)...(19): siRNA sense strand
caacgaaagugaagacaga

SEQ ID NO: 1347270 - RNA, 19 nt, Homo sapiens
  misc_RNA (1)...(19): siRNA sense strand
acaggaagaucaagaauga

SEQ ID NO: 1347271 - RNA, 19 nt, Homo sapiens
  misc_RNA (1)...(19): siRNA sense strand
gcccagagccuacuagaaa

SEQ ID NO: 1347272 - RNA, 19 nt, Homo sapiens
  misc_RNA (1)...(19): siRNA sense strand
gcgugcagcugaaccagua

SEQ ID NO: 1347273 - RNA, 19 nt, Homo sapiens
  misc_RNA (1)...(19): siRNA sense strand
ccacuggcgucacguugua

SEQ ID NO: 1347274 - RNA, 19 nt, Homo sapiens
  misc_RNA (1)...(19): siRNA sense strand
gggaaggccuuggauguau

SEQ ID NO: 1347275 - RNA, 19 nt, Homo sapiens
  misc_RNA (1)...(19): siRNA sense strand
gaagacagacacuaugcaa

SEQ ID NO: 1347276 - RNA, 19 nt, Homo sapiens
  misc_RNA (1)...(19): siRNA sense strand
gacagacacuaugcaauga

SEQ ID NO: 1347277 - RNA, 19 nt, Homo sapiens
  misc_RNA (1)...(19): siRNA sense strand
ugacagaggaggagguuaa

SEQ ID NO: 1347278 - RNA, 19 nt, Homo sapiens
  misc_RNA (1)...(19): siRNA sense strand
aguacaagcugcagaguga

SEQ ID NO: 1347279 - RNA, 19 nt, Homo sapiens
  misc_RNA (1)...(19): siRNA sense strand
ggaaggccuuggauguaug

SEQ ID NO: 1347280 - RNA, 19 nt, Homo sapiens
  misc_RNA (1)...(19): siRNA sense strand
gaccugauccugaagaugu

SEQ ID NO: 1347281 - RNA, 19 nt, Homo sapiens
  misc_RNA (1)...(19): siRNA sense strand
ugaaguccaugcugaggaa

SEQ ID NO: 1347282 - RNA, 19 nt, Homo sapiens
  misc_RNA (1)...(19): siRNA sense strand
cagacacuaugcaaugaaa

SEQ ID NO: 1347283 - RNA, 19 nt, Homo sapiens
  misc_RNA (1)...(19): siRNA sense strand
gaaugagcccgugguguuu

SEQ ID NO: 1347284 - RNA, 19 nt, Homo sapiens
  misc_RNA (1)...(19): siRNA sense strand
ggaagugcccugugacaag

SEQ ID NO: 1347285 - RNA, 19 nt, Homo sapiens
  misc_RNA (1)...(19): siRNA sense strand
gaagauguuagacaagaau

SEQ ID NO: 1347286 - RNA, 19 nt, Homo sapiens
  misc_RNA (1)...(19): siRNA sense strand
ucauggaagugcccuguga

SEQ ID NO: 1347287 - RNA, 19 nt, Homo sapiens
  misc_RNA (1)...(19): siRNA sense strand
agacagacacuaugcaaug

SEQ ID NO: 1347288 - RNA, 19 nt, Homo sapiens
  misc_RNA (1)...(19): siRNA sense strand
ugaucgagguccuggauga

SEQ ID NO: 1347289 - RNA, 19 nt, Homo sapiens
  misc_RNA (1)...(19): siRNA sense strand
gagauugccauccugaaga

SEQ ID NO: 1347290 - RNA, 19 nt, Homo sapiens
  misc_RNA (1)...(19): siRNA sense strand
gaagcuggaccacgugaau

SEQ ID NO: 1347291 - RNA, 19 nt, Homo sapiens
  misc_RNA (1)...(19): siRNA sense strand
cagaggaggagguuaagaa

SEQ ID NO: 1347292 - RNA, 19 nt, Homo sapiens
  misc_RNA (1)...(19): siRNA sense strand
agaaugagcccgugguguu

SEQ ID NO: 1347293 - RNA, 19 nt, Homo sapiens
  misc_RNA (1)...(19): siRNA sense strand
uguuugaccuccugagaaa

SEQ ID NO: 1347294 - RNA, 19 nt, Homo sapiens
  misc_RNA (1)...(19): siRNA sense strand
ugaagauguuagacaagaa

SEQ ID NO: 1347295 - RNA, 19 nt, Homo sapiens
  misc_RNA (1)...(19): siRNA sense strand
ccacggugauccuggugaa

SEQ ID NO: 1347296 - RNA, 19 nt, Homo sapiens
  misc_RNA (1)...(19): siRNA sense strand
cugaagauguuagacaaga

SEQ ID NO: 1347297 - RNA, 19 nt, Homo sapiens
  misc_RNA (1)...(19): siRNA sense strand
ggaggagguuaagaacuca

SEQ ID NO: 1347298 - RNA, 19 nt, Homo sapiens
  misc_RNA (1)...(19): siRNA sense strand
ggagauugccauccugaag

SEQ ID NO: 1347299 - RNA, 19 nt, Homo sapiens
  misc_RNA (1)...(19): siRNA sense strand
ggaagugcccauucaucga

SEQ ID NO: 1347300 - RNA, 19 nt, Homo sapiens
  misc_RNA (1)...(19): siRNA sense strand
agauugccauccugaagaa

SEQ ID NO: 1347301 - RNA, 19 nt, Homo sapiens
  misc_RNA (1)...(19): siRNA sense strand
ccgaggccauuucugauuc

SEQ ID NO: 1347302 - RNA, 19 nt, Homo sapiens
  misc_RNA (1)...(19): siRNA sense strand
ugaauguggucaaacugau

SEQ ID NO: 1347303 - RNA, 19 nt, Homo sapiens
  misc_RNA (1)...(19): siRNA sense strand
gugaauguggucaaacuga

SEQ ID NO: 1347304 - RNA, 19 nt, Homo sapiens
  misc_RNA (1)...(19): siRNA sense strand
gggaagagcgauccauguc

SEQ ID NO: 1347305 - RNA, 19 nt, Homo sapiens
  misc_RNA (1)...(19): siRNA sense strand
aggaggagguuaagaacuc

SEQ ID NO: 1347306 - RNA, 19 nt, Homo sapiens
  misc_RNA (1)...(19): siRNA sense strand
gaauguggucaaacugauc

SEQ ID NO: 1347307 - RNA, 19 nt, Homo sapiens
  misc_RNA (1)...(19): siRNA sense strand
ggaagagcgauccaugucu

SEQ ID NO: 1347308 - RNA, 19 nt, Homo sapiens
  misc_RNA (1)...(19): siRNA sense strand
guacuugcacugccagaag

SEQ ID NO: 1347309 - RNA, 19 nt, Homo sapiens
  misc_RNA (1)...(19): siRNA sense strand
gugaagaucgccgacuuug

SEQ ID NO: 1347310 - RNA, 19 nt, Homo sapiens
  misc_RNA (1)...(19): siRNA sense strand
gagguuaagaacucaguca

SEQ ID NO: 1347311 - RNA, 19 nt, Homo sapiens
  misc_RNA (1)...(19): siRNA sense strand
ccacaggaagaucaagaau

SEQ ID NO: 1347312 - RNA, 19 nt, Homo sapiens
  misc_RNA (1)...(19): siRNA sense strand
gaacucagucaggcucauc

SEQ ID NO: 1347313 - RNA, 19 nt, Homo sapiens
  misc_RNA (1)...(19): siRNA sense strand
gaugaugggcacgugaaga

SEQ ID NO: 1347314 - RNA, 19 nt, Homo sapiens
  misc_RNA (1)...(19): siRNA sense strand
ugggaaggccuuggaugua

SEQ ID NO: 1347315 - RNA, 19 nt, Homo sapiens
  misc_RNA (1)...(19): siRNA sense strand
gugggaaggccuuggaugu

SEQ ID NO: 1347316 - RNA, 19 nt, Homo sapiens
  misc_RNA (1)...(19): siRNA sense strand
gacacuaugcaaugaaagu

SEQ ID NO: 1347317 - RNA, 19 nt, Homo sapiens
  misc_RNA (1)...(19): siRNA sense strand
ugccagacaucaaguugca

SEQ ID NO: 1347318 - RNA, 19 nt, Homo sapiens
  misc_RNA (1)...(19): siRNA sense strand
guuguacugcuuugucuau

SEQ ID NO: 1347319 - RNA, 19 nt, Homo sapiens
  misc_RNA (1)...(19): siRNA sense strand
gggaugaugggcacgugaa

SEQ ID NO: 1347320 - RNA, 19 nt, Homo sapiens
  misc_RNA (1)...(19): siRNA sense strand
uacuugcacugccagaaga

SEQ ID NO: 1347321 - RNA, 19 nt, Homo sapiens
  misc_RNA (1)...(19): siRNA sense strand
aaaagaaguuacugaagca

SEQ ID NO: 1347322 - RNA, 19 nt, Homo sapiens
  misc_RNA (1)...(19): siRNA sense strand
uccugaagauguuagacaa

SEQ ID NO: 1347323 - RNA, 19 nt, Homo sapiens
  misc_RNA (1)...(19): siRNA sense strand
ugacccagcugaggacaac

SEQ ID NO: 1347324 - RNA, 19 nt, Homo sapiens
  misc_RNA (1)...(19): siRNA sense strand
cacaggaagaucaagaaug

SEQ ID NO: 1347325 - RNA, 19 nt, Homo sapiens
  misc_RNA (1)...(19): siRNA sense strand
cgugaagaucgccgacuuu

SEQ ID NO: 1347326 - RNA, 19 nt, Homo sapiens
  misc_RNA (1)...(19): siRNA sense strand
gaauuggggugccagacau

SEQ ID NO: 1347327 - RNA, 19 nt, Homo sapiens
  misc_RNA (1)...(19): siRNA sense strand
caacgaaagugaagacaga

SEQ ID NO: 1347328 - RNA, 19 nt, Homo sapiens
  misc_RNA (1)...(19): siRNA sense strand
acaggaagaucaagaauga

SEQ ID NO: 1347329 - RNA, 19 nt, Homo sapiens
  misc_RNA (1)...(19): siRNA sense strand
gcccagagccuacuagaaa

SEQ ID NO: 1347330 - RNA, 19 nt, Homo sapiens
  misc_RNA (1)...(19): siRNA sense strand
gcgugcagcugaaccagua

SEQ ID NO: 1347331 - RNA, 19 nt, Homo sapiens
  misc_RNA (1)...(19): siRNA sense strand
ccacuggcgucacguugua

SEQ ID NO: 1347332 - RNA, 19 nt, Homo sapiens
  misc_RNA (1)...(19): siRNA sense strand
gggaaggccuuggauguau

SEQ ID NO: 1347333 - RNA, 19 nt, Homo sapiens
  misc_RNA (1)...(19): siRNA sense strand
gaagacagacacuaugcaa

SEQ ID NO: 1347334 - RNA, 19 nt, Homo sapiens
  misc_RNA (1)...(19): siRNA sense strand
gacagacacuaugcaauga

SEQ ID NO: 1347335 - RNA, 19 nt, Homo sapiens
  misc_RNA (1)...(19): siRNA sense strand
ugacagaggaggagguuaa

SEQ ID NO: 1347336 - RNA, 19 nt, Homo sapiens
  misc_RNA (1)...(19): siRNA sense strand
aguacaagcugcagaguga

SEQ ID NO: 1347337 - RNA, 19 nt, Homo sapiens
  misc_RNA (1)...(19): siRNA sense strand
ggaaggccuuggauguaug

SEQ ID NO: 1347338 - RNA, 19 nt, Homo sapiens
  misc_RNA (1)...(19): siRNA sense strand
gaccugauccugaagaugu

SEQ ID NO: 1347339 - RNA, 19 nt, Homo sapiens
  misc_RNA (1)...(19): siRNA sense strand
ugaaguccaugcugaggaa

SEQ ID NO: 1347340 - RNA, 19 nt, Homo sapiens
  misc_RNA (1)...(19): siRNA sense strand
cagacacuaugcaaugaaa

SEQ ID NO: 1347341 - RNA, 19 nt, Homo sapiens
  misc_RNA (1)...(19): siRNA sense strand
gaaugagcccgugguguuu

SEQ ID NO: 1347342 - RNA, 19 nt, Homo sapiens
  misc_RNA (1)...(19): siRNA sense strand
ggaagugcccugugacaag

SEQ ID NO: 1347343 - RNA, 19 nt, Homo sapiens
  misc_RNA (1)...(19): siRNA sense strand
gaagauguuagacaagaau

SEQ ID NO: 1347344 - RNA, 19 nt, Homo sapiens
  misc_RNA (1)...(19): siRNA sense strand
ucauggaagugcccuguga

SEQ ID NO: 1347345 - RNA, 19 nt, Homo sapiens
  misc_RNA (1)...(19): siRNA sense strand
agacagacacuaugcaaug

SEQ ID NO: 1347346 - RNA, 19 nt, Homo sapiens
  misc_RNA (1)...(19): siRNA sense strand
ugaucgagguccuggauga

SEQ ID NO: 1347347 - RNA, 19 nt, Homo sapiens
  misc_RNA (1)...(19): siRNA sense strand
gagauugccauccugaaga

SEQ ID NO: 1347348 - RNA, 19 nt, Homo sapiens
  misc_RNA (1)...(19): siRNA sense strand
gaagcuggaccacgugaau

SEQ ID NO: 1347349 - RNA, 19 nt, Homo sapiens
  misc_RNA (1)...(19): siRNA sense strand
cagaggaggagguuaagaa

SEQ ID NO: 1347350 - RNA, 19 nt, Homo sapiens
  misc_RNA (1)...(19): siRNA sense strand
agaaugagcccgugguguu

SEQ ID NO: 1347351 - RNA, 19 nt, Homo sapiens
  misc_RNA (1)...(19): siRNA sense strand
uguuugaccuccugagaaa

SEQ ID NO: 1347352 - RNA, 19 nt, Homo sapiens
  misc_RNA (1)...(19): siRNA sense strand
ugaagauguuagacaagaa

SEQ ID NO: 1347353 - RNA, 19 nt, Homo sapiens
  misc_RNA (1)...(19): siRNA sense strand
ccacggugauccuggugaa

SEQ ID NO: 1347354 - RNA, 19 nt, Homo sapiens
  misc_RNA (1)...(19): siRNA sense strand
cugaagauguuagacaaga

SEQ ID NO: 1347355 - RNA, 19 nt, Homo sapiens
  misc_RNA (1)...(19): siRNA sense strand
ggaggagguuaagaacuca

SEQ ID NO: 1347356 - RNA, 19 nt, Homo sapiens
  misc_RNA (1)...(19): siRNA sense strand
ggagauugccauccugaag

SEQ ID NO: 1347357 - RNA, 19 nt, Homo sapiens
  misc_RNA (1)...(19): siRNA sense strand
ggaagugcccauucaucga

SEQ ID NO: 1347358 - RNA, 19 nt, Homo sapiens
  misc_RNA (1)...(19): siRNA sense strand
agauugccauccugaagaa

SEQ ID NO: 1347359 - RNA, 19 nt, Homo sapiens
  misc_RNA (1)...(19): siRNA sense strand
ccgaggccauuucugauuc

SEQ ID NO: 1347360 - RNA, 19 nt, Homo sapiens
  misc_RNA (1)...(19): siRNA sense strand
ugaauguggucaaacugau

SEQ ID NO: 1347361 - RNA, 19 nt, Homo sapiens
  misc_RNA (1)...(19): siRNA sense strand
gugaauguggucaaacuga

SEQ ID NO: 1347362 - RNA, 19 nt, Homo sapiens
  misc_RNA (1)...(19): siRNA sense strand
gggaagagcgauccauguc

SEQ ID NO: 1347363 - RNA, 19 nt, Homo sapiens
  misc_RNA (1)...(19): siRNA sense strand
aggaggagguuaagaacuc

SEQ ID NO: 1347364 - RNA, 19 nt, Homo sapiens
  misc_RNA (1)...(19): siRNA sense strand
gaauguggucaaacugauc

SEQ ID NO: 1347365 - RNA, 19 nt, Homo sapiens
  misc_RNA (1)...(19): siRNA sense strand
ggaagagcgauccaugucu

SEQ ID NO: 1347366 - RNA, 19 nt, Homo sapiens
  misc_RNA (1)...(19): siRNA sense strand
guacuugcacugccagaag

SEQ ID NO: 1347367 - RNA, 19 nt, Homo sapiens
  misc_RNA (1)...(19): siRNA sense strand
gugaagaucgccgacuuug

SEQ ID NO: 1347368 - RNA, 19 nt, Homo sapiens
  misc_RNA (1)...(19): siRNA sense strand
gagguuaagaacucaguca

SEQ ID NO: 1347369 - RNA, 19 nt, Homo sapiens
  misc_RNA (1)...(19): siRNA sense strand
ccacaggaagaucaagaau

SEQ ID NO: 1347370 - RNA, 19 nt, Homo sapiens
  misc_RNA (1)...(19): siRNA sense strand
gaacucagucaggcucauc

SEQ ID NO: 1347371 - RNA, 19 nt, Homo sapiens
  misc_RNA (1)...(19): siRNA sense strand
gaugaugggcacgugaaga

SEQ ID NO: 1347372 - RNA, 19 nt, Homo sapiens
  misc_RNA (1)...(19): siRNA sense strand
ugggaaggccuuggaugua

SEQ ID NO: 1347373 - RNA, 19 nt, Homo sapiens
  misc_RNA (1)...(19): siRNA sense strand
gugggaaggccuuggaugu

SEQ ID NO: 1347374 - RNA, 19 nt, Homo sapiens
  misc_RNA (1)...(19): siRNA sense strand
gacacuaugcaaugaaagu

SEQ ID NO: 1347375 - RNA, 19 nt, Homo sapiens
  misc_RNA (1)...(19): siRNA sense strand
ugccagacaucaaguugca

SEQ ID NO: 1347376 - RNA, 19 nt, Homo sapiens
  misc_RNA (1)...(19): siRNA sense strand
guuguacugcuuugucuau

SEQ ID NO: 1347377 - RNA, 19 nt, Homo sapiens
  misc_RNA (1)...(19): siRNA sense strand
gggaugaugggcacgugaa

SEQ ID NO: 1347378 - RNA, 19 nt, Homo sapiens
  misc_RNA (1)...(19): siRNA sense strand
uacuugcacugccagaaga

SEQ ID NO: 1347379 - RNA, 19 nt, Homo sapiens
  misc_RNA (1)...(19): siRNA sense strand
aaaagaaguuacugaagca

SEQ ID NO: 1347380 - RNA, 19 nt, Homo sapiens
  misc_RNA (1)...(19): siRNA sense strand
uccugaagauguuagacaa

SEQ ID NO: 1347381 - RNA, 19 nt, Homo sapiens
  misc_RNA (1)...(19): siRNA sense strand
ugacccagcugaggacaac

SEQ ID NO: 1347382 - RNA, 19 nt, Homo sapiens
  misc_RNA (1)...(19): siRNA sense strand
cacaggaagaucaagaaug

SEQ ID NO: 1347383 - RNA, 19 nt, Homo sapiens
  misc_RNA (1)...(19): siRNA sense strand
cgugaagaucgccgacuuu

SEQ ID NO: 1347384 - RNA, 19 nt, Homo sapiens
  misc_RNA (1)...(19): siRNA sense strand
gaauuggggugccagacau

SEQ ID NO: 1347385 - RNA, 19 nt, Homo sapiens
  misc_RNA (1)...(19): siRNA sense strand
gcacagagguggacuucaa

SEQ ID NO: 1347386 - RNA, 19 nt, Homo sapiens
  misc_RNA (1)...(19): siRNA sense strand
gaacugaugcugcccuuua

SEQ ID NO: 1347387 - RNA, 19 nt, Homo sapiens
  misc_RNA (1)...(19): siRNA sense strand
gaaggaggcguguuuguaa

SEQ ID NO: 1347388 - RNA, 19 nt, Homo sapiens
  misc_RNA (1)...(19): siRNA sense strand
gaaguuagagguccgagaa

SEQ ID NO: 1347389 - RNA, 19 nt, Homo sapiens
  misc_RNA (1)...(19): siRNA sense strand
gggcuaugcuggaggauga

SEQ ID NO: 1347390 - RNA, 19 nt, Homo sapiens
  misc_RNA (1)...(19): siRNA sense strand
gcagucaguuccauuaagu

SEQ ID NO: 1347391 - RNA, 19 nt, Homo sapiens
  misc_RNA (1)...(19): siRNA sense strand
ccacauggcucuguucauc

SEQ ID NO: 1347392 - RNA, 19 nt, Homo sapiens
  misc_RNA (1)...(19): siRNA sense strand
gaagccaacuugacuugca

SEQ ID NO: 1347393 - RNA, 19 nt, Homo sapiens
  misc_RNA (1)...(19): siRNA sense strand
gaucacagcccacgcuuca

SEQ ID NO: 1347394 - RNA, 19 nt, Homo sapiens
  misc_RNA (1)...(19): siRNA sense strand
gauacuggcuucuacuucu

SEQ ID NO: 1347395 - RNA, 19 nt, Homo sapiens
  misc_RNA (1)...(19): siRNA sense strand
ucacaacccuuugcuggaa

SEQ ID NO: 1347396 - RNA, 19 nt, Homo sapiens
  misc_RNA (1)...(19): siRNA sense strand
gcaaccugcugcugaagga

SEQ ID NO: 1347397 - RNA, 19 nt, Homo sapiens
  misc_RNA (1)...(19): siRNA sense strand
ggaugagggugucuauauc

SEQ ID NO: 1347398 - RNA, 19 nt, Homo sapiens
  misc_RNA (1)...(19): siRNA sense strand
gcaugaaggucaccaaagc

SEQ ID NO: 1347399 - RNA, 19 nt, Homo sapiens
  misc_RNA (1)...(19): siRNA sense strand
gaccucauaucguugguau

SEQ ID NO: 1347400 - RNA, 19 nt, Homo sapiens
  misc_RNA (1)...(19): siRNA sense strand
gagcgaugcuggcgucuac

SEQ ID NO: 1347401 - RNA, 19 nt, Homo sapiens
  misc_RNA (1)...(19): siRNA sense strand
gaggaugcccacucccaua

SEQ ID NO: 1347402 - RNA, 19 nt, Homo sapiens
  misc_RNA (1)...(19): siRNA sense strand
gaaccugaccugccuugug

SEQ ID NO: 1347403 - RNA, 19 nt, Homo sapiens
  misc_RNA (1)...(19): siRNA sense strand
caaauguucuuggaucauc

SEQ ID NO: 1347404 - RNA, 19 nt, Homo sapiens
  misc_RNA (1)...(19): siRNA sense strand
gagcuggcccuaucucaug

SEQ ID NO: 1347405 - RNA, 19 nt, Homo sapiens
  misc_RNA (1)...(19): siRNA sense strand
ggccacaaauguucuugga

SEQ ID NO: 1347406 - RNA, 19 nt, Homo sapiens
  misc_RNA (1)...(19): siRNA sense strand
caacaccucacucuucuuc

SEQ ID NO: 1347407 - RNA, 19 nt, Homo sapiens
  misc_RNA (1)...(19): siRNA sense strand
gucaaccgcuggucagaug

SEQ ID NO: 1347408 - RNA, 19 nt, Homo sapiens
  misc_RNA (1)...(19): siRNA sense strand
caucuguucugccucaaau

SEQ ID NO: 1347409 - RNA, 19 nt, Homo sapiens
  misc_RNA (1)...(19): siRNA sense strand
cacccacacucuauacuug

SEQ ID NO: 1347410 - RNA, 19 nt, Homo sapiens
  misc_RNA (1)...(19): siRNA sense strand
gagcgagauucaccuccaa

SEQ ID NO: 1347411 - RNA, 19 nt, Homo sapiens
  misc_RNA (1)...(19): siRNA sense strand
gcucauugauccugaugca

SEQ ID NO: 1347412 - RNA, 19 nt, Homo sapiens
  misc_RNA (1)...(19): siRNA sense strand
gcacagaagccaacuugac

SEQ ID NO: 1347413 - RNA, 19 nt, Homo sapiens
  misc_RNA (1)...(19): siRNA sense strand
gggcacagaagccaacuug

SEQ ID NO: 1347414 - RNA, 19 nt, Homo sapiens
  misc_RNA (1)...(19): siRNA sense strand
gaacggcgugggcucuuug

SEQ ID NO: 1347415 - RNA, 19 nt, Homo sapiens
  misc_RNA (1)...(19): siRNA sense strand
ucacggccaucugguacua

SEQ ID NO: 1347416 - RNA, 19 nt, Homo sapiens
  misc_RNA (1)...(19): siRNA sense strand
cagcuacccugcagucagu

SEQ ID NO: 1347417 - RNA, 19 nt, Homo sapiens
  misc_RNA (1)...(19): siRNA sense strand
gcacccacacucuauacuu

SEQ ID NO: 1347418 - RNA, 19 nt, Homo sapiens
  misc_RNA (1)...(19): siRNA sense strand
ggaaggacaggcagugaca

SEQ ID NO: 1347419 - RNA, 19 nt, Homo sapiens
  misc_RNA (1)...(19): siRNA sense strand
ccaagacgcccaccaugau

SEQ ID NO: 1347420 - RNA, 19 nt, Homo sapiens
  misc_RNA (1)...(19): siRNA sense strand
gcuccgcuuugcagccaua

SEQ ID NO: 1347421 - RNA, 19 nt, Homo sapiens
  misc_RNA (1)...(19): siRNA sense strand
agaaggaggcguguuugua

SEQ ID NO: 1347422 - RNA, 19 nt, Homo sapiens
  misc_RNA (1)...(19): siRNA sense strand
gaaggggucuugccugcuu

SEQ ID NO: 1347423 - RNA, 19 nt, Homo sapiens
  misc_RNA (1)...(19): siRNA sense strand
gaggccaacucccugaagu

SEQ ID NO: 1347424 - RNA, 19 nt, Homo sapiens
  misc_RNA (1)...(19): siRNA sense strand
gcaucacggccaucuggua

SEQ ID NO: 1347425 - RNA, 19 nt, Homo sapiens
  misc_RNA (1)...(19): siRNA sense strand
ggacucugguuccuacaac

SEQ ID NO: 1347426 - RNA, 19 nt, Homo sapiens
  misc_RNA (1)...(19): siRNA sense strand
aaccugaccugccuugugu

SEQ ID NO: 1347427 - RNA, 19 nt, Homo sapiens
  misc_RNA (1)...(19): siRNA sense strand
ccacacuggugcugucaca

SEQ ID NO: 1347428 - RNA, 19 nt, Homo sapiens
  misc_RNA (1)...(19): siRNA sense strand
ccagaccuaucaccuugga

SEQ ID NO: 1347429 - RNA, 19 nt, Homo sapiens
  misc_RNA (1)...(19): siRNA sense strand
gccauaacuuugacacaag

SEQ ID NO: 1347430 - RNA, 19 nt, Homo sapiens
  misc_RNA (1)...(19): siRNA sense strand
cacaaauguucuuggauca

SEQ ID NO: 1347431 - RNA, 19 nt, Homo sapiens
  misc_RNA (1)...(19): siRNA sense strand
ggaagaggagggcuuguac

SEQ ID NO: 1347432 - RNA, 19 nt, Homo sapiens
  misc_RNA (1)...(19): siRNA sense strand
cgcuacagcugguacaaga

SEQ ID NO: 1347433 - RNA, 19 nt, Homo sapiens
  misc_RNA (1)...(19): siRNA sense strand
gaugacaccuauguuugca

SEQ ID NO: 1347434 - RNA, 19 nt, Homo sapiens
  misc_RNA (1)...(19): siRNA sense strand
gugaugacaccuauguuug

SEQ ID NO: 1347435 - RNA, 19 nt, Homo sapiens
  misc_RNA (1)...(19): siRNA sense strand
ccagauccauggcugugau

SEQ ID NO: 1347436 - RNA, 19 nt, Homo sapiens
  misc_RNA (1)...(19): siRNA sense strand
caacuuccgcuucgagauc

SEQ ID NO: 1347437 - RNA, 19 nt, Homo sapiens
  misc_RNA (1)...(19): siRNA sense strand
gagaaggaggcguguuugu

SEQ ID NO: 1347438 - RNA, 19 nt, Homo sapiens
  misc_RNA (1)...(19): siRNA sense strand
ccacgcacccacacucuau

SEQ ID NO: 1347439 - RNA, 19 nt, Homo sapiens
  misc_RNA (1)...(19): siRNA sense strand
cugcugagcuggcccuauc

SEQ ID NO: 1347440 - RNA, 19 nt, Homo sapiens
  misc_RNA (1)...(19): siRNA sense strand
cagccugacucuccaccuu

SEQ ID NO: 1347441 - RNA, 19 nt, Homo sapiens
  misc_RNA (1)...(19): siRNA sense strand
cugcuccacucccuacgua

SEQ ID NO: 1347442 - RNA, 19 nt, Homo sapiens
  misc_RNA (1)...(19): siRNA sense strand
ggagaaggaggcguguuug

SEQ ID NO: 1347443 - RNA, 19 nt, Homo sapiens
  misc_RNA (1)...(19): siRNA sense strand
ggaggaugagggugucuau

SEQ ID NO: 1347444 - RNA, 19 nt, Homo sapiens
  misc_RNA (1)...(19): siRNA sense strand
cagaagccaacuugacuug

SEQ ID NO: 1347445 - RNA, 19 nt, Homo sapiens
  misc_RNA (1)...(19): siRNA sense strand
ggguacgccuccaaaccaa

SEQ ID NO: 1347446 - RNA, 19 nt, Homo sapiens
  misc_RNA (1)...(19): siRNA sense strand
uggagaaggaggcguguuu

SEQ ID NO: 1347447 - RNA, 19 nt, Homo sapiens
  misc_RNA (1)...(19): siRNA sense strand
gcuuugcagccauaacuuu

SEQ ID NO: 1347448 - RNA, 19 nt, Homo sapiens
  misc_RNA (1)...(19): siRNA sense strand
gauccgagaccuggaggaa

SEQ ID NO: 1347449 - RNA, 19 nt, Homo sapiens
  misc_RNA (1)...(19): siRNA sense strand
ccagugaucuccgcuacag

SEQ ID NO: 1347450 - RNA, 19 nt, Homo sapiens
  misc_RNA (1)...(19): siRNA sense strand
gcaccuuggucacaguaac

SEQ ID NO: 1347451 - RNA, 19 nt, Homo sapiens
  misc_RNA (1)...(19): siRNA sense strand
uugcaugguucuggaauga

SEQ ID NO: 1347452 - RNA, 19 nt, Homo sapiens
  misc_RNA (1)...(19): siRNA sense strand
gaugagggugucuauaucu

SEQ ID NO: 1347453 - RNA, 19 nt, Homo sapiens
  misc_RNA (1)...(19): siRNA sense strand
guacgccuccaaaccaaga

SEQ ID NO: 1347454 - RNA, 19 nt, Homo sapiens
  misc_RNA (1)...(19): siRNA sense strand
caagacgcccaccaugaug

SEQ ID NO: 1347455 - RNA, 19 nt, Homo sapiens
  misc_RNA (1)...(19): siRNA sense strand
gcccagggaugaggguuuc

SEQ ID NO: 1347456 - RNA, 19 nt, Homo sapiens
  misc_RNA (1)...(19): siRNA sense strand
ucagggaugccaccuccua

SEQ ID NO: 1347457 - RNA, 19 nt, Homo sapiens
  misc_RNA (1)...(19): siRNA sense strand
gaggaugagggugucuaua

SEQ ID NO: 1347458 - RNA, 19 nt, Homo sapiens
  misc_RNA (1)...(19): siRNA sense strand
agccauaacuuugacacaa

SEQ ID NO: 1347459 - RNA, 19 nt, Homo sapiens
  misc_RNA (1)...(19): siRNA sense strand
ggagauucacaacccuuug

SEQ ID NO: 1347460 - RNA, 19 nt, Homo sapiens
  misc_RNA (1)...(19): siRNA sense strand
ggcugcagcugcuccacaa

SEQ ID NO: 1347461 - RNA, 19 nt, Homo sapiens
  misc_RNA (1)...(19): siRNA sense strand
caacucccuuggaaaugca

SEQ ID NO: 1347462 - RNA, 19 nt, Homo sapiens
  misc_RNA (1)...(19): siRNA sense strand
gggcugauacuggcuucua

SEQ ID NO: 1347463 - RNA, 19 nt, Homo sapiens
  misc_RNA (1)...(19): siRNA sense strand
cggcugcacuuggccacua

SEQ ID NO: 1347464 - RNA, 19 nt, Homo sapiens
  misc_RNA (1)...(19): siRNA sense strand
ccacuguccuggccauugc

SEQ ID NO: 1347465 - RNA, 19 nt, Homo sapiens
  misc_RNA (1)...(19): siRNA sense strand
agaccacgcagcucauuga

SEQ ID NO: 1347466 - RNA, 19 nt, Homo sapiens
  misc_RNA (1)...(19): siRNA sense strand
aggaugagggugucuauau

SEQ ID NO: 1347467 - RNA, 19 nt, Homo sapiens
  misc_RNA (1)...(19): siRNA sense strand
ccaucagccuccacaucuu

SEQ ID NO: 1347468 - RNA, 19 nt, Homo sapiens
  misc_RNA (1)...(19): siRNA sense strand
ggaggcguguuuguaagca

SEQ ID NO: 1347469 - RNA, 19 nt, Homo sapiens
  misc_RNA (1)...(19): siRNA sense strand
cugcuaacuucuccugguu

SEQ ID NO: 1347470 - RNA, 19 nt, Homo sapiens
  misc_RNA (1)...(19): siRNA sense strand
ccugcagucaguuccauua

SEQ ID NO: 1347471 - RNA, 19 nt, Homo sapiens
  misc_RNA (1)...(19): siRNA sense strand
gcagcucauugauccugau

SEQ ID NO: 1347472 - RNA, 19 nt, Homo sapiens
  misc_RNA (1)...(19): siRNA sense strand
gcaaccugcgccugaccua

SEQ ID NO: 1347473 - RNA, 19 nt, Homo sapiens
  misc_RNA (1)...(19): siRNA sense strand
cagcucaccuacacauggu

SEQ ID NO: 1347474 - RNA, 19 nt, Homo sapiens
  misc_RNA (1)...(19): siRNA sense strand
cgccagcuguucucacugu

SEQ ID NO: 1347475 - RNA, 19 nt, Homo sapiens
  misc_RNA (1)...(19): siRNA sense strand
agaacggcgugggcucuuu

SEQ ID NO: 1347476 - RNA, 19 nt, Homo sapiens
  misc_RNA (1)...(19): siRNA sense strand
guccugggcucugccucua

SEQ ID NO: 1347477 - RNA, 19 nt, Homo sapiens
  misc_RNA (1)...(19): siRNA sense strand
cccaagacgcccaccauga

SEQ ID NO: 1347478 - RNA, 19 nt, Homo sapiens
  misc_RNA (1)...(19): siRNA sense strand
ggacgugcagggugugaag

SEQ ID NO: 1347479 - RNA, 19 nt, Homo sapiens
  misc_RNA (1)...(19): siRNA sense strand
gcagagcaugggcgagaau

SEQ ID NO: 1347480 - RNA, 19 nt, Homo sapiens
  misc_RNA (1)...(19): siRNA sense strand
gggaugaggguuucuacag

SEQ ID NO: 1347481 - RNA, 19 nt, Homo sapiens
  misc_RNA (1)...(19): siRNA sense strand
ccgcuggucagaugugaaa

SEQ ID NO: 1347482 - RNA, 19 nt, Homo sapiens
  misc_RNA (1)...(19): siRNA sense strand
ugugcaaccugcugcugaa

SEQ ID NO: 1347483 - RNA, 19 nt, Homo sapiens
  misc_RNA (1)...(19): siRNA sense strand
cacacucacuacccugaug

SEQ ID NO: 1347484 - RNA, 19 nt, Homo sapiens
  misc_RNA (1)...(19): siRNA sense strand
gaugcagccacaugugaga

SEQ ID NO: 1347485 - RNA, 19 nt, Homo sapiens
  misc_RNA (1)...(19): siRNA sense strand
ccaaggacggcuggguuua

SEQ ID NO: 1347486 - RNA, 19 nt, Homo sapiens
  misc_RNA (1)...(19): siRNA sense strand
ggacggcuggguuuacuac

SEQ ID NO: 1347487 - RNA, 19 nt, Homo sapiens
  misc_RNA (1)...(19): siRNA sense strand
gggaggagagaaccaccaa

SEQ ID NO: 1347488 - RNA, 19 nt, Homo sapiens
  misc_RNA (1)...(19): siRNA sense strand
ccaaggacggcuggguuua

SEQ ID NO: 1347489 - RNA, 19 nt, Homo sapiens
  misc_RNA (1)...(19): siRNA sense strand
ggacggcuggguuuacuac

SEQ ID NO: 1347490 - RNA, 19 nt, Homo sapiens
  misc_RNA (1)...(19): siRNA sense strand
gggaggagagaaccaccaa

SEQ ID NO: 1347491 - RNA, 19 nt, Homo sapiens
  misc_RNA (1)...(19): siRNA sense strand
ccaaggacggcuggguuua

SEQ ID NO: 1347492 - RNA, 19 nt, Homo sapiens
  misc_RNA (1)...(19): siRNA sense strand
ggacggcuggguuuacuac

SEQ ID NO: 1347493 - RNA, 19 nt, Homo sapiens
  misc_RNA (1)...(19): siRNA sense strand
gggaggagagaaccaccaa

SEQ ID NO: 1347494 - RNA, 19 nt, Homo sapiens
  misc_RNA (1)...(19): siRNA sense strand
ccaaggacggcuggguuua

SEQ ID NO: 1347495 - RNA, 19 nt, Homo sapiens
  misc_RNA (1)...(19): siRNA sense strand
ggacggcuggguuuacuac

SEQ ID NO: 1347496 - RNA, 19 nt, Homo sapiens
  misc_RNA (1)...(19): siRNA sense strand
gggaggagagaaccaccaa

SEQ ID NO: 1347497 - RNA, 19 nt, Homo sapiens
  misc_RNA (1)...(19): siRNA sense strand
ccaaggacggcuggguuua

SEQ ID NO: 1347498 - RNA, 19 nt, Homo sapiens
  misc_RNA (1)...(19): siRNA sense strand
ggacggcuggguuuacuac

SEQ ID NO: 1347499 - RNA, 19 nt, Homo sapiens
  misc_RNA (1)...(19): siRNA sense strand
gggaggagagaaccaccaa

SEQ ID NO: 1347500 - RNA, 19 nt, Homo sapiens
  misc_RNA (1)...(19): siRNA sense strand
ccaaggacggcuggguuua

SEQ ID NO: 1347501 - RNA, 19 nt, Homo sapiens
  misc_RNA (1)...(19): siRNA sense strand
ggacggcuggguuuacuac

SEQ ID NO: 1347502 - RNA, 19 nt, Homo sapiens
  misc_RNA (1)...(19): siRNA sense strand
gggaggagagaaccaccaa

SEQ ID NO: 1347503 - RNA, 19 nt, Homo sapiens
  misc_RNA (1)...(19): siRNA sense strand
ccaaggacggcuggguuua

SEQ ID NO: 1347504 - RNA, 19 nt, Homo sapiens
  misc_RNA (1)...(19): siRNA sense strand
ggacggcuggguuuacuac

SEQ ID NO: 1347505 - RNA, 19 nt, Homo sapiens
  misc_RNA (1)...(19): siRNA sense strand
gggaggagagaaccaccaa

SEQ ID NO: 1347506 - RNA, 19 nt, Homo sapiens
  misc_RNA (1)...(19): siRNA sense strand
ggaagaaagucgacagaga

SEQ ID NO: 1347507 - RNA, 19 nt, Homo sapiens
  misc_RNA (1)...(19): siRNA sense strand
ggaaagcacagauucauuu

SEQ ID NO: 1347508 - RNA, 19 nt, Homo sapiens
  misc_RNA (1)...(19): siRNA sense strand
gaaagcacagauucauuua

SEQ ID NO: 1347509 - RNA, 19 nt, Homo sapiens
  misc_RNA (1)...(19): siRNA sense strand
gaugauggcuuuucaauga

SEQ ID NO: 1347510 - RNA, 19 nt, Homo sapiens
  misc_RNA (1)...(19): siRNA sense strand
gaaggaaccagugauagua

SEQ ID NO: 1347511 - RNA, 19 nt, Homo sapiens
  misc_RNA (1)...(19): siRNA sense strand
ggcgagaucucacugauga

SEQ ID NO: 1347512 - RNA, 19 nt, Homo sapiens
  misc_RNA (1)...(19): siRNA sense strand
guaccuugcuuacauaaau

SEQ ID NO: 1347513 - RNA, 19 nt, Homo sapiens
  misc_RNA (1)...(19): siRNA sense strand
ucagugaaauucuuaguga

SEQ ID NO: 1347514 - RNA, 19 nt, Homo sapiens
  misc_RNA (1)...(19): siRNA sense strand
caacagagagccaacagaa

SEQ ID NO: 1347515 - RNA, 19 nt, Homo sapiens
  misc_RNA (1)...(19): siRNA sense strand
gaaagacgacgagaacauu

SEQ ID NO: 1347516 - RNA, 19 nt, Homo sapiens
  misc_RNA (1)...(19): siRNA sense strand
gagauuggcaagauuauug

SEQ ID NO: 1347517 - RNA, 19 nt, Homo sapiens
  misc_RNA (1)...(19): siRNA sense strand
gaagaaagacgacgagaac

SEQ ID NO: 1347518 - RNA, 19 nt, Homo sapiens
  misc_RNA (1)...(19): siRNA sense strand
gaaaguagaaguggauaug

SEQ ID NO: 1347519 - RNA, 19 nt, Homo sapiens
  misc_RNA (1)...(19): siRNA sense strand
gcacagauucauuuaacaa

SEQ ID NO: 1347520 - RNA, 19 nt, Homo sapiens
  misc_RNA (1)...(19): siRNA sense strand
ggagacacaccuugaagaa

SEQ ID NO: 1347521 - RNA, 19 nt, Homo sapiens
  misc_RNA (1)...(19): siRNA sense strand
gaggaaggaaccagugaua

SEQ ID NO: 1347522 - RNA, 19 nt, Homo sapiens
  misc_RNA (1)...(19): siRNA sense strand
gaaagucgacagagacaau

SEQ ID NO: 1347523 - RNA, 19 nt, Homo sapiens
  misc_RNA (1)...(19): siRNA sense strand
cugaagauccagaugauua

SEQ ID NO: 1347524 - RNA, 19 nt, Homo sapiens
  misc_RNA (1)...(19): siRNA sense strand
gaaggaggccgcagagcaa

SEQ ID NO: 1347525 - RNA, 19 nt, Homo sapiens
  misc_RNA (1)...(19): siRNA sense strand
gaaaggagaaccguacaug

SEQ ID NO: 1347526 - RNA, 19 nt, Homo sapiens
  misc_RNA (1)...(19): siRNA sense strand
ccaacagaauggugaagaa

SEQ ID NO: 1347527 - RNA, 19 nt, Homo sapiens
  misc_RNA (1)...(19): siRNA sense strand
gaagaaggcacgucuacuc

SEQ ID NO: 1347528 - RNA, 19 nt, Homo sapiens
  misc_RNA (1)...(19): siRNA sense strand
gaacaagcagcuaacaaag

SEQ ID NO: 1347529 - RNA, 19 nt, Homo sapiens
  misc_RNA (1)...(19): siRNA sense strand
caccaggguuugugggaua

SEQ ID NO: 1347530 - RNA, 19 nt, Homo sapiens
  misc_RNA (1)...(19): siRNA sense strand
ggaaggaaccagugauagu

SEQ ID NO: 1347531 - RNA, 19 nt, Homo sapiens
  misc_RNA (1)...(19): siRNA sense strand
aaacgaauacgaagcagaa

SEQ ID NO: 1347532 - RNA, 19 nt, Homo sapiens
  misc_RNA (1)...(19): siRNA sense strand
gaaaauugcagcugagauu

SEQ ID NO: 1347533 - RNA, 19 nt, Homo sapiens
  misc_RNA (1)...(19): siRNA sense strand
gaaugcagguccucaaacg

SEQ ID NO: 1347534 - RNA, 19 nt, Homo sapiens
  misc_RNA (1)...(19): siRNA sense strand
gauacaauccauacaguca

SEQ ID NO: 1347535 - RNA, 19 nt, Homo sapiens
  misc_RNA (1)...(19): siRNA sense strand
agacacaccuugaagaaac

SEQ ID NO: 1347536 - RNA, 19 nt, Homo sapiens
  misc_RNA (1)...(19): siRNA sense strand
agaacaagcagcuaacaaa

SEQ ID NO: 1347537 - RNA, 19 nt, Homo sapiens
  misc_RNA (1)...(19): siRNA sense strand
acagucaucucgccuacaa

SEQ ID NO: 1347538 - RNA, 19 nt, Homo sapiens
  misc_RNA (1)...(19): siRNA sense strand
guugugcggucugaaagua

SEQ ID NO: 1347539 - RNA, 19 nt, Homo sapiens
  misc_RNA (1)...(19): siRNA sense strand
ccgcguaccuugcuuacau

SEQ ID NO: 1347540 - RNA, 19 nt, Homo sapiens
  misc_RNA (1)...(19): siRNA sense strand
gaacgacaccaggagaaga

SEQ ID NO: 1347541 - RNA, 19 nt, Homo sapiens
  misc_RNA (1)...(19): siRNA sense strand
ugauuaugaugauggcuuu

SEQ ID NO: 1347542 - RNA, 19 nt, Homo sapiens
  misc_RNA (1)...(19): siRNA sense strand
acagagagccaacagaaug

SEQ ID NO: 1347543 - RNA, 19 nt, Homo sapiens
  misc_RNA (1)...(19): siRNA sense strand
ccucaucagugaaauucuu

SEQ ID NO: 1347544 - RNA, 19 nt, Homo sapiens
  misc_RNA (1)...(19): siRNA sense strand
uacaugagguacagcagaa

SEQ ID NO: 1347545 - RNA, 19 nt, Homo sapiens
  misc_RNA (1)...(19): siRNA sense strand
cagaaaagauagaguacaa

SEQ ID NO: 1347546 - RNA, 19 nt, Homo sapiens
  misc_RNA (1)...(19): siRNA sense strand
aagcacagauucauuuaac

SEQ ID NO: 1347547 - RNA, 19 nt, Homo sapiens
  misc_RNA (1)...(19): siRNA sense strand
uaacaaaggcgaggagaag

SEQ ID NO: 1347548 - RNA, 19 nt, Homo sapiens
  misc_RNA (1)...(19): siRNA sense strand
agaaguggauauggagaaa

SEQ ID NO: 1347549 - RNA, 19 nt, Homo sapiens
  misc_RNA (1)...(19): siRNA sense strand
gaaccguacaugagcauuc

SEQ ID NO: 1347550 - RNA, 19 nt, Homo sapiens
  misc_RNA (1)...(19): siRNA sense strand
agaucucacugaugaagaa

SEQ ID NO: 1347551 - RNA, 19 nt, Homo sapiens
  misc_RNA (1)...(19): siRNA sense strand
gagacacaccuugaagaaa

SEQ ID NO: 1347552 - RNA, 19 nt, Homo sapiens
  misc_RNA (1)...(19): siRNA sense strand
caaaggcgaggagaagaaa

SEQ ID NO: 1347553 - RNA, 19 nt, Homo sapiens
  misc_RNA (1)...(19): siRNA sense strand
gaagaacaagcagcuaaca

SEQ ID NO: 1347554 - RNA, 19 nt, Homo sapiens
  misc_RNA (1)...(19): siRNA sense strand
gcagguccaguccuuaaug

SEQ ID NO: 1347555 - RNA, 19 nt, Homo sapiens
  misc_RNA (1)...(19): siRNA sense strand
gaaaagauagaguacaaug

SEQ ID NO: 1347556 - RNA, 19 nt, Homo sapiens
  misc_RNA (1)...(19): siRNA sense strand
gaaggccuaucauaauucc

SEQ ID NO: 1347557 - RNA, 19 nt, Homo sapiens
  misc_RNA (1)...(19): siRNA sense strand
cuaaaguugugggagauug

SEQ ID NO: 1347558 - RNA, 19 nt, Homo sapiens
  misc_RNA (1)...(19): siRNA sense strand
gagaaaccaccgccucauc

SEQ ID NO: 1347559 - RNA, 19 nt, Homo sapiens
  misc_RNA (1)...(19): siRNA sense strand
agaguacaaugaaucuaug

SEQ ID NO: 1347560 - RNA, 19 nt, Homo sapiens
  misc_RNA (1)...(19): siRNA sense strand
ggagauuggcaagauuauu

SEQ ID NO: 1347561 - RNA, 19 nt, Homo sapiens
  misc_RNA (1)...(19): siRNA sense strand
guacaaugaaucuaugaag

SEQ ID NO: 1347562 - RNA, 19 nt, Homo sapiens
  misc_RNA (1)...(19): siRNA sense strand
gauagaguacaaugaaucu

SEQ ID NO: 1347563 - RNA, 19 nt, Homo sapiens
  misc_RNA (1)...(19): siRNA sense strand
gguccaguccuuaaugguu

SEQ ID NO: 1347564 - RNA, 19 nt, Homo sapiens
  misc_RNA (1)...(19): siRNA sense strand
aaaggagaaccguacauga

SEQ ID NO: 1347565 - RNA, 19 nt, Homo sapiens
  misc_RNA (1)...(19): siRNA sense strand
gaggaagaaagucgacaga

SEQ ID NO: 1347566 - RNA, 19 nt, Homo sapiens
  misc_RNA (1)...(19): siRNA sense strand
cagaggagacacaccuuga

SEQ ID NO: 1347567 - RNA, 19 nt, Homo sapiens
  misc_RNA (1)...(19): siRNA sense strand
gacguucggucaguuguca

SEQ ID NO: 1347568 - RNA, 19 nt, Homo sapiens
  misc_RNA (1)...(19): siRNA sense strand
gaagauccagaugauuaug

SEQ ID NO: 1347569 - RNA, 19 nt, Homo sapiens
  misc_RNA (1)...(19): siRNA sense strand
gacacaccuugaagaaaca

SEQ ID NO: 1347570 - RNA, 19 nt, Homo sapiens
  misc_RNA (1)...(19): siRNA sense strand
aaguagaaguggauaugga

SEQ ID NO: 1347571 - RNA, 19 nt, Homo sapiens
  misc_RNA (1)...(19): siRNA sense strand
ugggagauuggcaagauua

SEQ ID NO: 1347572 - RNA, 19 nt, Homo sapiens
  misc_RNA (1)...(19): siRNA sense strand
gcccagcacaccaggguuu

SEQ ID NO: 1347573 - RNA, 19 nt, Homo sapiens
  misc_RNA (1)...(19): siRNA sense strand
ccgcugaugcccuacauga

SEQ ID NO: 1347574 - RNA, 19 nt, Homo sapiens
  misc_RNA (1)...(19): siRNA sense strand
ggagagcaacagugcaaca

SEQ ID NO: 1347575 - RNA, 19 nt, Homo sapiens
  misc_RNA (1)...(19): siRNA sense strand
ugaagauccagaugauuau

SEQ ID NO: 1347576 - RNA, 19 nt, Homo sapiens
  misc_RNA (1)...(19): siRNA sense strand
gugggagauuggcaagauu

SEQ ID NO: 1347577 - RNA, 19 nt, Homo sapiens
  misc_RNA (1)...(19): siRNA sense strand
auacgaagcagaaaagaua

SEQ ID NO: 1347578 - RNA, 19 nt, Homo sapiens
  misc_RNA (1)...(19): siRNA sense strand
cauaccagaagaugagaaa

SEQ ID NO: 1347579 - RNA, 19 nt, Homo sapiens
  misc_RNA (1)...(19): siRNA sense strand
ggaggagccaccaacagau

SEQ ID NO: 1347580 - RNA, 19 nt, Homo sapiens
  misc_RNA (1)...(19): siRNA sense strand
acaaaggcgaggagaagaa

SEQ ID NO: 1347581 - RNA, 19 nt, Homo sapiens
  misc_RNA (1)...(19): siRNA sense strand
uagaaugcagguccucaaa

SEQ ID NO: 1347582 - RNA, 19 nt, Homo sapiens
  misc_RNA (1)...(19): siRNA sense strand
gguggcauguggcgagauc

SEQ ID NO: 1347583 - RNA, 19 nt, Homo sapiens
  misc_RNA (1)...(19): siRNA sense strand
gaggagccaccaacagauc

SEQ ID NO: 1347584 - RNA, 19 nt, Homo sapiens
  misc_RNA (1)...(19): siRNA sense strand
gaggagacacaccuugaag

SEQ ID NO: 1347585 - RNA, 19 nt, Homo sapiens
  misc_RNA (1)...(19): siRNA sense strand
acgagaacauuccgaugga

SEQ ID NO: 1347586 - RNA, 19 nt, Homo sapiens
  misc_RNA (1)...(19): siRNA sense strand
agaagaaagacgacgagaa

SEQ ID NO: 1347587 - RNA, 19 nt, Homo sapiens
  misc_RNA (1)...(19): siRNA sense strand
ggaagaacaagcagcuaac

SEQ ID NO: 1347588 - RNA, 19 nt, Homo sapiens
  misc_RNA (1)...(19): siRNA sense strand
ggagaagaagaggaaauuc

SEQ ID NO: 1347589 - RNA, 19 nt, Homo sapiens
  misc_RNA (1)...(19): siRNA sense strand
cggcagguccaguccuuaa

SEQ ID NO: 1347590 - RNA, 19 nt, Homo sapiens
  misc_RNA (1)...(19): siRNA sense strand
agaaaccaccgccucauca

SEQ ID NO: 1347591 - RNA, 19 nt, Homo sapiens
  misc_RNA (1)...(19): siRNA sense strand
ccagaugauuaugaugaug

SEQ ID NO: 1347592 - RNA, 19 nt, Homo sapiens
  misc_RNA (1)...(19): siRNA sense strand
gaguacaaugaaucuauga

SEQ ID NO: 1347593 - RNA, 19 nt, Homo sapiens
  misc_RNA (1)...(19): siRNA sense strand
gcaaaaggcaggaggaaag

SEQ ID NO: 1347594 - RNA, 19 nt, Homo sapiens
  misc_RNA (1)...(19): siRNA sense strand
cgcguaccuugcuuacaua

SEQ ID NO: 1347595 - RNA, 19 nt, Homo sapiens
  misc_RNA (1)...(19): siRNA sense strand
gucacggcauccucuggua

SEQ ID NO: 1347596 - RNA, 19 nt, Homo sapiens
  misc_RNA (1)...(19): siRNA sense strand
cagaucccauaccagaaga

SEQ ID NO: 1347597 - RNA, 19 nt, Homo sapiens
  misc_RNA (1)...(19): siRNA sense strand
uggaggagccaccaacaga

SEQ ID NO: 1347598 - RNA, 19 nt, Homo sapiens
  misc_RNA (1)...(19): siRNA sense strand
gaacauuccgauggagaca

SEQ ID NO: 1347599 - RNA, 19 nt, Homo sapiens
  misc_RNA (1)...(19): siRNA sense strand
aggaagaacaagcagcuaa

SEQ ID NO: 1347600 - RNA, 19 nt, Homo sapiens
  misc_RNA (1)...(19): siRNA sense strand
uacaauccauacagucauc

SEQ ID NO: 1347601 - RNA, 19 nt, Homo sapiens
  misc_RNA (1)...(19): siRNA sense strand
aaggaaccagugauaguaa

SEQ ID NO: 1347602 - RNA, 19 nt, Homo sapiens
  misc_RNA (1)...(19): siRNA sense strand
gagaaaggagaaccguaca

SEQ ID NO: 1347603 - RNA, 19 nt, Homo sapiens
  misc_RNA (1)...(19): siRNA sense strand
acauuccgauggagacaga

SEQ ID NO: 1347604 - RNA, 19 nt, Homo sapiens
  misc_RNA (1)...(19): siRNA sense strand
ggaaccagugauaguaaca

SEQ ID NO: 1347605 - RNA, 19 nt, Homo sapiens
  misc_RNA (1)...(19): siRNA sense strand
caacagaauggugaagaag

SEQ ID NO: 1347606 - RNA, 19 nt, Homo sapiens
  misc_RNA (1)...(19): siRNA sense strand
ccaaggacggcuggguuua

SEQ ID NO: 1347607 - RNA, 19 nt, Homo sapiens
  misc_RNA (1)...(19): siRNA sense strand
ggacggcuggguuuacuac

SEQ ID NO: 1347608 - RNA, 19 nt, Homo sapiens
  misc_RNA (1)...(19): siRNA sense strand
gggaggagagaaccaccaa

SEQ ID NO: 1347609 - RNA, 19 nt, Homo sapiens
  misc_RNA (1)...(19): siRNA sense strand
ccaaggacggcuggguuua

SEQ ID NO: 1347610 - RNA, 19 nt, Homo sapiens
  misc_RNA (1)...(19): siRNA sense strand
ggacggcuggguuuacuac

SEQ ID NO: 1347611 - RNA, 19 nt, Homo sapiens
  misc_RNA (1)...(19): siRNA sense strand
gggaggagagaaccaccaa

SEQ ID NO: 1347612 - RNA, 19 nt, Homo sapiens
  misc_RNA (1)...(19): siRNA sense strand
ccaaggacggcuggguuua

SEQ ID NO: 1347613 - RNA, 19 nt, Homo sapiens
  misc_RNA (1)...(19): siRNA sense strand
ggacggcuggguuuacuac

SEQ ID NO: 1347614 - RNA, 19 nt, Homo sapiens
  misc_RNA (1)...(19): siRNA sense strand
gggaggagagaaccaccaa

SEQ ID NO: 1347615 - RNA, 19 nt, Homo sapiens
  misc_RNA (1)...(19): siRNA sense strand
ccaaggacggcuggguuua

SEQ ID NO: 1347616 - RNA, 19 nt, Homo sapiens
  misc_RNA (1)...(19): siRNA sense strand
ggacggcuggguuuacuac

SEQ ID NO: 1347617 - RNA, 19 nt, Homo sapiens
  misc_RNA (1)...(19): siRNA sense strand
gggaggagagaaccaccaa

SEQ ID NO: 1347618 - RNA, 19 nt, Homo sapiens
  misc_RNA (1)...(19): siRNA sense strand
ccaaggacggcuggguuua

SEQ ID NO: 1347619 - RNA, 19 nt, Homo sapiens
  misc_RNA (1)...(19): siRNA sense strand
ggacggcuggguuuacuac

SEQ ID NO: 1347620 - RNA, 19 nt, Homo sapiens
  misc_RNA (1)...(19): siRNA sense strand
gggaggagagaaccaccaa

SEQ ID NO: 1347621 - RNA, 19 nt, Homo sapiens
  misc_RNA (1)...(19): siRNA sense strand
ccaaggacggcuggguuua

SEQ ID NO: 1347622 - RNA, 19 nt, Homo sapiens
  misc_RNA (1)...(19): siRNA sense strand
ggacggcuggguuuacuac

SEQ ID NO: 1347623 - RNA, 19 nt, Homo sapiens
  misc_RNA (1)...(19): siRNA sense strand
gggaggagagaaccaccaa

SEQ ID NO: 1347624 - RNA, 19 nt, Homo sapiens
  misc_RNA (1)...(19): siRNA sense strand
ccaaggacggcuggguuua

SEQ ID NO: 1347625 - RNA, 19 nt, Homo sapiens
  misc_RNA (1)...(19): siRNA sense strand
ggacggcuggguuuacuac

SEQ ID NO: 1347626 - RNA, 19 nt, Homo sapiens
  misc_RNA (1)...(19): siRNA sense strand
gggaggagagaaccaccaa

SEQ ID NO: 1347627 - RNA, 19 nt, Homo sapiens
  misc_RNA (1)...(19): siRNA sense strand
ccaaggacggcuggguuua

SEQ ID NO: 1347628 - RNA, 19 nt, Homo sapiens
  misc_RNA (1)...(19): siRNA sense strand
ggacggcuggguuuacuac

SEQ ID NO: 1347629 - RNA, 19 nt, Homo sapiens
  misc_RNA (1)...(19): siRNA sense strand
gggaggagagaaccaccaa

SEQ ID NO: 1347630 - RNA, 19 nt, Homo sapiens
  misc_RNA (1)...(19): siRNA sense strand
ccaaggacggcuggguuua

SEQ ID NO: 1347631 - RNA, 19 nt, Homo sapiens
  misc_RNA (1)...(19): siRNA sense strand
ggacggcuggguuuacuac

SEQ ID NO: 1347632 - RNA, 19 nt, Homo sapiens
  misc_RNA (1)...(19): siRNA sense strand
gggaggagagaaccaccaa

SEQ ID NO: 1347633 - RNA, 19 nt, Homo sapiens
  misc_RNA (1)...(19): siRNA sense strand
ccaaggacggcuggguuua

SEQ ID NO: 1347634 - RNA, 19 nt, Homo sapiens
  misc_RNA (1)...(19): siRNA sense strand
ggacggcuggguuuacuac

SEQ ID NO: 1347635 - RNA, 19 nt, Homo sapiens
  misc_RNA (1)...(19): siRNA sense strand
gggaggagagaaccaccaa

SEQ ID NO: 1347636 - RNA, 19 nt, Homo sapiens
  misc_RNA (1)...(19): siRNA sense strand
ccaaggacggcuggguuua

SEQ ID NO: 1347637 - RNA, 19 nt, Homo sapiens
  misc_RNA (1)...(19): siRNA sense strand
ggacggcuggguuuacuac

SEQ ID NO: 1347638 - RNA, 19 nt, Homo sapiens
  misc_RNA (1)...(19): siRNA sense strand
gggaggagagaaccaccaa

SEQ ID NO: 1347639 - RNA, 19 nt, Homo sapiens
  misc_RNA (1)...(19): siRNA sense strand
ccaaggacggcuggguuua

SEQ ID NO: 1347640 - RNA, 19 nt, Homo sapiens
  misc_RNA (1)...(19): siRNA sense strand
ggacggcuggguuuacuac

SEQ ID NO: 1347641 - RNA, 19 nt, Homo sapiens
  misc_RNA (1)...(19): siRNA sense strand
gggaggagagaaccaccaa

SEQ ID NO: 1347642 - RNA, 19 nt, Homo sapiens
  misc_RNA (1)...(19): siRNA sense strand
ccaaggacggcuggguuua

SEQ ID NO: 1347643 - RNA, 19 nt, Homo sapiens
  misc_RNA (1)...(19): siRNA sense strand
ggacggcuggguuuacuac

SEQ ID NO: 1347644 - RNA, 19 nt, Homo sapiens
  misc_RNA (1)...(19): siRNA sense strand
gggaggagagaaccaccaa

SEQ ID NO: 1347645 - RNA, 19 nt, Homo sapiens
  misc_RNA (1)...(19): siRNA sense strand
ccaaggacggcuggguuua

SEQ ID NO: 1347646 - RNA, 19 nt, Homo sapiens
  misc_RNA (1)...(19): siRNA sense strand
ggacggcuggguuuacuac

SEQ ID NO: 1347647 - RNA, 19 nt, Homo sapiens
  misc_RNA (1)...(19): siRNA sense strand
gggaggagagaaccaccaa

SEQ ID NO: 1347648 - RNA, 19 nt, Homo sapiens
  misc_RNA (1)...(19): siRNA sense strand
gaacaaggaugaacaagca

SEQ ID NO: 1347649 - RNA, 19 nt, Homo sapiens
  misc_RNA (1)...(19): siRNA sense strand
gaagagagaacaaggauga

SEQ ID NO: 1347650 - RNA, 19 nt, Homo sapiens
  misc_RNA (1)...(19): siRNA sense strand
ugacugaccugguaaagaa

SEQ ID NO: 1347651 - RNA, 19 nt, Homo sapiens
  misc_RNA (1)...(19): siRNA sense strand
gaacagcuaugacaucuac

SEQ ID NO: 1347652 - RNA, 19 nt, Homo sapiens
  misc_RNA (1)...(19): siRNA sense strand
gcacuaccguguugugaaa

SEQ ID NO: 1347653 - RNA, 19 nt, Homo sapiens
  misc_RNA (1)...(19): siRNA sense strand
ggaacaagauucugcacaa

SEQ ID NO: 1347654 - RNA, 19 nt, Homo sapiens
  misc_RNA (1)...(19): siRNA sense strand
ggaacaaacugcgggugua

SEQ ID NO: 1347655 - RNA, 19 nt, Homo sapiens
  misc_RNA (1)...(19): siRNA sense strand
gaaagaggagacagaauau

SEQ ID NO: 1347656 - RNA, 19 nt, Homo sapiens
  misc_RNA (1)...(19): siRNA sense strand
gaacaagauucugcacaau

SEQ ID NO: 1347657 - RNA, 19 nt, Homo sapiens
  misc_RNA (1)...(19): siRNA sense strand
gauauuuggucucuaggaa

SEQ ID NO: 1347658 - RNA, 19 nt, Homo sapiens
  misc_RNA (1)...(19): siRNA sense strand
caagguguauggacucauu

SEQ ID NO: 1347659 - RNA, 19 nt, Homo sapiens
  misc_RNA (1)...(19): siRNA sense strand
agaaagaggagacagaaua

SEQ ID NO: 1347660 - RNA, 19 nt, Homo sapiens
  misc_RNA (1)...(19): siRNA sense strand
ggaagccccuguaccauua

SEQ ID NO: 1347661 - RNA, 19 nt, Homo sapiens
  misc_RNA (1)...(19): siRNA sense strand
acaagauucugcacaauga

SEQ ID NO: 1347662 - RNA, 19 nt, Homo sapiens
  misc_RNA (1)...(19): siRNA sense strand
gaaguggucuaagaaguuc

SEQ ID NO: 1347663 - RNA, 19 nt, Homo sapiens
  misc_RNA (1)...(19): siRNA sense strand
ggucuaagaaguucauuga

SEQ ID NO: 1347664 - RNA, 19 nt, Homo sapiens
  misc_RNA (1)...(19): siRNA sense strand
ccaagaaggccauggacua

SEQ ID NO: 1347665 - RNA, 19 nt, Homo sapiens
  misc_RNA (1)...(19): siRNA sense strand
gagcaugccuaccucaagu

SEQ ID NO: 1347666 - RNA, 19 nt, Homo sapiens
  misc_RNA (1)...(19): siRNA sense strand
ggaaguacaagaagcgauu

SEQ ID NO: 1347667 - RNA, 19 nt, Homo sapiens
  misc_RNA (1)...(19): siRNA sense strand
ugacagccauggagaggaa

SEQ ID NO: 1347668 - RNA, 19 nt, Homo sapiens
  misc_RNA (1)...(19): siRNA sense strand
aaccguaacugcaucauga

SEQ ID NO: 1347669 - RNA, 19 nt, Homo sapiens
  misc_RNA (1)...(19): siRNA sense strand
acaaacugcggguguauua

SEQ ID NO: 1347670 - RNA, 19 nt, Homo sapiens
  misc_RNA (1)...(19): siRNA sense strand
gagcaacucagaggcuuua

SEQ ID NO: 1347671 - RNA, 19 nt, Homo sapiens
  misc_RNA (1)...(19): siRNA sense strand
gcacaaugacccagaagug

SEQ ID NO: 1347672 - RNA, 19 nt, Homo sapiens
  misc_RNA (1)...(19): siRNA sense strand
ucaugacucugaaccguaa

SEQ ID NO: 1347673 - RNA, 19 nt, Homo sapiens
  misc_RNA (1)...(19): siRNA sense strand
ggacccugcugggaucuuu

SEQ ID NO: 1347674 - RNA, 19 nt, Homo sapiens
  misc_RNA (1)...(19): siRNA sense strand
cggagcagcuacugaaguu

SEQ ID NO: 1347675 - RNA, 19 nt, Homo sapiens
  misc_RNA (1)...(19): siRNA sense strand
caacaucgccaccuacuac

SEQ ID NO: 1347676 - RNA, 19 nt, Homo sapiens
  misc_RNA (1)...(19): siRNA sense strand
gaacaaacugcggguguau

SEQ ID NO: 1347677 - RNA, 19 nt, Homo sapiens
  misc_RNA (1)...(19): siRNA sense strand
gcauagaggagcagaagga

SEQ ID NO: 1347678 - RNA, 19 nt, Homo sapiens
  misc_RNA (1)...(19): siRNA sense strand
ggagugauauuuggucucu

SEQ ID NO: 1347679 - RNA, 19 nt, Homo sapiens
  misc_RNA (1)...(19): siRNA sense strand
gaacccugaugccaccuau

SEQ ID NO: 1347680 - RNA, 19 nt, Homo sapiens
  misc_RNA (1)...(19): siRNA sense strand
uccaagaaguggucuaaga

SEQ ID NO: 1347681 - RNA, 19 nt, Homo sapiens
  misc_RNA (1)...(19): siRNA sense strand
ccaagaaguggucuaagaa

SEQ ID NO: 1347682 - RNA, 19 nt, Homo sapiens
  misc_RNA (1)...(19): siRNA sense strand
ggaggacuguaucgccuau

SEQ ID NO: 1347683 - RNA, 19 nt, Homo sapiens
  misc_RNA (1)...(19): siRNA sense strand
agacggaacacuuucauug

SEQ ID NO: 1347684 - RNA, 19 nt, Homo sapiens
  misc_RNA (1)...(19): siRNA sense strand
guaacugcaucaugaacug

SEQ ID NO: 1347685 - RNA, 19 nt, Homo sapiens
  misc_RNA (1)...(19): siRNA sense strand
ugagaaagccauugagauc

SEQ ID NO: 1347686 - RNA, 19 nt, Homo sapiens
  misc_RNA (1)...(19): siRNA sense strand
gcaugaaucccgcugacaa

SEQ ID NO: 1347687 - RNA, 19 nt, Homo sapiens
  misc_RNA (1)...(19): siRNA sense strand
gcagcgaggaggaagauga

SEQ ID NO: 1347688 - RNA, 19 nt, Homo sapiens
  misc_RNA (1)...(19): siRNA sense strand
ccacggagcagcuacugaa

SEQ ID NO: 1347689 - RNA, 19 nt, Homo sapiens
  misc_RNA (1)...(19): siRNA sense strand
gauuacaggagugauauuu

SEQ ID NO: 1347690 - RNA, 19 nt, Homo sapiens
  misc_RNA (1)...(19): siRNA sense strand
ggagacagaauaugaguac

SEQ ID NO: 1347691 - RNA, 19 nt, Homo sapiens
  misc_RNA (1)...(19): siRNA sense strand
gggaacagcuaugacaucu

SEQ ID NO: 1347692 - RNA, 19 nt, Homo sapiens
  misc_RNA (1)...(19): siRNA sense strand
ugaaauacgagcggauuaa

SEQ ID NO: 1347693 - RNA, 19 nt, Homo sapiens
  misc_RNA (1)...(19): siRNA sense strand
cuacggagccuucaucaag

SEQ ID NO: 1347694 - RNA, 19 nt, Homo sapiens
  misc_RNA (1)...(19): siRNA sense strand
guacaagggucggcauguc

SEQ ID NO: 1347695 - RNA, 19 nt, Homo sapiens
  misc_RNA (1)...(19): siRNA sense strand
gaaucccgcugacaaacca

SEQ ID NO: 1347696 - RNA, 19 nt, Homo sapiens
  misc_RNA (1)...(19): siRNA sense strand
aagaggagacagaauauga

SEQ ID NO: 1347697 - RNA, 19 nt, Homo sapiens
  misc_RNA (1)...(19): siRNA sense strand
gagcagcuacugaaguuuc

SEQ ID NO: 1347698 - RNA, 19 nt, Homo sapiens
  misc_RNA (1)...(19): siRNA sense strand
ugacuucauugacacaugu

SEQ ID NO: 1347699 - RNA, 19 nt, Homo sapiens
  misc_RNA (1)...(19): siRNA sense strand
ggugauccaucgagacauc

SEQ ID NO: 1347700 - RNA, 19 nt, Homo sapiens
  misc_RNA (1)...(19): siRNA sense strand
uuacaggagugauauuugg

SEQ ID NO: 1347701 - RNA, 19 nt, Homo sapiens
  misc_RNA (1)...(19): siRNA sense strand
ggauuaaguuccuggucau

SEQ ID NO: 1347702 - RNA, 19 nt, Homo sapiens
  misc_RNA (1)...(19): siRNA sense strand
gcaacucagaggcuuuaaa

SEQ ID NO: 1347703 - RNA, 19 nt, Homo sapiens
  misc_RNA (1)...(19): siRNA sense strand
ggacgaggaggaagagauc

SEQ ID NO: 1347704 - RNA, 19 nt, Homo sapiens
  misc_RNA (1)...(19): siRNA sense strand
uggagaugcugcugugcua

SEQ ID NO: 1347705 - RNA, 19 nt, Homo sapiens
  misc_RNA (1)...(19): siRNA sense strand
cuacaucccugugcacauc

SEQ ID NO: 1347706 - RNA, 19 nt, Homo sapiens
  misc_RNA (1)...(19): siRNA sense strand
acccagaaguggagaagaa

SEQ ID NO: 1347707 - RNA, 19 nt, Homo sapiens
  misc_RNA (1)...(19): siRNA sense strand
ggagaacgggcugauguug

SEQ ID NO: 1347708 - RNA, 19 nt, Homo sapiens
  misc_RNA (1)...(19): siRNA sense strand
gcugucauccgccagaauu

SEQ ID NO: 1347709 - RNA, 19 nt, Homo sapiens
  misc_RNA (1)...(19): siRNA sense strand
ucuaagaaguucauugacu

SEQ ID NO: 1347710 - RNA, 19 nt, Homo sapiens
  misc_RNA (1)...(19): siRNA sense strand
gaaauacgagcggauuaag

SEQ ID NO: 1347711 - RNA, 19 nt, Homo sapiens
  misc_RNA (1)...(19): siRNA sense strand
gugaaauacgagcggauua

SEQ ID NO: 1347712 - RNA, 19 nt, Homo sapiens
  misc_RNA (1)...(19): siRNA sense strand
gaacagcaaaggccaaagc

SEQ ID NO: 1347713 - RNA, 19 nt, Homo sapiens
  misc_RNA (1)...(19): siRNA sense strand
gagagaacaaggaugaaca

SEQ ID NO: 1347714 - RNA, 19 nt, Homo sapiens
  misc_RNA (1)...(19): siRNA sense strand
ggagaucaacaugcugaaa

SEQ ID NO: 1347715 - RNA, 19 nt, Homo sapiens
  misc_RNA (1)...(19): siRNA sense strand
gaaccguaacugcaucaug

SEQ ID NO: 1347716 - RNA, 19 nt, Homo sapiens
  misc_RNA (1)...(19): siRNA sense strand
acaaauucauggccuucaa

SEQ ID NO: 1347717 - RNA, 19 nt, Homo sapiens
  misc_RNA (1)...(19): siRNA sense strand
aauacgagcggauuaaguu

SEQ ID NO: 1347718 - RNA, 19 nt, Homo sapiens
  misc_RNA (1)...(19): siRNA sense strand
gggcucaaccugcucauca

SEQ ID NO: 1347719 - RNA, 19 nt, Homo sapiens
  misc_RNA (1)...(19): siRNA sense strand
gagaacagcaaaggccaaa

SEQ ID NO: 1347720 - RNA, 19 nt, Homo sapiens
  misc_RNA (1)...(19): siRNA sense strand
ggaugggaguggugacuac

SEQ ID NO: 1347721 - RNA, 19 nt, Homo sapiens
  misc_RNA (1)...(19): siRNA sense strand
ccauugagauccgcucugu

SEQ ID NO: 1347722 - RNA, 19 nt, Homo sapiens
  misc_RNA (1)...(19): siRNA sense strand
ggugagaaagccauugaga

SEQ ID NO: 1347723 - RNA, 19 nt, Homo sapiens
  misc_RNA (1)...(19): siRNA sense strand
gcaacaucgccaccuacua

SEQ ID NO: 1347724 - RNA, 19 nt, Homo sapiens
  misc_RNA (1)...(19): siRNA sense strand
cagaggucaucgccuguga

SEQ ID NO: 1347725 - RNA, 19 nt, Homo sapiens
  misc_RNA (1)...(19): siRNA sense strand
gggagaugccuacuucugu

SEQ ID NO: 1347726 - RNA, 19 nt, Homo sapiens
  misc_RNA (1)...(19): siRNA sense strand
gaaggguucuguggucaac

SEQ ID NO: 1347727 - RNA, 19 nt, Homo sapiens
  misc_RNA (1)...(19): siRNA sense strand
ggaugaacaagcagcagaa

SEQ ID NO: 1347728 - RNA, 19 nt, Homo sapiens
  misc_RNA (1)...(19): siRNA sense strand
guagaagagagaacaagga

SEQ ID NO: 1347729 - RNA, 19 nt, Homo sapiens
  misc_RNA (1)...(19): siRNA sense strand
ggaagcugcaggagaagga

SEQ ID NO: 1347730 - RNA, 19 nt, Homo sapiens
  misc_RNA (1)...(19): siRNA sense strand
agaaguggucuaagaaguu

SEQ ID NO: 1347731 - RNA, 19 nt, Homo sapiens
  misc_RNA (1)...(19): siRNA sense strand
uaugauuacaggagugaua

SEQ ID NO: 1347732 - RNA, 19 nt, Homo sapiens
  misc_RNA (1)...(19): siRNA sense strand
cugaugccaccuaugauua

SEQ ID NO: 1347733 - RNA, 19 nt, Homo sapiens
  misc_RNA (1)...(19): siRNA sense strand
ugacagcaauggguacaca

SEQ ID NO: 1347734 - RNA, 19 nt, Homo sapiens
  misc_RNA (1)...(19): siRNA sense strand
caacucagaggcuuuaaaa

SEQ ID NO: 1347735 - RNA, 19 nt, Homo sapiens
  misc_RNA (1)...(19): siRNA sense strand
aagaaguggucuaagaagu

SEQ ID NO: 1347736 - RNA, 19 nt, Homo sapiens
  misc_RNA (1)...(19): siRNA sense strand
cuacuucuguggccuacau

SEQ ID NO: 1347737 - RNA, 19 nt, Homo sapiens
  misc_RNA (1)...(19): siRNA sense strand
caaacccuaccacaaauuc

SEQ ID NO: 1347738 - RNA, 19 nt, Homo sapiens
  misc_RNA (1)...(19): siRNA sense strand
acuaccguguugugaaaua

SEQ ID NO: 1347739 - RNA, 19 nt, Homo sapiens
  misc_RNA (1)...(19): siRNA sense strand
gaacaagcagcagaacucu

SEQ ID NO: 1347740 - RNA, 19 nt, Homo sapiens
  misc_RNA (1)...(19): siRNA sense strand
ucaaacaggagaucaacau

SEQ ID NO: 1347741 - RNA, 19 nt, Homo sapiens
  misc_RNA (1)...(19): siRNA sense strand
cccaaacccuaccacaaau

SEQ ID NO: 1347742 - RNA, 19 nt, Homo sapiens
  misc_RNA (1)...(19): siRNA sense strand
guucuguggucaacgugaa

SEQ ID NO: 1347743 - RNA, 19 nt, Homo sapiens
  misc_RNA (1)...(19): siRNA sense strand
gcagaggggagcagagaua

SEQ ID NO: 1347744 - RNA, 19 nt, Homo sapiens
  misc_RNA (1)...(19): siRNA sense strand
caugaaucccgcugacaaa

SEQ ID NO: 1347745 - RNA, 19 nt, Homo sapiens
  misc_RNA (1)...(19): siRNA sense strand
agcagcagcuucagaaaca

SEQ ID NO: 1347746 - RNA, 19 nt, Homo sapiens
  misc_RNA (1)...(19): siRNA sense strand
uacggagccuucaucaaga

SEQ ID NO: 1347747 - RNA, 19 nt, Homo sapiens
  misc_RNA (1)...(19): siRNA sense strand
cgagcccucuuccucauuc

SEQ ID NO: 1347748 - RNA, 19 nt, Homo sapiens
  misc_RNA (1)...(19): siRNA sense strand
gaacaaggaugaacaagca

SEQ ID NO: 1347749 - RNA, 19 nt, Homo sapiens
  misc_RNA (1)...(19): siRNA sense strand
gaagagagaacaaggauga

SEQ ID NO: 1347750 - RNA, 19 nt, Homo sapiens
  misc_RNA (1)...(19): siRNA sense strand
ugacugaccugguaaagaa

SEQ ID NO: 1347751 - RNA, 19 nt, Homo sapiens
  misc_RNA (1)...(19): siRNA sense strand
gaacagcuaugacaucuac

SEQ ID NO: 1347752 - RNA, 19 nt, Homo sapiens
  misc_RNA (1)...(19): siRNA sense strand
gcacuaccguguugugaaa

SEQ ID NO: 1347753 - RNA, 19 nt, Homo sapiens
  misc_RNA (1)...(19): siRNA sense strand
ggaacaagauucugcacaa

SEQ ID NO: 1347754 - RNA, 19 nt, Homo sapiens
  misc_RNA (1)...(19): siRNA sense strand
ggaacaaacugcgggugua

SEQ ID NO: 1347755 - RNA, 19 nt, Homo sapiens
  misc_RNA (1)...(19): siRNA sense strand
gaaagaggagacagaauau

SEQ ID NO: 1347756 - RNA, 19 nt, Homo sapiens
  misc_RNA (1)...(19): siRNA sense strand
gaacaagauucugcacaau

SEQ ID NO: 1347757 - RNA, 19 nt, Homo sapiens
  misc_RNA (1)...(19): siRNA sense strand
gauauuuggucucuaggaa

SEQ ID NO: 1347758 - RNA, 19 nt, Homo sapiens
  misc_RNA (1)...(19): siRNA sense strand
caagguguauggacucauu

SEQ ID NO: 1347759 - RNA, 19 nt, Homo sapiens
  misc_RNA (1)...(19): siRNA sense strand
agaaagaggagacagaaua

SEQ ID NO: 1347760 - RNA, 19 nt, Homo sapiens
  misc_RNA (1)...(19): siRNA sense strand
ggaagccccuguaccauua

SEQ ID NO: 1347761 - RNA, 19 nt, Homo sapiens
  misc_RNA (1)...(19): siRNA sense strand
acaagauucugcacaauga

SEQ ID NO: 1347762 - RNA, 19 nt, Homo sapiens
  misc_RNA (1)...(19): siRNA sense strand
gaaguggucuaagaaguuc

SEQ ID NO: 1347763 - RNA, 19 nt, Homo sapiens
  misc_RNA (1)...(19): siRNA sense strand
ggucuaagaaguucauuga

SEQ ID NO: 1347764 - RNA, 19 nt, Homo sapiens
  misc_RNA (1)...(19): siRNA sense strand
ccaagaaggccauggacua

SEQ ID NO: 1347765 - RNA, 19 nt, Homo sapiens
  misc_RNA (1)...(19): siRNA sense strand
gagcaugccuaccucaagu

SEQ ID NO: 1347766 - RNA, 19 nt, Homo sapiens
  misc_RNA (1)...(19): siRNA sense strand
ggaaguacaagaagcgauu

SEQ ID NO: 1347767 - RNA, 19 nt, Homo sapiens
  misc_RNA (1)...(19): siRNA sense strand
ugacagccauggagaggaa

SEQ ID NO: 1347768 - RNA, 19 nt, Homo sapiens
  misc_RNA (1)...(19): siRNA sense strand
aaccguaacugcaucauga

SEQ ID NO: 1347769 - RNA, 19 nt, Homo sapiens
  misc_RNA (1)...(19): siRNA sense strand
acaaacugcggguguauua

SEQ ID NO: 1347770 - RNA, 19 nt, Homo sapiens
  misc_RNA (1)...(19): siRNA sense strand
gagcaacucagaggcuuua

SEQ ID NO: 1347771 - RNA, 19 nt, Homo sapiens
  misc_RNA (1)...(19): siRNA sense strand
gcacaaugacccagaagug

SEQ ID NO: 1347772 - RNA, 19 nt, Homo sapiens
  misc_RNA (1)...(19): siRNA sense strand
ucaugacucugaaccguaa

SEQ ID NO: 1347773 - RNA, 19 nt, Homo sapiens
  misc_RNA (1)...(19): siRNA sense strand
ggacccugcugggaucuuu

SEQ ID NO: 1347774 - RNA, 19 nt, Homo sapiens
  misc_RNA (1)...(19): siRNA sense strand
cggagcagcuacugaaguu

SEQ ID NO: 1347775 - RNA, 19 nt, Homo sapiens
  misc_RNA (1)...(19): siRNA sense strand
caacaucgccaccuacuac

SEQ ID NO: 1347776 - RNA, 19 nt, Homo sapiens
  misc_RNA (1)...(19): siRNA sense strand
gaacaaacugcggguguau

SEQ ID NO: 1347777 - RNA, 19 nt, Homo sapiens
  misc_RNA (1)...(19): siRNA sense strand
gcauagaggagcagaagga

SEQ ID NO: 1347778 - RNA, 19 nt, Homo sapiens
  misc_RNA (1)...(19): siRNA sense strand
ggagugauauuuggucucu

SEQ ID NO: 1347779 - RNA, 19 nt, Homo sapiens
  misc_RNA (1)...(19): siRNA sense strand
gaacccugaugccaccuau

SEQ ID NO: 1347780 - RNA, 19 nt, Homo sapiens
  misc_RNA (1)...(19): siRNA sense strand
uccaagaaguggucuaaga

SEQ ID NO: 1347781 - RNA, 19 nt, Homo sapiens
  misc_RNA (1)...(19): siRNA sense strand
ccaagaaguggucuaagaa

SEQ ID NO: 1347782 - RNA, 19 nt, Homo sapiens
  misc_RNA (1)...(19): siRNA sense strand
ggaggacuguaucgccuau

SEQ ID NO: 1347783 - RNA, 19 nt, Homo sapiens
  misc_RNA (1)...(19): siRNA sense strand
agacggaacacuuucauug

SEQ ID NO: 1347784 - RNA, 19 nt, Homo sapiens
  misc_RNA (1)...(19): siRNA sense strand
guaacugcaucaugaacug

SEQ ID NO: 1347785 - RNA, 19 nt, Homo sapiens
  misc_RNA (1)...(19): siRNA sense strand
ugagaaagccauugagauc

SEQ ID NO: 1347786 - RNA, 19 nt, Homo sapiens
  misc_RNA (1)...(19): siRNA sense strand
gcaugaaucccgcugacaa

SEQ ID NO: 1347787 - RNA, 19 nt, Homo sapiens
  misc_RNA (1)...(19): siRNA sense strand
gcagcgaggaggaagauga

SEQ ID NO: 1347788 - RNA, 19 nt, Homo sapiens
  misc_RNA (1)...(19): siRNA sense strand
ccacggagcagcuacugaa

SEQ ID NO: 1347789 - RNA, 19 nt, Homo sapiens
  misc_RNA (1)...(19): siRNA sense strand
gauuacaggagugauauuu

SEQ ID NO: 1347790 - RNA, 19 nt, Homo sapiens
  misc_RNA (1)...(19): siRNA sense strand
ggagacagaauaugaguac

SEQ ID NO: 1347791 - RNA, 19 nt, Homo sapiens
  misc_RNA (1)...(19): siRNA sense strand
gggaacagcuaugacaucu

SEQ ID NO: 1347792 - RNA, 19 nt, Homo sapiens
  misc_RNA (1)...(19): siRNA sense strand
ugaaauacgagcggauuaa

SEQ ID NO: 1347793 - RNA, 19 nt, Homo sapiens
  misc_RNA (1)...(19): siRNA sense strand
cuacggagccuucaucaag

SEQ ID NO: 1347794 - RNA, 19 nt, Homo sapiens
  misc_RNA (1)...(19): siRNA sense strand
guacaagggucggcauguc

SEQ ID NO: 1347795 - RNA, 19 nt, Homo sapiens
  misc_RNA (1)...(19): siRNA sense strand
gaaucccgcugacaaacca

SEQ ID NO: 1347796 - RNA, 19 nt, Homo sapiens
  misc_RNA (1)...(19): siRNA sense strand
aagaggagacagaauauga

SEQ ID NO: 1347797 - RNA, 19 nt, Homo sapiens
  misc_RNA (1)...(19): siRNA sense strand
gagcagcuacugaaguuuc

SEQ ID NO: 1347798 - RNA, 19 nt, Homo sapiens
  misc_RNA (1)...(19): siRNA sense strand
ugacuucauugacacaugu

SEQ ID NO: 1347799 - RNA, 19 nt, Homo sapiens
  misc_RNA (1)...(19): siRNA sense strand
ggugauccaucgagacauc

SEQ ID NO: 1347800 - RNA, 19 nt, Homo sapiens
  misc_RNA (1)...(19): siRNA sense strand
uuacaggagugauauuugg

SEQ ID NO: 1347801 - RNA, 19 nt, Homo sapiens
  misc_RNA (1)...(19): siRNA sense strand
ggauuaaguuccuggucau

SEQ ID NO: 1347802 - RNA, 19 nt, Homo sapiens
  misc_RNA (1)...(19): siRNA sense strand
gcaacucagaggcuuuaaa

SEQ ID NO: 1347803 - RNA, 19 nt, Homo sapiens
  misc_RNA (1)...(19): siRNA sense strand
ggacgaggaggaagagauc

SEQ ID NO: 1347804 - RNA, 19 nt, Homo sapiens
  misc_RNA (1)...(19): siRNA sense strand
uggagaugcugcugugcua

SEQ ID NO: 1347805 - RNA, 19 nt, Homo sapiens
  misc_RNA (1)...(19): siRNA sense strand
cuacaucccugugcacauc

SEQ ID NO: 1347806 - RNA, 19 nt, Homo sapiens
  misc_RNA (1)...(19): siRNA sense strand
acccagaaguggagaagaa

SEQ ID NO: 1347807 - RNA, 19 nt, Homo sapiens
  misc_RNA (1)...(19): siRNA sense strand
ggagaacgggcugauguug

SEQ ID NO: 1347808 - RNA, 19 nt, Homo sapiens
  misc_RNA (1)...(19): siRNA sense strand
gcugucauccgccagaauu

SEQ ID NO: 1347809 - RNA, 19 nt, Homo sapiens
  misc_RNA (1)...(19): siRNA sense strand
ucuaagaaguucauugacu

SEQ ID NO: 1347810 - RNA, 19 nt, Homo sapiens
  misc_RNA (1)...(19): siRNA sense strand
gaaauacgagcggauuaag

SEQ ID NO: 1347811 - RNA, 19 nt, Homo sapiens
  misc_RNA (1)...(19): siRNA sense strand
gugaaauacgagcggauua

SEQ ID NO: 1347812 - RNA, 19 nt, Homo sapiens
  misc_RNA (1)...(19): siRNA sense strand
gaacagcaaaggccaaagc

SEQ ID NO: 1347813 - RNA, 19 nt, Homo sapiens
  misc_RNA (1)...(19): siRNA sense strand
gagagaacaaggaugaaca

SEQ ID NO: 1347814 - RNA, 19 nt, Homo sapiens
  misc_RNA (1)...(19): siRNA sense strand
ggagaucaacaugcugaaa

SEQ ID NO: 1347815 - RNA, 19 nt, Homo sapiens
  misc_RNA (1)...(19): siRNA sense strand
gaaccguaacugcaucaug

SEQ ID NO: 1347816 - RNA, 19 nt, Homo sapiens
  misc_RNA (1)...(19): siRNA sense strand
acaaauucauggccuucaa

SEQ ID NO: 1347817 - RNA, 19 nt, Homo sapiens
  misc_RNA (1)...(19): siRNA sense strand
aauacgagcggauuaaguu

SEQ ID NO: 1347818 - RNA, 19 nt, Homo sapiens
  misc_RNA (1)...(19): siRNA sense strand
gggcucaaccugcucauca

SEQ ID NO: 1347819 - RNA, 19 nt, Homo sapiens
  misc_RNA (1)...(19): siRNA sense strand
gagaacagcaaaggccaaa

SEQ ID NO: 1347820 - RNA, 19 nt, Homo sapiens
  misc_RNA (1)...(19): siRNA sense strand
ggaugggaguggugacuac

SEQ ID NO: 1347821 - RNA, 19 nt, Homo sapiens
  misc_RNA (1)...(19): siRNA sense strand
ccauugagauccgcucugu

SEQ ID NO: 1347822 - RNA, 19 nt, Homo sapiens
  misc_RNA (1)...(19): siRNA sense strand
ggugagaaagccauugaga

SEQ ID NO: 1347823 - RNA, 19 nt, Homo sapiens
  misc_RNA (1)...(19): siRNA sense strand
gcaacaucgccaccuacua

SEQ ID NO: 1347824 - RNA, 19 nt, Homo sapiens
  misc_RNA (1)...(19): siRNA sense strand
cagaggucaucgccuguga

SEQ ID NO: 1347825 - RNA, 19 nt, Homo sapiens
  misc_RNA (1)...(19): siRNA sense strand
gggagaugccuacuucugu

SEQ ID NO: 1347826 - RNA, 19 nt, Homo sapiens
  misc_RNA (1)...(19): siRNA sense strand
gaaggguucuguggucaac

SEQ ID NO: 1347827 - RNA, 19 nt, Homo sapiens
  misc_RNA (1)...(19): siRNA sense strand
ggaugaacaagcagcagaa

SEQ ID NO: 1347828 - RNA, 19 nt, Homo sapiens
  misc_RNA (1)...(19): siRNA sense strand
guagaagagagaacaagga

SEQ ID NO: 1347829 - RNA, 19 nt, Homo sapiens
  misc_RNA (1)...(19): siRNA sense strand
ggaagcugcaggagaagga

SEQ ID NO: 1347830 - RNA, 19 nt, Homo sapiens
  misc_RNA (1)...(19): siRNA sense strand
agaaguggucuaagaaguu

SEQ ID NO: 1347831 - RNA, 19 nt, Homo sapiens
  misc_RNA (1)...(19): siRNA sense strand
uaugauuacaggagugaua

SEQ ID NO: 1347832 - RNA, 19 nt, Homo sapiens
  misc_RNA (1)...(19): siRNA sense strand
cugaugccaccuaugauua

SEQ ID NO: 1347833 - RNA, 19 nt, Homo sapiens
  misc_RNA (1)...(19): siRNA sense strand
ugacagcaauggguacaca

SEQ ID NO: 1347834 - RNA, 19 nt, Homo sapiens
  misc_RNA (1)...(19): siRNA sense strand
caacucagaggcuuuaaaa

SEQ ID NO: 1347835 - RNA, 19 nt, Homo sapiens
  misc_RNA (1)...(19): siRNA sense strand
aagaaguggucuaagaagu

SEQ ID NO: 1347836 - RNA, 19 nt, Homo sapiens
  misc_RNA (1)...(19): siRNA sense strand
cuacuucuguggccuacau

SEQ ID NO: 1347837 - RNA, 19 nt, Homo sapiens
  misc_RNA (1)...(19): siRNA sense strand
caaacccuaccacaaauuc

SEQ ID NO: 1347838 - RNA, 19 nt, Homo sapiens
  misc_RNA (1)...(19): siRNA sense strand
acuaccguguugugaaaua

SEQ ID NO: 1347839 - RNA, 19 nt, Homo sapiens
  misc_RNA (1)...(19): siRNA sense strand
gaacaagcagcagaacucu

SEQ ID NO: 1347840 - RNA, 19 nt, Homo sapiens
  misc_RNA (1)...(19): siRNA sense strand
ucaaacaggagaucaacau

SEQ ID NO: 1347841 - RNA, 19 nt, Homo sapiens
  misc_RNA (1)...(19): siRNA sense strand
cccaaacccuaccacaaau

SEQ ID NO: 1347842 - RNA, 19 nt, Homo sapiens
  misc_RNA (1)...(19): siRNA sense strand
guucuguggucaacgugaa

SEQ ID NO: 1347843 - RNA, 19 nt, Homo sapiens
  misc_RNA (1)...(19): siRNA sense strand
gcagaggggagcagagaua

SEQ ID NO: 1347844 - RNA, 19 nt, Homo sapiens
  misc_RNA (1)...(19): siRNA sense strand
caugaaucccgcugacaaa

SEQ ID NO: 1347845 - RNA, 19 nt, Homo sapiens
  misc_RNA (1)...(19): siRNA sense strand
agcagcagcuucagaaaca

SEQ ID NO: 1347846 - RNA, 19 nt, Homo sapiens
  misc_RNA (1)...(19): siRNA sense strand
uacggagccuucaucaaga

SEQ ID NO: 1347847 - RNA, 19 nt, Homo sapiens
  misc_RNA (1)...(19): siRNA sense strand
cgagcccucuuccucauuc

SEQ ID NO: 1347848 - RNA, 19 nt, Homo sapiens
  misc_RNA (1)...(19): siRNA sense strand
gaacaaggaugaacaagca

SEQ ID NO: 1347849 - RNA, 19 nt, Homo sapiens
  misc_RNA (1)...(19): siRNA sense strand
gaagagagaacaaggauga

SEQ ID NO: 1347850 - RNA, 19 nt, Homo sapiens
  misc_RNA (1)...(19): siRNA sense strand
ugacugaccugguaaagaa

SEQ ID NO: 1347851 - RNA, 19 nt, Homo sapiens
  misc_RNA (1)...(19): siRNA sense strand
gaacagcuaugacaucuac

SEQ ID NO: 1347852 - RNA, 19 nt, Homo sapiens
  misc_RNA (1)...(19): siRNA sense strand
gcacuaccguguugugaaa

SEQ ID NO: 1347853 - RNA, 19 nt, Homo sapiens
  misc_RNA (1)...(19): siRNA sense strand
ggaacaagauucugcacaa

SEQ ID NO: 1347854 - RNA, 19 nt, Homo sapiens
  misc_RNA (1)...(19): siRNA sense strand
ggaacaaacugcgggugua

SEQ ID NO: 1347855 - RNA, 19 nt, Homo sapiens
  misc_RNA (1)...(19): siRNA sense strand
gaaagaggagacagaauau

SEQ ID NO: 1347856 - RNA, 19 nt, Homo sapiens
  misc_RNA (1)...(19): siRNA sense strand
gaacaagauucugcacaau

SEQ ID NO: 1347857 - RNA, 19 nt, Homo sapiens
  misc_RNA (1)...(19): siRNA sense strand
gauauuuggucucuaggaa

SEQ ID NO: 1347858 - RNA, 19 nt, Homo sapiens
  misc_RNA (1)...(19): siRNA sense strand
caagguguauggacucauu

SEQ ID NO: 1347859 - RNA, 19 nt, Homo sapiens
  misc_RNA (1)...(19): siRNA sense strand
agaaagaggagacagaaua

SEQ ID NO: 1347860 - RNA, 19 nt, Homo sapiens
  misc_RNA (1)...(19): siRNA sense strand
ggaagccccuguaccauua

SEQ ID NO: 1347861 - RNA, 19 nt, Homo sapiens
  misc_RNA (1)...(19): siRNA sense strand
acaagauucugcacaauga

SEQ ID NO: 1347862 - RNA, 19 nt, Homo sapiens
  misc_RNA (1)...(19): siRNA sense strand
gaaguggucuaagaaguuc

SEQ ID NO: 1347863 - RNA, 19 nt, Homo sapiens
  misc_RNA (1)...(19): siRNA sense strand
ggucuaagaaguucauuga

SEQ ID NO: 1347864 - RNA, 19 nt, Homo sapiens
  misc_RNA (1)...(19): siRNA sense strand
ccaagaaggccauggacua

SEQ ID NO: 1347865 - RNA, 19 nt, Homo sapiens
  misc_RNA (1)...(19): siRNA sense strand
gagcaugccuaccucaagu

SEQ ID NO: 1347866 - RNA, 19 nt, Homo sapiens
  misc_RNA (1)...(19): siRNA sense strand
ggaaguacaagaagcgauu

SEQ ID NO: 1347867 - RNA, 19 nt, Homo sapiens
  misc_RNA (1)...(19): siRNA sense strand
ugacagccauggagaggaa

SEQ ID NO: 1347868 - RNA, 19 nt, Homo sapiens
  misc_RNA (1)...(19): siRNA sense strand
aaccguaacugcaucauga

SEQ ID NO: 1347869 - RNA, 19 nt, Homo sapiens
  misc_RNA (1)...(19): siRNA sense strand
acaaacugcggguguauua

SEQ ID NO: 1347870 - RNA, 19 nt, Homo sapiens
  misc_RNA (1)...(19): siRNA sense strand
gagcaacucagaggcuuua

SEQ ID NO: 1347871 - RNA, 19 nt, Homo sapiens
  misc_RNA (1)...(19): siRNA sense strand
gcacaaugacccagaagug

SEQ ID NO: 1347872 - RNA, 19 nt, Homo sapiens
  misc_RNA (1)...(19): siRNA sense strand
ucaugacucugaaccguaa

SEQ ID NO: 1347873 - RNA, 19 nt, Homo sapiens
  misc_RNA (1)...(19): siRNA sense strand
ggacccugcugggaucuuu

SEQ ID NO: 1347874 - RNA, 19 nt, Homo sapiens
  misc_RNA (1)...(19): siRNA sense strand
cggagcagcuacugaaguu

SEQ ID NO: 1347875 - RNA, 19 nt, Homo sapiens
  misc_RNA (1)...(19): siRNA sense strand
caacaucgccaccuacuac

SEQ ID NO: 1347876 - RNA, 19 nt, Homo sapiens
  misc_RNA (1)...(19): siRNA sense strand
gaacaaacugcggguguau

SEQ ID NO: 1347877 - RNA, 19 nt, Homo sapiens
  misc_RNA (1)...(19): siRNA sense strand
gcauagaggagcagaagga

SEQ ID NO: 1347878 - RNA, 19 nt, Homo sapiens
  misc_RNA (1)...(19): siRNA sense strand
ggagugauauuuggucucu

SEQ ID NO: 1347879 - RNA, 19 nt, Homo sapiens
  misc_RNA (1)...(19): siRNA sense strand
gaacccugaugccaccuau

SEQ ID NO: 1347880 - RNA, 19 nt, Homo sapiens
  misc_RNA (1)...(19): siRNA sense strand
uccaagaaguggucuaaga

SEQ ID NO: 1347881 - RNA, 19 nt, Homo sapiens
  misc_RNA (1)...(19): siRNA sense strand
ccaagaaguggucuaagaa

SEQ ID NO: 1347882 - RNA, 19 nt, Homo sapiens
  misc_RNA (1)...(19): siRNA sense strand
ggaggacuguaucgccuau

SEQ ID NO: 1347883 - RNA, 19 nt, Homo sapiens
  misc_RNA (1)...(19): siRNA sense strand
agacggaacacuuucauug

SEQ ID NO: 1347884 - RNA, 19 nt, Homo sapiens
  misc_RNA (1)...(19): siRNA sense strand
guaacugcaucaugaacug

SEQ ID NO: 1347885 - RNA, 19 nt, Homo sapiens
  misc_RNA (1)...(19): siRNA sense strand
ugagaaagccauugagauc

SEQ ID NO: 1347886 - RNA, 19 nt, Homo sapiens
  misc_RNA (1)...(19): siRNA sense strand
gcaugaaucccgcugacaa

SEQ ID NO: 1347887 - RNA, 19 nt, Homo sapiens
  misc_RNA (1)...(19): siRNA sense strand
gcagcgaggaggaagauga

SEQ ID NO: 1347888 - RNA, 19 nt, Homo sapiens
  misc_RNA (1)...(19): siRNA sense strand
ccacggagcagcuacugaa

SEQ ID NO: 1347889 - RNA, 19 nt, Homo sapiens
  misc_RNA (1)...(19): siRNA sense strand
gauuacaggagugauauuu

SEQ ID NO: 1347890 - RNA, 19 nt, Homo sapiens
  misc_RNA (1)...(19): siRNA sense strand
ggagacagaauaugaguac

SEQ ID NO: 1347891 - RNA, 19 nt, Homo sapiens
  misc_RNA (1)...(19): siRNA sense strand
gggaacagcuaugacaucu

SEQ ID NO: 1347892 - RNA, 19 nt, Homo sapiens
  misc_RNA (1)...(19): siRNA sense strand
ugaaauacgagcggauuaa

SEQ ID NO: 1347893 - RNA, 19 nt, Homo sapiens
  misc_RNA (1)...(19): siRNA sense strand
cuacggagccuucaucaag

SEQ ID NO: 1347894 - RNA, 19 nt, Homo sapiens
  misc_RNA (1)...(19): siRNA sense strand
guacaagggucggcauguc

SEQ ID NO: 1347895 - RNA, 19 nt, Homo sapiens
  misc_RNA (1)...(19): siRNA sense strand
gaaucccgcugacaaacca

SEQ ID NO: 1347896 - RNA, 19 nt, Homo sapiens
  misc_RNA (1)...(19): siRNA sense strand
aagaggagacagaauauga

SEQ ID NO: 1347897 - RNA, 19 nt, Homo sapiens
  misc_RNA (1)...(19): siRNA sense strand
gagcagcuacugaaguuuc

SEQ ID NO: 1347898 - RNA, 19 nt, Homo sapiens
  misc_RNA (1)...(19): siRNA sense strand
ugacuucauugacacaugu

SEQ ID NO: 1347899 - RNA, 19 nt, Homo sapiens
  misc_RNA (1)...(19): siRNA sense strand
ggugauccaucgagacauc

SEQ ID NO: 1347900 - RNA, 19 nt, Homo sapiens
  misc_RNA (1)...(19): siRNA sense strand
uuacaggagugauauuugg

SEQ ID NO: 1347901 - RNA, 19 nt, Homo sapiens
  misc_RNA (1)...(19): siRNA sense strand
ggauuaaguuccuggucau

SEQ ID NO: 1347902 - RNA, 19 nt, Homo sapiens
  misc_RNA (1)...(19): siRNA sense strand
gcaacucagaggcuuuaaa

SEQ ID NO: 1347903 - RNA, 19 nt, Homo sapiens
  misc_RNA (1)...(19): siRNA sense strand
ggacgaggaggaagagauc

SEQ ID NO: 1347904 - RNA, 19 nt, Homo sapiens
  misc_RNA (1)...(19): siRNA sense strand
uggagaugcugcugugcua

SEQ ID NO: 1347905 - RNA, 19 nt, Homo sapiens
  misc_RNA (1)...(19): siRNA sense strand
cuacaucccugugcacauc

SEQ ID NO: 1347906 - RNA, 19 nt, Homo sapiens
  misc_RNA (1)...(19): siRNA sense strand
acccagaaguggagaagaa

SEQ ID NO: 1347907 - RNA, 19 nt, Homo sapiens
  misc_RNA (1)...(19): siRNA sense strand
ggagaacgggcugauguug

SEQ ID NO: 1347908 - RNA, 19 nt, Homo sapiens
  misc_RNA (1)...(19): siRNA sense strand
gcugucauccgccagaauu

SEQ ID NO: 1347909 - RNA, 19 nt, Homo sapiens
  misc_RNA (1)...(19): siRNA sense strand
ucuaagaaguucauugacu

SEQ ID NO: 1347910 - RNA, 19 nt, Homo sapiens
  misc_RNA (1)...(19): siRNA sense strand
gaaauacgagcggauuaag

SEQ ID NO: 1347911 - RNA, 19 nt, Homo sapiens
  misc_RNA (1)...(19): siRNA sense strand
gugaaauacgagcggauua

SEQ ID NO: 1347912 - RNA, 19 nt, Homo sapiens
  misc_RNA (1)...(19): siRNA sense strand
gaacagcaaaggccaaagc

SEQ ID NO: 1347913 - RNA, 19 nt, Homo sapiens
  misc_RNA (1)...(19): siRNA sense strand
gagagaacaaggaugaaca

SEQ ID NO: 1347914 - RNA, 19 nt, Homo sapiens
  misc_RNA (1)...(19): siRNA sense strand
ggagaucaacaugcugaaa

SEQ ID NO: 1347915 - RNA, 19 nt, Homo sapiens
  misc_RNA (1)...(19): siRNA sense strand
gaaccguaacugcaucaug

SEQ ID NO: 1347916 - RNA, 19 nt, Homo sapiens
  misc_RNA (1)...(19): siRNA sense strand
acaaauucauggccuucaa

SEQ ID NO: 1347917 - RNA, 19 nt, Homo sapiens
  misc_RNA (1)...(19): siRNA sense strand
aauacgagcggauuaaguu

SEQ ID NO: 1347918 - RNA, 19 nt, Homo sapiens
  misc_RNA (1)...(19): siRNA sense strand
gggcucaaccugcucauca

SEQ ID NO: 1347919 - RNA, 19 nt, Homo sapiens
  misc_RNA (1)...(19): siRNA sense strand
gagaacagcaaaggccaaa

SEQ ID NO: 1347920 - RNA, 19 nt, Homo sapiens
  misc_RNA (1)...(19): siRNA sense strand
ggaugggaguggugacuac

SEQ ID NO: 1347921 - RNA, 19 nt, Homo sapiens
  misc_RNA (1)...(19): siRNA sense strand
ccauugagauccgcucugu

SEQ ID NO: 1347922 - RNA, 19 nt, Homo sapiens
  misc_RNA (1)...(19): siRNA sense strand
ggugagaaagccauugaga

SEQ ID NO: 1347923 - RNA, 19 nt, Homo sapiens
  misc_RNA (1)...(19): siRNA sense strand
gcaacaucgccaccuacua

SEQ ID NO: 1347924 - RNA, 19 nt, Homo sapiens
  misc_RNA (1)...(19): siRNA sense strand
cagaggucaucgccuguga

SEQ ID NO: 1347925 - RNA, 19 nt, Homo sapiens
  misc_RNA (1)...(19): siRNA sense strand
gggagaugccuacuucugu

SEQ ID NO: 1347926 - RNA, 19 nt, Homo sapiens
  misc_RNA (1)...(19): siRNA sense strand
gaaggguucuguggucaac

SEQ ID NO: 1347927 - RNA, 19 nt, Homo sapiens
  misc_RNA (1)...(19): siRNA sense strand
ggaugaacaagcagcagaa

SEQ ID NO: 1347928 - RNA, 19 nt, Homo sapiens
  misc_RNA (1)...(19): siRNA sense strand
guagaagagagaacaagga

SEQ ID NO: 1347929 - RNA, 19 nt, Homo sapiens
  misc_RNA (1)...(19): siRNA sense strand
ggaagcugcaggagaagga

SEQ ID NO: 1347930 - RNA, 19 nt, Homo sapiens
  misc_RNA (1)...(19): siRNA sense strand
agaaguggucuaagaaguu

SEQ ID NO: 1347931 - RNA, 19 nt, Homo sapiens
  misc_RNA (1)...(19): siRNA sense strand
uaugauuacaggagugaua

SEQ ID NO: 1347932 - RNA, 19 nt, Homo sapiens
  misc_RNA (1)...(19): siRNA sense strand
cugaugccaccuaugauua

SEQ ID NO: 1347933 - RNA, 19 nt, Homo sapiens
  misc_RNA (1)...(19): siRNA sense strand
ugacagcaauggguacaca

SEQ ID NO: 1347934 - RNA, 19 nt, Homo sapiens
  misc_RNA (1)...(19): siRNA sense strand
caacucagaggcuuuaaaa

SEQ ID NO: 1347935 - RNA, 19 nt, Homo sapiens
  misc_RNA (1)...(19): siRNA sense strand
aagaaguggucuaagaagu

SEQ ID NO: 1347936 - RNA, 19 nt, Homo sapiens
  misc_RNA (1)...(19): siRNA sense strand
cuacuucuguggccuacau

SEQ ID NO: 1347937 - RNA, 19 nt, Homo sapiens
  misc_RNA (1)...(19): siRNA sense strand
caaacccuaccacaaauuc

SEQ ID NO: 1347938 - RNA, 19 nt, Homo sapiens
  misc_RNA (1)...(19): siRNA sense strand
acuaccguguugugaaaua

SEQ ID NO: 1347939 - RNA, 19 nt, Homo sapiens
  misc_RNA (1)...(19): siRNA sense strand
gaacaagcagcagaacucu

SEQ ID NO: 1347940 - RNA, 19 nt, Homo sapiens
  misc_RNA (1)...(19): siRNA sense strand
ucaaacaggagaucaacau

SEQ ID NO: 1347941 - RNA, 19 nt, Homo sapiens
  misc_RNA (1)...(19): siRNA sense strand
cccaaacccuaccacaaau

SEQ ID NO: 1347942 - RNA, 19 nt, Homo sapiens
  misc_RNA (1)...(19): siRNA sense strand
guucuguggucaacgugaa

SEQ ID NO: 1347943 - RNA, 19 nt, Homo sapiens
  misc_RNA (1)...(19): siRNA sense strand
gcagaggggagcagagaua

SEQ ID NO: 1347944 - RNA, 19 nt, Homo sapiens
  misc_RNA (1)...(19): siRNA sense strand
caugaaucccgcugacaaa

SEQ ID NO: 1347945 - RNA, 19 nt, Homo sapiens
  misc_RNA (1)...(19): siRNA sense strand
agcagcagcuucagaaaca

SEQ ID NO: 1347946 - RNA, 19 nt, Homo sapiens
  misc_RNA (1)...(19): siRNA sense strand
uacggagccuucaucaaga

SEQ ID NO: 1347947 - RNA, 19 nt, Homo sapiens
  misc_RNA (1)...(19): siRNA sense strand
cgagcccucuuccucauuc

SEQ ID NO: 1347948 - RNA, 19 nt, Homo sapiens
  misc_RNA (1)...(19): siRNA sense strand
ggacuuauguacagcauuu

SEQ ID NO: 1347949 - RNA, 19 nt, Homo sapiens
  misc_RNA (1)...(19): siRNA sense strand
ucaaugaccuucagucuuu

SEQ ID NO: 1347950 - RNA, 19 nt, Homo sapiens
  misc_RNA (1)...(19): siRNA sense strand
ggaaggauguacugaaauu

SEQ ID NO: 1347951 - RNA, 19 nt, Homo sapiens
  misc_RNA (1)...(19): siRNA sense strand
ucacacagauggaguagua

SEQ ID NO: 1347952 - RNA, 19 nt, Homo sapiens
  misc_RNA (1)...(19): siRNA sense strand
caagauaaauccaaugaga

SEQ ID NO: 1347953 - RNA, 19 nt, Homo sapiens
  misc_RNA (1)...(19): siRNA sense strand
gcacagagcacaugaagga

SEQ ID NO: 1347954 - RNA, 19 nt, Homo sapiens
  misc_RNA (1)...(19): siRNA sense strand
ggaaagaagagccuaguaa

SEQ ID NO: 1347955 - RNA, 19 nt, Homo sapiens
  misc_RNA (1)...(19): siRNA sense strand
gaagggagcacuacaguau

SEQ ID NO: 1347956 - RNA, 19 nt, Homo sapiens
  misc_RNA (1)...(19): siRNA sense strand
gcucaaaccacuaguuaua

SEQ ID NO: 1347957 - RNA, 19 nt, Homo sapiens
  misc_RNA (1)...(19): siRNA sense strand
gacgagaagucaagaacua

SEQ ID NO: 1347958 - RNA, 19 nt, Homo sapiens
  misc_RNA (1)...(19): siRNA sense strand
cagagcagcuacaagauaa

SEQ ID NO: 1347959 - RNA, 19 nt, Homo sapiens
  misc_RNA (1)...(19): siRNA sense strand
gaagccaucgguuauauuu

SEQ ID NO: 1347960 - RNA, 19 nt, Homo sapiens
  misc_RNA (1)...(19): siRNA sense strand
gggcggagaucgaagacua

SEQ ID NO: 1347961 - RNA, 19 nt, Homo sapiens
  misc_RNA (1)...(19): siRNA sense strand
cugcuuaucuucuucauuu

SEQ ID NO: 1347962 - RNA, 19 nt, Homo sapiens
  misc_RNA (1)...(19): siRNA sense strand
gguuauauuugccaagaua

SEQ ID NO: 1347963 - RNA, 19 nt, Homo sapiens
  misc_RNA (1)...(19): siRNA sense strand
gugcagagaucccaguaaa

SEQ ID NO: 1347964 - RNA, 19 nt, Homo sapiens
  misc_RNA (1)...(19): siRNA sense strand
aagaagagccuaguaauaa

SEQ ID NO: 1347965 - RNA, 19 nt, Homo sapiens
  misc_RNA (1)...(19): siRNA sense strand
gugcaacucuucagaaugu

SEQ ID NO: 1347966 - RNA, 19 nt, Homo sapiens
  misc_RNA (1)...(19): siRNA sense strand
gaaagaagagccuaguaau

SEQ ID NO: 1347967 - RNA, 19 nt, Homo sapiens
  misc_RNA (1)...(19): siRNA sense strand
gguuauggccucccuguua

SEQ ID NO: 1347968 - RNA, 19 nt, Homo sapiens
  misc_RNA (1)...(19): siRNA sense strand
acuaugacaugguggauua

SEQ ID NO: 1347969 - RNA, 19 nt, Homo sapiens
  misc_RNA (1)...(19): siRNA sense strand
aaagaagagccuaguaaua

SEQ ID NO: 1347970 - RNA, 19 nt, Homo sapiens
  misc_RNA (1)...(19): siRNA sense strand
gaacugaggaaacugaaga

SEQ ID NO: 1347971 - RNA, 19 nt, Homo sapiens
  misc_RNA (1)...(19): siRNA sense strand
gaggaguucugcauaugaa

SEQ ID NO: 1347972 - RNA, 19 nt, Homo sapiens
  misc_RNA (1)...(19): siRNA sense strand
agagguggcuugcuauuga

SEQ ID NO: 1347973 - RNA, 19 nt, Homo sapiens
  misc_RNA (1)...(19): siRNA sense strand
uggagaaccugcccacuuu

SEQ ID NO: 1347974 - RNA, 19 nt, Homo sapiens
  misc_RNA (1)...(19): siRNA sense strand
gcaacagguucuucagaug

SEQ ID NO: 1347975 - RNA, 19 nt, Homo sapiens
  misc_RNA (1)...(19): siRNA sense strand
guuauggccucccuguuaa

SEQ ID NO: 1347976 - RNA, 19 nt, Homo sapiens
  misc_RNA (1)...(19): siRNA sense strand
cagaguggcuucaaaugug

SEQ ID NO: 1347977 - RNA, 19 nt, Homo sapiens
  misc_RNA (1)...(19): siRNA sense strand
guacauggaggccuuuaaa

SEQ ID NO: 1347978 - RNA, 19 nt, Homo sapiens
  misc_RNA (1)...(19): siRNA sense strand
gauagaauccaguucaaug

SEQ ID NO: 1347979 - RNA, 19 nt, Homo sapiens
  misc_RNA (1)...(19): siRNA sense strand
ucacacagacacuaacuaa

SEQ ID NO: 1347980 - RNA, 19 nt, Homo sapiens
  misc_RNA (1)...(19): siRNA sense strand
ggccaaugauccaugaauu

SEQ ID NO: 1347981 - RNA, 19 nt, Homo sapiens
  misc_RNA (1)...(19): siRNA sense strand
gaaggauguacugaaauua

SEQ ID NO: 1347982 - RNA, 19 nt, Homo sapiens
  misc_RNA (1)...(19): siRNA sense strand
gaagucaagaacuauguuu

SEQ ID NO: 1347983 - RNA, 19 nt, Homo sapiens
  misc_RNA (1)...(19): siRNA sense strand
ggagaucgaagacuaacaa

SEQ ID NO: 1347984 - RNA, 19 nt, Homo sapiens
  misc_RNA (1)...(19): siRNA sense strand
gauauugcccuugcuauug

SEQ ID NO: 1347985 - RNA, 19 nt, Homo sapiens
  misc_RNA (1)...(19): siRNA sense strand
guggugaauuccucaagua

SEQ ID NO: 1347986 - RNA, 19 nt, Homo sapiens
  misc_RNA (1)...(19): siRNA sense strand
ccagagcagcuacaagaua

SEQ ID NO: 1347987 - RNA, 19 nt, Homo sapiens
  misc_RNA (1)...(19): siRNA sense strand
gagcacauccgauagaauc

SEQ ID NO: 1347988 - RNA, 19 nt, Homo sapiens
  misc_RNA (1)...(19): siRNA sense strand
cagcucaaaccacuaguua

SEQ ID NO: 1347989 - RNA, 19 nt, Homo sapiens
  misc_RNA (1)...(19): siRNA sense strand
gaagagccuaguaauaaug

SEQ ID NO: 1347990 - RNA, 19 nt, Homo sapiens
  misc_RNA (1)...(19): siRNA sense strand
uuaugaagcugcagacguu

SEQ ID NO: 1347991 - RNA, 19 nt, Homo sapiens
  misc_RNA (1)...(19): siRNA sense strand
gagaugaggaucacacaga

SEQ ID NO: 1347992 - RNA, 19 nt, Homo sapiens
  misc_RNA (1)...(19): siRNA sense strand
gaaagugcaacaucaagau

SEQ ID NO: 1347993 - RNA, 19 nt, Homo sapiens
  misc_RNA (1)...(19): siRNA sense strand
ggaaagugcaacaucaaga

SEQ ID NO: 1347994 - RNA, 19 nt, Homo sapiens
  misc_RNA (1)...(19): siRNA sense strand
aggaagaaccagcuacuua

SEQ ID NO: 1347995 - RNA, 19 nt, Homo sapiens
  misc_RNA (1)...(19): siRNA sense strand
ccacauugcuggagaugag

SEQ ID NO: 1347996 - RNA, 19 nt, Homo sapiens
  misc_RNA (1)...(19): siRNA sense strand
gcuacaagauaaauccaau

SEQ ID NO: 1347997 - RNA, 19 nt, Homo sapiens
  misc_RNA (1)...(19): siRNA sense strand
caacccagaguagaauuua

SEQ ID NO: 1347998 - RNA, 19 nt, Homo sapiens
  misc_RNA (1)...(19): siRNA sense strand
caaugucugugaugaggaa

SEQ ID NO: 1347999 - RNA, 19 nt, Homo sapiens
  misc_RNA (1)...(19): siRNA sense strand
ugaggaaacugaagaacca

SEQ ID NO: 1348000 - RNA, 19 nt, Homo sapiens
  misc_RNA (1)...(19): siRNA sense strand
ugggaaggauguacugaaa

SEQ ID NO: 1348001 - RNA, 19 nt, Homo sapiens
  misc_RNA (1)...(19): siRNA sense strand
cugcagacguugcugauga

SEQ ID NO: 1348002 - RNA, 19 nt, Homo sapiens
  misc_RNA (1)...(19): siRNA sense strand
acaagaggaugcccugaug

SEQ ID NO: 1348003 - RNA, 19 nt, Homo sapiens
  misc_RNA (1)...(19): siRNA sense strand
caugguggauuaucugaau

SEQ ID NO: 1348004 - RNA, 19 nt, Homo sapiens
  misc_RNA (1)...(19): siRNA sense strand
aauccaacaucauaccuuu

SEQ ID NO: 1348005 - RNA, 19 nt, Homo sapiens
  misc_RNA (1)...(19): siRNA sense strand
agaagagccuaguaauaau

SEQ ID NO: 1348006 - RNA, 19 nt, Homo sapiens
  misc_RNA (1)...(19): siRNA sense strand
ugaaugagcuaagggaaag

SEQ ID NO: 1348007 - RNA, 19 nt, Homo sapiens
  misc_RNA (1)...(19): siRNA sense strand
ucaaaccacuaguuauaca

SEQ ID NO: 1348008 - RNA, 19 nt, Homo sapiens
  misc_RNA (1)...(19): siRNA sense strand
gguccaaugucugugauga

SEQ ID NO: 1348009 - RNA, 19 nt, Homo sapiens
  misc_RNA (1)...(19): siRNA sense strand
gaucgaagacuaacaaagc

SEQ ID NO: 1348010 - RNA, 19 nt, Homo sapiens
  misc_RNA (1)...(19): siRNA sense strand
agaacucuuugacaucuaa

SEQ ID NO: 1348011 - RNA, 19 nt, Homo sapiens
  misc_RNA (1)...(19): siRNA sense strand
gaagggcggagaucgaaga

SEQ ID NO: 1348012 - RNA, 19 nt, Homo sapiens
  misc_RNA (1)...(19): siRNA sense strand
cuaaagauccagauaucaa

SEQ ID NO: 1348013 - RNA, 19 nt, Homo sapiens
  misc_RNA (1)...(19): siRNA sense strand
cugaauaccagguuuguuu

SEQ ID NO: 1348014 - RNA, 19 nt, Homo sapiens
  misc_RNA (1)...(19): siRNA sense strand
cgacuuuggucaucaugga

SEQ ID NO: 1348015 - RNA, 19 nt, Homo sapiens
  misc_RNA (1)...(19): siRNA sense strand
ggaagaaccagcuacuuac

SEQ ID NO: 1348016 - RNA, 19 nt, Homo sapiens
  misc_RNA (1)...(19): siRNA sense strand
gaaggagucgacauuggaa

SEQ ID NO: 1348017 - RNA, 19 nt, Homo sapiens
  misc_RNA (1)...(19): siRNA sense strand
guacagcauuugggaagga

SEQ ID NO: 1348018 - RNA, 19 nt, Homo sapiens
  misc_RNA (1)...(19): siRNA sense strand
uuaaggauguuccaaagca

SEQ ID NO: 1348019 - RNA, 19 nt, Homo sapiens
  misc_RNA (1)...(19): siRNA sense strand
caaugaccuucagucuuua

SEQ ID NO: 1348020 - RNA, 19 nt, Homo sapiens
  misc_RNA (1)...(19): siRNA sense strand
cagaacaaccugaggaguu

SEQ ID NO: 1348021 - RNA, 19 nt, Homo sapiens
  misc_RNA (1)...(19): siRNA sense strand
uacaguaucugguuccaau

SEQ ID NO: 1348022 - RNA, 19 nt, Homo sapiens
  misc_RNA (1)...(19): siRNA sense strand
guacauggagacauauaug

SEQ ID NO: 1348023 - RNA, 19 nt, Homo sapiens
  misc_RNA (1)...(19): siRNA sense strand
ggauagaauucugguccaa

SEQ ID NO: 1348024 - RNA, 19 nt, Homo sapiens
  misc_RNA (1)...(19): siRNA sense strand
gugaauuccucaaguacau

SEQ ID NO: 1348025 - RNA, 19 nt, Homo sapiens
  misc_RNA (1)...(19): siRNA sense strand
ggaagccuauacuggaauc

SEQ ID NO: 1348026 - RNA, 19 nt, Homo sapiens
  misc_RNA (1)...(19): siRNA sense strand
cagcuggucuacaaaucaa

SEQ ID NO: 1348027 - RNA, 19 nt, Homo sapiens
  misc_RNA (1)...(19): siRNA sense strand
gaacguacacccggaugug

SEQ ID NO: 1348028 - RNA, 19 nt, Homo sapiens
  misc_RNA (1)...(19): siRNA sense strand
acuuagagguuguauugaa

SEQ ID NO: 1348029 - RNA, 19 nt, Homo sapiens
  misc_RNA (1)...(19): siRNA sense strand
guucagaagcuccuagaga

SEQ ID NO: 1348030 - RNA, 19 nt, Homo sapiens
  misc_RNA (1)...(19): siRNA sense strand
caaaagaacugaggaaacu

SEQ ID NO: 1348031 - RNA, 19 nt, Homo sapiens
  misc_RNA (1)...(19): siRNA sense strand
gguacaacccagaguagaa

SEQ ID NO: 1348032 - RNA, 19 nt, Homo sapiens
  misc_RNA (1)...(19): siRNA sense strand
gaccuucagucuuuacucu

SEQ ID NO: 1348033 - RNA, 19 nt, Homo sapiens
  misc_RNA (1)...(19): siRNA sense strand
ggaagccaucgguuauauu

SEQ ID NO: 1348034 - RNA, 19 nt, Homo sapiens
  misc_RNA (1)...(19): siRNA sense strand
gcuauuggaggagaguuua

SEQ ID NO: 1348035 - RNA, 19 nt, Homo sapiens
  misc_RNA (1)...(19): siRNA sense strand
ccugaggaguucugcauau

SEQ ID NO: 1348036 - RNA, 19 nt, Homo sapiens
  misc_RNA (1)...(19): siRNA sense strand
cacagacacuaacuaaaca

SEQ ID NO: 1348037 - RNA, 19 nt, Homo sapiens
  misc_RNA (1)...(19): siRNA sense strand
guccuuauauuaucaguac

SEQ ID NO: 1348038 - RNA, 19 nt, Homo sapiens
  misc_RNA (1)...(19): siRNA sense strand
gaaccugcccacuuuccuu

SEQ ID NO: 1348039 - RNA, 19 nt, Homo sapiens
  misc_RNA (1)...(19): siRNA sense strand
gguacgaguggcugcuuua

SEQ ID NO: 1348040 - RNA, 19 nt, Homo sapiens
  misc_RNA (1)...(19): siRNA sense strand
gcagagguggcuugcuauu

SEQ ID NO: 1348041 - RNA, 19 nt, Homo sapiens
  misc_RNA (1)...(19): siRNA sense strand
gaaaacgacuuuggucauc

SEQ ID NO: 1348042 - RNA, 19 nt, Homo sapiens
  misc_RNA (1)...(19): siRNA sense strand
ccuagagacuacagacaga

SEQ ID NO: 1348043 - RNA, 19 nt, Homo sapiens
  misc_RNA (1)...(19): siRNA sense strand
gcuacuuacugcuuaucuu

SEQ ID NO: 1348044 - RNA, 19 nt, Homo sapiens
  misc_RNA (1)...(19): siRNA sense strand
cagagcacauccgauagaa

SEQ ID NO: 1348045 - RNA, 19 nt, Homo sapiens
  misc_RNA (1)...(19): siRNA sense strand
uccaugaauuguuaacuga

SEQ ID NO: 1348046 - RNA, 19 nt, Homo sapiens
  misc_RNA (1)...(19): siRNA sense strand
gcccugcaauccaacauca

SEQ ID NO: 1348047 - RNA, 19 nt, Homo sapiens
  misc_RNA (1)...(19): siRNA sense strand
ucaagaugcuuugcagauc

SEQ ID NO: 1348048 - RNA, 19 nt, Homo sapiens
  misc_RNA (1)...(19): siRNA sense strand
ggaaagggauaaagugaug

SEQ ID NO: 1348049 - RNA, 19 nt, Homo sapiens
  misc_RNA (1)...(19): siRNA sense strand
ccaagaagaugagcaguuu

SEQ ID NO: 1348050 - RNA, 19 nt, Homo sapiens
  misc_RNA (1)...(19): siRNA sense strand
gcaagcagcucgguucugu

SEQ ID NO: 1348051 - RNA, 19 nt, Homo sapiens
  misc_RNA (1)...(19): siRNA sense strand
gacaaaagcuuccggcuaa

SEQ ID NO: 1348052 - RNA, 19 nt, Homo sapiens
  misc_RNA (1)...(19): siRNA sense strand
aaagugaugccucugauua

SEQ ID NO: 1348053 - RNA, 19 nt, Homo sapiens
  misc_RNA (1)...(19): siRNA sense strand
ccugagaaauggaauaaga

SEQ ID NO: 1348054 - RNA, 19 nt, Homo sapiens
  misc_RNA (1)...(19): siRNA sense strand
caccaagcauggauuauug

SEQ ID NO: 1348055 - RNA, 19 nt, Homo sapiens
  misc_RNA (1)...(19): siRNA sense strand
ggagaaccacuuccaagaa

SEQ ID NO: 1348056 - RNA, 19 nt, Homo sapiens
  misc_RNA (1)...(19): siRNA sense strand
gaagcaggaacaucuguaa

SEQ ID NO: 1348057 - RNA, 19 nt, Homo sapiens
  misc_RNA (1)...(19): siRNA sense strand
ucagugaccucuaugcaau

SEQ ID NO: 1348058 - RNA, 19 nt, Homo sapiens
  misc_RNA (1)...(19): siRNA sense strand
ggauaucccugagaaaugg

SEQ ID NO: 1348059 - RNA, 19 nt, Homo sapiens
  misc_RNA (1)...(19): siRNA sense strand
agacgacccuuacaugaug

SEQ ID NO: 1348060 - RNA, 19 nt, Homo sapiens
  misc_RNA (1)...(19): siRNA sense strand
gauaaagugaugccucuga

SEQ ID NO: 1348061 - RNA, 19 nt, Homo sapiens
  misc_RNA (1)...(19): siRNA sense strand
gaauuuaucaugccagaca

SEQ ID NO: 1348062 - RNA, 19 nt, Homo sapiens
  misc_RNA (1)...(19): siRNA sense strand
guagacgacccuuacauga

SEQ ID NO: 1348063 - RNA, 19 nt, Homo sapiens
  misc_RNA (1)...(19): siRNA sense strand
uaaagacgcagcugaggaa

SEQ ID NO: 1348064 - RNA, 19 nt, Homo sapiens
  misc_RNA (1)...(19): siRNA sense strand
gaagggcacaggcugcaaa

SEQ ID NO: 1348065 - RNA, 19 nt, Homo sapiens
  misc_RNA (1)...(19): siRNA sense strand
gugccaauguccucaguga

SEQ ID NO: 1348066 - RNA, 19 nt, Homo sapiens
  misc_RNA (1)...(19): siRNA sense strand
cgaggugucguuuguaauu

SEQ ID NO: 1348067 - RNA, 19 nt, Homo sapiens
  misc_RNA (1)...(19): siRNA sense strand
ggaagcaggaacaucugua

SEQ ID NO: 1348068 - RNA, 19 nt, Homo sapiens
  misc_RNA (1)...(19): siRNA sense strand
gggcuuuccuugguucaaa

SEQ ID NO: 1348069 - RNA, 19 nt, Homo sapiens
  misc_RNA (1)...(19): siRNA sense strand
ucaaaccacagauuacauu

SEQ ID NO: 1348070 - RNA, 19 nt, Homo sapiens
  misc_RNA (1)...(19): siRNA sense strand
gagcaaggccugcggaaac

SEQ ID NO: 1348071 - RNA, 19 nt, Homo sapiens
  misc_RNA (1)...(19): siRNA sense strand
cccggaaaguuacgaauug

SEQ ID NO: 1348072 - RNA, 19 nt, Homo sapiens
  misc_RNA (1)...(19): siRNA sense strand
gggcacaggcugcaaagug

SEQ ID NO: 1348073 - RNA, 19 nt, Homo sapiens
  misc_RNA (1)...(19): siRNA sense strand
gcacagccagaaucauaga

SEQ ID NO: 1348074 - RNA, 19 nt, Homo sapiens
  misc_RNA (1)...(19): siRNA sense strand
ccaccaagcauggauuauu

SEQ ID NO: 1348075 - RNA, 19 nt, Homo sapiens
  misc_RNA (1)...(19): siRNA sense strand
cacggaaugugacaauaug

SEQ ID NO: 1348076 - RNA, 19 nt, Homo sapiens
  misc_RNA (1)...(19): siRNA sense strand
caaaccacagauuacauuu

SEQ ID NO: 1348077 - RNA, 19 nt, Homo sapiens
  misc_RNA (1)...(19): siRNA sense strand
uuauugggauuguagagaa

SEQ ID NO: 1348078 - RNA, 19 nt, Homo sapiens
  misc_RNA (1)...(19): siRNA sense strand
guacuaaaccccuggauug

SEQ ID NO: 1348079 - RNA, 19 nt, Homo sapiens
  misc_RNA (1)...(19): siRNA sense strand
aaccacagauuacauuuac

SEQ ID NO: 1348080 - RNA, 19 nt, Homo sapiens
  misc_RNA (1)...(19): siRNA sense strand
ggaauggauacuuguguca

SEQ ID NO: 1348081 - RNA, 19 nt, Homo sapiens
  misc_RNA (1)...(19): siRNA sense strand
gaggugucguuuguaauuc

SEQ ID NO: 1348082 - RNA, 19 nt, Homo sapiens
  misc_RNA (1)...(19): siRNA sense strand
caggauagcgugugccaau

SEQ ID NO: 1348083 - RNA, 19 nt, Homo sapiens
  misc_RNA (1)...(19): siRNA sense strand
agacgcagcugaggaagca

SEQ ID NO: 1348084 - RNA, 19 nt, Homo sapiens
  misc_RNA (1)...(19): siRNA sense strand
ggccaccaagcauggauua

SEQ ID NO: 1348085 - RNA, 19 nt, Homo sapiens
  misc_RNA (1)...(19): siRNA sense strand
ggauagcgugugccaaugu

SEQ ID NO: 1348086 - RNA, 19 nt, Homo sapiens
  misc_RNA (1)...(19): siRNA sense strand
gcggccuucugaucuguuu

SEQ ID NO: 1348087 - RNA, 19 nt, Homo sapiens
  misc_RNA (1)...(19): siRNA sense strand
ccaacccaaugaauuuauc

SEQ ID NO: 1348088 - RNA, 19 nt, Homo sapiens
  misc_RNA (1)...(19): siRNA sense strand
gauagcgugugccaauguc

SEQ ID NO: 1348089 - RNA, 19 nt, Homo sapiens
  misc_RNA (1)...(19): siRNA sense strand
uaaagugaugccucugauu

SEQ ID NO: 1348090 - RNA, 19 nt, Homo sapiens
  misc_RNA (1)...(19): siRNA sense strand
cagccagaaucauagacaa

SEQ ID NO: 1348091 - RNA, 19 nt, Homo sapiens
  misc_RNA (1)...(19): siRNA sense strand
gaacauggcgaggcucaac

SEQ ID NO: 1348092 - RNA, 19 nt, Homo sapiens
  misc_RNA (1)...(19): siRNA sense strand
ggcuggauaucccugagaa

SEQ ID NO: 1348093 - RNA, 19 nt, Homo sapiens
  misc_RNA (1)...(19): siRNA sense strand
cgcagaaccuggccaagca

SEQ ID NO: 1348094 - RNA, 19 nt, Homo sapiens
  misc_RNA (1)...(19): siRNA sense strand
gcaaagugccccaagaugu

SEQ ID NO: 1348095 - RNA, 19 nt, Homo sapiens
  misc_RNA (1)...(19): siRNA sense strand
ugaggaagcaggaacaucu

SEQ ID NO: 1348096 - RNA, 19 nt, Homo sapiens
  misc_RNA (1)...(19): siRNA sense strand
cgaggucgcaccacaagug

SEQ ID NO: 1348097 - RNA, 19 nt, Homo sapiens
  misc_RNA (1)...(19): siRNA sense strand
ggacucaugcacacguuca

SEQ ID NO: 1348098 - RNA, 19 nt, Homo sapiens
  misc_RNA (1)...(19): siRNA sense strand
cugccaacccaaugaauuu

SEQ ID NO: 1348099 - RNA, 19 nt, Homo sapiens
  misc_RNA (1)...(19): siRNA sense strand
gggaaagggauaaagugau

SEQ ID NO: 1348100 - RNA, 19 nt, Homo sapiens
  misc_RNA (1)...(19): siRNA sense strand
caucacgggcuucgggauu

SEQ ID NO: 1348101 - RNA, 19 nt, Homo sapiens
  misc_RNA (1)...(19): siRNA sense strand
gcuuccggcuaaccagauu

SEQ ID NO: 1348102 - RNA, 19 nt, Homo sapiens
  misc_RNA (1)...(19): siRNA sense strand
cgacagggaaagggauaaa

SEQ ID NO: 1348103 - RNA, 19 nt, Homo sapiens
  misc_RNA (1)...(19): siRNA sense strand
uggaaucuuuacaggagaa

SEQ ID NO: 1348104 - RNA, 19 nt, Homo sapiens
  misc_RNA (1)...(19): siRNA sense strand
guucaaaccacagauuaca

SEQ ID NO: 1348105 - RNA, 19 nt, Homo sapiens
  misc_RNA (1)...(19): siRNA sense strand
cuacgcgggaguccuuuaa

SEQ ID NO: 1348106 - RNA, 19 nt, Homo sapiens
  misc_RNA (1)...(19): siRNA sense strand
auaaagugaugccucugau

SEQ ID NO: 1348107 - RNA, 19 nt, Homo sapiens
  misc_RNA (1)...(19): siRNA sense strand
cguagacgacccuuacaug

SEQ ID NO: 1348108 - RNA, 19 nt, Homo sapiens
  misc_RNA (1)...(19): siRNA sense strand
acauuuacccgaucguaga

SEQ ID NO: 1348109 - RNA, 19 nt, Homo sapiens
  misc_RNA (1)...(19): siRNA sense strand
uguccucagugaccucuau

SEQ ID NO: 1348110 - RNA, 19 nt, Homo sapiens
  misc_RNA (1)...(19): siRNA sense strand
uuacaugaugggcaggaua

SEQ ID NO: 1348111 - RNA, 19 nt, Homo sapiens
  misc_RNA (1)...(19): siRNA sense strand
uagacgacccuuacaugau

SEQ ID NO: 1348112 - RNA, 19 nt, Homo sapiens
  misc_RNA (1)...(19): siRNA sense strand
cccaagauguccugcaaaa

SEQ ID NO: 1348113 - RNA, 19 nt, Homo sapiens
  misc_RNA (1)...(19): siRNA sense strand
aggaggcgaugaugaacau

SEQ ID NO: 1348114 - RNA, 19 nt, Homo sapiens
  misc_RNA (1)...(19): siRNA sense strand
caacccaaugaauuuauca

SEQ ID NO: 1348115 - RNA, 19 nt, Homo sapiens
  misc_RNA (1)...(19): siRNA sense strand
gcauggauuauugggauug

SEQ ID NO: 1348116 - RNA, 19 nt, Homo sapiens
  misc_RNA (1)...(19): siRNA sense strand
ccaagcagcagaggaacga

SEQ ID NO: 1348117 - RNA, 19 nt, Homo sapiens
  misc_RNA (1)...(19): siRNA sense strand
cagggaaagggauaaagug

SEQ ID NO: 1348118 - RNA, 19 nt, Homo sapiens
  misc_RNA (1)...(19): siRNA sense strand
caaggccugcggaaacaug

SEQ ID NO: 1348119 - RNA, 19 nt, Homo sapiens
  misc_RNA (1)...(19): siRNA sense strand
caggacucaugcacacguu

SEQ ID NO: 1348120 - RNA, 19 nt, Homo sapiens
  misc_RNA (1)...(19): siRNA sense strand
gccaacccaaugaauuuau

SEQ ID NO: 1348121 - RNA, 19 nt, Homo sapiens
  misc_RNA (1)...(19): siRNA sense strand
gaauggauacuugugucau

SEQ ID NO: 1348122 - RNA, 19 nt, Homo sapiens
  misc_RNA (1)...(19): siRNA sense strand
uggauaucccugagaaaug

SEQ ID NO: 1348123 - RNA, 19 nt, Homo sapiens
  misc_RNA (1)...(19): siRNA sense strand
agauauagcugauacagua

SEQ ID NO: 1348124 - RNA, 19 nt, Homo sapiens
  misc_RNA (1)...(19): siRNA sense strand
ggagaaauccuucgaaaug

SEQ ID NO: 1348125 - RNA, 19 nt, Homo sapiens
  misc_RNA (1)...(19): siRNA sense strand
caaaucaccuuuauuagca

SEQ ID NO: 1348126 - RNA, 19 nt, Homo sapiens
  misc_RNA (1)...(19): siRNA sense strand
gaucagggucagaguauua

SEQ ID NO: 1348127 - RNA, 19 nt, Homo sapiens
  misc_RNA (1)...(19): siRNA sense strand
gaaaauguccagaagauua

SEQ ID NO: 1348128 - RNA, 19 nt, Homo sapiens
  misc_RNA (1)...(19): siRNA sense strand
uggcaaaucaccuuuauua

SEQ ID NO: 1348129 - RNA, 19 nt, Homo sapiens
  misc_RNA (1)...(19): siRNA sense strand
agacagagauugcuuuaag

SEQ ID NO: 1348130 - RNA, 19 nt, Homo sapiens
  misc_RNA (1)...(19): siRNA sense strand
gaagaucagggucagagua

SEQ ID NO: 1348131 - RNA, 19 nt, Homo sapiens
  misc_RNA (1)...(19): siRNA sense strand
caaccacacucuaaaugga

SEQ ID NO: 1348132 - RNA, 19 nt, Homo sapiens
  misc_RNA (1)...(19): siRNA sense strand
gcacagagagaauggaaga

SEQ ID NO: 1348133 - RNA, 19 nt, Homo sapiens
  misc_RNA (1)...(19): siRNA sense strand
cagcacauauggacuauca

SEQ ID NO: 1348134 - RNA, 19 nt, Homo sapiens
  misc_RNA (1)...(19): siRNA sense strand
gagaagugauuccuguaau

SEQ ID NO: 1348135 - RNA, 19 nt, Homo sapiens
  misc_RNA (1)...(19): siRNA sense strand
ggagaagugauuccuguaa

SEQ ID NO: 1348136 - RNA, 19 nt, Homo sapiens
  misc_RNA (1)...(19): siRNA sense strand
caagacagagauugcuuua

SEQ ID NO: 1348137 - RNA, 19 nt, Homo sapiens
  misc_RNA (1)...(19): siRNA sense strand
uaauggaacugcuuucauc

SEQ ID NO: 1348138 - RNA, 19 nt, Homo sapiens
  misc_RNA (1)...(19): siRNA sense strand
gaaaagggagugauuauug

SEQ ID NO: 1348139 - RNA, 19 nt, Homo sapiens
  misc_RNA (1)...(19): siRNA sense strand
caguguuccugaagaaaua

SEQ ID NO: 1348140 - RNA, 19 nt, Homo sapiens
  misc_RNA (1)...(19): siRNA sense strand
auacaguacucaaugauga

SEQ ID NO: 1348141 - RNA, 19 nt, Homo sapiens
  misc_RNA (1)...(19): siRNA sense strand
cauagaguguguguugaua

SEQ ID NO: 1348142 - RNA, 19 nt, Homo sapiens
  misc_RNA (1)...(19): siRNA sense strand
cauauaauccggaaaggaa

SEQ ID NO: 1348143 - RNA, 19 nt, Homo sapiens
  misc_RNA (1)...(19): siRNA sense strand
gaguguguguugauagauu

SEQ ID NO: 1348144 - RNA, 19 nt, Homo sapiens
  misc_RNA (1)...(19): siRNA sense strand
gaguggugcuauagaugua

SEQ ID NO: 1348145 - RNA, 19 nt, Homo sapiens
  misc_RNA (1)...(19): siRNA sense strand
gcacauauggacuaucaau

SEQ ID NO: 1348146 - RNA, 19 nt, Homo sapiens
  misc_RNA (1)...(19): siRNA sense strand
gcaaaucaccuuuauuagc

SEQ ID NO: 1348147 - RNA, 19 nt, Homo sapiens
  misc_RNA (1)...(19): siRNA sense strand
ucaauuauacuuccacaga

SEQ ID NO: 1348148 - RNA, 19 nt, Homo sapiens
  misc_RNA (1)...(19): siRNA sense strand
cagagagaauggaagauca

SEQ ID NO: 1348149 - RNA, 19 nt, Homo sapiens
  misc_RNA (1)...(19): siRNA sense strand
ggaacugcuuucaucuaug

SEQ ID NO: 1348150 - RNA, 19 nt, Homo sapiens
  misc_RNA (1)...(19): siRNA sense strand
gagaaauccuucgaaaugc

SEQ ID NO: 1348151 - RNA, 19 nt, Homo sapiens
  misc_RNA (1)...(19): siRNA sense strand
agaagugauuccuguaaug

SEQ ID NO: 1348152 - RNA, 19 nt, Homo sapiens
  misc_RNA (1)...(19): siRNA sense strand
uggaacugcuuucaucuau

SEQ ID NO: 1348153 - RNA, 19 nt, Homo sapiens
  misc_RNA (1)...(19): siRNA sense strand
uagaguguguguugauaga

SEQ ID NO: 1348154 - RNA, 19 nt, Homo sapiens
  misc_RNA (1)...(19): siRNA sense strand
gcauaaggaaagacaagaa

SEQ ID NO: 1348155 - RNA, 19 nt, Homo sapiens
  misc_RNA (1)...(19): siRNA sense strand
gacagagauugcuuuaagu

SEQ ID NO: 1348156 - RNA, 19 nt, Homo sapiens
  misc_RNA (1)...(19): siRNA sense strand
ggucagaguauuauuccaa

SEQ ID NO: 1348157 - RNA, 19 nt, Homo sapiens
  misc_RNA (1)...(19): siRNA sense strand
cauaaggaaagacaagaaa

SEQ ID NO: 1348158 - RNA, 19 nt, Homo sapiens
  misc_RNA (1)...(19): siRNA sense strand
cagcugucaugaaggcuuu

SEQ ID NO: 1348159 - RNA, 19 nt, Homo sapiens
  misc_RNA (1)...(19): siRNA sense strand
gcagagaguggugcuauag

SEQ ID NO: 1348160 - RNA, 19 nt, Homo sapiens
  misc_RNA (1)...(19): siRNA sense strand
ggacuaucaauuauacuuc

SEQ ID NO: 1348161 - RNA, 19 nt, Homo sapiens
  misc_RNA (1)...(19): siRNA sense strand
agagaguggugcuauagau

SEQ ID NO: 1348162 - RNA, 19 nt, Homo sapiens
  misc_RNA (1)...(19): siRNA sense strand
gcugauacaguacucaaug

SEQ ID NO: 1348163 - RNA, 19 nt, Homo sapiens
  misc_RNA (1)...(19): siRNA sense strand
gaagugauuccuguaaugg

SEQ ID NO: 1348164 - RNA, 19 nt, Homo sapiens
  misc_RNA (1)...(19): siRNA sense strand
gggagugauuauuguuuca

SEQ ID NO: 1348165 - RNA, 19 nt, Homo sapiens
  misc_RNA (1)...(19): siRNA sense strand
gauacaguacucaaugaug

SEQ ID NO: 1348166 - RNA, 19 nt, Homo sapiens
  misc_RNA (1)...(19): siRNA sense strand
ccaagacagagauugcuuu

SEQ ID NO: 1348167 - RNA, 19 nt, Homo sapiens
  misc_RNA (1)...(19): siRNA sense strand
ggaaaggaagaauauggau

SEQ ID NO: 1348168 - RNA, 19 nt, Homo sapiens
  misc_RNA (1)...(19): siRNA sense strand
aguguguguugauagauua

SEQ ID NO: 1348169 - RNA, 19 nt, Homo sapiens
  misc_RNA (1)...(19): siRNA sense strand
cuucauagaguguguguug

SEQ ID NO: 1348170 - RNA, 19 nt, Homo sapiens
  misc_RNA (1)...(19): siRNA sense strand
gacaauauucuugguccua

SEQ ID NO: 1348171 - RNA, 19 nt, Homo sapiens
  misc_RNA (1)...(19): siRNA sense strand
cugauacaguacucaauga

SEQ ID NO: 1348172 - RNA, 19 nt, Homo sapiens
  misc_RNA (1)...(19): siRNA sense strand
gagaguggugcuauagaug

SEQ ID NO: 1348173 - RNA, 19 nt, Homo sapiens
  misc_RNA (1)...(19): siRNA sense strand
aacagguacuucucaguga

SEQ ID NO: 1348174 - RNA, 19 nt, Homo sapiens
  misc_RNA (1)...(19): siRNA sense strand
caauauucuugguccuaga

SEQ ID NO: 1348175 - RNA, 19 nt, Homo sapiens
  misc_RNA (1)...(19): siRNA sense strand
agaaauccuucgaaaugca

SEQ ID NO: 1348176 - RNA, 19 nt, Homo sapiens
  misc_RNA (1)...(19): siRNA sense strand
gaguauuauuccaaugcuu

SEQ ID NO: 1348177 - RNA, 19 nt, Homo sapiens
  misc_RNA (1)...(19): siRNA sense strand
auggagaaauccuucgaaa

SEQ ID NO: 1348178 - RNA, 19 nt, Homo sapiens
  misc_RNA (1)...(19): siRNA sense strand
gucagaguauuauuccaau

SEQ ID NO: 1348179 - RNA, 19 nt, Homo sapiens
  misc_RNA (1)...(19): siRNA sense strand
ugcagagaguggugcuaua

SEQ ID NO: 1348180 - RNA, 19 nt, Homo sapiens
  misc_RNA (1)...(19): siRNA sense strand
gccaaccacacucuaaaug

SEQ ID NO: 1348181 - RNA, 19 nt, Homo sapiens
  misc_RNA (1)...(19): siRNA sense strand
guggugcuauagauguaaa

SEQ ID NO: 1348182 - RNA, 19 nt, Homo sapiens
  misc_RNA (1)...(19): siRNA sense strand
acacauauaauccggaaag

SEQ ID NO: 1348183 - RNA, 19 nt, Homo sapiens
  misc_RNA (1)...(19): siRNA sense strand
guaauggaacugcuuucau

SEQ ID NO: 1348184 - RNA, 19 nt, Homo sapiens
  misc_RNA (1)...(19): siRNA sense strand
gaaggcacagagagaaugg

SEQ ID NO: 1348185 - RNA, 19 nt, Homo sapiens
  misc_RNA (1)...(19): siRNA sense strand
guuucuaccucccacuuca

SEQ ID NO: 1348186 - RNA, 19 nt, Homo sapiens
  misc_RNA (1)...(19): siRNA sense strand
ucagaguauuauuccaaug

SEQ ID NO: 1348187 - RNA, 19 nt, Homo sapiens
  misc_RNA (1)...(19): siRNA sense strand
gugauggagaaauaacuuu

SEQ ID NO: 1348188 - RNA, 19 nt, Homo sapiens
  misc_RNA (1)...(19): siRNA sense strand
guacucaaugaugaugaua

SEQ ID NO: 1348189 - RNA, 19 nt, Homo sapiens
  misc_RNA (1)...(19): siRNA sense strand
aagaaaauguccagaagau

SEQ ID NO: 1348190 - RNA, 19 nt, Homo sapiens
  misc_RNA (1)...(19): siRNA sense strand
ucgcagcacauauggacua

SEQ ID NO: 1348191 - RNA, 19 nt, Homo sapiens
  misc_RNA (1)...(19): siRNA sense strand
aaaagggagugauuauugu

SEQ ID NO: 1348192 - RNA, 19 nt, Homo sapiens
  misc_RNA (1)...(19): siRNA sense strand
uccaaagacagaacaggua

SEQ ID NO: 1348193 - RNA, 19 nt, Homo sapiens
  misc_RNA (1)...(19): siRNA sense strand
ccuagaguaaggcacauuu

SEQ ID NO: 1348194 - RNA, 19 nt, Homo sapiens
  misc_RNA (1)...(19): siRNA sense strand
aguggcaaaucaccuuuau

SEQ ID NO: 1348195 - RNA, 19 nt, Homo sapiens
  misc_RNA (1)...(19): siRNA sense strand
aauuauacuuccacagaca

SEQ ID NO: 1348196 - RNA, 19 nt, Homo sapiens
  misc_RNA (1)...(19): siRNA sense strand
uauucuugguccuagagua

SEQ ID NO: 1348197 - RNA, 19 nt, Homo sapiens
  misc_RNA (1)...(19): siRNA sense strand
ccaaccacacucuaaaugg

SEQ ID NO: 1348198 - RNA, 19 nt, Homo sapiens
  misc_RNA (1)...(19): siRNA sense strand
cggaaaggaagaauaugga

SEQ ID NO: 1348199 - RNA, 19 nt, Homo sapiens
  misc_RNA (1)...(19): siRNA sense strand
ugcuuuaaguggcaaauca

SEQ ID NO: 1348200 - RNA, 19 nt, Homo sapiens
  misc_RNA (1)...(19): siRNA sense strand
uaaguggcaaaucaccuuu

SEQ ID NO: 1348201 - RNA, 19 nt, Homo sapiens
  misc_RNA (1)...(19): siRNA sense strand
aaagggagugauuauuguu

SEQ ID NO: 1348202 - RNA, 19 nt, Homo sapiens
  misc_RNA (1)...(19): siRNA sense strand
cacucuaaauggagaaauc

SEQ ID NO: 1348203 - RNA, 19 nt, Homo sapiens
  misc_RNA (1)...(19): siRNA sense strand
acagagauugcuuuaagug

SEQ ID NO: 1348204 - RNA, 19 nt, Homo sapiens
  misc_RNA (1)...(19): siRNA sense strand
aaagacagaacagguacuu

SEQ ID NO: 1348205 - RNA, 19 nt, Homo sapiens
  misc_RNA (1)...(19): siRNA sense strand
ggcaaaucaccuuuauuag

SEQ ID NO: 1348206 - RNA, 19 nt, Homo sapiens
  misc_RNA (1)...(19): siRNA sense strand
acagguacuucucagugau

SEQ ID NO: 1348207 - RNA, 19 nt, Homo sapiens
  misc_RNA (1)...(19): siRNA sense strand
agggagugauuauuguuuc

SEQ ID NO: 1348208 - RNA, 19 nt, Homo sapiens
  misc_RNA (1)...(19): siRNA sense strand
guuccugaagaaauagaua

SEQ ID NO: 1348209 - RNA, 19 nt, Homo sapiens
  misc_RNA (1)...(19): siRNA sense strand
aagaucagggucagaguau

SEQ ID NO: 1348210 - RNA, 19 nt, Homo sapiens
  misc_RNA (1)...(19): siRNA sense strand
cacauauggacuaucaauu

SEQ ID NO: 1348211 - RNA, 19 nt, Homo sapiens
  misc_RNA (1)...(19): siRNA sense strand
cugaagaaauagauauagc

SEQ ID NO: 1348212 - RNA, 19 nt, Homo sapiens
  misc_RNA (1)...(19): siRNA sense strand
uuagaaggcacagagagaa

SEQ ID NO: 1348213 - RNA, 19 nt, Homo sapiens
  misc_RNA (1)...(19): siRNA sense strand
ggaugcauaaggaaagaca

SEQ ID NO: 1348214 - RNA, 19 nt, Homo sapiens
  misc_RNA (1)...(19): siRNA sense strand
agauauagcugauacagua

SEQ ID NO: 1348215 - RNA, 19 nt, Homo sapiens
  misc_RNA (1)...(19): siRNA sense strand
ggagaaauccuucgaaaug

SEQ ID NO: 1348216 - RNA, 19 nt, Homo sapiens
  misc_RNA (1)...(19): siRNA sense strand
caaaucaccuuuauuagca

SEQ ID NO: 1348217 - RNA, 19 nt, Homo sapiens
  misc_RNA (1)...(19): siRNA sense strand
gaucagggucagaguauua

SEQ ID NO: 1348218 - RNA, 19 nt, Homo sapiens
  misc_RNA (1)...(19): siRNA sense strand
gaaaauguccagaagauua

SEQ ID NO: 1348219 - RNA, 19 nt, Homo sapiens
  misc_RNA (1)...(19): siRNA sense strand
uggcaaaucaccuuuauua

SEQ ID NO: 1348220 - RNA, 19 nt, Homo sapiens
  misc_RNA (1)...(19): siRNA sense strand
agacagagauugcuuuaag

SEQ ID NO: 1348221 - RNA, 19 nt, Homo sapiens
  misc_RNA (1)...(19): siRNA sense strand
gaagaucagggucagagua

SEQ ID NO: 1348222 - RNA, 19 nt, Homo sapiens
  misc_RNA (1)...(19): siRNA sense strand
caaccacacucuaaaugga

SEQ ID NO: 1348223 - RNA, 19 nt, Homo sapiens
  misc_RNA (1)...(19): siRNA sense strand
gcacagagagaauggaaga

SEQ ID NO: 1348224 - RNA, 19 nt, Homo sapiens
  misc_RNA (1)...(19): siRNA sense strand
cagcacauauggacuauca

SEQ ID NO: 1348225 - RNA, 19 nt, Homo sapiens
  misc_RNA (1)...(19): siRNA sense strand
gagaagugauuccuguaau

SEQ ID NO: 1348226 - RNA, 19 nt, Homo sapiens
  misc_RNA (1)...(19): siRNA sense strand
ggagaagugauuccuguaa

SEQ ID NO: 1348227 - RNA, 19 nt, Homo sapiens
  misc_RNA (1)...(19): siRNA sense strand
caagacagagauugcuuua

SEQ ID NO: 1348228 - RNA, 19 nt, Homo sapiens
  misc_RNA (1)...(19): siRNA sense strand
uaauggaacugcuuucauc

SEQ ID NO: 1348229 - RNA, 19 nt, Homo sapiens
  misc_RNA (1)...(19): siRNA sense strand
gaaaagggagugauuauug

SEQ ID NO: 1348230 - RNA, 19 nt, Homo sapiens
  misc_RNA (1)...(19): siRNA sense strand
caguguuccugaagaaaua

SEQ ID NO: 1348231 - RNA, 19 nt, Homo sapiens
  misc_RNA (1)...(19): siRNA sense strand
auacaguacucaaugauga

SEQ ID NO: 1348232 - RNA, 19 nt, Homo sapiens
  misc_RNA (1)...(19): siRNA sense strand
cauagaguguguguugaua

SEQ ID NO: 1348233 - RNA, 19 nt, Homo sapiens
  misc_RNA (1)...(19): siRNA sense strand
cauauaauccggaaaggaa

SEQ ID NO: 1348234 - RNA, 19 nt, Homo sapiens
  misc_RNA (1)...(19): siRNA sense strand
gaguguguguugauagauu

SEQ ID NO: 1348235 - RNA, 19 nt, Homo sapiens
  misc_RNA (1)...(19): siRNA sense strand
gaguggugcuauagaugua

SEQ ID NO: 1348236 - RNA, 19 nt, Homo sapiens
  misc_RNA (1)...(19): siRNA sense strand
gcacauauggacuaucaau

SEQ ID NO: 1348237 - RNA, 19 nt, Homo sapiens
  misc_RNA (1)...(19): siRNA sense strand
gcaaaucaccuuuauuagc

SEQ ID NO: 1348238 - RNA, 19 nt, Homo sapiens
  misc_RNA (1)...(19): siRNA sense strand
ucaauuauacuuccacaga

SEQ ID NO: 1348239 - RNA, 19 nt, Homo sapiens
  misc_RNA (1)...(19): siRNA sense strand
cagagagaauggaagauca

SEQ ID NO: 1348240 - RNA, 19 nt, Homo sapiens
  misc_RNA (1)...(19): siRNA sense strand
ggaacugcuuucaucuaug

SEQ ID NO: 1348241 - RNA, 19 nt, Homo sapiens
  misc_RNA (1)...(19): siRNA sense strand
gagaaauccuucgaaaugc

SEQ ID NO: 1348242 - RNA, 19 nt, Homo sapiens
  misc_RNA (1)...(19): siRNA sense strand
agaagugauuccuguaaug

SEQ ID NO: 1348243 - RNA, 19 nt, Homo sapiens
  misc_RNA (1)...(19): siRNA sense strand
uggaacugcuuucaucuau

SEQ ID NO: 1348244 - RNA, 19 nt, Homo sapiens
  misc_RNA (1)...(19): siRNA sense strand
uagaguguguguugauaga

SEQ ID NO: 1348245 - RNA, 19 nt, Homo sapiens
  misc_RNA (1)...(19): siRNA sense strand
gcauaaggaaagacaagaa

SEQ ID NO: 1348246 - RNA, 19 nt, Homo sapiens
  misc_RNA (1)...(19): siRNA sense strand
gacagagauugcuuuaagu

SEQ ID NO: 1348247 - RNA, 19 nt, Homo sapiens
  misc_RNA (1)...(19): siRNA sense strand
ggucagaguauuauuccaa

SEQ ID NO: 1348248 - RNA, 19 nt, Homo sapiens
  misc_RNA (1)...(19): siRNA sense strand
cauaaggaaagacaagaaa

SEQ ID NO: 1348249 - RNA, 19 nt, Homo sapiens
  misc_RNA (1)...(19): siRNA sense strand
cagcugucaugaaggcuuu

SEQ ID NO: 1348250 - RNA, 19 nt, Homo sapiens
  misc_RNA (1)...(19): siRNA sense strand
gcagagaguggugcuauag

SEQ ID NO: 1348251 - RNA, 19 nt, Homo sapiens
  misc_RNA (1)...(19): siRNA sense strand
ggacuaucaauuauacuuc

SEQ ID NO: 1348252 - RNA, 19 nt, Homo sapiens
  misc_RNA (1)...(19): siRNA sense strand
agagaguggugcuauagau

SEQ ID NO: 1348253 - RNA, 19 nt, Homo sapiens
  misc_RNA (1)...(19): siRNA sense strand
gcugauacaguacucaaug

SEQ ID NO: 1348254 - RNA, 19 nt, Homo sapiens
  misc_RNA (1)...(19): siRNA sense strand
gaagugauuccuguaaugg

SEQ ID NO: 1348255 - RNA, 19 nt, Homo sapiens
  misc_RNA (1)...(19): siRNA sense strand
gggagugauuauuguuuca

SEQ ID NO: 1348256 - RNA, 19 nt, Homo sapiens
  misc_RNA (1)...(19): siRNA sense strand
gauacaguacucaaugaug

SEQ ID NO: 1348257 - RNA, 19 nt, Homo sapiens
  misc_RNA (1)...(19): siRNA sense strand
ccaagacagagauugcuuu

SEQ ID NO: 1348258 - RNA, 19 nt, Homo sapiens
  misc_RNA (1)...(19): siRNA sense strand
ggaaaggaagaauauggau

SEQ ID NO: 1348259 - RNA, 19 nt, Homo sapiens
  misc_RNA (1)...(19): siRNA sense strand
aguguguguugauagauua

SEQ ID NO: 1348260 - RNA, 19 nt, Homo sapiens
  misc_RNA (1)...(19): siRNA sense strand
cuucauagaguguguguug

SEQ ID NO: 1348261 - RNA, 19 nt, Homo sapiens
  misc_RNA (1)...(19): siRNA sense strand
gacaauauucuugguccua

SEQ ID NO: 1348262 - RNA, 19 nt, Homo sapiens
  misc_RNA (1)...(19): siRNA sense strand
cugauacaguacucaauga

SEQ ID NO: 1348263 - RNA, 19 nt, Homo sapiens
  misc_RNA (1)...(19): siRNA sense strand
gagaguggugcuauagaug

SEQ ID NO: 1348264 - RNA, 19 nt, Homo sapiens
  misc_RNA (1)...(19): siRNA sense strand
aacagguacuucucaguga

SEQ ID NO: 1348265 - RNA, 19 nt, Homo sapiens
  misc_RNA (1)...(19): siRNA sense strand
caauauucuugguccuaga

SEQ ID NO: 1348266 - RNA, 19 nt, Homo sapiens
  misc_RNA (1)...(19): siRNA sense strand
agaaauccuucgaaaugca

SEQ ID NO: 1348267 - RNA, 19 nt, Homo sapiens
  misc_RNA (1)...(19): siRNA sense strand
gaguauuauuccaaugcuu

SEQ ID NO: 1348268 - RNA, 19 nt, Homo sapiens
  misc_RNA (1)...(19): siRNA sense strand
auggagaaauccuucgaaa

SEQ ID NO: 1348269 - RNA, 19 nt, Homo sapiens
  misc_RNA (1)...(19): siRNA sense strand
gucagaguauuauuccaau

SEQ ID NO: 1348270 - RNA, 19 nt, Homo sapiens
  misc_RNA (1)...(19): siRNA sense strand
ugcagagaguggugcuaua

SEQ ID NO: 1348271 - RNA, 19 nt, Homo sapiens
  misc_RNA (1)...(19): siRNA sense strand
gccaaccacacucuaaaug

SEQ ID NO: 1348272 - RNA, 19 nt, Homo sapiens
  misc_RNA (1)...(19): siRNA sense strand
guggugcuauagauguaaa

SEQ ID NO: 1348273 - RNA, 19 nt, Homo sapiens
  misc_RNA (1)...(19): siRNA sense strand
acacauauaauccggaaag

SEQ ID NO: 1348274 - RNA, 19 nt, Homo sapiens
  misc_RNA (1)...(19): siRNA sense strand
guaauggaacugcuuucau

SEQ ID NO: 1348275 - RNA, 19 nt, Homo sapiens
  misc_RNA (1)...(19): siRNA sense strand
gaaggcacagagagaaugg

SEQ ID NO: 1348276 - RNA, 19 nt, Homo sapiens
  misc_RNA (1)...(19): siRNA sense strand
guuucuaccucccacuuca

SEQ ID NO: 1348277 - RNA, 19 nt, Homo sapiens
  misc_RNA (1)...(19): siRNA sense strand
ucagaguauuauuccaaug

SEQ ID NO: 1348278 - RNA, 19 nt, Homo sapiens
  misc_RNA (1)...(19): siRNA sense strand
gugauggagaaauaacuuu

SEQ ID NO: 1348279 - RNA, 19 nt, Homo sapiens
  misc_RNA (1)...(19): siRNA sense strand
guacucaaugaugaugaua

SEQ ID NO: 1348280 - RNA, 19 nt, Homo sapiens
  misc_RNA (1)...(19): siRNA sense strand
aagaaaauguccagaagau

SEQ ID NO: 1348281 - RNA, 19 nt, Homo sapiens
  misc_RNA (1)...(19): siRNA sense strand
ucgcagcacauauggacua

SEQ ID NO: 1348282 - RNA, 19 nt, Homo sapiens
  misc_RNA (1)...(19): siRNA sense strand
aaaagggagugauuauugu

SEQ ID NO: 1348283 - RNA, 19 nt, Homo sapiens
  misc_RNA (1)...(19): siRNA sense strand
uccaaagacagaacaggua

SEQ ID NO: 1348284 - RNA, 19 nt, Homo sapiens
  misc_RNA (1)...(19): siRNA sense strand
ccuagaguaaggcacauuu

SEQ ID NO: 1348285 - RNA, 19 nt, Homo sapiens
  misc_RNA (1)...(19): siRNA sense strand
aguggcaaaucaccuuuau

SEQ ID NO: 1348286 - RNA, 19 nt, Homo sapiens
  misc_RNA (1)...(19): siRNA sense strand
aauuauacuuccacagaca

SEQ ID NO: 1348287 - RNA, 19 nt, Homo sapiens
  misc_RNA (1)...(19): siRNA sense strand
uauucuugguccuagagua

SEQ ID NO: 1348288 - RNA, 19 nt, Homo sapiens
  misc_RNA (1)...(19): siRNA sense strand
ccaaccacacucuaaaugg

SEQ ID NO: 1348289 - RNA, 19 nt, Homo sapiens
  misc_RNA (1)...(19): siRNA sense strand
cggaaaggaagaauaugga

SEQ ID NO: 1348290 - RNA, 19 nt, Homo sapiens
  misc_RNA (1)...(19): siRNA sense strand
ugcuuuaaguggcaaauca

SEQ ID NO: 1348291 - RNA, 19 nt, Homo sapiens
  misc_RNA (1)...(19): siRNA sense strand
uaaguggcaaaucaccuuu

SEQ ID NO: 1348292 - RNA, 19 nt, Homo sapiens
  misc_RNA (1)...(19): siRNA sense strand
aaagggagugauuauuguu

SEQ ID NO: 1348293 - RNA, 19 nt, Homo sapiens
  misc_RNA (1)...(19): siRNA sense strand
cacucuaaauggagaaauc

SEQ ID NO: 1348294 - RNA, 19 nt, Homo sapiens
  misc_RNA (1)...(19): siRNA sense strand
acagagauugcuuuaagug

SEQ ID NO: 1348295 - RNA, 19 nt, Homo sapiens
  misc_RNA (1)...(19): siRNA sense strand
aaagacagaacagguacuu

SEQ ID NO: 1348296 - RNA, 19 nt, Homo sapiens
  misc_RNA (1)...(19): siRNA sense strand
ggcaaaucaccuuuauuag

SEQ ID NO: 1348297 - RNA, 19 nt, Homo sapiens
  misc_RNA (1)...(19): siRNA sense strand
acagguacuucucagugau

SEQ ID NO: 1348298 - RNA, 19 nt, Homo sapiens
  misc_RNA (1)...(19): siRNA sense strand
agggagugauuauuguuuc

SEQ ID NO: 1348299 - RNA, 19 nt, Homo sapiens
  misc_RNA (1)...(19): siRNA sense strand
guuccugaagaaauagaua

SEQ ID NO: 1348300 - RNA, 19 nt, Homo sapiens
  misc_RNA (1)...(19): siRNA sense strand
aagaucagggucagaguau

SEQ ID NO: 1348301 - RNA, 19 nt, Homo sapiens
  misc_RNA (1)...(19): siRNA sense strand
cacauauggacuaucaauu

SEQ ID NO: 1348302 - RNA, 19 nt, Homo sapiens
  misc_RNA (1)...(19): siRNA sense strand
cugaagaaauagauauagc

SEQ ID NO: 1348303 - RNA, 19 nt, Homo sapiens
  misc_RNA (1)...(19): siRNA sense strand
uuagaaggcacagagagaa

SEQ ID NO: 1348304 - RNA, 19 nt, Homo sapiens
  misc_RNA (1)...(19): siRNA sense strand
ggaugcauaaggaaagaca

SEQ ID NO: 1348305 - RNA, 19 nt, Homo sapiens
  misc_RNA (1)...(19): siRNA sense strand
gaagagcgauuauauguua

SEQ ID NO: 1348306 - RNA, 19 nt, Homo sapiens
  misc_RNA (1)...(19): siRNA sense strand
gaauauggcugaccuaaua

SEQ ID NO: 1348307 - RNA, 19 nt, Homo sapiens
  misc_RNA (1)...(19): siRNA sense strand
gaaguuggguugucuagaa

SEQ ID NO: 1348308 - RNA, 19 nt, Homo sapiens
  misc_RNA (1)...(19): siRNA sense strand
cuacaaagcuuccaaagga

SEQ ID NO: 1348309 - RNA, 19 nt, Homo sapiens
  misc_RNA (1)...(19): siRNA sense strand
gaagaacaaugauguaauc

SEQ ID NO: 1348310 - RNA, 19 nt, Homo sapiens
  misc_RNA (1)...(19): siRNA sense strand
ggaaauugcuuugaaguug

SEQ ID NO: 1348311 - RNA, 19 nt, Homo sapiens
  misc_RNA (1)...(19): siRNA sense strand
gaacuuggacgauguauug

SEQ ID NO: 1348312 - RNA, 19 nt, Homo sapiens
  misc_RNA (1)...(19): siRNA sense strand
gaagauaagccaacuuuga

SEQ ID NO: 1348313 - RNA, 19 nt, Homo sapiens
  misc_RNA (1)...(19): siRNA sense strand
gguucaagcuggauuauuu

SEQ ID NO: 1348314 - RNA, 19 nt, Homo sapiens
  misc_RNA (1)...(19): siRNA sense strand
gaaggaaucaguuaccuaa

SEQ ID NO: 1348315 - RNA, 19 nt, Homo sapiens
  misc_RNA (1)...(19): siRNA sense strand
gaaauacaguuuggaucua

SEQ ID NO: 1348316 - RNA, 19 nt, Homo sapiens
  misc_RNA (1)...(19): siRNA sense strand
ggaggacucuacaguauug

SEQ ID NO: 1348317 - RNA, 19 nt, Homo sapiens
  misc_RNA (1)...(19): siRNA sense strand
agagauagcugaucaagug

SEQ ID NO: 1348318 - RNA, 19 nt, Homo sapiens
  misc_RNA (1)...(19): siRNA sense strand
guacagcucuugcauaucu

SEQ ID NO: 1348319 - RNA, 19 nt, Homo sapiens
  misc_RNA (1)...(19): siRNA sense strand
ggacauugcugcucggaau

SEQ ID NO: 1348320 - RNA, 19 nt, Homo sapiens
  misc_RNA (1)...(19): siRNA sense strand
caucagaccucagaaagaa

SEQ ID NO: 1348321 - RNA, 19 nt, Homo sapiens
  misc_RNA (1)...(19): siRNA sense strand
gaaaagaagucuaacuaug

SEQ ID NO: 1348322 - RNA, 19 nt, Homo sapiens
  misc_RNA (1)...(19): siRNA sense strand
caucaaggcauuuauauga

SEQ ID NO: 1348323 - RNA, 19 nt, Homo sapiens
  misc_RNA (1)...(19): siRNA sense strand
ccacacaucuugcugacuu

SEQ ID NO: 1348324 - RNA, 19 nt, Homo sapiens
  misc_RNA (1)...(19): siRNA sense strand
caagaagccuuaacaaugc

SEQ ID NO: 1348325 - RNA, 19 nt, Homo sapiens
  misc_RNA (1)...(19): siRNA sense strand
gaaccucgcagucauuuau

SEQ ID NO: 1348326 - RNA, 19 nt, Homo sapiens
  misc_RNA (1)...(19): siRNA sense strand
ucaagaagccuuaacaaug

SEQ ID NO: 1348327 - RNA, 19 nt, Homo sapiens
  misc_RNA (1)...(19): siRNA sense strand
guacaucaaggcauuuaua

SEQ ID NO: 1348328 - RNA, 19 nt, Homo sapiens
  misc_RNA (1)...(19): siRNA sense strand
gauaaggaaugcuucaagu

SEQ ID NO: 1348329 - RNA, 19 nt, Homo sapiens
  misc_RNA (1)...(19): siRNA sense strand
cuacagauuugauaaggaa

SEQ ID NO: 1348330 - RNA, 19 nt, Homo sapiens
  misc_RNA (1)...(19): siRNA sense strand
gauguaaucggucgaauug

SEQ ID NO: 1348331 - RNA, 19 nt, Homo sapiens
  misc_RNA (1)...(19): siRNA sense strand
caacgagggugucaagcuu

SEQ ID NO: 1348332 - RNA, 19 nt, Homo sapiens
  misc_RNA (1)...(19): siRNA sense strand
guggaaauaugaauugaga

SEQ ID NO: 1348333 - RNA, 19 nt, Homo sapiens
  misc_RNA (1)...(19): siRNA sense strand
ccuaagaguuuacuggauu

SEQ ID NO: 1348334 - RNA, 19 nt, Homo sapiens
  misc_RNA (1)...(19): siRNA sense strand
gcgauuauauguuagagau

SEQ ID NO: 1348335 - RNA, 19 nt, Homo sapiens
  misc_RNA (1)...(19): siRNA sense strand
gaacgggcuuugccaucaa

SEQ ID NO: 1348336 - RNA, 19 nt, Homo sapiens
  misc_RNA (1)...(19): siRNA sense strand
uaacaaugcgucaguuuga

SEQ ID NO: 1348337 - RNA, 19 nt, Homo sapiens
  misc_RNA (1)...(19): siRNA sense strand
gggcaucauucagaagaua

SEQ ID NO: 1348338 - RNA, 19 nt, Homo sapiens
  misc_RNA (1)...(19): siRNA sense strand
uaguacagcucuugcauau

SEQ ID NO: 1348339 - RNA, 19 nt, Homo sapiens
  misc_RNA (1)...(19): siRNA sense strand
cagaagaaggaaucaguua

SEQ ID NO: 1348340 - RNA, 19 nt, Homo sapiens
  misc_RNA (1)...(19): siRNA sense strand
aaaggaaugcuacaacuaa

SEQ ID NO: 1348341 - RNA, 19 nt, Homo sapiens
  misc_RNA (1)...(19): siRNA sense strand
gauaagccaacuuugaauu

SEQ ID NO: 1348342 - RNA, 19 nt, Homo sapiens
  misc_RNA (1)...(19): siRNA sense strand
ucugaaaccugaugugaga

SEQ ID NO: 1348343 - RNA, 19 nt, Homo sapiens
  misc_RNA (1)...(19): siRNA sense strand
guggaggacucuacaguau

SEQ ID NO: 1348344 - RNA, 19 nt, Homo sapiens
  misc_RNA (1)...(19): siRNA sense strand
agagaaggcucagcaagaa

SEQ ID NO: 1348345 - RNA, 19 nt, Homo sapiens
  misc_RNA (1)...(19): siRNA sense strand
ggaaauacaguuuggaucu

SEQ ID NO: 1348346 - RNA, 19 nt, Homo sapiens
  misc_RNA (1)...(19): siRNA sense strand
guaaggaaauacaguuugg

SEQ ID NO: 1348347 - RNA, 19 nt, Homo sapiens
  misc_RNA (1)...(19): siRNA sense strand
gaagucuaacuaugaagua

SEQ ID NO: 1348348 - RNA, 19 nt, Homo sapiens
  misc_RNA (1)...(19): siRNA sense strand
ccagaggaguggaaauaug

SEQ ID NO: 1348349 - RNA, 19 nt, Homo sapiens
  misc_RNA (1)...(19): siRNA sense strand
ggacauuauuggccacugu

SEQ ID NO: 1348350 - RNA, 19 nt, Homo sapiens
  misc_RNA (1)...(19): siRNA sense strand
gcaaugcacuagaaaagaa

SEQ ID NO: 1348351 - RNA, 19 nt, Homo sapiens
  misc_RNA (1)...(19): siRNA sense strand
gcaauggagcgaguauuaa

SEQ ID NO: 1348352 - RNA, 19 nt, Homo sapiens
  misc_RNA (1)...(19): siRNA sense strand
gcacagaagcuauugaacu

SEQ ID NO: 1348353 - RNA, 19 nt, Homo sapiens
  misc_RNA (1)...(19): siRNA sense strand
uguaaucggucgaauugaa

SEQ ID NO: 1348354 - RNA, 19 nt, Homo sapiens
  misc_RNA (1)...(19): siRNA sense strand
guuuggaucuagcaucuuu

SEQ ID NO: 1348355 - RNA, 19 nt, Homo sapiens
  misc_RNA (1)...(19): siRNA sense strand
ggaguggaaauaugaauug

SEQ ID NO: 1348356 - RNA, 19 nt, Homo sapiens
  misc_RNA (1)...(19): siRNA sense strand
ugucagaaacagaugauua

SEQ ID NO: 1348357 - RNA, 19 nt, Homo sapiens
  misc_RNA (1)...(19): siRNA sense strand
ugggugagcucaucaacaa

SEQ ID NO: 1348358 - RNA, 19 nt, Homo sapiens
  misc_RNA (1)...(19): siRNA sense strand
gugaagagcgauuauaugu

SEQ ID NO: 1348359 - RNA, 19 nt, Homo sapiens
  misc_RNA (1)...(19): siRNA sense strand
gcuccagagucaaucaauu

SEQ ID NO: 1348360 - RNA, 19 nt, Homo sapiens
  misc_RNA (1)...(19): siRNA sense strand
aaccagggauuaugagauu

SEQ ID NO: 1348361 - RNA, 19 nt, Homo sapiens
  misc_RNA (1)...(19): siRNA sense strand
gaaauacggcgaucauacu

SEQ ID NO: 1348362 - RNA, 19 nt, Homo sapiens
  misc_RNA (1)...(19): siRNA sense strand
gauaguggacagucacaaa

SEQ ID NO: 1348363 - RNA, 19 nt, Homo sapiens
  misc_RNA (1)...(19): siRNA sense strand
uauaucagccuguggguaa

SEQ ID NO: 1348364 - RNA, 19 nt, Homo sapiens
  misc_RNA (1)...(19): siRNA sense strand
gcagucauuuaucaucaga

SEQ ID NO: 1348365 - RNA, 19 nt, Homo sapiens
  misc_RNA (1)...(19): siRNA sense strand
caagcuggauuauuucagu

SEQ ID NO: 1348366 - RNA, 19 nt, Homo sapiens
  misc_RNA (1)...(19): siRNA sense strand
caauuugccaaccuuaaua

SEQ ID NO: 1348367 - RNA, 19 nt, Homo sapiens
  misc_RNA (1)...(19): siRNA sense strand
caauggagcgaguauuaaa

SEQ ID NO: 1348368 - RNA, 19 nt, Homo sapiens
  misc_RNA (1)...(19): siRNA sense strand
guuggguugucuagaaaua

SEQ ID NO: 1348369 - RNA, 19 nt, Homo sapiens
  misc_RNA (1)...(19): siRNA sense strand
gcaaaccauucaguauuca

SEQ ID NO: 1348370 - RNA, 19 nt, Homo sapiens
  misc_RNA (1)...(19): siRNA sense strand
ugaaagcugucaucgagau

SEQ ID NO: 1348371 - RNA, 19 nt, Homo sapiens
  misc_RNA (1)...(19): siRNA sense strand
uaccucagcuagugacgua

SEQ ID NO: 1348372 - RNA, 19 nt, Homo sapiens
  misc_RNA (1)...(19): siRNA sense strand
acaccaaauucgaguacua

SEQ ID NO: 1348373 - RNA, 19 nt, Homo sapiens
  misc_RNA (1)...(19): siRNA sense strand
augcugagauuauagauga

SEQ ID NO: 1348374 - RNA, 19 nt, Homo sapiens
  misc_RNA (1)...(19): siRNA sense strand
uaagaaaacugauccaaca

SEQ ID NO: 1348375 - RNA, 19 nt, Homo sapiens
  misc_RNA (1)...(19): siRNA sense strand
gagaauauggcugaccuaa

SEQ ID NO: 1348376 - RNA, 19 nt, Homo sapiens
  misc_RNA (1)...(19): siRNA sense strand
gauccugucuccagucuac

SEQ ID NO: 1348377 - RNA, 19 nt, Homo sapiens
  misc_RNA (1)...(19): siRNA sense strand
caaccuuaauagagaagaa

SEQ ID NO: 1348378 - RNA, 19 nt, Homo sapiens
  misc_RNA (1)...(19): siRNA sense strand
aaacuuacucgaugucauu

SEQ ID NO: 1348379 - RNA, 19 nt, Homo sapiens
  misc_RNA (1)...(19): siRNA sense strand
agauugagauggcacagaa

SEQ ID NO: 1348380 - RNA, 19 nt, Homo sapiens
  misc_RNA (1)...(19): siRNA sense strand
gauaagguguacgagaaug

SEQ ID NO: 1348381 - RNA, 19 nt, Homo sapiens
  misc_RNA (1)...(19): siRNA sense strand
guucugguguccucaaaug

SEQ ID NO: 1348382 - RNA, 19 nt, Homo sapiens
  misc_RNA (1)...(19): siRNA sense strand
uagcaucuuugauccugua

SEQ ID NO: 1348383 - RNA, 19 nt, Homo sapiens
  misc_RNA (1)...(19): siRNA sense strand
ggacacacgccgucucugu

SEQ ID NO: 1348384 - RNA, 19 nt, Homo sapiens
  misc_RNA (1)...(19): siRNA sense strand
gugcaaaccauucaguauu

SEQ ID NO: 1348385 - RNA, 19 nt, Homo sapiens
  misc_RNA (1)...(19): siRNA sense strand
auuaggagacuuuggauua

SEQ ID NO: 1348386 - RNA, 19 nt, Homo sapiens
  misc_RNA (1)...(19): siRNA sense strand
cagaggaguggaaauauga

SEQ ID NO: 1348387 - RNA, 19 nt, Homo sapiens
  misc_RNA (1)...(19): siRNA sense strand
caaguaaggaaauacaguu

SEQ ID NO: 1348388 - RNA, 19 nt, Homo sapiens
  misc_RNA (1)...(19): siRNA sense strand
ggacagcgugagagagaaa

SEQ ID NO: 1348389 - RNA, 19 nt, Homo sapiens
  misc_RNA (1)...(19): siRNA sense strand
gaguggaaauaugaauuga

SEQ ID NO: 1348390 - RNA, 19 nt, Homo sapiens
  misc_RNA (1)...(19): siRNA sense strand
ugaccagccuccagcaaga

SEQ ID NO: 1348391 - RNA, 19 nt, Homo sapiens
  misc_RNA (1)...(19): siRNA sense strand
cacagaagcuauugaacuc

SEQ ID NO: 1348392 - RNA, 19 nt, Homo sapiens
  misc_RNA (1)...(19): siRNA sense strand
gauuaccaaugccuccaaa

SEQ ID NO: 1348393 - RNA, 19 nt, Homo sapiens
  misc_RNA (1)...(19): siRNA sense strand
gaagcugauuggagucauc

SEQ ID NO: 1348394 - RNA, 19 nt, Homo sapiens
  misc_RNA (1)...(19): siRNA sense strand
gaauggaaccucgcaguca

SEQ ID NO: 1348395 - RNA, 19 nt, Homo sapiens
  misc_RNA (1)...(19): siRNA sense strand
gcaccaucccuaaccauug

SEQ ID NO: 1348396 - RNA, 19 nt, Homo sapiens
  misc_RNA (1)...(19): siRNA sense strand
caccagaggaguggaaaua

SEQ ID NO: 1348397 - RNA, 19 nt, Homo sapiens
  misc_RNA (1)...(19): siRNA sense strand
gauggaagagcgucuaauc

SEQ ID NO: 1348398 - RNA, 19 nt, Homo sapiens
  misc_RNA (1)...(19): siRNA sense strand
guaaucggucgaauugaaa

SEQ ID NO: 1348399 - RNA, 19 nt, Homo sapiens
  misc_RNA (1)...(19): siRNA sense strand
ugcaauggagcgaguauua

SEQ ID NO: 1348400 - RNA, 19 nt, Homo sapiens
  misc_RNA (1)...(19): siRNA sense strand
gaaaaggaaugcuacaacu

SEQ ID NO: 1348401 - RNA, 19 nt, Homo sapiens
  misc_RNA (1)...(19): siRNA sense strand
uaagccaacuuugaauuuc

SEQ ID NO: 1348402 - RNA, 19 nt, Homo sapiens
  misc_RNA (1)...(19): siRNA sense strand
aagauaagccaacuuugaa

SEQ ID NO: 1348403 - RNA, 19 nt, Homo sapiens
  misc_RNA (1)...(19): siRNA sense strand
agaaacagaugauuaugcu

SEQ ID NO: 1348404 - RNA, 19 nt, Homo sapiens
  misc_RNA (1)...(19): siRNA sense strand
uaaggaaugcuucaagugu

SEQ ID NO: 1348405 - RNA, 19 nt, Homo sapiens
  misc_RNA (1)...(19): siRNA sense strand
gaagagcgauuauauguua

SEQ ID NO: 1348406 - RNA, 19 nt, Homo sapiens
  misc_RNA (1)...(19): siRNA sense strand
gaauauggcugaccuaaua

SEQ ID NO: 1348407 - RNA, 19 nt, Homo sapiens
  misc_RNA (1)...(19): siRNA sense strand
gaaguuggguugucuagaa

SEQ ID NO: 1348408 - RNA, 19 nt, Homo sapiens
  misc_RNA (1)...(19): siRNA sense strand
cuacaaagcuuccaaagga

SEQ ID NO: 1348409 - RNA, 19 nt, Homo sapiens
  misc_RNA (1)...(19): siRNA sense strand
gaagaacaaugauguaauc

SEQ ID NO: 1348410 - RNA, 19 nt, Homo sapiens
  misc_RNA (1)...(19): siRNA sense strand
ggaaauugcuuugaaguug

SEQ ID NO: 1348411 - RNA, 19 nt, Homo sapiens
  misc_RNA (1)...(19): siRNA sense strand
gaacuuggacgauguauug

SEQ ID NO: 1348412 - RNA, 19 nt, Homo sapiens
  misc_RNA (1)...(19): siRNA sense strand
gaagauaagccaacuuuga

SEQ ID NO: 1348413 - RNA, 19 nt, Homo sapiens
  misc_RNA (1)...(19): siRNA sense strand
gguucaagcuggauuauuu

SEQ ID NO: 1348414 - RNA, 19 nt, Homo sapiens
  misc_RNA (1)...(19): siRNA sense strand
gaaggaaucaguuaccuaa

SEQ ID NO: 1348415 - RNA, 19 nt, Homo sapiens
  misc_RNA (1)...(19): siRNA sense strand
gaaauacaguuuggaucua

SEQ ID NO: 1348416 - RNA, 19 nt, Homo sapiens
  misc_RNA (1)...(19): siRNA sense strand
ggaggacucuacaguauug

SEQ ID NO: 1348417 - RNA, 19 nt, Homo sapiens
  misc_RNA (1)...(19): siRNA sense strand
agagauagcugaucaagug

SEQ ID NO: 1348418 - RNA, 19 nt, Homo sapiens
  misc_RNA (1)...(19): siRNA sense strand
guacagcucuugcauaucu

SEQ ID NO: 1348419 - RNA, 19 nt, Homo sapiens
  misc_RNA (1)...(19): siRNA sense strand
ggacauugcugcucggaau

SEQ ID NO: 1348420 - RNA, 19 nt, Homo sapiens
  misc_RNA (1)...(19): siRNA sense strand
caucagaccucagaaagaa

SEQ ID NO: 1348421 - RNA, 19 nt, Homo sapiens
  misc_RNA (1)...(19): siRNA sense strand
gaaaagaagucuaacuaug

SEQ ID NO: 1348422 - RNA, 19 nt, Homo sapiens
  misc_RNA (1)...(19): siRNA sense strand
caucaaggcauuuauauga

SEQ ID NO: 1348423 - RNA, 19 nt, Homo sapiens
  misc_RNA (1)...(19): siRNA sense strand
ccacacaucuugcugacuu

SEQ ID NO: 1348424 - RNA, 19 nt, Homo sapiens
  misc_RNA (1)...(19): siRNA sense strand
caagaagccuuaacaaugc

SEQ ID NO: 1348425 - RNA, 19 nt, Homo sapiens
  misc_RNA (1)...(19): siRNA sense strand
gaaccucgcagucauuuau

SEQ ID NO: 1348426 - RNA, 19 nt, Homo sapiens
  misc_RNA (1)...(19): siRNA sense strand
ucaagaagccuuaacaaug

SEQ ID NO: 1348427 - RNA, 19 nt, Homo sapiens
  misc_RNA (1)...(19): siRNA sense strand
guacaucaaggcauuuaua

SEQ ID NO: 1348428 - RNA, 19 nt, Homo sapiens
  misc_RNA (1)...(19): siRNA sense strand
gauaaggaaugcuucaagu

SEQ ID NO: 1348429 - RNA, 19 nt, Homo sapiens
  misc_RNA (1)...(19): siRNA sense strand
cuacagauuugauaaggaa

SEQ ID NO: 1348430 - RNA, 19 nt, Homo sapiens
  misc_RNA (1)...(19): siRNA sense strand
gauguaaucggucgaauug

SEQ ID NO: 1348431 - RNA, 19 nt, Homo sapiens
  misc_RNA (1)...(19): siRNA sense strand
caacgagggugucaagcuu

SEQ ID NO: 1348432 - RNA, 19 nt, Homo sapiens
  misc_RNA (1)...(19): siRNA sense strand
guggaaauaugaauugaga

SEQ ID NO: 1348433 - RNA, 19 nt, Homo sapiens
  misc_RNA (1)...(19): siRNA sense strand
ccuaagaguuuacuggauu

SEQ ID NO: 1348434 - RNA, 19 nt, Homo sapiens
  misc_RNA (1)...(19): siRNA sense strand
gcgauuauauguuagagau

SEQ ID NO: 1348435 - RNA, 19 nt, Homo sapiens
  misc_RNA (1)...(19): siRNA sense strand
gaacgggcuuugccaucaa

SEQ ID NO: 1348436 - RNA, 19 nt, Homo sapiens
  misc_RNA (1)...(19): siRNA sense strand
uaacaaugcgucaguuuga

SEQ ID NO: 1348437 - RNA, 19 nt, Homo sapiens
  misc_RNA (1)...(19): siRNA sense strand
gggcaucauucagaagaua

SEQ ID NO: 1348438 - RNA, 19 nt, Homo sapiens
  misc_RNA (1)...(19): siRNA sense strand
uaguacagcucuugcauau

SEQ ID NO: 1348439 - RNA, 19 nt, Homo sapiens
  misc_RNA (1)...(19): siRNA sense strand
cagaagaaggaaucaguua

SEQ ID NO: 1348440 - RNA, 19 nt, Homo sapiens
  misc_RNA (1)...(19): siRNA sense strand
aaaggaaugcuacaacuaa

SEQ ID NO: 1348441 - RNA, 19 nt, Homo sapiens
  misc_RNA (1)...(19): siRNA sense strand
gauaagccaacuuugaauu

SEQ ID NO: 1348442 - RNA, 19 nt, Homo sapiens
  misc_RNA (1)...(19): siRNA sense strand
ucugaaaccugaugugaga

SEQ ID NO: 1348443 - RNA, 19 nt, Homo sapiens
  misc_RNA (1)...(19): siRNA sense strand
guggaggacucuacaguau

SEQ ID NO: 1348444 - RNA, 19 nt, Homo sapiens
  misc_RNA (1)...(19): siRNA sense strand
agagaaggcucagcaagaa

SEQ ID NO: 1348445 - RNA, 19 nt, Homo sapiens
  misc_RNA (1)...(19): siRNA sense strand
ggaaauacaguuuggaucu

SEQ ID NO: 1348446 - RNA, 19 nt, Homo sapiens
  misc_RNA (1)...(19): siRNA sense strand
guaaggaaauacaguuugg

SEQ ID NO: 1348447 - RNA, 19 nt, Homo sapiens
  misc_RNA (1)...(19): siRNA sense strand
gaagucuaacuaugaagua

SEQ ID NO: 1348448 - RNA, 19 nt, Homo sapiens
  misc_RNA (1)...(19): siRNA sense strand
ccagaggaguggaaauaug

SEQ ID NO: 1348449 - RNA, 19 nt, Homo sapiens
  misc_RNA (1)...(19): siRNA sense strand
ggacauuauuggccacugu

SEQ ID NO: 1348450 - RNA, 19 nt, Homo sapiens
  misc_RNA (1)...(19): siRNA sense strand
gcaaugcacuagaaaagaa

SEQ ID NO: 1348451 - RNA, 19 nt, Homo sapiens
  misc_RNA (1)...(19): siRNA sense strand
ggaguggaaauaugaauug

SEQ ID NO: 1348452 - RNA, 19 nt, Homo sapiens
  misc_RNA (1)...(19): siRNA sense strand
gcacagaagcuauugaacu

SEQ ID NO: 1348453 - RNA, 19 nt, Homo sapiens
  misc_RNA (1)...(19): siRNA sense strand
uguaaucggucgaauugaa

SEQ ID NO: 1348454 - RNA, 19 nt, Homo sapiens
  misc_RNA (1)...(19): siRNA sense strand
gcaauggagcgaguauuaa

SEQ ID NO: 1348455 - RNA, 19 nt, Homo sapiens
  misc_RNA (1)...(19): siRNA sense strand
guuuggaucuagcaucuuu

SEQ ID NO: 1348456 - RNA, 19 nt, Homo sapiens
  misc_RNA (1)...(19): siRNA sense strand
ugucagaaacagaugauua

SEQ ID NO: 1348457 - RNA, 19 nt, Homo sapiens
  misc_RNA (1)...(19): siRNA sense strand
ugggugagcucaucaacaa

SEQ ID NO: 1348458 - RNA, 19 nt, Homo sapiens
  misc_RNA (1)...(19): siRNA sense strand
gugaagagcgauuauaugu

SEQ ID NO: 1348459 - RNA, 19 nt, Homo sapiens
  misc_RNA (1)...(19): siRNA sense strand
gcuccagagucaaucaauu

SEQ ID NO: 1348460 - RNA, 19 nt, Homo sapiens
  misc_RNA (1)...(19): siRNA sense strand
aaccagggauuaugagauu

SEQ ID NO: 1348461 - RNA, 19 nt, Homo sapiens
  misc_RNA (1)...(19): siRNA sense strand
gaaauacggcgaucauacu

SEQ ID NO: 1348462 - RNA, 19 nt, Homo sapiens
  misc_RNA (1)...(19): siRNA sense strand
gauaguggacagucacaaa

SEQ ID NO: 1348463 - RNA, 19 nt, Homo sapiens
  misc_RNA (1)...(19): siRNA sense strand
uauaucagccuguggguaa

SEQ ID NO: 1348464 - RNA, 19 nt, Homo sapiens
  misc_RNA (1)...(19): siRNA sense strand
caauggagcgaguauuaaa

SEQ ID NO: 1348465 - RNA, 19 nt, Homo sapiens
  misc_RNA (1)...(19): siRNA sense strand
gcagucauuuaucaucaga

SEQ ID NO: 1348466 - RNA, 19 nt, Homo sapiens
  misc_RNA (1)...(19): siRNA sense strand
caagcuggauuauuucagu

SEQ ID NO: 1348467 - RNA, 19 nt, Homo sapiens
  misc_RNA (1)...(19): siRNA sense strand
caauuugccaaccuuaaua

SEQ ID NO: 1348468 - RNA, 19 nt, Homo sapiens
  misc_RNA (1)...(19): siRNA sense strand
guuggguugucuagaaaua

SEQ ID NO: 1348469 - RNA, 19 nt, Homo sapiens
  misc_RNA (1)...(19): siRNA sense strand
gcaaaccauucaguauuca

SEQ ID NO: 1348470 - RNA, 19 nt, Homo sapiens
  misc_RNA (1)...(19): siRNA sense strand
ugaaagcugucaucgagau

SEQ ID NO: 1348471 - RNA, 19 nt, Homo sapiens
  misc_RNA (1)...(19): siRNA sense strand
uaccucagcuagugacgua

SEQ ID NO: 1348472 - RNA, 19 nt, Homo sapiens
  misc_RNA (1)...(19): siRNA sense strand
acaccaaauucgaguacua

SEQ ID NO: 1348473 - RNA, 19 nt, Homo sapiens
  misc_RNA (1)...(19): siRNA sense strand
augcugagauuauagauga

SEQ ID NO: 1348474 - RNA, 19 nt, Homo sapiens
  misc_RNA (1)...(19): siRNA sense strand
uaagaaaacugauccaaca

SEQ ID NO: 1348475 - RNA, 19 nt, Homo sapiens
  misc_RNA (1)...(19): siRNA sense strand
gagaauauggcugaccuaa

SEQ ID NO: 1348476 - RNA, 19 nt, Homo sapiens
  misc_RNA (1)...(19): siRNA sense strand
gauccugucuccagucuac

SEQ ID NO: 1348477 - RNA, 19 nt, Homo sapiens
  misc_RNA (1)...(19): siRNA sense strand
caaccuuaauagagaagaa

SEQ ID NO: 1348478 - RNA, 19 nt, Homo sapiens
  misc_RNA (1)...(19): siRNA sense strand
aaacuuacucgaugucauu

SEQ ID NO: 1348479 - RNA, 19 nt, Homo sapiens
  misc_RNA (1)...(19): siRNA sense strand
agauugagauggcacagaa

SEQ ID NO: 1348480 - RNA, 19 nt, Homo sapiens
  misc_RNA (1)...(19): siRNA sense strand
gauaagguguacgagaaug

SEQ ID NO: 1348481 - RNA, 19 nt, Homo sapiens
  misc_RNA (1)...(19): siRNA sense strand
guucugguguccucaaaug

SEQ ID NO: 1348482 - RNA, 19 nt, Homo sapiens
  misc_RNA (1)...(19): siRNA sense strand
uagcaucuuugauccugua

SEQ ID NO: 1348483 - RNA, 19 nt, Homo sapiens
  misc_RNA (1)...(19): siRNA sense strand
ggacacacgccgucucugu

SEQ ID NO: 1348484 - RNA, 19 nt, Homo sapiens
  misc_RNA (1)...(19): siRNA sense strand
gugcaaaccauucaguauu

SEQ ID NO: 1348485 - RNA, 19 nt, Homo sapiens
  misc_RNA (1)...(19): siRNA sense strand
auuaggagacuuuggauua

SEQ ID NO: 1348486 - RNA, 19 nt, Homo sapiens
  misc_RNA (1)...(19): siRNA sense strand
cagaggaguggaaauauga

SEQ ID NO: 1348487 - RNA, 19 nt, Homo sapiens
  misc_RNA (1)...(19): siRNA sense strand
caaguaaggaaauacaguu

SEQ ID NO: 1348488 - RNA, 19 nt, Homo sapiens
  misc_RNA (1)...(19): siRNA sense strand
ggacagcgugagagagaaa

SEQ ID NO: 1348489 - RNA, 19 nt, Homo sapiens
  misc_RNA (1)...(19): siRNA sense strand
gaguggaaauaugaauuga

SEQ ID NO: 1348490 - RNA, 19 nt, Homo sapiens
  misc_RNA (1)...(19): siRNA sense strand
ugaccagccuccagcaaga

SEQ ID NO: 1348491 - RNA, 19 nt, Homo sapiens
  misc_RNA (1)...(19): siRNA sense strand
cacagaagcuauugaacuc

SEQ ID NO: 1348492 - RNA, 19 nt, Homo sapiens
  misc_RNA (1)...(19): siRNA sense strand
gauuaccaaugccuccaaa

SEQ ID NO: 1348493 - RNA, 19 nt, Homo sapiens
  misc_RNA (1)...(19): siRNA sense strand
gaagcugauuggagucauc

SEQ ID NO: 1348494 - RNA, 19 nt, Homo sapiens
  misc_RNA (1)...(19): siRNA sense strand
gaauggaaccucgcaguca

SEQ ID NO: 1348495 - RNA, 19 nt, Homo sapiens
  misc_RNA (1)...(19): siRNA sense strand
gcaccaucccuaaccauug

SEQ ID NO: 1348496 - RNA, 19 nt, Homo sapiens
  misc_RNA (1)...(19): siRNA sense strand
caccagaggaguggaaaua

SEQ ID NO: 1348497 - RNA, 19 nt, Homo sapiens
  misc_RNA (1)...(19): siRNA sense strand
ugcaauggagcgaguauua

SEQ ID NO: 1348498 - RNA, 19 nt, Homo sapiens
  misc_RNA (1)...(19): siRNA sense strand
gauggaagagcgucuaauc

SEQ ID NO: 1348499 - RNA, 19 nt, Homo sapiens
  misc_RNA (1)...(19): siRNA sense strand
guaaucggucgaauugaaa

SEQ ID NO: 1348500 - RNA, 19 nt, Homo sapiens
  misc_RNA (1)...(19): siRNA sense strand
gaaaaggaaugcuacaacu

SEQ ID NO: 1348501 - RNA, 19 nt, Homo sapiens
  misc_RNA (1)...(19): siRNA sense strand
uaagccaacuuugaauuuc

SEQ ID NO: 1348502 - RNA, 19 nt, Homo sapiens
  misc_RNA (1)...(19): siRNA sense strand
aagauaagccaacuuugaa

SEQ ID NO: 1348503 - RNA, 19 nt, Homo sapiens
  misc_RNA (1)...(19): siRNA sense strand
agaaacagaugauuaugcu

SEQ ID NO: 1348504 - RNA, 19 nt, Homo sapiens
  misc_RNA (1)...(19): siRNA sense strand
uaaggaaugcuucaagugu

SEQ ID NO: 1348505 - RNA, 19 nt, Homo sapiens
  misc_RNA (1)...(19): siRNA sense strand
gcaaagaacaucagaacuu

SEQ ID NO: 1348506 - RNA, 19 nt, Homo sapiens
  misc_RNA (1)...(19): siRNA sense strand
caaagaacaucagaacuuc

SEQ ID NO: 1348507 - RNA, 19 nt, Homo sapiens
  misc_RNA (1)...(19): siRNA sense strand
gcagcucucugucggauga

SEQ ID NO: 1348508 - RNA, 19 nt, Homo sapiens
  misc_RNA (1)...(19): siRNA sense strand
guccacagaugaccucuuu

SEQ ID NO: 1348509 - RNA, 19 nt, Homo sapiens
  misc_RNA (1)...(19): siRNA sense strand
gagauugccucuacuugca

SEQ ID NO: 1348510 - RNA, 19 nt, Homo sapiens
  misc_RNA (1)...(19): siRNA sense strand
ccacccggcucuucacuga

SEQ ID NO: 1348511 - RNA, 19 nt, Homo sapiens
  misc_RNA (1)...(19): siRNA sense strand
gcaacgacauugugaccau

SEQ ID NO: 1348512 - RNA, 19 nt, Homo sapiens
  misc_RNA (1)...(19): siRNA sense strand
ggacagcccaucccagaga

SEQ ID NO: 1348513 - RNA, 19 nt, Homo sapiens
  misc_RNA (1)...(19): siRNA sense strand
gcuugagccucgaugguuu

SEQ ID NO: 1348514 - RNA, 19 nt, Homo sapiens
  misc_RNA (1)...(19): siRNA sense strand
ccaacgaggugaccacuac

SEQ ID NO: 1348515 - RNA, 19 nt, Homo sapiens
  misc_RNA (1)...(19): siRNA sense strand
gcucggaggaggagaugua

SEQ ID NO: 1348516 - RNA, 19 nt, Homo sapiens
  misc_RNA (1)...(19): siRNA sense strand
aggaggagauguacaacaa

SEQ ID NO: 1348517 - RNA, 19 nt, Homo sapiens
  misc_RNA (1)...(19): siRNA sense strand
caaauacuucuauggcaaa

SEQ ID NO: 1348518 - RNA, 19 nt, Homo sapiens
  misc_RNA (1)...(19): siRNA sense strand
uguccacgaugcugccuua

SEQ ID NO: 1348519 - RNA, 19 nt, Homo sapiens
  misc_RNA (1)...(19): siRNA sense strand
gcacagcuaccgcgucauc

SEQ ID NO: 1348520 - RNA, 19 nt, Homo sapiens
  misc_RNA (1)...(19): siRNA sense strand
aggaggaccugcagaagga

SEQ ID NO: 1348521 - RNA, 19 nt, Homo sapiens
  misc_RNA (1)...(19): siRNA sense strand
uaagggaacuccaaaaucu

SEQ ID NO: 1348522 - RNA, 19 nt, Homo sapiens
  misc_RNA (1)...(19): siRNA sense strand
gcuacuaccgcaaauacuu

SEQ ID NO: 1348523 - RNA, 19 nt, Homo sapiens
  misc_RNA (1)...(19): siRNA sense strand
gcaaggugggcauccugua

SEQ ID NO: 1348524 - RNA, 19 nt, Homo sapiens
  misc_RNA (1)...(19): siRNA sense strand
gggcccagcuagacaccaa

SEQ ID NO: 1348525 - RNA, 19 nt, Homo sapiens
  misc_RNA (1)...(19): siRNA sense strand
ugcaagaccuggccaccaa

SEQ ID NO: 1348526 - RNA, 19 nt, Homo sapiens
  misc_RNA (1)...(19): siRNA sense strand
gcacuuccagcacguguuc

SEQ ID NO: 1348527 - RNA, 19 nt, Homo sapiens
  misc_RNA (1)...(19): siRNA sense strand
ccacauuggcaacgacauu

SEQ ID NO: 1348528 - RNA, 19 nt, Homo sapiens
  misc_RNA (1)...(19): siRNA sense strand
guggagcgcuucacauucg

SEQ ID NO: 1348529 - RNA, 19 nt, Homo sapiens
  misc_RNA (1)...(19): siRNA sense strand
gaugguuugcccacuauga

SEQ ID NO: 1348530 - RNA, 19 nt, Homo sapiens
  misc_RNA (1)...(19): siRNA sense strand
gugcggagccugagacaca

SEQ ID NO: 1348531 - RNA, 19 nt, Homo sapiens
  misc_RNA (1)...(19): siRNA sense strand
gcacguggagcgcuucaca

SEQ ID NO: 1348532 - RNA, 19 nt, Homo sapiens
  misc_RNA (1)...(19): siRNA sense strand
gaccggccuucaugcaguu

SEQ ID NO: 1348533 - RNA, 19 nt, Homo sapiens
  misc_RNA (1)...(19): siRNA sense strand
ccacgaugcugccuuacac

SEQ ID NO: 1348534 - RNA, 19 nt, Homo sapiens
  misc_RNA (1)...(19): siRNA sense strand
ggaacuccaucagcaggau

SEQ ID NO: 1348535 - RNA, 19 nt, Homo sapiens
  misc_RNA (1)...(19): siRNA sense strand
caccuggcuuuguguguga

SEQ ID NO: 1348536 - RNA, 19 nt, Homo sapiens
  misc_RNA (1)...(19): siRNA sense strand
ggaccacgagaucauguuc

SEQ ID NO: 1348537 - RNA, 19 nt, Homo sapiens
  misc_RNA (1)...(19): siRNA sense strand
ucaugcaguuucucaccuu

SEQ ID NO: 1348538 - RNA, 19 nt, Homo sapiens
  misc_RNA (1)...(19): siRNA sense strand
cggaggaggagauguacaa

SEQ ID NO: 1348539 - RNA, 19 nt, Homo sapiens
  misc_RNA (1)...(19): siRNA sense strand
ccacagaugaccucuuugc

SEQ ID NO: 1348540 - RNA, 19 nt, Homo sapiens
  misc_RNA (1)...(19): siRNA sense strand
gcaaguggugagcuuccaa

SEQ ID NO: 1348541 - RNA, 19 nt, Homo sapiens
  misc_RNA (1)...(19): siRNA sense strand
gugcuggccuggaccuucu

SEQ ID NO: 1348542 - RNA, 19 nt, Homo sapiens
  misc_RNA (1)...(19): siRNA sense strand
ucgaugguuugcccacuau

SEQ ID NO: 1348543 - RNA, 19 nt, Homo sapiens
  misc_RNA (1)...(19): siRNA sense strand
gaggaggagauguacaaca

SEQ ID NO: 1348544 - RNA, 19 nt, Homo sapiens
  misc_RNA (1)...(19): siRNA sense strand
ucaccuugcugggcgaugu

SEQ ID NO: 1348545 - RNA, 19 nt, Homo sapiens
  misc_RNA (1)...(19): siRNA sense strand
ccgaggagaggacugaguu

SEQ ID NO: 1348546 - RNA, 19 nt, Homo sapiens
  misc_RNA (1)...(19): siRNA sense strand
gccgcguaguguucaauug

SEQ ID NO: 1348547 - RNA, 19 nt, Homo sapiens
  misc_RNA (1)...(19): siRNA sense strand
ucaccacgcagcucucugu

SEQ ID NO: 1348548 - RNA, 19 nt, Homo sapiens
  misc_RNA (1)...(19): siRNA sense strand
cacggacgcugcucacacu

SEQ ID NO: 1348549 - RNA, 19 nt, Homo sapiens
  misc_RNA (1)...(19): siRNA sense strand
ccacagccaagccaucagu

SEQ ID NO: 1348550 - RNA, 19 nt, Homo sapiens
  misc_RNA (1)...(19): siRNA sense strand
ggcacgcacucccucuaca

SEQ ID NO: 1348551 - RNA, 19 nt, Homo sapiens
  misc_RNA (1)...(19): siRNA sense strand
caaggugggcauccuguac

SEQ ID NO: 1348552 - RNA, 19 nt, Homo sapiens
  misc_RNA (1)...(19): siRNA sense strand
gcaaagaacaucagaacuu

SEQ ID NO: 1348553 - RNA, 19 nt, Homo sapiens
  misc_RNA (1)...(19): siRNA sense strand
caaagaacaucagaacuuc

SEQ ID NO: 1348554 - RNA, 19 nt, Homo sapiens
  misc_RNA (1)...(19): siRNA sense strand
gcagcucucugucggauga

SEQ ID NO: 1348555 - RNA, 19 nt, Homo sapiens
  misc_RNA (1)...(19): siRNA sense strand
guccacagaugaccucuuu

SEQ ID NO: 1348556 - RNA, 19 nt, Homo sapiens
  misc_RNA (1)...(19): siRNA sense strand
gagauugccucuacuugca

SEQ ID NO: 1348557 - RNA, 19 nt, Homo sapiens
  misc_RNA (1)...(19): siRNA sense strand
ccacccggcucuucacuga

SEQ ID NO: 1348558 - RNA, 19 nt, Homo sapiens
  misc_RNA (1)...(19): siRNA sense strand
gcaacgacauugugaccau

SEQ ID NO: 1348559 - RNA, 19 nt, Homo sapiens
  misc_RNA (1)...(19): siRNA sense strand
ggacagcccaucccagaga

SEQ ID NO: 1348560 - RNA, 19 nt, Homo sapiens
  misc_RNA (1)...(19): siRNA sense strand
gcuugagccucgaugguuu

SEQ ID NO: 1348561 - RNA, 19 nt, Homo sapiens
  misc_RNA (1)...(19): siRNA sense strand
ccaacgaggugaccacuac

SEQ ID NO: 1348562 - RNA, 19 nt, Homo sapiens
  misc_RNA (1)...(19): siRNA sense strand
gcucggaggaggagaugua

SEQ ID NO: 1348563 - RNA, 19 nt, Homo sapiens
  misc_RNA (1)...(19): siRNA sense strand
aggaggagauguacaacaa

SEQ ID NO: 1348564 - RNA, 19 nt, Homo sapiens
  misc_RNA (1)...(19): siRNA sense strand
caaauacuucuauggcaaa

SEQ ID NO: 1348565 - RNA, 19 nt, Homo sapiens
  misc_RNA (1)...(19): siRNA sense strand
uguccacgaugcugccuua

SEQ ID NO: 1348566 - RNA, 19 nt, Homo sapiens
  misc_RNA (1)...(19): siRNA sense strand
gcacagcuaccgcgucauc

SEQ ID NO: 1348567 - RNA, 19 nt, Homo sapiens
  misc_RNA (1)...(19): siRNA sense strand
aggaggaccugcagaagga

SEQ ID NO: 1348568 - RNA, 19 nt, Homo sapiens
  misc_RNA (1)...(19): siRNA sense strand
uaagggaacuccaaaaucu

SEQ ID NO: 1348569 - RNA, 19 nt, Homo sapiens
  misc_RNA (1)...(19): siRNA sense strand
gcuacuaccgcaaauacuu

SEQ ID NO: 1348570 - RNA, 19 nt, Homo sapiens
  misc_RNA (1)...(19): siRNA sense strand
gcaaggugggcauccugua

SEQ ID NO: 1348571 - RNA, 19 nt, Homo sapiens
  misc_RNA (1)...(19): siRNA sense strand
gggcccagcuagacaccaa

SEQ ID NO: 1348572 - RNA, 19 nt, Homo sapiens
  misc_RNA (1)...(19): siRNA sense strand
ugcaagaccuggccaccaa

SEQ ID NO: 1348573 - RNA, 19 nt, Homo sapiens
  misc_RNA (1)...(19): siRNA sense strand
gcacuuccagcacguguuc

SEQ ID NO: 1348574 - RNA, 19 nt, Homo sapiens
  misc_RNA (1)...(19): siRNA sense strand
ccacauuggcaacgacauu

SEQ ID NO: 1348575 - RNA, 19 nt, Homo sapiens
  misc_RNA (1)...(19): siRNA sense strand
guggagcgcuucacauucg

SEQ ID NO: 1348576 - RNA, 19 nt, Homo sapiens
  misc_RNA (1)...(19): siRNA sense strand
gaugguuugcccacuauga

SEQ ID NO: 1348577 - RNA, 19 nt, Homo sapiens
  misc_RNA (1)...(19): siRNA sense strand
gugcggagccugagacaca

SEQ ID NO: 1348578 - RNA, 19 nt, Homo sapiens
  misc_RNA (1)...(19): siRNA sense strand
gcacguggagcgcuucaca

SEQ ID NO: 1348579 - RNA, 19 nt, Homo sapiens
  misc_RNA (1)...(19): siRNA sense strand
gaccggccuucaugcaguu

SEQ ID NO: 1348580 - RNA, 19 nt, Homo sapiens
  misc_RNA (1)...(19): siRNA sense strand
ccacgaugcugccuuacac

SEQ ID NO: 1348581 - RNA, 19 nt, Homo sapiens
  misc_RNA (1)...(19): siRNA sense strand
ggaacuccaucagcaggau

SEQ ID NO: 1348582 - RNA, 19 nt, Homo sapiens
  misc_RNA (1)...(19): siRNA sense strand
caccuggcuuuguguguga

SEQ ID NO: 1348583 - RNA, 19 nt, Homo sapiens
  misc_RNA (1)...(19): siRNA sense strand
ggaccacgagaucauguuc

SEQ ID NO: 1348584 - RNA, 19 nt, Homo sapiens
  misc_RNA (1)...(19): siRNA sense strand
ucaugcaguuucucaccuu

SEQ ID NO: 1348585 - RNA, 19 nt, Homo sapiens
  misc_RNA (1)...(19): siRNA sense strand
cggaggaggagauguacaa

SEQ ID NO: 1348586 - RNA, 19 nt, Homo sapiens
  misc_RNA (1)...(19): siRNA sense strand
ccacagaugaccucuuugc

SEQ ID NO: 1348587 - RNA, 19 nt, Homo sapiens
  misc_RNA (1)...(19): siRNA sense strand
gcaaguggugagcuuccaa

SEQ ID NO: 1348588 - RNA, 19 nt, Homo sapiens
  misc_RNA (1)...(19): siRNA sense strand
gugcuggccuggaccuucu

SEQ ID NO: 1348589 - RNA, 19 nt, Homo sapiens
  misc_RNA (1)...(19): siRNA sense strand
ucgaugguuugcccacuau

SEQ ID NO: 1348590 - RNA, 19 nt, Homo sapiens
  misc_RNA (1)...(19): siRNA sense strand
gaggaggagauguacaaca

SEQ ID NO: 1348591 - RNA, 19 nt, Homo sapiens
  misc_RNA (1)...(19): siRNA sense strand
ucaccuugcugggcgaugu

SEQ ID NO: 1348592 - RNA, 19 nt, Homo sapiens
  misc_RNA (1)...(19): siRNA sense strand
ccgaggagaggacugaguu

SEQ ID NO: 1348593 - RNA, 19 nt, Homo sapiens
  misc_RNA (1)...(19): siRNA sense strand
gccgcguaguguucaauug

SEQ ID NO: 1348594 - RNA, 19 nt, Homo sapiens
  misc_RNA (1)...(19): siRNA sense strand
ucaccacgcagcucucugu

SEQ ID NO: 1348595 - RNA, 19 nt, Homo sapiens
  misc_RNA (1)...(19): siRNA sense strand
cacggacgcugcucacacu

SEQ ID NO: 1348596 - RNA, 19 nt, Homo sapiens
  misc_RNA (1)...(19): siRNA sense strand
ccacagccaagccaucagu

SEQ ID NO: 1348597 - RNA, 19 nt, Homo sapiens
  misc_RNA (1)...(19): siRNA sense strand
ggcacgcacucccucuaca

SEQ ID NO: 1348598 - RNA, 19 nt, Homo sapiens
  misc_RNA (1)...(19): siRNA sense strand
caaggugggcauccuguac

SEQ ID NO: 1348599 - RNA, 19 nt, Homo sapiens
  misc_RNA (1)...(19): siRNA sense strand
gggaauggcuggaugauga

SEQ ID NO: 1348600 - RNA, 19 nt, Homo sapiens
  misc_RNA (1)...(19): siRNA sense strand
cgaagaagcucuccaacuu

SEQ ID NO: 1348601 - RNA, 19 nt, Homo sapiens
  misc_RNA (1)...(19): siRNA sense strand
ggauggcgcucuucuucua

SEQ ID NO: 1348602 - RNA, 19 nt, Homo sapiens
  misc_RNA (1)...(19): siRNA sense strand
ggagagggaugcagugaau

SEQ ID NO: 1348603 - RNA, 19 nt, Homo sapiens
  misc_RNA (1)...(19): siRNA sense strand
gaacaaaaccaaaggauuu

SEQ ID NO: 1348604 - RNA, 19 nt, Homo sapiens
  misc_RNA (1)...(19): siRNA sense strand
gaacauggccacucauaca

SEQ ID NO: 1348605 - RNA, 19 nt, Homo sapiens
  misc_RNA (1)...(19): siRNA sense strand
ggacagcgacgaugaggaa

SEQ ID NO: 1348606 - RNA, 19 nt, Homo sapiens
  misc_RNA (1)...(19): siRNA sense strand
gcaguugccucaucacauc

SEQ ID NO: 1348607 - RNA, 19 nt, Homo sapiens
  misc_RNA (1)...(19): siRNA sense strand
gcaaacuccuuccacuuca

SEQ ID NO: 1348608 - RNA, 19 nt, Homo sapiens
  misc_RNA (1)...(19): siRNA sense strand
gagaacauggccacucaua

SEQ ID NO: 1348609 - RNA, 19 nt, Homo sapiens
  misc_RNA (1)...(19): siRNA sense strand
ggacggguauguguagaga

SEQ ID NO: 1348610 - RNA, 19 nt, Homo sapiens
  misc_RNA (1)...(19): siRNA sense strand
gcuacgggcuggagaagga

SEQ ID NO: 1348611 - RNA, 19 nt, Homo sapiens
  misc_RNA (1)...(19): siRNA sense strand
uagaggcccugcacuggua

SEQ ID NO: 1348612 - RNA, 19 nt, Homo sapiens
  misc_RNA (1)...(19): siRNA sense strand
gggaugcagugaaucagaa

SEQ ID NO: 1348613 - RNA, 19 nt, Homo sapiens
  misc_RNA (1)...(19): siRNA sense strand
gggcccagauggaggagua

SEQ ID NO: 1348614 - RNA, 19 nt, Homo sapiens
  misc_RNA (1)...(19): siRNA sense strand
gaaguggaaucuccucaac

SEQ ID NO: 1348615 - RNA, 19 nt, Homo sapiens
  misc_RNA (1)...(19): siRNA sense strand
gaaguacgagucugacgaa

SEQ ID NO: 1348616 - RNA, 19 nt, Homo sapiens
  misc_RNA (1)...(19): siRNA sense strand
ucagugaccucgauaacau

SEQ ID NO: 1348617 - RNA, 19 nt, Homo sapiens
  misc_RNA (1)...(19): siRNA sense strand
ggacgaagaagcucuccaa

SEQ ID NO: 1348618 - RNA, 19 nt, Homo sapiens
  misc_RNA (1)...(19): siRNA sense strand
acaccaagcugcugcaauc

SEQ ID NO: 1348619 - RNA, 19 nt, Homo sapiens
  misc_RNA (1)...(19): siRNA sense strand
cagagaccaugaucaucua

SEQ ID NO: 1348620 - RNA, 19 nt, Homo sapiens
  misc_RNA (1)...(19): siRNA sense strand
gaagugcaaaggcuuaaug

SEQ ID NO: 1348621 - RNA, 19 nt, Homo sapiens
  misc_RNA (1)...(19): siRNA sense strand
cauggccacucauacagua

SEQ ID NO: 1348622 - RNA, 19 nt, Homo sapiens
  misc_RNA (1)...(19): siRNA sense strand
ggagacgggcacugacuuu

SEQ ID NO: 1348623 - RNA, 19 nt, Homo sapiens
  misc_RNA (1)...(19): siRNA sense strand
ggagacagaagagaacaaa

SEQ ID NO: 1348624 - RNA, 19 nt, Homo sapiens
  misc_RNA (1)...(19): siRNA sense strand
gagaaggacccgcagagau

SEQ ID NO: 1348625 - RNA, 19 nt, Homo sapiens
  misc_RNA (1)...(19): siRNA sense strand
ccaagcagguggacaucau

SEQ ID NO: 1348626 - RNA, 19 nt, Homo sapiens
  misc_RNA (1)...(19): siRNA sense strand
aaugucaauuccaagguua

SEQ ID NO: 1348627 - RNA, 19 nt, Homo sapiens
  misc_RNA (1)...(19): siRNA sense strand
ugaaggagacagaagagaa

SEQ ID NO: 1348628 - RNA, 19 nt, Homo sapiens
  misc_RNA (1)...(19): siRNA sense strand
caacuccaacucuggcuuu

SEQ ID NO: 1348629 - RNA, 19 nt, Homo sapiens
  misc_RNA (1)...(19): siRNA sense strand
gacgggcacugacuuugga

SEQ ID NO: 1348630 - RNA, 19 nt, Homo sapiens
  misc_RNA (1)...(19): siRNA sense strand
caaacuccuuccacuucaa

SEQ ID NO: 1348631 - RNA, 19 nt, Homo sapiens
  misc_RNA (1)...(19): siRNA sense strand
ccgagaacauggccacuca

SEQ ID NO: 1348632 - RNA, 19 nt, Homo sapiens
  misc_RNA (1)...(19): siRNA sense strand
gaagcuagaccaccuccau

SEQ ID NO: 1348633 - RNA, 19 nt, Homo sapiens
  misc_RNA (1)...(19): siRNA sense strand
agaccgggauguguacuuu

SEQ ID NO: 1348634 - RNA, 19 nt, Homo sapiens
  misc_RNA (1)...(19): siRNA sense strand
ggcaaacuccuuccacuuc

SEQ ID NO: 1348635 - RNA, 19 nt, Homo sapiens
  misc_RNA (1)...(19): siRNA sense strand
gcccugcacugguacaaca

SEQ ID NO: 1348636 - RNA, 19 nt, Homo sapiens
  misc_RNA (1)...(19): siRNA sense strand
gaugaaguucugaucaaga

SEQ ID NO: 1348637 - RNA, 19 nt, Homo sapiens
  misc_RNA (1)...(19): siRNA sense strand
ggaagcacgcaauccagaa

SEQ ID NO: 1348638 - RNA, 19 nt, Homo sapiens
  misc_RNA (1)...(19): siRNA sense strand
gcgacgaugaggaagguua

SEQ ID NO: 1348639 - RNA, 19 nt, Homo sapiens
  misc_RNA (1)...(19): siRNA sense strand
ggagaaggacccgcagaga

SEQ ID NO: 1348640 - RNA, 19 nt, Homo sapiens
  misc_RNA (1)...(19): siRNA sense strand
ccagagaccaugaucaucu

SEQ ID NO: 1348641 - RNA, 19 nt, Homo sapiens
  misc_RNA (1)...(19): siRNA sense strand
gaaggagacagaagagaac

SEQ ID NO: 1348642 - RNA, 19 nt, Homo sapiens
  misc_RNA (1)...(19): siRNA sense strand
caccgggagucugagaaua

SEQ ID NO: 1348643 - RNA, 19 nt, Homo sapiens
  misc_RNA (1)...(19): siRNA sense strand
ggaauggcuggaugaugaa

SEQ ID NO: 1348644 - RNA, 19 nt, Homo sapiens
  misc_RNA (1)...(19): siRNA sense strand
ggagaugacggacugugau

SEQ ID NO: 1348645 - RNA, 19 nt, Homo sapiens
  misc_RNA (1)...(19): siRNA sense strand
ccaagguuaauaaguacua

SEQ ID NO: 1348646 - RNA, 19 nt, Homo sapiens
  misc_RNA (1)...(19): siRNA sense strand
gaaggacccgcagagauca

SEQ ID NO: 1348647 - RNA, 19 nt, Homo sapiens
  misc_RNA (1)...(19): siRNA sense strand
gagggcaaguacaucaagu

SEQ ID NO: 1348648 - RNA, 19 nt, Homo sapiens
  misc_RNA (1)...(19): siRNA sense strand
gcucgaaccagaaugucaa

SEQ ID NO: 1348649 - RNA, 19 nt, Homo sapiens
  misc_RNA (1)...(19): siRNA sense strand
uagccgaugucucucugaa

SEQ ID NO: 1348650 - RNA, 19 nt, Homo sapiens
  misc_RNA (1)...(19): siRNA sense strand
ggguauguguagagaagug

SEQ ID NO: 1348651 - RNA, 19 nt, Homo sapiens
  misc_RNA (1)...(19): siRNA sense strand
guacuacagcaaccuaaca

SEQ ID NO: 1348652 - RNA, 19 nt, Homo sapiens
  misc_RNA (1)...(19): siRNA sense strand
gccaaccaguacuaccaaa

SEQ ID NO: 1348653 - RNA, 19 nt, Homo sapiens
  misc_RNA (1)...(19): siRNA sense strand
agaaggacccgcagagauc

SEQ ID NO: 1348654 - RNA, 19 nt, Homo sapiens
  misc_RNA (1)...(19): siRNA sense strand
gaacgugcuacucgacaca

SEQ ID NO: 1348655 - RNA, 19 nt, Homo sapiens
  misc_RNA (1)...(19): siRNA sense strand
gagaugacggacugugaug

SEQ ID NO: 1348656 - RNA, 19 nt, Homo sapiens
  misc_RNA (1)...(19): siRNA sense strand
caacacugcccuggagaug

SEQ ID NO: 1348657 - RNA, 19 nt, Homo sapiens
  misc_RNA (1)...(19): siRNA sense strand
caugggccuugcucccuuu

SEQ ID NO: 1348658 - RNA, 19 nt, Homo sapiens
  misc_RNA (1)...(19): siRNA sense strand
uaaguacuacagcaaccua

SEQ ID NO: 1348659 - RNA, 19 nt, Homo sapiens
  misc_RNA (1)...(19): siRNA sense strand
gaagcacgcaauccagaag

SEQ ID NO: 1348660 - RNA, 19 nt, Homo sapiens
  misc_RNA (1)...(19): siRNA sense strand
caagcucgaaccagaaugu

SEQ ID NO: 1348661 - RNA, 19 nt, Homo sapiens
  misc_RNA (1)...(19): siRNA sense strand
cgacgugaccuucgacucu

SEQ ID NO: 1348662 - RNA, 19 nt, Homo sapiens
  misc_RNA (1)...(19): siRNA sense strand
ucgacucucucccuucuuc

SEQ ID NO: 1348663 - RNA, 19 nt, Homo sapiens
  misc_RNA (1)...(19): siRNA sense strand
cagcagaggcagcgaugga

SEQ ID NO: 1348664 - RNA, 19 nt, Homo sapiens
  misc_RNA (1)...(19): siRNA sense strand
gcuggaugaugaaguucug

SEQ ID NO: 1348665 - RNA, 19 nt, Homo sapiens
  misc_RNA (1)...(19): siRNA sense strand
gaagagaacaaaaccaaag

SEQ ID NO: 1348666 - RNA, 19 nt, Homo sapiens
  misc_RNA (1)...(19): siRNA sense strand
gcucuggacggguaugugu

SEQ ID NO: 1348667 - RNA, 19 nt, Homo sapiens
  misc_RNA (1)...(19): siRNA sense strand
acacggagacgggcacuga

SEQ ID NO: 1348668 - RNA, 19 nt, Homo sapiens
  misc_RNA (1)...(19): siRNA sense strand
caaguacaacuccaacucu

SEQ ID NO: 1348669 - RNA, 19 nt, Homo sapiens
  misc_RNA (1)...(19): siRNA sense strand
ggaguauaaucggcacaag

SEQ ID NO: 1348670 - RNA, 19 nt, Homo sapiens
  misc_RNA (1)...(19): siRNA sense strand
ccagaaggccaagcacaug

SEQ ID NO: 1348671 - RNA, 19 nt, Homo sapiens
  misc_RNA (1)...(19): siRNA sense strand
gaacaccaagcugcugcaa

SEQ ID NO: 1348672 - RNA, 19 nt, Homo sapiens
  misc_RNA (1)...(19): siRNA sense strand
augaaguucugaucaagau

SEQ ID NO: 1348673 - RNA, 19 nt, Homo sapiens
  misc_RNA (1)...(19): siRNA sense strand
acaguaaucggaaguacga

SEQ ID NO: 1348674 - RNA, 19 nt, Homo sapiens
  misc_RNA (1)...(19): siRNA sense strand
cagcgacgaugaggaaggu

SEQ ID NO: 1348675 - RNA, 19 nt, Homo sapiens
  misc_RNA (1)...(19): siRNA sense strand
gugaugagggcggugagua

SEQ ID NO: 1348676 - RNA, 19 nt, Homo sapiens
  misc_RNA (1)...(19): siRNA sense strand
accgggauguguacuuuga

SEQ ID NO: 1348677 - RNA, 19 nt, Homo sapiens
  misc_RNA (1)...(19): siRNA sense strand
acacugcccuggagaugac

SEQ ID NO: 1348678 - RNA, 19 nt, Homo sapiens
  misc_RNA (1)...(19): siRNA sense strand
cgacaggcaguccaugauc

SEQ ID NO: 1348679 - RNA, 19 nt, Homo sapiens
  misc_RNA (1)...(19): siRNA sense strand
gugcuacucgacacaggua

SEQ ID NO: 1348680 - RNA, 19 nt, Homo sapiens
  misc_RNA (1)...(19): siRNA sense strand
gaccaggagucggcugucu

SEQ ID NO: 1348681 - RNA, 19 nt, Homo sapiens
  misc_RNA (1)...(19): siRNA sense strand
aguggaaucuccucaacuc

SEQ ID NO: 1348682 - RNA, 19 nt, Homo sapiens
  misc_RNA (1)...(19): siRNA sense strand
gagacgggcacugacuuug

SEQ ID NO: 1348683 - RNA, 19 nt, Homo sapiens
  misc_RNA (1)...(19): siRNA sense strand
ggcaguccaugauccuagu

SEQ ID NO: 1348684 - RNA, 19 nt, Homo sapiens
  misc_RNA (1)...(19): siRNA sense strand
ccaggagucggcugucuuc

SEQ ID NO: 1348685 - RNA, 19 nt, Homo sapiens
  misc_RNA (1)...(19): siRNA sense strand
gggagugcuuccggacgaa

SEQ ID NO: 1348686 - RNA, 19 nt, Homo sapiens
  misc_RNA (1)...(19): siRNA sense strand
ggcgacaggcaguccauga

SEQ ID NO: 1348687 - RNA, 19 nt, Homo sapiens
  misc_RNA (1)...(19): siRNA sense strand
ugagcgacgugaccuucga

SEQ ID NO: 1348688 - RNA, 19 nt, Homo sapiens
  misc_RNA (1)...(19): siRNA sense strand
gggagagggaugcagugaa

SEQ ID NO: 1348689 - RNA, 19 nt, Homo sapiens
  misc_RNA (1)...(19): siRNA sense strand
cgggauggcgcucuucuuc

SEQ ID NO: 1348690 - RNA, 19 nt, Homo sapiens
  misc_RNA (1)...(19): siRNA sense strand
cuacaucgagggcaaguac

SEQ ID NO: 1348691 - RNA, 19 nt, Homo sapiens
  misc_RNA (1)...(19): siRNA sense strand
agagggaugcagugaauca

SEQ ID NO: 1348692 - RNA, 19 nt, Homo sapiens
  misc_RNA (1)...(19): siRNA sense strand
gcagagaucaggggacuug

SEQ ID NO: 1348693 - RNA, 19 nt, Homo sapiens
  misc_RNA (1)...(19): siRNA sense strand
gaugacggacugugaugag

SEQ ID NO: 1348694 - RNA, 19 nt, Homo sapiens
  misc_RNA (1)...(19): siRNA sense strand
acucgcaguugccucauca

SEQ ID NO: 1348695 - RNA, 19 nt, Homo sapiens
  misc_RNA (1)...(19): siRNA sense strand
gaaaagaaaaucgggaagu

SEQ ID NO: 1348696 - RNA, 19 nt, Homo sapiens
  misc_RNA (1)...(19): siRNA sense strand
ccguagaccgggaugugua

SEQ ID NO: 1348697 - RNA, 19 nt, Homo sapiens
  misc_RNA (1)...(19): siRNA sense strand
gagaccaugaucaucuaga

SEQ ID NO: 1348698 - RNA, 19 nt, Homo sapiens
  misc_RNA (1)...(19): siRNA sense strand
ucaaguacaacuccaacuc

SEQ ID NO: 1348699 - RNA, 19 nt, Homo sapiens
  misc_RNA (1)...(19): siRNA sense strand
uaagaaagcugucguuaag

SEQ ID NO: 1348700 - RNA, 19 nt, Homo sapiens
  misc_RNA (1)...(19): siRNA sense strand
caagaagggcuuuaagaaa

SEQ ID NO: 1348701 - RNA, 19 nt, Homo sapiens
  misc_RNA (1)...(19): siRNA sense strand
cgggagagcuggcuaaaca

SEQ ID NO: 1348702 - RNA, 19 nt, Homo sapiens
  misc_RNA (1)...(19): siRNA sense strand
ccaagaagggcuuuaagaa

SEQ ID NO: 1348703 - RNA, 19 nt, Homo sapiens
  misc_RNA (1)...(19): siRNA sense strand
ggagaguuauucuauuuac

SEQ ID NO: 1348704 - RNA, 19 nt, Homo sapiens
  misc_RNA (1)...(19): siRNA sense strand
agcaagcgcuccaccauuu

SEQ ID NO: 1348705 - RNA, 19 nt, Homo sapiens
  misc_RNA (1)...(19): siRNA sense strand
guacaccagcuccaaguaa

SEQ ID NO: 1348706 - RNA, 19 nt, Homo sapiens
  misc_RNA (1)...(19): siRNA sense strand
gugcuaccauuuccaagaa

SEQ ID NO: 1348707 - RNA, 19 nt, Homo sapiens
  misc_RNA (1)...(19): siRNA sense strand
cuaaacaugcugugucuga

SEQ ID NO: 1348708 - RNA, 19 nt, Homo sapiens
  misc_RNA (1)...(19): siRNA sense strand
acacuggcaucucuucgaa

SEQ ID NO: 1348709 - RNA, 19 nt, Homo sapiens
  misc_RNA (1)...(19): siRNA sense strand
ggagagcuggcuaaacaug

SEQ ID NO: 1348710 - RNA, 19 nt, Homo sapiens
  misc_RNA (1)...(19): siRNA sense strand
agaaagcugucguuaagac

SEQ ID NO: 1348711 - RNA, 19 nt, Homo sapiens
  misc_RNA (1)...(19): siRNA sense strand
ggaggugucaucuaaaggu

SEQ ID NO: 1348712 - RNA, 19 nt, Homo sapiens
  misc_RNA (1)...(19): siRNA sense strand
cuaaaggugcuaccauuuc

SEQ ID NO: 1348713 - RNA, 19 nt, Homo sapiens
  misc_RNA (1)...(19): siRNA sense strand
ugauaucuuugagcguaua

SEQ ID NO: 1348714 - RNA, 19 nt, Homo sapiens
  misc_RNA (1)...(19): siRNA sense strand
uaaaggugcuaccauuucc

SEQ ID NO: 1348715 - RNA, 19 nt, Homo sapiens
  misc_RNA (1)...(19): siRNA sense strand
ccggaggugucaucuaaag

SEQ ID NO: 1348716 - RNA, 19 nt, Homo sapiens
  misc_RNA (1)...(19): siRNA sense strand
ucuaaaggugcuaccauuu

SEQ ID NO: 1348717 - RNA, 19 nt, Homo sapiens
  misc_RNA (1)...(19): siRNA sense strand
ggcuaaacaugcugugucu

SEQ ID NO: 1348718 - RNA, 19 nt, Homo sapiens
  misc_RNA (1)...(19): siRNA sense strand
ggugcuaccauuuccaaga

SEQ ID NO: 1348719 - RNA, 19 nt, Homo sapiens
  misc_RNA (1)...(19): siRNA sense strand
cagcaagcgcuccaccauu

SEQ ID NO: 1348720 - RNA, 19 nt, Homo sapiens
  misc_RNA (1)...(19): siRNA sense strand
cgagcgaggcaucacguuu

SEQ ID NO: 1348721 - RNA, 19 nt, Homo sapiens
  misc_RNA (1)...(19): siRNA sense strand
gcaagcgcuccaccauuuc

SEQ ID NO: 1348722 - RNA, 19 nt, Homo sapiens
  misc_RNA (1)...(19): siRNA sense strand
uuuaagaaagcugucguua

SEQ ID NO: 1348723 - RNA, 19 nt, Homo sapiens
  misc_RNA (1)...(19): siRNA sense strand
uccaagaagggcuuuaaga

SEQ ID NO: 1348724 - RNA, 19 nt, Homo sapiens
  misc_RNA (1)...(19): siRNA sense strand
agaaggagcucuacagaaa

SEQ ID NO: 1348725 - RNA, 19 nt, Homo sapiens
  misc_RNA (1)...(19): siRNA sense strand
gaaacgugauggagaguaa

SEQ ID NO: 1348726 - RNA, 19 nt, Homo sapiens
  misc_RNA (1)...(19): siRNA sense strand
gagaucaccuuccgcuaua

SEQ ID NO: 1348727 - RNA, 19 nt, Homo sapiens
  misc_RNA (1)...(19): siRNA sense strand
ggagaaugauggcgucugu

SEQ ID NO: 1348728 - RNA, 19 nt, Homo sapiens
  misc_RNA (1)...(19): siRNA sense strand
aaacgacgcuccacaccuu

SEQ ID NO: 1348729 - RNA, 19 nt, Homo sapiens
  misc_RNA (1)...(19): siRNA sense strand
gggcaguucuguccucuug

SEQ ID NO: 1348730 - RNA, 19 nt, Homo sapiens
  misc_RNA (1)...(19): siRNA sense strand
gaagauggccguggaguuc

SEQ ID NO: 1348731 - RNA, 19 nt, Homo sapiens
  misc_RNA (1)...(19): siRNA sense strand
gaagagcuuuguccagaag

SEQ ID NO: 1348732 - RNA, 19 nt, Homo sapiens
  misc_RNA (1)...(19): siRNA sense strand
ggaguuggguacagagaug

SEQ ID NO: 1348733 - RNA, 19 nt, Homo sapiens
  misc_RNA (1)...(19): siRNA sense strand
ccacaucccuuggaggaaa

SEQ ID NO: 1348734 - RNA, 19 nt, Homo sapiens
  misc_RNA (1)...(19): siRNA sense strand
aaacaggagcuacaguaua

SEQ ID NO: 1348735 - RNA, 19 nt, Homo sapiens
  misc_RNA (1)...(19): siRNA sense strand
cuacgaauguucugagugu

SEQ ID NO: 1348736 - RNA, 19 nt, Homo sapiens
  misc_RNA (1)...(19): siRNA sense strand
gcaguucuguccucuugga

SEQ ID NO: 1348737 - RNA, 19 nt, Homo sapiens
  misc_RNA (1)...(19): siRNA sense strand
ucaaacaggagcuacagua

SEQ ID NO: 1348738 - RNA, 19 nt, Homo sapiens
  misc_RNA (1)...(19): siRNA sense strand
gcagaaggagcucuacaga

SEQ ID NO: 1348739 - RNA, 19 nt, Homo sapiens
  misc_RNA (1)...(19): siRNA sense strand
ggaaggcccugcggaucuu

SEQ ID NO: 1348740 - RNA, 19 nt, Homo sapiens
  misc_RNA (1)...(19): siRNA sense strand
gaugcugggugacuuggaa

SEQ ID NO: 1348741 - RNA, 19 nt, Homo sapiens
  misc_RNA (1)...(19): siRNA sense strand
gaaaucucauaggcaggua

SEQ ID NO: 1348742 - RNA, 19 nt, Homo sapiens
  misc_RNA (1)...(19): siRNA sense strand
gagcuucagucacccaucu

SEQ ID NO: 1348743 - RNA, 19 nt, Homo sapiens
  misc_RNA (1)...(19): siRNA sense strand
gagcaggaaugggagaauc

SEQ ID NO: 1348744 - RNA, 19 nt, Homo sapiens
  misc_RNA (1)...(19): siRNA sense strand
ugauggagaguaacuauga

SEQ ID NO: 1348745 - RNA, 19 nt, Homo sapiens
  misc_RNA (1)...(19): siRNA sense strand
ccucaucugugguuacugu

SEQ ID NO: 1348746 - RNA, 19 nt, Homo sapiens
  misc_RNA (1)...(19): siRNA sense strand
ucucaugcauugcugaaga

SEQ ID NO: 1348747 - RNA, 19 nt, Homo sapiens
  misc_RNA (1)...(19): siRNA sense strand
agaaugauggcgucuguuu

SEQ ID NO: 1348748 - RNA, 19 nt, Homo sapiens
  misc_RNA (1)...(19): siRNA sense strand
aacaggagcuacaguauac

SEQ ID NO: 1348749 - RNA, 19 nt, Homo sapiens
  misc_RNA (1)...(19): siRNA sense strand
caaacaggagcuacaguau

SEQ ID NO: 1348750 - RNA, 19 nt, Homo sapiens
  misc_RNA (1)...(19): siRNA sense strand
gcccgaagcagaaaucuca

SEQ ID NO: 1348751 - RNA, 19 nt, Homo sapiens
  misc_RNA (1)...(19): siRNA sense strand
ggaucuuccuggagaguuc

SEQ ID NO: 1348752 - RNA, 19 nt, Homo sapiens
  misc_RNA (1)...(19): siRNA sense strand
ccacaccuuuaacuucuuc

SEQ ID NO: 1348753 - RNA, 19 nt, Homo sapiens
  misc_RNA (1)...(19): siRNA sense strand
agaagagcuuuguccagaa

SEQ ID NO: 1348754 - RNA, 19 nt, Homo sapiens
  misc_RNA (1)...(19): siRNA sense strand
ugagaucaccuuccgcuau

SEQ ID NO: 1348755 - RNA, 19 nt, Homo sapiens
  misc_RNA (1)...(19): siRNA sense strand
gcuacaguauacacaggaa

SEQ ID NO: 1348756 - RNA, 19 nt, Homo sapiens
  misc_RNA (1)...(19): siRNA sense strand
gguaguagaguuccuagca

SEQ ID NO: 1348757 - RNA, 19 nt, Homo sapiens
  misc_RNA (1)...(19): siRNA sense strand
cagaaggagcucuacagaa

SEQ ID NO: 1348758 - RNA, 19 nt, Homo sapiens
  misc_RNA (1)...(19): siRNA sense strand
ggagaguaacuaugagaca

SEQ ID NO: 1348759 - RNA, 19 nt, Homo sapiens
  misc_RNA (1)...(19): siRNA sense strand
gcuccacaccuuuaacuuc

SEQ ID NO: 1348760 - RNA, 19 nt, Homo sapiens
  misc_RNA (1)...(19): siRNA sense strand
gcugaaaccacagaccaaa

SEQ ID NO: 1348761 - RNA, 19 nt, Homo sapiens
  misc_RNA (1)...(19): siRNA sense strand
gcaacaggaacuucuggau

SEQ ID NO: 1348762 - RNA, 19 nt, Homo sapiens
  misc_RNA (1)...(19): siRNA sense strand
guuccuagcagcagcagaa

SEQ ID NO: 1348763 - RNA, 19 nt, Homo sapiens
  misc_RNA (1)...(19): siRNA sense strand
gaaugauggcgucuguuuc

SEQ ID NO: 1348764 - RNA, 19 nt, Homo sapiens
  misc_RNA (1)...(19): siRNA sense strand
ccaagcugcaucaguguga

SEQ ID NO: 1348765 - RNA, 19 nt, Homo sapiens
  misc_RNA (1)...(19): siRNA sense strand
acacuuccuucacaagcaa

SEQ ID NO: 1348766 - RNA, 19 nt, Homo sapiens
  misc_RNA (1)...(19): siRNA sense strand
cagagaugcugggugacuu

SEQ ID NO: 1348767 - RNA, 19 nt, Homo sapiens
  misc_RNA (1)...(19): siRNA sense strand
gauggagaguaacuaugag

SEQ ID NO: 1348768 - RNA, 19 nt, Homo sapiens
  misc_RNA (1)...(19): siRNA sense strand
ccgaagcagaaaucucaua

SEQ ID NO: 1348769 - RNA, 19 nt, Homo sapiens
  misc_RNA (1)...(19): siRNA sense strand
aaugauggcgucuguuuca

SEQ ID NO: 1348770 - RNA, 19 nt, Homo sapiens
  misc_RNA (1)...(19): siRNA sense strand
cgacgcuccacaccuuuaa

SEQ ID NO: 1348771 - RNA, 19 nt, Homo sapiens
  misc_RNA (1)...(19): siRNA sense strand
cgaagcagaaaucucauag

SEQ ID NO: 1348772 - RNA, 19 nt, Homo sapiens
  misc_RNA (1)...(19): siRNA sense strand
aagcggaguuggguacaga

SEQ ID NO: 1348773 - RNA, 19 nt, Homo sapiens
  misc_RNA (1)...(19): siRNA sense strand
ggacagccgagaagaagcu

SEQ ID NO: 1348774 - RNA, 19 nt, Homo sapiens
  misc_RNA (1)...(19): siRNA sense strand
gagccagaggagagccuua

SEQ ID NO: 1348775 - RNA, 19 nt, Homo sapiens
  misc_RNA (1)...(19): siRNA sense strand
agaggagccuguugguagu

SEQ ID NO: 1348776 - RNA, 19 nt, Homo sapiens
  misc_RNA (1)...(19): siRNA sense strand
gaaggagcucuacagaaac

SEQ ID NO: 1348777 - RNA, 19 nt, Homo sapiens
  misc_RNA (1)...(19): siRNA sense strand
gagaaccugcugcgcaaca

SEQ ID NO: 1348778 - RNA, 19 nt, Homo sapiens
  misc_RNA (1)...(19): siRNA sense strand
gcccagagcagaccgaacu

SEQ ID NO: 1348779 - RNA, 19 nt, Homo sapiens
  misc_RNA (1)...(19): siRNA sense strand
gcccaauggccugcuuuaa

SEQ ID NO: 1348780 - RNA, 19 nt, Homo sapiens
  misc_RNA (1)...(19): siRNA sense strand
gaggagccuguugguagua

SEQ ID NO: 1348781 - RNA, 19 nt, Homo sapiens
  misc_RNA (1)...(19): siRNA sense strand
gagaagaagcuggcugacu

SEQ ID NO: 1348782 - RNA, 19 nt, Homo sapiens
  misc_RNA (1)...(19): siRNA sense strand
guucuguccucuuggaaac

SEQ ID NO: 1348783 - RNA, 19 nt, Homo sapiens
  misc_RNA (1)...(19): siRNA sense strand
cagagaaaagcuccuauuu

SEQ ID NO: 1348784 - RNA, 19 nt, Homo sapiens
  misc_RNA (1)...(19): siRNA sense strand
gaagcggaguuggguacag

SEQ ID NO: 1348785 - RNA, 19 nt, Homo sapiens
  misc_RNA (1)...(19): siRNA sense strand
uuucagaccaccgagauuu

SEQ ID NO: 1348786 - RNA, 19 nt, Homo sapiens
  misc_RNA (1)...(19): siRNA sense strand
ggagccuguugguaguaga

SEQ ID NO: 1348787 - RNA, 19 nt, Homo sapiens
  misc_RNA (1)...(19): siRNA sense strand
cccuacagcugcacugagu

SEQ ID NO: 1348788 - RNA, 19 nt, Homo sapiens
  misc_RNA (1)...(19): siRNA sense strand
gaucaaacaggagcuacag

SEQ ID NO: 1348789 - RNA, 19 nt, Homo sapiens
  misc_RNA (1)...(19): siRNA sense strand
cuccacaccuuuaacuucu

SEQ ID NO: 1348790 - RNA, 19 nt, Homo sapiens
  misc_RNA (1)...(19): siRNA sense strand
gaucaccuuccgcuauaag

SEQ ID NO: 1348791 - RNA, 19 nt, Homo sapiens
  misc_RNA (1)...(19): siRNA sense strand
cuagaggagccuguuggua

SEQ ID NO: 1348792 - RNA, 19 nt, Homo sapiens
  misc_RNA (1)...(19): siRNA sense strand
cuuccacacuuccuucaca

SEQ ID NO: 1348793 - RNA, 19 nt, Homo sapiens
  misc_RNA (1)...(19): siRNA sense strand
aggaggagcuggagaaaca

SEQ ID NO: 1348794 - RNA, 19 nt, Homo sapiens
  misc_RNA (1)...(19): siRNA sense strand
ucaacucacuguucuccaa

SEQ ID NO: 1348795 - RNA, 19 nt, Homo sapiens
  misc_RNA (1)...(19): siRNA sense strand
ucacuguucuccaaauaca

SEQ ID NO: 1348796 - RNA, 19 nt, Homo sapiens
  misc_RNA (1)...(19): siRNA sense strand
gcagaagggcgacaagaag

SEQ ID NO: 1348797 - RNA, 19 nt, Homo sapiens
  misc_RNA (1)...(19): siRNA sense strand
gcucuuauuucgucaacuc

SEQ ID NO: 1348798 - RNA, 19 nt, Homo sapiens
  misc_RNA (1)...(19): siRNA sense strand
acucacuguucuccaaaua

SEQ ID NO: 1348799 - RNA, 19 nt, Homo sapiens
  misc_RNA (1)...(19): siRNA sense strand
cgucgcaaauccaggaguu

SEQ ID NO: 1348800 - RNA, 19 nt, Homo sapiens
  misc_RNA (1)...(19): siRNA sense strand
aaagagaacaacaaagaca

SEQ ID NO: 1348801 - RNA, 19 nt, Homo sapiens
  misc_RNA (1)...(19): siRNA sense strand
caacucacuguucuccaaa

SEQ ID NO: 1348802 - RNA, 19 nt, Homo sapiens
  misc_RNA (1)...(19): siRNA sense strand
agaagggcgacaagaagua

SEQ ID NO: 1348803 - RNA, 19 nt, Homo sapiens
  misc_RNA (1)...(19): siRNA sense strand
gcaggaggagcuggagaaa

SEQ ID NO: 1348804 - RNA, 19 nt, Homo sapiens
  misc_RNA (1)...(19): siRNA sense strand
cccuggagcuggagaagga

SEQ ID NO: 1348805 - RNA, 19 nt, Homo sapiens
  misc_RNA (1)...(19): siRNA sense strand
gaagggcgacaagaaguag

SEQ ID NO: 1348806 - RNA, 19 nt, Homo sapiens
  misc_RNA (1)...(19): siRNA sense strand
guuccuauuuaaucccuau

SEQ ID NO: 1348807 - RNA, 19 nt, Homo sapiens
  misc_RNA (1)...(19): siRNA sense strand
gcaaauccaggaguucuac

SEQ ID NO: 1348808 - RNA, 19 nt, Homo sapiens
  misc_RNA (1)...(19): siRNA sense strand
cuauuuaaucccuaucuga

SEQ ID NO: 1348809 - RNA, 19 nt, Homo sapiens
  misc_RNA (1)...(19): siRNA sense strand
aucccuaucugacucguaa

SEQ ID NO: 1348810 - RNA, 19 nt, Homo sapiens
  misc_RNA (1)...(19): siRNA sense strand
gcccugggacugacagaga

SEQ ID NO: 1348811 - RNA, 19 nt, Homo sapiens
  misc_RNA (1)...(19): siRNA sense strand
gagcucuuauuucgucaac

SEQ ID NO: 1348812 - RNA, 19 nt, Homo sapiens
  misc_RNA (1)...(19): siRNA sense strand
uuccagaaccggaggauga

SEQ ID NO: 1348813 - RNA, 19 nt, Homo sapiens
  misc_RNA (1)...(19): siRNA sense strand
gcaacgccagagccuauuc

SEQ ID NO: 1348814 - RNA, 19 nt, Homo sapiens
  misc_RNA (1)...(19): siRNA sense strand
cagaagggcgacaagaagu

SEQ ID NO: 1348815 - RNA, 19 nt, Homo sapiens
  misc_RNA (1)...(19): siRNA sense strand
gagaacaacaaagacaagu

SEQ ID NO: 1348816 - RNA, 19 nt, Homo sapiens
  misc_RNA (1)...(19): siRNA sense strand
gaggagcuggagaaacaga

SEQ ID NO: 1348817 - RNA, 19 nt, Homo sapiens
  misc_RNA (1)...(19): siRNA sense strand
gcgcagaagggcgacaaga

SEQ ID NO: 1348818 - RNA, 19 nt, Homo sapiens
  misc_RNA (1)...(19): siRNA sense strand
cgcagaagggcgacaagaa

SEQ ID NO: 1348819 - RNA, 19 nt, Homo sapiens
  misc_RNA (1)...(19): siRNA sense strand
agaacaacaaagacaaguu

SEQ ID NO: 1348820 - RNA, 19 nt, Homo sapiens
  misc_RNA (1)...(19): siRNA sense strand
gggcagaacuguacaagga

SEQ ID NO: 1348821 - RNA, 19 nt, Homo sapiens
  misc_RNA (1)...(19): siRNA sense strand
gaaguaaggcugucagaga

SEQ ID NO: 1348822 - RNA, 19 nt, Homo sapiens
  misc_RNA (1)...(19): siRNA sense strand
acaaggagccuaccaauga

SEQ ID NO: 1348823 - RNA, 19 nt, Homo sapiens
  misc_RNA (1)...(19): siRNA sense strand
gaagaaggaucggauugau

SEQ ID NO: 1348824 - RNA, 19 nt, Homo sapiens
  misc_RNA (1)...(19): siRNA sense strand
ggccagagcugcaggacaa

SEQ ID NO: 1348825 - RNA, 19 nt, Homo sapiens
  misc_RNA (1)...(19): siRNA sense strand
gcacggcugucuaugaugu

SEQ ID NO: 1348826 - RNA, 19 nt, Homo sapiens
  misc_RNA (1)...(19): siRNA sense strand
uagaggagcuacuaaagga

SEQ ID NO: 1348827 - RNA, 19 nt, Homo sapiens
  misc_RNA (1)...(19): siRNA sense strand
acacauggguccugcaaga

SEQ ID NO: 1348828 - RNA, 19 nt, Homo sapiens
  misc_RNA (1)...(19): siRNA sense strand
gaagaagaaggaucggauu

SEQ ID NO: 1348829 - RNA, 19 nt, Homo sapiens
  misc_RNA (1)...(19): siRNA sense strand
gggaucaguuuaugucuca

SEQ ID NO: 1348830 - RNA, 19 nt, Homo sapiens
  misc_RNA (1)...(19): siRNA sense strand
ugagaagugucuugcaguu

SEQ ID NO: 1348831 - RNA, 19 nt, Homo sapiens
  misc_RNA (1)...(19): siRNA sense strand
cagcucagaucccucuuug

SEQ ID NO: 1348832 - RNA, 19 nt, Homo sapiens
  misc_RNA (1)...(19): siRNA sense strand
agaagugucuugcaguuuc

SEQ ID NO: 1348833 - RNA, 19 nt, Homo sapiens
  misc_RNA (1)...(19): siRNA sense strand
aaguaaggcugucagagaa

SEQ ID NO: 1348834 - RNA, 19 nt, Homo sapiens
  misc_RNA (1)...(19): siRNA sense strand
aaaccuguguccacuaugu

SEQ ID NO: 1348835 - RNA, 19 nt, Homo sapiens
  misc_RNA (1)...(19): siRNA sense strand
agaaaccuguguccacuau

SEQ ID NO: 1348836 - RNA, 19 nt, Homo sapiens
  misc_RNA (1)...(19): siRNA sense strand
guaaggcugucagagaaga

SEQ ID NO: 1348837 - RNA, 19 nt, Homo sapiens
  misc_RNA (1)...(19): siRNA sense strand
ccugaaacccucacuguug

SEQ ID NO: 1348838 - RNA, 19 nt, Homo sapiens
  misc_RNA (1)...(19): siRNA sense strand
agacugagaucuuguucca

SEQ ID NO: 1348839 - RNA, 19 nt, Homo sapiens
  misc_RNA (1)...(19): siRNA sense strand
ugucaaccauucugaguuc

SEQ ID NO: 1348840 - RNA, 19 nt, Homo sapiens
  misc_RNA (1)...(19): siRNA sense strand
cagccaagauccaccaaag

SEQ ID NO: 1348841 - RNA, 19 nt, Homo sapiens
  misc_RNA (1)...(19): siRNA sense strand
gaggcacggcugucuauga

SEQ ID NO: 1348842 - RNA, 19 nt, Homo sapiens
  misc_RNA (1)...(19): siRNA sense strand
guacaaggagccuaccaau

SEQ ID NO: 1348843 - RNA, 19 nt, Homo sapiens
  misc_RNA (1)...(19): siRNA sense strand
gaagugucuugcaguuucu

SEQ ID NO: 1348844 - RNA, 19 nt, Homo sapiens
  misc_RNA (1)...(19): siRNA sense strand
gagaagugucuugcaguuu

SEQ ID NO: 1348845 - RNA, 19 nt, Homo sapiens
  misc_RNA (1)...(19): siRNA sense strand
ggaaggcacaggcaaagag

SEQ ID NO: 1348846 - RNA, 19 nt, Homo sapiens
  misc_RNA (1)...(19): siRNA sense strand
caaggagccuaccaaugag

SEQ ID NO: 1348847 - RNA, 19 nt, Homo sapiens
  misc_RNA (1)...(19): siRNA sense strand
caaccucugugcugauguc

SEQ ID NO: 1348848 - RNA, 19 nt, Homo sapiens
  misc_RNA (1)...(19): siRNA sense strand
ucaacgggaucaguuuaug

SEQ ID NO: 1348849 - RNA, 19 nt, Homo sapiens
  misc_RNA (1)...(19): siRNA sense strand
ccaaugaggagcuuaaucg

SEQ ID NO: 1348850 - RNA, 19 nt, Homo sapiens
  misc_RNA (1)...(19): siRNA sense strand
ggacaucagccaagaucca

SEQ ID NO: 1348851 - RNA, 19 nt, Homo sapiens
  misc_RNA (1)...(19): siRNA sense strand
ugucagagaagaagaagga

SEQ ID NO: 1348852 - RNA, 19 nt, Homo sapiens
  misc_RNA (1)...(19): siRNA sense strand
cagccucuaugucccagaa

SEQ ID NO: 1348853 - RNA, 19 nt, Homo sapiens
  misc_RNA (1)...(19): siRNA sense strand
acauggguccugcaagaua

SEQ ID NO: 1348854 - RNA, 19 nt, Homo sapiens
  misc_RNA (1)...(19): siRNA sense strand
guuuaugucucagcucaga

SEQ ID NO: 1348855 - RNA, 19 nt, Homo sapiens
  misc_RNA (1)...(19): siRNA sense strand
ucggauugaugccuuccua

SEQ ID NO: 1348856 - RNA, 19 nt, Homo sapiens
  misc_RNA (1)...(19): siRNA sense strand
gccaagauccaccaaagca

SEQ ID NO: 1348857 - RNA, 19 nt, Homo sapiens
  misc_RNA (1)...(19): siRNA sense strand
ggacaaugguggggacuau

SEQ ID NO: 1348858 - RNA, 19 nt, Homo sapiens
  misc_RNA (1)...(19): siRNA sense strand
caacgggaucaguuuaugu

SEQ ID NO: 1348859 - RNA, 19 nt, Homo sapiens
  misc_RNA (1)...(19): siRNA sense strand
uaacacauggguccugcaa

SEQ ID NO: 1348860 - RNA, 19 nt, Homo sapiens
  misc_RNA (1)...(19): siRNA sense strand
cagcccagguuacuguugu

SEQ ID NO: 1348861 - RNA, 19 nt, Homo sapiens
  misc_RNA (1)...(19): siRNA sense strand
gacuaugucucagcugcuu

SEQ ID NO: 1348862 - RNA, 19 nt, Homo sapiens
  misc_RNA (1)...(19): siRNA sense strand
cagcagggcagaacuguac

SEQ ID NO: 1348863 - RNA, 19 nt, Homo sapiens
  misc_RNA (1)...(19): siRNA sense strand
agaagaaggaucggauuga

SEQ ID NO: 1348864 - RNA, 19 nt, Homo sapiens
  misc_RNA (1)...(19): siRNA sense strand
ggacaaggacgggcugaac

SEQ ID NO: 1348865 - RNA, 19 nt, Homo sapiens
  misc_RNA (1)...(19): siRNA sense strand
cugcaucuccguccacuga

SEQ ID NO: 1348866 - RNA, 19 nt, Homo sapiens
  misc_RNA (1)...(19): siRNA sense strand
aggcacggcugucuaugau

SEQ ID NO: 1348867 - RNA, 19 nt, Homo sapiens
  misc_RNA (1)...(19): siRNA sense strand
ggccuucuccguugucuuc

SEQ ID NO: 1348868 - RNA, 19 nt, Homo sapiens
  misc_RNA (1)...(19): siRNA sense strand
caagggccaggguggguuu

SEQ ID NO: 1348869 - RNA, 19 nt, Homo sapiens
  misc_RNA (1)...(19): siRNA sense strand
gcaucuccguccacugagu

SEQ ID NO: 1348870 - RNA, 19 nt, Homo sapiens
  misc_RNA (1)...(19): siRNA sense strand
cuaccaaugaggagcuuaa

SEQ ID NO: 1348871 - RNA, 19 nt, Homo sapiens
  misc_RNA (1)...(19): siRNA sense strand
cugguugucuuccuugugu

SEQ ID NO: 1348872 - RNA, 19 nt, Homo sapiens
  misc_RNA (1)...(19): siRNA sense strand
cacuccagcuugcuucguu

SEQ ID NO: 1348873 - RNA, 19 nt, Homo sapiens
  misc_RNA (1)...(19): siRNA sense strand
agucaacgggaucaguuua

SEQ ID NO: 1348874 - RNA, 19 nt, Homo sapiens
  misc_RNA (1)...(19): siRNA sense strand
gcaagauccauaccaccau

SEQ ID NO: 1348875 - RNA, 19 nt, Homo sapiens
  misc_RNA (1)...(19): siRNA sense strand
cauccgaccagacaucaau

SEQ ID NO: 1348876 - RNA, 19 nt, Homo sapiens
  misc_RNA (1)...(19): siRNA sense strand
aagaagaaggaucggauug

SEQ ID NO: 1348877 - RNA, 19 nt, Homo sapiens
  misc_RNA (1)...(19): siRNA sense strand
ccucugugcugaugucacu

SEQ ID NO: 1348878 - RNA, 19 nt, Homo sapiens
  misc_RNA (1)...(19): siRNA sense strand
gggagacugagaucuuguu

SEQ ID NO: 1348879 - RNA, 19 nt, Homo sapiens
  misc_RNA (1)...(19): siRNA sense strand
uccguugucuuccuggauu

SEQ ID NO: 1348880 - RNA, 19 nt, Homo sapiens
  misc_RNA (1)...(19): siRNA sense strand
cauggguccugcaagauac

SEQ ID NO: 1348881 - RNA, 19 nt, Homo sapiens
  misc_RNA (1)...(19): siRNA sense strand
ucgggagacugagaucuug

SEQ ID NO: 1348882 - RNA, 19 nt, Homo sapiens
  misc_RNA (1)...(19): siRNA sense strand
ccagcuugcuucguuuaca

SEQ ID NO: 1348883 - RNA, 19 nt, Homo sapiens
  misc_RNA (1)...(19): siRNA sense strand
ucccagaagcgccuuauuc

SEQ ID NO: 1348884 - RNA, 19 nt, Homo sapiens
  misc_RNA (1)...(19): siRNA sense strand
gcagggcagaacuguacaa

SEQ ID NO: 1348885 - RNA, 19 nt, Homo sapiens
  misc_RNA (1)...(19): siRNA sense strand
cagaaaccuguguccacua

SEQ ID NO: 1348886 - RNA, 19 nt, Homo sapiens
  misc_RNA (1)...(19): siRNA sense strand
gcuaaauuccgccaguucu

SEQ ID NO: 1348887 - RNA, 19 nt, Homo sapiens
  misc_RNA (1)...(19): siRNA sense strand
gguuccaccugcuguugau

SEQ ID NO: 1348888 - RNA, 19 nt, Homo sapiens
  misc_RNA (1)...(19): siRNA sense strand
gaaggauggcguggcacuu

SEQ ID NO: 1348889 - RNA, 19 nt, Homo sapiens
  misc_RNA (1)...(19): siRNA sense strand
caccugaaacccucacugu

SEQ ID NO: 1348890 - RNA, 19 nt, Homo sapiens
  misc_RNA (1)...(19): siRNA sense strand
gauccgggcuuuugaccau

SEQ ID NO: 1348891 - RNA, 19 nt, Homo sapiens
  misc_RNA (1)...(19): siRNA sense strand
ggagacugagaucuuguuc

SEQ ID NO: 1348892 - RNA, 19 nt, Homo sapiens
  misc_RNA (1)...(19): siRNA sense strand
gcaaagaggggaagaaagc

SEQ ID NO: 1348893 - RNA, 19 nt, Homo sapiens
  misc_RNA (1)...(19): siRNA sense strand
caugcugguugucuuccuu

SEQ ID NO: 1348894 - RNA, 19 nt, Homo sapiens
  misc_RNA (1)...(19): siRNA sense strand
gaccaugcccagggaaauc

SEQ ID NO: 1348895 - RNA, 19 nt, Homo sapiens
  misc_RNA (1)...(19): siRNA sense strand
ggcacuccaugcugacauc

SEQ ID NO: 1348896 - RNA, 19 nt, Homo sapiens
  misc_RNA (1)...(19): siRNA sense strand
cagcuugcuucguuuacag

SEQ ID NO: 1348897 - RNA, 19 nt, Homo sapiens
  misc_RNA (1)...(19): siRNA sense strand
gggcagaacuguacaagga

SEQ ID NO: 1348898 - RNA, 19 nt, Homo sapiens
  misc_RNA (1)...(19): siRNA sense strand
gaaguaaggcugucagaga

SEQ ID NO: 1348899 - RNA, 19 nt, Homo sapiens
  misc_RNA (1)...(19): siRNA sense strand
acaaggagccuaccaauga

SEQ ID NO: 1348900 - RNA, 19 nt, Homo sapiens
  misc_RNA (1)...(19): siRNA sense strand
gaagaaggaucggauugau

SEQ ID NO: 1348901 - RNA, 19 nt, Homo sapiens
  misc_RNA (1)...(19): siRNA sense strand
ggccagagcugcaggacaa

SEQ ID NO: 1348902 - RNA, 19 nt, Homo sapiens
  misc_RNA (1)...(19): siRNA sense strand
gcacggcugucuaugaugu

SEQ ID NO: 1348903 - RNA, 19 nt, Homo sapiens
  misc_RNA (1)...(19): siRNA sense strand
uagaggagcuacuaaagga

SEQ ID NO: 1348904 - RNA, 19 nt, Homo sapiens
  misc_RNA (1)...(19): siRNA sense strand
acacauggguccugcaaga

SEQ ID NO: 1348905 - RNA, 19 nt, Homo sapiens
  misc_RNA (1)...(19): siRNA sense strand
gaagaagaaggaucggauu

SEQ ID NO: 1348906 - RNA, 19 nt, Homo sapiens
  misc_RNA (1)...(19): siRNA sense strand
gggaucaguuuaugucuca

SEQ ID NO: 1348907 - RNA, 19 nt, Homo sapiens
  misc_RNA (1)...(19): siRNA sense strand
ugagaagugucuugcaguu

SEQ ID NO: 1348908 - RNA, 19 nt, Homo sapiens
  misc_RNA (1)...(19): siRNA sense strand
cagcucagaucccucuuug

SEQ ID NO: 1348909 - RNA, 19 nt, Homo sapiens
  misc_RNA (1)...(19): siRNA sense strand
agaagugucuugcaguuuc

SEQ ID NO: 1348910 - RNA, 19 nt, Homo sapiens
  misc_RNA (1)...(19): siRNA sense strand
aaguaaggcugucagagaa

SEQ ID NO: 1348911 - RNA, 19 nt, Homo sapiens
  misc_RNA (1)...(19): siRNA sense strand
aaaccuguguccacuaugu

SEQ ID NO: 1348912 - RNA, 19 nt, Homo sapiens
  misc_RNA (1)...(19): siRNA sense strand
agaaaccuguguccacuau

SEQ ID NO: 1348913 - RNA, 19 nt, Homo sapiens
  misc_RNA (1)...(19): siRNA sense strand
guaaggcugucagagaaga

SEQ ID NO: 1348914 - RNA, 19 nt, Homo sapiens
  misc_RNA (1)...(19): siRNA sense strand
ccugaaacccucacuguug

SEQ ID NO: 1348915 - RNA, 19 nt, Homo sapiens
  misc_RNA (1)...(19): siRNA sense strand
agacugagaucuuguucca

SEQ ID NO: 1348916 - RNA, 19 nt, Homo sapiens
  misc_RNA (1)...(19): siRNA sense strand
ugucaaccauucugaguuc

SEQ ID NO: 1348917 - RNA, 19 nt, Homo sapiens
  misc_RNA (1)...(19): siRNA sense strand
cagccaagauccaccaaag

SEQ ID NO: 1348918 - RNA, 19 nt, Homo sapiens
  misc_RNA (1)...(19): siRNA sense strand
gaggcacggcugucuauga

SEQ ID NO: 1348919 - RNA, 19 nt, Homo sapiens
  misc_RNA (1)...(19): siRNA sense strand
guacaaggagccuaccaau

SEQ ID NO: 1348920 - RNA, 19 nt, Homo sapiens
  misc_RNA (1)...(19): siRNA sense strand
gaagugucuugcaguuucu

SEQ ID NO: 1348921 - RNA, 19 nt, Homo sapiens
  misc_RNA (1)...(19): siRNA sense strand
gagaagugucuugcaguuu

SEQ ID NO: 1348922 - RNA, 19 nt, Homo sapiens
  misc_RNA (1)...(19): siRNA sense strand
ggaaggcacaggcaaagag

SEQ ID NO: 1348923 - RNA, 19 nt, Homo sapiens
  misc_RNA (1)...(19): siRNA sense strand
gaaaauguggcccuucuga

SEQ ID NO: 1348924 - RNA, 19 nt, Homo sapiens
  misc_RNA (1)...(19): siRNA sense strand
caaggagccuaccaaugag

SEQ ID NO: 1348925 - RNA, 19 nt, Homo sapiens
  misc_RNA (1)...(19): siRNA sense strand
caaccucugugcugauguc

SEQ ID NO: 1348926 - RNA, 19 nt, Homo sapiens
  misc_RNA (1)...(19): siRNA sense strand
ucaacgggaucaguuuaug

SEQ ID NO: 1348927 - RNA, 19 nt, Homo sapiens
  misc_RNA (1)...(19): siRNA sense strand
ccaaugaggagcuuaaucg

SEQ ID NO: 1348928 - RNA, 19 nt, Homo sapiens
  misc_RNA (1)...(19): siRNA sense strand
ggacaucagccaagaucca

SEQ ID NO: 1348929 - RNA, 19 nt, Homo sapiens
  misc_RNA (1)...(19): siRNA sense strand
ugucagagaagaagaagga

SEQ ID NO: 1348930 - RNA, 19 nt, Homo sapiens
  misc_RNA (1)...(19): siRNA sense strand
cagccucuaugucccagaa

SEQ ID NO: 1348931 - RNA, 19 nt, Homo sapiens
  misc_RNA (1)...(19): siRNA sense strand
acauggguccugcaagaua

SEQ ID NO: 1348932 - RNA, 19 nt, Homo sapiens
  misc_RNA (1)...(19): siRNA sense strand
guuuaugucucagcucaga

SEQ ID NO: 1348933 - RNA, 19 nt, Homo sapiens
  misc_RNA (1)...(19): siRNA sense strand
ucggauugaugccuuccua

SEQ ID NO: 1348934 - RNA, 19 nt, Homo sapiens
  misc_RNA (1)...(19): siRNA sense strand
gccaagauccaccaaagca

SEQ ID NO: 1348935 - RNA, 19 nt, Homo sapiens
  misc_RNA (1)...(19): siRNA sense strand
ggacaaugguggggacuau

SEQ ID NO: 1348936 - RNA, 19 nt, Homo sapiens
  misc_RNA (1)...(19): siRNA sense strand
caacgggaucaguuuaugu

SEQ ID NO: 1348937 - RNA, 19 nt, Homo sapiens
  misc_RNA (1)...(19): siRNA sense strand
uaacacauggguccugcaa

SEQ ID NO: 1348938 - RNA, 19 nt, Homo sapiens
  misc_RNA (1)...(19): siRNA sense strand
cagcccagguuacuguugu

SEQ ID NO: 1348939 - RNA, 19 nt, Homo sapiens
  misc_RNA (1)...(19): siRNA sense strand
gacuaugucucagcugcuu

SEQ ID NO: 1348940 - RNA, 19 nt, Homo sapiens
  misc_RNA (1)...(19): siRNA sense strand
agaagaaggaucggauuga

SEQ ID NO: 1348941 - RNA, 19 nt, Homo sapiens
  misc_RNA (1)...(19): siRNA sense strand
cagcagggcagaacuguac

SEQ ID NO: 1348942 - RNA, 19 nt, Homo sapiens
  misc_RNA (1)...(19): siRNA sense strand
ggacaaggacgggcugaac

SEQ ID NO: 1348943 - RNA, 19 nt, Homo sapiens
  misc_RNA (1)...(19): siRNA sense strand
cugcaucuccguccacuga

SEQ ID NO: 1348944 - RNA, 19 nt, Homo sapiens
  misc_RNA (1)...(19): siRNA sense strand
aggcacggcugucuaugau

SEQ ID NO: 1348945 - RNA, 19 nt, Homo sapiens
  misc_RNA (1)...(19): siRNA sense strand
ggccuucuccguugucuuc

SEQ ID NO: 1348946 - RNA, 19 nt, Homo sapiens
  misc_RNA (1)...(19): siRNA sense strand
caagggccaggguggguuu

SEQ ID NO: 1348947 - RNA, 19 nt, Homo sapiens
  misc_RNA (1)...(19): siRNA sense strand
cuaccaaugaggagcuuaa

SEQ ID NO: 1348948 - RNA, 19 nt, Homo sapiens
  misc_RNA (1)...(19): siRNA sense strand
gcaucuccguccacugagu

SEQ ID NO: 1348949 - RNA, 19 nt, Homo sapiens
  misc_RNA (1)...(19): siRNA sense strand
cugguugucuuccuugugu

SEQ ID NO: 1348950 - RNA, 19 nt, Homo sapiens
  misc_RNA (1)...(19): siRNA sense strand
cacuccagcuugcuucguu

SEQ ID NO: 1348951 - RNA, 19 nt, Homo sapiens
  misc_RNA (1)...(19): siRNA sense strand
agucaacgggaucaguuua

SEQ ID NO: 1348952 - RNA, 19 nt, Homo sapiens
  misc_RNA (1)...(19): siRNA sense strand
gcaagauccauaccaccau

SEQ ID NO: 1348953 - RNA, 19 nt, Homo sapiens
  misc_RNA (1)...(19): siRNA sense strand
cauccgaccagacaucaau

SEQ ID NO: 1348954 - RNA, 19 nt, Homo sapiens
  misc_RNA (1)...(19): siRNA sense strand
gggagacugagaucuuguu

SEQ ID NO: 1348955 - RNA, 19 nt, Homo sapiens
  misc_RNA (1)...(19): siRNA sense strand
ccucugugcugaugucacu

SEQ ID NO: 1348956 - RNA, 19 nt, Homo sapiens
  misc_RNA (1)...(19): siRNA sense strand
uccguugucuuccuggauu

SEQ ID NO: 1348957 - RNA, 19 nt, Homo sapiens
  misc_RNA (1)...(19): siRNA sense strand
ucgggagacugagaucuug

SEQ ID NO: 1348958 - RNA, 19 nt, Homo sapiens
  misc_RNA (1)...(19): siRNA sense strand
cauggguccugcaagauac

SEQ ID NO: 1348959 - RNA, 19 nt, Homo sapiens
  misc_RNA (1)...(19): siRNA sense strand
aagaagaaggaucggauug

SEQ ID NO: 1348960 - RNA, 19 nt, Homo sapiens
  misc_RNA (1)...(19): siRNA sense strand
ccagcuugcuucguuuaca

SEQ ID NO: 1348961 - RNA, 19 nt, Homo sapiens
  misc_RNA (1)...(19): siRNA sense strand
ucccagaagcgccuuauuc

SEQ ID NO: 1348962 - RNA, 19 nt, Homo sapiens
  misc_RNA (1)...(19): siRNA sense strand
gaaggauggcguggcacuu

SEQ ID NO: 1348963 - RNA, 19 nt, Homo sapiens
  misc_RNA (1)...(19): siRNA sense strand
cagaaaccuguguccacua

SEQ ID NO: 1348964 - RNA, 19 nt, Homo sapiens
  misc_RNA (1)...(19): siRNA sense strand
gcagggcagaacuguacaa

SEQ ID NO: 1348965 - RNA, 19 nt, Homo sapiens
  misc_RNA (1)...(19): siRNA sense strand
gcuaaauuccgccaguucu

SEQ ID NO: 1348966 - RNA, 19 nt, Homo sapiens
  misc_RNA (1)...(19): siRNA sense strand
gguuccaccugcuguugau

SEQ ID NO: 1348967 - RNA, 19 nt, Homo sapiens
  misc_RNA (1)...(19): siRNA sense strand
caccugaaacccucacugu

SEQ ID NO: 1348968 - RNA, 19 nt, Homo sapiens
  misc_RNA (1)...(19): siRNA sense strand
gauccgggcuuuugaccau

SEQ ID NO: 1348969 - RNA, 19 nt, Homo sapiens
  misc_RNA (1)...(19): siRNA sense strand
ggagacugagaucuuguuc

SEQ ID NO: 1348970 - RNA, 19 nt, Homo sapiens
  misc_RNA (1)...(19): siRNA sense strand
gcaaagaggggaagaaagc

SEQ ID NO: 1348971 - RNA, 19 nt, Homo sapiens
  misc_RNA (1)...(19): siRNA sense strand
caugcugguugucuuccuu

SEQ ID NO: 1348972 - RNA, 19 nt, Homo sapiens
  misc_RNA (1)...(19): siRNA sense strand
gaccaugcccagggaaauc

SEQ ID NO: 1348973 - RNA, 19 nt, Homo sapiens
  misc_RNA (1)...(19): siRNA sense strand
ggcacuccaugcugacauc

SEQ ID NO: 1348974 - RNA, 19 nt, Homo sapiens
  misc_RNA (1)...(19): siRNA sense strand
cagcuugcuucguuuacag

SEQ ID NO: 1348975 - RNA, 19 nt, Homo sapiens
  misc_RNA (1)...(19): siRNA sense strand
gggcagaacuguacaagga

SEQ ID NO: 1348976 - RNA, 19 nt, Homo sapiens
  misc_RNA (1)...(19): siRNA sense strand
gaaguaaggcugucagaga

SEQ ID NO: 1348977 - RNA, 19 nt, Homo sapiens
  misc_RNA (1)...(19): siRNA sense strand
acaaggagccuaccaauga

SEQ ID NO: 1348978 - RNA, 19 nt, Homo sapiens
  misc_RNA (1)...(19): siRNA sense strand
gaagaaggaucggauugau

SEQ ID NO: 1348979 - RNA, 19 nt, Homo sapiens
  misc_RNA (1)...(19): siRNA sense strand
ggccagagcugcaggacaa

SEQ ID NO: 1348980 - RNA, 19 nt, Homo sapiens
  misc_RNA (1)...(19): siRNA sense strand
gcacggcugucuaugaugu

SEQ ID NO: 1348981 - RNA, 19 nt, Homo sapiens
  misc_RNA (1)...(19): siRNA sense strand
uagaggagcuacuaaagga

SEQ ID NO: 1348982 - RNA, 19 nt, Homo sapiens
  misc_RNA (1)...(19): siRNA sense strand
acacauggguccugcaaga

SEQ ID NO: 1348983 - RNA, 19 nt, Homo sapiens
  misc_RNA (1)...(19): siRNA sense strand
gaagaagaaggaucggauu

SEQ ID NO: 1348984 - RNA, 19 nt, Homo sapiens
  misc_RNA (1)...(19): siRNA sense strand
gggaucaguuuaugucuca

SEQ ID NO: 1348985 - RNA, 19 nt, Homo sapiens
  misc_RNA (1)...(19): siRNA sense strand
ugagaagugucuugcaguu

SEQ ID NO: 1348986 - RNA, 19 nt, Homo sapiens
  misc_RNA (1)...(19): siRNA sense strand
cagcucagaucccucuuug

SEQ ID NO: 1348987 - RNA, 19 nt, Homo sapiens
  misc_RNA (1)...(19): siRNA sense strand
agaagugucuugcaguuuc

SEQ ID NO: 1348988 - RNA, 19 nt, Homo sapiens
  misc_RNA (1)...(19): siRNA sense strand
aaguaaggcugucagagaa

SEQ ID NO: 1348989 - RNA, 19 nt, Homo sapiens
  misc_RNA (1)...(19): siRNA sense strand
aaaccuguguccacuaugu

SEQ ID NO: 1348990 - RNA, 19 nt, Homo sapiens
  misc_RNA (1)...(19): siRNA sense strand
agaaaccuguguccacuau

SEQ ID NO: 1348991 - RNA, 19 nt, Homo sapiens
  misc_RNA (1)...(19): siRNA sense strand
guaaggcugucagagaaga

SEQ ID NO: 1348992 - RNA, 19 nt, Homo sapiens
  misc_RNA (1)...(19): siRNA sense strand
ccugaaacccucacuguug

SEQ ID NO: 1348993 - RNA, 19 nt, Homo sapiens
  misc_RNA (1)...(19): siRNA sense strand
agacugagaucuuguucca

SEQ ID NO: 1348994 - RNA, 19 nt, Homo sapiens
  misc_RNA (1)...(19): siRNA sense strand
ugucaaccauucugaguuc

SEQ ID NO: 1348995 - RNA, 19 nt, Homo sapiens
  misc_RNA (1)...(19): siRNA sense strand
cagccaagauccaccaaag

SEQ ID NO: 1348996 - RNA, 19 nt, Homo sapiens
  misc_RNA (1)...(19): siRNA sense strand
gaggcacggcugucuauga

SEQ ID NO: 1348997 - RNA, 19 nt, Homo sapiens
  misc_RNA (1)...(19): siRNA sense strand
guacaaggagccuaccaau

SEQ ID NO: 1348998 - RNA, 19 nt, Homo sapiens
  misc_RNA (1)...(19): siRNA sense strand
gaagugucuugcaguuucu

SEQ ID NO: 1348999 - RNA, 19 nt, Homo sapiens
  misc_RNA (1)...(19): siRNA sense strand
gagaagugucuugcaguuu

SEQ ID NO: 1349000 - RNA, 19 nt, Homo sapiens
  misc_RNA (1)...(19): siRNA sense strand
ggaaggcacaggcaaagag

SEQ ID NO: 1349001 - RNA, 19 nt, Homo sapiens
  misc_RNA (1)...(19): siRNA sense strand
caaggagccuaccaaugag

SEQ ID NO: 1349002 - RNA, 19 nt, Homo sapiens
  misc_RNA (1)...(19): siRNA sense strand
caaccucugugcugauguc

SEQ ID NO: 1349003 - RNA, 19 nt, Homo sapiens
  misc_RNA (1)...(19): siRNA sense strand
ucaacgggaucaguuuaug

SEQ ID NO: 1349004 - RNA, 19 nt, Homo sapiens
  misc_RNA (1)...(19): siRNA sense strand
ccaaugaggagcuuaaucg

SEQ ID NO: 1349005 - RNA, 19 nt, Homo sapiens
  misc_RNA (1)...(19): siRNA sense strand
ggacaucagccaagaucca

SEQ ID NO: 1349006 - RNA, 19 nt, Homo sapiens
  misc_RNA (1)...(19): siRNA sense strand
ugucagagaagaagaagga

SEQ ID NO: 1349007 - RNA, 19 nt, Homo sapiens
  misc_RNA (1)...(19): siRNA sense strand
cagccucuaugucccagaa

SEQ ID NO: 1349008 - RNA, 19 nt, Homo sapiens
  misc_RNA (1)...(19): siRNA sense strand
acauggguccugcaagaua

SEQ ID NO: 1349009 - RNA, 19 nt, Homo sapiens
  misc_RNA (1)...(19): siRNA sense strand
guuuaugucucagcucaga

SEQ ID NO: 1349010 - RNA, 19 nt, Homo sapiens
  misc_RNA (1)...(19): siRNA sense strand
ucggauugaugccuuccua

SEQ ID NO: 1349011 - RNA, 19 nt, Homo sapiens
  misc_RNA (1)...(19): siRNA sense strand
gccaagauccaccaaagca

SEQ ID NO: 1349012 - RNA, 19 nt, Homo sapiens
  misc_RNA (1)...(19): siRNA sense strand
ggacaaugguggggacuau

SEQ ID NO: 1349013 - RNA, 19 nt, Homo sapiens
  misc_RNA (1)...(19): siRNA sense strand
caacgggaucaguuuaugu

SEQ ID NO: 1349014 - RNA, 19 nt, Homo sapiens
  misc_RNA (1)...(19): siRNA sense strand
uaacacauggguccugcaa

SEQ ID NO: 1349015 - RNA, 19 nt, Homo sapiens
  misc_RNA (1)...(19): siRNA sense strand
cagcccagguuacuguugu

SEQ ID NO: 1349016 - RNA, 19 nt, Homo sapiens
  misc_RNA (1)...(19): siRNA sense strand
gacuaugucucagcugcuu

SEQ ID NO: 1349017 - RNA, 19 nt, Homo sapiens
  misc_RNA (1)...(19): siRNA sense strand
cagcagggcagaacuguac

SEQ ID NO: 1349018 - RNA, 19 nt, Homo sapiens
  misc_RNA (1)...(19): siRNA sense strand
agaagaaggaucggauuga

SEQ ID NO: 1349019 - RNA, 19 nt, Homo sapiens
  misc_RNA (1)...(19): siRNA sense strand
ggacaaggacgggcugaac

SEQ ID NO: 1349020 - RNA, 19 nt, Homo sapiens
  misc_RNA (1)...(19): siRNA sense strand
cugcaucuccguccacuga

SEQ ID NO: 1349021 - RNA, 19 nt, Homo sapiens
  misc_RNA (1)...(19): siRNA sense strand
aggcacggcugucuaugau

SEQ ID NO: 1349022 - RNA, 19 nt, Homo sapiens
  misc_RNA (1)...(19): siRNA sense strand
ggccuucuccguugucuuc

SEQ ID NO: 1349023 - RNA, 19 nt, Homo sapiens
  misc_RNA (1)...(19): siRNA sense strand
caagggccaggguggguuu

SEQ ID NO: 1349024 - RNA, 19 nt, Homo sapiens
  misc_RNA (1)...(19): siRNA sense strand
gcaucuccguccacugagu

SEQ ID NO: 1349025 - RNA, 19 nt, Homo sapiens
  misc_RNA (1)...(19): siRNA sense strand
cuaccaaugaggagcuuaa

SEQ ID NO: 1349026 - RNA, 19 nt, Homo sapiens
  misc_RNA (1)...(19): siRNA sense strand
cugguugucuuccuugugu

SEQ ID NO: 1349027 - RNA, 19 nt, Homo sapiens
  misc_RNA (1)...(19): siRNA sense strand
cacuccagcuugcuucguu

SEQ ID NO: 1349028 - RNA, 19 nt, Homo sapiens
  misc_RNA (1)...(19): siRNA sense strand
agucaacgggaucaguuua

SEQ ID NO: 1349029 - RNA, 19 nt, Homo sapiens
  misc_RNA (1)...(19): siRNA sense strand
gcaagauccauaccaccau

SEQ ID NO: 1349030 - RNA, 19 nt, Homo sapiens
  misc_RNA (1)...(19): siRNA sense strand
cauccgaccagacaucaau

SEQ ID NO: 1349031 - RNA, 19 nt, Homo sapiens
  misc_RNA (1)...(19): siRNA sense strand
aagaagaaggaucggauug

SEQ ID NO: 1349032 - RNA, 19 nt, Homo sapiens
  misc_RNA (1)...(19): siRNA sense strand
ccucugugcugaugucacu

SEQ ID NO: 1349033 - RNA, 19 nt, Homo sapiens
  misc_RNA (1)...(19): siRNA sense strand
gggagacugagaucuuguu

SEQ ID NO: 1349034 - RNA, 19 nt, Homo sapiens
  misc_RNA (1)...(19): siRNA sense strand
uccguugucuuccuggauu

SEQ ID NO: 1349035 - RNA, 19 nt, Homo sapiens
  misc_RNA (1)...(19): siRNA sense strand
cauggguccugcaagauac

SEQ ID NO: 1349036 - RNA, 19 nt, Homo sapiens
  misc_RNA (1)...(19): siRNA sense strand
ucgggagacugagaucuug

SEQ ID NO: 1349037 - RNA, 19 nt, Homo sapiens
  misc_RNA (1)...(19): siRNA sense strand
ccagcuugcuucguuuaca

SEQ ID NO: 1349038 - RNA, 19 nt, Homo sapiens
  misc_RNA (1)...(19): siRNA sense strand
ucccagaagcgccuuauuc

SEQ ID NO: 1349039 - RNA, 19 nt, Homo sapiens
  misc_RNA (1)...(19): siRNA sense strand
gcagggcagaacuguacaa

SEQ ID NO: 1349040 - RNA, 19 nt, Homo sapiens
  misc_RNA (1)...(19): siRNA sense strand
cagaaaccuguguccacua

SEQ ID NO: 1349041 - RNA, 19 nt, Homo sapiens
  misc_RNA (1)...(19): siRNA sense strand
gcuaaauuccgccaguucu

SEQ ID NO: 1349042 - RNA, 19 nt, Homo sapiens
  misc_RNA (1)...(19): siRNA sense strand
gguuccaccugcuguugau

SEQ ID NO: 1349043 - RNA, 19 nt, Homo sapiens
  misc_RNA (1)...(19): siRNA sense strand
gaaggauggcguggcacuu

SEQ ID NO: 1349044 - RNA, 19 nt, Homo sapiens
  misc_RNA (1)...(19): siRNA sense strand
caccugaaacccucacugu

SEQ ID NO: 1349045 - RNA, 19 nt, Homo sapiens
  misc_RNA (1)...(19): siRNA sense strand
gauccgggcuuuugaccau

SEQ ID NO: 1349046 - RNA, 19 nt, Homo sapiens
  misc_RNA (1)...(19): siRNA sense strand
ggagacugagaucuuguuc

SEQ ID NO: 1349047 - RNA, 19 nt, Homo sapiens
  misc_RNA (1)...(19): siRNA sense strand
gcaaagaggggaagaaagc

SEQ ID NO: 1349048 - RNA, 19 nt, Homo sapiens
  misc_RNA (1)...(19): siRNA sense strand
caugcugguugucuuccuu

SEQ ID NO: 1349049 - RNA, 19 nt, Homo sapiens
  misc_RNA (1)...(19): siRNA sense strand
gaccaugcccagggaaauc

SEQ ID NO: 1349050 - RNA, 19 nt, Homo sapiens
  misc_RNA (1)...(19): siRNA sense strand
ggcacuccaugcugacauc

SEQ ID NO: 1349051 - RNA, 19 nt, Homo sapiens
  misc_RNA (1)...(19): siRNA sense strand
cagcuugcuucguuuacag

SEQ ID NO: 1349052 - RNA, 19 nt, Homo sapiens
  misc_RNA (1)...(19): siRNA sense strand
gaacaagccuuaauuagga

SEQ ID NO: 1349053 - RNA, 19 nt, Homo sapiens
  misc_RNA (1)...(19): siRNA sense strand
gaaacaagaugcugacaaa

SEQ ID NO: 1349054 - RNA, 19 nt, Homo sapiens
  misc_RNA (1)...(19): siRNA sense strand
gaucaggaauuccauauuu

SEQ ID NO: 1349055 - RNA, 19 nt, Homo sapiens
  misc_RNA (1)...(19): siRNA sense strand
ggaagaaggugaucucuau

SEQ ID NO: 1349056 - RNA, 19 nt, Homo sapiens
  misc_RNA (1)...(19): siRNA sense strand
ggucagaacuuauguagaa

SEQ ID NO: 1349057 - RNA, 19 nt, Homo sapiens
  misc_RNA (1)...(19): siRNA sense strand
gcaggcagaucuucaauuu

SEQ ID NO: 1349058 - RNA, 19 nt, Homo sapiens
  misc_RNA (1)...(19): siRNA sense strand
guggagacauuacauauua

SEQ ID NO: 1349059 - RNA, 19 nt, Homo sapiens
  misc_RNA (1)...(19): siRNA sense strand
gaaaagggcugaaagaauu

SEQ ID NO: 1349060 - RNA, 19 nt, Homo sapiens
  misc_RNA (1)...(19): siRNA sense strand
gaaagaacuucaggacaua

SEQ ID NO: 1349061 - RNA, 19 nt, Homo sapiens
  misc_RNA (1)...(19): siRNA sense strand
gaacagaagagggcuauua

SEQ ID NO: 1349062 - RNA, 19 nt, Homo sapiens
  misc_RNA (1)...(19): siRNA sense strand
gaacuuauguagaagauca

SEQ ID NO: 1349063 - RNA, 19 nt, Homo sapiens
  misc_RNA (1)...(19): siRNA sense strand
gaugaaagaugaugaagga

SEQ ID NO: 1349064 - RNA, 19 nt, Homo sapiens
  misc_RNA (1)...(19): siRNA sense strand
gggagaagcugcccuuaaa

SEQ ID NO: 1349065 - RNA, 19 nt, Homo sapiens
  misc_RNA (1)...(19): siRNA sense strand
caaauuagaugacauugga

SEQ ID NO: 1349066 - RNA, 19 nt, Homo sapiens
  misc_RNA (1)...(19): siRNA sense strand
ccaaagaaguugugaaguu

SEQ ID NO: 1349067 - RNA, 19 nt, Homo sapiens
  misc_RNA (1)...(19): siRNA sense strand
caggaaagcuucaguuuga

SEQ ID NO: 1349068 - RNA, 19 nt, Homo sapiens
  misc_RNA (1)...(19): siRNA sense strand
gaaggcaucucuuacaaau

SEQ ID NO: 1349069 - RNA, 19 nt, Homo sapiens
  misc_RNA (1)...(19): siRNA sense strand
gaugaaagaugaccaggaa

SEQ ID NO: 1349070 - RNA, 19 nt, Homo sapiens
  misc_RNA (1)...(19): siRNA sense strand
ugaaggaacuuacacguuu

SEQ ID NO: 1349071 - RNA, 19 nt, Homo sapiens
  misc_RNA (1)...(19): siRNA sense strand
gguacucaaucacuaauua

SEQ ID NO: 1349072 - RNA, 19 nt, Homo sapiens
  misc_RNA (1)...(19): siRNA sense strand
gaccuuaccuguacagaaa

SEQ ID NO: 1349073 - RNA, 19 nt, Homo sapiens
  misc_RNA (1)...(19): siRNA sense strand
gaagagggcuauuaugaag

SEQ ID NO: 1349074 - RNA, 19 nt, Homo sapiens
  misc_RNA (1)...(19): siRNA sense strand
ugaagaagauggagaagaa

SEQ ID NO: 1349075 - RNA, 19 nt, Homo sapiens
  misc_RNA (1)...(19): siRNA sense strand
gaagagaaacgcuuuguug

SEQ ID NO: 1349076 - RNA, 19 nt, Homo sapiens
  misc_RNA (1)...(19): siRNA sense strand
gaaaucaaaucaacugaca

SEQ ID NO: 1349077 - RNA, 19 nt, Homo sapiens
  misc_RNA (1)...(19): siRNA sense strand
gaagaaugguguggaaauu

SEQ ID NO: 1349078 - RNA, 19 nt, Homo sapiens
  misc_RNA (1)...(19): siRNA sense strand
ggagaaagauaccaaaugg

SEQ ID NO: 1349079 - RNA, 19 nt, Homo sapiens
  misc_RNA (1)...(19): siRNA sense strand
caaagugaguuacaacaaa

SEQ ID NO: 1349080 - RNA, 19 nt, Homo sapiens
  misc_RNA (1)...(19): siRNA sense strand
cuaaagaggugaaacaaga

SEQ ID NO: 1349081 - RNA, 19 nt, Homo sapiens
  misc_RNA (1)...(19): siRNA sense strand
gagaauggcucaugaaggu

SEQ ID NO: 1349082 - RNA, 19 nt, Homo sapiens
  misc_RNA (1)...(19): siRNA sense strand
gaaacaauacugagaacua

SEQ ID NO: 1349083 - RNA, 19 nt, Homo sapiens
  misc_RNA (1)...(19): siRNA sense strand
gcaaauaacucaggagaag

SEQ ID NO: 1349084 - RNA, 19 nt, Homo sapiens
  misc_RNA (1)...(19): siRNA sense strand
gcagagccacuaacaaaua

SEQ ID NO: 1349085 - RNA, 19 nt, Homo sapiens
  misc_RNA (1)...(19): siRNA sense strand
guauaaagauggcauugaa

SEQ ID NO: 1349086 - RNA, 19 nt, Homo sapiens
  misc_RNA (1)...(19): siRNA sense strand
caucaaacauggagaaaga

SEQ ID NO: 1349087 - RNA, 19 nt, Homo sapiens
  misc_RNA (1)...(19): siRNA sense strand
gaaggaaaaugguaucaua

SEQ ID NO: 1349088 - RNA, 19 nt, Homo sapiens
  misc_RNA (1)...(19): siRNA sense strand
gaacaagaaacaauacuga

SEQ ID NO: 1349089 - RNA, 19 nt, Homo sapiens
  misc_RNA (1)...(19): siRNA sense strand
caacauagcuggagaaacc

SEQ ID NO: 1349090 - RNA, 19 nt, Homo sapiens
  misc_RNA (1)...(19): siRNA sense strand
gaagagcgcuuugaaguac

SEQ ID NO: 1349091 - RNA, 19 nt, Homo sapiens
  misc_RNA (1)...(19): siRNA sense strand
gaauugauguccuguggaa

SEQ ID NO: 1349092 - RNA, 19 nt, Homo sapiens
  misc_RNA (1)...(19): siRNA sense strand
gaaagaauccagagccaaa

SEQ ID NO: 1349093 - RNA, 19 nt, Homo sapiens
  misc_RNA (1)...(19): siRNA sense strand
ggauacagauacaaaguga

SEQ ID NO: 1349094 - RNA, 19 nt, Homo sapiens
  misc_RNA (1)...(19): siRNA sense strand
gcagaucacagacagaaua

SEQ ID NO: 1349095 - RNA, 19 nt, Homo sapiens
  misc_RNA (1)...(19): siRNA sense strand
gaaaccaacuguaaucucu

SEQ ID NO: 1349096 - RNA, 19 nt, Homo sapiens
  misc_RNA (1)...(19): siRNA sense strand
ggacauagaaguuccagaa

SEQ ID NO: 1349097 - RNA, 19 nt, Homo sapiens
  misc_RNA (1)...(19): siRNA sense strand
ggauauccauuaccaaaga

SEQ ID NO: 1349098 - RNA, 19 nt, Homo sapiens
  misc_RNA (1)...(19): siRNA sense strand
caaagaaguugugaaguug

SEQ ID NO: 1349099 - RNA, 19 nt, Homo sapiens
  misc_RNA (1)...(19): siRNA sense strand
caucaggaauguucacuuu

SEQ ID NO: 1349100 - RNA, 19 nt, Homo sapiens
  misc_RNA (1)...(19): siRNA sense strand
gaauuagagugcauuguau

SEQ ID NO: 1349101 - RNA, 19 nt, Homo sapiens
  misc_RNA (1)...(19): siRNA sense strand
uaaagaagaugguacucaa

SEQ ID NO: 1349102 - RNA, 19 nt, Homo sapiens
  misc_RNA (1)...(19): siRNA sense strand
uguggaagcucgucauaua

SEQ ID NO: 1349103 - RNA, 19 nt, Homo sapiens
  misc_RNA (1)...(19): siRNA sense strand
gaaaugaaagucagagcua

SEQ ID NO: 1349104 - RNA, 19 nt, Homo sapiens
  misc_RNA (1)...(19): siRNA sense strand
caaauggacuuucuacaag

SEQ ID NO: 1349105 - RNA, 19 nt, Homo sapiens
  misc_RNA (1)...(19): siRNA sense strand
ggaaaugccuguuuaucca

SEQ ID NO: 1349106 - RNA, 19 nt, Homo sapiens
  misc_RNA (1)...(19): siRNA sense strand
acacaaauauguaguggaa

SEQ ID NO: 1349107 - RNA, 19 nt, Homo sapiens
  misc_RNA (1)...(19): siRNA sense strand
ggaagaugcuggaaauuac

SEQ ID NO: 1349108 - RNA, 19 nt, Homo sapiens
  misc_RNA (1)...(19): siRNA sense strand
ccaaagaguuaacugaaga

SEQ ID NO: 1349109 - RNA, 19 nt, Homo sapiens
  misc_RNA (1)...(19): siRNA sense strand
cggaagagcugcgcaguaa

SEQ ID NO: 1349110 - RNA, 19 nt, Homo sapiens
  misc_RNA (1)...(19): siRNA sense strand
uaaggaagaugcuggaaau

SEQ ID NO: 1349111 - RNA, 19 nt, Homo sapiens
  misc_RNA (1)...(19): siRNA sense strand
ucagggaccuauucaguaa

SEQ ID NO: 1349112 - RNA, 19 nt, Homo sapiens
  misc_RNA (1)...(19): siRNA sense strand
gcacggaugucaccugcaa

SEQ ID NO: 1349113 - RNA, 19 nt, Homo sapiens
  misc_RNA (1)...(19): siRNA sense strand
gagaugugguuaugacuga

SEQ ID NO: 1349114 - RNA, 19 nt, Homo sapiens
  misc_RNA (1)...(19): siRNA sense strand
caagaacaaauccaaguua

SEQ ID NO: 1349115 - RNA, 19 nt, Homo sapiens
  misc_RNA (1)...(19): siRNA sense strand
gagaaacuauggcuacuag

SEQ ID NO: 1349116 - RNA, 19 nt, Homo sapiens
  misc_RNA (1)...(19): siRNA sense strand
ggagaagacugcuguaacu

SEQ ID NO: 1349117 - RNA, 19 nt, Homo sapiens
  misc_RNA (1)...(19): siRNA sense strand
gcacauaucaucacagauc

SEQ ID NO: 1349118 - RNA, 19 nt, Homo sapiens
  misc_RNA (1)...(19): siRNA sense strand
ggaaacacauuaaggacau

SEQ ID NO: 1349119 - RNA, 19 nt, Homo sapiens
  misc_RNA (1)...(19): siRNA sense strand
gaaauuaagccaagugaca

SEQ ID NO: 1349120 - RNA, 19 nt, Homo sapiens
  misc_RNA (1)...(19): siRNA sense strand
gaugaaagacggccaagaa

SEQ ID NO: 1349121 - RNA, 19 nt, Homo sapiens
  misc_RNA (1)...(19): siRNA sense strand
guuaaagucuccuuggaaa

SEQ ID NO: 1349122 - RNA, 19 nt, Homo sapiens
  misc_RNA (1)...(19): siRNA sense strand
gagcucaagucucgaaaga

SEQ ID NO: 1349123 - RNA, 19 nt, Homo sapiens
  misc_RNA (1)...(19): siRNA sense strand
gaaagaauuacccaugaaa

SEQ ID NO: 1349124 - RNA, 19 nt, Homo sapiens
  misc_RNA (1)...(19): siRNA sense strand
gaaggaaucuacacugcau

SEQ ID NO: 1349125 - RNA, 19 nt, Homo sapiens
  misc_RNA (1)...(19): siRNA sense strand
gauuaugaguuacugauga

SEQ ID NO: 1349126 - RNA, 19 nt, Homo sapiens
  misc_RNA (1)...(19): siRNA sense strand
ugaagaagcugauuaugag

SEQ ID NO: 1349127 - RNA, 19 nt, Homo sapiens
  misc_RNA (1)...(19): siRNA sense strand
gagaaacgcuuuguugagu

SEQ ID NO: 1349128 - RNA, 19 nt, Homo sapiens
  misc_RNA (1)...(19): siRNA sense strand
gcaggugucagaagaauuu

SEQ ID NO: 1349129 - RNA, 19 nt, Homo sapiens
  misc_RNA (1)...(19): siRNA sense strand
gaaauuuacuacagaagag

SEQ ID NO: 1349130 - RNA, 19 nt, Homo sapiens
  misc_RNA (1)...(19): siRNA sense strand
ggaaauugccgaagcuuau

SEQ ID NO: 1349131 - RNA, 19 nt, Homo sapiens
  misc_RNA (1)...(19): siRNA sense strand
gaaauugagaugagugaaa

SEQ ID NO: 1349132 - RNA, 19 nt, Homo sapiens
  misc_RNA (1)...(19): siRNA sense strand
cauagaaguuccagaauca

SEQ ID NO: 1349133 - RNA, 19 nt, Homo sapiens
  misc_RNA (1)...(19): siRNA sense strand
agacaaacccgaauugaaa

SEQ ID NO: 1349134 - RNA, 19 nt, Homo sapiens
  misc_RNA (1)...(19): siRNA sense strand
ggaacaauuuacucucuga

SEQ ID NO: 1349135 - RNA, 19 nt, Homo sapiens
  misc_RNA (1)...(19): siRNA sense strand
gaaaucaagcccaguucua

SEQ ID NO: 1349136 - RNA, 19 nt, Homo sapiens
  misc_RNA (1)...(19): siRNA sense strand
gaaagacggccaagaagug

SEQ ID NO: 1349137 - RNA, 19 nt, Homo sapiens
  misc_RNA (1)...(19): siRNA sense strand
ccaagcaauugaucacuuu

SEQ ID NO: 1349138 - RNA, 19 nt, Homo sapiens
  misc_RNA (1)...(19): siRNA sense strand
gagaaggcauuacuaccaa

SEQ ID NO: 1349139 - RNA, 19 nt, Homo sapiens
  misc_RNA (1)...(19): siRNA sense strand
gaaaacaguuguaccuaaa

SEQ ID NO: 1349140 - RNA, 19 nt, Homo sapiens
  misc_RNA (1)...(19): siRNA sense strand
caagaaaugcuuuaucaga

SEQ ID NO: 1349141 - RNA, 19 nt, Homo sapiens
  misc_RNA (1)...(19): siRNA sense strand
gaaggaacuuacacguuug

SEQ ID NO: 1349142 - RNA, 19 nt, Homo sapiens
  misc_RNA (1)...(19): siRNA sense strand
aaacagcgacuagucauua

SEQ ID NO: 1349143 - RNA, 19 nt, Homo sapiens
  misc_RNA (1)...(19): siRNA sense strand
caagugagacuccaaguga

SEQ ID NO: 1349144 - RNA, 19 nt, Homo sapiens
  misc_RNA (1)...(19): siRNA sense strand
gaaguugugucuccugauc

SEQ ID NO: 1349145 - RNA, 19 nt, Homo sapiens
  misc_RNA (1)...(19): siRNA sense strand
gaagaagcgagccauguuu

SEQ ID NO: 1349146 - RNA, 19 nt, Homo sapiens
  misc_RNA (1)...(19): siRNA sense strand
ccaggaagcuguguuugaa

SEQ ID NO: 1349147 - RNA, 19 nt, Homo sapiens
  misc_RNA (1)...(19): siRNA sense strand
gaaacaacagaaaccauuu

SEQ ID NO: 1349148 - RNA, 19 nt, Homo sapiens
  misc_RNA (1)...(19): siRNA sense strand
gcaagcuggugauuucuau

SEQ ID NO: 1349149 - RNA, 19 nt, Homo sapiens
  misc_RNA (1)...(19): siRNA sense strand
cauccaaccugcucaagaa

SEQ ID NO: 1349150 - RNA, 19 nt, Homo sapiens
  misc_RNA (1)...(19): siRNA sense strand
gaagauugaagcccacuuu

SEQ ID NO: 1349151 - RNA, 19 nt, Homo sapiens
  misc_RNA (1)...(19): siRNA sense strand
gcucagaucucagaaucaa

SEQ ID NO: 1349152 - RNA, 19 nt, Homo sapiens
  misc_RNA (1)...(19): siRNA sense strand
gaacaagccuuaauuagga

SEQ ID NO: 1349153 - RNA, 19 nt, Homo sapiens
  misc_RNA (1)...(19): siRNA sense strand
gaaacaagaugcugacaaa

SEQ ID NO: 1349154 - RNA, 19 nt, Homo sapiens
  misc_RNA (1)...(19): siRNA sense strand
gaucaggaauuccauauuu

SEQ ID NO: 1349155 - RNA, 19 nt, Homo sapiens
  misc_RNA (1)...(19): siRNA sense strand
ggaagaaggugaucucuau

SEQ ID NO: 1349156 - RNA, 19 nt, Homo sapiens
  misc_RNA (1)...(19): siRNA sense strand
ggucagaacuuauguagaa

SEQ ID NO: 1349157 - RNA, 19 nt, Homo sapiens
  misc_RNA (1)...(19): siRNA sense strand
gcaggcagaucuucaauuu

SEQ ID NO: 1349158 - RNA, 19 nt, Homo sapiens
  misc_RNA (1)...(19): siRNA sense strand
guggagacauuacauauua

SEQ ID NO: 1349159 - RNA, 19 nt, Homo sapiens
  misc_RNA (1)...(19): siRNA sense strand
gaaaagggcugaaagaauu

SEQ ID NO: 1349160 - RNA, 19 nt, Homo sapiens
  misc_RNA (1)...(19): siRNA sense strand
gaaagaacuucaggacaua

SEQ ID NO: 1349161 - RNA, 19 nt, Homo sapiens
  misc_RNA (1)...(19): siRNA sense strand
gaacagaagagggcuauua

SEQ ID NO: 1349162 - RNA, 19 nt, Homo sapiens
  misc_RNA (1)...(19): siRNA sense strand
gaacuuauguagaagauca

SEQ ID NO: 1349163 - RNA, 19 nt, Homo sapiens
  misc_RNA (1)...(19): siRNA sense strand
gaugaaagaugaugaagga

SEQ ID NO: 1349164 - RNA, 19 nt, Homo sapiens
  misc_RNA (1)...(19): siRNA sense strand
gggagaagcugcccuuaaa

SEQ ID NO: 1349165 - RNA, 19 nt, Homo sapiens
  misc_RNA (1)...(19): siRNA sense strand
caaauuagaugacauugga

SEQ ID NO: 1349166 - RNA, 19 nt, Homo sapiens
  misc_RNA (1)...(19): siRNA sense strand
ccaaagaaguugugaaguu

SEQ ID NO: 1349167 - RNA, 19 nt, Homo sapiens
  misc_RNA (1)...(19): siRNA sense strand
caggaaagcuucaguuuga

SEQ ID NO: 1349168 - RNA, 19 nt, Homo sapiens
  misc_RNA (1)...(19): siRNA sense strand
gaaggcaucucuuacaaau

SEQ ID NO: 1349169 - RNA, 19 nt, Homo sapiens
  misc_RNA (1)...(19): siRNA sense strand
gaugaaagaugaccaggaa

SEQ ID NO: 1349170 - RNA, 19 nt, Homo sapiens
  misc_RNA (1)...(19): siRNA sense strand
ugaaggaacuuacacguuu

SEQ ID NO: 1349171 - RNA, 19 nt, Homo sapiens
  misc_RNA (1)...(19): siRNA sense strand
gguacucaaucacuaauua

SEQ ID NO: 1349172 - RNA, 19 nt, Homo sapiens
  misc_RNA (1)...(19): siRNA sense strand
gaccuuaccuguacagaaa

SEQ ID NO: 1349173 - RNA, 19 nt, Homo sapiens
  misc_RNA (1)...(19): siRNA sense strand
gaagagggcuauuaugaag

SEQ ID NO: 1349174 - RNA, 19 nt, Homo sapiens
  misc_RNA (1)...(19): siRNA sense strand
ugaagaagauggagaagaa

SEQ ID NO: 1349175 - RNA, 19 nt, Homo sapiens
  misc_RNA (1)...(19): siRNA sense strand
gaagagaaacgcuuuguug

SEQ ID NO: 1349176 - RNA, 19 nt, Homo sapiens
  misc_RNA (1)...(19): siRNA sense strand
gaaaucaaaucaacugaca

SEQ ID NO: 1349177 - RNA, 19 nt, Homo sapiens
  misc_RNA (1)...(19): siRNA sense strand
gaagaaugguguggaaauu

SEQ ID NO: 1349178 - RNA, 19 nt, Homo sapiens
  misc_RNA (1)...(19): siRNA sense strand
ggagaaagauaccaaaugg

SEQ ID NO: 1349179 - RNA, 19 nt, Homo sapiens
  misc_RNA (1)...(19): siRNA sense strand
caaagugaguuacaacaaa

SEQ ID NO: 1349180 - RNA, 19 nt, Homo sapiens
  misc_RNA (1)...(19): siRNA sense strand
cuaaagaggugaaacaaga

SEQ ID NO: 1349181 - RNA, 19 nt, Homo sapiens
  misc_RNA (1)...(19): siRNA sense strand
gagaauggcucaugaaggu

SEQ ID NO: 1349182 - RNA, 19 nt, Homo sapiens
  misc_RNA (1)...(19): siRNA sense strand
gaaacaauacugagaacua

SEQ ID NO: 1349183 - RNA, 19 nt, Homo sapiens
  misc_RNA (1)...(19): siRNA sense strand
gcaaauaacucaggagaag

SEQ ID NO: 1349184 - RNA, 19 nt, Homo sapiens
  misc_RNA (1)...(19): siRNA sense strand
gcagagccacuaacaaaua

SEQ ID NO: 1349185 - RNA, 19 nt, Homo sapiens
  misc_RNA (1)...(19): siRNA sense strand
guauaaagauggcauugaa

SEQ ID NO: 1349186 - RNA, 19 nt, Homo sapiens
  misc_RNA (1)...(19): siRNA sense strand
caucaaacauggagaaaga

SEQ ID NO: 1349187 - RNA, 19 nt, Homo sapiens
  misc_RNA (1)...(19): siRNA sense strand
gaaggaaaaugguaucaua

SEQ ID NO: 1349188 - RNA, 19 nt, Homo sapiens
  misc_RNA (1)...(19): siRNA sense strand
gaacaagaaacaauacuga

SEQ ID NO: 1349189 - RNA, 19 nt, Homo sapiens
  misc_RNA (1)...(19): siRNA sense strand
caacauagcuggagaaacc

SEQ ID NO: 1349190 - RNA, 19 nt, Homo sapiens
  misc_RNA (1)...(19): siRNA sense strand
gaagagcgcuuugaaguac

SEQ ID NO: 1349191 - RNA, 19 nt, Homo sapiens
  misc_RNA (1)...(19): siRNA sense strand
gaauugauguccuguggaa

SEQ ID NO: 1349192 - RNA, 19 nt, Homo sapiens
  misc_RNA (1)...(19): siRNA sense strand
gaaagaauccagagccaaa

SEQ ID NO: 1349193 - RNA, 19 nt, Homo sapiens
  misc_RNA (1)...(19): siRNA sense strand
ggauacagauacaaaguga

SEQ ID NO: 1349194 - RNA, 19 nt, Homo sapiens
  misc_RNA (1)...(19): siRNA sense strand
gcagaucacagacagaaua

SEQ ID NO: 1349195 - RNA, 19 nt, Homo sapiens
  misc_RNA (1)...(19): siRNA sense strand
gaaaccaacuguaaucucu

SEQ ID NO: 1349196 - RNA, 19 nt, Homo sapiens
  misc_RNA (1)...(19): siRNA sense strand
ggacauagaaguuccagaa

SEQ ID NO: 1349197 - RNA, 19 nt, Homo sapiens
  misc_RNA (1)...(19): siRNA sense strand
ggauauccauuaccaaaga

SEQ ID NO: 1349198 - RNA, 19 nt, Homo sapiens
  misc_RNA (1)...(19): siRNA sense strand
caaagaaguugugaaguug

SEQ ID NO: 1349199 - RNA, 19 nt, Homo sapiens
  misc_RNA (1)...(19): siRNA sense strand
caucaggaauguucacuuu

SEQ ID NO: 1349200 - RNA, 19 nt, Homo sapiens
  misc_RNA (1)...(19): siRNA sense strand
gaauuagagugcauuguau

SEQ ID NO: 1349201 - RNA, 19 nt, Homo sapiens
  misc_RNA (1)...(19): siRNA sense strand
uaaagaagaugguacucaa

SEQ ID NO: 1349202 - RNA, 19 nt, Homo sapiens
  misc_RNA (1)...(19): siRNA sense strand
uguggaagcucgucauaua

SEQ ID NO: 1349203 - RNA, 19 nt, Homo sapiens
  misc_RNA (1)...(19): siRNA sense strand
gaaaugaaagucagagcua

SEQ ID NO: 1349204 - RNA, 19 nt, Homo sapiens
  misc_RNA (1)...(19): siRNA sense strand
caaauggacuuucuacaag

SEQ ID NO: 1349205 - RNA, 19 nt, Homo sapiens
  misc_RNA (1)...(19): siRNA sense strand
ggaaaugccuguuuaucca

SEQ ID NO: 1349206 - RNA, 19 nt, Homo sapiens
  misc_RNA (1)...(19): siRNA sense strand
acacaaauauguaguggaa

SEQ ID NO: 1349207 - RNA, 19 nt, Homo sapiens
  misc_RNA (1)...(19): siRNA sense strand
ggaagaugcuggaaauuac

SEQ ID NO: 1349208 - RNA, 19 nt, Homo sapiens
  misc_RNA (1)...(19): siRNA sense strand
ccaaagaguuaacugaaga

SEQ ID NO: 1349209 - RNA, 19 nt, Homo sapiens
  misc_RNA (1)...(19): siRNA sense strand
cggaagagcugcgcaguaa

SEQ ID NO: 1349210 - RNA, 19 nt, Homo sapiens
  misc_RNA (1)...(19): siRNA sense strand
uaaggaagaugcuggaaau

SEQ ID NO: 1349211 - RNA, 19 nt, Homo sapiens
  misc_RNA (1)...(19): siRNA sense strand
ucagggaccuauucaguaa

SEQ ID NO: 1349212 - RNA, 19 nt, Homo sapiens
  misc_RNA (1)...(19): siRNA sense strand
gcacggaugucaccugcaa

SEQ ID NO: 1349213 - RNA, 19 nt, Homo sapiens
  misc_RNA (1)...(19): siRNA sense strand
gagaugugguuaugacuga

SEQ ID NO: 1349214 - RNA, 19 nt, Homo sapiens
  misc_RNA (1)...(19): siRNA sense strand
caagaacaaauccaaguua

SEQ ID NO: 1349215 - RNA, 19 nt, Homo sapiens
  misc_RNA (1)...(19): siRNA sense strand
gagaaacuauggcuacuag

SEQ ID NO: 1349216 - RNA, 19 nt, Homo sapiens
  misc_RNA (1)...(19): siRNA sense strand
ggagaagacugcuguaacu

SEQ ID NO: 1349217 - RNA, 19 nt, Homo sapiens
  misc_RNA (1)...(19): siRNA sense strand
gcacauaucaucacagauc

SEQ ID NO: 1349218 - RNA, 19 nt, Homo sapiens
  misc_RNA (1)...(19): siRNA sense strand
ggaaacacauuaaggacau

SEQ ID NO: 1349219 - RNA, 19 nt, Homo sapiens
  misc_RNA (1)...(19): siRNA sense strand
gaaauuaagccaagugaca

SEQ ID NO: 1349220 - RNA, 19 nt, Homo sapiens
  misc_RNA (1)...(19): siRNA sense strand
gaugaaagacggccaagaa

SEQ ID NO: 1349221 - RNA, 19 nt, Homo sapiens
  misc_RNA (1)...(19): siRNA sense strand
guuaaagucuccuuggaaa

SEQ ID NO: 1349222 - RNA, 19 nt, Homo sapiens
  misc_RNA (1)...(19): siRNA sense strand
gagcucaagucucgaaaga

SEQ ID NO: 1349223 - RNA, 19 nt, Homo sapiens
  misc_RNA (1)...(19): siRNA sense strand
gaaagaauuacccaugaaa

SEQ ID NO: 1349224 - RNA, 19 nt, Homo sapiens
  misc_RNA (1)...(19): siRNA sense strand
gaaggaaucuacacugcau

SEQ ID NO: 1349225 - RNA, 19 nt, Homo sapiens
  misc_RNA (1)...(19): siRNA sense strand
gauuaugaguuacugauga

SEQ ID NO: 1349226 - RNA, 19 nt, Homo sapiens
  misc_RNA (1)...(19): siRNA sense strand
ugaagaagcugauuaugag

SEQ ID NO: 1349227 - RNA, 19 nt, Homo sapiens
  misc_RNA (1)...(19): siRNA sense strand
gagaaacgcuuuguugagu

SEQ ID NO: 1349228 - RNA, 19 nt, Homo sapiens
  misc_RNA (1)...(19): siRNA sense strand
gcaggugucagaagaauuu

SEQ ID NO: 1349229 - RNA, 19 nt, Homo sapiens
  misc_RNA (1)...(19): siRNA sense strand
gaaauuuacuacagaagag

SEQ ID NO: 1349230 - RNA, 19 nt, Homo sapiens
  misc_RNA (1)...(19): siRNA sense strand
ggaaauugccgaagcuuau

SEQ ID NO: 1349231 - RNA, 19 nt, Homo sapiens
  misc_RNA (1)...(19): siRNA sense strand
gaaauugagaugagugaaa

SEQ ID NO: 1349232 - RNA, 19 nt, Homo sapiens
  misc_RNA (1)...(19): siRNA sense strand
cauagaaguuccagaauca

SEQ ID NO: 1349233 - RNA, 19 nt, Homo sapiens
  misc_RNA (1)...(19): siRNA sense strand
agacaaacccgaauugaaa

SEQ ID NO: 1349234 - RNA, 19 nt, Homo sapiens
  misc_RNA (1)...(19): siRNA sense strand
ggaacaauuuacucucuga

SEQ ID NO: 1349235 - RNA, 19 nt, Homo sapiens
  misc_RNA (1)...(19): siRNA sense strand
gaaaucaagcccaguucua

SEQ ID NO: 1349236 - RNA, 19 nt, Homo sapiens
  misc_RNA (1)...(19): siRNA sense strand
gaaagacggccaagaagug

SEQ ID NO: 1349237 - RNA, 19 nt, Homo sapiens
  misc_RNA (1)...(19): siRNA sense strand
ccaagcaauugaucacuuu

SEQ ID NO: 1349238 - RNA, 19 nt, Homo sapiens
  misc_RNA (1)...(19): siRNA sense strand
gagaaggcauuacuaccaa

SEQ ID NO: 1349239 - RNA, 19 nt, Homo sapiens
  misc_RNA (1)...(19): siRNA sense strand
gaaaacaguuguaccuaaa

SEQ ID NO: 1349240 - RNA, 19 nt, Homo sapiens
  misc_RNA (1)...(19): siRNA sense strand
caagaaaugcuuuaucaga

SEQ ID NO: 1349241 - RNA, 19 nt, Homo sapiens
  misc_RNA (1)...(19): siRNA sense strand
gaaggaacuuacacguuug

SEQ ID NO: 1349242 - RNA, 19 nt, Homo sapiens
  misc_RNA (1)...(19): siRNA sense strand
aaacagcgacuagucauua

SEQ ID NO: 1349243 - RNA, 19 nt, Homo sapiens
  misc_RNA (1)...(19): siRNA sense strand
caagugagacuccaaguga

SEQ ID NO: 1349244 - RNA, 19 nt, Homo sapiens
  misc_RNA (1)...(19): siRNA sense strand
gaaguugugucuccugauc

SEQ ID NO: 1349245 - RNA, 19 nt, Homo sapiens
  misc_RNA (1)...(19): siRNA sense strand
gaagaagcgagccauguuu

SEQ ID NO: 1349246 - RNA, 19 nt, Homo sapiens
  misc_RNA (1)...(19): siRNA sense strand
ccaggaagcuguguuugaa

SEQ ID NO: 1349247 - RNA, 19 nt, Homo sapiens
  misc_RNA (1)...(19): siRNA sense strand
gaaacaacagaaaccauuu

SEQ ID NO: 1349248 - RNA, 19 nt, Homo sapiens
  misc_RNA (1)...(19): siRNA sense strand
gcaagcuggugauuucuau

SEQ ID NO: 1349249 - RNA, 19 nt, Homo sapiens
  misc_RNA (1)...(19): siRNA sense strand
cauccaaccugcucaagaa

SEQ ID NO: 1349250 - RNA, 19 nt, Homo sapiens
  misc_RNA (1)...(19): siRNA sense strand
gaagauugaagcccacuuu

SEQ ID NO: 1349251 - RNA, 19 nt, Homo sapiens
  misc_RNA (1)...(19): siRNA sense strand
gcucagaucucagaaucaa

SEQ ID NO: 1349252 - RNA, 19 nt, Homo sapiens
  misc_RNA (1)...(19): siRNA sense strand
gaacaagccuuaauuagga

SEQ ID NO: 1349253 - RNA, 19 nt, Homo sapiens
  misc_RNA (1)...(19): siRNA sense strand
gaaacaagaugcugacaaa

SEQ ID NO: 1349254 - RNA, 19 nt, Homo sapiens
  misc_RNA (1)...(19): siRNA sense strand
gaucaggaauuccauauuu

SEQ ID NO: 1349255 - RNA, 19 nt, Homo sapiens
  misc_RNA (1)...(19): siRNA sense strand
ggaagaaggugaucucuau

SEQ ID NO: 1349256 - RNA, 19 nt, Homo sapiens
  misc_RNA (1)...(19): siRNA sense strand
ggucagaacuuauguagaa

SEQ ID NO: 1349257 - RNA, 19 nt, Homo sapiens
  misc_RNA (1)...(19): siRNA sense strand
gcaggcagaucuucaauuu

SEQ ID NO: 1349258 - RNA, 19 nt, Homo sapiens
  misc_RNA (1)...(19): siRNA sense strand
guggagacauuacauauua

SEQ ID NO: 1349259 - RNA, 19 nt, Homo sapiens
  misc_RNA (1)...(19): siRNA sense strand
gaaaagggcugaaagaauu

SEQ ID NO: 1349260 - RNA, 19 nt, Homo sapiens
  misc_RNA (1)...(19): siRNA sense strand
gaaagaacuucaggacaua

SEQ ID NO: 1349261 - RNA, 19 nt, Homo sapiens
  misc_RNA (1)...(19): siRNA sense strand
gaacagaagagggcuauua

SEQ ID NO: 1349262 - RNA, 19 nt, Homo sapiens
  misc_RNA (1)...(19): siRNA sense strand
gaacuuauguagaagauca

SEQ ID NO: 1349263 - RNA, 19 nt, Homo sapiens
  misc_RNA (1)...(19): siRNA sense strand
gaugaaagaugaugaagga

SEQ ID NO: 1349264 - RNA, 19 nt, Homo sapiens
  misc_RNA (1)...(19): siRNA sense strand
gggagaagcugcccuuaaa

SEQ ID NO: 1349265 - RNA, 19 nt, Homo sapiens
  misc_RNA (1)...(19): siRNA sense strand
caaauuagaugacauugga

SEQ ID NO: 1349266 - RNA, 19 nt, Homo sapiens
  misc_RNA (1)...(19): siRNA sense strand
ccaaagaaguugugaaguu

SEQ ID NO: 1349267 - RNA, 19 nt, Homo sapiens
  misc_RNA (1)...(19): siRNA sense strand
caggaaagcuucaguuuga

SEQ ID NO: 1349268 - RNA, 19 nt, Homo sapiens
  misc_RNA (1)...(19): siRNA sense strand
gaaggcaucucuuacaaau

SEQ ID NO: 1349269 - RNA, 19 nt, Homo sapiens
  misc_RNA (1)...(19): siRNA sense strand
gaugaaagaugaccaggaa

SEQ ID NO: 1349270 - RNA, 19 nt, Homo sapiens
  misc_RNA (1)...(19): siRNA sense strand
ugaaggaacuuacacguuu

SEQ ID NO: 1349271 - RNA, 19 nt, Homo sapiens
  misc_RNA (1)...(19): siRNA sense strand
gguacucaaucacuaauua

SEQ ID NO: 1349272 - RNA, 19 nt, Homo sapiens
  misc_RNA (1)...(19): siRNA sense strand
gaccuuaccuguacagaaa

SEQ ID NO: 1349273 - RNA, 19 nt, Homo sapiens
  misc_RNA (1)...(19): siRNA sense strand
gaagagggcuauuaugaag

SEQ ID NO: 1349274 - RNA, 19 nt, Homo sapiens
  misc_RNA (1)...(19): siRNA sense strand
ugaagaagauggagaagaa

SEQ ID NO: 1349275 - RNA, 19 nt, Homo sapiens
  misc_RNA (1)...(19): siRNA sense strand
gaagagaaacgcuuuguug

SEQ ID NO: 1349276 - RNA, 19 nt, Homo sapiens
  misc_RNA (1)...(19): siRNA sense strand
gaaaucaaaucaacugaca

SEQ ID NO: 1349277 - RNA, 19 nt, Homo sapiens
  misc_RNA (1)...(19): siRNA sense strand
gaagaaugguguggaaauu

SEQ ID NO: 1349278 - RNA, 19 nt, Homo sapiens
  misc_RNA (1)...(19): siRNA sense strand
ggagaaagauaccaaaugg

SEQ ID NO: 1349279 - RNA, 19 nt, Homo sapiens
  misc_RNA (1)...(19): siRNA sense strand
caaagugaguuacaacaaa

SEQ ID NO: 1349280 - RNA, 19 nt, Homo sapiens
  misc_RNA (1)...(19): siRNA sense strand
cuaaagaggugaaacaaga

SEQ ID NO: 1349281 - RNA, 19 nt, Homo sapiens
  misc_RNA (1)...(19): siRNA sense strand
gagaauggcucaugaaggu

SEQ ID NO: 1349282 - RNA, 19 nt, Homo sapiens
  misc_RNA (1)...(19): siRNA sense strand
gaaacaauacugagaacua

SEQ ID NO: 1349283 - RNA, 19 nt, Homo sapiens
  misc_RNA (1)...(19): siRNA sense strand
gcaaauaacucaggagaag

SEQ ID NO: 1349284 - RNA, 19 nt, Homo sapiens
  misc_RNA (1)...(19): siRNA sense strand
gcagagccacuaacaaaua

SEQ ID NO: 1349285 - RNA, 19 nt, Homo sapiens
  misc_RNA (1)...(19): siRNA sense strand
guauaaagauggcauugaa

SEQ ID NO: 1349286 - RNA, 19 nt, Homo sapiens
  misc_RNA (1)...(19): siRNA sense strand
caucaaacauggagaaaga

SEQ ID NO: 1349287 - RNA, 19 nt, Homo sapiens
  misc_RNA (1)...(19): siRNA sense strand
gaaggaaaaugguaucaua

SEQ ID NO: 1349288 - RNA, 19 nt, Homo sapiens
  misc_RNA (1)...(19): siRNA sense strand
gaacaagaaacaauacuga

SEQ ID NO: 1349289 - RNA, 19 nt, Homo sapiens
  misc_RNA (1)...(19): siRNA sense strand
caacauagcuggagaaacc

SEQ ID NO: 1349290 - RNA, 19 nt, Homo sapiens
  misc_RNA (1)...(19): siRNA sense strand
gaagagcgcuuugaaguac

SEQ ID NO: 1349291 - RNA, 19 nt, Homo sapiens
  misc_RNA (1)...(19): siRNA sense strand
gaauugauguccuguggaa

SEQ ID NO: 1349292 - RNA, 19 nt, Homo sapiens
  misc_RNA (1)...(19): siRNA sense strand
gaaagaauccagagccaaa

SEQ ID NO: 1349293 - RNA, 19 nt, Homo sapiens
  misc_RNA (1)...(19): siRNA sense strand
ggauacagauacaaaguga

SEQ ID NO: 1349294 - RNA, 19 nt, Homo sapiens
  misc_RNA (1)...(19): siRNA sense strand
gcagaucacagacagaaua

SEQ ID NO: 1349295 - RNA, 19 nt, Homo sapiens
  misc_RNA (1)...(19): siRNA sense strand
gaaaccaacuguaaucucu

SEQ ID NO: 1349296 - RNA, 19 nt, Homo sapiens
  misc_RNA (1)...(19): siRNA sense strand
ggacauagaaguuccagaa

SEQ ID NO: 1349297 - RNA, 19 nt, Homo sapiens
  misc_RNA (1)...(19): siRNA sense strand
ggauauccauuaccaaaga

SEQ ID NO: 1349298 - RNA, 19 nt, Homo sapiens
  misc_RNA (1)...(19): siRNA sense strand
caaagaaguugugaaguug

SEQ ID NO: 1349299 - RNA, 19 nt, Homo sapiens
  misc_RNA (1)...(19): siRNA sense strand
caucaggaauguucacuuu

SEQ ID NO: 1349300 - RNA, 19 nt, Homo sapiens
  misc_RNA (1)...(19): siRNA sense strand
gaauuagagugcauuguau

SEQ ID NO: 1349301 - RNA, 19 nt, Homo sapiens
  misc_RNA (1)...(19): siRNA sense strand
uaaagaagaugguacucaa

SEQ ID NO: 1349302 - RNA, 19 nt, Homo sapiens
  misc_RNA (1)...(19): siRNA sense strand
uguggaagcucgucauaua

SEQ ID NO: 1349303 - RNA, 19 nt, Homo sapiens
  misc_RNA (1)...(19): siRNA sense strand
gaaaugaaagucagagcua

SEQ ID NO: 1349304 - RNA, 19 nt, Homo sapiens
  misc_RNA (1)...(19): siRNA sense strand
caaauggacuuucuacaag

SEQ ID NO: 1349305 - RNA, 19 nt, Homo sapiens
  misc_RNA (1)...(19): siRNA sense strand
ggaaaugccuguuuaucca

SEQ ID NO: 1349306 - RNA, 19 nt, Homo sapiens
  misc_RNA (1)...(19): siRNA sense strand
acacaaauauguaguggaa

SEQ ID NO: 1349307 - RNA, 19 nt, Homo sapiens
  misc_RNA (1)...(19): siRNA sense strand
ggaagaugcuggaaauuac

SEQ ID NO: 1349308 - RNA, 19 nt, Homo sapiens
  misc_RNA (1)...(19): siRNA sense strand
ccaaagaguuaacugaaga

SEQ ID NO: 1349309 - RNA, 19 nt, Homo sapiens
  misc_RNA (1)...(19): siRNA sense strand
cggaagagcugcgcaguaa

SEQ ID NO: 1349310 - RNA, 19 nt, Homo sapiens
  misc_RNA (1)...(19): siRNA sense strand
uaaggaagaugcuggaaau

SEQ ID NO: 1349311 - RNA, 19 nt, Homo sapiens
  misc_RNA (1)...(19): siRNA sense strand
ucagggaccuauucaguaa

SEQ ID NO: 1349312 - RNA, 19 nt, Homo sapiens
  misc_RNA (1)...(19): siRNA sense strand
gcacggaugucaccugcaa

SEQ ID NO: 1349313 - RNA, 19 nt, Homo sapiens
  misc_RNA (1)...(19): siRNA sense strand
gagaugugguuaugacuga

SEQ ID NO: 1349314 - RNA, 19 nt, Homo sapiens
  misc_RNA (1)...(19): siRNA sense strand
caagaacaaauccaaguua

SEQ ID NO: 1349315 - RNA, 19 nt, Homo sapiens
  misc_RNA (1)...(19): siRNA sense strand
gagaaacuauggcuacuag

SEQ ID NO: 1349316 - RNA, 19 nt, Homo sapiens
  misc_RNA (1)...(19): siRNA sense strand
ggagaagacugcuguaacu

SEQ ID NO: 1349317 - RNA, 19 nt, Homo sapiens
  misc_RNA (1)...(19): siRNA sense strand
gcacauaucaucacagauc

SEQ ID NO: 1349318 - RNA, 19 nt, Homo sapiens
  misc_RNA (1)...(19): siRNA sense strand
ggaaacacauuaaggacau

SEQ ID NO: 1349319 - RNA, 19 nt, Homo sapiens
  misc_RNA (1)...(19): siRNA sense strand
gaaauuaagccaagugaca

SEQ ID NO: 1349320 - RNA, 19 nt, Homo sapiens
  misc_RNA (1)...(19): siRNA sense strand
gaugaaagacggccaagaa

SEQ ID NO: 1349321 - RNA, 19 nt, Homo sapiens
  misc_RNA (1)...(19): siRNA sense strand
guuaaagucuccuuggaaa

SEQ ID NO: 1349322 - RNA, 19 nt, Homo sapiens
  misc_RNA (1)...(19): siRNA sense strand
gagcucaagucucgaaaga

SEQ ID NO: 1349323 - RNA, 19 nt, Homo sapiens
  misc_RNA (1)...(19): siRNA sense strand
gaaagaauuacccaugaaa

SEQ ID NO: 1349324 - RNA, 19 nt, Homo sapiens
  misc_RNA (1)...(19): siRNA sense strand
gaaggaaucuacacugcau

SEQ ID NO: 1349325 - RNA, 19 nt, Homo sapiens
  misc_RNA (1)...(19): siRNA sense strand
gauuaugaguuacugauga

SEQ ID NO: 1349326 - RNA, 19 nt, Homo sapiens
  misc_RNA (1)...(19): siRNA sense strand
ugaagaagcugauuaugag

SEQ ID NO: 1349327 - RNA, 19 nt, Homo sapiens
  misc_RNA (1)...(19): siRNA sense strand
gagaaacgcuuuguugagu

SEQ ID NO: 1349328 - RNA, 19 nt, Homo sapiens
  misc_RNA (1)...(19): siRNA sense strand
gcaggugucagaagaauuu

SEQ ID NO: 1349329 - RNA, 19 nt, Homo sapiens
  misc_RNA (1)...(19): siRNA sense strand
gaaauuuacuacagaagag

SEQ ID NO: 1349330 - RNA, 19 nt, Homo sapiens
  misc_RNA (1)...(19): siRNA sense strand
ggaaauugccgaagcuuau

SEQ ID NO: 1349331 - RNA, 19 nt, Homo sapiens
  misc_RNA (1)...(19): siRNA sense strand
gaaauugagaugagugaaa

SEQ ID NO: 1349332 - RNA, 19 nt, Homo sapiens
  misc_RNA (1)...(19): siRNA sense strand
cauagaaguuccagaauca

SEQ ID NO: 1349333 - RNA, 19 nt, Homo sapiens
  misc_RNA (1)...(19): siRNA sense strand
agacaaacccgaauugaaa

SEQ ID NO: 1349334 - RNA, 19 nt, Homo sapiens
  misc_RNA (1)...(19): siRNA sense strand
ggaacaauuuacucucuga

SEQ ID NO: 1349335 - RNA, 19 nt, Homo sapiens
  misc_RNA (1)...(19): siRNA sense strand
gaaaucaagcccaguucua

SEQ ID NO: 1349336 - RNA, 19 nt, Homo sapiens
  misc_RNA (1)...(19): siRNA sense strand
gaaagacggccaagaagug

SEQ ID NO: 1349337 - RNA, 19 nt, Homo sapiens
  misc_RNA (1)...(19): siRNA sense strand
ccaagcaauugaucacuuu

SEQ ID NO: 1349338 - RNA, 19 nt, Homo sapiens
  misc_RNA (1)...(19): siRNA sense strand
gagaaggcauuacuaccaa

SEQ ID NO: 1349339 - RNA, 19 nt, Homo sapiens
  misc_RNA (1)...(19): siRNA sense strand
gaaaacaguuguaccuaaa

SEQ ID NO: 1349340 - RNA, 19 nt, Homo sapiens
  misc_RNA (1)...(19): siRNA sense strand
caagaaaugcuuuaucaga

SEQ ID NO: 1349341 - RNA, 19 nt, Homo sapiens
  misc_RNA (1)...(19): siRNA sense strand
gaaggaacuuacacguuug

SEQ ID NO: 1349342 - RNA, 19 nt, Homo sapiens
  misc_RNA (1)...(19): siRNA sense strand
aaacagcgacuagucauua

SEQ ID NO: 1349343 - RNA, 19 nt, Homo sapiens
  misc_RNA (1)...(19): siRNA sense strand
caagugagacuccaaguga

SEQ ID NO: 1349344 - RNA, 19 nt, Homo sapiens
  misc_RNA (1)...(19): siRNA sense strand
gaaguugugucuccugauc

SEQ ID NO: 1349345 - RNA, 19 nt, Homo sapiens
  misc_RNA (1)...(19): siRNA sense strand
gaagaagcgagccauguuu

SEQ ID NO: 1349346 - RNA, 19 nt, Homo sapiens
  misc_RNA (1)...(19): siRNA sense strand
ccaggaagcuguguuugaa

SEQ ID NO: 1349347 - RNA, 19 nt, Homo sapiens
  misc_RNA (1)...(19): siRNA sense strand
gaaacaacagaaaccauuu

SEQ ID NO: 1349348 - RNA, 19 nt, Homo sapiens
  misc_RNA (1)...(19): siRNA sense strand
gcaagcuggugauuucuau

SEQ ID NO: 1349349 - RNA, 19 nt, Homo sapiens
  misc_RNA (1)...(19): siRNA sense strand
cauccaaccugcucaagaa

SEQ ID NO: 1349350 - RNA, 19 nt, Homo sapiens
  misc_RNA (1)...(19): siRNA sense strand
gaagauugaagcccacuuu

SEQ ID NO: 1349351 - RNA, 19 nt, Homo sapiens
  misc_RNA (1)...(19): siRNA sense strand
gcucagaucucagaaucaa

SEQ ID NO: 1349352 - RNA, 19 nt, Homo sapiens
  misc_RNA (1)...(19): siRNA sense strand
gaacaagccuuaauuagga

SEQ ID NO: 1349353 - RNA, 19 nt, Homo sapiens
  misc_RNA (1)...(19): siRNA sense strand
gaaacaagaugcugacaaa

SEQ ID NO: 1349354 - RNA, 19 nt, Homo sapiens
  misc_RNA (1)...(19): siRNA sense strand
gaucaggaauuccauauuu

SEQ ID NO: 1349355 - RNA, 19 nt, Homo sapiens
  misc_RNA (1)...(19): siRNA sense strand
ggaagaaggugaucucuau

SEQ ID NO: 1349356 - RNA, 19 nt, Homo sapiens
  misc_RNA (1)...(19): siRNA sense strand
ggucagaacuuauguagaa

SEQ ID NO: 1349357 - RNA, 19 nt, Homo sapiens
  misc_RNA (1)...(19): siRNA sense strand
gcaggcagaucuucaauuu

SEQ ID NO: 1349358 - RNA, 19 nt, Homo sapiens
  misc_RNA (1)...(19): siRNA sense strand
guggagacauuacauauua

SEQ ID NO: 1349359 - RNA, 19 nt, Homo sapiens
  misc_RNA (1)...(19): siRNA sense strand
gaaaagggcugaaagaauu

SEQ ID NO: 1349360 - RNA, 19 nt, Homo sapiens
  misc_RNA (1)...(19): siRNA sense strand
gaaagaacuucaggacaua

SEQ ID NO: 1349361 - RNA, 19 nt, Homo sapiens
  misc_RNA (1)...(19): siRNA sense strand
gaacagaagagggcuauua

SEQ ID NO: 1349362 - RNA, 19 nt, Homo sapiens
  misc_RNA (1)...(19): siRNA sense strand
gaacuuauguagaagauca

SEQ ID NO: 1349363 - RNA, 19 nt, Homo sapiens
  misc_RNA (1)...(19): siRNA sense strand
gaugaaagaugaugaagga

SEQ ID NO: 1349364 - RNA, 19 nt, Homo sapiens
  misc_RNA (1)...(19): siRNA sense strand
gggagaagcugcccuuaaa

SEQ ID NO: 1349365 - RNA, 19 nt, Homo sapiens
  misc_RNA (1)...(19): siRNA sense strand
caaauuagaugacauugga

SEQ ID NO: 1349366 - RNA, 19 nt, Homo sapiens
  misc_RNA (1)...(19): siRNA sense strand
ccaaagaaguugugaaguu

SEQ ID NO: 1349367 - RNA, 19 nt, Homo sapiens
  misc_RNA (1)...(19): siRNA sense strand
caggaaagcuucaguuuga

SEQ ID NO: 1349368 - RNA, 19 nt, Homo sapiens
  misc_RNA (1)...(19): siRNA sense strand
gaaggcaucucuuacaaau

SEQ ID NO: 1349369 - RNA, 19 nt, Homo sapiens
  misc_RNA (1)...(19): siRNA sense strand
gaugaaagaugaccaggaa

SEQ ID NO: 1349370 - RNA, 19 nt, Homo sapiens
  misc_RNA (1)...(19): siRNA sense strand
ugaaggaacuuacacguuu

SEQ ID NO: 1349371 - RNA, 19 nt, Homo sapiens
  misc_RNA (1)...(19): siRNA sense strand
gguacucaaucacuaauua

SEQ ID NO: 1349372 - RNA, 19 nt, Homo sapiens
  misc_RNA (1)...(19): siRNA sense strand
gaccuuaccuguacagaaa

SEQ ID NO: 1349373 - RNA, 19 nt, Homo sapiens
  misc_RNA (1)...(19): siRNA sense strand
gaagagggcuauuaugaag

SEQ ID NO: 1349374 - RNA, 19 nt, Homo sapiens
  misc_RNA (1)...(19): siRNA sense strand
ugaagaagauggagaagaa

SEQ ID NO: 1349375 - RNA, 19 nt, Homo sapiens
  misc_RNA (1)...(19): siRNA sense strand
gaagagaaacgcuuuguug

SEQ ID NO: 1349376 - RNA, 19 nt, Homo sapiens
  misc_RNA (1)...(19): siRNA sense strand
gaaaucaaaucaacugaca

SEQ ID NO: 1349377 - RNA, 19 nt, Homo sapiens
  misc_RNA (1)...(19): siRNA sense strand
gaagaaugguguggaaauu

SEQ ID NO: 1349378 - RNA, 19 nt, Homo sapiens
  misc_RNA (1)...(19): siRNA sense strand
ggagaaagauaccaaaugg

SEQ ID NO: 1349379 - RNA, 19 nt, Homo sapiens
  misc_RNA (1)...(19): siRNA sense strand
caaagugaguuacaacaaa

SEQ ID NO: 1349380 - RNA, 19 nt, Homo sapiens
  misc_RNA (1)...(19): siRNA sense strand
cuaaagaggugaaacaaga

SEQ ID NO: 1349381 - RNA, 19 nt, Homo sapiens
  misc_RNA (1)...(19): siRNA sense strand
gagaauggcucaugaaggu

SEQ ID NO: 1349382 - RNA, 19 nt, Homo sapiens
  misc_RNA (1)...(19): siRNA sense strand
gaaacaauacugagaacua

SEQ ID NO: 1349383 - RNA, 19 nt, Homo sapiens
  misc_RNA (1)...(19): siRNA sense strand
gcaaauaacucaggagaag

SEQ ID NO: 1349384 - RNA, 19 nt, Homo sapiens
  misc_RNA (1)...(19): siRNA sense strand
gcagagccacuaacaaaua

SEQ ID NO: 1349385 - RNA, 19 nt, Homo sapiens
  misc_RNA (1)...(19): siRNA sense strand
guauaaagauggcauugaa

SEQ ID NO: 1349386 - RNA, 19 nt, Homo sapiens
  misc_RNA (1)...(19): siRNA sense strand
caucaaacauggagaaaga

SEQ ID NO: 1349387 - RNA, 19 nt, Homo sapiens
  misc_RNA (1)...(19): siRNA sense strand
gaaggaaaaugguaucaua

SEQ ID NO: 1349388 - RNA, 19 nt, Homo sapiens
  misc_RNA (1)...(19): siRNA sense strand
gaacaagaaacaauacuga

SEQ ID NO: 1349389 - RNA, 19 nt, Homo sapiens
  misc_RNA (1)...(19): siRNA sense strand
caacauagcuggagaaacc

SEQ ID NO: 1349390 - RNA, 19 nt, Homo sapiens
  misc_RNA (1)...(19): siRNA sense strand
gaagagcgcuuugaaguac

SEQ ID NO: 1349391 - RNA, 19 nt, Homo sapiens
  misc_RNA (1)...(19): siRNA sense strand
gaauugauguccuguggaa

SEQ ID NO: 1349392 - RNA, 19 nt, Homo sapiens
  misc_RNA (1)...(19): siRNA sense strand
gaaagaauccagagccaaa

SEQ ID NO: 1349393 - RNA, 19 nt, Homo sapiens
  misc_RNA (1)...(19): siRNA sense strand
ggauacagauacaaaguga

SEQ ID NO: 1349394 - RNA, 19 nt, Homo sapiens
  misc_RNA (1)...(19): siRNA sense strand
gcagaucacagacagaaua

SEQ ID NO: 1349395 - RNA, 19 nt, Homo sapiens
  misc_RNA (1)...(19): siRNA sense strand
gaaaccaacuguaaucucu

SEQ ID NO: 1349396 - RNA, 19 nt, Homo sapiens
  misc_RNA (1)...(19): siRNA sense strand
ggacauagaaguuccagaa

SEQ ID NO: 1349397 - RNA, 19 nt, Homo sapiens
  misc_RNA (1)...(19): siRNA sense strand
ggauauccauuaccaaaga

SEQ ID NO: 1349398 - RNA, 19 nt, Homo sapiens
  misc_RNA (1)...(19): siRNA sense strand
caaagaaguugugaaguug

SEQ ID NO: 1349399 - RNA, 19 nt, Homo sapiens
  misc_RNA (1)...(19): siRNA sense strand
caucaggaauguucacuuu

SEQ ID NO: 1349400 - RNA, 19 nt, Homo sapiens
  misc_RNA (1)...(19): siRNA sense strand
gaauuagagugcauuguau

SEQ ID NO: 1349401 - RNA, 19 nt, Homo sapiens
  misc_RNA (1)...(19): siRNA sense strand
uaaagaagaugguacucaa

SEQ ID NO: 1349402 - RNA, 19 nt, Homo sapiens
  misc_RNA (1)...(19): siRNA sense strand
uguggaagcucgucauaua

SEQ ID NO: 1349403 - RNA, 19 nt, Homo sapiens
  misc_RNA (1)...(19): siRNA sense strand
gaaaugaaagucagagcua

SEQ ID NO: 1349404 - RNA, 19 nt, Homo sapiens
  misc_RNA (1)...(19): siRNA sense strand
caaauggacuuucuacaag

SEQ ID NO: 1349405 - RNA, 19 nt, Homo sapiens
  misc_RNA (1)...(19): siRNA sense strand
ggaaaugccuguuuaucca

SEQ ID NO: 1349406 - RNA, 19 nt, Homo sapiens
  misc_RNA (1)...(19): siRNA sense strand
acacaaauauguaguggaa

SEQ ID NO: 1349407 - RNA, 19 nt, Homo sapiens
  misc_RNA (1)...(19): siRNA sense strand
ggaagaugcuggaaauuac

SEQ ID NO: 1349408 - RNA, 19 nt, Homo sapiens
  misc_RNA (1)...(19): siRNA sense strand
ccaaagaguuaacugaaga

SEQ ID NO: 1349409 - RNA, 19 nt, Homo sapiens
  misc_RNA (1)...(19): siRNA sense strand
cggaagagcugcgcaguaa

SEQ ID NO: 1349410 - RNA, 19 nt, Homo sapiens
  misc_RNA (1)...(19): siRNA sense strand
uaaggaagaugcuggaaau

SEQ ID NO: 1349411 - RNA, 19 nt, Homo sapiens
  misc_RNA (1)...(19): siRNA sense strand
ucagggaccuauucaguaa

SEQ ID NO: 1349412 - RNA, 19 nt, Homo sapiens
  misc_RNA (1)...(19): siRNA sense strand
gcacggaugucaccugcaa

SEQ ID NO: 1349413 - RNA, 19 nt, Homo sapiens
  misc_RNA (1)...(19): siRNA sense strand
gagaugugguuaugacuga

SEQ ID NO: 1349414 - RNA, 19 nt, Homo sapiens
  misc_RNA (1)...(19): siRNA sense strand
caagaacaaauccaaguua

SEQ ID NO: 1349415 - RNA, 19 nt, Homo sapiens
  misc_RNA (1)...(19): siRNA sense strand
gagaaacuauggcuacuag

SEQ ID NO: 1349416 - RNA, 19 nt, Homo sapiens
  misc_RNA (1)...(19): siRNA sense strand
ggagaagacugcuguaacu

SEQ ID NO: 1349417 - RNA, 19 nt, Homo sapiens
  misc_RNA (1)...(19): siRNA sense strand
gcacauaucaucacagauc

SEQ ID NO: 1349418 - RNA, 19 nt, Homo sapiens
  misc_RNA (1)...(19): siRNA sense strand
ggaaacacauuaaggacau

SEQ ID NO: 1349419 - RNA, 19 nt, Homo sapiens
  misc_RNA (1)...(19): siRNA sense strand
gaaauuaagccaagugaca

SEQ ID NO: 1349420 - RNA, 19 nt, Homo sapiens
  misc_RNA (1)...(19): siRNA sense strand
gaugaaagacggccaagaa

SEQ ID NO: 1349421 - RNA, 19 nt, Homo sapiens
  misc_RNA (1)...(19): siRNA sense strand
guuaaagucuccuuggaaa

SEQ ID NO: 1349422 - RNA, 19 nt, Homo sapiens
  misc_RNA (1)...(19): siRNA sense strand
gagcucaagucucgaaaga

SEQ ID NO: 1349423 - RNA, 19 nt, Homo sapiens
  misc_RNA (1)...(19): siRNA sense strand
gaaagaauuacccaugaaa

SEQ ID NO: 1349424 - RNA, 19 nt, Homo sapiens
  misc_RNA (1)...(19): siRNA sense strand
gaaggaaucuacacugcau

SEQ ID NO: 1349425 - RNA, 19 nt, Homo sapiens
  misc_RNA (1)...(19): siRNA sense strand
gauuaugaguuacugauga

SEQ ID NO: 1349426 - RNA, 19 nt, Homo sapiens
  misc_RNA (1)...(19): siRNA sense strand
ugaagaagcugauuaugag

SEQ ID NO: 1349427 - RNA, 19 nt, Homo sapiens
  misc_RNA (1)...(19): siRNA sense strand
gagaaacgcuuuguugagu

SEQ ID NO: 1349428 - RNA, 19 nt, Homo sapiens
  misc_RNA (1)...(19): siRNA sense strand
gcaggugucagaagaauuu

SEQ ID NO: 1349429 - RNA, 19 nt, Homo sapiens
  misc_RNA (1)...(19): siRNA sense strand
gaaauuuacuacagaagag

SEQ ID NO: 1349430 - RNA, 19 nt, Homo sapiens
  misc_RNA (1)...(19): siRNA sense strand
ggaaauugccgaagcuuau

SEQ ID NO: 1349431 - RNA, 19 nt, Homo sapiens
  misc_RNA (1)...(19): siRNA sense strand
gaaauugagaugagugaaa

SEQ ID NO: 1349432 - RNA, 19 nt, Homo sapiens
  misc_RNA (1)...(19): siRNA sense strand
cauagaaguuccagaauca

SEQ ID NO: 1349433 - RNA, 19 nt, Homo sapiens
  misc_RNA (1)...(19): siRNA sense strand
agacaaacccgaauugaaa

SEQ ID NO: 1349434 - RNA, 19 nt, Homo sapiens
  misc_RNA (1)...(19): siRNA sense strand
ggaacaauuuacucucuga

SEQ ID NO: 1349435 - RNA, 19 nt, Homo sapiens
  misc_RNA (1)...(19): siRNA sense strand
gaaaucaagcccaguucua

SEQ ID NO: 1349436 - RNA, 19 nt, Homo sapiens
  misc_RNA (1)...(19): siRNA sense strand
gaaagacggccaagaagug

SEQ ID NO: 1349437 - RNA, 19 nt, Homo sapiens
  misc_RNA (1)...(19): siRNA sense strand
ccaagcaauugaucacuuu

SEQ ID NO: 1349438 - RNA, 19 nt, Homo sapiens
  misc_RNA (1)...(19): siRNA sense strand
gagaaggcauuacuaccaa

SEQ ID NO: 1349439 - RNA, 19 nt, Homo sapiens
  misc_RNA (1)...(19): siRNA sense strand
gaaaacaguuguaccuaaa

SEQ ID NO: 1349440 - RNA, 19 nt, Homo sapiens
  misc_RNA (1)...(19): siRNA sense strand
caagaaaugcuuuaucaga

SEQ ID NO: 1349441 - RNA, 19 nt, Homo sapiens
  misc_RNA (1)...(19): siRNA sense strand
gaaggaacuuacacguuug

SEQ ID NO: 1349442 - RNA, 19 nt, Homo sapiens
  misc_RNA (1)...(19): siRNA sense strand
aaacagcgacuagucauua

SEQ ID NO: 1349443 - RNA, 19 nt, Homo sapiens
  misc_RNA (1)...(19): siRNA sense strand
caagugagacuccaaguga

SEQ ID NO: 1349444 - RNA, 19 nt, Homo sapiens
  misc_RNA (1)...(19): siRNA sense strand
gaaguugugucuccugauc

SEQ ID NO: 1349445 - RNA, 19 nt, Homo sapiens
  misc_RNA (1)...(19): siRNA sense strand
gaagaagcgagccauguuu

SEQ ID NO: 1349446 - RNA, 19 nt, Homo sapiens
  misc_RNA (1)...(19): siRNA sense strand
ccaggaagcuguguuugaa

SEQ ID NO: 1349447 - RNA, 19 nt, Homo sapiens
  misc_RNA (1)...(19): siRNA sense strand
gaaacaacagaaaccauuu

SEQ ID NO: 1349448 - RNA, 19 nt, Homo sapiens
  misc_RNA (1)...(19): siRNA sense strand
gcaagcuggugauuucuau

SEQ ID NO: 1349449 - RNA, 19 nt, Homo sapiens
  misc_RNA (1)...(19): siRNA sense strand
cauccaaccugcucaagaa

SEQ ID NO: 1349450 - RNA, 19 nt, Homo sapiens
  misc_RNA (1)...(19): siRNA sense strand
gaagauugaagcccacuuu

SEQ ID NO: 1349451 - RNA, 19 nt, Homo sapiens
  misc_RNA (1)...(19): siRNA sense strand
gcucagaucucagaaucaa

SEQ ID NO: 1349452 - RNA, 19 nt, Homo sapiens
  misc_RNA (1)...(19): siRNA sense strand
gaacaagccuuaauuagga

SEQ ID NO: 1349453 - RNA, 19 nt, Homo sapiens
  misc_RNA (1)...(19): siRNA sense strand
gaaacaagaugcugacaaa

SEQ ID NO: 1349454 - RNA, 19 nt, Homo sapiens
  misc_RNA (1)...(19): siRNA sense strand
gaucaggaauuccauauuu

SEQ ID NO: 1349455 - RNA, 19 nt, Homo sapiens
  misc_RNA (1)...(19): siRNA sense strand
ggaagaaggugaucucuau

SEQ ID NO: 1349456 - RNA, 19 nt, Homo sapiens
  misc_RNA (1)...(19): siRNA sense strand
ggucagaacuuauguagaa

SEQ ID NO: 1349457 - RNA, 19 nt, Homo sapiens
  misc_RNA (1)...(19): siRNA sense strand
gcaggcagaucuucaauuu

SEQ ID NO: 1349458 - RNA, 19 nt, Homo sapiens
  misc_RNA (1)...(19): siRNA sense strand
guggagacauuacauauua

SEQ ID NO: 1349459 - RNA, 19 nt, Homo sapiens
  misc_RNA (1)...(19): siRNA sense strand
gaaaagggcugaaagaauu

SEQ ID NO: 1349460 - RNA, 19 nt, Homo sapiens
  misc_RNA (1)...(19): siRNA sense strand
gaaagaacuucaggacaua

SEQ ID NO: 1349461 - RNA, 19 nt, Homo sapiens
  misc_RNA (1)...(19): siRNA sense strand
gaacagaagagggcuauua

SEQ ID NO: 1349462 - RNA, 19 nt, Homo sapiens
  misc_RNA (1)...(19): siRNA sense strand
gaacuuauguagaagauca

SEQ ID NO: 1349463 - RNA, 19 nt, Homo sapiens
  misc_RNA (1)...(19): siRNA sense strand
gaugaaagaugaugaagga

SEQ ID NO: 1349464 - RNA, 19 nt, Homo sapiens
  misc_RNA (1)...(19): siRNA sense strand
gggagaagcugcccuuaaa

SEQ ID NO: 1349465 - RNA, 19 nt, Homo sapiens
  misc_RNA (1)...(19): siRNA sense strand
caaauuagaugacauugga

SEQ ID NO: 1349466 - RNA, 19 nt, Homo sapiens
  misc_RNA (1)...(19): siRNA sense strand
ccaaagaaguugugaaguu

SEQ ID NO: 1349467 - RNA, 19 nt, Homo sapiens
  misc_RNA (1)...(19): siRNA sense strand
caggaaagcuucaguuuga

SEQ ID NO: 1349468 - RNA, 19 nt, Homo sapiens
  misc_RNA (1)...(19): siRNA sense strand
gaaggcaucucuuacaaau

SEQ ID NO: 1349469 - RNA, 19 nt, Homo sapiens
  misc_RNA (1)...(19): siRNA sense strand
gaugaaagaugaccaggaa

SEQ ID NO: 1349470 - RNA, 19 nt, Homo sapiens
  misc_RNA (1)...(19): siRNA sense strand
ugaaggaacuuacacguuu

SEQ ID NO: 1349471 - RNA, 19 nt, Homo sapiens
  misc_RNA (1)...(19): siRNA sense strand
gguacucaaucacuaauua

SEQ ID NO: 1349472 - RNA, 19 nt, Homo sapiens
  misc_RNA (1)...(19): siRNA sense strand
gaccuuaccuguacagaaa

SEQ ID NO: 1349473 - RNA, 19 nt, Homo sapiens
  misc_RNA (1)...(19): siRNA sense strand
gaagagggcuauuaugaag

SEQ ID NO: 1349474 - RNA, 19 nt, Homo sapiens
  misc_RNA (1)...(19): siRNA sense strand
ugaagaagauggagaagaa

SEQ ID NO: 1349475 - RNA, 19 nt, Homo sapiens
  misc_RNA (1)...(19): siRNA sense strand
gaagagaaacgcuuuguug

SEQ ID NO: 1349476 - RNA, 19 nt, Homo sapiens
  misc_RNA (1)...(19): siRNA sense strand
gaaaucaaaucaacugaca

SEQ ID NO: 1349477 - RNA, 19 nt, Homo sapiens
  misc_RNA (1)...(19): siRNA sense strand
gaagaaugguguggaaauu

SEQ ID NO: 1349478 - RNA, 19 nt, Homo sapiens
  misc_RNA (1)...(19): siRNA sense strand
ggagaaagauaccaaaugg

SEQ ID NO: 1349479 - RNA, 19 nt, Homo sapiens
  misc_RNA (1)...(19): siRNA sense strand
caaagugaguuacaacaaa

SEQ ID NO: 1349480 - RNA, 19 nt, Homo sapiens
  misc_RNA (1)...(19): siRNA sense strand
cuaaagaggugaaacaaga

SEQ ID NO: 1349481 - RNA, 19 nt, Homo sapiens
  misc_RNA (1)...(19): siRNA sense strand
gagaauggcucaugaaggu

SEQ ID NO: 1349482 - RNA, 19 nt, Homo sapiens
  misc_RNA (1)...(19): siRNA sense strand
gaaacaauacugagaacua

SEQ ID NO: 1349483 - RNA, 19 nt, Homo sapiens
  misc_RNA (1)...(19): siRNA sense strand
gcaaauaacucaggagaag

SEQ ID NO: 1349484 - RNA, 19 nt, Homo sapiens
  misc_RNA (1)...(19): siRNA sense strand
gcagagccacuaacaaaua

SEQ ID NO: 1349485 - RNA, 19 nt, Homo sapiens
  misc_RNA (1)...(19): siRNA sense strand
guauaaagauggcauugaa

SEQ ID NO: 1349486 - RNA, 19 nt, Homo sapiens
  misc_RNA (1)...(19): siRNA sense strand
caucaaacauggagaaaga

SEQ ID NO: 1349487 - RNA, 19 nt, Homo sapiens
  misc_RNA (1)...(19): siRNA sense strand
gaaggaaaaugguaucaua

SEQ ID NO: 1349488 - RNA, 19 nt, Homo sapiens
  misc_RNA (1)...(19): siRNA sense strand
gaacaagaaacaauacuga

SEQ ID NO: 1349489 - RNA, 19 nt, Homo sapiens
  misc_RNA (1)...(19): siRNA sense strand
caacauagcuggagaaacc

SEQ ID NO: 1349490 - RNA, 19 nt, Homo sapiens
  misc_RNA (1)...(19): siRNA sense strand
gaagagcgcuuugaaguac

SEQ ID NO: 1349491 - RNA, 19 nt, Homo sapiens
  misc_RNA (1)...(19): siRNA sense strand
gaauugauguccuguggaa

SEQ ID NO: 1349492 - RNA, 19 nt, Homo sapiens
  misc_RNA (1)...(19): siRNA sense strand
gaaagaauccagagccaaa

SEQ ID NO: 1349493 - RNA, 19 nt, Homo sapiens
  misc_RNA (1)...(19): siRNA sense strand
ggauacagauacaaaguga

SEQ ID NO: 1349494 - RNA, 19 nt, Homo sapiens
  misc_RNA (1)...(19): siRNA sense strand
gcagaucacagacagaaua

SEQ ID NO: 1349495 - RNA, 19 nt, Homo sapiens
  misc_RNA (1)...(19): siRNA sense strand
gaaaccaacuguaaucucu

SEQ ID NO: 1349496 - RNA, 19 nt, Homo sapiens
  misc_RNA (1)...(19): siRNA sense strand
ggacauagaaguuccagaa

SEQ ID NO: 1349497 - RNA, 19 nt, Homo sapiens
  misc_RNA (1)...(19): siRNA sense strand
ggauauccauuaccaaaga

SEQ ID NO: 1349498 - RNA, 19 nt, Homo sapiens
  misc_RNA (1)...(19): siRNA sense strand
caaagaaguugugaaguug

SEQ ID NO: 1349499 - RNA, 19 nt, Homo sapiens
  misc_RNA (1)...(19): siRNA sense strand
caucaggaauguucacuuu

SEQ ID NO: 1349500 - RNA, 19 nt, Homo sapiens
  misc_RNA (1)...(19): siRNA sense strand
gaauuagagugcauuguau

SEQ ID NO: 1349501 - RNA, 19 nt, Homo sapiens
  misc_RNA (1)...(19): siRNA sense strand
uaaagaagaugguacucaa

SEQ ID NO: 1349502 - RNA, 19 nt, Homo sapiens
  misc_RNA (1)...(19): siRNA sense strand
uguggaagcucgucauaua

SEQ ID NO: 1349503 - RNA, 19 nt, Homo sapiens
  misc_RNA (1)...(19): siRNA sense strand
gaaaugaaagucagagcua

SEQ ID NO: 1349504 - RNA, 19 nt, Homo sapiens
  misc_RNA (1)...(19): siRNA sense strand
caaauggacuuucuacaag

SEQ ID NO: 1349505 - RNA, 19 nt, Homo sapiens
  misc_RNA (1)...(19): siRNA sense strand
ggaaaugccuguuuaucca

SEQ ID NO: 1349506 - RNA, 19 nt, Homo sapiens
  misc_RNA (1)...(19): siRNA sense strand
acacaaauauguaguggaa

SEQ ID NO: 1349507 - RNA, 19 nt, Homo sapiens
  misc_RNA (1)...(19): siRNA sense strand
ggaagaugcuggaaauuac

SEQ ID NO: 1349508 - RNA, 19 nt, Homo sapiens
  misc_RNA (1)...(19): siRNA sense strand
ccaaagaguuaacugaaga

SEQ ID NO: 1349509 - RNA, 19 nt, Homo sapiens
  misc_RNA (1)...(19): siRNA sense strand
cggaagagcugcgcaguaa

SEQ ID NO: 1349510 - RNA, 19 nt, Homo sapiens
  misc_RNA (1)...(19): siRNA sense strand
uaaggaagaugcuggaaau

SEQ ID NO: 1349511 - RNA, 19 nt, Homo sapiens
  misc_RNA (1)...(19): siRNA sense strand
ucagggaccuauucaguaa

SEQ ID NO: 1349512 - RNA, 19 nt, Homo sapiens
  misc_RNA (1)...(19): siRNA sense strand
gcacggaugucaccugcaa

SEQ ID NO: 1349513 - RNA, 19 nt, Homo sapiens
  misc_RNA (1)...(19): siRNA sense strand
gagaugugguuaugacuga

SEQ ID NO: 1349514 - RNA, 19 nt, Homo sapiens
  misc_RNA (1)...(19): siRNA sense strand
caagaacaaauccaaguua

SEQ ID NO: 1349515 - RNA, 19 nt, Homo sapiens
  misc_RNA (1)...(19): siRNA sense strand
gagaaacuauggcuacuag

SEQ ID NO: 1349516 - RNA, 19 nt, Homo sapiens
  misc_RNA (1)...(19): siRNA sense strand
ggagaagacugcuguaacu

SEQ ID NO: 1349517 - RNA, 19 nt, Homo sapiens
  misc_RNA (1)...(19): siRNA sense strand
gcacauaucaucacagauc

SEQ ID NO: 1349518 - RNA, 19 nt, Homo sapiens
  misc_RNA (1)...(19): siRNA sense strand
ggaaacacauuaaggacau

SEQ ID NO: 1349519 - RNA, 19 nt, Homo sapiens
  misc_RNA (1)...(19): siRNA sense strand
gaaauuaagccaagugaca

SEQ ID NO: 1349520 - RNA, 19 nt, Homo sapiens
  misc_RNA (1)...(19): siRNA sense strand
gaugaaagacggccaagaa

SEQ ID NO: 1349521 - RNA, 19 nt, Homo sapiens
  misc_RNA (1)...(19): siRNA sense strand
guuaaagucuccuuggaaa

SEQ ID NO: 1349522 - RNA, 19 nt, Homo sapiens
  misc_RNA (1)...(19): siRNA sense strand
gagcucaagucucgaaaga

SEQ ID NO: 1349523 - RNA, 19 nt, Homo sapiens
  misc_RNA (1)...(19): siRNA sense strand
gaaagaauuacccaugaaa

SEQ ID NO: 1349524 - RNA, 19 nt, Homo sapiens
  misc_RNA (1)...(19): siRNA sense strand
gaaggaaucuacacugcau

SEQ ID NO: 1349525 - RNA, 19 nt, Homo sapiens
  misc_RNA (1)...(19): siRNA sense strand
gauuaugaguuacugauga

SEQ ID NO: 1349526 - RNA, 19 nt, Homo sapiens
  misc_RNA (1)...(19): siRNA sense strand
ugaagaagcugauuaugag

SEQ ID NO: 1349527 - RNA, 19 nt, Homo sapiens
  misc_RNA (1)...(19): siRNA sense strand
gagaaacgcuuuguugagu

SEQ ID NO: 1349528 - RNA, 19 nt, Homo sapiens
  misc_RNA (1)...(19): siRNA sense strand
gcaggugucagaagaauuu

SEQ ID NO: 1349529 - RNA, 19 nt, Homo sapiens
  misc_RNA (1)...(19): siRNA sense strand
gaaauuuacuacagaagag

SEQ ID NO: 1349530 - RNA, 19 nt, Homo sapiens
  misc_RNA (1)...(19): siRNA sense strand
ggaaauugccgaagcuuau

SEQ ID NO: 1349531 - RNA, 19 nt, Homo sapiens
  misc_RNA (1)...(19): siRNA sense strand
gaaauugagaugagugaaa

SEQ ID NO: 1349532 - RNA, 19 nt, Homo sapiens
  misc_RNA (1)...(19): siRNA sense strand
cauagaaguuccagaauca

SEQ ID NO: 1349533 - RNA, 19 nt, Homo sapiens
  misc_RNA (1)...(19): siRNA sense strand
agacaaacccgaauugaaa

SEQ ID NO: 1349534 - RNA, 19 nt, Homo sapiens
  misc_RNA (1)...(19): siRNA sense strand
ggaacaauuuacucucuga

SEQ ID NO: 1349535 - RNA, 19 nt, Homo sapiens
  misc_RNA (1)...(19): siRNA sense strand
gaaaucaagcccaguucua

SEQ ID NO: 1349536 - RNA, 19 nt, Homo sapiens
  misc_RNA (1)...(19): siRNA sense strand
gaaagacggccaagaagug

SEQ ID NO: 1349537 - RNA, 19 nt, Homo sapiens
  misc_RNA (1)...(19): siRNA sense strand
ccaagcaauugaucacuuu

SEQ ID NO: 1349538 - RNA, 19 nt, Homo sapiens
  misc_RNA (1)...(19): siRNA sense strand
gagaaggcauuacuaccaa

SEQ ID NO: 1349539 - RNA, 19 nt, Homo sapiens
  misc_RNA (1)...(19): siRNA sense strand
gaaaacaguuguaccuaaa

SEQ ID NO: 1349540 - RNA, 19 nt, Homo sapiens
  misc_RNA (1)...(19): siRNA sense strand
caagaaaugcuuuaucaga

SEQ ID NO: 1349541 - RNA, 19 nt, Homo sapiens
  misc_RNA (1)...(19): siRNA sense strand
gaaggaacuuacacguuug

SEQ ID NO: 1349542 - RNA, 19 nt, Homo sapiens
  misc_RNA (1)...(19): siRNA sense strand
aaacagcgacuagucauua

SEQ ID NO: 1349543 - RNA, 19 nt, Homo sapiens
  misc_RNA (1)...(19): siRNA sense strand
caagugagacuccaaguga

SEQ ID NO: 1349544 - RNA, 19 nt, Homo sapiens
  misc_RNA (1)...(19): siRNA sense strand
gaaguugugucuccugauc

SEQ ID NO: 1349545 - RNA, 19 nt, Homo sapiens
  misc_RNA (1)...(19): siRNA sense strand
gaagaagcgagccauguuu

SEQ ID NO: 1349546 - RNA, 19 nt, Homo sapiens
  misc_RNA (1)...(19): siRNA sense strand
ccaggaagcuguguuugaa

SEQ ID NO: 1349547 - RNA, 19 nt, Homo sapiens
  misc_RNA (1)...(19): siRNA sense strand
gaaacaacagaaaccauuu

SEQ ID NO: 1349548 - RNA, 19 nt, Homo sapiens
  misc_RNA (1)...(19): siRNA sense strand
gcaagcuggugauuucuau

SEQ ID NO: 1349549 - RNA, 19 nt, Homo sapiens
  misc_RNA (1)...(19): siRNA sense strand
cauccaaccugcucaagaa

SEQ ID NO: 1349550 - RNA, 19 nt, Homo sapiens
  misc_RNA (1)...(19): siRNA sense strand
gaagauugaagcccacuuu

SEQ ID NO: 1349551 - RNA, 19 nt, Homo sapiens
  misc_RNA (1)...(19): siRNA sense strand
gcucagaucucagaaucaa

SEQ ID NO: 1349552 - RNA, 19 nt, Homo sapiens
  misc_RNA (1)...(19): siRNA sense strand
caagaagauuggucuguuu

SEQ ID NO: 1349553 - RNA, 19 nt, Homo sapiens
  misc_RNA (1)...(19): siRNA sense strand
gaucugcaccguccaguug

SEQ ID NO: 1349554 - RNA, 19 nt, Homo sapiens
  misc_RNA (1)...(19): siRNA sense strand
acaagaagauuggucuguu

SEQ ID NO: 1349555 - RNA, 19 nt, Homo sapiens
  misc_RNA (1)...(19): siRNA sense strand
gccggugacuuccacaaga

SEQ ID NO: 1349556 - RNA, 19 nt, Homo sapiens
  misc_RNA (1)...(19): siRNA sense strand
ugacagcagugagaagauc

SEQ ID NO: 1349557 - RNA, 19 nt, Homo sapiens
  misc_RNA (1)...(19): siRNA sense strand
ccggugacuuccacaagaa

SEQ ID NO: 1349558 - RNA, 19 nt, Homo sapiens
  misc_RNA (1)...(19): siRNA sense strand
gaagauuggucuguuuugu

SEQ ID NO: 1349559 - RNA, 19 nt, Homo sapiens
  misc_RNA (1)...(19): siRNA sense strand
ugacugugccggugacuuc

SEQ ID NO: 1349560 - RNA, 19 nt, Homo sapiens
  misc_RNA (1)...(19): siRNA sense strand
gagaccagcaguacgagau

SEQ ID NO: 1349561 - RNA, 19 nt, Homo sapiens
  misc_RNA (1)...(19): siRNA sense strand
gcagcucuacgacgugaug

SEQ ID NO: 1349562 - RNA, 19 nt, Homo sapiens
  misc_RNA (1)...(19): siRNA sense strand
gcgcgaggcagagaucgaa

SEQ ID NO: 1349563 - RNA, 19 nt, Homo sapiens
  misc_RNA (1)...(19): siRNA sense strand
caagaagauuggucuguuu

SEQ ID NO: 1349564 - RNA, 19 nt, Homo sapiens
  misc_RNA (1)...(19): siRNA sense strand
gaucugcaccguccaguug

SEQ ID NO: 1349565 - RNA, 19 nt, Homo sapiens
  misc_RNA (1)...(19): siRNA sense strand
acaagaagauuggucuguu

SEQ ID NO: 1349566 - RNA, 19 nt, Homo sapiens
  misc_RNA (1)...(19): siRNA sense strand
gccggugacuuccacaaga

SEQ ID NO: 1349567 - RNA, 19 nt, Homo sapiens
  misc_RNA (1)...(19): siRNA sense strand
ugacagcagugagaagauc

SEQ ID NO: 1349568 - RNA, 19 nt, Homo sapiens
  misc_RNA (1)...(19): siRNA sense strand
ccggugacuuccacaagaa

SEQ ID NO: 1349569 - RNA, 19 nt, Homo sapiens
  misc_RNA (1)...(19): siRNA sense strand
gaagauuggucuguuuugu

SEQ ID NO: 1349570 - RNA, 19 nt, Homo sapiens
  misc_RNA (1)...(19): siRNA sense strand
ugacugugccggugacuuc

SEQ ID NO: 1349571 - RNA, 19 nt, Homo sapiens
  misc_RNA (1)...(19): siRNA sense strand
gagaccagcaguacgagau

SEQ ID NO: 1349572 - RNA, 19 nt, Homo sapiens
  misc_RNA (1)...(19): siRNA sense strand
gcagcucuacgacgugaug

SEQ ID NO: 1349573 - RNA, 19 nt, Homo sapiens
  misc_RNA (1)...(19): siRNA sense strand
gcgcgaggcagagaucgaa

SEQ ID NO: 1349574 - RNA, 19 nt, Homo sapiens
  misc_RNA (1)...(19): siRNA sense strand
caagaagauuggucuguuu

SEQ ID NO: 1349575 - RNA, 19 nt, Homo sapiens
  misc_RNA (1)...(19): siRNA sense strand
gaucugcaccguccaguug

SEQ ID NO: 1349576 - RNA, 19 nt, Homo sapiens
  misc_RNA (1)...(19): siRNA sense strand
acaagaagauuggucuguu

SEQ ID NO: 1349577 - RNA, 19 nt, Homo sapiens
  misc_RNA (1)...(19): siRNA sense strand
gccggugacuuccacaaga

SEQ ID NO: 1349578 - RNA, 19 nt, Homo sapiens
  misc_RNA (1)...(19): siRNA sense strand
ugacagcagugagaagauc

SEQ ID NO: 1349579 - RNA, 19 nt, Homo sapiens
  misc_RNA (1)...(19): siRNA sense strand
ccggugacuuccacaagaa

SEQ ID NO: 1349580 - RNA, 19 nt, Homo sapiens
  misc_RNA (1)...(19): siRNA sense strand
gaagauuggucuguuuugu

SEQ ID NO: 1349581 - RNA, 19 nt, Homo sapiens
  misc_RNA (1)...(19): siRNA sense strand
ugacugugccggugacuuc

SEQ ID NO: 1349582 - RNA, 19 nt, Homo sapiens
  misc_RNA (1)...(19): siRNA sense strand
gagaccagcaguacgagau

SEQ ID NO: 1349583 - RNA, 19 nt, Homo sapiens
  misc_RNA (1)...(19): siRNA sense strand
gcagcucuacgacgugaug

SEQ ID NO: 1349584 - RNA, 19 nt, Homo sapiens
  misc_RNA (1)...(19): siRNA sense strand
gcgcgaggcagagaucgaa

SEQ ID NO: 1349585 - RNA, 19 nt, Homo sapiens
  misc_RNA (1)...(19): siRNA sense strand
caagaagauuggucuguuu

SEQ ID NO: 1349586 - RNA, 19 nt, Homo sapiens
  misc_RNA (1)...(19): siRNA sense strand
gaucugcaccguccaguug

SEQ ID NO: 1349587 - RNA, 19 nt, Homo sapiens
  misc_RNA (1)...(19): siRNA sense strand
acaagaagauuggucuguu

SEQ ID NO: 1349588 - RNA, 19 nt, Homo sapiens
  misc_RNA (1)...(19): siRNA sense strand
gccggugacuuccacaaga

SEQ ID NO: 1349589 - RNA, 19 nt, Homo sapiens
  misc_RNA (1)...(19): siRNA sense strand
ugacagcagugagaagauc

SEQ ID NO: 1349590 - RNA, 19 nt, Homo sapiens
  misc_RNA (1)...(19): siRNA sense strand
ccggugacuuccacaagaa

SEQ ID NO: 1349591 - RNA, 19 nt, Homo sapiens
  misc_RNA (1)...(19): siRNA sense strand
gaagauuggucuguuuugu

SEQ ID NO: 1349592 - RNA, 19 nt, Homo sapiens
  misc_RNA (1)...(19): siRNA sense strand
ugacugugccggugacuuc

SEQ ID NO: 1349593 - RNA, 19 nt, Homo sapiens
  misc_RNA (1)...(19): siRNA sense strand
gagaccagcaguacgagau

SEQ ID NO: 1349594 - RNA, 19 nt, Homo sapiens
  misc_RNA (1)...(19): siRNA sense strand
gcagcucuacgacgugaug

SEQ ID NO: 1349595 - RNA, 19 nt, Homo sapiens
  misc_RNA (1)...(19): siRNA sense strand
gcgcgaggcagagaucgaa

SEQ ID NO: 1349596 - RNA, 19 nt, Homo sapiens
  misc_RNA (1)...(19): siRNA sense strand
caagaagauuggucuguuu

SEQ ID NO: 1349597 - RNA, 19 nt, Homo sapiens
  misc_RNA (1)...(19): siRNA sense strand
acaagaagauuggucuguu

SEQ ID NO: 1349598 - RNA, 19 nt, Homo sapiens
  misc_RNA (1)...(19): siRNA sense strand
gccggugacuuccacaaga

SEQ ID NO: 1349599 - RNA, 19 nt, Homo sapiens
  misc_RNA (1)...(19): siRNA sense strand
ccggugacuuccacaagaa

SEQ ID NO: 1349600 - RNA, 19 nt, Homo sapiens
  misc_RNA (1)...(19): siRNA sense strand
gaagauuggucuguuuugu

SEQ ID NO: 1349601 - RNA, 19 nt, Homo sapiens
  misc_RNA (1)...(19): siRNA sense strand
ugacugugccggugacuuc

SEQ ID NO: 1349602 - RNA, 19 nt, Homo sapiens
  misc_RNA (1)...(19): siRNA sense strand
caagaagauuggucuguuu

SEQ ID NO: 1349603 - RNA, 19 nt, Homo sapiens
  misc_RNA (1)...(19): siRNA sense strand
acaagaagauuggucuguu

SEQ ID NO: 1349604 - RNA, 19 nt, Homo sapiens
  misc_RNA (1)...(19): siRNA sense strand
gccggugacuuccacaaga

SEQ ID NO: 1349605 - RNA, 19 nt, Homo sapiens
  misc_RNA (1)...(19): siRNA sense strand
ccggugacuuccacaagaa

SEQ ID NO: 1349606 - RNA, 19 nt, Homo sapiens
  misc_RNA (1)...(19): siRNA sense strand
gaagauuggucuguuuugu

SEQ ID NO: 1349607 - RNA, 19 nt, Homo sapiens
  misc_RNA (1)...(19): siRNA sense strand
ugacugugccggugacuuc

SEQ ID NO: 1349608 - RNA, 19 nt, Homo sapiens
  misc_RNA (1)...(19): siRNA sense strand
caagaagauuggucuguuu

SEQ ID NO: 1349609 - RNA, 19 nt, Homo sapiens
  misc_RNA (1)...(19): siRNA sense strand
gaucugcaccguccaguug

SEQ ID NO: 1349610 - RNA, 19 nt, Homo sapiens
  misc_RNA (1)...(19): siRNA sense strand
acaagaagauuggucuguu

SEQ ID NO: 1349611 - RNA, 19 nt, Homo sapiens
  misc_RNA (1)...(19): siRNA sense strand
gccggugacuuccacaaga

SEQ ID NO: 1349612 - RNA, 19 nt, Homo sapiens
  misc_RNA (1)...(19): siRNA sense strand
ugacagcagugagaagauc

SEQ ID NO: 1349613 - RNA, 19 nt, Homo sapiens
  misc_RNA (1)...(19): siRNA sense strand
ccggugacuuccacaagaa

SEQ ID NO: 1349614 - RNA, 19 nt, Homo sapiens
  misc_RNA (1)...(19): siRNA sense strand
gaagauuggucuguuuugu

SEQ ID NO: 1349615 - RNA, 19 nt, Homo sapiens
  misc_RNA (1)...(19): siRNA sense strand
ugacugugccggugacuuc

SEQ ID NO: 1349616 - RNA, 19 nt, Homo sapiens
  misc_RNA (1)...(19): siRNA sense strand
gagaccagcaguacgagau

SEQ ID NO: 1349617 - RNA, 19 nt, Homo sapiens
  misc_RNA (1)...(19): siRNA sense strand
gcagcucuacgacgugaug

SEQ ID NO: 1349618 - RNA, 19 nt, Homo sapiens
  misc_RNA (1)...(19): siRNA sense strand
gcgcgaggcagagaucgaa

SEQ ID NO: 1349619 - RNA, 19 nt, Homo sapiens
  misc_RNA (1)...(19): siRNA sense strand
caagaagauuggucuguuu

SEQ ID NO: 1349620 - RNA, 19 nt, Homo sapiens
  misc_RNA (1)...(19): siRNA sense strand
acaagaagauuggucuguu

SEQ ID NO: 1349621 - RNA, 19 nt, Homo sapiens
  misc_RNA (1)...(19): siRNA sense strand
gccggugacuuccacaaga

SEQ ID NO: 1349622 - RNA, 19 nt, Homo sapiens
  misc_RNA (1)...(19): siRNA sense strand
ccggugacuuccacaagaa

SEQ ID NO: 1349623 - RNA, 19 nt, Homo sapiens
  misc_RNA (1)...(19): siRNA sense strand
gaagauuggucuguuuugu

SEQ ID NO: 1349624 - RNA, 19 nt, Homo sapiens
  misc_RNA (1)...(19): siRNA sense strand
ugacugugccggugacuuc

SEQ ID NO: 1349625 - RNA, 19 nt, Homo sapiens
  misc_RNA (1)...(19): siRNA sense strand
caagaagauuggucuguuu

SEQ ID NO: 1349626 - RNA, 19 nt, Homo sapiens
  misc_RNA (1)...(19): siRNA sense strand
acaagaagauuggucuguu

SEQ ID NO: 1349627 - RNA, 19 nt, Homo sapiens
  misc_RNA (1)...(19): siRNA sense strand
gccggugacuuccacaaga

SEQ ID NO: 1349628 - RNA, 19 nt, Homo sapiens
  misc_RNA (1)...(19): siRNA sense strand
ccggugacuuccacaagaa

SEQ ID NO: 1349629 - RNA, 19 nt, Homo sapiens
  misc_RNA (1)...(19): siRNA sense strand
gaagauuggucuguuuugu

SEQ ID NO: 1349630 - RNA, 19 nt, Homo sapiens
  misc_RNA (1)...(19): siRNA sense strand
ugacugugccggugacuuc

SEQ ID NO: 1349631 - RNA, 19 nt, Homo sapiens
  misc_RNA (1)...(19): siRNA sense strand
caagaagauuggucuguuu

SEQ ID NO: 1349632 - RNA, 19 nt, Homo sapiens
  misc_RNA (1)...(19): siRNA sense strand
acaagaagauuggucuguu

SEQ ID NO: 1349633 - RNA, 19 nt, Homo sapiens
  misc_RNA (1)...(19): siRNA sense strand
gccggugacuuccacaaga

SEQ ID NO: 1349634 - RNA, 19 nt, Homo sapiens
  misc_RNA (1)...(19): siRNA sense strand
ccggugacuuccacaagaa

SEQ ID NO: 1349635 - RNA, 19 nt, Homo sapiens
  misc_RNA (1)...(19): siRNA sense strand
gaagauuggucuguuuugu

SEQ ID NO: 1349636 - RNA, 19 nt, Homo sapiens
  misc_RNA (1)...(19): siRNA sense strand
ugacugugccggugacuuc

SEQ ID NO: 1349637 - RNA, 19 nt, Homo sapiens
  misc_RNA (1)...(19): siRNA sense strand
caagaagauuggucuguuu

SEQ ID NO: 1349638 - RNA, 19 nt, Homo sapiens
  misc_RNA (1)...(19): siRNA sense strand
acaagaagauuggucuguu

SEQ ID NO: 1349639 - RNA, 19 nt, Homo sapiens
  misc_RNA (1)...(19): siRNA sense strand
gccggugacuuccacaaga

SEQ ID NO: 1349640 - RNA, 19 nt, Homo sapiens
  misc_RNA (1)...(19): siRNA sense strand
ccggugacuuccacaagaa

SEQ ID NO: 1349641 - RNA, 19 nt, Homo sapiens
  misc_RNA (1)...(19): siRNA sense strand
gaagauuggucuguuuugu

SEQ ID NO: 1349642 - RNA, 19 nt, Homo sapiens
  misc_RNA (1)...(19): siRNA sense strand
ugacugugccggugacuuc

SEQ ID NO: 1349643 - RNA, 19 nt, Homo sapiens
  misc_RNA (1)...(19): siRNA sense strand
caagaagauuggucuguuu

SEQ ID NO: 1349644 - RNA, 19 nt, Homo sapiens
  misc_RNA (1)...(19): siRNA sense strand
gaucugcaccguccaguug

SEQ ID NO: 1349645 - RNA, 19 nt, Homo sapiens
  misc_RNA (1)...(19): siRNA sense strand
acaagaagauuggucuguu

SEQ ID NO: 1349646 - RNA, 19 nt, Homo sapiens
  misc_RNA (1)...(19): siRNA sense strand
gccggugacuuccacaaga

SEQ ID NO: 1349647 - RNA, 19 nt, Homo sapiens
  misc_RNA (1)...(19): siRNA sense strand
ugacagcagugagaagauc

SEQ ID NO: 1349648 - RNA, 19 nt, Homo sapiens
  misc_RNA (1)...(19): siRNA sense strand
ccggugacuuccacaagaa

SEQ ID NO: 1349649 - RNA, 19 nt, Homo sapiens
  misc_RNA (1)...(19): siRNA sense strand
gaagauuggucuguuuugu

SEQ ID NO: 1349650 - RNA, 19 nt, Homo sapiens
  misc_RNA (1)...(19): siRNA sense strand
ugacugugccggugacuuc

SEQ ID NO: 1349651 - RNA, 19 nt, Homo sapiens
  misc_RNA (1)...(19): siRNA sense strand
gagaccagcaguacgagau

SEQ ID NO: 1349652 - RNA, 19 nt, Homo sapiens
  misc_RNA (1)...(19): siRNA sense strand
gcagcucuacgacgugaug

SEQ ID NO: 1349653 - RNA, 19 nt, Homo sapiens
  misc_RNA (1)...(19): siRNA sense strand
gcgcgaggcagagaucgaa

SEQ ID NO: 1349654 - RNA, 19 nt, Homo sapiens
  misc_RNA (1)...(19): siRNA sense strand
caagaagauuggucuguuu

SEQ ID NO: 1349655 - RNA, 19 nt, Homo sapiens
  misc_RNA (1)...(19): siRNA sense strand
gaucugcaccguccaguug

SEQ ID NO: 1349656 - RNA, 19 nt, Homo sapiens
  misc_RNA (1)...(19): siRNA sense strand
acaagaagauuggucuguu

SEQ ID NO: 1349657 - RNA, 19 nt, Homo sapiens
  misc_RNA (1)...(19): siRNA sense strand
gccggugacuuccacaaga

SEQ ID NO: 1349658 - RNA, 19 nt, Homo sapiens
  misc_RNA (1)...(19): siRNA sense strand
ugacagcagugagaagauc

SEQ ID NO: 1349659 - RNA, 19 nt, Homo sapiens
  misc_RNA (1)...(19): siRNA sense strand
ccggugacuuccacaagaa

SEQ ID NO: 1349660 - RNA, 19 nt, Homo sapiens
  misc_RNA (1)...(19): siRNA sense strand
gaagauuggucuguuuugu

SEQ ID NO: 1349661 - RNA, 19 nt, Homo sapiens
  misc_RNA (1)...(19): siRNA sense strand
ugacugugccggugacuuc

SEQ ID NO: 1349662 - RNA, 19 nt, Homo sapiens
  misc_RNA (1)...(19): siRNA sense strand
gagaccagcaguacgagau

SEQ ID NO: 1349663 - RNA, 19 nt, Homo sapiens
  misc_RNA (1)...(19): siRNA sense strand
gcagcucuacgacgugaug

SEQ ID NO: 1349664 - RNA, 19 nt, Homo sapiens
  misc_RNA (1)...(19): siRNA sense strand
gcgcgaggcagagaucgaa

SEQ ID NO: 1349665 - RNA, 19 nt, Homo sapiens
  misc_RNA (1)...(19): siRNA sense strand
caagaagauuggucuguuu

SEQ ID NO: 1349666 - RNA, 19 nt, Homo sapiens
  misc_RNA (1)...(19): siRNA sense strand
gaucugcaccguccaguug

SEQ ID NO: 1349667 - RNA, 19 nt, Homo sapiens
  misc_RNA (1)...(19): siRNA sense strand
acaagaagauuggucuguu

SEQ ID NO: 1349668 - RNA, 19 nt, Homo sapiens
  misc_RNA (1)...(19): siRNA sense strand
gccggugacuuccacaaga

SEQ ID NO: 1349669 - RNA, 19 nt, Homo sapiens
  misc_RNA (1)...(19): siRNA sense strand
ugacagcagugagaagauc

SEQ ID NO: 1349670 - RNA, 19 nt, Homo sapiens
  misc_RNA (1)...(19): siRNA sense strand
ccggugacuuccacaagaa

SEQ ID NO: 1349671 - RNA, 19 nt, Homo sapiens
  misc_RNA (1)...(19): siRNA sense strand
gaagauuggucuguuuugu

SEQ ID NO: 1349672 - RNA, 19 nt, Homo sapiens
  misc_RNA (1)...(19): siRNA sense strand
ugacugugccggugacuuc

SEQ ID NO: 1349673 - RNA, 19 nt, Homo sapiens
  misc_RNA (1)...(19): siRNA sense strand
gagaccagcaguacgagau

SEQ ID NO: 1349674 - RNA, 19 nt, Homo sapiens
  misc_RNA (1)...(19): siRNA sense strand
gcagcucuacgacgugaug

SEQ ID NO: 1349675 - RNA, 19 nt, Homo sapiens
  misc_RNA (1)...(19): siRNA sense strand
gcgcgaggcagagaucgaa

SEQ ID NO: 1349676 - RNA, 19 nt, Homo sapiens
  misc_RNA (1)...(19): siRNA sense strand
caagaagauuggucuguuu

SEQ ID NO: 1349677 - RNA, 19 nt, Homo sapiens
  misc_RNA (1)...(19): siRNA sense strand
gaucugcaccguccaguug

SEQ ID NO: 1349678 - RNA, 19 nt, Homo sapiens
  misc_RNA (1)...(19): siRNA sense strand
acaagaagauuggucuguu

SEQ ID NO: 1349679 - RNA, 19 nt, Homo sapiens
  misc_RNA (1)...(19): siRNA sense strand
gccggugacuuccacaaga

SEQ ID NO: 1349680 - RNA, 19 nt, Homo sapiens
  misc_RNA (1)...(19): siRNA sense strand
ugacagcagugagaagauc

SEQ ID NO: 1349681 - RNA, 19 nt, Homo sapiens
  misc_RNA (1)...(19): siRNA sense strand
ccggugacuuccacaagaa

SEQ ID NO: 1349682 - RNA, 19 nt, Homo sapiens
  misc_RNA (1)...(19): siRNA sense strand
gaagauuggucuguuuugu

SEQ ID NO: 1349683 - RNA, 19 nt, Homo sapiens
  misc_RNA (1)...(19): siRNA sense strand
ugacugugccggugacuuc

SEQ ID NO: 1349684 - RNA, 19 nt, Homo sapiens
  misc_RNA (1)...(19): siRNA sense strand
gagaccagcaguacgagau

SEQ ID NO: 1349685 - RNA, 19 nt, Homo sapiens
  misc_RNA (1)...(19): siRNA sense strand
gcagcucuacgacgugaug

SEQ ID NO: 1349686 - RNA, 19 nt, Homo sapiens
  misc_RNA (1)...(19): siRNA sense strand
gcgcgaggcagagaucgaa

SEQ ID NO: 1349687 - RNA, 19 nt, Homo sapiens
  misc_RNA (1)...(19): siRNA sense strand
caagaagauuggucuguuu

SEQ ID NO: 1349688 - RNA, 19 nt, Homo sapiens
  misc_RNA (1)...(19): siRNA sense strand
acaagaagauuggucuguu

SEQ ID NO: 1349689 - RNA, 19 nt, Homo sapiens
  misc_RNA (1)...(19): siRNA sense strand
gccggugacuuccacaaga

SEQ ID NO: 1349690 - RNA, 19 nt, Homo sapiens
  misc_RNA (1)...(19): siRNA sense strand
ccggugacuuccacaagaa

SEQ ID NO: 1349691 - RNA, 19 nt, Homo sapiens
  misc_RNA (1)...(19): siRNA sense strand
gaagauuggucuguuuugu

SEQ ID NO: 1349692 - RNA, 19 nt, Homo sapiens
  misc_RNA (1)...(19): siRNA sense strand
ugacugugccggugacuuc

SEQ ID NO: 1349693 - RNA, 19 nt, Homo sapiens
  misc_RNA (1)...(19): siRNA sense strand
caagaagauuggucuguuu

SEQ ID NO: 1349694 - RNA, 19 nt, Homo sapiens
  misc_RNA (1)...(19): siRNA sense strand
acaagaagauuggucuguu

SEQ ID NO: 1349695 - RNA, 19 nt, Homo sapiens
  misc_RNA (1)...(19): siRNA sense strand
gccggugacuuccacaaga

SEQ ID NO: 1349696 - RNA, 19 nt, Homo sapiens
  misc_RNA (1)...(19): siRNA sense strand
ccggugacuuccacaagaa

SEQ ID NO: 1349697 - RNA, 19 nt, Homo sapiens
  misc_RNA (1)...(19): siRNA sense strand
gaagauuggucuguuuugu

SEQ ID NO: 1349698 - RNA, 19 nt, Homo sapiens
  misc_RNA (1)...(19): siRNA sense strand
ugacugugccggugacuuc

SEQ ID NO: 1349699 - RNA, 19 nt, Homo sapiens
  misc_RNA (1)...(19): siRNA sense strand
caagaagauuggucuguuu

SEQ ID NO: 1349700 - RNA, 19 nt, Homo sapiens
  misc_RNA (1)...(19): siRNA sense strand
gaucugcaccguccaguug

SEQ ID NO: 1349701 - RNA, 19 nt, Homo sapiens
  misc_RNA (1)...(19): siRNA sense strand
acaagaagauuggucuguu

SEQ ID NO: 1349702 - RNA, 19 nt, Homo sapiens
  misc_RNA (1)...(19): siRNA sense strand
gccggugacuuccacaaga

SEQ ID NO: 1349703 - RNA, 19 nt, Homo sapiens
  misc_RNA (1)...(19): siRNA sense strand
ugacagcagugagaagauc

SEQ ID NO: 1349704 - RNA, 19 nt, Homo sapiens
  misc_RNA (1)...(19): siRNA sense strand
ccggugacuuccacaagaa

SEQ ID NO: 1349705 - RNA, 19 nt, Homo sapiens
  misc_RNA (1)...(19): siRNA sense strand
gaagauuggucuguuuugu

SEQ ID NO: 1349706 - RNA, 19 nt, Homo sapiens
  misc_RNA (1)...(19): siRNA sense strand
ugacugugccggugacuuc

SEQ ID NO: 1349707 - RNA, 19 nt, Homo sapiens
  misc_RNA (1)...(19): siRNA sense strand
gagaccagcaguacgagau

SEQ ID NO: 1349708 - RNA, 19 nt, Homo sapiens
  misc_RNA (1)...(19): siRNA sense strand
gcagcucuacgacgugaug

SEQ ID NO: 1349709 - RNA, 19 nt, Homo sapiens
  misc_RNA (1)...(19): siRNA sense strand
gcgcgaggcagagaucgaa

SEQ ID NO: 1349710 - RNA, 19 nt, Homo sapiens
  misc_RNA (1)...(19): siRNA sense strand
caagaagauuggucuguuu

SEQ ID NO: 1349711 - RNA, 19 nt, Homo sapiens
  misc_RNA (1)...(19): siRNA sense strand
acaagaagauuggucuguu

SEQ ID NO: 1349712 - RNA, 19 nt, Homo sapiens
  misc_RNA (1)...(19): siRNA sense strand
gccggugacuuccacaaga

SEQ ID NO: 1349713 - RNA, 19 nt, Homo sapiens
  misc_RNA (1)...(19): siRNA sense strand
ccggugacuuccacaagaa

SEQ ID NO: 1349714 - RNA, 19 nt, Homo sapiens
  misc_RNA (1)...(19): siRNA sense strand
gaagauuggucuguuuugu

SEQ ID NO: 1349715 - RNA, 19 nt, Homo sapiens
  misc_RNA (1)...(19): siRNA sense strand
ugacugugccggugacuuc

SEQ ID NO: 1349716 - RNA, 19 nt, Homo sapiens
  misc_RNA (1)...(19): siRNA sense strand
caagaagauuggucuguuu

SEQ ID NO: 1349717 - RNA, 19 nt, Homo sapiens
  misc_RNA (1)...(19): siRNA sense strand
acaagaagauuggucuguu

SEQ ID NO: 1349718 - RNA, 19 nt, Homo sapiens
  misc_RNA (1)...(19): siRNA sense strand
gccggugacuuccacaaga

SEQ ID NO: 1349719 - RNA, 19 nt, Homo sapiens
  misc_RNA (1)...(19): siRNA sense strand
ccggugacuuccacaagaa

SEQ ID NO: 1349720 - RNA, 19 nt, Homo sapiens
  misc_RNA (1)...(19): siRNA sense strand
gaagauuggucuguuuugu

SEQ ID NO: 1349721 - RNA, 19 nt, Homo sapiens
  misc_RNA (1)...(19): siRNA sense strand
ugacugugccggugacuuc

SEQ ID NO: 1349722 - RNA, 19 nt, Homo sapiens
  misc_RNA (1)...(19): siRNA sense strand
caagaagauuggucuguuu

SEQ ID NO: 1349723 - RNA, 19 nt, Homo sapiens
  misc_RNA (1)...(19): siRNA sense strand
acaagaagauuggucuguu

SEQ ID NO: 1349724 - RNA, 19 nt, Homo sapiens
  misc_RNA (1)...(19): siRNA sense strand
gccggugacuuccacaaga

SEQ ID NO: 1349725 - RNA, 19 nt, Homo sapiens
  misc_RNA (1)...(19): siRNA sense strand
ccggugacuuccacaagaa

SEQ ID NO: 1349726 - RNA, 19 nt, Homo sapiens
  misc_RNA (1)...(19): siRNA sense strand
gaagauuggucuguuuugu

SEQ ID NO: 1349727 - RNA, 19 nt, Homo sapiens
  misc_RNA (1)...(19): siRNA sense strand
ugacugugccggugacuuc

SEQ ID NO: 1349728 - RNA, 19 nt, Homo sapiens
  misc_RNA (1)...(19): siRNA sense strand
caagaagauuggucuguuu

SEQ ID NO: 1349729 - RNA, 19 nt, Homo sapiens
  misc_RNA (1)...(19): siRNA sense strand
acaagaagauuggucuguu

SEQ ID NO: 1349730 - RNA, 19 nt, Homo sapiens
  misc_RNA (1)...(19): siRNA sense strand
gccggugacuuccacaaga

SEQ ID NO: 1349731 - RNA, 19 nt, Homo sapiens
  misc_RNA (1)...(19): siRNA sense strand
ccggugacuuccacaagaa

SEQ ID NO: 1349732 - RNA, 19 nt, Homo sapiens
  misc_RNA (1)...(19): siRNA sense strand
gaagauuggucuguuuugu

SEQ ID NO: 1349733 - RNA, 19 nt, Homo sapiens
  misc_RNA (1)...(19): siRNA sense strand
ugacugugccggugacuuc

SEQ ID NO: 1349734 - RNA, 19 nt, Homo sapiens
  misc_RNA (1)...(19): siRNA sense strand
gaacggagaccugguauga

SEQ ID NO: 1349735 - RNA, 19 nt, Homo sapiens
  misc_RNA (1)...(19): siRNA sense strand
gaugacaacuccuacaugu

SEQ ID NO: 1349736 - RNA, 19 nt, Homo sapiens
  misc_RNA (1)...(19): siRNA sense strand
ucaagaaccgugugucuau

SEQ ID NO: 1349737 - RNA, 19 nt, Homo sapiens
  misc_RNA (1)...(19): siRNA sense strand
cuacauguacauucucuuu

SEQ ID NO: 1349738 - RNA, 19 nt, Homo sapiens
  misc_RNA (1)...(19): siRNA sense strand
acggagaccugguaugaga

SEQ ID NO: 1349739 - RNA, 19 nt, Homo sapiens
  misc_RNA (1)...(19): siRNA sense strand
caagaaccgugugucuaug

SEQ ID NO: 1349740 - RNA, 19 nt, Homo sapiens
  misc_RNA (1)...(19): siRNA sense strand
ugacaacuccuacauguac

SEQ ID NO: 1349741 - RNA, 19 nt, Homo sapiens
  misc_RNA (1)...(19): siRNA sense strand
acauguacauucucuuugu

SEQ ID NO: 1349742 - RNA, 19 nt, Homo sapiens
  misc_RNA (1)...(19): siRNA sense strand
ccuaucauguguauaucaa

SEQ ID NO: 1349743 - RNA, 19 nt, Homo sapiens
  misc_RNA (1)...(19): siRNA sense strand
ggccagacaaccagacuga

SEQ ID NO: 1349744 - RNA, 19 nt, Homo sapiens
  misc_RNA (1)...(19): siRNA sense strand
guacauucucuuugucaug

SEQ ID NO: 1349745 - RNA, 19 nt, Homo sapiens
  misc_RNA (1)...(19): siRNA sense strand
gugcugaaggcucuaaaug

SEQ ID NO: 1349746 - RNA, 19 nt, Homo sapiens
  misc_RNA (1)...(19): siRNA sense strand
cagccuaccuggccgugau

SEQ ID NO: 1349747 - RNA, 19 nt, Homo sapiens
  misc_RNA (1)...(19): siRNA sense strand
cuaaaugccacucuucaca

SEQ ID NO: 1349748 - RNA, 19 nt, Homo sapiens
  misc_RNA (1)...(19): siRNA sense strand
cagacaaccagacugaaga

SEQ ID NO: 1349749 - RNA, 19 nt, Homo sapiens
  misc_RNA (1)...(19): siRNA sense strand
gcucuaaaugccacucuuc

SEQ ID NO: 1349750 - RNA, 19 nt, Homo sapiens
  misc_RNA (1)...(19): siRNA sense strand
gacaacuccuacauguaca

SEQ ID NO: 1349751 - RNA, 19 nt, Homo sapiens
  misc_RNA (1)...(19): siRNA sense strand
ccacucuucacagcaauuu

SEQ ID NO: 1349752 - RNA, 19 nt, Homo sapiens
  misc_RNA (1)...(19): siRNA sense strand
ccagacaaccagacugaag

SEQ ID NO: 1349753 - RNA, 19 nt, Homo sapiens
  misc_RNA (1)...(19): siRNA sense strand
ccgugugucuaugaucuaa

SEQ ID NO: 1349754 - RNA, 19 nt, Homo sapiens
  misc_RNA (1)...(19): siRNA sense strand
caacuccuacauguacauu

SEQ ID NO: 1349755 - RNA, 19 nt, Homo sapiens
  misc_RNA (1)...(19): siRNA sense strand
gaaccgugugucuaugauc

SEQ ID NO: 1349756 - RNA, 19 nt, Homo sapiens
  misc_RNA (1)...(19): siRNA sense strand
cauguacauucucuuuguc

SEQ ID NO: 1349757 - RNA, 19 nt, Homo sapiens
  misc_RNA (1)...(19): siRNA sense strand
aagaaccgugugucuauga

SEQ ID NO: 1349758 - RNA, 19 nt, Homo sapiens
  misc_RNA (1)...(19): siRNA sense strand
guagugaccccuaucaugu

SEQ ID NO: 1349759 - RNA, 19 nt, Homo sapiens
  misc_RNA (1)...(19): siRNA sense strand
ggaacggagaccugguaug

SEQ ID NO: 1349760 - RNA, 19 nt, Homo sapiens
  misc_RNA (1)...(19): siRNA sense strand
gcaaggugcuucuagguua

SEQ ID NO: 1349761 - RNA, 19 nt, Homo sapiens
  misc_RNA (1)...(19): siRNA sense strand
gaacaaagcagccgcauga

SEQ ID NO: 1349762 - RNA, 19 nt, Homo sapiens
  misc_RNA (1)...(19): siRNA sense strand
caauaaagcuggacagaga

SEQ ID NO: 1349763 - RNA, 19 nt, Homo sapiens
  misc_RNA (1)...(19): siRNA sense strand
ggaagacagugaaggcaua

SEQ ID NO: 1349764 - RNA, 19 nt, Homo sapiens
  misc_RNA (1)...(19): siRNA sense strand
gcucaacccugaaauagaa

SEQ ID NO: 1349765 - RNA, 19 nt, Homo sapiens
  misc_RNA (1)...(19): siRNA sense strand
ggagaaggcugccaagcaa

SEQ ID NO: 1349766 - RNA, 19 nt, Homo sapiens
  misc_RNA (1)...(19): siRNA sense strand
cagaagaggugaccaucua

SEQ ID NO: 1349767 - RNA, 19 nt, Homo sapiens
  misc_RNA (1)...(19): siRNA sense strand
ggucgaaccuggauaccua

SEQ ID NO: 1349768 - RNA, 19 nt, Homo sapiens
  misc_RNA (1)...(19): siRNA sense strand
gaaccuccauucacuacaa

SEQ ID NO: 1349769 - RNA, 19 nt, Homo sapiens
  misc_RNA (1)...(19): siRNA sense strand
gcaacaaggucuauguauc

SEQ ID NO: 1349770 - RNA, 19 nt, Homo sapiens
  misc_RNA (1)...(19): siRNA sense strand
auauaaagcugcagacaaa

SEQ ID NO: 1349771 - RNA, 19 nt, Homo sapiens
  misc_RNA (1)...(19): siRNA sense strand
gaaaucaccaucgaaguuu

SEQ ID NO: 1349772 - RNA, 19 nt, Homo sapiens
  misc_RNA (1)...(19): siRNA sense strand
ggacagcggucaugaucau

SEQ ID NO: 1349773 - RNA, 19 nt, Homo sapiens
  misc_RNA (1)...(19): siRNA sense strand
ggaagcaccugagcaugaa

SEQ ID NO: 1349774 - RNA, 19 nt, Homo sapiens
  misc_RNA (1)...(19): siRNA sense strand
gacaacauccgaauugaaa

SEQ ID NO: 1349775 - RNA, 19 nt, Homo sapiens
  misc_RNA (1)...(19): siRNA sense strand
gaaauucacaucccgauca

SEQ ID NO: 1349776 - RNA, 19 nt, Homo sapiens
  misc_RNA (1)...(19): siRNA sense strand
guacaucccuccuucuuac

SEQ ID NO: 1349777 - RNA, 19 nt, Homo sapiens
  misc_RNA (1)...(19): siRNA sense strand
aaaagaagcugcacgguuu

SEQ ID NO: 1349778 - RNA, 19 nt, Homo sapiens
  misc_RNA (1)...(19): siRNA sense strand
gaucauagccuaccacacu

SEQ ID NO: 1349779 - RNA, 19 nt, Homo sapiens
  misc_RNA (1)...(19): siRNA sense strand
uaacagagacgacuuugug

SEQ ID NO: 1349780 - RNA, 19 nt, Homo sapiens
  misc_RNA (1)...(19): siRNA sense strand
uaaugucgcccaacucaua

SEQ ID NO: 1349781 - RNA, 19 nt, Homo sapiens
  misc_RNA (1)...(19): siRNA sense strand
gaccuucacuguccacuuc

SEQ ID NO: 1349782 - RNA, 19 nt, Homo sapiens
  misc_RNA (1)...(19): siRNA sense strand
gcuacagccuccaaaguga

SEQ ID NO: 1349783 - RNA, 19 nt, Homo sapiens
  misc_RNA (1)...(19): siRNA sense strand
cugcaagugugaccaauaa

SEQ ID NO: 1349784 - RNA, 19 nt, Homo sapiens
  misc_RNA (1)...(19): siRNA sense strand
ucgcccaacucauauauaa

SEQ ID NO: 1349785 - RNA, 19 nt, Homo sapiens
  misc_RNA (1)...(19): siRNA sense strand
ugaaauagaagcagaacaa

SEQ ID NO: 1349786 - RNA, 19 nt, Homo sapiens
  misc_RNA (1)...(19): siRNA sense strand
cagaagcucuaaccugaga

SEQ ID NO: 1349787 - RNA, 19 nt, Homo sapiens
  misc_RNA (1)...(19): siRNA sense strand
ccacaucucccaaugcauu

SEQ ID NO: 1349788 - RNA, 19 nt, Homo sapiens
  misc_RNA (1)...(19): siRNA sense strand
cgaccaggcugaaauccuu

SEQ ID NO: 1349789 - RNA, 19 nt, Homo sapiens
  misc_RNA (1)...(19): siRNA sense strand
gacaucggguucaguguga

SEQ ID NO: 1349790 - RNA, 19 nt, Homo sapiens
  misc_RNA (1)...(19): siRNA sense strand
ggcuggaccuggcugcuua

SEQ ID NO: 1349791 - RNA, 19 nt, Homo sapiens
  misc_RNA (1)...(19): siRNA sense strand
gagaugaagguguauguga

SEQ ID NO: 1349792 - RNA, 19 nt, Homo sapiens
  misc_RNA (1)...(19): siRNA sense strand
guggaucccuccucuguug

SEQ ID NO: 1349793 - RNA, 19 nt, Homo sapiens
  misc_RNA (1)...(19): siRNA sense strand
ggaaugaccgugaccuuca

SEQ ID NO: 1349794 - RNA, 19 nt, Homo sapiens
  misc_RNA (1)...(19): siRNA sense strand
guaaagguauccccuguuu

SEQ ID NO: 1349795 - RNA, 19 nt, Homo sapiens
  misc_RNA (1)...(19): siRNA sense strand
gaaauagaagcagaacaaa

SEQ ID NO: 1349796 - RNA, 19 nt, Homo sapiens
  misc_RNA (1)...(19): siRNA sense strand
gaagaucaggcaagggaaa

SEQ ID NO: 1349797 - RNA, 19 nt, Homo sapiens
  misc_RNA (1)...(19): siRNA sense strand
cauuguugcuguaaaggua

SEQ ID NO: 1349798 - RNA, 19 nt, Homo sapiens
  misc_RNA (1)...(19): siRNA sense strand
caacaaggucuauguaucu

SEQ ID NO: 1349799 - RNA, 19 nt, Homo sapiens
  misc_RNA (1)...(19): siRNA sense strand
ccaggaggcugucuacaag

SEQ ID NO: 1349800 - RNA, 19 nt, Homo sapiens
  misc_RNA (1)...(19): siRNA sense strand
ugaaaucaccaucgaaguu

SEQ ID NO: 1349801 - RNA, 19 nt, Homo sapiens
  misc_RNA (1)...(19): siRNA sense strand
caaccaaaccaucauuguu

SEQ ID NO: 1349802 - RNA, 19 nt, Homo sapiens
  misc_RNA (1)...(19): siRNA sense strand
gaauguacgcccugcagaa

SEQ ID NO: 1349803 - RNA, 19 nt, Homo sapiens
  misc_RNA (1)...(19): siRNA sense strand
gcagaacccacuccauuuc

SEQ ID NO: 1349804 - RNA, 19 nt, Homo sapiens
  misc_RNA (1)...(19): siRNA sense strand
gccuaucaguacacaauaa

SEQ ID NO: 1349805 - RNA, 19 nt, Homo sapiens
  misc_RNA (1)...(19): siRNA sense strand
caacuacaccaucacauuc

SEQ ID NO: 1349806 - RNA, 19 nt, Homo sapiens
  misc_RNA (1)...(19): siRNA sense strand
gugcagaacccacuccauu

SEQ ID NO: 1349807 - RNA, 19 nt, Homo sapiens
  misc_RNA (1)...(19): siRNA sense strand
ggacauccaccaucgaagu

SEQ ID NO: 1349808 - RNA, 19 nt, Homo sapiens
  misc_RNA (1)...(19): siRNA sense strand
caacuuugccacuaacaga

SEQ ID NO: 1349809 - RNA, 19 nt, Homo sapiens
  misc_RNA (1)...(19): siRNA sense strand
ucggugagaugaaggugua

SEQ ID NO: 1349810 - RNA, 19 nt, Homo sapiens
  misc_RNA (1)...(19): siRNA sense strand
cuauuucgcugccucauca

SEQ ID NO: 1349811 - RNA, 19 nt, Homo sapiens
  misc_RNA (1)...(19): siRNA sense strand
acaacagauugaagucuuu

SEQ ID NO: 1349812 - RNA, 19 nt, Homo sapiens
  misc_RNA (1)...(19): siRNA sense strand
augaagcccuugacaacua

SEQ ID NO: 1349813 - RNA, 19 nt, Homo sapiens
  misc_RNA (1)...(19): siRNA sense strand
ccacgcuucuugugagcua

SEQ ID NO: 1349814 - RNA, 19 nt, Homo sapiens
  misc_RNA (1)...(19): siRNA sense strand
cacaacagauugaagucuu

SEQ ID NO: 1349815 - RNA, 19 nt, Homo sapiens
  misc_RNA (1)...(19): siRNA sense strand
guacaacuuugccaugaac

SEQ ID NO: 1349816 - RNA, 19 nt, Homo sapiens
  misc_RNA (1)...(19): siRNA sense strand
gaggcugucuacaagaaug

SEQ ID NO: 1349817 - RNA, 19 nt, Homo sapiens
  misc_RNA (1)...(19): siRNA sense strand
caucauuguugcuguaaag

SEQ ID NO: 1349818 - RNA, 19 nt, Homo sapiens
  misc_RNA (1)...(19): siRNA sense strand
caguacaacuuugccauga

SEQ ID NO: 1349819 - RNA, 19 nt, Homo sapiens
  misc_RNA (1)...(19): siRNA sense strand
gcaagguggucaucaucuc

SEQ ID NO: 1349820 - RNA, 19 nt, Homo sapiens
  misc_RNA (1)...(19): siRNA sense strand
uuacauugguggcccuuga

SEQ ID NO: 1349821 - RNA, 19 nt, Homo sapiens
  misc_RNA (1)...(19): siRNA sense strand
ccgcagauguugucaaggu

SEQ ID NO: 1349822 - RNA, 19 nt, Homo sapiens
  misc_RNA (1)...(19): siRNA sense strand
ccaaauacuuccccuuuau

SEQ ID NO: 1349823 - RNA, 19 nt, Homo sapiens
  misc_RNA (1)...(19): siRNA sense strand
gcaagugugaccaauaaag

SEQ ID NO: 1349824 - RNA, 19 nt, Homo sapiens
  misc_RNA (1)...(19): siRNA sense strand
gagacgacuuugugcagau

SEQ ID NO: 1349825 - RNA, 19 nt, Homo sapiens
  misc_RNA (1)...(19): siRNA sense strand
gauccaaguccagguguuu

SEQ ID NO: 1349826 - RNA, 19 nt, Homo sapiens
  misc_RNA (1)...(19): siRNA sense strand
cagcaacaaggucuaugua

SEQ ID NO: 1349827 - RNA, 19 nt, Homo sapiens
  misc_RNA (1)...(19): siRNA sense strand
ccacuacccugaccuucuc

SEQ ID NO: 1349828 - RNA, 19 nt, Homo sapiens
  misc_RNA (1)...(19): siRNA sense strand
cggaagcaccugagcauga

SEQ ID NO: 1349829 - RNA, 19 nt, Homo sapiens
  misc_RNA (1)...(19): siRNA sense strand
ucgaagugauugcacaaga

SEQ ID NO: 1349830 - RNA, 19 nt, Homo sapiens
  misc_RNA (1)...(19): siRNA sense strand
gccaaauacuuccccuuua

SEQ ID NO: 1349831 - RNA, 19 nt, Homo sapiens
  misc_RNA (1)...(19): siRNA sense strand
gagauugggaagacaguga

SEQ ID NO: 1349832 - RNA, 19 nt, Homo sapiens
  misc_RNA (1)...(19): siRNA sense strand
ccaccugguugccacaguu

SEQ ID NO: 1349833 - RNA, 19 nt, Homo sapiens
  misc_RNA (1)...(19): siRNA sense strand
caacacuggauccuuguga

SEQ ID NO: 1349834 - RNA, 19 nt, Homo sapiens
  misc_RNA (1)...(19): siRNA sense strand
gcagccacuucuccacaga

SEQ ID NO: 1349835 - RNA, 19 nt, Homo sapiens
  misc_RNA (1)...(19): siRNA sense strand
caccugagcaugaagaaga

SEQ ID NO: 1349836 - RNA, 19 nt, Homo sapiens
  misc_RNA (1)...(19): siRNA sense strand
gcugcucaacccugaaaua

SEQ ID NO: 1349837 - RNA, 19 nt, Homo sapiens
  misc_RNA (1)...(19): siRNA sense strand
ucagggaaggcucagguua

SEQ ID NO: 1349838 - RNA, 19 nt, Homo sapiens
  misc_RNA (1)...(19): siRNA sense strand
uaccuaggguucacuguuc

SEQ ID NO: 1349839 - RNA, 19 nt, Homo sapiens
  misc_RNA (1)...(19): siRNA sense strand
ggcccagcuucaucacaua

SEQ ID NO: 1349840 - RNA, 19 nt, Homo sapiens
  misc_RNA (1)...(19): siRNA sense strand
cccagcaucuugacauuuc

SEQ ID NO: 1349841 - RNA, 19 nt, Homo sapiens
  misc_RNA (1)...(19): siRNA sense strand
gcgcugugaugccauugug

SEQ ID NO: 1349842 - RNA, 19 nt, Homo sapiens
  misc_RNA (1)...(19): siRNA sense strand
aaccaaaccaucauuguug

SEQ ID NO: 1349843 - RNA, 19 nt, Homo sapiens
  misc_RNA (1)...(19): siRNA sense strand
cgaagugauugcacaagag

SEQ ID NO: 1349844 - RNA, 19 nt, Homo sapiens
  misc_RNA (1)...(19): siRNA sense strand
gcggacagguucucagacu

SEQ ID NO: 1349845 - RNA, 19 nt, Homo sapiens
  misc_RNA (1)...(19): siRNA sense strand
gcuucuagguuacccaaca

SEQ ID NO: 1349846 - RNA, 19 nt, Homo sapiens
  misc_RNA (1)...(19): siRNA sense strand
ucacccacaucucccaaug

SEQ ID NO: 1349847 - RNA, 19 nt, Homo sapiens
  misc_RNA (1)...(19): siRNA sense strand
guacuucugcucaaucaca

SEQ ID NO: 1349848 - RNA, 19 nt, Homo sapiens
  misc_RNA (1)...(19): siRNA sense strand
gcccaacucauauauaaag

SEQ ID NO: 1349849 - RNA, 19 nt, Homo sapiens
  misc_RNA (1)...(19): siRNA sense strand
acaacuacaccaucacauu

SEQ ID NO: 1349850 - RNA, 19 nt, Homo sapiens
  misc_RNA (1)...(19): siRNA sense strand
ccaaggcugucguuuacgu

SEQ ID NO: 1349851 - RNA, 19 nt, Homo sapiens
  misc_RNA (1)...(19): siRNA sense strand
gaagaggugaccaucuaca

SEQ ID NO: 1349852 - RNA, 19 nt, Homo sapiens
  misc_RNA (1)...(19): siRNA sense strand
ggagaugcuguuugaagga

SEQ ID NO: 1349853 - RNA, 19 nt, Homo sapiens
  misc_RNA (1)...(19): siRNA sense strand
ugacaacauccgaauugaa

SEQ ID NO: 1349854 - RNA, 19 nt, Homo sapiens
  misc_RNA (1)...(19): siRNA sense strand
ggaaggugacacugcuuau

SEQ ID NO: 1349855 - RNA, 19 nt, Homo sapiens
  misc_RNA (1)...(19): siRNA sense strand
uguaugaaaucaccaucga

SEQ ID NO: 1349856 - RNA, 19 nt, Homo sapiens
  misc_RNA (1)...(19): siRNA sense strand
ggccaguacuucugcucaa

SEQ ID NO: 1349857 - RNA, 19 nt, Homo sapiens
  misc_RNA (1)...(19): siRNA sense strand
guccucaacuuugccacua

SEQ ID NO: 1349858 - RNA, 19 nt, Homo sapiens
  misc_RNA (1)...(19): siRNA sense strand
cuacaccaguuccgagauc

SEQ ID NO: 1349859 - RNA, 19 nt, Homo sapiens
  misc_RNA (1)...(19): siRNA sense strand
caguacuucugcucaauca

SEQ ID NO: 1349860 - RNA, 19 nt, Homo sapiens
  misc_RNA (1)...(19): siRNA sense strand
gggcagaacuguacaagga

SEQ ID NO: 1349861 - RNA, 19 nt, Homo sapiens
  misc_RNA (1)...(19): siRNA sense strand
gaaguaaggcugucagaga

SEQ ID NO: 1349862 - RNA, 19 nt, Homo sapiens
  misc_RNA (1)...(19): siRNA sense strand
acaaggagccuaccaauga

SEQ ID NO: 1349863 - RNA, 19 nt, Homo sapiens
  misc_RNA (1)...(19): siRNA sense strand
gaagaaggaucggauugau

SEQ ID NO: 1349864 - RNA, 19 nt, Homo sapiens
  misc_RNA (1)...(19): siRNA sense strand
ggccagagcugcaggacaa

SEQ ID NO: 1349865 - RNA, 19 nt, Homo sapiens
  misc_RNA (1)...(19): siRNA sense strand
gcacggcugucuaugaugu

SEQ ID NO: 1349866 - RNA, 19 nt, Homo sapiens
  misc_RNA (1)...(19): siRNA sense strand
uagaggagcuacuaaagga

SEQ ID NO: 1349867 - RNA, 19 nt, Homo sapiens
  misc_RNA (1)...(19): siRNA sense strand
acacauggguccugcaaga

SEQ ID NO: 1349868 - RNA, 19 nt, Homo sapiens
  misc_RNA (1)...(19): siRNA sense strand
gaagaagaaggaucggauu

SEQ ID NO: 1349869 - RNA, 19 nt, Homo sapiens
  misc_RNA (1)...(19): siRNA sense strand
gggaucaguuuaugucuca

SEQ ID NO: 1349870 - RNA, 19 nt, Homo sapiens
  misc_RNA (1)...(19): siRNA sense strand
ugagaagugucuugcaguu

SEQ ID NO: 1349871 - RNA, 19 nt, Homo sapiens
  misc_RNA (1)...(19): siRNA sense strand
cagcucagaucccucuuug

SEQ ID NO: 1349872 - RNA, 19 nt, Homo sapiens
  misc_RNA (1)...(19): siRNA sense strand
agaagugucuugcaguuuc

SEQ ID NO: 1349873 - RNA, 19 nt, Homo sapiens
  misc_RNA (1)...(19): siRNA sense strand
aaguaaggcugucagagaa

SEQ ID NO: 1349874 - RNA, 19 nt, Homo sapiens
  misc_RNA (1)...(19): siRNA sense strand
aaaccuguguccacuaugu

SEQ ID NO: 1349875 - RNA, 19 nt, Homo sapiens
  misc_RNA (1)...(19): siRNA sense strand
agaaaccuguguccacuau

SEQ ID NO: 1349876 - RNA, 19 nt, Homo sapiens
  misc_RNA (1)...(19): siRNA sense strand
guaaggcugucagagaaga

SEQ ID NO: 1349877 - RNA, 19 nt, Homo sapiens
  misc_RNA (1)...(19): siRNA sense strand
ccugaaacccucacuguug

SEQ ID NO: 1349878 - RNA, 19 nt, Homo sapiens
  misc_RNA (1)...(19): siRNA sense strand
agacugagaucuuguucca

SEQ ID NO: 1349879 - RNA, 19 nt, Homo sapiens
  misc_RNA (1)...(19): siRNA sense strand
ugucaaccauucugaguuc

SEQ ID NO: 1349880 - RNA, 19 nt, Homo sapiens
  misc_RNA (1)...(19): siRNA sense strand
cagccaagauccaccaaag

SEQ ID NO: 1349881 - RNA, 19 nt, Homo sapiens
  misc_RNA (1)...(19): siRNA sense strand
gaggcacggcugucuauga

SEQ ID NO: 1349882 - RNA, 19 nt, Homo sapiens
  misc_RNA (1)...(19): siRNA sense strand
guacaaggagccuaccaau

SEQ ID NO: 1349883 - RNA, 19 nt, Homo sapiens
  misc_RNA (1)...(19): siRNA sense strand
gaagugucuugcaguuucu

SEQ ID NO: 1349884 - RNA, 19 nt, Homo sapiens
  misc_RNA (1)...(19): siRNA sense strand
gagaagugucuugcaguuu

SEQ ID NO: 1349885 - RNA, 19 nt, Homo sapiens
  misc_RNA (1)...(19): siRNA sense strand
ggaaggcacaggcaaagag

SEQ ID NO: 1349886 - RNA, 19 nt, Homo sapiens
  misc_RNA (1)...(19): siRNA sense strand
caaggagccuaccaaugag

SEQ ID NO: 1349887 - RNA, 19 nt, Homo sapiens
  misc_RNA (1)...(19): siRNA sense strand
caaccucugugcugauguc

SEQ ID NO: 1349888 - RNA, 19 nt, Homo sapiens
  misc_RNA (1)...(19): siRNA sense strand
ucaacgggaucaguuuaug

SEQ ID NO: 1349889 - RNA, 19 nt, Homo sapiens
  misc_RNA (1)...(19): siRNA sense strand
ccaaugaggagcuuaaucg

SEQ ID NO: 1349890 - RNA, 19 nt, Homo sapiens
  misc_RNA (1)...(19): siRNA sense strand
ggacaucagccaagaucca

SEQ ID NO: 1349891 - RNA, 19 nt, Homo sapiens
  misc_RNA (1)...(19): siRNA sense strand
ugucagagaagaagaagga

SEQ ID NO: 1349892 - RNA, 19 nt, Homo sapiens
  misc_RNA (1)...(19): siRNA sense strand
cagccucuaugucccagaa

SEQ ID NO: 1349893 - RNA, 19 nt, Homo sapiens
  misc_RNA (1)...(19): siRNA sense strand
acauggguccugcaagaua

SEQ ID NO: 1349894 - RNA, 19 nt, Homo sapiens
  misc_RNA (1)...(19): siRNA sense strand
guuuaugucucagcucaga

SEQ ID NO: 1349895 - RNA, 19 nt, Homo sapiens
  misc_RNA (1)...(19): siRNA sense strand
ucggauugaugccuuccua

SEQ ID NO: 1349896 - RNA, 19 nt, Homo sapiens
  misc_RNA (1)...(19): siRNA sense strand
gccaagauccaccaaagca

SEQ ID NO: 1349897 - RNA, 19 nt, Homo sapiens
  misc_RNA (1)...(19): siRNA sense strand
ggacaaugguggggacuau

SEQ ID NO: 1349898 - RNA, 19 nt, Homo sapiens
  misc_RNA (1)...(19): siRNA sense strand
caacgggaucaguuuaugu

SEQ ID NO: 1349899 - RNA, 19 nt, Homo sapiens
  misc_RNA (1)...(19): siRNA sense strand
uaacacauggguccugcaa

SEQ ID NO: 1349900 - RNA, 19 nt, Homo sapiens
  misc_RNA (1)...(19): siRNA sense strand
cagcccagguuacuguugu

SEQ ID NO: 1349901 - RNA, 19 nt, Homo sapiens
  misc_RNA (1)...(19): siRNA sense strand
gacuaugucucagcugcuu

SEQ ID NO: 1349902 - RNA, 19 nt, Homo sapiens
  misc_RNA (1)...(19): siRNA sense strand
cagcagggcagaacuguac

SEQ ID NO: 1349903 - RNA, 19 nt, Homo sapiens
  misc_RNA (1)...(19): siRNA sense strand
agaagaaggaucggauuga

SEQ ID NO: 1349904 - RNA, 19 nt, Homo sapiens
  misc_RNA (1)...(19): siRNA sense strand
ggacaaggacgggcugaac

SEQ ID NO: 1349905 - RNA, 19 nt, Homo sapiens
  misc_RNA (1)...(19): siRNA sense strand
cugcaucuccguccacuga

SEQ ID NO: 1349906 - RNA, 19 nt, Homo sapiens
  misc_RNA (1)...(19): siRNA sense strand
aggcacggcugucuaugau

SEQ ID NO: 1349907 - RNA, 19 nt, Homo sapiens
  misc_RNA (1)...(19): siRNA sense strand
ggccuucuccguugucuuc

SEQ ID NO: 1349908 - RNA, 19 nt, Homo sapiens
  misc_RNA (1)...(19): siRNA sense strand
caagggccaggguggguuu

SEQ ID NO: 1349909 - RNA, 19 nt, Homo sapiens
  misc_RNA (1)...(19): siRNA sense strand
gcaucuccguccacugagu

SEQ ID NO: 1349910 - RNA, 19 nt, Homo sapiens
  misc_RNA (1)...(19): siRNA sense strand
cuaccaaugaggagcuuaa

SEQ ID NO: 1349911 - RNA, 19 nt, Homo sapiens
  misc_RNA (1)...(19): siRNA sense strand
cugguugucuuccuugugu

SEQ ID NO: 1349912 - RNA, 19 nt, Homo sapiens
  misc_RNA (1)...(19): siRNA sense strand
cacuccagcuugcuucguu

SEQ ID NO: 1349913 - RNA, 19 nt, Homo sapiens
  misc_RNA (1)...(19): siRNA sense strand
agucaacgggaucaguuua

SEQ ID NO: 1349914 - RNA, 19 nt, Homo sapiens
  misc_RNA (1)...(19): siRNA sense strand
gcaagauccauaccaccau

SEQ ID NO: 1349915 - RNA, 19 nt, Homo sapiens
  misc_RNA (1)...(19): siRNA sense strand
cauccgaccagacaucaau

SEQ ID NO: 1349916 - RNA, 19 nt, Homo sapiens
  misc_RNA (1)...(19): siRNA sense strand
aagaagaaggaucggauug

SEQ ID NO: 1349917 - RNA, 19 nt, Homo sapiens
  misc_RNA (1)...(19): siRNA sense strand
ccucugugcugaugucacu

SEQ ID NO: 1349918 - RNA, 19 nt, Homo sapiens
  misc_RNA (1)...(19): siRNA sense strand
gggagacugagaucuuguu

SEQ ID NO: 1349919 - RNA, 19 nt, Homo sapiens
  misc_RNA (1)...(19): siRNA sense strand
uccguugucuuccuggauu

SEQ ID NO: 1349920 - RNA, 19 nt, Homo sapiens
  misc_RNA (1)...(19): siRNA sense strand
cauggguccugcaagauac

SEQ ID NO: 1349921 - RNA, 19 nt, Homo sapiens
  misc_RNA (1)...(19): siRNA sense strand
ucgggagacugagaucuug

SEQ ID NO: 1349922 - RNA, 19 nt, Homo sapiens
  misc_RNA (1)...(19): siRNA sense strand
ccagcuugcuucguuuaca

SEQ ID NO: 1349923 - RNA, 19 nt, Homo sapiens
  misc_RNA (1)...(19): siRNA sense strand
ucccagaagcgccuuauuc

SEQ ID NO: 1349924 - RNA, 19 nt, Homo sapiens
  misc_RNA (1)...(19): siRNA sense strand
gcagggcagaacuguacaa

SEQ ID NO: 1349925 - RNA, 19 nt, Homo sapiens
  misc_RNA (1)...(19): siRNA sense strand
cagaaaccuguguccacua

SEQ ID NO: 1349926 - RNA, 19 nt, Homo sapiens
  misc_RNA (1)...(19): siRNA sense strand
gcuaaauuccgccaguucu

SEQ ID NO: 1349927 - RNA, 19 nt, Homo sapiens
  misc_RNA (1)...(19): siRNA sense strand
gguuccaccugcuguugau

SEQ ID NO: 1349928 - RNA, 19 nt, Homo sapiens
  misc_RNA (1)...(19): siRNA sense strand
gaaggauggcguggcacuu

SEQ ID NO: 1349929 - RNA, 19 nt, Homo sapiens
  misc_RNA (1)...(19): siRNA sense strand
caccugaaacccucacugu

SEQ ID NO: 1349930 - RNA, 19 nt, Homo sapiens
  misc_RNA (1)...(19): siRNA sense strand
gauccgggcuuuugaccau

SEQ ID NO: 1349931 - RNA, 19 nt, Homo sapiens
  misc_RNA (1)...(19): siRNA sense strand
ggagacugagaucuuguuc

SEQ ID NO: 1349932 - RNA, 19 nt, Homo sapiens
  misc_RNA (1)...(19): siRNA sense strand
gcaaagaggggaagaaagc

SEQ ID NO: 1349933 - RNA, 19 nt, Homo sapiens
  misc_RNA (1)...(19): siRNA sense strand
caugcugguugucuuccuu

SEQ ID NO: 1349934 - RNA, 19 nt, Homo sapiens
  misc_RNA (1)...(19): siRNA sense strand
gaccaugcccagggaaauc

SEQ ID NO: 1349935 - RNA, 19 nt, Homo sapiens
  misc_RNA (1)...(19): siRNA sense strand
ggcacuccaugcugacauc

SEQ ID NO: 1349936 - RNA, 19 nt, Homo sapiens
  misc_RNA (1)...(19): siRNA sense strand
cagcuugcuucguuuacag

SEQ ID NO: 1349937 - RNA, 19 nt, Homo sapiens
  misc_RNA (1)...(19): siRNA sense strand
gggcagaacuguacaagga

SEQ ID NO: 1349938 - RNA, 19 nt, Homo sapiens
  misc_RNA (1)...(19): siRNA sense strand
gaaguaaggcugucagaga

SEQ ID NO: 1349939 - RNA, 19 nt, Homo sapiens
  misc_RNA (1)...(19): siRNA sense strand
acaaggagccuaccaauga

SEQ ID NO: 1349940 - RNA, 19 nt, Homo sapiens
  misc_RNA (1)...(19): siRNA sense strand
gaagaaggaucggauugau

SEQ ID NO: 1349941 - RNA, 19 nt, Homo sapiens
  misc_RNA (1)...(19): siRNA sense strand
ggccagagcugcaggacaa

SEQ ID NO: 1349942 - RNA, 19 nt, Homo sapiens
  misc_RNA (1)...(19): siRNA sense strand
gcacggcugucuaugaugu

SEQ ID NO: 1349943 - RNA, 19 nt, Homo sapiens
  misc_RNA (1)...(19): siRNA sense strand
uagaggagcuacuaaagga

SEQ ID NO: 1349944 - RNA, 19 nt, Homo sapiens
  misc_RNA (1)...(19): siRNA sense strand
acacauggguccugcaaga

SEQ ID NO: 1349945 - RNA, 19 nt, Homo sapiens
  misc_RNA (1)...(19): siRNA sense strand
gaagaagaaggaucggauu

SEQ ID NO: 1349946 - RNA, 19 nt, Homo sapiens
  misc_RNA (1)...(19): siRNA sense strand
gggaucaguuuaugucuca

SEQ ID NO: 1349947 - RNA, 19 nt, Homo sapiens
  misc_RNA (1)...(19): siRNA sense strand
ugagaagugucuugcaguu

SEQ ID NO: 1349948 - RNA, 19 nt, Homo sapiens
  misc_RNA (1)...(19): siRNA sense strand
cagcucagaucccucuuug

SEQ ID NO: 1349949 - RNA, 19 nt, Homo sapiens
  misc_RNA (1)...(19): siRNA sense strand
agaagugucuugcaguuuc

SEQ ID NO: 1349950 - RNA, 19 nt, Homo sapiens
  misc_RNA (1)...(19): siRNA sense strand
aaguaaggcugucagagaa

SEQ ID NO: 1349951 - RNA, 19 nt, Homo sapiens
  misc_RNA (1)...(19): siRNA sense strand
aaaccuguguccacuaugu

SEQ ID NO: 1349952 - RNA, 19 nt, Homo sapiens
  misc_RNA (1)...(19): siRNA sense strand
agaaaccuguguccacuau

SEQ ID NO: 1349953 - RNA, 19 nt, Homo sapiens
  misc_RNA (1)...(19): siRNA sense strand
guaaggcugucagagaaga

SEQ ID NO: 1349954 - RNA, 19 nt, Homo sapiens
  misc_RNA (1)...(19): siRNA sense strand
ccugaaacccucacuguug

SEQ ID NO: 1349955 - RNA, 19 nt, Homo sapiens
  misc_RNA (1)...(19): siRNA sense strand
agacugagaucuuguucca

SEQ ID NO: 1349956 - RNA, 19 nt, Homo sapiens
  misc_RNA (1)...(19): siRNA sense strand
ugucaaccauucugaguuc

SEQ ID NO: 1349957 - RNA, 19 nt, Homo sapiens
  misc_RNA (1)...(19): siRNA sense strand
cagccaagauccaccaaag

SEQ ID NO: 1349958 - RNA, 19 nt, Homo sapiens
  misc_RNA (1)...(19): siRNA sense strand
gaggcacggcugucuauga

SEQ ID NO: 1349959 - RNA, 19 nt, Homo sapiens
  misc_RNA (1)...(19): siRNA sense strand
guacaaggagccuaccaau

SEQ ID NO: 1349960 - RNA, 19 nt, Homo sapiens
  misc_RNA (1)...(19): siRNA sense strand
gaagugucuugcaguuucu

SEQ ID NO: 1349961 - RNA, 19 nt, Homo sapiens
  misc_RNA (1)...(19): siRNA sense strand
gagaagugucuugcaguuu

SEQ ID NO: 1349962 - RNA, 19 nt, Homo sapiens
  misc_RNA (1)...(19): siRNA sense strand
ggaaggcacaggcaaagag

SEQ ID NO: 1349963 - RNA, 19 nt, Homo sapiens
  misc_RNA (1)...(19): siRNA sense strand
gaaaauguggcccuucuga

SEQ ID NO: 1349964 - RNA, 19 nt, Homo sapiens
  misc_RNA (1)...(19): siRNA sense strand
caaggagccuaccaaugag

SEQ ID NO: 1349965 - RNA, 19 nt, Homo sapiens
  misc_RNA (1)...(19): siRNA sense strand
caaccucugugcugauguc

SEQ ID NO: 1349966 - RNA, 19 nt, Homo sapiens
  misc_RNA (1)...(19): siRNA sense strand
ucaacgggaucaguuuaug

SEQ ID NO: 1349967 - RNA, 19 nt, Homo sapiens
  misc_RNA (1)...(19): siRNA sense strand
ccaaugaggagcuuaaucg

SEQ ID NO: 1349968 - RNA, 19 nt, Homo sapiens
  misc_RNA (1)...(19): siRNA sense strand
ggacaucagccaagaucca

SEQ ID NO: 1349969 - RNA, 19 nt, Homo sapiens
  misc_RNA (1)...(19): siRNA sense strand
ugucagagaagaagaagga

SEQ ID NO: 1349970 - RNA, 19 nt, Homo sapiens
  misc_RNA (1)...(19): siRNA sense strand
cagccucuaugucccagaa

SEQ ID NO: 1349971 - RNA, 19 nt, Homo sapiens
  misc_RNA (1)...(19): siRNA sense strand
acauggguccugcaagaua

SEQ ID NO: 1349972 - RNA, 19 nt, Homo sapiens
  misc_RNA (1)...(19): siRNA sense strand
guuuaugucucagcucaga

SEQ ID NO: 1349973 - RNA, 19 nt, Homo sapiens
  misc_RNA (1)...(19): siRNA sense strand
ucggauugaugccuuccua

SEQ ID NO: 1349974 - RNA, 19 nt, Homo sapiens
  misc_RNA (1)...(19): siRNA sense strand
gccaagauccaccaaagca

SEQ ID NO: 1349975 - RNA, 19 nt, Homo sapiens
  misc_RNA (1)...(19): siRNA sense strand
ggacaaugguggggacuau

SEQ ID NO: 1349976 - RNA, 19 nt, Homo sapiens
  misc_RNA (1)...(19): siRNA sense strand
caacgggaucaguuuaugu

SEQ ID NO: 1349977 - RNA, 19 nt, Homo sapiens
  misc_RNA (1)...(19): siRNA sense strand
uaacacauggguccugcaa

SEQ ID NO: 1349978 - RNA, 19 nt, Homo sapiens
  misc_RNA (1)...(19): siRNA sense strand
cagcccagguuacuguugu

SEQ ID NO: 1349979 - RNA, 19 nt, Homo sapiens
  misc_RNA (1)...(19): siRNA sense strand
gacuaugucucagcugcuu

SEQ ID NO: 1349980 - RNA, 19 nt, Homo sapiens
  misc_RNA (1)...(19): siRNA sense strand
agaagaaggaucggauuga

SEQ ID NO: 1349981 - RNA, 19 nt, Homo sapiens
  misc_RNA (1)...(19): siRNA sense strand
cagcagggcagaacuguac

SEQ ID NO: 1349982 - RNA, 19 nt, Homo sapiens
  misc_RNA (1)...(19): siRNA sense strand
ggacaaggacgggcugaac

SEQ ID NO: 1349983 - RNA, 19 nt, Homo sapiens
  misc_RNA (1)...(19): siRNA sense strand
cugcaucuccguccacuga

SEQ ID NO: 1349984 - RNA, 19 nt, Homo sapiens
  misc_RNA (1)...(19): siRNA sense strand
aggcacggcugucuaugau

SEQ ID NO: 1349985 - RNA, 19 nt, Homo sapiens
  misc_RNA (1)...(19): siRNA sense strand
ggccuucuccguugucuuc

SEQ ID NO: 1349986 - RNA, 19 nt, Homo sapiens
  misc_RNA (1)...(19): siRNA sense strand
caagggccaggguggguuu

SEQ ID NO: 1349987 - RNA, 19 nt, Homo sapiens
  misc_RNA (1)...(19): siRNA sense strand
cuaccaaugaggagcuuaa

SEQ ID NO: 1349988 - RNA, 19 nt, Homo sapiens
  misc_RNA (1)...(19): siRNA sense strand
gcaucuccguccacugagu

SEQ ID NO: 1349989 - RNA, 19 nt, Homo sapiens
  misc_RNA (1)...(19): siRNA sense strand
cugguugucuuccuugugu

SEQ ID NO: 1349990 - RNA, 19 nt, Homo sapiens
  misc_RNA (1)...(19): siRNA sense strand
cacuccagcuugcuucguu

SEQ ID NO: 1349991 - RNA, 19 nt, Homo sapiens
  misc_RNA (1)...(19): siRNA sense strand
agucaacgggaucaguuua

SEQ ID NO: 1349992 - RNA, 19 nt, Homo sapiens
  misc_RNA (1)...(19): siRNA sense strand
gcaagauccauaccaccau

SEQ ID NO: 1349993 - RNA, 19 nt, Homo sapiens
  misc_RNA (1)...(19): siRNA sense strand
cauccgaccagacaucaau

SEQ ID NO: 1349994 - RNA, 19 nt, Homo sapiens
  misc_RNA (1)...(19): siRNA sense strand
gggagacugagaucuuguu

SEQ ID NO: 1349995 - RNA, 19 nt, Homo sapiens
  misc_RNA (1)...(19): siRNA sense strand
ccucugugcugaugucacu

SEQ ID NO: 1349996 - RNA, 19 nt, Homo sapiens
  misc_RNA (1)...(19): siRNA sense strand
uccguugucuuccuggauu

SEQ ID NO: 1349997 - RNA, 19 nt, Homo sapiens
  misc_RNA (1)...(19): siRNA sense strand
ucgggagacugagaucuug

SEQ ID NO: 1349998 - RNA, 19 nt, Homo sapiens
  misc_RNA (1)...(19): siRNA sense strand
cauggguccugcaagauac

SEQ ID NO: 1349999 - RNA, 19 nt, Homo sapiens
  misc_RNA (1)...(19): siRNA sense strand
aagaagaaggaucggauug

SEQ ID NO: 1350000 - RNA, 19 nt, Homo sapiens
  misc_RNA (1)...(19): siRNA sense strand
ccagcuugcuucguuuaca

SEQ ID NO: 1350001 - RNA, 19 nt, Homo sapiens
  misc_RNA (1)...(19): siRNA sense strand
ucccagaagcgccuuauuc

SEQ ID NO: 1350002 - RNA, 19 nt, Homo sapiens
  misc_RNA (1)...(19): siRNA sense strand
gaaggauggcguggcacuu

SEQ ID NO: 1350003 - RNA, 19 nt, Homo sapiens
  misc_RNA (1)...(19): siRNA sense strand
cagaaaccuguguccacua

SEQ ID NO: 1350004 - RNA, 19 nt, Homo sapiens
  misc_RNA (1)...(19): siRNA sense strand
gcagggcagaacuguacaa

SEQ ID NO: 1350005 - RNA, 19 nt, Homo sapiens
  misc_RNA (1)...(19): siRNA sense strand
gcuaaauuccgccaguucu

SEQ ID NO: 1350006 - RNA, 19 nt, Homo sapiens
  misc_RNA (1)...(19): siRNA sense strand
gguuccaccugcuguugau

SEQ ID NO: 1350007 - RNA, 19 nt, Homo sapiens
  misc_RNA (1)...(19): siRNA sense strand
caccugaaacccucacugu

SEQ ID NO: 1350008 - RNA, 19 nt, Homo sapiens
  misc_RNA (1)...(19): siRNA sense strand
gauccgggcuuuugaccau

SEQ ID NO: 1350009 - RNA, 19 nt, Homo sapiens
  misc_RNA (1)...(19): siRNA sense strand
ggagacugagaucuuguuc

SEQ ID NO: 1350010 - RNA, 19 nt, Homo sapiens
  misc_RNA (1)...(19): siRNA sense strand
gcaaagaggggaagaaagc

SEQ ID NO: 1350011 - RNA, 19 nt, Homo sapiens
  misc_RNA (1)...(19): siRNA sense strand
caugcugguugucuuccuu

SEQ ID NO: 1350012 - RNA, 19 nt, Homo sapiens
  misc_RNA (1)...(19): siRNA sense strand
gaccaugcccagggaaauc

SEQ ID NO: 1350013 - RNA, 19 nt, Homo sapiens
  misc_RNA (1)...(19): siRNA sense strand
ggcacuccaugcugacauc

SEQ ID NO: 1350014 - RNA, 19 nt, Homo sapiens
  misc_RNA (1)...(19): siRNA sense strand
cagcuugcuucguuuacag

SEQ ID NO: 1350015 - RNA, 19 nt, Homo sapiens
  misc_RNA (1)...(19): siRNA sense strand
gggcagaacuguacaagga

SEQ ID NO: 1350016 - RNA, 19 nt, Homo sapiens
  misc_RNA (1)...(19): siRNA sense strand
gaaguaaggcugucagaga

SEQ ID NO: 1350017 - RNA, 19 nt, Homo sapiens
  misc_RNA (1)...(19): siRNA sense strand
acaaggagccuaccaauga

SEQ ID NO: 1350018 - RNA, 19 nt, Homo sapiens
  misc_RNA (1)...(19): siRNA sense strand
gaagaaggaucggauugau

SEQ ID NO: 1350019 - RNA, 19 nt, Homo sapiens
  misc_RNA (1)...(19): siRNA sense strand
ggccagagcugcaggacaa

SEQ ID NO: 1350020 - RNA, 19 nt, Homo sapiens
  misc_RNA (1)...(19): siRNA sense strand
gcacggcugucuaugaugu

SEQ ID NO: 1350021 - RNA, 19 nt, Homo sapiens
  misc_RNA (1)...(19): siRNA sense strand
uagaggagcuacuaaagga

SEQ ID NO: 1350022 - RNA, 19 nt, Homo sapiens
  misc_RNA (1)...(19): siRNA sense strand
acacauggguccugcaaga

SEQ ID NO: 1350023 - RNA, 19 nt, Homo sapiens
  misc_RNA (1)...(19): siRNA sense strand
gaagaagaaggaucggauu

SEQ ID NO: 1350024 - RNA, 19 nt, Homo sapiens
  misc_RNA (1)...(19): siRNA sense strand
gggaucaguuuaugucuca

SEQ ID NO: 1350025 - RNA, 19 nt, Homo sapiens
  misc_RNA (1)...(19): siRNA sense strand
ugagaagugucuugcaguu

SEQ ID NO: 1350026 - RNA, 19 nt, Homo sapiens
  misc_RNA (1)...(19): siRNA sense strand
cagcucagaucccucuuug

SEQ ID NO: 1350027 - RNA, 19 nt, Homo sapiens
  misc_RNA (1)...(19): siRNA sense strand
agaagugucuugcaguuuc

SEQ ID NO: 1350028 - RNA, 19 nt, Homo sapiens
  misc_RNA (1)...(19): siRNA sense strand
aaguaaggcugucagagaa

SEQ ID NO: 1350029 - RNA, 19 nt, Homo sapiens
  misc_RNA (1)...(19): siRNA sense strand
aaaccuguguccacuaugu

SEQ ID NO: 1350030 - RNA, 19 nt, Homo sapiens
  misc_RNA (1)...(19): siRNA sense strand
agaaaccuguguccacuau

SEQ ID NO: 1350031 - RNA, 19 nt, Homo sapiens
  misc_RNA (1)...(19): siRNA sense strand
guaaggcugucagagaaga

SEQ ID NO: 1350032 - RNA, 19 nt, Homo sapiens
  misc_RNA (1)...(19): siRNA sense strand
ccugaaacccucacuguug

SEQ ID NO: 1350033 - RNA, 19 nt, Homo sapiens
  misc_RNA (1)...(19): siRNA sense strand
agacugagaucuuguucca

SEQ ID NO: 1350034 - RNA, 19 nt, Homo sapiens
  misc_RNA (1)...(19): siRNA sense strand
ugucaaccauucugaguuc

SEQ ID NO: 1350035 - RNA, 19 nt, Homo sapiens
  misc_RNA (1)...(19): siRNA sense strand
cagccaagauccaccaaag

SEQ ID NO: 1350036 - RNA, 19 nt, Homo sapiens
  misc_RNA (1)...(19): siRNA sense strand
gaggcacggcugucuauga

SEQ ID NO: 1350037 - RNA, 19 nt, Homo sapiens
  misc_RNA (1)...(19): siRNA sense strand
guacaaggagccuaccaau

SEQ ID NO: 1350038 - RNA, 19 nt, Homo sapiens
  misc_RNA (1)...(19): siRNA sense strand
gaagugucuugcaguuucu

SEQ ID NO: 1350039 - RNA, 19 nt, Homo sapiens
  misc_RNA (1)...(19): siRNA sense strand
gagaagugucuugcaguuu

SEQ ID NO: 1350040 - RNA, 19 nt, Homo sapiens
  misc_RNA (1)...(19): siRNA sense strand
ggaaggcacaggcaaagag

SEQ ID NO: 1350041 - RNA, 19 nt, Homo sapiens
  misc_RNA (1)...(19): siRNA sense strand
caaggagccuaccaaugag

SEQ ID NO: 1350042 - RNA, 19 nt, Homo sapiens
  misc_RNA (1)...(19): siRNA sense strand
caaccucugugcugauguc

SEQ ID NO: 1350043 - RNA, 19 nt, Homo sapiens
  misc_RNA (1)...(19): siRNA sense strand
ucaacgggaucaguuuaug

SEQ ID NO: 1350044 - RNA, 19 nt, Homo sapiens
  misc_RNA (1)...(19): siRNA sense strand
ccaaugaggagcuuaaucg

SEQ ID NO: 1350045 - RNA, 19 nt, Homo sapiens
  misc_RNA (1)...(19): siRNA sense strand
ggacaucagccaagaucca

SEQ ID NO: 1350046 - RNA, 19 nt, Homo sapiens
  misc_RNA (1)...(19): siRNA sense strand
ugucagagaagaagaagga

SEQ ID NO: 1350047 - RNA, 19 nt, Homo sapiens
  misc_RNA (1)...(19): siRNA sense strand
cagccucuaugucccagaa

SEQ ID NO: 1350048 - RNA, 19 nt, Homo sapiens
  misc_RNA (1)...(19): siRNA sense strand
acauggguccugcaagaua

SEQ ID NO: 1350049 - RNA, 19 nt, Homo sapiens
  misc_RNA (1)...(19): siRNA sense strand
guuuaugucucagcucaga

SEQ ID NO: 1350050 - RNA, 19 nt, Homo sapiens
  misc_RNA (1)...(19): siRNA sense strand
ucggauugaugccuuccua

SEQ ID NO: 1350051 - RNA, 19 nt, Homo sapiens
  misc_RNA (1)...(19): siRNA sense strand
gccaagauccaccaaagca

SEQ ID NO: 1350052 - RNA, 19 nt, Homo sapiens
  misc_RNA (1)...(19): siRNA sense strand
ggacaaugguggggacuau

SEQ ID NO: 1350053 - RNA, 19 nt, Homo sapiens
  misc_RNA (1)...(19): siRNA sense strand
caacgggaucaguuuaugu

SEQ ID NO: 1350054 - RNA, 19 nt, Homo sapiens
  misc_RNA (1)...(19): siRNA sense strand
uaacacauggguccugcaa

SEQ ID NO: 1350055 - RNA, 19 nt, Homo sapiens
  misc_RNA (1)...(19): siRNA sense strand
cagcccagguuacuguugu

SEQ ID NO: 1350056 - RNA, 19 nt, Homo sapiens
  misc_RNA (1)...(19): siRNA sense strand
gacuaugucucagcugcuu

SEQ ID NO: 1350057 - RNA, 19 nt, Homo sapiens
  misc_RNA (1)...(19): siRNA sense strand
cagcagggcagaacuguac

SEQ ID NO: 1350058 - RNA, 19 nt, Homo sapiens
  misc_RNA (1)...(19): siRNA sense strand
agaagaaggaucggauuga

SEQ ID NO: 1350059 - RNA, 19 nt, Homo sapiens
  misc_RNA (1)...(19): siRNA sense strand
ggacaaggacgggcugaac

SEQ ID NO: 1350060 - RNA, 19 nt, Homo sapiens
  misc_RNA (1)...(19): siRNA sense strand
cugcaucuccguccacuga

SEQ ID NO: 1350061 - RNA, 19 nt, Homo sapiens
  misc_RNA (1)...(19): siRNA sense strand
aggcacggcugucuaugau

SEQ ID NO: 1350062 - RNA, 19 nt, Homo sapiens
  misc_RNA (1)...(19): siRNA sense strand
ggccuucuccguugucuuc

SEQ ID NO: 1350063 - RNA, 19 nt, Homo sapiens
  misc_RNA (1)...(19): siRNA sense strand
caagggccaggguggguuu

SEQ ID NO: 1350064 - RNA, 19 nt, Homo sapiens
  misc_RNA (1)...(19): siRNA sense strand
gcaucuccguccacugagu

SEQ ID NO: 1350065 - RNA, 19 nt, Homo sapiens
  misc_RNA (1)...(19): siRNA sense strand
cuaccaaugaggagcuuaa

SEQ ID NO: 1350066 - RNA, 19 nt, Homo sapiens
  misc_RNA (1)...(19): siRNA sense strand
cugguugucuuccuugugu

SEQ ID NO: 1350067 - RNA, 19 nt, Homo sapiens
  misc_RNA (1)...(19): siRNA sense strand
cacuccagcuugcuucguu

SEQ ID NO: 1350068 - RNA, 19 nt, Homo sapiens
  misc_RNA (1)...(19): siRNA sense strand
agucaacgggaucaguuua

SEQ ID NO: 1350069 - RNA, 19 nt, Homo sapiens
  misc_RNA (1)...(19): siRNA sense strand
gcaagauccauaccaccau

SEQ ID NO: 1350070 - RNA, 19 nt, Homo sapiens
  misc_RNA (1)...(19): siRNA sense strand
cauccgaccagacaucaau

SEQ ID NO: 1350071 - RNA, 19 nt, Homo sapiens
  misc_RNA (1)...(19): siRNA sense strand
aagaagaaggaucggauug

SEQ ID NO: 1350072 - RNA, 19 nt, Homo sapiens
  misc_RNA (1)...(19): siRNA sense strand
ccucugugcugaugucacu

SEQ ID NO: 1350073 - RNA, 19 nt, Homo sapiens
  misc_RNA (1)...(19): siRNA sense strand
gggagacugagaucuuguu

SEQ ID NO: 1350074 - RNA, 19 nt, Homo sapiens
  misc_RNA (1)...(19): siRNA sense strand
uccguugucuuccuggauu

SEQ ID NO: 1350075 - RNA, 19 nt, Homo sapiens
  misc_RNA (1)...(19): siRNA sense strand
cauggguccugcaagauac

SEQ ID NO: 1350076 - RNA, 19 nt, Homo sapiens
  misc_RNA (1)...(19): siRNA sense strand
ucgggagacugagaucuug

SEQ ID NO: 1350077 - RNA, 19 nt, Homo sapiens
  misc_RNA (1)...(19): siRNA sense strand
ccagcuugcuucguuuaca

SEQ ID NO: 1350078 - RNA, 19 nt, Homo sapiens
  misc_RNA (1)...(19): siRNA sense strand
ucccagaagcgccuuauuc

SEQ ID NO: 1350079 - RNA, 19 nt, Homo sapiens
  misc_RNA (1)...(19): siRNA sense strand
gcagggcagaacuguacaa

SEQ ID NO: 1350080 - RNA, 19 nt, Homo sapiens
  misc_RNA (1)...(19): siRNA sense strand
cagaaaccuguguccacua

SEQ ID NO: 1350081 - RNA, 19 nt, Homo sapiens
  misc_RNA (1)...(19): siRNA sense strand
gcuaaauuccgccaguucu

SEQ ID NO: 1350082 - RNA, 19 nt, Homo sapiens
  misc_RNA (1)...(19): siRNA sense strand
gguuccaccugcuguugau

SEQ ID NO: 1350083 - RNA, 19 nt, Homo sapiens
  misc_RNA (1)...(19): siRNA sense strand
gaaggauggcguggcacuu

SEQ ID NO: 1350084 - RNA, 19 nt, Homo sapiens
  misc_RNA (1)...(19): siRNA sense strand
caccugaaacccucacugu

SEQ ID NO: 1350085 - RNA, 19 nt, Homo sapiens
  misc_RNA (1)...(19): siRNA sense strand
gauccgggcuuuugaccau

SEQ ID NO: 1350086 - RNA, 19 nt, Homo sapiens
  misc_RNA (1)...(19): siRNA sense strand
ggagacugagaucuuguuc

SEQ ID NO: 1350087 - RNA, 19 nt, Homo sapiens
  misc_RNA (1)...(19): siRNA sense strand
gcaaagaggggaagaaagc

SEQ ID NO: 1350088 - RNA, 19 nt, Homo sapiens
  misc_RNA (1)...(19): siRNA sense strand
caugcugguugucuuccuu

SEQ ID NO: 1350089 - RNA, 19 nt, Homo sapiens
  misc_RNA (1)...(19): siRNA sense strand
gaccaugcccagggaaauc

SEQ ID NO: 1350090 - RNA, 19 nt, Homo sapiens
  misc_RNA (1)...(19): siRNA sense strand
ggcacuccaugcugacauc

SEQ ID NO: 1350091 - RNA, 19 nt, Homo sapiens
  misc_RNA (1)...(19): siRNA sense strand
cagcuugcuucguuuacag

SEQ ID NO: 1350092 - RNA, 19 nt, Homo sapiens
  misc_RNA (1)...(19): siRNA sense strand
ggaaagugaugacaaguac

SEQ ID NO: 1350093 - RNA, 19 nt, Homo sapiens
  misc_RNA (1)...(19): siRNA sense strand
caaggaaagugaugacaag

SEQ ID NO: 1350094 - RNA, 19 nt, Homo sapiens
  misc_RNA (1)...(19): siRNA sense strand
gccauucuauugacucuga

SEQ ID NO: 1350095 - RNA, 19 nt, Homo sapiens
  misc_RNA (1)...(19): siRNA sense strand
gcaagucaacugcuucuuc

SEQ ID NO: 1350096 - RNA, 19 nt, Homo sapiens
  misc_RNA (1)...(19): siRNA sense strand
caagucaacugcuucuucu

SEQ ID NO: 1350097 - RNA, 19 nt, Homo sapiens
  misc_RNA (1)...(19): siRNA sense strand
gaagugauggcaguagaaa

SEQ ID NO: 1350098 - RNA, 19 nt, Homo sapiens
  misc_RNA (1)...(19): siRNA sense strand
gaucuuccgaguccuuaaa

SEQ ID NO: 1350099 - RNA, 19 nt, Homo sapiens
  misc_RNA (1)...(19): siRNA sense strand
cgaccaguauaacaaggaa

SEQ ID NO: 1350100 - RNA, 19 nt, Homo sapiens
  misc_RNA (1)...(19): siRNA sense strand
gcuguacccugguuugaac

SEQ ID NO: 1350101 - RNA, 19 nt, Homo sapiens
  misc_RNA (1)...(19): siRNA sense strand
ggaucaccgaccaguauaa

SEQ ID NO: 1350102 - RNA, 19 nt, Homo sapiens
  misc_RNA (1)...(19): siRNA sense strand
ucaccgaccaguauaacaa

SEQ ID NO: 1350103 - RNA, 19 nt, Homo sapiens
  misc_RNA (1)...(19): siRNA sense strand
ccuguuggccauucuauug

SEQ ID NO: 1350104 - RNA, 19 nt, Homo sapiens
  misc_RNA (1)...(19): siRNA sense strand
guggaucaccgaccaguau

SEQ ID NO: 1350105 - RNA, 19 nt, Homo sapiens
  misc_RNA (1)...(19): siRNA sense strand
aagcguccaugaagugaug

SEQ ID NO: 1350106 - RNA, 19 nt, Homo sapiens
  misc_RNA (1)...(19): siRNA sense strand
uacccugguuugaacagua

SEQ ID NO: 1350107 - RNA, 19 nt, Homo sapiens
  misc_RNA (1)...(19): siRNA sense strand
aggaaagugaugacaagua

SEQ ID NO: 1350108 - RNA, 19 nt, Homo sapiens
  misc_RNA (1)...(19): siRNA sense strand
acaaggaaagugaugacaa

SEQ ID NO: 1350109 - RNA, 19 nt, Homo sapiens
  misc_RNA (1)...(19): siRNA sense strand
aguauaacaaggaaaguga

SEQ ID NO: 1350110 - RNA, 19 nt, Homo sapiens
  misc_RNA (1)...(19): siRNA sense strand
cuaccaagcaaggaagaaa

SEQ ID NO: 1350111 - RNA, 19 nt, Homo sapiens
  misc_RNA (1)...(19): siRNA sense strand
ugaagugauggcaguagaa

SEQ ID NO: 1350112 - RNA, 19 nt, Homo sapiens
  misc_RNA (1)...(19): siRNA sense strand
ucuaagcguccaugaagug

SEQ ID NO: 1350113 - RNA, 19 nt, Homo sapiens
  misc_RNA (1)...(19): siRNA sense strand
ggaaagugaugacaaguac

SEQ ID NO: 1350114 - RNA, 19 nt, Homo sapiens
  misc_RNA (1)...(19): siRNA sense strand
caaggaaagugaugacaag

SEQ ID NO: 1350115 - RNA, 19 nt, Homo sapiens
  misc_RNA (1)...(19): siRNA sense strand
gccauucuauugacucuga

SEQ ID NO: 1350116 - RNA, 19 nt, Homo sapiens
  misc_RNA (1)...(19): siRNA sense strand
gcaagucaacugcuucuuc

SEQ ID NO: 1350117 - RNA, 19 nt, Homo sapiens
  misc_RNA (1)...(19): siRNA sense strand
caagucaacugcuucuucu

SEQ ID NO: 1350118 - RNA, 19 nt, Homo sapiens
  misc_RNA (1)...(19): siRNA sense strand
gaagugauggcaguagaaa

SEQ ID NO: 1350119 - RNA, 19 nt, Homo sapiens
  misc_RNA (1)...(19): siRNA sense strand
gaucuuccgaguccuuaaa

SEQ ID NO: 1350120 - RNA, 19 nt, Homo sapiens
  misc_RNA (1)...(19): siRNA sense strand
cgaccaguauaacaaggaa

SEQ ID NO: 1350121 - RNA, 19 nt, Homo sapiens
  misc_RNA (1)...(19): siRNA sense strand
gcuguacccugguuugaac

SEQ ID NO: 1350122 - RNA, 19 nt, Homo sapiens
  misc_RNA (1)...(19): siRNA sense strand
ggaucaccgaccaguauaa

SEQ ID NO: 1350123 - RNA, 19 nt, Homo sapiens
  misc_RNA (1)...(19): siRNA sense strand
ucaccgaccaguauaacaa

SEQ ID NO: 1350124 - RNA, 19 nt, Homo sapiens
  misc_RNA (1)...(19): siRNA sense strand
ccuguuggccauucuauug

SEQ ID NO: 1350125 - RNA, 19 nt, Homo sapiens
  misc_RNA (1)...(19): siRNA sense strand
guggaucaccgaccaguau

SEQ ID NO: 1350126 - RNA, 19 nt, Homo sapiens
  misc_RNA (1)...(19): siRNA sense strand
aagcguccaugaagugaug

SEQ ID NO: 1350127 - RNA, 19 nt, Homo sapiens
  misc_RNA (1)...(19): siRNA sense strand
uacccugguuugaacagua

SEQ ID NO: 1350128 - RNA, 19 nt, Homo sapiens
  misc_RNA (1)...(19): siRNA sense strand
aggaaagugaugacaagua

SEQ ID NO: 1350129 - RNA, 19 nt, Homo sapiens
  misc_RNA (1)...(19): siRNA sense strand
acaaggaaagugaugacaa

SEQ ID NO: 1350130 - RNA, 19 nt, Homo sapiens
  misc_RNA (1)...(19): siRNA sense strand
aguauaacaaggaaaguga

SEQ ID NO: 1350131 - RNA, 19 nt, Homo sapiens
  misc_RNA (1)...(19): siRNA sense strand
cuaccaagcaaggaagaaa

SEQ ID NO: 1350132 - RNA, 19 nt, Homo sapiens
  misc_RNA (1)...(19): siRNA sense strand
ugaagugauggcaguagaa

SEQ ID NO: 1350133 - RNA, 19 nt, Homo sapiens
  misc_RNA (1)...(19): siRNA sense strand
ucuaagcguccaugaagug

SEQ ID NO: 1350134 - RNA, 19 nt, Homo sapiens
  misc_RNA (1)...(19): siRNA sense strand
gaagaggaccugauugaug

SEQ ID NO: 1350135 - RNA, 19 nt, Homo sapiens
  misc_RNA (1)...(19): siRNA sense strand
ucagcuccauugagaagaa

SEQ ID NO: 1350136 - RNA, 19 nt, Homo sapiens
  misc_RNA (1)...(19): siRNA sense strand
gguggaagaggaccugauu

SEQ ID NO: 1350137 - RNA, 19 nt, Homo sapiens
  misc_RNA (1)...(19): siRNA sense strand
uggaagaggaccugauuga

SEQ ID NO: 1350138 - RNA, 19 nt, Homo sapiens
  misc_RNA (1)...(19): siRNA sense strand
agaagaccauccuggacaa

SEQ ID NO: 1350139 - RNA, 19 nt, Homo sapiens
  misc_RNA (1)...(19): siRNA sense strand
accaucagcuccauugaga

SEQ ID NO: 1350140 - RNA, 19 nt, Homo sapiens
  misc_RNA (1)...(19): siRNA sense strand
caggccagcucaaggacaa

SEQ ID NO: 1350141 - RNA, 19 nt, Homo sapiens
  misc_RNA (1)...(19): siRNA sense strand
ggaagaggaccugauugau

SEQ ID NO: 1350142 - RNA, 19 nt, Homo sapiens
  misc_RNA (1)...(19): siRNA sense strand
ggaccuggccacaguuucu

SEQ ID NO: 1350143 - RNA, 19 nt, Homo sapiens
  misc_RNA (1)...(19): siRNA sense strand
cacgggagcugcaguccau

SEQ ID NO: 1350144 - RNA, 19 nt, Homo sapiens
  misc_RNA (1)...(19): siRNA sense strand
acauggaccuggccacagu

SEQ ID NO: 1350145 - RNA, 19 nt, Homo sapiens
  misc_RNA (1)...(19): siRNA sense strand
caucagcuccauugagaag

SEQ ID NO: 1350146 - RNA, 19 nt, Homo sapiens
  misc_RNA (1)...(19): siRNA sense strand
caccagccgccaucaagaa

SEQ ID NO: 1350147 - RNA, 19 nt, Homo sapiens
  misc_RNA (1)...(19): siRNA sense strand
cacagcagcaggcgucuug

SEQ ID NO: 1350148 - RNA, 19 nt, Homo sapiens
  misc_RNA (1)...(19): siRNA sense strand
agaugcugcugcacucaga

SEQ ID NO: 1350149 - RNA, 19 nt, Homo sapiens
  misc_RNA (1)...(19): siRNA sense strand
gaagaggaccugauugaug

SEQ ID NO: 1350150 - RNA, 19 nt, Homo sapiens
  misc_RNA (1)...(19): siRNA sense strand
ucagcuccauugagaagaa

SEQ ID NO: 1350151 - RNA, 19 nt, Homo sapiens
  misc_RNA (1)...(19): siRNA sense strand
gguggaagaggaccugauu

SEQ ID NO: 1350152 - RNA, 19 nt, Homo sapiens
  misc_RNA (1)...(19): siRNA sense strand
uggaagaggaccugauuga

SEQ ID NO: 1350153 - RNA, 19 nt, Homo sapiens
  misc_RNA (1)...(19): siRNA sense strand
agaagaccauccuggacaa

SEQ ID NO: 1350154 - RNA, 19 nt, Homo sapiens
  misc_RNA (1)...(19): siRNA sense strand
accaucagcuccauugaga

SEQ ID NO: 1350155 - RNA, 19 nt, Homo sapiens
  misc_RNA (1)...(19): siRNA sense strand
ggaccaccuuccucuagag

SEQ ID NO: 1350156 - RNA, 19 nt, Homo sapiens
  misc_RNA (1)...(19): siRNA sense strand
caggccagcucaaggacaa

SEQ ID NO: 1350157 - RNA, 19 nt, Homo sapiens
  misc_RNA (1)...(19): siRNA sense strand
ggaagaggaccugauugau

SEQ ID NO: 1350158 - RNA, 19 nt, Homo sapiens
  misc_RNA (1)...(19): siRNA sense strand
ggaccuggccacaguuucu

SEQ ID NO: 1350159 - RNA, 19 nt, Homo sapiens
  misc_RNA (1)...(19): siRNA sense strand
cacgggagcugcaguccau

SEQ ID NO: 1350160 - RNA, 19 nt, Homo sapiens
  misc_RNA (1)...(19): siRNA sense strand
acauggaccuggccacagu

SEQ ID NO: 1350161 - RNA, 19 nt, Homo sapiens
  misc_RNA (1)...(19): siRNA sense strand
caucagcuccauugagaag

SEQ ID NO: 1350162 - RNA, 19 nt, Homo sapiens
  misc_RNA (1)...(19): siRNA sense strand
caccagccgccaucaagaa

SEQ ID NO: 1350163 - RNA, 19 nt, Homo sapiens
  misc_RNA (1)...(19): siRNA sense strand
cacagcagcaggcgucuug

SEQ ID NO: 1350164 - RNA, 19 nt, Homo sapiens
  misc_RNA (1)...(19): siRNA sense strand
agaugcugcugcacucaga

SEQ ID NO: 1350165 - RNA, 19 nt, Homo sapiens
  misc_RNA (1)...(19): siRNA sense strand
agagagaucugguggguuu

SEQ ID NO: 1350166 - RNA, 19 nt, Homo sapiens
  misc_RNA (1)...(19): siRNA sense strand
ccagugaccugugcuuuga

SEQ ID NO: 1350167 - RNA, 19 nt, Homo sapiens
  misc_RNA (1)...(19): siRNA sense strand
ucaaggaguuuaagucuac

SEQ ID NO: 1350168 - RNA, 19 nt, Homo sapiens
  misc_RNA (1)...(19): siRNA sense strand
gcacccacguguugacuca

SEQ ID NO: 1350169 - RNA, 19 nt, Homo sapiens
  misc_RNA (1)...(19): siRNA sense strand
ggcagcagcucacuauugg

SEQ ID NO: 1350170 - RNA, 19 nt, Homo sapiens
  misc_RNA (1)...(19): siRNA sense strand
gauggcagcagcucacuau

SEQ ID NO: 1350171 - RNA, 19 nt, Homo sapiens
  misc_RNA (1)...(19): siRNA sense strand
ucuccaaccucuucaagga

SEQ ID NO: 1350172 - RNA, 19 nt, Homo sapiens
  misc_RNA (1)...(19): siRNA sense strand
ccaagccgauugagaagag

SEQ ID NO: 1350173 - RNA, 19 nt, Homo sapiens
  misc_RNA (1)...(19): siRNA sense strand
ccacguggcuccaguuucc

SEQ ID NO: 1350174 - RNA, 19 nt, Homo sapiens
  misc_RNA (1)...(19): siRNA sense strand
gcuugaaagugccuuccaa

SEQ ID NO: 1350175 - RNA, 19 nt, Homo sapiens
  misc_RNA (1)...(19): siRNA sense strand
cuacauccacguccgguuu

SEQ ID NO: 1350176 - RNA, 19 nt, Homo sapiens
  misc_RNA (1)...(19): siRNA sense strand
gcaagcacuucgucaucca

SEQ ID NO: 1350177 - RNA, 19 nt, Homo sapiens
  misc_RNA (1)...(19): siRNA sense strand
ccaggacaccucagagaga

SEQ ID NO: 1350178 - RNA, 19 nt, Homo sapiens
  misc_RNA (1)...(19): siRNA sense strand
cacguugucugcucucuca

SEQ ID NO: 1350179 - RNA, 19 nt, Homo sapiens
  misc_RNA (1)...(19): siRNA sense strand
caaggacaaccaagucauc

SEQ ID NO: 1350180 - RNA, 19 nt, Homo sapiens
  misc_RNA (1)...(19): siRNA sense strand
uggcagcagcucacuauug

SEQ ID NO: 1350181 - RNA, 19 nt, Homo sapiens
  misc_RNA (1)...(19): siRNA sense strand
gcuggaggccucugacauc

SEQ ID NO: 1350182 - RNA, 19 nt, Homo sapiens
  misc_RNA (1)...(19): siRNA sense strand
ccugugcgguucagugugu

SEQ ID NO: 1350183 - RNA, 19 nt, Homo sapiens
  misc_RNA (1)...(19): siRNA sense strand
caggacaccucagagagau

SEQ ID NO: 1350184 - RNA, 19 nt, Homo sapiens
  misc_RNA (1)...(19): siRNA sense strand
cuuccaagccgauugagaa

SEQ ID NO: 1350185 - RNA, 19 nt, Homo sapiens
  misc_RNA (1)...(19): siRNA sense strand
caagggcgucaucggcuuu

SEQ ID NO: 1350186 - RNA, 19 nt, Homo sapiens
  misc_RNA (1)...(19): siRNA sense strand
ggagcccaaugcacguugu

SEQ ID NO: 1350187 - RNA, 19 nt, Homo sapiens
  misc_RNA (1)...(19): siRNA sense strand
ggccaggacaccucagaga

SEQ ID NO: 1350188 - RNA, 19 nt, Homo sapiens
  misc_RNA (1)...(19): siRNA sense strand
cagcaagcacuucgucauc

SEQ ID NO: 1350189 - RNA, 19 nt, Homo sapiens
  misc_RNA (1)...(19): siRNA sense strand
ugacgggacgauaccugua

SEQ ID NO: 1350190 - RNA, 19 nt, Homo sapiens
  misc_RNA (1)...(19): siRNA sense strand
uucaaggaguuuaagucua

SEQ ID NO: 1350191 - RNA, 19 nt, Homo sapiens
  misc_RNA (1)...(19): siRNA sense strand
ggacaccucagagagaucu

SEQ ID NO: 1350192 - RNA, 19 nt, Homo sapiens
  misc_RNA (1)...(19): siRNA sense strand
acauccagcucccuaagag

SEQ ID NO: 1350193 - RNA, 19 nt, Homo sapiens
  misc_RNA (1)...(19): siRNA sense strand
ucacggacaagacccugaa

SEQ ID NO: 1350194 - RNA, 19 nt, Homo sapiens
  misc_RNA (1)...(19): siRNA sense strand
ggauggcagcagcucacua

SEQ ID NO: 1350195 - RNA, 19 nt, Homo sapiens
  misc_RNA (1)...(19): siRNA sense strand
cacguccgguuuccaagug

SEQ ID NO: 1350196 - RNA, 19 nt, Homo sapiens
  misc_RNA (1)...(19): siRNA sense strand
ggagcagcgcuucuuccuu

SEQ ID NO: 1350197 - RNA, 19 nt, Homo sapiens
  misc_RNA (1)...(19): siRNA sense strand
caagucauccgugugucuu

SEQ ID NO: 1350198 - RNA, 19 nt, Homo sapiens
  misc_RNA (1)...(19): siRNA sense strand
ggccaucucaagagcauca

SEQ ID NO: 1350199 - RNA, 19 nt, Homo sapiens
  misc_RNA (1)...(19): siRNA sense strand
ggaagaaggacaacaaauu

SEQ ID NO: 1350200 - RNA, 19 nt, Homo sapiens
  misc_RNA (1)...(19): siRNA sense strand
gaagaaggacaacaaauug

SEQ ID NO: 1350201 - RNA, 19 nt, Homo sapiens
  misc_RNA (1)...(19): siRNA sense strand
gcucuuacggcuacaauua

SEQ ID NO: 1350202 - RNA, 19 nt, Homo sapiens
  misc_RNA (1)...(19): siRNA sense strand
gacuaucaguugcuaaauu

SEQ ID NO: 1350203 - RNA, 19 nt, Homo sapiens
  misc_RNA (1)...(19): siRNA sense strand
gaaggacaacaaauugaaa

SEQ ID NO: 1350204 - RNA, 19 nt, Homo sapiens
  misc_RNA (1)...(19): siRNA sense strand
gaaaaggaguuccacuuca

SEQ ID NO: 1350205 - RNA, 19 nt, Homo sapiens
  misc_RNA (1)...(19): siRNA sense strand
ugaggaagcuucacaucag

SEQ ID NO: 1350206 - RNA, 19 nt, Homo sapiens
  misc_RNA (1)...(19): siRNA sense strand
gcucguacuuuguaaacuc

SEQ ID NO: 1350207 - RNA, 19 nt, Homo sapiens
  misc_RNA (1)...(19): siRNA sense strand
ggauggaccucagcgucaa

SEQ ID NO: 1350208 - RNA, 19 nt, Homo sapiens
  misc_RNA (1)...(19): siRNA sense strand
gggcagacuccgcagauau

SEQ ID NO: 1350209 - RNA, 19 nt, Homo sapiens
  misc_RNA (1)...(19): siRNA sense strand
ggaagcggcaagccagcua

SEQ ID NO: 1350210 - RNA, 19 nt, Homo sapiens
  misc_RNA (1)...(19): siRNA sense strand
ggcagacuccgcagauauu

SEQ ID NO: 1350211 - RNA, 19 nt, Homo sapiens
  misc_RNA (1)...(19): siRNA sense strand
gcaugaaguggaagaagga

SEQ ID NO: 1350212 - RNA, 19 nt, Homo sapiens
  misc_RNA (1)...(19): siRNA sense strand
gaagcggcaagccagcuaa

SEQ ID NO: 1350213 - RNA, 19 nt, Homo sapiens
  misc_RNA (1)...(19): siRNA sense strand
ggcaguggcagcucucuga

SEQ ID NO: 1350214 - RNA, 19 nt, Homo sapiens
  misc_RNA (1)...(19): siRNA sense strand
agaaggacaacaaauugaa

SEQ ID NO: 1350215 - RNA, 19 nt, Homo sapiens
  misc_RNA (1)...(19): siRNA sense strand
aaaaggaguuccacuucaa

SEQ ID NO: 1350216 - RNA, 19 nt, Homo sapiens
  misc_RNA (1)...(19): siRNA sense strand
aagaaggacaacaaauuga

SEQ ID NO: 1350217 - RNA, 19 nt, Homo sapiens
  misc_RNA (1)...(19): siRNA sense strand
ugaaguggaagaaggacaa

SEQ ID NO: 1350218 - RNA, 19 nt, Homo sapiens
  misc_RNA (1)...(19): siRNA sense strand
ggacuaucaguugcuaaau

SEQ ID NO: 1350219 - RNA, 19 nt, Homo sapiens
  misc_RNA (1)...(19): siRNA sense strand
guggaagaaggacaacaaa

SEQ ID NO: 1350220 - RNA, 19 nt, Homo sapiens
  misc_RNA (1)...(19): siRNA sense strand
ccagcuccagcgccaauuu

SEQ ID NO: 1350221 - RNA, 19 nt, Homo sapiens
  misc_RNA (1)...(19): siRNA sense strand
gagcucguacuuuguaaac

SEQ ID NO: 1350222 - RNA, 19 nt, Homo sapiens
  misc_RNA (1)...(19): siRNA sense strand
cggacuaucaguugcuaaa

SEQ ID NO: 1350223 - RNA, 19 nt, Homo sapiens
  misc_RNA (1)...(19): siRNA sense strand
ccaugcacaccggcucuua

SEQ ID NO: 1350224 - RNA, 19 nt, Homo sapiens
  misc_RNA (1)...(19): siRNA sense strand
gcagacuccgcagauauuc

SEQ ID NO: 1350225 - RNA, 19 nt, Homo sapiens
  misc_RNA (1)...(19): siRNA sense strand
ggagagagcacgauuuauu

SEQ ID NO: 1350226 - RNA, 19 nt, Homo sapiens
  misc_RNA (1)...(19): siRNA sense strand
agagaaacauguccauaua

SEQ ID NO: 1350227 - RNA, 19 nt, Homo sapiens
  misc_RNA (1)...(19): siRNA sense strand
cagaugcacuuuauuugua

SEQ ID NO: 1350228 - RNA, 19 nt, Homo sapiens
  misc_RNA (1)...(19): siRNA sense strand
ggacuuacgaguuugguua

SEQ ID NO: 1350229 - RNA, 19 nt, Homo sapiens
  misc_RNA (1)...(19): siRNA sense strand
aaacagauaucaggauuug

SEQ ID NO: 1350230 - RNA, 19 nt, Homo sapiens
  misc_RNA (1)...(19): siRNA sense strand
cuauggagcucauugguaa

SEQ ID NO: 1350231 - RNA, 19 nt, Homo sapiens
  misc_RNA (1)...(19): siRNA sense strand
aaacacaccuuuagugaag

SEQ ID NO: 1350232 - RNA, 19 nt, Homo sapiens
  misc_RNA (1)...(19): siRNA sense strand
gaacuuaaaggaucaguag

SEQ ID NO: 1350233 - RNA, 19 nt, Homo sapiens
  misc_RNA (1)...(19): siRNA sense strand
gaaaacagauaucaggauu

SEQ ID NO: 1350234 - RNA, 19 nt, Homo sapiens
  misc_RNA (1)...(19): siRNA sense strand
uaaaggaucaguagcaauu

SEQ ID NO: 1350235 - RNA, 19 nt, Homo sapiens
  misc_RNA (1)...(19): siRNA sense strand
aaaugggacuuacgaguuu

SEQ ID NO: 1350236 - RNA, 19 nt, Homo sapiens
  misc_RNA (1)...(19): siRNA sense strand
guuaucagaugcacuuuau

SEQ ID NO: 1350237 - RNA, 19 nt, Homo sapiens
  misc_RNA (1)...(19): siRNA sense strand
ugagauuggugaacgagua

SEQ ID NO: 1350238 - RNA, 19 nt, Homo sapiens
  misc_RNA (1)...(19): siRNA sense strand
gugaacgaguagauuauaa

SEQ ID NO: 1350239 - RNA, 19 nt, Homo sapiens
  misc_RNA (1)...(19): siRNA sense strand
gagagagcacgauuuauug

SEQ ID NO: 1350240 - RNA, 19 nt, Homo sapiens
  misc_RNA (1)...(19): siRNA sense strand
caaaugggacuuacgaguu

SEQ ID NO: 1350241 - RNA, 19 nt, Homo sapiens
  misc_RNA (1)...(19): siRNA sense strand
ggucauugcugugauuguu

SEQ ID NO: 1350242 - RNA, 19 nt, Homo sapiens
  misc_RNA (1)...(19): siRNA sense strand
ccagauccauuuucacuua

SEQ ID NO: 1350243 - RNA, 19 nt, Homo sapiens
  misc_RNA (1)...(19): siRNA sense strand
gaaggaauacuugacaguu

SEQ ID NO: 1350244 - RNA, 19 nt, Homo sapiens
  misc_RNA (1)...(19): siRNA sense strand
aaggaauacuugacaguuu

SEQ ID NO: 1350245 - RNA, 19 nt, Homo sapiens
  misc_RNA (1)...(19): siRNA sense strand
ucagaugacgccuguuaua

SEQ ID NO: 1350246 - RNA, 19 nt, Homo sapiens
  misc_RNA (1)...(19): siRNA sense strand
gaaaacacaccuuuaguga

SEQ ID NO: 1350247 - RNA, 19 nt, Homo sapiens
  misc_RNA (1)...(19): siRNA sense strand
gaugacgccuguuauagag

SEQ ID NO: 1350248 - RNA, 19 nt, Homo sapiens
  misc_RNA (1)...(19): siRNA sense strand
gagaaacauguccauauau

SEQ ID NO: 1350249 - RNA, 19 nt, Homo sapiens
  misc_RNA (1)...(19): siRNA sense strand
acgaguagauuauaagugu

SEQ ID NO: 1350250 - RNA, 19 nt, Homo sapiens
  misc_RNA (1)...(19): siRNA sense strand
cuacaaagcaacaguuaug

SEQ ID NO: 1350251 - RNA, 19 nt, Homo sapiens
  misc_RNA (1)...(19): siRNA sense strand
ccaccaacauuugaagcua

SEQ ID NO: 1350252 - RNA, 19 nt, Homo sapiens
  misc_RNA (1)...(19): siRNA sense strand
uauacgggauccuuuaaau

SEQ ID NO: 1350253 - RNA, 19 nt, Homo sapiens
  misc_RNA (1)...(19): siRNA sense strand
cgaguuugguuaucagaug

SEQ ID NO: 1350254 - RNA, 19 nt, Homo sapiens
  misc_RNA (1)...(19): siRNA sense strand
gaacgaguagauuauaagu

SEQ ID NO: 1350255 - RNA, 19 nt, Homo sapiens
  misc_RNA (1)...(19): siRNA sense strand
gugaggagccaccaacauu

SEQ ID NO: 1350256 - RNA, 19 nt, Homo sapiens
  misc_RNA (1)...(19): siRNA sense strand
gauggcagcgacacaauug

SEQ ID NO: 1350257 - RNA, 19 nt, Homo sapiens
  misc_RNA (1)...(19): siRNA sense strand
gcuauggagcucauuggua

SEQ ID NO: 1350258 - RNA, 19 nt, Homo sapiens
  misc_RNA (1)...(19): siRNA sense strand
gaggagccaccaacauuug

SEQ ID NO: 1350259 - RNA, 19 nt, Homo sapiens
  misc_RNA (1)...(19): siRNA sense strand
acacaccuuuagugaagua

SEQ ID NO: 1350260 - RNA, 19 nt, Homo sapiens
  misc_RNA (1)...(19): siRNA sense strand
ucucagaugacgccuguua

SEQ ID NO: 1350261 - RNA, 19 nt, Homo sapiens
  misc_RNA (1)...(19): siRNA sense strand
uagagaaacauguccauau

SEQ ID NO: 1350262 - RNA, 19 nt, Homo sapiens
  misc_RNA (1)...(19): siRNA sense strand
guuccaaagugucuuaaag

SEQ ID NO: 1350263 - RNA, 19 nt, Homo sapiens
  misc_RNA (1)...(19): siRNA sense strand
ggugaacgaguagauuaua

SEQ ID NO: 1350264 - RNA, 19 nt, Homo sapiens
  misc_RNA (1)...(19): siRNA sense strand
gaaguagaaguauuugagu

SEQ ID NO: 1350265 - RNA, 19 nt, Homo sapiens
  misc_RNA (1)...(19): siRNA sense strand
gaaacauguccauauauac

SEQ ID NO: 1350266 - RNA, 19 nt, Homo sapiens
  misc_RNA (1)...(19): siRNA sense strand
ugacgccuguuauagagaa

SEQ ID NO: 1350267 - RNA, 19 nt, Homo sapiens
  misc_RNA (1)...(19): siRNA sense strand
cgaguagauuauaagugua

SEQ ID NO: 1350268 - RNA, 19 nt, Homo sapiens
  misc_RNA (1)...(19): siRNA sense strand
gcacuuuauuuguaaugag

SEQ ID NO: 1350269 - RNA, 19 nt, Homo sapiens
  misc_RNA (1)...(19): siRNA sense strand
guagaaguauuugaguauc

SEQ ID NO: 1350270 - RNA, 19 nt, Homo sapiens
  misc_RNA (1)...(19): siRNA sense strand
guauuugaguaucuugaug

SEQ ID NO: 1350271 - RNA, 19 nt, Homo sapiens
  misc_RNA (1)...(19): siRNA sense strand
aggaauacuugacaguuug

SEQ ID NO: 1350272 - RNA, 19 nt, Homo sapiens
  misc_RNA (1)...(19): siRNA sense strand
ccaaaacccuacuaugaga

SEQ ID NO: 1350273 - RNA, 19 nt, Homo sapiens
  misc_RNA (1)...(19): siRNA sense strand
aguguaaaguggucaaaug

SEQ ID NO: 1350274 - RNA, 19 nt, Homo sapiens
  misc_RNA (1)...(19): siRNA sense strand
ccacccauacuauuuguga

SEQ ID NO: 1350275 - RNA, 19 nt, Homo sapiens
  misc_RNA (1)...(19): siRNA sense strand
caccaacauuugaagcuau

SEQ ID NO: 1350276 - RNA, 19 nt, Homo sapiens
  misc_RNA (1)...(19): siRNA sense strand
uuggagagagcacgauuua

SEQ ID NO: 1350277 - RNA, 19 nt, Homo sapiens
  misc_RNA (1)...(19): siRNA sense strand
gguuaucagaugcacuuua

SEQ ID NO: 1350278 - RNA, 19 nt, Homo sapiens
  misc_RNA (1)...(19): siRNA sense strand
ugaggagccaccaacauuu

SEQ ID NO: 1350279 - RNA, 19 nt, Homo sapiens
  misc_RNA (1)...(19): siRNA sense strand
ggaaggaauacuugacagu

SEQ ID NO: 1350280 - RNA, 19 nt, Homo sapiens
  misc_RNA (1)...(19): siRNA sense strand
gaggaaggaauacuugaca

SEQ ID NO: 1350281 - RNA, 19 nt, Homo sapiens
  misc_RNA (1)...(19): siRNA sense strand
ccaguuccaaagugucuua

SEQ ID NO: 1350282 - RNA, 19 nt, Homo sapiens
  misc_RNA (1)...(19): siRNA sense strand
ugaguaucuugaugcagua

SEQ ID NO: 1350283 - RNA, 19 nt, Homo sapiens
  misc_RNA (1)...(19): siRNA sense strand
caccuuuagugaaguagaa

SEQ ID NO: 1350284 - RNA, 19 nt, Homo sapiens
  misc_RNA (1)...(19): siRNA sense strand
acagauaucaggauuugga

SEQ ID NO: 1350285 - RNA, 19 nt, Homo sapiens
  misc_RNA (1)...(19): siRNA sense strand
ucauugcugugauuguuau

SEQ ID NO: 1350286 - RNA, 19 nt, Homo sapiens
  misc_RNA (1)...(19): siRNA sense strand
ucagaugcacuuuauuugu

SEQ ID NO: 1350287 - RNA, 19 nt, Homo sapiens
  misc_RNA (1)...(19): siRNA sense strand
gugcugcuccagaguguaa

SEQ ID NO: 1350288 - RNA, 19 nt, Homo sapiens
  misc_RNA (1)...(19): siRNA sense strand
ggaaaacacaccuuuagug

SEQ ID NO: 1350289 - RNA, 19 nt, Homo sapiens
  misc_RNA (1)...(19): siRNA sense strand
aaggaucaguagcaauuug

SEQ ID NO: 1350290 - RNA, 19 nt, Homo sapiens
  misc_RNA (1)...(19): siRNA sense strand
uauauacgggauccuuuaa

SEQ ID NO: 1350291 - RNA, 19 nt, Homo sapiens
  misc_RNA (1)...(19): siRNA sense strand
ugaaguagaaguauuugag

SEQ ID NO: 1350292 - RNA, 19 nt, Homo sapiens
  misc_RNA (1)...(19): siRNA sense strand
cuugacaguuuggauguuu

SEQ ID NO: 1350293 - RNA, 19 nt, Homo sapiens
  misc_RNA (1)...(19): siRNA sense strand
cauauauacgggauccuuu

SEQ ID NO: 1350294 - RNA, 19 nt, Homo sapiens
  misc_RNA (1)...(19): siRNA sense strand
auauauacgggauccuuua

SEQ ID NO: 1350295 - RNA, 19 nt, Homo sapiens
  misc_RNA (1)...(19): siRNA sense strand
cuuaaaggaucaguagcaa

SEQ ID NO: 1350296 - RNA, 19 nt, Homo sapiens
  misc_RNA (1)...(19): siRNA sense strand
uaaaccugaggaaggaaua

SEQ ID NO: 1350297 - RNA, 19 nt, Homo sapiens
  misc_RNA (1)...(19): siRNA sense strand
agaugacgccuguuauaga

SEQ ID NO: 1350298 - RNA, 19 nt, Homo sapiens
  misc_RNA (1)...(19): siRNA sense strand
ugugauuguuauugccaua

SEQ ID NO: 1350299 - RNA, 19 nt, Homo sapiens
  misc_RNA (1)...(19): siRNA sense strand
gagagcacgauuuauugug

SEQ ID NO: 1350300 - RNA, 19 nt, Homo sapiens
  misc_RNA (1)...(19): siRNA sense strand
gaaguauuugaguaucuug

SEQ ID NO: 1350301 - RNA, 19 nt, Homo sapiens
  misc_RNA (1)...(19): siRNA sense strand
ggcuaccugucucagauga

SEQ ID NO: 1350302 - RNA, 19 nt, Homo sapiens
  misc_RNA (1)...(19): siRNA sense strand
gauaucaggauuuggaaaa

SEQ ID NO: 1350303 - RNA, 19 nt, Homo sapiens
  misc_RNA (1)...(19): siRNA sense strand
ccucuugccacccauacua

SEQ ID NO: 1350304 - RNA, 19 nt, Homo sapiens
  misc_RNA (1)...(19): siRNA sense strand
ccaugguguugcugcugua

SEQ ID NO: 1350305 - RNA, 19 nt, Homo sapiens
  misc_RNA (1)...(19): siRNA sense strand
cagaugacgccuguuauag

SEQ ID NO: 1350306 - RNA, 19 nt, Homo sapiens
  misc_RNA (1)...(19): siRNA sense strand
uuggugaacgaguagauua

SEQ ID NO: 1350307 - RNA, 19 nt, Homo sapiens
  misc_RNA (1)...(19): siRNA sense strand
gucauugcugugauuguua

SEQ ID NO: 1350308 - RNA, 19 nt, Homo sapiens
  misc_RNA (1)...(19): siRNA sense strand
ggagccaccaacauuugaa

SEQ ID NO: 1350309 - RNA, 19 nt, Homo sapiens
  misc_RNA (1)...(19): siRNA sense strand
gcgcuuuccuggguugcuu

SEQ ID NO: 1350310 - RNA, 19 nt, Homo sapiens
  misc_RNA (1)...(19): siRNA sense strand
uacuacaaagcaacaguua

SEQ ID NO: 1350311 - RNA, 19 nt, Homo sapiens
  misc_RNA (1)...(19): siRNA sense strand
cuugaugcaguaacuuaua

SEQ ID NO: 1350312 - RNA, 19 nt, Homo sapiens
  misc_RNA (1)...(19): siRNA sense strand
aaacauguccauauauacg

SEQ ID NO: 1350313 - RNA, 19 nt, Homo sapiens
  misc_RNA (1)...(19): siRNA sense strand
guguaaaguggucaaaugu

SEQ ID NO: 1350314 - RNA, 19 nt, Homo sapiens
  misc_RNA (1)...(19): siRNA sense strand
cuuacgaguuugguuauca

SEQ ID NO: 1350315 - RNA, 19 nt, Homo sapiens
  misc_RNA (1)...(19): siRNA sense strand
uacgggauccuuuaaaugg

SEQ ID NO: 1350316 - RNA, 19 nt, Homo sapiens
  misc_RNA (1)...(19): siRNA sense strand
aaccaaaacccuacuauga

SEQ ID NO: 1350317 - RNA, 19 nt, Homo sapiens
  misc_RNA (1)...(19): siRNA sense strand
cccaauaugugaaaagguu

SEQ ID NO: 1350318 - RNA, 19 nt, Homo sapiens
  misc_RNA (1)...(19): siRNA sense strand
cgauggcagcgacacaauu

SEQ ID NO: 1350319 - RNA, 19 nt, Homo sapiens
  misc_RNA (1)...(19): siRNA sense strand
gauccauuuucacuuauug

SEQ ID NO: 1350320 - RNA, 19 nt, Homo sapiens
  misc_RNA (1)...(19): siRNA sense strand
uugaugcaguaacuuauag

SEQ ID NO: 1350321 - RNA, 19 nt, Homo sapiens
  misc_RNA (1)...(19): siRNA sense strand
guaucuugaugcaguaacu

SEQ ID NO: 1350322 - RNA, 19 nt, Homo sapiens
  misc_RNA (1)...(19): siRNA sense strand
caacauuugaagcuaugga

SEQ ID NO: 1350323 - RNA, 19 nt, Homo sapiens
  misc_RNA (1)...(19): siRNA sense strand
gagauuggugaacgaguag

SEQ ID NO: 1350324 - RNA, 19 nt, Homo sapiens
  misc_RNA (1)...(19): siRNA sense strand
ggagagagcacgauuuauu

SEQ ID NO: 1350325 - RNA, 19 nt, Homo sapiens
  misc_RNA (1)...(19): siRNA sense strand
agagaaacauguccauaua

SEQ ID NO: 1350326 - RNA, 19 nt, Homo sapiens
  misc_RNA (1)...(19): siRNA sense strand
cagaugcacuuuauuugua

SEQ ID NO: 1350327 - RNA, 19 nt, Homo sapiens
  misc_RNA (1)...(19): siRNA sense strand
ggacuuacgaguuugguua

SEQ ID NO: 1350328 - RNA, 19 nt, Homo sapiens
  misc_RNA (1)...(19): siRNA sense strand
aaacagauaucaggauuug

SEQ ID NO: 1350329 - RNA, 19 nt, Homo sapiens
  misc_RNA (1)...(19): siRNA sense strand
cuauggagcucauugguaa

SEQ ID NO: 1350330 - RNA, 19 nt, Homo sapiens
  misc_RNA (1)...(19): siRNA sense strand
aaacacaccuuuagugaag

SEQ ID NO: 1350331 - RNA, 19 nt, Homo sapiens
  misc_RNA (1)...(19): siRNA sense strand
gaacuuaaaggaucaguag

SEQ ID NO: 1350332 - RNA, 19 nt, Homo sapiens
  misc_RNA (1)...(19): siRNA sense strand
gaaaacagauaucaggauu

SEQ ID NO: 1350333 - RNA, 19 nt, Homo sapiens
  misc_RNA (1)...(19): siRNA sense strand
uaaaggaucaguagcaauu

SEQ ID NO: 1350334 - RNA, 19 nt, Homo sapiens
  misc_RNA (1)...(19): siRNA sense strand
aaaugggacuuacgaguuu

SEQ ID NO: 1350335 - RNA, 19 nt, Homo sapiens
  misc_RNA (1)...(19): siRNA sense strand
guuaucagaugcacuuuau

SEQ ID NO: 1350336 - RNA, 19 nt, Homo sapiens
  misc_RNA (1)...(19): siRNA sense strand
gagcugaauaugccacuua

SEQ ID NO: 1350337 - RNA, 19 nt, Homo sapiens
  misc_RNA (1)...(19): siRNA sense strand
ugagauuggugaacgagua

SEQ ID NO: 1350338 - RNA, 19 nt, Homo sapiens
  misc_RNA (1)...(19): siRNA sense strand
gugaacgaguagauuauaa

SEQ ID NO: 1350339 - RNA, 19 nt, Homo sapiens
  misc_RNA (1)...(19): siRNA sense strand
gagagagcacgauuuauug

SEQ ID NO: 1350340 - RNA, 19 nt, Homo sapiens
  misc_RNA (1)...(19): siRNA sense strand
caaaugggacuuacgaguu

SEQ ID NO: 1350341 - RNA, 19 nt, Homo sapiens
  misc_RNA (1)...(19): siRNA sense strand
ggucauugcugugauuguu

SEQ ID NO: 1350342 - RNA, 19 nt, Homo sapiens
  misc_RNA (1)...(19): siRNA sense strand
ccagauccauuuucacuua

SEQ ID NO: 1350343 - RNA, 19 nt, Homo sapiens
  misc_RNA (1)...(19): siRNA sense strand
gaaggaauacuugacaguu

SEQ ID NO: 1350344 - RNA, 19 nt, Homo sapiens
  misc_RNA (1)...(19): siRNA sense strand
aaggaauacuugacaguuu

SEQ ID NO: 1350345 - RNA, 19 nt, Homo sapiens
  misc_RNA (1)...(19): siRNA sense strand
ucagaugacgccuguuaua

SEQ ID NO: 1350346 - RNA, 19 nt, Homo sapiens
  misc_RNA (1)...(19): siRNA sense strand
gaaaacacaccuuuaguga

SEQ ID NO: 1350347 - RNA, 19 nt, Homo sapiens
  misc_RNA (1)...(19): siRNA sense strand
gaugacgccuguuauagag

SEQ ID NO: 1350348 - RNA, 19 nt, Homo sapiens
  misc_RNA (1)...(19): siRNA sense strand
gagaaacauguccauauau

SEQ ID NO: 1350349 - RNA, 19 nt, Homo sapiens
  misc_RNA (1)...(19): siRNA sense strand
ccacuuaccagacuaaauc

SEQ ID NO: 1350350 - RNA, 19 nt, Homo sapiens
  misc_RNA (1)...(19): siRNA sense strand
acgaguagauuauaagugu

SEQ ID NO: 1350351 - RNA, 19 nt, Homo sapiens
  misc_RNA (1)...(19): siRNA sense strand
cuacaaagcaacaguuaug

SEQ ID NO: 1350352 - RNA, 19 nt, Homo sapiens
  misc_RNA (1)...(19): siRNA sense strand
ccaccaacauuugaagcua

SEQ ID NO: 1350353 - RNA, 19 nt, Homo sapiens
  misc_RNA (1)...(19): siRNA sense strand
uauacgggauccuuuaaau

SEQ ID NO: 1350354 - RNA, 19 nt, Homo sapiens
  misc_RNA (1)...(19): siRNA sense strand
cgaguuugguuaucagaug

SEQ ID NO: 1350355 - RNA, 19 nt, Homo sapiens
  misc_RNA (1)...(19): siRNA sense strand
gaacgaguagauuauaagu

SEQ ID NO: 1350356 - RNA, 19 nt, Homo sapiens
  misc_RNA (1)...(19): siRNA sense strand
gugaggagccaccaacauu

SEQ ID NO: 1350357 - RNA, 19 nt, Homo sapiens
  misc_RNA (1)...(19): siRNA sense strand
gauggcagcgacacaauug

SEQ ID NO: 1350358 - RNA, 19 nt, Homo sapiens
  misc_RNA (1)...(19): siRNA sense strand
ucucagaugacgccuguua

SEQ ID NO: 1350359 - RNA, 19 nt, Homo sapiens
  misc_RNA (1)...(19): siRNA sense strand
gaggagccaccaacauuug

SEQ ID NO: 1350360 - RNA, 19 nt, Homo sapiens
  misc_RNA (1)...(19): siRNA sense strand
gcuauggagcucauuggua

SEQ ID NO: 1350361 - RNA, 19 nt, Homo sapiens
  misc_RNA (1)...(19): siRNA sense strand
acacaccuuuagugaagua

SEQ ID NO: 1350362 - RNA, 19 nt, Homo sapiens
  misc_RNA (1)...(19): siRNA sense strand
uagagaaacauguccauau

SEQ ID NO: 1350363 - RNA, 19 nt, Homo sapiens
  misc_RNA (1)...(19): siRNA sense strand
ggugaacgaguagauuaua

SEQ ID NO: 1350364 - RNA, 19 nt, Homo sapiens
  misc_RNA (1)...(19): siRNA sense strand
gaaguagaaguauuugagu

SEQ ID NO: 1350365 - RNA, 19 nt, Homo sapiens
  misc_RNA (1)...(19): siRNA sense strand
gaaacauguccauauauac

SEQ ID NO: 1350366 - RNA, 19 nt, Homo sapiens
  misc_RNA (1)...(19): siRNA sense strand
ugacgccuguuauagagaa

SEQ ID NO: 1350367 - RNA, 19 nt, Homo sapiens
  misc_RNA (1)...(19): siRNA sense strand
cgaguagauuauaagugua

SEQ ID NO: 1350368 - RNA, 19 nt, Homo sapiens
  misc_RNA (1)...(19): siRNA sense strand
gcacuuuauuuguaaugag

SEQ ID NO: 1350369 - RNA, 19 nt, Homo sapiens
  misc_RNA (1)...(19): siRNA sense strand
guagaaguauuugaguauc

SEQ ID NO: 1350370 - RNA, 19 nt, Homo sapiens
  misc_RNA (1)...(19): siRNA sense strand
guauuugaguaucuugaug

SEQ ID NO: 1350371 - RNA, 19 nt, Homo sapiens
  misc_RNA (1)...(19): siRNA sense strand
aggaauacuugacaguuug

SEQ ID NO: 1350372 - RNA, 19 nt, Homo sapiens
  misc_RNA (1)...(19): siRNA sense strand
ccaaaacccuacuaugaga

SEQ ID NO: 1350373 - RNA, 19 nt, Homo sapiens
  misc_RNA (1)...(19): siRNA sense strand
aguguaaaguggucaaaug

SEQ ID NO: 1350374 - RNA, 19 nt, Homo sapiens
  misc_RNA (1)...(19): siRNA sense strand
ccacccauacuauuuguga

SEQ ID NO: 1350375 - RNA, 19 nt, Homo sapiens
  misc_RNA (1)...(19): siRNA sense strand
uuggagagagcacgauuua

SEQ ID NO: 1350376 - RNA, 19 nt, Homo sapiens
  misc_RNA (1)...(19): siRNA sense strand
gguuaucagaugcacuuua

SEQ ID NO: 1350377 - RNA, 19 nt, Homo sapiens
  misc_RNA (1)...(19): siRNA sense strand
caccaacauuugaagcuau

SEQ ID NO: 1350378 - RNA, 19 nt, Homo sapiens
  misc_RNA (1)...(19): siRNA sense strand
ugaggagccaccaacauuu

SEQ ID NO: 1350379 - RNA, 19 nt, Homo sapiens
  misc_RNA (1)...(19): siRNA sense strand
ggaaggaauacuugacagu

SEQ ID NO: 1350380 - RNA, 19 nt, Homo sapiens
  misc_RNA (1)...(19): siRNA sense strand
gaggaaggaauacuugaca

SEQ ID NO: 1350381 - RNA, 19 nt, Homo sapiens
  misc_RNA (1)...(19): siRNA sense strand
ugaguaucuugaugcagua

SEQ ID NO: 1350382 - RNA, 19 nt, Homo sapiens
  misc_RNA (1)...(19): siRNA sense strand
caccuuuagugaaguagaa

SEQ ID NO: 1350383 - RNA, 19 nt, Homo sapiens
  misc_RNA (1)...(19): siRNA sense strand
acagauaucaggauuugga

SEQ ID NO: 1350384 - RNA, 19 nt, Homo sapiens
  misc_RNA (1)...(19): siRNA sense strand
ucauugcugugauuguuau

SEQ ID NO: 1350385 - RNA, 19 nt, Homo sapiens
  misc_RNA (1)...(19): siRNA sense strand
ucagaugcacuuuauuugu

SEQ ID NO: 1350386 - RNA, 19 nt, Homo sapiens
  misc_RNA (1)...(19): siRNA sense strand
gugcugcuccagaguguaa

SEQ ID NO: 1350387 - RNA, 19 nt, Homo sapiens
  misc_RNA (1)...(19): siRNA sense strand
ggaaaacacaccuuuagug

SEQ ID NO: 1350388 - RNA, 19 nt, Homo sapiens
  misc_RNA (1)...(19): siRNA sense strand
aaggaucaguagcaauuug

SEQ ID NO: 1350389 - RNA, 19 nt, Homo sapiens
  misc_RNA (1)...(19): siRNA sense strand
uauauacgggauccuuuaa

SEQ ID NO: 1350390 - RNA, 19 nt, Homo sapiens
  misc_RNA (1)...(19): siRNA sense strand
ugaaguagaaguauuugag

SEQ ID NO: 1350391 - RNA, 19 nt, Homo sapiens
  misc_RNA (1)...(19): siRNA sense strand
cuugacaguuuggauguuu

SEQ ID NO: 1350392 - RNA, 19 nt, Homo sapiens
  misc_RNA (1)...(19): siRNA sense strand
cauauauacgggauccuuu

SEQ ID NO: 1350393 - RNA, 19 nt, Homo sapiens
  misc_RNA (1)...(19): siRNA sense strand
auauauacgggauccuuua

SEQ ID NO: 1350394 - RNA, 19 nt, Homo sapiens
  misc_RNA (1)...(19): siRNA sense strand
cuuaaaggaucaguagcaa

SEQ ID NO: 1350395 - RNA, 19 nt, Homo sapiens
  misc_RNA (1)...(19): siRNA sense strand
uaaaccugaggaaggaaua

SEQ ID NO: 1350396 - RNA, 19 nt, Homo sapiens
  misc_RNA (1)...(19): siRNA sense strand
agaugacgccuguuauaga

SEQ ID NO: 1350397 - RNA, 19 nt, Homo sapiens
  misc_RNA (1)...(19): siRNA sense strand
ugugauuguuauugccaua

SEQ ID NO: 1350398 - RNA, 19 nt, Homo sapiens
  misc_RNA (1)...(19): siRNA sense strand
gagagcacgauuuauugug

SEQ ID NO: 1350399 - RNA, 19 nt, Homo sapiens
  misc_RNA (1)...(19): siRNA sense strand
gaaguauuugaguaucuug

SEQ ID NO: 1350400 - RNA, 19 nt, Homo sapiens
  misc_RNA (1)...(19): siRNA sense strand
ggcuaccugucucagauga

SEQ ID NO: 1350401 - RNA, 19 nt, Homo sapiens
  misc_RNA (1)...(19): siRNA sense strand
gauaucaggauuuggaaaa

SEQ ID NO: 1350402 - RNA, 19 nt, Homo sapiens
  misc_RNA (1)...(19): siRNA sense strand
ccucuugccacccauacua

SEQ ID NO: 1350403 - RNA, 19 nt, Homo sapiens
  misc_RNA (1)...(19): siRNA sense strand
ccaugguguugcugcugua

SEQ ID NO: 1350404 - RNA, 19 nt, Homo sapiens
  misc_RNA (1)...(19): siRNA sense strand
cagaugacgccuguuauag

SEQ ID NO: 1350405 - RNA, 19 nt, Homo sapiens
  misc_RNA (1)...(19): siRNA sense strand
cagaugguggagcugaaua

SEQ ID NO: 1350406 - RNA, 19 nt, Homo sapiens
  misc_RNA (1)...(19): siRNA sense strand
uuggugaacgaguagauua

SEQ ID NO: 1350407 - RNA, 19 nt, Homo sapiens
  misc_RNA (1)...(19): siRNA sense strand
gucauugcugugauuguua

SEQ ID NO: 1350408 - RNA, 19 nt, Homo sapiens
  misc_RNA (1)...(19): siRNA sense strand
ggagccaccaacauuugaa

SEQ ID NO: 1350409 - RNA, 19 nt, Homo sapiens
  misc_RNA (1)...(19): siRNA sense strand
gcgcuuuccuggguugcuu

SEQ ID NO: 1350410 - RNA, 19 nt, Homo sapiens
  misc_RNA (1)...(19): siRNA sense strand
uacuacaaagcaacaguua

SEQ ID NO: 1350411 - RNA, 19 nt, Homo sapiens
  misc_RNA (1)...(19): siRNA sense strand
cuugaugcaguaacuuaua

SEQ ID NO: 1350412 - RNA, 19 nt, Homo sapiens
  misc_RNA (1)...(19): siRNA sense strand
aaacauguccauauauacg

SEQ ID NO: 1350413 - RNA, 19 nt, Homo sapiens
  misc_RNA (1)...(19): siRNA sense strand
guguaaaguggucaaaugu

SEQ ID NO: 1350414 - RNA, 19 nt, Homo sapiens
  misc_RNA (1)...(19): siRNA sense strand
cuuacgaguuugguuauca

SEQ ID NO: 1350415 - RNA, 19 nt, Homo sapiens
  misc_RNA (1)...(19): siRNA sense strand
uacgggauccuuuaaaugg

SEQ ID NO: 1350416 - RNA, 19 nt, Homo sapiens
  misc_RNA (1)...(19): siRNA sense strand
gcagaugguggagcugaau

SEQ ID NO: 1350417 - RNA, 19 nt, Homo sapiens
  misc_RNA (1)...(19): siRNA sense strand
aaccaaaacccuacuauga

SEQ ID NO: 1350418 - RNA, 19 nt, Homo sapiens
  misc_RNA (1)...(19): siRNA sense strand
cccaauaugugaaaagguu

SEQ ID NO: 1350419 - RNA, 19 nt, Homo sapiens
  misc_RNA (1)...(19): siRNA sense strand
ggagcugaauaugccacuu

SEQ ID NO: 1350420 - RNA, 19 nt, Homo sapiens
  misc_RNA (1)...(19): siRNA sense strand
cgauggcagcgacacaauu

SEQ ID NO: 1350421 - RNA, 19 nt, Homo sapiens
  misc_RNA (1)...(19): siRNA sense strand
gauccauuuucacuuauug

SEQ ID NO: 1350422 - RNA, 19 nt, Homo sapiens
  misc_RNA (1)...(19): siRNA sense strand
uugaugcaguaacuuauag

SEQ ID NO: 1350423 - RNA, 19 nt, Homo sapiens
  misc_RNA (1)...(19): siRNA sense strand
guaucuugaugcaguaacu

SEQ ID NO: 1350424 - RNA, 19 nt, Homo sapiens
  misc_RNA (1)...(19): siRNA sense strand
ggagagagcacgauuuauu

SEQ ID NO: 1350425 - RNA, 19 nt, Homo sapiens
  misc_RNA (1)...(19): siRNA sense strand
agagaaacauguccauaua

SEQ ID NO: 1350426 - RNA, 19 nt, Homo sapiens
  misc_RNA (1)...(19): siRNA sense strand
cagaugcacuuuauuugua

SEQ ID NO: 1350427 - RNA, 19 nt, Homo sapiens
  misc_RNA (1)...(19): siRNA sense strand
ggacuuacgaguuugguua

SEQ ID NO: 1350428 - RNA, 19 nt, Homo sapiens
  misc_RNA (1)...(19): siRNA sense strand
aaacagauaucaggauuug

SEQ ID NO: 1350429 - RNA, 19 nt, Homo sapiens
  misc_RNA (1)...(19): siRNA sense strand
cuauggagcucauugguaa

SEQ ID NO: 1350430 - RNA, 19 nt, Homo sapiens
  misc_RNA (1)...(19): siRNA sense strand
aaacacaccuuuagugaag

SEQ ID NO: 1350431 - RNA, 19 nt, Homo sapiens
  misc_RNA (1)...(19): siRNA sense strand
gaacuuaaaggaucaguag

SEQ ID NO: 1350432 - RNA, 19 nt, Homo sapiens
  misc_RNA (1)...(19): siRNA sense strand
gaaaacagauaucaggauu

SEQ ID NO: 1350433 - RNA, 19 nt, Homo sapiens
  misc_RNA (1)...(19): siRNA sense strand
uaaaggaucaguagcaauu

SEQ ID NO: 1350434 - RNA, 19 nt, Homo sapiens
  misc_RNA (1)...(19): siRNA sense strand
aaaugggacuuacgaguuu

SEQ ID NO: 1350435 - RNA, 19 nt, Homo sapiens
  misc_RNA (1)...(19): siRNA sense strand
guuaucagaugcacuuuau

SEQ ID NO: 1350436 - RNA, 19 nt, Homo sapiens
  misc_RNA (1)...(19): siRNA sense strand
gagcugaauaugccacuua

SEQ ID NO: 1350437 - RNA, 19 nt, Homo sapiens
  misc_RNA (1)...(19): siRNA sense strand
gagcagagaggcugaauag

SEQ ID NO: 1350438 - RNA, 19 nt, Homo sapiens
  misc_RNA (1)...(19): siRNA sense strand
ugagauuggugaacgagua

SEQ ID NO: 1350439 - RNA, 19 nt, Homo sapiens
  misc_RNA (1)...(19): siRNA sense strand
gugaacgaguagauuauaa

SEQ ID NO: 1350440 - RNA, 19 nt, Homo sapiens
  misc_RNA (1)...(19): siRNA sense strand
gagagagcacgauuuauug

SEQ ID NO: 1350441 - RNA, 19 nt, Homo sapiens
  misc_RNA (1)...(19): siRNA sense strand
caaaugggacuuacgaguu

SEQ ID NO: 1350442 - RNA, 19 nt, Homo sapiens
  misc_RNA (1)...(19): siRNA sense strand
ggucauugcugugauuguu

SEQ ID NO: 1350443 - RNA, 19 nt, Homo sapiens
  misc_RNA (1)...(19): siRNA sense strand
ccagauccauuuucacuua

SEQ ID NO: 1350444 - RNA, 19 nt, Homo sapiens
  misc_RNA (1)...(19): siRNA sense strand
gaaggaauacuugacaguu

SEQ ID NO: 1350445 - RNA, 19 nt, Homo sapiens
  misc_RNA (1)...(19): siRNA sense strand
aaggaauacuugacaguuu

SEQ ID NO: 1350446 - RNA, 19 nt, Homo sapiens
  misc_RNA (1)...(19): siRNA sense strand
ucagaugacgccuguuaua

SEQ ID NO: 1350447 - RNA, 19 nt, Homo sapiens
  misc_RNA (1)...(19): siRNA sense strand
gaaaacacaccuuuaguga

SEQ ID NO: 1350448 - RNA, 19 nt, Homo sapiens
  misc_RNA (1)...(19): siRNA sense strand
gaugacgccuguuauagag

SEQ ID NO: 1350449 - RNA, 19 nt, Homo sapiens
  misc_RNA (1)...(19): siRNA sense strand
gagaaacauguccauauau

SEQ ID NO: 1350450 - RNA, 19 nt, Homo sapiens
  misc_RNA (1)...(19): siRNA sense strand
ccacuuaccagacuaaauc

SEQ ID NO: 1350451 - RNA, 19 nt, Homo sapiens
  misc_RNA (1)...(19): siRNA sense strand
acgaguagauuauaagugu

SEQ ID NO: 1350452 - RNA, 19 nt, Homo sapiens
  misc_RNA (1)...(19): siRNA sense strand
cuacaaagcaacaguuaug

SEQ ID NO: 1350453 - RNA, 19 nt, Homo sapiens
  misc_RNA (1)...(19): siRNA sense strand
ccaccaacauuugaagcua

SEQ ID NO: 1350454 - RNA, 19 nt, Homo sapiens
  misc_RNA (1)...(19): siRNA sense strand
uauacgggauccuuuaaau

SEQ ID NO: 1350455 - RNA, 19 nt, Homo sapiens
  misc_RNA (1)...(19): siRNA sense strand
cgaguuugguuaucagaug

SEQ ID NO: 1350456 - RNA, 19 nt, Homo sapiens
  misc_RNA (1)...(19): siRNA sense strand
gaacgaguagauuauaagu

SEQ ID NO: 1350457 - RNA, 19 nt, Homo sapiens
  misc_RNA (1)...(19): siRNA sense strand
gugaggagccaccaacauu

SEQ ID NO: 1350458 - RNA, 19 nt, Homo sapiens
  misc_RNA (1)...(19): siRNA sense strand
gauggcagcgacacaauug

SEQ ID NO: 1350459 - RNA, 19 nt, Homo sapiens
  misc_RNA (1)...(19): siRNA sense strand
ucucagaugacgccuguua

SEQ ID NO: 1350460 - RNA, 19 nt, Homo sapiens
  misc_RNA (1)...(19): siRNA sense strand
acacaccuuuagugaagua

SEQ ID NO: 1350461 - RNA, 19 nt, Homo sapiens
  misc_RNA (1)...(19): siRNA sense strand
gcuauggagcucauuggua

SEQ ID NO: 1350462 - RNA, 19 nt, Homo sapiens
  misc_RNA (1)...(19): siRNA sense strand
gaggagccaccaacauuug

SEQ ID NO: 1350463 - RNA, 19 nt, Homo sapiens
  misc_RNA (1)...(19): siRNA sense strand
uagagaaacauguccauau

SEQ ID NO: 1350464 - RNA, 19 nt, Homo sapiens
  misc_RNA (1)...(19): siRNA sense strand
guuccaaagugucuuaaag

SEQ ID NO: 1350465 - RNA, 19 nt, Homo sapiens
  misc_RNA (1)...(19): siRNA sense strand
ggugaacgaguagauuaua

SEQ ID NO: 1350466 - RNA, 19 nt, Homo sapiens
  misc_RNA (1)...(19): siRNA sense strand
gaaguagaaguauuugagu

SEQ ID NO: 1350467 - RNA, 19 nt, Homo sapiens
  misc_RNA (1)...(19): siRNA sense strand
gaaacauguccauauauac

SEQ ID NO: 1350468 - RNA, 19 nt, Homo sapiens
  misc_RNA (1)...(19): siRNA sense strand
ugacgccuguuauagagaa

SEQ ID NO: 1350469 - RNA, 19 nt, Homo sapiens
  misc_RNA (1)...(19): siRNA sense strand
cgaguagauuauaagugua

SEQ ID NO: 1350470 - RNA, 19 nt, Homo sapiens
  misc_RNA (1)...(19): siRNA sense strand
gcacuuuauuuguaaugag

SEQ ID NO: 1350471 - RNA, 19 nt, Homo sapiens
  misc_RNA (1)...(19): siRNA sense strand
guagaaguauuugaguauc

SEQ ID NO: 1350472 - RNA, 19 nt, Homo sapiens
  misc_RNA (1)...(19): siRNA sense strand
guauuugaguaucuugaug

SEQ ID NO: 1350473 - RNA, 19 nt, Homo sapiens
  misc_RNA (1)...(19): siRNA sense strand
aggaauacuugacaguuug

SEQ ID NO: 1350474 - RNA, 19 nt, Homo sapiens
  misc_RNA (1)...(19): siRNA sense strand
ccaaaacccuacuaugaga

SEQ ID NO: 1350475 - RNA, 19 nt, Homo sapiens
  misc_RNA (1)...(19): siRNA sense strand
aguguaaaguggucaaaug

SEQ ID NO: 1350476 - RNA, 19 nt, Homo sapiens
  misc_RNA (1)...(19): siRNA sense strand
ccacccauacuauuuguga

SEQ ID NO: 1350477 - RNA, 19 nt, Homo sapiens
  misc_RNA (1)...(19): siRNA sense strand
uuggagagagcacgauuua

SEQ ID NO: 1350478 - RNA, 19 nt, Homo sapiens
  misc_RNA (1)...(19): siRNA sense strand
gguuaucagaugcacuuua

SEQ ID NO: 1350479 - RNA, 19 nt, Homo sapiens
  misc_RNA (1)...(19): siRNA sense strand
caccaacauuugaagcuau

SEQ ID NO: 1350480 - RNA, 19 nt, Homo sapiens
  misc_RNA (1)...(19): siRNA sense strand
ugaggagccaccaacauuu

SEQ ID NO: 1350481 - RNA, 19 nt, Homo sapiens
  misc_RNA (1)...(19): siRNA sense strand
ggaaggaauacuugacagu

SEQ ID NO: 1350482 - RNA, 19 nt, Homo sapiens
  misc_RNA (1)...(19): siRNA sense strand
gaggaaggaauacuugaca

SEQ ID NO: 1350483 - RNA, 19 nt, Homo sapiens
  misc_RNA (1)...(19): siRNA sense strand
ccaguuccaaagugucuua

SEQ ID NO: 1350484 - RNA, 19 nt, Homo sapiens
  misc_RNA (1)...(19): siRNA sense strand
ugaguaucuugaugcagua

SEQ ID NO: 1350485 - RNA, 19 nt, Homo sapiens
  misc_RNA (1)...(19): siRNA sense strand
caccuuuagugaaguagaa

SEQ ID NO: 1350486 - RNA, 19 nt, Homo sapiens
  misc_RNA (1)...(19): siRNA sense strand
acagauaucaggauuugga

SEQ ID NO: 1350487 - RNA, 19 nt, Homo sapiens
  misc_RNA (1)...(19): siRNA sense strand
ucauugcugugauuguuau

SEQ ID NO: 1350488 - RNA, 19 nt, Homo sapiens
  misc_RNA (1)...(19): siRNA sense strand
ucagaugcacuuuauuugu

SEQ ID NO: 1350489 - RNA, 19 nt, Homo sapiens
  misc_RNA (1)...(19): siRNA sense strand
gugcugcuccagaguguaa

SEQ ID NO: 1350490 - RNA, 19 nt, Homo sapiens
  misc_RNA (1)...(19): siRNA sense strand
ggaaaacacaccuuuagug

SEQ ID NO: 1350491 - RNA, 19 nt, Homo sapiens
  misc_RNA (1)...(19): siRNA sense strand
aaggaucaguagcaauuug

SEQ ID NO: 1350492 - RNA, 19 nt, Homo sapiens
  misc_RNA (1)...(19): siRNA sense strand
uauauacgggauccuuuaa

SEQ ID NO: 1350493 - RNA, 19 nt, Homo sapiens
  misc_RNA (1)...(19): siRNA sense strand
ugaaguagaaguauuugag

SEQ ID NO: 1350494 - RNA, 19 nt, Homo sapiens
  misc_RNA (1)...(19): siRNA sense strand
cuugacaguuuggauguuu

SEQ ID NO: 1350495 - RNA, 19 nt, Homo sapiens
  misc_RNA (1)...(19): siRNA sense strand
cauauauacgggauccuuu

SEQ ID NO: 1350496 - RNA, 19 nt, Homo sapiens
  misc_RNA (1)...(19): siRNA sense strand
auauauacgggauccuuua

SEQ ID NO: 1350497 - RNA, 19 nt, Homo sapiens
  misc_RNA (1)...(19): siRNA sense strand
cuuaaaggaucaguagcaa

SEQ ID NO: 1350498 - RNA, 19 nt, Homo sapiens
  misc_RNA (1)...(19): siRNA sense strand
uaaaccugaggaaggaaua

SEQ ID NO: 1350499 - RNA, 19 nt, Homo sapiens
  misc_RNA (1)...(19): siRNA sense strand
agaugacgccuguuauaga

SEQ ID NO: 1350500 - RNA, 19 nt, Homo sapiens
  misc_RNA (1)...(19): siRNA sense strand
ugugauuguuauugccaua

SEQ ID NO: 1350501 - RNA, 19 nt, Homo sapiens
  misc_RNA (1)...(19): siRNA sense strand
gagagcacgauuuauugug

SEQ ID NO: 1350502 - RNA, 19 nt, Homo sapiens
  misc_RNA (1)...(19): siRNA sense strand
gaaguauuugaguaucuug

SEQ ID NO: 1350503 - RNA, 19 nt, Homo sapiens
  misc_RNA (1)...(19): siRNA sense strand
ggcuaccugucucagauga

SEQ ID NO: 1350504 - RNA, 19 nt, Homo sapiens
  misc_RNA (1)...(19): siRNA sense strand
ccucuugccacccauacua

SEQ ID NO: 1350505 - RNA, 19 nt, Homo sapiens
  misc_RNA (1)...(19): siRNA sense strand
gauaucaggauuuggaaaa

SEQ ID NO: 1350506 - RNA, 19 nt, Homo sapiens
  misc_RNA (1)...(19): siRNA sense strand
ccaugguguugcugcugua

SEQ ID NO: 1350507 - RNA, 19 nt, Homo sapiens
  misc_RNA (1)...(19): siRNA sense strand
cagaugacgccuguuauag

SEQ ID NO: 1350508 - RNA, 19 nt, Homo sapiens
  misc_RNA (1)...(19): siRNA sense strand
cagaugguggagcugaaua

SEQ ID NO: 1350509 - RNA, 19 nt, Homo sapiens
  misc_RNA (1)...(19): siRNA sense strand
gucauugcugugauuguua

SEQ ID NO: 1350510 - RNA, 19 nt, Homo sapiens
  misc_RNA (1)...(19): siRNA sense strand
uuggugaacgaguagauua

SEQ ID NO: 1350511 - RNA, 19 nt, Homo sapiens
  misc_RNA (1)...(19): siRNA sense strand
ggagccaccaacauuugaa

SEQ ID NO: 1350512 - RNA, 19 nt, Homo sapiens
  misc_RNA (1)...(19): siRNA sense strand
gcgcuuuccuggguugcuu

SEQ ID NO: 1350513 - RNA, 19 nt, Homo sapiens
  misc_RNA (1)...(19): siRNA sense strand
uacuacaaagcaacaguua

SEQ ID NO: 1350514 - RNA, 19 nt, Homo sapiens
  misc_RNA (1)...(19): siRNA sense strand
cuugaugcaguaacuuaua

SEQ ID NO: 1350515 - RNA, 19 nt, Homo sapiens
  misc_RNA (1)...(19): siRNA sense strand
aaacauguccauauauacg

SEQ ID NO: 1350516 - RNA, 19 nt, Homo sapiens
  misc_RNA (1)...(19): siRNA sense strand
guguaaaguggucaaaugu

SEQ ID NO: 1350517 - RNA, 19 nt, Homo sapiens
  misc_RNA (1)...(19): siRNA sense strand
cuuacgaguuugguuauca

SEQ ID NO: 1350518 - RNA, 19 nt, Homo sapiens
  misc_RNA (1)...(19): siRNA sense strand
aaccaaaacccuacuauga

SEQ ID NO: 1350519 - RNA, 19 nt, Homo sapiens
  misc_RNA (1)...(19): siRNA sense strand
gcagaugguggagcugaau

SEQ ID NO: 1350520 - RNA, 19 nt, Homo sapiens
  misc_RNA (1)...(19): siRNA sense strand
uacgggauccuuuaaaugg

SEQ ID NO: 1350521 - RNA, 19 nt, Homo sapiens
  misc_RNA (1)...(19): siRNA sense strand
cgauggcagcgacacaauu

SEQ ID NO: 1350522 - RNA, 19 nt, Homo sapiens
  misc_RNA (1)...(19): siRNA sense strand
ggagcugaauaugccacuu

SEQ ID NO: 1350523 - RNA, 19 nt, Homo sapiens
  misc_RNA (1)...(19): siRNA sense strand
caacauuugaagcuaugga

SEQ ID NO: 1350524 - RNA, 19 nt, Homo sapiens
  misc_RNA (1)...(19): siRNA sense strand
ggagagagcacgauuuauu

SEQ ID NO: 1350525 - RNA, 19 nt, Homo sapiens
  misc_RNA (1)...(19): siRNA sense strand
agagaaacauguccauaua

SEQ ID NO: 1350526 - RNA, 19 nt, Homo sapiens
  misc_RNA (1)...(19): siRNA sense strand
cagaugcacuuuauuugua

SEQ ID NO: 1350527 - RNA, 19 nt, Homo sapiens
  misc_RNA (1)...(19): siRNA sense strand
ggacuuacgaguuugguua

SEQ ID NO: 1350528 - RNA, 19 nt, Homo sapiens
  misc_RNA (1)...(19): siRNA sense strand
aaacagauaucaggauuug

SEQ ID NO: 1350529 - RNA, 19 nt, Homo sapiens
  misc_RNA (1)...(19): siRNA sense strand
cuauggagcucauugguaa

SEQ ID NO: 1350530 - RNA, 19 nt, Homo sapiens
  misc_RNA (1)...(19): siRNA sense strand
aaacacaccuuuagugaag

SEQ ID NO: 1350531 - RNA, 19 nt, Homo sapiens
  misc_RNA (1)...(19): siRNA sense strand
gaacuuaaaggaucaguag

SEQ ID NO: 1350532 - RNA, 19 nt, Homo sapiens
  misc_RNA (1)...(19): siRNA sense strand
gaaaacagauaucaggauu

SEQ ID NO: 1350533 - RNA, 19 nt, Homo sapiens
  misc_RNA (1)...(19): siRNA sense strand
uaaaggaucaguagcaauu

SEQ ID NO: 1350534 - RNA, 19 nt, Homo sapiens
  misc_RNA (1)...(19): siRNA sense strand
aaaugggacuuacgaguuu

SEQ ID NO: 1350535 - RNA, 19 nt, Homo sapiens
  misc_RNA (1)...(19): siRNA sense strand
guuaucagaugcacuuuau

SEQ ID NO: 1350536 - RNA, 19 nt, Homo sapiens
  misc_RNA (1)...(19): siRNA sense strand
ugagauuggugaacgagua

SEQ ID NO: 1350537 - RNA, 19 nt, Homo sapiens
  misc_RNA (1)...(19): siRNA sense strand
gugaacgaguagauuauaa

SEQ ID NO: 1350538 - RNA, 19 nt, Homo sapiens
  misc_RNA (1)...(19): siRNA sense strand
gagagagcacgauuuauug

SEQ ID NO: 1350539 - RNA, 19 nt, Homo sapiens
  misc_RNA (1)...(19): siRNA sense strand
caaaugggacuuacgaguu

SEQ ID NO: 1350540 - RNA, 19 nt, Homo sapiens
  misc_RNA (1)...(19): siRNA sense strand
ggucauugcugugauuguu

SEQ ID NO: 1350541 - RNA, 19 nt, Homo sapiens
  misc_RNA (1)...(19): siRNA sense strand
ccagauccauuuucacuua

SEQ ID NO: 1350542 - RNA, 19 nt, Homo sapiens
  misc_RNA (1)...(19): siRNA sense strand
gaaggaauacuugacaguu

SEQ ID NO: 1350543 - RNA, 19 nt, Homo sapiens
  misc_RNA (1)...(19): siRNA sense strand
aaggaauacuugacaguuu

SEQ ID NO: 1350544 - RNA, 19 nt, Homo sapiens
  misc_RNA (1)...(19): siRNA sense strand
ucagaugacgccuguuaua

SEQ ID NO: 1350545 - RNA, 19 nt, Homo sapiens
  misc_RNA (1)...(19): siRNA sense strand
gaaaacacaccuuuaguga

SEQ ID NO: 1350546 - RNA, 19 nt, Homo sapiens
  misc_RNA (1)...(19): siRNA sense strand
gaugacgccuguuauagag

SEQ ID NO: 1350547 - RNA, 19 nt, Homo sapiens
  misc_RNA (1)...(19): siRNA sense strand
gagaaacauguccauauau

SEQ ID NO: 1350548 - RNA, 19 nt, Homo sapiens
  misc_RNA (1)...(19): siRNA sense strand
acgaguagauuauaagugu

SEQ ID NO: 1350549 - RNA, 19 nt, Homo sapiens
  misc_RNA (1)...(19): siRNA sense strand
cuacaaagcaacaguuaug

SEQ ID NO: 1350550 - RNA, 19 nt, Homo sapiens
  misc_RNA (1)...(19): siRNA sense strand
ccaccaacauuugaagcua

SEQ ID NO: 1350551 - RNA, 19 nt, Homo sapiens
  misc_RNA (1)...(19): siRNA sense strand
uauacgggauccuuuaaau

SEQ ID NO: 1350552 - RNA, 19 nt, Homo sapiens
  misc_RNA (1)...(19): siRNA sense strand
cgaguuugguuaucagaug

SEQ ID NO: 1350553 - RNA, 19 nt, Homo sapiens
  misc_RNA (1)...(19): siRNA sense strand
gaacgaguagauuauaagu

SEQ ID NO: 1350554 - RNA, 19 nt, Homo sapiens
  misc_RNA (1)...(19): siRNA sense strand
gugaggagccaccaacauu

SEQ ID NO: 1350555 - RNA, 19 nt, Homo sapiens
  misc_RNA (1)...(19): siRNA sense strand
gauggcagcgacacaauug

SEQ ID NO: 1350556 - RNA, 19 nt, Homo sapiens
  misc_RNA (1)...(19): siRNA sense strand
gcuauggagcucauuggua

SEQ ID NO: 1350557 - RNA, 19 nt, Homo sapiens
  misc_RNA (1)...(19): siRNA sense strand
gaggagccaccaacauuug

SEQ ID NO: 1350558 - RNA, 19 nt, Homo sapiens
  misc_RNA (1)...(19): siRNA sense strand
acacaccuuuagugaagua

SEQ ID NO: 1350559 - RNA, 19 nt, Homo sapiens
  misc_RNA (1)...(19): siRNA sense strand
ucucagaugacgccuguua

SEQ ID NO: 1350560 - RNA, 19 nt, Homo sapiens
  misc_RNA (1)...(19): siRNA sense strand
uagagaaacauguccauau

SEQ ID NO: 1350561 - RNA, 19 nt, Homo sapiens
  misc_RNA (1)...(19): siRNA sense strand
ggugaacgaguagauuaua

SEQ ID NO: 1350562 - RNA, 19 nt, Homo sapiens
  misc_RNA (1)...(19): siRNA sense strand
gaaguagaaguauuugagu

SEQ ID NO: 1350563 - RNA, 19 nt, Homo sapiens
  misc_RNA (1)...(19): siRNA sense strand
gaaacauguccauauauac

SEQ ID NO: 1350564 - RNA, 19 nt, Homo sapiens
  misc_RNA (1)...(19): siRNA sense strand
ugacgccuguuauagagaa

SEQ ID NO: 1350565 - RNA, 19 nt, Homo sapiens
  misc_RNA (1)...(19): siRNA sense strand
cgaguagauuauaagugua

SEQ ID NO: 1350566 - RNA, 19 nt, Homo sapiens
  misc_RNA (1)...(19): siRNA sense strand
gcacuuuauuuguaaugag

SEQ ID NO: 1350567 - RNA, 19 nt, Homo sapiens
  misc_RNA (1)...(19): siRNA sense strand
guagaaguauuugaguauc

SEQ ID NO: 1350568 - RNA, 19 nt, Homo sapiens
  misc_RNA (1)...(19): siRNA sense strand
guauuugaguaucuugaug

SEQ ID NO: 1350569 - RNA, 19 nt, Homo sapiens
  misc_RNA (1)...(19): siRNA sense strand
aggaauacuugacaguuug

SEQ ID NO: 1350570 - RNA, 19 nt, Homo sapiens
  misc_RNA (1)...(19): siRNA sense strand
aguguaaaguggucaaaug

SEQ ID NO: 1350571 - RNA, 19 nt, Homo sapiens
  misc_RNA (1)...(19): siRNA sense strand
ccaaaacccuacuaugaga

SEQ ID NO: 1350572 - RNA, 19 nt, Homo sapiens
  misc_RNA (1)...(19): siRNA sense strand
ccacccauacuauuuguga

SEQ ID NO: 1350573 - RNA, 19 nt, Homo sapiens
  misc_RNA (1)...(19): siRNA sense strand
caccaacauuugaagcuau

SEQ ID NO: 1350574 - RNA, 19 nt, Homo sapiens
  misc_RNA (1)...(19): siRNA sense strand
uuggagagagcacgauuua

SEQ ID NO: 1350575 - RNA, 19 nt, Homo sapiens
  misc_RNA (1)...(19): siRNA sense strand
gguuaucagaugcacuuua

SEQ ID NO: 1350576 - RNA, 19 nt, Homo sapiens
  misc_RNA (1)...(19): siRNA sense strand
ugaggagccaccaacauuu

SEQ ID NO: 1350577 - RNA, 19 nt, Homo sapiens
  misc_RNA (1)...(19): siRNA sense strand
ggaaggaauacuugacagu

SEQ ID NO: 1350578 - RNA, 19 nt, Homo sapiens
  misc_RNA (1)...(19): siRNA sense strand
gaggaaggaauacuugaca

SEQ ID NO: 1350579 - RNA, 19 nt, Homo sapiens
  misc_RNA (1)...(19): siRNA sense strand
ugaguaucuugaugcagua

SEQ ID NO: 1350580 - RNA, 19 nt, Homo sapiens
  misc_RNA (1)...(19): siRNA sense strand
caccuuuagugaaguagaa

SEQ ID NO: 1350581 - RNA, 19 nt, Homo sapiens
  misc_RNA (1)...(19): siRNA sense strand
acagauaucaggauuugga

SEQ ID NO: 1350582 - RNA, 19 nt, Homo sapiens
  misc_RNA (1)...(19): siRNA sense strand
ucauugcugugauuguuau

SEQ ID NO: 1350583 - RNA, 19 nt, Homo sapiens
  misc_RNA (1)...(19): siRNA sense strand
ucagaugcacuuuauuugu

SEQ ID NO: 1350584 - RNA, 19 nt, Homo sapiens
  misc_RNA (1)...(19): siRNA sense strand
gugcugcuccagaguguaa

SEQ ID NO: 1350585 - RNA, 19 nt, Homo sapiens
  misc_RNA (1)...(19): siRNA sense strand
ggaaaacacaccuuuagug

SEQ ID NO: 1350586 - RNA, 19 nt, Homo sapiens
  misc_RNA (1)...(19): siRNA sense strand
aaggaucaguagcaauuug

SEQ ID NO: 1350587 - RNA, 19 nt, Homo sapiens
  misc_RNA (1)...(19): siRNA sense strand
uauauacgggauccuuuaa

SEQ ID NO: 1350588 - RNA, 19 nt, Homo sapiens
  misc_RNA (1)...(19): siRNA sense strand
ugaaguagaaguauuugag

SEQ ID NO: 1350589 - RNA, 19 nt, Homo sapiens
  misc_RNA (1)...(19): siRNA sense strand
cuugacaguuuggauguuu

SEQ ID NO: 1350590 - RNA, 19 nt, Homo sapiens
  misc_RNA (1)...(19): siRNA sense strand
cauauauacgggauccuuu

SEQ ID NO: 1350591 - RNA, 19 nt, Homo sapiens
  misc_RNA (1)...(19): siRNA sense strand
auauauacgggauccuuua

SEQ ID NO: 1350592 - RNA, 19 nt, Homo sapiens
  misc_RNA (1)...(19): siRNA sense strand
cuuaaaggaucaguagcaa

SEQ ID NO: 1350593 - RNA, 19 nt, Homo sapiens
  misc_RNA (1)...(19): siRNA sense strand
uaaaccugaggaaggaaua

SEQ ID NO: 1350594 - RNA, 19 nt, Homo sapiens
  misc_RNA (1)...(19): siRNA sense strand
agaugacgccuguuauaga

SEQ ID NO: 1350595 - RNA, 19 nt, Homo sapiens
  misc_RNA (1)...(19): siRNA sense strand
ugugauuguuauugccaua

SEQ ID NO: 1350596 - RNA, 19 nt, Homo sapiens
  misc_RNA (1)...(19): siRNA sense strand
gagagcacgauuuauugug

SEQ ID NO: 1350597 - RNA, 19 nt, Homo sapiens
  misc_RNA (1)...(19): siRNA sense strand
gaaguauuugaguaucuug

SEQ ID NO: 1350598 - RNA, 19 nt, Homo sapiens
  misc_RNA (1)...(19): siRNA sense strand
ccucuugccacccauacua

SEQ ID NO: 1350599 - RNA, 19 nt, Homo sapiens
  misc_RNA (1)...(19): siRNA sense strand
gauaucaggauuuggaaaa

SEQ ID NO: 1350600 - RNA, 19 nt, Homo sapiens
  misc_RNA (1)...(19): siRNA sense strand
ggcuaccugucucagauga

SEQ ID NO: 1350601 - RNA, 19 nt, Homo sapiens
  misc_RNA (1)...(19): siRNA sense strand
ccaugguguugcugcugua

SEQ ID NO: 1350602 - RNA, 19 nt, Homo sapiens
  misc_RNA (1)...(19): siRNA sense strand
cagaugacgccuguuauag

SEQ ID NO: 1350603 - RNA, 19 nt, Homo sapiens
  misc_RNA (1)...(19): siRNA sense strand
gucauugcugugauuguua

SEQ ID NO: 1350604 - RNA, 19 nt, Homo sapiens
  misc_RNA (1)...(19): siRNA sense strand
uuggugaacgaguagauua

SEQ ID NO: 1350605 - RNA, 19 nt, Homo sapiens
  misc_RNA (1)...(19): siRNA sense strand
ggagccaccaacauuugaa

SEQ ID NO: 1350606 - RNA, 19 nt, Homo sapiens
  misc_RNA (1)...(19): siRNA sense strand
gcgcuuuccuggguugcuu

SEQ ID NO: 1350607 - RNA, 19 nt, Homo sapiens
  misc_RNA (1)...(19): siRNA sense strand
uacuacaaagcaacaguua

SEQ ID NO: 1350608 - RNA, 19 nt, Homo sapiens
  misc_RNA (1)...(19): siRNA sense strand
cuugaugcaguaacuuaua

SEQ ID NO: 1350609 - RNA, 19 nt, Homo sapiens
  misc_RNA (1)...(19): siRNA sense strand
aaacauguccauauauacg

SEQ ID NO: 1350610 - RNA, 19 nt, Homo sapiens
  misc_RNA (1)...(19): siRNA sense strand
guguaaaguggucaaaugu

SEQ ID NO: 1350611 - RNA, 19 nt, Homo sapiens
  misc_RNA (1)...(19): siRNA sense strand
cuuacgaguuugguuauca

SEQ ID NO: 1350612 - RNA, 19 nt, Homo sapiens
  misc_RNA (1)...(19): siRNA sense strand
uacgggauccuuuaaaugg

SEQ ID NO: 1350613 - RNA, 19 nt, Homo sapiens
  misc_RNA (1)...(19): siRNA sense strand
aaccaaaacccuacuauga

SEQ ID NO: 1350614 - RNA, 19 nt, Homo sapiens
  misc_RNA (1)...(19): siRNA sense strand
cccaauaugugaaaagguu

SEQ ID NO: 1350615 - RNA, 19 nt, Homo sapiens
  misc_RNA (1)...(19): siRNA sense strand
cgauggcagcgacacaauu

SEQ ID NO: 1350616 - RNA, 19 nt, Homo sapiens
  misc_RNA (1)...(19): siRNA sense strand
gauccauuuucacuuauug

SEQ ID NO: 1350617 - RNA, 19 nt, Homo sapiens
  misc_RNA (1)...(19): siRNA sense strand
uugaugcaguaacuuauag

SEQ ID NO: 1350618 - RNA, 19 nt, Homo sapiens
  misc_RNA (1)...(19): siRNA sense strand
guaucuugaugcaguaacu

SEQ ID NO: 1350619 - RNA, 19 nt, Homo sapiens
  misc_RNA (1)...(19): siRNA sense strand
caacauuugaagcuaugga

SEQ ID NO: 1350620 - RNA, 19 nt, Homo sapiens
  misc_RNA (1)...(19): siRNA sense strand
gagauuggugaacgaguag

SEQ ID NO: 1350621 - RNA, 19 nt, Homo sapiens
  misc_RNA (1)...(19): siRNA sense strand
ggagagagcacgauuuauu

SEQ ID NO: 1350622 - RNA, 19 nt, Homo sapiens
  misc_RNA (1)...(19): siRNA sense strand
agagaaacauguccauaua

SEQ ID NO: 1350623 - RNA, 19 nt, Homo sapiens
  misc_RNA (1)...(19): siRNA sense strand
cagaugcacuuuauuugua

SEQ ID NO: 1350624 - RNA, 19 nt, Homo sapiens
  misc_RNA (1)...(19): siRNA sense strand
ggacuuacgaguuugguua

SEQ ID NO: 1350625 - RNA, 19 nt, Homo sapiens
  misc_RNA (1)...(19): siRNA sense strand
aaacagauaucaggauuug

SEQ ID NO: 1350626 - RNA, 19 nt, Homo sapiens
  misc_RNA (1)...(19): siRNA sense strand
cuauggagcucauugguaa

SEQ ID NO: 1350627 - RNA, 19 nt, Homo sapiens
  misc_RNA (1)...(19): siRNA sense strand
aaacacaccuuuagugaag

SEQ ID NO: 1350628 - RNA, 19 nt, Homo sapiens
  misc_RNA (1)...(19): siRNA sense strand
gaacuuaaaggaucaguag

SEQ ID NO: 1350629 - RNA, 19 nt, Homo sapiens
  misc_RNA (1)...(19): siRNA sense strand
gaaaacagauaucaggauu

SEQ ID NO: 1350630 - RNA, 19 nt, Homo sapiens
  misc_RNA (1)...(19): siRNA sense strand
uaaaggaucaguagcaauu

SEQ ID NO: 1350631 - RNA, 19 nt, Homo sapiens
  misc_RNA (1)...(19): siRNA sense strand
aaaugggacuuacgaguuu

SEQ ID NO: 1350632 - RNA, 19 nt, Homo sapiens
  misc_RNA (1)...(19): siRNA sense strand
guuaucagaugcacuuuau

SEQ ID NO: 1350633 - RNA, 19 nt, Homo sapiens
  misc_RNA (1)...(19): siRNA sense strand
ugagauuggugaacgagua

SEQ ID NO: 1350634 - RNA, 19 nt, Homo sapiens
  misc_RNA (1)...(19): siRNA sense strand
gugaacgaguagauuauaa

SEQ ID NO: 1350635 - RNA, 19 nt, Homo sapiens
  misc_RNA (1)...(19): siRNA sense strand
gagagagcacgauuuauug

SEQ ID NO: 1350636 - RNA, 19 nt, Homo sapiens
  misc_RNA (1)...(19): siRNA sense strand
caaaugggacuuacgaguu

SEQ ID NO: 1350637 - RNA, 19 nt, Homo sapiens
  misc_RNA (1)...(19): siRNA sense strand
ggucauugcugugauuguu

SEQ ID NO: 1350638 - RNA, 19 nt, Homo sapiens
  misc_RNA (1)...(19): siRNA sense strand
ccagauccauuuucacuua

SEQ ID NO: 1350639 - RNA, 19 nt, Homo sapiens
  misc_RNA (1)...(19): siRNA sense strand
gaaggaauacuugacaguu

SEQ ID NO: 1350640 - RNA, 19 nt, Homo sapiens
  misc_RNA (1)...(19): siRNA sense strand
aaggaauacuugacaguuu

SEQ ID NO: 1350641 - RNA, 19 nt, Homo sapiens
  misc_RNA (1)...(19): siRNA sense strand
ucagaugacgccuguuaua

SEQ ID NO: 1350642 - RNA, 19 nt, Homo sapiens
  misc_RNA (1)...(19): siRNA sense strand
gaaaacacaccuuuaguga

SEQ ID NO: 1350643 - RNA, 19 nt, Homo sapiens
  misc_RNA (1)...(19): siRNA sense strand
gaugacgccuguuauagag

SEQ ID NO: 1350644 - RNA, 19 nt, Homo sapiens
  misc_RNA (1)...(19): siRNA sense strand
gagaaacauguccauauau

SEQ ID NO: 1350645 - RNA, 19 nt, Homo sapiens
  misc_RNA (1)...(19): siRNA sense strand
acgaguagauuauaagugu

SEQ ID NO: 1350646 - RNA, 19 nt, Homo sapiens
  misc_RNA (1)...(19): siRNA sense strand
cuacaaagcaacaguuaug

SEQ ID NO: 1350647 - RNA, 19 nt, Homo sapiens
  misc_RNA (1)...(19): siRNA sense strand
ccaccaacauuugaagcua

SEQ ID NO: 1350648 - RNA, 19 nt, Homo sapiens
  misc_RNA (1)...(19): siRNA sense strand
uauacgggauccuuuaaau

SEQ ID NO: 1350649 - RNA, 19 nt, Homo sapiens
  misc_RNA (1)...(19): siRNA sense strand
cgaguuugguuaucagaug

SEQ ID NO: 1350650 - RNA, 19 nt, Homo sapiens
  misc_RNA (1)...(19): siRNA sense strand
gaacgaguagauuauaagu

SEQ ID NO: 1350651 - RNA, 19 nt, Homo sapiens
  misc_RNA (1)...(19): siRNA sense strand
gugaggagccaccaacauu

SEQ ID NO: 1350652 - RNA, 19 nt, Homo sapiens
  misc_RNA (1)...(19): siRNA sense strand
gauggcagcgacacaauug

SEQ ID NO: 1350653 - RNA, 19 nt, Homo sapiens
  misc_RNA (1)...(19): siRNA sense strand
gcuauggagcucauuggua

SEQ ID NO: 1350654 - RNA, 19 nt, Homo sapiens
  misc_RNA (1)...(19): siRNA sense strand
gaggagccaccaacauuug

SEQ ID NO: 1350655 - RNA, 19 nt, Homo sapiens
  misc_RNA (1)...(19): siRNA sense strand
acacaccuuuagugaagua

SEQ ID NO: 1350656 - RNA, 19 nt, Homo sapiens
  misc_RNA (1)...(19): siRNA sense strand
ucucagaugacgccuguua

SEQ ID NO: 1350657 - RNA, 19 nt, Homo sapiens
  misc_RNA (1)...(19): siRNA sense strand
uagagaaacauguccauau

SEQ ID NO: 1350658 - RNA, 19 nt, Homo sapiens
  misc_RNA (1)...(19): siRNA sense strand
guuccaaagugucuuaaag

SEQ ID NO: 1350659 - RNA, 19 nt, Homo sapiens
  misc_RNA (1)...(19): siRNA sense strand
ggugaacgaguagauuaua

SEQ ID NO: 1350660 - RNA, 19 nt, Homo sapiens
  misc_RNA (1)...(19): siRNA sense strand
gaaguagaaguauuugagu

SEQ ID NO: 1350661 - RNA, 19 nt, Homo sapiens
  misc_RNA (1)...(19): siRNA sense strand
gaaacauguccauauauac

SEQ ID NO: 1350662 - RNA, 19 nt, Homo sapiens
  misc_RNA (1)...(19): siRNA sense strand
ugacgccuguuauagagaa

SEQ ID NO: 1350663 - RNA, 19 nt, Homo sapiens
  misc_RNA (1)...(19): siRNA sense strand
cgaguagauuauaagugua

SEQ ID NO: 1350664 - RNA, 19 nt, Homo sapiens
  misc_RNA (1)...(19): siRNA sense strand
gcacuuuauuuguaaugag

SEQ ID NO: 1350665 - RNA, 19 nt, Homo sapiens
  misc_RNA (1)...(19): siRNA sense strand
guagaaguauuugaguauc

SEQ ID NO: 1350666 - RNA, 19 nt, Homo sapiens
  misc_RNA (1)...(19): siRNA sense strand
guauuugaguaucuugaug

SEQ ID NO: 1350667 - RNA, 19 nt, Homo sapiens
  misc_RNA (1)...(19): siRNA sense strand
aggaauacuugacaguuug

SEQ ID NO: 1350668 - RNA, 19 nt, Homo sapiens
  misc_RNA (1)...(19): siRNA sense strand
ccaaaacccuacuaugaga

SEQ ID NO: 1350669 - RNA, 19 nt, Homo sapiens
  misc_RNA (1)...(19): siRNA sense strand
aguguaaaguggucaaaug

SEQ ID NO: 1350670 - RNA, 19 nt, Homo sapiens
  misc_RNA (1)...(19): siRNA sense strand
ccacccauacuauuuguga

SEQ ID NO: 1350671 - RNA, 19 nt, Homo sapiens
  misc_RNA (1)...(19): siRNA sense strand
caccaacauuugaagcuau

SEQ ID NO: 1350672 - RNA, 19 nt, Homo sapiens
  misc_RNA (1)...(19): siRNA sense strand
uuggagagagcacgauuua

SEQ ID NO: 1350673 - RNA, 19 nt, Homo sapiens
  misc_RNA (1)...(19): siRNA sense strand
gguuaucagaugcacuuua

SEQ ID NO: 1350674 - RNA, 19 nt, Homo sapiens
  misc_RNA (1)...(19): siRNA sense strand
ugaggagccaccaacauuu

SEQ ID NO: 1350675 - RNA, 19 nt, Homo sapiens
  misc_RNA (1)...(19): siRNA sense strand
ggaaggaauacuugacagu

SEQ ID NO: 1350676 - RNA, 19 nt, Homo sapiens
  misc_RNA (1)...(19): siRNA sense strand
gaggaaggaauacuugaca

SEQ ID NO: 1350677 - RNA, 19 nt, Homo sapiens
  misc_RNA (1)...(19): siRNA sense strand
ccaguuccaaagugucuua

SEQ ID NO: 1350678 - RNA, 19 nt, Homo sapiens
  misc_RNA (1)...(19): siRNA sense strand
ugaguaucuugaugcagua

SEQ ID NO: 1350679 - RNA, 19 nt, Homo sapiens
  misc_RNA (1)...(19): siRNA sense strand
caccuuuagugaaguagaa

SEQ ID NO: 1350680 - RNA, 19 nt, Homo sapiens
  misc_RNA (1)...(19): siRNA sense strand
acagauaucaggauuugga

SEQ ID NO: 1350681 - RNA, 19 nt, Homo sapiens
  misc_RNA (1)...(19): siRNA sense strand
ucauugcugugauuguuau

SEQ ID NO: 1350682 - RNA, 19 nt, Homo sapiens
  misc_RNA (1)...(19): siRNA sense strand
ucagaugcacuuuauuugu

SEQ ID NO: 1350683 - RNA, 19 nt, Homo sapiens
  misc_RNA (1)...(19): siRNA sense strand
gugcugcuccagaguguaa

SEQ ID NO: 1350684 - RNA, 19 nt, Homo sapiens
  misc_RNA (1)...(19): siRNA sense strand
ggaaaacacaccuuuagug

SEQ ID NO: 1350685 - RNA, 19 nt, Homo sapiens
  misc_RNA (1)...(19): siRNA sense strand
aaggaucaguagcaauuug

SEQ ID NO: 1350686 - RNA, 19 nt, Homo sapiens
  misc_RNA (1)...(19): siRNA sense strand
uauauacgggauccuuuaa

SEQ ID NO: 1350687 - RNA, 19 nt, Homo sapiens
  misc_RNA (1)...(19): siRNA sense strand
ugaaguagaaguauuugag

SEQ ID NO: 1350688 - RNA, 19 nt, Homo sapiens
  misc_RNA (1)...(19): siRNA sense strand
cuugacaguuuggauguuu

SEQ ID NO: 1350689 - RNA, 19 nt, Homo sapiens
  misc_RNA (1)...(19): siRNA sense strand
cauauauacgggauccuuu

SEQ ID NO: 1350690 - RNA, 19 nt, Homo sapiens
  misc_RNA (1)...(19): siRNA sense strand
auauauacgggauccuuua

SEQ ID NO: 1350691 - RNA, 19 nt, Homo sapiens
  misc_RNA (1)...(19): siRNA sense strand
cuuaaaggaucaguagcaa

SEQ ID NO: 1350692 - RNA, 19 nt, Homo sapiens
  misc_RNA (1)...(19): siRNA sense strand
uaaaccugaggaaggaaua

SEQ ID NO: 1350693 - RNA, 19 nt, Homo sapiens
  misc_RNA (1)...(19): siRNA sense strand
agaugacgccuguuauaga

SEQ ID NO: 1350694 - RNA, 19 nt, Homo sapiens
  misc_RNA (1)...(19): siRNA sense strand
ugugauuguuauugccaua

SEQ ID NO: 1350695 - RNA, 19 nt, Homo sapiens
  misc_RNA (1)...(19): siRNA sense strand
gagagcacgauuuauugug

SEQ ID NO: 1350696 - RNA, 19 nt, Homo sapiens
  misc_RNA (1)...(19): siRNA sense strand
gaaguauuugaguaucuug

SEQ ID NO: 1350697 - RNA, 19 nt, Homo sapiens
  misc_RNA (1)...(19): siRNA sense strand
ggcuaccugucucagauga

SEQ ID NO: 1350698 - RNA, 19 nt, Homo sapiens
  misc_RNA (1)...(19): siRNA sense strand
gauaucaggauuuggaaaa

SEQ ID NO: 1350699 - RNA, 19 nt, Homo sapiens
  misc_RNA (1)...(19): siRNA sense strand
ccucuugccacccauacua

SEQ ID NO: 1350700 - RNA, 19 nt, Homo sapiens
  misc_RNA (1)...(19): siRNA sense strand
ccaugguguugcugcugua

SEQ ID NO: 1350701 - RNA, 19 nt, Homo sapiens
  misc_RNA (1)...(19): siRNA sense strand
cagaugacgccuguuauag

SEQ ID NO: 1350702 - RNA, 19 nt, Homo sapiens
  misc_RNA (1)...(19): siRNA sense strand
uuggugaacgaguagauua

SEQ ID NO: 1350703 - RNA, 19 nt, Homo sapiens
  misc_RNA (1)...(19): siRNA sense strand
gucauugcugugauuguua

SEQ ID NO: 1350704 - RNA, 19 nt, Homo sapiens
  misc_RNA (1)...(19): siRNA sense strand
ggagccaccaacauuugaa

SEQ ID NO: 1350705 - RNA, 19 nt, Homo sapiens
  misc_RNA (1)...(19): siRNA sense strand
gcgcuuuccuggguugcuu

SEQ ID NO: 1350706 - RNA, 19 nt, Homo sapiens
  misc_RNA (1)...(19): siRNA sense strand
uacuacaaagcaacaguua

SEQ ID NO: 1350707 - RNA, 19 nt, Homo sapiens
  misc_RNA (1)...(19): siRNA sense strand
cuugaugcaguaacuuaua

SEQ ID NO: 1350708 - RNA, 19 nt, Homo sapiens
  misc_RNA (1)...(19): siRNA sense strand
aaacauguccauauauacg

SEQ ID NO: 1350709 - RNA, 19 nt, Homo sapiens
  misc_RNA (1)...(19): siRNA sense strand
guguaaaguggucaaaugu

SEQ ID NO: 1350710 - RNA, 19 nt, Homo sapiens
  misc_RNA (1)...(19): siRNA sense strand
cuuacgaguuugguuauca

SEQ ID NO: 1350711 - RNA, 19 nt, Homo sapiens
  misc_RNA (1)...(19): siRNA sense strand
uacgggauccuuuaaaugg

SEQ ID NO: 1350712 - RNA, 19 nt, Homo sapiens
  misc_RNA (1)...(19): siRNA sense strand
aaccaaaacccuacuauga

SEQ ID NO: 1350713 - RNA, 19 nt, Homo sapiens
  misc_RNA (1)...(19): siRNA sense strand
cccaauaugugaaaagguu

SEQ ID NO: 1350714 - RNA, 19 nt, Homo sapiens
  misc_RNA (1)...(19): siRNA sense strand
cgauggcagcgacacaauu

SEQ ID NO: 1350715 - RNA, 19 nt, Homo sapiens
  misc_RNA (1)...(19): siRNA sense strand
gauccauuuucacuuauug

SEQ ID NO: 1350716 - RNA, 19 nt, Homo sapiens
  misc_RNA (1)...(19): siRNA sense strand
uugaugcaguaacuuauag

SEQ ID NO: 1350717 - RNA, 19 nt, Homo sapiens
  misc_RNA (1)...(19): siRNA sense strand
guaucuugaugcaguaacu

SEQ ID NO: 1350718 - RNA, 19 nt, Homo sapiens
  misc_RNA (1)...(19): siRNA sense strand
caacauuugaagcuaugga

SEQ ID NO: 1350719 - RNA, 19 nt, Homo sapiens
  misc_RNA (1)...(19): siRNA sense strand
gagauuggugaacgaguag

SEQ ID NO: 1350720 - RNA, 19 nt, Homo sapiens
  misc_RNA (1)...(19): siRNA sense strand
ggagagagcacgauuuauu

SEQ ID NO: 1350721 - RNA, 19 nt, Homo sapiens
  misc_RNA (1)...(19): siRNA sense strand
agagaaacauguccauaua

SEQ ID NO: 1350722 - RNA, 19 nt, Homo sapiens
  misc_RNA (1)...(19): siRNA sense strand
cagaugcacuuuauuugua

SEQ ID NO: 1350723 - RNA, 19 nt, Homo sapiens
  misc_RNA (1)...(19): siRNA sense strand
ggacuuacgaguuugguua

SEQ ID NO: 1350724 - RNA, 19 nt, Homo sapiens
  misc_RNA (1)...(19): siRNA sense strand
aaacagauaucaggauuug

SEQ ID NO: 1350725 - RNA, 19 nt, Homo sapiens
  misc_RNA (1)...(19): siRNA sense strand
cuauggagcucauugguaa

SEQ ID NO: 1350726 - RNA, 19 nt, Homo sapiens
  misc_RNA (1)...(19): siRNA sense strand
aaacacaccuuuagugaag

SEQ ID NO: 1350727 - RNA, 19 nt, Homo sapiens
  misc_RNA (1)...(19): siRNA sense strand
gaacuuaaaggaucaguag

SEQ ID NO: 1350728 - RNA, 19 nt, Homo sapiens
  misc_RNA (1)...(19): siRNA sense strand
gaaaacagauaucaggauu

SEQ ID NO: 1350729 - RNA, 19 nt, Homo sapiens
  misc_RNA (1)...(19): siRNA sense strand
uaaaggaucaguagcaauu

SEQ ID NO: 1350730 - RNA, 19 nt, Homo sapiens
  misc_RNA (1)...(19): siRNA sense strand
aaaugggacuuacgaguuu

SEQ ID NO: 1350731 - RNA, 19 nt, Homo sapiens
  misc_RNA (1)...(19): siRNA sense strand
guuaucagaugcacuuuau

SEQ ID NO: 1350732 - RNA, 19 nt, Homo sapiens
  misc_RNA (1)...(19): siRNA sense strand
gagcugaauaugccacuua

SEQ ID NO: 1350733 - RNA, 19 nt, Homo sapiens
  misc_RNA (1)...(19): siRNA sense strand
ugagauuggugaacgagua

SEQ ID NO: 1350734 - RNA, 19 nt, Homo sapiens
  misc_RNA (1)...(19): siRNA sense strand
gugaacgaguagauuauaa

SEQ ID NO: 1350735 - RNA, 19 nt, Homo sapiens
  misc_RNA (1)...(19): siRNA sense strand
gagagagcacgauuuauug

SEQ ID NO: 1350736 - RNA, 19 nt, Homo sapiens
  misc_RNA (1)...(19): siRNA sense strand
caaaugggacuuacgaguu

SEQ ID NO: 1350737 - RNA, 19 nt, Homo sapiens
  misc_RNA (1)...(19): siRNA sense strand
ggucauugcugugauuguu

SEQ ID NO: 1350738 - RNA, 19 nt, Homo sapiens
  misc_RNA (1)...(19): siRNA sense strand
ccagauccauuuucacuua

SEQ ID NO: 1350739 - RNA, 19 nt, Homo sapiens
  misc_RNA (1)...(19): siRNA sense strand
gaaggaauacuugacaguu

SEQ ID NO: 1350740 - RNA, 19 nt, Homo sapiens
  misc_RNA (1)...(19): siRNA sense strand
aaggaauacuugacaguuu

SEQ ID NO: 1350741 - RNA, 19 nt, Homo sapiens
  misc_RNA (1)...(19): siRNA sense strand
ucagaugacgccuguuaua

SEQ ID NO: 1350742 - RNA, 19 nt, Homo sapiens
  misc_RNA (1)...(19): siRNA sense strand
gaaaacacaccuuuaguga

SEQ ID NO: 1350743 - RNA, 19 nt, Homo sapiens
  misc_RNA (1)...(19): siRNA sense strand
gaugacgccuguuauagag

SEQ ID NO: 1350744 - RNA, 19 nt, Homo sapiens
  misc_RNA (1)...(19): siRNA sense strand
gagaaacauguccauauau

SEQ ID NO: 1350745 - RNA, 19 nt, Homo sapiens
  misc_RNA (1)...(19): siRNA sense strand
ccacuuaccagacuaaauc

SEQ ID NO: 1350746 - RNA, 19 nt, Homo sapiens
  misc_RNA (1)...(19): siRNA sense strand
acgaguagauuauaagugu

SEQ ID NO: 1350747 - RNA, 19 nt, Homo sapiens
  misc_RNA (1)...(19): siRNA sense strand
cuacaaagcaacaguuaug

SEQ ID NO: 1350748 - RNA, 19 nt, Homo sapiens
  misc_RNA (1)...(19): siRNA sense strand
ccaccaacauuugaagcua

SEQ ID NO: 1350749 - RNA, 19 nt, Homo sapiens
  misc_RNA (1)...(19): siRNA sense strand
uauacgggauccuuuaaau

SEQ ID NO: 1350750 - RNA, 19 nt, Homo sapiens
  misc_RNA (1)...(19): siRNA sense strand
cgaguuugguuaucagaug

SEQ ID NO: 1350751 - RNA, 19 nt, Homo sapiens
  misc_RNA (1)...(19): siRNA sense strand
gaacgaguagauuauaagu

SEQ ID NO: 1350752 - RNA, 19 nt, Homo sapiens
  misc_RNA (1)...(19): siRNA sense strand
gugaggagccaccaacauu

SEQ ID NO: 1350753 - RNA, 19 nt, Homo sapiens
  misc_RNA (1)...(19): siRNA sense strand
gauggcagcgacacaauug

SEQ ID NO: 1350754 - RNA, 19 nt, Homo sapiens
  misc_RNA (1)...(19): siRNA sense strand
ucucagaugacgccuguua

SEQ ID NO: 1350755 - RNA, 19 nt, Homo sapiens
  misc_RNA (1)...(19): siRNA sense strand
gaggagccaccaacauuug

SEQ ID NO: 1350756 - RNA, 19 nt, Homo sapiens
  misc_RNA (1)...(19): siRNA sense strand
gcuauggagcucauuggua

SEQ ID NO: 1350757 - RNA, 19 nt, Homo sapiens
  misc_RNA (1)...(19): siRNA sense strand
acacaccuuuagugaagua

SEQ ID NO: 1350758 - RNA, 19 nt, Homo sapiens
  misc_RNA (1)...(19): siRNA sense strand
uagagaaacauguccauau

SEQ ID NO: 1350759 - RNA, 19 nt, Homo sapiens
  misc_RNA (1)...(19): siRNA sense strand
guuccaaagugucuuaaag

SEQ ID NO: 1350760 - RNA, 19 nt, Homo sapiens
  misc_RNA (1)...(19): siRNA sense strand
ggugaacgaguagauuaua

SEQ ID NO: 1350761 - RNA, 19 nt, Homo sapiens
  misc_RNA (1)...(19): siRNA sense strand
gaaguagaaguauuugagu

SEQ ID NO: 1350762 - RNA, 19 nt, Homo sapiens
  misc_RNA (1)...(19): siRNA sense strand
gaaacauguccauauauac

SEQ ID NO: 1350763 - RNA, 19 nt, Homo sapiens
  misc_RNA (1)...(19): siRNA sense strand
ugacgccuguuauagagaa

SEQ ID NO: 1350764 - RNA, 19 nt, Homo sapiens
  misc_RNA (1)...(19): siRNA sense strand
cgaguagauuauaagugua

SEQ ID NO: 1350765 - RNA, 19 nt, Homo sapiens
  misc_RNA (1)...(19): siRNA sense strand
gcacuuuauuuguaaugag

SEQ ID NO: 1350766 - RNA, 19 nt, Homo sapiens
  misc_RNA (1)...(19): siRNA sense strand
guagaaguauuugaguauc

SEQ ID NO: 1350767 - RNA, 19 nt, Homo sapiens
  misc_RNA (1)...(19): siRNA sense strand
guauuugaguaucuugaug

SEQ ID NO: 1350768 - RNA, 19 nt, Homo sapiens
  misc_RNA (1)...(19): siRNA sense strand
aggaauacuugacaguuug

SEQ ID NO: 1350769 - RNA, 19 nt, Homo sapiens
  misc_RNA (1)...(19): siRNA sense strand
ccaaaacccuacuaugaga

SEQ ID NO: 1350770 - RNA, 19 nt, Homo sapiens
  misc_RNA (1)...(19): siRNA sense strand
aguguaaaguggucaaaug

SEQ ID NO: 1350771 - RNA, 19 nt, Homo sapiens
  misc_RNA (1)...(19): siRNA sense strand
ccacccauacuauuuguga

SEQ ID NO: 1350772 - RNA, 19 nt, Homo sapiens
  misc_RNA (1)...(19): siRNA sense strand
uuggagagagcacgauuua

SEQ ID NO: 1350773 - RNA, 19 nt, Homo sapiens
  misc_RNA (1)...(19): siRNA sense strand
gguuaucagaugcacuuua

SEQ ID NO: 1350774 - RNA, 19 nt, Homo sapiens
  misc_RNA (1)...(19): siRNA sense strand
caccaacauuugaagcuau

SEQ ID NO: 1350775 - RNA, 19 nt, Homo sapiens
  misc_RNA (1)...(19): siRNA sense strand
ugaggagccaccaacauuu

SEQ ID NO: 1350776 - RNA, 19 nt, Homo sapiens
  misc_RNA (1)...(19): siRNA sense strand
ggaaggaauacuugacagu

SEQ ID NO: 1350777 - RNA, 19 nt, Homo sapiens
  misc_RNA (1)...(19): siRNA sense strand
gaggaaggaauacuugaca

SEQ ID NO: 1350778 - RNA, 19 nt, Homo sapiens
  misc_RNA (1)...(19): siRNA sense strand
ccaguuccaaagugucuua

SEQ ID NO: 1350779 - RNA, 19 nt, Homo sapiens
  misc_RNA (1)...(19): siRNA sense strand
ugaguaucuugaugcagua

SEQ ID NO: 1350780 - RNA, 19 nt, Homo sapiens
  misc_RNA (1)...(19): siRNA sense strand
caccuuuagugaaguagaa

SEQ ID NO: 1350781 - RNA, 19 nt, Homo sapiens
  misc_RNA (1)...(19): siRNA sense strand
acagauaucaggauuugga

SEQ ID NO: 1350782 - RNA, 19 nt, Homo sapiens
  misc_RNA (1)...(19): siRNA sense strand
ucauugcugugauuguuau

SEQ ID NO: 1350783 - RNA, 19 nt, Homo sapiens
  misc_RNA (1)...(19): siRNA sense strand
ucagaugcacuuuauuugu

SEQ ID NO: 1350784 - RNA, 19 nt, Homo sapiens
  misc_RNA (1)...(19): siRNA sense strand
gugcugcuccagaguguaa

SEQ ID NO: 1350785 - RNA, 19 nt, Homo sapiens
  misc_RNA (1)...(19): siRNA sense strand
ggaaaacacaccuuuagug

SEQ ID NO: 1350786 - RNA, 19 nt, Homo sapiens
  misc_RNA (1)...(19): siRNA sense strand
aaggaucaguagcaauuug

SEQ ID NO: 1350787 - RNA, 19 nt, Homo sapiens
  misc_RNA (1)...(19): siRNA sense strand
uauauacgggauccuuuaa

SEQ ID NO: 1350788 - RNA, 19 nt, Homo sapiens
  misc_RNA (1)...(19): siRNA sense strand
ugaaguagaaguauuugag

SEQ ID NO: 1350789 - RNA, 19 nt, Homo sapiens
  misc_RNA (1)...(19): siRNA sense strand
cuugacaguuuggauguuu

SEQ ID NO: 1350790 - RNA, 19 nt, Homo sapiens
  misc_RNA (1)...(19): siRNA sense strand
cauauauacgggauccuuu

SEQ ID NO: 1350791 - RNA, 19 nt, Homo sapiens
  misc_RNA (1)...(19): siRNA sense strand
auauauacgggauccuuua

SEQ ID NO: 1350792 - RNA, 19 nt, Homo sapiens
  misc_RNA (1)...(19): siRNA sense strand
cuuaaaggaucaguagcaa

SEQ ID NO: 1350793 - RNA, 19 nt, Homo sapiens
  misc_RNA (1)...(19): siRNA sense strand
uaaaccugaggaaggaaua

SEQ ID NO: 1350794 - RNA, 19 nt, Homo sapiens
  misc_RNA (1)...(19): siRNA sense strand
agaugacgccuguuauaga

SEQ ID NO: 1350795 - RNA, 19 nt, Homo sapiens
  misc_RNA (1)...(19): siRNA sense strand
ugugauuguuauugccaua

SEQ ID NO: 1350796 - RNA, 19 nt, Homo sapiens
  misc_RNA (1)...(19): siRNA sense strand
gagagcacgauuuauugug

SEQ ID NO: 1350797 - RNA, 19 nt, Homo sapiens
  misc_RNA (1)...(19): siRNA sense strand
gaaguauuugaguaucuug

SEQ ID NO: 1350798 - RNA, 19 nt, Homo sapiens
  misc_RNA (1)...(19): siRNA sense strand
ggcuaccugucucagauga

SEQ ID NO: 1350799 - RNA, 19 nt, Homo sapiens
  misc_RNA (1)...(19): siRNA sense strand
gauaucaggauuuggaaaa

SEQ ID NO: 1350800 - RNA, 19 nt, Homo sapiens
  misc_RNA (1)...(19): siRNA sense strand
ccucuugccacccauacua

SEQ ID NO: 1350801 - RNA, 19 nt, Homo sapiens
  misc_RNA (1)...(19): siRNA sense strand
ccaugguguugcugcugua

SEQ ID NO: 1350802 - RNA, 19 nt, Homo sapiens
  misc_RNA (1)...(19): siRNA sense strand
cagaugacgccuguuauag

SEQ ID NO: 1350803 - RNA, 19 nt, Homo sapiens
  misc_RNA (1)...(19): siRNA sense strand
cagaugguggagcugaaua

SEQ ID NO: 1350804 - RNA, 19 nt, Homo sapiens
  misc_RNA (1)...(19): siRNA sense strand
gucauugcugugauuguua

SEQ ID NO: 1350805 - RNA, 19 nt, Homo sapiens
  misc_RNA (1)...(19): siRNA sense strand
ggagccaccaacauuugaa

SEQ ID NO: 1350806 - RNA, 19 nt, Homo sapiens
  misc_RNA (1)...(19): siRNA sense strand
uuggugaacgaguagauua

SEQ ID NO: 1350807 - RNA, 19 nt, Homo sapiens
  misc_RNA (1)...(19): siRNA sense strand
gcgcuuuccuggguugcuu

SEQ ID NO: 1350808 - RNA, 19 nt, Homo sapiens
  misc_RNA (1)...(19): siRNA sense strand
uacuacaaagcaacaguua

SEQ ID NO: 1350809 - RNA, 19 nt, Homo sapiens
  misc_RNA (1)...(19): siRNA sense strand
cuugaugcaguaacuuaua

SEQ ID NO: 1350810 - RNA, 19 nt, Homo sapiens
  misc_RNA (1)...(19): siRNA sense strand
aaacauguccauauauacg

SEQ ID NO: 1350811 - RNA, 19 nt, Homo sapiens
  misc_RNA (1)...(19): siRNA sense strand
guguaaaguggucaaaugu

SEQ ID NO: 1350812 - RNA, 19 nt, Homo sapiens
  misc_RNA (1)...(19): siRNA sense strand
cuuacgaguuugguuauca

SEQ ID NO: 1350813 - RNA, 19 nt, Homo sapiens
  misc_RNA (1)...(19): siRNA sense strand
uacgggauccuuuaaaugg

SEQ ID NO: 1350814 - RNA, 19 nt, Homo sapiens
  misc_RNA (1)...(19): siRNA sense strand
gcagaugguggagcugaau

SEQ ID NO: 1350815 - RNA, 19 nt, Homo sapiens
  misc_RNA (1)...(19): siRNA sense strand
aaccaaaacccuacuauga

SEQ ID NO: 1350816 - RNA, 19 nt, Homo sapiens
  misc_RNA (1)...(19): siRNA sense strand
uugaugcaguaacuuauag

SEQ ID NO: 1350817 - RNA, 19 nt, Homo sapiens
  misc_RNA (1)...(19): siRNA sense strand
ggagcugaauaugccacuu

SEQ ID NO: 1350818 - RNA, 19 nt, Homo sapiens
  misc_RNA (1)...(19): siRNA sense strand
cgauggcagcgacacaauu

SEQ ID NO: 1350819 - RNA, 19 nt, Homo sapiens
  misc_RNA (1)...(19): siRNA sense strand
gauccauuuucacuuauug

SEQ ID NO: 1350820 - RNA, 19 nt, Homo sapiens
  misc_RNA (1)...(19): siRNA sense strand
ggagagagcacgauuuauu

SEQ ID NO: 1350821 - RNA, 19 nt, Homo sapiens
  misc_RNA (1)...(19): siRNA sense strand
agagaaacauguccauaua

SEQ ID NO: 1350822 - RNA, 19 nt, Homo sapiens
  misc_RNA (1)...(19): siRNA sense strand
cagaugcacuuuauuugua

SEQ ID NO: 1350823 - RNA, 19 nt, Homo sapiens
  misc_RNA (1)...(19): siRNA sense strand
ggacuuacgaguuugguua

SEQ ID NO: 1350824 - RNA, 19 nt, Homo sapiens
  misc_RNA (1)...(19): siRNA sense strand
aaacagauaucaggauuug

SEQ ID NO: 1350825 - RNA, 19 nt, Homo sapiens
  misc_RNA (1)...(19): siRNA sense strand
cuauggagcucauugguaa

SEQ ID NO: 1350826 - RNA, 19 nt, Homo sapiens
  misc_RNA (1)...(19): siRNA sense strand
aaacacaccuuuagugaag

SEQ ID NO: 1350827 - RNA, 19 nt, Homo sapiens
  misc_RNA (1)...(19): siRNA sense strand
gaacuuaaaggaucaguag

SEQ ID NO: 1350828 - RNA, 19 nt, Homo sapiens
  misc_RNA (1)...(19): siRNA sense strand
gaaaacagauaucaggauu

SEQ ID NO: 1350829 - RNA, 19 nt, Homo sapiens
  misc_RNA (1)...(19): siRNA sense strand
uaaaggaucaguagcaauu

SEQ ID NO: 1350830 - RNA, 19 nt, Homo sapiens
  misc_RNA (1)...(19): siRNA sense strand
aaaugggacuuacgaguuu

SEQ ID NO: 1350831 - RNA, 19 nt, Homo sapiens
  misc_RNA (1)...(19): siRNA sense strand
guuaucagaugcacuuuau

SEQ ID NO: 1350832 - RNA, 19 nt, Homo sapiens
  misc_RNA (1)...(19): siRNA sense strand
ugagauuggugaacgagua

SEQ ID NO: 1350833 - RNA, 19 nt, Homo sapiens
  misc_RNA (1)...(19): siRNA sense strand
gugaacgaguagauuauaa

SEQ ID NO: 1350834 - RNA, 19 nt, Homo sapiens
  misc_RNA (1)...(19): siRNA sense strand
gagagagcacgauuuauug

SEQ ID NO: 1350835 - RNA, 19 nt, Homo sapiens
  misc_RNA (1)...(19): siRNA sense strand
caaaugggacuuacgaguu

SEQ ID NO: 1350836 - RNA, 19 nt, Homo sapiens
  misc_RNA (1)...(19): siRNA sense strand
ggucauugcugugauuguu

SEQ ID NO: 1350837 - RNA, 19 nt, Homo sapiens
  misc_RNA (1)...(19): siRNA sense strand
ccagauccauuuucacuua

SEQ ID NO: 1350838 - RNA, 19 nt, Homo sapiens
  misc_RNA (1)...(19): siRNA sense strand
gaaggaauacuugacaguu

SEQ ID NO: 1350839 - RNA, 19 nt, Homo sapiens
  misc_RNA (1)...(19): siRNA sense strand
aaggaauacuugacaguuu

SEQ ID NO: 1350840 - RNA, 19 nt, Homo sapiens
  misc_RNA (1)...(19): siRNA sense strand
ucagaugacgccuguuaua

SEQ ID NO: 1350841 - RNA, 19 nt, Homo sapiens
  misc_RNA (1)...(19): siRNA sense strand
gaaaacacaccuuuaguga

SEQ ID NO: 1350842 - RNA, 19 nt, Homo sapiens
  misc_RNA (1)...(19): siRNA sense strand
gaugacgccuguuauagag

SEQ ID NO: 1350843 - RNA, 19 nt, Homo sapiens
  misc_RNA (1)...(19): siRNA sense strand
gagaaacauguccauauau

SEQ ID NO: 1350844 - RNA, 19 nt, Homo sapiens
  misc_RNA (1)...(19): siRNA sense strand
acgaguagauuauaagugu

SEQ ID NO: 1350845 - RNA, 19 nt, Homo sapiens
  misc_RNA (1)...(19): siRNA sense strand
cuacaaagcaacaguuaug

SEQ ID NO: 1350846 - RNA, 19 nt, Homo sapiens
  misc_RNA (1)...(19): siRNA sense strand
ccaccaacauuugaagcua

SEQ ID NO: 1350847 - RNA, 19 nt, Homo sapiens
  misc_RNA (1)...(19): siRNA sense strand
uauacgggauccuuuaaau

SEQ ID NO: 1350848 - RNA, 19 nt, Homo sapiens
  misc_RNA (1)...(19): siRNA sense strand
cgaguuugguuaucagaug

SEQ ID NO: 1350849 - RNA, 19 nt, Homo sapiens
  misc_RNA (1)...(19): siRNA sense strand
gaacgaguagauuauaagu

SEQ ID NO: 1350850 - RNA, 19 nt, Homo sapiens
  misc_RNA (1)...(19): siRNA sense strand
gugaggagccaccaacauu

SEQ ID NO: 1350851 - RNA, 19 nt, Homo sapiens
  misc_RNA (1)...(19): siRNA sense strand
gauggcagcgacacaauug

SEQ ID NO: 1350852 - RNA, 19 nt, Homo sapiens
  misc_RNA (1)...(19): siRNA sense strand
gcuauggagcucauuggua

SEQ ID NO: 1350853 - RNA, 19 nt, Homo sapiens
  misc_RNA (1)...(19): siRNA sense strand
gaggagccaccaacauuug

SEQ ID NO: 1350854 - RNA, 19 nt, Homo sapiens
  misc_RNA (1)...(19): siRNA sense strand
acacaccuuuagugaagua

SEQ ID NO: 1350855 - RNA, 19 nt, Homo sapiens
  misc_RNA (1)...(19): siRNA sense strand
ucucagaugacgccuguua

SEQ ID NO: 1350856 - RNA, 19 nt, Homo sapiens
  misc_RNA (1)...(19): siRNA sense strand
uagagaaacauguccauau

SEQ ID NO: 1350857 - RNA, 19 nt, Homo sapiens
  misc_RNA (1)...(19): siRNA sense strand
guuccaaagugucuuaaag

SEQ ID NO: 1350858 - RNA, 19 nt, Homo sapiens
  misc_RNA (1)...(19): siRNA sense strand
ggugaacgaguagauuaua

SEQ ID NO: 1350859 - RNA, 19 nt, Homo sapiens
  misc_RNA (1)...(19): siRNA sense strand
gaaguagaaguauuugagu

SEQ ID NO: 1350860 - RNA, 19 nt, Homo sapiens
  misc_RNA (1)...(19): siRNA sense strand
gaaacauguccauauauac

SEQ ID NO: 1350861 - RNA, 19 nt, Homo sapiens
  misc_RNA (1)...(19): siRNA sense strand
ugacgccuguuauagagaa

SEQ ID NO: 1350862 - RNA, 19 nt, Homo sapiens
  misc_RNA (1)...(19): siRNA sense strand
cgaguagauuauaagugua

SEQ ID NO: 1350863 - RNA, 19 nt, Homo sapiens
  misc_RNA (1)...(19): siRNA sense strand
gcacuuuauuuguaaugag

SEQ ID NO: 1350864 - RNA, 19 nt, Homo sapiens
  misc_RNA (1)...(19): siRNA sense strand
guagaaguauuugaguauc

SEQ ID NO: 1350865 - RNA, 19 nt, Homo sapiens
  misc_RNA (1)...(19): siRNA sense strand
guauuugaguaucuugaug

SEQ ID NO: 1350866 - RNA, 19 nt, Homo sapiens
  misc_RNA (1)...(19): siRNA sense strand
aggaauacuugacaguuug

SEQ ID NO: 1350867 - RNA, 19 nt, Homo sapiens
  misc_RNA (1)...(19): siRNA sense strand
ccaaaacccuacuaugaga

SEQ ID NO: 1350868 - RNA, 19 nt, Homo sapiens
  misc_RNA (1)...(19): siRNA sense strand
aguguaaaguggucaaaug

SEQ ID NO: 1350869 - RNA, 19 nt, Homo sapiens
  misc_RNA (1)...(19): siRNA sense strand
ccacccauacuauuuguga

SEQ ID NO: 1350870 - RNA, 19 nt, Homo sapiens
  misc_RNA (1)...(19): siRNA sense strand
caccaacauuugaagcuau

SEQ ID NO: 1350871 - RNA, 19 nt, Homo sapiens
  misc_RNA (1)...(19): siRNA sense strand
uuggagagagcacgauuua

SEQ ID NO: 1350872 - RNA, 19 nt, Homo sapiens
  misc_RNA (1)...(19): siRNA sense strand
gguuaucagaugcacuuua

SEQ ID NO: 1350873 - RNA, 19 nt, Homo sapiens
  misc_RNA (1)...(19): siRNA sense strand
ugaggagccaccaacauuu

SEQ ID NO: 1350874 - RNA, 19 nt, Homo sapiens
  misc_RNA (1)...(19): siRNA sense strand
ggaaggaauacuugacagu

SEQ ID NO: 1350875 - RNA, 19 nt, Homo sapiens
  misc_RNA (1)...(19): siRNA sense strand
gaggaaggaauacuugaca

SEQ ID NO: 1350876 - RNA, 19 nt, Homo sapiens
  misc_RNA (1)...(19): siRNA sense strand
ccaguuccaaagugucuua

SEQ ID NO: 1350877 - RNA, 19 nt, Homo sapiens
  misc_RNA (1)...(19): siRNA sense strand
ugaguaucuugaugcagua

SEQ ID NO: 1350878 - RNA, 19 nt, Homo sapiens
  misc_RNA (1)...(19): siRNA sense strand
caccuuuagugaaguagaa

SEQ ID NO: 1350879 - RNA, 19 nt, Homo sapiens
  misc_RNA (1)...(19): siRNA sense strand
acagauaucaggauuugga

SEQ ID NO: 1350880 - RNA, 19 nt, Homo sapiens
  misc_RNA (1)...(19): siRNA sense strand
ucauugcugugauuguuau

SEQ ID NO: 1350881 - RNA, 19 nt, Homo sapiens
  misc_RNA (1)...(19): siRNA sense strand
ucagaugcacuuuauuugu

SEQ ID NO: 1350882 - RNA, 19 nt, Homo sapiens
  misc_RNA (1)...(19): siRNA sense strand
gugcugcuccagaguguaa

SEQ ID NO: 1350883 - RNA, 19 nt, Homo sapiens
  misc_RNA (1)...(19): siRNA sense strand
ggaaaacacaccuuuagug

SEQ ID NO: 1350884 - RNA, 19 nt, Homo sapiens
  misc_RNA (1)...(19): siRNA sense strand
aaggaucaguagcaauuug

SEQ ID NO: 1350885 - RNA, 19 nt, Homo sapiens
  misc_RNA (1)...(19): siRNA sense strand
uauauacgggauccuuuaa

SEQ ID NO: 1350886 - RNA, 19 nt, Homo sapiens
  misc_RNA (1)...(19): siRNA sense strand
ugaaguagaaguauuugag

SEQ ID NO: 1350887 - RNA, 19 nt, Homo sapiens
  misc_RNA (1)...(19): siRNA sense strand
cuugacaguuuggauguuu

SEQ ID NO: 1350888 - RNA, 19 nt, Homo sapiens
  misc_RNA (1)...(19): siRNA sense strand
cauauauacgggauccuuu

SEQ ID NO: 1350889 - RNA, 19 nt, Homo sapiens
  misc_RNA (1)...(19): siRNA sense strand
auauauacgggauccuuua

SEQ ID NO: 1350890 - RNA, 19 nt, Homo sapiens
  misc_RNA (1)...(19): siRNA sense strand
cuuaaaggaucaguagcaa

SEQ ID NO: 1350891 - RNA, 19 nt, Homo sapiens
  misc_RNA (1)...(19): siRNA sense strand
uaaaccugaggaaggaaua

SEQ ID NO: 1350892 - RNA, 19 nt, Homo sapiens
  misc_RNA (1)...(19): siRNA sense strand
agaugacgccuguuauaga

SEQ ID NO: 1350893 - RNA, 19 nt, Homo sapiens
  misc_RNA (1)...(19): siRNA sense strand
ugugauuguuauugccaua

SEQ ID NO: 1350894 - RNA, 19 nt, Homo sapiens
  misc_RNA (1)...(19): siRNA sense strand
gagagcacgauuuauugug

SEQ ID NO: 1350895 - RNA, 19 nt, Homo sapiens
  misc_RNA (1)...(19): siRNA sense strand
gaaguauuugaguaucuug

SEQ ID NO: 1350896 - RNA, 19 nt, Homo sapiens
  misc_RNA (1)...(19): siRNA sense strand
ggcuaccugucucagauga

SEQ ID NO: 1350897 - RNA, 19 nt, Homo sapiens
  misc_RNA (1)...(19): siRNA sense strand
gauaucaggauuuggaaaa

SEQ ID NO: 1350898 - RNA, 19 nt, Homo sapiens
  misc_RNA (1)...(19): siRNA sense strand
ccucuugccacccauacua

SEQ ID NO: 1350899 - RNA, 19 nt, Homo sapiens
  misc_RNA (1)...(19): siRNA sense strand
ccaugguguugcugcugua

SEQ ID NO: 1350900 - RNA, 19 nt, Homo sapiens
  misc_RNA (1)...(19): siRNA sense strand
cagaugacgccuguuauag

SEQ ID NO: 1350901 - RNA, 19 nt, Homo sapiens
  misc_RNA (1)...(19): siRNA sense strand
uuggugaacgaguagauua

SEQ ID NO: 1350902 - RNA, 19 nt, Homo sapiens
  misc_RNA (1)...(19): siRNA sense strand
gucauugcugugauuguua

SEQ ID NO: 1350903 - RNA, 19 nt, Homo sapiens
  misc_RNA (1)...(19): siRNA sense strand
ggagccaccaacauuugaa

SEQ ID NO: 1350904 - RNA, 19 nt, Homo sapiens
  misc_RNA (1)...(19): siRNA sense strand
gcgcuuuccuggguugcuu

SEQ ID NO: 1350905 - RNA, 19 nt, Homo sapiens
  misc_RNA (1)...(19): siRNA sense strand
uacuacaaagcaacaguua

SEQ ID NO: 1350906 - RNA, 19 nt, Homo sapiens
  misc_RNA (1)...(19): siRNA sense strand
cuugaugcaguaacuuaua

SEQ ID NO: 1350907 - RNA, 19 nt, Homo sapiens
  misc_RNA (1)...(19): siRNA sense strand
aaacauguccauauauacg

SEQ ID NO: 1350908 - RNA, 19 nt, Homo sapiens
  misc_RNA (1)...(19): siRNA sense strand
guguaaaguggucaaaugu

SEQ ID NO: 1350909 - RNA, 19 nt, Homo sapiens
  misc_RNA (1)...(19): siRNA sense strand
cuuacgaguuugguuauca

SEQ ID NO: 1350910 - RNA, 19 nt, Homo sapiens
  misc_RNA (1)...(19): siRNA sense strand
uacgggauccuuuaaaugg

SEQ ID NO: 1350911 - RNA, 19 nt, Homo sapiens
  misc_RNA (1)...(19): siRNA sense strand
aaccaaaacccuacuauga

SEQ ID NO: 1350912 - RNA, 19 nt, Homo sapiens
  misc_RNA (1)...(19): siRNA sense strand
cccaauaugugaaaagguu

SEQ ID NO: 1350913 - RNA, 19 nt, Homo sapiens
  misc_RNA (1)...(19): siRNA sense strand
cgauggcagcgacacaauu

SEQ ID NO: 1350914 - RNA, 19 nt, Homo sapiens
  misc_RNA (1)...(19): siRNA sense strand
gauccauuuucacuuauug

SEQ ID NO: 1350915 - RNA, 19 nt, Homo sapiens
  misc_RNA (1)...(19): siRNA sense strand
uugaugcaguaacuuauag

SEQ ID NO: 1350916 - RNA, 19 nt, Homo sapiens
  misc_RNA (1)...(19): siRNA sense strand
guaucuugaugcaguaacu

SEQ ID NO: 1350917 - RNA, 19 nt, Homo sapiens
  misc_RNA (1)...(19): siRNA sense strand
caacauuugaagcuaugga

SEQ ID NO: 1350918 - RNA, 19 nt, Homo sapiens
  misc_RNA (1)...(19): siRNA sense strand
gagauuggugaacgaguag

SEQ ID NO: 1350919 - RNA, 19 nt, Homo sapiens
  misc_RNA (1)...(19): siRNA sense strand
ggagagagcacgauuuauu

SEQ ID NO: 1350920 - RNA, 19 nt, Homo sapiens
  misc_RNA (1)...(19): siRNA sense strand
agagaaacauguccauaua

SEQ ID NO: 1350921 - RNA, 19 nt, Homo sapiens
  misc_RNA (1)...(19): siRNA sense strand
cagaugcacuuuauuugua

SEQ ID NO: 1350922 - RNA, 19 nt, Homo sapiens
  misc_RNA (1)...(19): siRNA sense strand
ggacuuacgaguuugguua

SEQ ID NO: 1350923 - RNA, 19 nt, Homo sapiens
  misc_RNA (1)...(19): siRNA sense strand
aaacagauaucaggauuug

SEQ ID NO: 1350924 - RNA, 19 nt, Homo sapiens
  misc_RNA (1)...(19): siRNA sense strand
cuauggagcucauugguaa

SEQ ID NO: 1350925 - RNA, 19 nt, Homo sapiens
  misc_RNA (1)...(19): siRNA sense strand
aaacacaccuuuagugaag

SEQ ID NO: 1350926 - RNA, 19 nt, Homo sapiens
  misc_RNA (1)...(19): siRNA sense strand
gaacuuaaaggaucaguag

SEQ ID NO: 1350927 - RNA, 19 nt, Homo sapiens
  misc_RNA (1)...(19): siRNA sense strand
gaaaacagauaucaggauu

SEQ ID NO: 1350928 - RNA, 19 nt, Homo sapiens
  misc_RNA (1)...(19): siRNA sense strand
uaaaggaucaguagcaauu

SEQ ID NO: 1350929 - RNA, 19 nt, Homo sapiens
  misc_RNA (1)...(19): siRNA sense strand
aaaugggacuuacgaguuu

SEQ ID NO: 1350930 - RNA, 19 nt, Homo sapiens
  misc_RNA (1)...(19): siRNA sense strand
guuaucagaugcacuuuau

SEQ ID NO: 1350931 - RNA, 19 nt, Homo sapiens
  misc_RNA (1)...(19): siRNA sense strand
ugagauuggugaacgagua

SEQ ID NO: 1350932 - RNA, 19 nt, Homo sapiens
  misc_RNA (1)...(19): siRNA sense strand
gugaacgaguagauuauaa

SEQ ID NO: 1350933 - RNA, 19 nt, Homo sapiens
  misc_RNA (1)...(19): siRNA sense strand
gagagagcacgauuuauug

SEQ ID NO: 1350934 - RNA, 19 nt, Homo sapiens
  misc_RNA (1)...(19): siRNA sense strand
caaaugggacuuacgaguu

SEQ ID NO: 1350935 - RNA, 19 nt, Homo sapiens
  misc_RNA (1)...(19): siRNA sense strand
ggucauugcugugauuguu

SEQ ID NO: 1350936 - RNA, 19 nt, Homo sapiens
  misc_RNA (1)...(19): siRNA sense strand
ccagauccauuuucacuua

SEQ ID NO: 1350937 - RNA, 19 nt, Homo sapiens
  misc_RNA (1)...(19): siRNA sense strand
gaaggaauacuugacaguu

SEQ ID NO: 1350938 - RNA, 19 nt, Homo sapiens
  misc_RNA (1)...(19): siRNA sense strand
aaggaauacuugacaguuu

SEQ ID NO: 1350939 - RNA, 19 nt, Homo sapiens
  misc_RNA (1)...(19): siRNA sense strand
ucagaugacgccuguuaua

SEQ ID NO: 1350940 - RNA, 19 nt, Homo sapiens
  misc_RNA (1)...(19): siRNA sense strand
gaaaacacaccuuuaguga

SEQ ID NO: 1350941 - RNA, 19 nt, Homo sapiens
  misc_RNA (1)...(19): siRNA sense strand
gaugacgccuguuauagag

SEQ ID NO: 1350942 - RNA, 19 nt, Homo sapiens
  misc_RNA (1)...(19): siRNA sense strand
gagaaacauguccauauau

SEQ ID NO: 1350943 - RNA, 19 nt, Homo sapiens
  misc_RNA (1)...(19): siRNA sense strand
acgaguagauuauaagugu

SEQ ID NO: 1350944 - RNA, 19 nt, Homo sapiens
  misc_RNA (1)...(19): siRNA sense strand
cuacaaagcaacaguuaug

SEQ ID NO: 1350945 - RNA, 19 nt, Homo sapiens
  misc_RNA (1)...(19): siRNA sense strand
ccaccaacauuugaagcua

SEQ ID NO: 1350946 - RNA, 19 nt, Homo sapiens
  misc_RNA (1)...(19): siRNA sense strand
uauacgggauccuuuaaau

SEQ ID NO: 1350947 - RNA, 19 nt, Homo sapiens
  misc_RNA (1)...(19): siRNA sense strand
cgaguuugguuaucagaug

SEQ ID NO: 1350948 - RNA, 19 nt, Homo sapiens
  misc_RNA (1)...(19): siRNA sense strand
gaacgaguagauuauaagu

SEQ ID NO: 1350949 - RNA, 19 nt, Homo sapiens
  misc_RNA (1)...(19): siRNA sense strand
gugaggagccaccaacauu

SEQ ID NO: 1350950 - RNA, 19 nt, Homo sapiens
  misc_RNA (1)...(19): siRNA sense strand
gauggcagcgacacaauug

SEQ ID NO: 1350951 - RNA, 19 nt, Homo sapiens
  misc_RNA (1)...(19): siRNA sense strand
gcuauggagcucauuggua

SEQ ID NO: 1350952 - RNA, 19 nt, Homo sapiens
  misc_RNA (1)...(19): siRNA sense strand
gaggagccaccaacauuug

SEQ ID NO: 1350953 - RNA, 19 nt, Homo sapiens
  misc_RNA (1)...(19): siRNA sense strand
acacaccuuuagugaagua

SEQ ID NO: 1350954 - RNA, 19 nt, Homo sapiens
  misc_RNA (1)...(19): siRNA sense strand
ucucagaugacgccuguua

SEQ ID NO: 1350955 - RNA, 19 nt, Homo sapiens
  misc_RNA (1)...(19): siRNA sense strand
uagagaaacauguccauau

SEQ ID NO: 1350956 - RNA, 19 nt, Homo sapiens
  misc_RNA (1)...(19): siRNA sense strand
ggugaacgaguagauuaua

SEQ ID NO: 1350957 - RNA, 19 nt, Homo sapiens
  misc_RNA (1)...(19): siRNA sense strand
gaaguagaaguauuugagu

SEQ ID NO: 1350958 - RNA, 19 nt, Homo sapiens
  misc_RNA (1)...(19): siRNA sense strand
gaaacauguccauauauac

SEQ ID NO: 1350959 - RNA, 19 nt, Homo sapiens
  misc_RNA (1)...(19): siRNA sense strand
ugacgccuguuauagagaa

SEQ ID NO: 1350960 - RNA, 19 nt, Homo sapiens
  misc_RNA (1)...(19): siRNA sense strand
cgaguagauuauaagugua

SEQ ID NO: 1350961 - RNA, 19 nt, Homo sapiens
  misc_RNA (1)...(19): siRNA sense strand
gcacuuuauuuguaaugag

SEQ ID NO: 1350962 - RNA, 19 nt, Homo sapiens
  misc_RNA (1)...(19): siRNA sense strand
guagaaguauuugaguauc

SEQ ID NO: 1350963 - RNA, 19 nt, Homo sapiens
  misc_RNA (1)...(19): siRNA sense strand
guauuugaguaucuugaug

SEQ ID NO: 1350964 - RNA, 19 nt, Homo sapiens
  misc_RNA (1)...(19): siRNA sense strand
aggaauacuugacaguuug

SEQ ID NO: 1350965 - RNA, 19 nt, Homo sapiens
  misc_RNA (1)...(19): siRNA sense strand
aguguaaaguggucaaaug

SEQ ID NO: 1350966 - RNA, 19 nt, Homo sapiens
  misc_RNA (1)...(19): siRNA sense strand
ccaaaacccuacuaugaga

SEQ ID NO: 1350967 - RNA, 19 nt, Homo sapiens
  misc_RNA (1)...(19): siRNA sense strand
ccacccauacuauuuguga

SEQ ID NO: 1350968 - RNA, 19 nt, Homo sapiens
  misc_RNA (1)...(19): siRNA sense strand
caccaacauuugaagcuau

SEQ ID NO: 1350969 - RNA, 19 nt, Homo sapiens
  misc_RNA (1)...(19): siRNA sense strand
uuggagagagcacgauuua

SEQ ID NO: 1350970 - RNA, 19 nt, Homo sapiens
  misc_RNA (1)...(19): siRNA sense strand
gguuaucagaugcacuuua

SEQ ID NO: 1350971 - RNA, 19 nt, Homo sapiens
  misc_RNA (1)...(19): siRNA sense strand
ugaggagccaccaacauuu

SEQ ID NO: 1350972 - RNA, 19 nt, Homo sapiens
  misc_RNA (1)...(19): siRNA sense strand
ggaaggaauacuugacagu

SEQ ID NO: 1350973 - RNA, 19 nt, Homo sapiens
  misc_RNA (1)...(19): siRNA sense strand
gaggaaggaauacuugaca

SEQ ID NO: 1350974 - RNA, 19 nt, Homo sapiens
  misc_RNA (1)...(19): siRNA sense strand
ugaguaucuugaugcagua

SEQ ID NO: 1350975 - RNA, 19 nt, Homo sapiens
  misc_RNA (1)...(19): siRNA sense strand
caccuuuagugaaguagaa

SEQ ID NO: 1350976 - RNA, 19 nt, Homo sapiens
  misc_RNA (1)...(19): siRNA sense strand
acagauaucaggauuugga

SEQ ID NO: 1350977 - RNA, 19 nt, Homo sapiens
  misc_RNA (1)...(19): siRNA sense strand
ucauugcugugauuguuau

SEQ ID NO: 1350978 - RNA, 19 nt, Homo sapiens
  misc_RNA (1)...(19): siRNA sense strand
ucagaugcacuuuauuugu

SEQ ID NO: 1350979 - RNA, 19 nt, Homo sapiens
  misc_RNA (1)...(19): siRNA sense strand
gugcugcuccagaguguaa

SEQ ID NO: 1350980 - RNA, 19 nt, Homo sapiens
  misc_RNA (1)...(19): siRNA sense strand
ggaaaacacaccuuuagug

SEQ ID NO: 1350981 - RNA, 19 nt, Homo sapiens
  misc_RNA (1)...(19): siRNA sense strand
aaggaucaguagcaauuug

SEQ ID NO: 1350982 - RNA, 19 nt, Homo sapiens
  misc_RNA (1)...(19): siRNA sense strand
uauauacgggauccuuuaa

SEQ ID NO: 1350983 - RNA, 19 nt, Homo sapiens
  misc_RNA (1)...(19): siRNA sense strand
ugaaguagaaguauuugag

SEQ ID NO: 1350984 - RNA, 19 nt, Homo sapiens
  misc_RNA (1)...(19): siRNA sense strand
cuugacaguuuggauguuu

SEQ ID NO: 1350985 - RNA, 19 nt, Homo sapiens
  misc_RNA (1)...(19): siRNA sense strand
cauauauacgggauccuuu

SEQ ID NO: 1350986 - RNA, 19 nt, Homo sapiens
  misc_RNA (1)...(19): siRNA sense strand
auauauacgggauccuuua

SEQ ID NO: 1350987 - RNA, 19 nt, Homo sapiens
  misc_RNA (1)...(19): siRNA sense strand
cuuaaaggaucaguagcaa

SEQ ID NO: 1350988 - RNA, 19 nt, Homo sapiens
  misc_RNA (1)...(19): siRNA sense strand
uaaaccugaggaaggaaua

SEQ ID NO: 1350989 - RNA, 19 nt, Homo sapiens
  misc_RNA (1)...(19): siRNA sense strand
agaugacgccuguuauaga

SEQ ID NO: 1350990 - RNA, 19 nt, Homo sapiens
  misc_RNA (1)...(19): siRNA sense strand
ugugauuguuauugccaua

SEQ ID NO: 1350991 - RNA, 19 nt, Homo sapiens
  misc_RNA (1)...(19): siRNA sense strand
gagagcacgauuuauugug

SEQ ID NO: 1350992 - RNA, 19 nt, Homo sapiens
  misc_RNA (1)...(19): siRNA sense strand
gaaguauuugaguaucuug

SEQ ID NO: 1350993 - RNA, 19 nt, Homo sapiens
  misc_RNA (1)...(19): siRNA sense strand
ccucuugccacccauacua

SEQ ID NO: 1350994 - RNA, 19 nt, Homo sapiens
  misc_RNA (1)...(19): siRNA sense strand
gauaucaggauuuggaaaa

SEQ ID NO: 1350995 - RNA, 19 nt, Homo sapiens
  misc_RNA (1)...(19): siRNA sense strand
ggcuaccugucucagauga

SEQ ID NO: 1350996 - RNA, 19 nt, Homo sapiens
  misc_RNA (1)...(19): siRNA sense strand
ccaugguguugcugcugua

SEQ ID NO: 1350997 - RNA, 19 nt, Homo sapiens
  misc_RNA (1)...(19): siRNA sense strand
cagaugacgccuguuauag

SEQ ID NO: 1350998 - RNA, 19 nt, Homo sapiens
  misc_RNA (1)...(19): siRNA sense strand
gucauugcugugauuguua

SEQ ID NO: 1350999 - RNA, 19 nt, Homo sapiens
  misc_RNA (1)...(19): siRNA sense strand
uuggugaacgaguagauua

SEQ ID NO: 1351000 - RNA, 19 nt, Homo sapiens
  misc_RNA (1)...(19): siRNA sense strand
ggagccaccaacauuugaa

SEQ ID NO: 1351001 - RNA, 19 nt, Homo sapiens
  misc_RNA (1)...(19): siRNA sense strand
gcgcuuuccuggguugcuu

SEQ ID NO: 1351002 - RNA, 19 nt, Homo sapiens
  misc_RNA (1)...(19): siRNA sense strand
uacuacaaagcaacaguua

SEQ ID NO: 1351003 - RNA, 19 nt, Homo sapiens
  misc_RNA (1)...(19): siRNA sense strand
cuugaugcaguaacuuaua

SEQ ID NO: 1351004 - RNA, 19 nt, Homo sapiens
  misc_RNA (1)...(19): siRNA sense strand
aaacauguccauauauacg

SEQ ID NO: 1351005 - RNA, 19 nt, Homo sapiens
  misc_RNA (1)...(19): siRNA sense strand
guguaaaguggucaaaugu

SEQ ID NO: 1351006 - RNA, 19 nt, Homo sapiens
  misc_RNA (1)...(19): siRNA sense strand
cuuacgaguuugguuauca

SEQ ID NO: 1351007 - RNA, 19 nt, Homo sapiens
  misc_RNA (1)...(19): siRNA sense strand
uacgggauccuuuaaaugg

SEQ ID NO: 1351008 - RNA, 19 nt, Homo sapiens
  misc_RNA (1)...(19): siRNA sense strand
aaccaaaacccuacuauga

SEQ ID NO: 1351009 - RNA, 19 nt, Homo sapiens
  misc_RNA (1)...(19): siRNA sense strand
cccaauaugugaaaagguu

SEQ ID NO: 1351010 - RNA, 19 nt, Homo sapiens
  misc_RNA (1)...(19): siRNA sense strand
cgauggcagcgacacaauu

SEQ ID NO: 1351011 - RNA, 19 nt, Homo sapiens
  misc_RNA (1)...(19): siRNA sense strand
gauccauuuucacuuauug

SEQ ID NO: 1351012 - RNA, 19 nt, Homo sapiens
  misc_RNA (1)...(19): siRNA sense strand
uugaugcaguaacuuauag

SEQ ID NO: 1351013 - RNA, 19 nt, Homo sapiens
  misc_RNA (1)...(19): siRNA sense strand
guaucuugaugcaguaacu

SEQ ID NO: 1351014 - RNA, 19 nt, Homo sapiens
  misc_RNA (1)...(19): siRNA sense strand
caacauuugaagcuaugga

SEQ ID NO: 1351015 - RNA, 19 nt, Homo sapiens
  misc_RNA (1)...(19): siRNA sense strand
gagauuggugaacgaguag

SEQ ID NO: 1351016 - RNA, 19 nt, Homo sapiens
  misc_RNA (1)...(19): siRNA sense strand
ggagagagcacgauuuauu

SEQ ID NO: 1351017 - RNA, 19 nt, Homo sapiens
  misc_RNA (1)...(19): siRNA sense strand
agagaaacauguccauaua

SEQ ID NO: 1351018 - RNA, 19 nt, Homo sapiens
  misc_RNA (1)...(19): siRNA sense strand
cagaugcacuuuauuugua

SEQ ID NO: 1351019 - RNA, 19 nt, Homo sapiens
  misc_RNA (1)...(19): siRNA sense strand
ggacuuacgaguuugguua

SEQ ID NO: 1351020 - RNA, 19 nt, Homo sapiens
  misc_RNA (1)...(19): siRNA sense strand
aaacagauaucaggauuug

SEQ ID NO: 1351021 - RNA, 19 nt, Homo sapiens
  misc_RNA (1)...(19): siRNA sense strand
cuauggagcucauugguaa

SEQ ID NO: 1351022 - RNA, 19 nt, Homo sapiens
  misc_RNA (1)...(19): siRNA sense strand
aaacacaccuuuagugaag

SEQ ID NO: 1351023 - RNA, 19 nt, Homo sapiens
  misc_RNA (1)...(19): siRNA sense strand
gaacuuaaaggaucaguag

SEQ ID NO: 1351024 - RNA, 19 nt, Homo sapiens
  misc_RNA (1)...(19): siRNA sense strand
gaaaacagauaucaggauu

SEQ ID NO: 1351025 - RNA, 19 nt, Homo sapiens
  misc_RNA (1)...(19): siRNA sense strand
uaaaggaucaguagcaauu

SEQ ID NO: 1351026 - RNA, 19 nt, Homo sapiens
  misc_RNA (1)...(19): siRNA sense strand
aaaugggacuuacgaguuu

SEQ ID NO: 1351027 - RNA, 19 nt, Homo sapiens
  misc_RNA (1)...(19): siRNA sense strand
guuaucagaugcacuuuau

SEQ ID NO: 1351028 - RNA, 19 nt, Homo sapiens
  misc_RNA (1)...(19): siRNA sense strand
gagcugaauaugccacuua

SEQ ID NO: 1351029 - RNA, 19 nt, Homo sapiens
  misc_RNA (1)...(19): siRNA sense strand
ugagauuggugaacgagua

SEQ ID NO: 1351030 - RNA, 19 nt, Homo sapiens
  misc_RNA (1)...(19): siRNA sense strand
gugaacgaguagauuauaa

SEQ ID NO: 1351031 - RNA, 19 nt, Homo sapiens
  misc_RNA (1)...(19): siRNA sense strand
gagagagcacgauuuauug

SEQ ID NO: 1351032 - RNA, 19 nt, Homo sapiens
  misc_RNA (1)...(19): siRNA sense strand
caaaugggacuuacgaguu

SEQ ID NO: 1351033 - RNA, 19 nt, Homo sapiens
  misc_RNA (1)...(19): siRNA sense strand
ggucauugcugugauuguu

SEQ ID NO: 1351034 - RNA, 19 nt, Homo sapiens
  misc_RNA (1)...(19): siRNA sense strand
ccagauccauuuucacuua

SEQ ID NO: 1351035 - RNA, 19 nt, Homo sapiens
  misc_RNA (1)...(19): siRNA sense strand
gaaggaauacuugacaguu

SEQ ID NO: 1351036 - RNA, 19 nt, Homo sapiens
  misc_RNA (1)...(19): siRNA sense strand
aaggaauacuugacaguuu

SEQ ID NO: 1351037 - RNA, 19 nt, Homo sapiens
  misc_RNA (1)...(19): siRNA sense strand
ucagaugacgccuguuaua

SEQ ID NO: 1351038 - RNA, 19 nt, Homo sapiens
  misc_RNA (1)...(19): siRNA sense strand
gaaaacacaccuuuaguga

SEQ ID NO: 1351039 - RNA, 19 nt, Homo sapiens
  misc_RNA (1)...(19): siRNA sense strand
gaugacgccuguuauagag

SEQ ID NO: 1351040 - RNA, 19 nt, Homo sapiens
  misc_RNA (1)...(19): siRNA sense strand
gagaaacauguccauauau

SEQ ID NO: 1351041 - RNA, 19 nt, Homo sapiens
  misc_RNA (1)...(19): siRNA sense strand
ccacuuaccagacuaaauc

SEQ ID NO: 1351042 - RNA, 19 nt, Homo sapiens
  misc_RNA (1)...(19): siRNA sense strand
acgaguagauuauaagugu

SEQ ID NO: 1351043 - RNA, 19 nt, Homo sapiens
  misc_RNA (1)...(19): siRNA sense strand
cuacaaagcaacaguuaug

SEQ ID NO: 1351044 - RNA, 19 nt, Homo sapiens
  misc_RNA (1)...(19): siRNA sense strand
ccaccaacauuugaagcua

SEQ ID NO: 1351045 - RNA, 19 nt, Homo sapiens
  misc_RNA (1)...(19): siRNA sense strand
uauacgggauccuuuaaau

SEQ ID NO: 1351046 - RNA, 19 nt, Homo sapiens
  misc_RNA (1)...(19): siRNA sense strand
cgaguuugguuaucagaug

SEQ ID NO: 1351047 - RNA, 19 nt, Homo sapiens
  misc_RNA (1)...(19): siRNA sense strand
gaacgaguagauuauaagu

SEQ ID NO: 1351048 - RNA, 19 nt, Homo sapiens
  misc_RNA (1)...(19): siRNA sense strand
gugaggagccaccaacauu

SEQ ID NO: 1351049 - RNA, 19 nt, Homo sapiens
  misc_RNA (1)...(19): siRNA sense strand
gauggcagcgacacaauug

SEQ ID NO: 1351050 - RNA, 19 nt, Homo sapiens
  misc_RNA (1)...(19): siRNA sense strand
ucucagaugacgccuguua

SEQ ID NO: 1351051 - RNA, 19 nt, Homo sapiens
  misc_RNA (1)...(19): siRNA sense strand
gaggagccaccaacauuug

SEQ ID NO: 1351052 - RNA, 19 nt, Homo sapiens
  misc_RNA (1)...(19): siRNA sense strand
gcuauggagcucauuggua

SEQ ID NO: 1351053 - RNA, 19 nt, Homo sapiens
  misc_RNA (1)...(19): siRNA sense strand
acacaccuuuagugaagua

SEQ ID NO: 1351054 - RNA, 19 nt, Homo sapiens
  misc_RNA (1)...(19): siRNA sense strand
uagagaaacauguccauau

SEQ ID NO: 1351055 - RNA, 19 nt, Homo sapiens
  misc_RNA (1)...(19): siRNA sense strand
ggugaacgaguagauuaua

SEQ ID NO: 1351056 - RNA, 19 nt, Homo sapiens
  misc_RNA (1)...(19): siRNA sense strand
gaaguagaaguauuugagu

SEQ ID NO: 1351057 - RNA, 19 nt, Homo sapiens
  misc_RNA (1)...(19): siRNA sense strand
gaaacauguccauauauac

SEQ ID NO: 1351058 - RNA, 19 nt, Homo sapiens
  misc_RNA (1)...(19): siRNA sense strand
ugacgccuguuauagagaa

SEQ ID NO: 1351059 - RNA, 19 nt, Homo sapiens
  misc_RNA (1)...(19): siRNA sense strand
cgaguagauuauaagugua

SEQ ID NO: 1351060 - RNA, 19 nt, Homo sapiens
  misc_RNA (1)...(19): siRNA sense strand
gcacuuuauuuguaaugag

SEQ ID NO: 1351061 - RNA, 19 nt, Homo sapiens
  misc_RNA (1)...(19): siRNA sense strand
guagaaguauuugaguauc

SEQ ID NO: 1351062 - RNA, 19 nt, Homo sapiens
  misc_RNA (1)...(19): siRNA sense strand
guauuugaguaucuugaug

SEQ ID NO: 1351063 - RNA, 19 nt, Homo sapiens
  misc_RNA (1)...(19): siRNA sense strand
aggaauacuugacaguuug

SEQ ID NO: 1351064 - RNA, 19 nt, Homo sapiens
  misc_RNA (1)...(19): siRNA sense strand
ccaaaacccuacuaugaga

SEQ ID NO: 1351065 - RNA, 19 nt, Homo sapiens
  misc_RNA (1)...(19): siRNA sense strand
aguguaaaguggucaaaug

SEQ ID NO: 1351066 - RNA, 19 nt, Homo sapiens
  misc_RNA (1)...(19): siRNA sense strand
ccacccauacuauuuguga

SEQ ID NO: 1351067 - RNA, 19 nt, Homo sapiens
  misc_RNA (1)...(19): siRNA sense strand
uuggagagagcacgauuua

SEQ ID NO: 1351068 - RNA, 19 nt, Homo sapiens
  misc_RNA (1)...(19): siRNA sense strand
gguuaucagaugcacuuua

SEQ ID NO: 1351069 - RNA, 19 nt, Homo sapiens
  misc_RNA (1)...(19): siRNA sense strand
caccaacauuugaagcuau

SEQ ID NO: 1351070 - RNA, 19 nt, Homo sapiens
  misc_RNA (1)...(19): siRNA sense strand
ugaggagccaccaacauuu

SEQ ID NO: 1351071 - RNA, 19 nt, Homo sapiens
  misc_RNA (1)...(19): siRNA sense strand
ggaaggaauacuugacagu

SEQ ID NO: 1351072 - RNA, 19 nt, Homo sapiens
  misc_RNA (1)...(19): siRNA sense strand
gaggaaggaauacuugaca

SEQ ID NO: 1351073 - RNA, 19 nt, Homo sapiens
  misc_RNA (1)...(19): siRNA sense strand
ugaguaucuugaugcagua

SEQ ID NO: 1351074 - RNA, 19 nt, Homo sapiens
  misc_RNA (1)...(19): siRNA sense strand
caccuuuagugaaguagaa

SEQ ID NO: 1351075 - RNA, 19 nt, Homo sapiens
  misc_RNA (1)...(19): siRNA sense strand
acagauaucaggauuugga

SEQ ID NO: 1351076 - RNA, 19 nt, Homo sapiens
  misc_RNA (1)...(19): siRNA sense strand
ucauugcugugauuguuau

SEQ ID NO: 1351077 - RNA, 19 nt, Homo sapiens
  misc_RNA (1)...(19): siRNA sense strand
ucagaugcacuuuauuugu

SEQ ID NO: 1351078 - RNA, 19 nt, Homo sapiens
  misc_RNA (1)...(19): siRNA sense strand
gugcugcuccagaguguaa

SEQ ID NO: 1351079 - RNA, 19 nt, Homo sapiens
  misc_RNA (1)...(19): siRNA sense strand
ggaaaacacaccuuuagug

SEQ ID NO: 1351080 - RNA, 19 nt, Homo sapiens
  misc_RNA (1)...(19): siRNA sense strand
aaggaucaguagcaauuug

SEQ ID NO: 1351081 - RNA, 19 nt, Homo sapiens
  misc_RNA (1)...(19): siRNA sense strand
uauauacgggauccuuuaa

SEQ ID NO: 1351082 - RNA, 19 nt, Homo sapiens
  misc_RNA (1)...(19): siRNA sense strand
ugaaguagaaguauuugag

SEQ ID NO: 1351083 - RNA, 19 nt, Homo sapiens
  misc_RNA (1)...(19): siRNA sense strand
cuugacaguuuggauguuu

SEQ ID NO: 1351084 - RNA, 19 nt, Homo sapiens
  misc_RNA (1)...(19): siRNA sense strand
cauauauacgggauccuuu

SEQ ID NO: 1351085 - RNA, 19 nt, Homo sapiens
  misc_RNA (1)...(19): siRNA sense strand
auauauacgggauccuuua

SEQ ID NO: 1351086 - RNA, 19 nt, Homo sapiens
  misc_RNA (1)...(19): siRNA sense strand
cuuaaaggaucaguagcaa

SEQ ID NO: 1351087 - RNA, 19 nt, Homo sapiens
  misc_RNA (1)...(19): siRNA sense strand
uaaaccugaggaaggaaua

SEQ ID NO: 1351088 - RNA, 19 nt, Homo sapiens
  misc_RNA (1)...(19): siRNA sense strand
agaugacgccuguuauaga

SEQ ID NO: 1351089 - RNA, 19 nt, Homo sapiens
  misc_RNA (1)...(19): siRNA sense strand
ugugauuguuauugccaua

SEQ ID NO: 1351090 - RNA, 19 nt, Homo sapiens
  misc_RNA (1)...(19): siRNA sense strand
gagagcacgauuuauugug

SEQ ID NO: 1351091 - RNA, 19 nt, Homo sapiens
  misc_RNA (1)...(19): siRNA sense strand
gaaguauuugaguaucuug

SEQ ID NO: 1351092 - RNA, 19 nt, Homo sapiens
  misc_RNA (1)...(19): siRNA sense strand
ggcuaccugucucagauga

SEQ ID NO: 1351093 - RNA, 19 nt, Homo sapiens
  misc_RNA (1)...(19): siRNA sense strand
gauaucaggauuuggaaaa

SEQ ID NO: 1351094 - RNA, 19 nt, Homo sapiens
  misc_RNA (1)...(19): siRNA sense strand
ccucuugccacccauacua

SEQ ID NO: 1351095 - RNA, 19 nt, Homo sapiens
  misc_RNA (1)...(19): siRNA sense strand
ccaugguguugcugcugua

SEQ ID NO: 1351096 - RNA, 19 nt, Homo sapiens
  misc_RNA (1)...(19): siRNA sense strand
cagaugacgccuguuauag

SEQ ID NO: 1351097 - RNA, 19 nt, Homo sapiens
  misc_RNA (1)...(19): siRNA sense strand
cagaugguggagcugaaua

SEQ ID NO: 1351098 - RNA, 19 nt, Homo sapiens
  misc_RNA (1)...(19): siRNA sense strand
uuggugaacgaguagauua

SEQ ID NO: 1351099 - RNA, 19 nt, Homo sapiens
  misc_RNA (1)...(19): siRNA sense strand
gucauugcugugauuguua

SEQ ID NO: 1351100 - RNA, 19 nt, Homo sapiens
  misc_RNA (1)...(19): siRNA sense strand
ggagccaccaacauuugaa

SEQ ID NO: 1351101 - RNA, 19 nt, Homo sapiens
  misc_RNA (1)...(19): siRNA sense strand
gcgcuuuccuggguugcuu

SEQ ID NO: 1351102 - RNA, 19 nt, Homo sapiens
  misc_RNA (1)...(19): siRNA sense strand
uacuacaaagcaacaguua

SEQ ID NO: 1351103 - RNA, 19 nt, Homo sapiens
  misc_RNA (1)...(19): siRNA sense strand
cuugaugcaguaacuuaua

SEQ ID NO: 1351104 - RNA, 19 nt, Homo sapiens
  misc_RNA (1)...(19): siRNA sense strand
aaacauguccauauauacg

SEQ ID NO: 1351105 - RNA, 19 nt, Homo sapiens
  misc_RNA (1)...(19): siRNA sense strand
guguaaaguggucaaaugu

SEQ ID NO: 1351106 - RNA, 19 nt, Homo sapiens
  misc_RNA (1)...(19): siRNA sense strand
cuuacgaguuugguuauca

SEQ ID NO: 1351107 - RNA, 19 nt, Homo sapiens
  misc_RNA (1)...(19): siRNA sense strand
uacgggauccuuuaaaugg

SEQ ID NO: 1351108 - RNA, 19 nt, Homo sapiens
  misc_RNA (1)...(19): siRNA sense strand
gcagaugguggagcugaau

SEQ ID NO: 1351109 - RNA, 19 nt, Homo sapiens
  misc_RNA (1)...(19): siRNA sense strand
aaccaaaacccuacuauga

SEQ ID NO: 1351110 - RNA, 19 nt, Homo sapiens
  misc_RNA (1)...(19): siRNA sense strand
cccaauaugugaaaagguu

SEQ ID NO: 1351111 - RNA, 19 nt, Homo sapiens
  misc_RNA (1)...(19): siRNA sense strand
ggagcugaauaugccacuu

SEQ ID NO: 1351112 - RNA, 19 nt, Homo sapiens
  misc_RNA (1)...(19): siRNA sense strand
cgauggcagcgacacaauu

SEQ ID NO: 1351113 - RNA, 19 nt, Homo sapiens
  misc_RNA (1)...(19): siRNA sense strand
gauccauuuucacuuauug

SEQ ID NO: 1351114 - RNA, 19 nt, Homo sapiens
  misc_RNA (1)...(19): siRNA sense strand
uugaugcaguaacuuauag

SEQ ID NO: 1351115 - RNA, 19 nt, Homo sapiens
  misc_RNA (1)...(19): siRNA sense strand
guaucuugaugcaguaacu

SEQ ID NO: 1351116 - RNA, 19 nt, Homo sapiens
  misc_RNA (1)...(19): siRNA sense strand
ggagagagcacgauuuauu

SEQ ID NO: 1351117 - RNA, 19 nt, Homo sapiens
  misc_RNA (1)...(19): siRNA sense strand
agagaaacauguccauaua

SEQ ID NO: 1351118 - RNA, 19 nt, Homo sapiens
  misc_RNA (1)...(19): siRNA sense strand
cagaugcacuuuauuugua

SEQ ID NO: 1351119 - RNA, 19 nt, Homo sapiens
  misc_RNA (1)...(19): siRNA sense strand
ggacuuacgaguuugguua

SEQ ID NO: 1351120 - RNA, 19 nt, Homo sapiens
  misc_RNA (1)...(19): siRNA sense strand
aaacagauaucaggauuug

SEQ ID NO: 1351121 - RNA, 19 nt, Homo sapiens
  misc_RNA (1)...(19): siRNA sense strand
cuauggagcucauugguaa

SEQ ID NO: 1351122 - RNA, 19 nt, Homo sapiens
  misc_RNA (1)...(19): siRNA sense strand
aaacacaccuuuagugaag

SEQ ID NO: 1351123 - RNA, 19 nt, Homo sapiens
  misc_RNA (1)...(19): siRNA sense strand
gaacuuaaaggaucaguag

SEQ ID NO: 1351124 - RNA, 19 nt, Homo sapiens
  misc_RNA (1)...(19): siRNA sense strand
gaaaacagauaucaggauu

SEQ ID NO: 1351125 - RNA, 19 nt, Homo sapiens
  misc_RNA (1)...(19): siRNA sense strand
uaaaggaucaguagcaauu

SEQ ID NO: 1351126 - RNA, 19 nt, Homo sapiens
  misc_RNA (1)...(19): siRNA sense strand
aaaugggacuuacgaguuu

SEQ ID NO: 1351127 - RNA, 19 nt, Homo sapiens
  misc_RNA (1)...(19): siRNA sense strand
guuaucagaugcacuuuau

SEQ ID NO: 1351128 - RNA, 19 nt, Homo sapiens
  misc_RNA (1)...(19): siRNA sense strand
ugagauuggugaacgagua

SEQ ID NO: 1351129 - RNA, 19 nt, Homo sapiens
  misc_RNA (1)...(19): siRNA sense strand
gugaacgaguagauuauaa

SEQ ID NO: 1351130 - RNA, 19 nt, Homo sapiens
  misc_RNA (1)...(19): siRNA sense strand
gagagagcacgauuuauug

SEQ ID NO: 1351131 - RNA, 19 nt, Homo sapiens
  misc_RNA (1)...(19): siRNA sense strand
caaaugggacuuacgaguu

SEQ ID NO: 1351132 - RNA, 19 nt, Homo sapiens
  misc_RNA (1)...(19): siRNA sense strand
ggucauugcugugauuguu

SEQ ID NO: 1351133 - RNA, 19 nt, Homo sapiens
  misc_RNA (1)...(19): siRNA sense strand
ccagauccauuuucacuua

SEQ ID NO: 1351134 - RNA, 19 nt, Homo sapiens
  misc_RNA (1)...(19): siRNA sense strand
gaaggaauacuugacaguu

SEQ ID NO: 1351135 - RNA, 19 nt, Homo sapiens
  misc_RNA (1)...(19): siRNA sense strand
aaggaauacuugacaguuu

SEQ ID NO: 1351136 - RNA, 19 nt, Homo sapiens
  misc_RNA (1)...(19): siRNA sense strand
ucagaugacgccuguuaua

SEQ ID NO: 1351137 - RNA, 19 nt, Homo sapiens
  misc_RNA (1)...(19): siRNA sense strand
gaaaacacaccuuuaguga

SEQ ID NO: 1351138 - RNA, 19 nt, Homo sapiens
  misc_RNA (1)...(19): siRNA sense strand
gaugacgccuguuauagag

SEQ ID NO: 1351139 - RNA, 19 nt, Homo sapiens
  misc_RNA (1)...(19): siRNA sense strand
gagaaacauguccauauau

SEQ ID NO: 1351140 - RNA, 19 nt, Homo sapiens
  misc_RNA (1)...(19): siRNA sense strand
acgaguagauuauaagugu

SEQ ID NO: 1351141 - RNA, 19 nt, Homo sapiens
  misc_RNA (1)...(19): siRNA sense strand
cuacaaagcaacaguuaug

SEQ ID NO: 1351142 - RNA, 19 nt, Homo sapiens
  misc_RNA (1)...(19): siRNA sense strand
ccaccaacauuugaagcua

SEQ ID NO: 1351143 - RNA, 19 nt, Homo sapiens
  misc_RNA (1)...(19): siRNA sense strand
uauacgggauccuuuaaau

SEQ ID NO: 1351144 - RNA, 19 nt, Homo sapiens
  misc_RNA (1)...(19): siRNA sense strand
cgaguuugguuaucagaug

SEQ ID NO: 1351145 - RNA, 19 nt, Homo sapiens
  misc_RNA (1)...(19): siRNA sense strand
gaacgaguagauuauaagu

SEQ ID NO: 1351146 - RNA, 19 nt, Homo sapiens
  misc_RNA (1)...(19): siRNA sense strand
gugaggagccaccaacauu

SEQ ID NO: 1351147 - RNA, 19 nt, Homo sapiens
  misc_RNA (1)...(19): siRNA sense strand
gauggcagcgacacaauug

SEQ ID NO: 1351148 - RNA, 19 nt, Homo sapiens
  misc_RNA (1)...(19): siRNA sense strand
gcuauggagcucauuggua

SEQ ID NO: 1351149 - RNA, 19 nt, Homo sapiens
  misc_RNA (1)...(19): siRNA sense strand
gaggagccaccaacauuug

SEQ ID NO: 1351150 - RNA, 19 nt, Homo sapiens
  misc_RNA (1)...(19): siRNA sense strand
acacaccuuuagugaagua

SEQ ID NO: 1351151 - RNA, 19 nt, Homo sapiens
  misc_RNA (1)...(19): siRNA sense strand
ucucagaugacgccuguua

SEQ ID NO: 1351152 - RNA, 19 nt, Homo sapiens
  misc_RNA (1)...(19): siRNA sense strand
uagagaaacauguccauau

SEQ ID NO: 1351153 - RNA, 19 nt, Homo sapiens
  misc_RNA (1)...(19): siRNA sense strand
guuccaaagugucuuaaag

SEQ ID NO: 1351154 - RNA, 19 nt, Homo sapiens
  misc_RNA (1)...(19): siRNA sense strand
ggugaacgaguagauuaua

SEQ ID NO: 1351155 - RNA, 19 nt, Homo sapiens
  misc_RNA (1)...(19): siRNA sense strand
gaaguagaaguauuugagu

SEQ ID NO: 1351156 - RNA, 19 nt, Homo sapiens
  misc_RNA (1)...(19): siRNA sense strand
gaaacauguccauauauac

SEQ ID NO: 1351157 - RNA, 19 nt, Homo sapiens
  misc_RNA (1)...(19): siRNA sense strand
ugacgccuguuauagagaa

SEQ ID NO: 1351158 - RNA, 19 nt, Homo sapiens
  misc_RNA (1)...(19): siRNA sense strand
cgaguagauuauaagugua

SEQ ID NO: 1351159 - RNA, 19 nt, Homo sapiens
  misc_RNA (1)...(19): siRNA sense strand
gcacuuuauuuguaaugag

SEQ ID NO: 1351160 - RNA, 19 nt, Homo sapiens
  misc_RNA (1)...(19): siRNA sense strand
guagaaguauuugaguauc

SEQ ID NO: 1351161 - RNA, 19 nt, Homo sapiens
  misc_RNA (1)...(19): siRNA sense strand
guauuugaguaucuugaug

SEQ ID NO: 1351162 - RNA, 19 nt, Homo sapiens
  misc_RNA (1)...(19): siRNA sense strand
aggaauacuugacaguuug

SEQ ID NO: 1351163 - RNA, 19 nt, Homo sapiens
  misc_RNA (1)...(19): siRNA sense strand
ccaaaacccuacuaugaga

SEQ ID NO: 1351164 - RNA, 19 nt, Homo sapiens
  misc_RNA (1)...(19): siRNA sense strand
aguguaaaguggucaaaug

SEQ ID NO: 1351165 - RNA, 19 nt, Homo sapiens
  misc_RNA (1)...(19): siRNA sense strand
ccacccauacuauuuguga

SEQ ID NO: 1351166 - RNA, 19 nt, Homo sapiens
  misc_RNA (1)...(19): siRNA sense strand
caccaacauuugaagcuau

SEQ ID NO: 1351167 - RNA, 19 nt, Homo sapiens
  misc_RNA (1)...(19): siRNA sense strand
uuggagagagcacgauuua

SEQ ID NO: 1351168 - RNA, 19 nt, Homo sapiens
  misc_RNA (1)...(19): siRNA sense strand
gguuaucagaugcacuuua

SEQ ID NO: 1351169 - RNA, 19 nt, Homo sapiens
  misc_RNA (1)...(19): siRNA sense strand
ugaggagccaccaacauuu

SEQ ID NO: 1351170 - RNA, 19 nt, Homo sapiens
  misc_RNA (1)...(19): siRNA sense strand
ggaaggaauacuugacagu

SEQ ID NO: 1351171 - RNA, 19 nt, Homo sapiens
  misc_RNA (1)...(19): siRNA sense strand
gaggaaggaauacuugaca

SEQ ID NO: 1351172 - RNA, 19 nt, Homo sapiens
  misc_RNA (1)...(19): siRNA sense strand
ccaguuccaaagugucuua

SEQ ID NO: 1351173 - RNA, 19 nt, Homo sapiens
  misc_RNA (1)...(19): siRNA sense strand
ugaguaucuugaugcagua

SEQ ID NO: 1351174 - RNA, 19 nt, Homo sapiens
  misc_RNA (1)...(19): siRNA sense strand
caccuuuagugaaguagaa

SEQ ID NO: 1351175 - RNA, 19 nt, Homo sapiens
  misc_RNA (1)...(19): siRNA sense strand
acagauaucaggauuugga

SEQ ID NO: 1351176 - RNA, 19 nt, Homo sapiens
  misc_RNA (1)...(19): siRNA sense strand
ucauugcugugauuguuau

SEQ ID NO: 1351177 - RNA, 19 nt, Homo sapiens
  misc_RNA (1)...(19): siRNA sense strand
ucagaugcacuuuauuugu

SEQ ID NO: 1351178 - RNA, 19 nt, Homo sapiens
  misc_RNA (1)...(19): siRNA sense strand
gugcugcuccagaguguaa

SEQ ID NO: 1351179 - RNA, 19 nt, Homo sapiens
  misc_RNA (1)...(19): siRNA sense strand
ggaaaacacaccuuuagug

SEQ ID NO: 1351180 - RNA, 19 nt, Homo sapiens
  misc_RNA (1)...(19): siRNA sense strand
aaggaucaguagcaauuug

SEQ ID NO: 1351181 - RNA, 19 nt, Homo sapiens
  misc_RNA (1)...(19): siRNA sense strand
uauauacgggauccuuuaa

SEQ ID NO: 1351182 - RNA, 19 nt, Homo sapiens
  misc_RNA (1)...(19): siRNA sense strand
ugaaguagaaguauuugag

SEQ ID NO: 1351183 - RNA, 19 nt, Homo sapiens
  misc_RNA (1)...(19): siRNA sense strand
cuugacaguuuggauguuu

SEQ ID NO: 1351184 - RNA, 19 nt, Homo sapiens
  misc_RNA (1)...(19): siRNA sense strand
cauauauacgggauccuuu

SEQ ID NO: 1351185 - RNA, 19 nt, Homo sapiens
  misc_RNA (1)...(19): siRNA sense strand
auauauacgggauccuuua

SEQ ID NO: 1351186 - RNA, 19 nt, Homo sapiens
  misc_RNA (1)...(19): siRNA sense strand
cuuaaaggaucaguagcaa

SEQ ID NO: 1351187 - RNA, 19 nt, Homo sapiens
  misc_RNA (1)...(19): siRNA sense strand
uaaaccugaggaaggaaua

SEQ ID NO: 1351188 - RNA, 19 nt, Homo sapiens
  misc_RNA (1)...(19): siRNA sense strand
agaugacgccuguuauaga

SEQ ID NO: 1351189 - RNA, 19 nt, Homo sapiens
  misc_RNA (1)...(19): siRNA sense strand
ugugauuguuauugccaua

SEQ ID NO: 1351190 - RNA, 19 nt, Homo sapiens
  misc_RNA (1)...(19): siRNA sense strand
gagagcacgauuuauugug

SEQ ID NO: 1351191 - RNA, 19 nt, Homo sapiens
  misc_RNA (1)...(19): siRNA sense strand
gaaguauuugaguaucuug

SEQ ID NO: 1351192 - RNA, 19 nt, Homo sapiens
  misc_RNA (1)...(19): siRNA sense strand
ggcuaccugucucagauga

SEQ ID NO: 1351193 - RNA, 19 nt, Homo sapiens
  misc_RNA (1)...(19): siRNA sense strand
gauaucaggauuuggaaaa

SEQ ID NO: 1351194 - RNA, 19 nt, Homo sapiens
  misc_RNA (1)...(19): siRNA sense strand
ccucuugccacccauacua

SEQ ID NO: 1351195 - RNA, 19 nt, Homo sapiens
  misc_RNA (1)...(19): siRNA sense strand
ccaugguguugcugcugua

SEQ ID NO: 1351196 - RNA, 19 nt, Homo sapiens
  misc_RNA (1)...(19): siRNA sense strand
cagaugacgccuguuauag

SEQ ID NO: 1351197 - RNA, 19 nt, Homo sapiens
  misc_RNA (1)...(19): siRNA sense strand
uuggugaacgaguagauua

SEQ ID NO: 1351198 - RNA, 19 nt, Homo sapiens
  misc_RNA (1)...(19): siRNA sense strand
gucauugcugugauuguua

SEQ ID NO: 1351199 - RNA, 19 nt, Homo sapiens
  misc_RNA (1)...(19): siRNA sense strand
ggagccaccaacauuugaa

SEQ ID NO: 1351200 - RNA, 19 nt, Homo sapiens
  misc_RNA (1)...(19): siRNA sense strand
gcgcuuuccuggguugcuu

SEQ ID NO: 1351201 - RNA, 19 nt, Homo sapiens
  misc_RNA (1)...(19): siRNA sense strand
uacuacaaagcaacaguua

SEQ ID NO: 1351202 - RNA, 19 nt, Homo sapiens
  misc_RNA (1)...(19): siRNA sense strand
cuugaugcaguaacuuaua

SEQ ID NO: 1351203 - RNA, 19 nt, Homo sapiens
  misc_RNA (1)...(19): siRNA sense strand
aaacauguccauauauacg

SEQ ID NO: 1351204 - RNA, 19 nt, Homo sapiens
  misc_RNA (1)...(19): siRNA sense strand
guguaaaguggucaaaugu

SEQ ID NO: 1351205 - RNA, 19 nt, Homo sapiens
  misc_RNA (1)...(19): siRNA sense strand
cuuacgaguuugguuauca

SEQ ID NO: 1351206 - RNA, 19 nt, Homo sapiens
  misc_RNA (1)...(19): siRNA sense strand
uacgggauccuuuaaaugg

SEQ ID NO: 1351207 - RNA, 19 nt, Homo sapiens
  misc_RNA (1)...(19): siRNA sense strand
aaccaaaacccuacuauga

SEQ ID NO: 1351208 - RNA, 19 nt, Homo sapiens
  misc_RNA (1)...(19): siRNA sense strand
cccaauaugugaaaagguu

SEQ ID NO: 1351209 - RNA, 19 nt, Homo sapiens
  misc_RNA (1)...(19): siRNA sense strand
cgauggcagcgacacaauu

SEQ ID NO: 1351210 - RNA, 19 nt, Homo sapiens
  misc_RNA (1)...(19): siRNA sense strand
gauccauuuucacuuauug

SEQ ID NO: 1351211 - RNA, 19 nt, Homo sapiens
  misc_RNA (1)...(19): siRNA sense strand
uugaugcaguaacuuauag

SEQ ID NO: 1351212 - RNA, 19 nt, Homo sapiens
  misc_RNA (1)...(19): siRNA sense strand
guaucuugaugcaguaacu

SEQ ID NO: 1351213 - RNA, 19 nt, Homo sapiens
  misc_RNA (1)...(19): siRNA sense strand
caacauuugaagcuaugga

SEQ ID NO: 1351214 - RNA, 19 nt, Homo sapiens
  misc_RNA (1)...(19): siRNA sense strand
gagauuggugaacgaguag

SEQ ID NO: 1351215 - RNA, 19 nt, Homo sapiens
  misc_RNA (1)...(19): siRNA sense strand
ggagagagcacgauuuauu

SEQ ID NO: 1351216 - RNA, 19 nt, Homo sapiens
  misc_RNA (1)...(19): siRNA sense strand
agagaaacauguccauaua

SEQ ID NO: 1351217 - RNA, 19 nt, Homo sapiens
  misc_RNA (1)...(19): siRNA sense strand
cagaugcacuuuauuugua

SEQ ID NO: 1351218 - RNA, 19 nt, Homo sapiens
  misc_RNA (1)...(19): siRNA sense strand
ggacuuacgaguuugguua

SEQ ID NO: 1351219 - RNA, 19 nt, Homo sapiens
  misc_RNA (1)...(19): siRNA sense strand
aaacagauaucaggauuug

SEQ ID NO: 1351220 - RNA, 19 nt, Homo sapiens
  misc_RNA (1)...(19): siRNA sense strand
cuauggagcucauugguaa

SEQ ID NO: 1351221 - RNA, 19 nt, Homo sapiens
  misc_RNA (1)...(19): siRNA sense strand
aaacacaccuuuagugaag

SEQ ID NO: 1351222 - RNA, 19 nt, Homo sapiens
  misc_RNA (1)...(19): siRNA sense strand
gaacuuaaaggaucaguag

SEQ ID NO: 1351223 - RNA, 19 nt, Homo sapiens
  misc_RNA (1)...(19): siRNA sense strand
gaaaacagauaucaggauu

SEQ ID NO: 1351224 - RNA, 19 nt, Homo sapiens
  misc_RNA (1)...(19): siRNA sense strand
uaaaggaucaguagcaauu

SEQ ID NO: 1351225 - RNA, 19 nt, Homo sapiens
  misc_RNA (1)...(19): siRNA sense strand
aaaugggacuuacgaguuu

SEQ ID NO: 1351226 - RNA, 19 nt, Homo sapiens
  misc_RNA (1)...(19): siRNA sense strand
guuaucagaugcacuuuau

SEQ ID NO: 1351227 - RNA, 19 nt, Homo sapiens
  misc_RNA (1)...(19): siRNA sense strand
gagcugaauaugccacuua

SEQ ID NO: 1351228 - RNA, 19 nt, Homo sapiens
  misc_RNA (1)...(19): siRNA sense strand
gagcagagaggcugaauag

SEQ ID NO: 1351229 - RNA, 19 nt, Homo sapiens
  misc_RNA (1)...(19): siRNA sense strand
ugagauuggugaacgagua

SEQ ID NO: 1351230 - RNA, 19 nt, Homo sapiens
  misc_RNA (1)...(19): siRNA sense strand
gugaacgaguagauuauaa

SEQ ID NO: 1351231 - RNA, 19 nt, Homo sapiens
  misc_RNA (1)...(19): siRNA sense strand
gagagagcacgauuuauug

SEQ ID NO: 1351232 - RNA, 19 nt, Homo sapiens
  misc_RNA (1)...(19): siRNA sense strand
caaaugggacuuacgaguu

SEQ ID NO: 1351233 - RNA, 19 nt, Homo sapiens
  misc_RNA (1)...(19): siRNA sense strand
ggucauugcugugauuguu

SEQ ID NO: 1351234 - RNA, 19 nt, Homo sapiens
  misc_RNA (1)...(19): siRNA sense strand
ccagauccauuuucacuua

SEQ ID NO: 1351235 - RNA, 19 nt, Homo sapiens
  misc_RNA (1)...(19): siRNA sense strand
gaaggaauacuugacaguu

SEQ ID NO: 1351236 - RNA, 19 nt, Homo sapiens
  misc_RNA (1)...(19): siRNA sense strand
aaggaauacuugacaguuu

SEQ ID NO: 1351237 - RNA, 19 nt, Homo sapiens
  misc_RNA (1)...(19): siRNA sense strand
ucagaugacgccuguuaua

SEQ ID NO: 1351238 - RNA, 19 nt, Homo sapiens
  misc_RNA (1)...(19): siRNA sense strand
gaaaacacaccuuuaguga

SEQ ID NO: 1351239 - RNA, 19 nt, Homo sapiens
  misc_RNA (1)...(19): siRNA sense strand
gaugacgccuguuauagag

SEQ ID NO: 1351240 - RNA, 19 nt, Homo sapiens
  misc_RNA (1)...(19): siRNA sense strand
gagaaacauguccauauau

SEQ ID NO: 1351241 - RNA, 19 nt, Homo sapiens
  misc_RNA (1)...(19): siRNA sense strand
ccacuuaccagacuaaauc

SEQ ID NO: 1351242 - RNA, 19 nt, Homo sapiens
  misc_RNA (1)...(19): siRNA sense strand
acgaguagauuauaagugu

SEQ ID NO: 1351243 - RNA, 19 nt, Homo sapiens
  misc_RNA (1)...(19): siRNA sense strand
cuacaaagcaacaguuaug

SEQ ID NO: 1351244 - RNA, 19 nt, Homo sapiens
  misc_RNA (1)...(19): siRNA sense strand
ccaccaacauuugaagcua

SEQ ID NO: 1351245 - RNA, 19 nt, Homo sapiens
  misc_RNA (1)...(19): siRNA sense strand
uauacgggauccuuuaaau

SEQ ID NO: 1351246 - RNA, 19 nt, Homo sapiens
  misc_RNA (1)...(19): siRNA sense strand
cgaguuugguuaucagaug

SEQ ID NO: 1351247 - RNA, 19 nt, Homo sapiens
  misc_RNA (1)...(19): siRNA sense strand
gaacgaguagauuauaagu

SEQ ID NO: 1351248 - RNA, 19 nt, Homo sapiens
  misc_RNA (1)...(19): siRNA sense strand
gugaggagccaccaacauu

SEQ ID NO: 1351249 - RNA, 19 nt, Homo sapiens
  misc_RNA (1)...(19): siRNA sense strand
gauggcagcgacacaauug

SEQ ID NO: 1351250 - RNA, 19 nt, Homo sapiens
  misc_RNA (1)...(19): siRNA sense strand
ucucagaugacgccuguua

SEQ ID NO: 1351251 - RNA, 19 nt, Homo sapiens
  misc_RNA (1)...(19): siRNA sense strand
acacaccuuuagugaagua

SEQ ID NO: 1351252 - RNA, 19 nt, Homo sapiens
  misc_RNA (1)...(19): siRNA sense strand
gcuauggagcucauuggua

SEQ ID NO: 1351253 - RNA, 19 nt, Homo sapiens
  misc_RNA (1)...(19): siRNA sense strand
gaggagccaccaacauuug

SEQ ID NO: 1351254 - RNA, 19 nt, Homo sapiens
  misc_RNA (1)...(19): siRNA sense strand
uagagaaacauguccauau

SEQ ID NO: 1351255 - RNA, 19 nt, Homo sapiens
  misc_RNA (1)...(19): siRNA sense strand
ggugaacgaguagauuaua

SEQ ID NO: 1351256 - RNA, 19 nt, Homo sapiens
  misc_RNA (1)...(19): siRNA sense strand
gaaguagaaguauuugagu

SEQ ID NO: 1351257 - RNA, 19 nt, Homo sapiens
  misc_RNA (1)...(19): siRNA sense strand
gaaacauguccauauauac

SEQ ID NO: 1351258 - RNA, 19 nt, Homo sapiens
  misc_RNA (1)...(19): siRNA sense strand
ugacgccuguuauagagaa

SEQ ID NO: 1351259 - RNA, 19 nt, Homo sapiens
  misc_RNA (1)...(19): siRNA sense strand
cgaguagauuauaagugua

SEQ ID NO: 1351260 - RNA, 19 nt, Homo sapiens
  misc_RNA (1)...(19): siRNA sense strand
gcacuuuauuuguaaugag

SEQ ID NO: 1351261 - RNA, 19 nt, Homo sapiens
  misc_RNA (1)...(19): siRNA sense strand
guagaaguauuugaguauc

SEQ ID NO: 1351262 - RNA, 19 nt, Homo sapiens
  misc_RNA (1)...(19): siRNA sense strand
guauuugaguaucuugaug

SEQ ID NO: 1351263 - RNA, 19 nt, Homo sapiens
  misc_RNA (1)...(19): siRNA sense strand
aggaauacuugacaguuug

SEQ ID NO: 1351264 - RNA, 19 nt, Homo sapiens
  misc_RNA (1)...(19): siRNA sense strand
ccaaaacccuacuaugaga

SEQ ID NO: 1351265 - RNA, 19 nt, Homo sapiens
  misc_RNA (1)...(19): siRNA sense strand
aguguaaaguggucaaaug

SEQ ID NO: 1351266 - RNA, 19 nt, Homo sapiens
  misc_RNA (1)...(19): siRNA sense strand
ccacccauacuauuuguga

SEQ ID NO: 1351267 - RNA, 19 nt, Homo sapiens
  misc_RNA (1)...(19): siRNA sense strand
uuggagagagcacgauuua

SEQ ID NO: 1351268 - RNA, 19 nt, Homo sapiens
  misc_RNA (1)...(19): siRNA sense strand
gguuaucagaugcacuuua

SEQ ID NO: 1351269 - RNA, 19 nt, Homo sapiens
  misc_RNA (1)...(19): siRNA sense strand
caccaacauuugaagcuau

SEQ ID NO: 1351270 - RNA, 19 nt, Homo sapiens
  misc_RNA (1)...(19): siRNA sense strand
ugaggagccaccaacauuu

SEQ ID NO: 1351271 - RNA, 19 nt, Homo sapiens
  misc_RNA (1)...(19): siRNA sense strand
ggaaggaauacuugacagu

SEQ ID NO: 1351272 - RNA, 19 nt, Homo sapiens
  misc_RNA (1)...(19): siRNA sense strand
gaggaaggaauacuugaca

SEQ ID NO: 1351273 - RNA, 19 nt, Homo sapiens
  misc_RNA (1)...(19): siRNA sense strand
ugaguaucuugaugcagua

SEQ ID NO: 1351274 - RNA, 19 nt, Homo sapiens
  misc_RNA (1)...(19): siRNA sense strand
caccuuuagugaaguagaa

SEQ ID NO: 1351275 - RNA, 19 nt, Homo sapiens
  misc_RNA (1)...(19): siRNA sense strand
acagauaucaggauuugga

SEQ ID NO: 1351276 - RNA, 19 nt, Homo sapiens
  misc_RNA (1)...(19): siRNA sense strand
ucauugcugugauuguuau

SEQ ID NO: 1351277 - RNA, 19 nt, Homo sapiens
  misc_RNA (1)...(19): siRNA sense strand
ucagaugcacuuuauuugu

SEQ ID NO: 1351278 - RNA, 19 nt, Homo sapiens
  misc_RNA (1)...(19): siRNA sense strand
gugcugcuccagaguguaa

SEQ ID NO: 1351279 - RNA, 19 nt, Homo sapiens
  misc_RNA (1)...(19): siRNA sense strand
ggaaaacacaccuuuagug

SEQ ID NO: 1351280 - RNA, 19 nt, Homo sapiens
  misc_RNA (1)...(19): siRNA sense strand
aaggaucaguagcaauuug

SEQ ID NO: 1351281 - RNA, 19 nt, Homo sapiens
  misc_RNA (1)...(19): siRNA sense strand
uauauacgggauccuuuaa

SEQ ID NO: 1351282 - RNA, 19 nt, Homo sapiens
  misc_RNA (1)...(19): siRNA sense strand
ugaaguagaaguauuugag

SEQ ID NO: 1351283 - RNA, 19 nt, Homo sapiens
  misc_RNA (1)...(19): siRNA sense strand
cuugacaguuuggauguuu

SEQ ID NO: 1351284 - RNA, 19 nt, Homo sapiens
  misc_RNA (1)...(19): siRNA sense strand
cauauauacgggauccuuu

SEQ ID NO: 1351285 - RNA, 19 nt, Homo sapiens
  misc_RNA (1)...(19): siRNA sense strand
auauauacgggauccuuua

SEQ ID NO: 1351286 - RNA, 19 nt, Homo sapiens
  misc_RNA (1)...(19): siRNA sense strand
cuuaaaggaucaguagcaa

SEQ ID NO: 1351287 - RNA, 19 nt, Homo sapiens
  misc_RNA (1)...(19): siRNA sense strand
uaaaccugaggaaggaaua

SEQ ID NO: 1351288 - RNA, 19 nt, Homo sapiens
  misc_RNA (1)...(19): siRNA sense strand
agaugacgccuguuauaga

SEQ ID NO: 1351289 - RNA, 19 nt, Homo sapiens
  misc_RNA (1)...(19): siRNA sense strand
ugugauuguuauugccaua

SEQ ID NO: 1351290 - RNA, 19 nt, Homo sapiens
  misc_RNA (1)...(19): siRNA sense strand
gagagcacgauuuauugug

SEQ ID NO: 1351291 - RNA, 19 nt, Homo sapiens
  misc_RNA (1)...(19): siRNA sense strand
gaaguauuugaguaucuug

SEQ ID NO: 1351292 - RNA, 19 nt, Homo sapiens
  misc_RNA (1)...(19): siRNA sense strand
ggcuaccugucucagauga

SEQ ID NO: 1351293 - RNA, 19 nt, Homo sapiens
  misc_RNA (1)...(19): siRNA sense strand
gauaucaggauuuggaaaa

SEQ ID NO: 1351294 - RNA, 19 nt, Homo sapiens
  misc_RNA (1)...(19): siRNA sense strand
ccucuugccacccauacua

SEQ ID NO: 1351295 - RNA, 19 nt, Homo sapiens
  misc_RNA (1)...(19): siRNA sense strand
ccaugguguugcugcugua

SEQ ID NO: 1351296 - RNA, 19 nt, Homo sapiens
  misc_RNA (1)...(19): siRNA sense strand
cagaugacgccuguuauag

SEQ ID NO: 1351297 - RNA, 19 nt, Homo sapiens
  misc_RNA (1)...(19): siRNA sense strand
cagaugguggagcugaaua

SEQ ID NO: 1351298 - RNA, 19 nt, Homo sapiens
  misc_RNA (1)...(19): siRNA sense strand
gucauugcugugauuguua

SEQ ID NO: 1351299 - RNA, 19 nt, Homo sapiens
  misc_RNA (1)...(19): siRNA sense strand
ggagccaccaacauuugaa

SEQ ID NO: 1351300 - RNA, 19 nt, Homo sapiens
  misc_RNA (1)...(19): siRNA sense strand
uuggugaacgaguagauua

SEQ ID NO: 1351301 - RNA, 19 nt, Homo sapiens
  misc_RNA (1)...(19): siRNA sense strand
gcgcuuuccuggguugcuu

SEQ ID NO: 1351302 - RNA, 19 nt, Homo sapiens
  misc_RNA (1)...(19): siRNA sense strand
uacuacaaagcaacaguua

SEQ ID NO: 1351303 - RNA, 19 nt, Homo sapiens
  misc_RNA (1)...(19): siRNA sense strand
cuugaugcaguaacuuaua

SEQ ID NO: 1351304 - RNA, 19 nt, Homo sapiens
  misc_RNA (1)...(19): siRNA sense strand
aaacauguccauauauacg

SEQ ID NO: 1351305 - RNA, 19 nt, Homo sapiens
  misc_RNA (1)...(19): siRNA sense strand
guguaaaguggucaaaugu

SEQ ID NO: 1351306 - RNA, 19 nt, Homo sapiens
  misc_RNA (1)...(19): siRNA sense strand
cuuacgaguuugguuauca

SEQ ID NO: 1351307 - RNA, 19 nt, Homo sapiens
  misc_RNA (1)...(19): siRNA sense strand
uacgggauccuuuaaaugg

SEQ ID NO: 1351308 - RNA, 19 nt, Homo sapiens
  misc_RNA (1)...(19): siRNA sense strand
gcagaugguggagcugaau

SEQ ID NO: 1351309 - RNA, 19 nt, Homo sapiens
  misc_RNA (1)...(19): siRNA sense strand
aaccaaaacccuacuauga

SEQ ID NO: 1351310 - RNA, 19 nt, Homo sapiens
  misc_RNA (1)...(19): siRNA sense strand
uugaugcaguaacuuauag

SEQ ID NO: 1351311 - RNA, 19 nt, Homo sapiens
  misc_RNA (1)...(19): siRNA sense strand
ggagcugaauaugccacuu

SEQ ID NO: 1351312 - RNA, 19 nt, Homo sapiens
  misc_RNA (1)...(19): siRNA sense strand
caacauuugaagcuaugga

SEQ ID NO: 1351313 - RNA, 19 nt, Homo sapiens
  misc_RNA (1)...(19): siRNA sense strand
cgauggcagcgacacaauu

SEQ ID NO: 1351314 - RNA, 19 nt, Homo sapiens
  misc_RNA (1)...(19): siRNA sense strand
gauccauuuucacuuauug

SEQ ID NO: 1351315 - RNA, 19 nt, Homo sapiens
  misc_RNA (1)...(19): siRNA sense strand
ggagagagcacgauuuauu

SEQ ID NO: 1351316 - RNA, 19 nt, Homo sapiens
  misc_RNA (1)...(19): siRNA sense strand
agagaaacauguccauaua

SEQ ID NO: 1351317 - RNA, 19 nt, Homo sapiens
  misc_RNA (1)...(19): siRNA sense strand
cagaugcacuuuauuugua

SEQ ID NO: 1351318 - RNA, 19 nt, Homo sapiens
  misc_RNA (1)...(19): siRNA sense strand
ggacuuacgaguuugguua

SEQ ID NO: 1351319 - RNA, 19 nt, Homo sapiens
  misc_RNA (1)...(19): siRNA sense strand
aaacagauaucaggauuug

SEQ ID NO: 1351320 - RNA, 19 nt, Homo sapiens
  misc_RNA (1)...(19): siRNA sense strand
cuauggagcucauugguaa

SEQ ID NO: 1351321 - RNA, 19 nt, Homo sapiens
  misc_RNA (1)...(19): siRNA sense strand
aaacacaccuuuagugaag

SEQ ID NO: 1351322 - RNA, 19 nt, Homo sapiens
  misc_RNA (1)...(19): siRNA sense strand
gaacuuaaaggaucaguag

SEQ ID NO: 1351323 - RNA, 19 nt, Homo sapiens
  misc_RNA (1)...(19): siRNA sense strand
gaaaacagauaucaggauu

SEQ ID NO: 1351324 - RNA, 19 nt, Homo sapiens
  misc_RNA (1)...(19): siRNA sense strand
uaaaggaucaguagcaauu

SEQ ID NO: 1351325 - RNA, 19 nt, Homo sapiens
  misc_RNA (1)...(19): siRNA sense strand
aaaugggacuuacgaguuu

SEQ ID NO: 1351326 - RNA, 19 nt, Homo sapiens
  misc_RNA (1)...(19): siRNA sense strand
guuaucagaugcacuuuau

SEQ ID NO: 1351327 - RNA, 19 nt, Homo sapiens
  misc_RNA (1)...(19): siRNA sense strand
gagcugaauaugccacuua

SEQ ID NO: 1351328 - RNA, 19 nt, Homo sapiens
  misc_RNA (1)...(19): siRNA sense strand
ugagauuggugaacgagua

SEQ ID NO: 1351329 - RNA, 19 nt, Homo sapiens
  misc_RNA (1)...(19): siRNA sense strand
gugaacgaguagauuauaa

SEQ ID NO: 1351330 - RNA, 19 nt, Homo sapiens
  misc_RNA (1)...(19): siRNA sense strand
gagagagcacgauuuauug

SEQ ID NO: 1351331 - RNA, 19 nt, Homo sapiens
  misc_RNA (1)...(19): siRNA sense strand
caaaugggacuuacgaguu

SEQ ID NO: 1351332 - RNA, 19 nt, Homo sapiens
  misc_RNA (1)...(19): siRNA sense strand
ggucauugcugugauuguu

SEQ ID NO: 1351333 - RNA, 19 nt, Homo sapiens
  misc_RNA (1)...(19): siRNA sense strand
ccagauccauuuucacuua

SEQ ID NO: 1351334 - RNA, 19 nt, Homo sapiens
  misc_RNA (1)...(19): siRNA sense strand
gaaggaauacuugacaguu

SEQ ID NO: 1351335 - RNA, 19 nt, Homo sapiens
  misc_RNA (1)...(19): siRNA sense strand
aaggaauacuugacaguuu

SEQ ID NO: 1351336 - RNA, 19 nt, Homo sapiens
  misc_RNA (1)...(19): siRNA sense strand
ucagaugacgccuguuaua

SEQ ID NO: 1351337 - RNA, 19 nt, Homo sapiens
  misc_RNA (1)...(19): siRNA sense strand
gaaaacacaccuuuaguga

SEQ ID NO: 1351338 - RNA, 19 nt, Homo sapiens
  misc_RNA (1)...(19): siRNA sense strand
gaugacgccuguuauagag

SEQ ID NO: 1351339 - RNA, 19 nt, Homo sapiens
  misc_RNA (1)...(19): siRNA sense strand
gagaaacauguccauauau

SEQ ID NO: 1351340 - RNA, 19 nt, Homo sapiens
  misc_RNA (1)...(19): siRNA sense strand
ccacuuaccagacuaaauc

SEQ ID NO: 1351341 - RNA, 19 nt, Homo sapiens
  misc_RNA (1)...(19): siRNA sense strand
acgaguagauuauaagugu

SEQ ID NO: 1351342 - RNA, 19 nt, Homo sapiens
  misc_RNA (1)...(19): siRNA sense strand
cuacaaagcaacaguuaug

SEQ ID NO: 1351343 - RNA, 19 nt, Homo sapiens
  misc_RNA (1)...(19): siRNA sense strand
ccaccaacauuugaagcua

SEQ ID NO: 1351344 - RNA, 19 nt, Homo sapiens
  misc_RNA (1)...(19): siRNA sense strand
uauacgggauccuuuaaau

SEQ ID NO: 1351345 - RNA, 19 nt, Homo sapiens
  misc_RNA (1)...(19): siRNA sense strand
cgaguuugguuaucagaug

SEQ ID NO: 1351346 - RNA, 19 nt, Homo sapiens
  misc_RNA (1)...(19): siRNA sense strand
gaacgaguagauuauaagu

SEQ ID NO: 1351347 - RNA, 19 nt, Homo sapiens
  misc_RNA (1)...(19): siRNA sense strand
gugaggagccaccaacauu

SEQ ID NO: 1351348 - RNA, 19 nt, Homo sapiens
  misc_RNA (1)...(19): siRNA sense strand
gauggcagcgacacaauug

SEQ ID NO: 1351349 - RNA, 19 nt, Homo sapiens
  misc_RNA (1)...(19): siRNA sense strand
ucucagaugacgccuguua

SEQ ID NO: 1351350 - RNA, 19 nt, Homo sapiens
  misc_RNA (1)...(19): siRNA sense strand
gaggagccaccaacauuug

SEQ ID NO: 1351351 - RNA, 19 nt, Homo sapiens
  misc_RNA (1)...(19): siRNA sense strand
gcuauggagcucauuggua

SEQ ID NO: 1351352 - RNA, 19 nt, Homo sapiens
  misc_RNA (1)...(19): siRNA sense strand
acacaccuuuagugaagua

SEQ ID NO: 1351353 - RNA, 19 nt, Homo sapiens
  misc_RNA (1)...(19): siRNA sense strand
uagagaaacauguccauau

SEQ ID NO: 1351354 - RNA, 19 nt, Homo sapiens
  misc_RNA (1)...(19): siRNA sense strand
guuccaaagugucuuaaag

SEQ ID NO: 1351355 - RNA, 19 nt, Homo sapiens
  misc_RNA (1)...(19): siRNA sense strand
ggugaacgaguagauuaua

SEQ ID NO: 1351356 - RNA, 19 nt, Homo sapiens
  misc_RNA (1)...(19): siRNA sense strand
gaaguagaaguauuugagu

SEQ ID NO: 1351357 - RNA, 19 nt, Homo sapiens
  misc_RNA (1)...(19): siRNA sense strand
gaaacauguccauauauac

SEQ ID NO: 1351358 - RNA, 19 nt, Homo sapiens
  misc_RNA (1)...(19): siRNA sense strand
ugacgccuguuauagagaa

SEQ ID NO: 1351359 - RNA, 19 nt, Homo sapiens
  misc_RNA (1)...(19): siRNA sense strand
cgaguagauuauaagugua

SEQ ID NO: 1351360 - RNA, 19 nt, Homo sapiens
  misc_RNA (1)...(19): siRNA sense strand
gcacuuuauuuguaaugag

SEQ ID NO: 1351361 - RNA, 19 nt, Homo sapiens
  misc_RNA (1)...(19): siRNA sense strand
guagaaguauuugaguauc

SEQ ID NO: 1351362 - RNA, 19 nt, Homo sapiens
  misc_RNA (1)...(19): siRNA sense strand
guauuugaguaucuugaug

SEQ ID NO: 1351363 - RNA, 19 nt, Homo sapiens
  misc_RNA (1)...(19): siRNA sense strand
aggaauacuugacaguuug

SEQ ID NO: 1351364 - RNA, 19 nt, Homo sapiens
  misc_RNA (1)...(19): siRNA sense strand
ccaaaacccuacuaugaga

SEQ ID NO: 1351365 - RNA, 19 nt, Homo sapiens
  misc_RNA (1)...(19): siRNA sense strand
aguguaaaguggucaaaug

SEQ ID NO: 1351366 - RNA, 19 nt, Homo sapiens
  misc_RNA (1)...(19): siRNA sense strand
ccacccauacuauuuguga

SEQ ID NO: 1351367 - RNA, 19 nt, Homo sapiens
  misc_RNA (1)...(19): siRNA sense strand
uuggagagagcacgauuua

SEQ ID NO: 1351368 - RNA, 19 nt, Homo sapiens
  misc_RNA (1)...(19): siRNA sense strand
gguuaucagaugcacuuua

SEQ ID NO: 1351369 - RNA, 19 nt, Homo sapiens
  misc_RNA (1)...(19): siRNA sense strand
caccaacauuugaagcuau

SEQ ID NO: 1351370 - RNA, 19 nt, Homo sapiens
  misc_RNA (1)...(19): siRNA sense strand
ugaggagccaccaacauuu

SEQ ID NO: 1351371 - RNA, 19 nt, Homo sapiens
  misc_RNA (1)...(19): siRNA sense strand
ggaaggaauacuugacagu

SEQ ID NO: 1351372 - RNA, 19 nt, Homo sapiens
  misc_RNA (1)...(19): siRNA sense strand
gaggaaggaauacuugaca

SEQ ID NO: 1351373 - RNA, 19 nt, Homo sapiens
  misc_RNA (1)...(19): siRNA sense strand
ccaguuccaaagugucuua

SEQ ID NO: 1351374 - RNA, 19 nt, Homo sapiens
  misc_RNA (1)...(19): siRNA sense strand
ugaguaucuugaugcagua

SEQ ID NO: 1351375 - RNA, 19 nt, Homo sapiens
  misc_RNA (1)...(19): siRNA sense strand
caccuuuagugaaguagaa

SEQ ID NO: 1351376 - RNA, 19 nt, Homo sapiens
  misc_RNA (1)...(19): siRNA sense strand
acagauaucaggauuugga

SEQ ID NO: 1351377 - RNA, 19 nt, Homo sapiens
  misc_RNA (1)...(19): siRNA sense strand
ucauugcugugauuguuau

SEQ ID NO: 1351378 - RNA, 19 nt, Homo sapiens
  misc_RNA (1)...(19): siRNA sense strand
ucagaugcacuuuauuugu

SEQ ID NO: 1351379 - RNA, 19 nt, Homo sapiens
  misc_RNA (1)...(19): siRNA sense strand
gugcugcuccagaguguaa

SEQ ID NO: 1351380 - RNA, 19 nt, Homo sapiens
  misc_RNA (1)...(19): siRNA sense strand
ggaaaacacaccuuuagug

SEQ ID NO: 1351381 - RNA, 19 nt, Homo sapiens
  misc_RNA (1)...(19): siRNA sense strand
aaggaucaguagcaauuug

SEQ ID NO: 1351382 - RNA, 19 nt, Homo sapiens
  misc_RNA (1)...(19): siRNA sense strand
uauauacgggauccuuuaa

SEQ ID NO: 1351383 - RNA, 19 nt, Homo sapiens
  misc_RNA (1)...(19): siRNA sense strand
ugaaguagaaguauuugag

SEQ ID NO: 1351384 - RNA, 19 nt, Homo sapiens
  misc_RNA (1)...(19): siRNA sense strand
cuugacaguuuggauguuu

SEQ ID NO: 1351385 - RNA, 19 nt, Homo sapiens
  misc_RNA (1)...(19): siRNA sense strand
cauauauacgggauccuuu

SEQ ID NO: 1351386 - RNA, 19 nt, Homo sapiens
  misc_RNA (1)...(19): siRNA sense strand
auauauacgggauccuuua

SEQ ID NO: 1351387 - RNA, 19 nt, Homo sapiens
  misc_RNA (1)...(19): siRNA sense strand
cuuaaaggaucaguagcaa

SEQ ID NO: 1351388 - RNA, 19 nt, Homo sapiens
  misc_RNA (1)...(19): siRNA sense strand
uaaaccugaggaaggaaua

SEQ ID NO: 1351389 - RNA, 19 nt, Homo sapiens
  misc_RNA (1)...(19): siRNA sense strand
agaugacgccuguuauaga

SEQ ID NO: 1351390 - RNA, 19 nt, Homo sapiens
  misc_RNA (1)...(19): siRNA sense strand
ugugauuguuauugccaua

SEQ ID NO: 1351391 - RNA, 19 nt, Homo sapiens
  misc_RNA (1)...(19): siRNA sense strand
gagagcacgauuuauugug

SEQ ID NO: 1351392 - RNA, 19 nt, Homo sapiens
  misc_RNA (1)...(19): siRNA sense strand
gaaguauuugaguaucuug

SEQ ID NO: 1351393 - RNA, 19 nt, Homo sapiens
  misc_RNA (1)...(19): siRNA sense strand
ggcuaccugucucagauga

SEQ ID NO: 1351394 - RNA, 19 nt, Homo sapiens
  misc_RNA (1)...(19): siRNA sense strand
gauaucaggauuuggaaaa

SEQ ID NO: 1351395 - RNA, 19 nt, Homo sapiens
  misc_RNA (1)...(19): siRNA sense strand
ccucuugccacccauacua

SEQ ID NO: 1351396 - RNA, 19 nt, Homo sapiens
  misc_RNA (1)...(19): siRNA sense strand
ccaugguguugcugcugua

SEQ ID NO: 1351397 - RNA, 19 nt, Homo sapiens
  misc_RNA (1)...(19): siRNA sense strand
cagaugacgccuguuauag

SEQ ID NO: 1351398 - RNA, 19 nt, Homo sapiens
  misc_RNA (1)...(19): siRNA sense strand
cagaugguggagcugaaua

SEQ ID NO: 1351399 - RNA, 19 nt, Homo sapiens
  misc_RNA (1)...(19): siRNA sense strand
gucauugcugugauuguua

SEQ ID NO: 1351400 - RNA, 19 nt, Homo sapiens
  misc_RNA (1)...(19): siRNA sense strand
ggagccaccaacauuugaa

SEQ ID NO: 1351401 - RNA, 19 nt, Homo sapiens
  misc_RNA (1)...(19): siRNA sense strand
uuggugaacgaguagauua

SEQ ID NO: 1351402 - RNA, 19 nt, Homo sapiens
  misc_RNA (1)...(19): siRNA sense strand
gcgcuuuccuggguugcuu

SEQ ID NO: 1351403 - RNA, 19 nt, Homo sapiens
  misc_RNA (1)...(19): siRNA sense strand
uacuacaaagcaacaguua

SEQ ID NO: 1351404 - RNA, 19 nt, Homo sapiens
  misc_RNA (1)...(19): siRNA sense strand
cuugaugcaguaacuuaua

SEQ ID NO: 1351405 - RNA, 19 nt, Homo sapiens
  misc_RNA (1)...(19): siRNA sense strand
aaacauguccauauauacg

SEQ ID NO: 1351406 - RNA, 19 nt, Homo sapiens
  misc_RNA (1)...(19): siRNA sense strand
guguaaaguggucaaaugu

SEQ ID NO: 1351407 - RNA, 19 nt, Homo sapiens
  misc_RNA (1)...(19): siRNA sense strand
cuuacgaguuugguuauca

SEQ ID NO: 1351408 - RNA, 19 nt, Homo sapiens
  misc_RNA (1)...(19): siRNA sense strand
uacgggauccuuuaaaugg

SEQ ID NO: 1351409 - RNA, 19 nt, Homo sapiens
  misc_RNA (1)...(19): siRNA sense strand
gcagaugguggagcugaau

SEQ ID NO: 1351410 - RNA, 19 nt, Homo sapiens
  misc_RNA (1)...(19): siRNA sense strand
aaccaaaacccuacuauga

SEQ ID NO: 1351411 - RNA, 19 nt, Homo sapiens
  misc_RNA (1)...(19): siRNA sense strand
uugaugcaguaacuuauag

SEQ ID NO: 1351412 - RNA, 19 nt, Homo sapiens
  misc_RNA (1)...(19): siRNA sense strand
ggagcugaauaugccacuu

SEQ ID NO: 1351413 - RNA, 19 nt, Homo sapiens
  misc_RNA (1)...(19): siRNA sense strand
cgauggcagcgacacaauu

SEQ ID NO: 1351414 - RNA, 19 nt, Homo sapiens
  misc_RNA (1)...(19): siRNA sense strand
gauccauuuucacuuauug

SEQ ID NO: 1351415 - RNA, 19 nt, Homo sapiens
  misc_RNA (1)...(19): siRNA sense strand
ggagagagcacgauuuauu

SEQ ID NO: 1351416 - RNA, 19 nt, Homo sapiens
  misc_RNA (1)...(19): siRNA sense strand
agagaaacauguccauaua

SEQ ID NO: 1351417 - RNA, 19 nt, Homo sapiens
  misc_RNA (1)...(19): siRNA sense strand
cagaugcacuuuauuugua

SEQ ID NO: 1351418 - RNA, 19 nt, Homo sapiens
  misc_RNA (1)...(19): siRNA sense strand
ggacuuacgaguuugguua

SEQ ID NO: 1351419 - RNA, 19 nt, Homo sapiens
  misc_RNA (1)...(19): siRNA sense strand
aaacagauaucaggauuug

SEQ ID NO: 1351420 - RNA, 19 nt, Homo sapiens
  misc_RNA (1)...(19): siRNA sense strand
cuauggagcucauugguaa

SEQ ID NO: 1351421 - RNA, 19 nt, Homo sapiens
  misc_RNA (1)...(19): siRNA sense strand
aaacacaccuuuagugaag

SEQ ID NO: 1351422 - RNA, 19 nt, Homo sapiens
  misc_RNA (1)...(19): siRNA sense strand
gaacuuaaaggaucaguag

SEQ ID NO: 1351423 - RNA, 19 nt, Homo sapiens
  misc_RNA (1)...(19): siRNA sense strand
gaaaacagauaucaggauu

SEQ ID NO: 1351424 - RNA, 19 nt, Homo sapiens
  misc_RNA (1)...(19): siRNA sense strand
uaaaggaucaguagcaauu

SEQ ID NO: 1351425 - RNA, 19 nt, Homo sapiens
  misc_RNA (1)...(19): siRNA sense strand
aaaugggacuuacgaguuu

SEQ ID NO: 1351426 - RNA, 19 nt, Homo sapiens
  misc_RNA (1)...(19): siRNA sense strand
guuaucagaugcacuuuau

SEQ ID NO: 1351427 - RNA, 19 nt, Homo sapiens
  misc_RNA (1)...(19): siRNA sense strand
gagcugaauaugccacuua

SEQ ID NO: 1351428 - RNA, 19 nt, Homo sapiens
  misc_RNA (1)...(19): siRNA sense strand
ugagauuggugaacgagua

SEQ ID NO: 1351429 - RNA, 19 nt, Homo sapiens
  misc_RNA (1)...(19): siRNA sense strand
gugaacgaguagauuauaa

SEQ ID NO: 1351430 - RNA, 19 nt, Homo sapiens
  misc_RNA (1)...(19): siRNA sense strand
gagagagcacgauuuauug

SEQ ID NO: 1351431 - RNA, 19 nt, Homo sapiens
  misc_RNA (1)...(19): siRNA sense strand
caaaugggacuuacgaguu

SEQ ID NO: 1351432 - RNA, 19 nt, Homo sapiens
  misc_RNA (1)...(19): siRNA sense strand
ggucauugcugugauuguu

SEQ ID NO: 1351433 - RNA, 19 nt, Homo sapiens
  misc_RNA (1)...(19): siRNA sense strand
ccagauccauuuucacuua

SEQ ID NO: 1351434 - RNA, 19 nt, Homo sapiens
  misc_RNA (1)...(19): siRNA sense strand
gaaggaauacuugacaguu

SEQ ID NO: 1351435 - RNA, 19 nt, Homo sapiens
  misc_RNA (1)...(19): siRNA sense strand
aaggaauacuugacaguuu

SEQ ID NO: 1351436 - RNA, 19 nt, Homo sapiens
  misc_RNA (1)...(19): siRNA sense strand
ucagaugacgccuguuaua

SEQ ID NO: 1351437 - RNA, 19 nt, Homo sapiens
  misc_RNA (1)...(19): siRNA sense strand
gaaaacacaccuuuaguga

SEQ ID NO: 1351438 - RNA, 19 nt, Homo sapiens
  misc_RNA (1)...(19): siRNA sense strand
gaugacgccuguuauagag

SEQ ID NO: 1351439 - RNA, 19 nt, Homo sapiens
  misc_RNA (1)...(19): siRNA sense strand
gagaaacauguccauauau

SEQ ID NO: 1351440 - RNA, 19 nt, Homo sapiens
  misc_RNA (1)...(19): siRNA sense strand
ccacuuaccagacuaaauc

SEQ ID NO: 1351441 - RNA, 19 nt, Homo sapiens
  misc_RNA (1)...(19): siRNA sense strand
acgaguagauuauaagugu

SEQ ID NO: 1351442 - RNA, 19 nt, Homo sapiens
  misc_RNA (1)...(19): siRNA sense strand
cuacaaagcaacaguuaug

SEQ ID NO: 1351443 - RNA, 19 nt, Homo sapiens
  misc_RNA (1)...(19): siRNA sense strand
ccaccaacauuugaagcua

SEQ ID NO: 1351444 - RNA, 19 nt, Homo sapiens
  misc_RNA (1)...(19): siRNA sense strand
uauacgggauccuuuaaau

SEQ ID NO: 1351445 - RNA, 19 nt, Homo sapiens
  misc_RNA (1)...(19): siRNA sense strand
cgaguuugguuaucagaug

SEQ ID NO: 1351446 - RNA, 19 nt, Homo sapiens
  misc_RNA (1)...(19): siRNA sense strand
gaacgaguagauuauaagu

SEQ ID NO: 1351447 - RNA, 19 nt, Homo sapiens
  misc_RNA (1)...(19): siRNA sense strand
gugaggagccaccaacauu

SEQ ID NO: 1351448 - RNA, 19 nt, Homo sapiens
  misc_RNA (1)...(19): siRNA sense strand
gauggcagcgacacaauug

SEQ ID NO: 1351449 - RNA, 19 nt, Homo sapiens
  misc_RNA (1)...(19): siRNA sense strand
ucucagaugacgccuguua

SEQ ID NO: 1351450 - RNA, 19 nt, Homo sapiens
  misc_RNA (1)...(19): siRNA sense strand
gaggagccaccaacauuug

SEQ ID NO: 1351451 - RNA, 19 nt, Homo sapiens
  misc_RNA (1)...(19): siRNA sense strand
gcuauggagcucauuggua

SEQ ID NO: 1351452 - RNA, 19 nt, Homo sapiens
  misc_RNA (1)...(19): siRNA sense strand
acacaccuuuagugaagua

SEQ ID NO: 1351453 - RNA, 19 nt, Homo sapiens
  misc_RNA (1)...(19): siRNA sense strand
uagagaaacauguccauau

SEQ ID NO: 1351454 - RNA, 19 nt, Homo sapiens
  misc_RNA (1)...(19): siRNA sense strand
guuccaaagugucuuaaag

SEQ ID NO: 1351455 - RNA, 19 nt, Homo sapiens
  misc_RNA (1)...(19): siRNA sense strand
ggugaacgaguagauuaua

SEQ ID NO: 1351456 - RNA, 19 nt, Homo sapiens
  misc_RNA (1)...(19): siRNA sense strand
gaaguagaaguauuugagu

SEQ ID NO: 1351457 - RNA, 19 nt, Homo sapiens
  misc_RNA (1)...(19): siRNA sense strand
gaaacauguccauauauac

SEQ ID NO: 1351458 - RNA, 19 nt, Homo sapiens
  misc_RNA (1)...(19): siRNA sense strand
ugacgccuguuauagagaa

SEQ ID NO: 1351459 - RNA, 19 nt, Homo sapiens
  misc_RNA (1)...(19): siRNA sense strand
cgaguagauuauaagugua

SEQ ID NO: 1351460 - RNA, 19 nt, Homo sapiens
  misc_RNA (1)...(19): siRNA sense strand
gcacuuuauuuguaaugag

SEQ ID NO: 1351461 - RNA, 19 nt, Homo sapiens
  misc_RNA (1)...(19): siRNA sense strand
guagaaguauuugaguauc

SEQ ID NO: 1351462 - RNA, 19 nt, Homo sapiens
  misc_RNA (1)...(19): siRNA sense strand
guauuugaguaucuugaug

SEQ ID NO: 1351463 - RNA, 19 nt, Homo sapiens
  misc_RNA (1)...(19): siRNA sense strand
aggaauacuugacaguuug

SEQ ID NO: 1351464 - RNA, 19 nt, Homo sapiens
  misc_RNA (1)...(19): siRNA sense strand
ccaaaacccuacuaugaga

SEQ ID NO: 1351465 - RNA, 19 nt, Homo sapiens
  misc_RNA (1)...(19): siRNA sense strand
aguguaaaguggucaaaug

SEQ ID NO: 1351466 - RNA, 19 nt, Homo sapiens
  misc_RNA (1)...(19): siRNA sense strand
ccacccauacuauuuguga

SEQ ID NO: 1351467 - RNA, 19 nt, Homo sapiens
  misc_RNA (1)...(19): siRNA sense strand
uuggagagagcacgauuua

SEQ ID NO: 1351468 - RNA, 19 nt, Homo sapiens
  misc_RNA (1)...(19): siRNA sense strand
gguuaucagaugcacuuua

SEQ ID NO: 1351469 - RNA, 19 nt, Homo sapiens
  misc_RNA (1)...(19): siRNA sense strand
caccaacauuugaagcuau

SEQ ID NO: 1351470 - RNA, 19 nt, Homo sapiens
  misc_RNA (1)...(19): siRNA sense strand
ugaggagccaccaacauuu

SEQ ID NO: 1351471 - RNA, 19 nt, Homo sapiens
  misc_RNA (1)...(19): siRNA sense strand
ggaaggaauacuugacagu

SEQ ID NO: 1351472 - RNA, 19 nt, Homo sapiens
  misc_RNA (1)...(19): siRNA sense strand
gaggaaggaauacuugaca

SEQ ID NO: 1351473 - RNA, 19 nt, Homo sapiens
  misc_RNA (1)...(19): siRNA sense strand
ccaguuccaaagugucuua

SEQ ID NO: 1351474 - RNA, 19 nt, Homo sapiens
  misc_RNA (1)...(19): siRNA sense strand
ugaguaucuugaugcagua

SEQ ID NO: 1351475 - RNA, 19 nt, Homo sapiens
  misc_RNA (1)...(19): siRNA sense strand
caccuuuagugaaguagaa

SEQ ID NO: 1351476 - RNA, 19 nt, Homo sapiens
  misc_RNA (1)...(19): siRNA sense strand
acagauaucaggauuugga

SEQ ID NO: 1351477 - RNA, 19 nt, Homo sapiens
  misc_RNA (1)...(19): siRNA sense strand
ucauugcugugauuguuau

SEQ ID NO: 1351478 - RNA, 19 nt, Homo sapiens
  misc_RNA (1)...(19): siRNA sense strand
ucagaugcacuuuauuugu

SEQ ID NO: 1351479 - RNA, 19 nt, Homo sapiens
  misc_RNA (1)...(19): siRNA sense strand
gugcugcuccagaguguaa

SEQ ID NO: 1351480 - RNA, 19 nt, Homo sapiens
  misc_RNA (1)...(19): siRNA sense strand
ggaaaacacaccuuuagug

SEQ ID NO: 1351481 - RNA, 19 nt, Homo sapiens
  misc_RNA (1)...(19): siRNA sense strand
aaggaucaguagcaauuug

SEQ ID NO: 1351482 - RNA, 19 nt, Homo sapiens
  misc_RNA (1)...(19): siRNA sense strand
uauauacgggauccuuuaa

SEQ ID NO: 1351483 - RNA, 19 nt, Homo sapiens
  misc_RNA (1)...(19): siRNA sense strand
ugaaguagaaguauuugag

SEQ ID NO: 1351484 - RNA, 19 nt, Homo sapiens
  misc_RNA (1)...(19): siRNA sense strand
cuugacaguuuggauguuu

SEQ ID NO: 1351485 - RNA, 19 nt, Homo sapiens
  misc_RNA (1)...(19): siRNA sense strand
cauauauacgggauccuuu

SEQ ID NO: 1351486 - RNA, 19 nt, Homo sapiens
  misc_RNA (1)...(19): siRNA sense strand
auauauacgggauccuuua

SEQ ID NO: 1351487 - RNA, 19 nt, Homo sapiens
  misc_RNA (1)...(19): siRNA sense strand
cuuaaaggaucaguagcaa

SEQ ID NO: 1351488 - RNA, 19 nt, Homo sapiens
  misc_RNA (1)...(19): siRNA sense strand
uaaaccugaggaaggaaua

SEQ ID NO: 1351489 - RNA, 19 nt, Homo sapiens
  misc_RNA (1)...(19): siRNA sense strand
agaugacgccuguuauaga

SEQ ID NO: 1351490 - RNA, 19 nt, Homo sapiens
  misc_RNA (1)...(19): siRNA sense strand
ugugauuguuauugccaua

SEQ ID NO: 1351491 - RNA, 19 nt, Homo sapiens
  misc_RNA (1)...(19): siRNA sense strand
gagagcacgauuuauugug

SEQ ID NO: 1351492 - RNA, 19 nt, Homo sapiens
  misc_RNA (1)...(19): siRNA sense strand
gaaguauuugaguaucuug

SEQ ID NO: 1351493 - RNA, 19 nt, Homo sapiens
  misc_RNA (1)...(19): siRNA sense strand
ggcuaccugucucagauga

SEQ ID NO: 1351494 - RNA, 19 nt, Homo sapiens
  misc_RNA (1)...(19): siRNA sense strand
gauaucaggauuuggaaaa

SEQ ID NO: 1351495 - RNA, 19 nt, Homo sapiens
  misc_RNA (1)...(19): siRNA sense strand
ccucuugccacccauacua

SEQ ID NO: 1351496 - RNA, 19 nt, Homo sapiens
  misc_RNA (1)...(19): siRNA sense strand
ccaugguguugcugcugua

SEQ ID NO: 1351497 - RNA, 19 nt, Homo sapiens
  misc_RNA (1)...(19): siRNA sense strand
cagaugacgccuguuauag

SEQ ID NO: 1351498 - RNA, 19 nt, Homo sapiens
  misc_RNA (1)...(19): siRNA sense strand
cagaugguggagcugaaua

SEQ ID NO: 1351499 - RNA, 19 nt, Homo sapiens
  misc_RNA (1)...(19): siRNA sense strand
gucauugcugugauuguua

SEQ ID NO: 1351500 - RNA, 19 nt, Homo sapiens
  misc_RNA (1)...(19): siRNA sense strand
ggagccaccaacauuugaa

SEQ ID NO: 1351501 - RNA, 19 nt, Homo sapiens
  misc_RNA (1)...(19): siRNA sense strand
uuggugaacgaguagauua

SEQ ID NO: 1351502 - RNA, 19 nt, Homo sapiens
  misc_RNA (1)...(19): siRNA sense strand
gcgcuuuccuggguugcuu

SEQ ID NO: 1351503 - RNA, 19 nt, Homo sapiens
  misc_RNA (1)...(19): siRNA sense strand
uacuacaaagcaacaguua

SEQ ID NO: 1351504 - RNA, 19 nt, Homo sapiens
  misc_RNA (1)...(19): siRNA sense strand
cuugaugcaguaacuuaua

SEQ ID NO: 1351505 - RNA, 19 nt, Homo sapiens
  misc_RNA (1)...(19): siRNA sense strand
aaacauguccauauauacg

SEQ ID NO: 1351506 - RNA, 19 nt, Homo sapiens
  misc_RNA (1)...(19): siRNA sense strand
guguaaaguggucaaaugu

SEQ ID NO: 1351507 - RNA, 19 nt, Homo sapiens
  misc_RNA (1)...(19): siRNA sense strand
cuuacgaguuugguuauca

SEQ ID NO: 1351508 - RNA, 19 nt, Homo sapiens
  misc_RNA (1)...(19): siRNA sense strand
uacgggauccuuuaaaugg

SEQ ID NO: 1351509 - RNA, 19 nt, Homo sapiens
  misc_RNA (1)...(19): siRNA sense strand
gcagaugguggagcugaau

SEQ ID NO: 1351510 - RNA, 19 nt, Homo sapiens
  misc_RNA (1)...(19): siRNA sense strand
aaccaaaacccuacuauga

SEQ ID NO: 1351511 - RNA, 19 nt, Homo sapiens
  misc_RNA (1)...(19): siRNA sense strand
uugaugcaguaacuuauag

SEQ ID NO: 1351512 - RNA, 19 nt, Homo sapiens
  misc_RNA (1)...(19): siRNA sense strand
ggagcugaauaugccacuu

SEQ ID NO: 1351513 - RNA, 19 nt, Homo sapiens
  misc_RNA (1)...(19): siRNA sense strand
cgauggcagcgacacaauu

SEQ ID NO: 1351514 - RNA, 19 nt, Homo sapiens
  misc_RNA (1)...(19): siRNA sense strand
gauccauuuucacuuauug

SEQ ID NO: 1351515 - RNA, 19 nt, Homo sapiens
  misc_RNA (1)...(19): siRNA sense strand
ggagagagcacgauuuauu

SEQ ID NO: 1351516 - RNA, 19 nt, Homo sapiens
  misc_RNA (1)...(19): siRNA sense strand
agagaaacauguccauaua

SEQ ID NO: 1351517 - RNA, 19 nt, Homo sapiens
  misc_RNA (1)...(19): siRNA sense strand
cagaugcacuuuauuugua

SEQ ID NO: 1351518 - RNA, 19 nt, Homo sapiens
  misc_RNA (1)...(19): siRNA sense strand
ggacuuacgaguuugguua

SEQ ID NO: 1351519 - RNA, 19 nt, Homo sapiens
  misc_RNA (1)...(19): siRNA sense strand
aaacagauaucaggauuug

SEQ ID NO: 1351520 - RNA, 19 nt, Homo sapiens
  misc_RNA (1)...(19): siRNA sense strand
cuauggagcucauugguaa

SEQ ID NO: 1351521 - RNA, 19 nt, Homo sapiens
  misc_RNA (1)...(19): siRNA sense strand
aaacacaccuuuagugaag

SEQ ID NO: 1351522 - RNA, 19 nt, Homo sapiens
  misc_RNA (1)...(19): siRNA sense strand
gaacuuaaaggaucaguag

SEQ ID NO: 1351523 - RNA, 19 nt, Homo sapiens
  misc_RNA (1)...(19): siRNA sense strand
gaaaacagauaucaggauu

SEQ ID NO: 1351524 - RNA, 19 nt, Homo sapiens
  misc_RNA (1)...(19): siRNA sense strand
uaaaggaucaguagcaauu

SEQ ID NO: 1351525 - RNA, 19 nt, Homo sapiens
  misc_RNA (1)...(19): siRNA sense strand
aaaugggacuuacgaguuu

SEQ ID NO: 1351526 - RNA, 19 nt, Homo sapiens
  misc_RNA (1)...(19): siRNA sense strand
guuaucagaugcacuuuau

SEQ ID NO: 1351527 - RNA, 19 nt, Homo sapiens
  misc_RNA (1)...(19): siRNA sense strand
gagcugaauaugccacuua

SEQ ID NO: 1351528 - RNA, 19 nt, Homo sapiens
  misc_RNA (1)...(19): siRNA sense strand
ugagauuggugaacgagua

SEQ ID NO: 1351529 - RNA, 19 nt, Homo sapiens
  misc_RNA (1)...(19): siRNA sense strand
gugaacgaguagauuauaa

SEQ ID NO: 1351530 - RNA, 19 nt, Homo sapiens
  misc_RNA (1)...(19): siRNA sense strand
gagagagcacgauuuauug

SEQ ID NO: 1351531 - RNA, 19 nt, Homo sapiens
  misc_RNA (1)...(19): siRNA sense strand
caaaugggacuuacgaguu

SEQ ID NO: 1351532 - RNA, 19 nt, Homo sapiens
  misc_RNA (1)...(19): siRNA sense strand
ggucauugcugugauuguu

SEQ ID NO: 1351533 - RNA, 19 nt, Homo sapiens
  misc_RNA (1)...(19): siRNA sense strand
ccagauccauuuucacuua

SEQ ID NO: 1351534 - RNA, 19 nt, Homo sapiens
  misc_RNA (1)...(19): siRNA sense strand
gaaggaauacuugacaguu

SEQ ID NO: 1351535 - RNA, 19 nt, Homo sapiens
  misc_RNA (1)...(19): siRNA sense strand
aaggaauacuugacaguuu

SEQ ID NO: 1351536 - RNA, 19 nt, Homo sapiens
  misc_RNA (1)...(19): siRNA sense strand
ucagaugacgccuguuaua

SEQ ID NO: 1351537 - RNA, 19 nt, Homo sapiens
  misc_RNA (1)...(19): siRNA sense strand
gaaaacacaccuuuaguga

SEQ ID NO: 1351538 - RNA, 19 nt, Homo sapiens
  misc_RNA (1)...(19): siRNA sense strand
gaugacgccuguuauagag

SEQ ID NO: 1351539 - RNA, 19 nt, Homo sapiens
  misc_RNA (1)...(19): siRNA sense strand
gagaaacauguccauauau

SEQ ID NO: 1351540 - RNA, 19 nt, Homo sapiens
  misc_RNA (1)...(19): siRNA sense strand
ccacuuaccagacuaaauc

SEQ ID NO: 1351541 - RNA, 19 nt, Homo sapiens
  misc_RNA (1)...(19): siRNA sense strand
acgaguagauuauaagugu

SEQ ID NO: 1351542 - RNA, 19 nt, Homo sapiens
  misc_RNA (1)...(19): siRNA sense strand
cuacaaagcaacaguuaug

SEQ ID NO: 1351543 - RNA, 19 nt, Homo sapiens
  misc_RNA (1)...(19): siRNA sense strand
ccaccaacauuugaagcua

SEQ ID NO: 1351544 - RNA, 19 nt, Homo sapiens
  misc_RNA (1)...(19): siRNA sense strand
uauacgggauccuuuaaau

SEQ ID NO: 1351545 - RNA, 19 nt, Homo sapiens
  misc_RNA (1)...(19): siRNA sense strand
cgaguuugguuaucagaug

SEQ ID NO: 1351546 - RNA, 19 nt, Homo sapiens
  misc_RNA (1)...(19): siRNA sense strand
gaacgaguagauuauaagu

SEQ ID NO: 1351547 - RNA, 19 nt, Homo sapiens
  misc_RNA (1)...(19): siRNA sense strand
gugaggagccaccaacauu

SEQ ID NO: 1351548 - RNA, 19 nt, Homo sapiens
  misc_RNA (1)...(19): siRNA sense strand
gauggcagcgacacaauug

SEQ ID NO: 1351549 - RNA, 19 nt, Homo sapiens
  misc_RNA (1)...(19): siRNA sense strand
ucucagaugacgccuguua

SEQ ID NO: 1351550 - RNA, 19 nt, Homo sapiens
  misc_RNA (1)...(19): siRNA sense strand
gaggagccaccaacauuug

SEQ ID NO: 1351551 - RNA, 19 nt, Homo sapiens
  misc_RNA (1)...(19): siRNA sense strand
gcuauggagcucauuggua

SEQ ID NO: 1351552 - RNA, 19 nt, Homo sapiens
  misc_RNA (1)...(19): siRNA sense strand
acacaccuuuagugaagua

SEQ ID NO: 1351553 - RNA, 19 nt, Homo sapiens
  misc_RNA (1)...(19): siRNA sense strand
uagagaaacauguccauau

SEQ ID NO: 1351554 - RNA, 19 nt, Homo sapiens
  misc_RNA (1)...(19): siRNA sense strand
guuccaaagugucuuaaag

SEQ ID NO: 1351555 - RNA, 19 nt, Homo sapiens
  misc_RNA (1)...(19): siRNA sense strand
ggugaacgaguagauuaua

SEQ ID NO: 1351556 - RNA, 19 nt, Homo sapiens
  misc_RNA (1)...(19): siRNA sense strand
gaaguagaaguauuugagu

SEQ ID NO: 1351557 - RNA, 19 nt, Homo sapiens
  misc_RNA (1)...(19): siRNA sense strand
gaaacauguccauauauac

SEQ ID NO: 1351558 - RNA, 19 nt, Homo sapiens
  misc_RNA (1)...(19): siRNA sense strand
ugacgccuguuauagagaa

SEQ ID NO: 1351559 - RNA, 19 nt, Homo sapiens
  misc_RNA (1)...(19): siRNA sense strand
cgaguagauuauaagugua

SEQ ID NO: 1351560 - RNA, 19 nt, Homo sapiens
  misc_RNA (1)...(19): siRNA sense strand
gcacuuuauuuguaaugag

SEQ ID NO: 1351561 - RNA, 19 nt, Homo sapiens
  misc_RNA (1)...(19): siRNA sense strand
guagaaguauuugaguauc

SEQ ID NO: 1351562 - RNA, 19 nt, Homo sapiens
  misc_RNA (1)...(19): siRNA sense strand
guauuugaguaucuugaug

SEQ ID NO: 1351563 - RNA, 19 nt, Homo sapiens
  misc_RNA (1)...(19): siRNA sense strand
aggaauacuugacaguuug

SEQ ID NO: 1351564 - RNA, 19 nt, Homo sapiens
  misc_RNA (1)...(19): siRNA sense strand
ccaaaacccuacuaugaga

SEQ ID NO: 1351565 - RNA, 19 nt, Homo sapiens
  misc_RNA (1)...(19): siRNA sense strand
aguguaaaguggucaaaug

SEQ ID NO: 1351566 - RNA, 19 nt, Homo sapiens
  misc_RNA (1)...(19): siRNA sense strand
ccacccauacuauuuguga

SEQ ID NO: 1351567 - RNA, 19 nt, Homo sapiens
  misc_RNA (1)...(19): siRNA sense strand
uuggagagagcacgauuua

SEQ ID NO: 1351568 - RNA, 19 nt, Homo sapiens
  misc_RNA (1)...(19): siRNA sense strand
gguuaucagaugcacuuua

SEQ ID NO: 1351569 - RNA, 19 nt, Homo sapiens
  misc_RNA (1)...(19): siRNA sense strand
caccaacauuugaagcuau

SEQ ID NO: 1351570 - RNA, 19 nt, Homo sapiens
  misc_RNA (1)...(19): siRNA sense strand
ugaggagccaccaacauuu

SEQ ID NO: 1351571 - RNA, 19 nt, Homo sapiens
  misc_RNA (1)...(19): siRNA sense strand
ggaaggaauacuugacagu

SEQ ID NO: 1351572 - RNA, 19 nt, Homo sapiens
  misc_RNA (1)...(19): siRNA sense strand
gaggaaggaauacuugaca

SEQ ID NO: 1351573 - RNA, 19 nt, Homo sapiens
  misc_RNA (1)...(19): siRNA sense strand
ccaguuccaaagugucuua

SEQ ID NO: 1351574 - RNA, 19 nt, Homo sapiens
  misc_RNA (1)...(19): siRNA sense strand
ugaguaucuugaugcagua

SEQ ID NO: 1351575 - RNA, 19 nt, Homo sapiens
  misc_RNA (1)...(19): siRNA sense strand
caccuuuagugaaguagaa

SEQ ID NO: 1351576 - RNA, 19 nt, Homo sapiens
  misc_RNA (1)...(19): siRNA sense strand
acagauaucaggauuugga

SEQ ID NO: 1351577 - RNA, 19 nt, Homo sapiens
  misc_RNA (1)...(19): siRNA sense strand
ucauugcugugauuguuau

SEQ ID NO: 1351578 - RNA, 19 nt, Homo sapiens
  misc_RNA (1)...(19): siRNA sense strand
ucagaugcacuuuauuugu

SEQ ID NO: 1351579 - RNA, 19 nt, Homo sapiens
  misc_RNA (1)...(19): siRNA sense strand
gugcugcuccagaguguaa

SEQ ID NO: 1351580 - RNA, 19 nt, Homo sapiens
  misc_RNA (1)...(19): siRNA sense strand
ggaaaacacaccuuuagug

SEQ ID NO: 1351581 - RNA, 19 nt, Homo sapiens
  misc_RNA (1)...(19): siRNA sense strand
aaggaucaguagcaauuug

SEQ ID NO: 1351582 - RNA, 19 nt, Homo sapiens
  misc_RNA (1)...(19): siRNA sense strand
uauauacgggauccuuuaa

SEQ ID NO: 1351583 - RNA, 19 nt, Homo sapiens
  misc_RNA (1)...(19): siRNA sense strand
ugaaguagaaguauuugag

SEQ ID NO: 1351584 - RNA, 19 nt, Homo sapiens
  misc_RNA (1)...(19): siRNA sense strand
cuugacaguuuggauguuu

SEQ ID NO: 1351585 - RNA, 19 nt, Homo sapiens
  misc_RNA (1)...(19): siRNA sense strand
cauauauacgggauccuuu

SEQ ID NO: 1351586 - RNA, 19 nt, Homo sapiens
  misc_RNA (1)...(19): siRNA sense strand
auauauacgggauccuuua

SEQ ID NO: 1351587 - RNA, 19 nt, Homo sapiens
  misc_RNA (1)...(19): siRNA sense strand
cuuaaaggaucaguagcaa

SEQ ID NO: 1351588 - RNA, 19 nt, Homo sapiens
  misc_RNA (1)...(19): siRNA sense strand
uaaaccugaggaaggaaua

SEQ ID NO: 1351589 - RNA, 19 nt, Homo sapiens
  misc_RNA (1)...(19): siRNA sense strand
agaugacgccuguuauaga

SEQ ID NO: 1351590 - RNA, 19 nt, Homo sapiens
  misc_RNA (1)...(19): siRNA sense strand
ugugauuguuauugccaua

SEQ ID NO: 1351591 - RNA, 19 nt, Homo sapiens
  misc_RNA (1)...(19): siRNA sense strand
gagagcacgauuuauugug

SEQ ID NO: 1351592 - RNA, 19 nt, Homo sapiens
  misc_RNA (1)...(19): siRNA sense strand
gaaguauuugaguaucuug

SEQ ID NO: 1351593 - RNA, 19 nt, Homo sapiens
  misc_RNA (1)...(19): siRNA sense strand
ggcuaccugucucagauga

SEQ ID NO: 1351594 - RNA, 19 nt, Homo sapiens
  misc_RNA (1)...(19): siRNA sense strand
gauaucaggauuuggaaaa

SEQ ID NO: 1351595 - RNA, 19 nt, Homo sapiens
  misc_RNA (1)...(19): siRNA sense strand
ccucuugccacccauacua

SEQ ID NO: 1351596 - RNA, 19 nt, Homo sapiens
  misc_RNA (1)...(19): siRNA sense strand
ccaugguguugcugcugua

SEQ ID NO: 1351597 - RNA, 19 nt, Homo sapiens
  misc_RNA (1)...(19): siRNA sense strand
cagaugacgccuguuauag

SEQ ID NO: 1351598 - RNA, 19 nt, Homo sapiens
  misc_RNA (1)...(19): siRNA sense strand
cagaugguggagcugaaua

SEQ ID NO: 1351599 - RNA, 19 nt, Homo sapiens
  misc_RNA (1)...(19): siRNA sense strand
gucauugcugugauuguua

SEQ ID NO: 1351600 - RNA, 19 nt, Homo sapiens
  misc_RNA (1)...(19): siRNA sense strand
ggagccaccaacauuugaa

SEQ ID NO: 1351601 - RNA, 19 nt, Homo sapiens
  misc_RNA (1)...(19): siRNA sense strand
uuggugaacgaguagauua

SEQ ID NO: 1351602 - RNA, 19 nt, Homo sapiens
  misc_RNA (1)...(19): siRNA sense strand
gcgcuuuccuggguugcuu

SEQ ID NO: 1351603 - RNA, 19 nt, Homo sapiens
  misc_RNA (1)...(19): siRNA sense strand
uacuacaaagcaacaguua

SEQ ID NO: 1351604 - RNA, 19 nt, Homo sapiens
  misc_RNA (1)...(19): siRNA sense strand
cuugaugcaguaacuuaua

SEQ ID NO: 1351605 - RNA, 19 nt, Homo sapiens
  misc_RNA (1)...(19): siRNA sense strand
aaacauguccauauauacg

SEQ ID NO: 1351606 - RNA, 19 nt, Homo sapiens
  misc_RNA (1)...(19): siRNA sense strand
guguaaaguggucaaaugu

SEQ ID NO: 1351607 - RNA, 19 nt, Homo sapiens
  misc_RNA (1)...(19): siRNA sense strand
cuuacgaguuugguuauca

SEQ ID NO: 1351608 - RNA, 19 nt, Homo sapiens
  misc_RNA (1)...(19): siRNA sense strand
uacgggauccuuuaaaugg

SEQ ID NO: 1351609 - RNA, 19 nt, Homo sapiens
  misc_RNA (1)...(19): siRNA sense strand
gcagaugguggagcugaau

SEQ ID NO: 1351610 - RNA, 19 nt, Homo sapiens
  misc_RNA (1)...(19): siRNA sense strand
aaccaaaacccuacuauga

SEQ ID NO: 1351611 - RNA, 19 nt, Homo sapiens
  misc_RNA (1)...(19): siRNA sense strand
uugaugcaguaacuuauag

SEQ ID NO: 1351612 - RNA, 19 nt, Homo sapiens
  misc_RNA (1)...(19): siRNA sense strand
ggagcugaauaugccacuu

SEQ ID NO: 1351613 - RNA, 19 nt, Homo sapiens
  misc_RNA (1)...(19): siRNA sense strand
cgauggcagcgacacaauu

SEQ ID NO: 1351614 - RNA, 19 nt, Homo sapiens
  misc_RNA (1)...(19): siRNA sense strand
gauccauuuucacuuauug

SEQ ID NO: 1351615 - RNA, 19 nt, Homo sapiens
  misc_RNA (1)...(19): siRNA sense strand
gaacaaggaugaacaagca

SEQ ID NO: 1351616 - RNA, 19 nt, Homo sapiens
  misc_RNA (1)...(19): siRNA sense strand
gaagagagaacaaggauga

SEQ ID NO: 1351617 - RNA, 19 nt, Homo sapiens
  misc_RNA (1)...(19): siRNA sense strand
ugacugaccugguaaagaa

SEQ ID NO: 1351618 - RNA, 19 nt, Homo sapiens
  misc_RNA (1)...(19): siRNA sense strand
gaacagcuaugacaucuac

SEQ ID NO: 1351619 - RNA, 19 nt, Homo sapiens
  misc_RNA (1)...(19): siRNA sense strand
gcacuaccguguugugaaa

SEQ ID NO: 1351620 - RNA, 19 nt, Homo sapiens
  misc_RNA (1)...(19): siRNA sense strand
ggaacaagauucugcacaa

SEQ ID NO: 1351621 - RNA, 19 nt, Homo sapiens
  misc_RNA (1)...(19): siRNA sense strand
ggaacaaacugcgggugua

SEQ ID NO: 1351622 - RNA, 19 nt, Homo sapiens
  misc_RNA (1)...(19): siRNA sense strand
gaaagaggagacagaauau

SEQ ID NO: 1351623 - RNA, 19 nt, Homo sapiens
  misc_RNA (1)...(19): siRNA sense strand
gaacaagauucugcacaau

SEQ ID NO: 1351624 - RNA, 19 nt, Homo sapiens
  misc_RNA (1)...(19): siRNA sense strand
gauauuuggucucuaggaa

SEQ ID NO: 1351625 - RNA, 19 nt, Homo sapiens
  misc_RNA (1)...(19): siRNA sense strand
caagguguauggacucauu

SEQ ID NO: 1351626 - RNA, 19 nt, Homo sapiens
  misc_RNA (1)...(19): siRNA sense strand
agaaagaggagacagaaua

SEQ ID NO: 1351627 - RNA, 19 nt, Homo sapiens
  misc_RNA (1)...(19): siRNA sense strand
ggaagccccuguaccauua

SEQ ID NO: 1351628 - RNA, 19 nt, Homo sapiens
  misc_RNA (1)...(19): siRNA sense strand
acaagauucugcacaauga

SEQ ID NO: 1351629 - RNA, 19 nt, Homo sapiens
  misc_RNA (1)...(19): siRNA sense strand
gaaguggucuaagaaguuc

SEQ ID NO: 1351630 - RNA, 19 nt, Homo sapiens
  misc_RNA (1)...(19): siRNA sense strand
ggucuaagaaguucauuga

SEQ ID NO: 1351631 - RNA, 19 nt, Homo sapiens
  misc_RNA (1)...(19): siRNA sense strand
ccaagaaggccauggacua

SEQ ID NO: 1351632 - RNA, 19 nt, Homo sapiens
  misc_RNA (1)...(19): siRNA sense strand
gagcaugccuaccucaagu

SEQ ID NO: 1351633 - RNA, 19 nt, Homo sapiens
  misc_RNA (1)...(19): siRNA sense strand
ggaaguacaagaagcgauu

SEQ ID NO: 1351634 - RNA, 19 nt, Homo sapiens
  misc_RNA (1)...(19): siRNA sense strand
ugacagccauggagaggaa

SEQ ID NO: 1351635 - RNA, 19 nt, Homo sapiens
  misc_RNA (1)...(19): siRNA sense strand
aaccguaacugcaucauga

SEQ ID NO: 1351636 - RNA, 19 nt, Homo sapiens
  misc_RNA (1)...(19): siRNA sense strand
acaaacugcggguguauua

SEQ ID NO: 1351637 - RNA, 19 nt, Homo sapiens
  misc_RNA (1)...(19): siRNA sense strand
gagcaacucagaggcuuua

SEQ ID NO: 1351638 - RNA, 19 nt, Homo sapiens
  misc_RNA (1)...(19): siRNA sense strand
gcacaaugacccagaagug

SEQ ID NO: 1351639 - RNA, 19 nt, Homo sapiens
  misc_RNA (1)...(19): siRNA sense strand
ucaugacucugaaccguaa

SEQ ID NO: 1351640 - RNA, 19 nt, Homo sapiens
  misc_RNA (1)...(19): siRNA sense strand
ggacccugcugggaucuuu

SEQ ID NO: 1351641 - RNA, 19 nt, Homo sapiens
  misc_RNA (1)...(19): siRNA sense strand
cggagcagcuacugaaguu

SEQ ID NO: 1351642 - RNA, 19 nt, Homo sapiens
  misc_RNA (1)...(19): siRNA sense strand
caacaucgccaccuacuac

SEQ ID NO: 1351643 - RNA, 19 nt, Homo sapiens
  misc_RNA (1)...(19): siRNA sense strand
gaacaaacugcggguguau

SEQ ID NO: 1351644 - RNA, 19 nt, Homo sapiens
  misc_RNA (1)...(19): siRNA sense strand
gcauagaggagcagaagga

SEQ ID NO: 1351645 - RNA, 19 nt, Homo sapiens
  misc_RNA (1)...(19): siRNA sense strand
ggagugauauuuggucucu

SEQ ID NO: 1351646 - RNA, 19 nt, Homo sapiens
  misc_RNA (1)...(19): siRNA sense strand
gaacccugaugccaccuau

SEQ ID NO: 1351647 - RNA, 19 nt, Homo sapiens
  misc_RNA (1)...(19): siRNA sense strand
uccaagaaguggucuaaga

SEQ ID NO: 1351648 - RNA, 19 nt, Homo sapiens
  misc_RNA (1)...(19): siRNA sense strand
ccaagaaguggucuaagaa

SEQ ID NO: 1351649 - RNA, 19 nt, Homo sapiens
  misc_RNA (1)...(19): siRNA sense strand
ggaggacuguaucgccuau

SEQ ID NO: 1351650 - RNA, 19 nt, Homo sapiens
  misc_RNA (1)...(19): siRNA sense strand
agacggaacacuuucauug

SEQ ID NO: 1351651 - RNA, 19 nt, Homo sapiens
  misc_RNA (1)...(19): siRNA sense strand
guaacugcaucaugaacug

SEQ ID NO: 1351652 - RNA, 19 nt, Homo sapiens
  misc_RNA (1)...(19): siRNA sense strand
ugagaaagccauugagauc

SEQ ID NO: 1351653 - RNA, 19 nt, Homo sapiens
  misc_RNA (1)...(19): siRNA sense strand
gcaugaaucccgcugacaa

SEQ ID NO: 1351654 - RNA, 19 nt, Homo sapiens
  misc_RNA (1)...(19): siRNA sense strand
gcagcgaggaggaagauga

SEQ ID NO: 1351655 - RNA, 19 nt, Homo sapiens
  misc_RNA (1)...(19): siRNA sense strand
ccacggagcagcuacugaa

SEQ ID NO: 1351656 - RNA, 19 nt, Homo sapiens
  misc_RNA (1)...(19): siRNA sense strand
gauuacaggagugauauuu

SEQ ID NO: 1351657 - RNA, 19 nt, Homo sapiens
  misc_RNA (1)...(19): siRNA sense strand
ggagacagaauaugaguac

SEQ ID NO: 1351658 - RNA, 19 nt, Homo sapiens
  misc_RNA (1)...(19): siRNA sense strand
gggaacagcuaugacaucu

SEQ ID NO: 1351659 - RNA, 19 nt, Homo sapiens
  misc_RNA (1)...(19): siRNA sense strand
ugaaauacgagcggauuaa

SEQ ID NO: 1351660 - RNA, 19 nt, Homo sapiens
  misc_RNA (1)...(19): siRNA sense strand
cuacggagccuucaucaag

SEQ ID NO: 1351661 - RNA, 19 nt, Homo sapiens
  misc_RNA (1)...(19): siRNA sense strand
guacaagggucggcauguc

SEQ ID NO: 1351662 - RNA, 19 nt, Homo sapiens
  misc_RNA (1)...(19): siRNA sense strand
gaaucccgcugacaaacca

SEQ ID NO: 1351663 - RNA, 19 nt, Homo sapiens
  misc_RNA (1)...(19): siRNA sense strand
aagaggagacagaauauga

SEQ ID NO: 1351664 - RNA, 19 nt, Homo sapiens
  misc_RNA (1)...(19): siRNA sense strand
gagcagcuacugaaguuuc

SEQ ID NO: 1351665 - RNA, 19 nt, Homo sapiens
  misc_RNA (1)...(19): siRNA sense strand
ugacuucauugacacaugu

SEQ ID NO: 1351666 - RNA, 19 nt, Homo sapiens
  misc_RNA (1)...(19): siRNA sense strand
ggugauccaucgagacauc

SEQ ID NO: 1351667 - RNA, 19 nt, Homo sapiens
  misc_RNA (1)...(19): siRNA sense strand
uuacaggagugauauuugg

SEQ ID NO: 1351668 - RNA, 19 nt, Homo sapiens
  misc_RNA (1)...(19): siRNA sense strand
ggauuaaguuccuggucau

SEQ ID NO: 1351669 - RNA, 19 nt, Homo sapiens
  misc_RNA (1)...(19): siRNA sense strand
gcaacucagaggcuuuaaa

SEQ ID NO: 1351670 - RNA, 19 nt, Homo sapiens
  misc_RNA (1)...(19): siRNA sense strand
ggacgaggaggaagagauc

SEQ ID NO: 1351671 - RNA, 19 nt, Homo sapiens
  misc_RNA (1)...(19): siRNA sense strand
uggagaugcugcugugcua

SEQ ID NO: 1351672 - RNA, 19 nt, Homo sapiens
  misc_RNA (1)...(19): siRNA sense strand
cuacaucccugugcacauc

SEQ ID NO: 1351673 - RNA, 19 nt, Homo sapiens
  misc_RNA (1)...(19): siRNA sense strand
acccagaaguggagaagaa

SEQ ID NO: 1351674 - RNA, 19 nt, Homo sapiens
  misc_RNA (1)...(19): siRNA sense strand
ggagaacgggcugauguug

SEQ ID NO: 1351675 - RNA, 19 nt, Homo sapiens
  misc_RNA (1)...(19): siRNA sense strand
gcugucauccgccagaauu

SEQ ID NO: 1351676 - RNA, 19 nt, Homo sapiens
  misc_RNA (1)...(19): siRNA sense strand
ucuaagaaguucauugacu

SEQ ID NO: 1351677 - RNA, 19 nt, Homo sapiens
  misc_RNA (1)...(19): siRNA sense strand
gaaauacgagcggauuaag

SEQ ID NO: 1351678 - RNA, 19 nt, Homo sapiens
  misc_RNA (1)...(19): siRNA sense strand
gugaaauacgagcggauua

SEQ ID NO: 1351679 - RNA, 19 nt, Homo sapiens
  misc_RNA (1)...(19): siRNA sense strand
gaacagcaaaggccaaagc

SEQ ID NO: 1351680 - RNA, 19 nt, Homo sapiens
  misc_RNA (1)...(19): siRNA sense strand
gagagaacaaggaugaaca

SEQ ID NO: 1351681 - RNA, 19 nt, Homo sapiens
  misc_RNA (1)...(19): siRNA sense strand
ggagaucaacaugcugaaa

SEQ ID NO: 1351682 - RNA, 19 nt, Homo sapiens
  misc_RNA (1)...(19): siRNA sense strand
gaaccguaacugcaucaug

SEQ ID NO: 1351683 - RNA, 19 nt, Homo sapiens
  misc_RNA (1)...(19): siRNA sense strand
acaaauucauggccuucaa

SEQ ID NO: 1351684 - RNA, 19 nt, Homo sapiens
  misc_RNA (1)...(19): siRNA sense strand
aauacgagcggauuaaguu

SEQ ID NO: 1351685 - RNA, 19 nt, Homo sapiens
  misc_RNA (1)...(19): siRNA sense strand
gggcucaaccugcucauca

SEQ ID NO: 1351686 - RNA, 19 nt, Homo sapiens
  misc_RNA (1)...(19): siRNA sense strand
gagaacagcaaaggccaaa

SEQ ID NO: 1351687 - RNA, 19 nt, Homo sapiens
  misc_RNA (1)...(19): siRNA sense strand
ggaugggaguggugacuac

SEQ ID NO: 1351688 - RNA, 19 nt, Homo sapiens
  misc_RNA (1)...(19): siRNA sense strand
ccauugagauccgcucugu

SEQ ID NO: 1351689 - RNA, 19 nt, Homo sapiens
  misc_RNA (1)...(19): siRNA sense strand
ggugagaaagccauugaga

SEQ ID NO: 1351690 - RNA, 19 nt, Homo sapiens
  misc_RNA (1)...(19): siRNA sense strand
gcaacaucgccaccuacua

SEQ ID NO: 1351691 - RNA, 19 nt, Homo sapiens
  misc_RNA (1)...(19): siRNA sense strand
cagaggucaucgccuguga

SEQ ID NO: 1351692 - RNA, 19 nt, Homo sapiens
  misc_RNA (1)...(19): siRNA sense strand
gggagaugccuacuucugu

SEQ ID NO: 1351693 - RNA, 19 nt, Homo sapiens
  misc_RNA (1)...(19): siRNA sense strand
gaaggguucuguggucaac

SEQ ID NO: 1351694 - RNA, 19 nt, Homo sapiens
  misc_RNA (1)...(19): siRNA sense strand
ggaugaacaagcagcagaa

SEQ ID NO: 1351695 - RNA, 19 nt, Homo sapiens
  misc_RNA (1)...(19): siRNA sense strand
guagaagagagaacaagga

SEQ ID NO: 1351696 - RNA, 19 nt, Homo sapiens
  misc_RNA (1)...(19): siRNA sense strand
ggaagcugcaggagaagga

SEQ ID NO: 1351697 - RNA, 19 nt, Homo sapiens
  misc_RNA (1)...(19): siRNA sense strand
agaaguggucuaagaaguu

SEQ ID NO: 1351698 - RNA, 19 nt, Homo sapiens
  misc_RNA (1)...(19): siRNA sense strand
uaugauuacaggagugaua

SEQ ID NO: 1351699 - RNA, 19 nt, Homo sapiens
  misc_RNA (1)...(19): siRNA sense strand
cugaugccaccuaugauua

SEQ ID NO: 1351700 - RNA, 19 nt, Homo sapiens
  misc_RNA (1)...(19): siRNA sense strand
ugacagcaauggguacaca

SEQ ID NO: 1351701 - RNA, 19 nt, Homo sapiens
  misc_RNA (1)...(19): siRNA sense strand
caacucagaggcuuuaaaa

SEQ ID NO: 1351702 - RNA, 19 nt, Homo sapiens
  misc_RNA (1)...(19): siRNA sense strand
aagaaguggucuaagaagu

SEQ ID NO: 1351703 - RNA, 19 nt, Homo sapiens
  misc_RNA (1)...(19): siRNA sense strand
cuacuucuguggccuacau

SEQ ID NO: 1351704 - RNA, 19 nt, Homo sapiens
  misc_RNA (1)...(19): siRNA sense strand
caaacccuaccacaaauuc

SEQ ID NO: 1351705 - RNA, 19 nt, Homo sapiens
  misc_RNA (1)...(19): siRNA sense strand
acuaccguguugugaaaua

SEQ ID NO: 1351706 - RNA, 19 nt, Homo sapiens
  misc_RNA (1)...(19): siRNA sense strand
gaacaagcagcagaacucu

SEQ ID NO: 1351707 - RNA, 19 nt, Homo sapiens
  misc_RNA (1)...(19): siRNA sense strand
ucaaacaggagaucaacau

SEQ ID NO: 1351708 - RNA, 19 nt, Homo sapiens
  misc_RNA (1)...(19): siRNA sense strand
cccaaacccuaccacaaau

SEQ ID NO: 1351709 - RNA, 19 nt, Homo sapiens
  misc_RNA (1)...(19): siRNA sense strand
guucuguggucaacgugaa

SEQ ID NO: 1351710 - RNA, 19 nt, Homo sapiens
  misc_RNA (1)...(19): siRNA sense strand
gcagaggggagcagagaua

SEQ ID NO: 1351711 - RNA, 19 nt, Homo sapiens
  misc_RNA (1)...(19): siRNA sense strand
caugaaucccgcugacaaa

SEQ ID NO: 1351712 - RNA, 19 nt, Homo sapiens
  misc_RNA (1)...(19): siRNA sense strand
agcagcagcuucagaaaca

SEQ ID NO: 1351713 - RNA, 19 nt, Homo sapiens
  misc_RNA (1)...(19): siRNA sense strand
uacggagccuucaucaaga

SEQ ID NO: 1351714 - RNA, 19 nt, Homo sapiens
  misc_RNA (1)...(19): siRNA sense strand
cgagcccucuuccucauuc

SEQ ID NO: 1351715 - RNA, 19 nt, Homo sapiens
  misc_RNA (1)...(19): siRNA sense strand
gaacaaggaugaacaagca

SEQ ID NO: 1351716 - RNA, 19 nt, Homo sapiens
  misc_RNA (1)...(19): siRNA sense strand
gaagagagaacaaggauga

SEQ ID NO: 1351717 - RNA, 19 nt, Homo sapiens
  misc_RNA (1)...(19): siRNA sense strand
ugacugaccugguaaagaa

SEQ ID NO: 1351718 - RNA, 19 nt, Homo sapiens
  misc_RNA (1)...(19): siRNA sense strand
gaacagcuaugacaucuac

SEQ ID NO: 1351719 - RNA, 19 nt, Homo sapiens
  misc_RNA (1)...(19): siRNA sense strand
gcacuaccguguugugaaa

SEQ ID NO: 1351720 - RNA, 19 nt, Homo sapiens
  misc_RNA (1)...(19): siRNA sense strand
ggaacaagauucugcacaa

SEQ ID NO: 1351721 - RNA, 19 nt, Homo sapiens
  misc_RNA (1)...(19): siRNA sense strand
ggaacaaacugcgggugua

SEQ ID NO: 1351722 - RNA, 19 nt, Homo sapiens
  misc_RNA (1)...(19): siRNA sense strand
gaaagaggagacagaauau

SEQ ID NO: 1351723 - RNA, 19 nt, Homo sapiens
  misc_RNA (1)...(19): siRNA sense strand
gaacaagauucugcacaau

SEQ ID NO: 1351724 - RNA, 19 nt, Homo sapiens
  misc_RNA (1)...(19): siRNA sense strand
gauauuuggucucuaggaa

SEQ ID NO: 1351725 - RNA, 19 nt, Homo sapiens
  misc_RNA (1)...(19): siRNA sense strand
caagguguauggacucauu

SEQ ID NO: 1351726 - RNA, 19 nt, Homo sapiens
  misc_RNA (1)...(19): siRNA sense strand
agaaagaggagacagaaua

SEQ ID NO: 1351727 - RNA, 19 nt, Homo sapiens
  misc_RNA (1)...(19): siRNA sense strand
ggaagccccuguaccauua

SEQ ID NO: 1351728 - RNA, 19 nt, Homo sapiens
  misc_RNA (1)...(19): siRNA sense strand
acaagauucugcacaauga

SEQ ID NO: 1351729 - RNA, 19 nt, Homo sapiens
  misc_RNA (1)...(19): siRNA sense strand
gaaguggucuaagaaguuc

SEQ ID NO: 1351730 - RNA, 19 nt, Homo sapiens
  misc_RNA (1)...(19): siRNA sense strand
ggucuaagaaguucauuga

SEQ ID NO: 1351731 - RNA, 19 nt, Homo sapiens
  misc_RNA (1)...(19): siRNA sense strand
ccaagaaggccauggacua

SEQ ID NO: 1351732 - RNA, 19 nt, Homo sapiens
  misc_RNA (1)...(19): siRNA sense strand
gagcaugccuaccucaagu

SEQ ID NO: 1351733 - RNA, 19 nt, Homo sapiens
  misc_RNA (1)...(19): siRNA sense strand
ggaaguacaagaagcgauu

SEQ ID NO: 1351734 - RNA, 19 nt, Homo sapiens
  misc_RNA (1)...(19): siRNA sense strand
ugacagccauggagaggaa

SEQ ID NO: 1351735 - RNA, 19 nt, Homo sapiens
  misc_RNA (1)...(19): siRNA sense strand
aaccguaacugcaucauga

SEQ ID NO: 1351736 - RNA, 19 nt, Homo sapiens
  misc_RNA (1)...(19): siRNA sense strand
acaaacugcggguguauua

SEQ ID NO: 1351737 - RNA, 19 nt, Homo sapiens
  misc_RNA (1)...(19): siRNA sense strand
gagcaacucagaggcuuua

SEQ ID NO: 1351738 - RNA, 19 nt, Homo sapiens
  misc_RNA (1)...(19): siRNA sense strand
gcacaaugacccagaagug

SEQ ID NO: 1351739 - RNA, 19 nt, Homo sapiens
  misc_RNA (1)...(19): siRNA sense strand
ucaugacucugaaccguaa

SEQ ID NO: 1351740 - RNA, 19 nt, Homo sapiens
  misc_RNA (1)...(19): siRNA sense strand
ggacccugcugggaucuuu

SEQ ID NO: 1351741 - RNA, 19 nt, Homo sapiens
  misc_RNA (1)...(19): siRNA sense strand
cggagcagcuacugaaguu

SEQ ID NO: 1351742 - RNA, 19 nt, Homo sapiens
  misc_RNA (1)...(19): siRNA sense strand
caacaucgccaccuacuac

SEQ ID NO: 1351743 - RNA, 19 nt, Homo sapiens
  misc_RNA (1)...(19): siRNA sense strand
gaacaaacugcggguguau

SEQ ID NO: 1351744 - RNA, 19 nt, Homo sapiens
  misc_RNA (1)...(19): siRNA sense strand
gcauagaggagcagaagga

SEQ ID NO: 1351745 - RNA, 19 nt, Homo sapiens
  misc_RNA (1)...(19): siRNA sense strand
ggagugauauuuggucucu

SEQ ID NO: 1351746 - RNA, 19 nt, Homo sapiens
  misc_RNA (1)...(19): siRNA sense strand
gaacccugaugccaccuau

SEQ ID NO: 1351747 - RNA, 19 nt, Homo sapiens
  misc_RNA (1)...(19): siRNA sense strand
uccaagaaguggucuaaga

SEQ ID NO: 1351748 - RNA, 19 nt, Homo sapiens
  misc_RNA (1)...(19): siRNA sense strand
ccaagaaguggucuaagaa

SEQ ID NO: 1351749 - RNA, 19 nt, Homo sapiens
  misc_RNA (1)...(19): siRNA sense strand
ggaggacuguaucgccuau

SEQ ID NO: 1351750 - RNA, 19 nt, Homo sapiens
  misc_RNA (1)...(19): siRNA sense strand
agacggaacacuuucauug

SEQ ID NO: 1351751 - RNA, 19 nt, Homo sapiens
  misc_RNA (1)...(19): siRNA sense strand
guaacugcaucaugaacug

SEQ ID NO: 1351752 - RNA, 19 nt, Homo sapiens
  misc_RNA (1)...(19): siRNA sense strand
ugagaaagccauugagauc

SEQ ID NO: 1351753 - RNA, 19 nt, Homo sapiens
  misc_RNA (1)...(19): siRNA sense strand
gcaugaaucccgcugacaa

SEQ ID NO: 1351754 - RNA, 19 nt, Homo sapiens
  misc_RNA (1)...(19): siRNA sense strand
gcagcgaggaggaagauga

SEQ ID NO: 1351755 - RNA, 19 nt, Homo sapiens
  misc_RNA (1)...(19): siRNA sense strand
ccacggagcagcuacugaa

SEQ ID NO: 1351756 - RNA, 19 nt, Homo sapiens
  misc_RNA (1)...(19): siRNA sense strand
gauuacaggagugauauuu

SEQ ID NO: 1351757 - RNA, 19 nt, Homo sapiens
  misc_RNA (1)...(19): siRNA sense strand
ggagacagaauaugaguac

SEQ ID NO: 1351758 - RNA, 19 nt, Homo sapiens
  misc_RNA (1)...(19): siRNA sense strand
gggaacagcuaugacaucu

SEQ ID NO: 1351759 - RNA, 19 nt, Homo sapiens
  misc_RNA (1)...(19): siRNA sense strand
ugaaauacgagcggauuaa

SEQ ID NO: 1351760 - RNA, 19 nt, Homo sapiens
  misc_RNA (1)...(19): siRNA sense strand
cuacggagccuucaucaag

SEQ ID NO: 1351761 - RNA, 19 nt, Homo sapiens
  misc_RNA (1)...(19): siRNA sense strand
guacaagggucggcauguc

SEQ ID NO: 1351762 - RNA, 19 nt, Homo sapiens
  misc_RNA (1)...(19): siRNA sense strand
gaaucccgcugacaaacca

SEQ ID NO: 1351763 - RNA, 19 nt, Homo sapiens
  misc_RNA (1)...(19): siRNA sense strand
aagaggagacagaauauga

SEQ ID NO: 1351764 - RNA, 19 nt, Homo sapiens
  misc_RNA (1)...(19): siRNA sense strand
gagcagcuacugaaguuuc

SEQ ID NO: 1351765 - RNA, 19 nt, Homo sapiens
  misc_RNA (1)...(19): siRNA sense strand
ugacuucauugacacaugu

SEQ ID NO: 1351766 - RNA, 19 nt, Homo sapiens
  misc_RNA (1)...(19): siRNA sense strand
ggugauccaucgagacauc

SEQ ID NO: 1351767 - RNA, 19 nt, Homo sapiens
  misc_RNA (1)...(19): siRNA sense strand
uuacaggagugauauuugg

SEQ ID NO: 1351768 - RNA, 19 nt, Homo sapiens
  misc_RNA (1)...(19): siRNA sense strand
ggauuaaguuccuggucau

SEQ ID NO: 1351769 - RNA, 19 nt, Homo sapiens
  misc_RNA (1)...(19): siRNA sense strand
gcaacucagaggcuuuaaa

SEQ ID NO: 1351770 - RNA, 19 nt, Homo sapiens
  misc_RNA (1)...(19): siRNA sense strand
ggacgaggaggaagagauc

SEQ ID NO: 1351771 - RNA, 19 nt, Homo sapiens
  misc_RNA (1)...(19): siRNA sense strand
uggagaugcugcugugcua

SEQ ID NO: 1351772 - RNA, 19 nt, Homo sapiens
  misc_RNA (1)...(19): siRNA sense strand
cuacaucccugugcacauc

SEQ ID NO: 1351773 - RNA, 19 nt, Homo sapiens
  misc_RNA (1)...(19): siRNA sense strand
acccagaaguggagaagaa

SEQ ID NO: 1351774 - RNA, 19 nt, Homo sapiens
  misc_RNA (1)...(19): siRNA sense strand
ggagaacgggcugauguug

SEQ ID NO: 1351775 - RNA, 19 nt, Homo sapiens
  misc_RNA (1)...(19): siRNA sense strand
gcugucauccgccagaauu

SEQ ID NO: 1351776 - RNA, 19 nt, Homo sapiens
  misc_RNA (1)...(19): siRNA sense strand
ucuaagaaguucauugacu

SEQ ID NO: 1351777 - RNA, 19 nt, Homo sapiens
  misc_RNA (1)...(19): siRNA sense strand
gaaauacgagcggauuaag

SEQ ID NO: 1351778 - RNA, 19 nt, Homo sapiens
  misc_RNA (1)...(19): siRNA sense strand
gugaaauacgagcggauua

SEQ ID NO: 1351779 - RNA, 19 nt, Homo sapiens
  misc_RNA (1)...(19): siRNA sense strand
gaacagcaaaggccaaagc

SEQ ID NO: 1351780 - RNA, 19 nt, Homo sapiens
  misc_RNA (1)...(19): siRNA sense strand
gagagaacaaggaugaaca

SEQ ID NO: 1351781 - RNA, 19 nt, Homo sapiens
  misc_RNA (1)...(19): siRNA sense strand
ggagaucaacaugcugaaa

SEQ ID NO: 1351782 - RNA, 19 nt, Homo sapiens
  misc_RNA (1)...(19): siRNA sense strand
gaaccguaacugcaucaug

SEQ ID NO: 1351783 - RNA, 19 nt, Homo sapiens
  misc_RNA (1)...(19): siRNA sense strand
acaaauucauggccuucaa

SEQ ID NO: 1351784 - RNA, 19 nt, Homo sapiens
  misc_RNA (1)...(19): siRNA sense strand
aauacgagcggauuaaguu

SEQ ID NO: 1351785 - RNA, 19 nt, Homo sapiens
  misc_RNA (1)...(19): siRNA sense strand
gggcucaaccugcucauca

SEQ ID NO: 1351786 - RNA, 19 nt, Homo sapiens
  misc_RNA (1)...(19): siRNA sense strand
gagaacagcaaaggccaaa

SEQ ID NO: 1351787 - RNA, 19 nt, Homo sapiens
  misc_RNA (1)...(19): siRNA sense strand
ggaugggaguggugacuac

SEQ ID NO: 1351788 - RNA, 19 nt, Homo sapiens
  misc_RNA (1)...(19): siRNA sense strand
ccauugagauccgcucugu

SEQ ID NO: 1351789 - RNA, 19 nt, Homo sapiens
  misc_RNA (1)...(19): siRNA sense strand
ggugagaaagccauugaga

SEQ ID NO: 1351790 - RNA, 19 nt, Homo sapiens
  misc_RNA (1)...(19): siRNA sense strand
gcaacaucgccaccuacua

SEQ ID NO: 1351791 - RNA, 19 nt, Homo sapiens
  misc_RNA (1)...(19): siRNA sense strand
cagaggucaucgccuguga

SEQ ID NO: 1351792 - RNA, 19 nt, Homo sapiens
  misc_RNA (1)...(19): siRNA sense strand
gggagaugccuacuucugu

SEQ ID NO: 1351793 - RNA, 19 nt, Homo sapiens
  misc_RNA (1)...(19): siRNA sense strand
gaaggguucuguggucaac

SEQ ID NO: 1351794 - RNA, 19 nt, Homo sapiens
  misc_RNA (1)...(19): siRNA sense strand
ggaugaacaagcagcagaa

SEQ ID NO: 1351795 - RNA, 19 nt, Homo sapiens
  misc_RNA (1)...(19): siRNA sense strand
guagaagagagaacaagga

SEQ ID NO: 1351796 - RNA, 19 nt, Homo sapiens
  misc_RNA (1)...(19): siRNA sense strand
ggaagcugcaggagaagga

SEQ ID NO: 1351797 - RNA, 19 nt, Homo sapiens
  misc_RNA (1)...(19): siRNA sense strand
agaaguggucuaagaaguu

SEQ ID NO: 1351798 - RNA, 19 nt, Homo sapiens
  misc_RNA (1)...(19): siRNA sense strand
uaugauuacaggagugaua

SEQ ID NO: 1351799 - RNA, 19 nt, Homo sapiens
  misc_RNA (1)...(19): siRNA sense strand
cugaugccaccuaugauua

SEQ ID NO: 1351800 - RNA, 19 nt, Homo sapiens
  misc_RNA (1)...(19): siRNA sense strand
ugacagcaauggguacaca

SEQ ID NO: 1351801 - RNA, 19 nt, Homo sapiens
  misc_RNA (1)...(19): siRNA sense strand
caacucagaggcuuuaaaa

SEQ ID NO: 1351802 - RNA, 19 nt, Homo sapiens
  misc_RNA (1)...(19): siRNA sense strand
aagaaguggucuaagaagu

SEQ ID NO: 1351803 - RNA, 19 nt, Homo sapiens
  misc_RNA (1)...(19): siRNA sense strand
cuacuucuguggccuacau

SEQ ID NO: 1351804 - RNA, 19 nt, Homo sapiens
  misc_RNA (1)...(19): siRNA sense strand
caaacccuaccacaaauuc

SEQ ID NO: 1351805 - RNA, 19 nt, Homo sapiens
  misc_RNA (1)...(19): siRNA sense strand
acuaccguguugugaaaua

SEQ ID NO: 1351806 - RNA, 19 nt, Homo sapiens
  misc_RNA (1)...(19): siRNA sense strand
gaacaagcagcagaacucu

SEQ ID NO: 1351807 - RNA, 19 nt, Homo sapiens
  misc_RNA (1)...(19): siRNA sense strand
ucaaacaggagaucaacau

SEQ ID NO: 1351808 - RNA, 19 nt, Homo sapiens
  misc_RNA (1)...(19): siRNA sense strand
cccaaacccuaccacaaau

SEQ ID NO: 1351809 - RNA, 19 nt, Homo sapiens
  misc_RNA (1)...(19): siRNA sense strand
guucuguggucaacgugaa

SEQ ID NO: 1351810 - RNA, 19 nt, Homo sapiens
  misc_RNA (1)...(19): siRNA sense strand
gcagaggggagcagagaua

SEQ ID NO: 1351811 - RNA, 19 nt, Homo sapiens
  misc_RNA (1)...(19): siRNA sense strand
caugaaucccgcugacaaa

SEQ ID NO: 1351812 - RNA, 19 nt, Homo sapiens
  misc_RNA (1)...(19): siRNA sense strand
agcagcagcuucagaaaca

SEQ ID NO: 1351813 - RNA, 19 nt, Homo sapiens
  misc_RNA (1)...(19): siRNA sense strand
uacggagccuucaucaaga

SEQ ID NO: 1351814 - RNA, 19 nt, Homo sapiens
  misc_RNA (1)...(19): siRNA sense strand
cgagcccucuuccucauuc

SEQ ID NO: 1351815 - RNA, 19 nt, Homo sapiens
  misc_RNA (1)...(19): siRNA sense strand
gaacaaggaugaacaagca

SEQ ID NO: 1351816 - RNA, 19 nt, Homo sapiens
  misc_RNA (1)...(19): siRNA sense strand
gaagagagaacaaggauga

SEQ ID NO: 1351817 - RNA, 19 nt, Homo sapiens
  misc_RNA (1)...(19): siRNA sense strand
ugacugaccugguaaagaa

SEQ ID NO: 1351818 - RNA, 19 nt, Homo sapiens
  misc_RNA (1)...(19): siRNA sense strand
gaacagcuaugacaucuac

SEQ ID NO: 1351819 - RNA, 19 nt, Homo sapiens
  misc_RNA (1)...(19): siRNA sense strand
gcacuaccguguugugaaa

SEQ ID NO: 1351820 - RNA, 19 nt, Homo sapiens
  misc_RNA (1)...(19): siRNA sense strand
ggaacaagauucugcacaa

SEQ ID NO: 1351821 - RNA, 19 nt, Homo sapiens
  misc_RNA (1)...(19): siRNA sense strand
ggaacaaacugcgggugua

SEQ ID NO: 1351822 - RNA, 19 nt, Homo sapiens
  misc_RNA (1)...(19): siRNA sense strand
gaaagaggagacagaauau

SEQ ID NO: 1351823 - RNA, 19 nt, Homo sapiens
  misc_RNA (1)...(19): siRNA sense strand
gaacaagauucugcacaau

SEQ ID NO: 1351824 - RNA, 19 nt, Homo sapiens
  misc_RNA (1)...(19): siRNA sense strand
gauauuuggucucuaggaa

SEQ ID NO: 1351825 - RNA, 19 nt, Homo sapiens
  misc_RNA (1)...(19): siRNA sense strand
caagguguauggacucauu

SEQ ID NO: 1351826 - RNA, 19 nt, Homo sapiens
  misc_RNA (1)...(19): siRNA sense strand
agaaagaggagacagaaua

SEQ ID NO: 1351827 - RNA, 19 nt, Homo sapiens
  misc_RNA (1)...(19): siRNA sense strand
ggaagccccuguaccauua

SEQ ID NO: 1351828 - RNA, 19 nt, Homo sapiens
  misc_RNA (1)...(19): siRNA sense strand
acaagauucugcacaauga

SEQ ID NO: 1351829 - RNA, 19 nt, Homo sapiens
  misc_RNA (1)...(19): siRNA sense strand
gaaguggucuaagaaguuc

SEQ ID NO: 1351830 - RNA, 19 nt, Homo sapiens
  misc_RNA (1)...(19): siRNA sense strand
ggucuaagaaguucauuga

SEQ ID NO: 1351831 - RNA, 19 nt, Homo sapiens
  misc_RNA (1)...(19): siRNA sense strand
ccaagaaggccauggacua

SEQ ID NO: 1351832 - RNA, 19 nt, Homo sapiens
  misc_RNA (1)...(19): siRNA sense strand
gagcaugccuaccucaagu

SEQ ID NO: 1351833 - RNA, 19 nt, Homo sapiens
  misc_RNA (1)...(19): siRNA sense strand
ggaaguacaagaagcgauu

SEQ ID NO: 1351834 - RNA, 19 nt, Homo sapiens
  misc_RNA (1)...(19): siRNA sense strand
ugacagccauggagaggaa

SEQ ID NO: 1351835 - RNA, 19 nt, Homo sapiens
  misc_RNA (1)...(19): siRNA sense strand
aaccguaacugcaucauga

SEQ ID NO: 1351836 - RNA, 19 nt, Homo sapiens
  misc_RNA (1)...(19): siRNA sense strand
acaaacugcggguguauua

SEQ ID NO: 1351837 - RNA, 19 nt, Homo sapiens
  misc_RNA (1)...(19): siRNA sense strand
gagcaacucagaggcuuua

SEQ ID NO: 1351838 - RNA, 19 nt, Homo sapiens
  misc_RNA (1)...(19): siRNA sense strand
gcacaaugacccagaagug

SEQ ID NO: 1351839 - RNA, 19 nt, Homo sapiens
  misc_RNA (1)...(19): siRNA sense strand
ucaugacucugaaccguaa

SEQ ID NO: 1351840 - RNA, 19 nt, Homo sapiens
  misc_RNA (1)...(19): siRNA sense strand
ggacccugcugggaucuuu

SEQ ID NO: 1351841 - RNA, 19 nt, Homo sapiens
  misc_RNA (1)...(19): siRNA sense strand
cggagcagcuacugaaguu

SEQ ID NO: 1351842 - RNA, 19 nt, Homo sapiens
  misc_RNA (1)...(19): siRNA sense strand
caacaucgccaccuacuac

SEQ ID NO: 1351843 - RNA, 19 nt, Homo sapiens
  misc_RNA (1)...(19): siRNA sense strand
gaacaaacugcggguguau

SEQ ID NO: 1351844 - RNA, 19 nt, Homo sapiens
  misc_RNA (1)...(19): siRNA sense strand
gcauagaggagcagaagga

SEQ ID NO: 1351845 - RNA, 19 nt, Homo sapiens
  misc_RNA (1)...(19): siRNA sense strand
ggagugauauuuggucucu

SEQ ID NO: 1351846 - RNA, 19 nt, Homo sapiens
  misc_RNA (1)...(19): siRNA sense strand
gaacccugaugccaccuau

SEQ ID NO: 1351847 - RNA, 19 nt, Homo sapiens
  misc_RNA (1)...(19): siRNA sense strand
uccaagaaguggucuaaga

SEQ ID NO: 1351848 - RNA, 19 nt, Homo sapiens
  misc_RNA (1)...(19): siRNA sense strand
ccaagaaguggucuaagaa

SEQ ID NO: 1351849 - RNA, 19 nt, Homo sapiens
  misc_RNA (1)...(19): siRNA sense strand
ggaggacuguaucgccuau

SEQ ID NO: 1351850 - RNA, 19 nt, Homo sapiens
  misc_RNA (1)...(19): siRNA sense strand
agacggaacacuuucauug

SEQ ID NO: 1351851 - RNA, 19 nt, Homo sapiens
  misc_RNA (1)...(19): siRNA sense strand
guaacugcaucaugaacug

SEQ ID NO: 1351852 - RNA, 19 nt, Homo sapiens
  misc_RNA (1)...(19): siRNA sense strand
ugagaaagccauugagauc

SEQ ID NO: 1351853 - RNA, 19 nt, Homo sapiens
  misc_RNA (1)...(19): siRNA sense strand
gcaugaaucccgcugacaa

SEQ ID NO: 1351854 - RNA, 19 nt, Homo sapiens
  misc_RNA (1)...(19): siRNA sense strand
gcagcgaggaggaagauga

SEQ ID NO: 1351855 - RNA, 19 nt, Homo sapiens
  misc_RNA (1)...(19): siRNA sense strand
ccacggagcagcuacugaa

SEQ ID NO: 1351856 - RNA, 19 nt, Homo sapiens
  misc_RNA (1)...(19): siRNA sense strand
gauuacaggagugauauuu

SEQ ID NO: 1351857 - RNA, 19 nt, Homo sapiens
  misc_RNA (1)...(19): siRNA sense strand
ggagacagaauaugaguac

SEQ ID NO: 1351858 - RNA, 19 nt, Homo sapiens
  misc_RNA (1)...(19): siRNA sense strand
gggaacagcuaugacaucu

SEQ ID NO: 1351859 - RNA, 19 nt, Homo sapiens
  misc_RNA (1)...(19): siRNA sense strand
ugaaauacgagcggauuaa

SEQ ID NO: 1351860 - RNA, 19 nt, Homo sapiens
  misc_RNA (1)...(19): siRNA sense strand
cuacggagccuucaucaag

SEQ ID NO: 1351861 - RNA, 19 nt, Homo sapiens
  misc_RNA (1)...(19): siRNA sense strand
guacaagggucggcauguc

SEQ ID NO: 1351862 - RNA, 19 nt, Homo sapiens
  misc_RNA (1)...(19): siRNA sense strand
gaaucccgcugacaaacca

SEQ ID NO: 1351863 - RNA, 19 nt, Homo sapiens
  misc_RNA (1)...(19): siRNA sense strand
aagaggagacagaauauga

SEQ ID NO: 1351864 - RNA, 19 nt, Homo sapiens
  misc_RNA (1)...(19): siRNA sense strand
gagcagcuacugaaguuuc

SEQ ID NO: 1351865 - RNA, 19 nt, Homo sapiens
  misc_RNA (1)...(19): siRNA sense strand
ugacuucauugacacaugu

SEQ ID NO: 1351866 - RNA, 19 nt, Homo sapiens
  misc_RNA (1)...(19): siRNA sense strand
ggugauccaucgagacauc

SEQ ID NO: 1351867 - RNA, 19 nt, Homo sapiens
  misc_RNA (1)...(19): siRNA sense strand
uuacaggagugauauuugg

SEQ ID NO: 1351868 - RNA, 19 nt, Homo sapiens
  misc_RNA (1)...(19): siRNA sense strand
ggauuaaguuccuggucau

SEQ ID NO: 1351869 - RNA, 19 nt, Homo sapiens
  misc_RNA (1)...(19): siRNA sense strand
gcaacucagaggcuuuaaa

SEQ ID NO: 1351870 - RNA, 19 nt, Homo sapiens
  misc_RNA (1)...(19): siRNA sense strand
ggacgaggaggaagagauc

SEQ ID NO: 1351871 - RNA, 19 nt, Homo sapiens
  misc_RNA (1)...(19): siRNA sense strand
uggagaugcugcugugcua

SEQ ID NO: 1351872 - RNA, 19 nt, Homo sapiens
  misc_RNA (1)...(19): siRNA sense strand
cuacaucccugugcacauc

SEQ ID NO: 1351873 - RNA, 19 nt, Homo sapiens
  misc_RNA (1)...(19): siRNA sense strand
acccagaaguggagaagaa

SEQ ID NO: 1351874 - RNA, 19 nt, Homo sapiens
  misc_RNA (1)...(19): siRNA sense strand
ggagaacgggcugauguug

SEQ ID NO: 1351875 - RNA, 19 nt, Homo sapiens
  misc_RNA (1)...(19): siRNA sense strand
gcugucauccgccagaauu

SEQ ID NO: 1351876 - RNA, 19 nt, Homo sapiens
  misc_RNA (1)...(19): siRNA sense strand
ucuaagaaguucauugacu

SEQ ID NO: 1351877 - RNA, 19 nt, Homo sapiens
  misc_RNA (1)...(19): siRNA sense strand
gaaauacgagcggauuaag

SEQ ID NO: 1351878 - RNA, 19 nt, Homo sapiens
  misc_RNA (1)...(19): siRNA sense strand
gugaaauacgagcggauua

SEQ ID NO: 1351879 - RNA, 19 nt, Homo sapiens
  misc_RNA (1)...(19): siRNA sense strand
gaacagcaaaggccaaagc

SEQ ID NO: 1351880 - RNA, 19 nt, Homo sapiens
  misc_RNA (1)...(19): siRNA sense strand
gagagaacaaggaugaaca

SEQ ID NO: 1351881 - RNA, 19 nt, Homo sapiens
  misc_RNA (1)...(19): siRNA sense strand
ggagaucaacaugcugaaa

SEQ ID NO: 1351882 - RNA, 19 nt, Homo sapiens
  misc_RNA (1)...(19): siRNA sense strand
gaaccguaacugcaucaug

SEQ ID NO: 1351883 - RNA, 19 nt, Homo sapiens
  misc_RNA (1)...(19): siRNA sense strand
acaaauucauggccuucaa

SEQ ID NO: 1351884 - RNA, 19 nt, Homo sapiens
  misc_RNA (1)...(19): siRNA sense strand
aauacgagcggauuaaguu

SEQ ID NO: 1351885 - RNA, 19 nt, Homo sapiens
  misc_RNA (1)...(19): siRNA sense strand
gggcucaaccugcucauca

SEQ ID NO: 1351886 - RNA, 19 nt, Homo sapiens
  misc_RNA (1)...(19): siRNA sense strand
gagaacagcaaaggccaaa

SEQ ID NO: 1351887 - RNA, 19 nt, Homo sapiens
  misc_RNA (1)...(19): siRNA sense strand
ggaugggaguggugacuac

SEQ ID NO: 1351888 - RNA, 19 nt, Homo sapiens
  misc_RNA (1)...(19): siRNA sense strand
ccauugagauccgcucugu

SEQ ID NO: 1351889 - RNA, 19 nt, Homo sapiens
  misc_RNA (1)...(19): siRNA sense strand
ggugagaaagccauugaga

SEQ ID NO: 1351890 - RNA, 19 nt, Homo sapiens
  misc_RNA (1)...(19): siRNA sense strand
gcaacaucgccaccuacua

SEQ ID NO: 1351891 - RNA, 19 nt, Homo sapiens
  misc_RNA (1)...(19): siRNA sense strand
cagaggucaucgccuguga

SEQ ID NO: 1351892 - RNA, 19 nt, Homo sapiens
  misc_RNA (1)...(19): siRNA sense strand
gggagaugccuacuucugu

SEQ ID NO: 1351893 - RNA, 19 nt, Homo sapiens
  misc_RNA (1)...(19): siRNA sense strand
gaaggguucuguggucaac

SEQ ID NO: 1351894 - RNA, 19 nt, Homo sapiens
  misc_RNA (1)...(19): siRNA sense strand
ggaugaacaagcagcagaa

SEQ ID NO: 1351895 - RNA, 19 nt, Homo sapiens
  misc_RNA (1)...(19): siRNA sense strand
guagaagagagaacaagga

SEQ ID NO: 1351896 - RNA, 19 nt, Homo sapiens
  misc_RNA (1)...(19): siRNA sense strand
ggaagcugcaggagaagga

SEQ ID NO: 1351897 - RNA, 19 nt, Homo sapiens
  misc_RNA (1)...(19): siRNA sense strand
agaaguggucuaagaaguu

SEQ ID NO: 1351898 - RNA, 19 nt, Homo sapiens
  misc_RNA (1)...(19): siRNA sense strand
uaugauuacaggagugaua

SEQ ID NO: 1351899 - RNA, 19 nt, Homo sapiens
  misc_RNA (1)...(19): siRNA sense strand
cugaugccaccuaugauua

SEQ ID NO: 1351900 - RNA, 19 nt, Homo sapiens
  misc_RNA (1)...(19): siRNA sense strand
ugacagcaauggguacaca

SEQ ID NO: 1351901 - RNA, 19 nt, Homo sapiens
  misc_RNA (1)...(19): siRNA sense strand
caacucagaggcuuuaaaa

SEQ ID NO: 1351902 - RNA, 19 nt, Homo sapiens
  misc_RNA (1)...(19): siRNA sense strand
aagaaguggucuaagaagu

SEQ ID NO: 1351903 - RNA, 19 nt, Homo sapiens
  misc_RNA (1)...(19): siRNA sense strand
cuacuucuguggccuacau

SEQ ID NO: 1351904 - RNA, 19 nt, Homo sapiens
  misc_RNA (1)...(19): siRNA sense strand
caaacccuaccacaaauuc

SEQ ID NO: 1351905 - RNA, 19 nt, Homo sapiens
  misc_RNA (1)...(19): siRNA sense strand
acuaccguguugugaaaua

SEQ ID NO: 1351906 - RNA, 19 nt, Homo sapiens
  misc_RNA (1)...(19): siRNA sense strand
gaacaagcagcagaacucu

SEQ ID NO: 1351907 - RNA, 19 nt, Homo sapiens
  misc_RNA (1)...(19): siRNA sense strand
ucaaacaggagaucaacau

SEQ ID NO: 1351908 - RNA, 19 nt, Homo sapiens
  misc_RNA (1)...(19): siRNA sense strand
cccaaacccuaccacaaau

SEQ ID NO: 1351909 - RNA, 19 nt, Homo sapiens
  misc_RNA (1)...(19): siRNA sense strand
guucuguggucaacgugaa

SEQ ID NO: 1351910 - RNA, 19 nt, Homo sapiens
  misc_RNA (1)...(19): siRNA sense strand
gcagaggggagcagagaua

SEQ ID NO: 1351911 - RNA, 19 nt, Homo sapiens
  misc_RNA (1)...(19): siRNA sense strand
caugaaucccgcugacaaa

SEQ ID NO: 1351912 - RNA, 19 nt, Homo sapiens
  misc_RNA (1)...(19): siRNA sense strand
agcagcagcuucagaaaca

SEQ ID NO: 1351913 - RNA, 19 nt, Homo sapiens
  misc_RNA (1)...(19): siRNA sense strand
uacggagccuucaucaaga

SEQ ID NO: 1351914 - RNA, 19 nt, Homo sapiens
  misc_RNA (1)...(19): siRNA sense strand
cgagcccucuuccucauuc

SEQ ID NO: 1351915 - RNA, 19 nt, Homo sapiens
  misc_RNA (1)...(19): siRNA sense strand
gaaagagggugaugaauua

SEQ ID NO: 1351916 - RNA, 19 nt, Homo sapiens
  misc_RNA (1)...(19): siRNA sense strand
caacaaagauucugcuaaa

SEQ ID NO: 1351917 - RNA, 19 nt, Homo sapiens
  misc_RNA (1)...(19): siRNA sense strand
caacagggaugaaauaguu

SEQ ID NO: 1351918 - RNA, 19 nt, Homo sapiens
  misc_RNA (1)...(19): siRNA sense strand
gaaugaaacuucugcugua

SEQ ID NO: 1351919 - RNA, 19 nt, Homo sapiens
  misc_RNA (1)...(19): siRNA sense strand
gaagaagaaugaagaucua

SEQ ID NO: 1351920 - RNA, 19 nt, Homo sapiens
  misc_RNA (1)...(19): siRNA sense strand
gaggaggacucuucugaua

SEQ ID NO: 1351921 - RNA, 19 nt, Homo sapiens
  misc_RNA (1)...(19): siRNA sense strand
gcaacuaugucaauucaaa

SEQ ID NO: 1351922 - RNA, 19 nt, Homo sapiens
  misc_RNA (1)...(19): siRNA sense strand
ugacgaaucuaguucaaua

SEQ ID NO: 1351923 - RNA, 19 nt, Homo sapiens
  misc_RNA (1)...(19): siRNA sense strand
gauggucucuauacaaaua

SEQ ID NO: 1351924 - RNA, 19 nt, Homo sapiens
  misc_RNA (1)...(19): siRNA sense strand
ggaagcuucugcugacuua

SEQ ID NO: 1351925 - RNA, 19 nt, Homo sapiens
  misc_RNA (1)...(19): siRNA sense strand
gaaugaagaucuaaagcaa

SEQ ID NO: 1351926 - RNA, 19 nt, Homo sapiens
  misc_RNA (1)...(19): siRNA sense strand
ggaaagagggugaugaauu

SEQ ID NO: 1351927 - RNA, 19 nt, Homo sapiens
  misc_RNA (1)...(19): siRNA sense strand
cugaagaguuucuauguua

SEQ ID NO: 1351928 - RNA, 19 nt, Homo sapiens
  misc_RNA (1)...(19): siRNA sense strand
ugacaaacuuggcaaauga

SEQ ID NO: 1351929 - RNA, 19 nt, Homo sapiens
  misc_RNA (1)...(19): siRNA sense strand
ugaagaauguggccaguaa

SEQ ID NO: 1351930 - RNA, 19 nt, Homo sapiens
  misc_RNA (1)...(19): siRNA sense strand
agaguucugucaaguauua

SEQ ID NO: 1351931 - RNA, 19 nt, Homo sapiens
  misc_RNA (1)...(19): siRNA sense strand
gaccguacaagauuuauua

SEQ ID NO: 1351932 - RNA, 19 nt, Homo sapiens
  misc_RNA (1)...(19): siRNA sense strand
ucaagaaguugguauaugu

SEQ ID NO: 1351933 - RNA, 19 nt, Homo sapiens
  misc_RNA (1)...(19): siRNA sense strand
ugaaauaguuguugcugaa

SEQ ID NO: 1351934 - RNA, 19 nt, Homo sapiens
  misc_RNA (1)...(19): siRNA sense strand
gugauaagauggucucuau

SEQ ID NO: 1351935 - RNA, 19 nt, Homo sapiens
  misc_RNA (1)...(19): siRNA sense strand
ucagaagguuguaaaugua

SEQ ID NO: 1351936 - RNA, 19 nt, Homo sapiens
  misc_RNA (1)...(19): siRNA sense strand
cuaaaucacuagugcguuu

SEQ ID NO: 1351937 - RNA, 19 nt, Homo sapiens
  misc_RNA (1)...(19): siRNA sense strand
caaaauugcuuacccagua

SEQ ID NO: 1351938 - RNA, 19 nt, Homo sapiens
  misc_RNA (1)...(19): siRNA sense strand
gcaaguauucuuuggcuaa

SEQ ID NO: 1351939 - RNA, 19 nt, Homo sapiens
  misc_RNA (1)...(19): siRNA sense strand
gaaagugugguuguuauaa

SEQ ID NO: 1351940 - RNA, 19 nt, Homo sapiens
  misc_RNA (1)...(19): siRNA sense strand
aaaugcaucugaacuguuu

SEQ ID NO: 1351941 - RNA, 19 nt, Homo sapiens
  misc_RNA (1)...(19): siRNA sense strand
aaccuuaucugaagaguuu

SEQ ID NO: 1351942 - RNA, 19 nt, Homo sapiens
  misc_RNA (1)...(19): siRNA sense strand
gcacaacauggugaaauua

SEQ ID NO: 1351943 - RNA, 19 nt, Homo sapiens
  misc_RNA (1)...(19): siRNA sense strand
gcuaaaagcuucacuagug

SEQ ID NO: 1351944 - RNA, 19 nt, Homo sapiens
  misc_RNA (1)...(19): siRNA sense strand
gcagcgauuugaagaagaa

SEQ ID NO: 1351945 - RNA, 19 nt, Homo sapiens
  misc_RNA (1)...(19): siRNA sense strand
caaagauguuucacuucua

SEQ ID NO: 1351946 - RNA, 19 nt, Homo sapiens
  misc_RNA (1)...(19): siRNA sense strand
caagagaauucugcuaaga

SEQ ID NO: 1351947 - RNA, 19 nt, Homo sapiens
  misc_RNA (1)...(19): siRNA sense strand
agaagaagccguauacuau

SEQ ID NO: 1351948 - RNA, 19 nt, Homo sapiens
  misc_RNA (1)...(19): siRNA sense strand
gaauaacacuacugaucga

SEQ ID NO: 1351949 - RNA, 19 nt, Homo sapiens
  misc_RNA (1)...(19): siRNA sense strand
ggaggacucuucugauagu

SEQ ID NO: 1351950 - RNA, 19 nt, Homo sapiens
  misc_RNA (1)...(19): siRNA sense strand
caaagauucugcuaaacug

SEQ ID NO: 1351951 - RNA, 19 nt, Homo sapiens
  misc_RNA (1)...(19): siRNA sense strand
uggcugaucuugaagguuu

SEQ ID NO: 1351952 - RNA, 19 nt, Homo sapiens
  misc_RNA (1)...(19): siRNA sense strand
uauuaaaucucggcaagua

SEQ ID NO: 1351953 - RNA, 19 nt, Homo sapiens
  misc_RNA (1)...(19): siRNA sense strand
gaagcuggcauaauuucua

SEQ ID NO: 1351954 - RNA, 19 nt, Homo sapiens
  misc_RNA (1)...(19): siRNA sense strand
ucaugaugcuugcuauuaa

SEQ ID NO: 1351955 - RNA, 19 nt, Homo sapiens
  misc_RNA (1)...(19): siRNA sense strand
ccaaagauguuucacuucu

SEQ ID NO: 1351956 - RNA, 19 nt, Homo sapiens
  misc_RNA (1)...(19): siRNA sense strand
gagugaaucuggaagugaa

SEQ ID NO: 1351957 - RNA, 19 nt, Homo sapiens
  misc_RNA (1)...(19): siRNA sense strand
gcaaaugaagccaacauau

SEQ ID NO: 1351958 - RNA, 19 nt, Homo sapiens
  misc_RNA (1)...(19): siRNA sense strand
cuacgaaucugaugaugau

SEQ ID NO: 1351959 - RNA, 19 nt, Homo sapiens
  misc_RNA (1)...(19): siRNA sense strand
gcaauagggaggugcagua

SEQ ID NO: 1351960 - RNA, 19 nt, Homo sapiens
  misc_RNA (1)...(19): siRNA sense strand
aagauggucucuauacaaa

SEQ ID NO: 1351961 - RNA, 19 nt, Homo sapiens
  misc_RNA (1)...(19): siRNA sense strand
gaagaagccguauacuaug

SEQ ID NO: 1351962 - RNA, 19 nt, Homo sapiens
  misc_RNA (1)...(19): siRNA sense strand
gauaauauacacagguuug

SEQ ID NO: 1351963 - RNA, 19 nt, Homo sapiens
  misc_RNA (1)...(19): siRNA sense strand
gcaguguugugauggcuuu

SEQ ID NO: 1351964 - RNA, 19 nt, Homo sapiens
  misc_RNA (1)...(19): siRNA sense strand
uaccaaagauguuucacuu

SEQ ID NO: 1351965 - RNA, 19 nt, Homo sapiens
  misc_RNA (1)...(19): siRNA sense strand
gaagacaauggaaagaauu

SEQ ID NO: 1351966 - RNA, 19 nt, Homo sapiens
  misc_RNA (1)...(19): siRNA sense strand
ggacccaaaccaacuaauu

SEQ ID NO: 1351967 - RNA, 19 nt, Homo sapiens
  misc_RNA (1)...(19): siRNA sense strand
uaacaggaaugaaugaaac

SEQ ID NO: 1351968 - RNA, 19 nt, Homo sapiens
  misc_RNA (1)...(19): siRNA sense strand
ccagaagagucacuaagga

SEQ ID NO: 1351969 - RNA, 19 nt, Homo sapiens
  misc_RNA (1)...(19): siRNA sense strand
gcaagagaauucugcuaag

SEQ ID NO: 1351970 - RNA, 19 nt, Homo sapiens
  misc_RNA (1)...(19): siRNA sense strand
gcaacaaagauucugcuaa

SEQ ID NO: 1351971 - RNA, 19 nt, Homo sapiens
  misc_RNA (1)...(19): siRNA sense strand
ugagaguucugucaaguau

SEQ ID NO: 1351972 - RNA, 19 nt, Homo sapiens
  misc_RNA (1)...(19): siRNA sense strand
aguauuagagugccaauua

SEQ ID NO: 1351973 - RNA, 19 nt, Homo sapiens
  misc_RNA (1)...(19): siRNA sense strand
ccaaacuccuggacaguau

SEQ ID NO: 1351974 - RNA, 19 nt, Homo sapiens
  misc_RNA (1)...(19): siRNA sense strand
caacauaucaacucuucuu

SEQ ID NO: 1351975 - RNA, 19 nt, Homo sapiens
  misc_RNA (1)...(19): siRNA sense strand
gagcagaaggaaauguuaa

SEQ ID NO: 1351976 - RNA, 19 nt, Homo sapiens
  misc_RNA (1)...(19): siRNA sense strand
caucagagaccguacaaga

SEQ ID NO: 1351977 - RNA, 19 nt, Homo sapiens
  misc_RNA (1)...(19): siRNA sense strand
auagggaggugcaguauau

SEQ ID NO: 1351978 - RNA, 19 nt, Homo sapiens
  misc_RNA (1)...(19): siRNA sense strand
gaaggacccaaaccaacua

SEQ ID NO: 1351979 - RNA, 19 nt, Homo sapiens
  misc_RNA (1)...(19): siRNA sense strand
gauaagauggucucuauac

SEQ ID NO: 1351980 - RNA, 19 nt, Homo sapiens
  misc_RNA (1)...(19): siRNA sense strand
ugucaguacuccugcauuu

SEQ ID NO: 1351981 - RNA, 19 nt, Homo sapiens
  misc_RNA (1)...(19): siRNA sense strand
ucucauacucucaacauua

SEQ ID NO: 1351982 - RNA, 19 nt, Homo sapiens
  misc_RNA (1)...(19): siRNA sense strand
gccaacauaucaacucuuc

SEQ ID NO: 1351983 - RNA, 19 nt, Homo sapiens
  misc_RNA (1)...(19): siRNA sense strand
uagcaacuaugucaauuca

SEQ ID NO: 1351984 - RNA, 19 nt, Homo sapiens
  misc_RNA (1)...(19): siRNA sense strand
guauuagagugccaauuau

SEQ ID NO: 1351985 - RNA, 19 nt, Homo sapiens
  misc_RNA (1)...(19): siRNA sense strand
gaagaaugaagaucuaaag

SEQ ID NO: 1351986 - RNA, 19 nt, Homo sapiens
  misc_RNA (1)...(19): siRNA sense strand
gcaaugaggacagcaguga

SEQ ID NO: 1351987 - RNA, 19 nt, Homo sapiens
  misc_RNA (1)...(19): siRNA sense strand
caaaugaagccaacauauc

SEQ ID NO: 1351988 - RNA, 19 nt, Homo sapiens
  misc_RNA (1)...(19): siRNA sense strand
gaagaucuaaagcaaaugu

SEQ ID NO: 1351989 - RNA, 19 nt, Homo sapiens
  misc_RNA (1)...(19): siRNA sense strand
caccauauguuaggaagaa

SEQ ID NO: 1351990 - RNA, 19 nt, Homo sapiens
  misc_RNA (1)...(19): siRNA sense strand
ucagagaccguacaagauu

SEQ ID NO: 1351991 - RNA, 19 nt, Homo sapiens
  misc_RNA (1)...(19): siRNA sense strand
gaagagucacuaaggagaa

SEQ ID NO: 1351992 - RNA, 19 nt, Homo sapiens
  misc_RNA (1)...(19): siRNA sense strand
ccagugagcaggacaguga

SEQ ID NO: 1351993 - RNA, 19 nt, Homo sapiens
  misc_RNA (1)...(19): siRNA sense strand
uaaacuggaugcuaugaag

SEQ ID NO: 1351994 - RNA, 19 nt, Homo sapiens
  misc_RNA (1)...(19): siRNA sense strand
cagagaccguacaagauuu

SEQ ID NO: 1351995 - RNA, 19 nt, Homo sapiens
  misc_RNA (1)...(19): siRNA sense strand
cuagugcguuuacuucgua

SEQ ID NO: 1351996 - RNA, 19 nt, Homo sapiens
  misc_RNA (1)...(19): siRNA sense strand
ugaaacuucugcuguaauc

SEQ ID NO: 1351997 - RNA, 19 nt, Homo sapiens
  misc_RNA (1)...(19): siRNA sense strand
gguuuacacuugucaacuu

SEQ ID NO: 1351998 - RNA, 19 nt, Homo sapiens
  misc_RNA (1)...(19): siRNA sense strand
gcagugacagugagaguga

SEQ ID NO: 1351999 - RNA, 19 nt, Homo sapiens
  misc_RNA (1)...(19): siRNA sense strand
gcuaugaagcggauuguug

SEQ ID NO: 1352000 - RNA, 19 nt, Homo sapiens
  misc_RNA (1)...(19): siRNA sense strand
caacugauccaacuaugau

SEQ ID NO: 1352001 - RNA, 19 nt, Homo sapiens
  misc_RNA (1)...(19): siRNA sense strand
gcacuccuguccauaagca

SEQ ID NO: 1352002 - RNA, 19 nt, Homo sapiens
  misc_RNA (1)...(19): siRNA sense strand
uaacacuacugaucgaaag

SEQ ID NO: 1352003 - RNA, 19 nt, Homo sapiens
  misc_RNA (1)...(19): siRNA sense strand
cucauacucucaacauuaa

SEQ ID NO: 1352004 - RNA, 19 nt, Homo sapiens
  misc_RNA (1)...(19): siRNA sense strand
cuuggcaccuuaucucaua

SEQ ID NO: 1352005 - RNA, 19 nt, Homo sapiens
  misc_RNA (1)...(19): siRNA sense strand
aagccaggauaaacaauuu

SEQ ID NO: 1352006 - RNA, 19 nt, Homo sapiens
  misc_RNA (1)...(19): siRNA sense strand
cauaucaacucuucuucga

SEQ ID NO: 1352007 - RNA, 19 nt, Homo sapiens
  misc_RNA (1)...(19): siRNA sense strand
ugacuuaucaccauauguu

SEQ ID NO: 1352008 - RNA, 19 nt, Homo sapiens
  misc_RNA (1)...(19): siRNA sense strand
gcaagcgcuuugagaguuc

SEQ ID NO: 1352009 - RNA, 19 nt, Homo sapiens
  misc_RNA (1)...(19): siRNA sense strand
gguauugacuuuugugauu

SEQ ID NO: 1352010 - RNA, 19 nt, Homo sapiens
  misc_RNA (1)...(19): siRNA sense strand
gaaagugaaucugaaucca

SEQ ID NO: 1352011 - RNA, 19 nt, Homo sapiens
  misc_RNA (1)...(19): siRNA sense strand
gcugaaagugugguuguua

SEQ ID NO: 1352012 - RNA, 19 nt, Homo sapiens
  misc_RNA (1)...(19): siRNA sense strand
gagaauuucagaccuaugu

SEQ ID NO: 1352013 - RNA, 19 nt, Homo sapiens
  misc_RNA (1)...(19): siRNA sense strand
uauguuaggucaacugauc

SEQ ID NO: 1352014 - RNA, 19 nt, Homo sapiens
  misc_RNA (1)...(19): siRNA sense strand
gcagaaggaaauguuaauu

SEQ ID NO: 1352015 - RNA, 19 nt, Homo sapiens
  misc_RNA (1)...(19): siRNA sense strand
gaaagucaaugucgguuua

SEQ ID NO: 1352016 - RNA, 19 nt, Homo sapiens
  misc_RNA (1)...(19): siRNA sense strand
caaaguuccugcugauaua

SEQ ID NO: 1352017 - RNA, 19 nt, Homo sapiens
  misc_RNA (1)...(19): siRNA sense strand
gagaagaaaugcaccuuga

SEQ ID NO: 1352018 - RNA, 19 nt, Homo sapiens
  misc_RNA (1)...(19): siRNA sense strand
aaagucaucucccuuauuu

SEQ ID NO: 1352019 - RNA, 19 nt, Homo sapiens
  misc_RNA (1)...(19): siRNA sense strand
gaucagaggugcuauuuac

SEQ ID NO: 1352020 - RNA, 19 nt, Homo sapiens
  misc_RNA (1)...(19): siRNA sense strand
caucaaaucuaccacacua

SEQ ID NO: 1352021 - RNA, 19 nt, Homo sapiens
  misc_RNA (1)...(19): siRNA sense strand
ggugauacuuguucccuua

SEQ ID NO: 1352022 - RNA, 19 nt, Homo sapiens
  misc_RNA (1)...(19): siRNA sense strand
gcauaaagaugauaaacca

SEQ ID NO: 1352023 - RNA, 19 nt, Homo sapiens
  misc_RNA (1)...(19): siRNA sense strand
gaaggugaagaaacaauua

SEQ ID NO: 1352024 - RNA, 19 nt, Homo sapiens
  misc_RNA (1)...(19): siRNA sense strand
ugaagaaggugaagaaaca

SEQ ID NO: 1352025 - RNA, 19 nt, Homo sapiens
  misc_RNA (1)...(19): siRNA sense strand
aaacauugcugcugggaaa

SEQ ID NO: 1352026 - RNA, 19 nt, Homo sapiens
  misc_RNA (1)...(19): siRNA sense strand
ggaaagaaaugcugaaaau

SEQ ID NO: 1352027 - RNA, 19 nt, Homo sapiens
  misc_RNA (1)...(19): siRNA sense strand
gaucaugucugucauucga

SEQ ID NO: 1352028 - RNA, 19 nt, Homo sapiens
  misc_RNA (1)...(19): siRNA sense strand
ucgaagcccuuaaggaaua

SEQ ID NO: 1352029 - RNA, 19 nt, Homo sapiens
  misc_RNA (1)...(19): siRNA sense strand
gauauaagguuaacuucca

SEQ ID NO: 1352030 - RNA, 19 nt, Homo sapiens
  misc_RNA (1)...(19): siRNA sense strand
gaucuggacaucaugaaua

SEQ ID NO: 1352031 - RNA, 19 nt, Homo sapiens
  misc_RNA (1)...(19): siRNA sense strand
gaacaccccuucagcaaaa

SEQ ID NO: 1352032 - RNA, 19 nt, Homo sapiens
  misc_RNA (1)...(19): siRNA sense strand
ugaggacucugccaacuuu

SEQ ID NO: 1352033 - RNA, 19 nt, Homo sapiens
  misc_RNA (1)...(19): siRNA sense strand
gcaacucagucauuaaaca

SEQ ID NO: 1352034 - RNA, 19 nt, Homo sapiens
  misc_RNA (1)...(19): siRNA sense strand
uuugaagacuugcuaguua

SEQ ID NO: 1352035 - RNA, 19 nt, Homo sapiens
  misc_RNA (1)...(19): siRNA sense strand
ggacaucaaugagcaagau

SEQ ID NO: 1352036 - RNA, 19 nt, Homo sapiens
  misc_RNA (1)...(19): siRNA sense strand
gagaagugcauaaagauga

SEQ ID NO: 1352037 - RNA, 19 nt, Homo sapiens
  misc_RNA (1)...(19): siRNA sense strand
gaagggugcuccugaaggu

SEQ ID NO: 1352038 - RNA, 19 nt, Homo sapiens
  misc_RNA (1)...(19): siRNA sense strand
aagguuaacuuccaucaaa

SEQ ID NO: 1352039 - RNA, 19 nt, Homo sapiens
  misc_RNA (1)...(19): siRNA sense strand
gacagcagcccuuggauuu

SEQ ID NO: 1352040 - RNA, 19 nt, Homo sapiens
  misc_RNA (1)...(19): siRNA sense strand
gcaaaggguguguaugaaa

SEQ ID NO: 1352041 - RNA, 19 nt, Homo sapiens
  misc_RNA (1)...(19): siRNA sense strand
gacaagacugguacacuua

SEQ ID NO: 1352042 - RNA, 19 nt, Homo sapiens
  misc_RNA (1)...(19): siRNA sense strand
ggacaacccggacuuugaa

SEQ ID NO: 1352043 - RNA, 19 nt, Homo sapiens
  misc_RNA (1)...(19): siRNA sense strand
caucgaagcccuuaaggaa

SEQ ID NO: 1352044 - RNA, 19 nt, Homo sapiens
  misc_RNA (1)...(19): siRNA sense strand
guacuaagguuccuaugac

SEQ ID NO: 1352045 - RNA, 19 nt, Homo sapiens
  misc_RNA (1)...(19): siRNA sense strand
caacaaaccagaugucagu

SEQ ID NO: 1352046 - RNA, 19 nt, Homo sapiens
  misc_RNA (1)...(19): siRNA sense strand
agacaagacugguacacuu

SEQ ID NO: 1352047 - RNA, 19 nt, Homo sapiens
  misc_RNA (1)...(19): siRNA sense strand
gaggugcuauuuacuacuu

SEQ ID NO: 1352048 - RNA, 19 nt, Homo sapiens
  misc_RNA (1)...(19): siRNA sense strand
ggaguuaacaccgaaauug

SEQ ID NO: 1352049 - RNA, 19 nt, Homo sapiens
  misc_RNA (1)...(19): siRNA sense strand
cauaguuccuggugauauu

SEQ ID NO: 1352050 - RNA, 19 nt, Homo sapiens
  misc_RNA (1)...(19): siRNA sense strand
uaacuuccaucaaaucuac

SEQ ID NO: 1352051 - RNA, 19 nt, Homo sapiens
  misc_RNA (1)...(19): siRNA sense strand
gaagaucaugucugucauu

SEQ ID NO: 1352052 - RNA, 19 nt, Homo sapiens
  misc_RNA (1)...(19): siRNA sense strand
gacaacuucuccaccauug

SEQ ID NO: 1352053 - RNA, 19 nt, Homo sapiens
  misc_RNA (1)...(19): siRNA sense strand
ucacuugccuaguagagaa

SEQ ID NO: 1352054 - RNA, 19 nt, Homo sapiens
  misc_RNA (1)...(19): siRNA sense strand
guagagaagaugaauguau

SEQ ID NO: 1352055 - RNA, 19 nt, Homo sapiens
  misc_RNA (1)...(19): siRNA sense strand
ugacaaaguuccugcugau

SEQ ID NO: 1352056 - RNA, 19 nt, Homo sapiens
  misc_RNA (1)...(19): siRNA sense strand
gaauugaagggucuuucua

SEQ ID NO: 1352057 - RNA, 19 nt, Homo sapiens
  misc_RNA (1)...(19): siRNA sense strand
gaugauaaaccagugaauu

SEQ ID NO: 1352058 - RNA, 19 nt, Homo sapiens
  misc_RNA (1)...(19): siRNA sense strand
ggugcuauuuacuacuuua

SEQ ID NO: 1352059 - RNA, 19 nt, Homo sapiens
  misc_RNA (1)...(19): siRNA sense strand
acaacaacaugaaacaguu

SEQ ID NO: 1352060 - RNA, 19 nt, Homo sapiens
  misc_RNA (1)...(19): siRNA sense strand
ccacaagucuaaaaucgua

SEQ ID NO: 1352061 - RNA, 19 nt, Homo sapiens
  misc_RNA (1)...(19): siRNA sense strand
gaagggucuuucuaaaaua

SEQ ID NO: 1352062 - RNA, 19 nt, Homo sapiens
  misc_RNA (1)...(19): siRNA sense strand
ugaauugucaccaguauga

SEQ ID NO: 1352063 - RNA, 19 nt, Homo sapiens
  misc_RNA (1)...(19): siRNA sense strand
ccaaagucaucucccuuau

SEQ ID NO: 1352064 - RNA, 19 nt, Homo sapiens
  misc_RNA (1)...(19): siRNA sense strand
guaacgcccucaacagcuu

SEQ ID NO: 1352065 - RNA, 19 nt, Homo sapiens
  misc_RNA (1)...(19): siRNA sense strand
ccaagcaggacaucaauga

SEQ ID NO: 1352066 - RNA, 19 nt, Homo sapiens
  misc_RNA (1)...(19): siRNA sense strand
gauacuuguucccuuaaug

SEQ ID NO: 1352067 - RNA, 19 nt, Homo sapiens
  misc_RNA (1)...(19): siRNA sense strand
gcagucuggaucauaaaua

SEQ ID NO: 1352068 - RNA, 19 nt, Homo sapiens
  misc_RNA (1)...(19): siRNA sense strand
ggaauaugagccugaaaug

SEQ ID NO: 1352069 - RNA, 19 nt, Homo sapiens
  misc_RNA (1)...(19): siRNA sense strand
ggcgcucucuguucuagua

SEQ ID NO: 1352070 - RNA, 19 nt, Homo sapiens
  misc_RNA (1)...(19): siRNA sense strand
ugagcaagauguuugugaa

SEQ ID NO: 1352071 - RNA, 19 nt, Homo sapiens
  misc_RNA (1)...(19): siRNA sense strand
caauuugugcucuuuguaa

SEQ ID NO: 1352072 - RNA, 19 nt, Homo sapiens
  misc_RNA (1)...(19): siRNA sense strand
gaaucugucucugucauca

SEQ ID NO: 1352073 - RNA, 19 nt, Homo sapiens
  misc_RNA (1)...(19): siRNA sense strand
gaacccaaaggaaccauug

SEQ ID NO: 1352074 - RNA, 19 nt, Homo sapiens
  misc_RNA (1)...(19): siRNA sense strand
agaaacaauuacagccuuu

SEQ ID NO: 1352075 - RNA, 19 nt, Homo sapiens
  misc_RNA (1)...(19): siRNA sense strand
gcacugcuguggccaucug

SEQ ID NO: 1352076 - RNA, 19 nt, Homo sapiens
  misc_RNA (1)...(19): siRNA sense strand
ggacucugccaacuuuauu

SEQ ID NO: 1352077 - RNA, 19 nt, Homo sapiens
  misc_RNA (1)...(19): siRNA sense strand
caaugucgguuuacuguac

SEQ ID NO: 1352078 - RNA, 19 nt, Homo sapiens
  misc_RNA (1)...(19): siRNA sense strand
caacagaacaggagagaac

SEQ ID NO: 1352079 - RNA, 19 nt, Homo sapiens
  misc_RNA (1)...(19): siRNA sense strand
agacauaguuccuggugau

SEQ ID NO: 1352080 - RNA, 19 nt, Homo sapiens
  misc_RNA (1)...(19): siRNA sense strand
ccaaaggaaccauugauca

SEQ ID NO: 1352081 - RNA, 19 nt, Homo sapiens
  misc_RNA (1)...(19): siRNA sense strand
ucaaugagcaagauguuug

SEQ ID NO: 1352082 - RNA, 19 nt, Homo sapiens
  misc_RNA (1)...(19): siRNA sense strand
caaaggguguguaugaaaa

SEQ ID NO: 1352083 - RNA, 19 nt, Homo sapiens
  misc_RNA (1)...(19): siRNA sense strand
caaagucaucucccuuauu

SEQ ID NO: 1352084 - RNA, 19 nt, Homo sapiens
  misc_RNA (1)...(19): siRNA sense strand
ugaaaugggcaaaguguau

SEQ ID NO: 1352085 - RNA, 19 nt, Homo sapiens
  misc_RNA (1)...(19): siRNA sense strand
cucaacagcuuguccgaaa

SEQ ID NO: 1352086 - RNA, 19 nt, Homo sapiens
  misc_RNA (1)...(19): siRNA sense strand
gaaguacuaagguuccuau

SEQ ID NO: 1352087 - RNA, 19 nt, Homo sapiens
  misc_RNA (1)...(19): siRNA sense strand
cgaguuaccggcugaagaa

SEQ ID NO: 1352088 - RNA, 19 nt, Homo sapiens
  misc_RNA (1)...(19): siRNA sense strand
gccugcaacucagucauua

SEQ ID NO: 1352089 - RNA, 19 nt, Homo sapiens
  misc_RNA (1)...(19): siRNA sense strand
ggcaaaggguguguaugaa

SEQ ID NO: 1352090 - RNA, 19 nt, Homo sapiens
  misc_RNA (1)...(19): siRNA sense strand
uaaugacucugcuuuggau

SEQ ID NO: 1352091 - RNA, 19 nt, Homo sapiens
  misc_RNA (1)...(19): siRNA sense strand
ucagaggugcuauuuacua

SEQ ID NO: 1352092 - RNA, 19 nt, Homo sapiens
  misc_RNA (1)...(19): siRNA sense strand
uaaggaauaugagccugaa

SEQ ID NO: 1352093 - RNA, 19 nt, Homo sapiens
  misc_RNA (1)...(19): siRNA sense strand
uugaugagauuacagcuau

SEQ ID NO: 1352094 - RNA, 19 nt, Homo sapiens
  misc_RNA (1)...(19): siRNA sense strand
ggagaagugcauaaagaug

SEQ ID NO: 1352095 - RNA, 19 nt, Homo sapiens
  misc_RNA (1)...(19): siRNA sense strand
uaccauaacuggaucaacu

SEQ ID NO: 1352096 - RNA, 19 nt, Homo sapiens
  misc_RNA (1)...(19): siRNA sense strand
cagucuggaucauaaauau

SEQ ID NO: 1352097 - RNA, 19 nt, Homo sapiens
  misc_RNA (1)...(19): siRNA sense strand
guucaacccuccugaucug

SEQ ID NO: 1352098 - RNA, 19 nt, Homo sapiens
  misc_RNA (1)...(19): siRNA sense strand
caauggcgcucucuguucu

SEQ ID NO: 1352099 - RNA, 19 nt, Homo sapiens
  misc_RNA (1)...(19): siRNA sense strand
gaucagcggguggcucuuu

SEQ ID NO: 1352100 - RNA, 19 nt, Homo sapiens
  misc_RNA (1)...(19): siRNA sense strand
gcugauauaagguuaacuu

SEQ ID NO: 1352101 - RNA, 19 nt, Homo sapiens
  misc_RNA (1)...(19): siRNA sense strand
ucuaccagcugagucauuu

SEQ ID NO: 1352102 - RNA, 19 nt, Homo sapiens
  misc_RNA (1)...(19): siRNA sense strand
guccaagaguguccuucua

SEQ ID NO: 1352103 - RNA, 19 nt, Homo sapiens
  misc_RNA (1)...(19): siRNA sense strand
ccacugagaagagaagaaa

SEQ ID NO: 1352104 - RNA, 19 nt, Homo sapiens
  misc_RNA (1)...(19): siRNA sense strand
uuggagaagugcauaaaga

SEQ ID NO: 1352105 - RNA, 19 nt, Homo sapiens
  misc_RNA (1)...(19): siRNA sense strand
cugguacacuuacaacaaa

SEQ ID NO: 1352106 - RNA, 19 nt, Homo sapiens
  misc_RNA (1)...(19): siRNA sense strand
ggaucagaggugcuauuua

SEQ ID NO: 1352107 - RNA, 19 nt, Homo sapiens
  misc_RNA (1)...(19): siRNA sense strand
gacaauggcgcucucuguu

SEQ ID NO: 1352108 - RNA, 19 nt, Homo sapiens
  misc_RNA (1)...(19): siRNA sense strand
ccagcugagucauuuccua

SEQ ID NO: 1352109 - RNA, 19 nt, Homo sapiens
  misc_RNA (1)...(19): siRNA sense strand
aaaccuugcuggaacuugu

SEQ ID NO: 1352110 - RNA, 19 nt, Homo sapiens
  misc_RNA (1)...(19): siRNA sense strand
gagaagaugaauguauuug

SEQ ID NO: 1352111 - RNA, 19 nt, Homo sapiens
  misc_RNA (1)...(19): siRNA sense strand
ggacagaguggaaggugau

SEQ ID NO: 1352112 - RNA, 19 nt, Homo sapiens
  misc_RNA (1)...(19): siRNA sense strand
ugaagggucuuucuaaaau

SEQ ID NO: 1352113 - RNA, 19 nt, Homo sapiens
  misc_RNA (1)...(19): siRNA sense strand
gaaagccgagauuggcauu

SEQ ID NO: 1352114 - RNA, 19 nt, Homo sapiens
  misc_RNA (1)...(19): siRNA sense strand
guuaccggcugaagaagga

SEQ ID NO: 1352115 - RNA, 19 nt, Homo sapiens
  misc_RNA (1)...(19): siRNA sense strand
gaaagucaaugucgguuua

SEQ ID NO: 1352116 - RNA, 19 nt, Homo sapiens
  misc_RNA (1)...(19): siRNA sense strand
caaaguuccugcugauaua

SEQ ID NO: 1352117 - RNA, 19 nt, Homo sapiens
  misc_RNA (1)...(19): siRNA sense strand
gagaagaaaugcaccuuga

SEQ ID NO: 1352118 - RNA, 19 nt, Homo sapiens
  misc_RNA (1)...(19): siRNA sense strand
aaagucaucucccuuauuu

SEQ ID NO: 1352119 - RNA, 19 nt, Homo sapiens
  misc_RNA (1)...(19): siRNA sense strand
gaucagaggugcuauuuac

SEQ ID NO: 1352120 - RNA, 19 nt, Homo sapiens
  misc_RNA (1)...(19): siRNA sense strand
caucaaaucuaccacacua

SEQ ID NO: 1352121 - RNA, 19 nt, Homo sapiens
  misc_RNA (1)...(19): siRNA sense strand
ggugauacuuguucccuua

SEQ ID NO: 1352122 - RNA, 19 nt, Homo sapiens
  misc_RNA (1)...(19): siRNA sense strand
gcauaaagaugauaaacca

SEQ ID NO: 1352123 - RNA, 19 nt, Homo sapiens
  misc_RNA (1)...(19): siRNA sense strand
gaaggugaagaaacaauua

SEQ ID NO: 1352124 - RNA, 19 nt, Homo sapiens
  misc_RNA (1)...(19): siRNA sense strand
ugaagaaggugaagaaaca

SEQ ID NO: 1352125 - RNA, 19 nt, Homo sapiens
  misc_RNA (1)...(19): siRNA sense strand
aaacauugcugcugggaaa

SEQ ID NO: 1352126 - RNA, 19 nt, Homo sapiens
  misc_RNA (1)...(19): siRNA sense strand
ggaaagaaaugcugaaaau

SEQ ID NO: 1352127 - RNA, 19 nt, Homo sapiens
  misc_RNA (1)...(19): siRNA sense strand
gaucaugucugucauucga

SEQ ID NO: 1352128 - RNA, 19 nt, Homo sapiens
  misc_RNA (1)...(19): siRNA sense strand
ucgaagcccuuaaggaaua

SEQ ID NO: 1352129 - RNA, 19 nt, Homo sapiens
  misc_RNA (1)...(19): siRNA sense strand
gauauaagguuaacuucca

SEQ ID NO: 1352130 - RNA, 19 nt, Homo sapiens
  misc_RNA (1)...(19): siRNA sense strand
gaucuggacaucaugaaua

SEQ ID NO: 1352131 - RNA, 19 nt, Homo sapiens
  misc_RNA (1)...(19): siRNA sense strand
gaacaccccuucagcaaaa

SEQ ID NO: 1352132 - RNA, 19 nt, Homo sapiens
  misc_RNA (1)...(19): siRNA sense strand
ugaggacucugccaacuuu

SEQ ID NO: 1352133 - RNA, 19 nt, Homo sapiens
  misc_RNA (1)...(19): siRNA sense strand
gcaacucagucauuaaaca

SEQ ID NO: 1352134 - RNA, 19 nt, Homo sapiens
  misc_RNA (1)...(19): siRNA sense strand
uuugaagacuugcuaguua

SEQ ID NO: 1352135 - RNA, 19 nt, Homo sapiens
  misc_RNA (1)...(19): siRNA sense strand
ggacaucaaugagcaagau

SEQ ID NO: 1352136 - RNA, 19 nt, Homo sapiens
  misc_RNA (1)...(19): siRNA sense strand
gagaagugcauaaagauga

SEQ ID NO: 1352137 - RNA, 19 nt, Homo sapiens
  misc_RNA (1)...(19): siRNA sense strand
gaagggugcuccugaaggu

SEQ ID NO: 1352138 - RNA, 19 nt, Homo sapiens
  misc_RNA (1)...(19): siRNA sense strand
aagguuaacuuccaucaaa

SEQ ID NO: 1352139 - RNA, 19 nt, Homo sapiens
  misc_RNA (1)...(19): siRNA sense strand
gacagcagcccuuggauuu

SEQ ID NO: 1352140 - RNA, 19 nt, Homo sapiens
  misc_RNA (1)...(19): siRNA sense strand
gcaaaggguguguaugaaa

SEQ ID NO: 1352141 - RNA, 19 nt, Homo sapiens
  misc_RNA (1)...(19): siRNA sense strand
gacaagacugguacacuua

SEQ ID NO: 1352142 - RNA, 19 nt, Homo sapiens
  misc_RNA (1)...(19): siRNA sense strand
ggacaacccggacuuugaa

SEQ ID NO: 1352143 - RNA, 19 nt, Homo sapiens
  misc_RNA (1)...(19): siRNA sense strand
caucgaagcccuuaaggaa

SEQ ID NO: 1352144 - RNA, 19 nt, Homo sapiens
  misc_RNA (1)...(19): siRNA sense strand
guacuaagguuccuaugac

SEQ ID NO: 1352145 - RNA, 19 nt, Homo sapiens
  misc_RNA (1)...(19): siRNA sense strand
caacaaaccagaugucagu

SEQ ID NO: 1352146 - RNA, 19 nt, Homo sapiens
  misc_RNA (1)...(19): siRNA sense strand
agacaagacugguacacuu

SEQ ID NO: 1352147 - RNA, 19 nt, Homo sapiens
  misc_RNA (1)...(19): siRNA sense strand
gaggugcuauuuacuacuu

SEQ ID NO: 1352148 - RNA, 19 nt, Homo sapiens
  misc_RNA (1)...(19): siRNA sense strand
ggaguuaacaccgaaauug

SEQ ID NO: 1352149 - RNA, 19 nt, Homo sapiens
  misc_RNA (1)...(19): siRNA sense strand
cauaguuccuggugauauu

SEQ ID NO: 1352150 - RNA, 19 nt, Homo sapiens
  misc_RNA (1)...(19): siRNA sense strand
uaacuuccaucaaaucuac

SEQ ID NO: 1352151 - RNA, 19 nt, Homo sapiens
  misc_RNA (1)...(19): siRNA sense strand
gaagaucaugucugucauu

SEQ ID NO: 1352152 - RNA, 19 nt, Homo sapiens
  misc_RNA (1)...(19): siRNA sense strand
gacaacuucuccaccauug

SEQ ID NO: 1352153 - RNA, 19 nt, Homo sapiens
  misc_RNA (1)...(19): siRNA sense strand
ucacuugccuaguagagaa

SEQ ID NO: 1352154 - RNA, 19 nt, Homo sapiens
  misc_RNA (1)...(19): siRNA sense strand
guagagaagaugaauguau

SEQ ID NO: 1352155 - RNA, 19 nt, Homo sapiens
  misc_RNA (1)...(19): siRNA sense strand
ugacaaaguuccugcugau

SEQ ID NO: 1352156 - RNA, 19 nt, Homo sapiens
  misc_RNA (1)...(19): siRNA sense strand
gaauugaagggucuuucua

SEQ ID NO: 1352157 - RNA, 19 nt, Homo sapiens
  misc_RNA (1)...(19): siRNA sense strand
gaugauaaaccagugaauu

SEQ ID NO: 1352158 - RNA, 19 nt, Homo sapiens
  misc_RNA (1)...(19): siRNA sense strand
ggugcuauuuacuacuuua

SEQ ID NO: 1352159 - RNA, 19 nt, Homo sapiens
  misc_RNA (1)...(19): siRNA sense strand
acaacaacaugaaacaguu

SEQ ID NO: 1352160 - RNA, 19 nt, Homo sapiens
  misc_RNA (1)...(19): siRNA sense strand
ccacaagucuaaaaucgua

SEQ ID NO: 1352161 - RNA, 19 nt, Homo sapiens
  misc_RNA (1)...(19): siRNA sense strand
gaagggucuuucuaaaaua

SEQ ID NO: 1352162 - RNA, 19 nt, Homo sapiens
  misc_RNA (1)...(19): siRNA sense strand
ugaauugucaccaguauga

SEQ ID NO: 1352163 - RNA, 19 nt, Homo sapiens
  misc_RNA (1)...(19): siRNA sense strand
ccaaagucaucucccuuau

SEQ ID NO: 1352164 - RNA, 19 nt, Homo sapiens
  misc_RNA (1)...(19): siRNA sense strand
guaacgcccucaacagcuu

SEQ ID NO: 1352165 - RNA, 19 nt, Homo sapiens
  misc_RNA (1)...(19): siRNA sense strand
ccaagcaggacaucaauga

SEQ ID NO: 1352166 - RNA, 19 nt, Homo sapiens
  misc_RNA (1)...(19): siRNA sense strand
gauacuuguucccuuaaug

SEQ ID NO: 1352167 - RNA, 19 nt, Homo sapiens
  misc_RNA (1)...(19): siRNA sense strand
gcagucuggaucauaaaua

SEQ ID NO: 1352168 - RNA, 19 nt, Homo sapiens
  misc_RNA (1)...(19): siRNA sense strand
ggaauaugagccugaaaug

SEQ ID NO: 1352169 - RNA, 19 nt, Homo sapiens
  misc_RNA (1)...(19): siRNA sense strand
ggcgcucucuguucuagua

SEQ ID NO: 1352170 - RNA, 19 nt, Homo sapiens
  misc_RNA (1)...(19): siRNA sense strand
ugagcaagauguuugugaa

SEQ ID NO: 1352171 - RNA, 19 nt, Homo sapiens
  misc_RNA (1)...(19): siRNA sense strand
caauuugugcucuuuguaa

SEQ ID NO: 1352172 - RNA, 19 nt, Homo sapiens
  misc_RNA (1)...(19): siRNA sense strand
gaaucugucucugucauca

SEQ ID NO: 1352173 - RNA, 19 nt, Homo sapiens
  misc_RNA (1)...(19): siRNA sense strand
gaacccaaaggaaccauug

SEQ ID NO: 1352174 - RNA, 19 nt, Homo sapiens
  misc_RNA (1)...(19): siRNA sense strand
agaaacaauuacagccuuu

SEQ ID NO: 1352175 - RNA, 19 nt, Homo sapiens
  misc_RNA (1)...(19): siRNA sense strand
gcacugcuguggccaucug

SEQ ID NO: 1352176 - RNA, 19 nt, Homo sapiens
  misc_RNA (1)...(19): siRNA sense strand
ggacucugccaacuuuauu

SEQ ID NO: 1352177 - RNA, 19 nt, Homo sapiens
  misc_RNA (1)...(19): siRNA sense strand
caaugucgguuuacuguac

SEQ ID NO: 1352178 - RNA, 19 nt, Homo sapiens
  misc_RNA (1)...(19): siRNA sense strand
caacagaacaggagagaac

SEQ ID NO: 1352179 - RNA, 19 nt, Homo sapiens
  misc_RNA (1)...(19): siRNA sense strand
agacauaguuccuggugau

SEQ ID NO: 1352180 - RNA, 19 nt, Homo sapiens
  misc_RNA (1)...(19): siRNA sense strand
ccaaaggaaccauugauca

SEQ ID NO: 1352181 - RNA, 19 nt, Homo sapiens
  misc_RNA (1)...(19): siRNA sense strand
ucaaugagcaagauguuug

SEQ ID NO: 1352182 - RNA, 19 nt, Homo sapiens
  misc_RNA (1)...(19): siRNA sense strand
caaaggguguguaugaaaa

SEQ ID NO: 1352183 - RNA, 19 nt, Homo sapiens
  misc_RNA (1)...(19): siRNA sense strand
caaagucaucucccuuauu

SEQ ID NO: 1352184 - RNA, 19 nt, Homo sapiens
  misc_RNA (1)...(19): siRNA sense strand
ugaaaugggcaaaguguau

SEQ ID NO: 1352185 - RNA, 19 nt, Homo sapiens
  misc_RNA (1)...(19): siRNA sense strand
cucaacagcuuguccgaaa

SEQ ID NO: 1352186 - RNA, 19 nt, Homo sapiens
  misc_RNA (1)...(19): siRNA sense strand
gaaguacuaagguuccuau

SEQ ID NO: 1352187 - RNA, 19 nt, Homo sapiens
  misc_RNA (1)...(19): siRNA sense strand
cgaguuaccggcugaagaa

SEQ ID NO: 1352188 - RNA, 19 nt, Homo sapiens
  misc_RNA (1)...(19): siRNA sense strand
gccugcaacucagucauua

SEQ ID NO: 1352189 - RNA, 19 nt, Homo sapiens
  misc_RNA (1)...(19): siRNA sense strand
ggcaaaggguguguaugaa

SEQ ID NO: 1352190 - RNA, 19 nt, Homo sapiens
  misc_RNA (1)...(19): siRNA sense strand
uaaugacucugcuuuggau

SEQ ID NO: 1352191 - RNA, 19 nt, Homo sapiens
  misc_RNA (1)...(19): siRNA sense strand
ucagaggugcuauuuacua

SEQ ID NO: 1352192 - RNA, 19 nt, Homo sapiens
  misc_RNA (1)...(19): siRNA sense strand
uaaggaauaugagccugaa

SEQ ID NO: 1352193 - RNA, 19 nt, Homo sapiens
  misc_RNA (1)...(19): siRNA sense strand
uugaugagauuacagcuau

SEQ ID NO: 1352194 - RNA, 19 nt, Homo sapiens
  misc_RNA (1)...(19): siRNA sense strand
ggagaagugcauaaagaug

SEQ ID NO: 1352195 - RNA, 19 nt, Homo sapiens
  misc_RNA (1)...(19): siRNA sense strand
uaccauaacuggaucaacu

SEQ ID NO: 1352196 - RNA, 19 nt, Homo sapiens
  misc_RNA (1)...(19): siRNA sense strand
cagucuggaucauaaauau

SEQ ID NO: 1352197 - RNA, 19 nt, Homo sapiens
  misc_RNA (1)...(19): siRNA sense strand
guucaacccuccugaucug

SEQ ID NO: 1352198 - RNA, 19 nt, Homo sapiens
  misc_RNA (1)...(19): siRNA sense strand
caauggcgcucucuguucu

SEQ ID NO: 1352199 - RNA, 19 nt, Homo sapiens
  misc_RNA (1)...(19): siRNA sense strand
gaucagcggguggcucuuu

SEQ ID NO: 1352200 - RNA, 19 nt, Homo sapiens
  misc_RNA (1)...(19): siRNA sense strand
gcugauauaagguuaacuu

SEQ ID NO: 1352201 - RNA, 19 nt, Homo sapiens
  misc_RNA (1)...(19): siRNA sense strand
ucuaccagcugagucauuu

SEQ ID NO: 1352202 - RNA, 19 nt, Homo sapiens
  misc_RNA (1)...(19): siRNA sense strand
guccaagaguguccuucua

SEQ ID NO: 1352203 - RNA, 19 nt, Homo sapiens
  misc_RNA (1)...(19): siRNA sense strand
ccacugagaagagaagaaa

SEQ ID NO: 1352204 - RNA, 19 nt, Homo sapiens
  misc_RNA (1)...(19): siRNA sense strand
uuggagaagugcauaaaga

SEQ ID NO: 1352205 - RNA, 19 nt, Homo sapiens
  misc_RNA (1)...(19): siRNA sense strand
cugguacacuuacaacaaa

SEQ ID NO: 1352206 - RNA, 19 nt, Homo sapiens
  misc_RNA (1)...(19): siRNA sense strand
ggaucagaggugcuauuua

SEQ ID NO: 1352207 - RNA, 19 nt, Homo sapiens
  misc_RNA (1)...(19): siRNA sense strand
gacaauggcgcucucuguu

SEQ ID NO: 1352208 - RNA, 19 nt, Homo sapiens
  misc_RNA (1)...(19): siRNA sense strand
ccagcugagucauuuccua

SEQ ID NO: 1352209 - RNA, 19 nt, Homo sapiens
  misc_RNA (1)...(19): siRNA sense strand
aaaccuugcuggaacuugu

SEQ ID NO: 1352210 - RNA, 19 nt, Homo sapiens
  misc_RNA (1)...(19): siRNA sense strand
gagaagaugaauguauuug

SEQ ID NO: 1352211 - RNA, 19 nt, Homo sapiens
  misc_RNA (1)...(19): siRNA sense strand
ggacagaguggaaggugau

SEQ ID NO: 1352212 - RNA, 19 nt, Homo sapiens
  misc_RNA (1)...(19): siRNA sense strand
ugaagggucuuucuaaaau

SEQ ID NO: 1352213 - RNA, 19 nt, Homo sapiens
  misc_RNA (1)...(19): siRNA sense strand
gaaagccgagauuggcauu

SEQ ID NO: 1352214 - RNA, 19 nt, Homo sapiens
  misc_RNA (1)...(19): siRNA sense strand
guuaccggcugaagaagga

SEQ ID NO: 1352215 - RNA, 19 nt, Homo sapiens
  misc_RNA (1)...(19): siRNA sense strand
gaaagaggcauuacuauuc

SEQ ID NO: 1352216 - RNA, 19 nt, Homo sapiens
  misc_RNA (1)...(19): siRNA sense strand
ggagcaagcuuuaaguaug

SEQ ID NO: 1352217 - RNA, 19 nt, Homo sapiens
  misc_RNA (1)...(19): siRNA sense strand
ggaaaugaaugauccugaa

SEQ ID NO: 1352218 - RNA, 19 nt, Homo sapiens
  misc_RNA (1)...(19): siRNA sense strand
caauauaccucgaaucugu

SEQ ID NO: 1352219 - RNA, 19 nt, Homo sapiens
  misc_RNA (1)...(19): siRNA sense strand
gauaucaaaucccuucauu

SEQ ID NO: 1352220 - RNA, 19 nt, Homo sapiens
  misc_RNA (1)...(19): siRNA sense strand
gagaauaagucgucugcuu

SEQ ID NO: 1352221 - RNA, 19 nt, Homo sapiens
  misc_RNA (1)...(19): siRNA sense strand
guagaaaucccuucauuga

SEQ ID NO: 1352222 - RNA, 19 nt, Homo sapiens
  misc_RNA (1)...(19): siRNA sense strand
caucaucaauccucccaua

SEQ ID NO: 1352223 - RNA, 19 nt, Homo sapiens
  misc_RNA (1)...(19): siRNA sense strand
gagagaaguuaaaggcaaa

SEQ ID NO: 1352224 - RNA, 19 nt, Homo sapiens
  misc_RNA (1)...(19): siRNA sense strand
gagacacagugacagauuu

SEQ ID NO: 1352225 - RNA, 19 nt, Homo sapiens
  misc_RNA (1)...(19): siRNA sense strand
ugaauuugcugacuugguu

SEQ ID NO: 1352226 - RNA, 19 nt, Homo sapiens
  misc_RNA (1)...(19): siRNA sense strand
gagcguaacuaugaauuuc

SEQ ID NO: 1352227 - RNA, 19 nt, Homo sapiens
  misc_RNA (1)...(19): siRNA sense strand
gaaagguuauagagucaau

SEQ ID NO: 1352228 - RNA, 19 nt, Homo sapiens
  misc_RNA (1)...(19): siRNA sense strand
ggauacagcccuuguuaga

SEQ ID NO: 1352229 - RNA, 19 nt, Homo sapiens
  misc_RNA (1)...(19): siRNA sense strand
cgagaaagaggcauuacua

SEQ ID NO: 1352230 - RNA, 19 nt, Homo sapiens
  misc_RNA (1)...(19): siRNA sense strand
ugaacaaguugcagauuug

SEQ ID NO: 1352231 - RNA, 19 nt, Homo sapiens
  misc_RNA (1)...(19): siRNA sense strand
cuaccaggcuuaauaggaa

SEQ ID NO: 1352232 - RNA, 19 nt, Homo sapiens
  misc_RNA (1)...(19): siRNA sense strand
caagaucacugggagaugu

SEQ ID NO: 1352233 - RNA, 19 nt, Homo sapiens
  misc_RNA (1)...(19): siRNA sense strand
uagaugcuguuacuaugua

SEQ ID NO: 1352234 - RNA, 19 nt, Homo sapiens
  misc_RNA (1)...(19): siRNA sense strand
gaggauauuugcaaugagu

SEQ ID NO: 1352235 - RNA, 19 nt, Homo sapiens
  misc_RNA (1)...(19): siRNA sense strand
aaagaggcauuacuauuca

SEQ ID NO: 1352236 - RNA, 19 nt, Homo sapiens
  misc_RNA (1)...(19): siRNA sense strand
ucaaaucccuucauuccau

SEQ ID NO: 1352237 - RNA, 19 nt, Homo sapiens
  misc_RNA (1)...(19): siRNA sense strand
ccacagaaagaauauugua

SEQ ID NO: 1352238 - RNA, 19 nt, Homo sapiens
  misc_RNA (1)...(19): siRNA sense strand
gcuaaaauccguaauauug

SEQ ID NO: 1352239 - RNA, 19 nt, Homo sapiens
  misc_RNA (1)...(19): siRNA sense strand
cugaagagcguaacuauga

SEQ ID NO: 1352240 - RNA, 19 nt, Homo sapiens
  misc_RNA (1)...(19): siRNA sense strand
ucaaaggagugguggaugu

SEQ ID NO: 1352241 - RNA, 19 nt, Homo sapiens
  misc_RNA (1)...(19): siRNA sense strand
ugaccaacauguagaaauc

SEQ ID NO: 1352242 - RNA, 19 nt, Homo sapiens
  misc_RNA (1)...(19): siRNA sense strand
auacagcccuuguuagaug

SEQ ID NO: 1352243 - RNA, 19 nt, Homo sapiens
  misc_RNA (1)...(19): siRNA sense strand
gagcaagcuuuaaguaugc

SEQ ID NO: 1352244 - RNA, 19 nt, Homo sapiens
  misc_RNA (1)...(19): siRNA sense strand
gcaauucaaaugauggaaa

SEQ ID NO: 1352245 - RNA, 19 nt, Homo sapiens
  misc_RNA (1)...(19): siRNA sense strand
aaugaaugauccugaauug

SEQ ID NO: 1352246 - RNA, 19 nt, Homo sapiens
  misc_RNA (1)...(19): siRNA sense strand
gagaaagaggcauuacuau

SEQ ID NO: 1352247 - RNA, 19 nt, Homo sapiens
  misc_RNA (1)...(19): siRNA sense strand
gaaaagaagcacagacaaa

SEQ ID NO: 1352248 - RNA, 19 nt, Homo sapiens
  misc_RNA (1)...(19): siRNA sense strand
ggagacacagugacagauu

SEQ ID NO: 1352249 - RNA, 19 nt, Homo sapiens
  misc_RNA (1)...(19): siRNA sense strand
cuacagacugcaauacaua

SEQ ID NO: 1352250 - RNA, 19 nt, Homo sapiens
  misc_RNA (1)...(19): siRNA sense strand
uugaacaaguugcagauuu

SEQ ID NO: 1352251 - RNA, 19 nt, Homo sapiens
  misc_RNA (1)...(19): siRNA sense strand
ggaaugccuuaauugaaca

SEQ ID NO: 1352252 - RNA, 19 nt, Homo sapiens
  misc_RNA (1)...(19): siRNA sense strand
gcaagcugauaaacacaau

SEQ ID NO: 1352253 - RNA, 19 nt, Homo sapiens
  misc_RNA (1)...(19): siRNA sense strand
cccaguguguauauuaaua

SEQ ID NO: 1352254 - RNA, 19 nt, Homo sapiens
  misc_RNA (1)...(19): siRNA sense strand
agaaagaggcauuacuauu

SEQ ID NO: 1352255 - RNA, 19 nt, Homo sapiens
  misc_RNA (1)...(19): siRNA sense strand
agaaaucccuucauugacu

SEQ ID NO: 1352256 - RNA, 19 nt, Homo sapiens
  misc_RNA (1)...(19): siRNA sense strand
guuagaugcuguuacuaug

SEQ ID NO: 1352257 - RNA, 19 nt, Homo sapiens
  misc_RNA (1)...(19): siRNA sense strand
gaaggaaacaacugaagca

SEQ ID NO: 1352258 - RNA, 19 nt, Homo sapiens
  misc_RNA (1)...(19): siRNA sense strand
gaggcaagcugauaaacac

SEQ ID NO: 1352259 - RNA, 19 nt, Homo sapiens
  misc_RNA (1)...(19): siRNA sense strand
ggcccagacucucacagua

SEQ ID NO: 1352260 - RNA, 19 nt, Homo sapiens
  misc_RNA (1)...(19): siRNA sense strand
guugaaagcaucagagaga

SEQ ID NO: 1352261 - RNA, 19 nt, Homo sapiens
  misc_RNA (1)...(19): siRNA sense strand
gaaaugaaugauccugaau

SEQ ID NO: 1352262 - RNA, 19 nt, Homo sapiens
  misc_RNA (1)...(19): siRNA sense strand
agaauaagucgucugcuuu

SEQ ID NO: 1352263 - RNA, 19 nt, Homo sapiens
  misc_RNA (1)...(19): siRNA sense strand
gaaagccccucuuggaaau

SEQ ID NO: 1352264 - RNA, 19 nt, Homo sapiens
  misc_RNA (1)...(19): siRNA sense strand
gcuacagacugcaauacau

SEQ ID NO: 1352265 - RNA, 19 nt, Homo sapiens
  misc_RNA (1)...(19): siRNA sense strand
ugaugaauuugcugacuug

SEQ ID NO: 1352266 - RNA, 19 nt, Homo sapiens
  misc_RNA (1)...(19): siRNA sense strand
ugaagagcguaacuaugaa

SEQ ID NO: 1352267 - RNA, 19 nt, Homo sapiens
  misc_RNA (1)...(19): siRNA sense strand
ucauauugaugcaggcaaa

SEQ ID NO: 1352268 - RNA, 19 nt, Homo sapiens
  misc_RNA (1)...(19): siRNA sense strand
gaagagcguaacuaugaau

SEQ ID NO: 1352269 - RNA, 19 nt, Homo sapiens
  misc_RNA (1)...(19): siRNA sense strand
uugcagauuuggaugauga

SEQ ID NO: 1352270 - RNA, 19 nt, Homo sapiens
  misc_RNA (1)...(19): siRNA sense strand
caaaggagugguggaugua

SEQ ID NO: 1352271 - RNA, 19 nt, Homo sapiens
  misc_RNA (1)...(19): siRNA sense strand
gagcgagaaagaggcauua

SEQ ID NO: 1352272 - RNA, 19 nt, Homo sapiens
  misc_RNA (1)...(19): siRNA sense strand
ucaauccucccauagcuaa

SEQ ID NO: 1352273 - RNA, 19 nt, Homo sapiens
  misc_RNA (1)...(19): siRNA sense strand
ggaggcaagcugauaaaca

SEQ ID NO: 1352274 - RNA, 19 nt, Homo sapiens
  misc_RNA (1)...(19): siRNA sense strand
gaugauggagacacaguga

SEQ ID NO: 1352275 - RNA, 19 nt, Homo sapiens
  misc_RNA (1)...(19): siRNA sense strand
uacccaguguguauauuaa

SEQ ID NO: 1352276 - RNA, 19 nt, Homo sapiens
  misc_RNA (1)...(19): siRNA sense strand
gaaagcaucagagagaagu

SEQ ID NO: 1352277 - RNA, 19 nt, Homo sapiens
  misc_RNA (1)...(19): siRNA sense strand
gagcggugccuaagagugu

SEQ ID NO: 1352278 - RNA, 19 nt, Homo sapiens
  misc_RNA (1)...(19): siRNA sense strand
gcuguuacauuugauugga

SEQ ID NO: 1352279 - RNA, 19 nt, Homo sapiens
  misc_RNA (1)...(19): siRNA sense strand
ccacaugugccgcuuggaa

SEQ ID NO: 1352280 - RNA, 19 nt, Homo sapiens
  misc_RNA (1)...(19): siRNA sense strand
gaaccuguuuucuucugua

SEQ ID NO: 1352281 - RNA, 19 nt, Homo sapiens
  misc_RNA (1)...(19): siRNA sense strand
gagauuccagaaccuguuu

SEQ ID NO: 1352282 - RNA, 19 nt, Homo sapiens
  misc_RNA (1)...(19): siRNA sense strand
uugaggauauuugcaauga

SEQ ID NO: 1352283 - RNA, 19 nt, Homo sapiens
  misc_RNA (1)...(19): siRNA sense strand
gcugauaaacacaauauac

SEQ ID NO: 1352284 - RNA, 19 nt, Homo sapiens
  misc_RNA (1)...(19): siRNA sense strand
guacuauuccggauauaca

SEQ ID NO: 1352285 - RNA, 19 nt, Homo sapiens
  misc_RNA (1)...(19): siRNA sense strand
ugccuuaauugaacaaguu

SEQ ID NO: 1352286 - RNA, 19 nt, Homo sapiens
  misc_RNA (1)...(19): siRNA sense strand
ugaccaacuugaggauauu

SEQ ID NO: 1352287 - RNA, 19 nt, Homo sapiens
  misc_RNA (1)...(19): siRNA sense strand
aggcauuacuauucaauca

SEQ ID NO: 1352288 - RNA, 19 nt, Homo sapiens
  misc_RNA (1)...(19): siRNA sense strand
aaacuucuuuggaauugca

SEQ ID NO: 1352289 - RNA, 19 nt, Homo sapiens
  misc_RNA (1)...(19): siRNA sense strand
gagguugagcggugccuaa

SEQ ID NO: 1352290 - RNA, 19 nt, Homo sapiens
  misc_RNA (1)...(19): siRNA sense strand
gggagauguugaugaugga

SEQ ID NO: 1352291 - RNA, 19 nt, Homo sapiens
  misc_RNA (1)...(19): siRNA sense strand
ggagauuccagaaccuguu

SEQ ID NO: 1352292 - RNA, 19 nt, Homo sapiens
  misc_RNA (1)...(19): siRNA sense strand
aaacaaugaagcagagaga

SEQ ID NO: 1352293 - RNA, 19 nt, Homo sapiens
  misc_RNA (1)...(19): siRNA sense strand
gaauaagucgucugcuuuu

SEQ ID NO: 1352294 - RNA, 19 nt, Homo sapiens
  misc_RNA (1)...(19): siRNA sense strand
gcguaacuaugaauuucug

SEQ ID NO: 1352295 - RNA, 19 nt, Homo sapiens
  misc_RNA (1)...(19): siRNA sense strand
ugacuugguuuuagaagaa

SEQ ID NO: 1352296 - RNA, 19 nt, Homo sapiens
  misc_RNA (1)...(19): siRNA sense strand
agugguggauguaguaaug

SEQ ID NO: 1352297 - RNA, 19 nt, Homo sapiens
  misc_RNA (1)...(19): siRNA sense strand
cacaauauaccucgaaucu

SEQ ID NO: 1352298 - RNA, 19 nt, Homo sapiens
  misc_RNA (1)...(19): siRNA sense strand
guauggaggcaagcugaua

SEQ ID NO: 1352299 - RNA, 19 nt, Homo sapiens
  misc_RNA (1)...(19): siRNA sense strand
gugcaguggcuguauuuga

SEQ ID NO: 1352300 - RNA, 19 nt, Homo sapiens
  misc_RNA (1)...(19): siRNA sense strand
guugagcggugccuaagag

SEQ ID NO: 1352301 - RNA, 19 nt, Homo sapiens
  misc_RNA (1)...(19): siRNA sense strand
cagauuucauggcccaaga

SEQ ID NO: 1352302 - RNA, 19 nt, Homo sapiens
  misc_RNA (1)...(19): siRNA sense strand
caccacagaaagaauauug

SEQ ID NO: 1352303 - RNA, 19 nt, Homo sapiens
  misc_RNA (1)...(19): siRNA sense strand
gcagagagacuuuuauugg

SEQ ID NO: 1352304 - RNA, 19 nt, Homo sapiens
  misc_RNA (1)...(19): siRNA sense strand
gcugguaacauugcuuuga

SEQ ID NO: 1352305 - RNA, 19 nt, Homo sapiens
  misc_RNA (1)...(19): siRNA sense strand
ggcuuaauaggaaaugaua

SEQ ID NO: 1352306 - RNA, 19 nt, Homo sapiens
  misc_RNA (1)...(19): siRNA sense strand
guuacuauguacuuaccuu

SEQ ID NO: 1352307 - RNA, 19 nt, Homo sapiens
  misc_RNA (1)...(19): siRNA sense strand
gaugaugaauuugcugacu

SEQ ID NO: 1352308 - RNA, 19 nt, Homo sapiens
  misc_RNA (1)...(19): siRNA sense strand
uaaacaagauggacaaaac

SEQ ID NO: 1352309 - RNA, 19 nt, Homo sapiens
  misc_RNA (1)...(19): siRNA sense strand
uggaaagguuauagaguca

SEQ ID NO: 1352310 - RNA, 19 nt, Homo sapiens
  misc_RNA (1)...(19): siRNA sense strand
caucaauccucccauagcu

SEQ ID NO: 1352311 - RNA, 19 nt, Homo sapiens
  misc_RNA (1)...(19): siRNA sense strand
uaccaccacagaaagaaua

SEQ ID NO: 1352312 - RNA, 19 nt, Homo sapiens
  misc_RNA (1)...(19): siRNA sense strand
aggaaugccuuaauugaac

SEQ ID NO: 1352313 - RNA, 19 nt, Homo sapiens
  misc_RNA (1)...(19): siRNA sense strand
gcccagacucucacaguau

SEQ ID NO: 1352314 - RNA, 19 nt, Homo sapiens
  misc_RNA (1)...(19): siRNA sense strand
ugaugccucugcuggugua

SEQ ID NO: 1352315 - RNA, 19 nt, Homo sapiens
  misc_RNA (1)...(19): siRNA sense strand
gaaagaggcauuacuauuc

SEQ ID NO: 1352316 - RNA, 19 nt, Homo sapiens
  misc_RNA (1)...(19): siRNA sense strand
ggagcaagcuuuaaguaug

SEQ ID NO: 1352317 - RNA, 19 nt, Homo sapiens
  misc_RNA (1)...(19): siRNA sense strand
ggaaaugaaugauccugaa

SEQ ID NO: 1352318 - RNA, 19 nt, Homo sapiens
  misc_RNA (1)...(19): siRNA sense strand
caauauaccucgaaucugu

SEQ ID NO: 1352319 - RNA, 19 nt, Homo sapiens
  misc_RNA (1)...(19): siRNA sense strand
gauaucaaaucccuucauu

SEQ ID NO: 1352320 - RNA, 19 nt, Homo sapiens
  misc_RNA (1)...(19): siRNA sense strand
gagaauaagucgucugcuu

SEQ ID NO: 1352321 - RNA, 19 nt, Homo sapiens
  misc_RNA (1)...(19): siRNA sense strand
guagaaaucccuucauuga

SEQ ID NO: 1352322 - RNA, 19 nt, Homo sapiens
  misc_RNA (1)...(19): siRNA sense strand
caucaucaauccucccaua

SEQ ID NO: 1352323 - RNA, 19 nt, Homo sapiens
  misc_RNA (1)...(19): siRNA sense strand
gagagaaguuaaaggcaaa

SEQ ID NO: 1352324 - RNA, 19 nt, Homo sapiens
  misc_RNA (1)...(19): siRNA sense strand
gagacacagugacagauuu

SEQ ID NO: 1352325 - RNA, 19 nt, Homo sapiens
  misc_RNA (1)...(19): siRNA sense strand
ugaauuugcugacuugguu

SEQ ID NO: 1352326 - RNA, 19 nt, Homo sapiens
  misc_RNA (1)...(19): siRNA sense strand
gagcguaacuaugaauuuc

SEQ ID NO: 1352327 - RNA, 19 nt, Homo sapiens
  misc_RNA (1)...(19): siRNA sense strand
gaaagguuauagagucaau

SEQ ID NO: 1352328 - RNA, 19 nt, Homo sapiens
  misc_RNA (1)...(19): siRNA sense strand
ggauacagcccuuguuaga

SEQ ID NO: 1352329 - RNA, 19 nt, Homo sapiens
  misc_RNA (1)...(19): siRNA sense strand
cgagaaagaggcauuacua

SEQ ID NO: 1352330 - RNA, 19 nt, Homo sapiens
  misc_RNA (1)...(19): siRNA sense strand
ugaacaaguugcagauuug

SEQ ID NO: 1352331 - RNA, 19 nt, Homo sapiens
  misc_RNA (1)...(19): siRNA sense strand
cuaccaggcuuaauaggaa

SEQ ID NO: 1352332 - RNA, 19 nt, Homo sapiens
  misc_RNA (1)...(19): siRNA sense strand
caagaucacugggagaugu

SEQ ID NO: 1352333 - RNA, 19 nt, Homo sapiens
  misc_RNA (1)...(19): siRNA sense strand
uagaugcuguuacuaugua

SEQ ID NO: 1352334 - RNA, 19 nt, Homo sapiens
  misc_RNA (1)...(19): siRNA sense strand
gaggauauuugcaaugagu

SEQ ID NO: 1352335 - RNA, 19 nt, Homo sapiens
  misc_RNA (1)...(19): siRNA sense strand
aaagaggcauuacuauuca

SEQ ID NO: 1352336 - RNA, 19 nt, Homo sapiens
  misc_RNA (1)...(19): siRNA sense strand
ucaaaucccuucauuccau

SEQ ID NO: 1352337 - RNA, 19 nt, Homo sapiens
  misc_RNA (1)...(19): siRNA sense strand
ccacagaaagaauauugua

SEQ ID NO: 1352338 - RNA, 19 nt, Homo sapiens
  misc_RNA (1)...(19): siRNA sense strand
gcuaaaauccguaauauug

SEQ ID NO: 1352339 - RNA, 19 nt, Homo sapiens
  misc_RNA (1)...(19): siRNA sense strand
cugaagagcguaacuauga

SEQ ID NO: 1352340 - RNA, 19 nt, Homo sapiens
  misc_RNA (1)...(19): siRNA sense strand
ucaaaggagugguggaugu

SEQ ID NO: 1352341 - RNA, 19 nt, Homo sapiens
  misc_RNA (1)...(19): siRNA sense strand
ugaccaacauguagaaauc

SEQ ID NO: 1352342 - RNA, 19 nt, Homo sapiens
  misc_RNA (1)...(19): siRNA sense strand
auacagcccuuguuagaug

SEQ ID NO: 1352343 - RNA, 19 nt, Homo sapiens
  misc_RNA (1)...(19): siRNA sense strand
gagcaagcuuuaaguaugc

SEQ ID NO: 1352344 - RNA, 19 nt, Homo sapiens
  misc_RNA (1)...(19): siRNA sense strand
gcaauucaaaugauggaaa

SEQ ID NO: 1352345 - RNA, 19 nt, Homo sapiens
  misc_RNA (1)...(19): siRNA sense strand
aaugaaugauccugaauug

SEQ ID NO: 1352346 - RNA, 19 nt, Homo sapiens
  misc_RNA (1)...(19): siRNA sense strand
gagaaagaggcauuacuau

SEQ ID NO: 1352347 - RNA, 19 nt, Homo sapiens
  misc_RNA (1)...(19): siRNA sense strand
gaaaagaagcacagacaaa

SEQ ID NO: 1352348 - RNA, 19 nt, Homo sapiens
  misc_RNA (1)...(19): siRNA sense strand
ggagacacagugacagauu

SEQ ID NO: 1352349 - RNA, 19 nt, Homo sapiens
  misc_RNA (1)...(19): siRNA sense strand
cuacagacugcaauacaua

SEQ ID NO: 1352350 - RNA, 19 nt, Homo sapiens
  misc_RNA (1)...(19): siRNA sense strand
uugaacaaguugcagauuu

SEQ ID NO: 1352351 - RNA, 19 nt, Homo sapiens
  misc_RNA (1)...(19): siRNA sense strand
ggaaugccuuaauugaaca

SEQ ID NO: 1352352 - RNA, 19 nt, Homo sapiens
  misc_RNA (1)...(19): siRNA sense strand
gcaagcugauaaacacaau

SEQ ID NO: 1352353 - RNA, 19 nt, Homo sapiens
  misc_RNA (1)...(19): siRNA sense strand
cccaguguguauauuaaua

SEQ ID NO: 1352354 - RNA, 19 nt, Homo sapiens
  misc_RNA (1)...(19): siRNA sense strand
agaaagaggcauuacuauu

SEQ ID NO: 1352355 - RNA, 19 nt, Homo sapiens
  misc_RNA (1)...(19): siRNA sense strand
agaaaucccuucauugacu

SEQ ID NO: 1352356 - RNA, 19 nt, Homo sapiens
  misc_RNA (1)...(19): siRNA sense strand
guuagaugcuguuacuaug

SEQ ID NO: 1352357 - RNA, 19 nt, Homo sapiens
  misc_RNA (1)...(19): siRNA sense strand
gaaggaaacaacugaagca

SEQ ID NO: 1352358 - RNA, 19 nt, Homo sapiens
  misc_RNA (1)...(19): siRNA sense strand
gaggcaagcugauaaacac

SEQ ID NO: 1352359 - RNA, 19 nt, Homo sapiens
  misc_RNA (1)...(19): siRNA sense strand
ggcccagacucucacagua

SEQ ID NO: 1352360 - RNA, 19 nt, Homo sapiens
  misc_RNA (1)...(19): siRNA sense strand
guugaaagcaucagagaga

SEQ ID NO: 1352361 - RNA, 19 nt, Homo sapiens
  misc_RNA (1)...(19): siRNA sense strand
gaaaugaaugauccugaau

SEQ ID NO: 1352362 - RNA, 19 nt, Homo sapiens
  misc_RNA (1)...(19): siRNA sense strand
agaauaagucgucugcuuu

SEQ ID NO: 1352363 - RNA, 19 nt, Homo sapiens
  misc_RNA (1)...(19): siRNA sense strand
gaaagccccucuuggaaau

SEQ ID NO: 1352364 - RNA, 19 nt, Homo sapiens
  misc_RNA (1)...(19): siRNA sense strand
gcuacagacugcaauacau

SEQ ID NO: 1352365 - RNA, 19 nt, Homo sapiens
  misc_RNA (1)...(19): siRNA sense strand
ugaugaauuugcugacuug

SEQ ID NO: 1352366 - RNA, 19 nt, Homo sapiens
  misc_RNA (1)...(19): siRNA sense strand
ugaagagcguaacuaugaa

SEQ ID NO: 1352367 - RNA, 19 nt, Homo sapiens
  misc_RNA (1)...(19): siRNA sense strand
ucauauugaugcaggcaaa

SEQ ID NO: 1352368 - RNA, 19 nt, Homo sapiens
  misc_RNA (1)...(19): siRNA sense strand
gaagagcguaacuaugaau

SEQ ID NO: 1352369 - RNA, 19 nt, Homo sapiens
  misc_RNA (1)...(19): siRNA sense strand
uugcagauuuggaugauga

SEQ ID NO: 1352370 - RNA, 19 nt, Homo sapiens
  misc_RNA (1)...(19): siRNA sense strand
caaaggagugguggaugua

SEQ ID NO: 1352371 - RNA, 19 nt, Homo sapiens
  misc_RNA (1)...(19): siRNA sense strand
gagcgagaaagaggcauua

SEQ ID NO: 1352372 - RNA, 19 nt, Homo sapiens
  misc_RNA (1)...(19): siRNA sense strand
ucaauccucccauagcuaa

SEQ ID NO: 1352373 - RNA, 19 nt, Homo sapiens
  misc_RNA (1)...(19): siRNA sense strand
ggaggcaagcugauaaaca

SEQ ID NO: 1352374 - RNA, 19 nt, Homo sapiens
  misc_RNA (1)...(19): siRNA sense strand
gaugauggagacacaguga

SEQ ID NO: 1352375 - RNA, 19 nt, Homo sapiens
  misc_RNA (1)...(19): siRNA sense strand
uacccaguguguauauuaa

SEQ ID NO: 1352376 - RNA, 19 nt, Homo sapiens
  misc_RNA (1)...(19): siRNA sense strand
gaaagcaucagagagaagu

SEQ ID NO: 1352377 - RNA, 19 nt, Homo sapiens
  misc_RNA (1)...(19): siRNA sense strand
gagcggugccuaagagugu

SEQ ID NO: 1352378 - RNA, 19 nt, Homo sapiens
  misc_RNA (1)...(19): siRNA sense strand
gcuguuacauuugauugga

SEQ ID NO: 1352379 - RNA, 19 nt, Homo sapiens
  misc_RNA (1)...(19): siRNA sense strand
ccacaugugccgcuuggaa

SEQ ID NO: 1352380 - RNA, 19 nt, Homo sapiens
  misc_RNA (1)...(19): siRNA sense strand
gaaccuguuuucuucugua

SEQ ID NO: 1352381 - RNA, 19 nt, Homo sapiens
  misc_RNA (1)...(19): siRNA sense strand
gagauuccagaaccuguuu

SEQ ID NO: 1352382 - RNA, 19 nt, Homo sapiens
  misc_RNA (1)...(19): siRNA sense strand
uugaggauauuugcaauga

SEQ ID NO: 1352383 - RNA, 19 nt, Homo sapiens
  misc_RNA (1)...(19): siRNA sense strand
gcugauaaacacaauauac

SEQ ID NO: 1352384 - RNA, 19 nt, Homo sapiens
  misc_RNA (1)...(19): siRNA sense strand
guacuauuccggauauaca

SEQ ID NO: 1352385 - RNA, 19 nt, Homo sapiens
  misc_RNA (1)...(19): siRNA sense strand
ugccuuaauugaacaaguu

SEQ ID NO: 1352386 - RNA, 19 nt, Homo sapiens
  misc_RNA (1)...(19): siRNA sense strand
ugaccaacuugaggauauu

SEQ ID NO: 1352387 - RNA, 19 nt, Homo sapiens
  misc_RNA (1)...(19): siRNA sense strand
aggcauuacuauucaauca

SEQ ID NO: 1352388 - RNA, 19 nt, Homo sapiens
  misc_RNA (1)...(19): siRNA sense strand
aaacuucuuuggaauugca

SEQ ID NO: 1352389 - RNA, 19 nt, Homo sapiens
  misc_RNA (1)...(19): siRNA sense strand
gagguugagcggugccuaa

SEQ ID NO: 1352390 - RNA, 19 nt, Homo sapiens
  misc_RNA (1)...(19): siRNA sense strand
gggagauguugaugaugga

SEQ ID NO: 1352391 - RNA, 19 nt, Homo sapiens
  misc_RNA (1)...(19): siRNA sense strand
ggagauuccagaaccuguu

SEQ ID NO: 1352392 - RNA, 19 nt, Homo sapiens
  misc_RNA (1)...(19): siRNA sense strand
aaacaaugaagcagagaga

SEQ ID NO: 1352393 - RNA, 19 nt, Homo sapiens
  misc_RNA (1)...(19): siRNA sense strand
gaauaagucgucugcuuuu

SEQ ID NO: 1352394 - RNA, 19 nt, Homo sapiens
  misc_RNA (1)...(19): siRNA sense strand
gcguaacuaugaauuucug

SEQ ID NO: 1352395 - RNA, 19 nt, Homo sapiens
  misc_RNA (1)...(19): siRNA sense strand
ugacuugguuuuagaagaa

SEQ ID NO: 1352396 - RNA, 19 nt, Homo sapiens
  misc_RNA (1)...(19): siRNA sense strand
agugguggauguaguaaug

SEQ ID NO: 1352397 - RNA, 19 nt, Homo sapiens
  misc_RNA (1)...(19): siRNA sense strand
cacaauauaccucgaaucu

SEQ ID NO: 1352398 - RNA, 19 nt, Homo sapiens
  misc_RNA (1)...(19): siRNA sense strand
guauggaggcaagcugaua

SEQ ID NO: 1352399 - RNA, 19 nt, Homo sapiens
  misc_RNA (1)...(19): siRNA sense strand
gugcaguggcuguauuuga

SEQ ID NO: 1352400 - RNA, 19 nt, Homo sapiens
  misc_RNA (1)...(19): siRNA sense strand
guugagcggugccuaagag

SEQ ID NO: 1352401 - RNA, 19 nt, Homo sapiens
  misc_RNA (1)...(19): siRNA sense strand
cagauuucauggcccaaga

SEQ ID NO: 1352402 - RNA, 19 nt, Homo sapiens
  misc_RNA (1)...(19): siRNA sense strand
caccacagaaagaauauug

SEQ ID NO: 1352403 - RNA, 19 nt, Homo sapiens
  misc_RNA (1)...(19): siRNA sense strand
gcagagagacuuuuauugg

SEQ ID NO: 1352404 - RNA, 19 nt, Homo sapiens
  misc_RNA (1)...(19): siRNA sense strand
gcugguaacauugcuuuga

SEQ ID NO: 1352405 - RNA, 19 nt, Homo sapiens
  misc_RNA (1)...(19): siRNA sense strand
ggcuuaauaggaaaugaua

SEQ ID NO: 1352406 - RNA, 19 nt, Homo sapiens
  misc_RNA (1)...(19): siRNA sense strand
guuacuauguacuuaccuu

SEQ ID NO: 1352407 - RNA, 19 nt, Homo sapiens
  misc_RNA (1)...(19): siRNA sense strand
gaugaugaauuugcugacu

SEQ ID NO: 1352408 - RNA, 19 nt, Homo sapiens
  misc_RNA (1)...(19): siRNA sense strand
uaaacaagauggacaaaac

SEQ ID NO: 1352409 - RNA, 19 nt, Homo sapiens
  misc_RNA (1)...(19): siRNA sense strand
uggaaagguuauagaguca

SEQ ID NO: 1352410 - RNA, 19 nt, Homo sapiens
  misc_RNA (1)...(19): siRNA sense strand
caucaauccucccauagcu

SEQ ID NO: 1352411 - RNA, 19 nt, Homo sapiens
  misc_RNA (1)...(19): siRNA sense strand
uaccaccacagaaagaaua

SEQ ID NO: 1352412 - RNA, 19 nt, Homo sapiens
  misc_RNA (1)...(19): siRNA sense strand
aggaaugccuuaauugaac

SEQ ID NO: 1352413 - RNA, 19 nt, Homo sapiens
  misc_RNA (1)...(19): siRNA sense strand
gcccagacucucacaguau

SEQ ID NO: 1352414 - RNA, 19 nt, Homo sapiens
  misc_RNA (1)...(19): siRNA sense strand
ugaugccucugcuggugua

SEQ ID NO: 1352415 - RNA, 19 nt, Homo sapiens
  misc_RNA (1)...(19): siRNA sense strand
gaaagaggcauuacuauuc

SEQ ID NO: 1352416 - RNA, 19 nt, Homo sapiens
  misc_RNA (1)...(19): siRNA sense strand
ggagcaagcuuuaaguaug

SEQ ID NO: 1352417 - RNA, 19 nt, Homo sapiens
  misc_RNA (1)...(19): siRNA sense strand
ggaaaugaaugauccugaa

SEQ ID NO: 1352418 - RNA, 19 nt, Homo sapiens
  misc_RNA (1)...(19): siRNA sense strand
caauauaccucgaaucugu

SEQ ID NO: 1352419 - RNA, 19 nt, Homo sapiens
  misc_RNA (1)...(19): siRNA sense strand
gauaucaaaucccuucauu

SEQ ID NO: 1352420 - RNA, 19 nt, Homo sapiens
  misc_RNA (1)...(19): siRNA sense strand
gagaauaagucgucugcuu

SEQ ID NO: 1352421 - RNA, 19 nt, Homo sapiens
  misc_RNA (1)...(19): siRNA sense strand
guagaaaucccuucauuga

SEQ ID NO: 1352422 - RNA, 19 nt, Homo sapiens
  misc_RNA (1)...(19): siRNA sense strand
caucaucaauccucccaua

SEQ ID NO: 1352423 - RNA, 19 nt, Homo sapiens
  misc_RNA (1)...(19): siRNA sense strand
gagagaaguuaaaggcaaa

SEQ ID NO: 1352424 - RNA, 19 nt, Homo sapiens
  misc_RNA (1)...(19): siRNA sense strand
gagacacagugacagauuu

SEQ ID NO: 1352425 - RNA, 19 nt, Homo sapiens
  misc_RNA (1)...(19): siRNA sense strand
ugaauuugcugacuugguu

SEQ ID NO: 1352426 - RNA, 19 nt, Homo sapiens
  misc_RNA (1)...(19): siRNA sense strand
gagcguaacuaugaauuuc

SEQ ID NO: 1352427 - RNA, 19 nt, Homo sapiens
  misc_RNA (1)...(19): siRNA sense strand
gaaagguuauagagucaau

SEQ ID NO: 1352428 - RNA, 19 nt, Homo sapiens
  misc_RNA (1)...(19): siRNA sense strand
ggauacagcccuuguuaga

SEQ ID NO: 1352429 - RNA, 19 nt, Homo sapiens
  misc_RNA (1)...(19): siRNA sense strand
cgagaaagaggcauuacua

SEQ ID NO: 1352430 - RNA, 19 nt, Homo sapiens
  misc_RNA (1)...(19): siRNA sense strand
ugaacaaguugcagauuug

SEQ ID NO: 1352431 - RNA, 19 nt, Homo sapiens
  misc_RNA (1)...(19): siRNA sense strand
cuaccaggcuuaauaggaa

SEQ ID NO: 1352432 - RNA, 19 nt, Homo sapiens
  misc_RNA (1)...(19): siRNA sense strand
caagaucacugggagaugu

SEQ ID NO: 1352433 - RNA, 19 nt, Homo sapiens
  misc_RNA (1)...(19): siRNA sense strand
uagaugcuguuacuaugua

SEQ ID NO: 1352434 - RNA, 19 nt, Homo sapiens
  misc_RNA (1)...(19): siRNA sense strand
gaggauauuugcaaugagu

SEQ ID NO: 1352435 - RNA, 19 nt, Homo sapiens
  misc_RNA (1)...(19): siRNA sense strand
aaagaggcauuacuauuca

SEQ ID NO: 1352436 - RNA, 19 nt, Homo sapiens
  misc_RNA (1)...(19): siRNA sense strand
ucaaaucccuucauuccau

SEQ ID NO: 1352437 - RNA, 19 nt, Homo sapiens
  misc_RNA (1)...(19): siRNA sense strand
ccacagaaagaauauugua

SEQ ID NO: 1352438 - RNA, 19 nt, Homo sapiens
  misc_RNA (1)...(19): siRNA sense strand
gcuaaaauccguaauauug

SEQ ID NO: 1352439 - RNA, 19 nt, Homo sapiens
  misc_RNA (1)...(19): siRNA sense strand
cugaagagcguaacuauga

SEQ ID NO: 1352440 - RNA, 19 nt, Homo sapiens
  misc_RNA (1)...(19): siRNA sense strand
ucaaaggagugguggaugu

SEQ ID NO: 1352441 - RNA, 19 nt, Homo sapiens
  misc_RNA (1)...(19): siRNA sense strand
ugaccaacauguagaaauc

SEQ ID NO: 1352442 - RNA, 19 nt, Homo sapiens
  misc_RNA (1)...(19): siRNA sense strand
auacagcccuuguuagaug

SEQ ID NO: 1352443 - RNA, 19 nt, Homo sapiens
  misc_RNA (1)...(19): siRNA sense strand
gagcaagcuuuaaguaugc

SEQ ID NO: 1352444 - RNA, 19 nt, Homo sapiens
  misc_RNA (1)...(19): siRNA sense strand
gcaauucaaaugauggaaa

SEQ ID NO: 1352445 - RNA, 19 nt, Homo sapiens
  misc_RNA (1)...(19): siRNA sense strand
aaugaaugauccugaauug

SEQ ID NO: 1352446 - RNA, 19 nt, Homo sapiens
  misc_RNA (1)...(19): siRNA sense strand
gagaaagaggcauuacuau

SEQ ID NO: 1352447 - RNA, 19 nt, Homo sapiens
  misc_RNA (1)...(19): siRNA sense strand
gaaaagaagcacagacaaa

SEQ ID NO: 1352448 - RNA, 19 nt, Homo sapiens
  misc_RNA (1)...(19): siRNA sense strand
ggagacacagugacagauu

SEQ ID NO: 1352449 - RNA, 19 nt, Homo sapiens
  misc_RNA (1)...(19): siRNA sense strand
cuacagacugcaauacaua

SEQ ID NO: 1352450 - RNA, 19 nt, Homo sapiens
  misc_RNA (1)...(19): siRNA sense strand
uugaacaaguugcagauuu

SEQ ID NO: 1352451 - RNA, 19 nt, Homo sapiens
  misc_RNA (1)...(19): siRNA sense strand
ggaaugccuuaauugaaca

SEQ ID NO: 1352452 - RNA, 19 nt, Homo sapiens
  misc_RNA (1)...(19): siRNA sense strand
gcaagcugauaaacacaau

SEQ ID NO: 1352453 - RNA, 19 nt, Homo sapiens
  misc_RNA (1)...(19): siRNA sense strand
cccaguguguauauuaaua

SEQ ID NO: 1352454 - RNA, 19 nt, Homo sapiens
  misc_RNA (1)...(19): siRNA sense strand
agaaagaggcauuacuauu

SEQ ID NO: 1352455 - RNA, 19 nt, Homo sapiens
  misc_RNA (1)...(19): siRNA sense strand
agaaaucccuucauugacu

SEQ ID NO: 1352456 - RNA, 19 nt, Homo sapiens
  misc_RNA (1)...(19): siRNA sense strand
guuagaugcuguuacuaug

SEQ ID NO: 1352457 - RNA, 19 nt, Homo sapiens
  misc_RNA (1)...(19): siRNA sense strand
gaaggaaacaacugaagca

SEQ ID NO: 1352458 - RNA, 19 nt, Homo sapiens
  misc_RNA (1)...(19): siRNA sense strand
gaggcaagcugauaaacac

SEQ ID NO: 1352459 - RNA, 19 nt, Homo sapiens
  misc_RNA (1)...(19): siRNA sense strand
ggcccagacucucacagua

SEQ ID NO: 1352460 - RNA, 19 nt, Homo sapiens
  misc_RNA (1)...(19): siRNA sense strand
guugaaagcaucagagaga

SEQ ID NO: 1352461 - RNA, 19 nt, Homo sapiens
  misc_RNA (1)...(19): siRNA sense strand
gaaaugaaugauccugaau

SEQ ID NO: 1352462 - RNA, 19 nt, Homo sapiens
  misc_RNA (1)...(19): siRNA sense strand
agaauaagucgucugcuuu

SEQ ID NO: 1352463 - RNA, 19 nt, Homo sapiens
  misc_RNA (1)...(19): siRNA sense strand
gaaagccccucuuggaaau

SEQ ID NO: 1352464 - RNA, 19 nt, Homo sapiens
  misc_RNA (1)...(19): siRNA sense strand
gcuacagacugcaauacau

SEQ ID NO: 1352465 - RNA, 19 nt, Homo sapiens
  misc_RNA (1)...(19): siRNA sense strand
ugaugaauuugcugacuug

SEQ ID NO: 1352466 - RNA, 19 nt, Homo sapiens
  misc_RNA (1)...(19): siRNA sense strand
ugaagagcguaacuaugaa

SEQ ID NO: 1352467 - RNA, 19 nt, Homo sapiens
  misc_RNA (1)...(19): siRNA sense strand
ucauauugaugcaggcaaa

SEQ ID NO: 1352468 - RNA, 19 nt, Homo sapiens
  misc_RNA (1)...(19): siRNA sense strand
gaagagcguaacuaugaau

SEQ ID NO: 1352469 - RNA, 19 nt, Homo sapiens
  misc_RNA (1)...(19): siRNA sense strand
uugcagauuuggaugauga

SEQ ID NO: 1352470 - RNA, 19 nt, Homo sapiens
  misc_RNA (1)...(19): siRNA sense strand
caaaggagugguggaugua

SEQ ID NO: 1352471 - RNA, 19 nt, Homo sapiens
  misc_RNA (1)...(19): siRNA sense strand
gagcgagaaagaggcauua

SEQ ID NO: 1352472 - RNA, 19 nt, Homo sapiens
  misc_RNA (1)...(19): siRNA sense strand
ucaauccucccauagcuaa

SEQ ID NO: 1352473 - RNA, 19 nt, Homo sapiens
  misc_RNA (1)...(19): siRNA sense strand
ggaggcaagcugauaaaca

SEQ ID NO: 1352474 - RNA, 19 nt, Homo sapiens
  misc_RNA (1)...(19): siRNA sense strand
gaugauggagacacaguga

SEQ ID NO: 1352475 - RNA, 19 nt, Homo sapiens
  misc_RNA (1)...(19): siRNA sense strand
uacccaguguguauauuaa

SEQ ID NO: 1352476 - RNA, 19 nt, Homo sapiens
  misc_RNA (1)...(19): siRNA sense strand
gaaagcaucagagagaagu

SEQ ID NO: 1352477 - RNA, 19 nt, Homo sapiens
  misc_RNA (1)...(19): siRNA sense strand
gagcggugccuaagagugu

SEQ ID NO: 1352478 - RNA, 19 nt, Homo sapiens
  misc_RNA (1)...(19): siRNA sense strand
gcuguuacauuugauugga

SEQ ID NO: 1352479 - RNA, 19 nt, Homo sapiens
  misc_RNA (1)...(19): siRNA sense strand
ccacaugugccgcuuggaa

SEQ ID NO: 1352480 - RNA, 19 nt, Homo sapiens
  misc_RNA (1)...(19): siRNA sense strand
gaaccuguuuucuucugua

SEQ ID NO: 1352481 - RNA, 19 nt, Homo sapiens
  misc_RNA (1)...(19): siRNA sense strand
gagauuccagaaccuguuu

SEQ ID NO: 1352482 - RNA, 19 nt, Homo sapiens
  misc_RNA (1)...(19): siRNA sense strand
uugaggauauuugcaauga

SEQ ID NO: 1352483 - RNA, 19 nt, Homo sapiens
  misc_RNA (1)...(19): siRNA sense strand
gcugauaaacacaauauac

SEQ ID NO: 1352484 - RNA, 19 nt, Homo sapiens
  misc_RNA (1)...(19): siRNA sense strand
guacuauuccggauauaca

SEQ ID NO: 1352485 - RNA, 19 nt, Homo sapiens
  misc_RNA (1)...(19): siRNA sense strand
ugccuuaauugaacaaguu

SEQ ID NO: 1352486 - RNA, 19 nt, Homo sapiens
  misc_RNA (1)...(19): siRNA sense strand
ugaccaacuugaggauauu

SEQ ID NO: 1352487 - RNA, 19 nt, Homo sapiens
  misc_RNA (1)...(19): siRNA sense strand
aggcauuacuauucaauca

SEQ ID NO: 1352488 - RNA, 19 nt, Homo sapiens
  misc_RNA (1)...(19): siRNA sense strand
aaacuucuuuggaauugca

SEQ ID NO: 1352489 - RNA, 19 nt, Homo sapiens
  misc_RNA (1)...(19): siRNA sense strand
gagguugagcggugccuaa

SEQ ID NO: 1352490 - RNA, 19 nt, Homo sapiens
  misc_RNA (1)...(19): siRNA sense strand
gggagauguugaugaugga

SEQ ID NO: 1352491 - RNA, 19 nt, Homo sapiens
  misc_RNA (1)...(19): siRNA sense strand
ggagauuccagaaccuguu

SEQ ID NO: 1352492 - RNA, 19 nt, Homo sapiens
  misc_RNA (1)...(19): siRNA sense strand
aaacaaugaagcagagaga

SEQ ID NO: 1352493 - RNA, 19 nt, Homo sapiens
  misc_RNA (1)...(19): siRNA sense strand
gaauaagucgucugcuuuu

SEQ ID NO: 1352494 - RNA, 19 nt, Homo sapiens
  misc_RNA (1)...(19): siRNA sense strand
gcguaacuaugaauuucug

SEQ ID NO: 1352495 - RNA, 19 nt, Homo sapiens
  misc_RNA (1)...(19): siRNA sense strand
ugacuugguuuuagaagaa

SEQ ID NO: 1352496 - RNA, 19 nt, Homo sapiens
  misc_RNA (1)...(19): siRNA sense strand
agugguggauguaguaaug

SEQ ID NO: 1352497 - RNA, 19 nt, Homo sapiens
  misc_RNA (1)...(19): siRNA sense strand
cacaauauaccucgaaucu

SEQ ID NO: 1352498 - RNA, 19 nt, Homo sapiens
  misc_RNA (1)...(19): siRNA sense strand
guauggaggcaagcugaua

SEQ ID NO: 1352499 - RNA, 19 nt, Homo sapiens
  misc_RNA (1)...(19): siRNA sense strand
gugcaguggcuguauuuga

SEQ ID NO: 1352500 - RNA, 19 nt, Homo sapiens
  misc_RNA (1)...(19): siRNA sense strand
guugagcggugccuaagag

SEQ ID NO: 1352501 - RNA, 19 nt, Homo sapiens
  misc_RNA (1)...(19): siRNA sense strand
cagauuucauggcccaaga

SEQ ID NO: 1352502 - RNA, 19 nt, Homo sapiens
  misc_RNA (1)...(19): siRNA sense strand
caccacagaaagaauauug

SEQ ID NO: 1352503 - RNA, 19 nt, Homo sapiens
  misc_RNA (1)...(19): siRNA sense strand
gcagagagacuuuuauugg

SEQ ID NO: 1352504 - RNA, 19 nt, Homo sapiens
  misc_RNA (1)...(19): siRNA sense strand
gcugguaacauugcuuuga

SEQ ID NO: 1352505 - RNA, 19 nt, Homo sapiens
  misc_RNA (1)...(19): siRNA sense strand
ggcuuaauaggaaaugaua

SEQ ID NO: 1352506 - RNA, 19 nt, Homo sapiens
  misc_RNA (1)...(19): siRNA sense strand
guuacuauguacuuaccuu

SEQ ID NO: 1352507 - RNA, 19 nt, Homo sapiens
  misc_RNA (1)...(19): siRNA sense strand
gaugaugaauuugcugacu

SEQ ID NO: 1352508 - RNA, 19 nt, Homo sapiens
  misc_RNA (1)...(19): siRNA sense strand
uaaacaagauggacaaaac

SEQ ID NO: 1352509 - RNA, 19 nt, Homo sapiens
  misc_RNA (1)...(19): siRNA sense strand
uggaaagguuauagaguca

SEQ ID NO: 1352510 - RNA, 19 nt, Homo sapiens
  misc_RNA (1)...(19): siRNA sense strand
caucaauccucccauagcu

SEQ ID NO: 1352511 - RNA, 19 nt, Homo sapiens
  misc_RNA (1)...(19): siRNA sense strand
uaccaccacagaaagaaua

SEQ ID NO: 1352512 - RNA, 19 nt, Homo sapiens
  misc_RNA (1)...(19): siRNA sense strand
aggaaugccuuaauugaac

SEQ ID NO: 1352513 - RNA, 19 nt, Homo sapiens
  misc_RNA (1)...(19): siRNA sense strand
gcccagacucucacaguau

SEQ ID NO: 1352514 - RNA, 19 nt, Homo sapiens
  misc_RNA (1)...(19): siRNA sense strand
ugaugccucugcuggugua

SEQ ID NO: 1352515 - RNA, 19 nt, Homo sapiens
  misc_RNA (1)...(19): siRNA sense strand
guacuaagguuucaucuuu

SEQ ID NO: 1352516 - RNA, 19 nt, Homo sapiens
  misc_RNA (1)...(19): siRNA sense strand
caagucagaucaugaagaa

SEQ ID NO: 1352517 - RNA, 19 nt, Homo sapiens
  misc_RNA (1)...(19): siRNA sense strand
gauacaagcaauacaagua

SEQ ID NO: 1352518 - RNA, 19 nt, Homo sapiens
  misc_RNA (1)...(19): siRNA sense strand
caaaguagcaacaaauauc

SEQ ID NO: 1352519 - RNA, 19 nt, Homo sapiens
  misc_RNA (1)...(19): siRNA sense strand
gaccauaacccuucuucuu

SEQ ID NO: 1352520 - RNA, 19 nt, Homo sapiens
  misc_RNA (1)...(19): siRNA sense strand
ggacaaggacgcgaucuau

SEQ ID NO: 1352521 - RNA, 19 nt, Homo sapiens
  misc_RNA (1)...(19): siRNA sense strand
gcuggacaauuugaugaua

SEQ ID NO: 1352522 - RNA, 19 nt, Homo sapiens
  misc_RNA (1)...(19): siRNA sense strand
caauacaaguacuaagguu

SEQ ID NO: 1352523 - RNA, 19 nt, Homo sapiens
  misc_RNA (1)...(19): siRNA sense strand
ccaucgaccucgucauuga

SEQ ID NO: 1352524 - RNA, 19 nt, Homo sapiens
  misc_RNA (1)...(19): siRNA sense strand
gaugauacaagcaauacaa

SEQ ID NO: 1352525 - RNA, 19 nt, Homo sapiens
  misc_RNA (1)...(19): siRNA sense strand
guacaggugacgaugauga

SEQ ID NO: 1352526 - RNA, 19 nt, Homo sapiens
  misc_RNA (1)...(19): siRNA sense strand
ccaaggagcagcauauagu

SEQ ID NO: 1352527 - RNA, 19 nt, Homo sapiens
  misc_RNA (1)...(19): siRNA sense strand
agacaacaguguagcuuca

SEQ ID NO: 1352528 - RNA, 19 nt, Homo sapiens
  misc_RNA (1)...(19): siRNA sense strand
gagcuggacaauuugauga

SEQ ID NO: 1352529 - RNA, 19 nt, Homo sapiens
  misc_RNA (1)...(19): siRNA sense strand
gagccaaggagcagcauau

SEQ ID NO: 1352530 - RNA, 19 nt, Homo sapiens
  misc_RNA (1)...(19): siRNA sense strand
gcccaucgaccucgucauu

SEQ ID NO: 1352531 - RNA, 19 nt, Homo sapiens
  misc_RNA (1)...(19): siRNA sense strand
ccaaaguagcaacaaauau

SEQ ID NO: 1352532 - RNA, 19 nt, Homo sapiens
  misc_RNA (1)...(19): siRNA sense strand
gcucuggucuuugagaagu

SEQ ID NO: 1352533 - RNA, 19 nt, Homo sapiens
  misc_RNA (1)...(19): siRNA sense strand
uaguacagcccaugauuga

SEQ ID NO: 1352534 - RNA, 19 nt, Homo sapiens
  misc_RNA (1)...(19): siRNA sense strand
caaaucucgcugaccauaa

SEQ ID NO: 1352535 - RNA, 19 nt, Homo sapiens
  misc_RNA (1)...(19): siRNA sense strand
gcaauacaaguacuaaggu

SEQ ID NO: 1352536 - RNA, 19 nt, Homo sapiens
  misc_RNA (1)...(19): siRNA sense strand
cccaaaguagcaacaaaua

SEQ ID NO: 1352537 - RNA, 19 nt, Homo sapiens
  misc_RNA (1)...(19): siRNA sense strand
caagcaauacaaguacuaa

SEQ ID NO: 1352538 - RNA, 19 nt, Homo sapiens
  misc_RNA (1)...(19): siRNA sense strand
acaaauaucaugagagcau

SEQ ID NO: 1352539 - RNA, 19 nt, Homo sapiens
  misc_RNA (1)...(19): siRNA sense strand
acaaaucucgcugaccaua

SEQ ID NO: 1352540 - RNA, 19 nt, Homo sapiens
  misc_RNA (1)...(19): siRNA sense strand
gaacugugcgauaacuucu

SEQ ID NO: 1352541 - RNA, 19 nt, Homo sapiens
  misc_RNA (1)...(19): siRNA sense strand
gacaaggacgcgaucuaug

SEQ ID NO: 1352542 - RNA, 19 nt, Homo sapiens
  misc_RNA (1)...(19): siRNA sense strand
uccacgaacugugcgauaa

SEQ ID NO: 1352543 - RNA, 19 nt, Homo sapiens
  misc_RNA (1)...(19): siRNA sense strand
gaauaguacagcccaugau

SEQ ID NO: 1352544 - RNA, 19 nt, Homo sapiens
  misc_RNA (1)...(19): siRNA sense strand
ccaagucagaucaugaaga

SEQ ID NO: 1352545 - RNA, 19 nt, Homo sapiens
  misc_RNA (1)...(19): siRNA sense strand
gcuccaagucagaucauga

SEQ ID NO: 1352546 - RNA, 19 nt, Homo sapiens
  misc_RNA (1)...(19): siRNA sense strand
gggacaaggacgcgaucua

SEQ ID NO: 1352547 - RNA, 19 nt, Homo sapiens
  misc_RNA (1)...(19): siRNA sense strand
guagcaacaaauaucauga

SEQ ID NO: 1352548 - RNA, 19 nt, Homo sapiens
  misc_RNA (1)...(19): siRNA sense strand
accgauacauuagcuguuu

SEQ ID NO: 1352549 - RNA, 19 nt, Homo sapiens
  misc_RNA (1)...(19): siRNA sense strand
guuuauuaaugccagaaga

SEQ ID NO: 1352550 - RNA, 19 nt, Homo sapiens
  misc_RNA (1)...(19): siRNA sense strand
gcaaggggaugguuuagac

SEQ ID NO: 1352551 - RNA, 19 nt, Homo sapiens
  misc_RNA (1)...(19): siRNA sense strand
uaacuucugccaccgauac

SEQ ID NO: 1352552 - RNA, 19 nt, Homo sapiens
  misc_RNA (1)...(19): siRNA sense strand
aauaguacagcccaugauu

SEQ ID NO: 1352553 - RNA, 19 nt, Homo sapiens
  misc_RNA (1)...(19): siRNA sense strand
aaaucucgcugaccauaac

SEQ ID NO: 1352554 - RNA, 19 nt, Homo sapiens
  misc_RNA (1)...(19): siRNA sense strand
acaaggacgcgaucuaugg

SEQ ID NO: 1352555 - RNA, 19 nt, Homo sapiens
  misc_RNA (1)...(19): siRNA sense strand
caaguacuaagguuucauc

SEQ ID NO: 1352556 - RNA, 19 nt, Homo sapiens
  misc_RNA (1)...(19): siRNA sense strand
gccagaagaagaauaguac

SEQ ID NO: 1352557 - RNA, 19 nt, Homo sapiens
  misc_RNA (1)...(19): siRNA sense strand
accauaacccuucuucuug

SEQ ID NO: 1352558 - RNA, 19 nt, Homo sapiens
  misc_RNA (1)...(19): siRNA sense strand
cgaacugugcgauaacuuc

SEQ ID NO: 1352559 - RNA, 19 nt, Homo sapiens
  misc_RNA (1)...(19): siRNA sense strand
ucaggcuccuccacaaauc

SEQ ID NO: 1352560 - RNA, 19 nt, Homo sapiens
  misc_RNA (1)...(19): siRNA sense strand
uguguuggauggucagcaa

SEQ ID NO: 1352561 - RNA, 19 nt, Homo sapiens
  misc_RNA (1)...(19): siRNA sense strand
acaagcaauacaaguacua

SEQ ID NO: 1352562 - RNA, 19 nt, Homo sapiens
  misc_RNA (1)...(19): siRNA sense strand
agaauaguacagcccauga

SEQ ID NO: 1352563 - RNA, 19 nt, Homo sapiens
  misc_RNA (1)...(19): siRNA sense strand
gucagaucaugaagaacuu

SEQ ID NO: 1352564 - RNA, 19 nt, Homo sapiens
  misc_RNA (1)...(19): siRNA sense strand
ggucuucgccaagcagguu

SEQ ID NO: 1352565 - RNA, 19 nt, Homo sapiens
  misc_RNA (1)...(19): siRNA sense strand
ugccagaagaagaauagua

SEQ ID NO: 1352566 - RNA, 19 nt, Homo sapiens
  misc_RNA (1)...(19): siRNA sense strand
acgaugaugauccggauaa

SEQ ID NO: 1352567 - RNA, 19 nt, Homo sapiens
  misc_RNA (1)...(19): siRNA sense strand
auacaaguacuaagguuuc

SEQ ID NO: 1352568 - RNA, 19 nt, Homo sapiens
  misc_RNA (1)...(19): siRNA sense strand
agcaacaaauaucaugaga

SEQ ID NO: 1352569 - RNA, 19 nt, Homo sapiens
  misc_RNA (1)...(19): siRNA sense strand
gcggagacaacagcaguga

SEQ ID NO: 1352570 - RNA, 19 nt, Homo sapiens
  misc_RNA (1)...(19): siRNA sense strand
gguuucaucuuuuggaguu

SEQ ID NO: 1352571 - RNA, 19 nt, Homo sapiens
  misc_RNA (1)...(19): siRNA sense strand
caaggagcagcauauaguc

SEQ ID NO: 1352572 - RNA, 19 nt, Homo sapiens
  misc_RNA (1)...(19): siRNA sense strand
gccaaggagcagcauauag

SEQ ID NO: 1352573 - RNA, 19 nt, Homo sapiens
  misc_RNA (1)...(19): siRNA sense strand
uggacaauuugaugauaca

SEQ ID NO: 1352574 - RNA, 19 nt, Homo sapiens
  misc_RNA (1)...(19): siRNA sense strand
cgauacauuagcuguuuga

SEQ ID NO: 1352575 - RNA, 19 nt, Homo sapiens
  misc_RNA (1)...(19): siRNA sense strand
ccgauacauuagcuguuug

SEQ ID NO: 1352576 - RNA, 19 nt, Homo sapiens
  misc_RNA (1)...(19): siRNA sense strand
gaaaagguccacgaacugu

SEQ ID NO: 1352577 - RNA, 19 nt, Homo sapiens
  misc_RNA (1)...(19): siRNA sense strand
gcagcuccaagucagauca

SEQ ID NO: 1352578 - RNA, 19 nt, Homo sapiens
  misc_RNA (1)...(19): siRNA sense strand
auuaaugccagaagaagaa

SEQ ID NO: 1352579 - RNA, 19 nt, Homo sapiens
  misc_RNA (1)...(19): siRNA sense strand
uagaaaagguccacgaacu

SEQ ID NO: 1352580 - RNA, 19 nt, Homo sapiens
  misc_RNA (1)...(19): siRNA sense strand
augaugauccggauaagga

SEQ ID NO: 1352581 - RNA, 19 nt, Homo sapiens
  misc_RNA (1)...(19): siRNA sense strand
guacuaagguuucaucuuu

SEQ ID NO: 1352582 - RNA, 19 nt, Homo sapiens
  misc_RNA (1)...(19): siRNA sense strand
caagucagaucaugaagaa

SEQ ID NO: 1352583 - RNA, 19 nt, Homo sapiens
  misc_RNA (1)...(19): siRNA sense strand
gauacaagcaauacaagua

SEQ ID NO: 1352584 - RNA, 19 nt, Homo sapiens
  misc_RNA (1)...(19): siRNA sense strand
caaaguagcaacaaauauc

SEQ ID NO: 1352585 - RNA, 19 nt, Homo sapiens
  misc_RNA (1)...(19): siRNA sense strand
gaccauaacccuucuucuu

SEQ ID NO: 1352586 - RNA, 19 nt, Homo sapiens
  misc_RNA (1)...(19): siRNA sense strand
ggacaaggacgcgaucuau

SEQ ID NO: 1352587 - RNA, 19 nt, Homo sapiens
  misc_RNA (1)...(19): siRNA sense strand
gcuggacaauuugaugaua

SEQ ID NO: 1352588 - RNA, 19 nt, Homo sapiens
  misc_RNA (1)...(19): siRNA sense strand
caauacaaguacuaagguu

SEQ ID NO: 1352589 - RNA, 19 nt, Homo sapiens
  misc_RNA (1)...(19): siRNA sense strand
ccaucgaccucgucauuga

SEQ ID NO: 1352590 - RNA, 19 nt, Homo sapiens
  misc_RNA (1)...(19): siRNA sense strand
gaugauacaagcaauacaa

SEQ ID NO: 1352591 - RNA, 19 nt, Homo sapiens
  misc_RNA (1)...(19): siRNA sense strand
guacaggugacgaugauga

SEQ ID NO: 1352592 - RNA, 19 nt, Homo sapiens
  misc_RNA (1)...(19): siRNA sense strand
acgaugagcugccccauua

SEQ ID NO: 1352593 - RNA, 19 nt, Homo sapiens
  misc_RNA (1)...(19): siRNA sense strand
agacaacaguguagcuuca

SEQ ID NO: 1352594 - RNA, 19 nt, Homo sapiens
  misc_RNA (1)...(19): siRNA sense strand
gagcuggacaauuugauga

SEQ ID NO: 1352595 - RNA, 19 nt, Homo sapiens
  misc_RNA (1)...(19): siRNA sense strand
gcccaucgaccucgucauu

SEQ ID NO: 1352596 - RNA, 19 nt, Homo sapiens
  misc_RNA (1)...(19): siRNA sense strand
ccaaaguagcaacaaauau

SEQ ID NO: 1352597 - RNA, 19 nt, Homo sapiens
  misc_RNA (1)...(19): siRNA sense strand
gcucuggucuuugagaagu

SEQ ID NO: 1352598 - RNA, 19 nt, Homo sapiens
  misc_RNA (1)...(19): siRNA sense strand
caaaucucgcugaccauaa

SEQ ID NO: 1352599 - RNA, 19 nt, Homo sapiens
  misc_RNA (1)...(19): siRNA sense strand
gcaauacaaguacuaaggu

SEQ ID NO: 1352600 - RNA, 19 nt, Homo sapiens
  misc_RNA (1)...(19): siRNA sense strand
cccaaaguagcaacaaaua

SEQ ID NO: 1352601 - RNA, 19 nt, Homo sapiens
  misc_RNA (1)...(19): siRNA sense strand
caagcaauacaaguacuaa

SEQ ID NO: 1352602 - RNA, 19 nt, Homo sapiens
  misc_RNA (1)...(19): siRNA sense strand
acaaauaucaugagagcau

SEQ ID NO: 1352603 - RNA, 19 nt, Homo sapiens
  misc_RNA (1)...(19): siRNA sense strand
acaaaucucgcugaccaua

SEQ ID NO: 1352604 - RNA, 19 nt, Homo sapiens
  misc_RNA (1)...(19): siRNA sense strand
gaacugugcgauaacuucu

SEQ ID NO: 1352605 - RNA, 19 nt, Homo sapiens
  misc_RNA (1)...(19): siRNA sense strand
gacaaggacgcgaucuaug

SEQ ID NO: 1352606 - RNA, 19 nt, Homo sapiens
  misc_RNA (1)...(19): siRNA sense strand
uccacgaacugugcgauaa

SEQ ID NO: 1352607 - RNA, 19 nt, Homo sapiens
  misc_RNA (1)...(19): siRNA sense strand
ccaagucagaucaugaaga

SEQ ID NO: 1352608 - RNA, 19 nt, Homo sapiens
  misc_RNA (1)...(19): siRNA sense strand
gcuccaagucagaucauga

SEQ ID NO: 1352609 - RNA, 19 nt, Homo sapiens
  misc_RNA (1)...(19): siRNA sense strand
gggacaaggacgcgaucua

SEQ ID NO: 1352610 - RNA, 19 nt, Homo sapiens
  misc_RNA (1)...(19): siRNA sense strand
guagcaacaaauaucauga

SEQ ID NO: 1352611 - RNA, 19 nt, Homo sapiens
  misc_RNA (1)...(19): siRNA sense strand
accgauacauuagcuguuu

SEQ ID NO: 1352612 - RNA, 19 nt, Homo sapiens
  misc_RNA (1)...(19): siRNA sense strand
gcaaggggaugguuuagac

SEQ ID NO: 1352613 - RNA, 19 nt, Homo sapiens
  misc_RNA (1)...(19): siRNA sense strand
uaacuucugccaccgauac

SEQ ID NO: 1352614 - RNA, 19 nt, Homo sapiens
  misc_RNA (1)...(19): siRNA sense strand
aaaucucgcugaccauaac

SEQ ID NO: 1352615 - RNA, 19 nt, Homo sapiens
  misc_RNA (1)...(19): siRNA sense strand
acaaggacgcgaucuaugg

SEQ ID NO: 1352616 - RNA, 19 nt, Homo sapiens
  misc_RNA (1)...(19): siRNA sense strand
caaguacuaagguuucauc

SEQ ID NO: 1352617 - RNA, 19 nt, Homo sapiens
  misc_RNA (1)...(19): siRNA sense strand
accauaacccuucuucuug

SEQ ID NO: 1352618 - RNA, 19 nt, Homo sapiens
  misc_RNA (1)...(19): siRNA sense strand
cgaacugugcgauaacuuc

SEQ ID NO: 1352619 - RNA, 19 nt, Homo sapiens
  misc_RNA (1)...(19): siRNA sense strand
ucaggcuccuccacaaauc

SEQ ID NO: 1352620 - RNA, 19 nt, Homo sapiens
  misc_RNA (1)...(19): siRNA sense strand
acaagcaauacaaguacua

SEQ ID NO: 1352621 - RNA, 19 nt, Homo sapiens
  misc_RNA (1)...(19): siRNA sense strand
gucagaucaugaagaacuu

SEQ ID NO: 1352622 - RNA, 19 nt, Homo sapiens
  misc_RNA (1)...(19): siRNA sense strand
ggucuucgccaagcagguu

SEQ ID NO: 1352623 - RNA, 19 nt, Homo sapiens
  misc_RNA (1)...(19): siRNA sense strand
acgaugaugauccggauaa

SEQ ID NO: 1352624 - RNA, 19 nt, Homo sapiens
  misc_RNA (1)...(19): siRNA sense strand
auacaaguacuaagguuuc

SEQ ID NO: 1352625 - RNA, 19 nt, Homo sapiens
  misc_RNA (1)...(19): siRNA sense strand
agcaacaaauaucaugaga

SEQ ID NO: 1352626 - RNA, 19 nt, Homo sapiens
  misc_RNA (1)...(19): siRNA sense strand
gcggagacaacagcaguga

SEQ ID NO: 1352627 - RNA, 19 nt, Homo sapiens
  misc_RNA (1)...(19): siRNA sense strand
uggacaauuugaugauaca

SEQ ID NO: 1352628 - RNA, 19 nt, Homo sapiens
  misc_RNA (1)...(19): siRNA sense strand
cgauacauuagcuguuuga

SEQ ID NO: 1352629 - RNA, 19 nt, Homo sapiens
  misc_RNA (1)...(19): siRNA sense strand
ccgauacauuagcuguuug

SEQ ID NO: 1352630 - RNA, 19 nt, Homo sapiens
  misc_RNA (1)...(19): siRNA sense strand
gaaaagguccacgaacugu

SEQ ID NO: 1352631 - RNA, 19 nt, Homo sapiens
  misc_RNA (1)...(19): siRNA sense strand
gguuucaucuuuuggaguu

SEQ ID NO: 1352632 - RNA, 19 nt, Homo sapiens
  misc_RNA (1)...(19): siRNA sense strand
gcagcuccaagucagauca

SEQ ID NO: 1352633 - RNA, 19 nt, Homo sapiens
  misc_RNA (1)...(19): siRNA sense strand
uagaaaagguccacgaacu

SEQ ID NO: 1352634 - RNA, 19 nt, Homo sapiens
  misc_RNA (1)...(19): siRNA sense strand
augaugauccggauaagga

SEQ ID NO: 1352635 - RNA, 19 nt, Homo sapiens
  misc_RNA (1)...(19): siRNA sense strand
guacuaagguuucaucuuu

SEQ ID NO: 1352636 - RNA, 19 nt, Homo sapiens
  misc_RNA (1)...(19): siRNA sense strand
caagucagaucaugaagaa

SEQ ID NO: 1352637 - RNA, 19 nt, Homo sapiens
  misc_RNA (1)...(19): siRNA sense strand
gauacaagcaauacaagua

SEQ ID NO: 1352638 - RNA, 19 nt, Homo sapiens
  misc_RNA (1)...(19): siRNA sense strand
caaaguagcaacaaauauc

SEQ ID NO: 1352639 - RNA, 19 nt, Homo sapiens
  misc_RNA (1)...(19): siRNA sense strand
gaccauaacccuucuucuu

SEQ ID NO: 1352640 - RNA, 19 nt, Homo sapiens
  misc_RNA (1)...(19): siRNA sense strand
ggacaaggacgcgaucuau

SEQ ID NO: 1352641 - RNA, 19 nt, Homo sapiens
  misc_RNA (1)...(19): siRNA sense strand
gcuggacaauuugaugaua

SEQ ID NO: 1352642 - RNA, 19 nt, Homo sapiens
  misc_RNA (1)...(19): siRNA sense strand
caauacaaguacuaagguu

SEQ ID NO: 1352643 - RNA, 19 nt, Homo sapiens
  misc_RNA (1)...(19): siRNA sense strand
ccaucgaccucgucauuga

SEQ ID NO: 1352644 - RNA, 19 nt, Homo sapiens
  misc_RNA (1)...(19): siRNA sense strand
gaugauacaagcaauacaa

SEQ ID NO: 1352645 - RNA, 19 nt, Homo sapiens
  misc_RNA (1)...(19): siRNA sense strand
guacaggugacgaugauga

SEQ ID NO: 1352646 - RNA, 19 nt, Homo sapiens
  misc_RNA (1)...(19): siRNA sense strand
ccaaggagcagcauauagu

SEQ ID NO: 1352647 - RNA, 19 nt, Homo sapiens
  misc_RNA (1)...(19): siRNA sense strand
acgaugagcugccccauua

SEQ ID NO: 1352648 - RNA, 19 nt, Homo sapiens
  misc_RNA (1)...(19): siRNA sense strand
agacaacaguguagcuuca

SEQ ID NO: 1352649 - RNA, 19 nt, Homo sapiens
  misc_RNA (1)...(19): siRNA sense strand
gagcuggacaauuugauga

SEQ ID NO: 1352650 - RNA, 19 nt, Homo sapiens
  misc_RNA (1)...(19): siRNA sense strand
gagccaaggagcagcauau

SEQ ID NO: 1352651 - RNA, 19 nt, Homo sapiens
  misc_RNA (1)...(19): siRNA sense strand
gcccaucgaccucgucauu

SEQ ID NO: 1352652 - RNA, 19 nt, Homo sapiens
  misc_RNA (1)...(19): siRNA sense strand
ccaaaguagcaacaaauau

SEQ ID NO: 1352653 - RNA, 19 nt, Homo sapiens
  misc_RNA (1)...(19): siRNA sense strand
gcucuggucuuugagaagu

SEQ ID NO: 1352654 - RNA, 19 nt, Homo sapiens
  misc_RNA (1)...(19): siRNA sense strand
uaguacagcccaugauuga

SEQ ID NO: 1352655 - RNA, 19 nt, Homo sapiens
  misc_RNA (1)...(19): siRNA sense strand
caaaucucgcugaccauaa

SEQ ID NO: 1352656 - RNA, 19 nt, Homo sapiens
  misc_RNA (1)...(19): siRNA sense strand
gcaauacaaguacuaaggu

SEQ ID NO: 1352657 - RNA, 19 nt, Homo sapiens
  misc_RNA (1)...(19): siRNA sense strand
cccaaaguagcaacaaaua

SEQ ID NO: 1352658 - RNA, 19 nt, Homo sapiens
  misc_RNA (1)...(19): siRNA sense strand
caagcaauacaaguacuaa

SEQ ID NO: 1352659 - RNA, 19 nt, Homo sapiens
  misc_RNA (1)...(19): siRNA sense strand
acaaauaucaugagagcau

SEQ ID NO: 1352660 - RNA, 19 nt, Homo sapiens
  misc_RNA (1)...(19): siRNA sense strand
acaaaucucgcugaccaua

SEQ ID NO: 1352661 - RNA, 19 nt, Homo sapiens
  misc_RNA (1)...(19): siRNA sense strand
gaacugugcgauaacuucu

SEQ ID NO: 1352662 - RNA, 19 nt, Homo sapiens
  misc_RNA (1)...(19): siRNA sense strand
gacaaggacgcgaucuaug

SEQ ID NO: 1352663 - RNA, 19 nt, Homo sapiens
  misc_RNA (1)...(19): siRNA sense strand
uccacgaacugugcgauaa

SEQ ID NO: 1352664 - RNA, 19 nt, Homo sapiens
  misc_RNA (1)...(19): siRNA sense strand
gaauaguacagcccaugau

SEQ ID NO: 1352665 - RNA, 19 nt, Homo sapiens
  misc_RNA (1)...(19): siRNA sense strand
ccaagucagaucaugaaga

SEQ ID NO: 1352666 - RNA, 19 nt, Homo sapiens
  misc_RNA (1)...(19): siRNA sense strand
gcuccaagucagaucauga

SEQ ID NO: 1352667 - RNA, 19 nt, Homo sapiens
  misc_RNA (1)...(19): siRNA sense strand
gggacaaggacgcgaucua

SEQ ID NO: 1352668 - RNA, 19 nt, Homo sapiens
  misc_RNA (1)...(19): siRNA sense strand
guagcaacaaauaucauga

SEQ ID NO: 1352669 - RNA, 19 nt, Homo sapiens
  misc_RNA (1)...(19): siRNA sense strand
accgauacauuagcuguuu

SEQ ID NO: 1352670 - RNA, 19 nt, Homo sapiens
  misc_RNA (1)...(19): siRNA sense strand
guuuauuaaugccagaaga

SEQ ID NO: 1352671 - RNA, 19 nt, Homo sapiens
  misc_RNA (1)...(19): siRNA sense strand
gcaaggggaugguuuagac

SEQ ID NO: 1352672 - RNA, 19 nt, Homo sapiens
  misc_RNA (1)...(19): siRNA sense strand
uaacuucugccaccgauac

SEQ ID NO: 1352673 - RNA, 19 nt, Homo sapiens
  misc_RNA (1)...(19): siRNA sense strand
aauaguacagcccaugauu

SEQ ID NO: 1352674 - RNA, 19 nt, Homo sapiens
  misc_RNA (1)...(19): siRNA sense strand
acaaggacgcgaucuaugg

SEQ ID NO: 1352675 - RNA, 19 nt, Homo sapiens
  misc_RNA (1)...(19): siRNA sense strand
aaaucucgcugaccauaac

SEQ ID NO: 1352676 - RNA, 19 nt, Homo sapiens
  misc_RNA (1)...(19): siRNA sense strand
caaguacuaagguuucauc

SEQ ID NO: 1352677 - RNA, 19 nt, Homo sapiens
  misc_RNA (1)...(19): siRNA sense strand
gccagaagaagaauaguac

SEQ ID NO: 1352678 - RNA, 19 nt, Homo sapiens
  misc_RNA (1)...(19): siRNA sense strand
accauaacccuucuucuug

SEQ ID NO: 1352679 - RNA, 19 nt, Homo sapiens
  misc_RNA (1)...(19): siRNA sense strand
cgaacugugcgauaacuuc

SEQ ID NO: 1352680 - RNA, 19 nt, Homo sapiens
  misc_RNA (1)...(19): siRNA sense strand
ucaggcuccuccacaaauc

SEQ ID NO: 1352681 - RNA, 19 nt, Homo sapiens
  misc_RNA (1)...(19): siRNA sense strand
uguguuggauggucagcaa

SEQ ID NO: 1352682 - RNA, 19 nt, Homo sapiens
  misc_RNA (1)...(19): siRNA sense strand
acaagcaauacaaguacua

SEQ ID NO: 1352683 - RNA, 19 nt, Homo sapiens
  misc_RNA (1)...(19): siRNA sense strand
agaauaguacagcccauga

SEQ ID NO: 1352684 - RNA, 19 nt, Homo sapiens
  misc_RNA (1)...(19): siRNA sense strand
gucagaucaugaagaacuu

SEQ ID NO: 1352685 - RNA, 19 nt, Homo sapiens
  misc_RNA (1)...(19): siRNA sense strand
ggucuucgccaagcagguu

SEQ ID NO: 1352686 - RNA, 19 nt, Homo sapiens
  misc_RNA (1)...(19): siRNA sense strand
ugccagaagaagaauagua

SEQ ID NO: 1352687 - RNA, 19 nt, Homo sapiens
  misc_RNA (1)...(19): siRNA sense strand
acgaugaugauccggauaa

SEQ ID NO: 1352688 - RNA, 19 nt, Homo sapiens
  misc_RNA (1)...(19): siRNA sense strand
auacaaguacuaagguuuc

SEQ ID NO: 1352689 - RNA, 19 nt, Homo sapiens
  misc_RNA (1)...(19): siRNA sense strand
agcaacaaauaucaugaga

SEQ ID NO: 1352690 - RNA, 19 nt, Homo sapiens
  misc_RNA (1)...(19): siRNA sense strand
gcggagacaacagcaguga

SEQ ID NO: 1352691 - RNA, 19 nt, Homo sapiens
  misc_RNA (1)...(19): siRNA sense strand
gguuucaucuuuuggaguu

SEQ ID NO: 1352692 - RNA, 19 nt, Homo sapiens
  misc_RNA (1)...(19): siRNA sense strand
caaggagcagcauauaguc

SEQ ID NO: 1352693 - RNA, 19 nt, Homo sapiens
  misc_RNA (1)...(19): siRNA sense strand
gccaaggagcagcauauag

SEQ ID NO: 1352694 - RNA, 19 nt, Homo sapiens
  misc_RNA (1)...(19): siRNA sense strand
cgauacauuagcuguuuga

SEQ ID NO: 1352695 - RNA, 19 nt, Homo sapiens
  misc_RNA (1)...(19): siRNA sense strand
ccgauacauuagcuguuug

SEQ ID NO: 1352696 - RNA, 19 nt, Homo sapiens
  misc_RNA (1)...(19): siRNA sense strand
uggacaauuugaugauaca

SEQ ID NO: 1352697 - RNA, 19 nt, Homo sapiens
  misc_RNA (1)...(19): siRNA sense strand
gaaaagguccacgaacugu

SEQ ID NO: 1352698 - RNA, 19 nt, Homo sapiens
  misc_RNA (1)...(19): siRNA sense strand
gcagcuccaagucagauca

SEQ ID NO: 1352699 - RNA, 19 nt, Homo sapiens
  misc_RNA (1)...(19): siRNA sense strand
auuaaugccagaagaagaa

SEQ ID NO: 1352700 - RNA, 19 nt, Homo sapiens
  misc_RNA (1)...(19): siRNA sense strand
uagaaaagguccacgaacu

SEQ ID NO: 1352701 - RNA, 19 nt, Homo sapiens
  misc_RNA (1)...(19): siRNA sense strand
augaugauccggauaagga

SEQ ID NO: 1352702 - RNA, 19 nt, Homo sapiens
  misc_RNA (1)...(19): siRNA sense strand
guacuaagguuucaucuuu

SEQ ID NO: 1352703 - RNA, 19 nt, Homo sapiens
  misc_RNA (1)...(19): siRNA sense strand
caagucagaucaugaagaa

SEQ ID NO: 1352704 - RNA, 19 nt, Homo sapiens
  misc_RNA (1)...(19): siRNA sense strand
ggacauucaugcccaauag

SEQ ID NO: 1352705 - RNA, 19 nt, Homo sapiens
  misc_RNA (1)...(19): siRNA sense strand
gauacaagcaauacaagua

SEQ ID NO: 1352706 - RNA, 19 nt, Homo sapiens
  misc_RNA (1)...(19): siRNA sense strand
caaaguagcaacaaauauc

SEQ ID NO: 1352707 - RNA, 19 nt, Homo sapiens
  misc_RNA (1)...(19): siRNA sense strand
gcacagagccccacaaugu

SEQ ID NO: 1352708 - RNA, 19 nt, Homo sapiens
  misc_RNA (1)...(19): siRNA sense strand
gaccauaacccuucuucuu

SEQ ID NO: 1352709 - RNA, 19 nt, Homo sapiens
  misc_RNA (1)...(19): siRNA sense strand
ggacaaggacgcgaucuau

SEQ ID NO: 1352710 - RNA, 19 nt, Homo sapiens
  misc_RNA (1)...(19): siRNA sense strand
gcuggacaauuugaugaua

SEQ ID NO: 1352711 - RNA, 19 nt, Homo sapiens
  misc_RNA (1)...(19): siRNA sense strand
caauacaaguacuaagguu

SEQ ID NO: 1352712 - RNA, 19 nt, Homo sapiens
  misc_RNA (1)...(19): siRNA sense strand
ccaucgaccucgucauuga

SEQ ID NO: 1352713 - RNA, 19 nt, Homo sapiens
  misc_RNA (1)...(19): siRNA sense strand
gaugauacaagcaauacaa

SEQ ID NO: 1352714 - RNA, 19 nt, Homo sapiens
  misc_RNA (1)...(19): siRNA sense strand
cccacacccuacucaauua

SEQ ID NO: 1352715 - RNA, 19 nt, Homo sapiens
  misc_RNA (1)...(19): siRNA sense strand
guacaggugacgaugauga

SEQ ID NO: 1352716 - RNA, 19 nt, Homo sapiens
  misc_RNA (1)...(19): siRNA sense strand
ccacaauguuaaauucugu

SEQ ID NO: 1352717 - RNA, 19 nt, Homo sapiens
  misc_RNA (1)...(19): siRNA sense strand
cccaaugcauucauauuug

SEQ ID NO: 1352718 - RNA, 19 nt, Homo sapiens
  misc_RNA (1)...(19): siRNA sense strand
ccaaggagcagcauauagu

SEQ ID NO: 1352719 - RNA, 19 nt, Homo sapiens
  misc_RNA (1)...(19): siRNA sense strand
acgaugagcugccccauua

SEQ ID NO: 1352720 - RNA, 19 nt, Homo sapiens
  misc_RNA (1)...(19): siRNA sense strand
agacaacaguguagcuuca

SEQ ID NO: 1352721 - RNA, 19 nt, Homo sapiens
  misc_RNA (1)...(19): siRNA sense strand
gagcuggacaauuugauga

SEQ ID NO: 1352722 - RNA, 19 nt, Homo sapiens
  misc_RNA (1)...(19): siRNA sense strand
gagccaaggagcagcauau

SEQ ID NO: 1352723 - RNA, 19 nt, Homo sapiens
  misc_RNA (1)...(19): siRNA sense strand
gcggacagguuauggacau

SEQ ID NO: 1352724 - RNA, 19 nt, Homo sapiens
  misc_RNA (1)...(19): siRNA sense strand
gcccaucgaccucgucauu

SEQ ID NO: 1352725 - RNA, 19 nt, Homo sapiens
  misc_RNA (1)...(19): siRNA sense strand
ccaaaguagcaacaaauau

SEQ ID NO: 1352726 - RNA, 19 nt, Homo sapiens
  misc_RNA (1)...(19): siRNA sense strand
gcaauacaaguacuaaggu

SEQ ID NO: 1352727 - RNA, 19 nt, Homo sapiens
  misc_RNA (1)...(19): siRNA sense strand
gacagguuauggacauuca

SEQ ID NO: 1352728 - RNA, 19 nt, Homo sapiens
  misc_RNA (1)...(19): siRNA sense strand
uaguacagcccaugauuga

SEQ ID NO: 1352729 - RNA, 19 nt, Homo sapiens
  misc_RNA (1)...(19): siRNA sense strand
caaaucucgcugaccauaa

SEQ ID NO: 1352730 - RNA, 19 nt, Homo sapiens
  misc_RNA (1)...(19): siRNA sense strand
gcucuggucuuugagaagu

SEQ ID NO: 1352731 - RNA, 19 nt, Homo sapiens
  misc_RNA (1)...(19): siRNA sense strand
cccaaaguagcaacaaaua

SEQ ID NO: 1352732 - RNA, 19 nt, Homo sapiens
  misc_RNA (1)...(19): siRNA sense strand
gguccuaugggaaugagua

SEQ ID NO: 1352733 - RNA, 19 nt, Homo sapiens
  misc_RNA (1)...(19): siRNA sense strand
caagcaauacaaguacuaa

SEQ ID NO: 1352734 - RNA, 19 nt, Homo sapiens
  misc_RNA (1)...(19): siRNA sense strand
aauguuggcggacagguua

SEQ ID NO: 1352735 - RNA, 19 nt, Homo sapiens
  misc_RNA (1)...(19): siRNA sense strand
ccaaugcauucauauuugc

SEQ ID NO: 1352736 - RNA, 19 nt, Homo sapiens
  misc_RNA (1)...(19): siRNA sense strand
acaaauaucaugagagcau

SEQ ID NO: 1352737 - RNA, 19 nt, Homo sapiens
  misc_RNA (1)...(19): siRNA sense strand
acaaaucucgcugaccaua

SEQ ID NO: 1352738 - RNA, 19 nt, Homo sapiens
  misc_RNA (1)...(19): siRNA sense strand
acacccuacucaauuaaga

SEQ ID NO: 1352739 - RNA, 19 nt, Homo sapiens
  misc_RNA (1)...(19): siRNA sense strand
gaacugugcgauaacuucu

SEQ ID NO: 1352740 - RNA, 19 nt, Homo sapiens
  misc_RNA (1)...(19): siRNA sense strand
ccuacucaauuaagacaug

SEQ ID NO: 1352741 - RNA, 19 nt, Homo sapiens
  misc_RNA (1)...(19): siRNA sense strand
gacaaggacgcgaucuaug

SEQ ID NO: 1352742 - RNA, 19 nt, Homo sapiens
  misc_RNA (1)...(19): siRNA sense strand
ccacacccuacucaauuaa

SEQ ID NO: 1352743 - RNA, 19 nt, Homo sapiens
  misc_RNA (1)...(19): siRNA sense strand
uccacgaacugugcgauaa

SEQ ID NO: 1352744 - RNA, 19 nt, Homo sapiens
  misc_RNA (1)...(19): siRNA sense strand
gaauaguacagcccaugau

SEQ ID NO: 1352745 - RNA, 19 nt, Homo sapiens
  misc_RNA (1)...(19): siRNA sense strand
ccaagucagaucaugaaga

SEQ ID NO: 1352746 - RNA, 19 nt, Homo sapiens
  misc_RNA (1)...(19): siRNA sense strand
gcuccaagucagaucauga

SEQ ID NO: 1352747 - RNA, 19 nt, Homo sapiens
  misc_RNA (1)...(19): siRNA sense strand
gggacaaggacgcgaucua

SEQ ID NO: 1352748 - RNA, 19 nt, Homo sapiens
  misc_RNA (1)...(19): siRNA sense strand
guagcaacaaauaucauga

SEQ ID NO: 1352749 - RNA, 19 nt, Homo sapiens
  misc_RNA (1)...(19): siRNA sense strand
accgauacauuagcuguuu

SEQ ID NO: 1352750 - RNA, 19 nt, Homo sapiens
  misc_RNA (1)...(19): siRNA sense strand
guuuauuaaugccagaaga

SEQ ID NO: 1352751 - RNA, 19 nt, Homo sapiens
  misc_RNA (1)...(19): siRNA sense strand
gcaaggggaugguuuagac

SEQ ID NO: 1352752 - RNA, 19 nt, Homo sapiens
  misc_RNA (1)...(19): siRNA sense strand
uaacuucugccaccgauac

SEQ ID NO: 1352753 - RNA, 19 nt, Homo sapiens
  misc_RNA (1)...(19): siRNA sense strand
ggacagguuauggacauuc

SEQ ID NO: 1352754 - RNA, 19 nt, Homo sapiens
  misc_RNA (1)...(19): siRNA sense strand
aauaguacagcccaugauu

SEQ ID NO: 1352755 - RNA, 19 nt, Homo sapiens
  misc_RNA (1)...(19): siRNA sense strand
acaaggacgcgaucuaugg

SEQ ID NO: 1352756 - RNA, 19 nt, Homo sapiens
  misc_RNA (1)...(19): siRNA sense strand
aaaucucgcugaccauaac

SEQ ID NO: 1352757 - RNA, 19 nt, Homo sapiens
  misc_RNA (1)...(19): siRNA sense strand
caaguacuaagguuucauc

SEQ ID NO: 1352758 - RNA, 19 nt, Homo sapiens
  misc_RNA (1)...(19): siRNA sense strand
gccagaagaagaauaguac

SEQ ID NO: 1352759 - RNA, 19 nt, Homo sapiens
  misc_RNA (1)...(19): siRNA sense strand
accauaacccuucuucuug

SEQ ID NO: 1352760 - RNA, 19 nt, Homo sapiens
  misc_RNA (1)...(19): siRNA sense strand
cgaacugugcgauaacuuc

SEQ ID NO: 1352761 - RNA, 19 nt, Homo sapiens
  misc_RNA (1)...(19): siRNA sense strand
ucaggcuccuccacaaauc

SEQ ID NO: 1352762 - RNA, 19 nt, Homo sapiens
  misc_RNA (1)...(19): siRNA sense strand
uguguuggauggucagcaa

SEQ ID NO: 1352763 - RNA, 19 nt, Homo sapiens
  misc_RNA (1)...(19): siRNA sense strand
gucagaucaugaagaacuu

SEQ ID NO: 1352764 - RNA, 19 nt, Homo sapiens
  misc_RNA (1)...(19): siRNA sense strand
agaauaguacagcccauga

SEQ ID NO: 1352765 - RNA, 19 nt, Homo sapiens
  misc_RNA (1)...(19): siRNA sense strand
acaagcaauacaaguacua

SEQ ID NO: 1352766 - RNA, 19 nt, Homo sapiens
  misc_RNA (1)...(19): siRNA sense strand
acgaugaugauccggauaa

SEQ ID NO: 1352767 - RNA, 19 nt, Homo sapiens
  misc_RNA (1)...(19): siRNA sense strand
ugccagaagaagaauagua

SEQ ID NO: 1352768 - RNA, 19 nt, Homo sapiens
  misc_RNA (1)...(19): siRNA sense strand
ggucuucgccaagcagguu

SEQ ID NO: 1352769 - RNA, 19 nt, Homo sapiens
  misc_RNA (1)...(19): siRNA sense strand
gcggagacaacagcaguga

SEQ ID NO: 1352770 - RNA, 19 nt, Homo sapiens
  misc_RNA (1)...(19): siRNA sense strand
auacaaguacuaagguuuc

SEQ ID NO: 1352771 - RNA, 19 nt, Homo sapiens
  misc_RNA (1)...(19): siRNA sense strand
agcaacaaauaucaugaga

SEQ ID NO: 1352772 - RNA, 19 nt, Homo sapiens
  misc_RNA (1)...(19): siRNA sense strand
gaaaagguccacgaacugu

SEQ ID NO: 1352773 - RNA, 19 nt, Homo sapiens
  misc_RNA (1)...(19): siRNA sense strand
caaggagcagcauauaguc

SEQ ID NO: 1352774 - RNA, 19 nt, Homo sapiens
  misc_RNA (1)...(19): siRNA sense strand
gccaaggagcagcauauag

SEQ ID NO: 1352775 - RNA, 19 nt, Homo sapiens
  misc_RNA (1)...(19): siRNA sense strand
uggacaauuugaugauaca

SEQ ID NO: 1352776 - RNA, 19 nt, Homo sapiens
  misc_RNA (1)...(19): siRNA sense strand
gguuucaucuuuuggaguu

SEQ ID NO: 1352777 - RNA, 19 nt, Homo sapiens
  misc_RNA (1)...(19): siRNA sense strand
cgauacauuagcuguuuga

SEQ ID NO: 1352778 - RNA, 19 nt, Homo sapiens
  misc_RNA (1)...(19): siRNA sense strand
ccgauacauuagcuguuug

SEQ ID NO: 1352779 - RNA, 19 nt, Homo sapiens
  misc_RNA (1)...(19): siRNA sense strand
gcagcuccaagucagauca

SEQ ID NO: 1352780 - RNA, 19 nt, Homo sapiens
  misc_RNA (1)...(19): siRNA sense strand
caauguuggcggacagguu

SEQ ID NO: 1352781 - RNA, 19 nt, Homo sapiens
  misc_RNA (1)...(19): siRNA sense strand
auuaaugccagaagaagaa

SEQ ID NO: 1352782 - RNA, 19 nt, Homo sapiens
  misc_RNA (1)...(19): siRNA sense strand
uagaaaagguccacgaacu

SEQ ID NO: 1352783 - RNA, 19 nt, Homo sapiens
  misc_RNA (1)...(19): siRNA sense strand
cccacaauguuaaauucug

SEQ ID NO: 1352784 - RNA, 19 nt, Homo sapiens
  misc_RNA (1)...(19): siRNA sense strand
ccaccacccagccaugaug

SEQ ID NO: 1352785 - RNA, 19 nt, Homo sapiens
  misc_RNA (1)...(19): siRNA sense strand
augaugauccggauaagga

SEQ ID NO: 1352786 - RNA, 19 nt, Homo sapiens
  misc_RNA (1)...(19): siRNA sense strand
guacuaagguuucaucuuu

SEQ ID NO: 1352787 - RNA, 19 nt, Homo sapiens
  misc_RNA (1)...(19): siRNA sense strand
caagucagaucaugaagaa

SEQ ID NO: 1352788 - RNA, 19 nt, Homo sapiens
  misc_RNA (1)...(19): siRNA sense strand
ggacauucaugcccaauag

SEQ ID NO: 1352789 - RNA, 19 nt, Homo sapiens
  misc_RNA (1)...(19): siRNA sense strand
gauacaagcaauacaagua

SEQ ID NO: 1352790 - RNA, 19 nt, Homo sapiens
  misc_RNA (1)...(19): siRNA sense strand
caaaguagcaacaaauauc

SEQ ID NO: 1352791 - RNA, 19 nt, Homo sapiens
  misc_RNA (1)...(19): siRNA sense strand
gcacagagccccacaaugu

SEQ ID NO: 1352792 - RNA, 19 nt, Homo sapiens
  misc_RNA (1)...(19): siRNA sense strand
gaccauaacccuucuucuu

SEQ ID NO: 1352793 - RNA, 19 nt, Homo sapiens
  misc_RNA (1)...(19): siRNA sense strand
ggacaaggacgcgaucuau

SEQ ID NO: 1352794 - RNA, 19 nt, Homo sapiens
  misc_RNA (1)...(19): siRNA sense strand
gcuggacaauuugaugaua

SEQ ID NO: 1352795 - RNA, 19 nt, Homo sapiens
  misc_RNA (1)...(19): siRNA sense strand
caauacaaguacuaagguu

SEQ ID NO: 1352796 - RNA, 19 nt, Homo sapiens
  misc_RNA (1)...(19): siRNA sense strand
ccaucgaccucgucauuga

SEQ ID NO: 1352797 - RNA, 19 nt, Homo sapiens
  misc_RNA (1)...(19): siRNA sense strand
gaugauacaagcaauacaa

SEQ ID NO: 1352798 - RNA, 19 nt, Homo sapiens
  misc_RNA (1)...(19): siRNA sense strand
cccacacccuacucaauua

SEQ ID NO: 1352799 - RNA, 19 nt, Homo sapiens
  misc_RNA (1)...(19): siRNA sense strand
guacaggugacgaugauga

SEQ ID NO: 1352800 - RNA, 19 nt, Homo sapiens
  misc_RNA (1)...(19): siRNA sense strand
ccacaauguuaaauucugu

SEQ ID NO: 1352801 - RNA, 19 nt, Homo sapiens
  misc_RNA (1)...(19): siRNA sense strand
cccaaugcauucauauuug

SEQ ID NO: 1352802 - RNA, 19 nt, Homo sapiens
  misc_RNA (1)...(19): siRNA sense strand
ccaaggagcagcauauagu

SEQ ID NO: 1352803 - RNA, 19 nt, Homo sapiens
  misc_RNA (1)...(19): siRNA sense strand
acgaugagcugccccauua

SEQ ID NO: 1352804 - RNA, 19 nt, Homo sapiens
  misc_RNA (1)...(19): siRNA sense strand
agacaacaguguagcuuca

SEQ ID NO: 1352805 - RNA, 19 nt, Homo sapiens
  misc_RNA (1)...(19): siRNA sense strand
gagcuggacaauuugauga

SEQ ID NO: 1352806 - RNA, 19 nt, Homo sapiens
  misc_RNA (1)...(19): siRNA sense strand
gagccaaggagcagcauau

SEQ ID NO: 1352807 - RNA, 19 nt, Homo sapiens
  misc_RNA (1)...(19): siRNA sense strand
gcggacagguuauggacau

SEQ ID NO: 1352808 - RNA, 19 nt, Homo sapiens
  misc_RNA (1)...(19): siRNA sense strand
gcccaucgaccucgucauu

SEQ ID NO: 1352809 - RNA, 19 nt, Homo sapiens
  misc_RNA (1)...(19): siRNA sense strand
ccaaaguagcaacaaauau

SEQ ID NO: 1352810 - RNA, 19 nt, Homo sapiens
  misc_RNA (1)...(19): siRNA sense strand
gcaauacaaguacuaaggu

SEQ ID NO: 1352811 - RNA, 19 nt, Homo sapiens
  misc_RNA (1)...(19): siRNA sense strand
gacagguuauggacauuca

SEQ ID NO: 1352812 - RNA, 19 nt, Homo sapiens
  misc_RNA (1)...(19): siRNA sense strand
uaguacagcccaugauuga

SEQ ID NO: 1352813 - RNA, 19 nt, Homo sapiens
  misc_RNA (1)...(19): siRNA sense strand
caaaucucgcugaccauaa

SEQ ID NO: 1352814 - RNA, 19 nt, Homo sapiens
  misc_RNA (1)...(19): siRNA sense strand
gcucuggucuuugagaagu

SEQ ID NO: 1352815 - RNA, 19 nt, Homo sapiens
  misc_RNA (1)...(19): siRNA sense strand
cccaaaguagcaacaaaua

SEQ ID NO: 1352816 - RNA, 19 nt, Homo sapiens
  misc_RNA (1)...(19): siRNA sense strand
gguccuaugggaaugagua

SEQ ID NO: 1352817 - RNA, 19 nt, Homo sapiens
  misc_RNA (1)...(19): siRNA sense strand
caagcaauacaaguacuaa

SEQ ID NO: 1352818 - RNA, 19 nt, Homo sapiens
  misc_RNA (1)...(19): siRNA sense strand
aauguuggcggacagguua

SEQ ID NO: 1352819 - RNA, 19 nt, Homo sapiens
  misc_RNA (1)...(19): siRNA sense strand
ccaaugcauucauauuugc

SEQ ID NO: 1352820 - RNA, 19 nt, Homo sapiens
  misc_RNA (1)...(19): siRNA sense strand
acaaauaucaugagagcau

SEQ ID NO: 1352821 - RNA, 19 nt, Homo sapiens
  misc_RNA (1)...(19): siRNA sense strand
acaaaucucgcugaccaua

SEQ ID NO: 1352822 - RNA, 19 nt, Homo sapiens
  misc_RNA (1)...(19): siRNA sense strand
acacccuacucaauuaaga

SEQ ID NO: 1352823 - RNA, 19 nt, Homo sapiens
  misc_RNA (1)...(19): siRNA sense strand
gaacugugcgauaacuucu

SEQ ID NO: 1352824 - RNA, 19 nt, Homo sapiens
  misc_RNA (1)...(19): siRNA sense strand
ccuacucaauuaagacaug

SEQ ID NO: 1352825 - RNA, 19 nt, Homo sapiens
  misc_RNA (1)...(19): siRNA sense strand
gacaaggacgcgaucuaug

SEQ ID NO: 1352826 - RNA, 19 nt, Homo sapiens
  misc_RNA (1)...(19): siRNA sense strand
ccacacccuacucaauuaa

SEQ ID NO: 1352827 - RNA, 19 nt, Homo sapiens
  misc_RNA (1)...(19): siRNA sense strand
uccacgaacugugcgauaa

SEQ ID NO: 1352828 - RNA, 19 nt, Homo sapiens
  misc_RNA (1)...(19): siRNA sense strand
gaauaguacagcccaugau

SEQ ID NO: 1352829 - RNA, 19 nt, Homo sapiens
  misc_RNA (1)...(19): siRNA sense strand
ccaagucagaucaugaaga

SEQ ID NO: 1352830 - RNA, 19 nt, Homo sapiens
  misc_RNA (1)...(19): siRNA sense strand
gcuccaagucagaucauga

SEQ ID NO: 1352831 - RNA, 19 nt, Homo sapiens
  misc_RNA (1)...(19): siRNA sense strand
gggacaaggacgcgaucua

SEQ ID NO: 1352832 - RNA, 19 nt, Homo sapiens
  misc_RNA (1)...(19): siRNA sense strand
guagcaacaaauaucauga

SEQ ID NO: 1352833 - RNA, 19 nt, Homo sapiens
  misc_RNA (1)...(19): siRNA sense strand
accgauacauuagcuguuu

SEQ ID NO: 1352834 - RNA, 19 nt, Homo sapiens
  misc_RNA (1)...(19): siRNA sense strand
guuuauuaaugccagaaga

SEQ ID NO: 1352835 - RNA, 19 nt, Homo sapiens
  misc_RNA (1)...(19): siRNA sense strand
gcaaggggaugguuuagac

SEQ ID NO: 1352836 - RNA, 19 nt, Homo sapiens
  misc_RNA (1)...(19): siRNA sense strand
uaacuucugccaccgauac

SEQ ID NO: 1352837 - RNA, 19 nt, Homo sapiens
  misc_RNA (1)...(19): siRNA sense strand
ggacagguuauggacauuc

SEQ ID NO: 1352838 - RNA, 19 nt, Homo sapiens
  misc_RNA (1)...(19): siRNA sense strand
aauaguacagcccaugauu

SEQ ID NO: 1352839 - RNA, 19 nt, Homo sapiens
  misc_RNA (1)...(19): siRNA sense strand
acaaggacgcgaucuaugg

SEQ ID NO: 1352840 - RNA, 19 nt, Homo sapiens
  misc_RNA (1)...(19): siRNA sense strand
aaaucucgcugaccauaac

SEQ ID NO: 1352841 - RNA, 19 nt, Homo sapiens
  misc_RNA (1)...(19): siRNA sense strand
caaguacuaagguuucauc

SEQ ID NO: 1352842 - RNA, 19 nt, Homo sapiens
  misc_RNA (1)...(19): siRNA sense strand
gccagaagaagaauaguac

SEQ ID NO: 1352843 - RNA, 19 nt, Homo sapiens
  misc_RNA (1)...(19): siRNA sense strand
accauaacccuucuucuug

SEQ ID NO: 1352844 - RNA, 19 nt, Homo sapiens
  misc_RNA (1)...(19): siRNA sense strand
cgaacugugcgauaacuuc

SEQ ID NO: 1352845 - RNA, 19 nt, Homo sapiens
  misc_RNA (1)...(19): siRNA sense strand
ucaggcuccuccacaaauc

SEQ ID NO: 1352846 - RNA, 19 nt, Homo sapiens
  misc_RNA (1)...(19): siRNA sense strand
uguguuggauggucagcaa

SEQ ID NO: 1352847 - RNA, 19 nt, Homo sapiens
  misc_RNA (1)...(19): siRNA sense strand
gucagaucaugaagaacuu

SEQ ID NO: 1352848 - RNA, 19 nt, Homo sapiens
  misc_RNA (1)...(19): siRNA sense strand
agaauaguacagcccauga

SEQ ID NO: 1352849 - RNA, 19 nt, Homo sapiens
  misc_RNA (1)...(19): siRNA sense strand
acaagcaauacaaguacua

SEQ ID NO: 1352850 - RNA, 19 nt, Homo sapiens
  misc_RNA (1)...(19): siRNA sense strand
acgaugaugauccggauaa

SEQ ID NO: 1352851 - RNA, 19 nt, Homo sapiens
  misc_RNA (1)...(19): siRNA sense strand
ugccagaagaagaauagua

SEQ ID NO: 1352852 - RNA, 19 nt, Homo sapiens
  misc_RNA (1)...(19): siRNA sense strand
ggucuucgccaagcagguu

SEQ ID NO: 1352853 - RNA, 19 nt, Homo sapiens
  misc_RNA (1)...(19): siRNA sense strand
gcggagacaacagcaguga

SEQ ID NO: 1352854 - RNA, 19 nt, Homo sapiens
  misc_RNA (1)...(19): siRNA sense strand
auacaaguacuaagguuuc

SEQ ID NO: 1352855 - RNA, 19 nt, Homo sapiens
  misc_RNA (1)...(19): siRNA sense strand
agcaacaaauaucaugaga

SEQ ID NO: 1352856 - RNA, 19 nt, Homo sapiens
  misc_RNA (1)...(19): siRNA sense strand
gaaaagguccacgaacugu

SEQ ID NO: 1352857 - RNA, 19 nt, Homo sapiens
  misc_RNA (1)...(19): siRNA sense strand
caaggagcagcauauaguc

SEQ ID NO: 1352858 - RNA, 19 nt, Homo sapiens
  misc_RNA (1)...(19): siRNA sense strand
gccaaggagcagcauauag

SEQ ID NO: 1352859 - RNA, 19 nt, Homo sapiens
  misc_RNA (1)...(19): siRNA sense strand
uggacaauuugaugauaca

SEQ ID NO: 1352860 - RNA, 19 nt, Homo sapiens
  misc_RNA (1)...(19): siRNA sense strand
gguuucaucuuuuggaguu

SEQ ID NO: 1352861 - RNA, 19 nt, Homo sapiens
  misc_RNA (1)...(19): siRNA sense strand
cgauacauuagcuguuuga

SEQ ID NO: 1352862 - RNA, 19 nt, Homo sapiens
  misc_RNA (1)...(19): siRNA sense strand
ccgauacauuagcuguuug

SEQ ID NO: 1352863 - RNA, 19 nt, Homo sapiens
  misc_RNA (1)...(19): siRNA sense strand
gcagcuccaagucagauca

SEQ ID NO: 1352864 - RNA, 19 nt, Homo sapiens
  misc_RNA (1)...(19): siRNA sense strand
caauguuggcggacagguu

SEQ ID NO: 1352865 - RNA, 19 nt, Homo sapiens
  misc_RNA (1)...(19): siRNA sense strand
auuaaugccagaagaagaa

SEQ ID NO: 1352866 - RNA, 19 nt, Homo sapiens
  misc_RNA (1)...(19): siRNA sense strand
uagaaaagguccacgaacu

SEQ ID NO: 1352867 - RNA, 19 nt, Homo sapiens
  misc_RNA (1)...(19): siRNA sense strand
cccacaauguuaaauucug

SEQ ID NO: 1352868 - RNA, 19 nt, Homo sapiens
  misc_RNA (1)...(19): siRNA sense strand
ccaccacccagccaugaug

SEQ ID NO: 1352869 - RNA, 19 nt, Homo sapiens
  misc_RNA (1)...(19): siRNA sense strand
augaugauccggauaagga

SEQ ID NO: 1352870 - RNA, 19 nt, Homo sapiens
  misc_RNA (1)...(19): siRNA sense strand
guacuaagguuucaucuuu

SEQ ID NO: 1352871 - RNA, 19 nt, Homo sapiens
  misc_RNA (1)...(19): siRNA sense strand
caagucagaucaugaagaa

SEQ ID NO: 1352872 - RNA, 19 nt, Homo sapiens
  misc_RNA (1)...(19): siRNA sense strand
gauacaagcaauacaagua

SEQ ID NO: 1352873 - RNA, 19 nt, Homo sapiens
  misc_RNA (1)...(19): siRNA sense strand
caaaguagcaacaaauauc

SEQ ID NO: 1352874 - RNA, 19 nt, Homo sapiens
  misc_RNA (1)...(19): siRNA sense strand
gaccauaacccuucuucuu

SEQ ID NO: 1352875 - RNA, 19 nt, Homo sapiens
  misc_RNA (1)...(19): siRNA sense strand
ggacaaggacgcgaucuau

SEQ ID NO: 1352876 - RNA, 19 nt, Homo sapiens
  misc_RNA (1)...(19): siRNA sense strand
gcuggacaauuugaugaua

SEQ ID NO: 1352877 - RNA, 19 nt, Homo sapiens
  misc_RNA (1)...(19): siRNA sense strand
caauacaaguacuaagguu

SEQ ID NO: 1352878 - RNA, 19 nt, Homo sapiens
  misc_RNA (1)...(19): siRNA sense strand
ccaucgaccucgucauuga

SEQ ID NO: 1352879 - RNA, 19 nt, Homo sapiens
  misc_RNA (1)...(19): siRNA sense strand
gaugauacaagcaauacaa

SEQ ID NO: 1352880 - RNA, 19 nt, Homo sapiens
  misc_RNA (1)...(19): siRNA sense strand
guacaggugacgaugauga

SEQ ID NO: 1352881 - RNA, 19 nt, Homo sapiens
  misc_RNA (1)...(19): siRNA sense strand
ccaaggagcagcauauagu

SEQ ID NO: 1352882 - RNA, 19 nt, Homo sapiens
  misc_RNA (1)...(19): siRNA sense strand
acgaugagcugccccauua

SEQ ID NO: 1352883 - RNA, 19 nt, Homo sapiens
  misc_RNA (1)...(19): siRNA sense strand
agacaacaguguagcuuca

SEQ ID NO: 1352884 - RNA, 19 nt, Homo sapiens
  misc_RNA (1)...(19): siRNA sense strand
gagcuggacaauuugauga

SEQ ID NO: 1352885 - RNA, 19 nt, Homo sapiens
  misc_RNA (1)...(19): siRNA sense strand
gagccaaggagcagcauau

SEQ ID NO: 1352886 - RNA, 19 nt, Homo sapiens
  misc_RNA (1)...(19): siRNA sense strand
gcccaucgaccucgucauu

SEQ ID NO: 1352887 - RNA, 19 nt, Homo sapiens
  misc_RNA (1)...(19): siRNA sense strand
ccaaaguagcaacaaauau

SEQ ID NO: 1352888 - RNA, 19 nt, Homo sapiens
  misc_RNA (1)...(19): siRNA sense strand
gcucuggucuuugagaagu

SEQ ID NO: 1352889 - RNA, 19 nt, Homo sapiens
  misc_RNA (1)...(19): siRNA sense strand
uaguacagcccaugauuga

SEQ ID NO: 1352890 - RNA, 19 nt, Homo sapiens
  misc_RNA (1)...(19): siRNA sense strand
caaaucucgcugaccauaa

SEQ ID NO: 1352891 - RNA, 19 nt, Homo sapiens
  misc_RNA (1)...(19): siRNA sense strand
gcaauacaaguacuaaggu

SEQ ID NO: 1352892 - RNA, 19 nt, Homo sapiens
  misc_RNA (1)...(19): siRNA sense strand
cccaaaguagcaacaaaua

SEQ ID NO: 1352893 - RNA, 19 nt, Homo sapiens
  misc_RNA (1)...(19): siRNA sense strand
caagcaauacaaguacuaa

SEQ ID NO: 1352894 - RNA, 19 nt, Homo sapiens
  misc_RNA (1)...(19): siRNA sense strand
acaaauaucaugagagcau

SEQ ID NO: 1352895 - RNA, 19 nt, Homo sapiens
  misc_RNA (1)...(19): siRNA sense strand
acaaaucucgcugaccaua

SEQ ID NO: 1352896 - RNA, 19 nt, Homo sapiens
  misc_RNA (1)...(19): siRNA sense strand
gaacugugcgauaacuucu

SEQ ID NO: 1352897 - RNA, 19 nt, Homo sapiens
  misc_RNA (1)...(19): siRNA sense strand
gacaaggacgcgaucuaug

SEQ ID NO: 1352898 - RNA, 19 nt, Homo sapiens
  misc_RNA (1)...(19): siRNA sense strand
uccacgaacugugcgauaa

SEQ ID NO: 1352899 - RNA, 19 nt, Homo sapiens
  misc_RNA (1)...(19): siRNA sense strand
gaauaguacagcccaugau

SEQ ID NO: 1352900 - RNA, 19 nt, Homo sapiens
  misc_RNA (1)...(19): siRNA sense strand
ccaagucagaucaugaaga

SEQ ID NO: 1352901 - RNA, 19 nt, Homo sapiens
  misc_RNA (1)...(19): siRNA sense strand
gcuccaagucagaucauga

SEQ ID NO: 1352902 - RNA, 19 nt, Homo sapiens
  misc_RNA (1)...(19): siRNA sense strand
gggacaaggacgcgaucua

SEQ ID NO: 1352903 - RNA, 19 nt, Homo sapiens
  misc_RNA (1)...(19): siRNA sense strand
guagcaacaaauaucauga

SEQ ID NO: 1352904 - RNA, 19 nt, Homo sapiens
  misc_RNA (1)...(19): siRNA sense strand
accgauacauuagcuguuu

SEQ ID NO: 1352905 - RNA, 19 nt, Homo sapiens
  misc_RNA (1)...(19): siRNA sense strand
guuuauuaaugccagaaga

SEQ ID NO: 1352906 - RNA, 19 nt, Homo sapiens
  misc_RNA (1)...(19): siRNA sense strand
gcaaggggaugguuuagac

SEQ ID NO: 1352907 - RNA, 19 nt, Homo sapiens
  misc_RNA (1)...(19): siRNA sense strand
uaacuucugccaccgauac

SEQ ID NO: 1352908 - RNA, 19 nt, Homo sapiens
  misc_RNA (1)...(19): siRNA sense strand
aauaguacagcccaugauu

SEQ ID NO: 1352909 - RNA, 19 nt, Homo sapiens
  misc_RNA (1)...(19): siRNA sense strand
acaaggacgcgaucuaugg

SEQ ID NO: 1352910 - RNA, 19 nt, Homo sapiens
  misc_RNA (1)...(19): siRNA sense strand
aaaucucgcugaccauaac

SEQ ID NO: 1352911 - RNA, 19 nt, Homo sapiens
  misc_RNA (1)...(19): siRNA sense strand
caaguacuaagguuucauc

SEQ ID NO: 1352912 - RNA, 19 nt, Homo sapiens
  misc_RNA (1)...(19): siRNA sense strand
gccagaagaagaauaguac

SEQ ID NO: 1352913 - RNA, 19 nt, Homo sapiens
  misc_RNA (1)...(19): siRNA sense strand
accauaacccuucuucuug

SEQ ID NO: 1352914 - RNA, 19 nt, Homo sapiens
  misc_RNA (1)...(19): siRNA sense strand
cgaacugugcgauaacuuc

SEQ ID NO: 1352915 - RNA, 19 nt, Homo sapiens
  misc_RNA (1)...(19): siRNA sense strand
ucaggcuccuccacaaauc

SEQ ID NO: 1352916 - RNA, 19 nt, Homo sapiens
  misc_RNA (1)...(19): siRNA sense strand
uguguuggauggucagcaa

SEQ ID NO: 1352917 - RNA, 19 nt, Homo sapiens
  misc_RNA (1)...(19): siRNA sense strand
acaagcaauacaaguacua

SEQ ID NO: 1352918 - RNA, 19 nt, Homo sapiens
  misc_RNA (1)...(19): siRNA sense strand
agaauaguacagcccauga

SEQ ID NO: 1352919 - RNA, 19 nt, Homo sapiens
  misc_RNA (1)...(19): siRNA sense strand
gucagaucaugaagaacuu

SEQ ID NO: 1352920 - RNA, 19 nt, Homo sapiens
  misc_RNA (1)...(19): siRNA sense strand
ggucuucgccaagcagguu

SEQ ID NO: 1352921 - RNA, 19 nt, Homo sapiens
  misc_RNA (1)...(19): siRNA sense strand
ugccagaagaagaauagua

SEQ ID NO: 1352922 - RNA, 19 nt, Homo sapiens
  misc_RNA (1)...(19): siRNA sense strand
acgaugaugauccggauaa

SEQ ID NO: 1352923 - RNA, 19 nt, Homo sapiens
  misc_RNA (1)...(19): siRNA sense strand
auacaaguacuaagguuuc

SEQ ID NO: 1352924 - RNA, 19 nt, Homo sapiens
  misc_RNA (1)...(19): siRNA sense strand
agcaacaaauaucaugaga

SEQ ID NO: 1352925 - RNA, 19 nt, Homo sapiens
  misc_RNA (1)...(19): siRNA sense strand
gcggagacaacagcaguga

SEQ ID NO: 1352926 - RNA, 19 nt, Homo sapiens
  misc_RNA (1)...(19): siRNA sense strand
gguuucaucuuuuggaguu

SEQ ID NO: 1352927 - RNA, 19 nt, Homo sapiens
  misc_RNA (1)...(19): siRNA sense strand
caaggagcagcauauaguc

SEQ ID NO: 1352928 - RNA, 19 nt, Homo sapiens
  misc_RNA (1)...(19): siRNA sense strand
gccaaggagcagcauauag

SEQ ID NO: 1352929 - RNA, 19 nt, Homo sapiens
  misc_RNA (1)...(19): siRNA sense strand
cgauacauuagcuguuuga

SEQ ID NO: 1352930 - RNA, 19 nt, Homo sapiens
  misc_RNA (1)...(19): siRNA sense strand
ccgauacauuagcuguuug

SEQ ID NO: 1352931 - RNA, 19 nt, Homo sapiens
  misc_RNA (1)...(19): siRNA sense strand
uggacaauuugaugauaca

SEQ ID NO: 1352932 - RNA, 19 nt, Homo sapiens
  misc_RNA (1)...(19): siRNA sense strand
gaaaagguccacgaacugu

SEQ ID NO: 1352933 - RNA, 19 nt, Homo sapiens
  misc_RNA (1)...(19): siRNA sense strand
gcagcuccaagucagauca

SEQ ID NO: 1352934 - RNA, 19 nt, Homo sapiens
  misc_RNA (1)...(19): siRNA sense strand
auuaaugccagaagaagaa

SEQ ID NO: 1352935 - RNA, 19 nt, Homo sapiens
  misc_RNA (1)...(19): siRNA sense strand
uagaaaagguccacgaacu

SEQ ID NO: 1352936 - RNA, 19 nt, Homo sapiens
  misc_RNA (1)...(19): siRNA sense strand
augaugauccggauaagga

SEQ ID NO: 1352937 - RNA, 19 nt, Homo sapiens
  misc_RNA (1)...(19): siRNA sense strand
guacuaagguuucaucuuu

SEQ ID NO: 1352938 - RNA, 19 nt, Homo sapiens
  misc_RNA (1)...(19): siRNA sense strand
caagucagaucaugaagaa

SEQ ID NO: 1352939 - RNA, 19 nt, Homo sapiens
  misc_RNA (1)...(19): siRNA sense strand
gauacaagcaauacaagua

SEQ ID NO: 1352940 - RNA, 19 nt, Homo sapiens
  misc_RNA (1)...(19): siRNA sense strand
caaaguagcaacaaauauc

SEQ ID NO: 1352941 - RNA, 19 nt, Homo sapiens
  misc_RNA (1)...(19): siRNA sense strand
gaccauaacccuucuucuu

SEQ ID NO: 1352942 - RNA, 19 nt, Homo sapiens
  misc_RNA (1)...(19): siRNA sense strand
ggacaaggacgcgaucuau

SEQ ID NO: 1352943 - RNA, 19 nt, Homo sapiens
  misc_RNA (1)...(19): siRNA sense strand
gcuggacaauuugaugaua

SEQ ID NO: 1352944 - RNA, 19 nt, Homo sapiens
  misc_RNA (1)...(19): siRNA sense strand
caauacaaguacuaagguu

SEQ ID NO: 1352945 - RNA, 19 nt, Homo sapiens
  misc_RNA (1)...(19): siRNA sense strand
ccaucgaccucgucauuga

SEQ ID NO: 1352946 - RNA, 19 nt, Homo sapiens
  misc_RNA (1)...(19): siRNA sense strand
gaugauacaagcaauacaa

SEQ ID NO: 1352947 - RNA, 19 nt, Homo sapiens
  misc_RNA (1)...(19): siRNA sense strand
guacaggugacgaugauga

SEQ ID NO: 1352948 - RNA, 19 nt, Homo sapiens
  misc_RNA (1)...(19): siRNA sense strand
ccaaggagcagcauauagu

SEQ ID NO: 1352949 - RNA, 19 nt, Homo sapiens
  misc_RNA (1)...(19): siRNA sense strand
agacaacaguguagcuuca

SEQ ID NO: 1352950 - RNA, 19 nt, Homo sapiens
  misc_RNA (1)...(19): siRNA sense strand
gagcuggacaauuugauga

SEQ ID NO: 1352951 - RNA, 19 nt, Homo sapiens
  misc_RNA (1)...(19): siRNA sense strand
gagccaaggagcagcauau

SEQ ID NO: 1352952 - RNA, 19 nt, Homo sapiens
  misc_RNA (1)...(19): siRNA sense strand
gcccaucgaccucgucauu

SEQ ID NO: 1352953 - RNA, 19 nt, Homo sapiens
  misc_RNA (1)...(19): siRNA sense strand
ccaaaguagcaacaaauau

SEQ ID NO: 1352954 - RNA, 19 nt, Homo sapiens
  misc_RNA (1)...(19): siRNA sense strand
gcucuggucuuugagaagu

SEQ ID NO: 1352955 - RNA, 19 nt, Homo sapiens
  misc_RNA (1)...(19): siRNA sense strand
uaguacagcccaugauuga

SEQ ID NO: 1352956 - RNA, 19 nt, Homo sapiens
  misc_RNA (1)...(19): siRNA sense strand
caaaucucgcugaccauaa

SEQ ID NO: 1352957 - RNA, 19 nt, Homo sapiens
  misc_RNA (1)...(19): siRNA sense strand
gcaauacaaguacuaaggu

SEQ ID NO: 1352958 - RNA, 19 nt, Homo sapiens
  misc_RNA (1)...(19): siRNA sense strand
cccaaaguagcaacaaaua

SEQ ID NO: 1352959 - RNA, 19 nt, Homo sapiens
  misc_RNA (1)...(19): siRNA sense strand
caagcaauacaaguacuaa

SEQ ID NO: 1352960 - RNA, 19 nt, Homo sapiens
  misc_RNA (1)...(19): siRNA sense strand
acaaauaucaugagagcau

SEQ ID NO: 1352961 - RNA, 19 nt, Homo sapiens
  misc_RNA (1)...(19): siRNA sense strand
acaaaucucgcugaccaua

SEQ ID NO: 1352962 - RNA, 19 nt, Homo sapiens
  misc_RNA (1)...(19): siRNA sense strand
gaacugugcgauaacuucu

SEQ ID NO: 1352963 - RNA, 19 nt, Homo sapiens
  misc_RNA (1)...(19): siRNA sense strand
gacaaggacgcgaucuaug

SEQ ID NO: 1352964 - RNA, 19 nt, Homo sapiens
  misc_RNA (1)...(19): siRNA sense strand
uccacgaacugugcgauaa

SEQ ID NO: 1352965 - RNA, 19 nt, Homo sapiens
  misc_RNA (1)...(19): siRNA sense strand
gaauaguacagcccaugau

SEQ ID NO: 1352966 - RNA, 19 nt, Homo sapiens
  misc_RNA (1)...(19): siRNA sense strand
ccaagucagaucaugaaga

SEQ ID NO: 1352967 - RNA, 19 nt, Homo sapiens
  misc_RNA (1)...(19): siRNA sense strand
gcuccaagucagaucauga

SEQ ID NO: 1352968 - RNA, 19 nt, Homo sapiens
  misc_RNA (1)...(19): siRNA sense strand
gggacaaggacgcgaucua

SEQ ID NO: 1352969 - RNA, 19 nt, Homo sapiens
  misc_RNA (1)...(19): siRNA sense strand
guagcaacaaauaucauga

SEQ ID NO: 1352970 - RNA, 19 nt, Homo sapiens
  misc_RNA (1)...(19): siRNA sense strand
accgauacauuagcuguuu

SEQ ID NO: 1352971 - RNA, 19 nt, Homo sapiens
  misc_RNA (1)...(19): siRNA sense strand
guuuauuaaugccagaaga

SEQ ID NO: 1352972 - RNA, 19 nt, Homo sapiens
  misc_RNA (1)...(19): siRNA sense strand
gcaaggggaugguuuagac

SEQ ID NO: 1352973 - RNA, 19 nt, Homo sapiens
  misc_RNA (1)...(19): siRNA sense strand
uaacuucugccaccgauac

SEQ ID NO: 1352974 - RNA, 19 nt, Homo sapiens
  misc_RNA (1)...(19): siRNA sense strand
aauaguacagcccaugauu

SEQ ID NO: 1352975 - RNA, 19 nt, Homo sapiens
  misc_RNA (1)...(19): siRNA sense strand
aaaucucgcugaccauaac

SEQ ID NO: 1352976 - RNA, 19 nt, Homo sapiens
  misc_RNA (1)...(19): siRNA sense strand
acaaggacgcgaucuaugg

SEQ ID NO: 1352977 - RNA, 19 nt, Homo sapiens
  misc_RNA (1)...(19): siRNA sense strand
caaguacuaagguuucauc

SEQ ID NO: 1352978 - RNA, 19 nt, Homo sapiens
  misc_RNA (1)...(19): siRNA sense strand
gccagaagaagaauaguac

SEQ ID NO: 1352979 - RNA, 19 nt, Homo sapiens
  misc_RNA (1)...(19): siRNA sense strand
accauaacccuucuucuug

SEQ ID NO: 1352980 - RNA, 19 nt, Homo sapiens
  misc_RNA (1)...(19): siRNA sense strand
cgaacugugcgauaacuuc

SEQ ID NO: 1352981 - RNA, 19 nt, Homo sapiens
  misc_RNA (1)...(19): siRNA sense strand
ucaggcuccuccacaaauc

SEQ ID NO: 1352982 - RNA, 19 nt, Homo sapiens
  misc_RNA (1)...(19): siRNA sense strand
uguguuggauggucagcaa

SEQ ID NO: 1352983 - RNA, 19 nt, Homo sapiens
  misc_RNA (1)...(19): siRNA sense strand
acaagcaauacaaguacua

SEQ ID NO: 1352984 - RNA, 19 nt, Homo sapiens
  misc_RNA (1)...(19): siRNA sense strand
agaauaguacagcccauga

SEQ ID NO: 1352985 - RNA, 19 nt, Homo sapiens
  misc_RNA (1)...(19): siRNA sense strand
gucagaucaugaagaacuu

SEQ ID NO: 1352986 - RNA, 19 nt, Homo sapiens
  misc_RNA (1)...(19): siRNA sense strand
ggucuucgccaagcagguu

SEQ ID NO: 1352987 - RNA, 19 nt, Homo sapiens
  misc_RNA (1)...(19): siRNA sense strand
ugccagaagaagaauagua

SEQ ID NO: 1352988 - RNA, 19 nt, Homo sapiens
  misc_RNA (1)...(19): siRNA sense strand
acgaugaugauccggauaa

SEQ ID NO: 1352989 - RNA, 19 nt, Homo sapiens
  misc_RNA (1)...(19): siRNA sense strand
auacaaguacuaagguuuc

SEQ ID NO: 1352990 - RNA, 19 nt, Homo sapiens
  misc_RNA (1)...(19): siRNA sense strand
agcaacaaauaucaugaga

SEQ ID NO: 1352991 - RNA, 19 nt, Homo sapiens
  misc_RNA (1)...(19): siRNA sense strand
gcggagacaacagcaguga

SEQ ID NO: 1352992 - RNA, 19 nt, Homo sapiens
  misc_RNA (1)...(19): siRNA sense strand
gguuucaucuuuuggaguu

SEQ ID NO: 1352993 - RNA, 19 nt, Homo sapiens
  misc_RNA (1)...(19): siRNA sense strand
caaggagcagcauauaguc

SEQ ID NO: 1352994 - RNA, 19 nt, Homo sapiens
  misc_RNA (1)...(19): siRNA sense strand
gccaaggagcagcauauag

SEQ ID NO: 1352995 - RNA, 19 nt, Homo sapiens
  misc_RNA (1)...(19): siRNA sense strand
uggacaauuugaugauaca

SEQ ID NO: 1352996 - RNA, 19 nt, Homo sapiens
  misc_RNA (1)...(19): siRNA sense strand
cgauacauuagcuguuuga

SEQ ID NO: 1352997 - RNA, 19 nt, Homo sapiens
  misc_RNA (1)...(19): siRNA sense strand
ccgauacauuagcuguuug

SEQ ID NO: 1352998 - RNA, 19 nt, Homo sapiens
  misc_RNA (1)...(19): siRNA sense strand
gaaaagguccacgaacugu

SEQ ID NO: 1352999 - RNA, 19 nt, Homo sapiens
  misc_RNA (1)...(19): siRNA sense strand
gcagcuccaagucagauca

SEQ ID NO: 1353000 - RNA, 19 nt, Homo sapiens
  misc_RNA (1)...(19): siRNA sense strand
auuaaugccagaagaagaa

SEQ ID NO: 1353001 - RNA, 19 nt, Homo sapiens
  misc_RNA (1)...(19): siRNA sense strand
uagaaaagguccacgaacu

SEQ ID NO: 1353002 - RNA, 19 nt, Homo sapiens
  misc_RNA (1)...(19): siRNA sense strand
augaugauccggauaagga

SEQ ID NO: 1353003 - RNA, 19 nt, Homo sapiens
  misc_RNA (1)...(19): siRNA sense strand
guacuaagguuucaucuuu

SEQ ID NO: 1353004 - RNA, 19 nt, Homo sapiens
  misc_RNA (1)...(19): siRNA sense strand
caagucagaucaugaagaa

SEQ ID NO: 1353005 - RNA, 19 nt, Homo sapiens
  misc_RNA (1)...(19): siRNA sense strand
gauacaagcaauacaagua

SEQ ID NO: 1353006 - RNA, 19 nt, Homo sapiens
  misc_RNA (1)...(19): siRNA sense strand
caaaguagcaacaaauauc

SEQ ID NO: 1353007 - RNA, 19 nt, Homo sapiens
  misc_RNA (1)...(19): siRNA sense strand
gaccauaacccuucuucuu

SEQ ID NO: 1353008 - RNA, 19 nt, Homo sapiens
  misc_RNA (1)...(19): siRNA sense strand
gcuggacaauuugaugaua

SEQ ID NO: 1353009 - RNA, 19 nt, Homo sapiens
  misc_RNA (1)...(19): siRNA sense strand
caauacaaguacuaagguu

SEQ ID NO: 1353010 - RNA, 19 nt, Homo sapiens
  misc_RNA (1)...(19): siRNA sense strand
ccaucgaccucgucauuga

SEQ ID NO: 1353011 - RNA, 19 nt, Homo sapiens
  misc_RNA (1)...(19): siRNA sense strand
gaugauacaagcaauacaa

SEQ ID NO: 1353012 - RNA, 19 nt, Homo sapiens
  misc_RNA (1)...(19): siRNA sense strand
guacaggugacgaugauga

SEQ ID NO: 1353013 - RNA, 19 nt, Homo sapiens
  misc_RNA (1)...(19): siRNA sense strand
ccaaggagcagcauauagu

SEQ ID NO: 1353014 - RNA, 19 nt, Homo sapiens
  misc_RNA (1)...(19): siRNA sense strand
agacaacaguguagcuuca

SEQ ID NO: 1353015 - RNA, 19 nt, Homo sapiens
  misc_RNA (1)...(19): siRNA sense strand
gagcuggacaauuugauga

SEQ ID NO: 1353016 - RNA, 19 nt, Homo sapiens
  misc_RNA (1)...(19): siRNA sense strand
gagccaaggagcagcauau

SEQ ID NO: 1353017 - RNA, 19 nt, Homo sapiens
  misc_RNA (1)...(19): siRNA sense strand
gcccaucgaccucgucauu

SEQ ID NO: 1353018 - RNA, 19 nt, Homo sapiens
  misc_RNA (1)...(19): siRNA sense strand
ccaaaguagcaacaaauau

SEQ ID NO: 1353019 - RNA, 19 nt, Homo sapiens
  misc_RNA (1)...(19): siRNA sense strand
gcaauacaaguacuaaggu

SEQ ID NO: 1353020 - RNA, 19 nt, Homo sapiens
  misc_RNA (1)...(19): siRNA sense strand
uaguacagcccaugauuga

SEQ ID NO: 1353021 - RNA, 19 nt, Homo sapiens
  misc_RNA (1)...(19): siRNA sense strand
caaaucucgcugaccauaa

SEQ ID NO: 1353022 - RNA, 19 nt, Homo sapiens
  misc_RNA (1)...(19): siRNA sense strand
gcucuggucuuugagaagu

SEQ ID NO: 1353023 - RNA, 19 nt, Homo sapiens
  misc_RNA (1)...(19): siRNA sense strand
cccaaaguagcaacaaaua

SEQ ID NO: 1353024 - RNA, 19 nt, Homo sapiens
  misc_RNA (1)...(19): siRNA sense strand
caagcaauacaaguacuaa

SEQ ID NO: 1353025 - RNA, 19 nt, Homo sapiens
  misc_RNA (1)...(19): siRNA sense strand
acaaauaucaugagagcau

SEQ ID NO: 1353026 - RNA, 19 nt, Homo sapiens
  misc_RNA (1)...(19): siRNA sense strand
acaaaucucgcugaccaua

SEQ ID NO: 1353027 - RNA, 19 nt, Homo sapiens
  misc_RNA (1)...(19): siRNA sense strand
gaacugugcgauaacuucu

SEQ ID NO: 1353028 - RNA, 19 nt, Homo sapiens
  misc_RNA (1)...(19): siRNA sense strand
uccacgaacugugcgauaa

SEQ ID NO: 1353029 - RNA, 19 nt, Homo sapiens
  misc_RNA (1)...(19): siRNA sense strand
gaauaguacagcccaugau

SEQ ID NO: 1353030 - RNA, 19 nt, Homo sapiens
  misc_RNA (1)...(19): siRNA sense strand
ccaagucagaucaugaaga

SEQ ID NO: 1353031 - RNA, 19 nt, Homo sapiens
  misc_RNA (1)...(19): siRNA sense strand
gcuccaagucagaucauga

SEQ ID NO: 1353032 - RNA, 19 nt, Homo sapiens
  misc_RNA (1)...(19): siRNA sense strand
guagcaacaaauaucauga

SEQ ID NO: 1353033 - RNA, 19 nt, Homo sapiens
  misc_RNA (1)...(19): siRNA sense strand
accgauacauuagcuguuu

SEQ ID NO: 1353034 - RNA, 19 nt, Homo sapiens
  misc_RNA (1)...(19): siRNA sense strand
guuuauuaaugccagaaga

SEQ ID NO: 1353035 - RNA, 19 nt, Homo sapiens
  misc_RNA (1)...(19): siRNA sense strand
gcaaggggaugguuuagac

SEQ ID NO: 1353036 - RNA, 19 nt, Homo sapiens
  misc_RNA (1)...(19): siRNA sense strand
uaacuucugccaccgauac

SEQ ID NO: 1353037 - RNA, 19 nt, Homo sapiens
  misc_RNA (1)...(19): siRNA sense strand
aauaguacagcccaugauu

SEQ ID NO: 1353038 - RNA, 19 nt, Homo sapiens
  misc_RNA (1)...(19): siRNA sense strand
aaaucucgcugaccauaac

SEQ ID NO: 1353039 - RNA, 19 nt, Homo sapiens
  misc_RNA (1)...(19): siRNA sense strand
caaguacuaagguuucauc

SEQ ID NO: 1353040 - RNA, 19 nt, Homo sapiens
  misc_RNA (1)...(19): siRNA sense strand
gccagaagaagaauaguac

SEQ ID NO: 1353041 - RNA, 19 nt, Homo sapiens
  misc_RNA (1)...(19): siRNA sense strand
accauaacccuucuucuug

SEQ ID NO: 1353042 - RNA, 19 nt, Homo sapiens
  misc_RNA (1)...(19): siRNA sense strand
cgaacugugcgauaacuuc

SEQ ID NO: 1353043 - RNA, 19 nt, Homo sapiens
  misc_RNA (1)...(19): siRNA sense strand
ucaggcuccuccacaaauc

SEQ ID NO: 1353044 - RNA, 19 nt, Homo sapiens
  misc_RNA (1)...(19): siRNA sense strand
uguguuggauggucagcaa

SEQ ID NO: 1353045 - RNA, 19 nt, Homo sapiens
  misc_RNA (1)...(19): siRNA sense strand
gucagaucaugaagaacuu

SEQ ID NO: 1353046 - RNA, 19 nt, Homo sapiens
  misc_RNA (1)...(19): siRNA sense strand
agaauaguacagcccauga

SEQ ID NO: 1353047 - RNA, 19 nt, Homo sapiens
  misc_RNA (1)...(19): siRNA sense strand
acaagcaauacaaguacua

SEQ ID NO: 1353048 - RNA, 19 nt, Homo sapiens
  misc_RNA (1)...(19): siRNA sense strand
acgaugaugauccggauaa

SEQ ID NO: 1353049 - RNA, 19 nt, Homo sapiens
  misc_RNA (1)...(19): siRNA sense strand
ggucuucgccaagcagguu

SEQ ID NO: 1353050 - RNA, 19 nt, Homo sapiens
  misc_RNA (1)...(19): siRNA sense strand
ugccagaagaagaauagua

SEQ ID NO: 1353051 - RNA, 19 nt, Homo sapiens
  misc_RNA (1)...(19): siRNA sense strand
auacaaguacuaagguuuc

SEQ ID NO: 1353052 - RNA, 19 nt, Homo sapiens
  misc_RNA (1)...(19): siRNA sense strand
agcaacaaauaucaugaga

SEQ ID NO: 1353053 - RNA, 19 nt, Homo sapiens
  misc_RNA (1)...(19): siRNA sense strand
gcggagacaacagcaguga

SEQ ID NO: 1353054 - RNA, 19 nt, Homo sapiens
  misc_RNA (1)...(19): siRNA sense strand
ccgauacauuagcuguuug

SEQ ID NO: 1353055 - RNA, 19 nt, Homo sapiens
  misc_RNA (1)...(19): siRNA sense strand
caaggagcagcauauaguc

SEQ ID NO: 1353056 - RNA, 19 nt, Homo sapiens
  misc_RNA (1)...(19): siRNA sense strand
gguuucaucuuuuggaguu

SEQ ID NO: 1353057 - RNA, 19 nt, Homo sapiens
  misc_RNA (1)...(19): siRNA sense strand
gccaaggagcagcauauag

SEQ ID NO: 1353058 - RNA, 19 nt, Homo sapiens
  misc_RNA (1)...(19): siRNA sense strand
uggacaauuugaugauaca

SEQ ID NO: 1353059 - RNA, 19 nt, Homo sapiens
  misc_RNA (1)...(19): siRNA sense strand
gaaaagguccacgaacugu

SEQ ID NO: 1353060 - RNA, 19 nt, Homo sapiens
  misc_RNA (1)...(19): siRNA sense strand
cgauacauuagcuguuuga

SEQ ID NO: 1353061 - RNA, 19 nt, Homo sapiens
  misc_RNA (1)...(19): siRNA sense strand
gcagcuccaagucagauca

SEQ ID NO: 1353062 - RNA, 19 nt, Homo sapiens
  misc_RNA (1)...(19): siRNA sense strand
auuaaugccagaagaagaa

SEQ ID NO: 1353063 - RNA, 19 nt, Homo sapiens
  misc_RNA (1)...(19): siRNA sense strand
augaugauccggauaagga

SEQ ID NO: 1353064 - RNA, 19 nt, Homo sapiens
  misc_RNA (1)...(19): siRNA sense strand
uagaaaagguccacgaacu

SEQ ID NO: 1353065 - RNA, 19 nt, Homo sapiens
  misc_RNA (1)...(19): siRNA sense strand
guacuaagguuucaucuuu

SEQ ID NO: 1353066 - RNA, 19 nt, Homo sapiens
  misc_RNA (1)...(19): siRNA sense strand
caagucagaucaugaagaa

SEQ ID NO: 1353067 - RNA, 19 nt, Homo sapiens
  misc_RNA (1)...(19): siRNA sense strand
gauacaagcaauacaagua

SEQ ID NO: 1353068 - RNA, 19 nt, Homo sapiens
  misc_RNA (1)...(19): siRNA sense strand
caaaguagcaacaaauauc

SEQ ID NO: 1353069 - RNA, 19 nt, Homo sapiens
  misc_RNA (1)...(19): siRNA sense strand
gaccauaacccuucuucuu

SEQ ID NO: 1353070 - RNA, 19 nt, Homo sapiens
  misc_RNA (1)...(19): siRNA sense strand
ggacaaggacgcgaucuau

SEQ ID NO: 1353071 - RNA, 19 nt, Homo sapiens
  misc_RNA (1)...(19): siRNA sense strand
gcuggacaauuugaugaua

SEQ ID NO: 1353072 - RNA, 19 nt, Homo sapiens
  misc_RNA (1)...(19): siRNA sense strand
caauacaaguacuaagguu

SEQ ID NO: 1353073 - RNA, 19 nt, Homo sapiens
  misc_RNA (1)...(19): siRNA sense strand
ccaucgaccucgucauuga

SEQ ID NO: 1353074 - RNA, 19 nt, Homo sapiens
  misc_RNA (1)...(19): siRNA sense strand
gaugauacaagcaauacaa

SEQ ID NO: 1353075 - RNA, 19 nt, Homo sapiens
  misc_RNA (1)...(19): siRNA sense strand
guacaggugacgaugauga

SEQ ID NO: 1353076 - RNA, 19 nt, Homo sapiens
  misc_RNA (1)...(19): siRNA sense strand
ccaaggagcagcauauagu

SEQ ID NO: 1353077 - RNA, 19 nt, Homo sapiens
  misc_RNA (1)...(19): siRNA sense strand
agacaacaguguagcuuca

SEQ ID NO: 1353078 - RNA, 19 nt, Homo sapiens
  misc_RNA (1)...(19): siRNA sense strand
gagcuggacaauuugauga

SEQ ID NO: 1353079 - RNA, 19 nt, Homo sapiens
  misc_RNA (1)...(19): siRNA sense strand
gagccaaggagcagcauau

SEQ ID NO: 1353080 - RNA, 19 nt, Homo sapiens
  misc_RNA (1)...(19): siRNA sense strand
gcccaucgaccucgucauu

SEQ ID NO: 1353081 - RNA, 19 nt, Homo sapiens
  misc_RNA (1)...(19): siRNA sense strand
ccaaaguagcaacaaauau

SEQ ID NO: 1353082 - RNA, 19 nt, Homo sapiens
  misc_RNA (1)...(19): siRNA sense strand
gcucuggucuuugagaagu

SEQ ID NO: 1353083 - RNA, 19 nt, Homo sapiens
  misc_RNA (1)...(19): siRNA sense strand
uaguacagcccaugauuga

SEQ ID NO: 1353084 - RNA, 19 nt, Homo sapiens
  misc_RNA (1)...(19): siRNA sense strand
caaaucucgcugaccauaa

SEQ ID NO: 1353085 - RNA, 19 nt, Homo sapiens
  misc_RNA (1)...(19): siRNA sense strand
gcaauacaaguacuaaggu

SEQ ID NO: 1353086 - RNA, 19 nt, Homo sapiens
  misc_RNA (1)...(19): siRNA sense strand
cccaaaguagcaacaaaua

SEQ ID NO: 1353087 - RNA, 19 nt, Homo sapiens
  misc_RNA (1)...(19): siRNA sense strand
caagcaauacaaguacuaa

SEQ ID NO: 1353088 - RNA, 19 nt, Homo sapiens
  misc_RNA (1)...(19): siRNA sense strand
acaaauaucaugagagcau

SEQ ID NO: 1353089 - RNA, 19 nt, Homo sapiens
  misc_RNA (1)...(19): siRNA sense strand
acaaaucucgcugaccaua

SEQ ID NO: 1353090 - RNA, 19 nt, Homo sapiens
  misc_RNA (1)...(19): siRNA sense strand
gaacugugcgauaacuucu

SEQ ID NO: 1353091 - RNA, 19 nt, Homo sapiens
  misc_RNA (1)...(19): siRNA sense strand
gacaaggacgcgaucuaug

SEQ ID NO: 1353092 - RNA, 19 nt, Homo sapiens
  misc_RNA (1)...(19): siRNA sense strand
uccacgaacugugcgauaa

SEQ ID NO: 1353093 - RNA, 19 nt, Homo sapiens
  misc_RNA (1)...(19): siRNA sense strand
gaauaguacagcccaugau

SEQ ID NO: 1353094 - RNA, 19 nt, Homo sapiens
  misc_RNA (1)...(19): siRNA sense strand
ccaagucagaucaugaaga

SEQ ID NO: 1353095 - RNA, 19 nt, Homo sapiens
  misc_RNA (1)...(19): siRNA sense strand
gcuccaagucagaucauga

SEQ ID NO: 1353096 - RNA, 19 nt, Homo sapiens
  misc_RNA (1)...(19): siRNA sense strand
gggacaaggacgcgaucua

SEQ ID NO: 1353097 - RNA, 19 nt, Homo sapiens
  misc_RNA (1)...(19): siRNA sense strand
guagcaacaaauaucauga

SEQ ID NO: 1353098 - RNA, 19 nt, Homo sapiens
  misc_RNA (1)...(19): siRNA sense strand
accgauacauuagcuguuu

SEQ ID NO: 1353099 - RNA, 19 nt, Homo sapiens
  misc_RNA (1)...(19): siRNA sense strand
guuuauuaaugccagaaga

SEQ ID NO: 1353100 - RNA, 19 nt, Homo sapiens
  misc_RNA (1)...(19): siRNA sense strand
gcaaggggaugguuuagac

SEQ ID NO: 1353101 - RNA, 19 nt, Homo sapiens
  misc_RNA (1)...(19): siRNA sense strand
uaacuucugccaccgauac

SEQ ID NO: 1353102 - RNA, 19 nt, Homo sapiens
  misc_RNA (1)...(19): siRNA sense strand
aauaguacagcccaugauu

SEQ ID NO: 1353103 - RNA, 19 nt, Homo sapiens
  misc_RNA (1)...(19): siRNA sense strand
aaaucucgcugaccauaac

SEQ ID NO: 1353104 - RNA, 19 nt, Homo sapiens
  misc_RNA (1)...(19): siRNA sense strand
acaaggacgcgaucuaugg

SEQ ID NO: 1353105 - RNA, 19 nt, Homo sapiens
  misc_RNA (1)...(19): siRNA sense strand
caaguacuaagguuucauc

SEQ ID NO: 1353106 - RNA, 19 nt, Homo sapiens
  misc_RNA (1)...(19): siRNA sense strand
gccagaagaagaauaguac

SEQ ID NO: 1353107 - RNA, 19 nt, Homo sapiens
  misc_RNA (1)...(19): siRNA sense strand
accauaacccuucuucuug

SEQ ID NO: 1353108 - RNA, 19 nt, Homo sapiens
  misc_RNA (1)...(19): siRNA sense strand
cgaacugugcgauaacuuc

SEQ ID NO: 1353109 - RNA, 19 nt, Homo sapiens
  misc_RNA (1)...(19): siRNA sense strand
ucaggcuccuccacaaauc

SEQ ID NO: 1353110 - RNA, 19 nt, Homo sapiens
  misc_RNA (1)...(19): siRNA sense strand
uguguuggauggucagcaa

SEQ ID NO: 1353111 - RNA, 19 nt, Homo sapiens
  misc_RNA (1)...(19): siRNA sense strand
acaagcaauacaaguacua

SEQ ID NO: 1353112 - RNA, 19 nt, Homo sapiens
  misc_RNA (1)...(19): siRNA sense strand
agaauaguacagcccauga

SEQ ID NO: 1353113 - RNA, 19 nt, Homo sapiens
  misc_RNA (1)...(19): siRNA sense strand
gucagaucaugaagaacuu

SEQ ID NO: 1353114 - RNA, 19 nt, Homo sapiens
  misc_RNA (1)...(19): siRNA sense strand
ggucuucgccaagcagguu

SEQ ID NO: 1353115 - RNA, 19 nt, Homo sapiens
  misc_RNA (1)...(19): siRNA sense strand
ugccagaagaagaauagua

SEQ ID NO: 1353116 - RNA, 19 nt, Homo sapiens
  misc_RNA (1)...(19): siRNA sense strand
acgaugaugauccggauaa

SEQ ID NO: 1353117 - RNA, 19 nt, Homo sapiens
  misc_RNA (1)...(19): siRNA sense strand
auacaaguacuaagguuuc

SEQ ID NO: 1353118 - RNA, 19 nt, Homo sapiens
  misc_RNA (1)...(19): siRNA sense strand
agcaacaaauaucaugaga

SEQ ID NO: 1353119 - RNA, 19 nt, Homo sapiens
  misc_RNA (1)...(19): siRNA sense strand
gcggagacaacagcaguga

SEQ ID NO: 1353120 - RNA, 19 nt, Homo sapiens
  misc_RNA (1)...(19): siRNA sense strand
gguuucaucuuuuggaguu

SEQ ID NO: 1353121 - RNA, 19 nt, Homo sapiens
  misc_RNA (1)...(19): siRNA sense strand
caaggagcagcauauaguc

SEQ ID NO: 1353122 - RNA, 19 nt, Homo sapiens
  misc_RNA (1)...(19): siRNA sense strand
gccaaggagcagcauauag

SEQ ID NO: 1353123 - RNA, 19 nt, Homo sapiens
  misc_RNA (1)...(19): siRNA sense strand
uggacaauuugaugauaca

SEQ ID NO: 1353124 - RNA, 19 nt, Homo sapiens
  misc_RNA (1)...(19): siRNA sense strand
cgauacauuagcuguuuga

SEQ ID NO: 1353125 - RNA, 19 nt, Homo sapiens
  misc_RNA (1)...(19): siRNA sense strand
ccgauacauuagcuguuug

SEQ ID NO: 1353126 - RNA, 19 nt, Homo sapiens
  misc_RNA (1)...(19): siRNA sense strand
gaaaagguccacgaacugu

SEQ ID NO: 1353127 - RNA, 19 nt, Homo sapiens
  misc_RNA (1)...(19): siRNA sense strand
gcagcuccaagucagauca

SEQ ID NO: 1353128 - RNA, 19 nt, Homo sapiens
  misc_RNA (1)...(19): siRNA sense strand
auuaaugccagaagaagaa

SEQ ID NO: 1353129 - RNA, 19 nt, Homo sapiens
  misc_RNA (1)...(19): siRNA sense strand
uagaaaagguccacgaacu

SEQ ID NO: 1353130 - RNA, 19 nt, Homo sapiens
  misc_RNA (1)...(19): siRNA sense strand
augaugauccggauaagga

SEQ ID NO: 1353131 - RNA, 19 nt, Homo sapiens
  misc_RNA (1)...(19): siRNA sense strand
guacuaagguuucaucuuu

SEQ ID NO: 1353132 - RNA, 19 nt, Homo sapiens
  misc_RNA (1)...(19): siRNA sense strand
caagucagaucaugaagaa

SEQ ID NO: 1353133 - RNA, 19 nt, Homo sapiens
  misc_RNA (1)...(19): siRNA sense strand
gauacaagcaauacaagua

SEQ ID NO: 1353134 - RNA, 19 nt, Homo sapiens
  misc_RNA (1)...(19): siRNA sense strand
caaaguagcaacaaauauc

SEQ ID NO: 1353135 - RNA, 19 nt, Homo sapiens
  misc_RNA (1)...(19): siRNA sense strand
gaccauaacccuucuucuu

SEQ ID NO: 1353136 - RNA, 19 nt, Homo sapiens
  misc_RNA (1)...(19): siRNA sense strand
ggacaaggacgcgaucuau

SEQ ID NO: 1353137 - RNA, 19 nt, Homo sapiens
  misc_RNA (1)...(19): siRNA sense strand
gcuggacaauuugaugaua

SEQ ID NO: 1353138 - RNA, 19 nt, Homo sapiens
  misc_RNA (1)...(19): siRNA sense strand
caauacaaguacuaagguu

SEQ ID NO: 1353139 - RNA, 19 nt, Homo sapiens
  misc_RNA (1)...(19): siRNA sense strand
ccaucgaccucgucauuga

SEQ ID NO: 1353140 - RNA, 19 nt, Homo sapiens
  misc_RNA (1)...(19): siRNA sense strand
gaugauacaagcaauacaa

SEQ ID NO: 1353141 - RNA, 19 nt, Homo sapiens
  misc_RNA (1)...(19): siRNA sense strand
guacaggugacgaugauga

SEQ ID NO: 1353142 - RNA, 19 nt, Homo sapiens
  misc_RNA (1)...(19): siRNA sense strand
acgaugagcugccccauua

SEQ ID NO: 1353143 - RNA, 19 nt, Homo sapiens
  misc_RNA (1)...(19): siRNA sense strand
agacaacaguguagcuuca

SEQ ID NO: 1353144 - RNA, 19 nt, Homo sapiens
  misc_RNA (1)...(19): siRNA sense strand
gagcuggacaauuugauga

SEQ ID NO: 1353145 - RNA, 19 nt, Homo sapiens
  misc_RNA (1)...(19): siRNA sense strand
gcccaucgaccucgucauu

SEQ ID NO: 1353146 - RNA, 19 nt, Homo sapiens
  misc_RNA (1)...(19): siRNA sense strand
ccaaaguagcaacaaauau

SEQ ID NO: 1353147 - RNA, 19 nt, Homo sapiens
  misc_RNA (1)...(19): siRNA sense strand
gcucuggucuuugagaagu

SEQ ID NO: 1353148 - RNA, 19 nt, Homo sapiens
  misc_RNA (1)...(19): siRNA sense strand
caaaucucgcugaccauaa

SEQ ID NO: 1353149 - RNA, 19 nt, Homo sapiens
  misc_RNA (1)...(19): siRNA sense strand
gcaauacaaguacuaaggu

SEQ ID NO: 1353150 - RNA, 19 nt, Homo sapiens
  misc_RNA (1)...(19): siRNA sense strand
cccaaaguagcaacaaaua

SEQ ID NO: 1353151 - RNA, 19 nt, Homo sapiens
  misc_RNA (1)...(19): siRNA sense strand
caagcaauacaaguacuaa

SEQ ID NO: 1353152 - RNA, 19 nt, Homo sapiens
  misc_RNA (1)...(19): siRNA sense strand
acaaauaucaugagagcau

SEQ ID NO: 1353153 - RNA, 19 nt, Homo sapiens
  misc_RNA (1)...(19): siRNA sense strand
acaaaucucgcugaccaua

SEQ ID NO: 1353154 - RNA, 19 nt, Homo sapiens
  misc_RNA (1)...(19): siRNA sense strand
gaacugugcgauaacuucu

SEQ ID NO: 1353155 - RNA, 19 nt, Homo sapiens
  misc_RNA (1)...(19): siRNA sense strand
gacaaggacgcgaucuaug

SEQ ID NO: 1353156 - RNA, 19 nt, Homo sapiens
  misc_RNA (1)...(19): siRNA sense strand
uccacgaacugugcgauaa

SEQ ID NO: 1353157 - RNA, 19 nt, Homo sapiens
  misc_RNA (1)...(19): siRNA sense strand
ccaagucagaucaugaaga

SEQ ID NO: 1353158 - RNA, 19 nt, Homo sapiens
  misc_RNA (1)...(19): siRNA sense strand
gcuccaagucagaucauga

SEQ ID NO: 1353159 - RNA, 19 nt, Homo sapiens
  misc_RNA (1)...(19): siRNA sense strand
gggacaaggacgcgaucua

SEQ ID NO: 1353160 - RNA, 19 nt, Homo sapiens
  misc_RNA (1)...(19): siRNA sense strand
guagcaacaaauaucauga

SEQ ID NO: 1353161 - RNA, 19 nt, Homo sapiens
  misc_RNA (1)...(19): siRNA sense strand
accgauacauuagcuguuu

SEQ ID NO: 1353162 - RNA, 19 nt, Homo sapiens
  misc_RNA (1)...(19): siRNA sense strand
gcaaggggaugguuuagac

SEQ ID NO: 1353163 - RNA, 19 nt, Homo sapiens
  misc_RNA (1)...(19): siRNA sense strand
uaacuucugccaccgauac

SEQ ID NO: 1353164 - RNA, 19 nt, Homo sapiens
  misc_RNA (1)...(19): siRNA sense strand
aaaucucgcugaccauaac

SEQ ID NO: 1353165 - RNA, 19 nt, Homo sapiens
  misc_RNA (1)...(19): siRNA sense strand
acaaggacgcgaucuaugg

SEQ ID NO: 1353166 - RNA, 19 nt, Homo sapiens
  misc_RNA (1)...(19): siRNA sense strand
caaguacuaagguuucauc

SEQ ID NO: 1353167 - RNA, 19 nt, Homo sapiens
  misc_RNA (1)...(19): siRNA sense strand
accauaacccuucuucuug

SEQ ID NO: 1353168 - RNA, 19 nt, Homo sapiens
  misc_RNA (1)...(19): siRNA sense strand
cgaacugugcgauaacuuc

SEQ ID NO: 1353169 - RNA, 19 nt, Homo sapiens
  misc_RNA (1)...(19): siRNA sense strand
ucaggcuccuccacaaauc

SEQ ID NO: 1353170 - RNA, 19 nt, Homo sapiens
  misc_RNA (1)...(19): siRNA sense strand
acaagcaauacaaguacua

SEQ ID NO: 1353171 - RNA, 19 nt, Homo sapiens
  misc_RNA (1)...(19): siRNA sense strand
gucagaucaugaagaacuu

SEQ ID NO: 1353172 - RNA, 19 nt, Homo sapiens
  misc_RNA (1)...(19): siRNA sense strand
ggucuucgccaagcagguu

SEQ ID NO: 1353173 - RNA, 19 nt, Homo sapiens
  misc_RNA (1)...(19): siRNA sense strand
acgaugaugauccggauaa

SEQ ID NO: 1353174 - RNA, 19 nt, Homo sapiens
  misc_RNA (1)...(19): siRNA sense strand
auacaaguacuaagguuuc

SEQ ID NO: 1353175 - RNA, 19 nt, Homo sapiens
  misc_RNA (1)...(19): siRNA sense strand
agcaacaaauaucaugaga

SEQ ID NO: 1353176 - RNA, 19 nt, Homo sapiens
  misc_RNA (1)...(19): siRNA sense strand
gcggagacaacagcaguga

SEQ ID NO: 1353177 - RNA, 19 nt, Homo sapiens
  misc_RNA (1)...(19): siRNA sense strand
uggacaauuugaugauaca

SEQ ID NO: 1353178 - RNA, 19 nt, Homo sapiens
  misc_RNA (1)...(19): siRNA sense strand
cgauacauuagcuguuuga

SEQ ID NO: 1353179 - RNA, 19 nt, Homo sapiens
  misc_RNA (1)...(19): siRNA sense strand
ccgauacauuagcuguuug

SEQ ID NO: 1353180 - RNA, 19 nt, Homo sapiens
  misc_RNA (1)...(19): siRNA sense strand
gaaaagguccacgaacugu

SEQ ID NO: 1353181 - RNA, 19 nt, Homo sapiens
  misc_RNA (1)...(19): siRNA sense strand
gguuucaucuuuuggaguu

SEQ ID NO: 1353182 - RNA, 19 nt, Homo sapiens
  misc_RNA (1)...(19): siRNA sense strand
gcagcuccaagucagauca

SEQ ID NO: 1353183 - RNA, 19 nt, Homo sapiens
  misc_RNA (1)...(19): siRNA sense strand
uagaaaagguccacgaacu

SEQ ID NO: 1353184 - RNA, 19 nt, Homo sapiens
  misc_RNA (1)...(19): siRNA sense strand
augaugauccggauaagga

SEQ ID NO: 1353185 - RNA, 19 nt, Homo sapiens
  misc_RNA (1)...(19): siRNA sense strand
guacuaagguuucaucuuu

SEQ ID NO: 1353186 - RNA, 19 nt, Homo sapiens
  misc_RNA (1)...(19): siRNA sense strand
caagucagaucaugaagaa

SEQ ID NO: 1353187 - RNA, 19 nt, Homo sapiens
  misc_RNA (1)...(19): siRNA sense strand
gauacaagcaauacaagua

SEQ ID NO: 1353188 - RNA, 19 nt, Homo sapiens
  misc_RNA (1)...(19): siRNA sense strand
caaaguagcaacaaauauc

SEQ ID NO: 1353189 - RNA, 19 nt, Homo sapiens
  misc_RNA (1)...(19): siRNA sense strand
gaccauaacccuucuucuu

SEQ ID NO: 1353190 - RNA, 19 nt, Homo sapiens
  misc_RNA (1)...(19): siRNA sense strand
ggacaaggacgcgaucuau

SEQ ID NO: 1353191 - RNA, 19 nt, Homo sapiens
  misc_RNA (1)...(19): siRNA sense strand
gcuggacaauuugaugaua

SEQ ID NO: 1353192 - RNA, 19 nt, Homo sapiens
  misc_RNA (1)...(19): siRNA sense strand
caauacaaguacuaagguu

SEQ ID NO: 1353193 - RNA, 19 nt, Homo sapiens
  misc_RNA (1)...(19): siRNA sense strand
ccaucgaccucgucauuga

SEQ ID NO: 1353194 - RNA, 19 nt, Homo sapiens
  misc_RNA (1)...(19): siRNA sense strand
gaugauacaagcaauacaa

SEQ ID NO: 1353195 - RNA, 19 nt, Homo sapiens
  misc_RNA (1)...(19): siRNA sense strand
guacaggugacgaugauga

SEQ ID NO: 1353196 - RNA, 19 nt, Homo sapiens
  misc_RNA (1)...(19): siRNA sense strand
ccaaggagcagcauauagu

SEQ ID NO: 1353197 - RNA, 19 nt, Homo sapiens
  misc_RNA (1)...(19): siRNA sense strand
acgaugagcugccccauua

SEQ ID NO: 1353198 - RNA, 19 nt, Homo sapiens
  misc_RNA (1)...(19): siRNA sense strand
agacaacaguguagcuuca

SEQ ID NO: 1353199 - RNA, 19 nt, Homo sapiens
  misc_RNA (1)...(19): siRNA sense strand
gagcuggacaauuugauga

SEQ ID NO: 1353200 - RNA, 19 nt, Homo sapiens
  misc_RNA (1)...(19): siRNA sense strand
gagccaaggagcagcauau

SEQ ID NO: 1353201 - RNA, 19 nt, Homo sapiens
  misc_RNA (1)...(19): siRNA sense strand
gcccaucgaccucgucauu

SEQ ID NO: 1353202 - RNA, 19 nt, Homo sapiens
  misc_RNA (1)...(19): siRNA sense strand
ccaaaguagcaacaaauau

SEQ ID NO: 1353203 - RNA, 19 nt, Homo sapiens
  misc_RNA (1)...(19): siRNA sense strand
gcucuggucuuugagaagu

SEQ ID NO: 1353204 - RNA, 19 nt, Homo sapiens
  misc_RNA (1)...(19): siRNA sense strand
uaguacagcccaugauuga

SEQ ID NO: 1353205 - RNA, 19 nt, Homo sapiens
  misc_RNA (1)...(19): siRNA sense strand
caaaucucgcugaccauaa

SEQ ID NO: 1353206 - RNA, 19 nt, Homo sapiens
  misc_RNA (1)...(19): siRNA sense strand
gcaauacaaguacuaaggu

SEQ ID NO: 1353207 - RNA, 19 nt, Homo sapiens
  misc_RNA (1)...(19): siRNA sense strand
cccaaaguagcaacaaaua

SEQ ID NO: 1353208 - RNA, 19 nt, Homo sapiens
  misc_RNA (1)...(19): siRNA sense strand
caagcaauacaaguacuaa

SEQ ID NO: 1353209 - RNA, 19 nt, Homo sapiens
  misc_RNA (1)...(19): siRNA sense strand
acaaauaucaugagagcau

SEQ ID NO: 1353210 - RNA, 19 nt, Homo sapiens
  misc_RNA (1)...(19): siRNA sense strand
acaaaucucgcugaccaua

SEQ ID NO: 1353211 - RNA, 19 nt, Homo sapiens
  misc_RNA (1)...(19): siRNA sense strand
gaacugugcgauaacuucu

SEQ ID NO: 1353212 - RNA, 19 nt, Homo sapiens
  misc_RNA (1)...(19): siRNA sense strand
gacaaggacgcgaucuaug

SEQ ID NO: 1353213 - RNA, 19 nt, Homo sapiens
  misc_RNA (1)...(19): siRNA sense strand
uccacgaacugugcgauaa

SEQ ID NO: 1353214 - RNA, 19 nt, Homo sapiens
  misc_RNA (1)...(19): siRNA sense strand
gaauaguacagcccaugau

SEQ ID NO: 1353215 - RNA, 19 nt, Homo sapiens
  misc_RNA (1)...(19): siRNA sense strand
ccaagucagaucaugaaga

SEQ ID NO: 1353216 - RNA, 19 nt, Homo sapiens
  misc_RNA (1)...(19): siRNA sense strand
gcuccaagucagaucauga

SEQ ID NO: 1353217 - RNA, 19 nt, Homo sapiens
  misc_RNA (1)...(19): siRNA sense strand
gggacaaggacgcgaucua

SEQ ID NO: 1353218 - RNA, 19 nt, Homo sapiens
  misc_RNA (1)...(19): siRNA sense strand
guagcaacaaauaucauga

SEQ ID NO: 1353219 - RNA, 19 nt, Homo sapiens
  misc_RNA (1)...(19): siRNA sense strand
accgauacauuagcuguuu

SEQ ID NO: 1353220 - RNA, 19 nt, Homo sapiens
  misc_RNA (1)...(19): siRNA sense strand
guuuauuaaugccagaaga

SEQ ID NO: 1353221 - RNA, 19 nt, Homo sapiens
  misc_RNA (1)...(19): siRNA sense strand
gcaaggggaugguuuagac

SEQ ID NO: 1353222 - RNA, 19 nt, Homo sapiens
  misc_RNA (1)...(19): siRNA sense strand
uaacuucugccaccgauac

SEQ ID NO: 1353223 - RNA, 19 nt, Homo sapiens
  misc_RNA (1)...(19): siRNA sense strand
aauaguacagcccaugauu

SEQ ID NO: 1353224 - RNA, 19 nt, Homo sapiens
  misc_RNA (1)...(19): siRNA sense strand
acaaggacgcgaucuaugg

SEQ ID NO: 1353225 - RNA, 19 nt, Homo sapiens
  misc_RNA (1)...(19): siRNA sense strand
aaaucucgcugaccauaac

SEQ ID NO: 1353226 - RNA, 19 nt, Homo sapiens
  misc_RNA (1)...(19): siRNA sense strand
caaguacuaagguuucauc

SEQ ID NO: 1353227 - RNA, 19 nt, Homo sapiens
  misc_RNA (1)...(19): siRNA sense strand
gccagaagaagaauaguac

SEQ ID NO: 1353228 - RNA, 19 nt, Homo sapiens
  misc_RNA (1)...(19): siRNA sense strand
accauaacccuucuucuug

SEQ ID NO: 1353229 - RNA, 19 nt, Homo sapiens
  misc_RNA (1)...(19): siRNA sense strand
cgaacugugcgauaacuuc

SEQ ID NO: 1353230 - RNA, 19 nt, Homo sapiens
  misc_RNA (1)...(19): siRNA sense strand
ucaggcuccuccacaaauc

SEQ ID NO: 1353231 - RNA, 19 nt, Homo sapiens
  misc_RNA (1)...(19): siRNA sense strand
uguguuggauggucagcaa

SEQ ID NO: 1353232 - RNA, 19 nt, Homo sapiens
  misc_RNA (1)...(19): siRNA sense strand
acaagcaauacaaguacua

SEQ ID NO: 1353233 - RNA, 19 nt, Homo sapiens
  misc_RNA (1)...(19): siRNA sense strand
agaauaguacagcccauga

SEQ ID NO: 1353234 - RNA, 19 nt, Homo sapiens
  misc_RNA (1)...(19): siRNA sense strand
gucagaucaugaagaacuu

SEQ ID NO: 1353235 - RNA, 19 nt, Homo sapiens
  misc_RNA (1)...(19): siRNA sense strand
ggucuucgccaagcagguu

SEQ ID NO: 1353236 - RNA, 19 nt, Homo sapiens
  misc_RNA (1)...(19): siRNA sense strand
ugccagaagaagaauagua

SEQ ID NO: 1353237 - RNA, 19 nt, Homo sapiens
  misc_RNA (1)...(19): siRNA sense strand
acgaugaugauccggauaa

SEQ ID NO: 1353238 - RNA, 19 nt, Homo sapiens
  misc_RNA (1)...(19): siRNA sense strand
auacaaguacuaagguuuc

SEQ ID NO: 1353239 - RNA, 19 nt, Homo sapiens
  misc_RNA (1)...(19): siRNA sense strand
agcaacaaauaucaugaga

SEQ ID NO: 1353240 - RNA, 19 nt, Homo sapiens
  misc_RNA (1)...(19): siRNA sense strand
gcggagacaacagcaguga

SEQ ID NO: 1353241 - RNA, 19 nt, Homo sapiens
  misc_RNA (1)...(19): siRNA sense strand
gguuucaucuuuuggaguu

SEQ ID NO: 1353242 - RNA, 19 nt, Homo sapiens
  misc_RNA (1)...(19): siRNA sense strand
caaggagcagcauauaguc

SEQ ID NO: 1353243 - RNA, 19 nt, Homo sapiens
  misc_RNA (1)...(19): siRNA sense strand
gccaaggagcagcauauag

SEQ ID NO: 1353244 - RNA, 19 nt, Homo sapiens
  misc_RNA (1)...(19): siRNA sense strand
cgauacauuagcuguuuga

SEQ ID NO: 1353245 - RNA, 19 nt, Homo sapiens
  misc_RNA (1)...(19): siRNA sense strand
ccgauacauuagcuguuug

SEQ ID NO: 1353246 - RNA, 19 nt, Homo sapiens
  misc_RNA (1)...(19): siRNA sense strand
uggacaauuugaugauaca

SEQ ID NO: 1353247 - RNA, 19 nt, Homo sapiens
  misc_RNA (1)...(19): siRNA sense strand
gaaaagguccacgaacugu

SEQ ID NO: 1353248 - RNA, 19 nt, Homo sapiens
  misc_RNA (1)...(19): siRNA sense strand
gcagcuccaagucagauca

SEQ ID NO: 1353249 - RNA, 19 nt, Homo sapiens
  misc_RNA (1)...(19): siRNA sense strand
auuaaugccagaagaagaa

SEQ ID NO: 1353250 - RNA, 19 nt, Homo sapiens
  misc_RNA (1)...(19): siRNA sense strand
uagaaaagguccacgaacu

SEQ ID NO: 1353251 - RNA, 19 nt, Homo sapiens
  misc_RNA (1)...(19): siRNA sense strand
augaugauccggauaagga

SEQ ID NO: 1353252 - RNA, 19 nt, Homo sapiens
  misc_RNA (1)...(19): siRNA sense strand
guacuaagguuucaucuuu

SEQ ID NO: 1353253 - RNA, 19 nt, Homo sapiens
  misc_RNA (1)...(19): siRNA sense strand
caagucagaucaugaagaa

SEQ ID NO: 1353254 - RNA, 19 nt, Homo sapiens
  misc_RNA (1)...(19): siRNA sense strand
ggacauucaugcccaauag

SEQ ID NO: 1353255 - RNA, 19 nt, Homo sapiens
  misc_RNA (1)...(19): siRNA sense strand
gauacaagcaauacaagua

SEQ ID NO: 1353256 - RNA, 19 nt, Homo sapiens
  misc_RNA (1)...(19): siRNA sense strand
caaaguagcaacaaauauc

SEQ ID NO: 1353257 - RNA, 19 nt, Homo sapiens
  misc_RNA (1)...(19): siRNA sense strand
gcacagagccccacaaugu

SEQ ID NO: 1353258 - RNA, 19 nt, Homo sapiens
  misc_RNA (1)...(19): siRNA sense strand
gaccauaacccuucuucuu

SEQ ID NO: 1353259 - RNA, 19 nt, Homo sapiens
  misc_RNA (1)...(19): siRNA sense strand
ggacaaggacgcgaucuau

SEQ ID NO: 1353260 - RNA, 19 nt, Homo sapiens
  misc_RNA (1)...(19): siRNA sense strand
gcuggacaauuugaugaua

SEQ ID NO: 1353261 - RNA, 19 nt, Homo sapiens
  misc_RNA (1)...(19): siRNA sense strand
caauacaaguacuaagguu

SEQ ID NO: 1353262 - RNA, 19 nt, Homo sapiens
  misc_RNA (1)...(19): siRNA sense strand
ccaucgaccucgucauuga

SEQ ID NO: 1353263 - RNA, 19 nt, Homo sapiens
  misc_RNA (1)...(19): siRNA sense strand
gaugauacaagcaauacaa

SEQ ID NO: 1353264 - RNA, 19 nt, Homo sapiens
  misc_RNA (1)...(19): siRNA sense strand
cccacacccuacucaauua

SEQ ID NO: 1353265 - RNA, 19 nt, Homo sapiens
  misc_RNA (1)...(19): siRNA sense strand
guacaggugacgaugauga

SEQ ID NO: 1353266 - RNA, 19 nt, Homo sapiens
  misc_RNA (1)...(19): siRNA sense strand
ccacaauguuaaauucugu

SEQ ID NO: 1353267 - RNA, 19 nt, Homo sapiens
  misc_RNA (1)...(19): siRNA sense strand
cccaaugcauucauauuug

SEQ ID NO: 1353268 - RNA, 19 nt, Homo sapiens
  misc_RNA (1)...(19): siRNA sense strand
ccaaggagcagcauauagu

SEQ ID NO: 1353269 - RNA, 19 nt, Homo sapiens
  misc_RNA (1)...(19): siRNA sense strand
acgaugagcugccccauua

SEQ ID NO: 1353270 - RNA, 19 nt, Homo sapiens
  misc_RNA (1)...(19): siRNA sense strand
agacaacaguguagcuuca

SEQ ID NO: 1353271 - RNA, 19 nt, Homo sapiens
  misc_RNA (1)...(19): siRNA sense strand
gagcuggacaauuugauga

SEQ ID NO: 1353272 - RNA, 19 nt, Homo sapiens
  misc_RNA (1)...(19): siRNA sense strand
gagccaaggagcagcauau

SEQ ID NO: 1353273 - RNA, 19 nt, Homo sapiens
  misc_RNA (1)...(19): siRNA sense strand
gcggacagguuauggacau

SEQ ID NO: 1353274 - RNA, 19 nt, Homo sapiens
  misc_RNA (1)...(19): siRNA sense strand
gcccaucgaccucgucauu

SEQ ID NO: 1353275 - RNA, 19 nt, Homo sapiens
  misc_RNA (1)...(19): siRNA sense strand
ccaaaguagcaacaaauau

SEQ ID NO: 1353276 - RNA, 19 nt, Homo sapiens
  misc_RNA (1)...(19): siRNA sense strand
gcaauacaaguacuaaggu

SEQ ID NO: 1353277 - RNA, 19 nt, Homo sapiens
  misc_RNA (1)...(19): siRNA sense strand
gacagguuauggacauuca

SEQ ID NO: 1353278 - RNA, 19 nt, Homo sapiens
  misc_RNA (1)...(19): siRNA sense strand
uaguacagcccaugauuga

SEQ ID NO: 1353279 - RNA, 19 nt, Homo sapiens
  misc_RNA (1)...(19): siRNA sense strand
caaaucucgcugaccauaa

SEQ ID NO: 1353280 - RNA, 19 nt, Homo sapiens
  misc_RNA (1)...(19): siRNA sense strand
gcucuggucuuugagaagu

SEQ ID NO: 1353281 - RNA, 19 nt, Homo sapiens
  misc_RNA (1)...(19): siRNA sense strand
cccaaaguagcaacaaaua

SEQ ID NO: 1353282 - RNA, 19 nt, Homo sapiens
  misc_RNA (1)...(19): siRNA sense strand
gguccuaugggaaugagua

SEQ ID NO: 1353283 - RNA, 19 nt, Homo sapiens
  misc_RNA (1)...(19): siRNA sense strand
caagcaauacaaguacuaa

SEQ ID NO: 1353284 - RNA, 19 nt, Homo sapiens
  misc_RNA (1)...(19): siRNA sense strand
aauguuggcggacagguua

SEQ ID NO: 1353285 - RNA, 19 nt, Homo sapiens
  misc_RNA (1)...(19): siRNA sense strand
ccaaugcauucauauuugc

SEQ ID NO: 1353286 - RNA, 19 nt, Homo sapiens
  misc_RNA (1)...(19): siRNA sense strand
acaaauaucaugagagcau

SEQ ID NO: 1353287 - RNA, 19 nt, Homo sapiens
  misc_RNA (1)...(19): siRNA sense strand
acaaaucucgcugaccaua

SEQ ID NO: 1353288 - RNA, 19 nt, Homo sapiens
  misc_RNA (1)...(19): siRNA sense strand
acacccuacucaauuaaga

SEQ ID NO: 1353289 - RNA, 19 nt, Homo sapiens
  misc_RNA (1)...(19): siRNA sense strand
gaacugugcgauaacuucu

SEQ ID NO: 1353290 - RNA, 19 nt, Homo sapiens
  misc_RNA (1)...(19): siRNA sense strand
ccuacucaauuaagacaug

SEQ ID NO: 1353291 - RNA, 19 nt, Homo sapiens
  misc_RNA (1)...(19): siRNA sense strand
gacaaggacgcgaucuaug

SEQ ID NO: 1353292 - RNA, 19 nt, Homo sapiens
  misc_RNA (1)...(19): siRNA sense strand
ccacacccuacucaauuaa

SEQ ID NO: 1353293 - RNA, 19 nt, Homo sapiens
  misc_RNA (1)...(19): siRNA sense strand
uccacgaacugugcgauaa

SEQ ID NO: 1353294 - RNA, 19 nt, Homo sapiens
  misc_RNA (1)...(19): siRNA sense strand
gaauaguacagcccaugau

SEQ ID NO: 1353295 - RNA, 19 nt, Homo sapiens
  misc_RNA (1)...(19): siRNA sense strand
ccaagucagaucaugaaga

SEQ ID NO: 1353296 - RNA, 19 nt, Homo sapiens
  misc_RNA (1)...(19): siRNA sense strand
gcuccaagucagaucauga

SEQ ID NO: 1353297 - RNA, 19 nt, Homo sapiens
  misc_RNA (1)...(19): siRNA sense strand
gggacaaggacgcgaucua

SEQ ID NO: 1353298 - RNA, 19 nt, Homo sapiens
  misc_RNA (1)...(19): siRNA sense strand
guagcaacaaauaucauga

SEQ ID NO: 1353299 - RNA, 19 nt, Homo sapiens
  misc_RNA (1)...(19): siRNA sense strand
accgauacauuagcuguuu

SEQ ID NO: 1353300 - RNA, 19 nt, Homo sapiens
  misc_RNA (1)...(19): siRNA sense strand
guuuauuaaugccagaaga

SEQ ID NO: 1353301 - RNA, 19 nt, Homo sapiens
  misc_RNA (1)...(19): siRNA sense strand
gcaaggggaugguuuagac

SEQ ID NO: 1353302 - RNA, 19 nt, Homo sapiens
  misc_RNA (1)...(19): siRNA sense strand
uaacuucugccaccgauac

SEQ ID NO: 1353303 - RNA, 19 nt, Homo sapiens
  misc_RNA (1)...(19): siRNA sense strand
ggacagguuauggacauuc

SEQ ID NO: 1353304 - RNA, 19 nt, Homo sapiens
  misc_RNA (1)...(19): siRNA sense strand
aauaguacagcccaugauu

SEQ ID NO: 1353305 - RNA, 19 nt, Homo sapiens
  misc_RNA (1)...(19): siRNA sense strand
acaaggacgcgaucuaugg

SEQ ID NO: 1353306 - RNA, 19 nt, Homo sapiens
  misc_RNA (1)...(19): siRNA sense strand
aaaucucgcugaccauaac

SEQ ID NO: 1353307 - RNA, 19 nt, Homo sapiens
  misc_RNA (1)...(19): siRNA sense strand
caaguacuaagguuucauc

SEQ ID NO: 1353308 - RNA, 19 nt, Homo sapiens
  misc_RNA (1)...(19): siRNA sense strand
gccagaagaagaauaguac

SEQ ID NO: 1353309 - RNA, 19 nt, Homo sapiens
  misc_RNA (1)...(19): siRNA sense strand
accauaacccuucuucuug

SEQ ID NO: 1353310 - RNA, 19 nt, Homo sapiens
  misc_RNA (1)...(19): siRNA sense strand
cgaacugugcgauaacuuc

SEQ ID NO: 1353311 - RNA, 19 nt, Homo sapiens
  misc_RNA (1)...(19): siRNA sense strand
ucaggcuccuccacaaauc

SEQ ID NO: 1353312 - RNA, 19 nt, Homo sapiens
  misc_RNA (1)...(19): siRNA sense strand
uguguuggauggucagcaa

SEQ ID NO: 1353313 - RNA, 19 nt, Homo sapiens
  misc_RNA (1)...(19): siRNA sense strand
gucagaucaugaagaacuu

SEQ ID NO: 1353314 - RNA, 19 nt, Homo sapiens
  misc_RNA (1)...(19): siRNA sense strand
agaauaguacagcccauga

SEQ ID NO: 1353315 - RNA, 19 nt, Homo sapiens
  misc_RNA (1)...(19): siRNA sense strand
acaagcaauacaaguacua

SEQ ID NO: 1353316 - RNA, 19 nt, Homo sapiens
  misc_RNA (1)...(19): siRNA sense strand
acgaugaugauccggauaa

SEQ ID NO: 1353317 - RNA, 19 nt, Homo sapiens
  misc_RNA (1)...(19): siRNA sense strand
ugccagaagaagaauagua

SEQ ID NO: 1353318 - RNA, 19 nt, Homo sapiens
  misc_RNA (1)...(19): siRNA sense strand
ggucuucgccaagcagguu

SEQ ID NO: 1353319 - RNA, 19 nt, Homo sapiens
  misc_RNA (1)...(19): siRNA sense strand
gcggagacaacagcaguga

SEQ ID NO: 1353320 - RNA, 19 nt, Homo sapiens
  misc_RNA (1)...(19): siRNA sense strand
auacaaguacuaagguuuc

SEQ ID NO: 1353321 - RNA, 19 nt, Homo sapiens
  misc_RNA (1)...(19): siRNA sense strand
agcaacaaauaucaugaga

SEQ ID NO: 1353322 - RNA, 19 nt, Homo sapiens
  misc_RNA (1)...(19): siRNA sense strand
gaaaagguccacgaacugu

SEQ ID NO: 1353323 - RNA, 19 nt, Homo sapiens
  misc_RNA (1)...(19): siRNA sense strand
caaggagcagcauauaguc

SEQ ID NO: 1353324 - RNA, 19 nt, Homo sapiens
  misc_RNA (1)...(19): siRNA sense strand
gccaaggagcagcauauag

SEQ ID NO: 1353325 - RNA, 19 nt, Homo sapiens
  misc_RNA (1)...(19): siRNA sense strand
uggacaauuugaugauaca

SEQ ID NO: 1353326 - RNA, 19 nt, Homo sapiens
  misc_RNA (1)...(19): siRNA sense strand
gguuucaucuuuuggaguu

SEQ ID NO: 1353327 - RNA, 19 nt, Homo sapiens
  misc_RNA (1)...(19): siRNA sense strand
cgauacauuagcuguuuga

SEQ ID NO: 1353328 - RNA, 19 nt, Homo sapiens
  misc_RNA (1)...(19): siRNA sense strand
ccgauacauuagcuguuug

SEQ ID NO: 1353329 - RNA, 19 nt, Homo sapiens
  misc_RNA (1)...(19): siRNA sense strand
gcagcuccaagucagauca

SEQ ID NO: 1353330 - RNA, 19 nt, Homo sapiens
  misc_RNA (1)...(19): siRNA sense strand
caauguuggcggacagguu

SEQ ID NO: 1353331 - RNA, 19 nt, Homo sapiens
  misc_RNA (1)...(19): siRNA sense strand
auuaaugccagaagaagaa

SEQ ID NO: 1353332 - RNA, 19 nt, Homo sapiens
  misc_RNA (1)...(19): siRNA sense strand
uagaaaagguccacgaacu

SEQ ID NO: 1353333 - RNA, 19 nt, Homo sapiens
  misc_RNA (1)...(19): siRNA sense strand
cccacaauguuaaauucug

SEQ ID NO: 1353334 - RNA, 19 nt, Homo sapiens
  misc_RNA (1)...(19): siRNA sense strand
ccaccacccagccaugaug

SEQ ID NO: 1353335 - RNA, 19 nt, Homo sapiens
  misc_RNA (1)...(19): siRNA sense strand
augaugauccggauaagga

SEQ ID NO: 1353336 - RNA, 19 nt, Homo sapiens
  misc_RNA (1)...(19): siRNA sense strand
guacuaagguuucaucuuu

SEQ ID NO: 1353337 - RNA, 19 nt, Homo sapiens
  misc_RNA (1)...(19): siRNA sense strand
caagucagaucaugaagaa

SEQ ID NO: 1353338 - RNA, 19 nt, Homo sapiens
  misc_RNA (1)...(19): siRNA sense strand
ggacauucaugcccaauag

SEQ ID NO: 1353339 - RNA, 19 nt, Homo sapiens
  misc_RNA (1)...(19): siRNA sense strand
gauacaagcaauacaagua

SEQ ID NO: 1353340 - RNA, 19 nt, Homo sapiens
  misc_RNA (1)...(19): siRNA sense strand
caaaguagcaacaaauauc

SEQ ID NO: 1353341 - RNA, 19 nt, Homo sapiens
  misc_RNA (1)...(19): siRNA sense strand
gcacagagccccacaaugu

SEQ ID NO: 1353342 - RNA, 19 nt, Homo sapiens
  misc_RNA (1)...(19): siRNA sense strand
gaccauaacccuucuucuu

SEQ ID NO: 1353343 - RNA, 19 nt, Homo sapiens
  misc_RNA (1)...(19): siRNA sense strand
ggacaaggacgcgaucuau

SEQ ID NO: 1353344 - RNA, 19 nt, Homo sapiens
  misc_RNA (1)...(19): siRNA sense strand
gcuggacaauuugaugaua

SEQ ID NO: 1353345 - RNA, 19 nt, Homo sapiens
  misc_RNA (1)...(19): siRNA sense strand
caauacaaguacuaagguu

SEQ ID NO: 1353346 - RNA, 19 nt, Homo sapiens
  misc_RNA (1)...(19): siRNA sense strand
ccaucgaccucgucauuga

SEQ ID NO: 1353347 - RNA, 19 nt, Homo sapiens
  misc_RNA (1)...(19): siRNA sense strand
gaugauacaagcaauacaa

SEQ ID NO: 1353348 - RNA, 19 nt, Homo sapiens
  misc_RNA (1)...(19): siRNA sense strand
cccacacccuacucaauua

SEQ ID NO: 1353349 - RNA, 19 nt, Homo sapiens
  misc_RNA (1)...(19): siRNA sense strand
guacaggugacgaugauga

SEQ ID NO: 1353350 - RNA, 19 nt, Homo sapiens
  misc_RNA (1)...(19): siRNA sense strand
ccacaauguuaaauucugu

SEQ ID NO: 1353351 - RNA, 19 nt, Homo sapiens
  misc_RNA (1)...(19): siRNA sense strand
cccaaugcauucauauuug

SEQ ID NO: 1353352 - RNA, 19 nt, Homo sapiens
  misc_RNA (1)...(19): siRNA sense strand
ccaaggagcagcauauagu

SEQ ID NO: 1353353 - RNA, 19 nt, Homo sapiens
  misc_RNA (1)...(19): siRNA sense strand
acgaugagcugccccauua

SEQ ID NO: 1353354 - RNA, 19 nt, Homo sapiens
  misc_RNA (1)...(19): siRNA sense strand
agacaacaguguagcuuca

SEQ ID NO: 1353355 - RNA, 19 nt, Homo sapiens
  misc_RNA (1)...(19): siRNA sense strand
gagcuggacaauuugauga

SEQ ID NO: 1353356 - RNA, 19 nt, Homo sapiens
  misc_RNA (1)...(19): siRNA sense strand
gagccaaggagcagcauau

SEQ ID NO: 1353357 - RNA, 19 nt, Homo sapiens
  misc_RNA (1)...(19): siRNA sense strand
gcggacagguuauggacau

SEQ ID NO: 1353358 - RNA, 19 nt, Homo sapiens
  misc_RNA (1)...(19): siRNA sense strand
gcccaucgaccucgucauu

SEQ ID NO: 1353359 - RNA, 19 nt, Homo sapiens
  misc_RNA (1)...(19): siRNA sense strand
ccaaaguagcaacaaauau

SEQ ID NO: 1353360 - RNA, 19 nt, Homo sapiens
  misc_RNA (1)...(19): siRNA sense strand
gcaauacaaguacuaaggu

SEQ ID NO: 1353361 - RNA, 19 nt, Homo sapiens
  misc_RNA (1)...(19): siRNA sense strand
gacagguuauggacauuca

SEQ ID NO: 1353362 - RNA, 19 nt, Homo sapiens
  misc_RNA (1)...(19): siRNA sense strand
uaguacagcccaugauuga

SEQ ID NO: 1353363 - RNA, 19 nt, Homo sapiens
  misc_RNA (1)...(19): siRNA sense strand
caaaucucgcugaccauaa

SEQ ID NO: 1353364 - RNA, 19 nt, Homo sapiens
  misc_RNA (1)...(19): siRNA sense strand
gcucuggucuuugagaagu

SEQ ID NO: 1353365 - RNA, 19 nt, Homo sapiens
  misc_RNA (1)...(19): siRNA sense strand
cccaaaguagcaacaaaua

SEQ ID NO: 1353366 - RNA, 19 nt, Homo sapiens
  misc_RNA (1)...(19): siRNA sense strand
gguccuaugggaaugagua

SEQ ID NO: 1353367 - RNA, 19 nt, Homo sapiens
  misc_RNA (1)...(19): siRNA sense strand
caagcaauacaaguacuaa

SEQ ID NO: 1353368 - RNA, 19 nt, Homo sapiens
  misc_RNA (1)...(19): siRNA sense strand
aauguuggcggacagguua

SEQ ID NO: 1353369 - RNA, 19 nt, Homo sapiens
  misc_RNA (1)...(19): siRNA sense strand
ccaaugcauucauauuugc

SEQ ID NO: 1353370 - RNA, 19 nt, Homo sapiens
  misc_RNA (1)...(19): siRNA sense strand
acaaauaucaugagagcau

SEQ ID NO: 1353371 - RNA, 19 nt, Homo sapiens
  misc_RNA (1)...(19): siRNA sense strand
acaaaucucgcugaccaua

SEQ ID NO: 1353372 - RNA, 19 nt, Homo sapiens
  misc_RNA (1)...(19): siRNA sense strand
acacccuacucaauuaaga

SEQ ID NO: 1353373 - RNA, 19 nt, Homo sapiens
  misc_RNA (1)...(19): siRNA sense strand
gaacugugcgauaacuucu

SEQ ID NO: 1353374 - RNA, 19 nt, Homo sapiens
  misc_RNA (1)...(19): siRNA sense strand
ccuacucaauuaagacaug

SEQ ID NO: 1353375 - RNA, 19 nt, Homo sapiens
  misc_RNA (1)...(19): siRNA sense strand
gacaaggacgcgaucuaug

SEQ ID NO: 1353376 - RNA, 19 nt, Homo sapiens
  misc_RNA (1)...(19): siRNA sense strand
ccacacccuacucaauuaa

SEQ ID NO: 1353377 - RNA, 19 nt, Homo sapiens
  misc_RNA (1)...(19): siRNA sense strand
uccacgaacugugcgauaa

SEQ ID NO: 1353378 - RNA, 19 nt, Homo sapiens
  misc_RNA (1)...(19): siRNA sense strand
gaauaguacagcccaugau

SEQ ID NO: 1353379 - RNA, 19 nt, Homo sapiens
  misc_RNA (1)...(19): siRNA sense strand
ccaagucagaucaugaaga

SEQ ID NO: 1353380 - RNA, 19 nt, Homo sapiens
  misc_RNA (1)...(19): siRNA sense strand
gcuccaagucagaucauga

SEQ ID NO: 1353381 - RNA, 19 nt, Homo sapiens
  misc_RNA (1)...(19): siRNA sense strand
gggacaaggacgcgaucua

SEQ ID NO: 1353382 - RNA, 19 nt, Homo sapiens
  misc_RNA (1)...(19): siRNA sense strand
guagcaacaaauaucauga

SEQ ID NO: 1353383 - RNA, 19 nt, Homo sapiens
  misc_RNA (1)...(19): siRNA sense strand
accgauacauuagcuguuu

SEQ ID NO: 1353384 - RNA, 19 nt, Homo sapiens
  misc_RNA (1)...(19): siRNA sense strand
guuuauuaaugccagaaga

SEQ ID NO: 1353385 - RNA, 19 nt, Homo sapiens
  misc_RNA (1)...(19): siRNA sense strand
gcaaggggaugguuuagac

SEQ ID NO: 1353386 - RNA, 19 nt, Homo sapiens
  misc_RNA (1)...(19): siRNA sense strand
uaacuucugccaccgauac

SEQ ID NO: 1353387 - RNA, 19 nt, Homo sapiens
  misc_RNA (1)...(19): siRNA sense strand
ggacagguuauggacauuc

SEQ ID NO: 1353388 - RNA, 19 nt, Homo sapiens
  misc_RNA (1)...(19): siRNA sense strand
aauaguacagcccaugauu

SEQ ID NO: 1353389 - RNA, 19 nt, Homo sapiens
  misc_RNA (1)...(19): siRNA sense strand
acaaggacgcgaucuaugg

SEQ ID NO: 1353390 - RNA, 19 nt, Homo sapiens
  misc_RNA (1)...(19): siRNA sense strand
aaaucucgcugaccauaac

SEQ ID NO: 1353391 - RNA, 19 nt, Homo sapiens
  misc_RNA (1)...(19): siRNA sense strand
caaguacuaagguuucauc

SEQ ID NO: 1353392 - RNA, 19 nt, Homo sapiens
  misc_RNA (1)...(19): siRNA sense strand
gccagaagaagaauaguac

SEQ ID NO: 1353393 - RNA, 19 nt, Homo sapiens
  misc_RNA (1)...(19): siRNA sense strand
accauaacccuucuucuug

SEQ ID NO: 1353394 - RNA, 19 nt, Homo sapiens
  misc_RNA (1)...(19): siRNA sense strand
cgaacugugcgauaacuuc

SEQ ID NO: 1353395 - RNA, 19 nt, Homo sapiens
  misc_RNA (1)...(19): siRNA sense strand
ucaggcuccuccacaaauc

SEQ ID NO: 1353396 - RNA, 19 nt, Homo sapiens
  misc_RNA (1)...(19): siRNA sense strand
uguguuggauggucagcaa

SEQ ID NO: 1353397 - RNA, 19 nt, Homo sapiens
  misc_RNA (1)...(19): siRNA sense strand
gucagaucaugaagaacuu

SEQ ID NO: 1353398 - RNA, 19 nt, Homo sapiens
  misc_RNA (1)...(19): siRNA sense strand
agaauaguacagcccauga

SEQ ID NO: 1353399 - RNA, 19 nt, Homo sapiens
  misc_RNA (1)...(19): siRNA sense strand
acaagcaauacaaguacua

SEQ ID NO: 1353400 - RNA, 19 nt, Homo sapiens
  misc_RNA (1)...(19): siRNA sense strand
acgaugaugauccggauaa

SEQ ID NO: 1353401 - RNA, 19 nt, Homo sapiens
  misc_RNA (1)...(19): siRNA sense strand
ugccagaagaagaauagua

SEQ ID NO: 1353402 - RNA, 19 nt, Homo sapiens
  misc_RNA (1)...(19): siRNA sense strand
ggucuucgccaagcagguu

SEQ ID NO: 1353403 - RNA, 19 nt, Homo sapiens
  misc_RNA (1)...(19): siRNA sense strand
gcggagacaacagcaguga

SEQ ID NO: 1353404 - RNA, 19 nt, Homo sapiens
  misc_RNA (1)...(19): siRNA sense strand
auacaaguacuaagguuuc

SEQ ID NO: 1353405 - RNA, 19 nt, Homo sapiens
  misc_RNA (1)...(19): siRNA sense strand
agcaacaaauaucaugaga

SEQ ID NO: 1353406 - RNA, 19 nt, Homo sapiens
  misc_RNA (1)...(19): siRNA sense strand
gaaaagguccacgaacugu

SEQ ID NO: 1353407 - RNA, 19 nt, Homo sapiens
  misc_RNA (1)...(19): siRNA sense strand
caaggagcagcauauaguc

SEQ ID NO: 1353408 - RNA, 19 nt, Homo sapiens
  misc_RNA (1)...(19): siRNA sense strand
gccaaggagcagcauauag

SEQ ID NO: 1353409 - RNA, 19 nt, Homo sapiens
  misc_RNA (1)...(19): siRNA sense strand
uggacaauuugaugauaca

SEQ ID NO: 1353410 - RNA, 19 nt, Homo sapiens
  misc_RNA (1)...(19): siRNA sense strand
gguuucaucuuuuggaguu

SEQ ID NO: 1353411 - RNA, 19 nt, Homo sapiens
  misc_RNA (1)...(19): siRNA sense strand
cgauacauuagcuguuuga

SEQ ID NO: 1353412 - RNA, 19 nt, Homo sapiens
  misc_RNA (1)...(19): siRNA sense strand
ccgauacauuagcuguuug

SEQ ID NO: 1353413 - RNA, 19 nt, Homo sapiens
  misc_RNA (1)...(19): siRNA sense strand
gcagcuccaagucagauca

SEQ ID NO: 1353414 - RNA, 19 nt, Homo sapiens
  misc_RNA (1)...(19): siRNA sense strand
caauguuggcggacagguu

SEQ ID NO: 1353415 - RNA, 19 nt, Homo sapiens
  misc_RNA (1)...(19): siRNA sense strand
auuaaugccagaagaagaa

SEQ ID NO: 1353416 - RNA, 19 nt, Homo sapiens
  misc_RNA (1)...(19): siRNA sense strand
uagaaaagguccacgaacu

SEQ ID NO: 1353417 - RNA, 19 nt, Homo sapiens
  misc_RNA (1)...(19): siRNA sense strand
cccacaauguuaaauucug

SEQ ID NO: 1353418 - RNA, 19 nt, Homo sapiens
  misc_RNA (1)...(19): siRNA sense strand
ccaccacccagccaugaug

SEQ ID NO: 1353419 - RNA, 19 nt, Homo sapiens
  misc_RNA (1)...(19): siRNA sense strand
augaugauccggauaagga

SEQ ID NO: 1353420 - RNA, 19 nt, Homo sapiens
  misc_RNA (1)...(19): siRNA sense strand
guacuaagguuucaucuuu

SEQ ID NO: 1353421 - RNA, 19 nt, Homo sapiens
  misc_RNA (1)...(19): siRNA sense strand
caagucagaucaugaagaa

SEQ ID NO: 1353422 - RNA, 19 nt, Homo sapiens
  misc_RNA (1)...(19): siRNA sense strand
gauacaagcaauacaagua

SEQ ID NO: 1353423 - RNA, 19 nt, Homo sapiens
  misc_RNA (1)...(19): siRNA sense strand
caaaguagcaacaaauauc

SEQ ID NO: 1353424 - RNA, 19 nt, Homo sapiens
  misc_RNA (1)...(19): siRNA sense strand
gaccauaacccuucuucuu

SEQ ID NO: 1353425 - RNA, 19 nt, Homo sapiens
  misc_RNA (1)...(19): siRNA sense strand
ggacaaggacgcgaucuau

SEQ ID NO: 1353426 - RNA, 19 nt, Homo sapiens
  misc_RNA (1)...(19): siRNA sense strand
gcuggacaauuugaugaua

SEQ ID NO: 1353427 - RNA, 19 nt, Homo sapiens
  misc_RNA (1)...(19): siRNA sense strand
caauacaaguacuaagguu

SEQ ID NO: 1353428 - RNA, 19 nt, Homo sapiens
  misc_RNA (1)...(19): siRNA sense strand
ccaucgaccucgucauuga

SEQ ID NO: 1353429 - RNA, 19 nt, Homo sapiens
  misc_RNA (1)...(19): siRNA sense strand
gaugauacaagcaauacaa

SEQ ID NO: 1353430 - RNA, 19 nt, Homo sapiens
  misc_RNA (1)...(19): siRNA sense strand
guacaggugacgaugauga

SEQ ID NO: 1353431 - RNA, 19 nt, Homo sapiens
  misc_RNA (1)...(19): siRNA sense strand
ccaaggagcagcauauagu

SEQ ID NO: 1353432 - RNA, 19 nt, Homo sapiens
  misc_RNA (1)...(19): siRNA sense strand
acgaugagcugccccauua

SEQ ID NO: 1353433 - RNA, 19 nt, Homo sapiens
  misc_RNA (1)...(19): siRNA sense strand
agacaacaguguagcuuca

SEQ ID NO: 1353434 - RNA, 19 nt, Homo sapiens
  misc_RNA (1)...(19): siRNA sense strand
gagcuggacaauuugauga

SEQ ID NO: 1353435 - RNA, 19 nt, Homo sapiens
  misc_RNA (1)...(19): siRNA sense strand
gagccaaggagcagcauau

SEQ ID NO: 1353436 - RNA, 19 nt, Homo sapiens
  misc_RNA (1)...(19): siRNA sense strand
gcccaucgaccucgucauu

SEQ ID NO: 1353437 - RNA, 19 nt, Homo sapiens
  misc_RNA (1)...(19): siRNA sense strand
ccaaaguagcaacaaauau

SEQ ID NO: 1353438 - RNA, 19 nt, Homo sapiens
  misc_RNA (1)...(19): siRNA sense strand
gcucuggucuuugagaagu

SEQ ID NO: 1353439 - RNA, 19 nt, Homo sapiens
  misc_RNA (1)...(19): siRNA sense strand
uaguacagcccaugauuga

SEQ ID NO: 1353440 - RNA, 19 nt, Homo sapiens
  misc_RNA (1)...(19): siRNA sense strand
caaaucucgcugaccauaa

SEQ ID NO: 1353441 - RNA, 19 nt, Homo sapiens
  misc_RNA (1)...(19): siRNA sense strand
gcaauacaaguacuaaggu

SEQ ID NO: 1353442 - RNA, 19 nt, Homo sapiens
  misc_RNA (1)...(19): siRNA sense strand
cccaaaguagcaacaaaua

SEQ ID NO: 1353443 - RNA, 19 nt, Homo sapiens
  misc_RNA (1)...(19): siRNA sense strand
caagcaauacaaguacuaa

SEQ ID NO: 1353444 - RNA, 19 nt, Homo sapiens
  misc_RNA (1)...(19): siRNA sense strand
acaaauaucaugagagcau

SEQ ID NO: 1353445 - RNA, 19 nt, Homo sapiens
  misc_RNA (1)...(19): siRNA sense strand
acaaaucucgcugaccaua

SEQ ID NO: 1353446 - RNA, 19 nt, Homo sapiens
  misc_RNA (1)...(19): siRNA sense strand
gaacugugcgauaacuucu

SEQ ID NO: 1353447 - RNA, 19 nt, Homo sapiens
  misc_RNA (1)...(19): siRNA sense strand
gacaaggacgcgaucuaug

SEQ ID NO: 1353448 - RNA, 19 nt, Homo sapiens
  misc_RNA (1)...(19): siRNA sense strand
uccacgaacugugcgauaa

SEQ ID NO: 1353449 - RNA, 19 nt, Homo sapiens
  misc_RNA (1)...(19): siRNA sense strand
gaauaguacagcccaugau

SEQ ID NO: 1353450 - RNA, 19 nt, Homo sapiens
  misc_RNA (1)...(19): siRNA sense strand
ccaagucagaucaugaaga

SEQ ID NO: 1353451 - RNA, 19 nt, Homo sapiens
  misc_RNA (1)...(19): siRNA sense strand
gcuccaagucagaucauga

SEQ ID NO: 1353452 - RNA, 19 nt, Homo sapiens
  misc_RNA (1)...(19): siRNA sense strand
gggacaaggacgcgaucua

SEQ ID NO: 1353453 - RNA, 19 nt, Homo sapiens
  misc_RNA (1)...(19): siRNA sense strand
guagcaacaaauaucauga

SEQ ID NO: 1353454 - RNA, 19 nt, Homo sapiens
  misc_RNA (1)...(19): siRNA sense strand
accgauacauuagcuguuu

SEQ ID NO: 1353455 - RNA, 19 nt, Homo sapiens
  misc_RNA (1)...(19): siRNA sense strand
guuuauuaaugccagaaga

SEQ ID NO: 1353456 - RNA, 19 nt, Homo sapiens
  misc_RNA (1)...(19): siRNA sense strand
gcaaggggaugguuuagac

SEQ ID NO: 1353457 - RNA, 19 nt, Homo sapiens
  misc_RNA (1)...(19): siRNA sense strand
uaacuucugccaccgauac

SEQ ID NO: 1353458 - RNA, 19 nt, Homo sapiens
  misc_RNA (1)...(19): siRNA sense strand
aauaguacagcccaugauu

SEQ ID NO: 1353459 - RNA, 19 nt, Homo sapiens
  misc_RNA (1)...(19): siRNA sense strand
acaaggacgcgaucuaugg

SEQ ID NO: 1353460 - RNA, 19 nt, Homo sapiens
  misc_RNA (1)...(19): siRNA sense strand
aaaucucgcugaccauaac

SEQ ID NO: 1353461 - RNA, 19 nt, Homo sapiens
  misc_RNA (1)...(19): siRNA sense strand
caaguacuaagguuucauc

SEQ ID NO: 1353462 - RNA, 19 nt, Homo sapiens
  misc_RNA (1)...(19): siRNA sense strand
gccagaagaagaauaguac

SEQ ID NO: 1353463 - RNA, 19 nt, Homo sapiens
  misc_RNA (1)...(19): siRNA sense strand
accauaacccuucuucuug

SEQ ID NO: 1353464 - RNA, 19 nt, Homo sapiens
  misc_RNA (1)...(19): siRNA sense strand
cgaacugugcgauaacuuc

SEQ ID NO: 1353465 - RNA, 19 nt, Homo sapiens
  misc_RNA (1)...(19): siRNA sense strand
ucaggcuccuccacaaauc

SEQ ID NO: 1353466 - RNA, 19 nt, Homo sapiens
  misc_RNA (1)...(19): siRNA sense strand
uguguuggauggucagcaa

SEQ ID NO: 1353467 - RNA, 19 nt, Homo sapiens
  misc_RNA (1)...(19): siRNA sense strand
acaagcaauacaaguacua

SEQ ID NO: 1353468 - RNA, 19 nt, Homo sapiens
  misc_RNA (1)...(19): siRNA sense strand
agaauaguacagcccauga

SEQ ID NO: 1353469 - RNA, 19 nt, Homo sapiens
  misc_RNA (1)...(19): siRNA sense strand
gucagaucaugaagaacuu

SEQ ID NO: 1353470 - RNA, 19 nt, Homo sapiens
  misc_RNA (1)...(19): siRNA sense strand
ggucuucgccaagcagguu

SEQ ID NO: 1353471 - RNA, 19 nt, Homo sapiens
  misc_RNA (1)...(19): siRNA sense strand
ugccagaagaagaauagua

SEQ ID NO: 1353472 - RNA, 19 nt, Homo sapiens
  misc_RNA (1)...(19): siRNA sense strand
acgaugaugauccggauaa

SEQ ID NO: 1353473 - RNA, 19 nt, Homo sapiens
  misc_RNA (1)...(19): siRNA sense strand
auacaaguacuaagguuuc

SEQ ID NO: 1353474 - RNA, 19 nt, Homo sapiens
  misc_RNA (1)...(19): siRNA sense strand
agcaacaaauaucaugaga

SEQ ID NO: 1353475 - RNA, 19 nt, Homo sapiens
  misc_RNA (1)...(19): siRNA sense strand
gcggagacaacagcaguga

SEQ ID NO: 1353476 - RNA, 19 nt, Homo sapiens
  misc_RNA (1)...(19): siRNA sense strand
gguuucaucuuuuggaguu

SEQ ID NO: 1353477 - RNA, 19 nt, Homo sapiens
  misc_RNA (1)...(19): siRNA sense strand
caaggagcagcauauaguc

SEQ ID NO: 1353478 - RNA, 19 nt, Homo sapiens
  misc_RNA (1)...(19): siRNA sense strand
gccaaggagcagcauauag

SEQ ID NO: 1353479 - RNA, 19 nt, Homo sapiens
  misc_RNA (1)...(19): siRNA sense strand
cgauacauuagcuguuuga

SEQ ID NO: 1353480 - RNA, 19 nt, Homo sapiens
  misc_RNA (1)...(19): siRNA sense strand
ccgauacauuagcuguuug

SEQ ID NO: 1353481 - RNA, 19 nt, Homo sapiens
  misc_RNA (1)...(19): siRNA sense strand
uggacaauuugaugauaca

SEQ ID NO: 1353482 - RNA, 19 nt, Homo sapiens
  misc_RNA (1)...(19): siRNA sense strand
gaaaagguccacgaacugu

SEQ ID NO: 1353483 - RNA, 19 nt, Homo sapiens
  misc_RNA (1)...(19): siRNA sense strand
gcagcuccaagucagauca

SEQ ID NO: 1353484 - RNA, 19 nt, Homo sapiens
  misc_RNA (1)...(19): siRNA sense strand
auuaaugccagaagaagaa

SEQ ID NO: 1353485 - RNA, 19 nt, Homo sapiens
  misc_RNA (1)...(19): siRNA sense strand
uagaaaagguccacgaacu

SEQ ID NO: 1353486 - RNA, 19 nt, Homo sapiens
  misc_RNA (1)...(19): siRNA sense strand
augaugauccggauaagga

SEQ ID NO: 1353487 - RNA, 19 nt, Homo sapiens
  misc_RNA (1)...(19): siRNA sense strand
guacuaagguuucaucuuu

SEQ ID NO: 1353488 - RNA, 19 nt, Homo sapiens
  misc_RNA (1)...(19): siRNA sense strand
caagucagaucaugaagaa

SEQ ID NO: 1353489 - RNA, 19 nt, Homo sapiens
  misc_RNA (1)...(19): siRNA sense strand
gauacaagcaauacaagua

SEQ ID NO: 1353490 - RNA, 19 nt, Homo sapiens
  misc_RNA (1)...(19): siRNA sense strand
caaaguagcaacaaauauc

SEQ ID NO: 1353491 - RNA, 19 nt, Homo sapiens
  misc_RNA (1)...(19): siRNA sense strand
gaccauaacccuucuucuu

SEQ ID NO: 1353492 - RNA, 19 nt, Homo sapiens
  misc_RNA (1)...(19): siRNA sense strand
ggacaaggacgcgaucuau

SEQ ID NO: 1353493 - RNA, 19 nt, Homo sapiens
  misc_RNA (1)...(19): siRNA sense strand
gcuggacaauuugaugaua

SEQ ID NO: 1353494 - RNA, 19 nt, Homo sapiens
  misc_RNA (1)...(19): siRNA sense strand
caauacaaguacuaagguu

SEQ ID NO: 1353495 - RNA, 19 nt, Homo sapiens
  misc_RNA (1)...(19): siRNA sense strand
ccaucgaccucgucauuga

SEQ ID NO: 1353496 - RNA, 19 nt, Homo sapiens
  misc_RNA (1)...(19): siRNA sense strand
gaugauacaagcaauacaa

SEQ ID NO: 1353497 - RNA, 19 nt, Homo sapiens
  misc_RNA (1)...(19): siRNA sense strand
guacaggugacgaugauga

SEQ ID NO: 1353498 - RNA, 19 nt, Homo sapiens
  misc_RNA (1)...(19): siRNA sense strand
ccaaggagcagcauauagu

SEQ ID NO: 1353499 - RNA, 19 nt, Homo sapiens
  misc_RNA (1)...(19): siRNA sense strand
agacaacaguguagcuuca

SEQ ID NO: 1353500 - RNA, 19 nt, Homo sapiens
  misc_RNA (1)...(19): siRNA sense strand
gagcuggacaauuugauga

SEQ ID NO: 1353501 - RNA, 19 nt, Homo sapiens
  misc_RNA (1)...(19): siRNA sense strand
gagccaaggagcagcauau

SEQ ID NO: 1353502 - RNA, 19 nt, Homo sapiens
  misc_RNA (1)...(19): siRNA sense strand
gcccaucgaccucgucauu

SEQ ID NO: 1353503 - RNA, 19 nt, Homo sapiens
  misc_RNA (1)...(19): siRNA sense strand
ccaaaguagcaacaaauau

SEQ ID NO: 1353504 - RNA, 19 nt, Homo sapiens
  misc_RNA (1)...(19): siRNA sense strand
gcucuggucuuugagaagu

SEQ ID NO: 1353505 - RNA, 19 nt, Homo sapiens
  misc_RNA (1)...(19): siRNA sense strand
uaguacagcccaugauuga

SEQ ID NO: 1353506 - RNA, 19 nt, Homo sapiens
  misc_RNA (1)...(19): siRNA sense strand
caaaucucgcugaccauaa

SEQ ID NO: 1353507 - RNA, 19 nt, Homo sapiens
  misc_RNA (1)...(19): siRNA sense strand
gcaauacaaguacuaaggu

SEQ ID NO: 1353508 - RNA, 19 nt, Homo sapiens
  misc_RNA (1)...(19): siRNA sense strand
cccaaaguagcaacaaaua

SEQ ID NO: 1353509 - RNA, 19 nt, Homo sapiens
  misc_RNA (1)...(19): siRNA sense strand
caagcaauacaaguacuaa

SEQ ID NO: 1353510 - RNA, 19 nt, Homo sapiens
  misc_RNA (1)...(19): siRNA sense strand
acaaauaucaugagagcau

SEQ ID NO: 1353511 - RNA, 19 nt, Homo sapiens
  misc_RNA (1)...(19): siRNA sense strand
acaaaucucgcugaccaua

SEQ ID NO: 1353512 - RNA, 19 nt, Homo sapiens
  misc_RNA (1)...(19): siRNA sense strand
gaacugugcgauaacuucu

SEQ ID NO: 1353513 - RNA, 19 nt, Homo sapiens
  misc_RNA (1)...(19): siRNA sense strand
gacaaggacgcgaucuaug

SEQ ID NO: 1353514 - RNA, 19 nt, Homo sapiens
  misc_RNA (1)...(19): siRNA sense strand
uccacgaacugugcgauaa

SEQ ID NO: 1353515 - RNA, 19 nt, Homo sapiens
  misc_RNA (1)...(19): siRNA sense strand
gaauaguacagcccaugau

SEQ ID NO: 1353516 - RNA, 19 nt, Homo sapiens
  misc_RNA (1)...(19): siRNA sense strand
ccaagucagaucaugaaga

SEQ ID NO: 1353517 - RNA, 19 nt, Homo sapiens
  misc_RNA (1)...(19): siRNA sense strand
gcuccaagucagaucauga

SEQ ID NO: 1353518 - RNA, 19 nt, Homo sapiens
  misc_RNA (1)...(19): siRNA sense strand
gggacaaggacgcgaucua

SEQ ID NO: 1353519 - RNA, 19 nt, Homo sapiens
  misc_RNA (1)...(19): siRNA sense strand
guagcaacaaauaucauga

SEQ ID NO: 1353520 - RNA, 19 nt, Homo sapiens
  misc_RNA (1)...(19): siRNA sense strand
accgauacauuagcuguuu

SEQ ID NO: 1353521 - RNA, 19 nt, Homo sapiens
  misc_RNA (1)...(19): siRNA sense strand
guuuauuaaugccagaaga

SEQ ID NO: 1353522 - RNA, 19 nt, Homo sapiens
  misc_RNA (1)...(19): siRNA sense strand
gcaaggggaugguuuagac

SEQ ID NO: 1353523 - RNA, 19 nt, Homo sapiens
  misc_RNA (1)...(19): siRNA sense strand
uaacuucugccaccgauac

SEQ ID NO: 1353524 - RNA, 19 nt, Homo sapiens
  misc_RNA (1)...(19): siRNA sense strand
aauaguacagcccaugauu

SEQ ID NO: 1353525 - RNA, 19 nt, Homo sapiens
  misc_RNA (1)...(19): siRNA sense strand
aaaucucgcugaccauaac

SEQ ID NO: 1353526 - RNA, 19 nt, Homo sapiens
  misc_RNA (1)...(19): siRNA sense strand
acaaggacgcgaucuaugg

SEQ ID NO: 1353527 - RNA, 19 nt, Homo sapiens
  misc_RNA (1)...(19): siRNA sense strand
caaguacuaagguuucauc

SEQ ID NO: 1353528 - RNA, 19 nt, Homo sapiens
  misc_RNA (1)...(19): siRNA sense strand
gccagaagaagaauaguac

SEQ ID NO: 1353529 - RNA, 19 nt, Homo sapiens
  misc_RNA (1)...(19): siRNA sense strand
accauaacccuucuucuug

SEQ ID NO: 1353530 - RNA, 19 nt, Homo sapiens
  misc_RNA (1)...(19): siRNA sense strand
cgaacugugcgauaacuuc

SEQ ID NO: 1353531 - RNA, 19 nt, Homo sapiens
  misc_RNA (1)...(19): siRNA sense strand
ucaggcuccuccacaaauc

SEQ ID NO: 1353532 - RNA, 19 nt, Homo sapiens
  misc_RNA (1)...(19): siRNA sense strand
uguguuggauggucagcaa

SEQ ID NO: 1353533 - RNA, 19 nt, Homo sapiens
  misc_RNA (1)...(19): siRNA sense strand
acaagcaauacaaguacua

SEQ ID NO: 1353534 - RNA, 19 nt, Homo sapiens
  misc_RNA (1)...(19): siRNA sense strand
agaauaguacagcccauga

SEQ ID NO: 1353535 - RNA, 19 nt, Homo sapiens
  misc_RNA (1)...(19): siRNA sense strand
gucagaucaugaagaacuu

SEQ ID NO: 1353536 - RNA, 19 nt, Homo sapiens
  misc_RNA (1)...(19): siRNA sense strand
ggucuucgccaagcagguu

SEQ ID NO: 1353537 - RNA, 19 nt, Homo sapiens
  misc_RNA (1)...(19): siRNA sense strand
ugccagaagaagaauagua

SEQ ID NO: 1353538 - RNA, 19 nt, Homo sapiens
  misc_RNA (1)...(19): siRNA sense strand
acgaugaugauccggauaa

SEQ ID NO: 1353539 - RNA, 19 nt, Homo sapiens
  misc_RNA (1)...(19): siRNA sense strand
auacaaguacuaagguuuc

SEQ ID NO: 1353540 - RNA, 19 nt, Homo sapiens
  misc_RNA (1)...(19): siRNA sense strand
agcaacaaauaucaugaga

SEQ ID NO: 1353541 - RNA, 19 nt, Homo sapiens
  misc_RNA (1)...(19): siRNA sense strand
gcggagacaacagcaguga

SEQ ID NO: 1353542 - RNA, 19 nt, Homo sapiens
  misc_RNA (1)...(19): siRNA sense strand
gguuucaucuuuuggaguu

SEQ ID NO: 1353543 - RNA, 19 nt, Homo sapiens
  misc_RNA (1)...(19): siRNA sense strand
caaggagcagcauauaguc

SEQ ID NO: 1353544 - RNA, 19 nt, Homo sapiens
  misc_RNA (1)...(19): siRNA sense strand
gccaaggagcagcauauag

SEQ ID NO: 1353545 - RNA, 19 nt, Homo sapiens
  misc_RNA (1)...(19): siRNA sense strand
uggacaauuugaugauaca

SEQ ID NO: 1353546 - RNA, 19 nt, Homo sapiens
  misc_RNA (1)...(19): siRNA sense strand
cgauacauuagcuguuuga

SEQ ID NO: 1353547 - RNA, 19 nt, Homo sapiens
  misc_RNA (1)...(19): siRNA sense strand
ccgauacauuagcuguuug

SEQ ID NO: 1353548 - RNA, 19 nt, Homo sapiens
  misc_RNA (1)...(19): siRNA sense strand
gaaaagguccacgaacugu

SEQ ID NO: 1353549 - RNA, 19 nt, Homo sapiens
  misc_RNA (1)...(19): siRNA sense strand
gcagcuccaagucagauca

SEQ ID NO: 1353550 - RNA, 19 nt, Homo sapiens
  misc_RNA (1)...(19): siRNA sense strand
auuaaugccagaagaagaa

SEQ ID NO: 1353551 - RNA, 19 nt, Homo sapiens
  misc_RNA (1)...(19): siRNA sense strand
uagaaaagguccacgaacu

SEQ ID NO: 1353552 - RNA, 19 nt, Homo sapiens
  misc_RNA (1)...(19): siRNA sense strand
augaugauccggauaagga

SEQ ID NO: 1353553 - RNA, 19 nt, Homo sapiens
  misc_RNA (1)...(19): siRNA sense strand
guacuaagguuucaucuuu

SEQ ID NO: 1353554 - RNA, 19 nt, Homo sapiens
  misc_RNA (1)...(19): siRNA sense strand
caagucagaucaugaagaa

SEQ ID NO: 1353555 - RNA, 19 nt, Homo sapiens
  misc_RNA (1)...(19): siRNA sense strand
gauacaagcaauacaagua

SEQ ID NO: 1353556 - RNA, 19 nt, Homo sapiens
  misc_RNA (1)...(19): siRNA sense strand
caaaguagcaacaaauauc

SEQ ID NO: 1353557 - RNA, 19 nt, Homo sapiens
  misc_RNA (1)...(19): siRNA sense strand
gaccauaacccuucuucuu

SEQ ID NO: 1353558 - RNA, 19 nt, Homo sapiens
  misc_RNA (1)...(19): siRNA sense strand
gcuggacaauuugaugaua

SEQ ID NO: 1353559 - RNA, 19 nt, Homo sapiens
  misc_RNA (1)...(19): siRNA sense strand
caauacaaguacuaagguu

SEQ ID NO: 1353560 - RNA, 19 nt, Homo sapiens
  misc_RNA (1)...(19): siRNA sense strand
ccaucgaccucgucauuga

SEQ ID NO: 1353561 - RNA, 19 nt, Homo sapiens
  misc_RNA (1)...(19): siRNA sense strand
gaugauacaagcaauacaa

SEQ ID NO: 1353562 - RNA, 19 nt, Homo sapiens
  misc_RNA (1)...(19): siRNA sense strand
guacaggugacgaugauga

SEQ ID NO: 1353563 - RNA, 19 nt, Homo sapiens
  misc_RNA (1)...(19): siRNA sense strand
ccaaggagcagcauauagu

SEQ ID NO: 1353564 - RNA, 19 nt, Homo sapiens
  misc_RNA (1)...(19): siRNA sense strand
agacaacaguguagcuuca

SEQ ID NO: 1353565 - RNA, 19 nt, Homo sapiens
  misc_RNA (1)...(19): siRNA sense strand
gagcuggacaauuugauga

SEQ ID NO: 1353566 - RNA, 19 nt, Homo sapiens
  misc_RNA (1)...(19): siRNA sense strand
gagccaaggagcagcauau

SEQ ID NO: 1353567 - RNA, 19 nt, Homo sapiens
  misc_RNA (1)...(19): siRNA sense strand
gcccaucgaccucgucauu

SEQ ID NO: 1353568 - RNA, 19 nt, Homo sapiens
  misc_RNA (1)...(19): siRNA sense strand
ccaaaguagcaacaaauau

SEQ ID NO: 1353569 - RNA, 19 nt, Homo sapiens
  misc_RNA (1)...(19): siRNA sense strand
gcaauacaaguacuaaggu

SEQ ID NO: 1353570 - RNA, 19 nt, Homo sapiens
  misc_RNA (1)...(19): siRNA sense strand
uaguacagcccaugauuga

SEQ ID NO: 1353571 - RNA, 19 nt, Homo sapiens
  misc_RNA (1)...(19): siRNA sense strand
caaaucucgcugaccauaa

SEQ ID NO: 1353572 - RNA, 19 nt, Homo sapiens
  misc_RNA (1)...(19): siRNA sense strand
gcucuggucuuugagaagu

SEQ ID NO: 1353573 - RNA, 19 nt, Homo sapiens
  misc_RNA (1)...(19): siRNA sense strand
cccaaaguagcaacaaaua

SEQ ID NO: 1353574 - RNA, 19 nt, Homo sapiens
  misc_RNA (1)...(19): siRNA sense strand
caagcaauacaaguacuaa

SEQ ID NO: 1353575 - RNA, 19 nt, Homo sapiens
  misc_RNA (1)...(19): siRNA sense strand
acaaauaucaugagagcau

SEQ ID NO: 1353576 - RNA, 19 nt, Homo sapiens
  misc_RNA (1)...(19): siRNA sense strand
acaaaucucgcugaccaua

SEQ ID NO: 1353577 - RNA, 19 nt, Homo sapiens
  misc_RNA (1)...(19): siRNA sense strand
gaacugugcgauaacuucu

SEQ ID NO: 1353578 - RNA, 19 nt, Homo sapiens
  misc_RNA (1)...(19): siRNA sense strand
uccacgaacugugcgauaa

SEQ ID NO: 1353579 - RNA, 19 nt, Homo sapiens
  misc_RNA (1)...(19): siRNA sense strand
gaauaguacagcccaugau

SEQ ID NO: 1353580 - RNA, 19 nt, Homo sapiens
  misc_RNA (1)...(19): siRNA sense strand
ccaagucagaucaugaaga

SEQ ID NO: 1353581 - RNA, 19 nt, Homo sapiens
  misc_RNA (1)...(19): siRNA sense strand
gcuccaagucagaucauga

SEQ ID NO: 1353582 - RNA, 19 nt, Homo sapiens
  misc_RNA (1)...(19): siRNA sense strand
guagcaacaaauaucauga

SEQ ID NO: 1353583 - RNA, 19 nt, Homo sapiens
  misc_RNA (1)...(19): siRNA sense strand
accgauacauuagcuguuu

SEQ ID NO: 1353584 - RNA, 19 nt, Homo sapiens
  misc_RNA (1)...(19): siRNA sense strand
guuuauuaaugccagaaga

SEQ ID NO: 1353585 - RNA, 19 nt, Homo sapiens
  misc_RNA (1)...(19): siRNA sense strand
gcaaggggaugguuuagac

SEQ ID NO: 1353586 - RNA, 19 nt, Homo sapiens
  misc_RNA (1)...(19): siRNA sense strand
uaacuucugccaccgauac

SEQ ID NO: 1353587 - RNA, 19 nt, Homo sapiens
  misc_RNA (1)...(19): siRNA sense strand
aauaguacagcccaugauu

SEQ ID NO: 1353588 - RNA, 19 nt, Homo sapiens
  misc_RNA (1)...(19): siRNA sense strand
aaaucucgcugaccauaac

SEQ ID NO: 1353589 - RNA, 19 nt, Homo sapiens
  misc_RNA (1)...(19): siRNA sense strand
caaguacuaagguuucauc

SEQ ID NO: 1353590 - RNA, 19 nt, Homo sapiens
  misc_RNA (1)...(19): siRNA sense strand
gccagaagaagaauaguac

SEQ ID NO: 1353591 - RNA, 19 nt, Homo sapiens
  misc_RNA (1)...(19): siRNA sense strand
accauaacccuucuucuug

SEQ ID NO: 1353592 - RNA, 19 nt, Homo sapiens
  misc_RNA (1)...(19): siRNA sense strand
cgaacugugcgauaacuuc

SEQ ID NO: 1353593 - RNA, 19 nt, Homo sapiens
  misc_RNA (1)...(19): siRNA sense strand
ucaggcuccuccacaaauc

SEQ ID NO: 1353594 - RNA, 19 nt, Homo sapiens
  misc_RNA (1)...(19): siRNA sense strand
uguguuggauggucagcaa

SEQ ID NO: 1353595 - RNA, 19 nt, Homo sapiens
  misc_RNA (1)...(19): siRNA sense strand
gucagaucaugaagaacuu

SEQ ID NO: 1353596 - RNA, 19 nt, Homo sapiens
  misc_RNA (1)...(19): siRNA sense strand
agaauaguacagcccauga

SEQ ID NO: 1353597 - RNA, 19 nt, Homo sapiens
  misc_RNA (1)...(19): siRNA sense strand
acaagcaauacaaguacua

SEQ ID NO: 1353598 - RNA, 19 nt, Homo sapiens
  misc_RNA (1)...(19): siRNA sense strand
acgaugaugauccggauaa

SEQ ID NO: 1353599 - RNA, 19 nt, Homo sapiens
  misc_RNA (1)...(19): siRNA sense strand
ggucuucgccaagcagguu

SEQ ID NO: 1353600 - RNA, 19 nt, Homo sapiens
  misc_RNA (1)...(19): siRNA sense strand
ugccagaagaagaauagua

SEQ ID NO: 1353601 - RNA, 19 nt, Homo sapiens
  misc_RNA (1)...(19): siRNA sense strand
auacaaguacuaagguuuc

SEQ ID NO: 1353602 - RNA, 19 nt, Homo sapiens
  misc_RNA (1)...(19): siRNA sense strand
agcaacaaauaucaugaga

SEQ ID NO: 1353603 - RNA, 19 nt, Homo sapiens
  misc_RNA (1)...(19): siRNA sense strand
gcggagacaacagcaguga

SEQ ID NO: 1353604 - RNA, 19 nt, Homo sapiens
  misc_RNA (1)...(19): siRNA sense strand
ccgauacauuagcuguuug

SEQ ID NO: 1353605 - RNA, 19 nt, Homo sapiens
  misc_RNA (1)...(19): siRNA sense strand
caaggagcagcauauaguc

SEQ ID NO: 1353606 - RNA, 19 nt, Homo sapiens
  misc_RNA (1)...(19): siRNA sense strand
gguuucaucuuuuggaguu

SEQ ID NO: 1353607 - RNA, 19 nt, Homo sapiens
  misc_RNA (1)...(19): siRNA sense strand
gccaaggagcagcauauag

SEQ ID NO: 1353608 - RNA, 19 nt, Homo sapiens
  misc_RNA (1)...(19): siRNA sense strand
uggacaauuugaugauaca

SEQ ID NO: 1353609 - RNA, 19 nt, Homo sapiens
  misc_RNA (1)...(19): siRNA sense strand
gaaaagguccacgaacugu

SEQ ID NO: 1353610 - RNA, 19 nt, Homo sapiens
  misc_RNA (1)...(19): siRNA sense strand
cgauacauuagcuguuuga

SEQ ID NO: 1353611 - RNA, 19 nt, Homo sapiens
  misc_RNA (1)...(19): siRNA sense strand
gcagcuccaagucagauca

SEQ ID NO: 1353612 - RNA, 19 nt, Homo sapiens
  misc_RNA (1)...(19): siRNA sense strand
auuaaugccagaagaagaa

SEQ ID NO: 1353613 - RNA, 19 nt, Homo sapiens
  misc_RNA (1)...(19): siRNA sense strand
augaugauccggauaagga

SEQ ID NO: 1353614 - RNA, 19 nt, Homo sapiens
  misc_RNA (1)...(19): siRNA sense strand
uagaaaagguccacgaacu

SEQ ID NO: 1353615 - RNA, 19 nt, Homo sapiens
  misc_RNA (1)...(19): siRNA sense strand
guacuaagguuucaucuuu

SEQ ID NO: 1353616 - RNA, 19 nt, Homo sapiens
  misc_RNA (1)...(19): siRNA sense strand
caagucagaucaugaagaa

SEQ ID NO: 1353617 - RNA, 19 nt, Homo sapiens
  misc_RNA (1)...(19): siRNA sense strand
gauacaagcaauacaagua

SEQ ID NO: 1353618 - RNA, 19 nt, Homo sapiens
  misc_RNA (1)...(19): siRNA sense strand
caaaguagcaacaaauauc

SEQ ID NO: 1353619 - RNA, 19 nt, Homo sapiens
  misc_RNA (1)...(19): siRNA sense strand
gaccauaacccuucuucuu

SEQ ID NO: 1353620 - RNA, 19 nt, Homo sapiens
  misc_RNA (1)...(19): siRNA sense strand
ggacaaggacgcgaucuau

SEQ ID NO: 1353621 - RNA, 19 nt, Homo sapiens
  misc_RNA (1)...(19): siRNA sense strand
gcuggacaauuugaugaua

SEQ ID NO: 1353622 - RNA, 19 nt, Homo sapiens
  misc_RNA (1)...(19): siRNA sense strand
caauacaaguacuaagguu

SEQ ID NO: 1353623 - RNA, 19 nt, Homo sapiens
  misc_RNA (1)...(19): siRNA sense strand
ccaucgaccucgucauuga

SEQ ID NO: 1353624 - RNA, 19 nt, Homo sapiens
  misc_RNA (1)...(19): siRNA sense strand
gaugauacaagcaauacaa

SEQ ID NO: 1353625 - RNA, 19 nt, Homo sapiens
  misc_RNA (1)...(19): siRNA sense strand
guacaggugacgaugauga

SEQ ID NO: 1353626 - RNA, 19 nt, Homo sapiens
  misc_RNA (1)...(19): siRNA sense strand
ccaaggagcagcauauagu

SEQ ID NO: 1353627 - RNA, 19 nt, Homo sapiens
  misc_RNA (1)...(19): siRNA sense strand
agacaacaguguagcuuca

SEQ ID NO: 1353628 - RNA, 19 nt, Homo sapiens
  misc_RNA (1)...(19): siRNA sense strand
gagcuggacaauuugauga

SEQ ID NO: 1353629 - RNA, 19 nt, Homo sapiens
  misc_RNA (1)...(19): siRNA sense strand
gagccaaggagcagcauau

SEQ ID NO: 1353630 - RNA, 19 nt, Homo sapiens
  misc_RNA (1)...(19): siRNA sense strand
gcccaucgaccucgucauu

SEQ ID NO: 1353631 - RNA, 19 nt, Homo sapiens
  misc_RNA (1)...(19): siRNA sense strand
ccaaaguagcaacaaauau

SEQ ID NO: 1353632 - RNA, 19 nt, Homo sapiens
  misc_RNA (1)...(19): siRNA sense strand
gcucuggucuuugagaagu

SEQ ID NO: 1353633 - RNA, 19 nt, Homo sapiens
  misc_RNA (1)...(19): siRNA sense strand
uaguacagcccaugauuga

SEQ ID NO: 1353634 - RNA, 19 nt, Homo sapiens
  misc_RNA (1)...(19): siRNA sense strand
caaaucucgcugaccauaa

SEQ ID NO: 1353635 - RNA, 19 nt, Homo sapiens
  misc_RNA (1)...(19): siRNA sense strand
gcaauacaaguacuaaggu

SEQ ID NO: 1353636 - RNA, 19 nt, Homo sapiens
  misc_RNA (1)...(19): siRNA sense strand
cccaaaguagcaacaaaua

SEQ ID NO: 1353637 - RNA, 19 nt, Homo sapiens
  misc_RNA (1)...(19): siRNA sense strand
caagcaauacaaguacuaa

SEQ ID NO: 1353638 - RNA, 19 nt, Homo sapiens
  misc_RNA (1)...(19): siRNA sense strand
acaaauaucaugagagcau

SEQ ID NO: 1353639 - RNA, 19 nt, Homo sapiens
  misc_RNA (1)...(19): siRNA sense strand
acaaaucucgcugaccaua

SEQ ID NO: 1353640 - RNA, 19 nt, Homo sapiens
  misc_RNA (1)...(19): siRNA sense strand
gaacugugcgauaacuucu

SEQ ID NO: 1353641 - RNA, 19 nt, Homo sapiens
  misc_RNA (1)...(19): siRNA sense strand
gacaaggacgcgaucuaug

SEQ ID NO: 1353642 - RNA, 19 nt, Homo sapiens
  misc_RNA (1)...(19): siRNA sense strand
uccacgaacugugcgauaa

SEQ ID NO: 1353643 - RNA, 19 nt, Homo sapiens
  misc_RNA (1)...(19): siRNA sense strand
gaauaguacagcccaugau

SEQ ID NO: 1353644 - RNA, 19 nt, Homo sapiens
  misc_RNA (1)...(19): siRNA sense strand
ccaagucagaucaugaaga

SEQ ID NO: 1353645 - RNA, 19 nt, Homo sapiens
  misc_RNA (1)...(19): siRNA sense strand
gcuccaagucagaucauga

SEQ ID NO: 1353646 - RNA, 19 nt, Homo sapiens
  misc_RNA (1)...(19): siRNA sense strand
gggacaaggacgcgaucua

SEQ ID NO: 1353647 - RNA, 19 nt, Homo sapiens
  misc_RNA (1)...(19): siRNA sense strand
guagcaacaaauaucauga

SEQ ID NO: 1353648 - RNA, 19 nt, Homo sapiens
  misc_RNA (1)...(19): siRNA sense strand
accgauacauuagcuguuu

SEQ ID NO: 1353649 - RNA, 19 nt, Homo sapiens
  misc_RNA (1)...(19): siRNA sense strand
guuuauuaaugccagaaga

SEQ ID NO: 1353650 - RNA, 19 nt, Homo sapiens
  misc_RNA (1)...(19): siRNA sense strand
gcaaggggaugguuuagac

SEQ ID NO: 1353651 - RNA, 19 nt, Homo sapiens
  misc_RNA (1)...(19): siRNA sense strand
uaacuucugccaccgauac

SEQ ID NO: 1353652 - RNA, 19 nt, Homo sapiens
  misc_RNA (1)...(19): siRNA sense strand
aauaguacagcccaugauu

SEQ ID NO: 1353653 - RNA, 19 nt, Homo sapiens
  misc_RNA (1)...(19): siRNA sense strand
aaaucucgcugaccauaac

SEQ ID NO: 1353654 - RNA, 19 nt, Homo sapiens
  misc_RNA (1)...(19): siRNA sense strand
acaaggacgcgaucuaugg

SEQ ID NO: 1353655 - RNA, 19 nt, Homo sapiens
  misc_RNA (1)...(19): siRNA sense strand
caaguacuaagguuucauc

SEQ ID NO: 1353656 - RNA, 19 nt, Homo sapiens
  misc_RNA (1)...(19): siRNA sense strand
gccagaagaagaauaguac

SEQ ID NO: 1353657 - RNA, 19 nt, Homo sapiens
  misc_RNA (1)...(19): siRNA sense strand
accauaacccuucuucuug

SEQ ID NO: 1353658 - RNA, 19 nt, Homo sapiens
  misc_RNA (1)...(19): siRNA sense strand
cgaacugugcgauaacuuc

SEQ ID NO: 1353659 - RNA, 19 nt, Homo sapiens
  misc_RNA (1)...(19): siRNA sense strand
ucaggcuccuccacaaauc

SEQ ID NO: 1353660 - RNA, 19 nt, Homo sapiens
  misc_RNA (1)...(19): siRNA sense strand
uguguuggauggucagcaa

SEQ ID NO: 1353661 - RNA, 19 nt, Homo sapiens
  misc_RNA (1)...(19): siRNA sense strand
acaagcaauacaaguacua

SEQ ID NO: 1353662 - RNA, 19 nt, Homo sapiens
  misc_RNA (1)...(19): siRNA sense strand
agaauaguacagcccauga

SEQ ID NO: 1353663 - RNA, 19 nt, Homo sapiens
  misc_RNA (1)...(19): siRNA sense strand
gucagaucaugaagaacuu

SEQ ID NO: 1353664 - RNA, 19 nt, Homo sapiens
  misc_RNA (1)...(19): siRNA sense strand
ggucuucgccaagcagguu

SEQ ID NO: 1353665 - RNA, 19 nt, Homo sapiens
  misc_RNA (1)...(19): siRNA sense strand
ugccagaagaagaauagua

SEQ ID NO: 1353666 - RNA, 19 nt, Homo sapiens
  misc_RNA (1)...(19): siRNA sense strand
acgaugaugauccggauaa

SEQ ID NO: 1353667 - RNA, 19 nt, Homo sapiens
  misc_RNA (1)...(19): siRNA sense strand
auacaaguacuaagguuuc

SEQ ID NO: 1353668 - RNA, 19 nt, Homo sapiens
  misc_RNA (1)...(19): siRNA sense strand
agcaacaaauaucaugaga

SEQ ID NO: 1353669 - RNA, 19 nt, Homo sapiens
  misc_RNA (1)...(19): siRNA sense strand
gcggagacaacagcaguga

SEQ ID NO: 1353670 - RNA, 19 nt, Homo sapiens
  misc_RNA (1)...(19): siRNA sense strand
gguuucaucuuuuggaguu

SEQ ID NO: 1353671 - RNA, 19 nt, Homo sapiens
  misc_RNA (1)...(19): siRNA sense strand
caaggagcagcauauaguc

SEQ ID NO: 1353672 - RNA, 19 nt, Homo sapiens
  misc_RNA (1)...(19): siRNA sense strand
gccaaggagcagcauauag

SEQ ID NO: 1353673 - RNA, 19 nt, Homo sapiens
  misc_RNA (1)...(19): siRNA sense strand
uggacaauuugaugauaca

SEQ ID NO: 1353674 - RNA, 19 nt, Homo sapiens
  misc_RNA (1)...(19): siRNA sense strand
cgauacauuagcuguuuga

SEQ ID NO: 1353675 - RNA, 19 nt, Homo sapiens
  misc_RNA (1)...(19): siRNA sense strand
ccgauacauuagcuguuug

SEQ ID NO: 1353676 - RNA, 19 nt, Homo sapiens
  misc_RNA (1)...(19): siRNA sense strand
gaaaagguccacgaacugu

SEQ ID NO: 1353677 - RNA, 19 nt, Homo sapiens
  misc_RNA (1)...(19): siRNA sense strand
gcagcuccaagucagauca

SEQ ID NO: 1353678 - RNA, 19 nt, Homo sapiens
  misc_RNA (1)...(19): siRNA sense strand
auuaaugccagaagaagaa

SEQ ID NO: 1353679 - RNA, 19 nt, Homo sapiens
  misc_RNA (1)...(19): siRNA sense strand
uagaaaagguccacgaacu

SEQ ID NO: 1353680 - RNA, 19 nt, Homo sapiens
  misc_RNA (1)...(19): siRNA sense strand
augaugauccggauaagga

SEQ ID NO: 1353681 - RNA, 19 nt, Homo sapiens
  misc_RNA (1)...(19): siRNA sense strand
guacuaagguuucaucuuu

SEQ ID NO: 1353682 - RNA, 19 nt, Homo sapiens
  misc_RNA (1)...(19): siRNA sense strand
caagucagaucaugaagaa

SEQ ID NO: 1353683 - RNA, 19 nt, Homo sapiens
  misc_RNA (1)...(19): siRNA sense strand
gauacaagcaauacaagua

SEQ ID NO: 1353684 - RNA, 19 nt, Homo sapiens
  misc_RNA (1)...(19): siRNA sense strand
caaaguagcaacaaauauc

SEQ ID NO: 1353685 - RNA, 19 nt, Homo sapiens
  misc_RNA (1)...(19): siRNA sense strand
gaccauaacccuucuucuu

SEQ ID NO: 1353686 - RNA, 19 nt, Homo sapiens
  misc_RNA (1)...(19): siRNA sense strand
ggacaaggacgcgaucuau

SEQ ID NO: 1353687 - RNA, 19 nt, Homo sapiens
  misc_RNA (1)...(19): siRNA sense strand
gcuggacaauuugaugaua

SEQ ID NO: 1353688 - RNA, 19 nt, Homo sapiens
  misc_RNA (1)...(19): siRNA sense strand
caauacaaguacuaagguu

SEQ ID NO: 1353689 - RNA, 19 nt, Homo sapiens
  misc_RNA (1)...(19): siRNA sense strand
ccaucgaccucgucauuga

SEQ ID NO: 1353690 - RNA, 19 nt, Homo sapiens
  misc_RNA (1)...(19): siRNA sense strand
gaugauacaagcaauacaa

SEQ ID NO: 1353691 - RNA, 19 nt, Homo sapiens
  misc_RNA (1)...(19): siRNA sense strand
guacaggugacgaugauga

SEQ ID NO: 1353692 - RNA, 19 nt, Homo sapiens
  misc_RNA (1)...(19): siRNA sense strand
acgaugagcugccccauua

SEQ ID NO: 1353693 - RNA, 19 nt, Homo sapiens
  misc_RNA (1)...(19): siRNA sense strand
agacaacaguguagcuuca

SEQ ID NO: 1353694 - RNA, 19 nt, Homo sapiens
  misc_RNA (1)...(19): siRNA sense strand
gagcuggacaauuugauga

SEQ ID NO: 1353695 - RNA, 19 nt, Homo sapiens
  misc_RNA (1)...(19): siRNA sense strand
gcccaucgaccucgucauu

SEQ ID NO: 1353696 - RNA, 19 nt, Homo sapiens
  misc_RNA (1)...(19): siRNA sense strand
ccaaaguagcaacaaauau

SEQ ID NO: 1353697 - RNA, 19 nt, Homo sapiens
  misc_RNA (1)...(19): siRNA sense strand
gcucuggucuuugagaagu

SEQ ID NO: 1353698 - RNA, 19 nt, Homo sapiens
  misc_RNA (1)...(19): siRNA sense strand
caaaucucgcugaccauaa

SEQ ID NO: 1353699 - RNA, 19 nt, Homo sapiens
  misc_RNA (1)...(19): siRNA sense strand
gcaauacaaguacuaaggu

SEQ ID NO: 1353700 - RNA, 19 nt, Homo sapiens
  misc_RNA (1)...(19): siRNA sense strand
cccaaaguagcaacaaaua

SEQ ID NO: 1353701 - RNA, 19 nt, Homo sapiens
  misc_RNA (1)...(19): siRNA sense strand
caagcaauacaaguacuaa

SEQ ID NO: 1353702 - RNA, 19 nt, Homo sapiens
  misc_RNA (1)...(19): siRNA sense strand
acaaauaucaugagagcau

SEQ ID NO: 1353703 - RNA, 19 nt, Homo sapiens
  misc_RNA (1)...(19): siRNA sense strand
acaaaucucgcugaccaua

SEQ ID NO: 1353704 - RNA, 19 nt, Homo sapiens
  misc_RNA (1)...(19): siRNA sense strand
gaacugugcgauaacuucu

SEQ ID NO: 1353705 - RNA, 19 nt, Homo sapiens
  misc_RNA (1)...(19): siRNA sense strand
gacaaggacgcgaucuaug

SEQ ID NO: 1353706 - RNA, 19 nt, Homo sapiens
  misc_RNA (1)...(19): siRNA sense strand
uccacgaacugugcgauaa

SEQ ID NO: 1353707 - RNA, 19 nt, Homo sapiens
  misc_RNA (1)...(19): siRNA sense strand
ccaagucagaucaugaaga

SEQ ID NO: 1353708 - RNA, 19 nt, Homo sapiens
  misc_RNA (1)...(19): siRNA sense strand
gcuccaagucagaucauga

SEQ ID NO: 1353709 - RNA, 19 nt, Homo sapiens
  misc_RNA (1)...(19): siRNA sense strand
gggacaaggacgcgaucua

SEQ ID NO: 1353710 - RNA, 19 nt, Homo sapiens
  misc_RNA (1)...(19): siRNA sense strand
guagcaacaaauaucauga

SEQ ID NO: 1353711 - RNA, 19 nt, Homo sapiens
  misc_RNA (1)...(19): siRNA sense strand
accgauacauuagcuguuu

SEQ ID NO: 1353712 - RNA, 19 nt, Homo sapiens
  misc_RNA (1)...(19): siRNA sense strand
gcaaggggaugguuuagac

SEQ ID NO: 1353713 - RNA, 19 nt, Homo sapiens
  misc_RNA (1)...(19): siRNA sense strand
uaacuucugccaccgauac

SEQ ID NO: 1353714 - RNA, 19 nt, Homo sapiens
  misc_RNA (1)...(19): siRNA sense strand
aaaucucgcugaccauaac

SEQ ID NO: 1353715 - RNA, 19 nt, Homo sapiens
  misc_RNA (1)...(19): siRNA sense strand
acaaggacgcgaucuaugg

SEQ ID NO: 1353716 - RNA, 19 nt, Homo sapiens
  misc_RNA (1)...(19): siRNA sense strand
caaguacuaagguuucauc

SEQ ID NO: 1353717 - RNA, 19 nt, Homo sapiens
  misc_RNA (1)...(19): siRNA sense strand
accauaacccuucuucuug

SEQ ID NO: 1353718 - RNA, 19 nt, Homo sapiens
  misc_RNA (1)...(19): siRNA sense strand
cgaacugugcgauaacuuc

SEQ ID NO: 1353719 - RNA, 19 nt, Homo sapiens
  misc_RNA (1)...(19): siRNA sense strand
ucaggcuccuccacaaauc

SEQ ID NO: 1353720 - RNA, 19 nt, Homo sapiens
  misc_RNA (1)...(19): siRNA sense strand
acaagcaauacaaguacua

SEQ ID NO: 1353721 - RNA, 19 nt, Homo sapiens
  misc_RNA (1)...(19): siRNA sense strand
gucagaucaugaagaacuu

SEQ ID NO: 1353722 - RNA, 19 nt, Homo sapiens
  misc_RNA (1)...(19): siRNA sense strand
ggucuucgccaagcagguu

SEQ ID NO: 1353723 - RNA, 19 nt, Homo sapiens
  misc_RNA (1)...(19): siRNA sense strand
acgaugaugauccggauaa

SEQ ID NO: 1353724 - RNA, 19 nt, Homo sapiens
  misc_RNA (1)...(19): siRNA sense strand
auacaaguacuaagguuuc

SEQ ID NO: 1353725 - RNA, 19 nt, Homo sapiens
  misc_RNA (1)...(19): siRNA sense strand
agcaacaaauaucaugaga

SEQ ID NO: 1353726 - RNA, 19 nt, Homo sapiens
  misc_RNA (1)...(19): siRNA sense strand
gcggagacaacagcaguga

SEQ ID NO: 1353727 - RNA, 19 nt, Homo sapiens
  misc_RNA (1)...(19): siRNA sense strand
uggacaauuugaugauaca

SEQ ID NO: 1353728 - RNA, 19 nt, Homo sapiens
  misc_RNA (1)...(19): siRNA sense strand
cgauacauuagcuguuuga

SEQ ID NO: 1353729 - RNA, 19 nt, Homo sapiens
  misc_RNA (1)...(19): siRNA sense strand
ccgauacauuagcuguuug

SEQ ID NO: 1353730 - RNA, 19 nt, Homo sapiens
  misc_RNA (1)...(19): siRNA sense strand
gaaaagguccacgaacugu

SEQ ID NO: 1353731 - RNA, 19 nt, Homo sapiens
  misc_RNA (1)...(19): siRNA sense strand
gguuucaucuuuuggaguu

SEQ ID NO: 1353732 - RNA, 19 nt, Homo sapiens
  misc_RNA (1)...(19): siRNA sense strand
gcagcuccaagucagauca

SEQ ID NO: 1353733 - RNA, 19 nt, Homo sapiens
  misc_RNA (1)...(19): siRNA sense strand
uagaaaagguccacgaacu

SEQ ID NO: 1353734 - RNA, 19 nt, Homo sapiens
  misc_RNA (1)...(19): siRNA sense strand
augaugauccggauaagga

SEQ ID NO: 1353735 - RNA, 19 nt, Homo sapiens
  misc_RNA (1)...(19): siRNA sense strand
guacuaagguuucaucuuu

SEQ ID NO: 1353736 - RNA, 19 nt, Homo sapiens
  misc_RNA (1)...(19): siRNA sense strand
caagucagaucaugaagaa

SEQ ID NO: 1353737 - RNA, 19 nt, Homo sapiens
  misc_RNA (1)...(19): siRNA sense strand
gauacaagcaauacaagua

SEQ ID NO: 1353738 - RNA, 19 nt, Homo sapiens
  misc_RNA (1)...(19): siRNA sense strand
caaaguagcaacaaauauc

SEQ ID NO: 1353739 - RNA, 19 nt, Homo sapiens
  misc_RNA (1)...(19): siRNA sense strand
gaccauaacccuucuucuu

SEQ ID NO: 1353740 - RNA, 19 nt, Homo sapiens
  misc_RNA (1)...(19): siRNA sense strand
ggacaaggacgcgaucuau

SEQ ID NO: 1353741 - RNA, 19 nt, Homo sapiens
  misc_RNA (1)...(19): siRNA sense strand
gcuggacaauuugaugaua

SEQ ID NO: 1353742 - RNA, 19 nt, Homo sapiens
  misc_RNA (1)...(19): siRNA sense strand
caauacaaguacuaagguu

SEQ ID NO: 1353743 - RNA, 19 nt, Homo sapiens
  misc_RNA (1)...(19): siRNA sense strand
ccaucgaccucgucauuga

SEQ ID NO: 1353744 - RNA, 19 nt, Homo sapiens
  misc_RNA (1)...(19): siRNA sense strand
gaugauacaagcaauacaa

SEQ ID NO: 1353745 - RNA, 19 nt, Homo sapiens
  misc_RNA (1)...(19): siRNA sense strand
guacaggugacgaugauga

SEQ ID NO: 1353746 - RNA, 19 nt, Homo sapiens
  misc_RNA (1)...(19): siRNA sense strand
ccaaggagcagcauauagu

SEQ ID NO: 1353747 - RNA, 19 nt, Homo sapiens
  misc_RNA (1)...(19): siRNA sense strand
acgaugagcugccccauua

SEQ ID NO: 1353748 - RNA, 19 nt, Homo sapiens
  misc_RNA (1)...(19): siRNA sense strand
agacaacaguguagcuuca

SEQ ID NO: 1353749 - RNA, 19 nt, Homo sapiens
  misc_RNA (1)...(19): siRNA sense strand
gagcuggacaauuugauga

SEQ ID NO: 1353750 - RNA, 19 nt, Homo sapiens
  misc_RNA (1)...(19): siRNA sense strand
gagccaaggagcagcauau

SEQ ID NO: 1353751 - RNA, 19 nt, Homo sapiens
  misc_RNA (1)...(19): siRNA sense strand
gcccaucgaccucgucauu

SEQ ID NO: 1353752 - RNA, 19 nt, Homo sapiens
  misc_RNA (1)...(19): siRNA sense strand
ccaaaguagcaacaaauau

SEQ ID NO: 1353753 - RNA, 19 nt, Homo sapiens
  misc_RNA (1)...(19): siRNA sense strand
gcucuggucuuugagaagu

SEQ ID NO: 1353754 - RNA, 19 nt, Homo sapiens
  misc_RNA (1)...(19): siRNA sense strand
uaguacagcccaugauuga

SEQ ID NO: 1353755 - RNA, 19 nt, Homo sapiens
  misc_RNA (1)...(19): siRNA sense strand
caaaucucgcugaccauaa

SEQ ID NO: 1353756 - RNA, 19 nt, Homo sapiens
  misc_RNA (1)...(19): siRNA sense strand
gcaauacaaguacuaaggu

SEQ ID NO: 1353757 - RNA, 19 nt, Homo sapiens
  misc_RNA (1)...(19): siRNA sense strand
cccaaaguagcaacaaaua

SEQ ID NO: 1353758 - RNA, 19 nt, Homo sapiens
  misc_RNA (1)...(19): siRNA sense strand
caagcaauacaaguacuaa

SEQ ID NO: 1353759 - RNA, 19 nt, Homo sapiens
  misc_RNA (1)...(19): siRNA sense strand
acaaauaucaugagagcau

SEQ ID NO: 1353760 - RNA, 19 nt, Homo sapiens
  misc_RNA (1)...(19): siRNA sense strand
acaaaucucgcugaccaua

SEQ ID NO: 1353761 - RNA, 19 nt, Homo sapiens
  misc_RNA (1)...(19): siRNA sense strand
gaacugugcgauaacuucu

SEQ ID NO: 1353762 - RNA, 19 nt, Homo sapiens
  misc_RNA (1)...(19): siRNA sense strand
gacaaggacgcgaucuaug

SEQ ID NO: 1353763 - RNA, 19 nt, Homo sapiens
  misc_RNA (1)...(19): siRNA sense strand
uccacgaacugugcgauaa

SEQ ID NO: 1353764 - RNA, 19 nt, Homo sapiens
  misc_RNA (1)...(19): siRNA sense strand
gaauaguacagcccaugau

SEQ ID NO: 1353765 - RNA, 19 nt, Homo sapiens
  misc_RNA (1)...(19): siRNA sense strand
ccaagucagaucaugaaga

SEQ ID NO: 1353766 - RNA, 19 nt, Homo sapiens
  misc_RNA (1)...(19): siRNA sense strand
gcuccaagucagaucauga

SEQ ID NO: 1353767 - RNA, 19 nt, Homo sapiens
  misc_RNA (1)...(19): siRNA sense strand
gggacaaggacgcgaucua

SEQ ID NO: 1353768 - RNA, 19 nt, Homo sapiens
  misc_RNA (1)...(19): siRNA sense strand
guagcaacaaauaucauga

SEQ ID NO: 1353769 - RNA, 19 nt, Homo sapiens
  misc_RNA (1)...(19): siRNA sense strand
accgauacauuagcuguuu

SEQ ID NO: 1353770 - RNA, 19 nt, Homo sapiens
  misc_RNA (1)...(19): siRNA sense strand
guuuauuaaugccagaaga

SEQ ID NO: 1353771 - RNA, 19 nt, Homo sapiens
  misc_RNA (1)...(19): siRNA sense strand
gcaaggggaugguuuagac

SEQ ID NO: 1353772 - RNA, 19 nt, Homo sapiens
  misc_RNA (1)...(19): siRNA sense strand
uaacuucugccaccgauac

SEQ ID NO: 1353773 - RNA, 19 nt, Homo sapiens
  misc_RNA (1)...(19): siRNA sense strand
aauaguacagcccaugauu

SEQ ID NO: 1353774 - RNA, 19 nt, Homo sapiens
  misc_RNA (1)...(19): siRNA sense strand
acaaggacgcgaucuaugg

SEQ ID NO: 1353775 - RNA, 19 nt, Homo sapiens
  misc_RNA (1)...(19): siRNA sense strand
aaaucucgcugaccauaac

SEQ ID NO: 1353776 - RNA, 19 nt, Homo sapiens
  misc_RNA (1)...(19): siRNA sense strand
caaguacuaagguuucauc

SEQ ID NO: 1353777 - RNA, 19 nt, Homo sapiens
  misc_RNA (1)...(19): siRNA sense strand
gccagaagaagaauaguac

SEQ ID NO: 1353778 - RNA, 19 nt, Homo sapiens
  misc_RNA (1)...(19): siRNA sense strand
accauaacccuucuucuug

SEQ ID NO: 1353779 - RNA, 19 nt, Homo sapiens
  misc_RNA (1)...(19): siRNA sense strand
cgaacugugcgauaacuuc

SEQ ID NO: 1353780 - RNA, 19 nt, Homo sapiens
  misc_RNA (1)...(19): siRNA sense strand
ucaggcuccuccacaaauc

SEQ ID NO: 1353781 - RNA, 19 nt, Homo sapiens
  misc_RNA (1)...(19): siRNA sense strand
uguguuggauggucagcaa

SEQ ID NO: 1353782 - RNA, 19 nt, Homo sapiens
  misc_RNA (1)...(19): siRNA sense strand
acaagcaauacaaguacua

SEQ ID NO: 1353783 - RNA, 19 nt, Homo sapiens
  misc_RNA (1)...(19): siRNA sense strand
agaauaguacagcccauga

SEQ ID NO: 1353784 - RNA, 19 nt, Homo sapiens
  misc_RNA (1)...(19): siRNA sense strand
gucagaucaugaagaacuu

SEQ ID NO: 1353785 - RNA, 19 nt, Homo sapiens
  misc_RNA (1)...(19): siRNA sense strand
ggucuucgccaagcagguu

SEQ ID NO: 1353786 - RNA, 19 nt, Homo sapiens
  misc_RNA (1)...(19): siRNA sense strand
ugccagaagaagaauagua

SEQ ID NO: 1353787 - RNA, 19 nt, Homo sapiens
  misc_RNA (1)...(19): siRNA sense strand
acgaugaugauccggauaa

SEQ ID NO: 1353788 - RNA, 19 nt, Homo sapiens
  misc_RNA (1)...(19): siRNA sense strand
auacaaguacuaagguuuc

SEQ ID NO: 1353789 - RNA, 19 nt, Homo sapiens
  misc_RNA (1)...(19): siRNA sense strand
agcaacaaauaucaugaga

SEQ ID NO: 1353790 - RNA, 19 nt, Homo sapiens
  misc_RNA (1)...(19): siRNA sense strand
gcggagacaacagcaguga

SEQ ID NO: 1353791 - RNA, 19 nt, Homo sapiens
  misc_RNA (1)...(19): siRNA sense strand
gguuucaucuuuuggaguu

SEQ ID NO: 1353792 - RNA, 19 nt, Homo sapiens
  misc_RNA (1)...(19): siRNA sense strand
caaggagcagcauauaguc

SEQ ID NO: 1353793 - RNA, 19 nt, Homo sapiens
  misc_RNA (1)...(19): siRNA sense strand
gccaaggagcagcauauag

SEQ ID NO: 1353794 - RNA, 19 nt, Homo sapiens
  misc_RNA (1)...(19): siRNA sense strand
cgauacauuagcuguuuga

SEQ ID NO: 1353795 - RNA, 19 nt, Homo sapiens
  misc_RNA (1)...(19): siRNA sense strand
ccgauacauuagcuguuug

SEQ ID NO: 1353796 - RNA, 19 nt, Homo sapiens
  misc_RNA (1)...(19): siRNA sense strand
uggacaauuugaugauaca

SEQ ID NO: 1353797 - RNA, 19 nt, Homo sapiens
  misc_RNA (1)...(19): siRNA sense strand
gaaaagguccacgaacugu

SEQ ID NO: 1353798 - RNA, 19 nt, Homo sapiens
  misc_RNA (1)...(19): siRNA sense strand
gcagcuccaagucagauca

SEQ ID NO: 1353799 - RNA, 19 nt, Homo sapiens
  misc_RNA (1)...(19): siRNA sense strand
auuaaugccagaagaagaa

SEQ ID NO: 1353800 - RNA, 19 nt, Homo sapiens
  misc_RNA (1)...(19): siRNA sense strand
uagaaaagguccacgaacu

SEQ ID NO: 1353801 - RNA, 19 nt, Homo sapiens
  misc_RNA (1)...(19): siRNA sense strand
augaugauccggauaagga

SEQ ID NO: 1353802 - RNA, 19 nt, Homo sapiens
  misc_RNA (1)...(19): siRNA sense strand
guacuaagguuucaucuuu

SEQ ID NO: 1353803 - RNA, 19 nt, Homo sapiens
  misc_RNA (1)...(19): siRNA sense strand
caagucagaucaugaagaa

SEQ ID NO: 1353804 - RNA, 19 nt, Homo sapiens
  misc_RNA (1)...(19): siRNA sense strand
ggacauucaugcccaauag

SEQ ID NO: 1353805 - RNA, 19 nt, Homo sapiens
  misc_RNA (1)...(19): siRNA sense strand
gauacaagcaauacaagua

SEQ ID NO: 1353806 - RNA, 19 nt, Homo sapiens
  misc_RNA (1)...(19): siRNA sense strand
caaaguagcaacaaauauc

SEQ ID NO: 1353807 - RNA, 19 nt, Homo sapiens
  misc_RNA (1)...(19): siRNA sense strand
gcacagagccccacaaugu

SEQ ID NO: 1353808 - RNA, 19 nt, Homo sapiens
  misc_RNA (1)...(19): siRNA sense strand
gaccauaacccuucuucuu

SEQ ID NO: 1353809 - RNA, 19 nt, Homo sapiens
  misc_RNA (1)...(19): siRNA sense strand
ggacaaggacgcgaucuau

SEQ ID NO: 1353810 - RNA, 19 nt, Homo sapiens
  misc_RNA (1)...(19): siRNA sense strand
gcuggacaauuugaugaua

SEQ ID NO: 1353811 - RNA, 19 nt, Homo sapiens
  misc_RNA (1)...(19): siRNA sense strand
caauacaaguacuaagguu

SEQ ID NO: 1353812 - RNA, 19 nt, Homo sapiens
  misc_RNA (1)...(19): siRNA sense strand
ccaucgaccucgucauuga

SEQ ID NO: 1353813 - RNA, 19 nt, Homo sapiens
  misc_RNA (1)...(19): siRNA sense strand
gaugauacaagcaauacaa

SEQ ID NO: 1353814 - RNA, 19 nt, Homo sapiens
  misc_RNA (1)...(19): siRNA sense strand
cccacacccuacucaauua

SEQ ID NO: 1353815 - RNA, 19 nt, Homo sapiens
  misc_RNA (1)...(19): siRNA sense strand
guacaggugacgaugauga

SEQ ID NO: 1353816 - RNA, 19 nt, Homo sapiens
  misc_RNA (1)...(19): siRNA sense strand
ccacaauguuaaauucugu

SEQ ID NO: 1353817 - RNA, 19 nt, Homo sapiens
  misc_RNA (1)...(19): siRNA sense strand
cccaaugcauucauauuug

SEQ ID NO: 1353818 - RNA, 19 nt, Homo sapiens
  misc_RNA (1)...(19): siRNA sense strand
ccaaggagcagcauauagu

SEQ ID NO: 1353819 - RNA, 19 nt, Homo sapiens
  misc_RNA (1)...(19): siRNA sense strand
acgaugagcugccccauua

SEQ ID NO: 1353820 - RNA, 19 nt, Homo sapiens
  misc_RNA (1)...(19): siRNA sense strand
agacaacaguguagcuuca

SEQ ID NO: 1353821 - RNA, 19 nt, Homo sapiens
  misc_RNA (1)...(19): siRNA sense strand
gagcuggacaauuugauga

SEQ ID NO: 1353822 - RNA, 19 nt, Homo sapiens
  misc_RNA (1)...(19): siRNA sense strand
gagccaaggagcagcauau

SEQ ID NO: 1353823 - RNA, 19 nt, Homo sapiens
  misc_RNA (1)...(19): siRNA sense strand
gcggacagguuauggacau

SEQ ID NO: 1353824 - RNA, 19 nt, Homo sapiens
  misc_RNA (1)...(19): siRNA sense strand
gcccaucgaccucgucauu

SEQ ID NO: 1353825 - RNA, 19 nt, Homo sapiens
  misc_RNA (1)...(19): siRNA sense strand
ccaaaguagcaacaaauau

SEQ ID NO: 1353826 - RNA, 19 nt, Homo sapiens
  misc_RNA (1)...(19): siRNA sense strand
gcaauacaaguacuaaggu

SEQ ID NO: 1353827 - RNA, 19 nt, Homo sapiens
  misc_RNA (1)...(19): siRNA sense strand
gacagguuauggacauuca

SEQ ID NO: 1353828 - RNA, 19 nt, Homo sapiens
  misc_RNA (1)...(19): siRNA sense strand
uaguacagcccaugauuga

SEQ ID NO: 1353829 - RNA, 19 nt, Homo sapiens
  misc_RNA (1)...(19): siRNA sense strand
caaaucucgcugaccauaa

SEQ ID NO: 1353830 - RNA, 19 nt, Homo sapiens
  misc_RNA (1)...(19): siRNA sense strand
gcucuggucuuugagaagu

SEQ ID NO: 1353831 - RNA, 19 nt, Homo sapiens
  misc_RNA (1)...(19): siRNA sense strand
cccaaaguagcaacaaaua

SEQ ID NO: 1353832 - RNA, 19 nt, Homo sapiens
  misc_RNA (1)...(19): siRNA sense strand
gguccuaugggaaugagua

SEQ ID NO: 1353833 - RNA, 19 nt, Homo sapiens
  misc_RNA (1)...(19): siRNA sense strand
caagcaauacaaguacuaa

SEQ ID NO: 1353834 - RNA, 19 nt, Homo sapiens
  misc_RNA (1)...(19): siRNA sense strand
aauguuggcggacagguua

SEQ ID NO: 1353835 - RNA, 19 nt, Homo sapiens
  misc_RNA (1)...(19): siRNA sense strand
ccaaugcauucauauuugc

SEQ ID NO: 1353836 - RNA, 19 nt, Homo sapiens
  misc_RNA (1)...(19): siRNA sense strand
acaaauaucaugagagcau

SEQ ID NO: 1353837 - RNA, 19 nt, Homo sapiens
  misc_RNA (1)...(19): siRNA sense strand
acaaaucucgcugaccaua

SEQ ID NO: 1353838 - RNA, 19 nt, Homo sapiens
  misc_RNA (1)...(19): siRNA sense strand
acacccuacucaauuaaga

SEQ ID NO: 1353839 - RNA, 19 nt, Homo sapiens
  misc_RNA (1)...(19): siRNA sense strand
gaacugugcgauaacuucu

SEQ ID NO: 1353840 - RNA, 19 nt, Homo sapiens
  misc_RNA (1)...(19): siRNA sense strand
ccuacucaauuaagacaug

SEQ ID NO: 1353841 - RNA, 19 nt, Homo sapiens
  misc_RNA (1)...(19): siRNA sense strand
gacaaggacgcgaucuaug

SEQ ID NO: 1353842 - RNA, 19 nt, Homo sapiens
  misc_RNA (1)...(19): siRNA sense strand
ccacacccuacucaauuaa

SEQ ID NO: 1353843 - RNA, 19 nt, Homo sapiens
  misc_RNA (1)...(19): siRNA sense strand
uccacgaacugugcgauaa

SEQ ID NO: 1353844 - RNA, 19 nt, Homo sapiens
  misc_RNA (1)...(19): siRNA sense strand
gaauaguacagcccaugau

SEQ ID NO: 1353845 - RNA, 19 nt, Homo sapiens
  misc_RNA (1)...(19): siRNA sense strand
ccaagucagaucaugaaga

SEQ ID NO: 1353846 - RNA, 19 nt, Homo sapiens
  misc_RNA (1)...(19): siRNA sense strand
gcuccaagucagaucauga

SEQ ID NO: 1353847 - RNA, 19 nt, Homo sapiens
  misc_RNA (1)...(19): siRNA sense strand
gggacaaggacgcgaucua

SEQ ID NO: 1353848 - RNA, 19 nt, Homo sapiens
  misc_RNA (1)...(19): siRNA sense strand
guagcaacaaauaucauga

SEQ ID NO: 1353849 - RNA, 19 nt, Homo sapiens
  misc_RNA (1)...(19): siRNA sense strand
accgauacauuagcuguuu

SEQ ID NO: 1353850 - RNA, 19 nt, Homo sapiens
  misc_RNA (1)...(19): siRNA sense strand
guuuauuaaugccagaaga

SEQ ID NO: 1353851 - RNA, 19 nt, Homo sapiens
  misc_RNA (1)...(19): siRNA sense strand
gcaaggggaugguuuagac

SEQ ID NO: 1353852 - RNA, 19 nt, Homo sapiens
  misc_RNA (1)...(19): siRNA sense strand
uaacuucugccaccgauac

SEQ ID NO: 1353853 - RNA, 19 nt, Homo sapiens
  misc_RNA (1)...(19): siRNA sense strand
ggacagguuauggacauuc

SEQ ID NO: 1353854 - RNA, 19 nt, Homo sapiens
  misc_RNA (1)...(19): siRNA sense strand
aauaguacagcccaugauu

SEQ ID NO: 1353855 - RNA, 19 nt, Homo sapiens
  misc_RNA (1)...(19): siRNA sense strand
acaaggacgcgaucuaugg

SEQ ID NO: 1353856 - RNA, 19 nt, Homo sapiens
  misc_RNA (1)...(19): siRNA sense strand
aaaucucgcugaccauaac

SEQ ID NO: 1353857 - RNA, 19 nt, Homo sapiens
  misc_RNA (1)...(19): siRNA sense strand
caaguacuaagguuucauc

SEQ ID NO: 1353858 - RNA, 19 nt, Homo sapiens
  misc_RNA (1)...(19): siRNA sense strand
gccagaagaagaauaguac

SEQ ID NO: 1353859 - RNA, 19 nt, Homo sapiens
  misc_RNA (1)...(19): siRNA sense strand
accauaacccuucuucuug

SEQ ID NO: 1353860 - RNA, 19 nt, Homo sapiens
  misc_RNA (1)...(19): siRNA sense strand
cgaacugugcgauaacuuc

SEQ ID NO: 1353861 - RNA, 19 nt, Homo sapiens
  misc_RNA (1)...(19): siRNA sense strand
ucaggcuccuccacaaauc

SEQ ID NO: 1353862 - RNA, 19 nt, Homo sapiens
  misc_RNA (1)...(19): siRNA sense strand
uguguuggauggucagcaa

SEQ ID NO: 1353863 - RNA, 19 nt, Homo sapiens
  misc_RNA (1)...(19): siRNA sense strand
gucagaucaugaagaacuu

SEQ ID NO: 1353864 - RNA, 19 nt, Homo sapiens
  misc_RNA (1)...(19): siRNA sense strand
agaauaguacagcccauga

SEQ ID NO: 1353865 - RNA, 19 nt, Homo sapiens
  misc_RNA (1)...(19): siRNA sense strand
acaagcaauacaaguacua

SEQ ID NO: 1353866 - RNA, 19 nt, Homo sapiens
  misc_RNA (1)...(19): siRNA sense strand
acgaugaugauccggauaa

SEQ ID NO: 1353867 - RNA, 19 nt, Homo sapiens
  misc_RNA (1)...(19): siRNA sense strand
ugccagaagaagaauagua

SEQ ID NO: 1353868 - RNA, 19 nt, Homo sapiens
  misc_RNA (1)...(19): siRNA sense strand
ggucuucgccaagcagguu

SEQ ID NO: 1353869 - RNA, 19 nt, Homo sapiens
  misc_RNA (1)...(19): siRNA sense strand
gcggagacaacagcaguga

SEQ ID NO: 1353870 - RNA, 19 nt, Homo sapiens
  misc_RNA (1)...(19): siRNA sense strand
auacaaguacuaagguuuc

SEQ ID NO: 1353871 - RNA, 19 nt, Homo sapiens
  misc_RNA (1)...(19): siRNA sense strand
agcaacaaauaucaugaga

SEQ ID NO: 1353872 - RNA, 19 nt, Homo sapiens
  misc_RNA (1)...(19): siRNA sense strand
gaaaagguccacgaacugu

SEQ ID NO: 1353873 - RNA, 19 nt, Homo sapiens
  misc_RNA (1)...(19): siRNA sense strand
caaggagcagcauauaguc

SEQ ID NO: 1353874 - RNA, 19 nt, Homo sapiens
  misc_RNA (1)...(19): siRNA sense strand
gccaaggagcagcauauag

SEQ ID NO: 1353875 - RNA, 19 nt, Homo sapiens
  misc_RNA (1)...(19): siRNA sense strand
uggacaauuugaugauaca

SEQ ID NO: 1353876 - RNA, 19 nt, Homo sapiens
  misc_RNA (1)...(19): siRNA sense strand
gguuucaucuuuuggaguu

SEQ ID NO: 1353877 - RNA, 19 nt, Homo sapiens
  misc_RNA (1)...(19): siRNA sense strand
cgauacauuagcuguuuga

SEQ ID NO: 1353878 - RNA, 19 nt, Homo sapiens
  misc_RNA (1)...(19): siRNA sense strand
ccgauacauuagcuguuug

SEQ ID NO: 1353879 - RNA, 19 nt, Homo sapiens
  misc_RNA (1)...(19): siRNA sense strand
gcagcuccaagucagauca

SEQ ID NO: 1353880 - RNA, 19 nt, Homo sapiens
  misc_RNA (1)...(19): siRNA sense strand
caauguuggcggacagguu

SEQ ID NO: 1353881 - RNA, 19 nt, Homo sapiens
  misc_RNA (1)...(19): siRNA sense strand
auuaaugccagaagaagaa

SEQ ID NO: 1353882 - RNA, 19 nt, Homo sapiens
  misc_RNA (1)...(19): siRNA sense strand
uagaaaagguccacgaacu

SEQ ID NO: 1353883 - RNA, 19 nt, Homo sapiens
  misc_RNA (1)...(19): siRNA sense strand
cccacaauguuaaauucug

SEQ ID NO: 1353884 - RNA, 19 nt, Homo sapiens
  misc_RNA (1)...(19): siRNA sense strand
ccaccacccagccaugaug

SEQ ID NO: 1353885 - RNA, 19 nt, Homo sapiens
  misc_RNA (1)...(19): siRNA sense strand
augaugauccggauaagga

SEQ ID NO: 1353886 - RNA, 19 nt, Homo sapiens
  misc_RNA (1)...(19): siRNA sense strand
guacuaagguuucaucuuu

SEQ ID NO: 1353887 - RNA, 19 nt, Homo sapiens
  misc_RNA (1)...(19): siRNA sense strand
caagucagaucaugaagaa

SEQ ID NO: 1353888 - RNA, 19 nt, Homo sapiens
  misc_RNA (1)...(19): siRNA sense strand
ggacauucaugcccaauag

SEQ ID NO: 1353889 - RNA, 19 nt, Homo sapiens
  misc_RNA (1)...(19): siRNA sense strand
gauacaagcaauacaagua

SEQ ID NO: 1353890 - RNA, 19 nt, Homo sapiens
  misc_RNA (1)...(19): siRNA sense strand
caaaguagcaacaaauauc

SEQ ID NO: 1353891 - RNA, 19 nt, Homo sapiens
  misc_RNA (1)...(19): siRNA sense strand
gcacagagccccacaaugu

SEQ ID NO: 1353892 - RNA, 19 nt, Homo sapiens
  misc_RNA (1)...(19): siRNA sense strand
gaccauaacccuucuucuu

SEQ ID NO: 1353893 - RNA, 19 nt, Homo sapiens
  misc_RNA (1)...(19): siRNA sense strand
ggacaaggacgcgaucuau

SEQ ID NO: 1353894 - RNA, 19 nt, Homo sapiens
  misc_RNA (1)...(19): siRNA sense strand
gcuggacaauuugaugaua

SEQ ID NO: 1353895 - RNA, 19 nt, Homo sapiens
  misc_RNA (1)...(19): siRNA sense strand
caauacaaguacuaagguu

SEQ ID NO: 1353896 - RNA, 19 nt, Homo sapiens
  misc_RNA (1)...(19): siRNA sense strand
ccaucgaccucgucauuga

SEQ ID NO: 1353897 - RNA, 19 nt, Homo sapiens
  misc_RNA (1)...(19): siRNA sense strand
gaugauacaagcaauacaa

SEQ ID NO: 1353898 - RNA, 19 nt, Homo sapiens
  misc_RNA (1)...(19): siRNA sense strand
cccacacccuacucaauua

SEQ ID NO: 1353899 - RNA, 19 nt, Homo sapiens
  misc_RNA (1)...(19): siRNA sense strand
guacaggugacgaugauga

SEQ ID NO: 1353900 - RNA, 19 nt, Homo sapiens
  misc_RNA (1)...(19): siRNA sense strand
ccacaauguuaaauucugu

SEQ ID NO: 1353901 - RNA, 19 nt, Homo sapiens
  misc_RNA (1)...(19): siRNA sense strand
cccaaugcauucauauuug

SEQ ID NO: 1353902 - RNA, 19 nt, Homo sapiens
  misc_RNA (1)...(19): siRNA sense strand
ccaaggagcagcauauagu

SEQ ID NO: 1353903 - RNA, 19 nt, Homo sapiens
  misc_RNA (1)...(19): siRNA sense strand
acgaugagcugccccauua

SEQ ID NO: 1353904 - RNA, 19 nt, Homo sapiens
  misc_RNA (1)...(19): siRNA sense strand
agacaacaguguagcuuca

SEQ ID NO: 1353905 - RNA, 19 nt, Homo sapiens
  misc_RNA (1)...(19): siRNA sense strand
gagcuggacaauuugauga

SEQ ID NO: 1353906 - RNA, 19 nt, Homo sapiens
  misc_RNA (1)...(19): siRNA sense strand
gagccaaggagcagcauau

SEQ ID NO: 1353907 - RNA, 19 nt, Homo sapiens
  misc_RNA (1)...(19): siRNA sense strand
gcggacagguuauggacau

SEQ ID NO: 1353908 - RNA, 19 nt, Homo sapiens
  misc_RNA (1)...(19): siRNA sense strand
gcccaucgaccucgucauu

SEQ ID NO: 1353909 - RNA, 19 nt, Homo sapiens
  misc_RNA (1)...(19): siRNA sense strand
ccaaaguagcaacaaauau

SEQ ID NO: 1353910 - RNA, 19 nt, Homo sapiens
  misc_RNA (1)...(19): siRNA sense strand
gcaauacaaguacuaaggu

SEQ ID NO: 1353911 - RNA, 19 nt, Homo sapiens
  misc_RNA (1)...(19): siRNA sense strand
gacagguuauggacauuca

SEQ ID NO: 1353912 - RNA, 19 nt, Homo sapiens
  misc_RNA (1)...(19): siRNA sense strand
uaguacagcccaugauuga

SEQ ID NO: 1353913 - RNA, 19 nt, Homo sapiens
  misc_RNA (1)...(19): siRNA sense strand
caaaucucgcugaccauaa

SEQ ID NO: 1353914 - RNA, 19 nt, Homo sapiens
  misc_RNA (1)...(19): siRNA sense strand
gcucuggucuuugagaagu

SEQ ID NO: 1353915 - RNA, 19 nt, Homo sapiens
  misc_RNA (1)...(19): siRNA sense strand
cccaaaguagcaacaaaua

SEQ ID NO: 1353916 - RNA, 19 nt, Homo sapiens
  misc_RNA (1)...(19): siRNA sense strand
gguccuaugggaaugagua

SEQ ID NO: 1353917 - RNA, 19 nt, Homo sapiens
  misc_RNA (1)...(19): siRNA sense strand
caagcaauacaaguacuaa

SEQ ID NO: 1353918 - RNA, 19 nt, Homo sapiens
  misc_RNA (1)...(19): siRNA sense strand
aauguuggcggacagguua

SEQ ID NO: 1353919 - RNA, 19 nt, Homo sapiens
  misc_RNA (1)...(19): siRNA sense strand
ccaaugcauucauauuugc

SEQ ID NO: 1353920 - RNA, 19 nt, Homo sapiens
  misc_RNA (1)...(19): siRNA sense strand
acaaauaucaugagagcau

SEQ ID NO: 1353921 - RNA, 19 nt, Homo sapiens
  misc_RNA (1)...(19): siRNA sense strand
acaaaucucgcugaccaua

SEQ ID NO: 1353922 - RNA, 19 nt, Homo sapiens
  misc_RNA (1)...(19): siRNA sense strand
acacccuacucaauuaaga

SEQ ID NO: 1353923 - RNA, 19 nt, Homo sapiens
  misc_RNA (1)...(19): siRNA sense strand
gaacugugcgauaacuucu

SEQ ID NO: 1353924 - RNA, 19 nt, Homo sapiens
  misc_RNA (1)...(19): siRNA sense strand
ccuacucaauuaagacaug

SEQ ID NO: 1353925 - RNA, 19 nt, Homo sapiens
  misc_RNA (1)...(19): siRNA sense strand
gacaaggacgcgaucuaug

SEQ ID NO: 1353926 - RNA, 19 nt, Homo sapiens
  misc_RNA (1)...(19): siRNA sense strand
ccacacccuacucaauuaa

SEQ ID NO: 1353927 - RNA, 19 nt, Homo sapiens
  misc_RNA (1)...(19): siRNA sense strand
uccacgaacugugcgauaa

SEQ ID NO: 1353928 - RNA, 19 nt, Homo sapiens
  misc_RNA (1)...(19): siRNA sense strand
gaauaguacagcccaugau

SEQ ID NO: 1353929 - RNA, 19 nt, Homo sapiens
  misc_RNA (1)...(19): siRNA sense strand
ccaagucagaucaugaaga

SEQ ID NO: 1353930 - RNA, 19 nt, Homo sapiens
  misc_RNA (1)...(19): siRNA sense strand
gcuccaagucagaucauga

SEQ ID NO: 1353931 - RNA, 19 nt, Homo sapiens
  misc_RNA (1)...(19): siRNA sense strand
gggacaaggacgcgaucua

SEQ ID NO: 1353932 - RNA, 19 nt, Homo sapiens
  misc_RNA (1)...(19): siRNA sense strand
guagcaacaaauaucauga

SEQ ID NO: 1353933 - RNA, 19 nt, Homo sapiens
  misc_RNA (1)...(19): siRNA sense strand
accgauacauuagcuguuu

SEQ ID NO: 1353934 - RNA, 19 nt, Homo sapiens
  misc_RNA (1)...(19): siRNA sense strand
guuuauuaaugccagaaga

SEQ ID NO: 1353935 - RNA, 19 nt, Homo sapiens
  misc_RNA (1)...(19): siRNA sense strand
gcaaggggaugguuuagac

SEQ ID NO: 1353936 - RNA, 19 nt, Homo sapiens
  misc_RNA (1)...(19): siRNA sense strand
uaacuucugccaccgauac

SEQ ID NO: 1353937 - RNA, 19 nt, Homo sapiens
  misc_RNA (1)...(19): siRNA sense strand
ggacagguuauggacauuc

SEQ ID NO: 1353938 - RNA, 19 nt, Homo sapiens
  misc_RNA (1)...(19): siRNA sense strand
aauaguacagcccaugauu

SEQ ID NO: 1353939 - RNA, 19 nt, Homo sapiens
  misc_RNA (1)...(19): siRNA sense strand
acaaggacgcgaucuaugg

SEQ ID NO: 1353940 - RNA, 19 nt, Homo sapiens
  misc_RNA (1)...(19): siRNA sense strand
aaaucucgcugaccauaac

SEQ ID NO: 1353941 - RNA, 19 nt, Homo sapiens
  misc_RNA (1)...(19): siRNA sense strand
caaguacuaagguuucauc

SEQ ID NO: 1353942 - RNA, 19 nt, Homo sapiens
  misc_RNA (1)...(19): siRNA sense strand
gccagaagaagaauaguac

SEQ ID NO: 1353943 - RNA, 19 nt, Homo sapiens
  misc_RNA (1)...(19): siRNA sense strand
accauaacccuucuucuug

SEQ ID NO: 1353944 - RNA, 19 nt, Homo sapiens
  misc_RNA (1)...(19): siRNA sense strand
cgaacugugcgauaacuuc

SEQ ID NO: 1353945 - RNA, 19 nt, Homo sapiens
  misc_RNA (1)...(19): siRNA sense strand
ucaggcuccuccacaaauc

SEQ ID NO: 1353946 - RNA, 19 nt, Homo sapiens
  misc_RNA (1)...(19): siRNA sense strand
uguguuggauggucagcaa

SEQ ID NO: 1353947 - RNA, 19 nt, Homo sapiens
  misc_RNA (1)...(19): siRNA sense strand
gucagaucaugaagaacuu

SEQ ID NO: 1353948 - RNA, 19 nt, Homo sapiens
  misc_RNA (1)...(19): siRNA sense strand
agaauaguacagcccauga

SEQ ID NO: 1353949 - RNA, 19 nt, Homo sapiens
  misc_RNA (1)...(19): siRNA sense strand
acaagcaauacaaguacua

SEQ ID NO: 1353950 - RNA, 19 nt, Homo sapiens
  misc_RNA (1)...(19): siRNA sense strand
acgaugaugauccggauaa

SEQ ID NO: 1353951 - RNA, 19 nt, Homo sapiens
  misc_RNA (1)...(19): siRNA sense strand
ugccagaagaagaauagua

SEQ ID NO: 1353952 - RNA, 19 nt, Homo sapiens
  misc_RNA (1)...(19): siRNA sense strand
ggucuucgccaagcagguu

SEQ ID NO: 1353953 - RNA, 19 nt, Homo sapiens
  misc_RNA (1)...(19): siRNA sense strand
gcggagacaacagcaguga

SEQ ID NO: 1353954 - RNA, 19 nt, Homo sapiens
  misc_RNA (1)...(19): siRNA sense strand
auacaaguacuaagguuuc

SEQ ID NO: 1353955 - RNA, 19 nt, Homo sapiens
  misc_RNA (1)...(19): siRNA sense strand
agcaacaaauaucaugaga

SEQ ID NO: 1353956 - RNA, 19 nt, Homo sapiens
  misc_RNA (1)...(19): siRNA sense strand
gaaaagguccacgaacugu

SEQ ID NO: 1353957 - RNA, 19 nt, Homo sapiens
  misc_RNA (1)...(19): siRNA sense strand
caaggagcagcauauaguc

SEQ ID NO: 1353958 - RNA, 19 nt, Homo sapiens
  misc_RNA (1)...(19): siRNA sense strand
gccaaggagcagcauauag

SEQ ID NO: 1353959 - RNA, 19 nt, Homo sapiens
  misc_RNA (1)...(19): siRNA sense strand
uggacaauuugaugauaca

SEQ ID NO: 1353960 - RNA, 19 nt, Homo sapiens
  misc_RNA (1)...(19): siRNA sense strand
gguuucaucuuuuggaguu

SEQ ID NO: 1353961 - RNA, 19 nt, Homo sapiens
  misc_RNA (1)...(19): siRNA sense strand
cgauacauuagcuguuuga

SEQ ID NO: 1353962 - RNA, 19 nt, Homo sapiens
  misc_RNA (1)...(19): siRNA sense strand
ccgauacauuagcuguuug

SEQ ID NO: 1353963 - RNA, 19 nt, Homo sapiens
  misc_RNA (1)...(19): siRNA sense strand
gcagcuccaagucagauca

SEQ ID NO: 1353964 - RNA, 19 nt, Homo sapiens
  misc_RNA (1)...(19): siRNA sense strand
caauguuggcggacagguu

SEQ ID NO: 1353965 - RNA, 19 nt, Homo sapiens
  misc_RNA (1)...(19): siRNA sense strand
auuaaugccagaagaagaa

SEQ ID NO: 1353966 - RNA, 19 nt, Homo sapiens
  misc_RNA (1)...(19): siRNA sense strand
uagaaaagguccacgaacu

SEQ ID NO: 1353967 - RNA, 19 nt, Homo sapiens
  misc_RNA (1)...(19): siRNA sense strand
cccacaauguuaaauucug

SEQ ID NO: 1353968 - RNA, 19 nt, Homo sapiens
  misc_RNA (1)...(19): siRNA sense strand
ccaccacccagccaugaug

SEQ ID NO: 1353969 - RNA, 19 nt, Homo sapiens
  misc_RNA (1)...(19): siRNA sense strand
augaugauccggauaagga

SEQ ID NO: 1353970 - RNA, 19 nt, Homo sapiens
  misc_RNA (1)...(19): siRNA sense strand
guacuaagguuucaucuuu

SEQ ID NO: 1353971 - RNA, 19 nt, Homo sapiens
  misc_RNA (1)...(19): siRNA sense strand
caagucagaucaugaagaa

SEQ ID NO: 1353972 - RNA, 19 nt, Homo sapiens
  misc_RNA (1)...(19): siRNA sense strand
gauacaagcaauacaagua

SEQ ID NO: 1353973 - RNA, 19 nt, Homo sapiens
  misc_RNA (1)...(19): siRNA sense strand
caaaguagcaacaaauauc

SEQ ID NO: 1353974 - RNA, 19 nt, Homo sapiens
  misc_RNA (1)...(19): siRNA sense strand
gaccauaacccuucuucuu

SEQ ID NO: 1353975 - RNA, 19 nt, Homo sapiens
  misc_RNA (1)...(19): siRNA sense strand
ggacaaggacgcgaucuau

SEQ ID NO: 1353976 - RNA, 19 nt, Homo sapiens
  misc_RNA (1)...(19): siRNA sense strand
gcuggacaauuugaugaua

SEQ ID NO: 1353977 - RNA, 19 nt, Homo sapiens
  misc_RNA (1)...(19): siRNA sense strand
caauacaaguacuaagguu

SEQ ID NO: 1353978 - RNA, 19 nt, Homo sapiens
  misc_RNA (1)...(19): siRNA sense strand
ccaucgaccucgucauuga

SEQ ID NO: 1353979 - RNA, 19 nt, Homo sapiens
  misc_RNA (1)...(19): siRNA sense strand
gaugauacaagcaauacaa

SEQ ID NO: 1353980 - RNA, 19 nt, Homo sapiens
  misc_RNA (1)...(19): siRNA sense strand
guacaggugacgaugauga

SEQ ID NO: 1353981 - RNA, 19 nt, Homo sapiens
  misc_RNA (1)...(19): siRNA sense strand
ccaaggagcagcauauagu

SEQ ID NO: 1353982 - RNA, 19 nt, Homo sapiens
  misc_RNA (1)...(19): siRNA sense strand
acgaugagcugccccauua

SEQ ID NO: 1353983 - RNA, 19 nt, Homo sapiens
  misc_RNA (1)...(19): siRNA sense strand
agacaacaguguagcuuca

SEQ ID NO: 1353984 - RNA, 19 nt, Homo sapiens
  misc_RNA (1)...(19): siRNA sense strand
gagcuggacaauuugauga

SEQ ID NO: 1353985 - RNA, 19 nt, Homo sapiens
  misc_RNA (1)...(19): siRNA sense strand
gagccaaggagcagcauau

SEQ ID NO: 1353986 - RNA, 19 nt, Homo sapiens
  misc_RNA (1)...(19): siRNA sense strand
gcccaucgaccucgucauu

SEQ ID NO: 1353987 - RNA, 19 nt, Homo sapiens
  misc_RNA (1)...(19): siRNA sense strand
ccaaaguagcaacaaauau

SEQ ID NO: 1353988 - RNA, 19 nt, Homo sapiens
  misc_RNA (1)...(19): siRNA sense strand
gcucuggucuuugagaagu

SEQ ID NO: 1353989 - RNA, 19 nt, Homo sapiens
  misc_RNA (1)...(19): siRNA sense strand
uaguacagcccaugauuga

SEQ ID NO: 1353990 - RNA, 19 nt, Homo sapiens
  misc_RNA (1)...(19): siRNA sense strand
caaaucucgcugaccauaa

SEQ ID NO: 1353991 - RNA, 19 nt, Homo sapiens
  misc_RNA (1)...(19): siRNA sense strand
gcaauacaaguacuaaggu

SEQ ID NO: 1353992 - RNA, 19 nt, Homo sapiens
  misc_RNA (1)...(19): siRNA sense strand
cccaaaguagcaacaaaua

SEQ ID NO: 1353993 - RNA, 19 nt, Homo sapiens
  misc_RNA (1)...(19): siRNA sense strand
caagcaauacaaguacuaa

SEQ ID NO: 1353994 - RNA, 19 nt, Homo sapiens
  misc_RNA (1)...(19): siRNA sense strand
acaaauaucaugagagcau

SEQ ID NO: 1353995 - RNA, 19 nt, Homo sapiens
  misc_RNA (1)...(19): siRNA sense strand
acaaaucucgcugaccaua

SEQ ID NO: 1353996 - RNA, 19 nt, Homo sapiens
  misc_RNA (1)...(19): siRNA sense strand
gaacugugcgauaacuucu

SEQ ID NO: 1353997 - RNA, 19 nt, Homo sapiens
  misc_RNA (1)...(19): siRNA sense strand
gacaaggacgcgaucuaug

SEQ ID NO: 1353998 - RNA, 19 nt, Homo sapiens
  misc_RNA (1)...(19): siRNA sense strand
uccacgaacugugcgauaa

SEQ ID NO: 1353999 - RNA, 19 nt, Homo sapiens
  misc_RNA (1)...(19): siRNA sense strand
gaauaguacagcccaugau

SEQ ID NO: 1354000 - RNA, 19 nt, Homo sapiens
  misc_RNA (1)...(19): siRNA sense strand
ccaagucagaucaugaaga

SEQ ID NO: 1354001 - RNA, 19 nt, Homo sapiens
  misc_RNA (1)...(19): siRNA sense strand
gcuccaagucagaucauga

SEQ ID NO: 1354002 - RNA, 19 nt, Homo sapiens
  misc_RNA (1)...(19): siRNA sense strand
gggacaaggacgcgaucua

SEQ ID NO: 1354003 - RNA, 19 nt, Homo sapiens
  misc_RNA (1)...(19): siRNA sense strand
guagcaacaaauaucauga

SEQ ID NO: 1354004 - RNA, 19 nt, Homo sapiens
  misc_RNA (1)...(19): siRNA sense strand
accgauacauuagcuguuu

SEQ ID NO: 1354005 - RNA, 19 nt, Homo sapiens
  misc_RNA (1)...(19): siRNA sense strand
guuuauuaaugccagaaga

SEQ ID NO: 1354006 - RNA, 19 nt, Homo sapiens
  misc_RNA (1)...(19): siRNA sense strand
gcaaggggaugguuuagac

SEQ ID NO: 1354007 - RNA, 19 nt, Homo sapiens
  misc_RNA (1)...(19): siRNA sense strand
uaacuucugccaccgauac

SEQ ID NO: 1354008 - RNA, 19 nt, Homo sapiens
  misc_RNA (1)...(19): siRNA sense strand
aauaguacagcccaugauu

SEQ ID NO: 1354009 - RNA, 19 nt, Homo sapiens
  misc_RNA (1)...(19): siRNA sense strand
acaaggacgcgaucuaugg

SEQ ID NO: 1354010 - RNA, 19 nt, Homo sapiens
  misc_RNA (1)...(19): siRNA sense strand
aaaucucgcugaccauaac

SEQ ID NO: 1354011 - RNA, 19 nt, Homo sapiens
  misc_RNA (1)...(19): siRNA sense strand
caaguacuaagguuucauc

SEQ ID NO: 1354012 - RNA, 19 nt, Homo sapiens
  misc_RNA (1)...(19): siRNA sense strand
gccagaagaagaauaguac

SEQ ID NO: 1354013 - RNA, 19 nt, Homo sapiens
  misc_RNA (1)...(19): siRNA sense strand
accauaacccuucuucuug

SEQ ID NO: 1354014 - RNA, 19 nt, Homo sapiens
  misc_RNA (1)...(19): siRNA sense strand
cgaacugugcgauaacuuc

SEQ ID NO: 1354015 - RNA, 19 nt, Homo sapiens
  misc_RNA (1)...(19): siRNA sense strand
ucaggcuccuccacaaauc

SEQ ID NO: 1354016 - RNA, 19 nt, Homo sapiens
  misc_RNA (1)...(19): siRNA sense strand
uguguuggauggucagcaa

SEQ ID NO: 1354017 - RNA, 19 nt, Homo sapiens
  misc_RNA (1)...(19): siRNA sense strand
acaagcaauacaaguacua

SEQ ID NO: 1354018 - RNA, 19 nt, Homo sapiens
  misc_RNA (1)...(19): siRNA sense strand
agaauaguacagcccauga

SEQ ID NO: 1354019 - RNA, 19 nt, Homo sapiens
  misc_RNA (1)...(19): siRNA sense strand
gucagaucaugaagaacuu

SEQ ID NO: 1354020 - RNA, 19 nt, Homo sapiens
  misc_RNA (1)...(19): siRNA sense strand
ggucuucgccaagcagguu

SEQ ID NO: 1354021 - RNA, 19 nt, Homo sapiens
  misc_RNA (1)...(19): siRNA sense strand
ugccagaagaagaauagua

SEQ ID NO: 1354022 - RNA, 19 nt, Homo sapiens
  misc_RNA (1)...(19): siRNA sense strand
acgaugaugauccggauaa

SEQ ID NO: 1354023 - RNA, 19 nt, Homo sapiens
  misc_RNA (1)...(19): siRNA sense strand
auacaaguacuaagguuuc

SEQ ID NO: 1354024 - RNA, 19 nt, Homo sapiens
  misc_RNA (1)...(19): siRNA sense strand
agcaacaaauaucaugaga

SEQ ID NO: 1354025 - RNA, 19 nt, Homo sapiens
  misc_RNA (1)...(19): siRNA sense strand
gcggagacaacagcaguga

SEQ ID NO: 1354026 - RNA, 19 nt, Homo sapiens
  misc_RNA (1)...(19): siRNA sense strand
gguuucaucuuuuggaguu

SEQ ID NO: 1354027 - RNA, 19 nt, Homo sapiens
  misc_RNA (1)...(19): siRNA sense strand
caaggagcagcauauaguc

SEQ ID NO: 1354028 - RNA, 19 nt, Homo sapiens
  misc_RNA (1)...(19): siRNA sense strand
gccaaggagcagcauauag

SEQ ID NO: 1354029 - RNA, 19 nt, Homo sapiens
  misc_RNA (1)...(19): siRNA sense strand
cgauacauuagcuguuuga

SEQ ID NO: 1354030 - RNA, 19 nt, Homo sapiens
  misc_RNA (1)...(19): siRNA sense strand
ccgauacauuagcuguuug

SEQ ID NO: 1354031 - RNA, 19 nt, Homo sapiens
  misc_RNA (1)...(19): siRNA sense strand
uggacaauuugaugauaca

SEQ ID NO: 1354032 - RNA, 19 nt, Homo sapiens
  misc_RNA (1)...(19): siRNA sense strand
gaaaagguccacgaacugu

SEQ ID NO: 1354033 - RNA, 19 nt, Homo sapiens
  misc_RNA (1)...(19): siRNA sense strand
gcagcuccaagucagauca

SEQ ID NO: 1354034 - RNA, 19 nt, Homo sapiens
  misc_RNA (1)...(19): siRNA sense strand
auuaaugccagaagaagaa

SEQ ID NO: 1354035 - RNA, 19 nt, Homo sapiens
  misc_RNA (1)...(19): siRNA sense strand
uagaaaagguccacgaacu

SEQ ID NO: 1354036 - RNA, 19 nt, Homo sapiens
  misc_RNA (1)...(19): siRNA sense strand
augaugauccggauaagga

SEQ ID NO: 1354037 - RNA, 19 nt, Homo sapiens
  misc_RNA (1)...(19): siRNA sense strand
guacuaagguuucaucuuu

SEQ ID NO: 1354038 - RNA, 19 nt, Homo sapiens
  misc_RNA (1)...(19): siRNA sense strand
caagucagaucaugaagaa

SEQ ID NO: 1354039 - RNA, 19 nt, Homo sapiens
  misc_RNA (1)...(19): siRNA sense strand
gauacaagcaauacaagua

SEQ ID NO: 1354040 - RNA, 19 nt, Homo sapiens
  misc_RNA (1)...(19): siRNA sense strand
caaaguagcaacaaauauc

SEQ ID NO: 1354041 - RNA, 19 nt, Homo sapiens
  misc_RNA (1)...(19): siRNA sense strand
gaccauaacccuucuucuu

SEQ ID NO: 1354042 - RNA, 19 nt, Homo sapiens
  misc_RNA (1)...(19): siRNA sense strand
ggacaaggacgcgaucuau

SEQ ID NO: 1354043 - RNA, 19 nt, Homo sapiens
  misc_RNA (1)...(19): siRNA sense strand
gcuggacaauuugaugaua

SEQ ID NO: 1354044 - RNA, 19 nt, Homo sapiens
  misc_RNA (1)...(19): siRNA sense strand
caauacaaguacuaagguu

SEQ ID NO: 1354045 - RNA, 19 nt, Homo sapiens
  misc_RNA (1)...(19): siRNA sense strand
ccaucgaccucgucauuga

SEQ ID NO: 1354046 - RNA, 19 nt, Homo sapiens
  misc_RNA (1)...(19): siRNA sense strand
gaugauacaagcaauacaa

SEQ ID NO: 1354047 - RNA, 19 nt, Homo sapiens
  misc_RNA (1)...(19): siRNA sense strand
guacaggugacgaugauga

SEQ ID NO: 1354048 - RNA, 19 nt, Homo sapiens
  misc_RNA (1)...(19): siRNA sense strand
ccaaggagcagcauauagu

SEQ ID NO: 1354049 - RNA, 19 nt, Homo sapiens
  misc_RNA (1)...(19): siRNA sense strand
agacaacaguguagcuuca

SEQ ID NO: 1354050 - RNA, 19 nt, Homo sapiens
  misc_RNA (1)...(19): siRNA sense strand
gagcuggacaauuugauga

SEQ ID NO: 1354051 - RNA, 19 nt, Homo sapiens
  misc_RNA (1)...(19): siRNA sense strand
gagccaaggagcagcauau

SEQ ID NO: 1354052 - RNA, 19 nt, Homo sapiens
  misc_RNA (1)...(19): siRNA sense strand
gcccaucgaccucgucauu

SEQ ID NO: 1354053 - RNA, 19 nt, Homo sapiens
  misc_RNA (1)...(19): siRNA sense strand
ccaaaguagcaacaaauau

SEQ ID NO: 1354054 - RNA, 19 nt, Homo sapiens
  misc_RNA (1)...(19): siRNA sense strand
gcucuggucuuugagaagu

SEQ ID NO: 1354055 - RNA, 19 nt, Homo sapiens
  misc_RNA (1)...(19): siRNA sense strand
uaguacagcccaugauuga

SEQ ID NO: 1354056 - RNA, 19 nt, Homo sapiens
  misc_RNA (1)...(19): siRNA sense strand
caaaucucgcugaccauaa

SEQ ID NO: 1354057 - RNA, 19 nt, Homo sapiens
  misc_RNA (1)...(19): siRNA sense strand
gcaauacaaguacuaaggu

SEQ ID NO: 1354058 - RNA, 19 nt, Homo sapiens
  misc_RNA (1)...(19): siRNA sense strand
cccaaaguagcaacaaaua

SEQ ID NO: 1354059 - RNA, 19 nt, Homo sapiens
  misc_RNA (1)...(19): siRNA sense strand
caagcaauacaaguacuaa

SEQ ID NO: 1354060 - RNA, 19 nt, Homo sapiens
  misc_RNA (1)...(19): siRNA sense strand
acaaauaucaugagagcau

SEQ ID NO: 1354061 - RNA, 19 nt, Homo sapiens
  misc_RNA (1)...(19): siRNA sense strand
acaaaucucgcugaccaua

SEQ ID NO: 1354062 - RNA, 19 nt, Homo sapiens
  misc_RNA (1)...(19): siRNA sense strand
gaacugugcgauaacuucu

SEQ ID NO: 1354063 - RNA, 19 nt, Homo sapiens
  misc_RNA (1)...(19): siRNA sense strand
gacaaggacgcgaucuaug

SEQ ID NO: 1354064 - RNA, 19 nt, Homo sapiens
  misc_RNA (1)...(19): siRNA sense strand
uccacgaacugugcgauaa

SEQ ID NO: 1354065 - RNA, 19 nt, Homo sapiens
  misc_RNA (1)...(19): siRNA sense strand
gaauaguacagcccaugau

SEQ ID NO: 1354066 - RNA, 19 nt, Homo sapiens
  misc_RNA (1)...(19): siRNA sense strand
ccaagucagaucaugaaga

SEQ ID NO: 1354067 - RNA, 19 nt, Homo sapiens
  misc_RNA (1)...(19): siRNA sense strand
gcuccaagucagaucauga

SEQ ID NO: 1354068 - RNA, 19 nt, Homo sapiens
  misc_RNA (1)...(19): siRNA sense strand
gggacaaggacgcgaucua

SEQ ID NO: 1354069 - RNA, 19 nt, Homo sapiens
  misc_RNA (1)...(19): siRNA sense strand
guagcaacaaauaucauga

SEQ ID NO: 1354070 - RNA, 19 nt, Homo sapiens
  misc_RNA (1)...(19): siRNA sense strand
accgauacauuagcuguuu

SEQ ID NO: 1354071 - RNA, 19 nt, Homo sapiens
  misc_RNA (1)...(19): siRNA sense strand
guuuauuaaugccagaaga

SEQ ID NO: 1354072 - RNA, 19 nt, Homo sapiens
  misc_RNA (1)...(19): siRNA sense strand
gcaaggggaugguuuagac

SEQ ID NO: 1354073 - RNA, 19 nt, Homo sapiens
  misc_RNA (1)...(19): siRNA sense strand
uaacuucugccaccgauac

SEQ ID NO: 1354074 - RNA, 19 nt, Homo sapiens
  misc_RNA (1)...(19): siRNA sense strand
aauaguacagcccaugauu

SEQ ID NO: 1354075 - RNA, 19 nt, Homo sapiens
  misc_RNA (1)...(19): siRNA sense strand
aaaucucgcugaccauaac

SEQ ID NO: 1354076 - RNA, 19 nt, Homo sapiens
  misc_RNA (1)...(19): siRNA sense strand
acaaggacgcgaucuaugg

SEQ ID NO: 1354077 - RNA, 19 nt, Homo sapiens
  misc_RNA (1)...(19): siRNA sense strand
caaguacuaagguuucauc

SEQ ID NO: 1354078 - RNA, 19 nt, Homo sapiens
  misc_RNA (1)...(19): siRNA sense strand
gccagaagaagaauaguac

SEQ ID NO: 1354079 - RNA, 19 nt, Homo sapiens
  misc_RNA (1)...(19): siRNA sense strand
accauaacccuucuucuug

SEQ ID NO: 1354080 - RNA, 19 nt, Homo sapiens
  misc_RNA (1)...(19): siRNA sense strand
cgaacugugcgauaacuuc

SEQ ID NO: 1354081 - RNA, 19 nt, Homo sapiens
  misc_RNA (1)...(19): siRNA sense strand
ucaggcuccuccacaaauc

SEQ ID NO: 1354082 - RNA, 19 nt, Homo sapiens
  misc_RNA (1)...(19): siRNA sense strand
uguguuggauggucagcaa

SEQ ID NO: 1354083 - RNA, 19 nt, Homo sapiens
  misc_RNA (1)...(19): siRNA sense strand
acaagcaauacaaguacua

SEQ ID NO: 1354084 - RNA, 19 nt, Homo sapiens
  misc_RNA (1)...(19): siRNA sense strand
agaauaguacagcccauga

SEQ ID NO: 1354085 - RNA, 19 nt, Homo sapiens
  misc_RNA (1)...(19): siRNA sense strand
gucagaucaugaagaacuu

SEQ ID NO: 1354086 - RNA, 19 nt, Homo sapiens
  misc_RNA (1)...(19): siRNA sense strand
ggucuucgccaagcagguu

SEQ ID NO: 1354087 - RNA, 19 nt, Homo sapiens
  misc_RNA (1)...(19): siRNA sense strand
ugccagaagaagaauagua

SEQ ID NO: 1354088 - RNA, 19 nt, Homo sapiens
  misc_RNA (1)...(19): siRNA sense strand
acgaugaugauccggauaa

SEQ ID NO: 1354089 - RNA, 19 nt, Homo sapiens
  misc_RNA (1)...(19): siRNA sense strand
auacaaguacuaagguuuc

SEQ ID NO: 1354090 - RNA, 19 nt, Homo sapiens
  misc_RNA (1)...(19): siRNA sense strand
agcaacaaauaucaugaga

SEQ ID NO: 1354091 - RNA, 19 nt, Homo sapiens
  misc_RNA (1)...(19): siRNA sense strand
gcggagacaacagcaguga

SEQ ID NO: 1354092 - RNA, 19 nt, Homo sapiens
  misc_RNA (1)...(19): siRNA sense strand
gguuucaucuuuuggaguu

SEQ ID NO: 1354093 - RNA, 19 nt, Homo sapiens
  misc_RNA (1)...(19): siRNA sense strand
caaggagcagcauauaguc

SEQ ID NO: 1354094 - RNA, 19 nt, Homo sapiens
  misc_RNA (1)...(19): siRNA sense strand
gccaaggagcagcauauag

SEQ ID NO: 1354095 - RNA, 19 nt, Homo sapiens
  misc_RNA (1)...(19): siRNA sense strand
uggacaauuugaugauaca

SEQ ID NO: 1354096 - RNA, 19 nt, Homo sapiens
  misc_RNA (1)...(19): siRNA sense strand
cgauacauuagcuguuuga

SEQ ID NO: 1354097 - RNA, 19 nt, Homo sapiens
  misc_RNA (1)...(19): siRNA sense strand
ccgauacauuagcuguuug

SEQ ID NO: 1354098 - RNA, 19 nt, Homo sapiens
  misc_RNA (1)...(19): siRNA sense strand
gaaaagguccacgaacugu

SEQ ID NO: 1354099 - RNA, 19 nt, Homo sapiens
  misc_RNA (1)...(19): siRNA sense strand
gcagcuccaagucagauca

SEQ ID NO: 1354100 - RNA, 19 nt, Homo sapiens
  misc_RNA (1)...(19): siRNA sense strand
auuaaugccagaagaagaa

SEQ ID NO: 1354101 - RNA, 19 nt, Homo sapiens
  misc_RNA (1)...(19): siRNA sense strand
uagaaaagguccacgaacu

SEQ ID NO: 1354102 - RNA, 19 nt, Homo sapiens
  misc_RNA (1)...(19): siRNA sense strand
augaugauccggauaagga

SEQ ID NO: 1354103 - RNA, 19 nt, Homo sapiens
  misc_RNA (1)...(19): siRNA sense strand
guacuaagguuucaucuuu

SEQ ID NO: 1354104 - RNA, 19 nt, Homo sapiens
  misc_RNA (1)...(19): siRNA sense strand
caagucagaucaugaagaa

SEQ ID NO: 1354105 - RNA, 19 nt, Homo sapiens
  misc_RNA (1)...(19): siRNA sense strand
gauacaagcaauacaagua

SEQ ID NO: 1354106 - RNA, 19 nt, Homo sapiens
  misc_RNA (1)...(19): siRNA sense strand
caaaguagcaacaaauauc

SEQ ID NO: 1354107 - RNA, 19 nt, Homo sapiens
  misc_RNA (1)...(19): siRNA sense strand
gaccauaacccuucuucuu

SEQ ID NO: 1354108 - RNA, 19 nt, Homo sapiens
  misc_RNA (1)...(19): siRNA sense strand
gcuggacaauuugaugaua

SEQ ID NO: 1354109 - RNA, 19 nt, Homo sapiens
  misc_RNA (1)...(19): siRNA sense strand
caauacaaguacuaagguu

SEQ ID NO: 1354110 - RNA, 19 nt, Homo sapiens
  misc_RNA (1)...(19): siRNA sense strand
ccaucgaccucgucauuga

SEQ ID NO: 1354111 - RNA, 19 nt, Homo sapiens
  misc_RNA (1)...(19): siRNA sense strand
gaugauacaagcaauacaa

SEQ ID NO: 1354112 - RNA, 19 nt, Homo sapiens
  misc_RNA (1)...(19): siRNA sense strand
guacaggugacgaugauga

SEQ ID NO: 1354113 - RNA, 19 nt, Homo sapiens
  misc_RNA (1)...(19): siRNA sense strand
ccaaggagcagcauauagu

SEQ ID NO: 1354114 - RNA, 19 nt, Homo sapiens
  misc_RNA (1)...(19): siRNA sense strand
agacaacaguguagcuuca

SEQ ID NO: 1354115 - RNA, 19 nt, Homo sapiens
  misc_RNA (1)...(19): siRNA sense strand
gagcuggacaauuugauga

SEQ ID NO: 1354116 - RNA, 19 nt, Homo sapiens
  misc_RNA (1)...(19): siRNA sense strand
gagccaaggagcagcauau

SEQ ID NO: 1354117 - RNA, 19 nt, Homo sapiens
  misc_RNA (1)...(19): siRNA sense strand
gcccaucgaccucgucauu

SEQ ID NO: 1354118 - RNA, 19 nt, Homo sapiens
  misc_RNA (1)...(19): siRNA sense strand
ccaaaguagcaacaaauau

SEQ ID NO: 1354119 - RNA, 19 nt, Homo sapiens
  misc_RNA (1)...(19): siRNA sense strand
gcaauacaaguacuaaggu

SEQ ID NO: 1354120 - RNA, 19 nt, Homo sapiens
  misc_RNA (1)...(19): siRNA sense strand
uaguacagcccaugauuga

SEQ ID NO: 1354121 - RNA, 19 nt, Homo sapiens
  misc_RNA (1)...(19): siRNA sense strand
caaaucucgcugaccauaa

SEQ ID NO: 1354122 - RNA, 19 nt, Homo sapiens
  misc_RNA (1)...(19): siRNA sense strand
gcucuggucuuugagaagu

SEQ ID NO: 1354123 - RNA, 19 nt, Homo sapiens
  misc_RNA (1)...(19): siRNA sense strand
cccaaaguagcaacaaaua

SEQ ID NO: 1354124 - RNA, 19 nt, Homo sapiens
  misc_RNA (1)...(19): siRNA sense strand
caagcaauacaaguacuaa

SEQ ID NO: 1354125 - RNA, 19 nt, Homo sapiens
  misc_RNA (1)...(19): siRNA sense strand
acaaauaucaugagagcau

SEQ ID NO: 1354126 - RNA, 19 nt, Homo sapiens
  misc_RNA (1)...(19): siRNA sense strand
acaaaucucgcugaccaua

SEQ ID NO: 1354127 - RNA, 19 nt, Homo sapiens
  misc_RNA (1)...(19): siRNA sense strand
gaacugugcgauaacuucu

SEQ ID NO: 1354128 - RNA, 19 nt, Homo sapiens
  misc_RNA (1)...(19): siRNA sense strand
uccacgaacugugcgauaa

SEQ ID NO: 1354129 - RNA, 19 nt, Homo sapiens
  misc_RNA (1)...(19): siRNA sense strand
gaauaguacagcccaugau

SEQ ID NO: 1354130 - RNA, 19 nt, Homo sapiens
  misc_RNA (1)...(19): siRNA sense strand
ccaagucagaucaugaaga

SEQ ID NO: 1354131 - RNA, 19 nt, Homo sapiens
  misc_RNA (1)...(19): siRNA sense strand
gcuccaagucagaucauga

SEQ ID NO: 1354132 - RNA, 19 nt, Homo sapiens
  misc_RNA (1)...(19): siRNA sense strand
guagcaacaaauaucauga

SEQ ID NO: 1354133 - RNA, 19 nt, Homo sapiens
  misc_RNA (1)...(19): siRNA sense strand
accgauacauuagcuguuu

SEQ ID NO: 1354134 - RNA, 19 nt, Homo sapiens
  misc_RNA (1)...(19): siRNA sense strand
guuuauuaaugccagaaga

SEQ ID NO: 1354135 - RNA, 19 nt, Homo sapiens
  misc_RNA (1)...(19): siRNA sense strand
gcaaggggaugguuuagac

SEQ ID NO: 1354136 - RNA, 19 nt, Homo sapiens
  misc_RNA (1)...(19): siRNA sense strand
uaacuucugccaccgauac

SEQ ID NO: 1354137 - RNA, 19 nt, Homo sapiens
  misc_RNA (1)...(19): siRNA sense strand
aauaguacagcccaugauu

SEQ ID NO: 1354138 - RNA, 19 nt, Homo sapiens
  misc_RNA (1)...(19): siRNA sense strand
aaaucucgcugaccauaac

SEQ ID NO: 1354139 - RNA, 19 nt, Homo sapiens
  misc_RNA (1)...(19): siRNA sense strand
caaguacuaagguuucauc

SEQ ID NO: 1354140 - RNA, 19 nt, Homo sapiens
  misc_RNA (1)...(19): siRNA sense strand
gccagaagaagaauaguac

SEQ ID NO: 1354141 - RNA, 19 nt, Homo sapiens
  misc_RNA (1)...(19): siRNA sense strand
accauaacccuucuucuug

SEQ ID NO: 1354142 - RNA, 19 nt, Homo sapiens
  misc_RNA (1)...(19): siRNA sense strand
cgaacugugcgauaacuuc

SEQ ID NO: 1354143 - RNA, 19 nt, Homo sapiens
  misc_RNA (1)...(19): siRNA sense strand
ucaggcuccuccacaaauc

SEQ ID NO: 1354144 - RNA, 19 nt, Homo sapiens
  misc_RNA (1)...(19): siRNA sense strand
uguguuggauggucagcaa

SEQ ID NO: 1354145 - RNA, 19 nt, Homo sapiens
  misc_RNA (1)...(19): siRNA sense strand
gucagaucaugaagaacuu

SEQ ID NO: 1354146 - RNA, 19 nt, Homo sapiens
  misc_RNA (1)...(19): siRNA sense strand
agaauaguacagcccauga

SEQ ID NO: 1354147 - RNA, 19 nt, Homo sapiens
  misc_RNA (1)...(19): siRNA sense strand
acaagcaauacaaguacua

SEQ ID NO: 1354148 - RNA, 19 nt, Homo sapiens
  misc_RNA (1)...(19): siRNA sense strand
acgaugaugauccggauaa

SEQ ID NO: 1354149 - RNA, 19 nt, Homo sapiens
  misc_RNA (1)...(19): siRNA sense strand
ggucuucgccaagcagguu

SEQ ID NO: 1354150 - RNA, 19 nt, Homo sapiens
  misc_RNA (1)...(19): siRNA sense strand
ugccagaagaagaauagua

SEQ ID NO: 1354151 - RNA, 19 nt, Homo sapiens
  misc_RNA (1)...(19): siRNA sense strand
auacaaguacuaagguuuc

SEQ ID NO: 1354152 - RNA, 19 nt, Homo sapiens
  misc_RNA (1)...(19): siRNA sense strand
agcaacaaauaucaugaga

SEQ ID NO: 1354153 - RNA, 19 nt, Homo sapiens
  misc_RNA (1)...(19): siRNA sense strand
gcggagacaacagcaguga

SEQ ID NO: 1354154 - RNA, 19 nt, Homo sapiens
  misc_RNA (1)...(19): siRNA sense strand
ccgauacauuagcuguuug

SEQ ID NO: 1354155 - RNA, 19 nt, Homo sapiens
  misc_RNA (1)...(19): siRNA sense strand
caaggagcagcauauaguc

SEQ ID NO: 1354156 - RNA, 19 nt, Homo sapiens
  misc_RNA (1)...(19): siRNA sense strand
gguuucaucuuuuggaguu

SEQ ID NO: 1354157 - RNA, 19 nt, Homo sapiens
  misc_RNA (1)...(19): siRNA sense strand
gccaaggagcagcauauag

SEQ ID NO: 1354158 - RNA, 19 nt, Homo sapiens
  misc_RNA (1)...(19): siRNA sense strand
uggacaauuugaugauaca

SEQ ID NO: 1354159 - RNA, 19 nt, Homo sapiens
  misc_RNA (1)...(19): siRNA sense strand
gaaaagguccacgaacugu

SEQ ID NO: 1354160 - RNA, 19 nt, Homo sapiens
  misc_RNA (1)...(19): siRNA sense strand
cgauacauuagcuguuuga

SEQ ID NO: 1354161 - RNA, 19 nt, Homo sapiens
  misc_RNA (1)...(19): siRNA sense strand
gcagcuccaagucagauca

SEQ ID NO: 1354162 - RNA, 19 nt, Homo sapiens
  misc_RNA (1)...(19): siRNA sense strand
auuaaugccagaagaagaa

SEQ ID NO: 1354163 - RNA, 19 nt, Homo sapiens
  misc_RNA (1)...(19): siRNA sense strand
augaugauccggauaagga

SEQ ID NO: 1354164 - RNA, 19 nt, Homo sapiens
  misc_RNA (1)...(19): siRNA sense strand
uagaaaagguccacgaacu

SEQ ID NO: 1354165 - RNA, 19 nt, Homo sapiens
  misc_RNA (1)...(19): siRNA sense strand
guacuaagguuucaucuuu

SEQ ID NO: 1354166 - RNA, 19 nt, Homo sapiens
  misc_RNA (1)...(19): siRNA sense strand
caagucagaucaugaagaa

SEQ ID NO: 1354167 - RNA, 19 nt, Homo sapiens
  misc_RNA (1)...(19): siRNA sense strand
gauacaagcaauacaagua

SEQ ID NO: 1354168 - RNA, 19 nt, Homo sapiens
  misc_RNA (1)...(19): siRNA sense strand
caaaguagcaacaaauauc

SEQ ID NO: 1354169 - RNA, 19 nt, Homo sapiens
  misc_RNA (1)...(19): siRNA sense strand
gaccauaacccuucuucuu

SEQ ID NO: 1354170 - RNA, 19 nt, Homo sapiens
  misc_RNA (1)...(19): siRNA sense strand
ggacaaggacgcgaucuau

SEQ ID NO: 1354171 - RNA, 19 nt, Homo sapiens
  misc_RNA (1)...(19): siRNA sense strand
gcuggacaauuugaugaua

SEQ ID NO: 1354172 - RNA, 19 nt, Homo sapiens
  misc_RNA (1)...(19): siRNA sense strand
caauacaaguacuaagguu

SEQ ID NO: 1354173 - RNA, 19 nt, Homo sapiens
  misc_RNA (1)...(19): siRNA sense strand
ccaucgaccucgucauuga

SEQ ID NO: 1354174 - RNA, 19 nt, Homo sapiens
  misc_RNA (1)...(19): siRNA sense strand
gaugauacaagcaauacaa

SEQ ID NO: 1354175 - RNA, 19 nt, Homo sapiens
  misc_RNA (1)...(19): siRNA sense strand
guacaggugacgaugauga

SEQ ID NO: 1354176 - RNA, 19 nt, Homo sapiens
  misc_RNA (1)...(19): siRNA sense strand
ccaaggagcagcauauagu

SEQ ID NO: 1354177 - RNA, 19 nt, Homo sapiens
  misc_RNA (1)...(19): siRNA sense strand
agacaacaguguagcuuca

SEQ ID NO: 1354178 - RNA, 19 nt, Homo sapiens
  misc_RNA (1)...(19): siRNA sense strand
gagcuggacaauuugauga

SEQ ID NO: 1354179 - RNA, 19 nt, Homo sapiens
  misc_RNA (1)...(19): siRNA sense strand
gagccaaggagcagcauau

SEQ ID NO: 1354180 - RNA, 19 nt, Homo sapiens
  misc_RNA (1)...(19): siRNA sense strand
gcccaucgaccucgucauu

SEQ ID NO: 1354181 - RNA, 19 nt, Homo sapiens
  misc_RNA (1)...(19): siRNA sense strand
ccaaaguagcaacaaauau

SEQ ID NO: 1354182 - RNA, 19 nt, Homo sapiens
  misc_RNA (1)...(19): siRNA sense strand
gcucuggucuuugagaagu

SEQ ID NO: 1354183 - RNA, 19 nt, Homo sapiens
  misc_RNA (1)...(19): siRNA sense strand
uaguacagcccaugauuga

SEQ ID NO: 1354184 - RNA, 19 nt, Homo sapiens
  misc_RNA (1)...(19): siRNA sense strand
caaaucucgcugaccauaa

SEQ ID NO: 1354185 - RNA, 19 nt, Homo sapiens
  misc_RNA (1)...(19): siRNA sense strand
gcaauacaaguacuaaggu

SEQ ID NO: 1354186 - RNA, 19 nt, Homo sapiens
  misc_RNA (1)...(19): siRNA sense strand
cccaaaguagcaacaaaua

SEQ ID NO: 1354187 - RNA, 19 nt, Homo sapiens
  misc_RNA (1)...(19): siRNA sense strand
caagcaauacaaguacuaa

SEQ ID NO: 1354188 - RNA, 19 nt, Homo sapiens
  misc_RNA (1)...(19): siRNA sense strand
acaaauaucaugagagcau

SEQ ID NO: 1354189 - RNA, 19 nt, Homo sapiens
  misc_RNA (1)...(19): siRNA sense strand
acaaaucucgcugaccaua

SEQ ID NO: 1354190 - RNA, 19 nt, Homo sapiens
  misc_RNA (1)...(19): siRNA sense strand
gaacugugcgauaacuucu

SEQ ID NO: 1354191 - RNA, 19 nt, Homo sapiens
  misc_RNA (1)...(19): siRNA sense strand
gacaaggacgcgaucuaug

SEQ ID NO: 1354192 - RNA, 19 nt, Homo sapiens
  misc_RNA (1)...(19): siRNA sense strand
uccacgaacugugcgauaa

SEQ ID NO: 1354193 - RNA, 19 nt, Homo sapiens
  misc_RNA (1)...(19): siRNA sense strand
gaauaguacagcccaugau

SEQ ID NO: 1354194 - RNA, 19 nt, Homo sapiens
  misc_RNA (1)...(19): siRNA sense strand
ccaagucagaucaugaaga

SEQ ID NO: 1354195 - RNA, 19 nt, Homo sapiens
  misc_RNA (1)...(19): siRNA sense strand
gcuccaagucagaucauga

SEQ ID NO: 1354196 - RNA, 19 nt, Homo sapiens
  misc_RNA (1)...(19): siRNA sense strand
gggacaaggacgcgaucua

SEQ ID NO: 1354197 - RNA, 19 nt, Homo sapiens
  misc_RNA (1)...(19): siRNA sense strand
guagcaacaaauaucauga

SEQ ID NO: 1354198 - RNA, 19 nt, Homo sapiens
  misc_RNA (1)...(19): siRNA sense strand
accgauacauuagcuguuu

SEQ ID NO: 1354199 - RNA, 19 nt, Homo sapiens
  misc_RNA (1)...(19): siRNA sense strand
guuuauuaaugccagaaga

SEQ ID NO: 1354200 - RNA, 19 nt, Homo sapiens
  misc_RNA (1)...(19): siRNA sense strand
gcaaggggaugguuuagac

SEQ ID NO: 1354201 - RNA, 19 nt, Homo sapiens
  misc_RNA (1)...(19): siRNA sense strand
uaacuucugccaccgauac

SEQ ID NO: 1354202 - RNA, 19 nt, Homo sapiens
  misc_RNA (1)...(19): siRNA sense strand
aauaguacagcccaugauu

SEQ ID NO: 1354203 - RNA, 19 nt, Homo sapiens
  misc_RNA (1)...(19): siRNA sense strand
aaaucucgcugaccauaac

SEQ ID NO: 1354204 - RNA, 19 nt, Homo sapiens
  misc_RNA (1)...(19): siRNA sense strand
acaaggacgcgaucuaugg

SEQ ID NO: 1354205 - RNA, 19 nt, Homo sapiens
  misc_RNA (1)...(19): siRNA sense strand
caaguacuaagguuucauc

SEQ ID NO: 1354206 - RNA, 19 nt, Homo sapiens
  misc_RNA (1)...(19): siRNA sense strand
gccagaagaagaauaguac

SEQ ID NO: 1354207 - RNA, 19 nt, Homo sapiens
  misc_RNA (1)...(19): siRNA sense strand
accauaacccuucuucuug

SEQ ID NO: 1354208 - RNA, 19 nt, Homo sapiens
  misc_RNA (1)...(19): siRNA sense strand
cgaacugugcgauaacuuc

SEQ ID NO: 1354209 - RNA, 19 nt, Homo sapiens
  misc_RNA (1)...(19): siRNA sense strand
ucaggcuccuccacaaauc

SEQ ID NO: 1354210 - RNA, 19 nt, Homo sapiens
  misc_RNA (1)...(19): siRNA sense strand
uguguuggauggucagcaa

SEQ ID NO: 1354211 - RNA, 19 nt, Homo sapiens
  misc_RNA (1)...(19): siRNA sense strand
acaagcaauacaaguacua

SEQ ID NO: 1354212 - RNA, 19 nt, Homo sapiens
  misc_RNA (1)...(19): siRNA sense strand
agaauaguacagcccauga

SEQ ID NO: 1354213 - RNA, 19 nt, Homo sapiens
  misc_RNA (1)...(19): siRNA sense strand
gucagaucaugaagaacuu

SEQ ID NO: 1354214 - RNA, 19 nt, Homo sapiens
  misc_RNA (1)...(19): siRNA sense strand
ggucuucgccaagcagguu

SEQ ID NO: 1354215 - RNA, 19 nt, Homo sapiens
  misc_RNA (1)...(19): siRNA sense strand
ugccagaagaagaauagua

SEQ ID NO: 1354216 - RNA, 19 nt, Homo sapiens
  misc_RNA (1)...(19): siRNA sense strand
acgaugaugauccggauaa

SEQ ID NO: 1354217 - RNA, 19 nt, Homo sapiens
  misc_RNA (1)...(19): siRNA sense strand
auacaaguacuaagguuuc

SEQ ID NO: 1354218 - RNA, 19 nt, Homo sapiens
  misc_RNA (1)...(19): siRNA sense strand
agcaacaaauaucaugaga

SEQ ID NO: 1354219 - RNA, 19 nt, Homo sapiens
  misc_RNA (1)...(19): siRNA sense strand
gcggagacaacagcaguga

SEQ ID NO: 1354220 - RNA, 19 nt, Homo sapiens
  misc_RNA (1)...(19): siRNA sense strand
gguuucaucuuuuggaguu

SEQ ID NO: 1354221 - RNA, 19 nt, Homo sapiens
  misc_RNA (1)...(19): siRNA sense strand
caaggagcagcauauaguc

SEQ ID NO: 1354222 - RNA, 19 nt, Homo sapiens
  misc_RNA (1)...(19): siRNA sense strand
gccaaggagcagcauauag

SEQ ID NO: 1354223 - RNA, 19 nt, Homo sapiens
  misc_RNA (1)...(19): siRNA sense strand
uggacaauuugaugauaca

SEQ ID NO: 1354224 - RNA, 19 nt, Homo sapiens
  misc_RNA (1)...(19): siRNA sense strand
cgauacauuagcuguuuga

SEQ ID NO: 1354225 - RNA, 19 nt, Homo sapiens
  misc_RNA (1)...(19): siRNA sense strand
ccgauacauuagcuguuug

SEQ ID NO: 1354226 - RNA, 19 nt, Homo sapiens
  misc_RNA (1)...(19): siRNA sense strand
gaaaagguccacgaacugu

SEQ ID NO: 1354227 - RNA, 19 nt, Homo sapiens
  misc_RNA (1)...(19): siRNA sense strand
gcagcuccaagucagauca

SEQ ID NO: 1354228 - RNA, 19 nt, Homo sapiens
  misc_RNA (1)...(19): siRNA sense strand
auuaaugccagaagaagaa

SEQ ID NO: 1354229 - RNA, 19 nt, Homo sapiens
  misc_RNA (1)...(19): siRNA sense strand
uagaaaagguccacgaacu

SEQ ID NO: 1354230 - RNA, 19 nt, Homo sapiens
  misc_RNA (1)...(19): siRNA sense strand
augaugauccggauaagga

SEQ ID NO: 1354231 - RNA, 19 nt, Homo sapiens
  misc_RNA (1)...(19): siRNA sense strand
guacuaagguuucaucuuu

SEQ ID NO: 1354232 - RNA, 19 nt, Homo sapiens
  misc_RNA (1)...(19): siRNA sense strand
caagucagaucaugaagaa

SEQ ID NO: 1354233 - RNA, 19 nt, Homo sapiens
  misc_RNA (1)...(19): siRNA sense strand
gauacaagcaauacaagua

SEQ ID NO: 1354234 - RNA, 19 nt, Homo sapiens
  misc_RNA (1)...(19): siRNA sense strand
caaaguagcaacaaauauc

SEQ ID NO: 1354235 - RNA, 19 nt, Homo sapiens
  misc_RNA (1)...(19): siRNA sense strand
gaccauaacccuucuucuu

SEQ ID NO: 1354236 - RNA, 19 nt, Homo sapiens
  misc_RNA (1)...(19): siRNA sense strand
ggacaaggacgcgaucuau

SEQ ID NO: 1354237 - RNA, 19 nt, Homo sapiens
  misc_RNA (1)...(19): siRNA sense strand
gcuggacaauuugaugaua

SEQ ID NO: 1354238 - RNA, 19 nt, Homo sapiens
  misc_RNA (1)...(19): siRNA sense strand
caauacaaguacuaagguu

SEQ ID NO: 1354239 - RNA, 19 nt, Homo sapiens
  misc_RNA (1)...(19): siRNA sense strand
ccaucgaccucgucauuga

SEQ ID NO: 1354240 - RNA, 19 nt, Homo sapiens
  misc_RNA (1)...(19): siRNA sense strand
gaugauacaagcaauacaa

SEQ ID NO: 1354241 - RNA, 19 nt, Homo sapiens
  misc_RNA (1)...(19): siRNA sense strand
guacaggugacgaugauga

SEQ ID NO: 1354242 - RNA, 19 nt, Homo sapiens
  misc_RNA (1)...(19): siRNA sense strand
acgaugagcugccccauua

SEQ ID NO: 1354243 - RNA, 19 nt, Homo sapiens
  misc_RNA (1)...(19): siRNA sense strand
agacaacaguguagcuuca

SEQ ID NO: 1354244 - RNA, 19 nt, Homo sapiens
  misc_RNA (1)...(19): siRNA sense strand
gagcuggacaauuugauga

SEQ ID NO: 1354245 - RNA, 19 nt, Homo sapiens
  misc_RNA (1)...(19): siRNA sense strand
gcccaucgaccucgucauu

SEQ ID NO: 1354246 - RNA, 19 nt, Homo sapiens
  misc_RNA (1)...(19): siRNA sense strand
ccaaaguagcaacaaauau

SEQ ID NO: 1354247 - RNA, 19 nt, Homo sapiens
  misc_RNA (1)...(19): siRNA sense strand
gcucuggucuuugagaagu

SEQ ID NO: 1354248 - RNA, 19 nt, Homo sapiens
  misc_RNA (1)...(19): siRNA sense strand
caaaucucgcugaccauaa

SEQ ID NO: 1354249 - RNA, 19 nt, Homo sapiens
  misc_RNA (1)...(19): siRNA sense strand
gcaauacaaguacuaaggu

SEQ ID NO: 1354250 - RNA, 19 nt, Homo sapiens
  misc_RNA (1)...(19): siRNA sense strand
cccaaaguagcaacaaaua

SEQ ID NO: 1354251 - RNA, 19 nt, Homo sapiens
  misc_RNA (1)...(19): siRNA sense strand
caagcaauacaaguacuaa

SEQ ID NO: 1354252 - RNA, 19 nt, Homo sapiens
  misc_RNA (1)...(19): siRNA sense strand
acaaauaucaugagagcau

SEQ ID NO: 1354253 - RNA, 19 nt, Homo sapiens
  misc_RNA (1)...(19): siRNA sense strand
acaaaucucgcugaccaua

SEQ ID NO: 1354254 - RNA, 19 nt, Homo sapiens
  misc_RNA (1)...(19): siRNA sense strand
gaacugugcgauaacuucu

SEQ ID NO: 1354255 - RNA, 19 nt, Homo sapiens
  misc_RNA (1)...(19): siRNA sense strand
gacaaggacgcgaucuaug

SEQ ID NO: 1354256 - RNA, 19 nt, Homo sapiens
  misc_RNA (1)...(19): siRNA sense strand
uccacgaacugugcgauaa

SEQ ID NO: 1354257 - RNA, 19 nt, Homo sapiens
  misc_RNA (1)...(19): siRNA sense strand
ccaagucagaucaugaaga

SEQ ID NO: 1354258 - RNA, 19 nt, Homo sapiens
  misc_RNA (1)...(19): siRNA sense strand
gcuccaagucagaucauga

SEQ ID NO: 1354259 - RNA, 19 nt, Homo sapiens
  misc_RNA (1)...(19): siRNA sense strand
gggacaaggacgcgaucua

SEQ ID NO: 1354260 - RNA, 19 nt, Homo sapiens
  misc_RNA (1)...(19): siRNA sense strand
guagcaacaaauaucauga

SEQ ID NO: 1354261 - RNA, 19 nt, Homo sapiens
  misc_RNA (1)...(19): siRNA sense strand
accgauacauuagcuguuu

SEQ ID NO: 1354262 - RNA, 19 nt, Homo sapiens
  misc_RNA (1)...(19): siRNA sense strand
gcaaggggaugguuuagac

SEQ ID NO: 1354263 - RNA, 19 nt, Homo sapiens
  misc_RNA (1)...(19): siRNA sense strand
uaacuucugccaccgauac

SEQ ID NO: 1354264 - RNA, 19 nt, Homo sapiens
  misc_RNA (1)...(19): siRNA sense strand
aaaucucgcugaccauaac

SEQ ID NO: 1354265 - RNA, 19 nt, Homo sapiens
  misc_RNA (1)...(19): siRNA sense strand
acaaggacgcgaucuaugg

SEQ ID NO: 1354266 - RNA, 19 nt, Homo sapiens
  misc_RNA (1)...(19): siRNA sense strand
caaguacuaagguuucauc

SEQ ID NO: 1354267 - RNA, 19 nt, Homo sapiens
  misc_RNA (1)...(19): siRNA sense strand
accauaacccuucuucuug

SEQ ID NO: 1354268 - RNA, 19 nt, Homo sapiens
  misc_RNA (1)...(19): siRNA sense strand
cgaacugugcgauaacuuc

SEQ ID NO: 1354269 - RNA, 19 nt, Homo sapiens
  misc_RNA (1)...(19): siRNA sense strand
ucaggcuccuccacaaauc

SEQ ID NO: 1354270 - RNA, 19 nt, Homo sapiens
  misc_RNA (1)...(19): siRNA sense strand
acaagcaauacaaguacua

SEQ ID NO: 1354271 - RNA, 19 nt, Homo sapiens
  misc_RNA (1)...(19): siRNA sense strand
gucagaucaugaagaacuu

SEQ ID NO: 1354272 - RNA, 19 nt, Homo sapiens
  misc_RNA (1)...(19): siRNA sense strand
ggucuucgccaagcagguu

SEQ ID NO: 1354273 - RNA, 19 nt, Homo sapiens
  misc_RNA (1)...(19): siRNA sense strand
acgaugaugauccggauaa

SEQ ID NO: 1354274 - RNA, 19 nt, Homo sapiens
  misc_RNA (1)...(19): siRNA sense strand
auacaaguacuaagguuuc

SEQ ID NO: 1354275 - RNA, 19 nt, Homo sapiens
  misc_RNA (1)...(19): siRNA sense strand
agcaacaaauaucaugaga

SEQ ID NO: 1354276 - RNA, 19 nt, Homo sapiens
  misc_RNA (1)...(19): siRNA sense strand
gcggagacaacagcaguga

SEQ ID NO: 1354277 - RNA, 19 nt, Homo sapiens
  misc_RNA (1)...(19): siRNA sense strand
uggacaauuugaugauaca

SEQ ID NO: 1354278 - RNA, 19 nt, Homo sapiens
  misc_RNA (1)...(19): siRNA sense strand
cgauacauuagcuguuuga

SEQ ID NO: 1354279 - RNA, 19 nt, Homo sapiens
  misc_RNA (1)...(19): siRNA sense strand
ccgauacauuagcuguuug

SEQ ID NO: 1354280 - RNA, 19 nt, Homo sapiens
  misc_RNA (1)...(19): siRNA sense strand
gaaaagguccacgaacugu

SEQ ID NO: 1354281 - RNA, 19 nt, Homo sapiens
  misc_RNA (1)...(19): siRNA sense strand
gguuucaucuuuuggaguu

SEQ ID NO: 1354282 - RNA, 19 nt, Homo sapiens
  misc_RNA (1)...(19): siRNA sense strand
gcagcuccaagucagauca

SEQ ID NO: 1354283 - RNA, 19 nt, Homo sapiens
  misc_RNA (1)...(19): siRNA sense strand
uagaaaagguccacgaacu

SEQ ID NO: 1354284 - RNA, 19 nt, Homo sapiens
  misc_RNA (1)...(19): siRNA sense strand
augaugauccggauaagga

SEQ ID NO: 1354285 - RNA, 19 nt, Homo sapiens
  misc_RNA (1)...(19): siRNA sense strand
guacuaagguuucaucuuu

SEQ ID NO: 1354286 - RNA, 19 nt, Homo sapiens
  misc_RNA (1)...(19): siRNA sense strand
caagucagaucaugaagaa

SEQ ID NO: 1354287 - RNA, 19 nt, Homo sapiens
  misc_RNA (1)...(19): siRNA sense strand
gauacaagcaauacaagua

SEQ ID NO: 1354288 - RNA, 19 nt, Homo sapiens
  misc_RNA (1)...(19): siRNA sense strand
caaaguagcaacaaauauc

SEQ ID NO: 1354289 - RNA, 19 nt, Homo sapiens
  misc_RNA (1)...(19): siRNA sense strand
gaccauaacccuucuucuu

SEQ ID NO: 1354290 - RNA, 19 nt, Homo sapiens
  misc_RNA (1)...(19): siRNA sense strand
ggacaaggacgcgaucuau

SEQ ID NO: 1354291 - RNA, 19 nt, Homo sapiens
  misc_RNA (1)...(19): siRNA sense strand
gcuggacaauuugaugaua

SEQ ID NO: 1354292 - RNA, 19 nt, Homo sapiens
  misc_RNA (1)...(19): siRNA sense strand
caauacaaguacuaagguu

SEQ ID NO: 1354293 - RNA, 19 nt, Homo sapiens
  misc_RNA (1)...(19): siRNA sense strand
ccaucgaccucgucauuga

SEQ ID NO: 1354294 - RNA, 19 nt, Homo sapiens
  misc_RNA (1)...(19): siRNA sense strand
gaugauacaagcaauacaa

SEQ ID NO: 1354295 - RNA, 19 nt, Homo sapiens
  misc_RNA (1)...(19): siRNA sense strand
guacaggugacgaugauga

SEQ ID NO: 1354296 - RNA, 19 nt, Homo sapiens
  misc_RNA (1)...(19): siRNA sense strand
ccaaggagcagcauauagu

SEQ ID NO: 1354297 - RNA, 19 nt, Homo sapiens
  misc_RNA (1)...(19): siRNA sense strand
acgaugagcugccccauua

SEQ ID NO: 1354298 - RNA, 19 nt, Homo sapiens
  misc_RNA (1)...(19): siRNA sense strand
agacaacaguguagcuuca

SEQ ID NO: 1354299 - RNA, 19 nt, Homo sapiens
  misc_RNA (1)...(19): siRNA sense strand
gagcuggacaauuugauga

SEQ ID NO: 1354300 - RNA, 19 nt, Homo sapiens
  misc_RNA (1)...(19): siRNA sense strand
gagccaaggagcagcauau

SEQ ID NO: 1354301 - RNA, 19 nt, Homo sapiens
  misc_RNA (1)...(19): siRNA sense strand
gcccaucgaccucgucauu

SEQ ID NO: 1354302 - RNA, 19 nt, Homo sapiens
  misc_RNA (1)...(19): siRNA sense strand
ccaaaguagcaacaaauau

SEQ ID NO: 1354303 - RNA, 19 nt, Homo sapiens
  misc_RNA (1)...(19): siRNA sense strand
gcucuggucuuugagaagu

SEQ ID NO: 1354304 - RNA, 19 nt, Homo sapiens
  misc_RNA (1)...(19): siRNA sense strand
uaguacagcccaugauuga

SEQ ID NO: 1354305 - RNA, 19 nt, Homo sapiens
  misc_RNA (1)...(19): siRNA sense strand
caaaucucgcugaccauaa

SEQ ID NO: 1354306 - RNA, 19 nt, Homo sapiens
  misc_RNA (1)...(19): siRNA sense strand
gcaauacaaguacuaaggu

SEQ ID NO: 1354307 - RNA, 19 nt, Homo sapiens
  misc_RNA (1)...(19): siRNA sense strand
cccaaaguagcaacaaaua

SEQ ID NO: 1354308 - RNA, 19 nt, Homo sapiens
  misc_RNA (1)...(19): siRNA sense strand
caagcaauacaaguacuaa

SEQ ID NO: 1354309 - RNA, 19 nt, Homo sapiens
  misc_RNA (1)...(19): siRNA sense strand
acaaauaucaugagagcau

SEQ ID NO: 1354310 - RNA, 19 nt, Homo sapiens
  misc_RNA (1)...(19): siRNA sense strand
acaaaucucgcugaccaua

SEQ ID NO: 1354311 - RNA, 19 nt, Homo sapiens
  misc_RNA (1)...(19): siRNA sense strand
gaacugugcgauaacuucu

SEQ ID NO: 1354312 - RNA, 19 nt, Homo sapiens
  misc_RNA (1)...(19): siRNA sense strand
gacaaggacgcgaucuaug

SEQ ID NO: 1354313 - RNA, 19 nt, Homo sapiens
  misc_RNA (1)...(19): siRNA sense strand
uccacgaacugugcgauaa

SEQ ID NO: 1354314 - RNA, 19 nt, Homo sapiens
  misc_RNA (1)...(19): siRNA sense strand
gaauaguacagcccaugau

SEQ ID NO: 1354315 - RNA, 19 nt, Homo sapiens
  misc_RNA (1)...(19): siRNA sense strand
ccaagucagaucaugaaga

SEQ ID NO: 1354316 - RNA, 19 nt, Homo sapiens
  misc_RNA (1)...(19): siRNA sense strand
gcuccaagucagaucauga

SEQ ID NO: 1354317 - RNA, 19 nt, Homo sapiens
  misc_RNA (1)...(19): siRNA sense strand
gggacaaggacgcgaucua

SEQ ID NO: 1354318 - RNA, 19 nt, Homo sapiens
  misc_RNA (1)...(19): siRNA sense strand
guagcaacaaauaucauga

SEQ ID NO: 1354319 - RNA, 19 nt, Homo sapiens
  misc_RNA (1)...(19): siRNA sense strand
accgauacauuagcuguuu

SEQ ID NO: 1354320 - RNA, 19 nt, Homo sapiens
  misc_RNA (1)...(19): siRNA sense strand
guuuauuaaugccagaaga

SEQ ID NO: 1354321 - RNA, 19 nt, Homo sapiens
  misc_RNA (1)...(19): siRNA sense strand
gcaaggggaugguuuagac

SEQ ID NO: 1354322 - RNA, 19 nt, Homo sapiens
  misc_RNA (1)...(19): siRNA sense strand
uaacuucugccaccgauac

SEQ ID NO: 1354323 - RNA, 19 nt, Homo sapiens
  misc_RNA (1)...(19): siRNA sense strand
aauaguacagcccaugauu

SEQ ID NO: 1354324 - RNA, 19 nt, Homo sapiens
  misc_RNA (1)...(19): siRNA sense strand
acaaggacgcgaucuaugg

SEQ ID NO: 1354325 - RNA, 19 nt, Homo sapiens
  misc_RNA (1)...(19): siRNA sense strand
aaaucucgcugaccauaac

SEQ ID NO: 1354326 - RNA, 19 nt, Homo sapiens
  misc_RNA (1)...(19): siRNA sense strand
caaguacuaagguuucauc

SEQ ID NO: 1354327 - RNA, 19 nt, Homo sapiens
  misc_RNA (1)...(19): siRNA sense strand
gccagaagaagaauaguac

SEQ ID NO: 1354328 - RNA, 19 nt, Homo sapiens
  misc_RNA (1)...(19): siRNA sense strand
accauaacccuucuucuug

SEQ ID NO: 1354329 - RNA, 19 nt, Homo sapiens
  misc_RNA (1)...(19): siRNA sense strand
cgaacugugcgauaacuuc

SEQ ID NO: 1354330 - RNA, 19 nt, Homo sapiens
  misc_RNA (1)...(19): siRNA sense strand
ucaggcuccuccacaaauc

SEQ ID NO: 1354331 - RNA, 19 nt, Homo sapiens
  misc_RNA (1)...(19): siRNA sense strand
uguguuggauggucagcaa

SEQ ID NO: 1354332 - RNA, 19 nt, Homo sapiens
  misc_RNA (1)...(19): siRNA sense strand
acaagcaauacaaguacua

SEQ ID NO: 1354333 - RNA, 19 nt, Homo sapiens
  misc_RNA (1)...(19): siRNA sense strand
agaauaguacagcccauga

SEQ ID NO: 1354334 - RNA, 19 nt, Homo sapiens
  misc_RNA (1)...(19): siRNA sense strand
gucagaucaugaagaacuu

SEQ ID NO: 1354335 - RNA, 19 nt, Homo sapiens
  misc_RNA (1)...(19): siRNA sense strand
ggucuucgccaagcagguu

SEQ ID NO: 1354336 - RNA, 19 nt, Homo sapiens
  misc_RNA (1)...(19): siRNA sense strand
ugccagaagaagaauagua

SEQ ID NO: 1354337 - RNA, 19 nt, Homo sapiens
  misc_RNA (1)...(19): siRNA sense strand
acgaugaugauccggauaa

SEQ ID NO: 1354338 - RNA, 19 nt, Homo sapiens
  misc_RNA (1)...(19): siRNA sense strand
auacaaguacuaagguuuc

SEQ ID NO: 1354339 - RNA, 19 nt, Homo sapiens
  misc_RNA (1)...(19): siRNA sense strand
agcaacaaauaucaugaga

SEQ ID NO: 1354340 - RNA, 19 nt, Homo sapiens
  misc_RNA (1)...(19): siRNA sense strand
gcggagacaacagcaguga

SEQ ID NO: 1354341 - RNA, 19 nt, Homo sapiens
  misc_RNA (1)...(19): siRNA sense strand
gguuucaucuuuuggaguu

SEQ ID NO: 1354342 - RNA, 19 nt, Homo sapiens
  misc_RNA (1)...(19): siRNA sense strand
caaggagcagcauauaguc

SEQ ID NO: 1354343 - RNA, 19 nt, Homo sapiens
  misc_RNA (1)...(19): siRNA sense strand
gccaaggagcagcauauag

SEQ ID NO: 1354344 - RNA, 19 nt, Homo sapiens
  misc_RNA (1)...(19): siRNA sense strand
cgauacauuagcuguuuga

SEQ ID NO: 1354345 - RNA, 19 nt, Homo sapiens
  misc_RNA (1)...(19): siRNA sense strand
ccgauacauuagcuguuug

SEQ ID NO: 1354346 - RNA, 19 nt, Homo sapiens
  misc_RNA (1)...(19): siRNA sense strand
uggacaauuugaugauaca

SEQ ID NO: 1354347 - RNA, 19 nt, Homo sapiens
  misc_RNA (1)...(19): siRNA sense strand
gaaaagguccacgaacugu

SEQ ID NO: 1354348 - RNA, 19 nt, Homo sapiens
  misc_RNA (1)...(19): siRNA sense strand
gcagcuccaagucagauca

SEQ ID NO: 1354349 - RNA, 19 nt, Homo sapiens
  misc_RNA (1)...(19): siRNA sense strand
auuaaugccagaagaagaa

SEQ ID NO: 1354350 - RNA, 19 nt, Homo sapiens
  misc_RNA (1)...(19): siRNA sense strand
uagaaaagguccacgaacu

SEQ ID NO: 1354351 - RNA, 19 nt, Homo sapiens
  misc_RNA (1)...(19): siRNA sense strand
augaugauccggauaagga

SEQ ID NO: 1354352 - RNA, 19 nt, Homo sapiens
  misc_RNA (1)...(19): siRNA sense strand
guacuaagguuucaucuuu

SEQ ID NO: 1354353 - RNA, 19 nt, Homo sapiens
  misc_RNA (1)...(19): siRNA sense strand
caagucagaucaugaagaa

SEQ ID NO: 1354354 - RNA, 19 nt, Homo sapiens
  misc_RNA (1)...(19): siRNA sense strand
ggacauucaugcccaauag

SEQ ID NO: 1354355 - RNA, 19 nt, Homo sapiens
  misc_RNA (1)...(19): siRNA sense strand
gauacaagcaauacaagua

SEQ ID NO: 1354356 - RNA, 19 nt, Homo sapiens
  misc_RNA (1)...(19): siRNA sense strand
caaaguagcaacaaauauc

SEQ ID NO: 1354357 - RNA, 19 nt, Homo sapiens
  misc_RNA (1)...(19): siRNA sense strand
gcacagagccccacaaugu

SEQ ID NO: 1354358 - RNA, 19 nt, Homo sapiens
  misc_RNA (1)...(19): siRNA sense strand
gaccauaacccuucuucuu

SEQ ID NO: 1354359 - RNA, 19 nt, Homo sapiens
  misc_RNA (1)...(19): siRNA sense strand
ggacaaggacgcgaucuau

SEQ ID NO: 1354360 - RNA, 19 nt, Homo sapiens
  misc_RNA (1)...(19): siRNA sense strand
gcuggacaauuugaugaua

SEQ ID NO: 1354361 - RNA, 19 nt, Homo sapiens
  misc_RNA (1)...(19): siRNA sense strand
caauacaaguacuaagguu

SEQ ID NO: 1354362 - RNA, 19 nt, Homo sapiens
  misc_RNA (1)...(19): siRNA sense strand
ccaucgaccucgucauuga

SEQ ID NO: 1354363 - RNA, 19 nt, Homo sapiens
  misc_RNA (1)...(19): siRNA sense strand
gaugauacaagcaauacaa

SEQ ID NO: 1354364 - RNA, 19 nt, Homo sapiens
  misc_RNA (1)...(19): siRNA sense strand
cccacacccuacucaauua

SEQ ID NO: 1354365 - RNA, 19 nt, Homo sapiens
  misc_RNA (1)...(19): siRNA sense strand
guacaggugacgaugauga

SEQ ID NO: 1354366 - RNA, 19 nt, Homo sapiens
  misc_RNA (1)...(19): siRNA sense strand
ccacaauguuaaauucugu

SEQ ID NO: 1354367 - RNA, 19 nt, Homo sapiens
  misc_RNA (1)...(19): siRNA sense strand
cccaaugcauucauauuug

SEQ ID NO: 1354368 - RNA, 19 nt, Homo sapiens
  misc_RNA (1)...(19): siRNA sense strand
ccaaggagcagcauauagu

SEQ ID NO: 1354369 - RNA, 19 nt, Homo sapiens
  misc_RNA (1)...(19): siRNA sense strand
acgaugagcugccccauua

SEQ ID NO: 1354370 - RNA, 19 nt, Homo sapiens
  misc_RNA (1)...(19): siRNA sense strand
agacaacaguguagcuuca

SEQ ID NO: 1354371 - RNA, 19 nt, Homo sapiens
  misc_RNA (1)...(19): siRNA sense strand
gagcuggacaauuugauga

SEQ ID NO: 1354372 - RNA, 19 nt, Homo sapiens
  misc_RNA (1)...(19): siRNA sense strand
gagccaaggagcagcauau

SEQ ID NO: 1354373 - RNA, 19 nt, Homo sapiens
  misc_RNA (1)...(19): siRNA sense strand
gcggacagguuauggacau

SEQ ID NO: 1354374 - RNA, 19 nt, Homo sapiens
  misc_RNA (1)...(19): siRNA sense strand
gcccaucgaccucgucauu

SEQ ID NO: 1354375 - RNA, 19 nt, Homo sapiens
  misc_RNA (1)...(19): siRNA sense strand
ccaaaguagcaacaaauau

SEQ ID NO: 1354376 - RNA, 19 nt, Homo sapiens
  misc_RNA (1)...(19): siRNA sense strand
gcaauacaaguacuaaggu

SEQ ID NO: 1354377 - RNA, 19 nt, Homo sapiens
  misc_RNA (1)...(19): siRNA sense strand
gacagguuauggacauuca

SEQ ID NO: 1354378 - RNA, 19 nt, Homo sapiens
  misc_RNA (1)...(19): siRNA sense strand
uaguacagcccaugauuga

SEQ ID NO: 1354379 - RNA, 19 nt, Homo sapiens
  misc_RNA (1)...(19): siRNA sense strand
caaaucucgcugaccauaa

SEQ ID NO: 1354380 - RNA, 19 nt, Homo sapiens
  misc_RNA (1)...(19): siRNA sense strand
gcucuggucuuugagaagu

SEQ ID NO: 1354381 - RNA, 19 nt, Homo sapiens
  misc_RNA (1)...(19): siRNA sense strand
cccaaaguagcaacaaaua

SEQ ID NO: 1354382 - RNA, 19 nt, Homo sapiens
  misc_RNA (1)...(19): siRNA sense strand
gguccuaugggaaugagua

SEQ ID NO: 1354383 - RNA, 19 nt, Homo sapiens
  misc_RNA (1)...(19): siRNA sense strand
caagcaauacaaguacuaa

SEQ ID NO: 1354384 - RNA, 19 nt, Homo sapiens
  misc_RNA (1)...(19): siRNA sense strand
aauguuggcggacagguua

SEQ ID NO: 1354385 - RNA, 19 nt, Homo sapiens
  misc_RNA (1)...(19): siRNA sense strand
ccaaugcauucauauuugc

SEQ ID NO: 1354386 - RNA, 19 nt, Homo sapiens
  misc_RNA (1)...(19): siRNA sense strand
acaaauaucaugagagcau

SEQ ID NO: 1354387 - RNA, 19 nt, Homo sapiens
  misc_RNA (1)...(19): siRNA sense strand
acaaaucucgcugaccaua

SEQ ID NO: 1354388 - RNA, 19 nt, Homo sapiens
  misc_RNA (1)...(19): siRNA sense strand
acacccuacucaauuaaga

SEQ ID NO: 1354389 - RNA, 19 nt, Homo sapiens
  misc_RNA (1)...(19): siRNA sense strand
gaacugugcgauaacuucu

SEQ ID NO: 1354390 - RNA, 19 nt, Homo sapiens
  misc_RNA (1)...(19): siRNA sense strand
ccuacucaauuaagacaug

SEQ ID NO: 1354391 - RNA, 19 nt, Homo sapiens
  misc_RNA (1)...(19): siRNA sense strand
gacaaggacgcgaucuaug

SEQ ID NO: 1354392 - RNA, 19 nt, Homo sapiens
  misc_RNA (1)...(19): siRNA sense strand
ccacacccuacucaauuaa

SEQ ID NO: 1354393 - RNA, 19 nt, Homo sapiens
  misc_RNA (1)...(19): siRNA sense strand
uccacgaacugugcgauaa

SEQ ID NO: 1354394 - RNA, 19 nt, Homo sapiens
  misc_RNA (1)...(19): siRNA sense strand
gaauaguacagcccaugau

SEQ ID NO: 1354395 - RNA, 19 nt, Homo sapiens
  misc_RNA (1)...(19): siRNA sense strand
ccaagucagaucaugaaga

SEQ ID NO: 1354396 - RNA, 19 nt, Homo sapiens
  misc_RNA (1)...(19): siRNA sense strand
gcuccaagucagaucauga

SEQ ID NO: 1354397 - RNA, 19 nt, Homo sapiens
  misc_RNA (1)...(19): siRNA sense strand
gggacaaggacgcgaucua

SEQ ID NO: 1354398 - RNA, 19 nt, Homo sapiens
  misc_RNA (1)...(19): siRNA sense strand
guagcaacaaauaucauga

SEQ ID NO: 1354399 - RNA, 19 nt, Homo sapiens
  misc_RNA (1)...(19): siRNA sense strand
accgauacauuagcuguuu

SEQ ID NO: 1354400 - RNA, 19 nt, Homo sapiens
  misc_RNA (1)...(19): siRNA sense strand
guuuauuaaugccagaaga

SEQ ID NO: 1354401 - RNA, 19 nt, Homo sapiens
  misc_RNA (1)...(19): siRNA sense strand
gcaaggggaugguuuagac

SEQ ID NO: 1354402 - RNA, 19 nt, Homo sapiens
  misc_RNA (1)...(19): siRNA sense strand
uaacuucugccaccgauac

SEQ ID NO: 1354403 - RNA, 19 nt, Homo sapiens
  misc_RNA (1)...(19): siRNA sense strand
ggacagguuauggacauuc

SEQ ID NO: 1354404 - RNA, 19 nt, Homo sapiens
  misc_RNA (1)...(19): siRNA sense strand
aauaguacagcccaugauu

SEQ ID NO: 1354405 - RNA, 19 nt, Homo sapiens
  misc_RNA (1)...(19): siRNA sense strand
acaaggacgcgaucuaugg

SEQ ID NO: 1354406 - RNA, 19 nt, Homo sapiens
  misc_RNA (1)...(19): siRNA sense strand
aaaucucgcugaccauaac

SEQ ID NO: 1354407 - RNA, 19 nt, Homo sapiens
  misc_RNA (1)...(19): siRNA sense strand
caaguacuaagguuucauc

SEQ ID NO: 1354408 - RNA, 19 nt, Homo sapiens
  misc_RNA (1)...(19): siRNA sense strand
gccagaagaagaauaguac

SEQ ID NO: 1354409 - RNA, 19 nt, Homo sapiens
  misc_RNA (1)...(19): siRNA sense strand
accauaacccuucuucuug

SEQ ID NO: 1354410 - RNA, 19 nt, Homo sapiens
  misc_RNA (1)...(19): siRNA sense strand
cgaacugugcgauaacuuc

SEQ ID NO: 1354411 - RNA, 19 nt, Homo sapiens
  misc_RNA (1)...(19): siRNA sense strand
ucaggcuccuccacaaauc

SEQ ID NO: 1354412 - RNA, 19 nt, Homo sapiens
  misc_RNA (1)...(19): siRNA sense strand
uguguuggauggucagcaa

SEQ ID NO: 1354413 - RNA, 19 nt, Homo sapiens
  misc_RNA (1)...(19): siRNA sense strand
gucagaucaugaagaacuu

SEQ ID NO: 1354414 - RNA, 19 nt, Homo sapiens
  misc_RNA (1)...(19): siRNA sense strand
agaauaguacagcccauga

SEQ ID NO: 1354415 - RNA, 19 nt, Homo sapiens
  misc_RNA (1)...(19): siRNA sense strand
acaagcaauacaaguacua

SEQ ID NO: 1354416 - RNA, 19 nt, Homo sapiens
  misc_RNA (1)...(19): siRNA sense strand
acgaugaugauccggauaa

SEQ ID NO: 1354417 - RNA, 19 nt, Homo sapiens
  misc_RNA (1)...(19): siRNA sense strand
ugccagaagaagaauagua

SEQ ID NO: 1354418 - RNA, 19 nt, Homo sapiens
  misc_RNA (1)...(19): siRNA sense strand
ggucuucgccaagcagguu

SEQ ID NO: 1354419 - RNA, 19 nt, Homo sapiens
  misc_RNA (1)...(19): siRNA sense strand
gcggagacaacagcaguga

SEQ ID NO: 1354420 - RNA, 19 nt, Homo sapiens
  misc_RNA (1)...(19): siRNA sense strand
auacaaguacuaagguuuc

SEQ ID NO: 1354421 - RNA, 19 nt, Homo sapiens
  misc_RNA (1)...(19): siRNA sense strand
agcaacaaauaucaugaga

SEQ ID NO: 1354422 - RNA, 19 nt, Homo sapiens
  misc_RNA (1)...(19): siRNA sense strand
gaaaagguccacgaacugu

SEQ ID NO: 1354423 - RNA, 19 nt, Homo sapiens
  misc_RNA (1)...(19): siRNA sense strand
caaggagcagcauauaguc

SEQ ID NO: 1354424 - RNA, 19 nt, Homo sapiens
  misc_RNA (1)...(19): siRNA sense strand
gccaaggagcagcauauag

SEQ ID NO: 1354425 - RNA, 19 nt, Homo sapiens
  misc_RNA (1)...(19): siRNA sense strand
uggacaauuugaugauaca

SEQ ID NO: 1354426 - RNA, 19 nt, Homo sapiens
  misc_RNA (1)...(19): siRNA sense strand
gguuucaucuuuuggaguu

SEQ ID NO: 1354427 - RNA, 19 nt, Homo sapiens
  misc_RNA (1)...(19): siRNA sense strand
cgauacauuagcuguuuga

SEQ ID NO: 1354428 - RNA, 19 nt, Homo sapiens
  misc_RNA (1)...(19): siRNA sense strand
ccgauacauuagcuguuug

SEQ ID NO: 1354429 - RNA, 19 nt, Homo sapiens
  misc_RNA (1)...(19): siRNA sense strand
gcagcuccaagucagauca

SEQ ID NO: 1354430 - RNA, 19 nt, Homo sapiens
  misc_RNA (1)...(19): siRNA sense strand
caauguuggcggacagguu

SEQ ID NO: 1354431 - RNA, 19 nt, Homo sapiens
  misc_RNA (1)...(19): siRNA sense strand
auuaaugccagaagaagaa

SEQ ID NO: 1354432 - RNA, 19 nt, Homo sapiens
  misc_RNA (1)...(19): siRNA sense strand
uagaaaagguccacgaacu

SEQ ID NO: 1354433 - RNA, 19 nt, Homo sapiens
  misc_RNA (1)...(19): siRNA sense strand
cccacaauguuaaauucug

SEQ ID NO: 1354434 - RNA, 19 nt, Homo sapiens
  misc_RNA (1)...(19): siRNA sense strand
ccaccacccagccaugaug

SEQ ID NO: 1354435 - RNA, 19 nt, Homo sapiens
  misc_RNA (1)...(19): siRNA sense strand
augaugauccggauaagga

SEQ ID NO: 1354436 - RNA, 19 nt, Homo sapiens
  misc_RNA (1)...(19): siRNA sense strand
guacuaagguuucaucuuu

SEQ ID NO: 1354437 - RNA, 19 nt, Homo sapiens
  misc_RNA (1)...(19): siRNA sense strand
caagucagaucaugaagaa

SEQ ID NO: 1354438 - RNA, 19 nt, Homo sapiens
  misc_RNA (1)...(19): siRNA sense strand
ggacauucaugcccaauag

SEQ ID NO: 1354439 - RNA, 19 nt, Homo sapiens
  misc_RNA (1)...(19): siRNA sense strand
gauacaagcaauacaagua

SEQ ID NO: 1354440 - RNA, 19 nt, Homo sapiens
  misc_RNA (1)...(19): siRNA sense strand
caaaguagcaacaaauauc

SEQ ID NO: 1354441 - RNA, 19 nt, Homo sapiens
  misc_RNA (1)...(19): siRNA sense strand
gcacagagccccacaaugu

SEQ ID NO: 1354442 - RNA, 19 nt, Homo sapiens
  misc_RNA (1)...(19): siRNA sense strand
gaccauaacccuucuucuu

SEQ ID NO: 1354443 - RNA, 19 nt, Homo sapiens
  misc_RNA (1)...(19): siRNA sense strand
ggacaaggacgcgaucuau

SEQ ID NO: 1354444 - RNA, 19 nt, Homo sapiens
  misc_RNA (1)...(19): siRNA sense strand
gcuggacaauuugaugaua

SEQ ID NO: 1354445 - RNA, 19 nt, Homo sapiens
  misc_RNA (1)...(19): siRNA sense strand
caauacaaguacuaagguu

SEQ ID NO: 1354446 - RNA, 19 nt, Homo sapiens
  misc_RNA (1)...(19): siRNA sense strand
ccaucgaccucgucauuga

SEQ ID NO: 1354447 - RNA, 19 nt, Homo sapiens
  misc_RNA (1)...(19): siRNA sense strand
gaugauacaagcaauacaa

SEQ ID NO: 1354448 - RNA, 19 nt, Homo sapiens
  misc_RNA (1)...(19): siRNA sense strand
cccacacccuacucaauua

SEQ ID NO: 1354449 - RNA, 19 nt, Homo sapiens
  misc_RNA (1)...(19): siRNA sense strand
guacaggugacgaugauga

SEQ ID NO: 1354450 - RNA, 19 nt, Homo sapiens
  misc_RNA (1)...(19): siRNA sense strand
ccacaauguuaaauucugu

SEQ ID NO: 1354451 - RNA, 19 nt, Homo sapiens
  misc_RNA (1)...(19): siRNA sense strand
cccaaugcauucauauuug

SEQ ID NO: 1354452 - RNA, 19 nt, Homo sapiens
  misc_RNA (1)...(19): siRNA sense strand
ccaaggagcagcauauagu

SEQ ID NO: 1354453 - RNA, 19 nt, Homo sapiens
  misc_RNA (1)...(19): siRNA sense strand
acgaugagcugccccauua

SEQ ID NO: 1354454 - RNA, 19 nt, Homo sapiens
  misc_RNA (1)...(19): siRNA sense strand
agacaacaguguagcuuca

SEQ ID NO: 1354455 - RNA, 19 nt, Homo sapiens
  misc_RNA (1)...(19): siRNA sense strand
gagcuggacaauuugauga

SEQ ID NO: 1354456 - RNA, 19 nt, Homo sapiens
  misc_RNA (1)...(19): siRNA sense strand
gagccaaggagcagcauau

SEQ ID NO: 1354457 - RNA, 19 nt, Homo sapiens
  misc_RNA (1)...(19): siRNA sense strand
gcggacagguuauggacau

SEQ ID NO: 1354458 - RNA, 19 nt, Homo sapiens
  misc_RNA (1)...(19): siRNA sense strand
gcccaucgaccucgucauu

SEQ ID NO: 1354459 - RNA, 19 nt, Homo sapiens
  misc_RNA (1)...(19): siRNA sense strand
ccaaaguagcaacaaauau

SEQ ID NO: 1354460 - RNA, 19 nt, Homo sapiens
  misc_RNA (1)...(19): siRNA sense strand
gcaauacaaguacuaaggu

SEQ ID NO: 1354461 - RNA, 19 nt, Homo sapiens
  misc_RNA (1)...(19): siRNA sense strand
gacagguuauggacauuca

SEQ ID NO: 1354462 - RNA, 19 nt, Homo sapiens
  misc_RNA (1)...(19): siRNA sense strand
uaguacagcccaugauuga

SEQ ID NO: 1354463 - RNA, 19 nt, Homo sapiens
  misc_RNA (1)...(19): siRNA sense strand
caaaucucgcugaccauaa

SEQ ID NO: 1354464 - RNA, 19 nt, Homo sapiens
  misc_RNA (1)...(19): siRNA sense strand
gcucuggucuuugagaagu

SEQ ID NO: 1354465 - RNA, 19 nt, Homo sapiens
  misc_RNA (1)...(19): siRNA sense strand
cccaaaguagcaacaaaua

SEQ ID NO: 1354466 - RNA, 19 nt, Homo sapiens
  misc_RNA (1)...(19): siRNA sense strand
gguccuaugggaaugagua

SEQ ID NO: 1354467 - RNA, 19 nt, Homo sapiens
  misc_RNA (1)...(19): siRNA sense strand
caagcaauacaaguacuaa

SEQ ID NO: 1354468 - RNA, 19 nt, Homo sapiens
  misc_RNA (1)...(19): siRNA sense strand
aauguuggcggacagguua

SEQ ID NO: 1354469 - RNA, 19 nt, Homo sapiens
  misc_RNA (1)...(19): siRNA sense strand
ccaaugcauucauauuugc

SEQ ID NO: 1354470 - RNA, 19 nt, Homo sapiens
  misc_RNA (1)...(19): siRNA sense strand
acaaauaucaugagagcau

SEQ ID NO: 1354471 - RNA, 19 nt, Homo sapiens
  misc_RNA (1)...(19): siRNA sense strand
acaaaucucgcugaccaua

SEQ ID NO: 1354472 - RNA, 19 nt, Homo sapiens
  misc_RNA (1)...(19): siRNA sense strand
acacccuacucaauuaaga

SEQ ID NO: 1354473 - RNA, 19 nt, Homo sapiens
  misc_RNA (1)...(19): siRNA sense strand
gaacugugcgauaacuucu

SEQ ID NO: 1354474 - RNA, 19 nt, Homo sapiens
  misc_RNA (1)...(19): siRNA sense strand
ccuacucaauuaagacaug

SEQ ID NO: 1354475 - RNA, 19 nt, Homo sapiens
  misc_RNA (1)...(19): siRNA sense strand
gacaaggacgcgaucuaug

SEQ ID NO: 1354476 - RNA, 19 nt, Homo sapiens
  misc_RNA (1)...(19): siRNA sense strand
ccacacccuacucaauuaa

SEQ ID NO: 1354477 - RNA, 19 nt, Homo sapiens
  misc_RNA (1)...(19): siRNA sense strand
uccacgaacugugcgauaa

SEQ ID NO: 1354478 - RNA, 19 nt, Homo sapiens
  misc_RNA (1)...(19): siRNA sense strand
gaauaguacagcccaugau

SEQ ID NO: 1354479 - RNA, 19 nt, Homo sapiens
  misc_RNA (1)...(19): siRNA sense strand
ccaagucagaucaugaaga

SEQ ID NO: 1354480 - RNA, 19 nt, Homo sapiens
  misc_RNA (1)...(19): siRNA sense strand
gcuccaagucagaucauga

SEQ ID NO: 1354481 - RNA, 19 nt, Homo sapiens
  misc_RNA (1)...(19): siRNA sense strand
gggacaaggacgcgaucua

SEQ ID NO: 1354482 - RNA, 19 nt, Homo sapiens
  misc_RNA (1)...(19): siRNA sense strand
guagcaacaaauaucauga

SEQ ID NO: 1354483 - RNA, 19 nt, Homo sapiens
  misc_RNA (1)...(19): siRNA sense strand
accgauacauuagcuguuu

SEQ ID NO: 1354484 - RNA, 19 nt, Homo sapiens
  misc_RNA (1)...(19): siRNA sense strand
guuuauuaaugccagaaga

SEQ ID NO: 1354485 - RNA, 19 nt, Homo sapiens
  misc_RNA (1)...(19): siRNA sense strand
gcaaggggaugguuuagac

SEQ ID NO: 1354486 - RNA, 19 nt, Homo sapiens
  misc_RNA (1)...(19): siRNA sense strand
uaacuucugccaccgauac

SEQ ID NO: 1354487 - RNA, 19 nt, Homo sapiens
  misc_RNA (1)...(19): siRNA sense strand
ggacagguuauggacauuc

SEQ ID NO: 1354488 - RNA, 19 nt, Homo sapiens
  misc_RNA (1)...(19): siRNA sense strand
aauaguacagcccaugauu

SEQ ID NO: 1354489 - RNA, 19 nt, Homo sapiens
  misc_RNA (1)...(19): siRNA sense strand
acaaggacgcgaucuaugg

SEQ ID NO: 1354490 - RNA, 19 nt, Homo sapiens
  misc_RNA (1)...(19): siRNA sense strand
aaaucucgcugaccauaac

SEQ ID NO: 1354491 - RNA, 19 nt, Homo sapiens
  misc_RNA (1)...(19): siRNA sense strand
caaguacuaagguuucauc

SEQ ID NO: 1354492 - RNA, 19 nt, Homo sapiens
  misc_RNA (1)...(19): siRNA sense strand
gccagaagaagaauaguac

SEQ ID NO: 1354493 - RNA, 19 nt, Homo sapiens
  misc_RNA (1)...(19): siRNA sense strand
accauaacccuucuucuug

SEQ ID NO: 1354494 - RNA, 19 nt, Homo sapiens
  misc_RNA (1)...(19): siRNA sense strand
cgaacugugcgauaacuuc

SEQ ID NO: 1354495 - RNA, 19 nt, Homo sapiens
  misc_RNA (1)...(19): siRNA sense strand
ucaggcuccuccacaaauc

SEQ ID NO: 1354496 - RNA, 19 nt, Homo sapiens
  misc_RNA (1)...(19): siRNA sense strand
uguguuggauggucagcaa

SEQ ID NO: 1354497 - RNA, 19 nt, Homo sapiens
  misc_RNA (1)...(19): siRNA sense strand
gucagaucaugaagaacuu

SEQ ID NO: 1354498 - RNA, 19 nt, Homo sapiens
  misc_RNA (1)...(19): siRNA sense strand
agaauaguacagcccauga

SEQ ID NO: 1354499 - RNA, 19 nt, Homo sapiens
  misc_RNA (1)...(19): siRNA sense strand
acaagcaauacaaguacua

SEQ ID NO: 1354500 - RNA, 19 nt, Homo sapiens
  misc_RNA (1)...(19): siRNA sense strand
acgaugaugauccggauaa

SEQ ID NO: 1354501 - RNA, 19 nt, Homo sapiens
  misc_RNA (1)...(19): siRNA sense strand
ugccagaagaagaauagua

SEQ ID NO: 1354502 - RNA, 19 nt, Homo sapiens
  misc_RNA (1)...(19): siRNA sense strand
ggucuucgccaagcagguu

SEQ ID NO: 1354503 - RNA, 19 nt, Homo sapiens
  misc_RNA (1)...(19): siRNA sense strand
gcggagacaacagcaguga

SEQ ID NO: 1354504 - RNA, 19 nt, Homo sapiens
  misc_RNA (1)...(19): siRNA sense strand
auacaaguacuaagguuuc

SEQ ID NO: 1354505 - RNA, 19 nt, Homo sapiens
  misc_RNA (1)...(19): siRNA sense strand
agcaacaaauaucaugaga

SEQ ID NO: 1354506 - RNA, 19 nt, Homo sapiens
  misc_RNA (1)...(19): siRNA sense strand
gaaaagguccacgaacugu

SEQ ID NO: 1354507 - RNA, 19 nt, Homo sapiens
  misc_RNA (1)...(19): siRNA sense strand
caaggagcagcauauaguc

SEQ ID NO: 1354508 - RNA, 19 nt, Homo sapiens
  misc_RNA (1)...(19): siRNA sense strand
gccaaggagcagcauauag

SEQ ID NO: 1354509 - RNA, 19 nt, Homo sapiens
  misc_RNA (1)...(19): siRNA sense strand
uggacaauuugaugauaca

SEQ ID NO: 1354510 - RNA, 19 nt, Homo sapiens
  misc_RNA (1)...(19): siRNA sense strand
gguuucaucuuuuggaguu

SEQ ID NO: 1354511 - RNA, 19 nt, Homo sapiens
  misc_RNA (1)...(19): siRNA sense strand
cgauacauuagcuguuuga

SEQ ID NO: 1354512 - RNA, 19 nt, Homo sapiens
  misc_RNA (1)...(19): siRNA sense strand
ccgauacauuagcuguuug

SEQ ID NO: 1354513 - RNA, 19 nt, Homo sapiens
  misc_RNA (1)...(19): siRNA sense strand
gcagcuccaagucagauca

SEQ ID NO: 1354514 - RNA, 19 nt, Homo sapiens
  misc_RNA (1)...(19): siRNA sense strand
caauguuggcggacagguu

SEQ ID NO: 1354515 - RNA, 19 nt, Homo sapiens
  misc_RNA (1)...(19): siRNA sense strand
auuaaugccagaagaagaa

SEQ ID NO: 1354516 - RNA, 19 nt, Homo sapiens
  misc_RNA (1)...(19): siRNA sense strand
uagaaaagguccacgaacu

SEQ ID NO: 1354517 - RNA, 19 nt, Homo sapiens
  misc_RNA (1)...(19): siRNA sense strand
cccacaauguuaaauucug

SEQ ID NO: 1354518 - RNA, 19 nt, Homo sapiens
  misc_RNA (1)...(19): siRNA sense strand
ccaccacccagccaugaug

SEQ ID NO: 1354519 - RNA, 19 nt, Homo sapiens
  misc_RNA (1)...(19): siRNA sense strand
augaugauccggauaagga

SEQ ID NO: 1354520 - RNA, 19 nt, Homo sapiens
  misc_RNA (1)...(19): siRNA sense strand
guacuaagguuucaucuuu

SEQ ID NO: 1354521 - RNA, 19 nt, Homo sapiens
  misc_RNA (1)...(19): siRNA sense strand
caagucagaucaugaagaa

SEQ ID NO: 1354522 - RNA, 19 nt, Homo sapiens
  misc_RNA (1)...(19): siRNA sense strand
gauacaagcaauacaagua

SEQ ID NO: 1354523 - RNA, 19 nt, Homo sapiens
  misc_RNA (1)...(19): siRNA sense strand
caaaguagcaacaaauauc

SEQ ID NO: 1354524 - RNA, 19 nt, Homo sapiens
  misc_RNA (1)...(19): siRNA sense strand
gaccauaacccuucuucuu

SEQ ID NO: 1354525 - RNA, 19 nt, Homo sapiens
  misc_RNA (1)...(19): siRNA sense strand
ggacaaggacgcgaucuau

SEQ ID NO: 1354526 - RNA, 19 nt, Homo sapiens
  misc_RNA (1)...(19): siRNA sense strand
gcuggacaauuugaugaua

SEQ ID NO: 1354527 - RNA, 19 nt, Homo sapiens
  misc_RNA (1)...(19): siRNA sense strand
caauacaaguacuaagguu

SEQ ID NO: 1354528 - RNA, 19 nt, Homo sapiens
  misc_RNA (1)...(19): siRNA sense strand
ccaucgaccucgucauuga

SEQ ID NO: 1354529 - RNA, 19 nt, Homo sapiens
  misc_RNA (1)...(19): siRNA sense strand
gaugauacaagcaauacaa

SEQ ID NO: 1354530 - RNA, 19 nt, Homo sapiens
  misc_RNA (1)...(19): siRNA sense strand
guacaggugacgaugauga

SEQ ID NO: 1354531 - RNA, 19 nt, Homo sapiens
  misc_RNA (1)...(19): siRNA sense strand
ccaaggagcagcauauagu

SEQ ID NO: 1354532 - RNA, 19 nt, Homo sapiens
  misc_RNA (1)...(19): siRNA sense strand
acgaugagcugccccauua

SEQ ID NO: 1354533 - RNA, 19 nt, Homo sapiens
  misc_RNA (1)...(19): siRNA sense strand
agacaacaguguagcuuca

SEQ ID NO: 1354534 - RNA, 19 nt, Homo sapiens
  misc_RNA (1)...(19): siRNA sense strand
gagcuggacaauuugauga

SEQ ID NO: 1354535 - RNA, 19 nt, Homo sapiens
  misc_RNA (1)...(19): siRNA sense strand
gagccaaggagcagcauau

SEQ ID NO: 1354536 - RNA, 19 nt, Homo sapiens
  misc_RNA (1)...(19): siRNA sense strand
gcccaucgaccucgucauu

SEQ ID NO: 1354537 - RNA, 19 nt, Homo sapiens
  misc_RNA (1)...(19): siRNA sense strand
ccaaaguagcaacaaauau

SEQ ID NO: 1354538 - RNA, 19 nt, Homo sapiens
  misc_RNA (1)...(19): siRNA sense strand
gcucuggucuuugagaagu

SEQ ID NO: 1354539 - RNA, 19 nt, Homo sapiens
  misc_RNA (1)...(19): siRNA sense strand
uaguacagcccaugauuga

SEQ ID NO: 1354540 - RNA, 19 nt, Homo sapiens
  misc_RNA (1)...(19): siRNA sense strand
caaaucucgcugaccauaa

SEQ ID NO: 1354541 - RNA, 19 nt, Homo sapiens
  misc_RNA (1)...(19): siRNA sense strand
gcaauacaaguacuaaggu

SEQ ID NO: 1354542 - RNA, 19 nt, Homo sapiens
  misc_RNA (1)...(19): siRNA sense strand
cccaaaguagcaacaaaua

SEQ ID NO: 1354543 - RNA, 19 nt, Homo sapiens
  misc_RNA (1)...(19): siRNA sense strand
caagcaauacaaguacuaa

SEQ ID NO: 1354544 - RNA, 19 nt, Homo sapiens
  misc_RNA (1)...(19): siRNA sense strand
acaaauaucaugagagcau

SEQ ID NO: 1354545 - RNA, 19 nt, Homo sapiens
  misc_RNA (1)...(19): siRNA sense strand
acaaaucucgcugaccaua

SEQ ID NO: 1354546 - RNA, 19 nt, Homo sapiens
  misc_RNA (1)...(19): siRNA sense strand
gaacugugcgauaacuucu

SEQ ID NO: 1354547 - RNA, 19 nt, Homo sapiens
  misc_RNA (1)...(19): siRNA sense strand
gacaaggacgcgaucuaug

SEQ ID NO: 1354548 - RNA, 19 nt, Homo sapiens
  misc_RNA (1)...(19): siRNA sense strand
uccacgaacugugcgauaa

SEQ ID NO: 1354549 - RNA, 19 nt, Homo sapiens
  misc_RNA (1)...(19): siRNA sense strand
gaauaguacagcccaugau

SEQ ID NO: 1354550 - RNA, 19 nt, Homo sapiens
  misc_RNA (1)...(19): siRNA sense strand
ccaagucagaucaugaaga

SEQ ID NO: 1354551 - RNA, 19 nt, Homo sapiens
  misc_RNA (1)...(19): siRNA sense strand
gcuccaagucagaucauga

SEQ ID NO: 1354552 - RNA, 19 nt, Homo sapiens
  misc_RNA (1)...(19): siRNA sense strand
gggacaaggacgcgaucua

SEQ ID NO: 1354553 - RNA, 19 nt, Homo sapiens
  misc_RNA (1)...(19): siRNA sense strand
guagcaacaaauaucauga

SEQ ID NO: 1354554 - RNA, 19 nt, Homo sapiens
  misc_RNA (1)...(19): siRNA sense strand
accgauacauuagcuguuu

SEQ ID NO: 1354555 - RNA, 19 nt, Homo sapiens
  misc_RNA (1)...(19): siRNA sense strand
guuuauuaaugccagaaga

SEQ ID NO: 1354556 - RNA, 19 nt, Homo sapiens
  misc_RNA (1)...(19): siRNA sense strand
gcaaggggaugguuuagac

SEQ ID NO: 1354557 - RNA, 19 nt, Homo sapiens
  misc_RNA (1)...(19): siRNA sense strand
uaacuucugccaccgauac

SEQ ID NO: 1354558 - RNA, 19 nt, Homo sapiens
  misc_RNA (1)...(19): siRNA sense strand
aauaguacagcccaugauu

SEQ ID NO: 1354559 - RNA, 19 nt, Homo sapiens
  misc_RNA (1)...(19): siRNA sense strand
acaaggacgcgaucuaugg

SEQ ID NO: 1354560 - RNA, 19 nt, Homo sapiens
  misc_RNA (1)...(19): siRNA sense strand
aaaucucgcugaccauaac

SEQ ID NO: 1354561 - RNA, 19 nt, Homo sapiens
  misc_RNA (1)...(19): siRNA sense strand
caaguacuaagguuucauc

SEQ ID NO: 1354562 - RNA, 19 nt, Homo sapiens
  misc_RNA (1)...(19): siRNA sense strand
gccagaagaagaauaguac

SEQ ID NO: 1354563 - RNA, 19 nt, Homo sapiens
  misc_RNA (1)...(19): siRNA sense strand
accauaacccuucuucuug

SEQ ID NO: 1354564 - RNA, 19 nt, Homo sapiens
  misc_RNA (1)...(19): siRNA sense strand
cgaacugugcgauaacuuc

SEQ ID NO: 1354565 - RNA, 19 nt, Homo sapiens
  misc_RNA (1)...(19): siRNA sense strand
ucaggcuccuccacaaauc

SEQ ID NO: 1354566 - RNA, 19 nt, Homo sapiens
  misc_RNA (1)...(19): siRNA sense strand
uguguuggauggucagcaa

SEQ ID NO: 1354567 - RNA, 19 nt, Homo sapiens
  misc_RNA (1)...(19): siRNA sense strand
acaagcaauacaaguacua

SEQ ID NO: 1354568 - RNA, 19 nt, Homo sapiens
  misc_RNA (1)...(19): siRNA sense strand
agaauaguacagcccauga

SEQ ID NO: 1354569 - RNA, 19 nt, Homo sapiens
  misc_RNA (1)...(19): siRNA sense strand
gucagaucaugaagaacuu

SEQ ID NO: 1354570 - RNA, 19 nt, Homo sapiens
  misc_RNA (1)...(19): siRNA sense strand
ggucuucgccaagcagguu

SEQ ID NO: 1354571 - RNA, 19 nt, Homo sapiens
  misc_RNA (1)...(19): siRNA sense strand
ugccagaagaagaauagua

SEQ ID NO: 1354572 - RNA, 19 nt, Homo sapiens
  misc_RNA (1)...(19): siRNA sense strand
acgaugaugauccggauaa

SEQ ID NO: 1354573 - RNA, 19 nt, Homo sapiens
  misc_RNA (1)...(19): siRNA sense strand
auacaaguacuaagguuuc

SEQ ID NO: 1354574 - RNA, 19 nt, Homo sapiens
  misc_RNA (1)...(19): siRNA sense strand
agcaacaaauaucaugaga

SEQ ID NO: 1354575 - RNA, 19 nt, Homo sapiens
  misc_RNA (1)...(19): siRNA sense strand
gcggagacaacagcaguga

SEQ ID NO: 1354576 - RNA, 19 nt, Homo sapiens
  misc_RNA (1)...(19): siRNA sense strand
gguuucaucuuuuggaguu

SEQ ID NO: 1354577 - RNA, 19 nt, Homo sapiens
  misc_RNA (1)...(19): siRNA sense strand
caaggagcagcauauaguc

SEQ ID NO: 1354578 - RNA, 19 nt, Homo sapiens
  misc_RNA (1)...(19): siRNA sense strand
gccaaggagcagcauauag

SEQ ID NO: 1354579 - RNA, 19 nt, Homo sapiens
  misc_RNA (1)...(19): siRNA sense strand
cgauacauuagcuguuuga

SEQ ID NO: 1354580 - RNA, 19 nt, Homo sapiens
  misc_RNA (1)...(19): siRNA sense strand
ccgauacauuagcuguuug

SEQ ID NO: 1354581 - RNA, 19 nt, Homo sapiens
  misc_RNA (1)...(19): siRNA sense strand
uggacaauuugaugauaca

SEQ ID NO: 1354582 - RNA, 19 nt, Homo sapiens
  misc_RNA (1)...(19): siRNA sense strand
gaaaagguccacgaacugu

SEQ ID NO: 1354583 - RNA, 19 nt, Homo sapiens
  misc_RNA (1)...(19): siRNA sense strand
gcagcuccaagucagauca

SEQ ID NO: 1354584 - RNA, 19 nt, Homo sapiens
  misc_RNA (1)...(19): siRNA sense strand
auuaaugccagaagaagaa

SEQ ID NO: 1354585 - RNA, 19 nt, Homo sapiens
  misc_RNA (1)...(19): siRNA sense strand
uagaaaagguccacgaacu

SEQ ID NO: 1354586 - RNA, 19 nt, Homo sapiens
  misc_RNA (1)...(19): siRNA sense strand
augaugauccggauaagga

SEQ ID NO: 1354587 - RNA, 19 nt, Homo sapiens
  misc_RNA (1)...(19): siRNA sense strand
guacuaagguuucaucuuu

SEQ ID NO: 1354588 - RNA, 19 nt, Homo sapiens
  misc_RNA (1)...(19): siRNA sense strand
caagucagaucaugaagaa

SEQ ID NO: 1354589 - RNA, 19 nt, Homo sapiens
  misc_RNA (1)...(19): siRNA sense strand
gauacaagcaauacaagua

SEQ ID NO: 1354590 - RNA, 19 nt, Homo sapiens
  misc_RNA (1)...(19): siRNA sense strand
caaaguagcaacaaauauc

SEQ ID NO: 1354591 - RNA, 19 nt, Homo sapiens
  misc_RNA (1)...(19): siRNA sense strand
gaccauaacccuucuucuu

SEQ ID NO: 1354592 - RNA, 19 nt, Homo sapiens
  misc_RNA (1)...(19): siRNA sense strand
ggacaaggacgcgaucuau

SEQ ID NO: 1354593 - RNA, 19 nt, Homo sapiens
  misc_RNA (1)...(19): siRNA sense strand
gcuggacaauuugaugaua

SEQ ID NO: 1354594 - RNA, 19 nt, Homo sapiens
  misc_RNA (1)...(19): siRNA sense strand
caauacaaguacuaagguu

SEQ ID NO: 1354595 - RNA, 19 nt, Homo sapiens
  misc_RNA (1)...(19): siRNA sense strand
ccaucgaccucgucauuga

SEQ ID NO: 1354596 - RNA, 19 nt, Homo sapiens
  misc_RNA (1)...(19): siRNA sense strand
gaugauacaagcaauacaa

SEQ ID NO: 1354597 - RNA, 19 nt, Homo sapiens
  misc_RNA (1)...(19): siRNA sense strand
guacaggugacgaugauga

SEQ ID NO: 1354598 - RNA, 19 nt, Homo sapiens
  misc_RNA (1)...(19): siRNA sense strand
ccaaggagcagcauauagu

SEQ ID NO: 1354599 - RNA, 19 nt, Homo sapiens
  misc_RNA (1)...(19): siRNA sense strand
agacaacaguguagcuuca

SEQ ID NO: 1354600 - RNA, 19 nt, Homo sapiens
  misc_RNA (1)...(19): siRNA sense strand
gagcuggacaauuugauga

SEQ ID NO: 1354601 - RNA, 19 nt, Homo sapiens
  misc_RNA (1)...(19): siRNA sense strand
gagccaaggagcagcauau

SEQ ID NO: 1354602 - RNA, 19 nt, Homo sapiens
  misc_RNA (1)...(19): siRNA sense strand
gcccaucgaccucgucauu

SEQ ID NO: 1354603 - RNA, 19 nt, Homo sapiens
  misc_RNA (1)...(19): siRNA sense strand
ccaaaguagcaacaaauau

SEQ ID NO: 1354604 - RNA, 19 nt, Homo sapiens
  misc_RNA (1)...(19): siRNA sense strand
gcucuggucuuugagaagu

SEQ ID NO: 1354605 - RNA, 19 nt, Homo sapiens
  misc_RNA (1)...(19): siRNA sense strand
uaguacagcccaugauuga

SEQ ID NO: 1354606 - RNA, 19 nt, Homo sapiens
  misc_RNA (1)...(19): siRNA sense strand
caaaucucgcugaccauaa

SEQ ID NO: 1354607 - RNA, 19 nt, Homo sapiens
  misc_RNA (1)...(19): siRNA sense strand
gcaauacaaguacuaaggu

SEQ ID NO: 1354608 - RNA, 19 nt, Homo sapiens
  misc_RNA (1)...(19): siRNA sense strand
cccaaaguagcaacaaaua

SEQ ID NO: 1354609 - RNA, 19 nt, Homo sapiens
  misc_RNA (1)...(19): siRNA sense strand
caagcaauacaaguacuaa

SEQ ID NO: 1354610 - RNA, 19 nt, Homo sapiens
  misc_RNA (1)...(19): siRNA sense strand
acaaauaucaugagagcau

SEQ ID NO: 1354611 - RNA, 19 nt, Homo sapiens
  misc_RNA (1)...(19): siRNA sense strand
acaaaucucgcugaccaua

SEQ ID NO: 1354612 - RNA, 19 nt, Homo sapiens
  misc_RNA (1)...(19): siRNA sense strand
gaacugugcgauaacuucu

SEQ ID NO: 1354613 - RNA, 19 nt, Homo sapiens
  misc_RNA (1)...(19): siRNA sense strand
gacaaggacgcgaucuaug

SEQ ID NO: 1354614 - RNA, 19 nt, Homo sapiens
  misc_RNA (1)...(19): siRNA sense strand
uccacgaacugugcgauaa

SEQ ID NO: 1354615 - RNA, 19 nt, Homo sapiens
  misc_RNA (1)...(19): siRNA sense strand
gaauaguacagcccaugau

SEQ ID NO: 1354616 - RNA, 19 nt, Homo sapiens
  misc_RNA (1)...(19): siRNA sense strand
ccaagucagaucaugaaga

SEQ ID NO: 1354617 - RNA, 19 nt, Homo sapiens
  misc_RNA (1)...(19): siRNA sense strand
gcuccaagucagaucauga

SEQ ID NO: 1354618 - RNA, 19 nt, Homo sapiens
  misc_RNA (1)...(19): siRNA sense strand
gggacaaggacgcgaucua

SEQ ID NO: 1354619 - RNA, 19 nt, Homo sapiens
  misc_RNA (1)...(19): siRNA sense strand
guagcaacaaauaucauga

SEQ ID NO: 1354620 - RNA, 19 nt, Homo sapiens
  misc_RNA (1)...(19): siRNA sense strand
accgauacauuagcuguuu

SEQ ID NO: 1354621 - RNA, 19 nt, Homo sapiens
  misc_RNA (1)...(19): siRNA sense strand
guuuauuaaugccagaaga

SEQ ID NO: 1354622 - RNA, 19 nt, Homo sapiens
  misc_RNA (1)...(19): siRNA sense strand
gcaaggggaugguuuagac

SEQ ID NO: 1354623 - RNA, 19 nt, Homo sapiens
  misc_RNA (1)...(19): siRNA sense strand
uaacuucugccaccgauac

SEQ ID NO: 1354624 - RNA, 19 nt, Homo sapiens
  misc_RNA (1)...(19): siRNA sense strand
aauaguacagcccaugauu

SEQ ID NO: 1354625 - RNA, 19 nt, Homo sapiens
  misc_RNA (1)...(19): siRNA sense strand
aaaucucgcugaccauaac

SEQ ID NO: 1354626 - RNA, 19 nt, Homo sapiens
  misc_RNA (1)...(19): siRNA sense strand
acaaggacgcgaucuaugg

SEQ ID NO: 1354627 - RNA, 19 nt, Homo sapiens
  misc_RNA (1)...(19): siRNA sense strand
caaguacuaagguuucauc

SEQ ID NO: 1354628 - RNA, 19 nt, Homo sapiens
  misc_RNA (1)...(19): siRNA sense strand
gccagaagaagaauaguac

SEQ ID NO: 1354629 - RNA, 19 nt, Homo sapiens
  misc_RNA (1)...(19): siRNA sense strand
accauaacccuucuucuug

SEQ ID NO: 1354630 - RNA, 19 nt, Homo sapiens
  misc_RNA (1)...(19): siRNA sense strand
cgaacugugcgauaacuuc

SEQ ID NO: 1354631 - RNA, 19 nt, Homo sapiens
  misc_RNA (1)...(19): siRNA sense strand
ucaggcuccuccacaaauc

SEQ ID NO: 1354632 - RNA, 19 nt, Homo sapiens
  misc_RNA (1)...(19): siRNA sense strand
uguguuggauggucagcaa

SEQ ID NO: 1354633 - RNA, 19 nt, Homo sapiens
  misc_RNA (1)...(19): siRNA sense strand
acaagcaauacaaguacua

SEQ ID NO: 1354634 - RNA, 19 nt, Homo sapiens
  misc_RNA (1)...(19): siRNA sense strand
agaauaguacagcccauga

SEQ ID NO: 1354635 - RNA, 19 nt, Homo sapiens
  misc_RNA (1)...(19): siRNA sense strand
gucagaucaugaagaacuu

SEQ ID NO: 1354636 - RNA, 19 nt, Homo sapiens
  misc_RNA (1)...(19): siRNA sense strand
ggucuucgccaagcagguu

SEQ ID NO: 1354637 - RNA, 19 nt, Homo sapiens
  misc_RNA (1)...(19): siRNA sense strand
ugccagaagaagaauagua

SEQ ID NO: 1354638 - RNA, 19 nt, Homo sapiens
  misc_RNA (1)...(19): siRNA sense strand
acgaugaugauccggauaa

SEQ ID NO: 1354639 - RNA, 19 nt, Homo sapiens
  misc_RNA (1)...(19): siRNA sense strand
auacaaguacuaagguuuc

SEQ ID NO: 1354640 - RNA, 19 nt, Homo sapiens
  misc_RNA (1)...(19): siRNA sense strand
agcaacaaauaucaugaga

SEQ ID NO: 1354641 - RNA, 19 nt, Homo sapiens
  misc_RNA (1)...(19): siRNA sense strand
gcggagacaacagcaguga

SEQ ID NO: 1354642 - RNA, 19 nt, Homo sapiens
  misc_RNA (1)...(19): siRNA sense strand
gguuucaucuuuuggaguu

SEQ ID NO: 1354643 - RNA, 19 nt, Homo sapiens
  misc_RNA (1)...(19): siRNA sense strand
caaggagcagcauauaguc

SEQ ID NO: 1354644 - RNA, 19 nt, Homo sapiens
  misc_RNA (1)...(19): siRNA sense strand
gccaaggagcagcauauag

SEQ ID NO: 1354645 - RNA, 19 nt, Homo sapiens
  misc_RNA (1)...(19): siRNA sense strand
uggacaauuugaugauaca

SEQ ID NO: 1354646 - RNA, 19 nt, Homo sapiens
  misc_RNA (1)...(19): siRNA sense strand
cgauacauuagcuguuuga

SEQ ID NO: 1354647 - RNA, 19 nt, Homo sapiens
  misc_RNA (1)...(19): siRNA sense strand
ccgauacauuagcuguuug

SEQ ID NO: 1354648 - RNA, 19 nt, Homo sapiens
  misc_RNA (1)...(19): siRNA sense strand
gaaaagguccacgaacugu

SEQ ID NO: 1354649 - RNA, 19 nt, Homo sapiens
  misc_RNA (1)...(19): siRNA sense strand
gcagcuccaagucagauca

SEQ ID NO: 1354650 - RNA, 19 nt, Homo sapiens
  misc_RNA (1)...(19): siRNA sense strand
auuaaugccagaagaagaa

SEQ ID NO: 1354651 - RNA, 19 nt, Homo sapiens
  misc_RNA (1)...(19): siRNA sense strand
uagaaaagguccacgaacu

SEQ ID NO: 1354652 - RNA, 19 nt, Homo sapiens
  misc_RNA (1)...(19): siRNA sense strand
augaugauccggauaagga

SEQ ID NO: 1354653 - RNA, 19 nt, Homo sapiens
  misc_RNA (1)...(19): siRNA sense strand
guacuaagguuucaucuuu

SEQ ID NO: 1354654 - RNA, 19 nt, Homo sapiens
  misc_RNA (1)...(19): siRNA sense strand
caagucagaucaugaagaa

SEQ ID NO: 1354655 - RNA, 19 nt, Homo sapiens
  misc_RNA (1)...(19): siRNA sense strand
gauacaagcaauacaagua

SEQ ID NO: 1354656 - RNA, 19 nt, Homo sapiens
  misc_RNA (1)...(19): siRNA sense strand
caaaguagcaacaaauauc

SEQ ID NO: 1354657 - RNA, 19 nt, Homo sapiens
  misc_RNA (1)...(19): siRNA sense strand
gaccauaacccuucuucuu

SEQ ID NO: 1354658 - RNA, 19 nt, Homo sapiens
  misc_RNA (1)...(19): siRNA sense strand
gcuggacaauuugaugaua

SEQ ID NO: 1354659 - RNA, 19 nt, Homo sapiens
  misc_RNA (1)...(19): siRNA sense strand
caauacaaguacuaagguu

SEQ ID NO: 1354660 - RNA, 19 nt, Homo sapiens
  misc_RNA (1)...(19): siRNA sense strand
ccaucgaccucgucauuga

SEQ ID NO: 1354661 - RNA, 19 nt, Homo sapiens
  misc_RNA (1)...(19): siRNA sense strand
gaugauacaagcaauacaa

SEQ ID NO: 1354662 - RNA, 19 nt, Homo sapiens
  misc_RNA (1)...(19): siRNA sense strand
guacaggugacgaugauga

SEQ ID NO: 1354663 - RNA, 19 nt, Homo sapiens
  misc_RNA (1)...(19): siRNA sense strand
ccaaggagcagcauauagu

SEQ ID NO: 1354664 - RNA, 19 nt, Homo sapiens
  misc_RNA (1)...(19): siRNA sense strand
agacaacaguguagcuuca

SEQ ID NO: 1354665 - RNA, 19 nt, Homo sapiens
  misc_RNA (1)...(19): siRNA sense strand
gagcuggacaauuugauga

SEQ ID NO: 1354666 - RNA, 19 nt, Homo sapiens
  misc_RNA (1)...(19): siRNA sense strand
gagccaaggagcagcauau

SEQ ID NO: 1354667 - RNA, 19 nt, Homo sapiens
  misc_RNA (1)...(19): siRNA sense strand
gcccaucgaccucgucauu

SEQ ID NO: 1354668 - RNA, 19 nt, Homo sapiens
  misc_RNA (1)...(19): siRNA sense strand
ccaaaguagcaacaaauau

SEQ ID NO: 1354669 - RNA, 19 nt, Homo sapiens
  misc_RNA (1)...(19): siRNA sense strand
gcaauacaaguacuaaggu

SEQ ID NO: 1354670 - RNA, 19 nt, Homo sapiens
  misc_RNA (1)...(19): siRNA sense strand
uaguacagcccaugauuga

SEQ ID NO: 1354671 - RNA, 19 nt, Homo sapiens
  misc_RNA (1)...(19): siRNA sense strand
caaaucucgcugaccauaa

SEQ ID NO: 1354672 - RNA, 19 nt, Homo sapiens
  misc_RNA (1)...(19): siRNA sense strand
gcucuggucuuugagaagu

SEQ ID NO: 1354673 - RNA, 19 nt, Homo sapiens
  misc_RNA (1)...(19): siRNA sense strand
cccaaaguagcaacaaaua

SEQ ID NO: 1354674 - RNA, 19 nt, Homo sapiens
  misc_RNA (1)...(19): siRNA sense strand
caagcaauacaaguacuaa

SEQ ID NO: 1354675 - RNA, 19 nt, Homo sapiens
  misc_RNA (1)...(19): siRNA sense strand
acaaauaucaugagagcau

SEQ ID NO: 1354676 - RNA, 19 nt, Homo sapiens
  misc_RNA (1)...(19): siRNA sense strand
acaaaucucgcugaccaua

SEQ ID NO: 1354677 - RNA, 19 nt, Homo sapiens
  misc_RNA (1)...(19): siRNA sense strand
gaacugugcgauaacuucu

SEQ ID NO: 1354678 - RNA, 19 nt, Homo sapiens
  misc_RNA (1)...(19): siRNA sense strand
uccacgaacugugcgauaa

SEQ ID NO: 1354679 - RNA, 19 nt, Homo sapiens
  misc_RNA (1)...(19): siRNA sense strand
gaauaguacagcccaugau

SEQ ID NO: 1354680 - RNA, 19 nt, Homo sapiens
  misc_RNA (1)...(19): siRNA sense strand
ccaagucagaucaugaaga

SEQ ID NO: 1354681 - RNA, 19 nt, Homo sapiens
  misc_RNA (1)...(19): siRNA sense strand
gcuccaagucagaucauga

SEQ ID NO: 1354682 - RNA, 19 nt, Homo sapiens
  misc_RNA (1)...(19): siRNA sense strand
guagcaacaaauaucauga

SEQ ID NO: 1354683 - RNA, 19 nt, Homo sapiens
  misc_RNA (1)...(19): siRNA sense strand
accgauacauuagcuguuu

SEQ ID NO: 1354684 - RNA, 19 nt, Homo sapiens
  misc_RNA (1)...(19): siRNA sense strand
guuuauuaaugccagaaga

SEQ ID NO: 1354685 - RNA, 19 nt, Homo sapiens
  misc_RNA (1)...(19): siRNA sense strand
gcaaggggaugguuuagac

SEQ ID NO: 1354686 - RNA, 19 nt, Homo sapiens
  misc_RNA (1)...(19): siRNA sense strand
uaacuucugccaccgauac

SEQ ID NO: 1354687 - RNA, 19 nt, Homo sapiens
  misc_RNA (1)...(19): siRNA sense strand
aauaguacagcccaugauu

SEQ ID NO: 1354688 - RNA, 19 nt, Homo sapiens
  misc_RNA (1)...(19): siRNA sense strand
aaaucucgcugaccauaac

SEQ ID NO: 1354689 - RNA, 19 nt, Homo sapiens
  misc_RNA (1)...(19): siRNA sense strand
caaguacuaagguuucauc

SEQ ID NO: 1354690 - RNA, 19 nt, Homo sapiens
  misc_RNA (1)...(19): siRNA sense strand
gccagaagaagaauaguac

SEQ ID NO: 1354691 - RNA, 19 nt, Homo sapiens
  misc_RNA (1)...(19): siRNA sense strand
accauaacccuucuucuug

SEQ ID NO: 1354692 - RNA, 19 nt, Homo sapiens
  misc_RNA (1)...(19): siRNA sense strand
cgaacugugcgauaacuuc

SEQ ID NO: 1354693 - RNA, 19 nt, Homo sapiens
  misc_RNA (1)...(19): siRNA sense strand
ucaggcuccuccacaaauc

SEQ ID NO: 1354694 - RNA, 19 nt, Homo sapiens
  misc_RNA (1)...(19): siRNA sense strand
uguguuggauggucagcaa

SEQ ID NO: 1354695 - RNA, 19 nt, Homo sapiens
  misc_RNA (1)...(19): siRNA sense strand
gucagaucaugaagaacuu

SEQ ID NO: 1354696 - RNA, 19 nt, Homo sapiens
  misc_RNA (1)...(19): siRNA sense strand
agaauaguacagcccauga

SEQ ID NO: 1354697 - RNA, 19 nt, Homo sapiens
  misc_RNA (1)...(19): siRNA sense strand
acaagcaauacaaguacua

SEQ ID NO: 1354698 - RNA, 19 nt, Homo sapiens
  misc_RNA (1)...(19): siRNA sense strand
acgaugaugauccggauaa

SEQ ID NO: 1354699 - RNA, 19 nt, Homo sapiens
  misc_RNA (1)...(19): siRNA sense strand
ggucuucgccaagcagguu

SEQ ID NO: 1354700 - RNA, 19 nt, Homo sapiens
  misc_RNA (1)...(19): siRNA sense strand
ugccagaagaagaauagua

SEQ ID NO: 1354701 - RNA, 19 nt, Homo sapiens
  misc_RNA (1)...(19): siRNA sense strand
auacaaguacuaagguuuc

SEQ ID NO: 1354702 - RNA, 19 nt, Homo sapiens
  misc_RNA (1)...(19): siRNA sense strand
agcaacaaauaucaugaga

SEQ ID NO: 1354703 - RNA, 19 nt, Homo sapiens
  misc_RNA (1)...(19): siRNA sense strand
gcggagacaacagcaguga

SEQ ID NO: 1354704 - RNA, 19 nt, Homo sapiens
  misc_RNA (1)...(19): siRNA sense strand
ccgauacauuagcuguuug

SEQ ID NO: 1354705 - RNA, 19 nt, Homo sapiens
  misc_RNA (1)...(19): siRNA sense strand
caaggagcagcauauaguc

SEQ ID NO: 1354706 - RNA, 19 nt, Homo sapiens
  misc_RNA (1)...(19): siRNA sense strand
gguuucaucuuuuggaguu

SEQ ID NO: 1354707 - RNA, 19 nt, Homo sapiens
  misc_RNA (1)...(19): siRNA sense strand
gccaaggagcagcauauag

SEQ ID NO: 1354708 - RNA, 19 nt, Homo sapiens
  misc_RNA (1)...(19): siRNA sense strand
uggacaauuugaugauaca

SEQ ID NO: 1354709 - RNA, 19 nt, Homo sapiens
  misc_RNA (1)...(19): siRNA sense strand
gaaaagguccacgaacugu

SEQ ID NO: 1354710 - RNA, 19 nt, Homo sapiens
  misc_RNA (1)...(19): siRNA sense strand
cgauacauuagcuguuuga

SEQ ID NO: 1354711 - RNA, 19 nt, Homo sapiens
  misc_RNA (1)...(19): siRNA sense strand
gcagcuccaagucagauca

SEQ ID NO: 1354712 - RNA, 19 nt, Homo sapiens
  misc_RNA (1)...(19): siRNA sense strand
auuaaugccagaagaagaa

SEQ ID NO: 1354713 - RNA, 19 nt, Homo sapiens
  misc_RNA (1)...(19): siRNA sense strand
augaugauccggauaagga

SEQ ID NO: 1354714 - RNA, 19 nt, Homo sapiens
  misc_RNA (1)...(19): siRNA sense strand
uagaaaagguccacgaacu

SEQ ID NO: 1354715 - RNA, 19 nt, Homo sapiens
  misc_RNA (1)...(19): siRNA sense strand
ggagagauauuugaaguug

SEQ ID NO: 1354716 - RNA, 19 nt, Homo sapiens
  misc_RNA (1)...(19): siRNA sense strand
gggaauggaugaugaagga

SEQ ID NO: 1354717 - RNA, 19 nt, Homo sapiens
  misc_RNA (1)...(19): siRNA sense strand
caaacaaucugugacuauu

SEQ ID NO: 1354718 - RNA, 19 nt, Homo sapiens
  misc_RNA (1)...(19): siRNA sense strand
ucaauuaaguugcagaguu

SEQ ID NO: 1354719 - RNA, 19 nt, Homo sapiens
  misc_RNA (1)...(19): siRNA sense strand
cgcaagaccuucaauauca

SEQ ID NO: 1354720 - RNA, 19 nt, Homo sapiens
  misc_RNA (1)...(19): siRNA sense strand
caauuaaguugcagaguuc

SEQ ID NO: 1354721 - RNA, 19 nt, Homo sapiens
  misc_RNA (1)...(19): siRNA sense strand
ggaccaagaauuccugaaa

SEQ ID NO: 1354722 - RNA, 19 nt, Homo sapiens
  misc_RNA (1)...(19): siRNA sense strand
gcaagaccuucaauaucaa

SEQ ID NO: 1354723 - RNA, 19 nt, Homo sapiens
  misc_RNA (1)...(19): siRNA sense strand
aaaugugaaugcagcaaua

SEQ ID NO: 1354724 - RNA, 19 nt, Homo sapiens
  misc_RNA (1)...(19): siRNA sense strand
gcaaacuacuuagacauca

SEQ ID NO: 1354725 - RNA, 19 nt, Homo sapiens
  misc_RNA (1)...(19): siRNA sense strand
cagaugauaucccuguuug

SEQ ID NO: 1354726 - RNA, 19 nt, Homo sapiens
  misc_RNA (1)...(19): siRNA sense strand
caagaauuccugaaaguug

SEQ ID NO: 1354727 - RNA, 19 nt, Homo sapiens
  misc_RNA (1)...(19): siRNA sense strand
ugaaguugauguggaaauu

SEQ ID NO: 1354728 - RNA, 19 nt, Homo sapiens
  misc_RNA (1)...(19): siRNA sense strand
gaccaagaauuccugaaag

SEQ ID NO: 1354729 - RNA, 19 nt, Homo sapiens
  misc_RNA (1)...(19): siRNA sense strand
gaaaguugaccaaggaaca

SEQ ID NO: 1354730 - RNA, 19 nt, Homo sapiens
  misc_RNA (1)...(19): siRNA sense strand
ugugaaugcagcaauauua

SEQ ID NO: 1354731 - RNA, 19 nt, Homo sapiens
  misc_RNA (1)...(19): siRNA sense strand
aagaauuccugaaaguuga

SEQ ID NO: 1354732 - RNA, 19 nt, Homo sapiens
  misc_RNA (1)...(19): siRNA sense strand
gaguucugauggagagaua

SEQ ID NO: 1354733 - RNA, 19 nt, Homo sapiens
  misc_RNA (1)...(19): siRNA sense strand
gagagauauuugaaguuga

SEQ ID NO: 1354734 - RNA, 19 nt, Homo sapiens
  misc_RNA (1)...(19): siRNA sense strand
ccugaaaguugaccaagga

SEQ ID NO: 1354735 - RNA, 19 nt, Homo sapiens
  misc_RNA (1)...(19): siRNA sense strand
ugaagaugaugagaacaaa

SEQ ID NO: 1354736 - RNA, 19 nt, Homo sapiens
  misc_RNA (1)...(19): siRNA sense strand
gaaaagcgaacagaugaua

SEQ ID NO: 1354737 - RNA, 19 nt, Homo sapiens
  misc_RNA (1)...(19): siRNA sense strand
caaacuacuuagacaucaa

SEQ ID NO: 1354738 - RNA, 19 nt, Homo sapiens
  misc_RNA (1)...(19): siRNA sense strand
gcacccaccacaaggauga

SEQ ID NO: 1354739 - RNA, 19 nt, Homo sapiens
  misc_RNA (1)...(19): siRNA sense strand
ccaaacaaucugugacuau

SEQ ID NO: 1354740 - RNA, 19 nt, Homo sapiens
  misc_RNA (1)...(19): siRNA sense strand
gugaaugcagcaauauuaa

SEQ ID NO: 1354741 - RNA, 19 nt, Homo sapiens
  misc_RNA (1)...(19): siRNA sense strand
uuaagaccauguuggaaga

SEQ ID NO: 1354742 - RNA, 19 nt, Homo sapiens
  misc_RNA (1)...(19): siRNA sense strand
gccaaacaaucugugacua

SEQ ID NO: 1354743 - RNA, 19 nt, Homo sapiens
  misc_RNA (1)...(19): siRNA sense strand
caagacuguugccaauaug

SEQ ID NO: 1354744 - RNA, 19 nt, Homo sapiens
  misc_RNA (1)...(19): siRNA sense strand
guuggaagauuugggaaug

SEQ ID NO: 1354745 - RNA, 19 nt, Homo sapiens
  misc_RNA (1)...(19): siRNA sense strand
gcugcaaacuacuuagaca

SEQ ID NO: 1354746 - RNA, 19 nt, Homo sapiens
  misc_RNA (1)...(19): siRNA sense strand
acuuagacaucaaagguuu

SEQ ID NO: 1354747 - RNA, 19 nt, Homo sapiens
  misc_RNA (1)...(19): siRNA sense strand
agaccauguuggaagauuu

SEQ ID NO: 1354748 - RNA, 19 nt, Homo sapiens
  misc_RNA (1)...(19): siRNA sense strand
gaaguugauguggaaauug

SEQ ID NO: 1354749 - RNA, 19 nt, Homo sapiens
  misc_RNA (1)...(19): siRNA sense strand
gaugaugagaacaaagaaa

SEQ ID NO: 1354750 - RNA, 19 nt, Homo sapiens
  misc_RNA (1)...(19): siRNA sense strand
ccaagaauuccugaaaguu

SEQ ID NO: 1354751 - RNA, 19 nt, Homo sapiens
  misc_RNA (1)...(19): siRNA sense strand
gagauucgcaagaccuuca

SEQ ID NO: 1354752 - RNA, 19 nt, Homo sapiens
  misc_RNA (1)...(19): siRNA sense strand
gaccauguuggaagauuug

SEQ ID NO: 1354753 - RNA, 19 nt, Homo sapiens
  misc_RNA (1)...(19): siRNA sense strand
caagaccuucaauaucaaa

SEQ ID NO: 1354754 - RNA, 19 nt, Homo sapiens
  misc_RNA (1)...(19): siRNA sense strand
gauauuugaaguugaugug

SEQ ID NO: 1354755 - RNA, 19 nt, Homo sapiens
  misc_RNA (1)...(19): siRNA sense strand
aagaugaugagaacaaaga

SEQ ID NO: 1354756 - RNA, 19 nt, Homo sapiens
  misc_RNA (1)...(19): siRNA sense strand
aaagguuugcuugauguua

SEQ ID NO: 1354757 - RNA, 19 nt, Homo sapiens
  misc_RNA (1)...(19): siRNA sense strand
cuacuuagacaucaaaggu

SEQ ID NO: 1354758 - RNA, 19 nt, Homo sapiens
  misc_RNA (1)...(19): siRNA sense strand
gaacucauucuggcugcaa

SEQ ID NO: 1354759 - RNA, 19 nt, Homo sapiens
  misc_RNA (1)...(19): siRNA sense strand
uguggaaauugccaaacaa

SEQ ID NO: 1354760 - RNA, 19 nt, Homo sapiens
  misc_RNA (1)...(19): siRNA sense strand
caaaugugaaugcagcaau

SEQ ID NO: 1354761 - RNA, 19 nt, Homo sapiens
  misc_RNA (1)...(19): siRNA sense strand
gaagaugaugagaacaaag

SEQ ID NO: 1354762 - RNA, 19 nt, Homo sapiens
  misc_RNA (1)...(19): siRNA sense strand
cauucuggcugcaaacuac

SEQ ID NO: 1354763 - RNA, 19 nt, Homo sapiens
  misc_RNA (1)...(19): siRNA sense strand
cuauuaagaccauguugga

SEQ ID NO: 1354764 - RNA, 19 nt, Homo sapiens
  misc_RNA (1)...(19): siRNA sense strand
ccaguuccucuaccaaaug

SEQ ID NO: 1354765 - RNA, 19 nt, Homo sapiens
  misc_RNA (1)...(19): siRNA sense strand
guucugauggagagauauu

SEQ ID NO: 1354766 - RNA, 19 nt, Homo sapiens
  misc_RNA (1)...(19): siRNA sense strand
ucgcaagaccuucaauauc

SEQ ID NO: 1354767 - RNA, 19 nt, Homo sapiens
  misc_RNA (1)...(19): siRNA sense strand
accaagaauuccugaaagu

SEQ ID NO: 1354768 - RNA, 19 nt, Homo sapiens
  misc_RNA (1)...(19): siRNA sense strand
caguuccucuaccaaaugu

SEQ ID NO: 1354769 - RNA, 19 nt, Homo sapiens
  misc_RNA (1)...(19): siRNA sense strand
guuccucuaccaaauguga

SEQ ID NO: 1354770 - RNA, 19 nt, Homo sapiens
  misc_RNA (1)...(19): siRNA sense strand
aaagcgaacagaugauauc

SEQ ID NO: 1354771 - RNA, 19 nt, Homo sapiens
  misc_RNA (1)...(19): siRNA sense strand
caaucugugacuauuaaga

SEQ ID NO: 1354772 - RNA, 19 nt, Homo sapiens
  misc_RNA (1)...(19): siRNA sense strand
gaugaugaaggagaugaug

SEQ ID NO: 1354773 - RNA, 19 nt, Homo sapiens
  misc_RNA (1)...(19): siRNA sense strand
uggaagauuugggaaugga

SEQ ID NO: 1354774 - RNA, 19 nt, Homo sapiens
  misc_RNA (1)...(19): siRNA sense strand
cugaagaugaugagaacaa

SEQ ID NO: 1354775 - RNA, 19 nt, Homo sapiens
  misc_RNA (1)...(19): siRNA sense strand
cccaguuccucuaccaaau

SEQ ID NO: 1354776 - RNA, 19 nt, Homo sapiens
  misc_RNA (1)...(19): siRNA sense strand
aggagaugaugacccaguu

SEQ ID NO: 1354777 - RNA, 19 nt, Homo sapiens
  misc_RNA (1)...(19): siRNA sense strand
aagguuugcuugauguuac

SEQ ID NO: 1354778 - RNA, 19 nt, Homo sapiens
  misc_RNA (1)...(19): siRNA sense strand
auggagagauauuugaagu

SEQ ID NO: 1354779 - RNA, 19 nt, Homo sapiens
  misc_RNA (1)...(19): siRNA sense strand
ugauggagagauauuugaa

SEQ ID NO: 1354780 - RNA, 19 nt, Homo sapiens
  misc_RNA (1)...(19): siRNA sense strand
gaacaaagaaaagcgaaca

SEQ ID NO: 1354781 - RNA, 19 nt, Homo sapiens
  misc_RNA (1)...(19): siRNA sense strand
ggagaugaugacccaguuc

SEQ ID NO: 1354782 - RNA, 19 nt, Homo sapiens
  misc_RNA (1)...(19): siRNA sense strand
ugacccaguuccucuacca

SEQ ID NO: 1354783 - RNA, 19 nt, Homo sapiens
  misc_RNA (1)...(19): siRNA sense strand
agaggaggaagcccaggua

SEQ ID NO: 1354784 - RNA, 19 nt, Homo sapiens
  misc_RNA (1)...(19): siRNA sense strand
aagaccauguuggaagauu

SEQ ID NO: 1354785 - RNA, 19 nt, Homo sapiens
  misc_RNA (1)...(19): siRNA sense strand
guugaccaaggaacacuuu

SEQ ID NO: 1354786 - RNA, 19 nt, Homo sapiens
  misc_RNA (1)...(19): siRNA sense strand
gauggagagauauuugaag

SEQ ID NO: 1354787 - RNA, 19 nt, Homo sapiens
  misc_RNA (1)...(19): siRNA sense strand
ggagagauauuugaaguug

SEQ ID NO: 1354788 - RNA, 19 nt, Homo sapiens
  misc_RNA (1)...(19): siRNA sense strand
gggaauggaugaugaagga

SEQ ID NO: 1354789 - RNA, 19 nt, Homo sapiens
  misc_RNA (1)...(19): siRNA sense strand
caaacaaucugugacuauu

SEQ ID NO: 1354790 - RNA, 19 nt, Homo sapiens
  misc_RNA (1)...(19): siRNA sense strand
ucaauuaaguugcagaguu

SEQ ID NO: 1354791 - RNA, 19 nt, Homo sapiens
  misc_RNA (1)...(19): siRNA sense strand
cgcaagaccuucaauauca

SEQ ID NO: 1354792 - RNA, 19 nt, Homo sapiens
  misc_RNA (1)...(19): siRNA sense strand
caauuaaguugcagaguuc

SEQ ID NO: 1354793 - RNA, 19 nt, Homo sapiens
  misc_RNA (1)...(19): siRNA sense strand
ggaccaagaauuccugaaa

SEQ ID NO: 1354794 - RNA, 19 nt, Homo sapiens
  misc_RNA (1)...(19): siRNA sense strand
gcaagaccuucaauaucaa

SEQ ID NO: 1354795 - RNA, 19 nt, Homo sapiens
  misc_RNA (1)...(19): siRNA sense strand
aaaugugaaugcagcaaua

SEQ ID NO: 1354796 - RNA, 19 nt, Homo sapiens
  misc_RNA (1)...(19): siRNA sense strand
gcaaacuacuuagacauca

SEQ ID NO: 1354797 - RNA, 19 nt, Homo sapiens
  misc_RNA (1)...(19): siRNA sense strand
cagaugauaucccuguuug

SEQ ID NO: 1354798 - RNA, 19 nt, Homo sapiens
  misc_RNA (1)...(19): siRNA sense strand
caagaauuccugaaaguug

SEQ ID NO: 1354799 - RNA, 19 nt, Homo sapiens
  misc_RNA (1)...(19): siRNA sense strand
ugaaguugauguggaaauu

SEQ ID NO: 1354800 - RNA, 19 nt, Homo sapiens
  misc_RNA (1)...(19): siRNA sense strand
gaccaagaauuccugaaag

SEQ ID NO: 1354801 - RNA, 19 nt, Homo sapiens
  misc_RNA (1)...(19): siRNA sense strand
gaaaguugaccaaggaaca

SEQ ID NO: 1354802 - RNA, 19 nt, Homo sapiens
  misc_RNA (1)...(19): siRNA sense strand
ugugaaugcagcaauauua

SEQ ID NO: 1354803 - RNA, 19 nt, Homo sapiens
  misc_RNA (1)...(19): siRNA sense strand
aagaauuccugaaaguuga

SEQ ID NO: 1354804 - RNA, 19 nt, Homo sapiens
  misc_RNA (1)...(19): siRNA sense strand
gaguucugauggagagaua

SEQ ID NO: 1354805 - RNA, 19 nt, Homo sapiens
  misc_RNA (1)...(19): siRNA sense strand
gagagauauuugaaguuga

SEQ ID NO: 1354806 - RNA, 19 nt, Homo sapiens
  misc_RNA (1)...(19): siRNA sense strand
ccugaaaguugaccaagga

SEQ ID NO: 1354807 - RNA, 19 nt, Homo sapiens
  misc_RNA (1)...(19): siRNA sense strand
ugaagaugaugagaacaaa

SEQ ID NO: 1354808 - RNA, 19 nt, Homo sapiens
  misc_RNA (1)...(19): siRNA sense strand
gaaaagcgaacagaugaua

SEQ ID NO: 1354809 - RNA, 19 nt, Homo sapiens
  misc_RNA (1)...(19): siRNA sense strand
caaacuacuuagacaucaa

SEQ ID NO: 1354810 - RNA, 19 nt, Homo sapiens
  misc_RNA (1)...(19): siRNA sense strand
gcacccaccacaaggauga

SEQ ID NO: 1354811 - RNA, 19 nt, Homo sapiens
  misc_RNA (1)...(19): siRNA sense strand
ccaaacaaucugugacuau

SEQ ID NO: 1354812 - RNA, 19 nt, Homo sapiens
  misc_RNA (1)...(19): siRNA sense strand
gugaaugcagcaauauuaa

SEQ ID NO: 1354813 - RNA, 19 nt, Homo sapiens
  misc_RNA (1)...(19): siRNA sense strand
uuaagaccauguuggaaga

SEQ ID NO: 1354814 - RNA, 19 nt, Homo sapiens
  misc_RNA (1)...(19): siRNA sense strand
gccaaacaaucugugacua

SEQ ID NO: 1354815 - RNA, 19 nt, Homo sapiens
  misc_RNA (1)...(19): siRNA sense strand
caagacuguugccaauaug

SEQ ID NO: 1354816 - RNA, 19 nt, Homo sapiens
  misc_RNA (1)...(19): siRNA sense strand
guuggaagauuugggaaug

SEQ ID NO: 1354817 - RNA, 19 nt, Homo sapiens
  misc_RNA (1)...(19): siRNA sense strand
gcugcaaacuacuuagaca

SEQ ID NO: 1354818 - RNA, 19 nt, Homo sapiens
  misc_RNA (1)...(19): siRNA sense strand
acuuagacaucaaagguuu

SEQ ID NO: 1354819 - RNA, 19 nt, Homo sapiens
  misc_RNA (1)...(19): siRNA sense strand
agaccauguuggaagauuu

SEQ ID NO: 1354820 - RNA, 19 nt, Homo sapiens
  misc_RNA (1)...(19): siRNA sense strand
gaaguugauguggaaauug

SEQ ID NO: 1354821 - RNA, 19 nt, Homo sapiens
  misc_RNA (1)...(19): siRNA sense strand
gaugaugagaacaaagaaa

SEQ ID NO: 1354822 - RNA, 19 nt, Homo sapiens
  misc_RNA (1)...(19): siRNA sense strand
ccaagaauuccugaaaguu

SEQ ID NO: 1354823 - RNA, 19 nt, Homo sapiens
  misc_RNA (1)...(19): siRNA sense strand
gagauucgcaagaccuuca

SEQ ID NO: 1354824 - RNA, 19 nt, Homo sapiens
  misc_RNA (1)...(19): siRNA sense strand
ccaguggugugaagagaag

SEQ ID NO: 1354825 - RNA, 19 nt, Homo sapiens
  misc_RNA (1)...(19): siRNA sense strand
gaccauguuggaagauuug

SEQ ID NO: 1354826 - RNA, 19 nt, Homo sapiens
  misc_RNA (1)...(19): siRNA sense strand
caagaccuucaauaucaaa

SEQ ID NO: 1354827 - RNA, 19 nt, Homo sapiens
  misc_RNA (1)...(19): siRNA sense strand
gauauuugaaguugaugug

SEQ ID NO: 1354828 - RNA, 19 nt, Homo sapiens
  misc_RNA (1)...(19): siRNA sense strand
aagaugaugagaacaaaga

SEQ ID NO: 1354829 - RNA, 19 nt, Homo sapiens
  misc_RNA (1)...(19): siRNA sense strand
aaagguuugcuugauguua

SEQ ID NO: 1354830 - RNA, 19 nt, Homo sapiens
  misc_RNA (1)...(19): siRNA sense strand
cuacuuagacaucaaaggu

SEQ ID NO: 1354831 - RNA, 19 nt, Homo sapiens
  misc_RNA (1)...(19): siRNA sense strand
gaacucauucuggcugcaa

SEQ ID NO: 1354832 - RNA, 19 nt, Homo sapiens
  misc_RNA (1)...(19): siRNA sense strand
uguggaaauugccaaacaa

SEQ ID NO: 1354833 - RNA, 19 nt, Homo sapiens
  misc_RNA (1)...(19): siRNA sense strand
caaaugugaaugcagcaau

SEQ ID NO: 1354834 - RNA, 19 nt, Homo sapiens
  misc_RNA (1)...(19): siRNA sense strand
gaagaugaugagaacaaag

SEQ ID NO: 1354835 - RNA, 19 nt, Homo sapiens
  misc_RNA (1)...(19): siRNA sense strand
cauucuggcugcaaacuac

SEQ ID NO: 1354836 - RNA, 19 nt, Homo sapiens
  misc_RNA (1)...(19): siRNA sense strand
cuauuaagaccauguugga

SEQ ID NO: 1354837 - RNA, 19 nt, Homo sapiens
  misc_RNA (1)...(19): siRNA sense strand
ccaguuccucuaccaaaug

SEQ ID NO: 1354838 - RNA, 19 nt, Homo sapiens
  misc_RNA (1)...(19): siRNA sense strand
guucugauggagagauauu

SEQ ID NO: 1354839 - RNA, 19 nt, Homo sapiens
  misc_RNA (1)...(19): siRNA sense strand
ucgcaagaccuucaauauc

SEQ ID NO: 1354840 - RNA, 19 nt, Homo sapiens
  misc_RNA (1)...(19): siRNA sense strand
accaagaauuccugaaagu

SEQ ID NO: 1354841 - RNA, 19 nt, Homo sapiens
  misc_RNA (1)...(19): siRNA sense strand
caguuccucuaccaaaugu

SEQ ID NO: 1354842 - RNA, 19 nt, Homo sapiens
  misc_RNA (1)...(19): siRNA sense strand
guuccucuaccaaauguga

SEQ ID NO: 1354843 - RNA, 19 nt, Homo sapiens
  misc_RNA (1)...(19): siRNA sense strand
aaagcgaacagaugauauc

SEQ ID NO: 1354844 - RNA, 19 nt, Homo sapiens
  misc_RNA (1)...(19): siRNA sense strand
caaucugugacuauuaaga

SEQ ID NO: 1354845 - RNA, 19 nt, Homo sapiens
  misc_RNA (1)...(19): siRNA sense strand
gaugaugaaggagaugaug

SEQ ID NO: 1354846 - RNA, 19 nt, Homo sapiens
  misc_RNA (1)...(19): siRNA sense strand
uggaagauuugggaaugga

SEQ ID NO: 1354847 - RNA, 19 nt, Homo sapiens
  misc_RNA (1)...(19): siRNA sense strand
cugaagaugaugagaacaa

SEQ ID NO: 1354848 - RNA, 19 nt, Homo sapiens
  misc_RNA (1)...(19): siRNA sense strand
cccaguuccucuaccaaau

SEQ ID NO: 1354849 - RNA, 19 nt, Homo sapiens
  misc_RNA (1)...(19): siRNA sense strand
aggagaugaugacccaguu

SEQ ID NO: 1354850 - RNA, 19 nt, Homo sapiens
  misc_RNA (1)...(19): siRNA sense strand
aagguuugcuugauguuac

SEQ ID NO: 1354851 - RNA, 19 nt, Homo sapiens
  misc_RNA (1)...(19): siRNA sense strand
auggagagauauuugaagu

SEQ ID NO: 1354852 - RNA, 19 nt, Homo sapiens
  misc_RNA (1)...(19): siRNA sense strand
ugauggagagauauuugaa

SEQ ID NO: 1354853 - RNA, 19 nt, Homo sapiens
  misc_RNA (1)...(19): siRNA sense strand
gaacaaagaaaagcgaaca

SEQ ID NO: 1354854 - RNA, 19 nt, Homo sapiens
  misc_RNA (1)...(19): siRNA sense strand
ggagaugaugacccaguuc

SEQ ID NO: 1354855 - RNA, 19 nt, Homo sapiens
  misc_RNA (1)...(19): siRNA sense strand
ugacccaguuccucuacca

SEQ ID NO: 1354856 - RNA, 19 nt, Homo sapiens
  misc_RNA (1)...(19): siRNA sense strand
agaggaggaagcccaggua

SEQ ID NO: 1354857 - RNA, 19 nt, Homo sapiens
  misc_RNA (1)...(19): siRNA sense strand
guugaccaaggaacacuuu

SEQ ID NO: 1354858 - RNA, 19 nt, Homo sapiens
  misc_RNA (1)...(19): siRNA sense strand
gauggagagauauuugaag

SEQ ID NO: 1354859 - RNA, 19 nt, Homo sapiens
  misc_RNA (1)...(19): siRNA sense strand
aagaccauguuggaagauu

SEQ ID NO: 1354860 - RNA, 19 nt, Homo sapiens
  misc_RNA (1)...(19): siRNA sense strand
ggaaagugaugacaaguac

SEQ ID NO: 1354861 - RNA, 19 nt, Homo sapiens
  misc_RNA (1)...(19): siRNA sense strand
caaggaaagugaugacaag

SEQ ID NO: 1354862 - RNA, 19 nt, Homo sapiens
  misc_RNA (1)...(19): siRNA sense strand
gccauucuauugacucuga

SEQ ID NO: 1354863 - RNA, 19 nt, Homo sapiens
  misc_RNA (1)...(19): siRNA sense strand
gcaagucaacugcuucuuc

SEQ ID NO: 1354864 - RNA, 19 nt, Homo sapiens
  misc_RNA (1)...(19): siRNA sense strand
caagucaacugcuucuucu

SEQ ID NO: 1354865 - RNA, 19 nt, Homo sapiens
  misc_RNA (1)...(19): siRNA sense strand
gaagugauggcaguagaaa

SEQ ID NO: 1354866 - RNA, 19 nt, Homo sapiens
  misc_RNA (1)...(19): siRNA sense strand
gaucuuccgaguccuuaaa

SEQ ID NO: 1354867 - RNA, 19 nt, Homo sapiens
  misc_RNA (1)...(19): siRNA sense strand
cgaccaguauaacaaggaa

SEQ ID NO: 1354868 - RNA, 19 nt, Homo sapiens
  misc_RNA (1)...(19): siRNA sense strand
gcuguacccugguuugaac

SEQ ID NO: 1354869 - RNA, 19 nt, Homo sapiens
  misc_RNA (1)...(19): siRNA sense strand
ggaucaccgaccaguauaa

SEQ ID NO: 1354870 - RNA, 19 nt, Homo sapiens
  misc_RNA (1)...(19): siRNA sense strand
ucaccgaccaguauaacaa

SEQ ID NO: 1354871 - RNA, 19 nt, Homo sapiens
  misc_RNA (1)...(19): siRNA sense strand
ccuguuggccauucuauug

SEQ ID NO: 1354872 - RNA, 19 nt, Homo sapiens
  misc_RNA (1)...(19): siRNA sense strand
guggaucaccgaccaguau

SEQ ID NO: 1354873 - RNA, 19 nt, Homo sapiens
  misc_RNA (1)...(19): siRNA sense strand
aagcguccaugaagugaug

SEQ ID NO: 1354874 - RNA, 19 nt, Homo sapiens
  misc_RNA (1)...(19): siRNA sense strand
uacccugguuugaacagua

SEQ ID NO: 1354875 - RNA, 19 nt, Homo sapiens
  misc_RNA (1)...(19): siRNA sense strand
aggaaagugaugacaagua

SEQ ID NO: 1354876 - RNA, 19 nt, Homo sapiens
  misc_RNA (1)...(19): siRNA sense strand
acaaggaaagugaugacaa

SEQ ID NO: 1354877 - RNA, 19 nt, Homo sapiens
  misc_RNA (1)...(19): siRNA sense strand
aguauaacaaggaaaguga

SEQ ID NO: 1354878 - RNA, 19 nt, Homo sapiens
  misc_RNA (1)...(19): siRNA sense strand
cuaccaagcaaggaagaaa

SEQ ID NO: 1354879 - RNA, 19 nt, Homo sapiens
  misc_RNA (1)...(19): siRNA sense strand
ugaagugauggcaguagaa

SEQ ID NO: 1354880 - RNA, 19 nt, Homo sapiens
  misc_RNA (1)...(19): siRNA sense strand
ucuaagcguccaugaagug

SEQ ID NO: 1354881 - RNA, 19 nt, Homo sapiens
  misc_RNA (1)...(19): siRNA sense strand
ggaaagugaugacaaguac

SEQ ID NO: 1354882 - RNA, 19 nt, Homo sapiens
  misc_RNA (1)...(19): siRNA sense strand
caaggaaagugaugacaag

SEQ ID NO: 1354883 - RNA, 19 nt, Homo sapiens
  misc_RNA (1)...(19): siRNA sense strand
gccauucuauugacucuga

SEQ ID NO: 1354884 - RNA, 19 nt, Homo sapiens
  misc_RNA (1)...(19): siRNA sense strand
gcaagucaacugcuucuuc

SEQ ID NO: 1354885 - RNA, 19 nt, Homo sapiens
  misc_RNA (1)...(19): siRNA sense strand
caagucaacugcuucuucu

SEQ ID NO: 1354886 - RNA, 19 nt, Homo sapiens
  misc_RNA (1)...(19): siRNA sense strand
gaagugauggcaguagaaa

SEQ ID NO: 1354887 - RNA, 19 nt, Homo sapiens
  misc_RNA (1)...(19): siRNA sense strand
gaucuuccgaguccuuaaa

SEQ ID NO: 1354888 - RNA, 19 nt, Homo sapiens
  misc_RNA (1)...(19): siRNA sense strand
cgaccaguauaacaaggaa

SEQ ID NO: 1354889 - RNA, 19 nt, Homo sapiens
  misc_RNA (1)...(19): siRNA sense strand
gcuguacccugguuugaac

SEQ ID NO: 1354890 - RNA, 19 nt, Homo sapiens
  misc_RNA (1)...(19): siRNA sense strand
ggaucaccgaccaguauaa

SEQ ID NO: 1354891 - RNA, 19 nt, Homo sapiens
  misc_RNA (1)...(19): siRNA sense strand
ucaccgaccaguauaacaa

SEQ ID NO: 1354892 - RNA, 19 nt, Homo sapiens
  misc_RNA (1)...(19): siRNA sense strand
ccuguuggccauucuauug

SEQ ID NO: 1354893 - RNA, 19 nt, Homo sapiens
  misc_RNA (1)...(19): siRNA sense strand
guggaucaccgaccaguau

SEQ ID NO: 1354894 - RNA, 19 nt, Homo sapiens
  misc_RNA (1)...(19): siRNA sense strand
aagcguccaugaagugaug

SEQ ID NO: 1354895 - RNA, 19 nt, Homo sapiens
  misc_RNA (1)...(19): siRNA sense strand
uacccugguuugaacagua

SEQ ID NO: 1354896 - RNA, 19 nt, Homo sapiens
  misc_RNA (1)...(19): siRNA sense strand
aggaaagugaugacaagua

SEQ ID NO: 1354897 - RNA, 19 nt, Homo sapiens
  misc_RNA (1)...(19): siRNA sense strand
acaaggaaagugaugacaa

SEQ ID NO: 1354898 - RNA, 19 nt, Homo sapiens
  misc_RNA (1)...(19): siRNA sense strand
aguauaacaaggaaaguga

SEQ ID NO: 1354899 - RNA, 19 nt, Homo sapiens
  misc_RNA (1)...(19): siRNA sense strand
cuaccaagcaaggaagaaa

SEQ ID NO: 1354900 - RNA, 19 nt, Homo sapiens
  misc_RNA (1)...(19): siRNA sense strand
ugaagugauggcaguagaa

SEQ ID NO: 1354901 - RNA, 19 nt, Homo sapiens
  misc_RNA (1)...(19): siRNA sense strand
ucuaagcguccaugaagug

SEQ ID NO: 1354902 - RNA, 19 nt, Homo sapiens
  misc_RNA (1)...(19): siRNA sense strand
ggacccggcuucugaauaa

SEQ ID NO: 1354903 - RNA, 19 nt, Homo sapiens
  misc_RNA (1)...(19): siRNA sense strand
gaugaaagcucagugaaga

SEQ ID NO: 1354904 - RNA, 19 nt, Homo sapiens
  misc_RNA (1)...(19): siRNA sense strand
ggaagcggaugaugacaaa

SEQ ID NO: 1354905 - RNA, 19 nt, Homo sapiens
  misc_RNA (1)...(19): siRNA sense strand
gaggagagaucaucgacaa

SEQ ID NO: 1354906 - RNA, 19 nt, Homo sapiens
  misc_RNA (1)...(19): siRNA sense strand
ugaagaggcugaaggcaaa

SEQ ID NO: 1354907 - RNA, 19 nt, Homo sapiens
  misc_RNA (1)...(19): siRNA sense strand
gaaggaacaugaagagcau

SEQ ID NO: 1354908 - RNA, 19 nt, Homo sapiens
  misc_RNA (1)...(19): siRNA sense strand
ccaggaagaucaagaaagu

SEQ ID NO: 1354909 - RNA, 19 nt, Homo sapiens
  misc_RNA (1)...(19): siRNA sense strand
gaagaugcgucggaaacaa

SEQ ID NO: 1354910 - RNA, 19 nt, Homo sapiens
  misc_RNA (1)...(19): siRNA sense strand
ggauuaaguuuccagacaa

SEQ ID NO: 1354911 - RNA, 19 nt, Homo sapiens
  misc_RNA (1)...(19): siRNA sense strand
gcaguuauccguguuuaaa

SEQ ID NO: 1354912 - RNA, 19 nt, Homo sapiens
  misc_RNA (1)...(19): siRNA sense strand
gugaagugcuggccauauu

SEQ ID NO: 1354913 - RNA, 19 nt, Homo sapiens
  misc_RNA (1)...(19): siRNA sense strand
uaauacagauguguccaua

SEQ ID NO: 1354914 - RNA, 19 nt, Homo sapiens
  misc_RNA (1)...(19): siRNA sense strand
aaccaagaauugcggauua

SEQ ID NO: 1354915 - RNA, 19 nt, Homo sapiens
  misc_RNA (1)...(19): siRNA sense strand
gcacagacaacugccauaa

SEQ ID NO: 1354916 - RNA, 19 nt, Homo sapiens
  misc_RNA (1)...(19): siRNA sense strand
cuucaggaauuaacagaua

SEQ ID NO: 1354917 - RNA, 19 nt, Homo sapiens
  misc_RNA (1)...(19): siRNA sense strand
ccacaacacucuggcuauu

SEQ ID NO: 1354918 - RNA, 19 nt, Homo sapiens
  misc_RNA (1)...(19): siRNA sense strand
gcacaucugcuacaucaug

SEQ ID NO: 1354919 - RNA, 19 nt, Homo sapiens
  misc_RNA (1)...(19): siRNA sense strand
ccagagaaguucauggaau

SEQ ID NO: 1354920 - RNA, 19 nt, Homo sapiens
  misc_RNA (1)...(19): siRNA sense strand
ccauagcuguggucgauuu

SEQ ID NO: 1354921 - RNA, 19 nt, Homo sapiens
  misc_RNA (1)...(19): siRNA sense strand
ggaauuaacagauauagac

SEQ ID NO: 1354922 - RNA, 19 nt, Homo sapiens
  misc_RNA (1)...(19): siRNA sense strand
ugagaagguugacagacua

SEQ ID NO: 1354923 - RNA, 19 nt, Homo sapiens
  misc_RNA (1)...(19): siRNA sense strand
gaaucgaugugcuucuuca

SEQ ID NO: 1354924 - RNA, 19 nt, Homo sapiens
  misc_RNA (1)...(19): siRNA sense strand
ccacugagaaggaacauga

SEQ ID NO: 1354925 - RNA, 19 nt, Homo sapiens
  misc_RNA (1)...(19): siRNA sense strand
cgaggaagcuccaucaaaa

SEQ ID NO: 1354926 - RNA, 19 nt, Homo sapiens
  misc_RNA (1)...(19): siRNA sense strand
gaggagccauuggaugaaa

SEQ ID NO: 1354927 - RNA, 19 nt, Homo sapiens
  misc_RNA (1)...(19): siRNA sense strand
aauccgagcuggaccuaaa

SEQ ID NO: 1354928 - RNA, 19 nt, Homo sapiens
  misc_RNA (1)...(19): siRNA sense strand
acagacaacugccauaagu

SEQ ID NO: 1354929 - RNA, 19 nt, Homo sapiens
  misc_RNA (1)...(19): siRNA sense strand
cagagaaguucauggaauc

SEQ ID NO: 1354930 - RNA, 19 nt, Homo sapiens
  misc_RNA (1)...(19): siRNA sense strand
uuaaauaucugggugcaau

SEQ ID NO: 1354931 - RNA, 19 nt, Homo sapiens
  misc_RNA (1)...(19): siRNA sense strand
ccauaaguuuguugacauu

SEQ ID NO: 1354932 - RNA, 19 nt, Homo sapiens
  misc_RNA (1)...(19): siRNA sense strand
gaugauggagaaucuguuu

SEQ ID NO: 1354933 - RNA, 19 nt, Homo sapiens
  misc_RNA (1)...(19): siRNA sense strand
ucgauuugcuucaggaauu

SEQ ID NO: 1354934 - RNA, 19 nt, Homo sapiens
  misc_RNA (1)...(19): siRNA sense strand
cgauuugcuucaggaauua

SEQ ID NO: 1354935 - RNA, 19 nt, Homo sapiens
  misc_RNA (1)...(19): siRNA sense strand
gcagauggcguccacaaca

SEQ ID NO: 1354936 - RNA, 19 nt, Homo sapiens
  misc_RNA (1)...(19): siRNA sense strand
ggagagaucaucgacaaug

SEQ ID NO: 1354937 - RNA, 19 nt, Homo sapiens
  misc_RNA (1)...(19): siRNA sense strand
ggagcuggauggaaucgau

SEQ ID NO: 1354938 - RNA, 19 nt, Homo sapiens
  misc_RNA (1)...(19): siRNA sense strand
ccauauugcuccaggacaa

SEQ ID NO: 1354939 - RNA, 19 nt, Homo sapiens
  misc_RNA (1)...(19): siRNA sense strand
gcgaggaagcuccaucaaa

SEQ ID NO: 1354940 - RNA, 19 nt, Homo sapiens
  misc_RNA (1)...(19): siRNA sense strand
gaagguugacagacuaaug

SEQ ID NO: 1354941 - RNA, 19 nt, Homo sapiens
  misc_RNA (1)...(19): siRNA sense strand
cagcaguuauccguguuua

SEQ ID NO: 1354942 - RNA, 19 nt, Homo sapiens
  misc_RNA (1)...(19): siRNA sense strand
gauuaaguuuccagacaau

SEQ ID NO: 1354943 - RNA, 19 nt, Homo sapiens
  misc_RNA (1)...(19): siRNA sense strand
gaucugcaaugccaauguc

SEQ ID NO: 1354944 - RNA, 19 nt, Homo sapiens
  misc_RNA (1)...(19): siRNA sense strand
gcagauuauugacagagau

SEQ ID NO: 1354945 - RNA, 19 nt, Homo sapiens
  misc_RNA (1)...(19): siRNA sense strand
gggaaccacugagaaggaa

SEQ ID NO: 1354946 - RNA, 19 nt, Homo sapiens
  misc_RNA (1)...(19): siRNA sense strand
ggccugagauguguacaga

SEQ ID NO: 1354947 - RNA, 19 nt, Homo sapiens
  misc_RNA (1)...(19): siRNA sense strand
gagcuggaccuaaaugaca

SEQ ID NO: 1354948 - RNA, 19 nt, Homo sapiens
  misc_RNA (1)...(19): siRNA sense strand
ggcauaucaucaaggagua

SEQ ID NO: 1354949 - RNA, 19 nt, Homo sapiens
  misc_RNA (1)...(19): siRNA sense strand
ucaggcauaucaucaagga

SEQ ID NO: 1354950 - RNA, 19 nt, Homo sapiens
  misc_RNA (1)...(19): siRNA sense strand
cggauuaaguuuccagaca

SEQ ID NO: 1354951 - RNA, 19 nt, Homo sapiens
  misc_RNA (1)...(19): siRNA sense strand
ccagaggguucaccagauc

SEQ ID NO: 1354952 - RNA, 19 nt, Homo sapiens
  misc_RNA (1)...(19): siRNA sense strand
caaugcagguggcggacaa

SEQ ID NO: 1354953 - RNA, 19 nt, Homo sapiens
  misc_RNA (1)...(19): siRNA sense strand
guccauagcuguggucgau

SEQ ID NO: 1354954 - RNA, 19 nt, Homo sapiens
  misc_RNA (1)...(19): siRNA sense strand
gccauaaguuuguugacau

SEQ ID NO: 1354955 - RNA, 19 nt, Homo sapiens
  misc_RNA (1)...(19): siRNA sense strand
gugagaagguugacagacu

SEQ ID NO: 1354956 - RNA, 19 nt, Homo sapiens
  misc_RNA (1)...(19): siRNA sense strand
gaauugcggauuaaguuuc

SEQ ID NO: 1354957 - RNA, 19 nt, Homo sapiens
  misc_RNA (1)...(19): siRNA sense strand
gcgagggucuucagcugau

SEQ ID NO: 1354958 - RNA, 19 nt, Homo sapiens
  misc_RNA (1)...(19): siRNA sense strand
gggaagaggaagaggaaga

SEQ ID NO: 1354959 - RNA, 19 nt, Homo sapiens
  misc_RNA (1)...(19): siRNA sense strand
gagaagguugacagacuaa

SEQ ID NO: 1354960 - RNA, 19 nt, Homo sapiens
  misc_RNA (1)...(19): siRNA sense strand
ggaugagucugugaaagag

SEQ ID NO: 1354961 - RNA, 19 nt, Homo sapiens
  misc_RNA (1)...(19): siRNA sense strand
gaagaggaggagcagaaga

SEQ ID NO: 1354962 - RNA, 19 nt, Homo sapiens
  misc_RNA (1)...(19): siRNA sense strand
ggaagaggaggagccauug

SEQ ID NO: 1354963 - RNA, 19 nt, Homo sapiens
  misc_RNA (1)...(19): siRNA sense strand
ugaaagcucagugaagaaa

SEQ ID NO: 1354964 - RNA, 19 nt, Homo sapiens
  misc_RNA (1)...(19): siRNA sense strand
caaggaguaugcagagaac

SEQ ID NO: 1354965 - RNA, 19 nt, Homo sapiens
  misc_RNA (1)...(19): siRNA sense strand
gagcagugcccugaaagug

SEQ ID NO: 1354966 - RNA, 19 nt, Homo sapiens
  misc_RNA (1)...(19): siRNA sense strand
ggacgugggcgaacuucug

SEQ ID NO: 1354967 - RNA, 19 nt, Homo sapiens
  misc_RNA (1)...(19): siRNA sense strand
aagaauugcggauuaaguu

SEQ ID NO: 1354968 - RNA, 19 nt, Homo sapiens
  misc_RNA (1)...(19): siRNA sense strand
gcagguggcggacaagaag

SEQ ID NO: 1354969 - RNA, 19 nt, Homo sapiens
  misc_RNA (1)...(19): siRNA sense strand
cagacaauccagagaaguu

SEQ ID NO: 1354970 - RNA, 19 nt, Homo sapiens
  misc_RNA (1)...(19): siRNA sense strand
ggaggaagcggaugaugac

SEQ ID NO: 1354971 - RNA, 19 nt, Homo sapiens
  misc_RNA (1)...(19): siRNA sense strand
gccagaggguucaccagau

SEQ ID NO: 1354972 - RNA, 19 nt, Homo sapiens
  misc_RNA (1)...(19): siRNA sense strand
ccggagcagugcccugaaa

SEQ ID NO: 1354973 - RNA, 19 nt, Homo sapiens
  misc_RNA (1)...(19): siRNA sense strand
caagaauugcggauuaagu

SEQ ID NO: 1354974 - RNA, 19 nt, Homo sapiens
  misc_RNA (1)...(19): siRNA sense strand
ucaaggaguaugcagagaa

SEQ ID NO: 1354975 - RNA, 19 nt, Homo sapiens
  misc_RNA (1)...(19): siRNA sense strand
ugauggagaaucuguuuga

SEQ ID NO: 1354976 - RNA, 19 nt, Homo sapiens
  misc_RNA (1)...(19): siRNA sense strand
agcaggagaugauggagaa

SEQ ID NO: 1354977 - RNA, 19 nt, Homo sapiens
  misc_RNA (1)...(19): siRNA sense strand
gcucggacacgauaauaca

SEQ ID NO: 1354978 - RNA, 19 nt, Homo sapiens
  misc_RNA (1)...(19): siRNA sense strand
ugggcgaacuucugagcua

SEQ ID NO: 1354979 - RNA, 19 nt, Homo sapiens
  misc_RNA (1)...(19): siRNA sense strand
ggaugaaagcucagugaag

SEQ ID NO: 1354980 - RNA, 19 nt, Homo sapiens
  misc_RNA (1)...(19): siRNA sense strand
gauggagaaucuguuugau

SEQ ID NO: 1354981 - RNA, 19 nt, Homo sapiens
  misc_RNA (1)...(19): siRNA sense strand
gcacugcugguacagaauc

SEQ ID NO: 1354982 - RNA, 19 nt, Homo sapiens
  misc_RNA (1)...(19): siRNA sense strand
ggagcugaaugcuguacag

SEQ ID NO: 1354983 - RNA, 19 nt, Homo sapiens
  misc_RNA (1)...(19): siRNA sense strand
gaagcuccaucaaaauugu

SEQ ID NO: 1354984 - RNA, 19 nt, Homo sapiens
  misc_RNA (1)...(19): siRNA sense strand
gaaccacugagaaggaaca

SEQ ID NO: 1354985 - RNA, 19 nt, Homo sapiens
  misc_RNA (1)...(19): siRNA sense strand
ugacauucuuggcuuacga

SEQ ID NO: 1354986 - RNA, 19 nt, Homo sapiens
  misc_RNA (1)...(19): siRNA sense strand
ccucugcuccugucuaaug

SEQ ID NO: 1354987 - RNA, 19 nt, Homo sapiens
  misc_RNA (1)...(19): siRNA sense strand
gggaagaagaaaugacugu

SEQ ID NO: 1354988 - RNA, 19 nt, Homo sapiens
  misc_RNA (1)...(19): siRNA sense strand
gcagaagaugcgucggaaa

SEQ ID NO: 1354989 - RNA, 19 nt, Homo sapiens
  misc_RNA (1)...(19): siRNA sense strand
gagugaagagggagcagaa

SEQ ID NO: 1354990 - RNA, 19 nt, Homo sapiens
  misc_RNA (1)...(19): siRNA sense strand
uggaugagucugugaaaga

SEQ ID NO: 1354991 - RNA, 19 nt, Homo sapiens
  misc_RNA (1)...(19): siRNA sense strand
acaaacugguacucgagaa

SEQ ID NO: 1354992 - RNA, 19 nt, Homo sapiens
  misc_RNA (1)...(19): siRNA sense strand
aggaggagccauuggauga

SEQ ID NO: 1354993 - RNA, 19 nt, Homo sapiens
  misc_RNA (1)...(19): siRNA sense strand
ucccucugcuccugucuaa

SEQ ID NO: 1354994 - RNA, 19 nt, Homo sapiens
  misc_RNA (1)...(19): siRNA sense strand
cgucggaaacaaacuggua

SEQ ID NO: 1354995 - RNA, 19 nt, Homo sapiens
  misc_RNA (1)...(19): siRNA sense strand
gaagagcaugucuguucga

SEQ ID NO: 1354996 - RNA, 19 nt, Homo sapiens
  misc_RNA (1)...(19): siRNA sense strand
accaagaauugcggauuaa

SEQ ID NO: 1354997 - RNA, 19 nt, Homo sapiens
  misc_RNA (1)...(19): siRNA sense strand
uggaaucgaugugcuucuu

SEQ ID NO: 1354998 - RNA, 19 nt, Homo sapiens
  misc_RNA (1)...(19): siRNA sense strand
auacagauguguccauagc

SEQ ID NO: 1354999 - RNA, 19 nt, Homo sapiens
  misc_RNA (1)...(19): siRNA sense strand
ggaggagccauuggaugaa

SEQ ID NO: 1355000 - RNA, 19 nt, Homo sapiens
  misc_RNA (1)...(19): siRNA sense strand
ggauggaaucgaugugcuu

SEQ ID NO: 1355001 - RNA, 19 nt, Homo sapiens
  misc_RNA (1)...(19): siRNA sense strand
uguugacauucuuggcuua

SEQ ID NO: 1355002 - RNA, 19 nt, Homo sapiens
  misc_RNA (1)...(19): siRNA sense strand
gaagaaaucucacuaauuc

SEQ ID NO: 1355003 - RNA, 19 nt, Homo sapiens
  misc_RNA (1)...(19): siRNA sense strand
gaagaagaaaucucacuaa

SEQ ID NO: 1355004 - RNA, 19 nt, Homo sapiens
  misc_RNA (1)...(19): siRNA sense strand
aggaguaccuggaguauaa

SEQ ID NO: 1355005 - RNA, 19 nt, Homo sapiens
  misc_RNA (1)...(19): siRNA sense strand
gaacagaagaagaagaaau

SEQ ID NO: 1355006 - RNA, 19 nt, Homo sapiens
  misc_RNA (1)...(19): siRNA sense strand
gcggcacgcugcuaaguuu

SEQ ID NO: 1355007 - RNA, 19 nt, Homo sapiens
  misc_RNA (1)...(19): siRNA sense strand
uagcugcucuuucuucuug

SEQ ID NO: 1355008 - RNA, 19 nt, Homo sapiens
  misc_RNA (1)...(19): siRNA sense strand
ggccagaacugaagcagau

SEQ ID NO: 1355009 - RNA, 19 nt, Homo sapiens
  misc_RNA (1)...(19): siRNA sense strand
gguuagaguucacacuuga

SEQ ID NO: 1355010 - RNA, 19 nt, Homo sapiens
  misc_RNA (1)...(19): siRNA sense strand
ucacagggcugcugauggu

SEQ ID NO: 1355011 - RNA, 19 nt, Homo sapiens
  misc_RNA (1)...(19): siRNA sense strand
gagaggaguaccuggagua

SEQ ID NO: 1355012 - RNA, 19 nt, Homo sapiens
  misc_RNA (1)...(19): siRNA sense strand
uacaguagcugcucuuucu

SEQ ID NO: 1355013 - RNA, 19 nt, Homo sapiens
  misc_RNA (1)...(19): siRNA sense strand
guacaugugcucccuguca

SEQ ID NO: 1355014 - RNA, 19 nt, Homo sapiens
  misc_RNA (1)...(19): siRNA sense strand
ccagaacugaagcagauua

SEQ ID NO: 1355015 - RNA, 19 nt, Homo sapiens
  misc_RNA (1)...(19): siRNA sense strand
acagcuggcuccaauuuca

SEQ ID NO: 1355016 - RNA, 19 nt, Homo sapiens
  misc_RNA (1)...(19): siRNA sense strand
guuuacagcuggcuccaau

SEQ ID NO: 1355017 - RNA, 19 nt, Homo sapiens
  misc_RNA (1)...(19): siRNA sense strand
agaagaagaagaaaucuca

SEQ ID NO: 1355018 - RNA, 19 nt, Homo sapiens
  misc_RNA (1)...(19): siRNA sense strand
aaucacagccuggaguaua

SEQ ID NO: 1355019 - RNA, 19 nt, Homo sapiens
  misc_RNA (1)...(19): siRNA sense strand
gguuucggcauccuucuua

SEQ ID NO: 1355020 - RNA, 19 nt, Homo sapiens
  misc_RNA (1)...(19): siRNA sense strand
uuacagcuggcuccaauuu

SEQ ID NO: 1355021 - RNA, 19 nt, Homo sapiens
  misc_RNA (1)...(19): siRNA sense strand
ccacgggccugccuuucau

SEQ ID NO: 1355022 - RNA, 19 nt, Homo sapiens
  misc_RNA (1)...(19): siRNA sense strand
ugucauuguuccacuauuc

SEQ ID NO: 1355023 - RNA, 19 nt, Homo sapiens
  misc_RNA (1)...(19): siRNA sense strand
gaacugaagcagauuaccu

SEQ ID NO: 1355024 - RNA, 19 nt, Homo sapiens
  misc_RNA (1)...(19): siRNA sense strand
gaggaguaccuggaguaua

SEQ ID NO: 1355025 - RNA, 19 nt, Homo sapiens
  misc_RNA (1)...(19): siRNA sense strand
agaagaagaaaucucacua

SEQ ID NO: 1355026 - RNA, 19 nt, Homo sapiens
  misc_RNA (1)...(19): siRNA sense strand
ugaaucacagccuggagua

SEQ ID NO: 1355027 - RNA, 19 nt, Homo sapiens
  misc_RNA (1)...(19): siRNA sense strand
ucgaacagaagaagaagaa

SEQ ID NO: 1355028 - RNA, 19 nt, Homo sapiens
  misc_RNA (1)...(19): siRNA sense strand
gaugguggucuucggagaa

SEQ ID NO: 1355029 - RNA, 19 nt, Homo sapiens
  misc_RNA (1)...(19): siRNA sense strand
uauuggaacucaggugaug

SEQ ID NO: 1355030 - RNA, 19 nt, Homo sapiens
  misc_RNA (1)...(19): siRNA sense strand
cgaucgaacagaagaagaa

SEQ ID NO: 1355031 - RNA, 19 nt, Homo sapiens
  misc_RNA (1)...(19): siRNA sense strand
cagccuggaguauacagua

SEQ ID NO: 1355032 - RNA, 19 nt, Homo sapiens
  misc_RNA (1)...(19): siRNA sense strand
cucaggugaugcuguguaa

SEQ ID NO: 1355033 - RNA, 19 nt, Homo sapiens
  misc_RNA (1)...(19): siRNA sense strand
gaaaucucacuaauucacu

SEQ ID NO: 1355034 - RNA, 19 nt, Homo sapiens
  misc_RNA (1)...(19): siRNA sense strand
aaaagucuguccuuggauu

SEQ ID NO: 1355035 - RNA, 19 nt, Homo sapiens
  misc_RNA (1)...(19): siRNA sense strand
caucugcggcgucagcuau

SEQ ID NO: 1355036 - RNA, 19 nt, Homo sapiens
  misc_RNA (1)...(19): siRNA sense strand
ggugaccaguggaguguac

SEQ ID NO: 1355037 - RNA, 19 nt, Homo sapiens
  misc_RNA (1)...(19): siRNA sense strand
ccgccucgcuaccagauag

SEQ ID NO: 1355038 - RNA, 19 nt, Homo sapiens
  misc_RNA (1)...(19): siRNA sense strand
uaccuggaguauaagaaga

SEQ ID NO: 1355039 - RNA, 19 nt, Homo sapiens
  misc_RNA (1)...(19): siRNA sense strand
gcucuuucuucuugguuag

SEQ ID NO: 1355040 - RNA, 19 nt, Homo sapiens
  misc_RNA (1)...(19): siRNA sense strand
guaccuggaguauaagaag

SEQ ID NO: 1355041 - RNA, 19 nt, Homo sapiens
  misc_RNA (1)...(19): siRNA sense strand
ggaguguacgcuugguuuc

SEQ ID NO: 1355042 - RNA, 19 nt, Homo sapiens
  misc_RNA (1)...(19): siRNA sense strand
gcagauuaccuggcucagu

SEQ ID NO: 1355043 - RNA, 19 nt, Homo sapiens
  misc_RNA (1)...(19): siRNA sense strand
cuuccgcgaucgaacagaa

SEQ ID NO: 1355044 - RNA, 19 nt, Homo sapiens
  misc_RNA (1)...(19): siRNA sense strand
ugugcucccugucauuguu

SEQ ID NO: 1355045 - RNA, 19 nt, Homo sapiens
  misc_RNA (1)...(19): siRNA sense strand
ugguuagaguucacacuug

SEQ ID NO: 1355046 - RNA, 19 nt, Homo sapiens
  misc_RNA (1)...(19): siRNA sense strand
aacagaagaagaagaaauc

SEQ ID NO: 1355047 - RNA, 19 nt, Homo sapiens
  misc_RNA (1)...(19): siRNA sense strand
gaaucacagccuggaguau

SEQ ID NO: 1355048 - RNA, 19 nt, Homo sapiens
  misc_RNA (1)...(19): siRNA sense strand
gacaguguggcgauucuuc

SEQ ID NO: 1355049 - RNA, 19 nt, Homo sapiens
  misc_RNA (1)...(19): siRNA sense strand
guccuuggauuccuuucuc

SEQ ID NO: 1355050 - RNA, 19 nt, Homo sapiens
  misc_RNA (1)...(19): siRNA sense strand
cuucuuacgucgggugguu

SEQ ID NO: 1355051 - RNA, 19 nt, Homo sapiens
  misc_RNA (1)...(19): siRNA sense strand
caugugcucccugucauug

SEQ ID NO: 1355052 - RNA, 19 nt, Homo sapiens
  misc_RNA (1)...(19): siRNA sense strand
gaagaaaucucacuaauuc

SEQ ID NO: 1355053 - RNA, 19 nt, Homo sapiens
  misc_RNA (1)...(19): siRNA sense strand
gaagaagaaaucucacuaa

SEQ ID NO: 1355054 - RNA, 19 nt, Homo sapiens
  misc_RNA (1)...(19): siRNA sense strand
aggaguaccuggaguauaa

SEQ ID NO: 1355055 - RNA, 19 nt, Homo sapiens
  misc_RNA (1)...(19): siRNA sense strand
gaacagaagaagaagaaau

SEQ ID NO: 1355056 - RNA, 19 nt, Homo sapiens
  misc_RNA (1)...(19): siRNA sense strand
uagcugcucuuucuucuug

SEQ ID NO: 1355057 - RNA, 19 nt, Homo sapiens
  misc_RNA (1)...(19): siRNA sense strand
ggccagaacugaagcagau

SEQ ID NO: 1355058 - RNA, 19 nt, Homo sapiens
  misc_RNA (1)...(19): siRNA sense strand
gguuagaguucacacuuga

SEQ ID NO: 1355059 - RNA, 19 nt, Homo sapiens
  misc_RNA (1)...(19): siRNA sense strand
ucacagggcugcugauggu

SEQ ID NO: 1355060 - RNA, 19 nt, Homo sapiens
  misc_RNA (1)...(19): siRNA sense strand
gagaggaguaccuggagua

SEQ ID NO: 1355061 - RNA, 19 nt, Homo sapiens
  misc_RNA (1)...(19): siRNA sense strand
uacaguagcugcucuuucu

SEQ ID NO: 1355062 - RNA, 19 nt, Homo sapiens
  misc_RNA (1)...(19): siRNA sense strand
ccagaacugaagcagauua

SEQ ID NO: 1355063 - RNA, 19 nt, Homo sapiens
  misc_RNA (1)...(19): siRNA sense strand
acagcuggcuccaauuuca

SEQ ID NO: 1355064 - RNA, 19 nt, Homo sapiens
  misc_RNA (1)...(19): siRNA sense strand
guuuacagcuggcuccaau

SEQ ID NO: 1355065 - RNA, 19 nt, Homo sapiens
  misc_RNA (1)...(19): siRNA sense strand
agaagaagaagaaaucuca

SEQ ID NO: 1355066 - RNA, 19 nt, Homo sapiens
  misc_RNA (1)...(19): siRNA sense strand
aaucacagccuggaguaua

SEQ ID NO: 1355067 - RNA, 19 nt, Homo sapiens
  misc_RNA (1)...(19): siRNA sense strand
gguuucggcauccuucuua

SEQ ID NO: 1355068 - RNA, 19 nt, Homo sapiens
  misc_RNA (1)...(19): siRNA sense strand
uuacagcuggcuccaauuu

SEQ ID NO: 1355069 - RNA, 19 nt, Homo sapiens
  misc_RNA (1)...(19): siRNA sense strand
ccacgggccugccuuucau

SEQ ID NO: 1355070 - RNA, 19 nt, Homo sapiens
  misc_RNA (1)...(19): siRNA sense strand
ugucauuguuccacuauuc

SEQ ID NO: 1355071 - RNA, 19 nt, Homo sapiens
  misc_RNA (1)...(19): siRNA sense strand
gaacugaagcagauuaccu

SEQ ID NO: 1355072 - RNA, 19 nt, Homo sapiens
  misc_RNA (1)...(19): siRNA sense strand
gaggaguaccuggaguaua

SEQ ID NO: 1355073 - RNA, 19 nt, Homo sapiens
  misc_RNA (1)...(19): siRNA sense strand
agaagaagaaaucucacua

SEQ ID NO: 1355074 - RNA, 19 nt, Homo sapiens
  misc_RNA (1)...(19): siRNA sense strand
ugaaucacagccuggagua

SEQ ID NO: 1355075 - RNA, 19 nt, Homo sapiens
  misc_RNA (1)...(19): siRNA sense strand
ucgaacagaagaagaagaa

SEQ ID NO: 1355076 - RNA, 19 nt, Homo sapiens
  misc_RNA (1)...(19): siRNA sense strand
gaugguggucuucggagaa

SEQ ID NO: 1355077 - RNA, 19 nt, Homo sapiens
  misc_RNA (1)...(19): siRNA sense strand
uauuggaacucaggugaug

SEQ ID NO: 1355078 - RNA, 19 nt, Homo sapiens
  misc_RNA (1)...(19): siRNA sense strand
cgaucgaacagaagaagaa

SEQ ID NO: 1355079 - RNA, 19 nt, Homo sapiens
  misc_RNA (1)...(19): siRNA sense strand
cagccuggaguauacagua

SEQ ID NO: 1355080 - RNA, 19 nt, Homo sapiens
  misc_RNA (1)...(19): siRNA sense strand
cucaggugaugcuguguaa

SEQ ID NO: 1355081 - RNA, 19 nt, Homo sapiens
  misc_RNA (1)...(19): siRNA sense strand
gaaaucucacuaauucacu

SEQ ID NO: 1355082 - RNA, 19 nt, Homo sapiens
  misc_RNA (1)...(19): siRNA sense strand
ggugaccaguggaguguac

SEQ ID NO: 1355083 - RNA, 19 nt, Homo sapiens
  misc_RNA (1)...(19): siRNA sense strand
aaaagucuguccuuggauu

SEQ ID NO: 1355084 - RNA, 19 nt, Homo sapiens
  misc_RNA (1)...(19): siRNA sense strand
caucugcggcgucagcuau

SEQ ID NO: 1355085 - RNA, 19 nt, Homo sapiens
  misc_RNA (1)...(19): siRNA sense strand
uaccuggaguauaagaaga

SEQ ID NO: 1355086 - RNA, 19 nt, Homo sapiens
  misc_RNA (1)...(19): siRNA sense strand
gcucuuucuucuugguuag

SEQ ID NO: 1355087 - RNA, 19 nt, Homo sapiens
  misc_RNA (1)...(19): siRNA sense strand
guaccuggaguauaagaag

SEQ ID NO: 1355088 - RNA, 19 nt, Homo sapiens
  misc_RNA (1)...(19): siRNA sense strand
ggaguguacgcuugguuuc

SEQ ID NO: 1355089 - RNA, 19 nt, Homo sapiens
  misc_RNA (1)...(19): siRNA sense strand
gcagauuaccuggcucagu

SEQ ID NO: 1355090 - RNA, 19 nt, Homo sapiens
  misc_RNA (1)...(19): siRNA sense strand
cuuccgcgaucgaacagaa

SEQ ID NO: 1355091 - RNA, 19 nt, Homo sapiens
  misc_RNA (1)...(19): siRNA sense strand
ugguuagaguucacacuug

SEQ ID NO: 1355092 - RNA, 19 nt, Homo sapiens
  misc_RNA (1)...(19): siRNA sense strand
aacagaagaagaagaaauc

SEQ ID NO: 1355093 - RNA, 19 nt, Homo sapiens
  misc_RNA (1)...(19): siRNA sense strand
gacaguguggcgauucuuc

SEQ ID NO: 1355094 - RNA, 19 nt, Homo sapiens
  misc_RNA (1)...(19): siRNA sense strand
gaaucacagccuggaguau

SEQ ID NO: 1355095 - RNA, 19 nt, Homo sapiens
  misc_RNA (1)...(19): siRNA sense strand
cuucuuacgucgggugguu

SEQ ID NO: 1355096 - RNA, 19 nt, Homo sapiens
  misc_RNA (1)...(19): siRNA sense strand
guccuuggauuccuuucuc

SEQ ID NO: 1355097 - RNA, 19 nt, Homo sapiens
  misc_RNA (1)...(19): siRNA sense strand
caacauaguuugucauuca

SEQ ID NO: 1355098 - RNA, 19 nt, Homo sapiens
  misc_RNA (1)...(19): siRNA sense strand
gcaggaugcugucaacaua

SEQ ID NO: 1355099 - RNA, 19 nt, Homo sapiens
  misc_RNA (1)...(19): siRNA sense strand
ccaaggaggaggaugauua

SEQ ID NO: 1355100 - RNA, 19 nt, Homo sapiens
  misc_RNA (1)...(19): siRNA sense strand
ggacaacagugaguauaug

SEQ ID NO: 1355101 - RNA, 19 nt, Homo sapiens
  misc_RNA (1)...(19): siRNA sense strand
ggaaagcacuauggugugu

SEQ ID NO: 1355102 - RNA, 19 nt, Homo sapiens
  misc_RNA (1)...(19): siRNA sense strand
cuaaacgccucaagaagga

SEQ ID NO: 1355103 - RNA, 19 nt, Homo sapiens
  misc_RNA (1)...(19): siRNA sense strand
gagaacaacgugggccuua

SEQ ID NO: 1355104 - RNA, 19 nt, Homo sapiens
  misc_RNA (1)...(19): siRNA sense strand
agaaggaucuggugaaacu

SEQ ID NO: 1355105 - RNA, 19 nt, Homo sapiens
  misc_RNA (1)...(19): siRNA sense strand
ugagaaggaucuggugaaa

SEQ ID NO: 1355106 - RNA, 19 nt, Homo sapiens
  misc_RNA (1)...(19): siRNA sense strand
aagaggaggugaacacaga

SEQ ID NO: 1355107 - RNA, 19 nt, Homo sapiens
  misc_RNA (1)...(19): siRNA sense strand
gcagcaacccugagaacaa

SEQ ID NO: 1355108 - RNA, 19 nt, Homo sapiens
  misc_RNA (1)...(19): siRNA sense strand
gaaggagaaaguaaauguu

SEQ ID NO: 1355109 - RNA, 19 nt, Homo sapiens
  misc_RNA (1)...(19): siRNA sense strand
gcucagcuauggacacauc

SEQ ID NO: 1355110 - RNA, 19 nt, Homo sapiens
  misc_RNA (1)...(19): siRNA sense strand
gaacaacgugggccuuauc

SEQ ID NO: 1355111 - RNA, 19 nt, Homo sapiens
  misc_RNA (1)...(19): siRNA sense strand
gccagugacuuugaauuug

SEQ ID NO: 1355112 - RNA, 19 nt, Homo sapiens
  misc_RNA (1)...(19): siRNA sense strand
ucaagaaggagaaaguaaa

SEQ ID NO: 1355113 - RNA, 19 nt, Homo sapiens
  misc_RNA (1)...(19): siRNA sense strand
caagaaggagaaaguaaau

SEQ ID NO: 1355114 - RNA, 19 nt, Homo sapiens
  misc_RNA (1)...(19): siRNA sense strand
gcggaauggagacuucuua

SEQ ID NO: 1355115 - RNA, 19 nt, Homo sapiens
  misc_RNA (1)...(19): siRNA sense strand
caacgugggccuuaucaca

SEQ ID NO: 1355116 - RNA, 19 nt, Homo sapiens
  misc_RNA (1)...(19): siRNA sense strand
guucucaucuggugacagu

SEQ ID NO: 1355117 - RNA, 19 nt, Homo sapiens
  misc_RNA (1)...(19): siRNA sense strand
caagcuacauacuguccaa

SEQ ID NO: 1355118 - RNA, 19 nt, Homo sapiens
  misc_RNA (1)...(19): siRNA sense strand
gcgcaucauugccuuugug

SEQ ID NO: 1355119 - RNA, 19 nt, Homo sapiens
  misc_RNA (1)...(19): siRNA sense strand
ccagugacuuugaauuugg

SEQ ID NO: 1355120 - RNA, 19 nt, Homo sapiens
  misc_RNA (1)...(19): siRNA sense strand
ucucaucaguucuccgauu

SEQ ID NO: 1355121 - RNA, 19 nt, Homo sapiens
  misc_RNA (1)...(19): siRNA sense strand
uuaucacacuggcuaauga

SEQ ID NO: 1355122 - RNA, 19 nt, Homo sapiens
  misc_RNA (1)...(19): siRNA sense strand
uguccaagcuacauacugu

SEQ ID NO: 1355123 - RNA, 19 nt, Homo sapiens
  misc_RNA (1)...(19): siRNA sense strand
gaagcccaguggaggacaa

SEQ ID NO: 1355124 - RNA, 19 nt, Homo sapiens
  misc_RNA (1)...(19): siRNA sense strand
ggaggacaaugagaaggau

SEQ ID NO: 1355125 - RNA, 19 nt, Homo sapiens
  misc_RNA (1)...(19): siRNA sense strand
cgacaaggcaagaaucaca

SEQ ID NO: 1355126 - RNA, 19 nt, Homo sapiens
  misc_RNA (1)...(19): siRNA sense strand
gacgaugcccugcugaaga

SEQ ID NO: 1355127 - RNA, 19 nt, Homo sapiens
  misc_RNA (1)...(19): siRNA sense strand
ugacuuugaauuuggagua

SEQ ID NO: 1355128 - RNA, 19 nt, Homo sapiens
  misc_RNA (1)...(19): siRNA sense strand
gcaccgacaaggcaagaau

SEQ ID NO: 1355129 - RNA, 19 nt, Homo sapiens
  misc_RNA (1)...(19): siRNA sense strand
agaaggagaaaguaaaugu

SEQ ID NO: 1355130 - RNA, 19 nt, Homo sapiens
  misc_RNA (1)...(19): siRNA sense strand
aggcaagaaucacaagaug

SEQ ID NO: 1355131 - RNA, 19 nt, Homo sapiens
  misc_RNA (1)...(19): siRNA sense strand
gugaguauaugcggaaugg

SEQ ID NO: 1355132 - RNA, 19 nt, Homo sapiens
  misc_RNA (1)...(19): siRNA sense strand
aggagaaaguaaauguuga

SEQ ID NO: 1355133 - RNA, 19 nt, Homo sapiens
  misc_RNA (1)...(19): siRNA sense strand
gaugcugucaacauaguuu

SEQ ID NO: 1355134 - RNA, 19 nt, Homo sapiens
  misc_RNA (1)...(19): siRNA sense strand
ccaaggacggcaagaagga

SEQ ID NO: 1355135 - RNA, 19 nt, Homo sapiens
  misc_RNA (1)...(19): siRNA sense strand
cacacuggcuaaugacugu

SEQ ID NO: 1355136 - RNA, 19 nt, Homo sapiens
  misc_RNA (1)...(19): siRNA sense strand
cucaucaguucuccgauuu

SEQ ID NO: 1355137 - RNA, 19 nt, Homo sapiens
  misc_RNA (1)...(19): siRNA sense strand
aaagcacuauggugugugu

SEQ ID NO: 1355138 - RNA, 19 nt, Homo sapiens
  misc_RNA (1)...(19): siRNA sense strand
uggcuaaacgccucaagaa

SEQ ID NO: 1355139 - RNA, 19 nt, Homo sapiens
  misc_RNA (1)...(19): siRNA sense strand
ugccagugacuuugaauuu

SEQ ID NO: 1355140 - RNA, 19 nt, Homo sapiens
  misc_RNA (1)...(19): siRNA sense strand
aaggagaaaguaaauguug

SEQ ID NO: 1355141 - RNA, 19 nt, Homo sapiens
  misc_RNA (1)...(19): siRNA sense strand
cagcaacccugagaacaac

SEQ ID NO: 1355142 - RNA, 19 nt, Homo sapiens
  misc_RNA (1)...(19): siRNA sense strand
ggcggaaucagcagacauu

SEQ ID NO: 1355143 - RNA, 19 nt, Homo sapiens
  misc_RNA (1)...(19): siRNA sense strand
gaggaggugaacacagaaa

SEQ ID NO: 1355144 - RNA, 19 nt, Homo sapiens
  misc_RNA (1)...(19): siRNA sense strand
acgaugcccugcugaagau

SEQ ID NO: 1355145 - RNA, 19 nt, Homo sapiens
  misc_RNA (1)...(19): siRNA sense strand
cagccaaggaggaggauga

SEQ ID NO: 1355146 - RNA, 19 nt, Homo sapiens
  misc_RNA (1)...(19): siRNA sense strand
gucaacauaguuugucauu

SEQ ID NO: 1355147 - RNA, 19 nt, Homo sapiens
  misc_RNA (1)...(19): siRNA sense strand
ggaagaggaggugaacaca

SEQ ID NO: 1355148 - RNA, 19 nt, Homo sapiens
  misc_RNA (1)...(19): siRNA sense strand
gcccaguggaggacaauga

SEQ ID NO: 1355149 - RNA, 19 nt, Homo sapiens
  misc_RNA (1)...(19): siRNA sense strand
gacaaggcaagaaucacaa

SEQ ID NO: 1355150 - RNA, 19 nt, Homo sapiens
  misc_RNA (1)...(19): siRNA sense strand
ugacagccuuuguaaacac

SEQ ID NO: 1355151 - RNA, 19 nt, Homo sapiens
  misc_RNA (1)...(19): siRNA sense strand
caaggaggaggaugauuac

SEQ ID NO: 1355152 - RNA, 19 nt, Homo sapiens
  misc_RNA (1)...(19): siRNA sense strand
cacguugaauggcaaagau

SEQ ID NO: 1355153 - RNA, 19 nt, Homo sapiens
  misc_RNA (1)...(19): siRNA sense strand
agaacaacgugggccuuau

SEQ ID NO: 1355154 - RNA, 19 nt, Homo sapiens
  misc_RNA (1)...(19): siRNA sense strand
ggagaaaguaaauguugac

SEQ ID NO: 1355155 - RNA, 19 nt, Homo sapiens
  misc_RNA (1)...(19): siRNA sense strand
ccucaagaaggagaaagua

SEQ ID NO: 1355156 - RNA, 19 nt, Homo sapiens
  misc_RNA (1)...(19): siRNA sense strand
guggacaacagugaguaua

SEQ ID NO: 1355157 - RNA, 19 nt, Homo sapiens
  misc_RNA (1)...(19): siRNA sense strand
ccaccaaggacggcaagaa

SEQ ID NO: 1355158 - RNA, 19 nt, Homo sapiens
  misc_RNA (1)...(19): siRNA sense strand
cggaaucagcagacauuga

SEQ ID NO: 1355159 - RNA, 19 nt, Homo sapiens
  misc_RNA (1)...(19): siRNA sense strand
caacccaagggcaagauca

SEQ ID NO: 1355160 - RNA, 19 nt, Homo sapiens
  misc_RNA (1)...(19): siRNA sense strand
gcuuaugccaugcagaugu

SEQ ID NO: 1355161 - RNA, 19 nt, Homo sapiens
  misc_RNA (1)...(19): siRNA sense strand
gauuuuggcuggugaaggu

SEQ ID NO: 1355162 - RNA, 19 nt, Homo sapiens
  misc_RNA (1)...(19): siRNA sense strand
caaggcaagaaucacaaga

SEQ ID NO: 1355163 - RNA, 19 nt, Homo sapiens
  misc_RNA (1)...(19): siRNA sense strand
ggaugauuacgacgugaug

SEQ ID NO: 1355164 - RNA, 19 nt, Homo sapiens
  misc_RNA (1)...(19): siRNA sense strand
gacuuugaauuuggaguag

SEQ ID NO: 1355165 - RNA, 19 nt, Homo sapiens
  misc_RNA (1)...(19): siRNA sense strand
ucaacauaguuugucauuc

SEQ ID NO: 1355166 - RNA, 19 nt, Homo sapiens
  misc_RNA (1)...(19): siRNA sense strand
gggaagaggaggugaacac

SEQ ID NO: 1355167 - RNA, 19 nt, Homo sapiens
  misc_RNA (1)...(19): siRNA sense strand
uaugcggaauggagacuuc

SEQ ID NO: 1355168 - RNA, 19 nt, Homo sapiens
  misc_RNA (1)...(19): siRNA sense strand
uggcccaucuggcucugaa

SEQ ID NO: 1355169 - RNA, 19 nt, Homo sapiens
  misc_RNA (1)...(19): siRNA sense strand
ugacugaggaagagcagau

SEQ ID NO: 1355170 - RNA, 19 nt, Homo sapiens
  misc_RNA (1)...(19): siRNA sense strand
cuuccugaccuaagcagua

SEQ ID NO: 1355171 - RNA, 19 nt, Homo sapiens
  misc_RNA (1)...(19): siRNA sense strand
gggcccaguuuggcugaug

SEQ ID NO: 1355172 - RNA, 19 nt, Homo sapiens
  misc_RNA (1)...(19): siRNA sense strand
caguggaggacaaugagaa

SEQ ID NO: 1355173 - RNA, 19 nt, Homo sapiens
  misc_RNA (1)...(19): siRNA sense strand
caacauaguuugucauuca

SEQ ID NO: 1355174 - RNA, 19 nt, Homo sapiens
  misc_RNA (1)...(19): siRNA sense strand
gcaggaugcugucaacaua

SEQ ID NO: 1355175 - RNA, 19 nt, Homo sapiens
  misc_RNA (1)...(19): siRNA sense strand
ggacaacagugaguauaug

SEQ ID NO: 1355176 - RNA, 19 nt, Homo sapiens
  misc_RNA (1)...(19): siRNA sense strand
ggaaagcacuauggugugu

SEQ ID NO: 1355177 - RNA, 19 nt, Homo sapiens
  misc_RNA (1)...(19): siRNA sense strand
cuaaacgccucaagaagga

SEQ ID NO: 1355178 - RNA, 19 nt, Homo sapiens
  misc_RNA (1)...(19): siRNA sense strand
gagaacaacgugggccuua

SEQ ID NO: 1355179 - RNA, 19 nt, Homo sapiens
  misc_RNA (1)...(19): siRNA sense strand
agaaggaucuggugaaacu

SEQ ID NO: 1355180 - RNA, 19 nt, Homo sapiens
  misc_RNA (1)...(19): siRNA sense strand
ugagaaggaucuggugaaa

SEQ ID NO: 1355181 - RNA, 19 nt, Homo sapiens
  misc_RNA (1)...(19): siRNA sense strand
aagaggaggugaacacaga

SEQ ID NO: 1355182 - RNA, 19 nt, Homo sapiens
  misc_RNA (1)...(19): siRNA sense strand
gcagcaacccugagaacaa

SEQ ID NO: 1355183 - RNA, 19 nt, Homo sapiens
  misc_RNA (1)...(19): siRNA sense strand
gaaggagaaaguaaauguu

SEQ ID NO: 1355184 - RNA, 19 nt, Homo sapiens
  misc_RNA (1)...(19): siRNA sense strand
gaacaacgugggccuuauc

SEQ ID NO: 1355185 - RNA, 19 nt, Homo sapiens
  misc_RNA (1)...(19): siRNA sense strand
gccagugacuuugaauuug

SEQ ID NO: 1355186 - RNA, 19 nt, Homo sapiens
  misc_RNA (1)...(19): siRNA sense strand
ucaagaaggagaaaguaaa

SEQ ID NO: 1355187 - RNA, 19 nt, Homo sapiens
  misc_RNA (1)...(19): siRNA sense strand
caagaaggagaaaguaaau

SEQ ID NO: 1355188 - RNA, 19 nt, Homo sapiens
  misc_RNA (1)...(19): siRNA sense strand
gcggaauggagacuucuua

SEQ ID NO: 1355189 - RNA, 19 nt, Homo sapiens
  misc_RNA (1)...(19): siRNA sense strand
caacgugggccuuaucaca

SEQ ID NO: 1355190 - RNA, 19 nt, Homo sapiens
  misc_RNA (1)...(19): siRNA sense strand
guucucaucuggugacagu

SEQ ID NO: 1355191 - RNA, 19 nt, Homo sapiens
  misc_RNA (1)...(19): siRNA sense strand
caagcuacauacuguccaa

SEQ ID NO: 1355192 - RNA, 19 nt, Homo sapiens
  misc_RNA (1)...(19): siRNA sense strand
gcgcaucauugccuuugug

SEQ ID NO: 1355193 - RNA, 19 nt, Homo sapiens
  misc_RNA (1)...(19): siRNA sense strand
ccagugacuuugaauuugg

SEQ ID NO: 1355194 - RNA, 19 nt, Homo sapiens
  misc_RNA (1)...(19): siRNA sense strand
ucucaucaguucuccgauu

SEQ ID NO: 1355195 - RNA, 19 nt, Homo sapiens
  misc_RNA (1)...(19): siRNA sense strand
uuaucacacuggcuaauga

SEQ ID NO: 1355196 - RNA, 19 nt, Homo sapiens
  misc_RNA (1)...(19): siRNA sense strand
uguccaagcuacauacugu

SEQ ID NO: 1355197 - RNA, 19 nt, Homo sapiens
  misc_RNA (1)...(19): siRNA sense strand
gaagcccaguggaggacaa

SEQ ID NO: 1355198 - RNA, 19 nt, Homo sapiens
  misc_RNA (1)...(19): siRNA sense strand
ggaggacaaugagaaggau

SEQ ID NO: 1355199 - RNA, 19 nt, Homo sapiens
  misc_RNA (1)...(19): siRNA sense strand
cgacaaggcaagaaucaca

SEQ ID NO: 1355200 - RNA, 19 nt, Homo sapiens
  misc_RNA (1)...(19): siRNA sense strand
ugacuuugaauuuggagua

SEQ ID NO: 1355201 - RNA, 19 nt, Homo sapiens
  misc_RNA (1)...(19): siRNA sense strand
gcaccgacaaggcaagaau

SEQ ID NO: 1355202 - RNA, 19 nt, Homo sapiens
  misc_RNA (1)...(19): siRNA sense strand
agaaggagaaaguaaaugu

SEQ ID NO: 1355203 - RNA, 19 nt, Homo sapiens
  misc_RNA (1)...(19): siRNA sense strand
aggcaagaaucacaagaug

SEQ ID NO: 1355204 - RNA, 19 nt, Homo sapiens
  misc_RNA (1)...(19): siRNA sense strand
gaugcugucaacauaguuu

SEQ ID NO: 1355205 - RNA, 19 nt, Homo sapiens
  misc_RNA (1)...(19): siRNA sense strand
gugaguauaugcggaaugg

SEQ ID NO: 1355206 - RNA, 19 nt, Homo sapiens
  misc_RNA (1)...(19): siRNA sense strand
aggagaaaguaaauguuga

SEQ ID NO: 1355207 - RNA, 19 nt, Homo sapiens
  misc_RNA (1)...(19): siRNA sense strand
cacacuggcuaaugacugu

SEQ ID NO: 1355208 - RNA, 19 nt, Homo sapiens
  misc_RNA (1)...(19): siRNA sense strand
cucaucaguucuccgauuu

SEQ ID NO: 1355209 - RNA, 19 nt, Homo sapiens
  misc_RNA (1)...(19): siRNA sense strand
aaagcacuauggugugugu

SEQ ID NO: 1355210 - RNA, 19 nt, Homo sapiens
  misc_RNA (1)...(19): siRNA sense strand
uggcuaaacgccucaagaa

SEQ ID NO: 1355211 - RNA, 19 nt, Homo sapiens
  misc_RNA (1)...(19): siRNA sense strand
ugccagugacuuugaauuu

SEQ ID NO: 1355212 - RNA, 19 nt, Homo sapiens
  misc_RNA (1)...(19): siRNA sense strand
aaggagaaaguaaauguug

SEQ ID NO: 1355213 - RNA, 19 nt, Homo sapiens
  misc_RNA (1)...(19): siRNA sense strand
cagcaacccugagaacaac

SEQ ID NO: 1355214 - RNA, 19 nt, Homo sapiens
  misc_RNA (1)...(19): siRNA sense strand
gaggaggugaacacagaaa

SEQ ID NO: 1355215 - RNA, 19 nt, Homo sapiens
  misc_RNA (1)...(19): siRNA sense strand
gucaacauaguuugucauu

SEQ ID NO: 1355216 - RNA, 19 nt, Homo sapiens
  misc_RNA (1)...(19): siRNA sense strand
ggaagaggaggugaacaca

SEQ ID NO: 1355217 - RNA, 19 nt, Homo sapiens
  misc_RNA (1)...(19): siRNA sense strand
gcccaguggaggacaauga

SEQ ID NO: 1355218 - RNA, 19 nt, Homo sapiens
  misc_RNA (1)...(19): siRNA sense strand
gacaaggcaagaaucacaa

SEQ ID NO: 1355219 - RNA, 19 nt, Homo sapiens
  misc_RNA (1)...(19): siRNA sense strand
ugacagccuuuguaaacac

SEQ ID NO: 1355220 - RNA, 19 nt, Homo sapiens
  misc_RNA (1)...(19): siRNA sense strand
cacguugaauggcaaagau

SEQ ID NO: 1355221 - RNA, 19 nt, Homo sapiens
  misc_RNA (1)...(19): siRNA sense strand
agaacaacgugggccuuau

SEQ ID NO: 1355222 - RNA, 19 nt, Homo sapiens
  misc_RNA (1)...(19): siRNA sense strand
ggagaaaguaaauguugac

SEQ ID NO: 1355223 - RNA, 19 nt, Homo sapiens
  misc_RNA (1)...(19): siRNA sense strand
ccucaagaaggagaaagua

SEQ ID NO: 1355224 - RNA, 19 nt, Homo sapiens
  misc_RNA (1)...(19): siRNA sense strand
guggacaacagugaguaua

SEQ ID NO: 1355225 - RNA, 19 nt, Homo sapiens
  misc_RNA (1)...(19): siRNA sense strand
caacccaagggcaagauca

SEQ ID NO: 1355226 - RNA, 19 nt, Homo sapiens
  misc_RNA (1)...(19): siRNA sense strand
gauuuuggcuggugaaggu

SEQ ID NO: 1355227 - RNA, 19 nt, Homo sapiens
  misc_RNA (1)...(19): siRNA sense strand
caaggcaagaaucacaaga

SEQ ID NO: 1355228 - RNA, 19 nt, Homo sapiens
  misc_RNA (1)...(19): siRNA sense strand
gacuuugaauuuggaguag

SEQ ID NO: 1355229 - RNA, 19 nt, Homo sapiens
  misc_RNA (1)...(19): siRNA sense strand
ucaacauaguuugucauuc

SEQ ID NO: 1355230 - RNA, 19 nt, Homo sapiens
  misc_RNA (1)...(19): siRNA sense strand
gggaagaggaggugaacac

SEQ ID NO: 1355231 - RNA, 19 nt, Homo sapiens
  misc_RNA (1)...(19): siRNA sense strand
uaugcggaauggagacuuc

SEQ ID NO: 1355232 - RNA, 19 nt, Homo sapiens
  misc_RNA (1)...(19): siRNA sense strand
uggcccaucuggcucugaa

SEQ ID NO: 1355233 - RNA, 19 nt, Homo sapiens
  misc_RNA (1)...(19): siRNA sense strand
gggcccaguuuggcugaug

SEQ ID NO: 1355234 - RNA, 19 nt, Homo sapiens
  misc_RNA (1)...(19): siRNA sense strand
caguggaggacaaugagaa

SEQ ID NO: 1355235 - RNA, 19 nt, Homo sapiens
  misc_RNA (1)...(19): siRNA sense strand
ggagagauauuugaaguug

SEQ ID NO: 1355236 - RNA, 19 nt, Homo sapiens
  misc_RNA (1)...(19): siRNA sense strand
gggaauggaugaugaagga

SEQ ID NO: 1355237 - RNA, 19 nt, Homo sapiens
  misc_RNA (1)...(19): siRNA sense strand
caaacaaucugugacuauu

SEQ ID NO: 1355238 - RNA, 19 nt, Homo sapiens
  misc_RNA (1)...(19): siRNA sense strand
ucaauuaaguugcagaguu

SEQ ID NO: 1355239 - RNA, 19 nt, Homo sapiens
  misc_RNA (1)...(19): siRNA sense strand
cgcaagaccuucaauauca

SEQ ID NO: 1355240 - RNA, 19 nt, Homo sapiens
  misc_RNA (1)...(19): siRNA sense strand
caauuaaguugcagaguuc

SEQ ID NO: 1355241 - RNA, 19 nt, Homo sapiens
  misc_RNA (1)...(19): siRNA sense strand
ggaccaagaauuccugaaa

SEQ ID NO: 1355242 - RNA, 19 nt, Homo sapiens
  misc_RNA (1)...(19): siRNA sense strand
gcaagaccuucaauaucaa

SEQ ID NO: 1355243 - RNA, 19 nt, Homo sapiens
  misc_RNA (1)...(19): siRNA sense strand
aaaugugaaugcagcaaua

SEQ ID NO: 1355244 - RNA, 19 nt, Homo sapiens
  misc_RNA (1)...(19): siRNA sense strand
gcaaacuacuuagacauca

SEQ ID NO: 1355245 - RNA, 19 nt, Homo sapiens
  misc_RNA (1)...(19): siRNA sense strand
cagaugauaucccuguuug

SEQ ID NO: 1355246 - RNA, 19 nt, Homo sapiens
  misc_RNA (1)...(19): siRNA sense strand
caagaauuccugaaaguug

SEQ ID NO: 1355247 - RNA, 19 nt, Homo sapiens
  misc_RNA (1)...(19): siRNA sense strand
ugaaguugauguggaaauu

SEQ ID NO: 1355248 - RNA, 19 nt, Homo sapiens
  misc_RNA (1)...(19): siRNA sense strand
gaccaagaauuccugaaag

SEQ ID NO: 1355249 - RNA, 19 nt, Homo sapiens
  misc_RNA (1)...(19): siRNA sense strand
gaaaguugaccaaggaaca

SEQ ID NO: 1355250 - RNA, 19 nt, Homo sapiens
  misc_RNA (1)...(19): siRNA sense strand
ugugaaugcagcaauauua

SEQ ID NO: 1355251 - RNA, 19 nt, Homo sapiens
  misc_RNA (1)...(19): siRNA sense strand
aagaauuccugaaaguuga

SEQ ID NO: 1355252 - RNA, 19 nt, Homo sapiens
  misc_RNA (1)...(19): siRNA sense strand
gaguucugauggagagaua

SEQ ID NO: 1355253 - RNA, 19 nt, Homo sapiens
  misc_RNA (1)...(19): siRNA sense strand
gagagauauuugaaguuga

SEQ ID NO: 1355254 - RNA, 19 nt, Homo sapiens
  misc_RNA (1)...(19): siRNA sense strand
ccugaaaguugaccaagga

SEQ ID NO: 1355255 - RNA, 19 nt, Homo sapiens
  misc_RNA (1)...(19): siRNA sense strand
ugaagaugaugagaacaaa

SEQ ID NO: 1355256 - RNA, 19 nt, Homo sapiens
  misc_RNA (1)...(19): siRNA sense strand
gaaaagcgaacagaugaua

SEQ ID NO: 1355257 - RNA, 19 nt, Homo sapiens
  misc_RNA (1)...(19): siRNA sense strand
caaacuacuuagacaucaa

SEQ ID NO: 1355258 - RNA, 19 nt, Homo sapiens
  misc_RNA (1)...(19): siRNA sense strand
gcacccaccacaaggauga

SEQ ID NO: 1355259 - RNA, 19 nt, Homo sapiens
  misc_RNA (1)...(19): siRNA sense strand
ccaaacaaucugugacuau

SEQ ID NO: 1355260 - RNA, 19 nt, Homo sapiens
  misc_RNA (1)...(19): siRNA sense strand
gugaaugcagcaauauuaa

SEQ ID NO: 1355261 - RNA, 19 nt, Homo sapiens
  misc_RNA (1)...(19): siRNA sense strand
uuaagaccauguuggaaga

SEQ ID NO: 1355262 - RNA, 19 nt, Homo sapiens
  misc_RNA (1)...(19): siRNA sense strand
gccaaacaaucugugacua

SEQ ID NO: 1355263 - RNA, 19 nt, Homo sapiens
  misc_RNA (1)...(19): siRNA sense strand
caagacuguugccaauaug

SEQ ID NO: 1355264 - RNA, 19 nt, Homo sapiens
  misc_RNA (1)...(19): siRNA sense strand
guuggaagauuugggaaug

SEQ ID NO: 1355265 - RNA, 19 nt, Homo sapiens
  misc_RNA (1)...(19): siRNA sense strand
gcugcaaacuacuuagaca

SEQ ID NO: 1355266 - RNA, 19 nt, Homo sapiens
  misc_RNA (1)...(19): siRNA sense strand
acuuagacaucaaagguuu

SEQ ID NO: 1355267 - RNA, 19 nt, Homo sapiens
  misc_RNA (1)...(19): siRNA sense strand
agaccauguuggaagauuu

SEQ ID NO: 1355268 - RNA, 19 nt, Homo sapiens
  misc_RNA (1)...(19): siRNA sense strand
gaaguugauguggaaauug

SEQ ID NO: 1355269 - RNA, 19 nt, Homo sapiens
  misc_RNA (1)...(19): siRNA sense strand
gaugaugagaacaaagaaa

SEQ ID NO: 1355270 - RNA, 19 nt, Homo sapiens
  misc_RNA (1)...(19): siRNA sense strand
ccaagaauuccugaaaguu

SEQ ID NO: 1355271 - RNA, 19 nt, Homo sapiens
  misc_RNA (1)...(19): siRNA sense strand
gagauucgcaagaccuuca

SEQ ID NO: 1355272 - RNA, 19 nt, Homo sapiens
  misc_RNA (1)...(19): siRNA sense strand
gaccauguuggaagauuug

SEQ ID NO: 1355273 - RNA, 19 nt, Homo sapiens
  misc_RNA (1)...(19): siRNA sense strand
caagaccuucaauaucaaa

SEQ ID NO: 1355274 - RNA, 19 nt, Homo sapiens
  misc_RNA (1)...(19): siRNA sense strand
gauauuugaaguugaugug

SEQ ID NO: 1355275 - RNA, 19 nt, Homo sapiens
  misc_RNA (1)...(19): siRNA sense strand
aagaugaugagaacaaaga

SEQ ID NO: 1355276 - RNA, 19 nt, Homo sapiens
  misc_RNA (1)...(19): siRNA sense strand
aaagguuugcuugauguua

SEQ ID NO: 1355277 - RNA, 19 nt, Homo sapiens
  misc_RNA (1)...(19): siRNA sense strand
cuacuuagacaucaaaggu

SEQ ID NO: 1355278 - RNA, 19 nt, Homo sapiens
  misc_RNA (1)...(19): siRNA sense strand
gaacucauucuggcugcaa

SEQ ID NO: 1355279 - RNA, 19 nt, Homo sapiens
  misc_RNA (1)...(19): siRNA sense strand
uguggaaauugccaaacaa

SEQ ID NO: 1355280 - RNA, 19 nt, Homo sapiens
  misc_RNA (1)...(19): siRNA sense strand
caaaugugaaugcagcaau

SEQ ID NO: 1355281 - RNA, 19 nt, Homo sapiens
  misc_RNA (1)...(19): siRNA sense strand
gaagaugaugagaacaaag

SEQ ID NO: 1355282 - RNA, 19 nt, Homo sapiens
  misc_RNA (1)...(19): siRNA sense strand
cauucuggcugcaaacuac

SEQ ID NO: 1355283 - RNA, 19 nt, Homo sapiens
  misc_RNA (1)...(19): siRNA sense strand
cuauuaagaccauguugga

SEQ ID NO: 1355284 - RNA, 19 nt, Homo sapiens
  misc_RNA (1)...(19): siRNA sense strand
ccaguuccucuaccaaaug

SEQ ID NO: 1355285 - RNA, 19 nt, Homo sapiens
  misc_RNA (1)...(19): siRNA sense strand
guucugauggagagauauu

SEQ ID NO: 1355286 - RNA, 19 nt, Homo sapiens
  misc_RNA (1)...(19): siRNA sense strand
ucgcaagaccuucaauauc

SEQ ID NO: 1355287 - RNA, 19 nt, Homo sapiens
  misc_RNA (1)...(19): siRNA sense strand
accaagaauuccugaaagu

SEQ ID NO: 1355288 - RNA, 19 nt, Homo sapiens
  misc_RNA (1)...(19): siRNA sense strand
caguuccucuaccaaaugu

SEQ ID NO: 1355289 - RNA, 19 nt, Homo sapiens
  misc_RNA (1)...(19): siRNA sense strand
guuccucuaccaaauguga

SEQ ID NO: 1355290 - RNA, 19 nt, Homo sapiens
  misc_RNA (1)...(19): siRNA sense strand
aaagcgaacagaugauauc

SEQ ID NO: 1355291 - RNA, 19 nt, Homo sapiens
  misc_RNA (1)...(19): siRNA sense strand
caaucugugacuauuaaga

SEQ ID NO: 1355292 - RNA, 19 nt, Homo sapiens
  misc_RNA (1)...(19): siRNA sense strand
gaugaugaaggagaugaug

SEQ ID NO: 1355293 - RNA, 19 nt, Homo sapiens
  misc_RNA (1)...(19): siRNA sense strand
uggaagauuugggaaugga

SEQ ID NO: 1355294 - RNA, 19 nt, Homo sapiens
  misc_RNA (1)...(19): siRNA sense strand
cugaagaugaugagaacaa

SEQ ID NO: 1355295 - RNA, 19 nt, Homo sapiens
  misc_RNA (1)...(19): siRNA sense strand
cccaguuccucuaccaaau

SEQ ID NO: 1355296 - RNA, 19 nt, Homo sapiens
  misc_RNA (1)...(19): siRNA sense strand
aggagaugaugacccaguu

SEQ ID NO: 1355297 - RNA, 19 nt, Homo sapiens
  misc_RNA (1)...(19): siRNA sense strand
aagguuugcuugauguuac

SEQ ID NO: 1355298 - RNA, 19 nt, Homo sapiens
  misc_RNA (1)...(19): siRNA sense strand
auggagagauauuugaagu

SEQ ID NO: 1355299 - RNA, 19 nt, Homo sapiens
  misc_RNA (1)...(19): siRNA sense strand
ugauggagagauauuugaa

SEQ ID NO: 1355300 - RNA, 19 nt, Homo sapiens
  misc_RNA (1)...(19): siRNA sense strand
gaacaaagaaaagcgaaca

SEQ ID NO: 1355301 - RNA, 19 nt, Homo sapiens
  misc_RNA (1)...(19): siRNA sense strand
ggagaugaugacccaguuc

SEQ ID NO: 1355302 - RNA, 19 nt, Homo sapiens
  misc_RNA (1)...(19): siRNA sense strand
ugacccaguuccucuacca

SEQ ID NO: 1355303 - RNA, 19 nt, Homo sapiens
  misc_RNA (1)...(19): siRNA sense strand
agaggaggaagcccaggua

SEQ ID NO: 1355304 - RNA, 19 nt, Homo sapiens
  misc_RNA (1)...(19): siRNA sense strand
aagaccauguuggaagauu

SEQ ID NO: 1355305 - RNA, 19 nt, Homo sapiens
  misc_RNA (1)...(19): siRNA sense strand
guugaccaaggaacacuuu

SEQ ID NO: 1355306 - RNA, 19 nt, Homo sapiens
  misc_RNA (1)...(19): siRNA sense strand
gauggagagauauuugaag

SEQ ID NO: 1355307 - RNA, 19 nt, Homo sapiens
  misc_RNA (1)...(19): siRNA sense strand
ggagagauauuugaaguug

SEQ ID NO: 1355308 - RNA, 19 nt, Homo sapiens
  misc_RNA (1)...(19): siRNA sense strand
gggaauggaugaugaagga

SEQ ID NO: 1355309 - RNA, 19 nt, Homo sapiens
  misc_RNA (1)...(19): siRNA sense strand
caaacaaucugugacuauu

SEQ ID NO: 1355310 - RNA, 19 nt, Homo sapiens
  misc_RNA (1)...(19): siRNA sense strand
ucaauuaaguugcagaguu

SEQ ID NO: 1355311 - RNA, 19 nt, Homo sapiens
  misc_RNA (1)...(19): siRNA sense strand
cgcaagaccuucaauauca

SEQ ID NO: 1355312 - RNA, 19 nt, Homo sapiens
  misc_RNA (1)...(19): siRNA sense strand
caauuaaguugcagaguuc

SEQ ID NO: 1355313 - RNA, 19 nt, Homo sapiens
  misc_RNA (1)...(19): siRNA sense strand
ggaccaagaauuccugaaa

SEQ ID NO: 1355314 - RNA, 19 nt, Homo sapiens
  misc_RNA (1)...(19): siRNA sense strand
gcaagaccuucaauaucaa

SEQ ID NO: 1355315 - RNA, 19 nt, Homo sapiens
  misc_RNA (1)...(19): siRNA sense strand
aaaugugaaugcagcaaua

SEQ ID NO: 1355316 - RNA, 19 nt, Homo sapiens
  misc_RNA (1)...(19): siRNA sense strand
gcaaacuacuuagacauca

SEQ ID NO: 1355317 - RNA, 19 nt, Homo sapiens
  misc_RNA (1)...(19): siRNA sense strand
cagaugauaucccuguuug

SEQ ID NO: 1355318 - RNA, 19 nt, Homo sapiens
  misc_RNA (1)...(19): siRNA sense strand
caagaauuccugaaaguug

SEQ ID NO: 1355319 - RNA, 19 nt, Homo sapiens
  misc_RNA (1)...(19): siRNA sense strand
ugaaguugauguggaaauu

SEQ ID NO: 1355320 - RNA, 19 nt, Homo sapiens
  misc_RNA (1)...(19): siRNA sense strand
gaccaagaauuccugaaag

SEQ ID NO: 1355321 - RNA, 19 nt, Homo sapiens
  misc_RNA (1)...(19): siRNA sense strand
gaaaguugaccaaggaaca

SEQ ID NO: 1355322 - RNA, 19 nt, Homo sapiens
  misc_RNA (1)...(19): siRNA sense strand
ugugaaugcagcaauauua

SEQ ID NO: 1355323 - RNA, 19 nt, Homo sapiens
  misc_RNA (1)...(19): siRNA sense strand
aagaauuccugaaaguuga

SEQ ID NO: 1355324 - RNA, 19 nt, Homo sapiens
  misc_RNA (1)...(19): siRNA sense strand
gaguucugauggagagaua

SEQ ID NO: 1355325 - RNA, 19 nt, Homo sapiens
  misc_RNA (1)...(19): siRNA sense strand
gagagauauuugaaguuga

SEQ ID NO: 1355326 - RNA, 19 nt, Homo sapiens
  misc_RNA (1)...(19): siRNA sense strand
ccugaaaguugaccaagga

SEQ ID NO: 1355327 - RNA, 19 nt, Homo sapiens
  misc_RNA (1)...(19): siRNA sense strand
ugaagaugaugagaacaaa

SEQ ID NO: 1355328 - RNA, 19 nt, Homo sapiens
  misc_RNA (1)...(19): siRNA sense strand
gaaaagcgaacagaugaua

SEQ ID NO: 1355329 - RNA, 19 nt, Homo sapiens
  misc_RNA (1)...(19): siRNA sense strand
caaacuacuuagacaucaa

SEQ ID NO: 1355330 - RNA, 19 nt, Homo sapiens
  misc_RNA (1)...(19): siRNA sense strand
gcacccaccacaaggauga

SEQ ID NO: 1355331 - RNA, 19 nt, Homo sapiens
  misc_RNA (1)...(19): siRNA sense strand
ccaaacaaucugugacuau

SEQ ID NO: 1355332 - RNA, 19 nt, Homo sapiens
  misc_RNA (1)...(19): siRNA sense strand
gugaaugcagcaauauuaa

SEQ ID NO: 1355333 - RNA, 19 nt, Homo sapiens
  misc_RNA (1)...(19): siRNA sense strand
uuaagaccauguuggaaga

SEQ ID NO: 1355334 - RNA, 19 nt, Homo sapiens
  misc_RNA (1)...(19): siRNA sense strand
gccaaacaaucugugacua

SEQ ID NO: 1355335 - RNA, 19 nt, Homo sapiens
  misc_RNA (1)...(19): siRNA sense strand
caagacuguugccaauaug

SEQ ID NO: 1355336 - RNA, 19 nt, Homo sapiens
  misc_RNA (1)...(19): siRNA sense strand
guuggaagauuugggaaug

SEQ ID NO: 1355337 - RNA, 19 nt, Homo sapiens
  misc_RNA (1)...(19): siRNA sense strand
gcugcaaacuacuuagaca

SEQ ID NO: 1355338 - RNA, 19 nt, Homo sapiens
  misc_RNA (1)...(19): siRNA sense strand
acuuagacaucaaagguuu

SEQ ID NO: 1355339 - RNA, 19 nt, Homo sapiens
  misc_RNA (1)...(19): siRNA sense strand
agaccauguuggaagauuu

SEQ ID NO: 1355340 - RNA, 19 nt, Homo sapiens
  misc_RNA (1)...(19): siRNA sense strand
gaaguugauguggaaauug

SEQ ID NO: 1355341 - RNA, 19 nt, Homo sapiens
  misc_RNA (1)...(19): siRNA sense strand
gaugaugagaacaaagaaa

SEQ ID NO: 1355342 - RNA, 19 nt, Homo sapiens
  misc_RNA (1)...(19): siRNA sense strand
ccaagaauuccugaaaguu

SEQ ID NO: 1355343 - RNA, 19 nt, Homo sapiens
  misc_RNA (1)...(19): siRNA sense strand
gagauucgcaagaccuuca

SEQ ID NO: 1355344 - RNA, 19 nt, Homo sapiens
  misc_RNA (1)...(19): siRNA sense strand
ccaguggugugaagagaag

SEQ ID NO: 1355345 - RNA, 19 nt, Homo sapiens
  misc_RNA (1)...(19): siRNA sense strand
gaccauguuggaagauuug

SEQ ID NO: 1355346 - RNA, 19 nt, Homo sapiens
  misc_RNA (1)...(19): siRNA sense strand
caagaccuucaauaucaaa

SEQ ID NO: 1355347 - RNA, 19 nt, Homo sapiens
  misc_RNA (1)...(19): siRNA sense strand
gauauuugaaguugaugug

SEQ ID NO: 1355348 - RNA, 19 nt, Homo sapiens
  misc_RNA (1)...(19): siRNA sense strand
aagaugaugagaacaaaga

SEQ ID NO: 1355349 - RNA, 19 nt, Homo sapiens
  misc_RNA (1)...(19): siRNA sense strand
aaagguuugcuugauguua

SEQ ID NO: 1355350 - RNA, 19 nt, Homo sapiens
  misc_RNA (1)...(19): siRNA sense strand
cuacuuagacaucaaaggu

SEQ ID NO: 1355351 - RNA, 19 nt, Homo sapiens
  misc_RNA (1)...(19): siRNA sense strand
gaacucauucuggcugcaa

SEQ ID NO: 1355352 - RNA, 19 nt, Homo sapiens
  misc_RNA (1)...(19): siRNA sense strand
uguggaaauugccaaacaa

SEQ ID NO: 1355353 - RNA, 19 nt, Homo sapiens
  misc_RNA (1)...(19): siRNA sense strand
caaaugugaaugcagcaau

SEQ ID NO: 1355354 - RNA, 19 nt, Homo sapiens
  misc_RNA (1)...(19): siRNA sense strand
gaagaugaugagaacaaag

SEQ ID NO: 1355355 - RNA, 19 nt, Homo sapiens
  misc_RNA (1)...(19): siRNA sense strand
cauucuggcugcaaacuac

SEQ ID NO: 1355356 - RNA, 19 nt, Homo sapiens
  misc_RNA (1)...(19): siRNA sense strand
cuauuaagaccauguugga

SEQ ID NO: 1355357 - RNA, 19 nt, Homo sapiens
  misc_RNA (1)...(19): siRNA sense strand
ccaguuccucuaccaaaug

SEQ ID NO: 1355358 - RNA, 19 nt, Homo sapiens
  misc_RNA (1)...(19): siRNA sense strand
guucugauggagagauauu

SEQ ID NO: 1355359 - RNA, 19 nt, Homo sapiens
  misc_RNA (1)...(19): siRNA sense strand
ucgcaagaccuucaauauc

SEQ ID NO: 1355360 - RNA, 19 nt, Homo sapiens
  misc_RNA (1)...(19): siRNA sense strand
accaagaauuccugaaagu

SEQ ID NO: 1355361 - RNA, 19 nt, Homo sapiens
  misc_RNA (1)...(19): siRNA sense strand
caguuccucuaccaaaugu

SEQ ID NO: 1355362 - RNA, 19 nt, Homo sapiens
  misc_RNA (1)...(19): siRNA sense strand
guuccucuaccaaauguga

SEQ ID NO: 1355363 - RNA, 19 nt, Homo sapiens
  misc_RNA (1)...(19): siRNA sense strand
aaagcgaacagaugauauc

SEQ ID NO: 1355364 - RNA, 19 nt, Homo sapiens
  misc_RNA (1)...(19): siRNA sense strand
caaucugugacuauuaaga

SEQ ID NO: 1355365 - RNA, 19 nt, Homo sapiens
  misc_RNA (1)...(19): siRNA sense strand
gaugaugaaggagaugaug

SEQ ID NO: 1355366 - RNA, 19 nt, Homo sapiens
  misc_RNA (1)...(19): siRNA sense strand
uggaagauuugggaaugga

SEQ ID NO: 1355367 - RNA, 19 nt, Homo sapiens
  misc_RNA (1)...(19): siRNA sense strand
cugaagaugaugagaacaa

SEQ ID NO: 1355368 - RNA, 19 nt, Homo sapiens
  misc_RNA (1)...(19): siRNA sense strand
cccaguuccucuaccaaau

SEQ ID NO: 1355369 - RNA, 19 nt, Homo sapiens
  misc_RNA (1)...(19): siRNA sense strand
aggagaugaugacccaguu

SEQ ID NO: 1355370 - RNA, 19 nt, Homo sapiens
  misc_RNA (1)...(19): siRNA sense strand
aagguuugcuugauguuac

SEQ ID NO: 1355371 - RNA, 19 nt, Homo sapiens
  misc_RNA (1)...(19): siRNA sense strand
auggagagauauuugaagu

SEQ ID NO: 1355372 - RNA, 19 nt, Homo sapiens
  misc_RNA (1)...(19): siRNA sense strand
ugauggagagauauuugaa

SEQ ID NO: 1355373 - RNA, 19 nt, Homo sapiens
  misc_RNA (1)...(19): siRNA sense strand
gaacaaagaaaagcgaaca

SEQ ID NO: 1355374 - RNA, 19 nt, Homo sapiens
  misc_RNA (1)...(19): siRNA sense strand
ggagaugaugacccaguuc

SEQ ID NO: 1355375 - RNA, 19 nt, Homo sapiens
  misc_RNA (1)...(19): siRNA sense strand
ugacccaguuccucuacca

SEQ ID NO: 1355376 - RNA, 19 nt, Homo sapiens
  misc_RNA (1)...(19): siRNA sense strand
agaggaggaagcccaggua

SEQ ID NO: 1355377 - RNA, 19 nt, Homo sapiens
  misc_RNA (1)...(19): siRNA sense strand
guugaccaaggaacacuuu

SEQ ID NO: 1355378 - RNA, 19 nt, Homo sapiens
  misc_RNA (1)...(19): siRNA sense strand
gauggagagauauuugaag

SEQ ID NO: 1355379 - RNA, 19 nt, Homo sapiens
  misc_RNA (1)...(19): siRNA sense strand
aagaccauguuggaagauu

SEQ ID NO: 1355380 - RNA, 19 nt, Homo sapiens
  misc_RNA (1)...(19): siRNA sense strand
gaaagaggcauuacuauuc

SEQ ID NO: 1355381 - RNA, 19 nt, Homo sapiens
  misc_RNA (1)...(19): siRNA sense strand
ggagcaagcuuuaaguaug

SEQ ID NO: 1355382 - RNA, 19 nt, Homo sapiens
  misc_RNA (1)...(19): siRNA sense strand
ggaaaugaaugauccugaa

SEQ ID NO: 1355383 - RNA, 19 nt, Homo sapiens
  misc_RNA (1)...(19): siRNA sense strand
caauauaccucgaaucugu

SEQ ID NO: 1355384 - RNA, 19 nt, Homo sapiens
  misc_RNA (1)...(19): siRNA sense strand
gauaucaaaucccuucauu

SEQ ID NO: 1355385 - RNA, 19 nt, Homo sapiens
  misc_RNA (1)...(19): siRNA sense strand
gagaauaagucgucugcuu

SEQ ID NO: 1355386 - RNA, 19 nt, Homo sapiens
  misc_RNA (1)...(19): siRNA sense strand
guagaaaucccuucauuga

SEQ ID NO: 1355387 - RNA, 19 nt, Homo sapiens
  misc_RNA (1)...(19): siRNA sense strand
caucaucaauccucccaua

SEQ ID NO: 1355388 - RNA, 19 nt, Homo sapiens
  misc_RNA (1)...(19): siRNA sense strand
gagagaaguuaaaggcaaa

SEQ ID NO: 1355389 - RNA, 19 nt, Homo sapiens
  misc_RNA (1)...(19): siRNA sense strand
gagacacagugacagauuu

SEQ ID NO: 1355390 - RNA, 19 nt, Homo sapiens
  misc_RNA (1)...(19): siRNA sense strand
ugaauuugcugacuugguu

SEQ ID NO: 1355391 - RNA, 19 nt, Homo sapiens
  misc_RNA (1)...(19): siRNA sense strand
gagcguaacuaugaauuuc

SEQ ID NO: 1355392 - RNA, 19 nt, Homo sapiens
  misc_RNA (1)...(19): siRNA sense strand
gaaagguuauagagucaau

SEQ ID NO: 1355393 - RNA, 19 nt, Homo sapiens
  misc_RNA (1)...(19): siRNA sense strand
ggauacagcccuuguuaga

SEQ ID NO: 1355394 - RNA, 19 nt, Homo sapiens
  misc_RNA (1)...(19): siRNA sense strand
cgagaaagaggcauuacua

SEQ ID NO: 1355395 - RNA, 19 nt, Homo sapiens
  misc_RNA (1)...(19): siRNA sense strand
ugaacaaguugcagauuug

SEQ ID NO: 1355396 - RNA, 19 nt, Homo sapiens
  misc_RNA (1)...(19): siRNA sense strand
cuaccaggcuuaauaggaa

SEQ ID NO: 1355397 - RNA, 19 nt, Homo sapiens
  misc_RNA (1)...(19): siRNA sense strand
caagaucacugggagaugu

SEQ ID NO: 1355398 - RNA, 19 nt, Homo sapiens
  misc_RNA (1)...(19): siRNA sense strand
uagaugcuguuacuaugua

SEQ ID NO: 1355399 - RNA, 19 nt, Homo sapiens
  misc_RNA (1)...(19): siRNA sense strand
gaggauauuugcaaugagu

SEQ ID NO: 1355400 - RNA, 19 nt, Homo sapiens
  misc_RNA (1)...(19): siRNA sense strand
aaagaggcauuacuauuca

SEQ ID NO: 1355401 - RNA, 19 nt, Homo sapiens
  misc_RNA (1)...(19): siRNA sense strand
ucaaaucccuucauuccau

SEQ ID NO: 1355402 - RNA, 19 nt, Homo sapiens
  misc_RNA (1)...(19): siRNA sense strand
ccacagaaagaauauugua

SEQ ID NO: 1355403 - RNA, 19 nt, Homo sapiens
  misc_RNA (1)...(19): siRNA sense strand
gcuaaaauccguaauauug

SEQ ID NO: 1355404 - RNA, 19 nt, Homo sapiens
  misc_RNA (1)...(19): siRNA sense strand
cugaagagcguaacuauga

SEQ ID NO: 1355405 - RNA, 19 nt, Homo sapiens
  misc_RNA (1)...(19): siRNA sense strand
ucaaaggagugguggaugu

SEQ ID NO: 1355406 - RNA, 19 nt, Homo sapiens
  misc_RNA (1)...(19): siRNA sense strand
ugaccaacauguagaaauc

SEQ ID NO: 1355407 - RNA, 19 nt, Homo sapiens
  misc_RNA (1)...(19): siRNA sense strand
auacagcccuuguuagaug

SEQ ID NO: 1355408 - RNA, 19 nt, Homo sapiens
  misc_RNA (1)...(19): siRNA sense strand
gagcaagcuuuaaguaugc

SEQ ID NO: 1355409 - RNA, 19 nt, Homo sapiens
  misc_RNA (1)...(19): siRNA sense strand
gcaauucaaaugauggaaa

SEQ ID NO: 1355410 - RNA, 19 nt, Homo sapiens
  misc_RNA (1)...(19): siRNA sense strand
aaugaaugauccugaauug

SEQ ID NO: 1355411 - RNA, 19 nt, Homo sapiens
  misc_RNA (1)...(19): siRNA sense strand
gagaaagaggcauuacuau

SEQ ID NO: 1355412 - RNA, 19 nt, Homo sapiens
  misc_RNA (1)...(19): siRNA sense strand
gaaaagaagcacagacaaa

SEQ ID NO: 1355413 - RNA, 19 nt, Homo sapiens
  misc_RNA (1)...(19): siRNA sense strand
ggagacacagugacagauu

SEQ ID NO: 1355414 - RNA, 19 nt, Homo sapiens
  misc_RNA (1)...(19): siRNA sense strand
cuacagacugcaauacaua

SEQ ID NO: 1355415 - RNA, 19 nt, Homo sapiens
  misc_RNA (1)...(19): siRNA sense strand
uugaacaaguugcagauuu

SEQ ID NO: 1355416 - RNA, 19 nt, Homo sapiens
  misc_RNA (1)...(19): siRNA sense strand
ggaaugccuuaauugaaca

SEQ ID NO: 1355417 - RNA, 19 nt, Homo sapiens
  misc_RNA (1)...(19): siRNA sense strand
gcaagcugauaaacacaau

SEQ ID NO: 1355418 - RNA, 19 nt, Homo sapiens
  misc_RNA (1)...(19): siRNA sense strand
cccaguguguauauuaaua

SEQ ID NO: 1355419 - RNA, 19 nt, Homo sapiens
  misc_RNA (1)...(19): siRNA sense strand
agaaagaggcauuacuauu

SEQ ID NO: 1355420 - RNA, 19 nt, Homo sapiens
  misc_RNA (1)...(19): siRNA sense strand
agaaaucccuucauugacu

SEQ ID NO: 1355421 - RNA, 19 nt, Homo sapiens
  misc_RNA (1)...(19): siRNA sense strand
guuagaugcuguuacuaug

SEQ ID NO: 1355422 - RNA, 19 nt, Homo sapiens
  misc_RNA (1)...(19): siRNA sense strand
gaaggaaacaacugaagca

SEQ ID NO: 1355423 - RNA, 19 nt, Homo sapiens
  misc_RNA (1)...(19): siRNA sense strand
gaggcaagcugauaaacac

SEQ ID NO: 1355424 - RNA, 19 nt, Homo sapiens
  misc_RNA (1)...(19): siRNA sense strand
ggcccagacucucacagua

SEQ ID NO: 1355425 - RNA, 19 nt, Homo sapiens
  misc_RNA (1)...(19): siRNA sense strand
guugaaagcaucagagaga

SEQ ID NO: 1355426 - RNA, 19 nt, Homo sapiens
  misc_RNA (1)...(19): siRNA sense strand
gaaaugaaugauccugaau

SEQ ID NO: 1355427 - RNA, 19 nt, Homo sapiens
  misc_RNA (1)...(19): siRNA sense strand
agaauaagucgucugcuuu

SEQ ID NO: 1355428 - RNA, 19 nt, Homo sapiens
  misc_RNA (1)...(19): siRNA sense strand
gaaagccccucuuggaaau

SEQ ID NO: 1355429 - RNA, 19 nt, Homo sapiens
  misc_RNA (1)...(19): siRNA sense strand
gcuacagacugcaauacau

SEQ ID NO: 1355430 - RNA, 19 nt, Homo sapiens
  misc_RNA (1)...(19): siRNA sense strand
ugaugaauuugcugacuug

SEQ ID NO: 1355431 - RNA, 19 nt, Homo sapiens
  misc_RNA (1)...(19): siRNA sense strand
ugaagagcguaacuaugaa

SEQ ID NO: 1355432 - RNA, 19 nt, Homo sapiens
  misc_RNA (1)...(19): siRNA sense strand
ucauauugaugcaggcaaa

SEQ ID NO: 1355433 - RNA, 19 nt, Homo sapiens
  misc_RNA (1)...(19): siRNA sense strand
gaagagcguaacuaugaau

SEQ ID NO: 1355434 - RNA, 19 nt, Homo sapiens
  misc_RNA (1)...(19): siRNA sense strand
uugcagauuuggaugauga

SEQ ID NO: 1355435 - RNA, 19 nt, Homo sapiens
  misc_RNA (1)...(19): siRNA sense strand
caaaggagugguggaugua

SEQ ID NO: 1355436 - RNA, 19 nt, Homo sapiens
  misc_RNA (1)...(19): siRNA sense strand
gagcgagaaagaggcauua

SEQ ID NO: 1355437 - RNA, 19 nt, Homo sapiens
  misc_RNA (1)...(19): siRNA sense strand
ucaauccucccauagcuaa

SEQ ID NO: 1355438 - RNA, 19 nt, Homo sapiens
  misc_RNA (1)...(19): siRNA sense strand
ggaggcaagcugauaaaca

SEQ ID NO: 1355439 - RNA, 19 nt, Homo sapiens
  misc_RNA (1)...(19): siRNA sense strand
gaugauggagacacaguga

SEQ ID NO: 1355440 - RNA, 19 nt, Homo sapiens
  misc_RNA (1)...(19): siRNA sense strand
uacccaguguguauauuaa

SEQ ID NO: 1355441 - RNA, 19 nt, Homo sapiens
  misc_RNA (1)...(19): siRNA sense strand
gaaagcaucagagagaagu

SEQ ID NO: 1355442 - RNA, 19 nt, Homo sapiens
  misc_RNA (1)...(19): siRNA sense strand
gagcggugccuaagagugu

SEQ ID NO: 1355443 - RNA, 19 nt, Homo sapiens
  misc_RNA (1)...(19): siRNA sense strand
gcuguuacauuugauugga

SEQ ID NO: 1355444 - RNA, 19 nt, Homo sapiens
  misc_RNA (1)...(19): siRNA sense strand
ccacaugugccgcuuggaa

SEQ ID NO: 1355445 - RNA, 19 nt, Homo sapiens
  misc_RNA (1)...(19): siRNA sense strand
gaaccuguuuucuucugua

SEQ ID NO: 1355446 - RNA, 19 nt, Homo sapiens
  misc_RNA (1)...(19): siRNA sense strand
gagauuccagaaccuguuu

SEQ ID NO: 1355447 - RNA, 19 nt, Homo sapiens
  misc_RNA (1)...(19): siRNA sense strand
uugaggauauuugcaauga

SEQ ID NO: 1355448 - RNA, 19 nt, Homo sapiens
  misc_RNA (1)...(19): siRNA sense strand
gcugauaaacacaauauac

SEQ ID NO: 1355449 - RNA, 19 nt, Homo sapiens
  misc_RNA (1)...(19): siRNA sense strand
guacuauuccggauauaca

SEQ ID NO: 1355450 - RNA, 19 nt, Homo sapiens
  misc_RNA (1)...(19): siRNA sense strand
ugccuuaauugaacaaguu

SEQ ID NO: 1355451 - RNA, 19 nt, Homo sapiens
  misc_RNA (1)...(19): siRNA sense strand
ugaccaacuugaggauauu

SEQ ID NO: 1355452 - RNA, 19 nt, Homo sapiens
  misc_RNA (1)...(19): siRNA sense strand
aggcauuacuauucaauca

SEQ ID NO: 1355453 - RNA, 19 nt, Homo sapiens
  misc_RNA (1)...(19): siRNA sense strand
aaacuucuuuggaauugca

SEQ ID NO: 1355454 - RNA, 19 nt, Homo sapiens
  misc_RNA (1)...(19): siRNA sense strand
gagguugagcggugccuaa

SEQ ID NO: 1355455 - RNA, 19 nt, Homo sapiens
  misc_RNA (1)...(19): siRNA sense strand
gggagauguugaugaugga

SEQ ID NO: 1355456 - RNA, 19 nt, Homo sapiens
  misc_RNA (1)...(19): siRNA sense strand
ggagauuccagaaccuguu

SEQ ID NO: 1355457 - RNA, 19 nt, Homo sapiens
  misc_RNA (1)...(19): siRNA sense strand
aaacaaugaagcagagaga

SEQ ID NO: 1355458 - RNA, 19 nt, Homo sapiens
  misc_RNA (1)...(19): siRNA sense strand
gaauaagucgucugcuuuu

SEQ ID NO: 1355459 - RNA, 19 nt, Homo sapiens
  misc_RNA (1)...(19): siRNA sense strand
gcguaacuaugaauuucug

SEQ ID NO: 1355460 - RNA, 19 nt, Homo sapiens
  misc_RNA (1)...(19): siRNA sense strand
ugacuugguuuuagaagaa

SEQ ID NO: 1355461 - RNA, 19 nt, Homo sapiens
  misc_RNA (1)...(19): siRNA sense strand
agugguggauguaguaaug

SEQ ID NO: 1355462 - RNA, 19 nt, Homo sapiens
  misc_RNA (1)...(19): siRNA sense strand
cacaauauaccucgaaucu

SEQ ID NO: 1355463 - RNA, 19 nt, Homo sapiens
  misc_RNA (1)...(19): siRNA sense strand
guauggaggcaagcugaua

SEQ ID NO: 1355464 - RNA, 19 nt, Homo sapiens
  misc_RNA (1)...(19): siRNA sense strand
gugcaguggcuguauuuga

SEQ ID NO: 1355465 - RNA, 19 nt, Homo sapiens
  misc_RNA (1)...(19): siRNA sense strand
guugagcggugccuaagag

SEQ ID NO: 1355466 - RNA, 19 nt, Homo sapiens
  misc_RNA (1)...(19): siRNA sense strand
cagauuucauggcccaaga

SEQ ID NO: 1355467 - RNA, 19 nt, Homo sapiens
  misc_RNA (1)...(19): siRNA sense strand
caccacagaaagaauauug

SEQ ID NO: 1355468 - RNA, 19 nt, Homo sapiens
  misc_RNA (1)...(19): siRNA sense strand
gcagagagacuuuuauugg

SEQ ID NO: 1355469 - RNA, 19 nt, Homo sapiens
  misc_RNA (1)...(19): siRNA sense strand
gcugguaacauugcuuuga

SEQ ID NO: 1355470 - RNA, 19 nt, Homo sapiens
  misc_RNA (1)...(19): siRNA sense strand
ggcuuaauaggaaaugaua

SEQ ID NO: 1355471 - RNA, 19 nt, Homo sapiens
  misc_RNA (1)...(19): siRNA sense strand
guuacuauguacuuaccuu

SEQ ID NO: 1355472 - RNA, 19 nt, Homo sapiens
  misc_RNA (1)...(19): siRNA sense strand
gaugaugaauuugcugacu

SEQ ID NO: 1355473 - RNA, 19 nt, Homo sapiens
  misc_RNA (1)...(19): siRNA sense strand
uaaacaagauggacaaaac

SEQ ID NO: 1355474 - RNA, 19 nt, Homo sapiens
  misc_RNA (1)...(19): siRNA sense strand
uggaaagguuauagaguca

SEQ ID NO: 1355475 - RNA, 19 nt, Homo sapiens
  misc_RNA (1)...(19): siRNA sense strand
caucaauccucccauagcu

SEQ ID NO: 1355476 - RNA, 19 nt, Homo sapiens
  misc_RNA (1)...(19): siRNA sense strand
uaccaccacagaaagaaua

SEQ ID NO: 1355477 - RNA, 19 nt, Homo sapiens
  misc_RNA (1)...(19): siRNA sense strand
aggaaugccuuaauugaac

SEQ ID NO: 1355478 - RNA, 19 nt, Homo sapiens
  misc_RNA (1)...(19): siRNA sense strand
gcccagacucucacaguau

SEQ ID NO: 1355479 - RNA, 19 nt, Homo sapiens
  misc_RNA (1)...(19): siRNA sense strand
ugaugccucugcuggugua

SEQ ID NO: 1355480 - RNA, 19 nt, Homo sapiens
  misc_RNA (1)...(19): siRNA sense strand
gaaagaggcauuacuauuc

SEQ ID NO: 1355481 - RNA, 19 nt, Homo sapiens
  misc_RNA (1)...(19): siRNA sense strand
ggagcaagcuuuaaguaug

SEQ ID NO: 1355482 - RNA, 19 nt, Homo sapiens
  misc_RNA (1)...(19): siRNA sense strand
ggaaaugaaugauccugaa

SEQ ID NO: 1355483 - RNA, 19 nt, Homo sapiens
  misc_RNA (1)...(19): siRNA sense strand
caauauaccucgaaucugu

SEQ ID NO: 1355484 - RNA, 19 nt, Homo sapiens
  misc_RNA (1)...(19): siRNA sense strand
gauaucaaaucccuucauu

SEQ ID NO: 1355485 - RNA, 19 nt, Homo sapiens
  misc_RNA (1)...(19): siRNA sense strand
gagaauaagucgucugcuu

SEQ ID NO: 1355486 - RNA, 19 nt, Homo sapiens
  misc_RNA (1)...(19): siRNA sense strand
guagaaaucccuucauuga

SEQ ID NO: 1355487 - RNA, 19 nt, Homo sapiens
  misc_RNA (1)...(19): siRNA sense strand
caucaucaauccucccaua

SEQ ID NO: 1355488 - RNA, 19 nt, Homo sapiens
  misc_RNA (1)...(19): siRNA sense strand
gagagaaguuaaaggcaaa

SEQ ID NO: 1355489 - RNA, 19 nt, Homo sapiens
  misc_RNA (1)...(19): siRNA sense strand
gagacacagugacagauuu

SEQ ID NO: 1355490 - RNA, 19 nt, Homo sapiens
  misc_RNA (1)...(19): siRNA sense strand
ugaauuugcugacuugguu

SEQ ID NO: 1355491 - RNA, 19 nt, Homo sapiens
  misc_RNA (1)...(19): siRNA sense strand
gagcguaacuaugaauuuc

SEQ ID NO: 1355492 - RNA, 19 nt, Homo sapiens
  misc_RNA (1)...(19): siRNA sense strand
gaaagguuauagagucaau

SEQ ID NO: 1355493 - RNA, 19 nt, Homo sapiens
  misc_RNA (1)...(19): siRNA sense strand
ggauacagcccuuguuaga

SEQ ID NO: 1355494 - RNA, 19 nt, Homo sapiens
  misc_RNA (1)...(19): siRNA sense strand
cgagaaagaggcauuacua

SEQ ID NO: 1355495 - RNA, 19 nt, Homo sapiens
  misc_RNA (1)...(19): siRNA sense strand
ugaacaaguugcagauuug

SEQ ID NO: 1355496 - RNA, 19 nt, Homo sapiens
  misc_RNA (1)...(19): siRNA sense strand
cuaccaggcuuaauaggaa

SEQ ID NO: 1355497 - RNA, 19 nt, Homo sapiens
  misc_RNA (1)...(19): siRNA sense strand
caagaucacugggagaugu

SEQ ID NO: 1355498 - RNA, 19 nt, Homo sapiens
  misc_RNA (1)...(19): siRNA sense strand
uagaugcuguuacuaugua

SEQ ID NO: 1355499 - RNA, 19 nt, Homo sapiens
  misc_RNA (1)...(19): siRNA sense strand
gaggauauuugcaaugagu

SEQ ID NO: 1355500 - RNA, 19 nt, Homo sapiens
  misc_RNA (1)...(19): siRNA sense strand
aaagaggcauuacuauuca

SEQ ID NO: 1355501 - RNA, 19 nt, Homo sapiens
  misc_RNA (1)...(19): siRNA sense strand
ucaaaucccuucauuccau

SEQ ID NO: 1355502 - RNA, 19 nt, Homo sapiens
  misc_RNA (1)...(19): siRNA sense strand
ccacagaaagaauauugua

SEQ ID NO: 1355503 - RNA, 19 nt, Homo sapiens
  misc_RNA (1)...(19): siRNA sense strand
gcuaaaauccguaauauug

SEQ ID NO: 1355504 - RNA, 19 nt, Homo sapiens
  misc_RNA (1)...(19): siRNA sense strand
cugaagagcguaacuauga

SEQ ID NO: 1355505 - RNA, 19 nt, Homo sapiens
  misc_RNA (1)...(19): siRNA sense strand
ucaaaggagugguggaugu

SEQ ID NO: 1355506 - RNA, 19 nt, Homo sapiens
  misc_RNA (1)...(19): siRNA sense strand
ugaccaacauguagaaauc

SEQ ID NO: 1355507 - RNA, 19 nt, Homo sapiens
  misc_RNA (1)...(19): siRNA sense strand
auacagcccuuguuagaug

SEQ ID NO: 1355508 - RNA, 19 nt, Homo sapiens
  misc_RNA (1)...(19): siRNA sense strand
gagcaagcuuuaaguaugc

SEQ ID NO: 1355509 - RNA, 19 nt, Homo sapiens
  misc_RNA (1)...(19): siRNA sense strand
gcaauucaaaugauggaaa

SEQ ID NO: 1355510 - RNA, 19 nt, Homo sapiens
  misc_RNA (1)...(19): siRNA sense strand
aaugaaugauccugaauug

SEQ ID NO: 1355511 - RNA, 19 nt, Homo sapiens
  misc_RNA (1)...(19): siRNA sense strand
gagaaagaggcauuacuau

SEQ ID NO: 1355512 - RNA, 19 nt, Homo sapiens
  misc_RNA (1)...(19): siRNA sense strand
gaaaagaagcacagacaaa

SEQ ID NO: 1355513 - RNA, 19 nt, Homo sapiens
  misc_RNA (1)...(19): siRNA sense strand
ggagacacagugacagauu

SEQ ID NO: 1355514 - RNA, 19 nt, Homo sapiens
  misc_RNA (1)...(19): siRNA sense strand
cuacagacugcaauacaua

SEQ ID NO: 1355515 - RNA, 19 nt, Homo sapiens
  misc_RNA (1)...(19): siRNA sense strand
uugaacaaguugcagauuu

SEQ ID NO: 1355516 - RNA, 19 nt, Homo sapiens
  misc_RNA (1)...(19): siRNA sense strand
ggaaugccuuaauugaaca

SEQ ID NO: 1355517 - RNA, 19 nt, Homo sapiens
  misc_RNA (1)...(19): siRNA sense strand
gcaagcugauaaacacaau

SEQ ID NO: 1355518 - RNA, 19 nt, Homo sapiens
  misc_RNA (1)...(19): siRNA sense strand
cccaguguguauauuaaua

SEQ ID NO: 1355519 - RNA, 19 nt, Homo sapiens
  misc_RNA (1)...(19): siRNA sense strand
agaaagaggcauuacuauu

SEQ ID NO: 1355520 - RNA, 19 nt, Homo sapiens
  misc_RNA (1)...(19): siRNA sense strand
agaaaucccuucauugacu

SEQ ID NO: 1355521 - RNA, 19 nt, Homo sapiens
  misc_RNA (1)...(19): siRNA sense strand
guuagaugcuguuacuaug

SEQ ID NO: 1355522 - RNA, 19 nt, Homo sapiens
  misc_RNA (1)...(19): siRNA sense strand
gaaggaaacaacugaagca

SEQ ID NO: 1355523 - RNA, 19 nt, Homo sapiens
  misc_RNA (1)...(19): siRNA sense strand
gaggcaagcugauaaacac

SEQ ID NO: 1355524 - RNA, 19 nt, Homo sapiens
  misc_RNA (1)...(19): siRNA sense strand
ggcccagacucucacagua

SEQ ID NO: 1355525 - RNA, 19 nt, Homo sapiens
  misc_RNA (1)...(19): siRNA sense strand
guugaaagcaucagagaga

SEQ ID NO: 1355526 - RNA, 19 nt, Homo sapiens
  misc_RNA (1)...(19): siRNA sense strand
gaaaugaaugauccugaau

SEQ ID NO: 1355527 - RNA, 19 nt, Homo sapiens
  misc_RNA (1)...(19): siRNA sense strand
agaauaagucgucugcuuu

SEQ ID NO: 1355528 - RNA, 19 nt, Homo sapiens
  misc_RNA (1)...(19): siRNA sense strand
gaaagccccucuuggaaau

SEQ ID NO: 1355529 - RNA, 19 nt, Homo sapiens
  misc_RNA (1)...(19): siRNA sense strand
gcuacagacugcaauacau

SEQ ID NO: 1355530 - RNA, 19 nt, Homo sapiens
  misc_RNA (1)...(19): siRNA sense strand
ugaugaauuugcugacuug

SEQ ID NO: 1355531 - RNA, 19 nt, Homo sapiens
  misc_RNA (1)...(19): siRNA sense strand
ugaagagcguaacuaugaa

SEQ ID NO: 1355532 - RNA, 19 nt, Homo sapiens
  misc_RNA (1)...(19): siRNA sense strand
ucauauugaugcaggcaaa

SEQ ID NO: 1355533 - RNA, 19 nt, Homo sapiens
  misc_RNA (1)...(19): siRNA sense strand
gaagagcguaacuaugaau

SEQ ID NO: 1355534 - RNA, 19 nt, Homo sapiens
  misc_RNA (1)...(19): siRNA sense strand
uugcagauuuggaugauga

SEQ ID NO: 1355535 - RNA, 19 nt, Homo sapiens
  misc_RNA (1)...(19): siRNA sense strand
caaaggagugguggaugua

SEQ ID NO: 1355536 - RNA, 19 nt, Homo sapiens
  misc_RNA (1)...(19): siRNA sense strand
gagcgagaaagaggcauua

SEQ ID NO: 1355537 - RNA, 19 nt, Homo sapiens
  misc_RNA (1)...(19): siRNA sense strand
ucaauccucccauagcuaa

SEQ ID NO: 1355538 - RNA, 19 nt, Homo sapiens
  misc_RNA (1)...(19): siRNA sense strand
ggaggcaagcugauaaaca

SEQ ID NO: 1355539 - RNA, 19 nt, Homo sapiens
  misc_RNA (1)...(19): siRNA sense strand
gaugauggagacacaguga

SEQ ID NO: 1355540 - RNA, 19 nt, Homo sapiens
  misc_RNA (1)...(19): siRNA sense strand
uacccaguguguauauuaa

SEQ ID NO: 1355541 - RNA, 19 nt, Homo sapiens
  misc_RNA (1)...(19): siRNA sense strand
gaaagcaucagagagaagu

SEQ ID NO: 1355542 - RNA, 19 nt, Homo sapiens
  misc_RNA (1)...(19): siRNA sense strand
gagcggugccuaagagugu

SEQ ID NO: 1355543 - RNA, 19 nt, Homo sapiens
  misc_RNA (1)...(19): siRNA sense strand
gcuguuacauuugauugga

SEQ ID NO: 1355544 - RNA, 19 nt, Homo sapiens
  misc_RNA (1)...(19): siRNA sense strand
ccacaugugccgcuuggaa

SEQ ID NO: 1355545 - RNA, 19 nt, Homo sapiens
  misc_RNA (1)...(19): siRNA sense strand
gaaccuguuuucuucugua

SEQ ID NO: 1355546 - RNA, 19 nt, Homo sapiens
  misc_RNA (1)...(19): siRNA sense strand
gagauuccagaaccuguuu

SEQ ID NO: 1355547 - RNA, 19 nt, Homo sapiens
  misc_RNA (1)...(19): siRNA sense strand
uugaggauauuugcaauga

SEQ ID NO: 1355548 - RNA, 19 nt, Homo sapiens
  misc_RNA (1)...(19): siRNA sense strand
gcugauaaacacaauauac

SEQ ID NO: 1355549 - RNA, 19 nt, Homo sapiens
  misc_RNA (1)...(19): siRNA sense strand
guacuauuccggauauaca

SEQ ID NO: 1355550 - RNA, 19 nt, Homo sapiens
  misc_RNA (1)...(19): siRNA sense strand
ugccuuaauugaacaaguu

SEQ ID NO: 1355551 - RNA, 19 nt, Homo sapiens
  misc_RNA (1)...(19): siRNA sense strand
ugaccaacuugaggauauu

SEQ ID NO: 1355552 - RNA, 19 nt, Homo sapiens
  misc_RNA (1)...(19): siRNA sense strand
aggcauuacuauucaauca

SEQ ID NO: 1355553 - RNA, 19 nt, Homo sapiens
  misc_RNA (1)...(19): siRNA sense strand
aaacuucuuuggaauugca

SEQ ID NO: 1355554 - RNA, 19 nt, Homo sapiens
  misc_RNA (1)...(19): siRNA sense strand
gagguugagcggugccuaa

SEQ ID NO: 1355555 - RNA, 19 nt, Homo sapiens
  misc_RNA (1)...(19): siRNA sense strand
gggagauguugaugaugga

SEQ ID NO: 1355556 - RNA, 19 nt, Homo sapiens
  misc_RNA (1)...(19): siRNA sense strand
ggagauuccagaaccuguu

SEQ ID NO: 1355557 - RNA, 19 nt, Homo sapiens
  misc_RNA (1)...(19): siRNA sense strand
aaacaaugaagcagagaga

SEQ ID NO: 1355558 - RNA, 19 nt, Homo sapiens
  misc_RNA (1)...(19): siRNA sense strand
gaauaagucgucugcuuuu

SEQ ID NO: 1355559 - RNA, 19 nt, Homo sapiens
  misc_RNA (1)...(19): siRNA sense strand
gcguaacuaugaauuucug

SEQ ID NO: 1355560 - RNA, 19 nt, Homo sapiens
  misc_RNA (1)...(19): siRNA sense strand
ugacuugguuuuagaagaa

SEQ ID NO: 1355561 - RNA, 19 nt, Homo sapiens
  misc_RNA (1)...(19): siRNA sense strand
agugguggauguaguaaug

SEQ ID NO: 1355562 - RNA, 19 nt, Homo sapiens
  misc_RNA (1)...(19): siRNA sense strand
cacaauauaccucgaaucu

SEQ ID NO: 1355563 - RNA, 19 nt, Homo sapiens
  misc_RNA (1)...(19): siRNA sense strand
guauggaggcaagcugaua

SEQ ID NO: 1355564 - RNA, 19 nt, Homo sapiens
  misc_RNA (1)...(19): siRNA sense strand
gugcaguggcuguauuuga

SEQ ID NO: 1355565 - RNA, 19 nt, Homo sapiens
  misc_RNA (1)...(19): siRNA sense strand
guugagcggugccuaagag

SEQ ID NO: 1355566 - RNA, 19 nt, Homo sapiens
  misc_RNA (1)...(19): siRNA sense strand
cagauuucauggcccaaga

SEQ ID NO: 1355567 - RNA, 19 nt, Homo sapiens
  misc_RNA (1)...(19): siRNA sense strand
caccacagaaagaauauug

SEQ ID NO: 1355568 - RNA, 19 nt, Homo sapiens
  misc_RNA (1)...(19): siRNA sense strand
gcagagagacuuuuauugg

SEQ ID NO: 1355569 - RNA, 19 nt, Homo sapiens
  misc_RNA (1)...(19): siRNA sense strand
gcugguaacauugcuuuga

SEQ ID NO: 1355570 - RNA, 19 nt, Homo sapiens
  misc_RNA (1)...(19): siRNA sense strand
ggcuuaauaggaaaugaua

SEQ ID NO: 1355571 - RNA, 19 nt, Homo sapiens
  misc_RNA (1)...(19): siRNA sense strand
guuacuauguacuuaccuu

SEQ ID NO: 1355572 - RNA, 19 nt, Homo sapiens
  misc_RNA (1)...(19): siRNA sense strand
gaugaugaauuugcugacu

SEQ ID NO: 1355573 - RNA, 19 nt, Homo sapiens
  misc_RNA (1)...(19): siRNA sense strand
uaaacaagauggacaaaac

SEQ ID NO: 1355574 - RNA, 19 nt, Homo sapiens
  misc_RNA (1)...(19): siRNA sense strand
uggaaagguuauagaguca

SEQ ID NO: 1355575 - RNA, 19 nt, Homo sapiens
  misc_RNA (1)...(19): siRNA sense strand
caucaauccucccauagcu

SEQ ID NO: 1355576 - RNA, 19 nt, Homo sapiens
  misc_RNA (1)...(19): siRNA sense strand
uaccaccacagaaagaaua

SEQ ID NO: 1355577 - RNA, 19 nt, Homo sapiens
  misc_RNA (1)...(19): siRNA sense strand
aggaaugccuuaauugaac

SEQ ID NO: 1355578 - RNA, 19 nt, Homo sapiens
  misc_RNA (1)...(19): siRNA sense strand
gcccagacucucacaguau

SEQ ID NO: 1355579 - RNA, 19 nt, Homo sapiens
  misc_RNA (1)...(19): siRNA sense strand
ugaugccucugcuggugua

SEQ ID NO: 1355580 - RNA, 19 nt, Homo sapiens
  misc_RNA (1)...(19): siRNA sense strand
gaaagaggcauuacuauuc

SEQ ID NO: 1355581 - RNA, 19 nt, Homo sapiens
  misc_RNA (1)...(19): siRNA sense strand
ggagcaagcuuuaaguaug

SEQ ID NO: 1355582 - RNA, 19 nt, Homo sapiens
  misc_RNA (1)...(19): siRNA sense strand
ggaaaugaaugauccugaa

SEQ ID NO: 1355583 - RNA, 19 nt, Homo sapiens
  misc_RNA (1)...(19): siRNA sense strand
caauauaccucgaaucugu

SEQ ID NO: 1355584 - RNA, 19 nt, Homo sapiens
  misc_RNA (1)...(19): siRNA sense strand
gauaucaaaucccuucauu

SEQ ID NO: 1355585 - RNA, 19 nt, Homo sapiens
  misc_RNA (1)...(19): siRNA sense strand
gagaauaagucgucugcuu

SEQ ID NO: 1355586 - RNA, 19 nt, Homo sapiens
  misc_RNA (1)...(19): siRNA sense strand
guagaaaucccuucauuga

SEQ ID NO: 1355587 - RNA, 19 nt, Homo sapiens
  misc_RNA (1)...(19): siRNA sense strand
caucaucaauccucccaua

SEQ ID NO: 1355588 - RNA, 19 nt, Homo sapiens
  misc_RNA (1)...(19): siRNA sense strand
gagagaaguuaaaggcaaa

SEQ ID NO: 1355589 - RNA, 19 nt, Homo sapiens
  misc_RNA (1)...(19): siRNA sense strand
gagacacagugacagauuu

SEQ ID NO: 1355590 - RNA, 19 nt, Homo sapiens
  misc_RNA (1)...(19): siRNA sense strand
ugaauuugcugacuugguu

SEQ ID NO: 1355591 - RNA, 19 nt, Homo sapiens
  misc_RNA (1)...(19): siRNA sense strand
gagcguaacuaugaauuuc

SEQ ID NO: 1355592 - RNA, 19 nt, Homo sapiens
  misc_RNA (1)...(19): siRNA sense strand
gaaagguuauagagucaau

SEQ ID NO: 1355593 - RNA, 19 nt, Homo sapiens
  misc_RNA (1)...(19): siRNA sense strand
ggauacagcccuuguuaga

SEQ ID NO: 1355594 - RNA, 19 nt, Homo sapiens
  misc_RNA (1)...(19): siRNA sense strand
cgagaaagaggcauuacua

SEQ ID NO: 1355595 - RNA, 19 nt, Homo sapiens
  misc_RNA (1)...(19): siRNA sense strand
ugaacaaguugcagauuug

SEQ ID NO: 1355596 - RNA, 19 nt, Homo sapiens
  misc_RNA (1)...(19): siRNA sense strand
cuaccaggcuuaauaggaa

SEQ ID NO: 1355597 - RNA, 19 nt, Homo sapiens
  misc_RNA (1)...(19): siRNA sense strand
caagaucacugggagaugu

SEQ ID NO: 1355598 - RNA, 19 nt, Homo sapiens
  misc_RNA (1)...(19): siRNA sense strand
uagaugcuguuacuaugua

SEQ ID NO: 1355599 - RNA, 19 nt, Homo sapiens
  misc_RNA (1)...(19): siRNA sense strand
gaggauauuugcaaugagu

SEQ ID NO: 1355600 - RNA, 19 nt, Homo sapiens
  misc_RNA (1)...(19): siRNA sense strand
aaagaggcauuacuauuca

SEQ ID NO: 1355601 - RNA, 19 nt, Homo sapiens
  misc_RNA (1)...(19): siRNA sense strand
ucaaaucccuucauuccau

SEQ ID NO: 1355602 - RNA, 19 nt, Homo sapiens
  misc_RNA (1)...(19): siRNA sense strand
ccacagaaagaauauugua

SEQ ID NO: 1355603 - RNA, 19 nt, Homo sapiens
  misc_RNA (1)...(19): siRNA sense strand
gcuaaaauccguaauauug

SEQ ID NO: 1355604 - RNA, 19 nt, Homo sapiens
  misc_RNA (1)...(19): siRNA sense strand
cugaagagcguaacuauga

SEQ ID NO: 1355605 - RNA, 19 nt, Homo sapiens
  misc_RNA (1)...(19): siRNA sense strand
ucaaaggagugguggaugu

SEQ ID NO: 1355606 - RNA, 19 nt, Homo sapiens
  misc_RNA (1)...(19): siRNA sense strand
ugaccaacauguagaaauc

SEQ ID NO: 1355607 - RNA, 19 nt, Homo sapiens
  misc_RNA (1)...(19): siRNA sense strand
auacagcccuuguuagaug

SEQ ID NO: 1355608 - RNA, 19 nt, Homo sapiens
  misc_RNA (1)...(19): siRNA sense strand
gagcaagcuuuaaguaugc

SEQ ID NO: 1355609 - RNA, 19 nt, Homo sapiens
  misc_RNA (1)...(19): siRNA sense strand
gcaauucaaaugauggaaa

SEQ ID NO: 1355610 - RNA, 19 nt, Homo sapiens
  misc_RNA (1)...(19): siRNA sense strand
aaugaaugauccugaauug

SEQ ID NO: 1355611 - RNA, 19 nt, Homo sapiens
  misc_RNA (1)...(19): siRNA sense strand
gagaaagaggcauuacuau

SEQ ID NO: 1355612 - RNA, 19 nt, Homo sapiens
  misc_RNA (1)...(19): siRNA sense strand
gaaaagaagcacagacaaa

SEQ ID NO: 1355613 - RNA, 19 nt, Homo sapiens
  misc_RNA (1)...(19): siRNA sense strand
ggagacacagugacagauu

SEQ ID NO: 1355614 - RNA, 19 nt, Homo sapiens
  misc_RNA (1)...(19): siRNA sense strand
cuacagacugcaauacaua

SEQ ID NO: 1355615 - RNA, 19 nt, Homo sapiens
  misc_RNA (1)...(19): siRNA sense strand
uugaacaaguugcagauuu

SEQ ID NO: 1355616 - RNA, 19 nt, Homo sapiens
  misc_RNA (1)...(19): siRNA sense strand
ggaaugccuuaauugaaca

SEQ ID NO: 1355617 - RNA, 19 nt, Homo sapiens
  misc_RNA (1)...(19): siRNA sense strand
gcaagcugauaaacacaau

SEQ ID NO: 1355618 - RNA, 19 nt, Homo sapiens
  misc_RNA (1)...(19): siRNA sense strand
cccaguguguauauuaaua

SEQ ID NO: 1355619 - RNA, 19 nt, Homo sapiens
  misc_RNA (1)...(19): siRNA sense strand
agaaagaggcauuacuauu

SEQ ID NO: 1355620 - RNA, 19 nt, Homo sapiens
  misc_RNA (1)...(19): siRNA sense strand
agaaaucccuucauugacu

SEQ ID NO: 1355621 - RNA, 19 nt, Homo sapiens
  misc_RNA (1)...(19): siRNA sense strand
guuagaugcuguuacuaug

SEQ ID NO: 1355622 - RNA, 19 nt, Homo sapiens
  misc_RNA (1)...(19): siRNA sense strand
gaaggaaacaacugaagca

SEQ ID NO: 1355623 - RNA, 19 nt, Homo sapiens
  misc_RNA (1)...(19): siRNA sense strand
gaggcaagcugauaaacac

SEQ ID NO: 1355624 - RNA, 19 nt, Homo sapiens
  misc_RNA (1)...(19): siRNA sense strand
ggcccagacucucacagua

SEQ ID NO: 1355625 - RNA, 19 nt, Homo sapiens
  misc_RNA (1)...(19): siRNA sense strand
guugaaagcaucagagaga

SEQ ID NO: 1355626 - RNA, 19 nt, Homo sapiens
  misc_RNA (1)...(19): siRNA sense strand
gaaaugaaugauccugaau

SEQ ID NO: 1355627 - RNA, 19 nt, Homo sapiens
  misc_RNA (1)...(19): siRNA sense strand
agaauaagucgucugcuuu

SEQ ID NO: 1355628 - RNA, 19 nt, Homo sapiens
  misc_RNA (1)...(19): siRNA sense strand
gaaagccccucuuggaaau

SEQ ID NO: 1355629 - RNA, 19 nt, Homo sapiens
  misc_RNA (1)...(19): siRNA sense strand
gcuacagacugcaauacau

SEQ ID NO: 1355630 - RNA, 19 nt, Homo sapiens
  misc_RNA (1)...(19): siRNA sense strand
ugaugaauuugcugacuug

SEQ ID NO: 1355631 - RNA, 19 nt, Homo sapiens
  misc_RNA (1)...(19): siRNA sense strand
ugaagagcguaacuaugaa

SEQ ID NO: 1355632 - RNA, 19 nt, Homo sapiens
  misc_RNA (1)...(19): siRNA sense strand
ucauauugaugcaggcaaa

SEQ ID NO: 1355633 - RNA, 19 nt, Homo sapiens
  misc_RNA (1)...(19): siRNA sense strand
gaagagcguaacuaugaau

SEQ ID NO: 1355634 - RNA, 19 nt, Homo sapiens
  misc_RNA (1)...(19): siRNA sense strand
uugcagauuuggaugauga

SEQ ID NO: 1355635 - RNA, 19 nt, Homo sapiens
  misc_RNA (1)...(19): siRNA sense strand
caaaggagugguggaugua

SEQ ID NO: 1355636 - RNA, 19 nt, Homo sapiens
  misc_RNA (1)...(19): siRNA sense strand
gagcgagaaagaggcauua

SEQ ID NO: 1355637 - RNA, 19 nt, Homo sapiens
  misc_RNA (1)...(19): siRNA sense strand
ucaauccucccauagcuaa

SEQ ID NO: 1355638 - RNA, 19 nt, Homo sapiens
  misc_RNA (1)...(19): siRNA sense strand
ggaggcaagcugauaaaca

SEQ ID NO: 1355639 - RNA, 19 nt, Homo sapiens
  misc_RNA (1)...(19): siRNA sense strand
gaugauggagacacaguga

SEQ ID NO: 1355640 - RNA, 19 nt, Homo sapiens
  misc_RNA (1)...(19): siRNA sense strand
uacccaguguguauauuaa

SEQ ID NO: 1355641 - RNA, 19 nt, Homo sapiens
  misc_RNA (1)...(19): siRNA sense strand
gaaagcaucagagagaagu

SEQ ID NO: 1355642 - RNA, 19 nt, Homo sapiens
  misc_RNA (1)...(19): siRNA sense strand
gagcggugccuaagagugu

SEQ ID NO: 1355643 - RNA, 19 nt, Homo sapiens
  misc_RNA (1)...(19): siRNA sense strand
gcuguuacauuugauugga

SEQ ID NO: 1355644 - RNA, 19 nt, Homo sapiens
  misc_RNA (1)...(19): siRNA sense strand
ccacaugugccgcuuggaa

SEQ ID NO: 1355645 - RNA, 19 nt, Homo sapiens
  misc_RNA (1)...(19): siRNA sense strand
gaaccuguuuucuucugua

SEQ ID NO: 1355646 - RNA, 19 nt, Homo sapiens
  misc_RNA (1)...(19): siRNA sense strand
gagauuccagaaccuguuu

SEQ ID NO: 1355647 - RNA, 19 nt, Homo sapiens
  misc_RNA (1)...(19): siRNA sense strand
uugaggauauuugcaauga

SEQ ID NO: 1355648 - RNA, 19 nt, Homo sapiens
  misc_RNA (1)...(19): siRNA sense strand
gcugauaaacacaauauac

SEQ ID NO: 1355649 - RNA, 19 nt, Homo sapiens
  misc_RNA (1)...(19): siRNA sense strand
guacuauuccggauauaca

SEQ ID NO: 1355650 - RNA, 19 nt, Homo sapiens
  misc_RNA (1)...(19): siRNA sense strand
ugccuuaauugaacaaguu

SEQ ID NO: 1355651 - RNA, 19 nt, Homo sapiens
  misc_RNA (1)...(19): siRNA sense strand
ugaccaacuugaggauauu

SEQ ID NO: 1355652 - RNA, 19 nt, Homo sapiens
  misc_RNA (1)...(19): siRNA sense strand
aggcauuacuauucaauca

SEQ ID NO: 1355653 - RNA, 19 nt, Homo sapiens
  misc_RNA (1)...(19): siRNA sense strand
aaacuucuuuggaauugca

SEQ ID NO: 1355654 - RNA, 19 nt, Homo sapiens
  misc_RNA (1)...(19): siRNA sense strand
gagguugagcggugccuaa

SEQ ID NO: 1355655 - RNA, 19 nt, Homo sapiens
  misc_RNA (1)...(19): siRNA sense strand
gggagauguugaugaugga

SEQ ID NO: 1355656 - RNA, 19 nt, Homo sapiens
  misc_RNA (1)...(19): siRNA sense strand
ggagauuccagaaccuguu

SEQ ID NO: 1355657 - RNA, 19 nt, Homo sapiens
  misc_RNA (1)...(19): siRNA sense strand
aaacaaugaagcagagaga

SEQ ID NO: 1355658 - RNA, 19 nt, Homo sapiens
  misc_RNA (1)...(19): siRNA sense strand
gaauaagucgucugcuuuu

SEQ ID NO: 1355659 - RNA, 19 nt, Homo sapiens
  misc_RNA (1)...(19): siRNA sense strand
gcguaacuaugaauuucug

SEQ ID NO: 1355660 - RNA, 19 nt, Homo sapiens
  misc_RNA (1)...(19): siRNA sense strand
ugacuugguuuuagaagaa

SEQ ID NO: 1355661 - RNA, 19 nt, Homo sapiens
  misc_RNA (1)...(19): siRNA sense strand
agugguggauguaguaaug

SEQ ID NO: 1355662 - RNA, 19 nt, Homo sapiens
  misc_RNA (1)...(19): siRNA sense strand
cacaauauaccucgaaucu

SEQ ID NO: 1355663 - RNA, 19 nt, Homo sapiens
  misc_RNA (1)...(19): siRNA sense strand
guauggaggcaagcugaua

SEQ ID NO: 1355664 - RNA, 19 nt, Homo sapiens
  misc_RNA (1)...(19): siRNA sense strand
gugcaguggcuguauuuga

SEQ ID NO: 1355665 - RNA, 19 nt, Homo sapiens
  misc_RNA (1)...(19): siRNA sense strand
guugagcggugccuaagag

SEQ ID NO: 1355666 - RNA, 19 nt, Homo sapiens
  misc_RNA (1)...(19): siRNA sense strand
cagauuucauggcccaaga

SEQ ID NO: 1355667 - RNA, 19 nt, Homo sapiens
  misc_RNA (1)...(19): siRNA sense strand
caccacagaaagaauauug

SEQ ID NO: 1355668 - RNA, 19 nt, Homo sapiens
  misc_RNA (1)...(19): siRNA sense strand
gcagagagacuuuuauugg

SEQ ID NO: 1355669 - RNA, 19 nt, Homo sapiens
  misc_RNA (1)...(19): siRNA sense strand
gcugguaacauugcuuuga

SEQ ID NO: 1355670 - RNA, 19 nt, Homo sapiens
  misc_RNA (1)...(19): siRNA sense strand
ggcuuaauaggaaaugaua

SEQ ID NO: 1355671 - RNA, 19 nt, Homo sapiens
  misc_RNA (1)...(19): siRNA sense strand
guuacuauguacuuaccuu

SEQ ID NO: 1355672 - RNA, 19 nt, Homo sapiens
  misc_RNA (1)...(19): siRNA sense strand
gaugaugaauuugcugacu

SEQ ID NO: 1355673 - RNA, 19 nt, Homo sapiens
  misc_RNA (1)...(19): siRNA sense strand
uaaacaagauggacaaaac

SEQ ID NO: 1355674 - RNA, 19 nt, Homo sapiens
  misc_RNA (1)...(19): siRNA sense strand
uggaaagguuauagaguca

SEQ ID NO: 1355675 - RNA, 19 nt, Homo sapiens
  misc_RNA (1)...(19): siRNA sense strand
caucaauccucccauagcu

SEQ ID NO: 1355676 - RNA, 19 nt, Homo sapiens
  misc_RNA (1)...(19): siRNA sense strand
uaccaccacagaaagaaua

SEQ ID NO: 1355677 - RNA, 19 nt, Homo sapiens
  misc_RNA (1)...(19): siRNA sense strand
aggaaugccuuaauugaac

SEQ ID NO: 1355678 - RNA, 19 nt, Homo sapiens
  misc_RNA (1)...(19): siRNA sense strand
gcccagacucucacaguau

SEQ ID NO: 1355679 - RNA, 19 nt, Homo sapiens
  misc_RNA (1)...(19): siRNA sense strand
ugaugccucugcuggugua

SEQ ID NO: 1355680 - RNA, 19 nt, Homo sapiens
  misc_RNA (1)...(19): siRNA sense strand
ucacagagcucgcacacaa

SEQ ID NO: 1355681 - RNA, 19 nt, Homo sapiens
  misc_RNA (1)...(19): siRNA sense strand
cuacagccauaagaaauuu

SEQ ID NO: 1355682 - RNA, 19 nt, Homo sapiens
  misc_RNA (1)...(19): siRNA sense strand
gcacagacggguaccugaa

SEQ ID NO: 1355683 - RNA, 19 nt, Homo sapiens
  misc_RNA (1)...(19): siRNA sense strand
ggcgcugugugcccuauua

SEQ ID NO: 1355684 - RNA, 19 nt, Homo sapiens
  misc_RNA (1)...(19): siRNA sense strand
ucaccauccucaucaagaa

SEQ ID NO: 1355685 - RNA, 19 nt, Homo sapiens
  misc_RNA (1)...(19): siRNA sense strand
gauccgcauugacgucauu

SEQ ID NO: 1355686 - RNA, 19 nt, Homo sapiens
  misc_RNA (1)...(19): siRNA sense strand
cugauucccaccauuauua

SEQ ID NO: 1355687 - RNA, 19 nt, Homo sapiens
  misc_RNA (1)...(19): siRNA sense strand
aacaaggucuacagccaua

SEQ ID NO: 1355688 - RNA, 19 nt, Homo sapiens
  misc_RNA (1)...(19): siRNA sense strand
gacuggaucuugcuaacau

SEQ ID NO: 1355689 - RNA, 19 nt, Homo sapiens
  misc_RNA (1)...(19): siRNA sense strand
gccaaauacuacaagauca

SEQ ID NO: 1355690 - RNA, 19 nt, Homo sapiens
  misc_RNA (1)...(19): siRNA sense strand
ggcuacaacuucagguuug

SEQ ID NO: 1355691 - RNA, 19 nt, Homo sapiens
  misc_RNA (1)...(19): siRNA sense strand
ggucuacagccauaagaaa

SEQ ID NO: 1355692 - RNA, 19 nt, Homo sapiens
  misc_RNA (1)...(19): siRNA sense strand
ccacagaccccaaagguuu

SEQ ID NO: 1355693 - RNA, 19 nt, Homo sapiens
  misc_RNA (1)...(19): siRNA sense strand
ucaagaacagcauccacua

SEQ ID NO: 1355694 - RNA, 19 nt, Homo sapiens
  misc_RNA (1)...(19): siRNA sense strand
ccaaauacuacaagaucaa

SEQ ID NO: 1355695 - RNA, 19 nt, Homo sapiens
  misc_RNA (1)...(19): siRNA sense strand
agguuuggcucaacucuga

SEQ ID NO: 1355696 - RNA, 19 nt, Homo sapiens
  misc_RNA (1)...(19): siRNA sense strand
ccaaauuccacuucuccaa

SEQ ID NO: 1355697 - RNA, 19 nt, Homo sapiens
  misc_RNA (1)...(19): siRNA sense strand
uugcuaacauucaugaaca

SEQ ID NO: 1355698 - RNA, 19 nt, Homo sapiens
  misc_RNA (1)...(19): siRNA sense strand
gggccucugucagccaauu

SEQ ID NO: 1355699 - RNA, 19 nt, Homo sapiens
  misc_RNA (1)...(19): siRNA sense strand
ggaucuugcuaacauucau

SEQ ID NO: 1355700 - RNA, 19 nt, Homo sapiens
  misc_RNA (1)...(19): siRNA sense strand
guacgauggccccaaauuu

SEQ ID NO: 1355701 - RNA, 19 nt, Homo sapiens
  misc_RNA (1)...(19): siRNA sense strand
gccauaagaaauuugacaa

SEQ ID NO: 1355702 - RNA, 19 nt, Homo sapiens
  misc_RNA (1)...(19): siRNA sense strand
gccaauuucuggguacgau

SEQ ID NO: 1355703 - RNA, 19 nt, Homo sapiens
  misc_RNA (1)...(19): siRNA sense strand
caagaacagcauccacuac

SEQ ID NO: 1355704 - RNA, 19 nt, Homo sapiens
  misc_RNA (1)...(19): siRNA sense strand
ucuacagccauaagaaauu

SEQ ID NO: 1355705 - RNA, 19 nt, Homo sapiens
  misc_RNA (1)...(19): siRNA sense strand
gcuaacauucaugaacaaa

SEQ ID NO: 1355706 - RNA, 19 nt, Homo sapiens
  misc_RNA (1)...(19): siRNA sense strand
gcgacuggaucuugcuaac

SEQ ID NO: 1355707 - RNA, 19 nt, Homo sapiens
  misc_RNA (1)...(19): siRNA sense strand
ccuacgggauccgcauuga

SEQ ID NO: 1355708 - RNA, 19 nt, Homo sapiens
  misc_RNA (1)...(19): siRNA sense strand
gaagauggggccucuguca

SEQ ID NO: 1355709 - RNA, 19 nt, Homo sapiens
  misc_RNA (1)...(19): siRNA sense strand
ugauucccaccauuauuaa

SEQ ID NO: 1355710 - RNA, 19 nt, Homo sapiens
  misc_RNA (1)...(19): siRNA sense strand
cagccugauucccaccauu

SEQ ID NO: 1355711 - RNA, 19 nt, Homo sapiens
  misc_RNA (1)...(19): siRNA sense strand
agccugauucccaccauua

SEQ ID NO: 1355712 - RNA, 19 nt, Homo sapiens
  misc_RNA (1)...(19): siRNA sense strand
ugacgucauugugcaugga

SEQ ID NO: 1355713 - RNA, 19 nt, Homo sapiens
  misc_RNA (1)...(19): siRNA sense strand
gaucuugcuaacauucaug

SEQ ID NO: 1355714 - RNA, 19 nt, Homo sapiens
  misc_RNA (1)...(19): siRNA sense strand
ucacagagcucgcacacaa

SEQ ID NO: 1355715 - RNA, 19 nt, Homo sapiens
  misc_RNA (1)...(19): siRNA sense strand
cuacagccauaagaaauuu

SEQ ID NO: 1355716 - RNA, 19 nt, Homo sapiens
  misc_RNA (1)...(19): siRNA sense strand
gcacagacggguaccugaa

SEQ ID NO: 1355717 - RNA, 19 nt, Homo sapiens
  misc_RNA (1)...(19): siRNA sense strand
ggcgcugugugcccuauua

SEQ ID NO: 1355718 - RNA, 19 nt, Homo sapiens
  misc_RNA (1)...(19): siRNA sense strand
ucaccauccucaucaagaa

SEQ ID NO: 1355719 - RNA, 19 nt, Homo sapiens
  misc_RNA (1)...(19): siRNA sense strand
gauccgcauugacgucauu

SEQ ID NO: 1355720 - RNA, 19 nt, Homo sapiens
  misc_RNA (1)...(19): siRNA sense strand
cugauucccaccauuauua

SEQ ID NO: 1355721 - RNA, 19 nt, Homo sapiens
  misc_RNA (1)...(19): siRNA sense strand
aacaaggucuacagccaua

SEQ ID NO: 1355722 - RNA, 19 nt, Homo sapiens
  misc_RNA (1)...(19): siRNA sense strand
gacuggaucuugcuaacau

SEQ ID NO: 1355723 - RNA, 19 nt, Homo sapiens
  misc_RNA (1)...(19): siRNA sense strand
gccaaauacuacaagauca

SEQ ID NO: 1355724 - RNA, 19 nt, Homo sapiens
  misc_RNA (1)...(19): siRNA sense strand
ggcuacaacuucagguuug

SEQ ID NO: 1355725 - RNA, 19 nt, Homo sapiens
  misc_RNA (1)...(19): siRNA sense strand
ggucuacagccauaagaaa

SEQ ID NO: 1355726 - RNA, 19 nt, Homo sapiens
  misc_RNA (1)...(19): siRNA sense strand
ccacagaccccaaagguuu

SEQ ID NO: 1355727 - RNA, 19 nt, Homo sapiens
  misc_RNA (1)...(19): siRNA sense strand
ucaagaacagcauccacua

SEQ ID NO: 1355728 - RNA, 19 nt, Homo sapiens
  misc_RNA (1)...(19): siRNA sense strand
ccaaauacuacaagaucaa

SEQ ID NO: 1355729 - RNA, 19 nt, Homo sapiens
  misc_RNA (1)...(19): siRNA sense strand
agguuuggcucaacucuga

SEQ ID NO: 1355730 - RNA, 19 nt, Homo sapiens
  misc_RNA (1)...(19): siRNA sense strand
ccaaauuccacuucuccaa

SEQ ID NO: 1355731 - RNA, 19 nt, Homo sapiens
  misc_RNA (1)...(19): siRNA sense strand
uugcuaacauucaugaaca

SEQ ID NO: 1355732 - RNA, 19 nt, Homo sapiens
  misc_RNA (1)...(19): siRNA sense strand
gggccucugucagccaauu

SEQ ID NO: 1355733 - RNA, 19 nt, Homo sapiens
  misc_RNA (1)...(19): siRNA sense strand
ggaucuugcuaacauucau

SEQ ID NO: 1355734 - RNA, 19 nt, Homo sapiens
  misc_RNA (1)...(19): siRNA sense strand
guacgauggccccaaauuu

SEQ ID NO: 1355735 - RNA, 19 nt, Homo sapiens
  misc_RNA (1)...(19): siRNA sense strand
gccauaagaaauuugacaa

SEQ ID NO: 1355736 - RNA, 19 nt, Homo sapiens
  misc_RNA (1)...(19): siRNA sense strand
gccaauuucuggguacgau

SEQ ID NO: 1355737 - RNA, 19 nt, Homo sapiens
  misc_RNA (1)...(19): siRNA sense strand
caagaacagcauccacuac

SEQ ID NO: 1355738 - RNA, 19 nt, Homo sapiens
  misc_RNA (1)...(19): siRNA sense strand
ucuacagccauaagaaauu

SEQ ID NO: 1355739 - RNA, 19 nt, Homo sapiens
  misc_RNA (1)...(19): siRNA sense strand
gcuaacauucaugaacaaa

SEQ ID NO: 1355740 - RNA, 19 nt, Homo sapiens
  misc_RNA (1)...(19): siRNA sense strand
gcgacuggaucuugcuaac

SEQ ID NO: 1355741 - RNA, 19 nt, Homo sapiens
  misc_RNA (1)...(19): siRNA sense strand
ccuacgggauccgcauuga

SEQ ID NO: 1355742 - RNA, 19 nt, Homo sapiens
  misc_RNA (1)...(19): siRNA sense strand
gaagauggggccucuguca

SEQ ID NO: 1355743 - RNA, 19 nt, Homo sapiens
  misc_RNA (1)...(19): siRNA sense strand
ugauucccaccauuauuaa

SEQ ID NO: 1355744 - RNA, 19 nt, Homo sapiens
  misc_RNA (1)...(19): siRNA sense strand
cagccugauucccaccauu

SEQ ID NO: 1355745 - RNA, 19 nt, Homo sapiens
  misc_RNA (1)...(19): siRNA sense strand
agccugauucccaccauua

SEQ ID NO: 1355746 - RNA, 19 nt, Homo sapiens
  misc_RNA (1)...(19): siRNA sense strand
ugacgucauugugcaugga

SEQ ID NO: 1355747 - RNA, 19 nt, Homo sapiens
  misc_RNA (1)...(19): siRNA sense strand
gaucuugcuaacauucaug

SEQ ID NO: 1355748 - RNA, 19 nt, Homo sapiens
  misc_RNA (1)...(19): siRNA sense strand
ucacagagcucgcacacaa

SEQ ID NO: 1355749 - RNA, 19 nt, Homo sapiens
  misc_RNA (1)...(19): siRNA sense strand
cuacagccauaagaaauuu

SEQ ID NO: 1355750 - RNA, 19 nt, Homo sapiens
  misc_RNA (1)...(19): siRNA sense strand
gcacagacggguaccugaa

SEQ ID NO: 1355751 - RNA, 19 nt, Homo sapiens
  misc_RNA (1)...(19): siRNA sense strand
ggcgcugugugcccuauua

SEQ ID NO: 1355752 - RNA, 19 nt, Homo sapiens
  misc_RNA (1)...(19): siRNA sense strand
ucaccauccucaucaagaa

SEQ ID NO: 1355753 - RNA, 19 nt, Homo sapiens
  misc_RNA (1)...(19): siRNA sense strand
gauccgcauugacgucauu

SEQ ID NO: 1355754 - RNA, 19 nt, Homo sapiens
  misc_RNA (1)...(19): siRNA sense strand
cugauucccaccauuauua

SEQ ID NO: 1355755 - RNA, 19 nt, Homo sapiens
  misc_RNA (1)...(19): siRNA sense strand
aacaaggucuacagccaua

SEQ ID NO: 1355756 - RNA, 19 nt, Homo sapiens
  misc_RNA (1)...(19): siRNA sense strand
gacuggaucuugcuaacau

SEQ ID NO: 1355757 - RNA, 19 nt, Homo sapiens
  misc_RNA (1)...(19): siRNA sense strand
gccaaauacuacaagauca

SEQ ID NO: 1355758 - RNA, 19 nt, Homo sapiens
  misc_RNA (1)...(19): siRNA sense strand
ggcuacaacuucagguuug

SEQ ID NO: 1355759 - RNA, 19 nt, Homo sapiens
  misc_RNA (1)...(19): siRNA sense strand
ggucuacagccauaagaaa

SEQ ID NO: 1355760 - RNA, 19 nt, Homo sapiens
  misc_RNA (1)...(19): siRNA sense strand
ccacagaccccaaagguuu

SEQ ID NO: 1355761 - RNA, 19 nt, Homo sapiens
  misc_RNA (1)...(19): siRNA sense strand
ucaagaacagcauccacua

SEQ ID NO: 1355762 - RNA, 19 nt, Homo sapiens
  misc_RNA (1)...(19): siRNA sense strand
ccaaauacuacaagaucaa

SEQ ID NO: 1355763 - RNA, 19 nt, Homo sapiens
  misc_RNA (1)...(19): siRNA sense strand
agguuuggcucaacucuga

SEQ ID NO: 1355764 - RNA, 19 nt, Homo sapiens
  misc_RNA (1)...(19): siRNA sense strand
ccaaauuccacuucuccaa

SEQ ID NO: 1355765 - RNA, 19 nt, Homo sapiens
  misc_RNA (1)...(19): siRNA sense strand
uugcuaacauucaugaaca

SEQ ID NO: 1355766 - RNA, 19 nt, Homo sapiens
  misc_RNA (1)...(19): siRNA sense strand
gggccucugucagccaauu

SEQ ID NO: 1355767 - RNA, 19 nt, Homo sapiens
  misc_RNA (1)...(19): siRNA sense strand
ggaucuugcuaacauucau

SEQ ID NO: 1355768 - RNA, 19 nt, Homo sapiens
  misc_RNA (1)...(19): siRNA sense strand
guacgauggccccaaauuu

SEQ ID NO: 1355769 - RNA, 19 nt, Homo sapiens
  misc_RNA (1)...(19): siRNA sense strand
gccauaagaaauuugacaa

SEQ ID NO: 1355770 - RNA, 19 nt, Homo sapiens
  misc_RNA (1)...(19): siRNA sense strand
gccaauuucuggguacgau

SEQ ID NO: 1355771 - RNA, 19 nt, Homo sapiens
  misc_RNA (1)...(19): siRNA sense strand
caagaacagcauccacuac

SEQ ID NO: 1355772 - RNA, 19 nt, Homo sapiens
  misc_RNA (1)...(19): siRNA sense strand
ucuacagccauaagaaauu

SEQ ID NO: 1355773 - RNA, 19 nt, Homo sapiens
  misc_RNA (1)...(19): siRNA sense strand
gcuaacauucaugaacaaa

SEQ ID NO: 1355774 - RNA, 19 nt, Homo sapiens
  misc_RNA (1)...(19): siRNA sense strand
gcgacuggaucuugcuaac

SEQ ID NO: 1355775 - RNA, 19 nt, Homo sapiens
  misc_RNA (1)...(19): siRNA sense strand
ccuacgggauccgcauuga

SEQ ID NO: 1355776 - RNA, 19 nt, Homo sapiens
  misc_RNA (1)...(19): siRNA sense strand
gaagauggggccucuguca

SEQ ID NO: 1355777 - RNA, 19 nt, Homo sapiens
  misc_RNA (1)...(19): siRNA sense strand
ugauucccaccauuauuaa

SEQ ID NO: 1355778 - RNA, 19 nt, Homo sapiens
  misc_RNA (1)...(19): siRNA sense strand
cagccugauucccaccauu

SEQ ID NO: 1355779 - RNA, 19 nt, Homo sapiens
  misc_RNA (1)...(19): siRNA sense strand
agccugauucccaccauua

SEQ ID NO: 1355780 - RNA, 19 nt, Homo sapiens
  misc_RNA (1)...(19): siRNA sense strand
ugacgucauugugcaugga

SEQ ID NO: 1355781 - RNA, 19 nt, Homo sapiens
  misc_RNA (1)...(19): siRNA sense strand
gaucuugcuaacauucaug

SEQ ID NO: 1355782 - RNA, 19 nt, Homo sapiens
  misc_RNA (1)...(19): siRNA sense strand
ucacagagcucgcacacaa

SEQ ID NO: 1355783 - RNA, 19 nt, Homo sapiens
  misc_RNA (1)...(19): siRNA sense strand
cuacagccauaagaaauuu

SEQ ID NO: 1355784 - RNA, 19 nt, Homo sapiens
  misc_RNA (1)...(19): siRNA sense strand
gcacagacggguaccugaa

SEQ ID NO: 1355785 - RNA, 19 nt, Homo sapiens
  misc_RNA (1)...(19): siRNA sense strand
ggcgcugugugcccuauua

SEQ ID NO: 1355786 - RNA, 19 nt, Homo sapiens
  misc_RNA (1)...(19): siRNA sense strand
ucaccauccucaucaagaa

SEQ ID NO: 1355787 - RNA, 19 nt, Homo sapiens
  misc_RNA (1)...(19): siRNA sense strand
gauccgcauugacgucauu

SEQ ID NO: 1355788 - RNA, 19 nt, Homo sapiens
  misc_RNA (1)...(19): siRNA sense strand
cugauucccaccauuauua

SEQ ID NO: 1355789 - RNA, 19 nt, Homo sapiens
  misc_RNA (1)...(19): siRNA sense strand
aacaaggucuacagccaua

SEQ ID NO: 1355790 - RNA, 19 nt, Homo sapiens
  misc_RNA (1)...(19): siRNA sense strand
gacuggaucuugcuaacau

SEQ ID NO: 1355791 - RNA, 19 nt, Homo sapiens
  misc_RNA (1)...(19): siRNA sense strand
gccaaauacuacaagauca

SEQ ID NO: 1355792 - RNA, 19 nt, Homo sapiens
  misc_RNA (1)...(19): siRNA sense strand
ggcuacaacuucagguuug

SEQ ID NO: 1355793 - RNA, 19 nt, Homo sapiens
  misc_RNA (1)...(19): siRNA sense strand
ggucuacagccauaagaaa

SEQ ID NO: 1355794 - RNA, 19 nt, Homo sapiens
  misc_RNA (1)...(19): siRNA sense strand
ccacagaccccaaagguuu

SEQ ID NO: 1355795 - RNA, 19 nt, Homo sapiens
  misc_RNA (1)...(19): siRNA sense strand
ucaagaacagcauccacua

SEQ ID NO: 1355796 - RNA, 19 nt, Homo sapiens
  misc_RNA (1)...(19): siRNA sense strand
ccaaauacuacaagaucaa

SEQ ID NO: 1355797 - RNA, 19 nt, Homo sapiens
  misc_RNA (1)...(19): siRNA sense strand
agguuuggcucaacucuga

SEQ ID NO: 1355798 - RNA, 19 nt, Homo sapiens
  misc_RNA (1)...(19): siRNA sense strand
ccaaauuccacuucuccaa

SEQ ID NO: 1355799 - RNA, 19 nt, Homo sapiens
  misc_RNA (1)...(19): siRNA sense strand
uugcuaacauucaugaaca

SEQ ID NO: 1355800 - RNA, 19 nt, Homo sapiens
  misc_RNA (1)...(19): siRNA sense strand
gggccucugucagccaauu

SEQ ID NO: 1355801 - RNA, 19 nt, Homo sapiens
  misc_RNA (1)...(19): siRNA sense strand
ggaucuugcuaacauucau

SEQ ID NO: 1355802 - RNA, 19 nt, Homo sapiens
  misc_RNA (1)...(19): siRNA sense strand
guacgauggccccaaauuu

SEQ ID NO: 1355803 - RNA, 19 nt, Homo sapiens
  misc_RNA (1)...(19): siRNA sense strand
gccauaagaaauuugacaa

SEQ ID NO: 1355804 - RNA, 19 nt, Homo sapiens
  misc_RNA (1)...(19): siRNA sense strand
gccaauuucuggguacgau

SEQ ID NO: 1355805 - RNA, 19 nt, Homo sapiens
  misc_RNA (1)...(19): siRNA sense strand
caagaacagcauccacuac

SEQ ID NO: 1355806 - RNA, 19 nt, Homo sapiens
  misc_RNA (1)...(19): siRNA sense strand
ucuacagccauaagaaauu

SEQ ID NO: 1355807 - RNA, 19 nt, Homo sapiens
  misc_RNA (1)...(19): siRNA sense strand
gcuaacauucaugaacaaa

SEQ ID NO: 1355808 - RNA, 19 nt, Homo sapiens
  misc_RNA (1)...(19): siRNA sense strand
gcgacuggaucuugcuaac

SEQ ID NO: 1355809 - RNA, 19 nt, Homo sapiens
  misc_RNA (1)...(19): siRNA sense strand
ccuacgggauccgcauuga

SEQ ID NO: 1355810 - RNA, 19 nt, Homo sapiens
  misc_RNA (1)...(19): siRNA sense strand
gaagauggggccucuguca

SEQ ID NO: 1355811 - RNA, 19 nt, Homo sapiens
  misc_RNA (1)...(19): siRNA sense strand
ugauucccaccauuauuaa

SEQ ID NO: 1355812 - RNA, 19 nt, Homo sapiens
  misc_RNA (1)...(19): siRNA sense strand
cagccugauucccaccauu

SEQ ID NO: 1355813 - RNA, 19 nt, Homo sapiens
  misc_RNA (1)...(19): siRNA sense strand
agccugauucccaccauua

SEQ ID NO: 1355814 - RNA, 19 nt, Homo sapiens
  misc_RNA (1)...(19): siRNA sense strand
ugacgucauugugcaugga

SEQ ID NO: 1355815 - RNA, 19 nt, Homo sapiens
  misc_RNA (1)...(19): siRNA sense strand
gaucuugcuaacauucaug

SEQ ID NO: 1355816 - RNA, 19 nt, Homo sapiens
  misc_RNA (1)...(19): siRNA sense strand
ucacagagcucgcacacaa

SEQ ID NO: 1355817 - RNA, 19 nt, Homo sapiens
  misc_RNA (1)...(19): siRNA sense strand
cuacagccauaagaaauuu

SEQ ID NO: 1355818 - RNA, 19 nt, Homo sapiens
  misc_RNA (1)...(19): siRNA sense strand
gcacagacggguaccugaa

SEQ ID NO: 1355819 - RNA, 19 nt, Homo sapiens
  misc_RNA (1)...(19): siRNA sense strand
ggcgcugugugcccuauua

SEQ ID NO: 1355820 - RNA, 19 nt, Homo sapiens
  misc_RNA (1)...(19): siRNA sense strand
ucaccauccucaucaagaa

SEQ ID NO: 1355821 - RNA, 19 nt, Homo sapiens
  misc_RNA (1)...(19): siRNA sense strand
gauccgcauugacgucauu

SEQ ID NO: 1355822 - RNA, 19 nt, Homo sapiens
  misc_RNA (1)...(19): siRNA sense strand
cugauucccaccauuauua

SEQ ID NO: 1355823 - RNA, 19 nt, Homo sapiens
  misc_RNA (1)...(19): siRNA sense strand
aacaaggucuacagccaua

SEQ ID NO: 1355824 - RNA, 19 nt, Homo sapiens
  misc_RNA (1)...(19): siRNA sense strand
gacuggaucuugcuaacau

SEQ ID NO: 1355825 - RNA, 19 nt, Homo sapiens
  misc_RNA (1)...(19): siRNA sense strand
gccaaauacuacaagauca

SEQ ID NO: 1355826 - RNA, 19 nt, Homo sapiens
  misc_RNA (1)...(19): siRNA sense strand
ggcuacaacuucagguuug

SEQ ID NO: 1355827 - RNA, 19 nt, Homo sapiens
  misc_RNA (1)...(19): siRNA sense strand
ggucuacagccauaagaaa

SEQ ID NO: 1355828 - RNA, 19 nt, Homo sapiens
  misc_RNA (1)...(19): siRNA sense strand
ccacagaccccaaagguuu

SEQ ID NO: 1355829 - RNA, 19 nt, Homo sapiens
  misc_RNA (1)...(19): siRNA sense strand
ucaagaacagcauccacua

SEQ ID NO: 1355830 - RNA, 19 nt, Homo sapiens
  misc_RNA (1)...(19): siRNA sense strand
ccaaauacuacaagaucaa

SEQ ID NO: 1355831 - RNA, 19 nt, Homo sapiens
  misc_RNA (1)...(19): siRNA sense strand
agguuuggcucaacucuga

SEQ ID NO: 1355832 - RNA, 19 nt, Homo sapiens
  misc_RNA (1)...(19): siRNA sense strand
ccaaauuccacuucuccaa

SEQ ID NO: 1355833 - RNA, 19 nt, Homo sapiens
  misc_RNA (1)...(19): siRNA sense strand
uugcuaacauucaugaaca

SEQ ID NO: 1355834 - RNA, 19 nt, Homo sapiens
  misc_RNA (1)...(19): siRNA sense strand
gggccucugucagccaauu

SEQ ID NO: 1355835 - RNA, 19 nt, Homo sapiens
  misc_RNA (1)...(19): siRNA sense strand
ggaucuugcuaacauucau

SEQ ID NO: 1355836 - RNA, 19 nt, Homo sapiens
  misc_RNA (1)...(19): siRNA sense strand
guacgauggccccaaauuu

SEQ ID NO: 1355837 - RNA, 19 nt, Homo sapiens
  misc_RNA (1)...(19): siRNA sense strand
gccauaagaaauuugacaa

SEQ ID NO: 1355838 - RNA, 19 nt, Homo sapiens
  misc_RNA (1)...(19): siRNA sense strand
gccaauuucuggguacgau

SEQ ID NO: 1355839 - RNA, 19 nt, Homo sapiens
  misc_RNA (1)...(19): siRNA sense strand
caagaacagcauccacuac

SEQ ID NO: 1355840 - RNA, 19 nt, Homo sapiens
  misc_RNA (1)...(19): siRNA sense strand
ucuacagccauaagaaauu

SEQ ID NO: 1355841 - RNA, 19 nt, Homo sapiens
  misc_RNA (1)...(19): siRNA sense strand
gcuaacauucaugaacaaa

SEQ ID NO: 1355842 - RNA, 19 nt, Homo sapiens
  misc_RNA (1)...(19): siRNA sense strand
gcgacuggaucuugcuaac

SEQ ID NO: 1355843 - RNA, 19 nt, Homo sapiens
  misc_RNA (1)...(19): siRNA sense strand
ccuacgggauccgcauuga

SEQ ID NO: 1355844 - RNA, 19 nt, Homo sapiens
  misc_RNA (1)...(19): siRNA sense strand
gaagauggggccucuguca

SEQ ID NO: 1355845 - RNA, 19 nt, Homo sapiens
  misc_RNA (1)...(19): siRNA sense strand
ugauucccaccauuauuaa

SEQ ID NO: 1355846 - RNA, 19 nt, Homo sapiens
  misc_RNA (1)...(19): siRNA sense strand
cagccugauucccaccauu

SEQ ID NO: 1355847 - RNA, 19 nt, Homo sapiens
  misc_RNA (1)...(19): siRNA sense strand
agccugauucccaccauua

SEQ ID NO: 1355848 - RNA, 19 nt, Homo sapiens
  misc_RNA (1)...(19): siRNA sense strand
ugacgucauugugcaugga

SEQ ID NO: 1355849 - RNA, 19 nt, Homo sapiens
  misc_RNA (1)...(19): siRNA sense strand
gaucuugcuaacauucaug

SEQ ID NO: 1355850 - RNA, 19 nt, Homo sapiens
  misc_RNA (1)...(19): siRNA sense strand
ucacagagcucgcacacaa

SEQ ID NO: 1355851 - RNA, 19 nt, Homo sapiens
  misc_RNA (1)...(19): siRNA sense strand
cuacagccauaagaaauuu

SEQ ID NO: 1355852 - RNA, 19 nt, Homo sapiens
  misc_RNA (1)...(19): siRNA sense strand
gcacagacggguaccugaa

SEQ ID NO: 1355853 - RNA, 19 nt, Homo sapiens
  misc_RNA (1)...(19): siRNA sense strand
ggcgcugugugcccuauua

SEQ ID NO: 1355854 - RNA, 19 nt, Homo sapiens
  misc_RNA (1)...(19): siRNA sense strand
ucaccauccucaucaagaa

SEQ ID NO: 1355855 - RNA, 19 nt, Homo sapiens
  misc_RNA (1)...(19): siRNA sense strand
gauccgcauugacgucauu

SEQ ID NO: 1355856 - RNA, 19 nt, Homo sapiens
  misc_RNA (1)...(19): siRNA sense strand
cugauucccaccauuauua

SEQ ID NO: 1355857 - RNA, 19 nt, Homo sapiens
  misc_RNA (1)...(19): siRNA sense strand
aacaaggucuacagccaua

SEQ ID NO: 1355858 - RNA, 19 nt, Homo sapiens
  misc_RNA (1)...(19): siRNA sense strand
gacuggaucuugcuaacau

SEQ ID NO: 1355859 - RNA, 19 nt, Homo sapiens
  misc_RNA (1)...(19): siRNA sense strand
gccaaauacuacaagauca

SEQ ID NO: 1355860 - RNA, 19 nt, Homo sapiens
  misc_RNA (1)...(19): siRNA sense strand
ggcuacaacuucagguuug

SEQ ID NO: 1355861 - RNA, 19 nt, Homo sapiens
  misc_RNA (1)...(19): siRNA sense strand
ggucuacagccauaagaaa

SEQ ID NO: 1355862 - RNA, 19 nt, Homo sapiens
  misc_RNA (1)...(19): siRNA sense strand
ccacagaccccaaagguuu

SEQ ID NO: 1355863 - RNA, 19 nt, Homo sapiens
  misc_RNA (1)...(19): siRNA sense strand
ucaagaacagcauccacua

SEQ ID NO: 1355864 - RNA, 19 nt, Homo sapiens
  misc_RNA (1)...(19): siRNA sense strand
ccaaauacuacaagaucaa

SEQ ID NO: 1355865 - RNA, 19 nt, Homo sapiens
  misc_RNA (1)...(19): siRNA sense strand
agguuuggcucaacucuga

SEQ ID NO: 1355866 - RNA, 19 nt, Homo sapiens
  misc_RNA (1)...(19): siRNA sense strand
ccaaauuccacuucuccaa

SEQ ID NO: 1355867 - RNA, 19 nt, Homo sapiens
  misc_RNA (1)...(19): siRNA sense strand
uugcuaacauucaugaaca

SEQ ID NO: 1355868 - RNA, 19 nt, Homo sapiens
  misc_RNA (1)...(19): siRNA sense strand
gggccucugucagccaauu

SEQ ID NO: 1355869 - RNA, 19 nt, Homo sapiens
  misc_RNA (1)...(19): siRNA sense strand
ggaucuugcuaacauucau

SEQ ID NO: 1355870 - RNA, 19 nt, Homo sapiens
  misc_RNA (1)...(19): siRNA sense strand
guacgauggccccaaauuu

SEQ ID NO: 1355871 - RNA, 19 nt, Homo sapiens
  misc_RNA (1)...(19): siRNA sense strand
gccauaagaaauuugacaa

SEQ ID NO: 1355872 - RNA, 19 nt, Homo sapiens
  misc_RNA (1)...(19): siRNA sense strand
gccaauuucuggguacgau

SEQ ID NO: 1355873 - RNA, 19 nt, Homo sapiens
  misc_RNA (1)...(19): siRNA sense strand
caagaacagcauccacuac

SEQ ID NO: 1355874 - RNA, 19 nt, Homo sapiens
  misc_RNA (1)...(19): siRNA sense strand
ucuacagccauaagaaauu

SEQ ID NO: 1355875 - RNA, 19 nt, Homo sapiens
  misc_RNA (1)...(19): siRNA sense strand
gcuaacauucaugaacaaa

SEQ ID NO: 1355876 - RNA, 19 nt, Homo sapiens
  misc_RNA (1)...(19): siRNA sense strand
gcgacuggaucuugcuaac

SEQ ID NO: 1355877 - RNA, 19 nt, Homo sapiens
  misc_RNA (1)...(19): siRNA sense strand
ccuacgggauccgcauuga

SEQ ID NO: 1355878 - RNA, 19 nt, Homo sapiens
  misc_RNA (1)...(19): siRNA sense strand
gaagauggggccucuguca

SEQ ID NO: 1355879 - RNA, 19 nt, Homo sapiens
  misc_RNA (1)...(19): siRNA sense strand
ugauucccaccauuauuaa

SEQ ID NO: 1355880 - RNA, 19 nt, Homo sapiens
  misc_RNA (1)...(19): siRNA sense strand
cagccugauucccaccauu

SEQ ID NO: 1355881 - RNA, 19 nt, Homo sapiens
  misc_RNA (1)...(19): siRNA sense strand
agccugauucccaccauua

SEQ ID NO: 1355882 - RNA, 19 nt, Homo sapiens
  misc_RNA (1)...(19): siRNA sense strand
ugacgucauugugcaugga

SEQ ID NO: 1355883 - RNA, 19 nt, Homo sapiens
  misc_RNA (1)...(19): siRNA sense strand
gaucuugcuaacauucaug

SEQ ID NO: 1355884 - RNA, 19 nt, Homo sapiens
  misc_RNA (1)...(19): siRNA sense strand
ucacagagcucgcacacaa

SEQ ID NO: 1355885 - RNA, 19 nt, Homo sapiens
  misc_RNA (1)...(19): siRNA sense strand
cuacagccauaagaaauuu

SEQ ID NO: 1355886 - RNA, 19 nt, Homo sapiens
  misc_RNA (1)...(19): siRNA sense strand
gcacagacggguaccugaa

SEQ ID NO: 1355887 - RNA, 19 nt, Homo sapiens
  misc_RNA (1)...(19): siRNA sense strand
ggcgcugugugcccuauua

SEQ ID NO: 1355888 - RNA, 19 nt, Homo sapiens
  misc_RNA (1)...(19): siRNA sense strand
ucaccauccucaucaagaa

SEQ ID NO: 1355889 - RNA, 19 nt, Homo sapiens
  misc_RNA (1)...(19): siRNA sense strand
gauccgcauugacgucauu

SEQ ID NO: 1355890 - RNA, 19 nt, Homo sapiens
  misc_RNA (1)...(19): siRNA sense strand
cugauucccaccauuauua

SEQ ID NO: 1355891 - RNA, 19 nt, Homo sapiens
  misc_RNA (1)...(19): siRNA sense strand
aacaaggucuacagccaua

SEQ ID NO: 1355892 - RNA, 19 nt, Homo sapiens
  misc_RNA (1)...(19): siRNA sense strand
gacuggaucuugcuaacau

SEQ ID NO: 1355893 - RNA, 19 nt, Homo sapiens
  misc_RNA (1)...(19): siRNA sense strand
gccaaauacuacaagauca

SEQ ID NO: 1355894 - RNA, 19 nt, Homo sapiens
  misc_RNA (1)...(19): siRNA sense strand
ggcuacaacuucagguuug

SEQ ID NO: 1355895 - RNA, 19 nt, Homo sapiens
  misc_RNA (1)...(19): siRNA sense strand
ggucuacagccauaagaaa

SEQ ID NO: 1355896 - RNA, 19 nt, Homo sapiens
  misc_RNA (1)...(19): siRNA sense strand
ccacagaccccaaagguuu

SEQ ID NO: 1355897 - RNA, 19 nt, Homo sapiens
  misc_RNA (1)...(19): siRNA sense strand
ucaagaacagcauccacua

SEQ ID NO: 1355898 - RNA, 19 nt, Homo sapiens
  misc_RNA (1)...(19): siRNA sense strand
ccaaauacuacaagaucaa

SEQ ID NO: 1355899 - RNA, 19 nt, Homo sapiens
  misc_RNA (1)...(19): siRNA sense strand
agguuuggcucaacucuga

SEQ ID NO: 1355900 - RNA, 19 nt, Homo sapiens
  misc_RNA (1)...(19): siRNA sense strand
ccaaauuccacuucuccaa

SEQ ID NO: 1355901 - RNA, 19 nt, Homo sapiens
  misc_RNA (1)...(19): siRNA sense strand
uugcuaacauucaugaaca

SEQ ID NO: 1355902 - RNA, 19 nt, Homo sapiens
  misc_RNA (1)...(19): siRNA sense strand
gggccucugucagccaauu

SEQ ID NO: 1355903 - RNA, 19 nt, Homo sapiens
  misc_RNA (1)...(19): siRNA sense strand
ggaucuugcuaacauucau

SEQ ID NO: 1355904 - RNA, 19 nt, Homo sapiens
  misc_RNA (1)...(19): siRNA sense strand
guacgauggccccaaauuu

SEQ ID NO: 1355905 - RNA, 19 nt, Homo sapiens
  misc_RNA (1)...(19): siRNA sense strand
gccauaagaaauuugacaa

SEQ ID NO: 1355906 - RNA, 19 nt, Homo sapiens
  misc_RNA (1)...(19): siRNA sense strand
gccaauuucuggguacgau

SEQ ID NO: 1355907 - RNA, 19 nt, Homo sapiens
  misc_RNA (1)...(19): siRNA sense strand
caagaacagcauccacuac

SEQ ID NO: 1355908 - RNA, 19 nt, Homo sapiens
  misc_RNA (1)...(19): siRNA sense strand
ucuacagccauaagaaauu

SEQ ID NO: 1355909 - RNA, 19 nt, Homo sapiens
  misc_RNA (1)...(19): siRNA sense strand
gcuaacauucaugaacaaa

SEQ ID NO: 1355910 - RNA, 19 nt, Homo sapiens
  misc_RNA (1)...(19): siRNA sense strand
gcgacuggaucuugcuaac

SEQ ID NO: 1355911 - RNA, 19 nt, Homo sapiens
  misc_RNA (1)...(19): siRNA sense strand
ccuacgggauccgcauuga

SEQ ID NO: 1355912 - RNA, 19 nt, Homo sapiens
  misc_RNA (1)...(19): siRNA sense strand
gaagauggggccucuguca

SEQ ID NO: 1355913 - RNA, 19 nt, Homo sapiens
  misc_RNA (1)...(19): siRNA sense strand
ugauucccaccauuauuaa

SEQ ID NO: 1355914 - RNA, 19 nt, Homo sapiens
  misc_RNA (1)...(19): siRNA sense strand
cagccugauucccaccauu

SEQ ID NO: 1355915 - RNA, 19 nt, Homo sapiens
  misc_RNA (1)...(19): siRNA sense strand
agccugauucccaccauua

SEQ ID NO: 1355916 - RNA, 19 nt, Homo sapiens
  misc_RNA (1)...(19): siRNA sense strand
ugacgucauugugcaugga

SEQ ID NO: 1355917 - RNA, 19 nt, Homo sapiens
  misc_RNA (1)...(19): siRNA sense strand
gaucuugcuaacauucaug

SEQ ID NO: 1355918 - RNA, 19 nt, Homo sapiens
  misc_RNA (1)...(19): siRNA sense strand
ucacagagcucgcacacaa

SEQ ID NO: 1355919 - RNA, 19 nt, Homo sapiens
  misc_RNA (1)...(19): siRNA sense strand
cuacagccauaagaaauuu

SEQ ID NO: 1355920 - RNA, 19 nt, Homo sapiens
  misc_RNA (1)...(19): siRNA sense strand
gcacagacggguaccugaa

SEQ ID NO: 1355921 - RNA, 19 nt, Homo sapiens
  misc_RNA (1)...(19): siRNA sense strand
ggcgcugugugcccuauua

SEQ ID NO: 1355922 - RNA, 19 nt, Homo sapiens
  misc_RNA (1)...(19): siRNA sense strand
ucaccauccucaucaagaa

SEQ ID NO: 1355923 - RNA, 19 nt, Homo sapiens
  misc_RNA (1)...(19): siRNA sense strand
gauccgcauugacgucauu

SEQ ID NO: 1355924 - RNA, 19 nt, Homo sapiens
  misc_RNA (1)...(19): siRNA sense strand
cugauucccaccauuauua

SEQ ID NO: 1355925 - RNA, 19 nt, Homo sapiens
  misc_RNA (1)...(19): siRNA sense strand
aacaaggucuacagccaua

SEQ ID NO: 1355926 - RNA, 19 nt, Homo sapiens
  misc_RNA (1)...(19): siRNA sense strand
gacuggaucuugcuaacau

SEQ ID NO: 1355927 - RNA, 19 nt, Homo sapiens
  misc_RNA (1)...(19): siRNA sense strand
gccaaauacuacaagauca

SEQ ID NO: 1355928 - RNA, 19 nt, Homo sapiens
  misc_RNA (1)...(19): siRNA sense strand
ggcuacaacuucagguuug

SEQ ID NO: 1355929 - RNA, 19 nt, Homo sapiens
  misc_RNA (1)...(19): siRNA sense strand
ggucuacagccauaagaaa

SEQ ID NO: 1355930 - RNA, 19 nt, Homo sapiens
  misc_RNA (1)...(19): siRNA sense strand
ccacagaccccaaagguuu

SEQ ID NO: 1355931 - RNA, 19 nt, Homo sapiens
  misc_RNA (1)...(19): siRNA sense strand
ucaagaacagcauccacua

SEQ ID NO: 1355932 - RNA, 19 nt, Homo sapiens
  misc_RNA (1)...(19): siRNA sense strand
ccaaauacuacaagaucaa

SEQ ID NO: 1355933 - RNA, 19 nt, Homo sapiens
  misc_RNA (1)...(19): siRNA sense strand
agguuuggcucaacucuga

SEQ ID NO: 1355934 - RNA, 19 nt, Homo sapiens
  misc_RNA (1)...(19): siRNA sense strand
ccaaauuccacuucuccaa

SEQ ID NO: 1355935 - RNA, 19 nt, Homo sapiens
  misc_RNA (1)...(19): siRNA sense strand
uugcuaacauucaugaaca

SEQ ID NO: 1355936 - RNA, 19 nt, Homo sapiens
  misc_RNA (1)...(19): siRNA sense strand
gggccucugucagccaauu

SEQ ID NO: 1355937 - RNA, 19 nt, Homo sapiens
  misc_RNA (1)...(19): siRNA sense strand
ggaucuugcuaacauucau

SEQ ID NO: 1355938 - RNA, 19 nt, Homo sapiens
  misc_RNA (1)...(19): siRNA sense strand
guacgauggccccaaauuu

SEQ ID NO: 1355939 - RNA, 19 nt, Homo sapiens
  misc_RNA (1)...(19): siRNA sense strand
gccauaagaaauuugacaa

SEQ ID NO: 1355940 - RNA, 19 nt, Homo sapiens
  misc_RNA (1)...(19): siRNA sense strand
gccaauuucuggguacgau

SEQ ID NO: 1355941 - RNA, 19 nt, Homo sapiens
  misc_RNA (1)...(19): siRNA sense strand
caagaacagcauccacuac

SEQ ID NO: 1355942 - RNA, 19 nt, Homo sapiens
  misc_RNA (1)...(19): siRNA sense strand
ucuacagccauaagaaauu

SEQ ID NO: 1355943 - RNA, 19 nt, Homo sapiens
  misc_RNA (1)...(19): siRNA sense strand
gcuaacauucaugaacaaa

SEQ ID NO: 1355944 - RNA, 19 nt, Homo sapiens
  misc_RNA (1)...(19): siRNA sense strand
gcgacuggaucuugcuaac

SEQ ID NO: 1355945 - RNA, 19 nt, Homo sapiens
  misc_RNA (1)...(19): siRNA sense strand
ccuacgggauccgcauuga

SEQ ID NO: 1355946 - RNA, 19 nt, Homo sapiens
  misc_RNA (1)...(19): siRNA sense strand
gaagauggggccucuguca

SEQ ID NO: 1355947 - RNA, 19 nt, Homo sapiens
  misc_RNA (1)...(19): siRNA sense strand
ugauucccaccauuauuaa

SEQ ID NO: 1355948 - RNA, 19 nt, Homo sapiens
  misc_RNA (1)...(19): siRNA sense strand
cagccugauucccaccauu

SEQ ID NO: 1355949 - RNA, 19 nt, Homo sapiens
  misc_RNA (1)...(19): siRNA sense strand
agccugauucccaccauua

SEQ ID NO: 1355950 - RNA, 19 nt, Homo sapiens
  misc_RNA (1)...(19): siRNA sense strand
ugacgucauugugcaugga

SEQ ID NO: 1355951 - RNA, 19 nt, Homo sapiens
  misc_RNA (1)...(19): siRNA sense strand
gaucuugcuaacauucaug

SEQ ID NO: 1355952 - RNA, 19 nt, Homo sapiens
  misc_RNA (1)...(19): siRNA sense strand
ucacagagcucgcacacaa

SEQ ID NO: 1355953 - RNA, 19 nt, Homo sapiens
  misc_RNA (1)...(19): siRNA sense strand
cuacagccauaagaaauuu

SEQ ID NO: 1355954 - RNA, 19 nt, Homo sapiens
  misc_RNA (1)...(19): siRNA sense strand
gcacagacggguaccugaa

SEQ ID NO: 1355955 - RNA, 19 nt, Homo sapiens
  misc_RNA (1)...(19): siRNA sense strand
ggcgcugugugcccuauua

SEQ ID NO: 1355956 - RNA, 19 nt, Homo sapiens
  misc_RNA (1)...(19): siRNA sense strand
ucaccauccucaucaagaa

SEQ ID NO: 1355957 - RNA, 19 nt, Homo sapiens
  misc_RNA (1)...(19): siRNA sense strand
gauccgcauugacgucauu

SEQ ID NO: 1355958 - RNA, 19 nt, Homo sapiens
  misc_RNA (1)...(19): siRNA sense strand
cugauucccaccauuauua

SEQ ID NO: 1355959 - RNA, 19 nt, Homo sapiens
  misc_RNA (1)...(19): siRNA sense strand
aacaaggucuacagccaua

SEQ ID NO: 1355960 - RNA, 19 nt, Homo sapiens
  misc_RNA (1)...(19): siRNA sense strand
gacuggaucuugcuaacau

SEQ ID NO: 1355961 - RNA, 19 nt, Homo sapiens
  misc_RNA (1)...(19): siRNA sense strand
gccaaauacuacaagauca

SEQ ID NO: 1355962 - RNA, 19 nt, Homo sapiens
  misc_RNA (1)...(19): siRNA sense strand
ggcuacaacuucagguuug

SEQ ID NO: 1355963 - RNA, 19 nt, Homo sapiens
  misc_RNA (1)...(19): siRNA sense strand
ggucuacagccauaagaaa

SEQ ID NO: 1355964 - RNA, 19 nt, Homo sapiens
  misc_RNA (1)...(19): siRNA sense strand
ccacagaccccaaagguuu

SEQ ID NO: 1355965 - RNA, 19 nt, Homo sapiens
  misc_RNA (1)...(19): siRNA sense strand
ucaagaacagcauccacua

SEQ ID NO: 1355966 - RNA, 19 nt, Homo sapiens
  misc_RNA (1)...(19): siRNA sense strand
ccaaauacuacaagaucaa

SEQ ID NO: 1355967 - RNA, 19 nt, Homo sapiens
  misc_RNA (1)...(19): siRNA sense strand
agguuuggcucaacucuga

SEQ ID NO: 1355968 - RNA, 19 nt, Homo sapiens
  misc_RNA (1)...(19): siRNA sense strand
ccaaauuccacuucuccaa

SEQ ID NO: 1355969 - RNA, 19 nt, Homo sapiens
  misc_RNA (1)...(19): siRNA sense strand
uugcuaacauucaugaaca

SEQ ID NO: 1355970 - RNA, 19 nt, Homo sapiens
  misc_RNA (1)...(19): siRNA sense strand
gggccucugucagccaauu

SEQ ID NO: 1355971 - RNA, 19 nt, Homo sapiens
  misc_RNA (1)...(19): siRNA sense strand
ggaucuugcuaacauucau

SEQ ID NO: 1355972 - RNA, 19 nt, Homo sapiens
  misc_RNA (1)...(19): siRNA sense strand
guacgauggccccaaauuu

SEQ ID NO: 1355973 - RNA, 19 nt, Homo sapiens
  misc_RNA (1)...(19): siRNA sense strand
gccauaagaaauuugacaa

SEQ ID NO: 1355974 - RNA, 19 nt, Homo sapiens
  misc_RNA (1)...(19): siRNA sense strand
gccaauuucuggguacgau

SEQ ID NO: 1355975 - RNA, 19 nt, Homo sapiens
  misc_RNA (1)...(19): siRNA sense strand
caagaacagcauccacuac

SEQ ID NO: 1355976 - RNA, 19 nt, Homo sapiens
  misc_RNA (1)...(19): siRNA sense strand
ucuacagccauaagaaauu

SEQ ID NO: 1355977 - RNA, 19 nt, Homo sapiens
  misc_RNA (1)...(19): siRNA sense strand
gcuaacauucaugaacaaa

SEQ ID NO: 1355978 - RNA, 19 nt, Homo sapiens
  misc_RNA (1)...(19): siRNA sense strand
gcgacuggaucuugcuaac

SEQ ID NO: 1355979 - RNA, 19 nt, Homo sapiens
  misc_RNA (1)...(19): siRNA sense strand
ccuacgggauccgcauuga

SEQ ID NO: 1355980 - RNA, 19 nt, Homo sapiens
  misc_RNA (1)...(19): siRNA sense strand
gaagauggggccucuguca

SEQ ID NO: 1355981 - RNA, 19 nt, Homo sapiens
  misc_RNA (1)...(19): siRNA sense strand
ugauucccaccauuauuaa

SEQ ID NO: 1355982 - RNA, 19 nt, Homo sapiens
  misc_RNA (1)...(19): siRNA sense strand
cagccugauucccaccauu

SEQ ID NO: 1355983 - RNA, 19 nt, Homo sapiens
  misc_RNA (1)...(19): siRNA sense strand
agccugauucccaccauua

SEQ ID NO: 1355984 - RNA, 19 nt, Homo sapiens
  misc_RNA (1)...(19): siRNA sense strand
ugacgucauugugcaugga

SEQ ID NO: 1355985 - RNA, 19 nt, Homo sapiens
  misc_RNA (1)...(19): siRNA sense strand
gaucuugcuaacauucaug

SEQ ID NO: 1355986 - RNA, 19 nt, Homo sapiens
  misc_RNA (1)...(19): siRNA sense strand
ucacagagcucgcacacaa

SEQ ID NO: 1355987 - RNA, 19 nt, Homo sapiens
  misc_RNA (1)...(19): siRNA sense strand
cuacagccauaagaaauuu

SEQ ID NO: 1355988 - RNA, 19 nt, Homo sapiens
  misc_RNA (1)...(19): siRNA sense strand
gcacagacggguaccugaa

SEQ ID NO: 1355989 - RNA, 19 nt, Homo sapiens
  misc_RNA (1)...(19): siRNA sense strand
ggcgcugugugcccuauua

SEQ ID NO: 1355990 - RNA, 19 nt, Homo sapiens
  misc_RNA (1)...(19): siRNA sense strand
ucaccauccucaucaagaa

SEQ ID NO: 1355991 - RNA, 19 nt, Homo sapiens
  misc_RNA (1)...(19): siRNA sense strand
gauccgcauugacgucauu

SEQ ID NO: 1355992 - RNA, 19 nt, Homo sapiens
  misc_RNA (1)...(19): siRNA sense strand
cugauucccaccauuauua

SEQ ID NO: 1355993 - RNA, 19 nt, Homo sapiens
  misc_RNA (1)...(19): siRNA sense strand
aacaaggucuacagccaua

SEQ ID NO: 1355994 - RNA, 19 nt, Homo sapiens
  misc_RNA (1)...(19): siRNA sense strand
gacuggaucuugcuaacau

SEQ ID NO: 1355995 - RNA, 19 nt, Homo sapiens
  misc_RNA (1)...(19): siRNA sense strand
gccaaauacuacaagauca

SEQ ID NO: 1355996 - RNA, 19 nt, Homo sapiens
  misc_RNA (1)...(19): siRNA sense strand
ggcuacaacuucagguuug

SEQ ID NO: 1355997 - RNA, 19 nt, Homo sapiens
  misc_RNA (1)...(19): siRNA sense strand
ggucuacagccauaagaaa

SEQ ID NO: 1355998 - RNA, 19 nt, Homo sapiens
  misc_RNA (1)...(19): siRNA sense strand
ccacagaccccaaagguuu

SEQ ID NO: 1355999 - RNA, 19 nt, Homo sapiens
  misc_RNA (1)...(19): siRNA sense strand
ucaagaacagcauccacua

SEQ ID NO: 1356000 - RNA, 19 nt, Homo sapiens
  misc_RNA (1)...(19): siRNA sense strand
ccaaauacuacaagaucaa

SEQ ID NO: 1356001 - RNA, 19 nt, Homo sapiens
  misc_RNA (1)...(19): siRNA sense strand
agguuuggcucaacucuga

SEQ ID NO: 1356002 - RNA, 19 nt, Homo sapiens
  misc_RNA (1)...(19): siRNA sense strand
ccaaauuccacuucuccaa

SEQ ID NO: 1356003 - RNA, 19 nt, Homo sapiens
  misc_RNA (1)...(19): siRNA sense strand
uugcuaacauucaugaaca

SEQ ID NO: 1356004 - RNA, 19 nt, Homo sapiens
  misc_RNA (1)...(19): siRNA sense strand
gggccucugucagccaauu

SEQ ID NO: 1356005 - RNA, 19 nt, Homo sapiens
  misc_RNA (1)...(19): siRNA sense strand
ggaucuugcuaacauucau

SEQ ID NO: 1356006 - RNA, 19 nt, Homo sapiens
  misc_RNA (1)...(19): siRNA sense strand
guacgauggccccaaauuu

SEQ ID NO: 1356007 - RNA, 19 nt, Homo sapiens
  misc_RNA (1)...(19): siRNA sense strand
gccauaagaaauuugacaa

SEQ ID NO: 1356008 - RNA, 19 nt, Homo sapiens
  misc_RNA (1)...(19): siRNA sense strand
gccaauuucuggguacgau

SEQ ID NO: 1356009 - RNA, 19 nt, Homo sapiens
  misc_RNA (1)...(19): siRNA sense strand
caagaacagcauccacuac

SEQ ID NO: 1356010 - RNA, 19 nt, Homo sapiens
  misc_RNA (1)...(19): siRNA sense strand
ucuacagccauaagaaauu

SEQ ID NO: 1356011 - RNA, 19 nt, Homo sapiens
  misc_RNA (1)...(19): siRNA sense strand
gcuaacauucaugaacaaa

SEQ ID NO: 1356012 - RNA, 19 nt, Homo sapiens
  misc_RNA (1)...(19): siRNA sense strand
gcgacuggaucuugcuaac

SEQ ID NO: 1356013 - RNA, 19 nt, Homo sapiens
  misc_RNA (1)...(19): siRNA sense strand
ccuacgggauccgcauuga

SEQ ID NO: 1356014 - RNA, 19 nt, Homo sapiens
  misc_RNA (1)...(19): siRNA sense strand
gaagauggggccucuguca

SEQ ID NO: 1356015 - RNA, 19 nt, Homo sapiens
  misc_RNA (1)...(19): siRNA sense strand
ugauucccaccauuauuaa

SEQ ID NO: 1356016 - RNA, 19 nt, Homo sapiens
  misc_RNA (1)...(19): siRNA sense strand
cagccugauucccaccauu

SEQ ID NO: 1356017 - RNA, 19 nt, Homo sapiens
  misc_RNA (1)...(19): siRNA sense strand
agccugauucccaccauua

SEQ ID NO: 1356018 - RNA, 19 nt, Homo sapiens
  misc_RNA (1)...(19): siRNA sense strand
ugacgucauugugcaugga

SEQ ID NO: 1356019 - RNA, 19 nt, Homo sapiens
  misc_RNA (1)...(19): siRNA sense strand
gaucuugcuaacauucaug

SEQ ID NO: 1356020 - RNA, 19 nt, Homo sapiens
  misc_RNA (1)...(19): siRNA sense strand
ucacagagcucgcacacaa

SEQ ID NO: 1356021 - RNA, 19 nt, Homo sapiens
  misc_RNA (1)...(19): siRNA sense strand
cuacagccauaagaaauuu

SEQ ID NO: 1356022 - RNA, 19 nt, Homo sapiens
  misc_RNA (1)...(19): siRNA sense strand
gcacagacggguaccugaa

SEQ ID NO: 1356023 - RNA, 19 nt, Homo sapiens
  misc_RNA (1)...(19): siRNA sense strand
ggcgcugugugcccuauua

SEQ ID NO: 1356024 - RNA, 19 nt, Homo sapiens
  misc_RNA (1)...(19): siRNA sense strand
ucaccauccucaucaagaa

SEQ ID NO: 1356025 - RNA, 19 nt, Homo sapiens
  misc_RNA (1)...(19): siRNA sense strand
gauccgcauugacgucauu

SEQ ID NO: 1356026 - RNA, 19 nt, Homo sapiens
  misc_RNA (1)...(19): siRNA sense strand
cugauucccaccauuauua

SEQ ID NO: 1356027 - RNA, 19 nt, Homo sapiens
  misc_RNA (1)...(19): siRNA sense strand
aacaaggucuacagccaua

SEQ ID NO: 1356028 - RNA, 19 nt, Homo sapiens
  misc_RNA (1)...(19): siRNA sense strand
gacuggaucuugcuaacau

SEQ ID NO: 1356029 - RNA, 19 nt, Homo sapiens
  misc_RNA (1)...(19): siRNA sense strand
gccaaauacuacaagauca

SEQ ID NO: 1356030 - RNA, 19 nt, Homo sapiens
  misc_RNA (1)...(19): siRNA sense strand
ggcuacaacuucagguuug

SEQ ID NO: 1356031 - RNA, 19 nt, Homo sapiens
  misc_RNA (1)...(19): siRNA sense strand
ggucuacagccauaagaaa

SEQ ID NO: 1356032 - RNA, 19 nt, Homo sapiens
  misc_RNA (1)...(19): siRNA sense strand
ccacagaccccaaagguuu

SEQ ID NO: 1356033 - RNA, 19 nt, Homo sapiens
  misc_RNA (1)...(19): siRNA sense strand
ucaagaacagcauccacua

SEQ ID NO: 1356034 - RNA, 19 nt, Homo sapiens
  misc_RNA (1)...(19): siRNA sense strand
ccaaauacuacaagaucaa

SEQ ID NO: 1356035 - RNA, 19 nt, Homo sapiens
  misc_RNA (1)...(19): siRNA sense strand
agguuuggcucaacucuga

SEQ ID NO: 1356036 - RNA, 19 nt, Homo sapiens
  misc_RNA (1)...(19): siRNA sense strand
ccaaauuccacuucuccaa

SEQ ID NO: 1356037 - RNA, 19 nt, Homo sapiens
  misc_RNA (1)...(19): siRNA sense strand
uugcuaacauucaugaaca

SEQ ID NO: 1356038 - RNA, 19 nt, Homo sapiens
  misc_RNA (1)...(19): siRNA sense strand
gggccucugucagccaauu

SEQ ID NO: 1356039 - RNA, 19 nt, Homo sapiens
  misc_RNA (1)...(19): siRNA sense strand
ggaucuugcuaacauucau

SEQ ID NO: 1356040 - RNA, 19 nt, Homo sapiens
  misc_RNA (1)...(19): siRNA sense strand
guacgauggccccaaauuu

SEQ ID NO: 1356041 - RNA, 19 nt, Homo sapiens
  misc_RNA (1)...(19): siRNA sense strand
gccauaagaaauuugacaa

SEQ ID NO: 1356042 - RNA, 19 nt, Homo sapiens
  misc_RNA (1)...(19): siRNA sense strand
gccaauuucuggguacgau

SEQ ID NO: 1356043 - RNA, 19 nt, Homo sapiens
  misc_RNA (1)...(19): siRNA sense strand
caagaacagcauccacuac

SEQ ID NO: 1356044 - RNA, 19 nt, Homo sapiens
  misc_RNA (1)...(19): siRNA sense strand
ucuacagccauaagaaauu

SEQ ID NO: 1356045 - RNA, 19 nt, Homo sapiens
  misc_RNA (1)...(19): siRNA sense strand
gcuaacauucaugaacaaa

SEQ ID NO: 1356046 - RNA, 19 nt, Homo sapiens
  misc_RNA (1)...(19): siRNA sense strand
gcgacuggaucuugcuaac

SEQ ID NO: 1356047 - RNA, 19 nt, Homo sapiens
  misc_RNA (1)...(19): siRNA sense strand
ccuacgggauccgcauuga

SEQ ID NO: 1356048 - RNA, 19 nt, Homo sapiens
  misc_RNA (1)...(19): siRNA sense strand
gaagauggggccucuguca

SEQ ID NO: 1356049 - RNA, 19 nt, Homo sapiens
  misc_RNA (1)...(19): siRNA sense strand
ugauucccaccauuauuaa

SEQ ID NO: 1356050 - RNA, 19 nt, Homo sapiens
  misc_RNA (1)...(19): siRNA sense strand
cagccugauucccaccauu

SEQ ID NO: 1356051 - RNA, 19 nt, Homo sapiens
  misc_RNA (1)...(19): siRNA sense strand
agccugauucccaccauua

SEQ ID NO: 1356052 - RNA, 19 nt, Homo sapiens
  misc_RNA (1)...(19): siRNA sense strand
ugacgucauugugcaugga

SEQ ID NO: 1356053 - RNA, 19 nt, Homo sapiens
  misc_RNA (1)...(19): siRNA sense strand
gaucuugcuaacauucaug

SEQ ID NO: 1356054 - RNA, 19 nt, Homo sapiens
  misc_RNA (1)...(19): siRNA sense strand
ucacagagcucgcacacaa

SEQ ID NO: 1356055 - RNA, 19 nt, Homo sapiens
  misc_RNA (1)...(19): siRNA sense strand
cuacagccauaagaaauuu

SEQ ID NO: 1356056 - RNA, 19 nt, Homo sapiens
  misc_RNA (1)...(19): siRNA sense strand
gcacagacggguaccugaa

SEQ ID NO: 1356057 - RNA, 19 nt, Homo sapiens
  misc_RNA (1)...(19): siRNA sense strand
ggcgcugugugcccuauua

SEQ ID NO: 1356058 - RNA, 19 nt, Homo sapiens
  misc_RNA (1)...(19): siRNA sense strand
ucaccauccucaucaagaa

SEQ ID NO: 1356059 - RNA, 19 nt, Homo sapiens
  misc_RNA (1)...(19): siRNA sense strand
gauccgcauugacgucauu

SEQ ID NO: 1356060 - RNA, 19 nt, Homo sapiens
  misc_RNA (1)...(19): siRNA sense strand
cugauucccaccauuauua

SEQ ID NO: 1356061 - RNA, 19 nt, Homo sapiens
  misc_RNA (1)...(19): siRNA sense strand
aacaaggucuacagccaua

SEQ ID NO: 1356062 - RNA, 19 nt, Homo sapiens
  misc_RNA (1)...(19): siRNA sense strand
gacuggaucuugcuaacau

SEQ ID NO: 1356063 - RNA, 19 nt, Homo sapiens
  misc_RNA (1)...(19): siRNA sense strand
gccaaauacuacaagauca

SEQ ID NO: 1356064 - RNA, 19 nt, Homo sapiens
  misc_RNA (1)...(19): siRNA sense strand
ggcuacaacuucagguuug

SEQ ID NO: 1356065 - RNA, 19 nt, Homo sapiens
  misc_RNA (1)...(19): siRNA sense strand
ggucuacagccauaagaaa

SEQ ID NO: 1356066 - RNA, 19 nt, Homo sapiens
  misc_RNA (1)...(19): siRNA sense strand
ccacagaccccaaagguuu

SEQ ID NO: 1356067 - RNA, 19 nt, Homo sapiens
  misc_RNA (1)...(19): siRNA sense strand
ucaagaacagcauccacua

SEQ ID NO: 1356068 - RNA, 19 nt, Homo sapiens
  misc_RNA (1)...(19): siRNA sense strand
ccaaauacuacaagaucaa

SEQ ID NO: 1356069 - RNA, 19 nt, Homo sapiens
  misc_RNA (1)...(19): siRNA sense strand
agguuuggcucaacucuga

SEQ ID NO: 1356070 - RNA, 19 nt, Homo sapiens
  misc_RNA (1)...(19): siRNA sense strand
ccaaauuccacuucuccaa

SEQ ID NO: 1356071 - RNA, 19 nt, Homo sapiens
  misc_RNA (1)...(19): siRNA sense strand
uugcuaacauucaugaaca

SEQ ID NO: 1356072 - RNA, 19 nt, Homo sapiens
  misc_RNA (1)...(19): siRNA sense strand
gggccucugucagccaauu

SEQ ID NO: 1356073 - RNA, 19 nt, Homo sapiens
  misc_RNA (1)...(19): siRNA sense strand
ggaucuugcuaacauucau

SEQ ID NO: 1356074 - RNA, 19 nt, Homo sapiens
  misc_RNA (1)...(19): siRNA sense strand
guacgauggccccaaauuu

SEQ ID NO: 1356075 - RNA, 19 nt, Homo sapiens
  misc_RNA (1)...(19): siRNA sense strand
gccauaagaaauuugacaa

SEQ ID NO: 1356076 - RNA, 19 nt, Homo sapiens
  misc_RNA (1)...(19): siRNA sense strand
gccaauuucuggguacgau

SEQ ID NO: 1356077 - RNA, 19 nt, Homo sapiens
  misc_RNA (1)...(19): siRNA sense strand
caagaacagcauccacuac

SEQ ID NO: 1356078 - RNA, 19 nt, Homo sapiens
  misc_RNA (1)...(19): siRNA sense strand
ucuacagccauaagaaauu

SEQ ID NO: 1356079 - RNA, 19 nt, Homo sapiens
  misc_RNA (1)...(19): siRNA sense strand
gcuaacauucaugaacaaa

SEQ ID NO: 1356080 - RNA, 19 nt, Homo sapiens
  misc_RNA (1)...(19): siRNA sense strand
gcgacuggaucuugcuaac

SEQ ID NO: 1356081 - RNA, 19 nt, Homo sapiens
  misc_RNA (1)...(19): siRNA sense strand
ccuacgggauccgcauuga

SEQ ID NO: 1356082 - RNA, 19 nt, Homo sapiens
  misc_RNA (1)...(19): siRNA sense strand
gaagauggggccucuguca

SEQ ID NO: 1356083 - RNA, 19 nt, Homo sapiens
  misc_RNA (1)...(19): siRNA sense strand
ugauucccaccauuauuaa

SEQ ID NO: 1356084 - RNA, 19 nt, Homo sapiens
  misc_RNA (1)...(19): siRNA sense strand
cagccugauucccaccauu

SEQ ID NO: 1356085 - RNA, 19 nt, Homo sapiens
  misc_RNA (1)...(19): siRNA sense strand
agccugauucccaccauua

SEQ ID NO: 1356086 - RNA, 19 nt, Homo sapiens
  misc_RNA (1)...(19): siRNA sense strand
ugacgucauugugcaugga

SEQ ID NO: 1356087 - RNA, 19 nt, Homo sapiens
  misc_RNA (1)...(19): siRNA sense strand
gaucuugcuaacauucaug

SEQ ID NO: 1356088 - RNA, 19 nt, Homo sapiens
  misc_RNA (1)...(19): siRNA sense strand
gauauucugucuuggauua

SEQ ID NO: 1356089 - RNA, 19 nt, Homo sapiens
  misc_RNA (1)...(19): siRNA sense strand
uaacugggcuugaaacuuc

SEQ ID NO: 1356090 - RNA, 19 nt, Homo sapiens
  misc_RNA (1)...(19): siRNA sense strand
gcaagaaucucagccaaga

SEQ ID NO: 1356091 - RNA, 19 nt, Homo sapiens
  misc_RNA (1)...(19): siRNA sense strand
aaagugagauucccacaga

SEQ ID NO: 1356092 - RNA, 19 nt, Homo sapiens
  misc_RNA (1)...(19): siRNA sense strand
gcacuuaugcugaugaaga

SEQ ID NO: 1356093 - RNA, 19 nt, Homo sapiens
  misc_RNA (1)...(19): siRNA sense strand
cuacauccaugacaccuuu

SEQ ID NO: 1356094 - RNA, 19 nt, Homo sapiens
  misc_RNA (1)...(19): siRNA sense strand
agacuuaccuaccaucuuc

SEQ ID NO: 1356095 - RNA, 19 nt, Homo sapiens
  misc_RNA (1)...(19): siRNA sense strand
gcgagcagguguucucaug

SEQ ID NO: 1356096 - RNA, 19 nt, Homo sapiens
  misc_RNA (1)...(19): siRNA sense strand
gcaagcaccaccuaaugaa

SEQ ID NO: 1356097 - RNA, 19 nt, Homo sapiens
  misc_RNA (1)...(19): siRNA sense strand
ugaagagcuugucaucaaa

SEQ ID NO: 1356098 - RNA, 19 nt, Homo sapiens
  misc_RNA (1)...(19): siRNA sense strand
ccucauaacugggcuugaa

SEQ ID NO: 1356099 - RNA, 19 nt, Homo sapiens
  misc_RNA (1)...(19): siRNA sense strand
caucaagacuuaccuacca

SEQ ID NO: 1356100 - RNA, 19 nt, Homo sapiens
  misc_RNA (1)...(19): siRNA sense strand
cuccauggauuaugcuaua

SEQ ID NO: 1356101 - RNA, 19 nt, Homo sapiens
  misc_RNA (1)...(19): siRNA sense strand
ugucaacacugaaggucua

SEQ ID NO: 1356102 - RNA, 19 nt, Homo sapiens
  misc_RNA (1)...(19): siRNA sense strand
acucacccaucaagacuua

SEQ ID NO: 1356103 - RNA, 19 nt, Homo sapiens
  misc_RNA (1)...(19): siRNA sense strand
ccaaggagagugacgugua

SEQ ID NO: 1356104 - RNA, 19 nt, Homo sapiens
  misc_RNA (1)...(19): siRNA sense strand
ggcaggagcuuccgcuaca

SEQ ID NO: 1356105 - RNA, 19 nt, Homo sapiens
  misc_RNA (1)...(19): siRNA sense strand
gugaagagccugguauuuc

SEQ ID NO: 1356106 - RNA, 19 nt, Homo sapiens
  misc_RNA (1)...(19): siRNA sense strand
ggauuaaacaagaagaaga

SEQ ID NO: 1356107 - RNA, 19 nt, Homo sapiens
  misc_RNA (1)...(19): siRNA sense strand
ucucucaucuccauggauu

SEQ ID NO: 1356108 - RNA, 19 nt, Homo sapiens
  misc_RNA (1)...(19): siRNA sense strand
caaggagagugacguguac

SEQ ID NO: 1356109 - RNA, 19 nt, Homo sapiens
  misc_RNA (1)...(19): siRNA sense strand
ggagagugacguguacaaa

SEQ ID NO: 1356110 - RNA, 19 nt, Homo sapiens
  misc_RNA (1)...(19): siRNA sense strand
gcacaagagcgcccuuucu

SEQ ID NO: 1356111 - RNA, 19 nt, Homo sapiens
  misc_RNA (1)...(19): siRNA sense strand
caacuacgagucucucauc

SEQ ID NO: 1356112 - RNA, 19 nt, Homo sapiens
  misc_RNA (1)...(19): siRNA sense strand
gguauuucaacaucagaua

SEQ ID NO: 1356113 - RNA, 19 nt, Homo sapiens
  misc_RNA (1)...(19): siRNA sense strand
gaagagccugguauuucaa

SEQ ID NO: 1356114 - RNA, 19 nt, Homo sapiens
  misc_RNA (1)...(19): siRNA sense strand
aaccugaugucuuaucuca

SEQ ID NO: 1356115 - RNA, 19 nt, Homo sapiens
  misc_RNA (1)...(19): siRNA sense strand
gaagggcaacuacgagucu

SEQ ID NO: 1356116 - RNA, 19 nt, Homo sapiens
  misc_RNA (1)...(19): siRNA sense strand
caagcaccaccuaaugaaa

SEQ ID NO: 1356117 - RNA, 19 nt, Homo sapiens
  misc_RNA (1)...(19): siRNA sense strand
gaagagcuugucaucaaag

SEQ ID NO: 1356118 - RNA, 19 nt, Homo sapiens
  misc_RNA (1)...(19): siRNA sense strand
cugaaggccuugcuagauc

SEQ ID NO: 1356119 - RNA, 19 nt, Homo sapiens
  misc_RNA (1)...(19): siRNA sense strand
agaagaagagccucagguu

SEQ ID NO: 1356120 - RNA, 19 nt, Homo sapiens
  misc_RNA (1)...(19): siRNA sense strand
acaaacagacacucaagga

SEQ ID NO: 1356121 - RNA, 19 nt, Homo sapiens
  misc_RNA (1)...(19): siRNA sense strand
gcaggagcuuccgcuacaa

SEQ ID NO: 1356122 - RNA, 19 nt, Homo sapiens
  misc_RNA (1)...(19): siRNA sense strand
gcugaaggccuugcuagau

SEQ ID NO: 1356123 - RNA, 19 nt, Homo sapiens
  misc_RNA (1)...(19): siRNA sense strand
gauuaaacaagaagaagag

SEQ ID NO: 1356124 - RNA, 19 nt, Homo sapiens
  misc_RNA (1)...(19): siRNA sense strand
gaaucucagccaagacaug

SEQ ID NO: 1356125 - RNA, 19 nt, Homo sapiens
  misc_RNA (1)...(19): siRNA sense strand
uuacucaguuggguagcua

SEQ ID NO: 1356126 - RNA, 19 nt, Homo sapiens
  misc_RNA (1)...(19): siRNA sense strand
cgcaagcaccaccuaauga

SEQ ID NO: 1356127 - RNA, 19 nt, Homo sapiens
  misc_RNA (1)...(19): siRNA sense strand
ccgcaagcaccaccuaaug

SEQ ID NO: 1356128 - RNA, 19 nt, Homo sapiens
  misc_RNA (1)...(19): siRNA sense strand
ucaaccugaugucuuaucu

SEQ ID NO: 1356129 - RNA, 19 nt, Homo sapiens
  misc_RNA (1)...(19): siRNA sense strand
gcuacaaacagacacucaa

SEQ ID NO: 1356130 - RNA, 19 nt, Homo sapiens
  misc_RNA (1)...(19): siRNA sense strand
caucuucggguccauaaca

SEQ ID NO: 1356131 - RNA, 19 nt, Homo sapiens
  misc_RNA (1)...(19): siRNA sense strand
gagagugacguguacaaaa

SEQ ID NO: 1356132 - RNA, 19 nt, Homo sapiens
  misc_RNA (1)...(19): siRNA sense strand
ccagaaggggaacauaaua

SEQ ID NO: 1356133 - RNA, 19 nt, Homo sapiens
  misc_RNA (1)...(19): siRNA sense strand
ggaccaugccagcgagaca

SEQ ID NO: 1356134 - RNA, 19 nt, Homo sapiens
  misc_RNA (1)...(19): siRNA sense strand
caaggaccaccuccguuca

SEQ ID NO: 1356135 - RNA, 19 nt, Homo sapiens
  misc_RNA (1)...(19): siRNA sense strand
uugcugacccaccaaugua

SEQ ID NO: 1356136 - RNA, 19 nt, Homo sapiens
  misc_RNA (1)...(19): siRNA sense strand
gagcuuccgcuacaaacag

SEQ ID NO: 1356137 - RNA, 19 nt, Homo sapiens
  misc_RNA (1)...(19): siRNA sense strand
caggagcuuccgcuacaaa

SEQ ID NO: 1356138 - RNA, 19 nt, Homo sapiens
  misc_RNA (1)...(19): siRNA sense strand
acacaggcgagcguccuua

SEQ ID NO: 1356139 - RNA, 19 nt, Homo sapiens
  misc_RNA (1)...(19): siRNA sense strand
caacacugaaggucuagag

SEQ ID NO: 1356140 - RNA, 19 nt, Homo sapiens
  misc_RNA (1)...(19): siRNA sense strand
cacaagagcgcccuuucuc

SEQ ID NO: 1356141 - RNA, 19 nt, Homo sapiens
  misc_RNA (1)...(19): siRNA sense strand
gccagaggaaagugagauu

SEQ ID NO: 1356142 - RNA, 19 nt, Homo sapiens
  misc_RNA (1)...(19): siRNA sense strand
ggagcuuccgcuacaaaca

SEQ ID NO: 1356143 - RNA, 19 nt, Homo sapiens
  misc_RNA (1)...(19): siRNA sense strand
gauauucugucuuggauua

SEQ ID NO: 1356144 - RNA, 19 nt, Homo sapiens
  misc_RNA (1)...(19): siRNA sense strand
uaacugggcuugaaacuuc

SEQ ID NO: 1356145 - RNA, 19 nt, Homo sapiens
  misc_RNA (1)...(19): siRNA sense strand
gcaagaaucucagccaaga

SEQ ID NO: 1356146 - RNA, 19 nt, Homo sapiens
  misc_RNA (1)...(19): siRNA sense strand
aaagugagauucccacaga

SEQ ID NO: 1356147 - RNA, 19 nt, Homo sapiens
  misc_RNA (1)...(19): siRNA sense strand
gcacuuaugcugaugaaga

SEQ ID NO: 1356148 - RNA, 19 nt, Homo sapiens
  misc_RNA (1)...(19): siRNA sense strand
gaaacuagccagcugugaa

SEQ ID NO: 1356149 - RNA, 19 nt, Homo sapiens
  misc_RNA (1)...(19): siRNA sense strand
cuacauccaugacaccuuu

SEQ ID NO: 1356150 - RNA, 19 nt, Homo sapiens
  misc_RNA (1)...(19): siRNA sense strand
agacuuaccuaccaucuuc

SEQ ID NO: 1356151 - RNA, 19 nt, Homo sapiens
  misc_RNA (1)...(19): siRNA sense strand
gcgagcagguguucucaug

SEQ ID NO: 1356152 - RNA, 19 nt, Homo sapiens
  misc_RNA (1)...(19): siRNA sense strand
ggacagggacagcagagaa

SEQ ID NO: 1356153 - RNA, 19 nt, Homo sapiens
  misc_RNA (1)...(19): siRNA sense strand
gcaagcaccaccuaaugaa

SEQ ID NO: 1356154 - RNA, 19 nt, Homo sapiens
  misc_RNA (1)...(19): siRNA sense strand
ugaagagcuugucaucaaa

SEQ ID NO: 1356155 - RNA, 19 nt, Homo sapiens
  misc_RNA (1)...(19): siRNA sense strand
ccucauaacugggcuugaa

SEQ ID NO: 1356156 - RNA, 19 nt, Homo sapiens
  misc_RNA (1)...(19): siRNA sense strand
caucaagacuuaccuacca

SEQ ID NO: 1356157 - RNA, 19 nt, Homo sapiens
  misc_RNA (1)...(19): siRNA sense strand
cuccauggauuaugcuaua

SEQ ID NO: 1356158 - RNA, 19 nt, Homo sapiens
  misc_RNA (1)...(19): siRNA sense strand
ugucaacacugaaggucua

SEQ ID NO: 1356159 - RNA, 19 nt, Homo sapiens
  misc_RNA (1)...(19): siRNA sense strand
acucacccaucaagacuua

SEQ ID NO: 1356160 - RNA, 19 nt, Homo sapiens
  misc_RNA (1)...(19): siRNA sense strand
ccaaggagagugacgugua

SEQ ID NO: 1356161 - RNA, 19 nt, Homo sapiens
  misc_RNA (1)...(19): siRNA sense strand
ggcaggagcuuccgcuaca

SEQ ID NO: 1356162 - RNA, 19 nt, Homo sapiens
  misc_RNA (1)...(19): siRNA sense strand
gcagacagcagcuaucucu

SEQ ID NO: 1356163 - RNA, 19 nt, Homo sapiens
  misc_RNA (1)...(19): siRNA sense strand
gugaagagccugguauuuc

SEQ ID NO: 1356164 - RNA, 19 nt, Homo sapiens
  misc_RNA (1)...(19): siRNA sense strand
ggauuaaacaagaagaaga

SEQ ID NO: 1356165 - RNA, 19 nt, Homo sapiens
  misc_RNA (1)...(19): siRNA sense strand
ucucucaucuccauggauu

SEQ ID NO: 1356166 - RNA, 19 nt, Homo sapiens
  misc_RNA (1)...(19): siRNA sense strand
aaacuagccagcugugaaa

SEQ ID NO: 1356167 - RNA, 19 nt, Homo sapiens
  misc_RNA (1)...(19): siRNA sense strand
caaggagagugacguguac

SEQ ID NO: 1356168 - RNA, 19 nt, Homo sapiens
  misc_RNA (1)...(19): siRNA sense strand
ggagagugacguguacaaa

SEQ ID NO: 1356169 - RNA, 19 nt, Homo sapiens
  misc_RNA (1)...(19): siRNA sense strand
gcacaagagcgcccuuucu

SEQ ID NO: 1356170 - RNA, 19 nt, Homo sapiens
  misc_RNA (1)...(19): siRNA sense strand
caacuacgagucucucauc

SEQ ID NO: 1356171 - RNA, 19 nt, Homo sapiens
  misc_RNA (1)...(19): siRNA sense strand
gguauuucaacaucagaua

SEQ ID NO: 1356172 - RNA, 19 nt, Homo sapiens
  misc_RNA (1)...(19): siRNA sense strand
gaagagccugguauuucaa

SEQ ID NO: 1356173 - RNA, 19 nt, Homo sapiens
  misc_RNA (1)...(19): siRNA sense strand
agaggcggcuggagaacuu

SEQ ID NO: 1356174 - RNA, 19 nt, Homo sapiens
  misc_RNA (1)...(19): siRNA sense strand
ggacagcagagaagaaacu

SEQ ID NO: 1356175 - RNA, 19 nt, Homo sapiens
  misc_RNA (1)...(19): siRNA sense strand
aaccugaugucuuaucuca

SEQ ID NO: 1356176 - RNA, 19 nt, Homo sapiens
  misc_RNA (1)...(19): siRNA sense strand
gaagggcaacuacgagucu

SEQ ID NO: 1356177 - RNA, 19 nt, Homo sapiens
  misc_RNA (1)...(19): siRNA sense strand
caagcaccaccuaaugaaa

SEQ ID NO: 1356178 - RNA, 19 nt, Homo sapiens
  misc_RNA (1)...(19): siRNA sense strand
gcggcucccuccagguauu

SEQ ID NO: 1356179 - RNA, 19 nt, Homo sapiens
  misc_RNA (1)...(19): siRNA sense strand
cugaaggccuugcuagauc

SEQ ID NO: 1356180 - RNA, 19 nt, Homo sapiens
  misc_RNA (1)...(19): siRNA sense strand
gaagagcuugucaucaaag

SEQ ID NO: 1356181 - RNA, 19 nt, Homo sapiens
  misc_RNA (1)...(19): siRNA sense strand
agaagaagagccucagguu

SEQ ID NO: 1356182 - RNA, 19 nt, Homo sapiens
  misc_RNA (1)...(19): siRNA sense strand
acaaacagacacucaagga

SEQ ID NO: 1356183 - RNA, 19 nt, Homo sapiens
  misc_RNA (1)...(19): siRNA sense strand
gcaggagcuuccgcuacaa

SEQ ID NO: 1356184 - RNA, 19 nt, Homo sapiens
  misc_RNA (1)...(19): siRNA sense strand
gcugaaggccuugcuagau

SEQ ID NO: 1356185 - RNA, 19 nt, Homo sapiens
  misc_RNA (1)...(19): siRNA sense strand
gcaacaggaacuucuggau

SEQ ID NO: 1356186 - RNA, 19 nt, Homo sapiens
  misc_RNA (1)...(19): siRNA sense strand
gaaucucagccaagacaug

SEQ ID NO: 1356187 - RNA, 19 nt, Homo sapiens
  misc_RNA (1)...(19): siRNA sense strand
gauuaaacaagaagaagag

SEQ ID NO: 1356188 - RNA, 19 nt, Homo sapiens
  misc_RNA (1)...(19): siRNA sense strand
uuacucaguuggguagcua

SEQ ID NO: 1356189 - RNA, 19 nt, Homo sapiens
  misc_RNA (1)...(19): siRNA sense strand
cgcaagcaccaccuaauga

SEQ ID NO: 1356190 - RNA, 19 nt, Homo sapiens
  misc_RNA (1)...(19): siRNA sense strand
ccgcaagcaccaccuaaug

SEQ ID NO: 1356191 - RNA, 19 nt, Homo sapiens
  misc_RNA (1)...(19): siRNA sense strand
ucaaccugaugucuuaucu

SEQ ID NO: 1356192 - RNA, 19 nt, Homo sapiens
  misc_RNA (1)...(19): siRNA sense strand
gcuacaaacagacacucaa

SEQ ID NO: 1356193 - RNA, 19 nt, Homo sapiens
  misc_RNA (1)...(19): siRNA sense strand
gagaaccugcugcgcaaca

SEQ ID NO: 1356194 - RNA, 19 nt, Homo sapiens
  misc_RNA (1)...(19): siRNA sense strand
caucuucggguccauaaca

SEQ ID NO: 1356195 - RNA, 19 nt, Homo sapiens
  misc_RNA (1)...(19): siRNA sense strand
gagagugacguguacaaaa

SEQ ID NO: 1356196 - RNA, 19 nt, Homo sapiens
  misc_RNA (1)...(19): siRNA sense strand
ccagaaggggaacauaaua

SEQ ID NO: 1356197 - RNA, 19 nt, Homo sapiens
  misc_RNA (1)...(19): siRNA sense strand
ggaccaugccagcgagaca

SEQ ID NO: 1356198 - RNA, 19 nt, Homo sapiens
  misc_RNA (1)...(19): siRNA sense strand
caaggaccaccuccguuca

SEQ ID NO: 1356199 - RNA, 19 nt, Homo sapiens
  misc_RNA (1)...(19): siRNA sense strand
gacagcagagaagaaacua

SEQ ID NO: 1356200 - RNA, 19 nt, Homo sapiens
  misc_RNA (1)...(19): siRNA sense strand
gagcuuccgcuacaaacag

SEQ ID NO: 1356201 - RNA, 19 nt, Homo sapiens
  misc_RNA (1)...(19): siRNA sense strand
caggagcuuccgcuacaaa

SEQ ID NO: 1356202 - RNA, 19 nt, Homo sapiens
  misc_RNA (1)...(19): siRNA sense strand
uugcugacccaccaaugua

SEQ ID NO: 1356203 - RNA, 19 nt, Homo sapiens
  misc_RNA (1)...(19): siRNA sense strand
acacaggcgagcguccuua

SEQ ID NO: 1356204 - RNA, 19 nt, Homo sapiens
  misc_RNA (1)...(19): siRNA sense strand
caacacugaaggucuagag

SEQ ID NO: 1356205 - RNA, 19 nt, Homo sapiens
  misc_RNA (1)...(19): siRNA sense strand
gccagaggaaagugagauu

SEQ ID NO: 1356206 - RNA, 19 nt, Homo sapiens
  misc_RNA (1)...(19): siRNA sense strand
ggagcuuccgcuacaaaca

SEQ ID NO: 1356207 - RNA, 19 nt, Homo sapiens
  misc_RNA (1)...(19): siRNA sense strand
cacaagagcgcccuuucuc

SEQ ID NO: 1356208 - RNA, 19 nt, Homo sapiens
  misc_RNA (1)...(19): siRNA sense strand
agacagcagcuaucucucu

SEQ ID NO: 1356209 - RNA, 19 nt, Homo sapiens
  misc_RNA (1)...(19): siRNA sense strand
gaaagaggcauuacuauuc

SEQ ID NO: 1356210 - RNA, 19 nt, Homo sapiens
  misc_RNA (1)...(19): siRNA sense strand
ggagcaagcuuuaaguaug

SEQ ID NO: 1356211 - RNA, 19 nt, Homo sapiens
  misc_RNA (1)...(19): siRNA sense strand
ggaaaugaaugauccugaa

SEQ ID NO: 1356212 - RNA, 19 nt, Homo sapiens
  misc_RNA (1)...(19): siRNA sense strand
caauauaccucgaaucugu

SEQ ID NO: 1356213 - RNA, 19 nt, Homo sapiens
  misc_RNA (1)...(19): siRNA sense strand
gauaucaaaucccuucauu

SEQ ID NO: 1356214 - RNA, 19 nt, Homo sapiens
  misc_RNA (1)...(19): siRNA sense strand
gagaauaagucgucugcuu

SEQ ID NO: 1356215 - RNA, 19 nt, Homo sapiens
  misc_RNA (1)...(19): siRNA sense strand
guagaaaucccuucauuga

SEQ ID NO: 1356216 - RNA, 19 nt, Homo sapiens
  misc_RNA (1)...(19): siRNA sense strand
caucaucaauccucccaua

SEQ ID NO: 1356217 - RNA, 19 nt, Homo sapiens
  misc_RNA (1)...(19): siRNA sense strand
gagagaaguuaaaggcaaa

SEQ ID NO: 1356218 - RNA, 19 nt, Homo sapiens
  misc_RNA (1)...(19): siRNA sense strand
gagacacagugacagauuu

SEQ ID NO: 1356219 - RNA, 19 nt, Homo sapiens
  misc_RNA (1)...(19): siRNA sense strand
ugaauuugcugacuugguu

SEQ ID NO: 1356220 - RNA, 19 nt, Homo sapiens
  misc_RNA (1)...(19): siRNA sense strand
gagcguaacuaugaauuuc

SEQ ID NO: 1356221 - RNA, 19 nt, Homo sapiens
  misc_RNA (1)...(19): siRNA sense strand
gaaagguuauagagucaau

SEQ ID NO: 1356222 - RNA, 19 nt, Homo sapiens
  misc_RNA (1)...(19): siRNA sense strand
ggauacagcccuuguuaga

SEQ ID NO: 1356223 - RNA, 19 nt, Homo sapiens
  misc_RNA (1)...(19): siRNA sense strand
cgagaaagaggcauuacua

SEQ ID NO: 1356224 - RNA, 19 nt, Homo sapiens
  misc_RNA (1)...(19): siRNA sense strand
ugaacaaguugcagauuug

SEQ ID NO: 1356225 - RNA, 19 nt, Homo sapiens
  misc_RNA (1)...(19): siRNA sense strand
cuaccaggcuuaauaggaa

SEQ ID NO: 1356226 - RNA, 19 nt, Homo sapiens
  misc_RNA (1)...(19): siRNA sense strand
caagaucacugggagaugu

SEQ ID NO: 1356227 - RNA, 19 nt, Homo sapiens
  misc_RNA (1)...(19): siRNA sense strand
uagaugcuguuacuaugua

SEQ ID NO: 1356228 - RNA, 19 nt, Homo sapiens
  misc_RNA (1)...(19): siRNA sense strand
gaggauauuugcaaugagu

SEQ ID NO: 1356229 - RNA, 19 nt, Homo sapiens
  misc_RNA (1)...(19): siRNA sense strand
aaagaggcauuacuauuca

SEQ ID NO: 1356230 - RNA, 19 nt, Homo sapiens
  misc_RNA (1)...(19): siRNA sense strand
ucaaaucccuucauuccau

SEQ ID NO: 1356231 - RNA, 19 nt, Homo sapiens
  misc_RNA (1)...(19): siRNA sense strand
ccacagaaagaauauugua

SEQ ID NO: 1356232 - RNA, 19 nt, Homo sapiens
  misc_RNA (1)...(19): siRNA sense strand
gcuaaaauccguaauauug

SEQ ID NO: 1356233 - RNA, 19 nt, Homo sapiens
  misc_RNA (1)...(19): siRNA sense strand
cugaagagcguaacuauga

SEQ ID NO: 1356234 - RNA, 19 nt, Homo sapiens
  misc_RNA (1)...(19): siRNA sense strand
ucaaaggagugguggaugu

SEQ ID NO: 1356235 - RNA, 19 nt, Homo sapiens
  misc_RNA (1)...(19): siRNA sense strand
ugaccaacauguagaaauc

SEQ ID NO: 1356236 - RNA, 19 nt, Homo sapiens
  misc_RNA (1)...(19): siRNA sense strand
auacagcccuuguuagaug

SEQ ID NO: 1356237 - RNA, 19 nt, Homo sapiens
  misc_RNA (1)...(19): siRNA sense strand
gagcaagcuuuaaguaugc

SEQ ID NO: 1356238 - RNA, 19 nt, Homo sapiens
  misc_RNA (1)...(19): siRNA sense strand
gcaauucaaaugauggaaa

SEQ ID NO: 1356239 - RNA, 19 nt, Homo sapiens
  misc_RNA (1)...(19): siRNA sense strand
aaugaaugauccugaauug

SEQ ID NO: 1356240 - RNA, 19 nt, Homo sapiens
  misc_RNA (1)...(19): siRNA sense strand
gagaaagaggcauuacuau

SEQ ID NO: 1356241 - RNA, 19 nt, Homo sapiens
  misc_RNA (1)...(19): siRNA sense strand
gaaaagaagcacagacaaa

SEQ ID NO: 1356242 - RNA, 19 nt, Homo sapiens
  misc_RNA (1)...(19): siRNA sense strand
ggagacacagugacagauu

SEQ ID NO: 1356243 - RNA, 19 nt, Homo sapiens
  misc_RNA (1)...(19): siRNA sense strand
cuacagacugcaauacaua

SEQ ID NO: 1356244 - RNA, 19 nt, Homo sapiens
  misc_RNA (1)...(19): siRNA sense strand
uugaacaaguugcagauuu

SEQ ID NO: 1356245 - RNA, 19 nt, Homo sapiens
  misc_RNA (1)...(19): siRNA sense strand
ggaaugccuuaauugaaca

SEQ ID NO: 1356246 - RNA, 19 nt, Homo sapiens
  misc_RNA (1)...(19): siRNA sense strand
gcaagcugauaaacacaau

SEQ ID NO: 1356247 - RNA, 19 nt, Homo sapiens
  misc_RNA (1)...(19): siRNA sense strand
cccaguguguauauuaaua

SEQ ID NO: 1356248 - RNA, 19 nt, Homo sapiens
  misc_RNA (1)...(19): siRNA sense strand
agaaagaggcauuacuauu

SEQ ID NO: 1356249 - RNA, 19 nt, Homo sapiens
  misc_RNA (1)...(19): siRNA sense strand
agaaaucccuucauugacu

SEQ ID NO: 1356250 - RNA, 19 nt, Homo sapiens
  misc_RNA (1)...(19): siRNA sense strand
guuagaugcuguuacuaug

SEQ ID NO: 1356251 - RNA, 19 nt, Homo sapiens
  misc_RNA (1)...(19): siRNA sense strand
gaaggaaacaacugaagca

SEQ ID NO: 1356252 - RNA, 19 nt, Homo sapiens
  misc_RNA (1)...(19): siRNA sense strand
gaggcaagcugauaaacac

SEQ ID NO: 1356253 - RNA, 19 nt, Homo sapiens
  misc_RNA (1)...(19): siRNA sense strand
ggcccagacucucacagua

SEQ ID NO: 1356254 - RNA, 19 nt, Homo sapiens
  misc_RNA (1)...(19): siRNA sense strand
guugaaagcaucagagaga

SEQ ID NO: 1356255 - RNA, 19 nt, Homo sapiens
  misc_RNA (1)...(19): siRNA sense strand
gaaaugaaugauccugaau

SEQ ID NO: 1356256 - RNA, 19 nt, Homo sapiens
  misc_RNA (1)...(19): siRNA sense strand
agaauaagucgucugcuuu

SEQ ID NO: 1356257 - RNA, 19 nt, Homo sapiens
  misc_RNA (1)...(19): siRNA sense strand
gaaagccccucuuggaaau

SEQ ID NO: 1356258 - RNA, 19 nt, Homo sapiens
  misc_RNA (1)...(19): siRNA sense strand
gcuacagacugcaauacau

SEQ ID NO: 1356259 - RNA, 19 nt, Homo sapiens
  misc_RNA (1)...(19): siRNA sense strand
ugaugaauuugcugacuug

SEQ ID NO: 1356260 - RNA, 19 nt, Homo sapiens
  misc_RNA (1)...(19): siRNA sense strand
ugaagagcguaacuaugaa

SEQ ID NO: 1356261 - RNA, 19 nt, Homo sapiens
  misc_RNA (1)...(19): siRNA sense strand
ucauauugaugcaggcaaa

SEQ ID NO: 1356262 - RNA, 19 nt, Homo sapiens
  misc_RNA (1)...(19): siRNA sense strand
gaagagcguaacuaugaau

SEQ ID NO: 1356263 - RNA, 19 nt, Homo sapiens
  misc_RNA (1)...(19): siRNA sense strand
uugcagauuuggaugauga

SEQ ID NO: 1356264 - RNA, 19 nt, Homo sapiens
  misc_RNA (1)...(19): siRNA sense strand
caaaggagugguggaugua

SEQ ID NO: 1356265 - RNA, 19 nt, Homo sapiens
  misc_RNA (1)...(19): siRNA sense strand
gagcgagaaagaggcauua

SEQ ID NO: 1356266 - RNA, 19 nt, Homo sapiens
  misc_RNA (1)...(19): siRNA sense strand
ucaauccucccauagcuaa

SEQ ID NO: 1356267 - RNA, 19 nt, Homo sapiens
  misc_RNA (1)...(19): siRNA sense strand
ggaggcaagcugauaaaca

SEQ ID NO: 1356268 - RNA, 19 nt, Homo sapiens
  misc_RNA (1)...(19): siRNA sense strand
gaugauggagacacaguga

SEQ ID NO: 1356269 - RNA, 19 nt, Homo sapiens
  misc_RNA (1)...(19): siRNA sense strand
uacccaguguguauauuaa

SEQ ID NO: 1356270 - RNA, 19 nt, Homo sapiens
  misc_RNA (1)...(19): siRNA sense strand
gaaagcaucagagagaagu

SEQ ID NO: 1356271 - RNA, 19 nt, Homo sapiens
  misc_RNA (1)...(19): siRNA sense strand
gagcggugccuaagagugu

SEQ ID NO: 1356272 - RNA, 19 nt, Homo sapiens
  misc_RNA (1)...(19): siRNA sense strand
gcuguuacauuugauugga

SEQ ID NO: 1356273 - RNA, 19 nt, Homo sapiens
  misc_RNA (1)...(19): siRNA sense strand
ccacaugugccgcuuggaa

SEQ ID NO: 1356274 - RNA, 19 nt, Homo sapiens
  misc_RNA (1)...(19): siRNA sense strand
gaaccuguuuucuucugua

SEQ ID NO: 1356275 - RNA, 19 nt, Homo sapiens
  misc_RNA (1)...(19): siRNA sense strand
gagauuccagaaccuguuu

SEQ ID NO: 1356276 - RNA, 19 nt, Homo sapiens
  misc_RNA (1)...(19): siRNA sense strand
uugaggauauuugcaauga

SEQ ID NO: 1356277 - RNA, 19 nt, Homo sapiens
  misc_RNA (1)...(19): siRNA sense strand
gcugauaaacacaauauac

SEQ ID NO: 1356278 - RNA, 19 nt, Homo sapiens
  misc_RNA (1)...(19): siRNA sense strand
guacuauuccggauauaca

SEQ ID NO: 1356279 - RNA, 19 nt, Homo sapiens
  misc_RNA (1)...(19): siRNA sense strand
ugccuuaauugaacaaguu

SEQ ID NO: 1356280 - RNA, 19 nt, Homo sapiens
  misc_RNA (1)...(19): siRNA sense strand
ugaccaacuugaggauauu

SEQ ID NO: 1356281 - RNA, 19 nt, Homo sapiens
  misc_RNA (1)...(19): siRNA sense strand
aggcauuacuauucaauca

SEQ ID NO: 1356282 - RNA, 19 nt, Homo sapiens
  misc_RNA (1)...(19): siRNA sense strand
aaacuucuuuggaauugca

SEQ ID NO: 1356283 - RNA, 19 nt, Homo sapiens
  misc_RNA (1)...(19): siRNA sense strand
gagguugagcggugccuaa

SEQ ID NO: 1356284 - RNA, 19 nt, Homo sapiens
  misc_RNA (1)...(19): siRNA sense strand
gggagauguugaugaugga

SEQ ID NO: 1356285 - RNA, 19 nt, Homo sapiens
  misc_RNA (1)...(19): siRNA sense strand
ggagauuccagaaccuguu

SEQ ID NO: 1356286 - RNA, 19 nt, Homo sapiens
  misc_RNA (1)...(19): siRNA sense strand
aaacaaugaagcagagaga

SEQ ID NO: 1356287 - RNA, 19 nt, Homo sapiens
  misc_RNA (1)...(19): siRNA sense strand
gaauaagucgucugcuuuu

SEQ ID NO: 1356288 - RNA, 19 nt, Homo sapiens
  misc_RNA (1)...(19): siRNA sense strand
gcguaacuaugaauuucug

SEQ ID NO: 1356289 - RNA, 19 nt, Homo sapiens
  misc_RNA (1)...(19): siRNA sense strand
ugacuugguuuuagaagaa

SEQ ID NO: 1356290 - RNA, 19 nt, Homo sapiens
  misc_RNA (1)...(19): siRNA sense strand
agugguggauguaguaaug

SEQ ID NO: 1356291 - RNA, 19 nt, Homo sapiens
  misc_RNA (1)...(19): siRNA sense strand
cacaauauaccucgaaucu

SEQ ID NO: 1356292 - RNA, 19 nt, Homo sapiens
  misc_RNA (1)...(19): siRNA sense strand
guauggaggcaagcugaua

SEQ ID NO: 1356293 - RNA, 19 nt, Homo sapiens
  misc_RNA (1)...(19): siRNA sense strand
gugcaguggcuguauuuga

SEQ ID NO: 1356294 - RNA, 19 nt, Homo sapiens
  misc_RNA (1)...(19): siRNA sense strand
guugagcggugccuaagag

SEQ ID NO: 1356295 - RNA, 19 nt, Homo sapiens
  misc_RNA (1)...(19): siRNA sense strand
cagauuucauggcccaaga

SEQ ID NO: 1356296 - RNA, 19 nt, Homo sapiens
  misc_RNA (1)...(19): siRNA sense strand
caccacagaaagaauauug

SEQ ID NO: 1356297 - RNA, 19 nt, Homo sapiens
  misc_RNA (1)...(19): siRNA sense strand
gcagagagacuuuuauugg

SEQ ID NO: 1356298 - RNA, 19 nt, Homo sapiens
  misc_RNA (1)...(19): siRNA sense strand
gcugguaacauugcuuuga

SEQ ID NO: 1356299 - RNA, 19 nt, Homo sapiens
  misc_RNA (1)...(19): siRNA sense strand
ggcuuaauaggaaaugaua

SEQ ID NO: 1356300 - RNA, 19 nt, Homo sapiens
  misc_RNA (1)...(19): siRNA sense strand
guuacuauguacuuaccuu

SEQ ID NO: 1356301 - RNA, 19 nt, Homo sapiens
  misc_RNA (1)...(19): siRNA sense strand
gaugaugaauuugcugacu

SEQ ID NO: 1356302 - RNA, 19 nt, Homo sapiens
  misc_RNA (1)...(19): siRNA sense strand
uaaacaagauggacaaaac

SEQ ID NO: 1356303 - RNA, 19 nt, Homo sapiens
  misc_RNA (1)...(19): siRNA sense strand
uggaaagguuauagaguca

SEQ ID NO: 1356304 - RNA, 19 nt, Homo sapiens
  misc_RNA (1)...(19): siRNA sense strand
caucaauccucccauagcu

SEQ ID NO: 1356305 - RNA, 19 nt, Homo sapiens
  misc_RNA (1)...(19): siRNA sense strand
uaccaccacagaaagaaua

SEQ ID NO: 1356306 - RNA, 19 nt, Homo sapiens
  misc_RNA (1)...(19): siRNA sense strand
aggaaugccuuaauugaac

SEQ ID NO: 1356307 - RNA, 19 nt, Homo sapiens
  misc_RNA (1)...(19): siRNA sense strand
gcccagacucucacaguau

SEQ ID NO: 1356308 - RNA, 19 nt, Homo sapiens
  misc_RNA (1)...(19): siRNA sense strand
ugaugccucugcuggugua

SEQ ID NO: 1356309 - RNA, 19 nt, Homo sapiens
  misc_RNA (1)...(19): siRNA sense strand
gaaagaggcauuacuauuc

SEQ ID NO: 1356310 - RNA, 19 nt, Homo sapiens
  misc_RNA (1)...(19): siRNA sense strand
ggagcaagcuuuaaguaug

SEQ ID NO: 1356311 - RNA, 19 nt, Homo sapiens
  misc_RNA (1)...(19): siRNA sense strand
ggaaaugaaugauccugaa

SEQ ID NO: 1356312 - RNA, 19 nt, Homo sapiens
  misc_RNA (1)...(19): siRNA sense strand
caauauaccucgaaucugu

SEQ ID NO: 1356313 - RNA, 19 nt, Homo sapiens
  misc_RNA (1)...(19): siRNA sense strand
gauaucaaaucccuucauu

SEQ ID NO: 1356314 - RNA, 19 nt, Homo sapiens
  misc_RNA (1)...(19): siRNA sense strand
gagaauaagucgucugcuu

SEQ ID NO: 1356315 - RNA, 19 nt, Homo sapiens
  misc_RNA (1)...(19): siRNA sense strand
guagaaaucccuucauuga

SEQ ID NO: 1356316 - RNA, 19 nt, Homo sapiens
  misc_RNA (1)...(19): siRNA sense strand
caucaucaauccucccaua

SEQ ID NO: 1356317 - RNA, 19 nt, Homo sapiens
  misc_RNA (1)...(19): siRNA sense strand
gagagaaguuaaaggcaaa

SEQ ID NO: 1356318 - RNA, 19 nt, Homo sapiens
  misc_RNA (1)...(19): siRNA sense strand
gagacacagugacagauuu

SEQ ID NO: 1356319 - RNA, 19 nt, Homo sapiens
  misc_RNA (1)...(19): siRNA sense strand
ugaauuugcugacuugguu

SEQ ID NO: 1356320 - RNA, 19 nt, Homo sapiens
  misc_RNA (1)...(19): siRNA sense strand
gagcguaacuaugaauuuc

SEQ ID NO: 1356321 - RNA, 19 nt, Homo sapiens
  misc_RNA (1)...(19): siRNA sense strand
gaaagguuauagagucaau

SEQ ID NO: 1356322 - RNA, 19 nt, Homo sapiens
  misc_RNA (1)...(19): siRNA sense strand
ggauacagcccuuguuaga

SEQ ID NO: 1356323 - RNA, 19 nt, Homo sapiens
  misc_RNA (1)...(19): siRNA sense strand
cgagaaagaggcauuacua

SEQ ID NO: 1356324 - RNA, 19 nt, Homo sapiens
  misc_RNA (1)...(19): siRNA sense strand
ugaacaaguugcagauuug

SEQ ID NO: 1356325 - RNA, 19 nt, Homo sapiens
  misc_RNA (1)...(19): siRNA sense strand
cuaccaggcuuaauaggaa

SEQ ID NO: 1356326 - RNA, 19 nt, Homo sapiens
  misc_RNA (1)...(19): siRNA sense strand
caagaucacugggagaugu

SEQ ID NO: 1356327 - RNA, 19 nt, Homo sapiens
  misc_RNA (1)...(19): siRNA sense strand
uagaugcuguuacuaugua

SEQ ID NO: 1356328 - RNA, 19 nt, Homo sapiens
  misc_RNA (1)...(19): siRNA sense strand
gaggauauuugcaaugagu

SEQ ID NO: 1356329 - RNA, 19 nt, Homo sapiens
  misc_RNA (1)...(19): siRNA sense strand
aaagaggcauuacuauuca

SEQ ID NO: 1356330 - RNA, 19 nt, Homo sapiens
  misc_RNA (1)...(19): siRNA sense strand
ucaaaucccuucauuccau

SEQ ID NO: 1356331 - RNA, 19 nt, Homo sapiens
  misc_RNA (1)...(19): siRNA sense strand
ccacagaaagaauauugua

SEQ ID NO: 1356332 - RNA, 19 nt, Homo sapiens
  misc_RNA (1)...(19): siRNA sense strand
gcuaaaauccguaauauug

SEQ ID NO: 1356333 - RNA, 19 nt, Homo sapiens
  misc_RNA (1)...(19): siRNA sense strand
cugaagagcguaacuauga

SEQ ID NO: 1356334 - RNA, 19 nt, Homo sapiens
  misc_RNA (1)...(19): siRNA sense strand
ucaaaggagugguggaugu

SEQ ID NO: 1356335 - RNA, 19 nt, Homo sapiens
  misc_RNA (1)...(19): siRNA sense strand
ugaccaacauguagaaauc

SEQ ID NO: 1356336 - RNA, 19 nt, Homo sapiens
  misc_RNA (1)...(19): siRNA sense strand
auacagcccuuguuagaug

SEQ ID NO: 1356337 - RNA, 19 nt, Homo sapiens
  misc_RNA (1)...(19): siRNA sense strand
gagcaagcuuuaaguaugc

SEQ ID NO: 1356338 - RNA, 19 nt, Homo sapiens
  misc_RNA (1)...(19): siRNA sense strand
gcaauucaaaugauggaaa

SEQ ID NO: 1356339 - RNA, 19 nt, Homo sapiens
  misc_RNA (1)...(19): siRNA sense strand
aaugaaugauccugaauug

SEQ ID NO: 1356340 - RNA, 19 nt, Homo sapiens
  misc_RNA (1)...(19): siRNA sense strand
gagaaagaggcauuacuau

SEQ ID NO: 1356341 - RNA, 19 nt, Homo sapiens
  misc_RNA (1)...(19): siRNA sense strand
gaaaagaagcacagacaaa

SEQ ID NO: 1356342 - RNA, 19 nt, Homo sapiens
  misc_RNA (1)...(19): siRNA sense strand
ggagacacagugacagauu

SEQ ID NO: 1356343 - RNA, 19 nt, Homo sapiens
  misc_RNA (1)...(19): siRNA sense strand
cuacagacugcaauacaua

SEQ ID NO: 1356344 - RNA, 19 nt, Homo sapiens
  misc_RNA (1)...(19): siRNA sense strand
uugaacaaguugcagauuu

SEQ ID NO: 1356345 - RNA, 19 nt, Homo sapiens
  misc_RNA (1)...(19): siRNA sense strand
ggaaugccuuaauugaaca

SEQ ID NO: 1356346 - RNA, 19 nt, Homo sapiens
  misc_RNA (1)...(19): siRNA sense strand
gcaagcugauaaacacaau

SEQ ID NO: 1356347 - RNA, 19 nt, Homo sapiens
  misc_RNA (1)...(19): siRNA sense strand
cccaguguguauauuaaua

SEQ ID NO: 1356348 - RNA, 19 nt, Homo sapiens
  misc_RNA (1)...(19): siRNA sense strand
agaaagaggcauuacuauu

SEQ ID NO: 1356349 - RNA, 19 nt, Homo sapiens
  misc_RNA (1)...(19): siRNA sense strand
agaaaucccuucauugacu

SEQ ID NO: 1356350 - RNA, 19 nt, Homo sapiens
  misc_RNA (1)...(19): siRNA sense strand
guuagaugcuguuacuaug

SEQ ID NO: 1356351 - RNA, 19 nt, Homo sapiens
  misc_RNA (1)...(19): siRNA sense strand
gaaggaaacaacugaagca

SEQ ID NO: 1356352 - RNA, 19 nt, Homo sapiens
  misc_RNA (1)...(19): siRNA sense strand
gaggcaagcugauaaacac

SEQ ID NO: 1356353 - RNA, 19 nt, Homo sapiens
  misc_RNA (1)...(19): siRNA sense strand
ggcccagacucucacagua

SEQ ID NO: 1356354 - RNA, 19 nt, Homo sapiens
  misc_RNA (1)...(19): siRNA sense strand
guugaaagcaucagagaga

SEQ ID NO: 1356355 - RNA, 19 nt, Homo sapiens
  misc_RNA (1)...(19): siRNA sense strand
gaaaugaaugauccugaau

SEQ ID NO: 1356356 - RNA, 19 nt, Homo sapiens
  misc_RNA (1)...(19): siRNA sense strand
agaauaagucgucugcuuu

SEQ ID NO: 1356357 - RNA, 19 nt, Homo sapiens
  misc_RNA (1)...(19): siRNA sense strand
gaaagccccucuuggaaau

SEQ ID NO: 1356358 - RNA, 19 nt, Homo sapiens
  misc_RNA (1)...(19): siRNA sense strand
gcuacagacugcaauacau

SEQ ID NO: 1356359 - RNA, 19 nt, Homo sapiens
  misc_RNA (1)...(19): siRNA sense strand
ugaugaauuugcugacuug

SEQ ID NO: 1356360 - RNA, 19 nt, Homo sapiens
  misc_RNA (1)...(19): siRNA sense strand
ugaagagcguaacuaugaa

SEQ ID NO: 1356361 - RNA, 19 nt, Homo sapiens
  misc_RNA (1)...(19): siRNA sense strand
ucauauugaugcaggcaaa

SEQ ID NO: 1356362 - RNA, 19 nt, Homo sapiens
  misc_RNA (1)...(19): siRNA sense strand
gaagagcguaacuaugaau

SEQ ID NO: 1356363 - RNA, 19 nt, Homo sapiens
  misc_RNA (1)...(19): siRNA sense strand
uugcagauuuggaugauga

SEQ ID NO: 1356364 - RNA, 19 nt, Homo sapiens
  misc_RNA (1)...(19): siRNA sense strand
caaaggagugguggaugua

SEQ ID NO: 1356365 - RNA, 19 nt, Homo sapiens
  misc_RNA (1)...(19): siRNA sense strand
gagcgagaaagaggcauua

SEQ ID NO: 1356366 - RNA, 19 nt, Homo sapiens
  misc_RNA (1)...(19): siRNA sense strand
ucaauccucccauagcuaa

SEQ ID NO: 1356367 - RNA, 19 nt, Homo sapiens
  misc_RNA (1)...(19): siRNA sense strand
ggaggcaagcugauaaaca

SEQ ID NO: 1356368 - RNA, 19 nt, Homo sapiens
  misc_RNA (1)...(19): siRNA sense strand
gaugauggagacacaguga

SEQ ID NO: 1356369 - RNA, 19 nt, Homo sapiens
  misc_RNA (1)...(19): siRNA sense strand
uacccaguguguauauuaa

SEQ ID NO: 1356370 - RNA, 19 nt, Homo sapiens
  misc_RNA (1)...(19): siRNA sense strand
gaaagcaucagagagaagu

SEQ ID NO: 1356371 - RNA, 19 nt, Homo sapiens
  misc_RNA (1)...(19): siRNA sense strand
gagcggugccuaagagugu

SEQ ID NO: 1356372 - RNA, 19 nt, Homo sapiens
  misc_RNA (1)...(19): siRNA sense strand
gcuguuacauuugauugga

SEQ ID NO: 1356373 - RNA, 19 nt, Homo sapiens
  misc_RNA (1)...(19): siRNA sense strand
ccacaugugccgcuuggaa

SEQ ID NO: 1356374 - RNA, 19 nt, Homo sapiens
  misc_RNA (1)...(19): siRNA sense strand
gaaccuguuuucuucugua

SEQ ID NO: 1356375 - RNA, 19 nt, Homo sapiens
  misc_RNA (1)...(19): siRNA sense strand
gagauuccagaaccuguuu

SEQ ID NO: 1356376 - RNA, 19 nt, Homo sapiens
  misc_RNA (1)...(19): siRNA sense strand
uugaggauauuugcaauga

SEQ ID NO: 1356377 - RNA, 19 nt, Homo sapiens
  misc_RNA (1)...(19): siRNA sense strand
gcugauaaacacaauauac

SEQ ID NO: 1356378 - RNA, 19 nt, Homo sapiens
  misc_RNA (1)...(19): siRNA sense strand
guacuauuccggauauaca

SEQ ID NO: 1356379 - RNA, 19 nt, Homo sapiens
  misc_RNA (1)...(19): siRNA sense strand
ugccuuaauugaacaaguu

SEQ ID NO: 1356380 - RNA, 19 nt, Homo sapiens
  misc_RNA (1)...(19): siRNA sense strand
ugaccaacuugaggauauu

SEQ ID NO: 1356381 - RNA, 19 nt, Homo sapiens
  misc_RNA (1)...(19): siRNA sense strand
aggcauuacuauucaauca

SEQ ID NO: 1356382 - RNA, 19 nt, Homo sapiens
  misc_RNA (1)...(19): siRNA sense strand
aaacuucuuuggaauugca

SEQ ID NO: 1356383 - RNA, 19 nt, Homo sapiens
  misc_RNA (1)...(19): siRNA sense strand
gagguugagcggugccuaa

SEQ ID NO: 1356384 - RNA, 19 nt, Homo sapiens
  misc_RNA (1)...(19): siRNA sense strand
gggagauguugaugaugga

SEQ ID NO: 1356385 - RNA, 19 nt, Homo sapiens
  misc_RNA (1)...(19): siRNA sense strand
ggagauuccagaaccuguu

SEQ ID NO: 1356386 - RNA, 19 nt, Homo sapiens
  misc_RNA (1)...(19): siRNA sense strand
aaacaaugaagcagagaga

SEQ ID NO: 1356387 - RNA, 19 nt, Homo sapiens
  misc_RNA (1)...(19): siRNA sense strand
gaauaagucgucugcuuuu

SEQ ID NO: 1356388 - RNA, 19 nt, Homo sapiens
  misc_RNA (1)...(19): siRNA sense strand
gcguaacuaugaauuucug

SEQ ID NO: 1356389 - RNA, 19 nt, Homo sapiens
  misc_RNA (1)...(19): siRNA sense strand
ugacuugguuuuagaagaa

SEQ ID NO: 1356390 - RNA, 19 nt, Homo sapiens
  misc_RNA (1)...(19): siRNA sense strand
agugguggauguaguaaug

SEQ ID NO: 1356391 - RNA, 19 nt, Homo sapiens
  misc_RNA (1)...(19): siRNA sense strand
cacaauauaccucgaaucu

SEQ ID NO: 1356392 - RNA, 19 nt, Homo sapiens
  misc_RNA (1)...(19): siRNA sense strand
guauggaggcaagcugaua

SEQ ID NO: 1356393 - RNA, 19 nt, Homo sapiens
  misc_RNA (1)...(19): siRNA sense strand
gugcaguggcuguauuuga

SEQ ID NO: 1356394 - RNA, 19 nt, Homo sapiens
  misc_RNA (1)...(19): siRNA sense strand
guugagcggugccuaagag

SEQ ID NO: 1356395 - RNA, 19 nt, Homo sapiens
  misc_RNA (1)...(19): siRNA sense strand
cagauuucauggcccaaga

SEQ ID NO: 1356396 - RNA, 19 nt, Homo sapiens
  misc_RNA (1)...(19): siRNA sense strand
caccacagaaagaauauug

SEQ ID NO: 1356397 - RNA, 19 nt, Homo sapiens
  misc_RNA (1)...(19): siRNA sense strand
gcagagagacuuuuauugg

SEQ ID NO: 1356398 - RNA, 19 nt, Homo sapiens
  misc_RNA (1)...(19): siRNA sense strand
gcugguaacauugcuuuga

SEQ ID NO: 1356399 - RNA, 19 nt, Homo sapiens
  misc_RNA (1)...(19): siRNA sense strand
ggcuuaauaggaaaugaua

SEQ ID NO: 1356400 - RNA, 19 nt, Homo sapiens
  misc_RNA (1)...(19): siRNA sense strand
guuacuauguacuuaccuu

SEQ ID NO: 1356401 - RNA, 19 nt, Homo sapiens
  misc_RNA (1)...(19): siRNA sense strand
gaugaugaauuugcugacu

SEQ ID NO: 1356402 - RNA, 19 nt, Homo sapiens
  misc_RNA (1)...(19): siRNA sense strand
uaaacaagauggacaaaac

SEQ ID NO: 1356403 - RNA, 19 nt, Homo sapiens
  misc_RNA (1)...(19): siRNA sense strand
uggaaagguuauagaguca

SEQ ID NO: 1356404 - RNA, 19 nt, Homo sapiens
  misc_RNA (1)...(19): siRNA sense strand
caucaauccucccauagcu

SEQ ID NO: 1356405 - RNA, 19 nt, Homo sapiens
  misc_RNA (1)...(19): siRNA sense strand
uaccaccacagaaagaaua

SEQ ID NO: 1356406 - RNA, 19 nt, Homo sapiens
  misc_RNA (1)...(19): siRNA sense strand
aggaaugccuuaauugaac

SEQ ID NO: 1356407 - RNA, 19 nt, Homo sapiens
  misc_RNA (1)...(19): siRNA sense strand
gcccagacucucacaguau

SEQ ID NO: 1356408 - RNA, 19 nt, Homo sapiens
  misc_RNA (1)...(19): siRNA sense strand
ugaugccucugcuggugua

SEQ ID NO: 1356409 - RNA, 19 nt, Homo sapiens
  misc_RNA (1)...(19): siRNA sense strand
gaaagaggcauuacuauuc

SEQ ID NO: 1356410 - RNA, 19 nt, Homo sapiens
  misc_RNA (1)...(19): siRNA sense strand
ggagcaagcuuuaaguaug

SEQ ID NO: 1356411 - RNA, 19 nt, Homo sapiens
  misc_RNA (1)...(19): siRNA sense strand
ggaaaugaaugauccugaa

SEQ ID NO: 1356412 - RNA, 19 nt, Homo sapiens
  misc_RNA (1)...(19): siRNA sense strand
caauauaccucgaaucugu

SEQ ID NO: 1356413 - RNA, 19 nt, Homo sapiens
  misc_RNA (1)...(19): siRNA sense strand
gauaucaaaucccuucauu

SEQ ID NO: 1356414 - RNA, 19 nt, Homo sapiens
  misc_RNA (1)...(19): siRNA sense strand
gagaauaagucgucugcuu

SEQ ID NO: 1356415 - RNA, 19 nt, Homo sapiens
  misc_RNA (1)...(19): siRNA sense strand
guagaaaucccuucauuga

SEQ ID NO: 1356416 - RNA, 19 nt, Homo sapiens
  misc_RNA (1)...(19): siRNA sense strand
caucaucaauccucccaua

SEQ ID NO: 1356417 - RNA, 19 nt, Homo sapiens
  misc_RNA (1)...(19): siRNA sense strand
gagagaaguuaaaggcaaa

SEQ ID NO: 1356418 - RNA, 19 nt, Homo sapiens
  misc_RNA (1)...(19): siRNA sense strand
gagacacagugacagauuu

SEQ ID NO: 1356419 - RNA, 19 nt, Homo sapiens
  misc_RNA (1)...(19): siRNA sense strand
ugaauuugcugacuugguu

SEQ ID NO: 1356420 - RNA, 19 nt, Homo sapiens
  misc_RNA (1)...(19): siRNA sense strand
gagcguaacuaugaauuuc

SEQ ID NO: 1356421 - RNA, 19 nt, Homo sapiens
  misc_RNA (1)...(19): siRNA sense strand
gaaagguuauagagucaau

SEQ ID NO: 1356422 - RNA, 19 nt, Homo sapiens
  misc_RNA (1)...(19): siRNA sense strand
ggauacagcccuuguuaga

SEQ ID NO: 1356423 - RNA, 19 nt, Homo sapiens
  misc_RNA (1)...(19): siRNA sense strand
cgagaaagaggcauuacua

SEQ ID NO: 1356424 - RNA, 19 nt, Homo sapiens
  misc_RNA (1)...(19): siRNA sense strand
ugaacaaguugcagauuug

SEQ ID NO: 1356425 - RNA, 19 nt, Homo sapiens
  misc_RNA (1)...(19): siRNA sense strand
cuaccaggcuuaauaggaa

SEQ ID NO: 1356426 - RNA, 19 nt, Homo sapiens
  misc_RNA (1)...(19): siRNA sense strand
caagaucacugggagaugu

SEQ ID NO: 1356427 - RNA, 19 nt, Homo sapiens
  misc_RNA (1)...(19): siRNA sense strand
uagaugcuguuacuaugua

SEQ ID NO: 1356428 - RNA, 19 nt, Homo sapiens
  misc_RNA (1)...(19): siRNA sense strand
gaggauauuugcaaugagu

SEQ ID NO: 1356429 - RNA, 19 nt, Homo sapiens
  misc_RNA (1)...(19): siRNA sense strand
aaagaggcauuacuauuca

SEQ ID NO: 1356430 - RNA, 19 nt, Homo sapiens
  misc_RNA (1)...(19): siRNA sense strand
ucaaaucccuucauuccau

SEQ ID NO: 1356431 - RNA, 19 nt, Homo sapiens
  misc_RNA (1)...(19): siRNA sense strand
ccacagaaagaauauugua

SEQ ID NO: 1356432 - RNA, 19 nt, Homo sapiens
  misc_RNA (1)...(19): siRNA sense strand
gcuaaaauccguaauauug

SEQ ID NO: 1356433 - RNA, 19 nt, Homo sapiens
  misc_RNA (1)...(19): siRNA sense strand
cugaagagcguaacuauga

SEQ ID NO: 1356434 - RNA, 19 nt, Homo sapiens
  misc_RNA (1)...(19): siRNA sense strand
ucaaaggagugguggaugu

SEQ ID NO: 1356435 - RNA, 19 nt, Homo sapiens
  misc_RNA (1)...(19): siRNA sense strand
ugaccaacauguagaaauc

SEQ ID NO: 1356436 - RNA, 19 nt, Homo sapiens
  misc_RNA (1)...(19): siRNA sense strand
auacagcccuuguuagaug

SEQ ID NO: 1356437 - RNA, 19 nt, Homo sapiens
  misc_RNA (1)...(19): siRNA sense strand
gagcaagcuuuaaguaugc

SEQ ID NO: 1356438 - RNA, 19 nt, Homo sapiens
  misc_RNA (1)...(19): siRNA sense strand
gcaauucaaaugauggaaa

SEQ ID NO: 1356439 - RNA, 19 nt, Homo sapiens
  misc_RNA (1)...(19): siRNA sense strand
aaugaaugauccugaauug

SEQ ID NO: 1356440 - RNA, 19 nt, Homo sapiens
  misc_RNA (1)...(19): siRNA sense strand
gagaaagaggcauuacuau

SEQ ID NO: 1356441 - RNA, 19 nt, Homo sapiens
  misc_RNA (1)...(19): siRNA sense strand
gaaaagaagcacagacaaa

SEQ ID NO: 1356442 - RNA, 19 nt, Homo sapiens
  misc_RNA (1)...(19): siRNA sense strand
ggagacacagugacagauu

SEQ ID NO: 1356443 - RNA, 19 nt, Homo sapiens
  misc_RNA (1)...(19): siRNA sense strand
cuacagacugcaauacaua

SEQ ID NO: 1356444 - RNA, 19 nt, Homo sapiens
  misc_RNA (1)...(19): siRNA sense strand
uugaacaaguugcagauuu

SEQ ID NO: 1356445 - RNA, 19 nt, Homo sapiens
  misc_RNA (1)...(19): siRNA sense strand
ggaaugccuuaauugaaca

SEQ ID NO: 1356446 - RNA, 19 nt, Homo sapiens
  misc_RNA (1)...(19): siRNA sense strand
gcaagcugauaaacacaau

SEQ ID NO: 1356447 - RNA, 19 nt, Homo sapiens
  misc_RNA (1)...(19): siRNA sense strand
cccaguguguauauuaaua

SEQ ID NO: 1356448 - RNA, 19 nt, Homo sapiens
  misc_RNA (1)...(19): siRNA sense strand
agaaagaggcauuacuauu

SEQ ID NO: 1356449 - RNA, 19 nt, Homo sapiens
  misc_RNA (1)...(19): siRNA sense strand
agaaaucccuucauugacu

SEQ ID NO: 1356450 - RNA, 19 nt, Homo sapiens
  misc_RNA (1)...(19): siRNA sense strand
guuagaugcuguuacuaug

SEQ ID NO: 1356451 - RNA, 19 nt, Homo sapiens
  misc_RNA (1)...(19): siRNA sense strand
gaaggaaacaacugaagca

SEQ ID NO: 1356452 - RNA, 19 nt, Homo sapiens
  misc_RNA (1)...(19): siRNA sense strand
gaggcaagcugauaaacac

SEQ ID NO: 1356453 - RNA, 19 nt, Homo sapiens
  misc_RNA (1)...(19): siRNA sense strand
ggcccagacucucacagua

SEQ ID NO: 1356454 - RNA, 19 nt, Homo sapiens
  misc_RNA (1)...(19): siRNA sense strand
guugaaagcaucagagaga

SEQ ID NO: 1356455 - RNA, 19 nt, Homo sapiens
  misc_RNA (1)...(19): siRNA sense strand
gaaaugaaugauccugaau

SEQ ID NO: 1356456 - RNA, 19 nt, Homo sapiens
  misc_RNA (1)...(19): siRNA sense strand
agaauaagucgucugcuuu

SEQ ID NO: 1356457 - RNA, 19 nt, Homo sapiens
  misc_RNA (1)...(19): siRNA sense strand
gaaagccccucuuggaaau

SEQ ID NO: 1356458 - RNA, 19 nt, Homo sapiens
  misc_RNA (1)...(19): siRNA sense strand
gcuacagacugcaauacau

SEQ ID NO: 1356459 - RNA, 19 nt, Homo sapiens
  misc_RNA (1)...(19): siRNA sense strand
ugaugaauuugcugacuug

SEQ ID NO: 1356460 - RNA, 19 nt, Homo sapiens
  misc_RNA (1)...(19): siRNA sense strand
ugaagagcguaacuaugaa

SEQ ID NO: 1356461 - RNA, 19 nt, Homo sapiens
  misc_RNA (1)...(19): siRNA sense strand
ucauauugaugcaggcaaa

SEQ ID NO: 1356462 - RNA, 19 nt, Homo sapiens
  misc_RNA (1)...(19): siRNA sense strand
gaagagcguaacuaugaau

SEQ ID NO: 1356463 - RNA, 19 nt, Homo sapiens
  misc_RNA (1)...(19): siRNA sense strand
uugcagauuuggaugauga

SEQ ID NO: 1356464 - RNA, 19 nt, Homo sapiens
  misc_RNA (1)...(19): siRNA sense strand
caaaggagugguggaugua

SEQ ID NO: 1356465 - RNA, 19 nt, Homo sapiens
  misc_RNA (1)...(19): siRNA sense strand
gagcgagaaagaggcauua

SEQ ID NO: 1356466 - RNA, 19 nt, Homo sapiens
  misc_RNA (1)...(19): siRNA sense strand
ucaauccucccauagcuaa

SEQ ID NO: 1356467 - RNA, 19 nt, Homo sapiens
  misc_RNA (1)...(19): siRNA sense strand
ggaggcaagcugauaaaca

SEQ ID NO: 1356468 - RNA, 19 nt, Homo sapiens
  misc_RNA (1)...(19): siRNA sense strand
gaugauggagacacaguga

SEQ ID NO: 1356469 - RNA, 19 nt, Homo sapiens
  misc_RNA (1)...(19): siRNA sense strand
uacccaguguguauauuaa

SEQ ID NO: 1356470 - RNA, 19 nt, Homo sapiens
  misc_RNA (1)...(19): siRNA sense strand
gaaagcaucagagagaagu

SEQ ID NO: 1356471 - RNA, 19 nt, Homo sapiens
  misc_RNA (1)...(19): siRNA sense strand
gagcggugccuaagagugu

SEQ ID NO: 1356472 - RNA, 19 nt, Homo sapiens
  misc_RNA (1)...(19): siRNA sense strand
gcuguuacauuugauugga

SEQ ID NO: 1356473 - RNA, 19 nt, Homo sapiens
  misc_RNA (1)...(19): siRNA sense strand
ccacaugugccgcuuggaa

SEQ ID NO: 1356474 - RNA, 19 nt, Homo sapiens
  misc_RNA (1)...(19): siRNA sense strand
gaaccuguuuucuucugua

SEQ ID NO: 1356475 - RNA, 19 nt, Homo sapiens
  misc_RNA (1)...(19): siRNA sense strand
gagauuccagaaccuguuu

SEQ ID NO: 1356476 - RNA, 19 nt, Homo sapiens
  misc_RNA (1)...(19): siRNA sense strand
uugaggauauuugcaauga

SEQ ID NO: 1356477 - RNA, 19 nt, Homo sapiens
  misc_RNA (1)...(19): siRNA sense strand
gcugauaaacacaauauac

SEQ ID NO: 1356478 - RNA, 19 nt, Homo sapiens
  misc_RNA (1)...(19): siRNA sense strand
guacuauuccggauauaca

SEQ ID NO: 1356479 - RNA, 19 nt, Homo sapiens
  misc_RNA (1)...(19): siRNA sense strand
ugccuuaauugaacaaguu

SEQ ID NO: 1356480 - RNA, 19 nt, Homo sapiens
  misc_RNA (1)...(19): siRNA sense strand
ugaccaacuugaggauauu

SEQ ID NO: 1356481 - RNA, 19 nt, Homo sapiens
  misc_RNA (1)...(19): siRNA sense strand
aggcauuacuauucaauca

SEQ ID NO: 1356482 - RNA, 19 nt, Homo sapiens
  misc_RNA (1)...(19): siRNA sense strand
aaacuucuuuggaauugca

SEQ ID NO: 1356483 - RNA, 19 nt, Homo sapiens
  misc_RNA (1)...(19): siRNA sense strand
gagguugagcggugccuaa

SEQ ID NO: 1356484 - RNA, 19 nt, Homo sapiens
  misc_RNA (1)...(19): siRNA sense strand
gggagauguugaugaugga

SEQ ID NO: 1356485 - RNA, 19 nt, Homo sapiens
  misc_RNA (1)...(19): siRNA sense strand
ggagauuccagaaccuguu

SEQ ID NO: 1356486 - RNA, 19 nt, Homo sapiens
  misc_RNA (1)...(19): siRNA sense strand
aaacaaugaagcagagaga

SEQ ID NO: 1356487 - RNA, 19 nt, Homo sapiens
  misc_RNA (1)...(19): siRNA sense strand
gaauaagucgucugcuuuu

SEQ ID NO: 1356488 - RNA, 19 nt, Homo sapiens
  misc_RNA (1)...(19): siRNA sense strand
gcguaacuaugaauuucug

SEQ ID NO: 1356489 - RNA, 19 nt, Homo sapiens
  misc_RNA (1)...(19): siRNA sense strand
ugacuugguuuuagaagaa

SEQ ID NO: 1356490 - RNA, 19 nt, Homo sapiens
  misc_RNA (1)...(19): siRNA sense strand
agugguggauguaguaaug

SEQ ID NO: 1356491 - RNA, 19 nt, Homo sapiens
  misc_RNA (1)...(19): siRNA sense strand
cacaauauaccucgaaucu

SEQ ID NO: 1356492 - RNA, 19 nt, Homo sapiens
  misc_RNA (1)...(19): siRNA sense strand
guauggaggcaagcugaua

SEQ ID NO: 1356493 - RNA, 19 nt, Homo sapiens
  misc_RNA (1)...(19): siRNA sense strand
gugcaguggcuguauuuga

SEQ ID NO: 1356494 - RNA, 19 nt, Homo sapiens
  misc_RNA (1)...(19): siRNA sense strand
guugagcggugccuaagag

SEQ ID NO: 1356495 - RNA, 19 nt, Homo sapiens
  misc_RNA (1)...(19): siRNA sense strand
cagauuucauggcccaaga

SEQ ID NO: 1356496 - RNA, 19 nt, Homo sapiens
  misc_RNA (1)...(19): siRNA sense strand
caccacagaaagaauauug

SEQ ID NO: 1356497 - RNA, 19 nt, Homo sapiens
  misc_RNA (1)...(19): siRNA sense strand
gcagagagacuuuuauugg

SEQ ID NO: 1356498 - RNA, 19 nt, Homo sapiens
  misc_RNA (1)...(19): siRNA sense strand
gcugguaacauugcuuuga

SEQ ID NO: 1356499 - RNA, 19 nt, Homo sapiens
  misc_RNA (1)...(19): siRNA sense strand
ggcuuaauaggaaaugaua

SEQ ID NO: 1356500 - RNA, 19 nt, Homo sapiens
  misc_RNA (1)...(19): siRNA sense strand
guuacuauguacuuaccuu

SEQ ID NO: 1356501 - RNA, 19 nt, Homo sapiens
  misc_RNA (1)...(19): siRNA sense strand
gaugaugaauuugcugacu

SEQ ID NO: 1356502 - RNA, 19 nt, Homo sapiens
  misc_RNA (1)...(19): siRNA sense strand
uaaacaagauggacaaaac

SEQ ID NO: 1356503 - RNA, 19 nt, Homo sapiens
  misc_RNA (1)...(19): siRNA sense strand
uggaaagguuauagaguca

SEQ ID NO: 1356504 - RNA, 19 nt, Homo sapiens
  misc_RNA (1)...(19): siRNA sense strand
caucaauccucccauagcu

SEQ ID NO: 1356505 - RNA, 19 nt, Homo sapiens
  misc_RNA (1)...(19): siRNA sense strand
uaccaccacagaaagaaua

SEQ ID NO: 1356506 - RNA, 19 nt, Homo sapiens
  misc_RNA (1)...(19): siRNA sense strand
aggaaugccuuaauugaac

SEQ ID NO: 1356507 - RNA, 19 nt, Homo sapiens
  misc_RNA (1)...(19): siRNA sense strand
gcccagacucucacaguau

SEQ ID NO: 1356508 - RNA, 19 nt, Homo sapiens
  misc_RNA (1)...(19): siRNA sense strand
ugaugccucugcuggugua

SEQ ID NO: 1356509 - RNA, 19 nt, Homo sapiens
  misc_RNA (1)...(19): siRNA sense strand
ccaaggacaugaagaacaa

SEQ ID NO: 1356510 - RNA, 19 nt, Homo sapiens
  misc_RNA (1)...(19): siRNA sense strand
ucaagaaggucaagucaca

SEQ ID NO: 1356511 - RNA, 19 nt, Homo sapiens
  misc_RNA (1)...(19): siRNA sense strand
uggagaagcugcugguuca

SEQ ID NO: 1356512 - RNA, 19 nt, Homo sapiens
  misc_RNA (1)...(19): siRNA sense strand
ggacucguacccucgcuuu

SEQ ID NO: 1356513 - RNA, 19 nt, Homo sapiens
  misc_RNA (1)...(19): siRNA sense strand
gcuucgaccuggcacagaa

SEQ ID NO: 1356514 - RNA, 19 nt, Homo sapiens
  misc_RNA (1)...(19): siRNA sense strand
agaagcugcugguucacaa

SEQ ID NO: 1356515 - RNA, 19 nt, Homo sapiens
  misc_RNA (1)...(19): siRNA sense strand
gugaggagaaucuggaguu

SEQ ID NO: 1356516 - RNA, 19 nt, Homo sapiens
  misc_RNA (1)...(19): siRNA sense strand
gaagcugcugguucacaaa

SEQ ID NO: 1356517 - RNA, 19 nt, Homo sapiens
  misc_RNA (1)...(19): siRNA sense strand
cauccaaggccaagaagau

SEQ ID NO: 1356518 - RNA, 19 nt, Homo sapiens
  misc_RNA (1)...(19): siRNA sense strand
gcugcugguucacaaauac

SEQ ID NO: 1356519 - RNA, 19 nt, Homo sapiens
  misc_RNA (1)...(19): siRNA sense strand
ucacaaauacggguuagca

SEQ ID NO: 1356520 - RNA, 19 nt, Homo sapiens
  misc_RNA (1)...(19): siRNA sense strand
cuuauuaaccagaagaaga

SEQ ID NO: 1356521 - RNA, 19 nt, Homo sapiens
  misc_RNA (1)...(19): siRNA sense strand
cauucaagcccaccucaga

SEQ ID NO: 1356522 - RNA, 19 nt, Homo sapiens
  misc_RNA (1)...(19): siRNA sense strand
ugaggagaaucuggaguuc

SEQ ID NO: 1356523 - RNA, 19 nt, Homo sapiens
  misc_RNA (1)...(19): siRNA sense strand
gggcaaggcagacaaaaug

SEQ ID NO: 1356524 - RNA, 19 nt, Homo sapiens
  misc_RNA (1)...(19): siRNA sense strand
caucuucgggcucauggaa

SEQ ID NO: 1356525 - RNA, 19 nt, Homo sapiens
  misc_RNA (1)...(19): siRNA sense strand
gccaaggacaugaagaaca

SEQ ID NO: 1356526 - RNA, 19 nt, Homo sapiens
  misc_RNA (1)...(19): siRNA sense strand
ugaguucagugaggagaau

SEQ ID NO: 1356527 - RNA, 19 nt, Homo sapiens
  misc_RNA (1)...(19): siRNA sense strand
gagaagcugcugguucaca

SEQ ID NO: 1356528 - RNA, 19 nt, Homo sapiens
  misc_RNA (1)...(19): siRNA sense strand
ggaccuuauuaaccagaag

SEQ ID NO: 1356529 - RNA, 19 nt, Homo sapiens
  misc_RNA (1)...(19): siRNA sense strand
gggagcacaccaaggacaa

SEQ ID NO: 1356530 - RNA, 19 nt, Homo sapiens
  misc_RNA (1)...(19): siRNA sense strand
gaccucuaccuggaccuua

SEQ ID NO: 1356531 - RNA, 19 nt, Homo sapiens
  misc_RNA (1)...(19): siRNA sense strand
gaccuuauuaaccagaaga

SEQ ID NO: 1356532 - RNA, 19 nt, Homo sapiens
  misc_RNA (1)...(19): siRNA sense strand
ccaaggacaugaagaacaa

SEQ ID NO: 1356533 - RNA, 19 nt, Homo sapiens
  misc_RNA (1)...(19): siRNA sense strand
ucaagaaggucaagucaca

SEQ ID NO: 1356534 - RNA, 19 nt, Homo sapiens
  misc_RNA (1)...(19): siRNA sense strand
uggagaagcugcugguuca

SEQ ID NO: 1356535 - RNA, 19 nt, Homo sapiens
  misc_RNA (1)...(19): siRNA sense strand
ggacucguacccucgcuuu

SEQ ID NO: 1356536 - RNA, 19 nt, Homo sapiens
  misc_RNA (1)...(19): siRNA sense strand
gcuucgaccuggcacagaa

SEQ ID NO: 1356537 - RNA, 19 nt, Homo sapiens
  misc_RNA (1)...(19): siRNA sense strand
agaagcugcugguucacaa

SEQ ID NO: 1356538 - RNA, 19 nt, Homo sapiens
  misc_RNA (1)...(19): siRNA sense strand
gugaggagaaucuggaguu

SEQ ID NO: 1356539 - RNA, 19 nt, Homo sapiens
  misc_RNA (1)...(19): siRNA sense strand
gaagcugcugguucacaaa

SEQ ID NO: 1356540 - RNA, 19 nt, Homo sapiens
  misc_RNA (1)...(19): siRNA sense strand
cauccaaggccaagaagau

SEQ ID NO: 1356541 - RNA, 19 nt, Homo sapiens
  misc_RNA (1)...(19): siRNA sense strand
gcugcugguucacaaauac

SEQ ID NO: 1356542 - RNA, 19 nt, Homo sapiens
  misc_RNA (1)...(19): siRNA sense strand
ucacaaauacggguuagca

SEQ ID NO: 1356543 - RNA, 19 nt, Homo sapiens
  misc_RNA (1)...(19): siRNA sense strand
cuuauuaaccagaagaaga

SEQ ID NO: 1356544 - RNA, 19 nt, Homo sapiens
  misc_RNA (1)...(19): siRNA sense strand
cauucaagcccaccucaga

SEQ ID NO: 1356545 - RNA, 19 nt, Homo sapiens
  misc_RNA (1)...(19): siRNA sense strand
ugaggagaaucuggaguuc

SEQ ID NO: 1356546 - RNA, 19 nt, Homo sapiens
  misc_RNA (1)...(19): siRNA sense strand
gggcaaggcagacaaaaug

SEQ ID NO: 1356547 - RNA, 19 nt, Homo sapiens
  misc_RNA (1)...(19): siRNA sense strand
caucuucgggcucauggaa

SEQ ID NO: 1356548 - RNA, 19 nt, Homo sapiens
  misc_RNA (1)...(19): siRNA sense strand
gccaaggacaugaagaaca

SEQ ID NO: 1356549 - RNA, 19 nt, Homo sapiens
  misc_RNA (1)...(19): siRNA sense strand
ugaguucagugaggagaau

SEQ ID NO: 1356550 - RNA, 19 nt, Homo sapiens
  misc_RNA (1)...(19): siRNA sense strand
gagaagcugcugguucaca

SEQ ID NO: 1356551 - RNA, 19 nt, Homo sapiens
  misc_RNA (1)...(19): siRNA sense strand
ggaccuuauuaaccagaag

SEQ ID NO: 1356552 - RNA, 19 nt, Homo sapiens
  misc_RNA (1)...(19): siRNA sense strand
gggagcacaccaaggacaa

SEQ ID NO: 1356553 - RNA, 19 nt, Homo sapiens
  misc_RNA (1)...(19): siRNA sense strand
gaccucuaccuggaccuua

SEQ ID NO: 1356554 - RNA, 19 nt, Homo sapiens
  misc_RNA (1)...(19): siRNA sense strand
gaccuuauuaaccagaaga

SEQ ID NO: 1356555 - RNA, 19 nt, Homo sapiens
  misc_RNA (1)...(19): siRNA sense strand
ccaaggacaugaagaacaa

SEQ ID NO: 1356556 - RNA, 19 nt, Homo sapiens
  misc_RNA (1)...(19): siRNA sense strand
ucaagaaggucaagucaca

SEQ ID NO: 1356557 - RNA, 19 nt, Homo sapiens
  misc_RNA (1)...(19): siRNA sense strand
uggagaagcugcugguuca

SEQ ID NO: 1356558 - RNA, 19 nt, Homo sapiens
  misc_RNA (1)...(19): siRNA sense strand
ggacucguacccucgcuuu

SEQ ID NO: 1356559 - RNA, 19 nt, Homo sapiens
  misc_RNA (1)...(19): siRNA sense strand
gcuucgaccuggcacagaa

SEQ ID NO: 1356560 - RNA, 19 nt, Homo sapiens
  misc_RNA (1)...(19): siRNA sense strand
agaagcugcugguucacaa

SEQ ID NO: 1356561 - RNA, 19 nt, Homo sapiens
  misc_RNA (1)...(19): siRNA sense strand
gugaggagaaucuggaguu

SEQ ID NO: 1356562 - RNA, 19 nt, Homo sapiens
  misc_RNA (1)...(19): siRNA sense strand
gaagcugcugguucacaaa

SEQ ID NO: 1356563 - RNA, 19 nt, Homo sapiens
  misc_RNA (1)...(19): siRNA sense strand
cauccaaggccaagaagau

SEQ ID NO: 1356564 - RNA, 19 nt, Homo sapiens
  misc_RNA (1)...(19): siRNA sense strand
gcugcugguucacaaauac

SEQ ID NO: 1356565 - RNA, 19 nt, Homo sapiens
  misc_RNA (1)...(19): siRNA sense strand
ucacaaauacggguuagca

SEQ ID NO: 1356566 - RNA, 19 nt, Homo sapiens
  misc_RNA (1)...(19): siRNA sense strand
cuuauuaaccagaagaaga

SEQ ID NO: 1356567 - RNA, 19 nt, Homo sapiens
  misc_RNA (1)...(19): siRNA sense strand
cauucaagcccaccucaga

SEQ ID NO: 1356568 - RNA, 19 nt, Homo sapiens
  misc_RNA (1)...(19): siRNA sense strand
ugaggagaaucuggaguuc

SEQ ID NO: 1356569 - RNA, 19 nt, Homo sapiens
  misc_RNA (1)...(19): siRNA sense strand
gggcaaggcagacaaaaug

SEQ ID NO: 1356570 - RNA, 19 nt, Homo sapiens
  misc_RNA (1)...(19): siRNA sense strand
caucuucgggcucauggaa

SEQ ID NO: 1356571 - RNA, 19 nt, Homo sapiens
  misc_RNA (1)...(19): siRNA sense strand
gccaaggacaugaagaaca

SEQ ID NO: 1356572 - RNA, 19 nt, Homo sapiens
  misc_RNA (1)...(19): siRNA sense strand
ugaguucagugaggagaau

SEQ ID NO: 1356573 - RNA, 19 nt, Homo sapiens
  misc_RNA (1)...(19): siRNA sense strand
gagaagcugcugguucaca

SEQ ID NO: 1356574 - RNA, 19 nt, Homo sapiens
  misc_RNA (1)...(19): siRNA sense strand
ggaccuuauuaaccagaag

SEQ ID NO: 1356575 - RNA, 19 nt, Homo sapiens
  misc_RNA (1)...(19): siRNA sense strand
gggagcacaccaaggacaa

SEQ ID NO: 1356576 - RNA, 19 nt, Homo sapiens
  misc_RNA (1)...(19): siRNA sense strand
gaccucuaccuggaccuua

SEQ ID NO: 1356577 - RNA, 19 nt, Homo sapiens
  misc_RNA (1)...(19): siRNA sense strand
gaccuuauuaaccagaaga

SEQ ID NO: 1356578 - RNA, 19 nt, Homo sapiens
  misc_RNA (1)...(19): siRNA sense strand
ucaagaaggucaagucaca

SEQ ID NO: 1356579 - RNA, 19 nt, Homo sapiens
  misc_RNA (1)...(19): siRNA sense strand
uggagaagcugcugguuca

SEQ ID NO: 1356580 - RNA, 19 nt, Homo sapiens
  misc_RNA (1)...(19): siRNA sense strand
ggacucguacccucgcuuu

SEQ ID NO: 1356581 - RNA, 19 nt, Homo sapiens
  misc_RNA (1)...(19): siRNA sense strand
gcuucgaccuggcacagaa

SEQ ID NO: 1356582 - RNA, 19 nt, Homo sapiens
  misc_RNA (1)...(19): siRNA sense strand
agaagcugcugguucacaa

SEQ ID NO: 1356583 - RNA, 19 nt, Homo sapiens
  misc_RNA (1)...(19): siRNA sense strand
gugaggagaaucuggaguu

SEQ ID NO: 1356584 - RNA, 19 nt, Homo sapiens
  misc_RNA (1)...(19): siRNA sense strand
gaagcugcugguucacaaa

SEQ ID NO: 1356585 - RNA, 19 nt, Homo sapiens
  misc_RNA (1)...(19): siRNA sense strand
cauccaaggccaagaagau

SEQ ID NO: 1356586 - RNA, 19 nt, Homo sapiens
  misc_RNA (1)...(19): siRNA sense strand
gcugcugguucacaaauac

SEQ ID NO: 1356587 - RNA, 19 nt, Homo sapiens
  misc_RNA (1)...(19): siRNA sense strand
ucacaaauacggguuagca

SEQ ID NO: 1356588 - RNA, 19 nt, Homo sapiens
  misc_RNA (1)...(19): siRNA sense strand
cuuauuaaccagaagaaga

SEQ ID NO: 1356589 - RNA, 19 nt, Homo sapiens
  misc_RNA (1)...(19): siRNA sense strand
cauucaagcccaccucaga

SEQ ID NO: 1356590 - RNA, 19 nt, Homo sapiens
  misc_RNA (1)...(19): siRNA sense strand
ugaggagaaucuggaguuc

SEQ ID NO: 1356591 - RNA, 19 nt, Homo sapiens
  misc_RNA (1)...(19): siRNA sense strand
ugaguucagugaggagaau

SEQ ID NO: 1356592 - RNA, 19 nt, Homo sapiens
  misc_RNA (1)...(19): siRNA sense strand
caucuucgggcucauggaa

SEQ ID NO: 1356593 - RNA, 19 nt, Homo sapiens
  misc_RNA (1)...(19): siRNA sense strand
gggcaaggcagacaaaaug

SEQ ID NO: 1356594 - RNA, 19 nt, Homo sapiens
  misc_RNA (1)...(19): siRNA sense strand
gagaagcugcugguucaca

SEQ ID NO: 1356595 - RNA, 19 nt, Homo sapiens
  misc_RNA (1)...(19): siRNA sense strand
ggaccuuauuaaccagaag

SEQ ID NO: 1356596 - RNA, 19 nt, Homo sapiens
  misc_RNA (1)...(19): siRNA sense strand
gggagcacaccaaggacaa

SEQ ID NO: 1356597 - RNA, 19 nt, Homo sapiens
  misc_RNA (1)...(19): siRNA sense strand
gaccucuaccuggaccuua

SEQ ID NO: 1356598 - RNA, 19 nt, Homo sapiens
  misc_RNA (1)...(19): siRNA sense strand
gaccuuauuaaccagaaga

SEQ ID NO: 1356599 - RNA, 19 nt, Homo sapiens
  misc_RNA (1)...(19): siRNA sense strand
ccaaggacaugaagaacaa

SEQ ID NO: 1356600 - RNA, 19 nt, Homo sapiens
  misc_RNA (1)...(19): siRNA sense strand
ucaagaaggucaagucaca

SEQ ID NO: 1356601 - RNA, 19 nt, Homo sapiens
  misc_RNA (1)...(19): siRNA sense strand
uggagaagcugcugguuca

SEQ ID NO: 1356602 - RNA, 19 nt, Homo sapiens
  misc_RNA (1)...(19): siRNA sense strand
ggacucguacccucgcuuu

SEQ ID NO: 1356603 - RNA, 19 nt, Homo sapiens
  misc_RNA (1)...(19): siRNA sense strand
gcuucgaccuggcacagaa

SEQ ID NO: 1356604 - RNA, 19 nt, Homo sapiens
  misc_RNA (1)...(19): siRNA sense strand
agaagcugcugguucacaa

SEQ ID NO: 1356605 - RNA, 19 nt, Homo sapiens
  misc_RNA (1)...(19): siRNA sense strand
gugaggagaaucuggaguu

SEQ ID NO: 1356606 - RNA, 19 nt, Homo sapiens
  misc_RNA (1)...(19): siRNA sense strand
gaagcugcugguucacaaa

SEQ ID NO: 1356607 - RNA, 19 nt, Homo sapiens
  misc_RNA (1)...(19): siRNA sense strand
cauccaaggccaagaagau

SEQ ID NO: 1356608 - RNA, 19 nt, Homo sapiens
  misc_RNA (1)...(19): siRNA sense strand
gcugcugguucacaaauac

SEQ ID NO: 1356609 - RNA, 19 nt, Homo sapiens
  misc_RNA (1)...(19): siRNA sense strand
ucacaaauacggguuagca

SEQ ID NO: 1356610 - RNA, 19 nt, Homo sapiens
  misc_RNA (1)...(19): siRNA sense strand
cuuauuaaccagaagaaga

SEQ ID NO: 1356611 - RNA, 19 nt, Homo sapiens
  misc_RNA (1)...(19): siRNA sense strand
cauucaagcccaccucaga

SEQ ID NO: 1356612 - RNA, 19 nt, Homo sapiens
  misc_RNA (1)...(19): siRNA sense strand
ugaggagaaucuggaguuc

SEQ ID NO: 1356613 - RNA, 19 nt, Homo sapiens
  misc_RNA (1)...(19): siRNA sense strand
gggcaaggcagacaaaaug

SEQ ID NO: 1356614 - RNA, 19 nt, Homo sapiens
  misc_RNA (1)...(19): siRNA sense strand
caucuucgggcucauggaa

SEQ ID NO: 1356615 - RNA, 19 nt, Homo sapiens
  misc_RNA (1)...(19): siRNA sense strand
gccaaggacaugaagaaca

SEQ ID NO: 1356616 - RNA, 19 nt, Homo sapiens
  misc_RNA (1)...(19): siRNA sense strand
ugaguucagugaggagaau

SEQ ID NO: 1356617 - RNA, 19 nt, Homo sapiens
  misc_RNA (1)...(19): siRNA sense strand
gagaagcugcugguucaca

SEQ ID NO: 1356618 - RNA, 19 nt, Homo sapiens
  misc_RNA (1)...(19): siRNA sense strand
ggaccuuauuaaccagaag

SEQ ID NO: 1356619 - RNA, 19 nt, Homo sapiens
  misc_RNA (1)...(19): siRNA sense strand
gggagcacaccaaggacaa

SEQ ID NO: 1356620 - RNA, 19 nt, Homo sapiens
  misc_RNA (1)...(19): siRNA sense strand
gaccucuaccuggaccuua

SEQ ID NO: 1356621 - RNA, 19 nt, Homo sapiens
  misc_RNA (1)...(19): siRNA sense strand
gaccuuauuaaccagaaga

SEQ ID NO: 1356622 - RNA, 19 nt, Homo sapiens
  misc_RNA (1)...(19): siRNA sense strand
ccaaggacaugaagaacaa

SEQ ID NO: 1356623 - RNA, 19 nt, Homo sapiens
  misc_RNA (1)...(19): siRNA sense strand
ucaagaaggucaagucaca

SEQ ID NO: 1356624 - RNA, 19 nt, Homo sapiens
  misc_RNA (1)...(19): siRNA sense strand
uggagaagcugcugguuca

SEQ ID NO: 1356625 - RNA, 19 nt, Homo sapiens
  misc_RNA (1)...(19): siRNA sense strand
ggacucguacccucgcuuu

SEQ ID NO: 1356626 - RNA, 19 nt, Homo sapiens
  misc_RNA (1)...(19): siRNA sense strand
gcuucgaccuggcacagaa

SEQ ID NO: 1356627 - RNA, 19 nt, Homo sapiens
  misc_RNA (1)...(19): siRNA sense strand
agaagcugcugguucacaa

SEQ ID NO: 1356628 - RNA, 19 nt, Homo sapiens
  misc_RNA (1)...(19): siRNA sense strand
gugaggagaaucuggaguu

SEQ ID NO: 1356629 - RNA, 19 nt, Homo sapiens
  misc_RNA (1)...(19): siRNA sense strand
gaagcugcugguucacaaa

SEQ ID NO: 1356630 - RNA, 19 nt, Homo sapiens
  misc_RNA (1)...(19): siRNA sense strand
cauccaaggccaagaagau

SEQ ID NO: 1356631 - RNA, 19 nt, Homo sapiens
  misc_RNA (1)...(19): siRNA sense strand
gcugcugguucacaaauac

SEQ ID NO: 1356632 - RNA, 19 nt, Homo sapiens
  misc_RNA (1)...(19): siRNA sense strand
ucacaaauacggguuagca

SEQ ID NO: 1356633 - RNA, 19 nt, Homo sapiens
  misc_RNA (1)...(19): siRNA sense strand
cuuauuaaccagaagaaga

SEQ ID NO: 1356634 - RNA, 19 nt, Homo sapiens
  misc_RNA (1)...(19): siRNA sense strand
cauucaagcccaccucaga

SEQ ID NO: 1356635 - RNA, 19 nt, Homo sapiens
  misc_RNA (1)...(19): siRNA sense strand
ugaggagaaucuggaguuc

SEQ ID NO: 1356636 - RNA, 19 nt, Homo sapiens
  misc_RNA (1)...(19): siRNA sense strand
gggcaaggcagacaaaaug

SEQ ID NO: 1356637 - RNA, 19 nt, Homo sapiens
  misc_RNA (1)...(19): siRNA sense strand
caucuucgggcucauggaa

SEQ ID NO: 1356638 - RNA, 19 nt, Homo sapiens
  misc_RNA (1)...(19): siRNA sense strand
gccaaggacaugaagaaca

SEQ ID NO: 1356639 - RNA, 19 nt, Homo sapiens
  misc_RNA (1)...(19): siRNA sense strand
ugaguucagugaggagaau

SEQ ID NO: 1356640 - RNA, 19 nt, Homo sapiens
  misc_RNA (1)...(19): siRNA sense strand
gagaagcugcugguucaca

SEQ ID NO: 1356641 - RNA, 19 nt, Homo sapiens
  misc_RNA (1)...(19): siRNA sense strand
ggaccuuauuaaccagaag

SEQ ID NO: 1356642 - RNA, 19 nt, Homo sapiens
  misc_RNA (1)...(19): siRNA sense strand
gggagcacaccaaggacaa

SEQ ID NO: 1356643 - RNA, 19 nt, Homo sapiens
  misc_RNA (1)...(19): siRNA sense strand
gaccucuaccuggaccuua

SEQ ID NO: 1356644 - RNA, 19 nt, Homo sapiens
  misc_RNA (1)...(19): siRNA sense strand
gaccuuauuaaccagaaga

SEQ ID NO: 1356645 - RNA, 19 nt, Homo sapiens
  misc_RNA (1)...(19): siRNA sense strand
gaacuugauccuauacaga

SEQ ID NO: 1356646 - RNA, 19 nt, Homo sapiens
  misc_RNA (1)...(19): siRNA sense strand
gcaguggcauuuaauaagg

SEQ ID NO: 1356647 - RNA, 19 nt, Homo sapiens
  misc_RNA (1)...(19): siRNA sense strand
cagcaguggcauuuaauaa

SEQ ID NO: 1356648 - RNA, 19 nt, Homo sapiens
  misc_RNA (1)...(19): siRNA sense strand
gaagaucccaaauuugaag

SEQ ID NO: 1356649 - RNA, 19 nt, Homo sapiens
  misc_RNA (1)...(19): siRNA sense strand
gguaaugcagacaugaaua

SEQ ID NO: 1356650 - RNA, 19 nt, Homo sapiens
  misc_RNA (1)...(19): siRNA sense strand
augcagacaugaauacauu

SEQ ID NO: 1356651 - RNA, 19 nt, Homo sapiens
  misc_RNA (1)...(19): siRNA sense strand
uugaagaucccaaauuuga

SEQ ID NO: 1356652 - RNA, 19 nt, Homo sapiens
  misc_RNA (1)...(19): siRNA sense strand
ggaacuugauccuauacag

SEQ ID NO: 1356653 - RNA, 19 nt, Homo sapiens
  misc_RNA (1)...(19): siRNA sense strand
caaauuugaagucaucgaa

SEQ ID NO: 1356654 - RNA, 19 nt, Homo sapiens
  misc_RNA (1)...(19): siRNA sense strand
gaucccaaauuugaaguca

SEQ ID NO: 1356655 - RNA, 19 nt, Homo sapiens
  misc_RNA (1)...(19): siRNA sense strand
ugaauacauuucccaccuu

SEQ ID NO: 1356656 - RNA, 19 nt, Homo sapiens
  misc_RNA (1)...(19): siRNA sense strand
gcagacaugaauacauuuc

SEQ ID NO: 1356657 - RNA, 19 nt, Homo sapiens
  misc_RNA (1)...(19): siRNA sense strand
cagguucuccucugucauu

SEQ ID NO: 1356658 - RNA, 19 nt, Homo sapiens
  misc_RNA (1)...(19): siRNA sense strand
guucagaguaucagcaaga

SEQ ID NO: 1356659 - RNA, 19 nt, Homo sapiens
  misc_RNA (1)...(19): siRNA sense strand
uaagcucaagcaaauguuu

SEQ ID NO: 1356660 - RNA, 19 nt, Homo sapiens
  misc_RNA (1)...(19): siRNA sense strand
guaaugcagacaugaauac

SEQ ID NO: 1356661 - RNA, 19 nt, Homo sapiens
  misc_RNA (1)...(19): siRNA sense strand
uuucccaccuucaaauuug

SEQ ID NO: 1356662 - RNA, 19 nt, Homo sapiens
  misc_RNA (1)...(19): siRNA sense strand
ucccaaauuugaagucauc

SEQ ID NO: 1356663 - RNA, 19 nt, Homo sapiens
  misc_RNA (1)...(19): siRNA sense strand
gaugcuaguucagaguauc

SEQ ID NO: 1356664 - RNA, 19 nt, Homo sapiens
  misc_RNA (1)...(19): siRNA sense strand
ugaagaucccaaauuugaa

SEQ ID NO: 1356665 - RNA, 19 nt, Homo sapiens
  misc_RNA (1)...(19): siRNA sense strand
acagcaguggcauuuaaua

SEQ ID NO: 1356666 - RNA, 19 nt, Homo sapiens
  misc_RNA (1)...(19): siRNA sense strand
caguggcauuuaauaagga

SEQ ID NO: 1356667 - RNA, 19 nt, Homo sapiens
  misc_RNA (1)...(19): siRNA sense strand
gauccuauacagaaacucu

SEQ ID NO: 1356668 - RNA, 19 nt, Homo sapiens
  misc_RNA (1)...(19): siRNA sense strand
uggaggaccuguugaugcu

SEQ ID NO: 1356669 - RNA, 19 nt, Homo sapiens
  misc_RNA (1)...(19): siRNA sense strand
ggagaugguuuccuauuuc

SEQ ID NO: 1356670 - RNA, 19 nt, Homo sapiens
  misc_RNA (1)...(19): siRNA sense strand
ggaaggacaacuccaauuc

SEQ ID NO: 1356671 - RNA, 19 nt, Homo sapiens
  misc_RNA (1)...(19): siRNA sense strand
ccaauucccugcaggugaa

SEQ ID NO: 1356672 - RNA, 19 nt, Homo sapiens
  misc_RNA (1)...(19): siRNA sense strand
caagaugucccuguuguuu

SEQ ID NO: 1356673 - RNA, 19 nt, Homo sapiens
  misc_RNA (1)...(19): siRNA sense strand
cagcggaguuugacuugaa

SEQ ID NO: 1356674 - RNA, 19 nt, Homo sapiens
  misc_RNA (1)...(19): siRNA sense strand
ggaguuggcugagcagauc

SEQ ID NO: 1356675 - RNA, 19 nt, Homo sapiens
  misc_RNA (1)...(19): siRNA sense strand
ugaagcagcucuuuagcau

SEQ ID NO: 1356676 - RNA, 19 nt, Homo sapiens
  misc_RNA (1)...(19): siRNA sense strand
ccaagcugcuccacaucua

SEQ ID NO: 1356677 - RNA, 19 nt, Homo sapiens
  misc_RNA (1)...(19): siRNA sense strand
gaucauccgugggaacuuc

SEQ ID NO: 1356678 - RNA, 19 nt, Homo sapiens
  misc_RNA (1)...(19): siRNA sense strand
gugcaaggaucgccuguca

SEQ ID NO: 1356679 - RNA, 19 nt, Homo sapiens
  misc_RNA (1)...(19): siRNA sense strand
gcaaggaucgccugucagu

SEQ ID NO: 1356680 - RNA, 19 nt, Homo sapiens
  misc_RNA (1)...(19): siRNA sense strand
agaugucccuguuguuuga

SEQ ID NO: 1356681 - RNA, 19 nt, Homo sapiens
  misc_RNA (1)...(19): siRNA sense strand
cggagcaucucaccuacuu

SEQ ID NO: 1356682 - RNA, 19 nt, Homo sapiens
  misc_RNA (1)...(19): siRNA sense strand
ggaagcggcaggugacuca

SEQ ID NO: 1356683 - RNA, 19 nt, Homo sapiens
  misc_RNA (1)...(19): siRNA sense strand
gcagggaggagaugguuuc

SEQ ID NO: 1356684 - RNA, 19 nt, Homo sapiens
  misc_RNA (1)...(19): siRNA sense strand
ccacaucucacaggaagaa

SEQ ID NO: 1356685 - RNA, 19 nt, Homo sapiens
  misc_RNA (1)...(19): siRNA sense strand
gcaagaugucccuguuguu

SEQ ID NO: 1356686 - RNA, 19 nt, Homo sapiens
  misc_RNA (1)...(19): siRNA sense strand
uguuugacauccacuugua

SEQ ID NO: 1356687 - RNA, 19 nt, Homo sapiens
  misc_RNA (1)...(19): siRNA sense strand
cggugucucuggaucagua

SEQ ID NO: 1356688 - RNA, 19 nt, Homo sapiens
  misc_RNA (1)...(19): siRNA sense strand
cgacggcacagcagccuaa

SEQ ID NO: 1356689 - RNA, 19 nt, Homo sapiens
  misc_RNA (1)...(19): siRNA sense strand
aaggaucgccugucaguug

SEQ ID NO: 1356690 - RNA, 19 nt, Homo sapiens
  misc_RNA (1)...(19): siRNA sense strand
ucaggacuaucacaguuuc

SEQ ID NO: 1356691 - RNA, 19 nt, Homo sapiens
  misc_RNA (1)...(19): siRNA sense strand
agaagaugguggagucugu

SEQ ID NO: 1356692 - RNA, 19 nt, Homo sapiens
  misc_RNA (1)...(19): siRNA sense strand
gcugaaggcucugcuagac

SEQ ID NO: 1356693 - RNA, 19 nt, Homo sapiens
  misc_RNA (1)...(19): siRNA sense strand
gggagggucucacggaacu

SEQ ID NO: 1356694 - RNA, 19 nt, Homo sapiens
  misc_RNA (1)...(19): siRNA sense strand
gagacccacagccacguua

SEQ ID NO: 1356695 - RNA, 19 nt, Homo sapiens
  misc_RNA (1)...(19): siRNA sense strand
gaacuucaacacgcugaug

SEQ ID NO: 1356696 - RNA, 19 nt, Homo sapiens
  misc_RNA (1)...(19): siRNA sense strand
uuucaggacuaucacaguu

SEQ ID NO: 1356697 - RNA, 19 nt, Homo sapiens
  misc_RNA (1)...(19): siRNA sense strand
gcaugggcuucguacacaa

SEQ ID NO: 1356698 - RNA, 19 nt, Homo sapiens
  misc_RNA (1)...(19): siRNA sense strand
agacggaggaugagcugua

SEQ ID NO: 1356699 - RNA, 19 nt, Homo sapiens
  misc_RNA (1)...(19): siRNA sense strand
uggaggagcuggccauggu

SEQ ID NO: 1356700 - RNA, 19 nt, Homo sapiens
  misc_RNA (1)...(19): siRNA sense strand
gcucaugauccucagcaaa

SEQ ID NO: 1356701 - RNA, 19 nt, Homo sapiens
  misc_RNA (1)...(19): siRNA sense strand
cgcaagaugucccuguugu

SEQ ID NO: 1356702 - RNA, 19 nt, Homo sapiens
  misc_RNA (1)...(19): siRNA sense strand
ucugcaagauccuguuuca

SEQ ID NO: 1356703 - RNA, 19 nt, Homo sapiens
  misc_RNA (1)...(19): siRNA sense strand
gaugguggagucuguguuc

SEQ ID NO: 1356704 - RNA, 19 nt, Homo sapiens
  misc_RNA (1)...(19): siRNA sense strand
cggccaagcugcuccacau

SEQ ID NO: 1356705 - RNA, 19 nt, Homo sapiens
  misc_RNA (1)...(19): siRNA sense strand
uggcugagcagaucaagga

SEQ ID NO: 1356706 - RNA, 19 nt, Homo sapiens
  misc_RNA (1)...(19): siRNA sense strand
uggcggagcaucucaccua

SEQ ID NO: 1356707 - RNA, 19 nt, Homo sapiens
  misc_RNA (1)...(19): siRNA sense strand
cagcgucccuaccuacaag

SEQ ID NO: 1356708 - RNA, 19 nt, Homo sapiens
  misc_RNA (1)...(19): siRNA sense strand
gcagccuaaucgacauaga

SEQ ID NO: 1356709 - RNA, 19 nt, Homo sapiens
  misc_RNA (1)...(19): siRNA sense strand
uagacagcgucccuaccua

SEQ ID NO: 1356710 - RNA, 19 nt, Homo sapiens
  misc_RNA (1)...(19): siRNA sense strand
cuacaagcagggccucaaa

SEQ ID NO: 1356711 - RNA, 19 nt, Homo sapiens
  misc_RNA (1)...(19): siRNA sense strand
ugcuacagcugcagaacuu

SEQ ID NO: 1356712 - RNA, 19 nt, Homo sapiens
  misc_RNA (1)...(19): siRNA sense strand
ggucaucacacacuuuguc

SEQ ID NO: 1356713 - RNA, 19 nt, Homo sapiens
  misc_RNA (1)...(19): siRNA sense strand
uaucgcuccuucugcaaga

SEQ ID NO: 1356714 - RNA, 19 nt, Homo sapiens
  misc_RNA (1)...(19): siRNA sense strand
gagaugguuuccuauuucc

SEQ ID NO: 1356715 - RNA, 19 nt, Homo sapiens
  misc_RNA (1)...(19): siRNA sense strand
caucucacaggaagaauuc

SEQ ID NO: 1356716 - RNA, 19 nt, Homo sapiens
  misc_RNA (1)...(19): siRNA sense strand
acaagcagggccucaaaug

SEQ ID NO: 1356717 - RNA, 19 nt, Homo sapiens
  misc_RNA (1)...(19): siRNA sense strand
uggagcacaucgagaagau

SEQ ID NO: 1356718 - RNA, 19 nt, Homo sapiens
  misc_RNA (1)...(19): siRNA sense strand
gcgcaagaugucccuguug

SEQ ID NO: 1356719 - RNA, 19 nt, Homo sapiens
  misc_RNA (1)...(19): siRNA sense strand
ccacaucuaccaacaaucc

SEQ ID NO: 1356720 - RNA, 19 nt, Homo sapiens
  misc_RNA (1)...(19): siRNA sense strand
agaugaagcagcucuuuag

SEQ ID NO: 1356721 - RNA, 19 nt, Homo sapiens
  misc_RNA (1)...(19): siRNA sense strand
gaaggacaacuccaauucc

SEQ ID NO: 1356722 - RNA, 19 nt, Homo sapiens
  misc_RNA (1)...(19): siRNA sense strand
guucaucucccucuucaac

SEQ ID NO: 1356723 - RNA, 19 nt, Homo sapiens
  misc_RNA (1)...(19): siRNA sense strand
gcuccaggccuccagagau

SEQ ID NO: 1356724 - RNA, 19 nt, Homo sapiens
  misc_RNA (1)...(19): siRNA sense strand
cuccacaucuaccaacaau

SEQ ID NO: 1356725 - RNA, 19 nt, Homo sapiens
  misc_RNA (1)...(19): siRNA sense strand
cggaaggacaacuccaauu

SEQ ID NO: 1356726 - RNA, 19 nt, Homo sapiens
  misc_RNA (1)...(19): siRNA sense strand
cagcagccuaaucgacaua

SEQ ID NO: 1356727 - RNA, 19 nt, Homo sapiens
  misc_RNA (1)...(19): siRNA sense strand
gaucgccugucaguugagu

SEQ ID NO: 1356728 - RNA, 19 nt, Homo sapiens
  misc_RNA (1)...(19): siRNA sense strand
aggaucgccugucaguuga

SEQ ID NO: 1356729 - RNA, 19 nt, Homo sapiens
  misc_RNA (1)...(19): siRNA sense strand
ccacaagcagugcaaggau

SEQ ID NO: 1356730 - RNA, 19 nt, Homo sapiens
  misc_RNA (1)...(19): siRNA sense strand
ggagacccacagccacguu

SEQ ID NO: 1356731 - RNA, 19 nt, Homo sapiens
  misc_RNA (1)...(19): siRNA sense strand
aguaucagacggaggauga

SEQ ID NO: 1356732 - RNA, 19 nt, Homo sapiens
  misc_RNA (1)...(19): siRNA sense strand
aggcaacuauggcaacuac

SEQ ID NO: 1356733 - RNA, 19 nt, Homo sapiens
  misc_RNA (1)...(19): siRNA sense strand
gacggaggaugagcuguac

SEQ ID NO: 1356734 - RNA, 19 nt, Homo sapiens
  misc_RNA (1)...(19): siRNA sense strand
gggcuucguacacaacuuc

SEQ ID NO: 1356735 - RNA, 19 nt, Homo sapiens
  misc_RNA (1)...(19): siRNA sense strand
gcgcuccagcucuguguug

SEQ ID NO: 1356736 - RNA, 19 nt, Homo sapiens
  misc_RNA (1)...(19): siRNA sense strand
ccagcggaguuugacuuga

SEQ ID NO: 1356737 - RNA, 19 nt, Homo sapiens
  misc_RNA (1)...(19): siRNA sense strand
ccaaacccaagcuggauca

SEQ ID NO: 1356738 - RNA, 19 nt, Homo sapiens
  misc_RNA (1)...(19): siRNA sense strand
cgguucaucucccucuuca

SEQ ID NO: 1356739 - RNA, 19 nt, Homo sapiens
  misc_RNA (1)...(19): siRNA sense strand
gguguuugacauccacuug

SEQ ID NO: 1356740 - RNA, 19 nt, Homo sapiens
  misc_RNA (1)...(19): siRNA sense strand
cuccaggccuccagagauc

SEQ ID NO: 1356741 - RNA, 19 nt, Homo sapiens
  misc_RNA (1)...(19): siRNA sense strand
caagcagggccucaaaugc

SEQ ID NO: 1356742 - RNA, 19 nt, Homo sapiens
  misc_RNA (1)...(19): siRNA sense strand
cgcaugggcuucguacaca

SEQ ID NO: 1356743 - RNA, 19 nt, Homo sapiens
  misc_RNA (1)...(19): siRNA sense strand
ugacuugaacccggaguug

SEQ ID NO: 1356744 - RNA, 19 nt, Homo sapiens
  misc_RNA (1)...(19): siRNA sense strand
ggagaugguuuccuauuuc

SEQ ID NO: 1356745 - RNA, 19 nt, Homo sapiens
  misc_RNA (1)...(19): siRNA sense strand
ggaaggacaacuccaauuc

SEQ ID NO: 1356746 - RNA, 19 nt, Homo sapiens
  misc_RNA (1)...(19): siRNA sense strand
ccaauucccugcaggugaa

SEQ ID NO: 1356747 - RNA, 19 nt, Homo sapiens
  misc_RNA (1)...(19): siRNA sense strand
caagaugucccuguuguuu

SEQ ID NO: 1356748 - RNA, 19 nt, Homo sapiens
  misc_RNA (1)...(19): siRNA sense strand
cagcggaguuugacuugaa

SEQ ID NO: 1356749 - RNA, 19 nt, Homo sapiens
  misc_RNA (1)...(19): siRNA sense strand
ggaguuggcugagcagauc

SEQ ID NO: 1356750 - RNA, 19 nt, Homo sapiens
  misc_RNA (1)...(19): siRNA sense strand
ugaagcagcucuuuagcau

SEQ ID NO: 1356751 - RNA, 19 nt, Homo sapiens
  misc_RNA (1)...(19): siRNA sense strand
ccaagcugcuccacaucua

SEQ ID NO: 1356752 - RNA, 19 nt, Homo sapiens
  misc_RNA (1)...(19): siRNA sense strand
gaucauccgugggaacuuc

SEQ ID NO: 1356753 - RNA, 19 nt, Homo sapiens
  misc_RNA (1)...(19): siRNA sense strand
gugcaaggaucgccuguca

SEQ ID NO: 1356754 - RNA, 19 nt, Homo sapiens
  misc_RNA (1)...(19): siRNA sense strand
gcaaggaucgccugucagu

SEQ ID NO: 1356755 - RNA, 19 nt, Homo sapiens
  misc_RNA (1)...(19): siRNA sense strand
agaugucccuguuguuuga

SEQ ID NO: 1356756 - RNA, 19 nt, Homo sapiens
  misc_RNA (1)...(19): siRNA sense strand
cggagcaucucaccuacuu

SEQ ID NO: 1356757 - RNA, 19 nt, Homo sapiens
  misc_RNA (1)...(19): siRNA sense strand
ggaagcggcaggugacuca

SEQ ID NO: 1356758 - RNA, 19 nt, Homo sapiens
  misc_RNA (1)...(19): siRNA sense strand
gcagggaggagaugguuuc

SEQ ID NO: 1356759 - RNA, 19 nt, Homo sapiens
  misc_RNA (1)...(19): siRNA sense strand
ccacaucucacaggaagaa

SEQ ID NO: 1356760 - RNA, 19 nt, Homo sapiens
  misc_RNA (1)...(19): siRNA sense strand
gcaagaugucccuguuguu

SEQ ID NO: 1356761 - RNA, 19 nt, Homo sapiens
  misc_RNA (1)...(19): siRNA sense strand
uguuugacauccacuugua

SEQ ID NO: 1356762 - RNA, 19 nt, Homo sapiens
  misc_RNA (1)...(19): siRNA sense strand
cggugucucuggaucagua

SEQ ID NO: 1356763 - RNA, 19 nt, Homo sapiens
  misc_RNA (1)...(19): siRNA sense strand
cgacggcacagcagccuaa

SEQ ID NO: 1356764 - RNA, 19 nt, Homo sapiens
  misc_RNA (1)...(19): siRNA sense strand
aaggaucgccugucaguug

SEQ ID NO: 1356765 - RNA, 19 nt, Homo sapiens
  misc_RNA (1)...(19): siRNA sense strand
ucaggacuaucacaguuuc

SEQ ID NO: 1356766 - RNA, 19 nt, Homo sapiens
  misc_RNA (1)...(19): siRNA sense strand
agaagaugguggagucugu

SEQ ID NO: 1356767 - RNA, 19 nt, Homo sapiens
  misc_RNA (1)...(19): siRNA sense strand
gcugaaggcucugcuagac

SEQ ID NO: 1356768 - RNA, 19 nt, Homo sapiens
  misc_RNA (1)...(19): siRNA sense strand
gggagggucucacggaacu

SEQ ID NO: 1356769 - RNA, 19 nt, Homo sapiens
  misc_RNA (1)...(19): siRNA sense strand
gagacccacagccacguua

SEQ ID NO: 1356770 - RNA, 19 nt, Homo sapiens
  misc_RNA (1)...(19): siRNA sense strand
gaacuucaacacgcugaug

SEQ ID NO: 1356771 - RNA, 19 nt, Homo sapiens
  misc_RNA (1)...(19): siRNA sense strand
uuucaggacuaucacaguu

SEQ ID NO: 1356772 - RNA, 19 nt, Homo sapiens
  misc_RNA (1)...(19): siRNA sense strand
gcaugggcuucguacacaa

SEQ ID NO: 1356773 - RNA, 19 nt, Homo sapiens
  misc_RNA (1)...(19): siRNA sense strand
agacggaggaugagcugua

SEQ ID NO: 1356774 - RNA, 19 nt, Homo sapiens
  misc_RNA (1)...(19): siRNA sense strand
uggaggagcuggccauggu

SEQ ID NO: 1356775 - RNA, 19 nt, Homo sapiens
  misc_RNA (1)...(19): siRNA sense strand
gcucaugauccucagcaaa

SEQ ID NO: 1356776 - RNA, 19 nt, Homo sapiens
  misc_RNA (1)...(19): siRNA sense strand
cgcaagaugucccuguugu

SEQ ID NO: 1356777 - RNA, 19 nt, Homo sapiens
  misc_RNA (1)...(19): siRNA sense strand
ucugcaagauccuguuuca

SEQ ID NO: 1356778 - RNA, 19 nt, Homo sapiens
  misc_RNA (1)...(19): siRNA sense strand
gaugguggagucuguguuc

SEQ ID NO: 1356779 - RNA, 19 nt, Homo sapiens
  misc_RNA (1)...(19): siRNA sense strand
cggccaagcugcuccacau

SEQ ID NO: 1356780 - RNA, 19 nt, Homo sapiens
  misc_RNA (1)...(19): siRNA sense strand
uggcugagcagaucaagga

SEQ ID NO: 1356781 - RNA, 19 nt, Homo sapiens
  misc_RNA (1)...(19): siRNA sense strand
uggcggagcaucucaccua

SEQ ID NO: 1356782 - RNA, 19 nt, Homo sapiens
  misc_RNA (1)...(19): siRNA sense strand
cagcgucccuaccuacaag

SEQ ID NO: 1356783 - RNA, 19 nt, Homo sapiens
  misc_RNA (1)...(19): siRNA sense strand
gcagccuaaucgacauaga

SEQ ID NO: 1356784 - RNA, 19 nt, Homo sapiens
  misc_RNA (1)...(19): siRNA sense strand
uagacagcgucccuaccua

SEQ ID NO: 1356785 - RNA, 19 nt, Homo sapiens
  misc_RNA (1)...(19): siRNA sense strand
cuacaagcagggccucaaa

SEQ ID NO: 1356786 - RNA, 19 nt, Homo sapiens
  misc_RNA (1)...(19): siRNA sense strand
ugcuacagcugcagaacuu

SEQ ID NO: 1356787 - RNA, 19 nt, Homo sapiens
  misc_RNA (1)...(19): siRNA sense strand
ggucaucacacacuuuguc

SEQ ID NO: 1356788 - RNA, 19 nt, Homo sapiens
  misc_RNA (1)...(19): siRNA sense strand
uaucgcuccuucugcaaga

SEQ ID NO: 1356789 - RNA, 19 nt, Homo sapiens
  misc_RNA (1)...(19): siRNA sense strand
gagaugguuuccuauuucc

SEQ ID NO: 1356790 - RNA, 19 nt, Homo sapiens
  misc_RNA (1)...(19): siRNA sense strand
caucucacaggaagaauuc

SEQ ID NO: 1356791 - RNA, 19 nt, Homo sapiens
  misc_RNA (1)...(19): siRNA sense strand
acaagcagggccucaaaug

SEQ ID NO: 1356792 - RNA, 19 nt, Homo sapiens
  misc_RNA (1)...(19): siRNA sense strand
uggagcacaucgagaagau

SEQ ID NO: 1356793 - RNA, 19 nt, Homo sapiens
  misc_RNA (1)...(19): siRNA sense strand
gcgcaagaugucccuguug

SEQ ID NO: 1356794 - RNA, 19 nt, Homo sapiens
  misc_RNA (1)...(19): siRNA sense strand
ccacaucuaccaacaaucc

SEQ ID NO: 1356795 - RNA, 19 nt, Homo sapiens
  misc_RNA (1)...(19): siRNA sense strand
agaugaagcagcucuuuag

SEQ ID NO: 1356796 - RNA, 19 nt, Homo sapiens
  misc_RNA (1)...(19): siRNA sense strand
gaaggacaacuccaauucc

SEQ ID NO: 1356797 - RNA, 19 nt, Homo sapiens
  misc_RNA (1)...(19): siRNA sense strand
guucaucucccucuucaac

SEQ ID NO: 1356798 - RNA, 19 nt, Homo sapiens
  misc_RNA (1)...(19): siRNA sense strand
gcuccaggccuccagagau

SEQ ID NO: 1356799 - RNA, 19 nt, Homo sapiens
  misc_RNA (1)...(19): siRNA sense strand
cuccacaucuaccaacaau

SEQ ID NO: 1356800 - RNA, 19 nt, Homo sapiens
  misc_RNA (1)...(19): siRNA sense strand
cggaaggacaacuccaauu

SEQ ID NO: 1356801 - RNA, 19 nt, Homo sapiens
  misc_RNA (1)...(19): siRNA sense strand
cagcagccuaaucgacaua

SEQ ID NO: 1356802 - RNA, 19 nt, Homo sapiens
  misc_RNA (1)...(19): siRNA sense strand
gaucgccugucaguugagu

SEQ ID NO: 1356803 - RNA, 19 nt, Homo sapiens
  misc_RNA (1)...(19): siRNA sense strand
aggaucgccugucaguuga

SEQ ID NO: 1356804 - RNA, 19 nt, Homo sapiens
  misc_RNA (1)...(19): siRNA sense strand
ccacaagcagugcaaggau

SEQ ID NO: 1356805 - RNA, 19 nt, Homo sapiens
  misc_RNA (1)...(19): siRNA sense strand
ggagacccacagccacguu

SEQ ID NO: 1356806 - RNA, 19 nt, Homo sapiens
  misc_RNA (1)...(19): siRNA sense strand
aguaucagacggaggauga

SEQ ID NO: 1356807 - RNA, 19 nt, Homo sapiens
  misc_RNA (1)...(19): siRNA sense strand
aggcaacuauggcaacuac

SEQ ID NO: 1356808 - RNA, 19 nt, Homo sapiens
  misc_RNA (1)...(19): siRNA sense strand
gacggaggaugagcuguac

SEQ ID NO: 1356809 - RNA, 19 nt, Homo sapiens
  misc_RNA (1)...(19): siRNA sense strand
gggcuucguacacaacuuc

SEQ ID NO: 1356810 - RNA, 19 nt, Homo sapiens
  misc_RNA (1)...(19): siRNA sense strand
gcgcuccagcucuguguug

SEQ ID NO: 1356811 - RNA, 19 nt, Homo sapiens
  misc_RNA (1)...(19): siRNA sense strand
ccagcggaguuugacuuga

SEQ ID NO: 1356812 - RNA, 19 nt, Homo sapiens
  misc_RNA (1)...(19): siRNA sense strand
ccaaacccaagcuggauca

SEQ ID NO: 1356813 - RNA, 19 nt, Homo sapiens
  misc_RNA (1)...(19): siRNA sense strand
cgguucaucucccucuuca

SEQ ID NO: 1356814 - RNA, 19 nt, Homo sapiens
  misc_RNA (1)...(19): siRNA sense strand
gguguuugacauccacuug

SEQ ID NO: 1356815 - RNA, 19 nt, Homo sapiens
  misc_RNA (1)...(19): siRNA sense strand
cuccaggccuccagagauc

SEQ ID NO: 1356816 - RNA, 19 nt, Homo sapiens
  misc_RNA (1)...(19): siRNA sense strand
caagcagggccucaaaugc

SEQ ID NO: 1356817 - RNA, 19 nt, Homo sapiens
  misc_RNA (1)...(19): siRNA sense strand
cgcaugggcuucguacaca

SEQ ID NO: 1356818 - RNA, 19 nt, Homo sapiens
  misc_RNA (1)...(19): siRNA sense strand
ugacuugaacccggaguug

SEQ ID NO: 1356819 - RNA, 19 nt, Homo sapiens
  misc_RNA (1)...(19): siRNA sense strand
ccaagaagcgcccaaauua

SEQ ID NO: 1356820 - RNA, 19 nt, Homo sapiens
  misc_RNA (1)...(19): siRNA sense strand
gagaaggaguuccauuuua

SEQ ID NO: 1356821 - RNA, 19 nt, Homo sapiens
  misc_RNA (1)...(19): siRNA sense strand
acacagaccucuccucuca

SEQ ID NO: 1356822 - RNA, 19 nt, Homo sapiens
  misc_RNA (1)...(19): siRNA sense strand
caagaagcgcccaaauuaa

SEQ ID NO: 1356823 - RNA, 19 nt, Homo sapiens
  misc_RNA (1)...(19): siRNA sense strand
gcagaaagccaccuacuac

SEQ ID NO: 1356824 - RNA, 19 nt, Homo sapiens
  misc_RNA (1)...(19): siRNA sense strand
ucaaccaccuuucccauca

SEQ ID NO: 1356825 - RNA, 19 nt, Homo sapiens
  misc_RNA (1)...(19): siRNA sense strand
agaaggaguuccauuuuaa

SEQ ID NO: 1356826 - RNA, 19 nt, Homo sapiens
  misc_RNA (1)...(19): siRNA sense strand
ccgggaaccuggacuacaa

SEQ ID NO: 1356827 - RNA, 19 nt, Homo sapiens
  misc_RNA (1)...(19): siRNA sense strand
caacuccacccucaccaaa

SEQ ID NO: 1356828 - RNA, 19 nt, Homo sapiens
  misc_RNA (1)...(19): siRNA sense strand
gcaaacguccaagcugaaa

SEQ ID NO: 1356829 - RNA, 19 nt, Homo sapiens
  misc_RNA (1)...(19): siRNA sense strand
gguaaagcccaccagaaug

SEQ ID NO: 1356830 - RNA, 19 nt, Homo sapiens
  misc_RNA (1)...(19): siRNA sense strand
gcaugaaguacaagaagga

SEQ ID NO: 1356831 - RNA, 19 nt, Homo sapiens
  misc_RNA (1)...(19): siRNA sense strand
ugguggagcuggagaagga

SEQ ID NO: 1356832 - RNA, 19 nt, Homo sapiens
  misc_RNA (1)...(19): siRNA sense strand
guaaagcccaccagaaugc

SEQ ID NO: 1356833 - RNA, 19 nt, Homo sapiens
  misc_RNA (1)...(19): siRNA sense strand
ggagaaggaguuccauuuu

SEQ ID NO: 1356834 - RNA, 19 nt, Homo sapiens
  misc_RNA (1)...(19): siRNA sense strand
ccagaaggccaagggauug

SEQ ID NO: 1356835 - RNA, 19 nt, Homo sapiens
  misc_RNA (1)...(19): siRNA sense strand
gccacuagcaacagcagua

SEQ ID NO: 1356836 - RNA, 19 nt, Homo sapiens
  misc_RNA (1)...(19): siRNA sense strand
cgguaaagcccaccagaau

SEQ ID NO: 1356837 - RNA, 19 nt, Homo sapiens
  misc_RNA (1)...(19): siRNA sense strand
uccaagaagcgcccaaauu

SEQ ID NO: 1356838 - RNA, 19 nt, Homo sapiens
  misc_RNA (1)...(19): siRNA sense strand
guacaagaaggaccagaag

SEQ ID NO: 1356839 - RNA, 19 nt, Homo sapiens
  misc_RNA (1)...(19): siRNA sense strand
gcaauggcuucggcuucga

SEQ ID NO: 1356840 - RNA, 19 nt, Homo sapiens
  misc_RNA (1)...(19): siRNA sense strand
ccacuagcaacagcaguaa

SEQ ID NO: 1356841 - RNA, 19 nt, Homo sapiens
  misc_RNA (1)...(19): siRNA sense strand
aagaagcgcccaaauuaac

SEQ ID NO: 1356842 - RNA, 19 nt, Homo sapiens
  misc_RNA (1)...(19): siRNA sense strand
augaaagagucgaggcaaa

SEQ ID NO: 1356843 - RNA, 19 nt, Homo sapiens
  misc_RNA (1)...(19): siRNA sense strand
agaaagccaccuacuacga

SEQ ID NO: 1356844 - RNA, 19 nt, Homo sapiens
  misc_RNA (1)...(19): siRNA sense strand
cacccucaccaaacagaua

SEQ ID NO: 1356845 - RNA, 19 nt, Homo sapiens
  misc_RNA (1)...(19): siRNA sense strand
gcgagcggcagaucaagau

SEQ ID NO: 1356846 - RNA, 19 nt, Homo sapiens
  misc_RNA (1)...(19): siRNA sense strand
gcgcaugaaguacaagaag

SEQ ID NO: 1356847 - RNA, 19 nt, Homo sapiens
  misc_RNA (1)...(19): siRNA sense strand
ggcaaacguccaagcugaa

SEQ ID NO: 1356848 - RNA, 19 nt, Homo sapiens
  misc_RNA (1)...(19): siRNA sense strand
guguagagauggccaaccu

SEQ ID NO: 1356849 - RNA, 19 nt, Homo sapiens
  misc_RNA (1)...(19): siRNA sense strand
acuccacccucaccaaaca

SEQ ID NO: 1356850 - RNA, 19 nt, Homo sapiens
  misc_RNA (1)...(19): siRNA sense strand
ucagcgagcggcagaucaa

SEQ ID NO: 1356851 - RNA, 19 nt, Homo sapiens
  misc_RNA (1)...(19): siRNA sense strand
ccacccgccuucgguaaag

SEQ ID NO: 1356852 - RNA, 19 nt, Homo sapiens
  misc_RNA (1)...(19): siRNA sense strand
gaacauaacuccaguccaa

SEQ ID NO: 1356853 - RNA, 19 nt, Homo sapiens
  misc_RNA (1)...(19): siRNA sense strand
gaaaguagccuuccuaaug

SEQ ID NO: 1356854 - RNA, 19 nt, Homo sapiens
  misc_RNA (1)...(19): siRNA sense strand
ggaguuggcuugugccuua

SEQ ID NO: 1356855 - RNA, 19 nt, Homo sapiens
  misc_RNA (1)...(19): siRNA sense strand
gcaaauaccucacccuuca

SEQ ID NO: 1356856 - RNA, 19 nt, Homo sapiens
  misc_RNA (1)...(19): siRNA sense strand
ggacaagacuucugcuuug

SEQ ID NO: 1356857 - RNA, 19 nt, Homo sapiens
  misc_RNA (1)...(19): siRNA sense strand
ccaaauccauugaggaaua

SEQ ID NO: 1356858 - RNA, 19 nt, Homo sapiens
  misc_RNA (1)...(19): siRNA sense strand
gcucaucagugccucauua

SEQ ID NO: 1356859 - RNA, 19 nt, Homo sapiens
  misc_RNA (1)...(19): siRNA sense strand
ccaaaggccucuauagauu

SEQ ID NO: 1356860 - RNA, 19 nt, Homo sapiens
  misc_RNA (1)...(19): siRNA sense strand
gagcaugacuuauucugaa

SEQ ID NO: 1356861 - RNA, 19 nt, Homo sapiens
  misc_RNA (1)...(19): siRNA sense strand
ggaaugaagcgcuuucuuu

SEQ ID NO: 1356862 - RNA, 19 nt, Homo sapiens
  misc_RNA (1)...(19): siRNA sense strand
acacauaccucuugcuuug

SEQ ID NO: 1356863 - RNA, 19 nt, Homo sapiens
  misc_RNA (1)...(19): siRNA sense strand
gaacugugccuugaugaua

SEQ ID NO: 1356864 - RNA, 19 nt, Homo sapiens
  misc_RNA (1)...(19): siRNA sense strand
gaccaaagcagacaauauu

SEQ ID NO: 1356865 - RNA, 19 nt, Homo sapiens
  misc_RNA (1)...(19): siRNA sense strand
ggacaacaguaucuucaug

SEQ ID NO: 1356866 - RNA, 19 nt, Homo sapiens
  misc_RNA (1)...(19): siRNA sense strand
gcaggacaguucaaccuaa

SEQ ID NO: 1356867 - RNA, 19 nt, Homo sapiens
  misc_RNA (1)...(19): siRNA sense strand
gaagauuucacuaaacgua

SEQ ID NO: 1356868 - RNA, 19 nt, Homo sapiens
  misc_RNA (1)...(19): siRNA sense strand
caucagugccucauuauuu

SEQ ID NO: 1356869 - RNA, 19 nt, Homo sapiens
  misc_RNA (1)...(19): siRNA sense strand
gaaagaaguguuugcauca

SEQ ID NO: 1356870 - RNA, 19 nt, Homo sapiens
  misc_RNA (1)...(19): siRNA sense strand
ggacaguucaaccuaauaa

SEQ ID NO: 1356871 - RNA, 19 nt, Homo sapiens
  misc_RNA (1)...(19): siRNA sense strand
cauggaagauuucacuaaa

SEQ ID NO: 1356872 - RNA, 19 nt, Homo sapiens
  misc_RNA (1)...(19): siRNA sense strand
uaacaaagaggaauacaug

SEQ ID NO: 1356873 - RNA, 19 nt, Homo sapiens
  misc_RNA (1)...(19): siRNA sense strand
guaaaugcuucagcuguaa

SEQ ID NO: 1356874 - RNA, 19 nt, Homo sapiens
  misc_RNA (1)...(19): siRNA sense strand
ugagaaguaugaacaagaa

SEQ ID NO: 1356875 - RNA, 19 nt, Homo sapiens
  misc_RNA (1)...(19): siRNA sense strand
gcagaaagguccccucgua

SEQ ID NO: 1356876 - RNA, 19 nt, Homo sapiens
  misc_RNA (1)...(19): siRNA sense strand
guaucacaguucacauuua

SEQ ID NO: 1356877 - RNA, 19 nt, Homo sapiens
  misc_RNA (1)...(19): siRNA sense strand
caucaacucuuacuguguu

SEQ ID NO: 1356878 - RNA, 19 nt, Homo sapiens
  misc_RNA (1)...(19): siRNA sense strand
ggagcaauacaaagaauuu

SEQ ID NO: 1356879 - RNA, 19 nt, Homo sapiens
  misc_RNA (1)...(19): siRNA sense strand
caaaguaccaggauucuuc

SEQ ID NO: 1356880 - RNA, 19 nt, Homo sapiens
  misc_RNA (1)...(19): siRNA sense strand
cagcaagccuccucucaga

SEQ ID NO: 1356881 - RNA, 19 nt, Homo sapiens
  misc_RNA (1)...(19): siRNA sense strand
gauauuaccaagucauuga

SEQ ID NO: 1356882 - RNA, 19 nt, Homo sapiens
  misc_RNA (1)...(19): siRNA sense strand
gaacacuauugccaccaaa

SEQ ID NO: 1356883 - RNA, 19 nt, Homo sapiens
  misc_RNA (1)...(19): siRNA sense strand
ugaaguggaucccagcaaa

SEQ ID NO: 1356884 - RNA, 19 nt, Homo sapiens
  misc_RNA (1)...(19): siRNA sense strand
gaaggaucaugcugagaug

SEQ ID NO: 1356885 - RNA, 19 nt, Homo sapiens
  misc_RNA (1)...(19): siRNA sense strand
agaagcugcugcuggaaua

SEQ ID NO: 1356886 - RNA, 19 nt, Homo sapiens
  misc_RNA (1)...(19): siRNA sense strand
aagaggaacugaagaagga

SEQ ID NO: 1356887 - RNA, 19 nt, Homo sapiens
  misc_RNA (1)...(19): siRNA sense strand
cugaaaggcuccaucaaga

SEQ ID NO: 1356888 - RNA, 19 nt, Homo sapiens
  misc_RNA (1)...(19): siRNA sense strand
ggaagaaacugagcaaaau

SEQ ID NO: 1356889 - RNA, 19 nt, Homo sapiens
  misc_RNA (1)...(19): siRNA sense strand
gaccuucuauucggauuaa

SEQ ID NO: 1356890 - RNA, 19 nt, Homo sapiens
  misc_RNA (1)...(19): siRNA sense strand
gacaagacuucugcuuuga

SEQ ID NO: 1356891 - RNA, 19 nt, Homo sapiens
  misc_RNA (1)...(19): siRNA sense strand
gaaaagugguauccaguga

SEQ ID NO: 1356892 - RNA, 19 nt, Homo sapiens
  misc_RNA (1)...(19): siRNA sense strand
gcauggaagauuucacuaa

SEQ ID NO: 1356893 - RNA, 19 nt, Homo sapiens
  misc_RNA (1)...(19): siRNA sense strand
ugacagugauuugcauaaa

SEQ ID NO: 1356894 - RNA, 19 nt, Homo sapiens
  misc_RNA (1)...(19): siRNA sense strand
gcugugagcuggcuuucug

SEQ ID NO: 1356895 - RNA, 19 nt, Homo sapiens
  misc_RNA (1)...(19): siRNA sense strand
gcaaauguucaucuaguga

SEQ ID NO: 1356896 - RNA, 19 nt, Homo sapiens
  misc_RNA (1)...(19): siRNA sense strand
caugaugucuugaucuuca

SEQ ID NO: 1356897 - RNA, 19 nt, Homo sapiens
  misc_RNA (1)...(19): siRNA sense strand
gggaguuuaucaaagcuuu

SEQ ID NO: 1356898 - RNA, 19 nt, Homo sapiens
  misc_RNA (1)...(19): siRNA sense strand
gcuaauggcuguggaagag

SEQ ID NO: 1356899 - RNA, 19 nt, Homo sapiens
  misc_RNA (1)...(19): siRNA sense strand
ccaagcaugcugagaagua

SEQ ID NO: 1356900 - RNA, 19 nt, Homo sapiens
  misc_RNA (1)...(19): siRNA sense strand
ugaagaggauguggaagaa

SEQ ID NO: 1356901 - RNA, 19 nt, Homo sapiens
  misc_RNA (1)...(19): siRNA sense strand
gauagacacauaccucuug

SEQ ID NO: 1356902 - RNA, 19 nt, Homo sapiens
  misc_RNA (1)...(19): siRNA sense strand
aaaguagccuuccuaaugg

SEQ ID NO: 1356903 - RNA, 19 nt, Homo sapiens
  misc_RNA (1)...(19): siRNA sense strand
cagcaaauguucaucuagu

SEQ ID NO: 1356904 - RNA, 19 nt, Homo sapiens
  misc_RNA (1)...(19): siRNA sense strand
gaucaucaacucuuacugu

SEQ ID NO: 1356905 - RNA, 19 nt, Homo sapiens
  misc_RNA (1)...(19): siRNA sense strand
caacacagacagcuacuuc

SEQ ID NO: 1356906 - RNA, 19 nt, Homo sapiens
  misc_RNA (1)...(19): siRNA sense strand
agagagcccuguucccaaa

SEQ ID NO: 1356907 - RNA, 19 nt, Homo sapiens
  misc_RNA (1)...(19): siRNA sense strand
ucucagagcaugacuuauu

SEQ ID NO: 1356908 - RNA, 19 nt, Homo sapiens
  misc_RNA (1)...(19): siRNA sense strand
aguaaaugcuucagcugua

SEQ ID NO: 1356909 - RNA, 19 nt, Homo sapiens
  misc_RNA (1)...(19): siRNA sense strand
gaagacagcaggaagaaaa

SEQ ID NO: 1356910 - RNA, 19 nt, Homo sapiens
  misc_RNA (1)...(19): siRNA sense strand
ggugccagauagacacaua

SEQ ID NO: 1356911 - RNA, 19 nt, Homo sapiens
  misc_RNA (1)...(19): siRNA sense strand
gagcuggcuuucugcaaga

SEQ ID NO: 1356912 - RNA, 19 nt, Homo sapiens
  misc_RNA (1)...(19): siRNA sense strand
gccacacagugcuucuuua

SEQ ID NO: 1356913 - RNA, 19 nt, Homo sapiens
  misc_RNA (1)...(19): siRNA sense strand
gauacccucuuugcucgua

SEQ ID NO: 1356914 - RNA, 19 nt, Homo sapiens
  misc_RNA (1)...(19): siRNA sense strand
gcaagcaguuauugaugca

SEQ ID NO: 1356915 - RNA, 19 nt, Homo sapiens
  misc_RNA (1)...(19): siRNA sense strand
gccgagagcuuucaguuuu

SEQ ID NO: 1356916 - RNA, 19 nt, Homo sapiens
  misc_RNA (1)...(19): siRNA sense strand
gaucugggccgagagcuuu

SEQ ID NO: 1356917 - RNA, 19 nt, Homo sapiens
  misc_RNA (1)...(19): siRNA sense strand
gccaaaggccucuauagau

SEQ ID NO: 1356918 - RNA, 19 nt, Homo sapiens
  misc_RNA (1)...(19): siRNA sense strand
aauaauugaugcacaggaa

SEQ ID NO: 1356919 - RNA, 19 nt, Homo sapiens
  misc_RNA (1)...(19): siRNA sense strand
agagacaaguggauggaaa

SEQ ID NO: 1356920 - RNA, 19 nt, Homo sapiens
  misc_RNA (1)...(19): siRNA sense strand
guucuucguuuauggauca

SEQ ID NO: 1356921 - RNA, 19 nt, Homo sapiens
  misc_RNA (1)...(19): siRNA sense strand
gaaugaagcgcuuucuuuu

SEQ ID NO: 1356922 - RNA, 19 nt, Homo sapiens
  misc_RNA (1)...(19): siRNA sense strand
caagcaugcugagaaguau

SEQ ID NO: 1356923 - RNA, 19 nt, Homo sapiens
  misc_RNA (1)...(19): siRNA sense strand
gaacaaugggcaguaugaa

SEQ ID NO: 1356924 - RNA, 19 nt, Homo sapiens
  misc_RNA (1)...(19): siRNA sense strand
uaucacaguucacauuuac

SEQ ID NO: 1356925 - RNA, 19 nt, Homo sapiens
  misc_RNA (1)...(19): siRNA sense strand
acacagugcuucuuuacgu

SEQ ID NO: 1356926 - RNA, 19 nt, Homo sapiens
  misc_RNA (1)...(19): siRNA sense strand
gcaauagcagcauggaaga

SEQ ID NO: 1356927 - RNA, 19 nt, Homo sapiens
  misc_RNA (1)...(19): siRNA sense strand
gaagccaaaguaacaguga

SEQ ID NO: 1356928 - RNA, 19 nt, Homo sapiens
  misc_RNA (1)...(19): siRNA sense strand
gacaacaguaucuucauga

SEQ ID NO: 1356929 - RNA, 19 nt, Homo sapiens
  misc_RNA (1)...(19): siRNA sense strand
gugcacauucuucaaagua

SEQ ID NO: 1356930 - RNA, 19 nt, Homo sapiens
  misc_RNA (1)...(19): siRNA sense strand
uaauucugcuucugagaga

SEQ ID NO: 1356931 - RNA, 19 nt, Homo sapiens
  misc_RNA (1)...(19): siRNA sense strand
gcugagaugcaagcaguua

SEQ ID NO: 1356932 - RNA, 19 nt, Homo sapiens
  misc_RNA (1)...(19): siRNA sense strand
aaggagcgccugagaguuu

SEQ ID NO: 1356933 - RNA, 19 nt, Homo sapiens
  misc_RNA (1)...(19): siRNA sense strand
ugacuaauccuacgccaau

SEQ ID NO: 1356934 - RNA, 19 nt, Homo sapiens
  misc_RNA (1)...(19): siRNA sense strand
gaacaugaaugggguggaa

SEQ ID NO: 1356935 - RNA, 19 nt, Homo sapiens
  misc_RNA (1)...(19): siRNA sense strand
ucaaacagcugcgggaaac

SEQ ID NO: 1356936 - RNA, 19 nt, Homo sapiens
  misc_RNA (1)...(19): siRNA sense strand
gggcgaacauuuugaauuc

SEQ ID NO: 1356937 - RNA, 19 nt, Homo sapiens
  misc_RNA (1)...(19): siRNA sense strand
ccaccaagcuuuccaucac

SEQ ID NO: 1356938 - RNA, 19 nt, Homo sapiens
  misc_RNA (1)...(19): siRNA sense strand
ugagaacugugaaguggau

SEQ ID NO: 1356939 - RNA, 19 nt, Homo sapiens
  misc_RNA (1)...(19): siRNA sense strand
gaaccuguaucagugaaac

SEQ ID NO: 1356940 - RNA, 19 nt, Homo sapiens
  misc_RNA (1)...(19): siRNA sense strand
cacagugcuucuuuacgua

SEQ ID NO: 1356941 - RNA, 19 nt, Homo sapiens
  misc_RNA (1)...(19): siRNA sense strand
uaacccaauuccagcaaug

SEQ ID NO: 1356942 - RNA, 19 nt, Homo sapiens
  misc_RNA (1)...(19): siRNA sense strand
ucaccucaauaacccaauu

SEQ ID NO: 1356943 - RNA, 19 nt, Homo sapiens
  misc_RNA (1)...(19): siRNA sense strand
ggacacucaugcugcucaa

SEQ ID NO: 1356944 - RNA, 19 nt, Homo sapiens
  misc_RNA (1)...(19): siRNA sense strand
uaccucacccuucaaagua

SEQ ID NO: 1356945 - RNA, 19 nt, Homo sapiens
  misc_RNA (1)...(19): siRNA sense strand
gacaggaggaccuucuauu

SEQ ID NO: 1356946 - RNA, 19 nt, Homo sapiens
  misc_RNA (1)...(19): siRNA sense strand
aggaauaccucaaguuggu

SEQ ID NO: 1356947 - RNA, 19 nt, Homo sapiens
  misc_RNA (1)...(19): siRNA sense strand
gaugcaagcaguuauugau

SEQ ID NO: 1356948 - RNA, 19 nt, Homo sapiens
  misc_RNA (1)...(19): siRNA sense strand
gaacugaagaaggaucaug

SEQ ID NO: 1356949 - RNA, 19 nt, Homo sapiens
  misc_RNA (1)...(19): siRNA sense strand
ggccgaaccugugcagaau

SEQ ID NO: 1356950 - RNA, 19 nt, Homo sapiens
  misc_RNA (1)...(19): siRNA sense strand
ccagguggccagcaucaaa

SEQ ID NO: 1356951 - RNA, 19 nt, Homo sapiens
  misc_RNA (1)...(19): siRNA sense strand
ucucggacucuaacucuua

SEQ ID NO: 1356952 - RNA, 19 nt, Homo sapiens
  misc_RNA (1)...(19): siRNA sense strand
gaacauaacuccaguccaa

SEQ ID NO: 1356953 - RNA, 19 nt, Homo sapiens
  misc_RNA (1)...(19): siRNA sense strand
gaaaguagccuuccuaaug

SEQ ID NO: 1356954 - RNA, 19 nt, Homo sapiens
  misc_RNA (1)...(19): siRNA sense strand
ggaguuggcuugugccuua

SEQ ID NO: 1356955 - RNA, 19 nt, Homo sapiens
  misc_RNA (1)...(19): siRNA sense strand
gcaaauaccucacccuuca

SEQ ID NO: 1356956 - RNA, 19 nt, Homo sapiens
  misc_RNA (1)...(19): siRNA sense strand
ggacaagacuucugcuuug

SEQ ID NO: 1356957 - RNA, 19 nt, Homo sapiens
  misc_RNA (1)...(19): siRNA sense strand
ccaaauccauugaggaaua

SEQ ID NO: 1356958 - RNA, 19 nt, Homo sapiens
  misc_RNA (1)...(19): siRNA sense strand
gcucaucagugccucauua

SEQ ID NO: 1356959 - RNA, 19 nt, Homo sapiens
  misc_RNA (1)...(19): siRNA sense strand
ccaaaggccucuauagauu

SEQ ID NO: 1356960 - RNA, 19 nt, Homo sapiens
  misc_RNA (1)...(19): siRNA sense strand
gagcaugacuuauucugaa

SEQ ID NO: 1356961 - RNA, 19 nt, Homo sapiens
  misc_RNA (1)...(19): siRNA sense strand
ggaaugaagcgcuuucuuu

SEQ ID NO: 1356962 - RNA, 19 nt, Homo sapiens
  misc_RNA (1)...(19): siRNA sense strand
acacauaccucuugcuuug

SEQ ID NO: 1356963 - RNA, 19 nt, Homo sapiens
  misc_RNA (1)...(19): siRNA sense strand
gaacugugccuugaugaua

SEQ ID NO: 1356964 - RNA, 19 nt, Homo sapiens
  misc_RNA (1)...(19): siRNA sense strand
gaccaaagcagacaauauu

SEQ ID NO: 1356965 - RNA, 19 nt, Homo sapiens
  misc_RNA (1)...(19): siRNA sense strand
ggacaacaguaucuucaug

SEQ ID NO: 1356966 - RNA, 19 nt, Homo sapiens
  misc_RNA (1)...(19): siRNA sense strand
gcaggacaguucaaccuaa

SEQ ID NO: 1356967 - RNA, 19 nt, Homo sapiens
  misc_RNA (1)...(19): siRNA sense strand
gaagauuucacuaaacgua

SEQ ID NO: 1356968 - RNA, 19 nt, Homo sapiens
  misc_RNA (1)...(19): siRNA sense strand
caucagugccucauuauuu

SEQ ID NO: 1356969 - RNA, 19 nt, Homo sapiens
  misc_RNA (1)...(19): siRNA sense strand
gaaagaaguguuugcauca

SEQ ID NO: 1356970 - RNA, 19 nt, Homo sapiens
  misc_RNA (1)...(19): siRNA sense strand
ggacaguucaaccuaauaa

SEQ ID NO: 1356971 - RNA, 19 nt, Homo sapiens
  misc_RNA (1)...(19): siRNA sense strand
cauggaagauuucacuaaa

SEQ ID NO: 1356972 - RNA, 19 nt, Homo sapiens
  misc_RNA (1)...(19): siRNA sense strand
uaacaaagaggaauacaug

SEQ ID NO: 1356973 - RNA, 19 nt, Homo sapiens
  misc_RNA (1)...(19): siRNA sense strand
guaaaugcuucagcuguaa

SEQ ID NO: 1356974 - RNA, 19 nt, Homo sapiens
  misc_RNA (1)...(19): siRNA sense strand
ugagaaguaugaacaagaa

SEQ ID NO: 1356975 - RNA, 19 nt, Homo sapiens
  misc_RNA (1)...(19): siRNA sense strand
gcagaaagguccccucgua

SEQ ID NO: 1356976 - RNA, 19 nt, Homo sapiens
  misc_RNA (1)...(19): siRNA sense strand
guaucacaguucacauuua

SEQ ID NO: 1356977 - RNA, 19 nt, Homo sapiens
  misc_RNA (1)...(19): siRNA sense strand
caucaacucuuacuguguu

SEQ ID NO: 1356978 - RNA, 19 nt, Homo sapiens
  misc_RNA (1)...(19): siRNA sense strand
ggagcaauacaaagaauuu

SEQ ID NO: 1356979 - RNA, 19 nt, Homo sapiens
  misc_RNA (1)...(19): siRNA sense strand
caaaguaccaggauucuuc

SEQ ID NO: 1356980 - RNA, 19 nt, Homo sapiens
  misc_RNA (1)...(19): siRNA sense strand
cagcaagccuccucucaga

SEQ ID NO: 1356981 - RNA, 19 nt, Homo sapiens
  misc_RNA (1)...(19): siRNA sense strand
gauauuaccaagucauuga

SEQ ID NO: 1356982 - RNA, 19 nt, Homo sapiens
  misc_RNA (1)...(19): siRNA sense strand
gaacacuauugccaccaaa

SEQ ID NO: 1356983 - RNA, 19 nt, Homo sapiens
  misc_RNA (1)...(19): siRNA sense strand
ugaaguggaucccagcaaa

SEQ ID NO: 1356984 - RNA, 19 nt, Homo sapiens
  misc_RNA (1)...(19): siRNA sense strand
gaaggaucaugcugagaug

SEQ ID NO: 1356985 - RNA, 19 nt, Homo sapiens
  misc_RNA (1)...(19): siRNA sense strand
agaagcugcugcuggaaua

SEQ ID NO: 1356986 - RNA, 19 nt, Homo sapiens
  misc_RNA (1)...(19): siRNA sense strand
aagaggaacugaagaagga

SEQ ID NO: 1356987 - RNA, 19 nt, Homo sapiens
  misc_RNA (1)...(19): siRNA sense strand
cugaaaggcuccaucaaga

SEQ ID NO: 1356988 - RNA, 19 nt, Homo sapiens
  misc_RNA (1)...(19): siRNA sense strand
ggaagaaacugagcaaaau

SEQ ID NO: 1356989 - RNA, 19 nt, Homo sapiens
  misc_RNA (1)...(19): siRNA sense strand
gaccuucuauucggauuaa

SEQ ID NO: 1356990 - RNA, 19 nt, Homo sapiens
  misc_RNA (1)...(19): siRNA sense strand
gacaagacuucugcuuuga

SEQ ID NO: 1356991 - RNA, 19 nt, Homo sapiens
  misc_RNA (1)...(19): siRNA sense strand
gaaaagugguauccaguga

SEQ ID NO: 1356992 - RNA, 19 nt, Homo sapiens
  misc_RNA (1)...(19): siRNA sense strand
gcauggaagauuucacuaa

SEQ ID NO: 1356993 - RNA, 19 nt, Homo sapiens
  misc_RNA (1)...(19): siRNA sense strand
ugacagugauuugcauaaa

SEQ ID NO: 1356994 - RNA, 19 nt, Homo sapiens
  misc_RNA (1)...(19): siRNA sense strand
gcugugagcuggcuuucug

SEQ ID NO: 1356995 - RNA, 19 nt, Homo sapiens
  misc_RNA (1)...(19): siRNA sense strand
gcaaauguucaucuaguga

SEQ ID NO: 1356996 - RNA, 19 nt, Homo sapiens
  misc_RNA (1)...(19): siRNA sense strand
caugaugucuugaucuuca

SEQ ID NO: 1356997 - RNA, 19 nt, Homo sapiens
  misc_RNA (1)...(19): siRNA sense strand
gggaguuuaucaaagcuuu

SEQ ID NO: 1356998 - RNA, 19 nt, Homo sapiens
  misc_RNA (1)...(19): siRNA sense strand
gcuaauggcuguggaagag

SEQ ID NO: 1356999 - RNA, 19 nt, Homo sapiens
  misc_RNA (1)...(19): siRNA sense strand
ccaagcaugcugagaagua

SEQ ID NO: 1357000 - RNA, 19 nt, Homo sapiens
  misc_RNA (1)...(19): siRNA sense strand
ugaagaggauguggaagaa

SEQ ID NO: 1357001 - RNA, 19 nt, Homo sapiens
  misc_RNA (1)...(19): siRNA sense strand
gauagacacauaccucuug

SEQ ID NO: 1357002 - RNA, 19 nt, Homo sapiens
  misc_RNA (1)...(19): siRNA sense strand
aaaguagccuuccuaaugg

SEQ ID NO: 1357003 - RNA, 19 nt, Homo sapiens
  misc_RNA (1)...(19): siRNA sense strand
cagcaaauguucaucuagu

SEQ ID NO: 1357004 - RNA, 19 nt, Homo sapiens
  misc_RNA (1)...(19): siRNA sense strand
gaucaucaacucuuacugu

SEQ ID NO: 1357005 - RNA, 19 nt, Homo sapiens
  misc_RNA (1)...(19): siRNA sense strand
caacacagacagcuacuuc

SEQ ID NO: 1357006 - RNA, 19 nt, Homo sapiens
  misc_RNA (1)...(19): siRNA sense strand
agagagcccuguucccaaa

SEQ ID NO: 1357007 - RNA, 19 nt, Homo sapiens
  misc_RNA (1)...(19): siRNA sense strand
ucucagagcaugacuuauu

SEQ ID NO: 1357008 - RNA, 19 nt, Homo sapiens
  misc_RNA (1)...(19): siRNA sense strand
aguaaaugcuucagcugua

SEQ ID NO: 1357009 - RNA, 19 nt, Homo sapiens
  misc_RNA (1)...(19): siRNA sense strand
gaagacagcaggaagaaaa

SEQ ID NO: 1357010 - RNA, 19 nt, Homo sapiens
  misc_RNA (1)...(19): siRNA sense strand
ggugccagauagacacaua

SEQ ID NO: 1357011 - RNA, 19 nt, Homo sapiens
  misc_RNA (1)...(19): siRNA sense strand
gagcuggcuuucugcaaga

SEQ ID NO: 1357012 - RNA, 19 nt, Homo sapiens
  misc_RNA (1)...(19): siRNA sense strand
gccacacagugcuucuuua

SEQ ID NO: 1357013 - RNA, 19 nt, Homo sapiens
  misc_RNA (1)...(19): siRNA sense strand
gauacccucuuugcucgua

SEQ ID NO: 1357014 - RNA, 19 nt, Homo sapiens
  misc_RNA (1)...(19): siRNA sense strand
gcaagcaguuauugaugca

SEQ ID NO: 1357015 - RNA, 19 nt, Homo sapiens
  misc_RNA (1)...(19): siRNA sense strand
gccgagagcuuucaguuuu

SEQ ID NO: 1357016 - RNA, 19 nt, Homo sapiens
  misc_RNA (1)...(19): siRNA sense strand
gaucugggccgagagcuuu

SEQ ID NO: 1357017 - RNA, 19 nt, Homo sapiens
  misc_RNA (1)...(19): siRNA sense strand
gccaaaggccucuauagau

SEQ ID NO: 1357018 - RNA, 19 nt, Homo sapiens
  misc_RNA (1)...(19): siRNA sense strand
aauaauugaugcacaggaa

SEQ ID NO: 1357019 - RNA, 19 nt, Homo sapiens
  misc_RNA (1)...(19): siRNA sense strand
agagacaaguggauggaaa

SEQ ID NO: 1357020 - RNA, 19 nt, Homo sapiens
  misc_RNA (1)...(19): siRNA sense strand
guucuucguuuauggauca

SEQ ID NO: 1357021 - RNA, 19 nt, Homo sapiens
  misc_RNA (1)...(19): siRNA sense strand
gaaugaagcgcuuucuuuu

SEQ ID NO: 1357022 - RNA, 19 nt, Homo sapiens
  misc_RNA (1)...(19): siRNA sense strand
caagcaugcugagaaguau

SEQ ID NO: 1357023 - RNA, 19 nt, Homo sapiens
  misc_RNA (1)...(19): siRNA sense strand
gaacaaugggcaguaugaa

SEQ ID NO: 1357024 - RNA, 19 nt, Homo sapiens
  misc_RNA (1)...(19): siRNA sense strand
uaucacaguucacauuuac

SEQ ID NO: 1357025 - RNA, 19 nt, Homo sapiens
  misc_RNA (1)...(19): siRNA sense strand
acacagugcuucuuuacgu

SEQ ID NO: 1357026 - RNA, 19 nt, Homo sapiens
  misc_RNA (1)...(19): siRNA sense strand
gcaauagcagcauggaaga

SEQ ID NO: 1357027 - RNA, 19 nt, Homo sapiens
  misc_RNA (1)...(19): siRNA sense strand
gaagccaaaguaacaguga

SEQ ID NO: 1357028 - RNA, 19 nt, Homo sapiens
  misc_RNA (1)...(19): siRNA sense strand
gacaacaguaucuucauga

SEQ ID NO: 1357029 - RNA, 19 nt, Homo sapiens
  misc_RNA (1)...(19): siRNA sense strand
gugcacauucuucaaagua

SEQ ID NO: 1357030 - RNA, 19 nt, Homo sapiens
  misc_RNA (1)...(19): siRNA sense strand
uaauucugcuucugagaga

SEQ ID NO: 1357031 - RNA, 19 nt, Homo sapiens
  misc_RNA (1)...(19): siRNA sense strand
gcugagaugcaagcaguua

SEQ ID NO: 1357032 - RNA, 19 nt, Homo sapiens
  misc_RNA (1)...(19): siRNA sense strand
aaggagcgccugagaguuu

SEQ ID NO: 1357033 - RNA, 19 nt, Homo sapiens
  misc_RNA (1)...(19): siRNA sense strand
ugacuaauccuacgccaau

SEQ ID NO: 1357034 - RNA, 19 nt, Homo sapiens
  misc_RNA (1)...(19): siRNA sense strand
gaacaugaaugggguggaa

SEQ ID NO: 1357035 - RNA, 19 nt, Homo sapiens
  misc_RNA (1)...(19): siRNA sense strand
ucaaacagcugcgggaaac

SEQ ID NO: 1357036 - RNA, 19 nt, Homo sapiens
  misc_RNA (1)...(19): siRNA sense strand
gggcgaacauuuugaauuc

SEQ ID NO: 1357037 - RNA, 19 nt, Homo sapiens
  misc_RNA (1)...(19): siRNA sense strand
ccaccaagcuuuccaucac

SEQ ID NO: 1357038 - RNA, 19 nt, Homo sapiens
  misc_RNA (1)...(19): siRNA sense strand
ugagaacugugaaguggau

SEQ ID NO: 1357039 - RNA, 19 nt, Homo sapiens
  misc_RNA (1)...(19): siRNA sense strand
gaaccuguaucagugaaac

SEQ ID NO: 1357040 - RNA, 19 nt, Homo sapiens
  misc_RNA (1)...(19): siRNA sense strand
cacagugcuucuuuacgua

SEQ ID NO: 1357041 - RNA, 19 nt, Homo sapiens
  misc_RNA (1)...(19): siRNA sense strand
uaacccaauuccagcaaug

SEQ ID NO: 1357042 - RNA, 19 nt, Homo sapiens
  misc_RNA (1)...(19): siRNA sense strand
ucaccucaauaacccaauu

SEQ ID NO: 1357043 - RNA, 19 nt, Homo sapiens
  misc_RNA (1)...(19): siRNA sense strand
ggacacucaugcugcucaa

SEQ ID NO: 1357044 - RNA, 19 nt, Homo sapiens
  misc_RNA (1)...(19): siRNA sense strand
uaccucacccuucaaagua

SEQ ID NO: 1357045 - RNA, 19 nt, Homo sapiens
  misc_RNA (1)...(19): siRNA sense strand
gacaggaggaccuucuauu

SEQ ID NO: 1357046 - RNA, 19 nt, Homo sapiens
  misc_RNA (1)...(19): siRNA sense strand
aggaauaccucaaguuggu

SEQ ID NO: 1357047 - RNA, 19 nt, Homo sapiens
  misc_RNA (1)...(19): siRNA sense strand
gaugcaagcaguuauugau

SEQ ID NO: 1357048 - RNA, 19 nt, Homo sapiens
  misc_RNA (1)...(19): siRNA sense strand
gaacugaagaaggaucaug

SEQ ID NO: 1357049 - RNA, 19 nt, Homo sapiens
  misc_RNA (1)...(19): siRNA sense strand
ggccgaaccugugcagaau

SEQ ID NO: 1357050 - RNA, 19 nt, Homo sapiens
  misc_RNA (1)...(19): siRNA sense strand
ccagguggccagcaucaaa

SEQ ID NO: 1357051 - RNA, 19 nt, Homo sapiens
  misc_RNA (1)...(19): siRNA sense strand
ucucggacucuaacucuua

SEQ ID NO: 1357052 - RNA, 19 nt, Homo sapiens
  misc_RNA (1)...(19): siRNA sense strand
gaaagagccuuaugaucga

SEQ ID NO: 1357053 - RNA, 19 nt, Homo sapiens
  misc_RNA (1)...(19): siRNA sense strand
ggacuucgacuuccucaaa

SEQ ID NO: 1357054 - RNA, 19 nt, Homo sapiens
  misc_RNA (1)...(19): siRNA sense strand
gggaugaccuguaccacaa

SEQ ID NO: 1357055 - RNA, 19 nt, Homo sapiens
  misc_RNA (1)...(19): siRNA sense strand
caagauguaucccagaugu

SEQ ID NO: 1357056 - RNA, 19 nt, Homo sapiens
  misc_RNA (1)...(19): siRNA sense strand
gcaaagccuucuccacaag

SEQ ID NO: 1357057 - RNA, 19 nt, Homo sapiens
  misc_RNA (1)...(19): siRNA sense strand
cagacuuucuugagauuaa

SEQ ID NO: 1357058 - RNA, 19 nt, Homo sapiens
  misc_RNA (1)...(19): siRNA sense strand
aaacugggaugaccuguac

SEQ ID NO: 1357059 - RNA, 19 nt, Homo sapiens
  misc_RNA (1)...(19): siRNA sense strand
gcagugaagguacuacaga

SEQ ID NO: 1357060 - RNA, 19 nt, Homo sapiens
  misc_RNA (1)...(19): siRNA sense strand
caagugcauuccugggauu

SEQ ID NO: 1357061 - RNA, 19 nt, Homo sapiens
  misc_RNA (1)...(19): siRNA sense strand
gauuaagaaccauguauuc

SEQ ID NO: 1357062 - RNA, 19 nt, Homo sapiens
  misc_RNA (1)...(19): siRNA sense strand
gaagacaccacauccacau

SEQ ID NO: 1357063 - RNA, 19 nt, Homo sapiens
  misc_RNA (1)...(19): siRNA sense strand
gagauuaagaaccauguau

SEQ ID NO: 1357064 - RNA, 19 nt, Homo sapiens
  misc_RNA (1)...(19): siRNA sense strand
uaucccagauguaugagaa

SEQ ID NO: 1357065 - RNA, 19 nt, Homo sapiens
  misc_RNA (1)...(19): siRNA sense strand
gggcaguccucuacgagau

SEQ ID NO: 1357066 - RNA, 19 nt, Homo sapiens
  misc_RNA (1)...(19): siRNA sense strand
gcuacagaaugaacucuag

SEQ ID NO: 1357067 - RNA, 19 nt, Homo sapiens
  misc_RNA (1)...(19): siRNA sense strand
gaugaccuguaccacaaga

SEQ ID NO: 1357068 - RNA, 19 nt, Homo sapiens
  misc_RNA (1)...(19): siRNA sense strand
cagugaagguacuacagaa

SEQ ID NO: 1357069 - RNA, 19 nt, Homo sapiens
  misc_RNA (1)...(19): siRNA sense strand
gccaagauguaucccagau

SEQ ID NO: 1357070 - RNA, 19 nt, Homo sapiens
  misc_RNA (1)...(19): siRNA sense strand
gaacuacgggaagguccua

SEQ ID NO: 1357071 - RNA, 19 nt, Homo sapiens
  misc_RNA (1)...(19): siRNA sense strand
aagcagacuuucuugagau

SEQ ID NO: 1357072 - RNA, 19 nt, Homo sapiens
  misc_RNA (1)...(19): siRNA sense strand
gcagacuuucuugagauua

SEQ ID NO: 1357073 - RNA, 19 nt, Homo sapiens
  misc_RNA (1)...(19): siRNA sense strand
gagcgcagugugcuucuga

SEQ ID NO: 1357074 - RNA, 19 nt, Homo sapiens
  misc_RNA (1)...(19): siRNA sense strand
ccugugaccuccugcaaag

SEQ ID NO: 1357075 - RNA, 19 nt, Homo sapiens
  misc_RNA (1)...(19): siRNA sense strand
uaaacugggaugaccugua

SEQ ID NO: 1357076 - RNA, 19 nt, Homo sapiens
  misc_RNA (1)...(19): siRNA sense strand
ugcaaagccuucuccacaa

SEQ ID NO: 1357077 - RNA, 19 nt, Homo sapiens
  misc_RNA (1)...(19): siRNA sense strand
ccugaucauugcuacagaa

SEQ ID NO: 1357078 - RNA, 19 nt, Homo sapiens
  misc_RNA (1)...(19): siRNA sense strand
gaaagagcagagccacauc

SEQ ID NO: 1357079 - RNA, 19 nt, Homo sapiens
  misc_RNA (1)...(19): siRNA sense strand
gcgcuacuccuuccagaca

SEQ ID NO: 1357080 - RNA, 19 nt, Homo sapiens
  misc_RNA (1)...(19): siRNA sense strand
uaccugcacucccucaaca

SEQ ID NO: 1357081 - RNA, 19 nt, Homo sapiens
  misc_RNA (1)...(19): siRNA sense strand
gcaccagccgcuacagauc

SEQ ID NO: 1357082 - RNA, 19 nt, Homo sapiens
  misc_RNA (1)...(19): siRNA sense strand
cagagcugccugaucauug

SEQ ID NO: 1357083 - RNA, 19 nt, Homo sapiens
  misc_RNA (1)...(19): siRNA sense strand
uuacagggaucugaaacca

SEQ ID NO: 1357084 - RNA, 19 nt, Homo sapiens
  misc_RNA (1)...(19): siRNA sense strand
gcacucccucaacaucauu

SEQ ID NO: 1357085 - RNA, 19 nt, Homo sapiens
  misc_RNA (1)...(19): siRNA sense strand
ccucaaagucaucggcaaa

SEQ ID NO: 1357086 - RNA, 19 nt, Homo sapiens
  misc_RNA (1)...(19): siRNA sense strand
gacaccacauccacauucu

SEQ ID NO: 1357087 - RNA, 19 nt, Homo sapiens
  misc_RNA (1)...(19): siRNA sense strand
gccaagcgcaagucugaug

SEQ ID NO: 1357088 - RNA, 19 nt, Homo sapiens
  misc_RNA (1)...(19): siRNA sense strand
uggccaagcgcaagucuga

SEQ ID NO: 1357089 - RNA, 19 nt, Homo sapiens
  misc_RNA (1)...(19): siRNA sense strand
caccugagaagcucuacuu

SEQ ID NO: 1357090 - RNA, 19 nt, Homo sapiens
  misc_RNA (1)...(19): siRNA sense strand
ggggagagcucuucuucca

SEQ ID NO: 1357091 - RNA, 19 nt, Homo sapiens
  misc_RNA (1)...(19): siRNA sense strand
acguggugcugacggauuu

SEQ ID NO: 1357092 - RNA, 19 nt, Homo sapiens
  misc_RNA (1)...(19): siRNA sense strand
gacuucgacuuccucaaag

SEQ ID NO: 1357093 - RNA, 19 nt, Homo sapiens
  misc_RNA (1)...(19): siRNA sense strand
agacaccacauccacauuc

SEQ ID NO: 1357094 - RNA, 19 nt, Homo sapiens
  misc_RNA (1)...(19): siRNA sense strand
caccacauccacauucugu

SEQ ID NO: 1357095 - RNA, 19 nt, Homo sapiens
  misc_RNA (1)...(19): siRNA sense strand
cuuaugcgccagaggauga

SEQ ID NO: 1357096 - RNA, 19 nt, Homo sapiens
  misc_RNA (1)...(19): siRNA sense strand
aggaagcuguguccaaguc

SEQ ID NO: 1357097 - RNA, 19 nt, Homo sapiens
  misc_RNA (1)...(19): siRNA sense strand
ggcguucuaugcagugaag

SEQ ID NO: 1357098 - RNA, 19 nt, Homo sapiens
  misc_RNA (1)...(19): siRNA sense strand
gcccacggacuucgacuuc

SEQ ID NO: 1357099 - RNA, 19 nt, Homo sapiens
  misc_RNA (1)...(19): siRNA sense strand
agauguaucccagauguau

SEQ ID NO: 1357100 - RNA, 19 nt, Homo sapiens
  misc_RNA (1)...(19): siRNA sense strand
aaagagcagagccacauca

SEQ ID NO: 1357101 - RNA, 19 nt, Homo sapiens
  misc_RNA (1)...(19): siRNA sense strand
agaaagagcagagccacau

SEQ ID NO: 1357102 - RNA, 19 nt, Homo sapiens
  misc_RNA (1)...(19): siRNA sense strand
guucuaugcagugaaggua

SEQ ID NO: 1357103 - RNA, 19 nt, Homo sapiens
  misc_RNA (1)...(19): siRNA sense strand
ucaaagucaucggcaaagg

SEQ ID NO: 1357104 - RNA, 19 nt, Homo sapiens
  misc_RNA (1)...(19): siRNA sense strand
gaagguguagagccugaag

SEQ ID NO: 1357105 - RNA, 19 nt, Homo sapiens
  misc_RNA (1)...(19): siRNA sense strand
cuacuucgugcucgacuau

SEQ ID NO: 1357106 - RNA, 19 nt, Homo sapiens
  misc_RNA (1)...(19): siRNA sense strand
cggaaagagccuuaugauc

SEQ ID NO: 1357107 - RNA, 19 nt, Homo sapiens
  misc_RNA (1)...(19): siRNA sense strand
gaaagagccuuaugaucga

SEQ ID NO: 1357108 - RNA, 19 nt, Homo sapiens
  misc_RNA (1)...(19): siRNA sense strand
ggacuucgacuuccucaaa

SEQ ID NO: 1357109 - RNA, 19 nt, Homo sapiens
  misc_RNA (1)...(19): siRNA sense strand
gggaugaccuguaccacaa

SEQ ID NO: 1357110 - RNA, 19 nt, Homo sapiens
  misc_RNA (1)...(19): siRNA sense strand
caagauguaucccagaugu

SEQ ID NO: 1357111 - RNA, 19 nt, Homo sapiens
  misc_RNA (1)...(19): siRNA sense strand
gcaaagccuucuccacaag

SEQ ID NO: 1357112 - RNA, 19 nt, Homo sapiens
  misc_RNA (1)...(19): siRNA sense strand
cagacuuucuugagauuaa

SEQ ID NO: 1357113 - RNA, 19 nt, Homo sapiens
  misc_RNA (1)...(19): siRNA sense strand
aaacugggaugaccuguac

SEQ ID NO: 1357114 - RNA, 19 nt, Homo sapiens
  misc_RNA (1)...(19): siRNA sense strand
gcagugaagguacuacaga

SEQ ID NO: 1357115 - RNA, 19 nt, Homo sapiens
  misc_RNA (1)...(19): siRNA sense strand
caagugcauuccugggauu

SEQ ID NO: 1357116 - RNA, 19 nt, Homo sapiens
  misc_RNA (1)...(19): siRNA sense strand
gauuaagaaccauguauuc

SEQ ID NO: 1357117 - RNA, 19 nt, Homo sapiens
  misc_RNA (1)...(19): siRNA sense strand
gaagacaccacauccacau

SEQ ID NO: 1357118 - RNA, 19 nt, Homo sapiens
  misc_RNA (1)...(19): siRNA sense strand
gagauuaagaaccauguau

SEQ ID NO: 1357119 - RNA, 19 nt, Homo sapiens
  misc_RNA (1)...(19): siRNA sense strand
uaucccagauguaugagaa

SEQ ID NO: 1357120 - RNA, 19 nt, Homo sapiens
  misc_RNA (1)...(19): siRNA sense strand
gggcaguccucuacgagau

SEQ ID NO: 1357121 - RNA, 19 nt, Homo sapiens
  misc_RNA (1)...(19): siRNA sense strand
gaugaccuguaccacaaga

SEQ ID NO: 1357122 - RNA, 19 nt, Homo sapiens
  misc_RNA (1)...(19): siRNA sense strand
cagugaagguacuacagaa

SEQ ID NO: 1357123 - RNA, 19 nt, Homo sapiens
  misc_RNA (1)...(19): siRNA sense strand
gccaagauguaucccagau

SEQ ID NO: 1357124 - RNA, 19 nt, Homo sapiens
  misc_RNA (1)...(19): siRNA sense strand
gaacuacgggaagguccua

SEQ ID NO: 1357125 - RNA, 19 nt, Homo sapiens
  misc_RNA (1)...(19): siRNA sense strand
aagcagacuuucuugagau

SEQ ID NO: 1357126 - RNA, 19 nt, Homo sapiens
  misc_RNA (1)...(19): siRNA sense strand
gcagacuuucuugagauua

SEQ ID NO: 1357127 - RNA, 19 nt, Homo sapiens
  misc_RNA (1)...(19): siRNA sense strand
gagcgcagugugcuucuga

SEQ ID NO: 1357128 - RNA, 19 nt, Homo sapiens
  misc_RNA (1)...(19): siRNA sense strand
ccugugaccuccugcaaag

SEQ ID NO: 1357129 - RNA, 19 nt, Homo sapiens
  misc_RNA (1)...(19): siRNA sense strand
uaaacugggaugaccugua

SEQ ID NO: 1357130 - RNA, 19 nt, Homo sapiens
  misc_RNA (1)...(19): siRNA sense strand
ugcaaagccuucuccacaa

SEQ ID NO: 1357131 - RNA, 19 nt, Homo sapiens
  misc_RNA (1)...(19): siRNA sense strand
gaaagagcagagccacauc

SEQ ID NO: 1357132 - RNA, 19 nt, Homo sapiens
  misc_RNA (1)...(19): siRNA sense strand
gcgcuacuccuuccagaca

SEQ ID NO: 1357133 - RNA, 19 nt, Homo sapiens
  misc_RNA (1)...(19): siRNA sense strand
uaccugcacucccucaaca

SEQ ID NO: 1357134 - RNA, 19 nt, Homo sapiens
  misc_RNA (1)...(19): siRNA sense strand
gcaccagccgcuacagauc

SEQ ID NO: 1357135 - RNA, 19 nt, Homo sapiens
  misc_RNA (1)...(19): siRNA sense strand
uuacagggaucugaaacca

SEQ ID NO: 1357136 - RNA, 19 nt, Homo sapiens
  misc_RNA (1)...(19): siRNA sense strand
gcacucccucaacaucauu

SEQ ID NO: 1357137 - RNA, 19 nt, Homo sapiens
  misc_RNA (1)...(19): siRNA sense strand
ccucaaagucaucggcaaa

SEQ ID NO: 1357138 - RNA, 19 nt, Homo sapiens
  misc_RNA (1)...(19): siRNA sense strand
gacaccacauccacauucu

SEQ ID NO: 1357139 - RNA, 19 nt, Homo sapiens
  misc_RNA (1)...(19): siRNA sense strand
gccaagcgcaagucugaug

SEQ ID NO: 1357140 - RNA, 19 nt, Homo sapiens
  misc_RNA (1)...(19): siRNA sense strand
uggccaagcgcaagucuga

SEQ ID NO: 1357141 - RNA, 19 nt, Homo sapiens
  misc_RNA (1)...(19): siRNA sense strand
caccugagaagcucuacuu

SEQ ID NO: 1357142 - RNA, 19 nt, Homo sapiens
  misc_RNA (1)...(19): siRNA sense strand
ggggagagcucuucuucca

SEQ ID NO: 1357143 - RNA, 19 nt, Homo sapiens
  misc_RNA (1)...(19): siRNA sense strand
acguggugcugacggauuu

SEQ ID NO: 1357144 - RNA, 19 nt, Homo sapiens
  misc_RNA (1)...(19): siRNA sense strand
agacaccacauccacauuc

SEQ ID NO: 1357145 - RNA, 19 nt, Homo sapiens
  misc_RNA (1)...(19): siRNA sense strand
gacuucgacuuccucaaag

SEQ ID NO: 1357146 - RNA, 19 nt, Homo sapiens
  misc_RNA (1)...(19): siRNA sense strand
caccacauccacauucugu

SEQ ID NO: 1357147 - RNA, 19 nt, Homo sapiens
  misc_RNA (1)...(19): siRNA sense strand
cuuaugcgccagaggauga

SEQ ID NO: 1357148 - RNA, 19 nt, Homo sapiens
  misc_RNA (1)...(19): siRNA sense strand
aggaagcuguguccaaguc

SEQ ID NO: 1357149 - RNA, 19 nt, Homo sapiens
  misc_RNA (1)...(19): siRNA sense strand
guucuaugcagugaaggua

SEQ ID NO: 1357150 - RNA, 19 nt, Homo sapiens
  misc_RNA (1)...(19): siRNA sense strand
agauguaucccagauguau

SEQ ID NO: 1357151 - RNA, 19 nt, Homo sapiens
  misc_RNA (1)...(19): siRNA sense strand
gcccacggacuucgacuuc

SEQ ID NO: 1357152 - RNA, 19 nt, Homo sapiens
  misc_RNA (1)...(19): siRNA sense strand
aaagagcagagccacauca

SEQ ID NO: 1357153 - RNA, 19 nt, Homo sapiens
  misc_RNA (1)...(19): siRNA sense strand
ggcguucuaugcagugaag

SEQ ID NO: 1357154 - RNA, 19 nt, Homo sapiens
  misc_RNA (1)...(19): siRNA sense strand
agaaagagcagagccacau

SEQ ID NO: 1357155 - RNA, 19 nt, Homo sapiens
  misc_RNA (1)...(19): siRNA sense strand
cuacuucgugcucgacuau

SEQ ID NO: 1357156 - RNA, 19 nt, Homo sapiens
  misc_RNA (1)...(19): siRNA sense strand
ucaaagucaucggcaaagg

SEQ ID NO: 1357157 - RNA, 19 nt, Homo sapiens
  misc_RNA (1)...(19): siRNA sense strand
gaagguguagagccugaag

SEQ ID NO: 1357158 - RNA, 19 nt, Homo sapiens
  misc_RNA (1)...(19): siRNA sense strand
cggaaagagccuuaugauc

SEQ ID NO: 1357159 - RNA, 19 nt, Homo sapiens
  misc_RNA (1)...(19): siRNA sense strand
cagcaaaccugacuccuua

SEQ ID NO: 1357160 - RNA, 19 nt, Homo sapiens
  misc_RNA (1)...(19): siRNA sense strand
ucaaagaccuggccaaaga

SEQ ID NO: 1357161 - RNA, 19 nt, Homo sapiens
  misc_RNA (1)...(19): siRNA sense strand
caacaccgcugccaaagga

SEQ ID NO: 1357162 - RNA, 19 nt, Homo sapiens
  misc_RNA (1)...(19): siRNA sense strand
gaagagggcugccaagaac

SEQ ID NO: 1357163 - RNA, 19 nt, Homo sapiens
  misc_RNA (1)...(19): siRNA sense strand
cagaaggacugcaagauga

SEQ ID NO: 1357164 - RNA, 19 nt, Homo sapiens
  misc_RNA (1)...(19): siRNA sense strand
caaaggcucucacaaaucu

SEQ ID NO: 1357165 - RNA, 19 nt, Homo sapiens
  misc_RNA (1)...(19): siRNA sense strand
ggagccaccugacauugua

SEQ ID NO: 1357166 - RNA, 19 nt, Homo sapiens
  misc_RNA (1)...(19): siRNA sense strand
gcaaacgacugcugaagag

SEQ ID NO: 1357167 - RNA, 19 nt, Homo sapiens
  misc_RNA (1)...(19): siRNA sense strand
ugaaggaguuuguggacua

SEQ ID NO: 1357168 - RNA, 19 nt, Homo sapiens
  misc_RNA (1)...(19): siRNA sense strand
gaugagagcauaugaagug

SEQ ID NO: 1357169 - RNA, 19 nt, Homo sapiens
  misc_RNA (1)...(19): siRNA sense strand
gagagcauaugaaguggaa

SEQ ID NO: 1357170 - RNA, 19 nt, Homo sapiens
  misc_RNA (1)...(19): siRNA sense strand
gcagccagcucuucaucaa

SEQ ID NO: 1357171 - RNA, 19 nt, Homo sapiens
  misc_RNA (1)...(19): siRNA sense strand
aaaccugacuccuuacuga

SEQ ID NO: 1357172 - RNA, 19 nt, Homo sapiens
  misc_RNA (1)...(19): siRNA sense strand
cuucaaaccuucacagcua

SEQ ID NO: 1357173 - RNA, 19 nt, Homo sapiens
  misc_RNA (1)...(19): siRNA sense strand
caacaacaccgcugccaaa

SEQ ID NO: 1357174 - RNA, 19 nt, Homo sapiens
  misc_RNA (1)...(19): siRNA sense strand
ucagugacgucgagaacua

SEQ ID NO: 1357175 - RNA, 19 nt, Homo sapiens
  misc_RNA (1)...(19): siRNA sense strand
caaagaguguccugagugu

SEQ ID NO: 1357176 - RNA, 19 nt, Homo sapiens
  misc_RNA (1)...(19): siRNA sense strand
caccugacauuguaaagaa

SEQ ID NO: 1357177 - RNA, 19 nt, Homo sapiens
  misc_RNA (1)...(19): siRNA sense strand
agaugaagcugaaggaguu

SEQ ID NO: 1357178 - RNA, 19 nt, Homo sapiens
  misc_RNA (1)...(19): siRNA sense strand
gaccggaagugaauacugu

SEQ ID NO: 1357179 - RNA, 19 nt, Homo sapiens
  misc_RNA (1)...(19): siRNA sense strand
cuucacagcuaaucaaaga

SEQ ID NO: 1357180 - RNA, 19 nt, Homo sapiens
  misc_RNA (1)...(19): siRNA sense strand
ggagucagaugaagacaac

SEQ ID NO: 1357181 - RNA, 19 nt, Homo sapiens
  misc_RNA (1)...(19): siRNA sense strand
gaaggaguuuguggacuau

SEQ ID NO: 1357182 - RNA, 19 nt, Homo sapiens
  misc_RNA (1)...(19): siRNA sense strand
gcaagcgccugacgucaag

SEQ ID NO: 1357183 - RNA, 19 nt, Homo sapiens
  misc_RNA (1)...(19): siRNA sense strand
gacgagcccugguguguuc

SEQ ID NO: 1357184 - RNA, 19 nt, Homo sapiens
  misc_RNA (1)...(19): siRNA sense strand
gaacggaguguggauguga

SEQ ID NO: 1357185 - RNA, 19 nt, Homo sapiens
  misc_RNA (1)...(19): siRNA sense strand
gccaacaucucccuguaug

SEQ ID NO: 1357186 - RNA, 19 nt, Homo sapiens
  misc_RNA (1)...(19): siRNA sense strand
gccucuagcuggaaacaaa

SEQ ID NO: 1357187 - RNA, 19 nt, Homo sapiens
  misc_RNA (1)...(19): siRNA sense strand
gaaacugcgugcugguaca

SEQ ID NO: 1357188 - RNA, 19 nt, Homo sapiens
  misc_RNA (1)...(19): siRNA sense strand
gaagaagucccgggaguca

SEQ ID NO: 1357189 - RNA, 19 nt, Homo sapiens
  misc_RNA (1)...(19): siRNA sense strand
ggacucagacuacguuuac

SEQ ID NO: 1357190 - RNA, 19 nt, Homo sapiens
  misc_RNA (1)...(19): siRNA sense strand
ggaaguacaagaacagcaa

SEQ ID NO: 1357191 - RNA, 19 nt, Homo sapiens
  misc_RNA (1)...(19): siRNA sense strand
aggaguuuguggacuauua

SEQ ID NO: 1357192 - RNA, 19 nt, Homo sapiens
  misc_RNA (1)...(19): siRNA sense strand
caacaaagaugugguucac

SEQ ID NO: 1357193 - RNA, 19 nt, Homo sapiens
  misc_RNA (1)...(19): siRNA sense strand
gaaacugucauggguagaa

SEQ ID NO: 1357194 - RNA, 19 nt, Homo sapiens
  misc_RNA (1)...(19): siRNA sense strand
acgggaaacuacuccuuua

SEQ ID NO: 1357195 - RNA, 19 nt, Homo sapiens
  misc_RNA (1)...(19): siRNA sense strand
gcaagaagaaagggaagaa

SEQ ID NO: 1357196 - RNA, 19 nt, Homo sapiens
  misc_RNA (1)...(19): siRNA sense strand
ccaaguggaaguacaagaa

SEQ ID NO: 1357197 - RNA, 19 nt, Homo sapiens
  misc_RNA (1)...(19): siRNA sense strand
ggaaacaaagacaauaagu

SEQ ID NO: 1357198 - RNA, 19 nt, Homo sapiens
  misc_RNA (1)...(19): siRNA sense strand
gaaaacuacuggccagaug

SEQ ID NO: 1357199 - RNA, 19 nt, Homo sapiens
  misc_RNA (1)...(19): siRNA sense strand
gcucaagaucgacgaguuu

SEQ ID NO: 1357200 - RNA, 19 nt, Homo sapiens
  misc_RNA (1)...(19): siRNA sense strand
gcagaugagagcauaugaa

SEQ ID NO: 1357201 - RNA, 19 nt, Homo sapiens
  misc_RNA (1)...(19): siRNA sense strand
gcacacaggaagccauuca

SEQ ID NO: 1357202 - RNA, 19 nt, Homo sapiens
  misc_RNA (1)...(19): siRNA sense strand
gcaagcggguccucaacgu

SEQ ID NO: 1357203 - RNA, 19 nt, Homo sapiens
  misc_RNA (1)...(19): siRNA sense strand
gaacgggaaacuacuccuu

SEQ ID NO: 1357204 - RNA, 19 nt, Homo sapiens
  misc_RNA (1)...(19): siRNA sense strand
guacacggguggcuuccau

SEQ ID NO: 1357205 - RNA, 19 nt, Homo sapiens
  misc_RNA (1)...(19): siRNA sense strand
gagcuaaaauucucaaugg

SEQ ID NO: 1357206 - RNA, 19 nt, Homo sapiens
  misc_RNA (1)...(19): siRNA sense strand
gaaguggaaaggagguuga

SEQ ID NO: 1357207 - RNA, 19 nt, Homo sapiens
  misc_RNA (1)...(19): siRNA sense strand
ugaagagggcugccaagaa

SEQ ID NO: 1357208 - RNA, 19 nt, Homo sapiens
  misc_RNA (1)...(19): siRNA sense strand
gcccaucggugccaagaca

SEQ ID NO: 1357209 - RNA, 19 nt, Homo sapiens
  misc_RNA (1)...(19): siRNA sense strand
gagcaaaccaagagcaagu

SEQ ID NO: 1357210 - RNA, 19 nt, Homo sapiens
  misc_RNA (1)...(19): siRNA sense strand
gcaagaugaagcugaagga

SEQ ID NO: 1357211 - RNA, 19 nt, Homo sapiens
  misc_RNA (1)...(19): siRNA sense strand
cgcccgacaucgacauaua

SEQ ID NO: 1357212 - RNA, 19 nt, Homo sapiens
  misc_RNA (1)...(19): siRNA sense strand
gcaaugccagagucaagaa

SEQ ID NO: 1357213 - RNA, 19 nt, Homo sapiens
  misc_RNA (1)...(19): siRNA sense strand
gaaguacaagaacagcaaa

SEQ ID NO: 1357214 - RNA, 19 nt, Homo sapiens
  misc_RNA (1)...(19): siRNA sense strand
ccaaaacgcugaagcucaa

SEQ ID NO: 1357215 - RNA, 19 nt, Homo sapiens
  misc_RNA (1)...(19): siRNA sense strand
gaagcggaccuggcacaaa

SEQ ID NO: 1357216 - RNA, 19 nt, Homo sapiens
  misc_RNA (1)...(19): siRNA sense strand
ggaagaggagcagaagcua

SEQ ID NO: 1357217 - RNA, 19 nt, Homo sapiens
  misc_RNA (1)...(19): siRNA sense strand
gcuggaaauucgagagcaa

SEQ ID NO: 1357218 - RNA, 19 nt, Homo sapiens
  misc_RNA (1)...(19): siRNA sense strand
uucaaaggcucucacaaau

SEQ ID NO: 1357219 - RNA, 19 nt, Homo sapiens
  misc_RNA (1)...(19): siRNA sense strand
gaccaaguacugccuaauc

SEQ ID NO: 1357220 - RNA, 19 nt, Homo sapiens
  misc_RNA (1)...(19): siRNA sense strand
caaggacucagacuacguu

SEQ ID NO: 1357221 - RNA, 19 nt, Homo sapiens
  misc_RNA (1)...(19): siRNA sense strand
ggcaaacgacugcugaaga

SEQ ID NO: 1357222 - RNA, 19 nt, Homo sapiens
  misc_RNA (1)...(19): siRNA sense strand
gaaauucgagagcaaacca

SEQ ID NO: 1357223 - RNA, 19 nt, Homo sapiens
  misc_RNA (1)...(19): siRNA sense strand
ccggagcacuucaaaccuu

SEQ ID NO: 1357224 - RNA, 19 nt, Homo sapiens
  misc_RNA (1)...(19): siRNA sense strand
aaacugucauggguagaaa

SEQ ID NO: 1357225 - RNA, 19 nt, Homo sapiens
  misc_RNA (1)...(19): siRNA sense strand
aaagauggaggcaagaaga

SEQ ID NO: 1357226 - RNA, 19 nt, Homo sapiens
  misc_RNA (1)...(19): siRNA sense strand
uggcaagagugcaggcaaa

SEQ ID NO: 1357227 - RNA, 19 nt, Homo sapiens
  misc_RNA (1)...(19): siRNA sense strand
caaagacaauaaguucucu

SEQ ID NO: 1357228 - RNA, 19 nt, Homo sapiens
  misc_RNA (1)...(19): siRNA sense strand
gcuggaaacaaagacaaua

SEQ ID NO: 1357229 - RNA, 19 nt, Homo sapiens
  misc_RNA (1)...(19): siRNA sense strand
gcaagucagaggccaagug

SEQ ID NO: 1357230 - RNA, 19 nt, Homo sapiens
  misc_RNA (1)...(19): siRNA sense strand
aaaccaagagcaagucaga

SEQ ID NO: 1357231 - RNA, 19 nt, Homo sapiens
  misc_RNA (1)...(19): siRNA sense strand
ugagugugcccaacaaaga

SEQ ID NO: 1357232 - RNA, 19 nt, Homo sapiens
  misc_RNA (1)...(19): siRNA sense strand
ucaccaaccucgaguucuc

SEQ ID NO: 1357233 - RNA, 19 nt, Homo sapiens
  misc_RNA (1)...(19): siRNA sense strand
gagcagaagcuagagaagu

SEQ ID NO: 1357234 - RNA, 19 nt, Homo sapiens
  misc_RNA (1)...(19): siRNA sense strand
gagagcaaaccaagagcaa

SEQ ID NO: 1357235 - RNA, 19 nt, Homo sapiens
  misc_RNA (1)...(19): siRNA sense strand
gcaaggccacaaagagugu

SEQ ID NO: 1357236 - RNA, 19 nt, Homo sapiens
  misc_RNA (1)...(19): siRNA sense strand
gggcaaggccacaaagagu

SEQ ID NO: 1357237 - RNA, 19 nt, Homo sapiens
  misc_RNA (1)...(19): siRNA sense strand
cggccaacaucucccugua

SEQ ID NO: 1357238 - RNA, 19 nt, Homo sapiens
  misc_RNA (1)...(19): siRNA sense strand
ccaaagugaccaaguacug

SEQ ID NO: 1357239 - RNA, 19 nt, Homo sapiens
  misc_RNA (1)...(19): siRNA sense strand
caagagugcaggcaaacga

SEQ ID NO: 1357240 - RNA, 19 nt, Homo sapiens
  misc_RNA (1)...(19): siRNA sense strand
auucaaaggcucucacaaa

SEQ ID NO: 1357241 - RNA, 19 nt, Homo sapiens
  misc_RNA (1)...(19): siRNA sense strand
acaagugcaucgucaagca

SEQ ID NO: 1357242 - RNA, 19 nt, Homo sapiens
  misc_RNA (1)...(19): siRNA sense strand
ccacagcgagauguucuuu

SEQ ID NO: 1357243 - RNA, 19 nt, Homo sapiens
  misc_RNA (1)...(19): siRNA sense strand
ggacaguuacaccgacuuc

SEQ ID NO: 1357244 - RNA, 19 nt, Homo sapiens
  misc_RNA (1)...(19): siRNA sense strand
gagcauaugaaguggaaag

SEQ ID NO: 1357245 - RNA, 19 nt, Homo sapiens
  misc_RNA (1)...(19): siRNA sense strand
gagcagaaaagcaagaaaa

SEQ ID NO: 1357246 - RNA, 19 nt, Homo sapiens
  misc_RNA (1)...(19): siRNA sense strand
ggaacggaguguggaugug

SEQ ID NO: 1357247 - RNA, 19 nt, Homo sapiens
  misc_RNA (1)...(19): siRNA sense strand
cacaaagaguguccugagu

SEQ ID NO: 1357248 - RNA, 19 nt, Homo sapiens
  misc_RNA (1)...(19): siRNA sense strand
ccaaggaggcacugaccaa

SEQ ID NO: 1357249 - RNA, 19 nt, Homo sapiens
  misc_RNA (1)...(19): siRNA sense strand
caacaucucccuguaugag

SEQ ID NO: 1357250 - RNA, 19 nt, Homo sapiens
  misc_RNA (1)...(19): siRNA sense strand
cgucagaugagguguguga

SEQ ID NO: 1357251 - RNA, 19 nt, Homo sapiens
  misc_RNA (1)...(19): siRNA sense strand
agcccaaagugaccaagua

SEQ ID NO: 1357252 - RNA, 19 nt, Homo sapiens
  misc_RNA (1)...(19): siRNA sense strand
ggaugacggugagcucaag

SEQ ID NO: 1357253 - RNA, 19 nt, Homo sapiens
  misc_RNA (1)...(19): siRNA sense strand
augaguacgugucggauga

SEQ ID NO: 1357254 - RNA, 19 nt, Homo sapiens
  misc_RNA (1)...(19): siRNA sense strand
agucagaggccaaguggaa

SEQ ID NO: 1357255 - RNA, 19 nt, Homo sapiens
  misc_RNA (1)...(19): siRNA sense strand
caucgucuccaaacaacaa

SEQ ID NO: 1357256 - RNA, 19 nt, Homo sapiens
  misc_RNA (1)...(19): siRNA sense strand
acggugagcucaagaucga

SEQ ID NO: 1357257 - RNA, 19 nt, Homo sapiens
  misc_RNA (1)...(19): siRNA sense strand
aagcggaccuggcacaaac

SEQ ID NO: 1357258 - RNA, 19 nt, Homo sapiens
  misc_RNA (1)...(19): siRNA sense strand
guguggaugugacagaugu

SEQ ID NO: 1357259 - RNA, 19 nt, Homo sapiens
  misc_RNA (1)...(19): siRNA sense strand
cagcaaaccugacuccuua

SEQ ID NO: 1357260 - RNA, 19 nt, Homo sapiens
  misc_RNA (1)...(19): siRNA sense strand
ucaaagaccuggccaaaga

SEQ ID NO: 1357261 - RNA, 19 nt, Homo sapiens
  misc_RNA (1)...(19): siRNA sense strand
caacaccgcugccaaagga

SEQ ID NO: 1357262 - RNA, 19 nt, Homo sapiens
  misc_RNA (1)...(19): siRNA sense strand
gaagagggcugccaagaac

SEQ ID NO: 1357263 - RNA, 19 nt, Homo sapiens
  misc_RNA (1)...(19): siRNA sense strand
cagaaggacugcaagauga

SEQ ID NO: 1357264 - RNA, 19 nt, Homo sapiens
  misc_RNA (1)...(19): siRNA sense strand
caaaggcucucacaaaucu

SEQ ID NO: 1357265 - RNA, 19 nt, Homo sapiens
  misc_RNA (1)...(19): siRNA sense strand
ggagccaccugacauugua

SEQ ID NO: 1357266 - RNA, 19 nt, Homo sapiens
  misc_RNA (1)...(19): siRNA sense strand
gcaaacgacugcugaagag

SEQ ID NO: 1357267 - RNA, 19 nt, Homo sapiens
  misc_RNA (1)...(19): siRNA sense strand
ugaaggaguuuguggacua

SEQ ID NO: 1357268 - RNA, 19 nt, Homo sapiens
  misc_RNA (1)...(19): siRNA sense strand
gaugagagcauaugaagug

SEQ ID NO: 1357269 - RNA, 19 nt, Homo sapiens
  misc_RNA (1)...(19): siRNA sense strand
gagagcauaugaaguggaa

SEQ ID NO: 1357270 - RNA, 19 nt, Homo sapiens
  misc_RNA (1)...(19): siRNA sense strand
gcagccagcucuucaucaa

SEQ ID NO: 1357271 - RNA, 19 nt, Homo sapiens
  misc_RNA (1)...(19): siRNA sense strand
aaaccugacuccuuacuga

SEQ ID NO: 1357272 - RNA, 19 nt, Homo sapiens
  misc_RNA (1)...(19): siRNA sense strand
cuucaaaccuucacagcua

SEQ ID NO: 1357273 - RNA, 19 nt, Homo sapiens
  misc_RNA (1)...(19): siRNA sense strand
caacaacaccgcugccaaa

SEQ ID NO: 1357274 - RNA, 19 nt, Homo sapiens
  misc_RNA (1)...(19): siRNA sense strand
ucagugacgucgagaacua

SEQ ID NO: 1357275 - RNA, 19 nt, Homo sapiens
  misc_RNA (1)...(19): siRNA sense strand
caaagaguguccugagugu

SEQ ID NO: 1357276 - RNA, 19 nt, Homo sapiens
  misc_RNA (1)...(19): siRNA sense strand
caccugacauuguaaagaa

SEQ ID NO: 1357277 - RNA, 19 nt, Homo sapiens
  misc_RNA (1)...(19): siRNA sense strand
agaugaagcugaaggaguu

SEQ ID NO: 1357278 - RNA, 19 nt, Homo sapiens
  misc_RNA (1)...(19): siRNA sense strand
gaccggaagugaauacugu

SEQ ID NO: 1357279 - RNA, 19 nt, Homo sapiens
  misc_RNA (1)...(19): siRNA sense strand
cuucacagcuaaucaaaga

SEQ ID NO: 1357280 - RNA, 19 nt, Homo sapiens
  misc_RNA (1)...(19): siRNA sense strand
ggagucagaugaagacaac

SEQ ID NO: 1357281 - RNA, 19 nt, Homo sapiens
  misc_RNA (1)...(19): siRNA sense strand
gaaggaguuuguggacuau

SEQ ID NO: 1357282 - RNA, 19 nt, Homo sapiens
  misc_RNA (1)...(19): siRNA sense strand
gcaagcgccugacgucaag

SEQ ID NO: 1357283 - RNA, 19 nt, Homo sapiens
  misc_RNA (1)...(19): siRNA sense strand
gacgagcccugguguguuc

SEQ ID NO: 1357284 - RNA, 19 nt, Homo sapiens
  misc_RNA (1)...(19): siRNA sense strand
gaacggaguguggauguga

SEQ ID NO: 1357285 - RNA, 19 nt, Homo sapiens
  misc_RNA (1)...(19): siRNA sense strand
gccaacaucucccuguaug

SEQ ID NO: 1357286 - RNA, 19 nt, Homo sapiens
  misc_RNA (1)...(19): siRNA sense strand
gccucuagcuggaaacaaa

SEQ ID NO: 1357287 - RNA, 19 nt, Homo sapiens
  misc_RNA (1)...(19): siRNA sense strand
gaaacugcgugcugguaca

SEQ ID NO: 1357288 - RNA, 19 nt, Homo sapiens
  misc_RNA (1)...(19): siRNA sense strand
gaagaagucccgggaguca

SEQ ID NO: 1357289 - RNA, 19 nt, Homo sapiens
  misc_RNA (1)...(19): siRNA sense strand
ggacucagacuacguuuac

SEQ ID NO: 1357290 - RNA, 19 nt, Homo sapiens
  misc_RNA (1)...(19): siRNA sense strand
ggaaguacaagaacagcaa

SEQ ID NO: 1357291 - RNA, 19 nt, Homo sapiens
  misc_RNA (1)...(19): siRNA sense strand
aggaguuuguggacuauua

SEQ ID NO: 1357292 - RNA, 19 nt, Homo sapiens
  misc_RNA (1)...(19): siRNA sense strand
caacaaagaugugguucac

SEQ ID NO: 1357293 - RNA, 19 nt, Homo sapiens
  misc_RNA (1)...(19): siRNA sense strand
gaaacugucauggguagaa

SEQ ID NO: 1357294 - RNA, 19 nt, Homo sapiens
  misc_RNA (1)...(19): siRNA sense strand
acgggaaacuacuccuuua

SEQ ID NO: 1357295 - RNA, 19 nt, Homo sapiens
  misc_RNA (1)...(19): siRNA sense strand
gcaagaagaaagggaagaa

SEQ ID NO: 1357296 - RNA, 19 nt, Homo sapiens
  misc_RNA (1)...(19): siRNA sense strand
ccaaguggaaguacaagaa

SEQ ID NO: 1357297 - RNA, 19 nt, Homo sapiens
  misc_RNA (1)...(19): siRNA sense strand
ggaaacaaagacaauaagu

SEQ ID NO: 1357298 - RNA, 19 nt, Homo sapiens
  misc_RNA (1)...(19): siRNA sense strand
gaaaacuacuggccagaug

SEQ ID NO: 1357299 - RNA, 19 nt, Homo sapiens
  misc_RNA (1)...(19): siRNA sense strand
gcucaagaucgacgaguuu

SEQ ID NO: 1357300 - RNA, 19 nt, Homo sapiens
  misc_RNA (1)...(19): siRNA sense strand
gcagaugagagcauaugaa

SEQ ID NO: 1357301 - RNA, 19 nt, Homo sapiens
  misc_RNA (1)...(19): siRNA sense strand
gcacacaggaagccauuca

SEQ ID NO: 1357302 - RNA, 19 nt, Homo sapiens
  misc_RNA (1)...(19): siRNA sense strand
gcaagcggguccucaacgu

SEQ ID NO: 1357303 - RNA, 19 nt, Homo sapiens
  misc_RNA (1)...(19): siRNA sense strand
gaacgggaaacuacuccuu

SEQ ID NO: 1357304 - RNA, 19 nt, Homo sapiens
  misc_RNA (1)...(19): siRNA sense strand
guacacggguggcuuccau

SEQ ID NO: 1357305 - RNA, 19 nt, Homo sapiens
  misc_RNA (1)...(19): siRNA sense strand
gagcuaaaauucucaaugg

SEQ ID NO: 1357306 - RNA, 19 nt, Homo sapiens
  misc_RNA (1)...(19): siRNA sense strand
gaaguggaaaggagguuga

SEQ ID NO: 1357307 - RNA, 19 nt, Homo sapiens
  misc_RNA (1)...(19): siRNA sense strand
ugaagagggcugccaagaa

SEQ ID NO: 1357308 - RNA, 19 nt, Homo sapiens
  misc_RNA (1)...(19): siRNA sense strand
gcccaucggugccaagaca

SEQ ID NO: 1357309 - RNA, 19 nt, Homo sapiens
  misc_RNA (1)...(19): siRNA sense strand
gagcaaaccaagagcaagu

SEQ ID NO: 1357310 - RNA, 19 nt, Homo sapiens
  misc_RNA (1)...(19): siRNA sense strand
gcaagaugaagcugaagga

SEQ ID NO: 1357311 - RNA, 19 nt, Homo sapiens
  misc_RNA (1)...(19): siRNA sense strand
cgcccgacaucgacauaua

SEQ ID NO: 1357312 - RNA, 19 nt, Homo sapiens
  misc_RNA (1)...(19): siRNA sense strand
gcaaugccagagucaagaa

SEQ ID NO: 1357313 - RNA, 19 nt, Homo sapiens
  misc_RNA (1)...(19): siRNA sense strand
gaaguacaagaacagcaaa

SEQ ID NO: 1357314 - RNA, 19 nt, Homo sapiens
  misc_RNA (1)...(19): siRNA sense strand
ccaaaacgcugaagcucaa

SEQ ID NO: 1357315 - RNA, 19 nt, Homo sapiens
  misc_RNA (1)...(19): siRNA sense strand
gaagcggaccuggcacaaa

SEQ ID NO: 1357316 - RNA, 19 nt, Homo sapiens
  misc_RNA (1)...(19): siRNA sense strand
ggaagaggagcagaagcua

SEQ ID NO: 1357317 - RNA, 19 nt, Homo sapiens
  misc_RNA (1)...(19): siRNA sense strand
gcuggaaauucgagagcaa

SEQ ID NO: 1357318 - RNA, 19 nt, Homo sapiens
  misc_RNA (1)...(19): siRNA sense strand
uucaaaggcucucacaaau

SEQ ID NO: 1357319 - RNA, 19 nt, Homo sapiens
  misc_RNA (1)...(19): siRNA sense strand
gaccaaguacugccuaauc

SEQ ID NO: 1357320 - RNA, 19 nt, Homo sapiens
  misc_RNA (1)...(19): siRNA sense strand
caaggacucagacuacguu

SEQ ID NO: 1357321 - RNA, 19 nt, Homo sapiens
  misc_RNA (1)...(19): siRNA sense strand
ggcaaacgacugcugaaga

SEQ ID NO: 1357322 - RNA, 19 nt, Homo sapiens
  misc_RNA (1)...(19): siRNA sense strand
gaaauucgagagcaaacca

SEQ ID NO: 1357323 - RNA, 19 nt, Homo sapiens
  misc_RNA (1)...(19): siRNA sense strand
ccggagcacuucaaaccuu

SEQ ID NO: 1357324 - RNA, 19 nt, Homo sapiens
  misc_RNA (1)...(19): siRNA sense strand
aaacugucauggguagaaa

SEQ ID NO: 1357325 - RNA, 19 nt, Homo sapiens
  misc_RNA (1)...(19): siRNA sense strand
aaagauggaggcaagaaga

SEQ ID NO: 1357326 - RNA, 19 nt, Homo sapiens
  misc_RNA (1)...(19): siRNA sense strand
uggcaagagugcaggcaaa

SEQ ID NO: 1357327 - RNA, 19 nt, Homo sapiens
  misc_RNA (1)...(19): siRNA sense strand
caaagacaauaaguucucu

SEQ ID NO: 1357328 - RNA, 19 nt, Homo sapiens
  misc_RNA (1)...(19): siRNA sense strand
gcuggaaacaaagacaaua

SEQ ID NO: 1357329 - RNA, 19 nt, Homo sapiens
  misc_RNA (1)...(19): siRNA sense strand
gcaagucagaggccaagug

SEQ ID NO: 1357330 - RNA, 19 nt, Homo sapiens
  misc_RNA (1)...(19): siRNA sense strand
aaaccaagagcaagucaga

SEQ ID NO: 1357331 - RNA, 19 nt, Homo sapiens
  misc_RNA (1)...(19): siRNA sense strand
ugagugugcccaacaaaga

SEQ ID NO: 1357332 - RNA, 19 nt, Homo sapiens
  misc_RNA (1)...(19): siRNA sense strand
ucaccaaccucgaguucuc

SEQ ID NO: 1357333 - RNA, 19 nt, Homo sapiens
  misc_RNA (1)...(19): siRNA sense strand
gagcagaagcuagagaagu

SEQ ID NO: 1357334 - RNA, 19 nt, Homo sapiens
  misc_RNA (1)...(19): siRNA sense strand
gagagcaaaccaagagcaa

SEQ ID NO: 1357335 - RNA, 19 nt, Homo sapiens
  misc_RNA (1)...(19): siRNA sense strand
gcaaggccacaaagagugu

SEQ ID NO: 1357336 - RNA, 19 nt, Homo sapiens
  misc_RNA (1)...(19): siRNA sense strand
gggcaaggccacaaagagu

SEQ ID NO: 1357337 - RNA, 19 nt, Homo sapiens
  misc_RNA (1)...(19): siRNA sense strand
cggccaacaucucccugua

SEQ ID NO: 1357338 - RNA, 19 nt, Homo sapiens
  misc_RNA (1)...(19): siRNA sense strand
ccaaagugaccaaguacug

SEQ ID NO: 1357339 - RNA, 19 nt, Homo sapiens
  misc_RNA (1)...(19): siRNA sense strand
caagagugcaggcaaacga

SEQ ID NO: 1357340 - RNA, 19 nt, Homo sapiens
  misc_RNA (1)...(19): siRNA sense strand
auucaaaggcucucacaaa

SEQ ID NO: 1357341 - RNA, 19 nt, Homo sapiens
  misc_RNA (1)...(19): siRNA sense strand
acaagugcaucgucaagca

SEQ ID NO: 1357342 - RNA, 19 nt, Homo sapiens
  misc_RNA (1)...(19): siRNA sense strand
ccacagcgagauguucuuu

SEQ ID NO: 1357343 - RNA, 19 nt, Homo sapiens
  misc_RNA (1)...(19): siRNA sense strand
ggacaguuacaccgacuuc

SEQ ID NO: 1357344 - RNA, 19 nt, Homo sapiens
  misc_RNA (1)...(19): siRNA sense strand
gagcauaugaaguggaaag

SEQ ID NO: 1357345 - RNA, 19 nt, Homo sapiens
  misc_RNA (1)...(19): siRNA sense strand
gagcagaaaagcaagaaaa

SEQ ID NO: 1357346 - RNA, 19 nt, Homo sapiens
  misc_RNA (1)...(19): siRNA sense strand
ggaacggaguguggaugug

SEQ ID NO: 1357347 - RNA, 19 nt, Homo sapiens
  misc_RNA (1)...(19): siRNA sense strand
cacaaagaguguccugagu

SEQ ID NO: 1357348 - RNA, 19 nt, Homo sapiens
  misc_RNA (1)...(19): siRNA sense strand
ccaaggaggcacugaccaa

SEQ ID NO: 1357349 - RNA, 19 nt, Homo sapiens
  misc_RNA (1)...(19): siRNA sense strand
caacaucucccuguaugag

SEQ ID NO: 1357350 - RNA, 19 nt, Homo sapiens
  misc_RNA (1)...(19): siRNA sense strand
cgucagaugagguguguga

SEQ ID NO: 1357351 - RNA, 19 nt, Homo sapiens
  misc_RNA (1)...(19): siRNA sense strand
agcccaaagugaccaagua

SEQ ID NO: 1357352 - RNA, 19 nt, Homo sapiens
  misc_RNA (1)...(19): siRNA sense strand
ggaugacggugagcucaag

SEQ ID NO: 1357353 - RNA, 19 nt, Homo sapiens
  misc_RNA (1)...(19): siRNA sense strand
augaguacgugucggauga

SEQ ID NO: 1357354 - RNA, 19 nt, Homo sapiens
  misc_RNA (1)...(19): siRNA sense strand
agucagaggccaaguggaa

SEQ ID NO: 1357355 - RNA, 19 nt, Homo sapiens
  misc_RNA (1)...(19): siRNA sense strand
caucgucuccaaacaacaa

SEQ ID NO: 1357356 - RNA, 19 nt, Homo sapiens
  misc_RNA (1)...(19): siRNA sense strand
acggugagcucaagaucga

SEQ ID NO: 1357357 - RNA, 19 nt, Homo sapiens
  misc_RNA (1)...(19): siRNA sense strand
aagcggaccuggcacaaac

SEQ ID NO: 1357358 - RNA, 19 nt, Homo sapiens
  misc_RNA (1)...(19): siRNA sense strand
guguggaugugacagaugu

SEQ ID NO: 1357359 - RNA, 19 nt, Homo sapiens
  misc_RNA (1)...(19): siRNA sense strand
gaagguauaugagcuguua

SEQ ID NO: 1357360 - RNA, 19 nt, Homo sapiens
  misc_RNA (1)...(19): siRNA sense strand
ccaaagagcucauaaaaga

SEQ ID NO: 1357361 - RNA, 19 nt, Homo sapiens
  misc_RNA (1)...(19): siRNA sense strand
ggagaaggguggcaaagga

SEQ ID NO: 1357362 - RNA, 19 nt, Homo sapiens
  misc_RNA (1)...(19): siRNA sense strand
caagauguauggugaguau

SEQ ID NO: 1357363 - RNA, 19 nt, Homo sapiens
  misc_RNA (1)...(19): siRNA sense strand
ccaaugagcuccugcaaac

SEQ ID NO: 1357364 - RNA, 19 nt, Homo sapiens
  misc_RNA (1)...(19): siRNA sense strand
caacaaacagggaagauga

SEQ ID NO: 1357365 - RNA, 19 nt, Homo sapiens
  misc_RNA (1)...(19): siRNA sense strand
ggacugaggaggagaagaa

SEQ ID NO: 1357366 - RNA, 19 nt, Homo sapiens
  misc_RNA (1)...(19): siRNA sense strand
gaagagaaggacagagaaa

SEQ ID NO: 1357367 - RNA, 19 nt, Homo sapiens
  misc_RNA (1)...(19): siRNA sense strand
aaagagagccugugauugu

SEQ ID NO: 1357368 - RNA, 19 nt, Homo sapiens
  misc_RNA (1)...(19): siRNA sense strand
cccaagagguugacaguga

SEQ ID NO: 1357369 - RNA, 19 nt, Homo sapiens
  misc_RNA (1)...(19): siRNA sense strand
caggagcccuucaauucua

SEQ ID NO: 1357370 - RNA, 19 nt, Homo sapiens
  misc_RNA (1)...(19): siRNA sense strand
ucucaaggacuaucuguua

SEQ ID NO: 1357371 - RNA, 19 nt, Homo sapiens
  misc_RNA (1)...(19): siRNA sense strand
ugaaagagagccugugauu

SEQ ID NO: 1357372 - RNA, 19 nt, Homo sapiens
  misc_RNA (1)...(19): siRNA sense strand
gugaguaugugaagaacuu

SEQ ID NO: 1357373 - RNA, 19 nt, Homo sapiens
  misc_RNA (1)...(19): siRNA sense strand
aacagacgcuggagacuuu

SEQ ID NO: 1357374 - RNA, 19 nt, Homo sapiens
  misc_RNA (1)...(19): siRNA sense strand
caaaagguguuucacauug

SEQ ID NO: 1357375 - RNA, 19 nt, Homo sapiens
  misc_RNA (1)...(19): siRNA sense strand
ggaccgcuauccacgcauu

SEQ ID NO: 1357376 - RNA, 19 nt, Homo sapiens
  misc_RNA (1)...(19): siRNA sense strand
uaacaucugcuccaucuau

SEQ ID NO: 1357377 - RNA, 19 nt, Homo sapiens
  misc_RNA (1)...(19): siRNA sense strand
gaacagacgcuggagacuu

SEQ ID NO: 1357378 - RNA, 19 nt, Homo sapiens
  misc_RNA (1)...(19): siRNA sense strand
gccaggagcccuucaauuc

SEQ ID NO: 1357379 - RNA, 19 nt, Homo sapiens
  misc_RNA (1)...(19): siRNA sense strand
gaaagagagccugugauug

SEQ ID NO: 1357380 - RNA, 19 nt, Homo sapiens
  misc_RNA (1)...(19): siRNA sense strand
ggaguugacugugcagcaa

SEQ ID NO: 1357381 - RNA, 19 nt, Homo sapiens
  misc_RNA (1)...(19): siRNA sense strand
gcuggagacuuucaaacug

SEQ ID NO: 1357382 - RNA, 19 nt, Homo sapiens
  misc_RNA (1)...(19): siRNA sense strand
ccuagagccucauccagaa

SEQ ID NO: 1357383 - RNA, 19 nt, Homo sapiens
  misc_RNA (1)...(19): siRNA sense strand
ucaacgaccgccuccuuua

SEQ ID NO: 1357384 - RNA, 19 nt, Homo sapiens
  misc_RNA (1)...(19): siRNA sense strand
aaauggagcgaaugcauaa

SEQ ID NO: 1357385 - RNA, 19 nt, Homo sapiens
  misc_RNA (1)...(19): siRNA sense strand
guagauggcauggagcuaa

SEQ ID NO: 1357386 - RNA, 19 nt, Homo sapiens
  misc_RNA (1)...(19): siRNA sense strand
caaagaaugggaccacuca

SEQ ID NO: 1357387 - RNA, 19 nt, Homo sapiens
  misc_RNA (1)...(19): siRNA sense strand
auaagcugcugaagguaua

SEQ ID NO: 1357388 - RNA, 19 nt, Homo sapiens
  misc_RNA (1)...(19): siRNA sense strand
ggaagagaaggacagagaa

SEQ ID NO: 1357389 - RNA, 19 nt, Homo sapiens
  misc_RNA (1)...(19): siRNA sense strand
caccucagcugguacuuca

SEQ ID NO: 1357390 - RNA, 19 nt, Homo sapiens
  misc_RNA (1)...(19): siRNA sense strand
caaggacuaucuguuaaag

SEQ ID NO: 1357391 - RNA, 19 nt, Homo sapiens
  misc_RNA (1)...(19): siRNA sense strand
ggagacauccugcagaaac

SEQ ID NO: 1357392 - RNA, 19 nt, Homo sapiens
  misc_RNA (1)...(19): siRNA sense strand
caagaccgauaccucauac

SEQ ID NO: 1357393 - RNA, 19 nt, Homo sapiens
  misc_RNA (1)...(19): siRNA sense strand
cgggacagcggcauugaua

SEQ ID NO: 1357394 - RNA, 19 nt, Homo sapiens
  misc_RNA (1)...(19): siRNA sense strand
uagauggcauggagcuaaa

SEQ ID NO: 1357395 - RNA, 19 nt, Homo sapiens
  misc_RNA (1)...(19): siRNA sense strand
gggcacgcauugauguaga

SEQ ID NO: 1357396 - RNA, 19 nt, Homo sapiens
  misc_RNA (1)...(19): siRNA sense strand
ggaccacucaagaccgaua

SEQ ID NO: 1357397 - RNA, 19 nt, Homo sapiens
  misc_RNA (1)...(19): siRNA sense strand
ucuaacaucugcuccaucu

SEQ ID NO: 1357398 - RNA, 19 nt, Homo sapiens
  misc_RNA (1)...(19): siRNA sense strand
accgauaccucauacuauu

SEQ ID NO: 1357399 - RNA, 19 nt, Homo sapiens
  misc_RNA (1)...(19): siRNA sense strand
ucaagaccgauaccucaua

SEQ ID NO: 1357400 - RNA, 19 nt, Homo sapiens
  misc_RNA (1)...(19): siRNA sense strand
ugcauaagcugcugaaggu

SEQ ID NO: 1357401 - RNA, 19 nt, Homo sapiens
  misc_RNA (1)...(19): siRNA sense strand
uugagaaguuugaaagaga

SEQ ID NO: 1357402 - RNA, 19 nt, Homo sapiens
  misc_RNA (1)...(19): siRNA sense strand
cagcagagcacucgaaugc

SEQ ID NO: 1357403 - RNA, 19 nt, Homo sapiens
  misc_RNA (1)...(19): siRNA sense strand
cucaaggacuaucuguuaa

SEQ ID NO: 1357404 - RNA, 19 nt, Homo sapiens
  misc_RNA (1)...(19): siRNA sense strand
cagcguccuucaccacuga

SEQ ID NO: 1357405 - RNA, 19 nt, Homo sapiens
  misc_RNA (1)...(19): siRNA sense strand
uccaugaggugcagaagga

SEQ ID NO: 1357406 - RNA, 19 nt, Homo sapiens
  misc_RNA (1)...(19): siRNA sense strand
cacggcaucuucucuaaca

SEQ ID NO: 1357407 - RNA, 19 nt, Homo sapiens
  misc_RNA (1)...(19): siRNA sense strand
ccacccuccugaagcauga

SEQ ID NO: 1357408 - RNA, 19 nt, Homo sapiens
  misc_RNA (1)...(19): siRNA sense strand
gaccgauaccucauacuau

SEQ ID NO: 1357409 - RNA, 19 nt, Homo sapiens
  misc_RNA (1)...(19): siRNA sense strand
agaccgauaccucauacua

SEQ ID NO: 1357410 - RNA, 19 nt, Homo sapiens
  misc_RNA (1)...(19): siRNA sense strand
ccaccaaagagcucauaaa

SEQ ID NO: 1357411 - RNA, 19 nt, Homo sapiens
  misc_RNA (1)...(19): siRNA sense strand
ucaaggacuaucuguuaaa

SEQ ID NO: 1357412 - RNA, 19 nt, Homo sapiens
  misc_RNA (1)...(19): siRNA sense strand
gagacauccugcagaaacu

SEQ ID NO: 1357413 - RNA, 19 nt, Homo sapiens
  misc_RNA (1)...(19): siRNA sense strand
ggaggaaugggaccgcuau

SEQ ID NO: 1357414 - RNA, 19 nt, Homo sapiens
  misc_RNA (1)...(19): siRNA sense strand
ucaauucuaucaccaaacg

SEQ ID NO: 1357415 - RNA, 19 nt, Homo sapiens
  misc_RNA (1)...(19): siRNA sense strand
cauaagcugcugaagguau

SEQ ID NO: 1357416 - RNA, 19 nt, Homo sapiens
  misc_RNA (1)...(19): siRNA sense strand
gcagagaacagcgucaucu

SEQ ID NO: 1357417 - RNA, 19 nt, Homo sapiens
  misc_RNA (1)...(19): siRNA sense strand
gcaaaagguguuucacauu

SEQ ID NO: 1357418 - RNA, 19 nt, Homo sapiens
  misc_RNA (1)...(19): siRNA sense strand
ccuuggugcuguauaucua

SEQ ID NO: 1357419 - RNA, 19 nt, Homo sapiens
  misc_RNA (1)...(19): siRNA sense strand
ugugugcacugauugcuau

SEQ ID NO: 1357420 - RNA, 19 nt, Homo sapiens
  misc_RNA (1)...(19): siRNA sense strand
cuucaauucuaucaccaaa

SEQ ID NO: 1357421 - RNA, 19 nt, Homo sapiens
  misc_RNA (1)...(19): siRNA sense strand
agaaugggaccacucaaga

SEQ ID NO: 1357422 - RNA, 19 nt, Homo sapiens
  misc_RNA (1)...(19): siRNA sense strand
gugauugucgccucggaua

SEQ ID NO: 1357423 - RNA, 19 nt, Homo sapiens
  misc_RNA (1)...(19): siRNA sense strand
gagaagcgcauggaggaau

SEQ ID NO: 1357424 - RNA, 19 nt, Homo sapiens
  misc_RNA (1)...(19): siRNA sense strand
ggaaugggaccgcuaucca

SEQ ID NO: 1357425 - RNA, 19 nt, Homo sapiens
  misc_RNA (1)...(19): siRNA sense strand
gagcgcuccacccaguuua

SEQ ID NO: 1357426 - RNA, 19 nt, Homo sapiens
  misc_RNA (1)...(19): siRNA sense strand
gauugagaaguuugaaaga

SEQ ID NO: 1357427 - RNA, 19 nt, Homo sapiens
  misc_RNA (1)...(19): siRNA sense strand
gauguauggugaguaugug

SEQ ID NO: 1357428 - RNA, 19 nt, Homo sapiens
  misc_RNA (1)...(19): siRNA sense strand
gagaaggccuacguuucca

SEQ ID NO: 1357429 - RNA, 19 nt, Homo sapiens
  misc_RNA (1)...(19): siRNA sense strand
uuggagacauccugcagaa

SEQ ID NO: 1357430 - RNA, 19 nt, Homo sapiens
  misc_RNA (1)...(19): siRNA sense strand
gccaaugagcuccugcaaa

SEQ ID NO: 1357431 - RNA, 19 nt, Homo sapiens
  misc_RNA (1)...(19): siRNA sense strand
aggcaccgguggcugcuuu

SEQ ID NO: 1357432 - RNA, 19 nt, Homo sapiens
  misc_RNA (1)...(19): siRNA sense strand
gaacccuuggugcuguaua

SEQ ID NO: 1357433 - RNA, 19 nt, Homo sapiens
  misc_RNA (1)...(19): siRNA sense strand
gugcacugauugcuaugug

SEQ ID NO: 1357434 - RNA, 19 nt, Homo sapiens
  misc_RNA (1)...(19): siRNA sense strand
gaaaaggaagucaccaugu

SEQ ID NO: 1357435 - RNA, 19 nt, Homo sapiens
  misc_RNA (1)...(19): siRNA sense strand
caacuccacccuccugaag

SEQ ID NO: 1357436 - RNA, 19 nt, Homo sapiens
  misc_RNA (1)...(19): siRNA sense strand
ccacauccuuaagcuguca

SEQ ID NO: 1357437 - RNA, 19 nt, Homo sapiens
  misc_RNA (1)...(19): siRNA sense strand
gaaugcauaagcugcugaa

SEQ ID NO: 1357438 - RNA, 19 nt, Homo sapiens
  misc_RNA (1)...(19): siRNA sense strand
agaagcgcauggaggaaug

SEQ ID NO: 1357439 - RNA, 19 nt, Homo sapiens
  misc_RNA (1)...(19): siRNA sense strand
ggaggaggaggaagagaag

SEQ ID NO: 1357440 - RNA, 19 nt, Homo sapiens
  misc_RNA (1)...(19): siRNA sense strand
gagaaggguggcaaaggau

SEQ ID NO: 1357441 - RNA, 19 nt, Homo sapiens
  misc_RNA (1)...(19): siRNA sense strand
gggcccugcgcuucucuua

SEQ ID NO: 1357442 - RNA, 19 nt, Homo sapiens
  misc_RNA (1)...(19): siRNA sense strand
aaccgugugugcacugauu

SEQ ID NO: 1357443 - RNA, 19 nt, Homo sapiens
  misc_RNA (1)...(19): siRNA sense strand
agaccugcuucgucaguga

SEQ ID NO: 1357444 - RNA, 19 nt, Homo sapiens
  misc_RNA (1)...(19): siRNA sense strand
caaacagggaagaugaaga

SEQ ID NO: 1357445 - RNA, 19 nt, Homo sapiens
  misc_RNA (1)...(19): siRNA sense strand
ggacagcggcauugauagc

SEQ ID NO: 1357446 - RNA, 19 nt, Homo sapiens
  misc_RNA (1)...(19): siRNA sense strand
ggaggaagagaaggacaga

SEQ ID NO: 1357447 - RNA, 19 nt, Homo sapiens
  misc_RNA (1)...(19): siRNA sense strand
gaaugcugccauccgcaaa

SEQ ID NO: 1357448 - RNA, 19 nt, Homo sapiens
  misc_RNA (1)...(19): siRNA sense strand
cuggagacuuucaaacugu

SEQ ID NO: 1357449 - RNA, 19 nt, Homo sapiens
  misc_RNA (1)...(19): siRNA sense strand
caacgaccgccuccuuuac

SEQ ID NO: 1357450 - RNA, 19 nt, Homo sapiens
  misc_RNA (1)...(19): siRNA sense strand
gauugucgccucggauaga

SEQ ID NO: 1357451 - RNA, 19 nt, Homo sapiens
  misc_RNA (1)...(19): siRNA sense strand
agagccaccucagcuggua

SEQ ID NO: 1357452 - RNA, 19 nt, Homo sapiens
  misc_RNA (1)...(19): siRNA sense strand
aaaaggaagucaccaugug

SEQ ID NO: 1357453 - RNA, 19 nt, Homo sapiens
  misc_RNA (1)...(19): siRNA sense strand
gaagcucggaaccgcaguu

SEQ ID NO: 1357454 - RNA, 19 nt, Homo sapiens
  misc_RNA (1)...(19): siRNA sense strand
ggagaccugcuucgucagu

SEQ ID NO: 1357455 - RNA, 19 nt, Homo sapiens
  misc_RNA (1)...(19): siRNA sense strand
aaacagggaagaugaagac

SEQ ID NO: 1357456 - RNA, 19 nt, Homo sapiens
  misc_RNA (1)...(19): siRNA sense strand
cagcaaggaugcccaaaag

SEQ ID NO: 1357457 - RNA, 19 nt, Homo sapiens
  misc_RNA (1)...(19): siRNA sense strand
aacaucugcuccaucuauu

SEQ ID NO: 1357458 - RNA, 19 nt, Homo sapiens
  misc_RNA (1)...(19): siRNA sense strand
caaccgggacagcggcauu

SEQ ID NO: 1357459 - RNA, 19 nt, Homo sapiens
  misc_RNA (1)...(19): siRNA sense strand
gagaaaggauggcaaagau

SEQ ID NO: 1357460 - RNA, 19 nt, Homo sapiens
  misc_RNA (1)...(19): siRNA sense strand
gcaaagauccaaaucaguu

SEQ ID NO: 1357461 - RNA, 19 nt, Homo sapiens
  misc_RNA (1)...(19): siRNA sense strand
caaacgggcugcagagaug

SEQ ID NO: 1357462 - RNA, 19 nt, Homo sapiens
  misc_RNA (1)...(19): siRNA sense strand
agauggagcuucaggcaaa

SEQ ID NO: 1357463 - RNA, 19 nt, Homo sapiens
  misc_RNA (1)...(19): siRNA sense strand
gacauucccuuggaccuuu

SEQ ID NO: 1357464 - RNA, 19 nt, Homo sapiens
  misc_RNA (1)...(19): siRNA sense strand
gcauggacauucccuugga

SEQ ID NO: 1357465 - RNA, 19 nt, Homo sapiens
  misc_RNA (1)...(19): siRNA sense strand
acagacaccucucucaugu

SEQ ID NO: 1357466 - RNA, 19 nt, Homo sapiens
  misc_RNA (1)...(19): siRNA sense strand
aggcaaaacuuacagcuua

SEQ ID NO: 1357467 - RNA, 19 nt, Homo sapiens
  misc_RNA (1)...(19): siRNA sense strand
ucagugaucugccauacca

SEQ ID NO: 1357468 - RNA, 19 nt, Homo sapiens
  misc_RNA (1)...(19): siRNA sense strand
ggacuucaguggauuucag

SEQ ID NO: 1357469 - RNA, 19 nt, Homo sapiens
  misc_RNA (1)...(19): siRNA sense strand
acacagauauacagcagau

SEQ ID NO: 1357470 - RNA, 19 nt, Homo sapiens
  misc_RNA (1)...(19): siRNA sense strand
ugacugcauugaaagaugu

SEQ ID NO: 1357471 - RNA, 19 nt, Homo sapiens
  misc_RNA (1)...(19): siRNA sense strand
cugcagagauggagcuuca

SEQ ID NO: 1357472 - RNA, 19 nt, Homo sapiens
  misc_RNA (1)...(19): siRNA sense strand
agacaccucucucauguac

SEQ ID NO: 1357473 - RNA, 19 nt, Homo sapiens
  misc_RNA (1)...(19): siRNA sense strand
cacugugacugcauugaaa

SEQ ID NO: 1357474 - RNA, 19 nt, Homo sapiens
  misc_RNA (1)...(19): siRNA sense strand
ucccugacaugcugagaaa

SEQ ID NO: 1357475 - RNA, 19 nt, Homo sapiens
  misc_RNA (1)...(19): siRNA sense strand
gucuguaacugguucauca

SEQ ID NO: 1357476 - RNA, 19 nt, Homo sapiens
  misc_RNA (1)...(19): siRNA sense strand
uggcaaagauccaaaucag

SEQ ID NO: 1357477 - RNA, 19 nt, Homo sapiens
  misc_RNA (1)...(19): siRNA sense strand
gcugagaaaggauggcaaa

SEQ ID NO: 1357478 - RNA, 19 nt, Homo sapiens
  misc_RNA (1)...(19): siRNA sense strand
ugagaaaggauggcaaaga

SEQ ID NO: 1357479 - RNA, 19 nt, Homo sapiens
  misc_RNA (1)...(19): siRNA sense strand
gaggacagcauggacauuc

SEQ ID NO: 1357480 - RNA, 19 nt, Homo sapiens
  misc_RNA (1)...(19): siRNA sense strand
ggacauucccuuggaccuu

SEQ ID NO: 1357481 - RNA, 19 nt, Homo sapiens
  misc_RNA (1)...(19): siRNA sense strand
gugacugcauugaaagaug

SEQ ID NO: 1357482 - RNA, 19 nt, Homo sapiens
  misc_RNA (1)...(19): siRNA sense strand
uaugagcaccguuacaaug

SEQ ID NO: 1357483 - RNA, 19 nt, Homo sapiens
  misc_RNA (1)...(19): siRNA sense strand
ccacugugacugcauugaa

SEQ ID NO: 1357484 - RNA, 19 nt, Homo sapiens
  misc_RNA (1)...(19): siRNA sense strand
ccuuggaccuuucuucauc

SEQ ID NO: 1357485 - RNA, 19 nt, Homo sapiens
  misc_RNA (1)...(19): siRNA sense strand
uuacaaugccuauccuuca

SEQ ID NO: 1357486 - RNA, 19 nt, Homo sapiens
  misc_RNA (1)...(19): siRNA sense strand
gugcagauucuucgggauu

SEQ ID NO: 1357487 - RNA, 19 nt, Homo sapiens
  misc_RNA (1)...(19): siRNA sense strand
aaccaggacuucaguggau

SEQ ID NO: 1357488 - RNA, 19 nt, Homo sapiens
  misc_RNA (1)...(19): siRNA sense strand
cagcaaacacaccugucua

SEQ ID NO: 1357489 - RNA, 19 nt, Homo sapiens
  misc_RNA (1)...(19): siRNA sense strand
caaagauccaaaucaguuc

SEQ ID NO: 1357490 - RNA, 19 nt, Homo sapiens
  misc_RNA (1)...(19): siRNA sense strand
gagcuucaggcaaaacuua

SEQ ID NO: 1357491 - RNA, 19 nt, Homo sapiens
  misc_RNA (1)...(19): siRNA sense strand
ggacaaaacacagauauac

SEQ ID NO: 1357492 - RNA, 19 nt, Homo sapiens
  misc_RNA (1)...(19): siRNA sense strand
acagauauacagcagauag

SEQ ID NO: 1357493 - RNA, 19 nt, Homo sapiens
  misc_RNA (1)...(19): siRNA sense strand
auaccacugugacugcauu

SEQ ID NO: 1357494 - RNA, 19 nt, Homo sapiens
  misc_RNA (1)...(19): siRNA sense strand
ggcaaaacuuacagcuuaa

SEQ ID NO: 1357495 - RNA, 19 nt, Homo sapiens
  misc_RNA (1)...(19): siRNA sense strand
cacagacaccucucucaug

SEQ ID NO: 1357496 - RNA, 19 nt, Homo sapiens
  misc_RNA (1)...(19): siRNA sense strand
ucacagacaccucucucau

SEQ ID NO: 1357497 - RNA, 19 nt, Homo sapiens
  misc_RNA (1)...(19): siRNA sense strand
ucaaacgggcugcagagau

SEQ ID NO: 1357498 - RNA, 19 nt, Homo sapiens
  misc_RNA (1)...(19): siRNA sense strand
guaaaucuggaccaaguac

SEQ ID NO: 1357499 - RNA, 19 nt, Homo sapiens
  misc_RNA (1)...(19): siRNA sense strand
gauccaaaucaguucacaa

SEQ ID NO: 1357500 - RNA, 19 nt, Homo sapiens
  misc_RNA (1)...(19): siRNA sense strand
ccaggacuucaguggauuu

SEQ ID NO: 1357501 - RNA, 19 nt, Homo sapiens
  misc_RNA (1)...(19): siRNA sense strand
gcagauucuucgggauugg

SEQ ID NO: 1357502 - RNA, 19 nt, Homo sapiens
  misc_RNA (1)...(19): siRNA sense strand
gaugucccuuucucucucu

SEQ ID NO: 1357503 - RNA, 19 nt, Homo sapiens
  misc_RNA (1)...(19): siRNA sense strand
ggaccucaaccaggacuuc

SEQ ID NO: 1357504 - RNA, 19 nt, Homo sapiens
  misc_RNA (1)...(19): siRNA sense strand
ggcuguaugagcaccguua

SEQ ID NO: 1357505 - RNA, 19 nt, Homo sapiens
  misc_RNA (1)...(19): siRNA sense strand
guaugagcaccguuacaau

SEQ ID NO: 1357506 - RNA, 19 nt, Homo sapiens
  misc_RNA (1)...(19): siRNA sense strand
caguggauuucagcuucua

SEQ ID NO: 1357507 - RNA, 19 nt, Homo sapiens
  misc_RNA (1)...(19): siRNA sense strand
gagaaaggauggcaaagau

SEQ ID NO: 1357508 - RNA, 19 nt, Homo sapiens
  misc_RNA (1)...(19): siRNA sense strand
gcaaagauccaaaucaguu

SEQ ID NO: 1357509 - RNA, 19 nt, Homo sapiens
  misc_RNA (1)...(19): siRNA sense strand
caaacgggcugcagagaug

SEQ ID NO: 1357510 - RNA, 19 nt, Homo sapiens
  misc_RNA (1)...(19): siRNA sense strand
agauggagcuucaggcaaa

SEQ ID NO: 1357511 - RNA, 19 nt, Homo sapiens
  misc_RNA (1)...(19): siRNA sense strand
gacauucccuuggaccuuu

SEQ ID NO: 1357512 - RNA, 19 nt, Homo sapiens
  misc_RNA (1)...(19): siRNA sense strand
gcauggacauucccuugga

SEQ ID NO: 1357513 - RNA, 19 nt, Homo sapiens
  misc_RNA (1)...(19): siRNA sense strand
acagacaccucucucaugu

SEQ ID NO: 1357514 - RNA, 19 nt, Homo sapiens
  misc_RNA (1)...(19): siRNA sense strand
aggcaaaacuuacagcuua

SEQ ID NO: 1357515 - RNA, 19 nt, Homo sapiens
  misc_RNA (1)...(19): siRNA sense strand
ucagugaucugccauacca

SEQ ID NO: 1357516 - RNA, 19 nt, Homo sapiens
  misc_RNA (1)...(19): siRNA sense strand
ggacuucaguggauuucag

SEQ ID NO: 1357517 - RNA, 19 nt, Homo sapiens
  misc_RNA (1)...(19): siRNA sense strand
acacagauauacagcagau

SEQ ID NO: 1357518 - RNA, 19 nt, Homo sapiens
  misc_RNA (1)...(19): siRNA sense strand
ugacugcauugaaagaugu

SEQ ID NO: 1357519 - RNA, 19 nt, Homo sapiens
  misc_RNA (1)...(19): siRNA sense strand
cugcagagauggagcuuca

SEQ ID NO: 1357520 - RNA, 19 nt, Homo sapiens
  misc_RNA (1)...(19): siRNA sense strand
agacaccucucucauguac

SEQ ID NO: 1357521 - RNA, 19 nt, Homo sapiens
  misc_RNA (1)...(19): siRNA sense strand
cacugugacugcauugaaa

SEQ ID NO: 1357522 - RNA, 19 nt, Homo sapiens
  misc_RNA (1)...(19): siRNA sense strand
ucccugacaugcugagaaa

SEQ ID NO: 1357523 - RNA, 19 nt, Homo sapiens
  misc_RNA (1)...(19): siRNA sense strand
gucuguaacugguucauca

SEQ ID NO: 1357524 - RNA, 19 nt, Homo sapiens
  misc_RNA (1)...(19): siRNA sense strand
uggcaaagauccaaaucag

SEQ ID NO: 1357525 - RNA, 19 nt, Homo sapiens
  misc_RNA (1)...(19): siRNA sense strand
gcugagaaaggauggcaaa

SEQ ID NO: 1357526 - RNA, 19 nt, Homo sapiens
  misc_RNA (1)...(19): siRNA sense strand
ugagaaaggauggcaaaga

SEQ ID NO: 1357527 - RNA, 19 nt, Homo sapiens
  misc_RNA (1)...(19): siRNA sense strand
gaggacagcauggacauuc

SEQ ID NO: 1357528 - RNA, 19 nt, Homo sapiens
  misc_RNA (1)...(19): siRNA sense strand
ggacauucccuuggaccuu

SEQ ID NO: 1357529 - RNA, 19 nt, Homo sapiens
  misc_RNA (1)...(19): siRNA sense strand
gugacugcauugaaagaug

SEQ ID NO: 1357530 - RNA, 19 nt, Homo sapiens
  misc_RNA (1)...(19): siRNA sense strand
uaugagcaccguuacaaug

SEQ ID NO: 1357531 - RNA, 19 nt, Homo sapiens
  misc_RNA (1)...(19): siRNA sense strand
ccacugugacugcauugaa

SEQ ID NO: 1357532 - RNA, 19 nt, Homo sapiens
  misc_RNA (1)...(19): siRNA sense strand
ccuuggaccuuucuucauc

SEQ ID NO: 1357533 - RNA, 19 nt, Homo sapiens
  misc_RNA (1)...(19): siRNA sense strand
uuacaaugccuauccuuca

SEQ ID NO: 1357534 - RNA, 19 nt, Homo sapiens
  misc_RNA (1)...(19): siRNA sense strand
gugcagauucuucgggauu

SEQ ID NO: 1357535 - RNA, 19 nt, Homo sapiens
  misc_RNA (1)...(19): siRNA sense strand
aaccaggacuucaguggau

SEQ ID NO: 1357536 - RNA, 19 nt, Homo sapiens
  misc_RNA (1)...(19): siRNA sense strand
cagcaaacacaccugucua

SEQ ID NO: 1357537 - RNA, 19 nt, Homo sapiens
  misc_RNA (1)...(19): siRNA sense strand
caaagauccaaaucaguuc

SEQ ID NO: 1357538 - RNA, 19 nt, Homo sapiens
  misc_RNA (1)...(19): siRNA sense strand
gagcuucaggcaaaacuua

SEQ ID NO: 1357539 - RNA, 19 nt, Homo sapiens
  misc_RNA (1)...(19): siRNA sense strand
ggacaaaacacagauauac

SEQ ID NO: 1357540 - RNA, 19 nt, Homo sapiens
  misc_RNA (1)...(19): siRNA sense strand
acagauauacagcagauag

SEQ ID NO: 1357541 - RNA, 19 nt, Homo sapiens
  misc_RNA (1)...(19): siRNA sense strand
auaccacugugacugcauu

SEQ ID NO: 1357542 - RNA, 19 nt, Homo sapiens
  misc_RNA (1)...(19): siRNA sense strand
ggcaaaacuuacagcuuaa

SEQ ID NO: 1357543 - RNA, 19 nt, Homo sapiens
  misc_RNA (1)...(19): siRNA sense strand
cacagacaccucucucaug

SEQ ID NO: 1357544 - RNA, 19 nt, Homo sapiens
  misc_RNA (1)...(19): siRNA sense strand
ucacagacaccucucucau

SEQ ID NO: 1357545 - RNA, 19 nt, Homo sapiens
  misc_RNA (1)...(19): siRNA sense strand
ucaaacgggcugcagagau

SEQ ID NO: 1357546 - RNA, 19 nt, Homo sapiens
  misc_RNA (1)...(19): siRNA sense strand
guaaaucuggaccaaguac

SEQ ID NO: 1357547 - RNA, 19 nt, Homo sapiens
  misc_RNA (1)...(19): siRNA sense strand
gauccaaaucaguucacaa

SEQ ID NO: 1357548 - RNA, 19 nt, Homo sapiens
  misc_RNA (1)...(19): siRNA sense strand
ccaggacuucaguggauuu

SEQ ID NO: 1357549 - RNA, 19 nt, Homo sapiens
  misc_RNA (1)...(19): siRNA sense strand
gcagauucuucgggauugg

SEQ ID NO: 1357550 - RNA, 19 nt, Homo sapiens
  misc_RNA (1)...(19): siRNA sense strand
gaugucccuuucucucucu

SEQ ID NO: 1357551 - RNA, 19 nt, Homo sapiens
  misc_RNA (1)...(19): siRNA sense strand
ggaccucaaccaggacuuc

SEQ ID NO: 1357552 - RNA, 19 nt, Homo sapiens
  misc_RNA (1)...(19): siRNA sense strand
ggcuguaugagcaccguua

SEQ ID NO: 1357553 - RNA, 19 nt, Homo sapiens
  misc_RNA (1)...(19): siRNA sense strand
guaugagcaccguuacaau

SEQ ID NO: 1357554 - RNA, 19 nt, Homo sapiens
  misc_RNA (1)...(19): siRNA sense strand
caguggauuucagcuucua

SEQ ID NO: 1357555 - RNA, 19 nt, Homo sapiens
  misc_RNA (1)...(19): siRNA sense strand
gagaaaggauggcaaagau

SEQ ID NO: 1357556 - RNA, 19 nt, Homo sapiens
  misc_RNA (1)...(19): siRNA sense strand
gcaaagauccaaaucaguu

SEQ ID NO: 1357557 - RNA, 19 nt, Homo sapiens
  misc_RNA (1)...(19): siRNA sense strand
caaacgggcugcagagaug

SEQ ID NO: 1357558 - RNA, 19 nt, Homo sapiens
  misc_RNA (1)...(19): siRNA sense strand
agauggagcuucaggcaaa

SEQ ID NO: 1357559 - RNA, 19 nt, Homo sapiens
  misc_RNA (1)...(19): siRNA sense strand
gacauucccuuggaccuuu

SEQ ID NO: 1357560 - RNA, 19 nt, Homo sapiens
  misc_RNA (1)...(19): siRNA sense strand
gcauggacauucccuugga

SEQ ID NO: 1357561 - RNA, 19 nt, Homo sapiens
  misc_RNA (1)...(19): siRNA sense strand
acagacaccucucucaugu

SEQ ID NO: 1357562 - RNA, 19 nt, Homo sapiens
  misc_RNA (1)...(19): siRNA sense strand
aggcaaaacuuacagcuua

SEQ ID NO: 1357563 - RNA, 19 nt, Homo sapiens
  misc_RNA (1)...(19): siRNA sense strand
ucagugaucugccauacca

SEQ ID NO: 1357564 - RNA, 19 nt, Homo sapiens
  misc_RNA (1)...(19): siRNA sense strand
ggacuucaguggauuucag

SEQ ID NO: 1357565 - RNA, 19 nt, Homo sapiens
  misc_RNA (1)...(19): siRNA sense strand
acacagauauacagcagau

SEQ ID NO: 1357566 - RNA, 19 nt, Homo sapiens
  misc_RNA (1)...(19): siRNA sense strand
ugacugcauugaaagaugu

SEQ ID NO: 1357567 - RNA, 19 nt, Homo sapiens
  misc_RNA (1)...(19): siRNA sense strand
cugcagagauggagcuuca

SEQ ID NO: 1357568 - RNA, 19 nt, Homo sapiens
  misc_RNA (1)...(19): siRNA sense strand
agacaccucucucauguac

SEQ ID NO: 1357569 - RNA, 19 nt, Homo sapiens
  misc_RNA (1)...(19): siRNA sense strand
cacugugacugcauugaaa

SEQ ID NO: 1357570 - RNA, 19 nt, Homo sapiens
  misc_RNA (1)...(19): siRNA sense strand
ucccugacaugcugagaaa

SEQ ID NO: 1357571 - RNA, 19 nt, Homo sapiens
  misc_RNA (1)...(19): siRNA sense strand
gucuguaacugguucauca

SEQ ID NO: 1357572 - RNA, 19 nt, Homo sapiens
  misc_RNA (1)...(19): siRNA sense strand
uggcaaagauccaaaucag

SEQ ID NO: 1357573 - RNA, 19 nt, Homo sapiens
  misc_RNA (1)...(19): siRNA sense strand
gcugagaaaggauggcaaa

SEQ ID NO: 1357574 - RNA, 19 nt, Homo sapiens
  misc_RNA (1)...(19): siRNA sense strand
ugagaaaggauggcaaaga

SEQ ID NO: 1357575 - RNA, 19 nt, Homo sapiens
  misc_RNA (1)...(19): siRNA sense strand
gaggacagcauggacauuc

SEQ ID NO: 1357576 - RNA, 19 nt, Homo sapiens
  misc_RNA (1)...(19): siRNA sense strand
ggacauucccuuggaccuu

SEQ ID NO: 1357577 - RNA, 19 nt, Homo sapiens
  misc_RNA (1)...(19): siRNA sense strand
gugacugcauugaaagaug

SEQ ID NO: 1357578 - RNA, 19 nt, Homo sapiens
  misc_RNA (1)...(19): siRNA sense strand
uaugagcaccguuacaaug

SEQ ID NO: 1357579 - RNA, 19 nt, Homo sapiens
  misc_RNA (1)...(19): siRNA sense strand
ccacugugacugcauugaa

SEQ ID NO: 1357580 - RNA, 19 nt, Homo sapiens
  misc_RNA (1)...(19): siRNA sense strand
ccuuggaccuuucuucauc

SEQ ID NO: 1357581 - RNA, 19 nt, Homo sapiens
  misc_RNA (1)...(19): siRNA sense strand
uuacaaugccuauccuuca

SEQ ID NO: 1357582 - RNA, 19 nt, Homo sapiens
  misc_RNA (1)...(19): siRNA sense strand
gugcagauucuucgggauu

SEQ ID NO: 1357583 - RNA, 19 nt, Homo sapiens
  misc_RNA (1)...(19): siRNA sense strand
aaccaggacuucaguggau

SEQ ID NO: 1357584 - RNA, 19 nt, Homo sapiens
  misc_RNA (1)...(19): siRNA sense strand
cagcaaacacaccugucua

SEQ ID NO: 1357585 - RNA, 19 nt, Homo sapiens
  misc_RNA (1)...(19): siRNA sense strand
caaagauccaaaucaguuc

SEQ ID NO: 1357586 - RNA, 19 nt, Homo sapiens
  misc_RNA (1)...(19): siRNA sense strand
gagcuucaggcaaaacuua

SEQ ID NO: 1357587 - RNA, 19 nt, Homo sapiens
  misc_RNA (1)...(19): siRNA sense strand
ggacaaaacacagauauac

SEQ ID NO: 1357588 - RNA, 19 nt, Homo sapiens
  misc_RNA (1)...(19): siRNA sense strand
acagauauacagcagauag

SEQ ID NO: 1357589 - RNA, 19 nt, Homo sapiens
  misc_RNA (1)...(19): siRNA sense strand
auaccacugugacugcauu

SEQ ID NO: 1357590 - RNA, 19 nt, Homo sapiens
  misc_RNA (1)...(19): siRNA sense strand
ggcaaaacuuacagcuuaa

SEQ ID NO: 1357591 - RNA, 19 nt, Homo sapiens
  misc_RNA (1)...(19): siRNA sense strand
cacagacaccucucucaug

SEQ ID NO: 1357592 - RNA, 19 nt, Homo sapiens
  misc_RNA (1)...(19): siRNA sense strand
ucacagacaccucucucau

SEQ ID NO: 1357593 - RNA, 19 nt, Homo sapiens
  misc_RNA (1)...(19): siRNA sense strand
ucaaacgggcugcagagau

SEQ ID NO: 1357594 - RNA, 19 nt, Homo sapiens
  misc_RNA (1)...(19): siRNA sense strand
guaaaucuggaccaaguac

SEQ ID NO: 1357595 - RNA, 19 nt, Homo sapiens
  misc_RNA (1)...(19): siRNA sense strand
gauccaaaucaguucacaa

SEQ ID NO: 1357596 - RNA, 19 nt, Homo sapiens
  misc_RNA (1)...(19): siRNA sense strand
ccaggacuucaguggauuu

SEQ ID NO: 1357597 - RNA, 19 nt, Homo sapiens
  misc_RNA (1)...(19): siRNA sense strand
gcagauucuucgggauugg

SEQ ID NO: 1357598 - RNA, 19 nt, Homo sapiens
  misc_RNA (1)...(19): siRNA sense strand
gaugucccuuucucucucu

SEQ ID NO: 1357599 - RNA, 19 nt, Homo sapiens
  misc_RNA (1)...(19): siRNA sense strand
ggaccucaaccaggacuuc

SEQ ID NO: 1357600 - RNA, 19 nt, Homo sapiens
  misc_RNA (1)...(19): siRNA sense strand
ggcuguaugagcaccguua

SEQ ID NO: 1357601 - RNA, 19 nt, Homo sapiens
  misc_RNA (1)...(19): siRNA sense strand
guaugagcaccguuacaau

SEQ ID NO: 1357602 - RNA, 19 nt, Homo sapiens
  misc_RNA (1)...(19): siRNA sense strand
caguggauuucagcuucua

SEQ ID NO: 1357603 - RNA, 19 nt, Homo sapiens
  misc_RNA (1)...(19): siRNA sense strand
gagaaaggauggcaaagau

SEQ ID NO: 1357604 - RNA, 19 nt, Homo sapiens
  misc_RNA (1)...(19): siRNA sense strand
gcaaagauccaaaucaguu

SEQ ID NO: 1357605 - RNA, 19 nt, Homo sapiens
  misc_RNA (1)...(19): siRNA sense strand
caaacgggcugcagagaug

SEQ ID NO: 1357606 - RNA, 19 nt, Homo sapiens
  misc_RNA (1)...(19): siRNA sense strand
agauggagcuucaggcaaa

SEQ ID NO: 1357607 - RNA, 19 nt, Homo sapiens
  misc_RNA (1)...(19): siRNA sense strand
gacauucccuuggaccuuu

SEQ ID NO: 1357608 - RNA, 19 nt, Homo sapiens
  misc_RNA (1)...(19): siRNA sense strand
gcauggacauucccuugga

SEQ ID NO: 1357609 - RNA, 19 nt, Homo sapiens
  misc_RNA (1)...(19): siRNA sense strand
acagacaccucucucaugu

SEQ ID NO: 1357610 - RNA, 19 nt, Homo sapiens
  misc_RNA (1)...(19): siRNA sense strand
aggcaaaacuuacagcuua

SEQ ID NO: 1357611 - RNA, 19 nt, Homo sapiens
  misc_RNA (1)...(19): siRNA sense strand
ucagugaucugccauacca

SEQ ID NO: 1357612 - RNA, 19 nt, Homo sapiens
  misc_RNA (1)...(19): siRNA sense strand
ggacuucaguggauuucag

SEQ ID NO: 1357613 - RNA, 19 nt, Homo sapiens
  misc_RNA (1)...(19): siRNA sense strand
acacagauauacagcagau

SEQ ID NO: 1357614 - RNA, 19 nt, Homo sapiens
  misc_RNA (1)...(19): siRNA sense strand
ugacugcauugaaagaugu

SEQ ID NO: 1357615 - RNA, 19 nt, Homo sapiens
  misc_RNA (1)...(19): siRNA sense strand
cugcagagauggagcuuca

SEQ ID NO: 1357616 - RNA, 19 nt, Homo sapiens
  misc_RNA (1)...(19): siRNA sense strand
agacaccucucucauguac

SEQ ID NO: 1357617 - RNA, 19 nt, Homo sapiens
  misc_RNA (1)...(19): siRNA sense strand
cacugugacugcauugaaa

SEQ ID NO: 1357618 - RNA, 19 nt, Homo sapiens
  misc_RNA (1)...(19): siRNA sense strand
ucccugacaugcugagaaa

SEQ ID NO: 1357619 - RNA, 19 nt, Homo sapiens
  misc_RNA (1)...(19): siRNA sense strand
gucuguaacugguucauca

SEQ ID NO: 1357620 - RNA, 19 nt, Homo sapiens
  misc_RNA (1)...(19): siRNA sense strand
uggcaaagauccaaaucag

SEQ ID NO: 1357621 - RNA, 19 nt, Homo sapiens
  misc_RNA (1)...(19): siRNA sense strand
gcugagaaaggauggcaaa

SEQ ID NO: 1357622 - RNA, 19 nt, Homo sapiens
  misc_RNA (1)...(19): siRNA sense strand
ugagaaaggauggcaaaga

SEQ ID NO: 1357623 - RNA, 19 nt, Homo sapiens
  misc_RNA (1)...(19): siRNA sense strand
gaggacagcauggacauuc

SEQ ID NO: 1357624 - RNA, 19 nt, Homo sapiens
  misc_RNA (1)...(19): siRNA sense strand
ggacauucccuuggaccuu

SEQ ID NO: 1357625 - RNA, 19 nt, Homo sapiens
  misc_RNA (1)...(19): siRNA sense strand
gugacugcauugaaagaug

SEQ ID NO: 1357626 - RNA, 19 nt, Homo sapiens
  misc_RNA (1)...(19): siRNA sense strand
uaugagcaccguuacaaug

SEQ ID NO: 1357627 - RNA, 19 nt, Homo sapiens
  misc_RNA (1)...(19): siRNA sense strand
ccacugugacugcauugaa

SEQ ID NO: 1357628 - RNA, 19 nt, Homo sapiens
  misc_RNA (1)...(19): siRNA sense strand
ccuuggaccuuucuucauc

SEQ ID NO: 1357629 - RNA, 19 nt, Homo sapiens
  misc_RNA (1)...(19): siRNA sense strand
uuacaaugccuauccuuca

SEQ ID NO: 1357630 - RNA, 19 nt, Homo sapiens
  misc_RNA (1)...(19): siRNA sense strand
gugcagauucuucgggauu

SEQ ID NO: 1357631 - RNA, 19 nt, Homo sapiens
  misc_RNA (1)...(19): siRNA sense strand
aaccaggacuucaguggau

SEQ ID NO: 1357632 - RNA, 19 nt, Homo sapiens
  misc_RNA (1)...(19): siRNA sense strand
cagcaaacacaccugucua

SEQ ID NO: 1357633 - RNA, 19 nt, Homo sapiens
  misc_RNA (1)...(19): siRNA sense strand
caaagauccaaaucaguuc

SEQ ID NO: 1357634 - RNA, 19 nt, Homo sapiens
  misc_RNA (1)...(19): siRNA sense strand
gagcuucaggcaaaacuua

SEQ ID NO: 1357635 - RNA, 19 nt, Homo sapiens
  misc_RNA (1)...(19): siRNA sense strand
ggacaaaacacagauauac

SEQ ID NO: 1357636 - RNA, 19 nt, Homo sapiens
  misc_RNA (1)...(19): siRNA sense strand
acagauauacagcagauag

SEQ ID NO: 1357637 - RNA, 19 nt, Homo sapiens
  misc_RNA (1)...(19): siRNA sense strand
auaccacugugacugcauu

SEQ ID NO: 1357638 - RNA, 19 nt, Homo sapiens
  misc_RNA (1)...(19): siRNA sense strand
ggcaaaacuuacagcuuaa

SEQ ID NO: 1357639 - RNA, 19 nt, Homo sapiens
  misc_RNA (1)...(19): siRNA sense strand
cacagacaccucucucaug

SEQ ID NO: 1357640 - RNA, 19 nt, Homo sapiens
  misc_RNA (1)...(19): siRNA sense strand
ucacagacaccucucucau

SEQ ID NO: 1357641 - RNA, 19 nt, Homo sapiens
  misc_RNA (1)...(19): siRNA sense strand
ucaaacgggcugcagagau

SEQ ID NO: 1357642 - RNA, 19 nt, Homo sapiens
  misc_RNA (1)...(19): siRNA sense strand
guaaaucuggaccaaguac

SEQ ID NO: 1357643 - RNA, 19 nt, Homo sapiens
  misc_RNA (1)...(19): siRNA sense strand
gauccaaaucaguucacaa

SEQ ID NO: 1357644 - RNA, 19 nt, Homo sapiens
  misc_RNA (1)...(19): siRNA sense strand
ccaggacuucaguggauuu

SEQ ID NO: 1357645 - RNA, 19 nt, Homo sapiens
  misc_RNA (1)...(19): siRNA sense strand
gcagauucuucgggauugg

SEQ ID NO: 1357646 - RNA, 19 nt, Homo sapiens
  misc_RNA (1)...(19): siRNA sense strand
gaugucccuuucucucucu

SEQ ID NO: 1357647 - RNA, 19 nt, Homo sapiens
  misc_RNA (1)...(19): siRNA sense strand
ggaccucaaccaggacuuc

SEQ ID NO: 1357648 - RNA, 19 nt, Homo sapiens
  misc_RNA (1)...(19): siRNA sense strand
ggcuguaugagcaccguua

SEQ ID NO: 1357649 - RNA, 19 nt, Homo sapiens
  misc_RNA (1)...(19): siRNA sense strand
guaugagcaccguuacaau

SEQ ID NO: 1357650 - RNA, 19 nt, Homo sapiens
  misc_RNA (1)...(19): siRNA sense strand
caguggauuucagcuucua

SEQ ID NO: 1357651 - RNA, 19 nt, Homo sapiens
  misc_RNA (1)...(19): siRNA sense strand
gagaaaggauggcaaagau

SEQ ID NO: 1357652 - RNA, 19 nt, Homo sapiens
  misc_RNA (1)...(19): siRNA sense strand
gcaaagauccaaaucaguu

SEQ ID NO: 1357653 - RNA, 19 nt, Homo sapiens
  misc_RNA (1)...(19): siRNA sense strand
caaacgggcugcagagaug

SEQ ID NO: 1357654 - RNA, 19 nt, Homo sapiens
  misc_RNA (1)...(19): siRNA sense strand
agauggagcuucaggcaaa

SEQ ID NO: 1357655 - RNA, 19 nt, Homo sapiens
  misc_RNA (1)...(19): siRNA sense strand
gacauucccuuggaccuuu

SEQ ID NO: 1357656 - RNA, 19 nt, Homo sapiens
  misc_RNA (1)...(19): siRNA sense strand
acagacaccucucucaugu

SEQ ID NO: 1357657 - RNA, 19 nt, Homo sapiens
  misc_RNA (1)...(19): siRNA sense strand
aggcaaaacuuacagcuua

SEQ ID NO: 1357658 - RNA, 19 nt, Homo sapiens
  misc_RNA (1)...(19): siRNA sense strand
ucagugaucugccauacca

SEQ ID NO: 1357659 - RNA, 19 nt, Homo sapiens
  misc_RNA (1)...(19): siRNA sense strand
ggacuucaguggauuucag

SEQ ID NO: 1357660 - RNA, 19 nt, Homo sapiens
  misc_RNA (1)...(19): siRNA sense strand
acacagauauacagcagau

SEQ ID NO: 1357661 - RNA, 19 nt, Homo sapiens
  misc_RNA (1)...(19): siRNA sense strand
ugacugcauugaaagaugu

SEQ ID NO: 1357662 - RNA, 19 nt, Homo sapiens
  misc_RNA (1)...(19): siRNA sense strand
cugcagagauggagcuuca

SEQ ID NO: 1357663 - RNA, 19 nt, Homo sapiens
  misc_RNA (1)...(19): siRNA sense strand
agacaccucucucauguac

SEQ ID NO: 1357664 - RNA, 19 nt, Homo sapiens
  misc_RNA (1)...(19): siRNA sense strand
cacugugacugcauugaaa

SEQ ID NO: 1357665 - RNA, 19 nt, Homo sapiens
  misc_RNA (1)...(19): siRNA sense strand
ucccugacaugcugagaaa

SEQ ID NO: 1357666 - RNA, 19 nt, Homo sapiens
  misc_RNA (1)...(19): siRNA sense strand
gucuguaacugguucauca

SEQ ID NO: 1357667 - RNA, 19 nt, Homo sapiens
  misc_RNA (1)...(19): siRNA sense strand
uggcaaagauccaaaucag

SEQ ID NO: 1357668 - RNA, 19 nt, Homo sapiens
  misc_RNA (1)...(19): siRNA sense strand
gcugagaaaggauggcaaa

SEQ ID NO: 1357669 - RNA, 19 nt, Homo sapiens
  misc_RNA (1)...(19): siRNA sense strand
ugagaaaggauggcaaaga

SEQ ID NO: 1357670 - RNA, 19 nt, Homo sapiens
  misc_RNA (1)...(19): siRNA sense strand
ggacauucccuuggaccuu

SEQ ID NO: 1357671 - RNA, 19 nt, Homo sapiens
  misc_RNA (1)...(19): siRNA sense strand
gugacugcauugaaagaug

SEQ ID NO: 1357672 - RNA, 19 nt, Homo sapiens
  misc_RNA (1)...(19): siRNA sense strand
uaugagcaccguuacaaug

SEQ ID NO: 1357673 - RNA, 19 nt, Homo sapiens
  misc_RNA (1)...(19): siRNA sense strand
ccuuggaccuuucuucauc

SEQ ID NO: 1357674 - RNA, 19 nt, Homo sapiens
  misc_RNA (1)...(19): siRNA sense strand
ccacugugacugcauugaa

SEQ ID NO: 1357675 - RNA, 19 nt, Homo sapiens
  misc_RNA (1)...(19): siRNA sense strand
uuacaaugccuauccuuca

SEQ ID NO: 1357676 - RNA, 19 nt, Homo sapiens
  misc_RNA (1)...(19): siRNA sense strand
cagcaaacacaccugucua

SEQ ID NO: 1357677 - RNA, 19 nt, Homo sapiens
  misc_RNA (1)...(19): siRNA sense strand
aaccaggacuucaguggau

SEQ ID NO: 1357678 - RNA, 19 nt, Homo sapiens
  misc_RNA (1)...(19): siRNA sense strand
gugcagauucuucgggauu

SEQ ID NO: 1357679 - RNA, 19 nt, Homo sapiens
  misc_RNA (1)...(19): siRNA sense strand
caaagauccaaaucaguuc

SEQ ID NO: 1357680 - RNA, 19 nt, Homo sapiens
  misc_RNA (1)...(19): siRNA sense strand
gagcuucaggcaaaacuua

SEQ ID NO: 1357681 - RNA, 19 nt, Homo sapiens
  misc_RNA (1)...(19): siRNA sense strand
ggacaaaacacagauauac

SEQ ID NO: 1357682 - RNA, 19 nt, Homo sapiens
  misc_RNA (1)...(19): siRNA sense strand
acagauauacagcagauag

SEQ ID NO: 1357683 - RNA, 19 nt, Homo sapiens
  misc_RNA (1)...(19): siRNA sense strand
auaccacugugacugcauu

SEQ ID NO: 1357684 - RNA, 19 nt, Homo sapiens
  misc_RNA (1)...(19): siRNA sense strand
ggcaaaacuuacagcuuaa

SEQ ID NO: 1357685 - RNA, 19 nt, Homo sapiens
  misc_RNA (1)...(19): siRNA sense strand
cacagacaccucucucaug

SEQ ID NO: 1357686 - RNA, 19 nt, Homo sapiens
  misc_RNA (1)...(19): siRNA sense strand
ucacagacaccucucucau

SEQ ID NO: 1357687 - RNA, 19 nt, Homo sapiens
  misc_RNA (1)...(19): siRNA sense strand
ucaaacgggcugcagagau

SEQ ID NO: 1357688 - RNA, 19 nt, Homo sapiens
  misc_RNA (1)...(19): siRNA sense strand
guaaaucuggaccaaguac

SEQ ID NO: 1357689 - RNA, 19 nt, Homo sapiens
  misc_RNA (1)...(19): siRNA sense strand
gauccaaaucaguucacaa

SEQ ID NO: 1357690 - RNA, 19 nt, Homo sapiens
  misc_RNA (1)...(19): siRNA sense strand
gcagauucuucgggauugg

SEQ ID NO: 1357691 - RNA, 19 nt, Homo sapiens
  misc_RNA (1)...(19): siRNA sense strand
ccaggacuucaguggauuu

SEQ ID NO: 1357692 - RNA, 19 nt, Homo sapiens
  misc_RNA (1)...(19): siRNA sense strand
ggcuguaugagcaccguua

SEQ ID NO: 1357693 - RNA, 19 nt, Homo sapiens
  misc_RNA (1)...(19): siRNA sense strand
ggaccucaaccaggacuuc

SEQ ID NO: 1357694 - RNA, 19 nt, Homo sapiens
  misc_RNA (1)...(19): siRNA sense strand
guaugagcaccguuacaau

SEQ ID NO: 1357695 - RNA, 19 nt, Homo sapiens
  misc_RNA (1)...(19): siRNA sense strand
gaugucccuuucucucucu

SEQ ID NO: 1357696 - RNA, 19 nt, Homo sapiens
  misc_RNA (1)...(19): siRNA sense strand
caguggauuucagcuucua

SEQ ID NO: 1357697 - RNA, 19 nt, Homo sapiens
  misc_RNA (1)...(19): siRNA sense strand
gagaaaggauggcaaagau

SEQ ID NO: 1357698 - RNA, 19 nt, Homo sapiens
  misc_RNA (1)...(19): siRNA sense strand
gcaaagauccaaaucaguu

SEQ ID NO: 1357699 - RNA, 19 nt, Homo sapiens
  misc_RNA (1)...(19): siRNA sense strand
caaacgggcugcagagaug

SEQ ID NO: 1357700 - RNA, 19 nt, Homo sapiens
  misc_RNA (1)...(19): siRNA sense strand
agauggagcuucaggcaaa

SEQ ID NO: 1357701 - RNA, 19 nt, Homo sapiens
  misc_RNA (1)...(19): siRNA sense strand
gacauucccuuggaccuuu

SEQ ID NO: 1357702 - RNA, 19 nt, Homo sapiens
  misc_RNA (1)...(19): siRNA sense strand
acagacaccucucucaugu

SEQ ID NO: 1357703 - RNA, 19 nt, Homo sapiens
  misc_RNA (1)...(19): siRNA sense strand
aggcaaaacuuacagcuua

SEQ ID NO: 1357704 - RNA, 19 nt, Homo sapiens
  misc_RNA (1)...(19): siRNA sense strand
ucagugaucugccauacca

SEQ ID NO: 1357705 - RNA, 19 nt, Homo sapiens
  misc_RNA (1)...(19): siRNA sense strand
ggacuucaguggauuucag

SEQ ID NO: 1357706 - RNA, 19 nt, Homo sapiens
  misc_RNA (1)...(19): siRNA sense strand
acacagauauacagcagau

SEQ ID NO: 1357707 - RNA, 19 nt, Homo sapiens
  misc_RNA (1)...(19): siRNA sense strand
ugacugcauugaaagaugu

SEQ ID NO: 1357708 - RNA, 19 nt, Homo sapiens
  misc_RNA (1)...(19): siRNA sense strand
cugcagagauggagcuuca

SEQ ID NO: 1357709 - RNA, 19 nt, Homo sapiens
  misc_RNA (1)...(19): siRNA sense strand
agacaccucucucauguac

SEQ ID NO: 1357710 - RNA, 19 nt, Homo sapiens
  misc_RNA (1)...(19): siRNA sense strand
cacugugacugcauugaaa

SEQ ID NO: 1357711 - RNA, 19 nt, Homo sapiens
  misc_RNA (1)...(19): siRNA sense strand
ucccugacaugcugagaaa

SEQ ID NO: 1357712 - RNA, 19 nt, Homo sapiens
  misc_RNA (1)...(19): siRNA sense strand
gucuguaacugguucauca

SEQ ID NO: 1357713 - RNA, 19 nt, Homo sapiens
  misc_RNA (1)...(19): siRNA sense strand
uggcaaagauccaaaucag

SEQ ID NO: 1357714 - RNA, 19 nt, Homo sapiens
  misc_RNA (1)...(19): siRNA sense strand
gcugagaaaggauggcaaa

SEQ ID NO: 1357715 - RNA, 19 nt, Homo sapiens
  misc_RNA (1)...(19): siRNA sense strand
ugagaaaggauggcaaaga

SEQ ID NO: 1357716 - RNA, 19 nt, Homo sapiens
  misc_RNA (1)...(19): siRNA sense strand
ggacauucccuuggaccuu

SEQ ID NO: 1357717 - RNA, 19 nt, Homo sapiens
  misc_RNA (1)...(19): siRNA sense strand
gugacugcauugaaagaug

SEQ ID NO: 1357718 - RNA, 19 nt, Homo sapiens
  misc_RNA (1)...(19): siRNA sense strand
uaugagcaccguuacaaug

SEQ ID NO: 1357719 - RNA, 19 nt, Homo sapiens
  misc_RNA (1)...(19): siRNA sense strand
ccuuggaccuuucuucauc

SEQ ID NO: 1357720 - RNA, 19 nt, Homo sapiens
  misc_RNA (1)...(19): siRNA sense strand
ccacugugacugcauugaa

SEQ ID NO: 1357721 - RNA, 19 nt, Homo sapiens
  misc_RNA (1)...(19): siRNA sense strand
uuacaaugccuauccuuca

SEQ ID NO: 1357722 - RNA, 19 nt, Homo sapiens
  misc_RNA (1)...(19): siRNA sense strand
cagcaaacacaccugucua

SEQ ID NO: 1357723 - RNA, 19 nt, Homo sapiens
  misc_RNA (1)...(19): siRNA sense strand
aaccaggacuucaguggau

SEQ ID NO: 1357724 - RNA, 19 nt, Homo sapiens
  misc_RNA (1)...(19): siRNA sense strand
gugcagauucuucgggauu

SEQ ID NO: 1357725 - RNA, 19 nt, Homo sapiens
  misc_RNA (1)...(19): siRNA sense strand
caaagauccaaaucaguuc

SEQ ID NO: 1357726 - RNA, 19 nt, Homo sapiens
  misc_RNA (1)...(19): siRNA sense strand
gagcuucaggcaaaacuua

SEQ ID NO: 1357727 - RNA, 19 nt, Homo sapiens
  misc_RNA (1)...(19): siRNA sense strand
ggacaaaacacagauauac

SEQ ID NO: 1357728 - RNA, 19 nt, Homo sapiens
  misc_RNA (1)...(19): siRNA sense strand
acagauauacagcagauag

SEQ ID NO: 1357729 - RNA, 19 nt, Homo sapiens
  misc_RNA (1)...(19): siRNA sense strand
auaccacugugacugcauu

SEQ ID NO: 1357730 - RNA, 19 nt, Homo sapiens
  misc_RNA (1)...(19): siRNA sense strand
ggcaaaacuuacagcuuaa

SEQ ID NO: 1357731 - RNA, 19 nt, Homo sapiens
  misc_RNA (1)...(19): siRNA sense strand
cacagacaccucucucaug

SEQ ID NO: 1357732 - RNA, 19 nt, Homo sapiens
  misc_RNA (1)...(19): siRNA sense strand
ucacagacaccucucucau

SEQ ID NO: 1357733 - RNA, 19 nt, Homo sapiens
  misc_RNA (1)...(19): siRNA sense strand
ucaaacgggcugcagagau

SEQ ID NO: 1357734 - RNA, 19 nt, Homo sapiens
  misc_RNA (1)...(19): siRNA sense strand
guaaaucuggaccaaguac

SEQ ID NO: 1357735 - RNA, 19 nt, Homo sapiens
  misc_RNA (1)...(19): siRNA sense strand
gauccaaaucaguucacaa

SEQ ID NO: 1357736 - RNA, 19 nt, Homo sapiens
  misc_RNA (1)...(19): siRNA sense strand
gcagauucuucgggauugg

SEQ ID NO: 1357737 - RNA, 19 nt, Homo sapiens
  misc_RNA (1)...(19): siRNA sense strand
ccaggacuucaguggauuu

SEQ ID NO: 1357738 - RNA, 19 nt, Homo sapiens
  misc_RNA (1)...(19): siRNA sense strand
ggcuguaugagcaccguua

SEQ ID NO: 1357739 - RNA, 19 nt, Homo sapiens
  misc_RNA (1)...(19): siRNA sense strand
ggaccucaaccaggacuuc

SEQ ID NO: 1357740 - RNA, 19 nt, Homo sapiens
  misc_RNA (1)...(19): siRNA sense strand
guaugagcaccguuacaau

SEQ ID NO: 1357741 - RNA, 19 nt, Homo sapiens
  misc_RNA (1)...(19): siRNA sense strand
gaugucccuuucucucucu

SEQ ID NO: 1357742 - RNA, 19 nt, Homo sapiens
  misc_RNA (1)...(19): siRNA sense strand
caguggauuucagcuucua

SEQ ID NO: 1357743 - RNA, 19 nt, Homo sapiens
  misc_RNA (1)...(19): siRNA sense strand
gagaaaggauggcaaagau

SEQ ID NO: 1357744 - RNA, 19 nt, Homo sapiens
  misc_RNA (1)...(19): siRNA sense strand
gcaaagauccaaaucaguu

SEQ ID NO: 1357745 - RNA, 19 nt, Homo sapiens
  misc_RNA (1)...(19): siRNA sense strand
caaacgggcugcagagaug

SEQ ID NO: 1357746 - RNA, 19 nt, Homo sapiens
  misc_RNA (1)...(19): siRNA sense strand
agauggagcuucaggcaaa

SEQ ID NO: 1357747 - RNA, 19 nt, Homo sapiens
  misc_RNA (1)...(19): siRNA sense strand
gacauucccuuggaccuuu

SEQ ID NO: 1357748 - RNA, 19 nt, Homo sapiens
  misc_RNA (1)...(19): siRNA sense strand
acagacaccucucucaugu

SEQ ID NO: 1357749 - RNA, 19 nt, Homo sapiens
  misc_RNA (1)...(19): siRNA sense strand
aggcaaaacuuacagcuua

SEQ ID NO: 1357750 - RNA, 19 nt, Homo sapiens
  misc_RNA (1)...(19): siRNA sense strand
ucagugaucugccauacca

SEQ ID NO: 1357751 - RNA, 19 nt, Homo sapiens
  misc_RNA (1)...(19): siRNA sense strand
ggacuucaguggauuucag

SEQ ID NO: 1357752 - RNA, 19 nt, Homo sapiens
  misc_RNA (1)...(19): siRNA sense strand
acacagauauacagcagau

SEQ ID NO: 1357753 - RNA, 19 nt, Homo sapiens
  misc_RNA (1)...(19): siRNA sense strand
ugacugcauugaaagaugu

SEQ ID NO: 1357754 - RNA, 19 nt, Homo sapiens
  misc_RNA (1)...(19): siRNA sense strand
cugcagagauggagcuuca

SEQ ID NO: 1357755 - RNA, 19 nt, Homo sapiens
  misc_RNA (1)...(19): siRNA sense strand
agacaccucucucauguac

SEQ ID NO: 1357756 - RNA, 19 nt, Homo sapiens
  misc_RNA (1)...(19): siRNA sense strand
cacugugacugcauugaaa

SEQ ID NO: 1357757 - RNA, 19 nt, Homo sapiens
  misc_RNA (1)...(19): siRNA sense strand
ucccugacaugcugagaaa

SEQ ID NO: 1357758 - RNA, 19 nt, Homo sapiens
  misc_RNA (1)...(19): siRNA sense strand
gucuguaacugguucauca

SEQ ID NO: 1357759 - RNA, 19 nt, Homo sapiens
  misc_RNA (1)...(19): siRNA sense strand
uggcaaagauccaaaucag

SEQ ID NO: 1357760 - RNA, 19 nt, Homo sapiens
  misc_RNA (1)...(19): siRNA sense strand
gcugagaaaggauggcaaa

SEQ ID NO: 1357761 - RNA, 19 nt, Homo sapiens
  misc_RNA (1)...(19): siRNA sense strand
ugagaaaggauggcaaaga

SEQ ID NO: 1357762 - RNA, 19 nt, Homo sapiens
  misc_RNA (1)...(19): siRNA sense strand
ggacauucccuuggaccuu

SEQ ID NO: 1357763 - RNA, 19 nt, Homo sapiens
  misc_RNA (1)...(19): siRNA sense strand
gugacugcauugaaagaug

SEQ ID NO: 1357764 - RNA, 19 nt, Homo sapiens
  misc_RNA (1)...(19): siRNA sense strand
uaugagcaccguuacaaug

SEQ ID NO: 1357765 - RNA, 19 nt, Homo sapiens
  misc_RNA (1)...(19): siRNA sense strand
ccuuggaccuuucuucauc

SEQ ID NO: 1357766 - RNA, 19 nt, Homo sapiens
  misc_RNA (1)...(19): siRNA sense strand
ccacugugacugcauugaa

SEQ ID NO: 1357767 - RNA, 19 nt, Homo sapiens
  misc_RNA (1)...(19): siRNA sense strand
uuacaaugccuauccuuca

SEQ ID NO: 1357768 - RNA, 19 nt, Homo sapiens
  misc_RNA (1)...(19): siRNA sense strand
cagcaaacacaccugucua

SEQ ID NO: 1357769 - RNA, 19 nt, Homo sapiens
  misc_RNA (1)...(19): siRNA sense strand
aaccaggacuucaguggau

SEQ ID NO: 1357770 - RNA, 19 nt, Homo sapiens
  misc_RNA (1)...(19): siRNA sense strand
gugcagauucuucgggauu

SEQ ID NO: 1357771 - RNA, 19 nt, Homo sapiens
  misc_RNA (1)...(19): siRNA sense strand
caaagauccaaaucaguuc

SEQ ID NO: 1357772 - RNA, 19 nt, Homo sapiens
  misc_RNA (1)...(19): siRNA sense strand
gagcuucaggcaaaacuua

SEQ ID NO: 1357773 - RNA, 19 nt, Homo sapiens
  misc_RNA (1)...(19): siRNA sense strand
ggacaaaacacagauauac

SEQ ID NO: 1357774 - RNA, 19 nt, Homo sapiens
  misc_RNA (1)...(19): siRNA sense strand
acagauauacagcagauag

SEQ ID NO: 1357775 - RNA, 19 nt, Homo sapiens
  misc_RNA (1)...(19): siRNA sense strand
auaccacugugacugcauu

SEQ ID NO: 1357776 - RNA, 19 nt, Homo sapiens
  misc_RNA (1)...(19): siRNA sense strand
ggcaaaacuuacagcuuaa

SEQ ID NO: 1357777 - RNA, 19 nt, Homo sapiens
  misc_RNA (1)...(19): siRNA sense strand
cacagacaccucucucaug

SEQ ID NO: 1357778 - RNA, 19 nt, Homo sapiens
  misc_RNA (1)...(19): siRNA sense strand
ucacagacaccucucucau

SEQ ID NO: 1357779 - RNA, 19 nt, Homo sapiens
  misc_RNA (1)...(19): siRNA sense strand
ucaaacgggcugcagagau

SEQ ID NO: 1357780 - RNA, 19 nt, Homo sapiens
  misc_RNA (1)...(19): siRNA sense strand
guaaaucuggaccaaguac

SEQ ID NO: 1357781 - RNA, 19 nt, Homo sapiens
  misc_RNA (1)...(19): siRNA sense strand
gauccaaaucaguucacaa

SEQ ID NO: 1357782 - RNA, 19 nt, Homo sapiens
  misc_RNA (1)...(19): siRNA sense strand
gcagauucuucgggauugg

SEQ ID NO: 1357783 - RNA, 19 nt, Homo sapiens
  misc_RNA (1)...(19): siRNA sense strand
ccaggacuucaguggauuu

SEQ ID NO: 1357784 - RNA, 19 nt, Homo sapiens
  misc_RNA (1)...(19): siRNA sense strand
ggcuguaugagcaccguua

SEQ ID NO: 1357785 - RNA, 19 nt, Homo sapiens
  misc_RNA (1)...(19): siRNA sense strand
ggaccucaaccaggacuuc

SEQ ID NO: 1357786 - RNA, 19 nt, Homo sapiens
  misc_RNA (1)...(19): siRNA sense strand
guaugagcaccguuacaau

SEQ ID NO: 1357787 - RNA, 19 nt, Homo sapiens
  misc_RNA (1)...(19): siRNA sense strand
gaugucccuuucucucucu

SEQ ID NO: 1357788 - RNA, 19 nt, Homo sapiens
  misc_RNA (1)...(19): siRNA sense strand
caguggauuucagcuucua

SEQ ID NO: 1357789 - RNA, 19 nt, Homo sapiens
  misc_RNA (1)...(19): siRNA sense strand
gagaaaggauggcaaagau

SEQ ID NO: 1357790 - RNA, 19 nt, Homo sapiens
  misc_RNA (1)...(19): siRNA sense strand
gcaaagauccaaaucaguu

SEQ ID NO: 1357791 - RNA, 19 nt, Homo sapiens
  misc_RNA (1)...(19): siRNA sense strand
caaacgggcugcagagaug

SEQ ID NO: 1357792 - RNA, 19 nt, Homo sapiens
  misc_RNA (1)...(19): siRNA sense strand
agauggagcuucaggcaaa

SEQ ID NO: 1357793 - RNA, 19 nt, Homo sapiens
  misc_RNA (1)...(19): siRNA sense strand
gacauucccuuggaccuuu

SEQ ID NO: 1357794 - RNA, 19 nt, Homo sapiens
  misc_RNA (1)...(19): siRNA sense strand
acagacaccucucucaugu

SEQ ID NO: 1357795 - RNA, 19 nt, Homo sapiens
  misc_RNA (1)...(19): siRNA sense strand
aggcaaaacuuacagcuua

SEQ ID NO: 1357796 - RNA, 19 nt, Homo sapiens
  misc_RNA (1)...(19): siRNA sense strand
ucagugaucugccauacca

SEQ ID NO: 1357797 - RNA, 19 nt, Homo sapiens
  misc_RNA (1)...(19): siRNA sense strand
ggacuucaguggauuucag

SEQ ID NO: 1357798 - RNA, 19 nt, Homo sapiens
  misc_RNA (1)...(19): siRNA sense strand
acacagauauacagcagau

SEQ ID NO: 1357799 - RNA, 19 nt, Homo sapiens
  misc_RNA (1)...(19): siRNA sense strand
ugacugcauugaaagaugu

SEQ ID NO: 1357800 - RNA, 19 nt, Homo sapiens
  misc_RNA (1)...(19): siRNA sense strand
cugcagagauggagcuuca

SEQ ID NO: 1357801 - RNA, 19 nt, Homo sapiens
  misc_RNA (1)...(19): siRNA sense strand
agacaccucucucauguac

SEQ ID NO: 1357802 - RNA, 19 nt, Homo sapiens
  misc_RNA (1)...(19): siRNA sense strand
cacugugacugcauugaaa

SEQ ID NO: 1357803 - RNA, 19 nt, Homo sapiens
  misc_RNA (1)...(19): siRNA sense strand
ucccugacaugcugagaaa

SEQ ID NO: 1357804 - RNA, 19 nt, Homo sapiens
  misc_RNA (1)...(19): siRNA sense strand
gucuguaacugguucauca

SEQ ID NO: 1357805 - RNA, 19 nt, Homo sapiens
  misc_RNA (1)...(19): siRNA sense strand
uggcaaagauccaaaucag

SEQ ID NO: 1357806 - RNA, 19 nt, Homo sapiens
  misc_RNA (1)...(19): siRNA sense strand
gcugagaaaggauggcaaa

SEQ ID NO: 1357807 - RNA, 19 nt, Homo sapiens
  misc_RNA (1)...(19): siRNA sense strand
ugagaaaggauggcaaaga

SEQ ID NO: 1357808 - RNA, 19 nt, Homo sapiens
  misc_RNA (1)...(19): siRNA sense strand
ggacauucccuuggaccuu

SEQ ID NO: 1357809 - RNA, 19 nt, Homo sapiens
  misc_RNA (1)...(19): siRNA sense strand
gugacugcauugaaagaug

SEQ ID NO: 1357810 - RNA, 19 nt, Homo sapiens
  misc_RNA (1)...(19): siRNA sense strand
uaugagcaccguuacaaug

SEQ ID NO: 1357811 - RNA, 19 nt, Homo sapiens
  misc_RNA (1)...(19): siRNA sense strand
ccuuggaccuuucuucauc

SEQ ID NO: 1357812 - RNA, 19 nt, Homo sapiens
  misc_RNA (1)...(19): siRNA sense strand
ccacugugacugcauugaa

SEQ ID NO: 1357813 - RNA, 19 nt, Homo sapiens
  misc_RNA (1)...(19): siRNA sense strand
uuacaaugccuauccuuca

SEQ ID NO: 1357814 - RNA, 19 nt, Homo sapiens
  misc_RNA (1)...(19): siRNA sense strand
cagcaaacacaccugucua

SEQ ID NO: 1357815 - RNA, 19 nt, Homo sapiens
  misc_RNA (1)...(19): siRNA sense strand
aaccaggacuucaguggau

SEQ ID NO: 1357816 - RNA, 19 nt, Homo sapiens
  misc_RNA (1)...(19): siRNA sense strand
gugcagauucuucgggauu

SEQ ID NO: 1357817 - RNA, 19 nt, Homo sapiens
  misc_RNA (1)...(19): siRNA sense strand
caaagauccaaaucaguuc

SEQ ID NO: 1357818 - RNA, 19 nt, Homo sapiens
  misc_RNA (1)...(19): siRNA sense strand
gagcuucaggcaaaacuua

SEQ ID NO: 1357819 - RNA, 19 nt, Homo sapiens
  misc_RNA (1)...(19): siRNA sense strand
ggacaaaacacagauauac

SEQ ID NO: 1357820 - RNA, 19 nt, Homo sapiens
  misc_RNA (1)...(19): siRNA sense strand
acagauauacagcagauag

SEQ ID NO: 1357821 - RNA, 19 nt, Homo sapiens
  misc_RNA (1)...(19): siRNA sense strand
auaccacugugacugcauu

SEQ ID NO: 1357822 - RNA, 19 nt, Homo sapiens
  misc_RNA (1)...(19): siRNA sense strand
ggcaaaacuuacagcuuaa

SEQ ID NO: 1357823 - RNA, 19 nt, Homo sapiens
  misc_RNA (1)...(19): siRNA sense strand
cacagacaccucucucaug

SEQ ID NO: 1357824 - RNA, 19 nt, Homo sapiens
  misc_RNA (1)...(19): siRNA sense strand
ucacagacaccucucucau

SEQ ID NO: 1357825 - RNA, 19 nt, Homo sapiens
  misc_RNA (1)...(19): siRNA sense strand
ucaaacgggcugcagagau

SEQ ID NO: 1357826 - RNA, 19 nt, Homo sapiens
  misc_RNA (1)...(19): siRNA sense strand
guaaaucuggaccaaguac

SEQ ID NO: 1357827 - RNA, 19 nt, Homo sapiens
  misc_RNA (1)...(19): siRNA sense strand
gauccaaaucaguucacaa

SEQ ID NO: 1357828 - RNA, 19 nt, Homo sapiens
  misc_RNA (1)...(19): siRNA sense strand
gcagauucuucgggauugg

SEQ ID NO: 1357829 - RNA, 19 nt, Homo sapiens
  misc_RNA (1)...(19): siRNA sense strand
ccaggacuucaguggauuu

SEQ ID NO: 1357830 - RNA, 19 nt, Homo sapiens
  misc_RNA (1)...(19): siRNA sense strand
ggcuguaugagcaccguua

SEQ ID NO: 1357831 - RNA, 19 nt, Homo sapiens
  misc_RNA (1)...(19): siRNA sense strand
ggaccucaaccaggacuuc

SEQ ID NO: 1357832 - RNA, 19 nt, Homo sapiens
  misc_RNA (1)...(19): siRNA sense strand
guaugagcaccguuacaau

SEQ ID NO: 1357833 - RNA, 19 nt, Homo sapiens
  misc_RNA (1)...(19): siRNA sense strand
gaugucccuuucucucucu

SEQ ID NO: 1357834 - RNA, 19 nt, Homo sapiens
  misc_RNA (1)...(19): siRNA sense strand
caguggauuucagcuucua

SEQ ID NO: 1357835 - RNA, 19 nt, Homo sapiens
  misc_RNA (1)...(19): siRNA sense strand
caacgucacugaugauaug

SEQ ID NO: 1357836 - RNA, 19 nt, Homo sapiens
  misc_RNA (1)...(19): siRNA sense strand
ggagagaaaugggagaauu

SEQ ID NO: 1357837 - RNA, 19 nt, Homo sapiens
  misc_RNA (1)...(19): siRNA sense strand
gcagcugucuuuacuaaug

SEQ ID NO: 1357838 - RNA, 19 nt, Homo sapiens
  misc_RNA (1)...(19): siRNA sense strand
gaaguaauuugaagagagu

SEQ ID NO: 1357839 - RNA, 19 nt, Homo sapiens
  misc_RNA (1)...(19): siRNA sense strand
gcaaaggacugggccgaaa

SEQ ID NO: 1357840 - RNA, 19 nt, Homo sapiens
  misc_RNA (1)...(19): siRNA sense strand
cgaaagagccaauaacuca

SEQ ID NO: 1357841 - RNA, 19 nt, Homo sapiens
  misc_RNA (1)...(19): siRNA sense strand
uagcagcugucuuuacuaa

SEQ ID NO: 1357842 - RNA, 19 nt, Homo sapiens
  misc_RNA (1)...(19): siRNA sense strand
ggaugaaguuaucgaaaga

SEQ ID NO: 1357843 - RNA, 19 nt, Homo sapiens
  misc_RNA (1)...(19): siRNA sense strand
ggacagaucaucccaugga

SEQ ID NO: 1357844 - RNA, 19 nt, Homo sapiens
  misc_RNA (1)...(19): siRNA sense strand
gccaauaacucagacuuug

SEQ ID NO: 1357845 - RNA, 19 nt, Homo sapiens
  misc_RNA (1)...(19): siRNA sense strand
ggauaagcuugcagacuug

SEQ ID NO: 1357846 - RNA, 19 nt, Homo sapiens
  misc_RNA (1)...(19): siRNA sense strand
gauucaagaugucuggaaa

SEQ ID NO: 1357847 - RNA, 19 nt, Homo sapiens
  misc_RNA (1)...(19): siRNA sense strand
uggauaagcuugcagacuu

SEQ ID NO: 1357848 - RNA, 19 nt, Homo sapiens
  misc_RNA (1)...(19): siRNA sense strand
gauuuaagacgauggauga

SEQ ID NO: 1357849 - RNA, 19 nt, Homo sapiens
  misc_RNA (1)...(19): siRNA sense strand
ccaagaagcagcuggaaga

SEQ ID NO: 1357850 - RNA, 19 nt, Homo sapiens
  misc_RNA (1)...(19): siRNA sense strand
gacgauggaugaaguuauc

SEQ ID NO: 1357851 - RNA, 19 nt, Homo sapiens
  misc_RNA (1)...(19): siRNA sense strand
uacaagacaugaacccauu

SEQ ID NO: 1357852 - RNA, 19 nt, Homo sapiens
  misc_RNA (1)...(19): siRNA sense strand
uuaagacggugacaguaaa

SEQ ID NO: 1357853 - RNA, 19 nt, Homo sapiens
  misc_RNA (1)...(19): siRNA sense strand
gcuggaauguggaggcaaa

SEQ ID NO: 1357854 - RNA, 19 nt, Homo sapiens
  misc_RNA (1)...(19): siRNA sense strand
ggaagaaguaauuugaaga

SEQ ID NO: 1357855 - RNA, 19 nt, Homo sapiens
  misc_RNA (1)...(19): siRNA sense strand
agaagcagcuggaagaagu

SEQ ID NO: 1357856 - RNA, 19 nt, Homo sapiens
  misc_RNA (1)...(19): siRNA sense strand
ggagaucuuuggcccuguu

SEQ ID NO: 1357857 - RNA, 19 nt, Homo sapiens
  misc_RNA (1)...(19): siRNA sense strand
ggcaaaaguccuaauauua

SEQ ID NO: 1357858 - RNA, 19 nt, Homo sapiens
  misc_RNA (1)...(19): siRNA sense strand
cuguuuggaucaauuguua

SEQ ID NO: 1357859 - RNA, 19 nt, Homo sapiens
  misc_RNA (1)...(19): siRNA sense strand
gauggaugcuucagaaagg

SEQ ID NO: 1357860 - RNA, 19 nt, Homo sapiens
  misc_RNA (1)...(19): siRNA sense strand
gauaagaaacaguacaaca

SEQ ID NO: 1357861 - RNA, 19 nt, Homo sapiens
  misc_RNA (1)...(19): siRNA sense strand
ggacagggcaguucuugca

SEQ ID NO: 1357862 - RNA, 19 nt, Homo sapiens
  misc_RNA (1)...(19): siRNA sense strand
guuaagacggugacaguaa

SEQ ID NO: 1357863 - RNA, 19 nt, Homo sapiens
  misc_RNA (1)...(19): siRNA sense strand
gaagaaguaauuugaagag

SEQ ID NO: 1357864 - RNA, 19 nt, Homo sapiens
  misc_RNA (1)...(19): siRNA sense strand
gcagcuggaagaaguaauu

SEQ ID NO: 1357865 - RNA, 19 nt, Homo sapiens
  misc_RNA (1)...(19): siRNA sense strand
gcuggaagaaguaauuuga

SEQ ID NO: 1357866 - RNA, 19 nt, Homo sapiens
  misc_RNA (1)...(19): siRNA sense strand
ggaugaccauuccuguaga

SEQ ID NO: 1357867 - RNA, 19 nt, Homo sapiens
  misc_RNA (1)...(19): siRNA sense strand
cgggaguacucagaaguua

SEQ ID NO: 1357868 - RNA, 19 nt, Homo sapiens
  misc_RNA (1)...(19): siRNA sense strand
cacagugucuucugcaaug

SEQ ID NO: 1357869 - RNA, 19 nt, Homo sapiens
  misc_RNA (1)...(19): siRNA sense strand
gcuuugugcuguggcaaua

SEQ ID NO: 1357870 - RNA, 19 nt, Homo sapiens
  misc_RNA (1)...(19): siRNA sense strand
aaggauggaugcuucagaa

SEQ ID NO: 1357871 - RNA, 19 nt, Homo sapiens
  misc_RNA (1)...(19): siRNA sense strand
gcugauguuugccuggaaa

SEQ ID NO: 1357872 - RNA, 19 nt, Homo sapiens
  misc_RNA (1)...(19): siRNA sense strand
cagcugucuuuacuaauga

SEQ ID NO: 1357873 - RNA, 19 nt, Homo sapiens
  misc_RNA (1)...(19): siRNA sense strand
uuaagacgauggaugaagu

SEQ ID NO: 1357874 - RNA, 19 nt, Homo sapiens
  misc_RNA (1)...(19): siRNA sense strand
ggaaaugggagagaaaugg

SEQ ID NO: 1357875 - RNA, 19 nt, Homo sapiens
  misc_RNA (1)...(19): siRNA sense strand
gggacuguuuggaucaauu

SEQ ID NO: 1357876 - RNA, 19 nt, Homo sapiens
  misc_RNA (1)...(19): siRNA sense strand
gaagcagcuggaagaagua

SEQ ID NO: 1357877 - RNA, 19 nt, Homo sapiens
  misc_RNA (1)...(19): siRNA sense strand
guccaucuaugaggaguuu

SEQ ID NO: 1357878 - RNA, 19 nt, Homo sapiens
  misc_RNA (1)...(19): siRNA sense strand
gaugaccauuccuguagau

SEQ ID NO: 1357879 - RNA, 19 nt, Homo sapiens
  misc_RNA (1)...(19): siRNA sense strand
aagaaacaguacaacaaga

SEQ ID NO: 1357880 - RNA, 19 nt, Homo sapiens
  misc_RNA (1)...(19): siRNA sense strand
aaccauuccugcaagcuuu

SEQ ID NO: 1357881 - RNA, 19 nt, Homo sapiens
  misc_RNA (1)...(19): siRNA sense strand
acucguagcagcugucuuu

SEQ ID NO: 1357882 - RNA, 19 nt, Homo sapiens
  misc_RNA (1)...(19): siRNA sense strand
gggcaguucuugcaaccau

SEQ ID NO: 1357883 - RNA, 19 nt, Homo sapiens
  misc_RNA (1)...(19): siRNA sense strand
gacagaucaucccauggaa

SEQ ID NO: 1357884 - RNA, 19 nt, Homo sapiens
  misc_RNA (1)...(19): siRNA sense strand
gggaugaccauuccuguag

SEQ ID NO: 1357885 - RNA, 19 nt, Homo sapiens
  misc_RNA (1)...(19): siRNA sense strand
gcagagcaaacaccacuca

SEQ ID NO: 1357886 - RNA, 19 nt, Homo sapiens
  misc_RNA (1)...(19): siRNA sense strand
ggacuguuuggaucaauug

SEQ ID NO: 1357887 - RNA, 19 nt, Homo sapiens
  misc_RNA (1)...(19): siRNA sense strand
gaaacaguacaacaagauc

SEQ ID NO: 1357888 - RNA, 19 nt, Homo sapiens
  misc_RNA (1)...(19): siRNA sense strand
uaagaaacaguacaacaag

SEQ ID NO: 1357889 - RNA, 19 nt, Homo sapiens
  misc_RNA (1)...(19): siRNA sense strand
caucaaaaccuuucgauau

SEQ ID NO: 1357890 - RNA, 19 nt, Homo sapiens
  misc_RNA (1)...(19): siRNA sense strand
ggaguacucagaaguuaag

SEQ ID NO: 1357891 - RNA, 19 nt, Homo sapiens
  misc_RNA (1)...(19): siRNA sense strand
cguagcagcugucuuuacu

SEQ ID NO: 1357892 - RNA, 19 nt, Homo sapiens
  misc_RNA (1)...(19): siRNA sense strand
ggaauguggaggcaaagga

SEQ ID NO: 1357893 - RNA, 19 nt, Homo sapiens
  misc_RNA (1)...(19): siRNA sense strand
uggaagaaguaauuugaag

SEQ ID NO: 1357894 - RNA, 19 nt, Homo sapiens
  misc_RNA (1)...(19): siRNA sense strand
gaucaucccauggaacuuc

SEQ ID NO: 1357895 - RNA, 19 nt, Homo sapiens
  misc_RNA (1)...(19): siRNA sense strand
ugggagcccucaucaagga

SEQ ID NO: 1357896 - RNA, 19 nt, Homo sapiens
  misc_RNA (1)...(19): siRNA sense strand
caauaacucagacuuugga

SEQ ID NO: 1357897 - RNA, 19 nt, Homo sapiens
  misc_RNA (1)...(19): siRNA sense strand
uggaugaaguuaucgaaag

SEQ ID NO: 1357898 - RNA, 19 nt, Homo sapiens
  misc_RNA (1)...(19): siRNA sense strand
gguguguucuucaaucaag

SEQ ID NO: 1357899 - RNA, 19 nt, Homo sapiens
  misc_RNA (1)...(19): siRNA sense strand
ggacgucuguuggauaagc

SEQ ID NO: 1357900 - RNA, 19 nt, Homo sapiens
  misc_RNA (1)...(19): siRNA sense strand
ggagacuauuuuaccuuua

SEQ ID NO: 1357901 - RNA, 19 nt, Homo sapiens
  misc_RNA (1)...(19): siRNA sense strand
ggaaagcuuauccaagaag

SEQ ID NO: 1357902 - RNA, 19 nt, Homo sapiens
  misc_RNA (1)...(19): siRNA sense strand
gggaguacucagaaguuaa

SEQ ID NO: 1357903 - RNA, 19 nt, Homo sapiens
  misc_RNA (1)...(19): siRNA sense strand
ucauugagcccacaguguu

SEQ ID NO: 1357904 - RNA, 19 nt, Homo sapiens
  misc_RNA (1)...(19): siRNA sense strand
ggggacgucuguuggauaa

SEQ ID NO: 1357905 - RNA, 19 nt, Homo sapiens
  misc_RNA (1)...(19): siRNA sense strand
guagauggagacuauuuua

SEQ ID NO: 1357906 - RNA, 19 nt, Homo sapiens
  misc_RNA (1)...(19): siRNA sense strand
ggauggaugcuucagaaag

SEQ ID NO: 1357907 - RNA, 19 nt, Homo sapiens
  misc_RNA (1)...(19): siRNA sense strand
caugggagcccucaucaag

SEQ ID NO: 1357908 - RNA, 19 nt, Homo sapiens
  misc_RNA (1)...(19): siRNA sense strand
gaugcugacuuggacuaug

SEQ ID NO: 1357909 - RNA, 19 nt, Homo sapiens
  misc_RNA (1)...(19): siRNA sense strand
uaugaggaguuugugagaa

SEQ ID NO: 1357910 - RNA, 19 nt, Homo sapiens
  misc_RNA (1)...(19): siRNA sense strand
gcaaccauggaaucccuaa

SEQ ID NO: 1357911 - RNA, 19 nt, Homo sapiens
  misc_RNA (1)...(19): siRNA sense strand
ggaggcaaaaguccuaaua

SEQ ID NO: 1357912 - RNA, 19 nt, Homo sapiens
  misc_RNA (1)...(19): siRNA sense strand
uuuccaacgucacugauga

SEQ ID NO: 1357913 - RNA, 19 nt, Homo sapiens
  misc_RNA (1)...(19): siRNA sense strand
caggguguguucuucaauc

SEQ ID NO: 1357914 - RNA, 19 nt, Homo sapiens
  misc_RNA (1)...(19): siRNA sense strand
aggcugggcugauaaaauu

SEQ ID NO: 1357915 - RNA, 19 nt, Homo sapiens
  misc_RNA (1)...(19): siRNA sense strand
aaagagccaauaacucaga

SEQ ID NO: 1357916 - RNA, 19 nt, Homo sapiens
  misc_RNA (1)...(19): siRNA sense strand
caagaagcagcuggaagaa

SEQ ID NO: 1357917 - RNA, 19 nt, Homo sapiens
  misc_RNA (1)...(19): siRNA sense strand
gauggaugaaguuaucgaa

SEQ ID NO: 1357918 - RNA, 19 nt, Homo sapiens
  misc_RNA (1)...(19): siRNA sense strand
gcgggaguacucagaaguu

SEQ ID NO: 1357919 - RNA, 19 nt, Homo sapiens
  misc_RNA (1)...(19): siRNA sense strand
ggauucaagaugucuggaa

SEQ ID NO: 1357920 - RNA, 19 nt, Homo sapiens
  misc_RNA (1)...(19): siRNA sense strand
gagccaauaacucagacuu

SEQ ID NO: 1357921 - RNA, 19 nt, Homo sapiens
  misc_RNA (1)...(19): siRNA sense strand
uccuguagauggagacuau

SEQ ID NO: 1357922 - RNA, 19 nt, Homo sapiens
  misc_RNA (1)...(19): siRNA sense strand
uacgcaggcugggcugaua

SEQ ID NO: 1357923 - RNA, 19 nt, Homo sapiens
  misc_RNA (1)...(19): siRNA sense strand
ggcuuucucucuugguuca

SEQ ID NO: 1357924 - RNA, 19 nt, Homo sapiens
  misc_RNA (1)...(19): siRNA sense strand
ccgccuggcuuucucucuu

SEQ ID NO: 1357925 - RNA, 19 nt, Homo sapiens
  misc_RNA (1)...(19): siRNA sense strand
agaaacaguacaacaagau

SEQ ID NO: 1357926 - RNA, 19 nt, Homo sapiens
  misc_RNA (1)...(19): siRNA sense strand
gauguuugccuggaaaaua

SEQ ID NO: 1357927 - RNA, 19 nt, Homo sapiens
  misc_RNA (1)...(19): siRNA sense strand
aggcaaaaguccuaauauu

SEQ ID NO: 1357928 - RNA, 19 nt, Homo sapiens
  misc_RNA (1)...(19): siRNA sense strand
ugcaggcucucgcaucuuc

SEQ ID NO: 1357929 - RNA, 19 nt, Homo sapiens
  misc_RNA (1)...(19): siRNA sense strand
uucaagaugucuggaaaug

SEQ ID NO: 1357930 - RNA, 19 nt, Homo sapiens
  misc_RNA (1)...(19): siRNA sense strand
ucaacaaggcccucacagu

SEQ ID NO: 1357931 - RNA, 19 nt, Homo sapiens
  misc_RNA (1)...(19): siRNA sense strand
cauggaaucccuaaauggu

SEQ ID NO: 1357932 - RNA, 19 nt, Homo sapiens
  misc_RNA (1)...(19): siRNA sense strand
uggcaaaccauuccugcaa

SEQ ID NO: 1357933 - RNA, 19 nt, Homo sapiens
  misc_RNA (1)...(19): siRNA sense strand
ucuggaacuuggaggcaaa

SEQ ID NO: 1357934 - RNA, 19 nt, Homo sapiens
  misc_RNA (1)...(19): siRNA sense strand
ggaggaguccaucuaugag

SEQ ID NO: 1357935 - RNA, 19 nt, Homo sapiens
  misc_RNA (1)...(19): siRNA sense strand
caacgucacugaugauaug

SEQ ID NO: 1357936 - RNA, 19 nt, Homo sapiens
  misc_RNA (1)...(19): siRNA sense strand
ggagagaaaugggagaauu

SEQ ID NO: 1357937 - RNA, 19 nt, Homo sapiens
  misc_RNA (1)...(19): siRNA sense strand
gcagcugucuuuacuaaug

SEQ ID NO: 1357938 - RNA, 19 nt, Homo sapiens
  misc_RNA (1)...(19): siRNA sense strand
gaaguaauuugaagagagu

SEQ ID NO: 1357939 - RNA, 19 nt, Homo sapiens
  misc_RNA (1)...(19): siRNA sense strand
gcaaaggacugggccgaaa

SEQ ID NO: 1357940 - RNA, 19 nt, Homo sapiens
  misc_RNA (1)...(19): siRNA sense strand
cgaaagagccaauaacuca

SEQ ID NO: 1357941 - RNA, 19 nt, Homo sapiens
  misc_RNA (1)...(19): siRNA sense strand
uagcagcugucuuuacuaa

SEQ ID NO: 1357942 - RNA, 19 nt, Homo sapiens
  misc_RNA (1)...(19): siRNA sense strand
ggaugaaguuaucgaaaga

SEQ ID NO: 1357943 - RNA, 19 nt, Homo sapiens
  misc_RNA (1)...(19): siRNA sense strand
ggacagaucaucccaugga

SEQ ID NO: 1357944 - RNA, 19 nt, Homo sapiens
  misc_RNA (1)...(19): siRNA sense strand
gccaauaacucagacuuug

SEQ ID NO: 1357945 - RNA, 19 nt, Homo sapiens
  misc_RNA (1)...(19): siRNA sense strand
ggauaagcuugcagacuug

SEQ ID NO: 1357946 - RNA, 19 nt, Homo sapiens
  misc_RNA (1)...(19): siRNA sense strand
gauucaagaugucuggaaa

SEQ ID NO: 1357947 - RNA, 19 nt, Homo sapiens
  misc_RNA (1)...(19): siRNA sense strand
uggauaagcuugcagacuu

SEQ ID NO: 1357948 - RNA, 19 nt, Homo sapiens
  misc_RNA (1)...(19): siRNA sense strand
gauuuaagacgauggauga

SEQ ID NO: 1357949 - RNA, 19 nt, Homo sapiens
  misc_RNA (1)...(19): siRNA sense strand
ccaagaagcagcuggaaga

SEQ ID NO: 1357950 - RNA, 19 nt, Homo sapiens
  misc_RNA (1)...(19): siRNA sense strand
gacgauggaugaaguuauc

SEQ ID NO: 1357951 - RNA, 19 nt, Homo sapiens
  misc_RNA (1)...(19): siRNA sense strand
uacaagacaugaacccauu

SEQ ID NO: 1357952 - RNA, 19 nt, Homo sapiens
  misc_RNA (1)...(19): siRNA sense strand
uuaagacggugacaguaaa

SEQ ID NO: 1357953 - RNA, 19 nt, Homo sapiens
  misc_RNA (1)...(19): siRNA sense strand
gcuggaauguggaggcaaa

SEQ ID NO: 1357954 - RNA, 19 nt, Homo sapiens
  misc_RNA (1)...(19): siRNA sense strand
ggaagaaguaauuugaaga

SEQ ID NO: 1357955 - RNA, 19 nt, Homo sapiens
  misc_RNA (1)...(19): siRNA sense strand
agaagcagcuggaagaagu

SEQ ID NO: 1357956 - RNA, 19 nt, Homo sapiens
  misc_RNA (1)...(19): siRNA sense strand
ggagaucuuuggcccuguu

SEQ ID NO: 1357957 - RNA, 19 nt, Homo sapiens
  misc_RNA (1)...(19): siRNA sense strand
ggcaaaaguccuaauauua

SEQ ID NO: 1357958 - RNA, 19 nt, Homo sapiens
  misc_RNA (1)...(19): siRNA sense strand
cuguuuggaucaauuguua

SEQ ID NO: 1357959 - RNA, 19 nt, Homo sapiens
  misc_RNA (1)...(19): siRNA sense strand
gauggaugcuucagaaagg

SEQ ID NO: 1357960 - RNA, 19 nt, Homo sapiens
  misc_RNA (1)...(19): siRNA sense strand
gauaagaaacaguacaaca

SEQ ID NO: 1357961 - RNA, 19 nt, Homo sapiens
  misc_RNA (1)...(19): siRNA sense strand
ggacagggcaguucuugca

SEQ ID NO: 1357962 - RNA, 19 nt, Homo sapiens
  misc_RNA (1)...(19): siRNA sense strand
guuaagacggugacaguaa

SEQ ID NO: 1357963 - RNA, 19 nt, Homo sapiens
  misc_RNA (1)...(19): siRNA sense strand
gaagaaguaauuugaagag

SEQ ID NO: 1357964 - RNA, 19 nt, Homo sapiens
  misc_RNA (1)...(19): siRNA sense strand
gcagcuggaagaaguaauu

SEQ ID NO: 1357965 - RNA, 19 nt, Homo sapiens
  misc_RNA (1)...(19): siRNA sense strand
gcuggaagaaguaauuuga

SEQ ID NO: 1357966 - RNA, 19 nt, Homo sapiens
  misc_RNA (1)...(19): siRNA sense strand
ggaugaccauuccuguaga

SEQ ID NO: 1357967 - RNA, 19 nt, Homo sapiens
  misc_RNA (1)...(19): siRNA sense strand
cgggaguacucagaaguua

SEQ ID NO: 1357968 - RNA, 19 nt, Homo sapiens
  misc_RNA (1)...(19): siRNA sense strand
cacagugucuucugcaaug

SEQ ID NO: 1357969 - RNA, 19 nt, Homo sapiens
  misc_RNA (1)...(19): siRNA sense strand
gcuuugugcuguggcaaua

SEQ ID NO: 1357970 - RNA, 19 nt, Homo sapiens
  misc_RNA (1)...(19): siRNA sense strand
aaggauggaugcuucagaa

SEQ ID NO: 1357971 - RNA, 19 nt, Homo sapiens
  misc_RNA (1)...(19): siRNA sense strand
gcugauguuugccuggaaa

SEQ ID NO: 1357972 - RNA, 19 nt, Homo sapiens
  misc_RNA (1)...(19): siRNA sense strand
cagcugucuuuacuaauga

SEQ ID NO: 1357973 - RNA, 19 nt, Homo sapiens
  misc_RNA (1)...(19): siRNA sense strand
uuaagacgauggaugaagu

SEQ ID NO: 1357974 - RNA, 19 nt, Homo sapiens
  misc_RNA (1)...(19): siRNA sense strand
ggaaaugggagagaaaugg

SEQ ID NO: 1357975 - RNA, 19 nt, Homo sapiens
  misc_RNA (1)...(19): siRNA sense strand
gggacuguuuggaucaauu

SEQ ID NO: 1357976 - RNA, 19 nt, Homo sapiens
  misc_RNA (1)...(19): siRNA sense strand
gaagcagcuggaagaagua

SEQ ID NO: 1357977 - RNA, 19 nt, Homo sapiens
  misc_RNA (1)...(19): siRNA sense strand
guccaucuaugaggaguuu

SEQ ID NO: 1357978 - RNA, 19 nt, Homo sapiens
  misc_RNA (1)...(19): siRNA sense strand
gaugaccauuccuguagau

SEQ ID NO: 1357979 - RNA, 19 nt, Homo sapiens
  misc_RNA (1)...(19): siRNA sense strand
aagaaacaguacaacaaga

SEQ ID NO: 1357980 - RNA, 19 nt, Homo sapiens
  misc_RNA (1)...(19): siRNA sense strand
aaccauuccugcaagcuuu

SEQ ID NO: 1357981 - RNA, 19 nt, Homo sapiens
  misc_RNA (1)...(19): siRNA sense strand
acucguagcagcugucuuu

SEQ ID NO: 1357982 - RNA, 19 nt, Homo sapiens
  misc_RNA (1)...(19): siRNA sense strand
gggcaguucuugcaaccau

SEQ ID NO: 1357983 - RNA, 19 nt, Homo sapiens
  misc_RNA (1)...(19): siRNA sense strand
gacagaucaucccauggaa

SEQ ID NO: 1357984 - RNA, 19 nt, Homo sapiens
  misc_RNA (1)...(19): siRNA sense strand
gggaugaccauuccuguag

SEQ ID NO: 1357985 - RNA, 19 nt, Homo sapiens
  misc_RNA (1)...(19): siRNA sense strand
gcagagcaaacaccacuca

SEQ ID NO: 1357986 - RNA, 19 nt, Homo sapiens
  misc_RNA (1)...(19): siRNA sense strand
ggacuguuuggaucaauug

SEQ ID NO: 1357987 - RNA, 19 nt, Homo sapiens
  misc_RNA (1)...(19): siRNA sense strand
gaaacaguacaacaagauc

SEQ ID NO: 1357988 - RNA, 19 nt, Homo sapiens
  misc_RNA (1)...(19): siRNA sense strand
uaagaaacaguacaacaag

SEQ ID NO: 1357989 - RNA, 19 nt, Homo sapiens
  misc_RNA (1)...(19): siRNA sense strand
caucaaaaccuuucgauau

SEQ ID NO: 1357990 - RNA, 19 nt, Homo sapiens
  misc_RNA (1)...(19): siRNA sense strand
ggaguacucagaaguuaag

SEQ ID NO: 1357991 - RNA, 19 nt, Homo sapiens
  misc_RNA (1)...(19): siRNA sense strand
cguagcagcugucuuuacu

SEQ ID NO: 1357992 - RNA, 19 nt, Homo sapiens
  misc_RNA (1)...(19): siRNA sense strand
ggaauguggaggcaaagga

SEQ ID NO: 1357993 - RNA, 19 nt, Homo sapiens
  misc_RNA (1)...(19): siRNA sense strand
uggaagaaguaauuugaag

SEQ ID NO: 1357994 - RNA, 19 nt, Homo sapiens
  misc_RNA (1)...(19): siRNA sense strand
gaucaucccauggaacuuc

SEQ ID NO: 1357995 - RNA, 19 nt, Homo sapiens
  misc_RNA (1)...(19): siRNA sense strand
ugggagcccucaucaagga

SEQ ID NO: 1357996 - RNA, 19 nt, Homo sapiens
  misc_RNA (1)...(19): siRNA sense strand
caauaacucagacuuugga

SEQ ID NO: 1357997 - RNA, 19 nt, Homo sapiens
  misc_RNA (1)...(19): siRNA sense strand
uggaugaaguuaucgaaag

SEQ ID NO: 1357998 - RNA, 19 nt, Homo sapiens
  misc_RNA (1)...(19): siRNA sense strand
gguguguucuucaaucaag

SEQ ID NO: 1357999 - RNA, 19 nt, Homo sapiens
  misc_RNA (1)...(19): siRNA sense strand
ggacgucuguuggauaagc

SEQ ID NO: 1358000 - RNA, 19 nt, Homo sapiens
  misc_RNA (1)...(19): siRNA sense strand
ggagacuauuuuaccuuua

SEQ ID NO: 1358001 - RNA, 19 nt, Homo sapiens
  misc_RNA (1)...(19): siRNA sense strand
ggaaagcuuauccaagaag

SEQ ID NO: 1358002 - RNA, 19 nt, Homo sapiens
  misc_RNA (1)...(19): siRNA sense strand
gggaguacucagaaguuaa

SEQ ID NO: 1358003 - RNA, 19 nt, Homo sapiens
  misc_RNA (1)...(19): siRNA sense strand
ucauugagcccacaguguu

SEQ ID NO: 1358004 - RNA, 19 nt, Homo sapiens
  misc_RNA (1)...(19): siRNA sense strand
ggggacgucuguuggauaa

SEQ ID NO: 1358005 - RNA, 19 nt, Homo sapiens
  misc_RNA (1)...(19): siRNA sense strand
guagauggagacuauuuua

SEQ ID NO: 1358006 - RNA, 19 nt, Homo sapiens
  misc_RNA (1)...(19): siRNA sense strand
ggauggaugcuucagaaag

SEQ ID NO: 1358007 - RNA, 19 nt, Homo sapiens
  misc_RNA (1)...(19): siRNA sense strand
caugggagcccucaucaag

SEQ ID NO: 1358008 - RNA, 19 nt, Homo sapiens
  misc_RNA (1)...(19): siRNA sense strand
gaugcugacuuggacuaug

SEQ ID NO: 1358009 - RNA, 19 nt, Homo sapiens
  misc_RNA (1)...(19): siRNA sense strand
uaugaggaguuugugagaa

SEQ ID NO: 1358010 - RNA, 19 nt, Homo sapiens
  misc_RNA (1)...(19): siRNA sense strand
gcaaccauggaaucccuaa

SEQ ID NO: 1358011 - RNA, 19 nt, Homo sapiens
  misc_RNA (1)...(19): siRNA sense strand
ggaggcaaaaguccuaaua

SEQ ID NO: 1358012 - RNA, 19 nt, Homo sapiens
  misc_RNA (1)...(19): siRNA sense strand
uuuccaacgucacugauga

SEQ ID NO: 1358013 - RNA, 19 nt, Homo sapiens
  misc_RNA (1)...(19): siRNA sense strand
caggguguguucuucaauc

SEQ ID NO: 1358014 - RNA, 19 nt, Homo sapiens
  misc_RNA (1)...(19): siRNA sense strand
aggcugggcugauaaaauu

SEQ ID NO: 1358015 - RNA, 19 nt, Homo sapiens
  misc_RNA (1)...(19): siRNA sense strand
aaagagccaauaacucaga

SEQ ID NO: 1358016 - RNA, 19 nt, Homo sapiens
  misc_RNA (1)...(19): siRNA sense strand
caagaagcagcuggaagaa

SEQ ID NO: 1358017 - RNA, 19 nt, Homo sapiens
  misc_RNA (1)...(19): siRNA sense strand
gauggaugaaguuaucgaa

SEQ ID NO: 1358018 - RNA, 19 nt, Homo sapiens
  misc_RNA (1)...(19): siRNA sense strand
gcgggaguacucagaaguu

SEQ ID NO: 1358019 - RNA, 19 nt, Homo sapiens
  misc_RNA (1)...(19): siRNA sense strand
ggauucaagaugucuggaa

SEQ ID NO: 1358020 - RNA, 19 nt, Homo sapiens
  misc_RNA (1)...(19): siRNA sense strand
gagccaauaacucagacuu

SEQ ID NO: 1358021 - RNA, 19 nt, Homo sapiens
  misc_RNA (1)...(19): siRNA sense strand
uccuguagauggagacuau

SEQ ID NO: 1358022 - RNA, 19 nt, Homo sapiens
  misc_RNA (1)...(19): siRNA sense strand
uacgcaggcugggcugaua

SEQ ID NO: 1358023 - RNA, 19 nt, Homo sapiens
  misc_RNA (1)...(19): siRNA sense strand
ggcuuucucucuugguuca

SEQ ID NO: 1358024 - RNA, 19 nt, Homo sapiens
  misc_RNA (1)...(19): siRNA sense strand
ccgccuggcuuucucucuu

SEQ ID NO: 1358025 - RNA, 19 nt, Homo sapiens
  misc_RNA (1)...(19): siRNA sense strand
agaaacaguacaacaagau

SEQ ID NO: 1358026 - RNA, 19 nt, Homo sapiens
  misc_RNA (1)...(19): siRNA sense strand
gauguuugccuggaaaaua

SEQ ID NO: 1358027 - RNA, 19 nt, Homo sapiens
  misc_RNA (1)...(19): siRNA sense strand
aggcaaaaguccuaauauu

SEQ ID NO: 1358028 - RNA, 19 nt, Homo sapiens
  misc_RNA (1)...(19): siRNA sense strand
ugcaggcucucgcaucuuc

SEQ ID NO: 1358029 - RNA, 19 nt, Homo sapiens
  misc_RNA (1)...(19): siRNA sense strand
uucaagaugucuggaaaug

SEQ ID NO: 1358030 - RNA, 19 nt, Homo sapiens
  misc_RNA (1)...(19): siRNA sense strand
ucaacaaggcccucacagu

SEQ ID NO: 1358031 - RNA, 19 nt, Homo sapiens
  misc_RNA (1)...(19): siRNA sense strand
cauggaaucccuaaauggu

SEQ ID NO: 1358032 - RNA, 19 nt, Homo sapiens
  misc_RNA (1)...(19): siRNA sense strand
uggcaaaccauuccugcaa

SEQ ID NO: 1358033 - RNA, 19 nt, Homo sapiens
  misc_RNA (1)...(19): siRNA sense strand
ucuggaacuuggaggcaaa

SEQ ID NO: 1358034 - RNA, 19 nt, Homo sapiens
  misc_RNA (1)...(19): siRNA sense strand
ggaggaguccaucuaugag

SEQ ID NO: 1358035 - RNA, 19 nt, Homo sapiens
  misc_RNA (1)...(19): siRNA sense strand
caacgucacugaugauaug

SEQ ID NO: 1358036 - RNA, 19 nt, Homo sapiens
  misc_RNA (1)...(19): siRNA sense strand
ggagagaaaugggagaauu

SEQ ID NO: 1358037 - RNA, 19 nt, Homo sapiens
  misc_RNA (1)...(19): siRNA sense strand
gcagcugucuuuacuaaug

SEQ ID NO: 1358038 - RNA, 19 nt, Homo sapiens
  misc_RNA (1)...(19): siRNA sense strand
gaaguaauuugaagagagu

SEQ ID NO: 1358039 - RNA, 19 nt, Homo sapiens
  misc_RNA (1)...(19): siRNA sense strand
gcaaaggacugggccgaaa

SEQ ID NO: 1358040 - RNA, 19 nt, Homo sapiens
  misc_RNA (1)...(19): siRNA sense strand
cgaaagagccaauaacuca

SEQ ID NO: 1358041 - RNA, 19 nt, Homo sapiens
  misc_RNA (1)...(19): siRNA sense strand
uagcagcugucuuuacuaa

SEQ ID NO: 1358042 - RNA, 19 nt, Homo sapiens
  misc_RNA (1)...(19): siRNA sense strand
ggaugaaguuaucgaaaga

SEQ ID NO: 1358043 - RNA, 19 nt, Homo sapiens
  misc_RNA (1)...(19): siRNA sense strand
ggacagaucaucccaugga

SEQ ID NO: 1358044 - RNA, 19 nt, Homo sapiens
  misc_RNA (1)...(19): siRNA sense strand
gccaauaacucagacuuug

SEQ ID NO: 1358045 - RNA, 19 nt, Homo sapiens
  misc_RNA (1)...(19): siRNA sense strand
ggauaagcuugcagacuug

SEQ ID NO: 1358046 - RNA, 19 nt, Homo sapiens
  misc_RNA (1)...(19): siRNA sense strand
gauucaagaugucuggaaa

SEQ ID NO: 1358047 - RNA, 19 nt, Homo sapiens
  misc_RNA (1)...(19): siRNA sense strand
uggauaagcuugcagacuu

SEQ ID NO: 1358048 - RNA, 19 nt, Homo sapiens
  misc_RNA (1)...(19): siRNA sense strand
gauuuaagacgauggauga

SEQ ID NO: 1358049 - RNA, 19 nt, Homo sapiens
  misc_RNA (1)...(19): siRNA sense strand
ccaagaagcagcuggaaga

SEQ ID NO: 1358050 - RNA, 19 nt, Homo sapiens
  misc_RNA (1)...(19): siRNA sense strand
gacgauggaugaaguuauc

SEQ ID NO: 1358051 - RNA, 19 nt, Homo sapiens
  misc_RNA (1)...(19): siRNA sense strand
uacaagacaugaacccauu

SEQ ID NO: 1358052 - RNA, 19 nt, Homo sapiens
  misc_RNA (1)...(19): siRNA sense strand
uuaagacggugacaguaaa

SEQ ID NO: 1358053 - RNA, 19 nt, Homo sapiens
  misc_RNA (1)...(19): siRNA sense strand
gcuggaauguggaggcaaa

SEQ ID NO: 1358054 - RNA, 19 nt, Homo sapiens
  misc_RNA (1)...(19): siRNA sense strand
ggaagaaguaauuugaaga

SEQ ID NO: 1358055 - RNA, 19 nt, Homo sapiens
  misc_RNA (1)...(19): siRNA sense strand
agaagcagcuggaagaagu

SEQ ID NO: 1358056 - RNA, 19 nt, Homo sapiens
  misc_RNA (1)...(19): siRNA sense strand
ggagaucuuuggcccuguu

SEQ ID NO: 1358057 - RNA, 19 nt, Homo sapiens
  misc_RNA (1)...(19): siRNA sense strand
ggcaaaaguccuaauauua

SEQ ID NO: 1358058 - RNA, 19 nt, Homo sapiens
  misc_RNA (1)...(19): siRNA sense strand
cuguuuggaucaauuguua

SEQ ID NO: 1358059 - RNA, 19 nt, Homo sapiens
  misc_RNA (1)...(19): siRNA sense strand
gauaagaaacaguacaaca

SEQ ID NO: 1358060 - RNA, 19 nt, Homo sapiens
  misc_RNA (1)...(19): siRNA sense strand
ggacagggcaguucuugca

SEQ ID NO: 1358061 - RNA, 19 nt, Homo sapiens
  misc_RNA (1)...(19): siRNA sense strand
guuaagacggugacaguaa

SEQ ID NO: 1358062 - RNA, 19 nt, Homo sapiens
  misc_RNA (1)...(19): siRNA sense strand
gaagaaguaauuugaagag

SEQ ID NO: 1358063 - RNA, 19 nt, Homo sapiens
  misc_RNA (1)...(19): siRNA sense strand
gcagcuggaagaaguaauu

SEQ ID NO: 1358064 - RNA, 19 nt, Homo sapiens
  misc_RNA (1)...(19): siRNA sense strand
gcuggaagaaguaauuuga

SEQ ID NO: 1358065 - RNA, 19 nt, Homo sapiens
  misc_RNA (1)...(19): siRNA sense strand
ggaugaccauuccuguaga

SEQ ID NO: 1358066 - RNA, 19 nt, Homo sapiens
  misc_RNA (1)...(19): siRNA sense strand
cgggaguacucagaaguua

SEQ ID NO: 1358067 - RNA, 19 nt, Homo sapiens
  misc_RNA (1)...(19): siRNA sense strand
cacagugucuucugcaaug

SEQ ID NO: 1358068 - RNA, 19 nt, Homo sapiens
  misc_RNA (1)...(19): siRNA sense strand
gcuuugugcuguggcaaua

SEQ ID NO: 1358069 - RNA, 19 nt, Homo sapiens
  misc_RNA (1)...(19): siRNA sense strand
gcugauguuugccuggaaa

SEQ ID NO: 1358070 - RNA, 19 nt, Homo sapiens
  misc_RNA (1)...(19): siRNA sense strand
cagcugucuuuacuaauga

SEQ ID NO: 1358071 - RNA, 19 nt, Homo sapiens
  misc_RNA (1)...(19): siRNA sense strand
uuaagacgauggaugaagu

SEQ ID NO: 1358072 - RNA, 19 nt, Homo sapiens
  misc_RNA (1)...(19): siRNA sense strand
ggaaaugggagagaaaugg

SEQ ID NO: 1358073 - RNA, 19 nt, Homo sapiens
  misc_RNA (1)...(19): siRNA sense strand
gggacuguuuggaucaauu

SEQ ID NO: 1358074 - RNA, 19 nt, Homo sapiens
  misc_RNA (1)...(19): siRNA sense strand
gaagcagcuggaagaagua

SEQ ID NO: 1358075 - RNA, 19 nt, Homo sapiens
  misc_RNA (1)...(19): siRNA sense strand
guccaucuaugaggaguuu

SEQ ID NO: 1358076 - RNA, 19 nt, Homo sapiens
  misc_RNA (1)...(19): siRNA sense strand
gaugaccauuccuguagau

SEQ ID NO: 1358077 - RNA, 19 nt, Homo sapiens
  misc_RNA (1)...(19): siRNA sense strand
aagaaacaguacaacaaga

SEQ ID NO: 1358078 - RNA, 19 nt, Homo sapiens
  misc_RNA (1)...(19): siRNA sense strand
gggaugaccauuccuguag

SEQ ID NO: 1358079 - RNA, 19 nt, Homo sapiens
  misc_RNA (1)...(19): siRNA sense strand
gggcaguucuugcaaccau

SEQ ID NO: 1358080 - RNA, 19 nt, Homo sapiens
  misc_RNA (1)...(19): siRNA sense strand
acucguagcagcugucuuu

SEQ ID NO: 1358081 - RNA, 19 nt, Homo sapiens
  misc_RNA (1)...(19): siRNA sense strand
aaccauuccugcaagcuuu

SEQ ID NO: 1358082 - RNA, 19 nt, Homo sapiens
  misc_RNA (1)...(19): siRNA sense strand
gacagaucaucccauggaa

SEQ ID NO: 1358083 - RNA, 19 nt, Homo sapiens
  misc_RNA (1)...(19): siRNA sense strand
gcagagcaaacaccacuca

SEQ ID NO: 1358084 - RNA, 19 nt, Homo sapiens
  misc_RNA (1)...(19): siRNA sense strand
ggacuguuuggaucaauug

SEQ ID NO: 1358085 - RNA, 19 nt, Homo sapiens
  misc_RNA (1)...(19): siRNA sense strand
gaaacaguacaacaagauc

SEQ ID NO: 1358086 - RNA, 19 nt, Homo sapiens
  misc_RNA (1)...(19): siRNA sense strand
uaagaaacaguacaacaag

SEQ ID NO: 1358087 - RNA, 19 nt, Homo sapiens
  misc_RNA (1)...(19): siRNA sense strand
caucaaaaccuuucgauau

SEQ ID NO: 1358088 - RNA, 19 nt, Homo sapiens
  misc_RNA (1)...(19): siRNA sense strand
ggaguacucagaaguuaag

SEQ ID NO: 1358089 - RNA, 19 nt, Homo sapiens
  misc_RNA (1)...(19): siRNA sense strand
cguagcagcugucuuuacu

SEQ ID NO: 1358090 - RNA, 19 nt, Homo sapiens
  misc_RNA (1)...(19): siRNA sense strand
ggaauguggaggcaaagga

SEQ ID NO: 1358091 - RNA, 19 nt, Homo sapiens
  misc_RNA (1)...(19): siRNA sense strand
uggaagaaguaauuugaag

SEQ ID NO: 1358092 - RNA, 19 nt, Homo sapiens
  misc_RNA (1)...(19): siRNA sense strand
gaucaucccauggaacuuc

SEQ ID NO: 1358093 - RNA, 19 nt, Homo sapiens
  misc_RNA (1)...(19): siRNA sense strand
ugggagcccucaucaagga

SEQ ID NO: 1358094 - RNA, 19 nt, Homo sapiens
  misc_RNA (1)...(19): siRNA sense strand
caauaacucagacuuugga

SEQ ID NO: 1358095 - RNA, 19 nt, Homo sapiens
  misc_RNA (1)...(19): siRNA sense strand
ggacgucuguuggauaagc

SEQ ID NO: 1358096 - RNA, 19 nt, Homo sapiens
  misc_RNA (1)...(19): siRNA sense strand
uggaugaaguuaucgaaag

SEQ ID NO: 1358097 - RNA, 19 nt, Homo sapiens
  misc_RNA (1)...(19): siRNA sense strand
gguguguucuucaaucaag

SEQ ID NO: 1358098 - RNA, 19 nt, Homo sapiens
  misc_RNA (1)...(19): siRNA sense strand
ggagacuauuuuaccuuua

SEQ ID NO: 1358099 - RNA, 19 nt, Homo sapiens
  misc_RNA (1)...(19): siRNA sense strand
ggaaagcuuauccaagaag

SEQ ID NO: 1358100 - RNA, 19 nt, Homo sapiens
  misc_RNA (1)...(19): siRNA sense strand
gggaguacucagaaguuaa

SEQ ID NO: 1358101 - RNA, 19 nt, Homo sapiens
  misc_RNA (1)...(19): siRNA sense strand
ucauugagcccacaguguu

SEQ ID NO: 1358102 - RNA, 19 nt, Homo sapiens
  misc_RNA (1)...(19): siRNA sense strand
ggggacgucuguuggauaa

SEQ ID NO: 1358103 - RNA, 19 nt, Homo sapiens
  misc_RNA (1)...(19): siRNA sense strand
guagauggagacuauuuua

SEQ ID NO: 1358104 - RNA, 19 nt, Homo sapiens
  misc_RNA (1)...(19): siRNA sense strand
caugggagcccucaucaag

SEQ ID NO: 1358105 - RNA, 19 nt, Homo sapiens
  misc_RNA (1)...(19): siRNA sense strand
gaugcugacuuggacuaug

SEQ ID NO: 1358106 - RNA, 19 nt, Homo sapiens
  misc_RNA (1)...(19): siRNA sense strand
gcaaccauggaaucccuaa

SEQ ID NO: 1358107 - RNA, 19 nt, Homo sapiens
  misc_RNA (1)...(19): siRNA sense strand
uaugaggaguuugugagaa

SEQ ID NO: 1358108 - RNA, 19 nt, Homo sapiens
  misc_RNA (1)...(19): siRNA sense strand
ggaggcaaaaguccuaaua

SEQ ID NO: 1358109 - RNA, 19 nt, Homo sapiens
  misc_RNA (1)...(19): siRNA sense strand
uuuccaacgucacugauga

SEQ ID NO: 1358110 - RNA, 19 nt, Homo sapiens
  misc_RNA (1)...(19): siRNA sense strand
caggguguguucuucaauc

SEQ ID NO: 1358111 - RNA, 19 nt, Homo sapiens
  misc_RNA (1)...(19): siRNA sense strand
caagaagcagcuggaagaa

SEQ ID NO: 1358112 - RNA, 19 nt, Homo sapiens
  misc_RNA (1)...(19): siRNA sense strand
aaagagccaauaacucaga

SEQ ID NO: 1358113 - RNA, 19 nt, Homo sapiens
  misc_RNA (1)...(19): siRNA sense strand
aggcugggcugauaaaauu

SEQ ID NO: 1358114 - RNA, 19 nt, Homo sapiens
  misc_RNA (1)...(19): siRNA sense strand
gauggaugaaguuaucgaa

SEQ ID NO: 1358115 - RNA, 19 nt, Homo sapiens
  misc_RNA (1)...(19): siRNA sense strand
gcgggaguacucagaaguu

SEQ ID NO: 1358116 - RNA, 19 nt, Homo sapiens
  misc_RNA (1)...(19): siRNA sense strand
ggauucaagaugucuggaa

SEQ ID NO: 1358117 - RNA, 19 nt, Homo sapiens
  misc_RNA (1)...(19): siRNA sense strand
gagccaauaacucagacuu

SEQ ID NO: 1358118 - RNA, 19 nt, Homo sapiens
  misc_RNA (1)...(19): siRNA sense strand
agaaacaguacaacaagau

SEQ ID NO: 1358119 - RNA, 19 nt, Homo sapiens
  misc_RNA (1)...(19): siRNA sense strand
uacgcaggcugggcugaua

SEQ ID NO: 1358120 - RNA, 19 nt, Homo sapiens
  misc_RNA (1)...(19): siRNA sense strand
uccuguagauggagacuau

SEQ ID NO: 1358121 - RNA, 19 nt, Homo sapiens
  misc_RNA (1)...(19): siRNA sense strand
gauguuugccuggaaaaua

SEQ ID NO: 1358122 - RNA, 19 nt, Homo sapiens
  misc_RNA (1)...(19): siRNA sense strand
aggcaaaaguccuaauauu

SEQ ID NO: 1358123 - RNA, 19 nt, Homo sapiens
  misc_RNA (1)...(19): siRNA sense strand
cauggaaucccuaaauggu

SEQ ID NO: 1358124 - RNA, 19 nt, Homo sapiens
  misc_RNA (1)...(19): siRNA sense strand
uggcaaaccauuccugcaa

SEQ ID NO: 1358125 - RNA, 19 nt, Homo sapiens
  misc_RNA (1)...(19): siRNA sense strand
uucaagaugucuggaaaug

SEQ ID NO: 1358126 - RNA, 19 nt, Homo sapiens
  misc_RNA (1)...(19): siRNA sense strand
ucaacaaggcccucacagu

SEQ ID NO: 1358127 - RNA, 19 nt, Homo sapiens
  misc_RNA (1)...(19): siRNA sense strand
ugcaggcucucgcaucuuc

SEQ ID NO: 1358128 - RNA, 19 nt, Homo sapiens
  misc_RNA (1)...(19): siRNA sense strand
ucuggaacuuggaggcaaa

SEQ ID NO: 1358129 - RNA, 19 nt, Homo sapiens
  misc_RNA (1)...(19): siRNA sense strand
ggaggaguccaucuaugag

SEQ ID NO: 1358130 - RNA, 19 nt, Homo sapiens
  misc_RNA (1)...(19): siRNA sense strand
accauggaaucccuaaaug

SEQ ID NO: 1358131 - RNA, 19 nt, Homo sapiens
  misc_RNA (1)...(19): siRNA sense strand
aaugcaagcugggacuguu

SEQ ID NO: 1358132 - RNA, 19 nt, Homo sapiens
  misc_RNA (1)...(19): siRNA sense strand
gaggaguuugugagaagaa

SEQ ID NO: 1358133 - RNA, 19 nt, Homo sapiens
  misc_RNA (1)...(19): siRNA sense strand
uaagacgauggaugaaguu

SEQ ID NO: 1358134 - RNA, 19 nt, Homo sapiens
  misc_RNA (1)...(19): siRNA sense strand
cauugagcccacaguguuu

SEQ ID NO: 1358135 - RNA, 19 nt, Homo sapiens
  misc_RNA (1)...(19): siRNA sense strand
caacgucacugaugauaug

SEQ ID NO: 1358136 - RNA, 19 nt, Homo sapiens
  misc_RNA (1)...(19): siRNA sense strand
ggagagaaaugggagaauu

SEQ ID NO: 1358137 - RNA, 19 nt, Homo sapiens
  misc_RNA (1)...(19): siRNA sense strand
gcagcugucuuuacuaaug

SEQ ID NO: 1358138 - RNA, 19 nt, Homo sapiens
  misc_RNA (1)...(19): siRNA sense strand
gaaguaauuugaagagagu

SEQ ID NO: 1358139 - RNA, 19 nt, Homo sapiens
  misc_RNA (1)...(19): siRNA sense strand
gcaaaggacugggccgaaa

SEQ ID NO: 1358140 - RNA, 19 nt, Homo sapiens
  misc_RNA (1)...(19): siRNA sense strand
cgaaagagccaauaacuca

SEQ ID NO: 1358141 - RNA, 19 nt, Homo sapiens
  misc_RNA (1)...(19): siRNA sense strand
uagcagcugucuuuacuaa

SEQ ID NO: 1358142 - RNA, 19 nt, Homo sapiens
  misc_RNA (1)...(19): siRNA sense strand
ggaugaaguuaucgaaaga

SEQ ID NO: 1358143 - RNA, 19 nt, Homo sapiens
  misc_RNA (1)...(19): siRNA sense strand
ggacagaucaucccaugga

SEQ ID NO: 1358144 - RNA, 19 nt, Homo sapiens
  misc_RNA (1)...(19): siRNA sense strand
gccaauaacucagacuuug

SEQ ID NO: 1358145 - RNA, 19 nt, Homo sapiens
  misc_RNA (1)...(19): siRNA sense strand
ggauaagcuugcagacuug

SEQ ID NO: 1358146 - RNA, 19 nt, Homo sapiens
  misc_RNA (1)...(19): siRNA sense strand
gauucaagaugucuggaaa

SEQ ID NO: 1358147 - RNA, 19 nt, Homo sapiens
  misc_RNA (1)...(19): siRNA sense strand
uggauaagcuugcagacuu

SEQ ID NO: 1358148 - RNA, 19 nt, Homo sapiens
  misc_RNA (1)...(19): siRNA sense strand
gauuuaagacgauggauga

SEQ ID NO: 1358149 - RNA, 19 nt, Homo sapiens
  misc_RNA (1)...(19): siRNA sense strand
ccaagaagcagcuggaaga

SEQ ID NO: 1358150 - RNA, 19 nt, Homo sapiens
  misc_RNA (1)...(19): siRNA sense strand
gacgauggaugaaguuauc

SEQ ID NO: 1358151 - RNA, 19 nt, Homo sapiens
  misc_RNA (1)...(19): siRNA sense strand
uacaagacaugaacccauu

SEQ ID NO: 1358152 - RNA, 19 nt, Homo sapiens
  misc_RNA (1)...(19): siRNA sense strand
uuaagacggugacaguaaa

SEQ ID NO: 1358153 - RNA, 19 nt, Homo sapiens
  misc_RNA (1)...(19): siRNA sense strand
gcuggaauguggaggcaaa

SEQ ID NO: 1358154 - RNA, 19 nt, Homo sapiens
  misc_RNA (1)...(19): siRNA sense strand
ggaagaaguaauuugaaga

SEQ ID NO: 1358155 - RNA, 19 nt, Homo sapiens
  misc_RNA (1)...(19): siRNA sense strand
agaagcagcuggaagaagu

SEQ ID NO: 1358156 - RNA, 19 nt, Homo sapiens
  misc_RNA (1)...(19): siRNA sense strand
ggagaucuuuggcccuguu

SEQ ID NO: 1358157 - RNA, 19 nt, Homo sapiens
  misc_RNA (1)...(19): siRNA sense strand
ggcaaaaguccuaauauua

SEQ ID NO: 1358158 - RNA, 19 nt, Homo sapiens
  misc_RNA (1)...(19): siRNA sense strand
cuguuuggaucaauuguua

SEQ ID NO: 1358159 - RNA, 19 nt, Homo sapiens
  misc_RNA (1)...(19): siRNA sense strand
gauggaugcuucagaaagg

SEQ ID NO: 1358160 - RNA, 19 nt, Homo sapiens
  misc_RNA (1)...(19): siRNA sense strand
gauaagaaacaguacaaca

SEQ ID NO: 1358161 - RNA, 19 nt, Homo sapiens
  misc_RNA (1)...(19): siRNA sense strand
ggacagggcaguucuugca

SEQ ID NO: 1358162 - RNA, 19 nt, Homo sapiens
  misc_RNA (1)...(19): siRNA sense strand
guuaagacggugacaguaa

SEQ ID NO: 1358163 - RNA, 19 nt, Homo sapiens
  misc_RNA (1)...(19): siRNA sense strand
gaagaaguaauuugaagag

SEQ ID NO: 1358164 - RNA, 19 nt, Homo sapiens
  misc_RNA (1)...(19): siRNA sense strand
gcagcuggaagaaguaauu

SEQ ID NO: 1358165 - RNA, 19 nt, Homo sapiens
  misc_RNA (1)...(19): siRNA sense strand
gcuggaagaaguaauuuga

SEQ ID NO: 1358166 - RNA, 19 nt, Homo sapiens
  misc_RNA (1)...(19): siRNA sense strand
ggaugaccauuccuguaga

SEQ ID NO: 1358167 - RNA, 19 nt, Homo sapiens
  misc_RNA (1)...(19): siRNA sense strand
cgggaguacucagaaguua

SEQ ID NO: 1358168 - RNA, 19 nt, Homo sapiens
  misc_RNA (1)...(19): siRNA sense strand
cacagugucuucugcaaug

SEQ ID NO: 1358169 - RNA, 19 nt, Homo sapiens
  misc_RNA (1)...(19): siRNA sense strand
gcuuugugcuguggcaaua

SEQ ID NO: 1358170 - RNA, 19 nt, Homo sapiens
  misc_RNA (1)...(19): siRNA sense strand
aaggauggaugcuucagaa

SEQ ID NO: 1358171 - RNA, 19 nt, Homo sapiens
  misc_RNA (1)...(19): siRNA sense strand
gcugauguuugccuggaaa

SEQ ID NO: 1358172 - RNA, 19 nt, Homo sapiens
  misc_RNA (1)...(19): siRNA sense strand
cagcugucuuuacuaauga

SEQ ID NO: 1358173 - RNA, 19 nt, Homo sapiens
  misc_RNA (1)...(19): siRNA sense strand
uuaagacgauggaugaagu

SEQ ID NO: 1358174 - RNA, 19 nt, Homo sapiens
  misc_RNA (1)...(19): siRNA sense strand
ggaaaugggagagaaaugg

SEQ ID NO: 1358175 - RNA, 19 nt, Homo sapiens
  misc_RNA (1)...(19): siRNA sense strand
gggacuguuuggaucaauu

SEQ ID NO: 1358176 - RNA, 19 nt, Homo sapiens
  misc_RNA (1)...(19): siRNA sense strand
gaagcagcuggaagaagua

SEQ ID NO: 1358177 - RNA, 19 nt, Homo sapiens
  misc_RNA (1)...(19): siRNA sense strand
guccaucuaugaggaguuu

SEQ ID NO: 1358178 - RNA, 19 nt, Homo sapiens
  misc_RNA (1)...(19): siRNA sense strand
gaugaccauuccuguagau

SEQ ID NO: 1358179 - RNA, 19 nt, Homo sapiens
  misc_RNA (1)...(19): siRNA sense strand
aagaaacaguacaacaaga

SEQ ID NO: 1358180 - RNA, 19 nt, Homo sapiens
  misc_RNA (1)...(19): siRNA sense strand
aaccauuccugcaagcuuu

SEQ ID NO: 1358181 - RNA, 19 nt, Homo sapiens
  misc_RNA (1)...(19): siRNA sense strand
acucguagcagcugucuuu

SEQ ID NO: 1358182 - RNA, 19 nt, Homo sapiens
  misc_RNA (1)...(19): siRNA sense strand
gggcaguucuugcaaccau

SEQ ID NO: 1358183 - RNA, 19 nt, Homo sapiens
  misc_RNA (1)...(19): siRNA sense strand
gacagaucaucccauggaa

SEQ ID NO: 1358184 - RNA, 19 nt, Homo sapiens
  misc_RNA (1)...(19): siRNA sense strand
gggaugaccauuccuguag

SEQ ID NO: 1358185 - RNA, 19 nt, Homo sapiens
  misc_RNA (1)...(19): siRNA sense strand
gcagagcaaacaccacuca

SEQ ID NO: 1358186 - RNA, 19 nt, Homo sapiens
  misc_RNA (1)...(19): siRNA sense strand
ggacuguuuggaucaauug

SEQ ID NO: 1358187 - RNA, 19 nt, Homo sapiens
  misc_RNA (1)...(19): siRNA sense strand
gaaacaguacaacaagauc

SEQ ID NO: 1358188 - RNA, 19 nt, Homo sapiens
  misc_RNA (1)...(19): siRNA sense strand
uaagaaacaguacaacaag

SEQ ID NO: 1358189 - RNA, 19 nt, Homo sapiens
  misc_RNA (1)...(19): siRNA sense strand
caucaaaaccuuucgauau

SEQ ID NO: 1358190 - RNA, 19 nt, Homo sapiens
  misc_RNA (1)...(19): siRNA sense strand
ggaguacucagaaguuaag

SEQ ID NO: 1358191 - RNA, 19 nt, Homo sapiens
  misc_RNA (1)...(19): siRNA sense strand
cguagcagcugucuuuacu

SEQ ID NO: 1358192 - RNA, 19 nt, Homo sapiens
  misc_RNA (1)...(19): siRNA sense strand
ggaauguggaggcaaagga

SEQ ID NO: 1358193 - RNA, 19 nt, Homo sapiens
  misc_RNA (1)...(19): siRNA sense strand
uggaagaaguaauuugaag

SEQ ID NO: 1358194 - RNA, 19 nt, Homo sapiens
  misc_RNA (1)...(19): siRNA sense strand
gaucaucccauggaacuuc

SEQ ID NO: 1358195 - RNA, 19 nt, Homo sapiens
  misc_RNA (1)...(19): siRNA sense strand
ugggagcccucaucaagga

SEQ ID NO: 1358196 - RNA, 19 nt, Homo sapiens
  misc_RNA (1)...(19): siRNA sense strand
caauaacucagacuuugga

SEQ ID NO: 1358197 - RNA, 19 nt, Homo sapiens
  misc_RNA (1)...(19): siRNA sense strand
uggaugaaguuaucgaaag

SEQ ID NO: 1358198 - RNA, 19 nt, Homo sapiens
  misc_RNA (1)...(19): siRNA sense strand
gguguguucuucaaucaag

SEQ ID NO: 1358199 - RNA, 19 nt, Homo sapiens
  misc_RNA (1)...(19): siRNA sense strand
ggacgucuguuggauaagc

SEQ ID NO: 1358200 - RNA, 19 nt, Homo sapiens
  misc_RNA (1)...(19): siRNA sense strand
ggagacuauuuuaccuuua

SEQ ID NO: 1358201 - RNA, 19 nt, Homo sapiens
  misc_RNA (1)...(19): siRNA sense strand
ggaaagcuuauccaagaag

SEQ ID NO: 1358202 - RNA, 19 nt, Homo sapiens
  misc_RNA (1)...(19): siRNA sense strand
gggaguacucagaaguuaa

SEQ ID NO: 1358203 - RNA, 19 nt, Homo sapiens
  misc_RNA (1)...(19): siRNA sense strand
ucauugagcccacaguguu

SEQ ID NO: 1358204 - RNA, 19 nt, Homo sapiens
  misc_RNA (1)...(19): siRNA sense strand
ggggacgucuguuggauaa

SEQ ID NO: 1358205 - RNA, 19 nt, Homo sapiens
  misc_RNA (1)...(19): siRNA sense strand
guagauggagacuauuuua

SEQ ID NO: 1358206 - RNA, 19 nt, Homo sapiens
  misc_RNA (1)...(19): siRNA sense strand
ggauggaugcuucagaaag

SEQ ID NO: 1358207 - RNA, 19 nt, Homo sapiens
  misc_RNA (1)...(19): siRNA sense strand
caugggagcccucaucaag

SEQ ID NO: 1358208 - RNA, 19 nt, Homo sapiens
  misc_RNA (1)...(19): siRNA sense strand
gaugcugacuuggacuaug

SEQ ID NO: 1358209 - RNA, 19 nt, Homo sapiens
  misc_RNA (1)...(19): siRNA sense strand
uaugaggaguuugugagaa

SEQ ID NO: 1358210 - RNA, 19 nt, Homo sapiens
  misc_RNA (1)...(19): siRNA sense strand
gcaaccauggaaucccuaa

SEQ ID NO: 1358211 - RNA, 19 nt, Homo sapiens
  misc_RNA (1)...(19): siRNA sense strand
ggaggcaaaaguccuaaua

SEQ ID NO: 1358212 - RNA, 19 nt, Homo sapiens
  misc_RNA (1)...(19): siRNA sense strand
uuuccaacgucacugauga

SEQ ID NO: 1358213 - RNA, 19 nt, Homo sapiens
  misc_RNA (1)...(19): siRNA sense strand
caggguguguucuucaauc

SEQ ID NO: 1358214 - RNA, 19 nt, Homo sapiens
  misc_RNA (1)...(19): siRNA sense strand
aggcugggcugauaaaauu

SEQ ID NO: 1358215 - RNA, 19 nt, Homo sapiens
  misc_RNA (1)...(19): siRNA sense strand
aaagagccaauaacucaga

SEQ ID NO: 1358216 - RNA, 19 nt, Homo sapiens
  misc_RNA (1)...(19): siRNA sense strand
caagaagcagcuggaagaa

SEQ ID NO: 1358217 - RNA, 19 nt, Homo sapiens
  misc_RNA (1)...(19): siRNA sense strand
gauggaugaaguuaucgaa

SEQ ID NO: 1358218 - RNA, 19 nt, Homo sapiens
  misc_RNA (1)...(19): siRNA sense strand
gcgggaguacucagaaguu

SEQ ID NO: 1358219 - RNA, 19 nt, Homo sapiens
  misc_RNA (1)...(19): siRNA sense strand
ggauucaagaugucuggaa

SEQ ID NO: 1358220 - RNA, 19 nt, Homo sapiens
  misc_RNA (1)...(19): siRNA sense strand
gagccaauaacucagacuu

SEQ ID NO: 1358221 - RNA, 19 nt, Homo sapiens
  misc_RNA (1)...(19): siRNA sense strand
uccuguagauggagacuau

SEQ ID NO: 1358222 - RNA, 19 nt, Homo sapiens
  misc_RNA (1)...(19): siRNA sense strand
uacgcaggcugggcugaua

SEQ ID NO: 1358223 - RNA, 19 nt, Homo sapiens
  misc_RNA (1)...(19): siRNA sense strand
ggcuuucucucuugguuca

SEQ ID NO: 1358224 - RNA, 19 nt, Homo sapiens
  misc_RNA (1)...(19): siRNA sense strand
ccgccuggcuuucucucuu

SEQ ID NO: 1358225 - RNA, 19 nt, Homo sapiens
  misc_RNA (1)...(19): siRNA sense strand
agaaacaguacaacaagau

SEQ ID NO: 1358226 - RNA, 19 nt, Homo sapiens
  misc_RNA (1)...(19): siRNA sense strand
gauguuugccuggaaaaua

SEQ ID NO: 1358227 - RNA, 19 nt, Homo sapiens
  misc_RNA (1)...(19): siRNA sense strand
aggcaaaaguccuaauauu

SEQ ID NO: 1358228 - RNA, 19 nt, Homo sapiens
  misc_RNA (1)...(19): siRNA sense strand
ugcaggcucucgcaucuuc

SEQ ID NO: 1358229 - RNA, 19 nt, Homo sapiens
  misc_RNA (1)...(19): siRNA sense strand
uucaagaugucuggaaaug

SEQ ID NO: 1358230 - RNA, 19 nt, Homo sapiens
  misc_RNA (1)...(19): siRNA sense strand
ucaacaaggcccucacagu

SEQ ID NO: 1358231 - RNA, 19 nt, Homo sapiens
  misc_RNA (1)...(19): siRNA sense strand
cauggaaucccuaaauggu

SEQ ID NO: 1358232 - RNA, 19 nt, Homo sapiens
  misc_RNA (1)...(19): siRNA sense strand
uggcaaaccauuccugcaa

SEQ ID NO: 1358233 - RNA, 19 nt, Homo sapiens
  misc_RNA (1)...(19): siRNA sense strand
ucuggaacuuggaggcaaa

SEQ ID NO: 1358234 - RNA, 19 nt, Homo sapiens
  misc_RNA (1)...(19): siRNA sense strand
ggaggaguccaucuaugag

SEQ ID NO: 1358235 - RNA, 19 nt, Homo sapiens
  misc_RNA (1)...(19): siRNA sense strand
caacgucacugaugauaug

SEQ ID NO: 1358236 - RNA, 19 nt, Homo sapiens
  misc_RNA (1)...(19): siRNA sense strand
ggagagaaaugggagaauu

SEQ ID NO: 1358237 - RNA, 19 nt, Homo sapiens
  misc_RNA (1)...(19): siRNA sense strand
gcagcugucuuuacuaaug

SEQ ID NO: 1358238 - RNA, 19 nt, Homo sapiens
  misc_RNA (1)...(19): siRNA sense strand
gaaguaauuugaagagagu

SEQ ID NO: 1358239 - RNA, 19 nt, Homo sapiens
  misc_RNA (1)...(19): siRNA sense strand
gcaaaggacugggccgaaa

SEQ ID NO: 1358240 - RNA, 19 nt, Homo sapiens
  misc_RNA (1)...(19): siRNA sense strand
cgaaagagccaauaacuca

SEQ ID NO: 1358241 - RNA, 19 nt, Homo sapiens
  misc_RNA (1)...(19): siRNA sense strand
uagcagcugucuuuacuaa

SEQ ID NO: 1358242 - RNA, 19 nt, Homo sapiens
  misc_RNA (1)...(19): siRNA sense strand
ggaugaaguuaucgaaaga

SEQ ID NO: 1358243 - RNA, 19 nt, Homo sapiens
  misc_RNA (1)...(19): siRNA sense strand
ggacagaucaucccaugga

SEQ ID NO: 1358244 - RNA, 19 nt, Homo sapiens
  misc_RNA (1)...(19): siRNA sense strand
gccaauaacucagacuuug

SEQ ID NO: 1358245 - RNA, 19 nt, Homo sapiens
  misc_RNA (1)...(19): siRNA sense strand
ggauaagcuugcagacuug

SEQ ID NO: 1358246 - RNA, 19 nt, Homo sapiens
  misc_RNA (1)...(19): siRNA sense strand
gauucaagaugucuggaaa

SEQ ID NO: 1358247 - RNA, 19 nt, Homo sapiens
  misc_RNA (1)...(19): siRNA sense strand
uggauaagcuugcagacuu

SEQ ID NO: 1358248 - RNA, 19 nt, Homo sapiens
  misc_RNA (1)...(19): siRNA sense strand
gauuuaagacgauggauga

SEQ ID NO: 1358249 - RNA, 19 nt, Homo sapiens
  misc_RNA (1)...(19): siRNA sense strand
ccaagaagcagcuggaaga

SEQ ID NO: 1358250 - RNA, 19 nt, Homo sapiens
  misc_RNA (1)...(19): siRNA sense strand
gacgauggaugaaguuauc

SEQ ID NO: 1358251 - RNA, 19 nt, Homo sapiens
  misc_RNA (1)...(19): siRNA sense strand
uacaagacaugaacccauu

SEQ ID NO: 1358252 - RNA, 19 nt, Homo sapiens
  misc_RNA (1)...(19): siRNA sense strand
uuaagacggugacaguaaa

SEQ ID NO: 1358253 - RNA, 19 nt, Homo sapiens
  misc_RNA (1)...(19): siRNA sense strand
gcuggaauguggaggcaaa

SEQ ID NO: 1358254 - RNA, 19 nt, Homo sapiens
  misc_RNA (1)...(19): siRNA sense strand
ggaagaaguaauuugaaga

SEQ ID NO: 1358255 - RNA, 19 nt, Homo sapiens
  misc_RNA (1)...(19): siRNA sense strand
agaagcagcuggaagaagu

SEQ ID NO: 1358256 - RNA, 19 nt, Homo sapiens
  misc_RNA (1)...(19): siRNA sense strand
ggagaucuuuggcccuguu

SEQ ID NO: 1358257 - RNA, 19 nt, Homo sapiens
  misc_RNA (1)...(19): siRNA sense strand
ggcaaaaguccuaauauua

SEQ ID NO: 1358258 - RNA, 19 nt, Homo sapiens
  misc_RNA (1)...(19): siRNA sense strand
cuguuuggaucaauuguua

SEQ ID NO: 1358259 - RNA, 19 nt, Homo sapiens
  misc_RNA (1)...(19): siRNA sense strand
gauggaugcuucagaaagg

SEQ ID NO: 1358260 - RNA, 19 nt, Homo sapiens
  misc_RNA (1)...(19): siRNA sense strand
gauaagaaacaguacaaca

SEQ ID NO: 1358261 - RNA, 19 nt, Homo sapiens
  misc_RNA (1)...(19): siRNA sense strand
ggacagggcaguucuugca

SEQ ID NO: 1358262 - RNA, 19 nt, Homo sapiens
  misc_RNA (1)...(19): siRNA sense strand
guuaagacggugacaguaa

SEQ ID NO: 1358263 - RNA, 19 nt, Homo sapiens
  misc_RNA (1)...(19): siRNA sense strand
gaagaaguaauuugaagag

SEQ ID NO: 1358264 - RNA, 19 nt, Homo sapiens
  misc_RNA (1)...(19): siRNA sense strand
gcagcuggaagaaguaauu

SEQ ID NO: 1358265 - RNA, 19 nt, Homo sapiens
  misc_RNA (1)...(19): siRNA sense strand
gcuggaagaaguaauuuga

SEQ ID NO: 1358266 - RNA, 19 nt, Homo sapiens
  misc_RNA (1)...(19): siRNA sense strand
ggaugaccauuccuguaga

SEQ ID NO: 1358267 - RNA, 19 nt, Homo sapiens
  misc_RNA (1)...(19): siRNA sense strand
cgggaguacucagaaguua

SEQ ID NO: 1358268 - RNA, 19 nt, Homo sapiens
  misc_RNA (1)...(19): siRNA sense strand
cacagugucuucugcaaug

SEQ ID NO: 1358269 - RNA, 19 nt, Homo sapiens
  misc_RNA (1)...(19): siRNA sense strand
gcuuugugcuguggcaaua

SEQ ID NO: 1358270 - RNA, 19 nt, Homo sapiens
  misc_RNA (1)...(19): siRNA sense strand
aaggauggaugcuucagaa

SEQ ID NO: 1358271 - RNA, 19 nt, Homo sapiens
  misc_RNA (1)...(19): siRNA sense strand
gcugauguuugccuggaaa

SEQ ID NO: 1358272 - RNA, 19 nt, Homo sapiens
  misc_RNA (1)...(19): siRNA sense strand
cagcugucuuuacuaauga

SEQ ID NO: 1358273 - RNA, 19 nt, Homo sapiens
  misc_RNA (1)...(19): siRNA sense strand
uuaagacgauggaugaagu

SEQ ID NO: 1358274 - RNA, 19 nt, Homo sapiens
  misc_RNA (1)...(19): siRNA sense strand
ggaaaugggagagaaaugg

SEQ ID NO: 1358275 - RNA, 19 nt, Homo sapiens
  misc_RNA (1)...(19): siRNA sense strand
gggacuguuuggaucaauu

SEQ ID NO: 1358276 - RNA, 19 nt, Homo sapiens
  misc_RNA (1)...(19): siRNA sense strand
gaagcagcuggaagaagua

SEQ ID NO: 1358277 - RNA, 19 nt, Homo sapiens
  misc_RNA (1)...(19): siRNA sense strand
guccaucuaugaggaguuu

SEQ ID NO: 1358278 - RNA, 19 nt, Homo sapiens
  misc_RNA (1)...(19): siRNA sense strand
gaugaccauuccuguagau

SEQ ID NO: 1358279 - RNA, 19 nt, Homo sapiens
  misc_RNA (1)...(19): siRNA sense strand
aagaaacaguacaacaaga

SEQ ID NO: 1358280 - RNA, 19 nt, Homo sapiens
  misc_RNA (1)...(19): siRNA sense strand
aaccauuccugcaagcuuu

SEQ ID NO: 1358281 - RNA, 19 nt, Homo sapiens
  misc_RNA (1)...(19): siRNA sense strand
acucguagcagcugucuuu

SEQ ID NO: 1358282 - RNA, 19 nt, Homo sapiens
  misc_RNA (1)...(19): siRNA sense strand
gggcaguucuugcaaccau

SEQ ID NO: 1358283 - RNA, 19 nt, Homo sapiens
  misc_RNA (1)...(19): siRNA sense strand
gacagaucaucccauggaa

SEQ ID NO: 1358284 - RNA, 19 nt, Homo sapiens
  misc_RNA (1)...(19): siRNA sense strand
gggaugaccauuccuguag

SEQ ID NO: 1358285 - RNA, 19 nt, Homo sapiens
  misc_RNA (1)...(19): siRNA sense strand
gcagagcaaacaccacuca

SEQ ID NO: 1358286 - RNA, 19 nt, Homo sapiens
  misc_RNA (1)...(19): siRNA sense strand
ggacuguuuggaucaauug

SEQ ID NO: 1358287 - RNA, 19 nt, Homo sapiens
  misc_RNA (1)...(19): siRNA sense strand
gaaacaguacaacaagauc

SEQ ID NO: 1358288 - RNA, 19 nt, Homo sapiens
  misc_RNA (1)...(19): siRNA sense strand
uaagaaacaguacaacaag

SEQ ID NO: 1358289 - RNA, 19 nt, Homo sapiens
  misc_RNA (1)...(19): siRNA sense strand
caucaaaaccuuucgauau

SEQ ID NO: 1358290 - RNA, 19 nt, Homo sapiens
  misc_RNA (1)...(19): siRNA sense strand
ggaguacucagaaguuaag

SEQ ID NO: 1358291 - RNA, 19 nt, Homo sapiens
  misc_RNA (1)...(19): siRNA sense strand
cguagcagcugucuuuacu

SEQ ID NO: 1358292 - RNA, 19 nt, Homo sapiens
  misc_RNA (1)...(19): siRNA sense strand
ggaauguggaggcaaagga

SEQ ID NO: 1358293 - RNA, 19 nt, Homo sapiens
  misc_RNA (1)...(19): siRNA sense strand
uggaagaaguaauuugaag

SEQ ID NO: 1358294 - RNA, 19 nt, Homo sapiens
  misc_RNA (1)...(19): siRNA sense strand
gaucaucccauggaacuuc

SEQ ID NO: 1358295 - RNA, 19 nt, Homo sapiens
  misc_RNA (1)...(19): siRNA sense strand
ugggagcccucaucaagga

SEQ ID NO: 1358296 - RNA, 19 nt, Homo sapiens
  misc_RNA (1)...(19): siRNA sense strand
caauaacucagacuuugga

SEQ ID NO: 1358297 - RNA, 19 nt, Homo sapiens
  misc_RNA (1)...(19): siRNA sense strand
uggaugaaguuaucgaaag

SEQ ID NO: 1358298 - RNA, 19 nt, Homo sapiens
  misc_RNA (1)...(19): siRNA sense strand
gguguguucuucaaucaag

SEQ ID NO: 1358299 - RNA, 19 nt, Homo sapiens
  misc_RNA (1)...(19): siRNA sense strand
ggacgucuguuggauaagc

SEQ ID NO: 1358300 - RNA, 19 nt, Homo sapiens
  misc_RNA (1)...(19): siRNA sense strand
ggagacuauuuuaccuuua

SEQ ID NO: 1358301 - RNA, 19 nt, Homo sapiens
  misc_RNA (1)...(19): siRNA sense strand
ggaaagcuuauccaagaag

SEQ ID NO: 1358302 - RNA, 19 nt, Homo sapiens
  misc_RNA (1)...(19): siRNA sense strand
gggaguacucagaaguuaa

SEQ ID NO: 1358303 - RNA, 19 nt, Homo sapiens
  misc_RNA (1)...(19): siRNA sense strand
ucauugagcccacaguguu

SEQ ID NO: 1358304 - RNA, 19 nt, Homo sapiens
  misc_RNA (1)...(19): siRNA sense strand
ggggacgucuguuggauaa

SEQ ID NO: 1358305 - RNA, 19 nt, Homo sapiens
  misc_RNA (1)...(19): siRNA sense strand
guagauggagacuauuuua

SEQ ID NO: 1358306 - RNA, 19 nt, Homo sapiens
  misc_RNA (1)...(19): siRNA sense strand
ggauggaugcuucagaaag

SEQ ID NO: 1358307 - RNA, 19 nt, Homo sapiens
  misc_RNA (1)...(19): siRNA sense strand
caugggagcccucaucaag

SEQ ID NO: 1358308 - RNA, 19 nt, Homo sapiens
  misc_RNA (1)...(19): siRNA sense strand
gaugcugacuuggacuaug

SEQ ID NO: 1358309 - RNA, 19 nt, Homo sapiens
  misc_RNA (1)...(19): siRNA sense strand
uaugaggaguuugugagaa

SEQ ID NO: 1358310 - RNA, 19 nt, Homo sapiens
  misc_RNA (1)...(19): siRNA sense strand
gcaaccauggaaucccuaa

SEQ ID NO: 1358311 - RNA, 19 nt, Homo sapiens
  misc_RNA (1)...(19): siRNA sense strand
ggaggcaaaaguccuaaua

SEQ ID NO: 1358312 - RNA, 19 nt, Homo sapiens
  misc_RNA (1)...(19): siRNA sense strand
uuuccaacgucacugauga

SEQ ID NO: 1358313 - RNA, 19 nt, Homo sapiens
  misc_RNA (1)...(19): siRNA sense strand
caggguguguucuucaauc

SEQ ID NO: 1358314 - RNA, 19 nt, Homo sapiens
  misc_RNA (1)...(19): siRNA sense strand
aggcugggcugauaaaauu

SEQ ID NO: 1358315 - RNA, 19 nt, Homo sapiens
  misc_RNA (1)...(19): siRNA sense strand
aaagagccaauaacucaga

SEQ ID NO: 1358316 - RNA, 19 nt, Homo sapiens
  misc_RNA (1)...(19): siRNA sense strand
caagaagcagcuggaagaa

SEQ ID NO: 1358317 - RNA, 19 nt, Homo sapiens
  misc_RNA (1)...(19): siRNA sense strand
gauggaugaaguuaucgaa

SEQ ID NO: 1358318 - RNA, 19 nt, Homo sapiens
  misc_RNA (1)...(19): siRNA sense strand
gcgggaguacucagaaguu

SEQ ID NO: 1358319 - RNA, 19 nt, Homo sapiens
  misc_RNA (1)...(19): siRNA sense strand
ggauucaagaugucuggaa

SEQ ID NO: 1358320 - RNA, 19 nt, Homo sapiens
  misc_RNA (1)...(19): siRNA sense strand
gagccaauaacucagacuu

SEQ ID NO: 1358321 - RNA, 19 nt, Homo sapiens
  misc_RNA (1)...(19): siRNA sense strand
uccuguagauggagacuau

SEQ ID NO: 1358322 - RNA, 19 nt, Homo sapiens
  misc_RNA (1)...(19): siRNA sense strand
uacgcaggcugggcugaua

SEQ ID NO: 1358323 - RNA, 19 nt, Homo sapiens
  misc_RNA (1)...(19): siRNA sense strand
ggcuuucucucuugguuca

SEQ ID NO: 1358324 - RNA, 19 nt, Homo sapiens
  misc_RNA (1)...(19): siRNA sense strand
ccgccuggcuuucucucuu

SEQ ID NO: 1358325 - RNA, 19 nt, Homo sapiens
  misc_RNA (1)...(19): siRNA sense strand
agaaacaguacaacaagau

SEQ ID NO: 1358326 - RNA, 19 nt, Homo sapiens
  misc_RNA (1)...(19): siRNA sense strand
gauguuugccuggaaaaua

SEQ ID NO: 1358327 - RNA, 19 nt, Homo sapiens
  misc_RNA (1)...(19): siRNA sense strand
aggcaaaaguccuaauauu

SEQ ID NO: 1358328 - RNA, 19 nt, Homo sapiens
  misc_RNA (1)...(19): siRNA sense strand
ugcaggcucucgcaucuuc

SEQ ID NO: 1358329 - RNA, 19 nt, Homo sapiens
  misc_RNA (1)...(19): siRNA sense strand
uucaagaugucuggaaaug

SEQ ID NO: 1358330 - RNA, 19 nt, Homo sapiens
  misc_RNA (1)...(19): siRNA sense strand
ucaacaaggcccucacagu

SEQ ID NO: 1358331 - RNA, 19 nt, Homo sapiens
  misc_RNA (1)...(19): siRNA sense strand
cauggaaucccuaaauggu

SEQ ID NO: 1358332 - RNA, 19 nt, Homo sapiens
  misc_RNA (1)...(19): siRNA sense strand
uggcaaaccauuccugcaa

SEQ ID NO: 1358333 - RNA, 19 nt, Homo sapiens
  misc_RNA (1)...(19): siRNA sense strand
ucuggaacuuggaggcaaa

SEQ ID NO: 1358334 - RNA, 19 nt, Homo sapiens
  misc_RNA (1)...(19): siRNA sense strand
ggaggaguccaucuaugag

SEQ ID NO: 1358335 - RNA, 19 nt, Homo sapiens
  misc_RNA (1)...(19): siRNA sense strand
caacgucacugaugauaug

SEQ ID NO: 1358336 - RNA, 19 nt, Homo sapiens
  misc_RNA (1)...(19): siRNA sense strand
ggagagaaaugggagaauu

SEQ ID NO: 1358337 - RNA, 19 nt, Homo sapiens
  misc_RNA (1)...(19): siRNA sense strand
gcagcugucuuuacuaaug

SEQ ID NO: 1358338 - RNA, 19 nt, Homo sapiens
  misc_RNA (1)...(19): siRNA sense strand
gaaguaauuugaagagagu

SEQ ID NO: 1358339 - RNA, 19 nt, Homo sapiens
  misc_RNA (1)...(19): siRNA sense strand
gcaaaggacugggccgaaa

SEQ ID NO: 1358340 - RNA, 19 nt, Homo sapiens
  misc_RNA (1)...(19): siRNA sense strand
cgaaagagccaauaacuca

SEQ ID NO: 1358341 - RNA, 19 nt, Homo sapiens
  misc_RNA (1)...(19): siRNA sense strand
uagcagcugucuuuacuaa

SEQ ID NO: 1358342 - RNA, 19 nt, Homo sapiens
  misc_RNA (1)...(19): siRNA sense strand
ggaugaaguuaucgaaaga

SEQ ID NO: 1358343 - RNA, 19 nt, Homo sapiens
  misc_RNA (1)...(19): siRNA sense strand
ggacagaucaucccaugga

SEQ ID NO: 1358344 - RNA, 19 nt, Homo sapiens
  misc_RNA (1)...(19): siRNA sense strand
gccaauaacucagacuuug

SEQ ID NO: 1358345 - RNA, 19 nt, Homo sapiens
  misc_RNA (1)...(19): siRNA sense strand
ggauaagcuugcagacuug

SEQ ID NO: 1358346 - RNA, 19 nt, Homo sapiens
  misc_RNA (1)...(19): siRNA sense strand
gauucaagaugucuggaaa

SEQ ID NO: 1358347 - RNA, 19 nt, Homo sapiens
  misc_RNA (1)...(19): siRNA sense strand
uggauaagcuugcagacuu

SEQ ID NO: 1358348 - RNA, 19 nt, Homo sapiens
  misc_RNA (1)...(19): siRNA sense strand
gauuuaagacgauggauga

SEQ ID NO: 1358349 - RNA, 19 nt, Homo sapiens
  misc_RNA (1)...(19): siRNA sense strand
ccaagaagcagcuggaaga

SEQ ID NO: 1358350 - RNA, 19 nt, Homo sapiens
  misc_RNA (1)...(19): siRNA sense strand
gacgauggaugaaguuauc

SEQ ID NO: 1358351 - RNA, 19 nt, Homo sapiens
  misc_RNA (1)...(19): siRNA sense strand
uacaagacaugaacccauu

SEQ ID NO: 1358352 - RNA, 19 nt, Homo sapiens
  misc_RNA (1)...(19): siRNA sense strand
uuaagacggugacaguaaa

SEQ ID NO: 1358353 - RNA, 19 nt, Homo sapiens
  misc_RNA (1)...(19): siRNA sense strand
gcuggaauguggaggcaaa

SEQ ID NO: 1358354 - RNA, 19 nt, Homo sapiens
  misc_RNA (1)...(19): siRNA sense strand
ggaagaaguaauuugaaga

SEQ ID NO: 1358355 - RNA, 19 nt, Homo sapiens
  misc_RNA (1)...(19): siRNA sense strand
agaagcagcuggaagaagu

SEQ ID NO: 1358356 - RNA, 19 nt, Homo sapiens
  misc_RNA (1)...(19): siRNA sense strand
ggagaucuuuggcccuguu

SEQ ID NO: 1358357 - RNA, 19 nt, Homo sapiens
  misc_RNA (1)...(19): siRNA sense strand
ggcaaaaguccuaauauua

SEQ ID NO: 1358358 - RNA, 19 nt, Homo sapiens
  misc_RNA (1)...(19): siRNA sense strand
cuguuuggaucaauuguua

SEQ ID NO: 1358359 - RNA, 19 nt, Homo sapiens
  misc_RNA (1)...(19): siRNA sense strand
gauaagaaacaguacaaca

SEQ ID NO: 1358360 - RNA, 19 nt, Homo sapiens
  misc_RNA (1)...(19): siRNA sense strand
ggacagggcaguucuugca

SEQ ID NO: 1358361 - RNA, 19 nt, Homo sapiens
  misc_RNA (1)...(19): siRNA sense strand
guuaagacggugacaguaa

SEQ ID NO: 1358362 - RNA, 19 nt, Homo sapiens
  misc_RNA (1)...(19): siRNA sense strand
gaagaaguaauuugaagag

SEQ ID NO: 1358363 - RNA, 19 nt, Homo sapiens
  misc_RNA (1)...(19): siRNA sense strand
gcagcuggaagaaguaauu

SEQ ID NO: 1358364 - RNA, 19 nt, Homo sapiens
  misc_RNA (1)...(19): siRNA sense strand
gcuggaagaaguaauuuga

SEQ ID NO: 1358365 - RNA, 19 nt, Homo sapiens
  misc_RNA (1)...(19): siRNA sense strand
ggaugaccauuccuguaga

SEQ ID NO: 1358366 - RNA, 19 nt, Homo sapiens
  misc_RNA (1)...(19): siRNA sense strand
cgggaguacucagaaguua

SEQ ID NO: 1358367 - RNA, 19 nt, Homo sapiens
  misc_RNA (1)...(19): siRNA sense strand
cacagugucuucugcaaug

SEQ ID NO: 1358368 - RNA, 19 nt, Homo sapiens
  misc_RNA (1)...(19): siRNA sense strand
gcuuugugcuguggcaaua

SEQ ID NO: 1358369 - RNA, 19 nt, Homo sapiens
  misc_RNA (1)...(19): siRNA sense strand
gcugauguuugccuggaaa

SEQ ID NO: 1358370 - RNA, 19 nt, Homo sapiens
  misc_RNA (1)...(19): siRNA sense strand
cagcugucuuuacuaauga

SEQ ID NO: 1358371 - RNA, 19 nt, Homo sapiens
  misc_RNA (1)...(19): siRNA sense strand
uuaagacgauggaugaagu

SEQ ID NO: 1358372 - RNA, 19 nt, Homo sapiens
  misc_RNA (1)...(19): siRNA sense strand
ggaaaugggagagaaaugg

SEQ ID NO: 1358373 - RNA, 19 nt, Homo sapiens
  misc_RNA (1)...(19): siRNA sense strand
gggacuguuuggaucaauu

SEQ ID NO: 1358374 - RNA, 19 nt, Homo sapiens
  misc_RNA (1)...(19): siRNA sense strand
gaagcagcuggaagaagua

SEQ ID NO: 1358375 - RNA, 19 nt, Homo sapiens
  misc_RNA (1)...(19): siRNA sense strand
guccaucuaugaggaguuu

SEQ ID NO: 1358376 - RNA, 19 nt, Homo sapiens
  misc_RNA (1)...(19): siRNA sense strand
gaugaccauuccuguagau

SEQ ID NO: 1358377 - RNA, 19 nt, Homo sapiens
  misc_RNA (1)...(19): siRNA sense strand
aagaaacaguacaacaaga

SEQ ID NO: 1358378 - RNA, 19 nt, Homo sapiens
  misc_RNA (1)...(19): siRNA sense strand
gggaugaccauuccuguag

SEQ ID NO: 1358379 - RNA, 19 nt, Homo sapiens
  misc_RNA (1)...(19): siRNA sense strand
gggcaguucuugcaaccau

SEQ ID NO: 1358380 - RNA, 19 nt, Homo sapiens
  misc_RNA (1)...(19): siRNA sense strand
acucguagcagcugucuuu

SEQ ID NO: 1358381 - RNA, 19 nt, Homo sapiens
  misc_RNA (1)...(19): siRNA sense strand
aaccauuccugcaagcuuu

SEQ ID NO: 1358382 - RNA, 19 nt, Homo sapiens
  misc_RNA (1)...(19): siRNA sense strand
gacagaucaucccauggaa

SEQ ID NO: 1358383 - RNA, 19 nt, Homo sapiens
  misc_RNA (1)...(19): siRNA sense strand
gcagagcaaacaccacuca

SEQ ID NO: 1358384 - RNA, 19 nt, Homo sapiens
  misc_RNA (1)...(19): siRNA sense strand
ggacuguuuggaucaauug

SEQ ID NO: 1358385 - RNA, 19 nt, Homo sapiens
  misc_RNA (1)...(19): siRNA sense strand
gaaacaguacaacaagauc

SEQ ID NO: 1358386 - RNA, 19 nt, Homo sapiens
  misc_RNA (1)...(19): siRNA sense strand
uaagaaacaguacaacaag

SEQ ID NO: 1358387 - RNA, 19 nt, Homo sapiens
  misc_RNA (1)...(19): siRNA sense strand
caucaaaaccuuucgauau

SEQ ID NO: 1358388 - RNA, 19 nt, Homo sapiens
  misc_RNA (1)...(19): siRNA sense strand
ggaguacucagaaguuaag

SEQ ID NO: 1358389 - RNA, 19 nt, Homo sapiens
  misc_RNA (1)...(19): siRNA sense strand
cguagcagcugucuuuacu

SEQ ID NO: 1358390 - RNA, 19 nt, Homo sapiens
  misc_RNA (1)...(19): siRNA sense strand
ggaauguggaggcaaagga

SEQ ID NO: 1358391 - RNA, 19 nt, Homo sapiens
  misc_RNA (1)...(19): siRNA sense strand
uggaagaaguaauuugaag

SEQ ID NO: 1358392 - RNA, 19 nt, Homo sapiens
  misc_RNA (1)...(19): siRNA sense strand
gaucaucccauggaacuuc

SEQ ID NO: 1358393 - RNA, 19 nt, Homo sapiens
  misc_RNA (1)...(19): siRNA sense strand
ugggagcccucaucaagga

SEQ ID NO: 1358394 - RNA, 19 nt, Homo sapiens
  misc_RNA (1)...(19): siRNA sense strand
caauaacucagacuuugga

SEQ ID NO: 1358395 - RNA, 19 nt, Homo sapiens
  misc_RNA (1)...(19): siRNA sense strand
ggacgucuguuggauaagc

SEQ ID NO: 1358396 - RNA, 19 nt, Homo sapiens
  misc_RNA (1)...(19): siRNA sense strand
uggaugaaguuaucgaaag

SEQ ID NO: 1358397 - RNA, 19 nt, Homo sapiens
  misc_RNA (1)...(19): siRNA sense strand
gguguguucuucaaucaag

SEQ ID NO: 1358398 - RNA, 19 nt, Homo sapiens
  misc_RNA (1)...(19): siRNA sense strand
ggagacuauuuuaccuuua

SEQ ID NO: 1358399 - RNA, 19 nt, Homo sapiens
  misc_RNA (1)...(19): siRNA sense strand
ggaaagcuuauccaagaag

SEQ ID NO: 1358400 - RNA, 19 nt, Homo sapiens
  misc_RNA (1)...(19): siRNA sense strand
gggaguacucagaaguuaa

SEQ ID NO: 1358401 - RNA, 19 nt, Homo sapiens
  misc_RNA (1)...(19): siRNA sense strand
ucauugagcccacaguguu

SEQ ID NO: 1358402 - RNA, 19 nt, Homo sapiens
  misc_RNA (1)...(19): siRNA sense strand
ggggacgucuguuggauaa

SEQ ID NO: 1358403 - RNA, 19 nt, Homo sapiens
  misc_RNA (1)...(19): siRNA sense strand
guagauggagacuauuuua

SEQ ID NO: 1358404 - RNA, 19 nt, Homo sapiens
  misc_RNA (1)...(19): siRNA sense strand
caugggagcccucaucaag

SEQ ID NO: 1358405 - RNA, 19 nt, Homo sapiens
  misc_RNA (1)...(19): siRNA sense strand
gaugcugacuuggacuaug

SEQ ID NO: 1358406 - RNA, 19 nt, Homo sapiens
  misc_RNA (1)...(19): siRNA sense strand
gcaaccauggaaucccuaa

SEQ ID NO: 1358407 - RNA, 19 nt, Homo sapiens
  misc_RNA (1)...(19): siRNA sense strand
uaugaggaguuugugagaa

SEQ ID NO: 1358408 - RNA, 19 nt, Homo sapiens
  misc_RNA (1)...(19): siRNA sense strand
ggaggcaaaaguccuaaua

SEQ ID NO: 1358409 - RNA, 19 nt, Homo sapiens
  misc_RNA (1)...(19): siRNA sense strand
uuuccaacgucacugauga

SEQ ID NO: 1358410 - RNA, 19 nt, Homo sapiens
  misc_RNA (1)...(19): siRNA sense strand
caggguguguucuucaauc

SEQ ID NO: 1358411 - RNA, 19 nt, Homo sapiens
  misc_RNA (1)...(19): siRNA sense strand
caagaagcagcuggaagaa

SEQ ID NO: 1358412 - RNA, 19 nt, Homo sapiens
  misc_RNA (1)...(19): siRNA sense strand
aaagagccaauaacucaga

SEQ ID NO: 1358413 - RNA, 19 nt, Homo sapiens
  misc_RNA (1)...(19): siRNA sense strand
aggcugggcugauaaaauu

SEQ ID NO: 1358414 - RNA, 19 nt, Homo sapiens
  misc_RNA (1)...(19): siRNA sense strand
gauggaugaaguuaucgaa

SEQ ID NO: 1358415 - RNA, 19 nt, Homo sapiens
  misc_RNA (1)...(19): siRNA sense strand
gcgggaguacucagaaguu

SEQ ID NO: 1358416 - RNA, 19 nt, Homo sapiens
  misc_RNA (1)...(19): siRNA sense strand
ggauucaagaugucuggaa

SEQ ID NO: 1358417 - RNA, 19 nt, Homo sapiens
  misc_RNA (1)...(19): siRNA sense strand
gagccaauaacucagacuu

SEQ ID NO: 1358418 - RNA, 19 nt, Homo sapiens
  misc_RNA (1)...(19): siRNA sense strand
agaaacaguacaacaagau

SEQ ID NO: 1358419 - RNA, 19 nt, Homo sapiens
  misc_RNA (1)...(19): siRNA sense strand
uacgcaggcugggcugaua

SEQ ID NO: 1358420 - RNA, 19 nt, Homo sapiens
  misc_RNA (1)...(19): siRNA sense strand
uccuguagauggagacuau

SEQ ID NO: 1358421 - RNA, 19 nt, Homo sapiens
  misc_RNA (1)...(19): siRNA sense strand
gauguuugccuggaaaaua

SEQ ID NO: 1358422 - RNA, 19 nt, Homo sapiens
  misc_RNA (1)...(19): siRNA sense strand
aggcaaaaguccuaauauu

SEQ ID NO: 1358423 - RNA, 19 nt, Homo sapiens
  misc_RNA (1)...(19): siRNA sense strand
cauggaaucccuaaauggu

SEQ ID NO: 1358424 - RNA, 19 nt, Homo sapiens
  misc_RNA (1)...(19): siRNA sense strand
uggcaaaccauuccugcaa

SEQ ID NO: 1358425 - RNA, 19 nt, Homo sapiens
  misc_RNA (1)...(19): siRNA sense strand
uucaagaugucuggaaaug

SEQ ID NO: 1358426 - RNA, 19 nt, Homo sapiens
  misc_RNA (1)...(19): siRNA sense strand
ucaacaaggcccucacagu

SEQ ID NO: 1358427 - RNA, 19 nt, Homo sapiens
  misc_RNA (1)...(19): siRNA sense strand
ugcaggcucucgcaucuuc

SEQ ID NO: 1358428 - RNA, 19 nt, Homo sapiens
  misc_RNA (1)...(19): siRNA sense strand
ucuggaacuuggaggcaaa

SEQ ID NO: 1358429 - RNA, 19 nt, Homo sapiens
  misc_RNA (1)...(19): siRNA sense strand
ggaggaguccaucuaugag

SEQ ID NO: 1358430 - RNA, 19 nt, Homo sapiens
  misc_RNA (1)...(19): siRNA sense strand
accauggaaucccuaaaug

SEQ ID NO: 1358431 - RNA, 19 nt, Homo sapiens
  misc_RNA (1)...(19): siRNA sense strand
aaugcaagcugggacuguu

SEQ ID NO: 1358432 - RNA, 19 nt, Homo sapiens
  misc_RNA (1)...(19): siRNA sense strand
gaggaguuugugagaagaa

SEQ ID NO: 1358433 - RNA, 19 nt, Homo sapiens
  misc_RNA (1)...(19): siRNA sense strand
uaagacgauggaugaaguu

SEQ ID NO: 1358434 - RNA, 19 nt, Homo sapiens
  misc_RNA (1)...(19): siRNA sense strand
cauugagcccacaguguuu

SEQ ID NO: 1358435 - RNA, 19 nt, Homo sapiens
  misc_RNA (1)...(19): siRNA sense strand
gcaaacaugucccagguaa

SEQ ID NO: 1358436 - RNA, 19 nt, Homo sapiens
  misc_RNA (1)...(19): siRNA sense strand
gcaaguggcaguacugaua

SEQ ID NO: 1358437 - RNA, 19 nt, Homo sapiens
  misc_RNA (1)...(19): siRNA sense strand
ggagacagguuugcauauu

SEQ ID NO: 1358438 - RNA, 19 nt, Homo sapiens
  misc_RNA (1)...(19): siRNA sense strand
uggcaguacugauaauuua

SEQ ID NO: 1358439 - RNA, 19 nt, Homo sapiens
  misc_RNA (1)...(19): siRNA sense strand
gagacagguuugcauauug

SEQ ID NO: 1358440 - RNA, 19 nt, Homo sapiens
  misc_RNA (1)...(19): siRNA sense strand
gacccuggcuaucuauauu

SEQ ID NO: 1358441 - RNA, 19 nt, Homo sapiens
  misc_RNA (1)...(19): siRNA sense strand
gaucaccguuauaaugaau

SEQ ID NO: 1358442 - RNA, 19 nt, Homo sapiens
  misc_RNA (1)...(19): siRNA sense strand
acauaauccugaucuguuu

SEQ ID NO: 1358443 - RNA, 19 nt, Homo sapiens
  misc_RNA (1)...(19): siRNA sense strand
gugcgacccuggcuaucua

SEQ ID NO: 1358444 - RNA, 19 nt, Homo sapiens
  misc_RNA (1)...(19): siRNA sense strand
ucaguuggaucaccguuau

SEQ ID NO: 1358445 - RNA, 19 nt, Homo sapiens
  misc_RNA (1)...(19): siRNA sense strand
ggaucaccguuauaaugaa

SEQ ID NO: 1358446 - RNA, 19 nt, Homo sapiens
  misc_RNA (1)...(19): siRNA sense strand
aaacuucacgcaauuaugu

SEQ ID NO: 1358447 - RNA, 19 nt, Homo sapiens
  misc_RNA (1)...(19): siRNA sense strand
caaguggcaguacugauaa

SEQ ID NO: 1358448 - RNA, 19 nt, Homo sapiens
  misc_RNA (1)...(19): siRNA sense strand
agacagguuugcauauugu

SEQ ID NO: 1358449 - RNA, 19 nt, Homo sapiens
  misc_RNA (1)...(19): siRNA sense strand
cccuggcuaucuauauuua

SEQ ID NO: 1358450 - RNA, 19 nt, Homo sapiens
  misc_RNA (1)...(19): siRNA sense strand
auucaaacuucacgcaauu

SEQ ID NO: 1358451 - RNA, 19 nt, Homo sapiens
  misc_RNA (1)...(19): siRNA sense strand
cacauaauccugaucuguu

SEQ ID NO: 1358452 - RNA, 19 nt, Homo sapiens
  misc_RNA (1)...(19): siRNA sense strand
guggagacagguuugcaua

SEQ ID NO: 1358453 - RNA, 19 nt, Homo sapiens
  misc_RNA (1)...(19): siRNA sense strand
uggaucaccguuauaauga

SEQ ID NO: 1358454 - RNA, 19 nt, Homo sapiens
  misc_RNA (1)...(19): siRNA sense strand
gcaguacugauaauuuagu

SEQ ID NO: 1358455 - RNA, 19 nt, Homo sapiens
  misc_RNA (1)...(19): siRNA sense strand
ucaccguuauaaugaauuc

SEQ ID NO: 1358456 - RNA, 19 nt, Homo sapiens
  misc_RNA (1)...(19): siRNA sense strand
ccacauaauccugaucugu

SEQ ID NO: 1358457 - RNA, 19 nt, Homo sapiens
  misc_RNA (1)...(19): siRNA sense strand
gaugucagccauggaacaa

SEQ ID NO: 1358458 - RNA, 19 nt, Homo sapiens
  misc_RNA (1)...(19): siRNA sense strand
guggcaguacugauaauuu

SEQ ID NO: 1358459 - RNA, 19 nt, Homo sapiens
  misc_RNA (1)...(19): siRNA sense strand
ucaaacuucacgcaauuau

SEQ ID NO: 1358460 - RNA, 19 nt, Homo sapiens
  misc_RNA (1)...(19): siRNA sense strand
caaacuucacgcaauuaug

SEQ ID NO: 1358461 - RNA, 19 nt, Homo sapiens
  misc_RNA (1)...(19): siRNA sense strand
aaacaugucccagguaagg

SEQ ID NO: 1358462 - RNA, 19 nt, Homo sapiens
  misc_RNA (1)...(19): siRNA sense strand
aaacaaucacagcaauuuc

SEQ ID NO: 1358463 - RNA, 19 nt, Homo sapiens
  misc_RNA (1)...(19): siRNA sense strand
aauucaaacuucacgcaau

SEQ ID NO: 1358464 - RNA, 19 nt, Homo sapiens
  misc_RNA (1)...(19): siRNA sense strand
uuggaucaccguuauaaug

SEQ ID NO: 1358465 - RNA, 19 nt, Homo sapiens
  misc_RNA (1)...(19): siRNA sense strand
ccugaucuguuugcaagug

SEQ ID NO: 1358466 - RNA, 19 nt, Homo sapiens
  misc_RNA (1)...(19): siRNA sense strand
cgacccuggcuaucuauau

SEQ ID NO: 1358467 - RNA, 19 nt, Homo sapiens
  misc_RNA (1)...(19): siRNA sense strand
ggaugucagccauggaaca

SEQ ID NO: 1358468 - RNA, 19 nt, Homo sapiens
  misc_RNA (1)...(19): siRNA sense strand
gguaaggcaagugggauug

SEQ ID NO: 1358469 - RNA, 19 nt, Homo sapiens
  misc_RNA (1)...(19): siRNA sense strand
caguacugauaauuuagug

SEQ ID NO: 1358470 - RNA, 19 nt, Homo sapiens
  misc_RNA (1)...(19): siRNA sense strand
cuggcuaucuauauuuauc

SEQ ID NO: 1358471 - RNA, 19 nt, Homo sapiens
  misc_RNA (1)...(19): siRNA sense strand
caaucacagcaauuucuug

SEQ ID NO: 1358472 - RNA, 19 nt, Homo sapiens
  misc_RNA (1)...(19): siRNA sense strand
gcaaguggcaguacugaua

SEQ ID NO: 1358473 - RNA, 19 nt, Homo sapiens
  misc_RNA (1)...(19): siRNA sense strand
ggagacagguuugcauauu

SEQ ID NO: 1358474 - RNA, 19 nt, Homo sapiens
  misc_RNA (1)...(19): siRNA sense strand
uggcaguacugauaauuua

SEQ ID NO: 1358475 - RNA, 19 nt, Homo sapiens
  misc_RNA (1)...(19): siRNA sense strand
gagacagguuugcauauug

SEQ ID NO: 1358476 - RNA, 19 nt, Homo sapiens
  misc_RNA (1)...(19): siRNA sense strand
gacccuggcuaucuauauu

SEQ ID NO: 1358477 - RNA, 19 nt, Homo sapiens
  misc_RNA (1)...(19): siRNA sense strand
gaucaccguuauaaugaau

SEQ ID NO: 1358478 - RNA, 19 nt, Homo sapiens
  misc_RNA (1)...(19): siRNA sense strand
acauaauccugaucuguuu

SEQ ID NO: 1358479 - RNA, 19 nt, Homo sapiens
  misc_RNA (1)...(19): siRNA sense strand
gugcgacccuggcuaucua

SEQ ID NO: 1358480 - RNA, 19 nt, Homo sapiens
  misc_RNA (1)...(19): siRNA sense strand
ucaguuggaucaccguuau

SEQ ID NO: 1358481 - RNA, 19 nt, Homo sapiens
  misc_RNA (1)...(19): siRNA sense strand
ggaucaccguuauaaugaa

SEQ ID NO: 1358482 - RNA, 19 nt, Homo sapiens
  misc_RNA (1)...(19): siRNA sense strand
aaacuucacgcaauuaugu

SEQ ID NO: 1358483 - RNA, 19 nt, Homo sapiens
  misc_RNA (1)...(19): siRNA sense strand
caaguggcaguacugauaa

SEQ ID NO: 1358484 - RNA, 19 nt, Homo sapiens
  misc_RNA (1)...(19): siRNA sense strand
agacagguuugcauauugu

SEQ ID NO: 1358485 - RNA, 19 nt, Homo sapiens
  misc_RNA (1)...(19): siRNA sense strand
cccuggcuaucuauauuua

SEQ ID NO: 1358486 - RNA, 19 nt, Homo sapiens
  misc_RNA (1)...(19): siRNA sense strand
auucaaacuucacgcaauu

SEQ ID NO: 1358487 - RNA, 19 nt, Homo sapiens
  misc_RNA (1)...(19): siRNA sense strand
cacauaauccugaucuguu

SEQ ID NO: 1358488 - RNA, 19 nt, Homo sapiens
  misc_RNA (1)...(19): siRNA sense strand
guggagacagguuugcaua

SEQ ID NO: 1358489 - RNA, 19 nt, Homo sapiens
  misc_RNA (1)...(19): siRNA sense strand
uggaucaccguuauaauga

SEQ ID NO: 1358490 - RNA, 19 nt, Homo sapiens
  misc_RNA (1)...(19): siRNA sense strand
gcaguacugauaauuuagu

SEQ ID NO: 1358491 - RNA, 19 nt, Homo sapiens
  misc_RNA (1)...(19): siRNA sense strand
ucaccguuauaaugaauuc

SEQ ID NO: 1358492 - RNA, 19 nt, Homo sapiens
  misc_RNA (1)...(19): siRNA sense strand
ccacauaauccugaucugu

SEQ ID NO: 1358493 - RNA, 19 nt, Homo sapiens
  misc_RNA (1)...(19): siRNA sense strand
gaugucagccauggaacaa

SEQ ID NO: 1358494 - RNA, 19 nt, Homo sapiens
  misc_RNA (1)...(19): siRNA sense strand
guggcaguacugauaauuu

SEQ ID NO: 1358495 - RNA, 19 nt, Homo sapiens
  misc_RNA (1)...(19): siRNA sense strand
ucaaacuucacgcaauuau

SEQ ID NO: 1358496 - RNA, 19 nt, Homo sapiens
  misc_RNA (1)...(19): siRNA sense strand
caaacuucacgcaauuaug

SEQ ID NO: 1358497 - RNA, 19 nt, Homo sapiens
  misc_RNA (1)...(19): siRNA sense strand
aaacaaucacagcaauuuc

SEQ ID NO: 1358498 - RNA, 19 nt, Homo sapiens
  misc_RNA (1)...(19): siRNA sense strand
aauucaaacuucacgcaau

SEQ ID NO: 1358499 - RNA, 19 nt, Homo sapiens
  misc_RNA (1)...(19): siRNA sense strand
uuggaucaccguuauaaug

SEQ ID NO: 1358500 - RNA, 19 nt, Homo sapiens
  misc_RNA (1)...(19): siRNA sense strand
ccugaucuguuugcaagug

SEQ ID NO: 1358501 - RNA, 19 nt, Homo sapiens
  misc_RNA (1)...(19): siRNA sense strand
cgacccuggcuaucuauau

SEQ ID NO: 1358502 - RNA, 19 nt, Homo sapiens
  misc_RNA (1)...(19): siRNA sense strand
gguaaggcaagugggauug

SEQ ID NO: 1358503 - RNA, 19 nt, Homo sapiens
  misc_RNA (1)...(19): siRNA sense strand
ggaugucagccauggaaca

SEQ ID NO: 1358504 - RNA, 19 nt, Homo sapiens
  misc_RNA (1)...(19): siRNA sense strand
caguacugauaauuuagug

SEQ ID NO: 1358505 - RNA, 19 nt, Homo sapiens
  misc_RNA (1)...(19): siRNA sense strand
cuggcuaucuauauuuauc

SEQ ID NO: 1358506 - RNA, 19 nt, Homo sapiens
  misc_RNA (1)...(19): siRNA sense strand
caaucacagcaauuucuug

SEQ ID NO: 1358507 - RNA, 19 nt, Homo sapiens
  misc_RNA (1)...(19): siRNA sense strand
caacguggauucuuucauc

SEQ ID NO: 1358508 - RNA, 19 nt, Homo sapiens
  misc_RNA (1)...(19): siRNA sense strand
ggaaagagaccaucccaau

SEQ ID NO: 1358509 - RNA, 19 nt, Homo sapiens
  misc_RNA (1)...(19): siRNA sense strand
gaaagagaccaucccaaug

SEQ ID NO: 1358510 - RNA, 19 nt, Homo sapiens
  misc_RNA (1)...(19): siRNA sense strand
ugacagugcucgaucucuu

SEQ ID NO: 1358511 - RNA, 19 nt, Homo sapiens
  misc_RNA (1)...(19): siRNA sense strand
gggugcaucucaucugcua

SEQ ID NO: 1358512 - RNA, 19 nt, Homo sapiens
  misc_RNA (1)...(19): siRNA sense strand
cagcuucuuugguuucuau

SEQ ID NO: 1358513 - RNA, 19 nt, Homo sapiens
  misc_RNA (1)...(19): siRNA sense strand
ccaccacgaugacuuguac

SEQ ID NO: 1358514 - RNA, 19 nt, Homo sapiens
  misc_RNA (1)...(19): siRNA sense strand
ccaccuccaugcggucuaa

SEQ ID NO: 1358515 - RNA, 19 nt, Homo sapiens
  misc_RNA (1)...(19): siRNA sense strand
caguccagcuucuuugguu

SEQ ID NO: 1358516 - RNA, 19 nt, Homo sapiens
  misc_RNA (1)...(19): siRNA sense strand
ccacagaugggacaguaug

SEQ ID NO: 1358517 - RNA, 19 nt, Homo sapiens
  misc_RNA (1)...(19): siRNA sense strand
ggccaggaauucuccaucu

SEQ ID NO: 1358518 - RNA, 19 nt, Homo sapiens
  misc_RNA (1)...(19): siRNA sense strand
gaucacaacguggauucuu

SEQ ID NO: 1358519 - RNA, 19 nt, Homo sapiens
  misc_RNA (1)...(19): siRNA sense strand
aaagagaccaucccaaugc

SEQ ID NO: 1358520 - RNA, 19 nt, Homo sapiens
  misc_RNA (1)...(19): siRNA sense strand
ccucuccucuccacagaug

SEQ ID NO: 1358521 - RNA, 19 nt, Homo sapiens
  misc_RNA (1)...(19): siRNA sense strand
ggagacacggacuacuuga

SEQ ID NO: 1358522 - RNA, 19 nt, Homo sapiens
  misc_RNA (1)...(19): siRNA sense strand
gaugacuuguaccucaaug

SEQ ID NO: 1358523 - RNA, 19 nt, Homo sapiens
  misc_RNA (1)...(19): siRNA sense strand
caugcggucuaaccucuau

SEQ ID NO: 1358524 - RNA, 19 nt, Homo sapiens
  misc_RNA (1)...(19): siRNA sense strand
gagacacggacuacuugaa

SEQ ID NO: 1358525 - RNA, 19 nt, Homo sapiens
  misc_RNA (1)...(19): siRNA sense strand
ggaauacaucaaugagaca

SEQ ID NO: 1358526 - RNA, 19 nt, Homo sapiens
  misc_RNA (1)...(19): siRNA sense strand
cuccacagaugggacagua

SEQ ID NO: 1358527 - RNA, 19 nt, Homo sapiens
  misc_RNA (1)...(19): siRNA sense strand
caguauggcggaagaacuu

SEQ ID NO: 1358528 - RNA, 19 nt, Homo sapiens
  misc_RNA (1)...(19): siRNA sense strand
gccaggaauucuccaucug

SEQ ID NO: 1358529 - RNA, 19 nt, Homo sapiens
  misc_RNA (1)...(19): siRNA sense strand
ucacaacguggauucuuuc

SEQ ID NO: 1358530 - RNA, 19 nt, Homo sapiens
  misc_RNA (1)...(19): siRNA sense strand
ggagauggaggagcaacug

SEQ ID NO: 1358531 - RNA, 19 nt, Homo sapiens
  misc_RNA (1)...(19): siRNA sense strand
gaugaugguguuauuacuc

SEQ ID NO: 1358532 - RNA, 19 nt, Homo sapiens
  misc_RNA (1)...(19): siRNA sense strand
ccaucccaaugccacagua

SEQ ID NO: 1358533 - RNA, 19 nt, Homo sapiens
  misc_RNA (1)...(19): siRNA sense strand
gcagcuuccuggcccugau

SEQ ID NO: 1358534 - RNA, 19 nt, Homo sapiens
  misc_RNA (1)...(19): siRNA sense strand
uccgccaccugcuggaaua

SEQ ID NO: 1358535 - RNA, 19 nt, Homo sapiens
  misc_RNA (1)...(19): siRNA sense strand
gggcucugcuuucugucau

SEQ ID NO: 1358536 - RNA, 19 nt, Homo sapiens
  misc_RNA (1)...(19): siRNA sense strand
ccugaugaugguguuauua

SEQ ID NO: 1358537 - RNA, 19 nt, Homo sapiens
  misc_RNA (1)...(19): siRNA sense strand
gaugaucacaacguggauu

SEQ ID NO: 1358538 - RNA, 19 nt, Homo sapiens
  misc_RNA (1)...(19): siRNA sense strand
aucacaacguggauucuuu

SEQ ID NO: 1358539 - RNA, 19 nt, Homo sapiens
  misc_RNA (1)...(19): siRNA sense strand
cuucuuugguuucuaugau

SEQ ID NO: 1358540 - RNA, 19 nt, Homo sapiens
  misc_RNA (1)...(19): siRNA sense strand
agacacggacuacuugaag

SEQ ID NO: 1358541 - RNA, 19 nt, Homo sapiens
  misc_RNA (1)...(19): siRNA sense strand
ucuaaccucuaucggaucu

SEQ ID NO: 1358542 - RNA, 19 nt, Homo sapiens
  misc_RNA (1)...(19): siRNA sense strand
gacagugcucgaucucuuc

SEQ ID NO: 1358543 - RNA, 19 nt, Homo sapiens
  misc_RNA (1)...(19): siRNA sense strand
agaccguccuggagaugga

SEQ ID NO: 1358544 - RNA, 19 nt, Homo sapiens
  misc_RNA (1)...(19): siRNA sense strand
cugcuggaauacaucaaug

SEQ ID NO: 1358545 - RNA, 19 nt, Homo sapiens
  misc_RNA (1)...(19): siRNA sense strand
caacguggauucuuucauc

SEQ ID NO: 1358546 - RNA, 19 nt, Homo sapiens
  misc_RNA (1)...(19): siRNA sense strand
ggaaagagaccaucccaau

SEQ ID NO: 1358547 - RNA, 19 nt, Homo sapiens
  misc_RNA (1)...(19): siRNA sense strand
gaaagagaccaucccaaug

SEQ ID NO: 1358548 - RNA, 19 nt, Homo sapiens
  misc_RNA (1)...(19): siRNA sense strand
ugacagugcucgaucucuu

SEQ ID NO: 1358549 - RNA, 19 nt, Homo sapiens
  misc_RNA (1)...(19): siRNA sense strand
gggugcaucucaucugcua

SEQ ID NO: 1358550 - RNA, 19 nt, Homo sapiens
  misc_RNA (1)...(19): siRNA sense strand
cagcuucuuugguuucuau

SEQ ID NO: 1358551 - RNA, 19 nt, Homo sapiens
  misc_RNA (1)...(19): siRNA sense strand
ccaccacgaugacuuguac

SEQ ID NO: 1358552 - RNA, 19 nt, Homo sapiens
  misc_RNA (1)...(19): siRNA sense strand
ccaccuccaugcggucuaa

SEQ ID NO: 1358553 - RNA, 19 nt, Homo sapiens
  misc_RNA (1)...(19): siRNA sense strand
caguccagcuucuuugguu

SEQ ID NO: 1358554 - RNA, 19 nt, Homo sapiens
  misc_RNA (1)...(19): siRNA sense strand
ccacagaugggacaguaug

SEQ ID NO: 1358555 - RNA, 19 nt, Homo sapiens
  misc_RNA (1)...(19): siRNA sense strand
ggccaggaauucuccaucu

SEQ ID NO: 1358556 - RNA, 19 nt, Homo sapiens
  misc_RNA (1)...(19): siRNA sense strand
gaucacaacguggauucuu

SEQ ID NO: 1358557 - RNA, 19 nt, Homo sapiens
  misc_RNA (1)...(19): siRNA sense strand
aaagagaccaucccaaugc

SEQ ID NO: 1358558 - RNA, 19 nt, Homo sapiens
  misc_RNA (1)...(19): siRNA sense strand
ccucuccucuccacagaug

SEQ ID NO: 1358559 - RNA, 19 nt, Homo sapiens
  misc_RNA (1)...(19): siRNA sense strand
ggagacacggacuacuuga

SEQ ID NO: 1358560 - RNA, 19 nt, Homo sapiens
  misc_RNA (1)...(19): siRNA sense strand
gaugacuuguaccucaaug

SEQ ID NO: 1358561 - RNA, 19 nt, Homo sapiens
  misc_RNA (1)...(19): siRNA sense strand
caugcggucuaaccucuau

SEQ ID NO: 1358562 - RNA, 19 nt, Homo sapiens
  misc_RNA (1)...(19): siRNA sense strand
gagacacggacuacuugaa

SEQ ID NO: 1358563 - RNA, 19 nt, Homo sapiens
  misc_RNA (1)...(19): siRNA sense strand
ggaauacaucaaugagaca

SEQ ID NO: 1358564 - RNA, 19 nt, Homo sapiens
  misc_RNA (1)...(19): siRNA sense strand
cuccacagaugggacagua

SEQ ID NO: 1358565 - RNA, 19 nt, Homo sapiens
  misc_RNA (1)...(19): siRNA sense strand
caguauggcggaagaacuu

SEQ ID NO: 1358566 - RNA, 19 nt, Homo sapiens
  misc_RNA (1)...(19): siRNA sense strand
gccaggaauucuccaucug

SEQ ID NO: 1358567 - RNA, 19 nt, Homo sapiens
  misc_RNA (1)...(19): siRNA sense strand
ucacaacguggauucuuuc

SEQ ID NO: 1358568 - RNA, 19 nt, Homo sapiens
  misc_RNA (1)...(19): siRNA sense strand
ggagauggaggagcaacug

SEQ ID NO: 1358569 - RNA, 19 nt, Homo sapiens
  misc_RNA (1)...(19): siRNA sense strand
gaugaugguguuauuacuc

SEQ ID NO: 1358570 - RNA, 19 nt, Homo sapiens
  misc_RNA (1)...(19): siRNA sense strand
ccaucccaaugccacagua

SEQ ID NO: 1358571 - RNA, 19 nt, Homo sapiens
  misc_RNA (1)...(19): siRNA sense strand
gcagcuuccuggcccugau

SEQ ID NO: 1358572 - RNA, 19 nt, Homo sapiens
  misc_RNA (1)...(19): siRNA sense strand
uccgccaccugcuggaaua

SEQ ID NO: 1358573 - RNA, 19 nt, Homo sapiens
  misc_RNA (1)...(19): siRNA sense strand
gggcucugcuuucugucau

SEQ ID NO: 1358574 - RNA, 19 nt, Homo sapiens
  misc_RNA (1)...(19): siRNA sense strand
ccugaugaugguguuauua

SEQ ID NO: 1358575 - RNA, 19 nt, Homo sapiens
  misc_RNA (1)...(19): siRNA sense strand
gaugaucacaacguggauu

SEQ ID NO: 1358576 - RNA, 19 nt, Homo sapiens
  misc_RNA (1)...(19): siRNA sense strand
aucacaacguggauucuuu

SEQ ID NO: 1358577 - RNA, 19 nt, Homo sapiens
  misc_RNA (1)...(19): siRNA sense strand
cuucuuugguuucuaugau

SEQ ID NO: 1358578 - RNA, 19 nt, Homo sapiens
  misc_RNA (1)...(19): siRNA sense strand
agacacggacuacuugaag

SEQ ID NO: 1358579 - RNA, 19 nt, Homo sapiens
  misc_RNA (1)...(19): siRNA sense strand
ucuaaccucuaucggaucu

SEQ ID NO: 1358580 - RNA, 19 nt, Homo sapiens
  misc_RNA (1)...(19): siRNA sense strand
gacagugcucgaucucuuc

SEQ ID NO: 1358581 - RNA, 19 nt, Homo sapiens
  misc_RNA (1)...(19): siRNA sense strand
agaccguccuggagaugga

SEQ ID NO: 1358582 - RNA, 19 nt, Homo sapiens
  misc_RNA (1)...(19): siRNA sense strand
cugcuggaauacaucaaug

SEQ ID NO: 1358583 - RNA, 19 nt, Homo sapiens
  misc_RNA (1)...(19): siRNA sense strand
caacguggauucuuucauc

SEQ ID NO: 1358584 - RNA, 19 nt, Homo sapiens
  misc_RNA (1)...(19): siRNA sense strand
ggaaagagaccaucccaau

SEQ ID NO: 1358585 - RNA, 19 nt, Homo sapiens
  misc_RNA (1)...(19): siRNA sense strand
gaaagagaccaucccaaug

SEQ ID NO: 1358586 - RNA, 19 nt, Homo sapiens
  misc_RNA (1)...(19): siRNA sense strand
ugacagugcucgaucucuu

SEQ ID NO: 1358587 - RNA, 19 nt, Homo sapiens
  misc_RNA (1)...(19): siRNA sense strand
gggugcaucucaucugcua

SEQ ID NO: 1358588 - RNA, 19 nt, Homo sapiens
  misc_RNA (1)...(19): siRNA sense strand
cagcuucuuugguuucuau

SEQ ID NO: 1358589 - RNA, 19 nt, Homo sapiens
  misc_RNA (1)...(19): siRNA sense strand
ccaccacgaugacuuguac

SEQ ID NO: 1358590 - RNA, 19 nt, Homo sapiens
  misc_RNA (1)...(19): siRNA sense strand
ccaccuccaugcggucuaa

SEQ ID NO: 1358591 - RNA, 19 nt, Homo sapiens
  misc_RNA (1)...(19): siRNA sense strand
caguccagcuucuuugguu

SEQ ID NO: 1358592 - RNA, 19 nt, Homo sapiens
  misc_RNA (1)...(19): siRNA sense strand
ccacagaugggacaguaug

SEQ ID NO: 1358593 - RNA, 19 nt, Homo sapiens
  misc_RNA (1)...(19): siRNA sense strand
ggccaggaauucuccaucu

SEQ ID NO: 1358594 - RNA, 19 nt, Homo sapiens
  misc_RNA (1)...(19): siRNA sense strand
gaucacaacguggauucuu

SEQ ID NO: 1358595 - RNA, 19 nt, Homo sapiens
  misc_RNA (1)...(19): siRNA sense strand
aaagagaccaucccaaugc

SEQ ID NO: 1358596 - RNA, 19 nt, Homo sapiens
  misc_RNA (1)...(19): siRNA sense strand
ccucuccucuccacagaug

SEQ ID NO: 1358597 - RNA, 19 nt, Homo sapiens
  misc_RNA (1)...(19): siRNA sense strand
ggagacacggacuacuuga

SEQ ID NO: 1358598 - RNA, 19 nt, Homo sapiens
  misc_RNA (1)...(19): siRNA sense strand
gaugacuuguaccucaaug

SEQ ID NO: 1358599 - RNA, 19 nt, Homo sapiens
  misc_RNA (1)...(19): siRNA sense strand
caugcggucuaaccucuau

SEQ ID NO: 1358600 - RNA, 19 nt, Homo sapiens
  misc_RNA (1)...(19): siRNA sense strand
gagacacggacuacuugaa

SEQ ID NO: 1358601 - RNA, 19 nt, Homo sapiens
  misc_RNA (1)...(19): siRNA sense strand
ggaauacaucaaugagaca

SEQ ID NO: 1358602 - RNA, 19 nt, Homo sapiens
  misc_RNA (1)...(19): siRNA sense strand
cuccacagaugggacagua

SEQ ID NO: 1358603 - RNA, 19 nt, Homo sapiens
  misc_RNA (1)...(19): siRNA sense strand
caguauggcggaagaacuu

SEQ ID NO: 1358604 - RNA, 19 nt, Homo sapiens
  misc_RNA (1)...(19): siRNA sense strand
gccaggaauucuccaucug

SEQ ID NO: 1358605 - RNA, 19 nt, Homo sapiens
  misc_RNA (1)...(19): siRNA sense strand
ucacaacguggauucuuuc

SEQ ID NO: 1358606 - RNA, 19 nt, Homo sapiens
  misc_RNA (1)...(19): siRNA sense strand
ggagauggaggagcaacug

SEQ ID NO: 1358607 - RNA, 19 nt, Homo sapiens
  misc_RNA (1)...(19): siRNA sense strand
gaugaugguguuauuacuc

SEQ ID NO: 1358608 - RNA, 19 nt, Homo sapiens
  misc_RNA (1)...(19): siRNA sense strand
ccaucccaaugccacagua

SEQ ID NO: 1358609 - RNA, 19 nt, Homo sapiens
  misc_RNA (1)...(19): siRNA sense strand
gcagcuuccuggcccugau

SEQ ID NO: 1358610 - RNA, 19 nt, Homo sapiens
  misc_RNA (1)...(19): siRNA sense strand
uccgccaccugcuggaaua

SEQ ID NO: 1358611 - RNA, 19 nt, Homo sapiens
  misc_RNA (1)...(19): siRNA sense strand
gggcucugcuuucugucau

SEQ ID NO: 1358612 - RNA, 19 nt, Homo sapiens
  misc_RNA (1)...(19): siRNA sense strand
ccugaugaugguguuauua

SEQ ID NO: 1358613 - RNA, 19 nt, Homo sapiens
  misc_RNA (1)...(19): siRNA sense strand
gaugaucacaacguggauu

SEQ ID NO: 1358614 - RNA, 19 nt, Homo sapiens
  misc_RNA (1)...(19): siRNA sense strand
aucacaacguggauucuuu

SEQ ID NO: 1358615 - RNA, 19 nt, Homo sapiens
  misc_RNA (1)...(19): siRNA sense strand
cuucuuugguuucuaugau

SEQ ID NO: 1358616 - RNA, 19 nt, Homo sapiens
  misc_RNA (1)...(19): siRNA sense strand
agacacggacuacuugaag

SEQ ID NO: 1358617 - RNA, 19 nt, Homo sapiens
  misc_RNA (1)...(19): siRNA sense strand
ucuaaccucuaucggaucu

SEQ ID NO: 1358618 - RNA, 19 nt, Homo sapiens
  misc_RNA (1)...(19): siRNA sense strand
gacagugcucgaucucuuc

SEQ ID NO: 1358619 - RNA, 19 nt, Homo sapiens
  misc_RNA (1)...(19): siRNA sense strand
agaccguccuggagaugga

SEQ ID NO: 1358620 - RNA, 19 nt, Homo sapiens
  misc_RNA (1)...(19): siRNA sense strand
cugcuggaauacaucaaug

SEQ ID NO: 1358621 - RNA, 19 nt, Homo sapiens
  misc_RNA (1)...(19): siRNA sense strand
gauaauaccuaaagaggaa

SEQ ID NO: 1358622 - RNA, 19 nt, Homo sapiens
  misc_RNA (1)...(19): siRNA sense strand
gaagagcaaccacaaguuu

SEQ ID NO: 1358623 - RNA, 19 nt, Homo sapiens
  misc_RNA (1)...(19): siRNA sense strand
ccugaggucuggauucuuu

SEQ ID NO: 1358624 - RNA, 19 nt, Homo sapiens
  misc_RNA (1)...(19): siRNA sense strand
cuaaagaggaacacuguaa

SEQ ID NO: 1358625 - RNA, 19 nt, Homo sapiens
  misc_RNA (1)...(19): siRNA sense strand
cauggaaggugaucugcaa

SEQ ID NO: 1358626 - RNA, 19 nt, Homo sapiens
  misc_RNA (1)...(19): siRNA sense strand
gaagauaauaccuaaagag

SEQ ID NO: 1358627 - RNA, 19 nt, Homo sapiens
  misc_RNA (1)...(19): siRNA sense strand
uaaagaggaacacuguaaa

SEQ ID NO: 1358628 - RNA, 19 nt, Homo sapiens
  misc_RNA (1)...(19): siRNA sense strand
agaagcaggugaagagcaa

SEQ ID NO: 1358629 - RNA, 19 nt, Homo sapiens
  misc_RNA (1)...(19): siRNA sense strand
agaagaagaucaggauaca

SEQ ID NO: 1358630 - RNA, 19 nt, Homo sapiens
  misc_RNA (1)...(19): siRNA sense strand
gcgucaaggugaagauaau

SEQ ID NO: 1358631 - RNA, 19 nt, Homo sapiens
  misc_RNA (1)...(19): siRNA sense strand
ggaaggugaucugcaagag

SEQ ID NO: 1358632 - RNA, 19 nt, Homo sapiens
  misc_RNA (1)...(19): siRNA sense strand
aagagcaaccacaaguuua

SEQ ID NO: 1358633 - RNA, 19 nt, Homo sapiens
  misc_RNA (1)...(19): siRNA sense strand
gugaagauaauaccuaaag

SEQ ID NO: 1358634 - RNA, 19 nt, Homo sapiens
  misc_RNA (1)...(19): siRNA sense strand
agagcaaccacaaguuuaa

SEQ ID NO: 1358635 - RNA, 19 nt, Homo sapiens
  misc_RNA (1)...(19): siRNA sense strand
gacagaagaagaucaggau

SEQ ID NO: 1358636 - RNA, 19 nt, Homo sapiens
  misc_RNA (1)...(19): siRNA sense strand
gaggaacacuguaaaaugc

SEQ ID NO: 1358637 - RNA, 19 nt, Homo sapiens
  misc_RNA (1)...(19): siRNA sense strand
gcagcagacagaagaagau

SEQ ID NO: 1358638 - RNA, 19 nt, Homo sapiens
  misc_RNA (1)...(19): siRNA sense strand
gugaagagcaaccacaagu

SEQ ID NO: 1358639 - RNA, 19 nt, Homo sapiens
  misc_RNA (1)...(19): siRNA sense strand
gcugaaagucgggauccua

SEQ ID NO: 1358640 - RNA, 19 nt, Homo sapiens
  misc_RNA (1)...(19): siRNA sense strand
gcaagagcugcaucaguca

SEQ ID NO: 1358641 - RNA, 19 nt, Homo sapiens
  misc_RNA (1)...(19): siRNA sense strand
ugaagagcaaccacaaguu

SEQ ID NO: 1358642 - RNA, 19 nt, Homo sapiens
  misc_RNA (1)...(19): siRNA sense strand
cagaagaagaucaggauac

SEQ ID NO: 1358643 - RNA, 19 nt, Homo sapiens
  misc_RNA (1)...(19): siRNA sense strand
gccagaagcaggugaagag

SEQ ID NO: 1358644 - RNA, 19 nt, Homo sapiens
  misc_RNA (1)...(19): siRNA sense strand
gcagacagaagaagaucag

SEQ ID NO: 1358645 - RNA, 19 nt, Homo sapiens
  misc_RNA (1)...(19): siRNA sense strand
cgacauggaaggugaucug

SEQ ID NO: 1358646 - RNA, 19 nt, Homo sapiens
  misc_RNA (1)...(19): siRNA sense strand
gaaagucgggauccuacac

SEQ ID NO: 1358647 - RNA, 19 nt, Homo sapiens
  misc_RNA (1)...(19): siRNA sense strand
cgucaaggugaagauaaua

SEQ ID NO: 1358648 - RNA, 19 nt, Homo sapiens
  misc_RNA (1)...(19): siRNA sense strand
acagaagaagaucaggaua

SEQ ID NO: 1358649 - RNA, 19 nt, Homo sapiens
  misc_RNA (1)...(19): siRNA sense strand
caagagcugcaucagucaa

SEQ ID NO: 1358650 - RNA, 19 nt, Homo sapiens
  misc_RNA (1)...(19): siRNA sense strand
ggcgucaaggugaagauaa

SEQ ID NO: 1358651 - RNA, 19 nt, Homo sapiens
  misc_RNA (1)...(19): siRNA sense strand
ggcagcagacagaagaaga

SEQ ID NO: 1358652 - RNA, 19 nt, Homo sapiens
  misc_RNA (1)...(19): siRNA sense strand
gagcugcaucagucaaaca

SEQ ID NO: 1358653 - RNA, 19 nt, Homo sapiens
  misc_RNA (1)...(19): siRNA sense strand
caccugggcagcagacaga

SEQ ID NO: 1358654 - RNA, 19 nt, Homo sapiens
  misc_RNA (1)...(19): siRNA sense strand
guuccggcgucaaggugaa

SEQ ID NO: 1358655 - RNA, 19 nt, Homo sapiens
  misc_RNA (1)...(19): siRNA sense strand
cauggaaggugaucugcaa

SEQ ID NO: 1358656 - RNA, 19 nt, Homo sapiens
  misc_RNA (1)...(19): siRNA sense strand
agaagaagaucaggauaca

SEQ ID NO: 1358657 - RNA, 19 nt, Homo sapiens
  misc_RNA (1)...(19): siRNA sense strand
gcgucaaggugaagauaau

SEQ ID NO: 1358658 - RNA, 19 nt, Homo sapiens
  misc_RNA (1)...(19): siRNA sense strand
ggaaggugaucugcaagag

SEQ ID NO: 1358659 - RNA, 19 nt, Homo sapiens
  misc_RNA (1)...(19): siRNA sense strand
gacagaagaagaucaggau

SEQ ID NO: 1358660 - RNA, 19 nt, Homo sapiens
  misc_RNA (1)...(19): siRNA sense strand
gcagcagacagaagaagau

SEQ ID NO: 1358661 - RNA, 19 nt, Homo sapiens
  misc_RNA (1)...(19): siRNA sense strand
gcugaaagucgggauccua

SEQ ID NO: 1358662 - RNA, 19 nt, Homo sapiens
  misc_RNA (1)...(19): siRNA sense strand
gcaagagcugcaucaguca

SEQ ID NO: 1358663 - RNA, 19 nt, Homo sapiens
  misc_RNA (1)...(19): siRNA sense strand
cagaagaagaucaggauac

SEQ ID NO: 1358664 - RNA, 19 nt, Homo sapiens
  misc_RNA (1)...(19): siRNA sense strand
gcagacagaagaagaucag

SEQ ID NO: 1358665 - RNA, 19 nt, Homo sapiens
  misc_RNA (1)...(19): siRNA sense strand
cgacauggaaggugaucug

SEQ ID NO: 1358666 - RNA, 19 nt, Homo sapiens
  misc_RNA (1)...(19): siRNA sense strand
gaaagucgggauccuacac

SEQ ID NO: 1358667 - RNA, 19 nt, Homo sapiens
  misc_RNA (1)...(19): siRNA sense strand
cgucaaggugaagauaaua

SEQ ID NO: 1358668 - RNA, 19 nt, Homo sapiens
  misc_RNA (1)...(19): siRNA sense strand
acagaagaagaucaggaua

SEQ ID NO: 1358669 - RNA, 19 nt, Homo sapiens
  misc_RNA (1)...(19): siRNA sense strand
caagagcugcaucagucaa

SEQ ID NO: 1358670 - RNA, 19 nt, Homo sapiens
  misc_RNA (1)...(19): siRNA sense strand
ggcgucaaggugaagauaa

SEQ ID NO: 1358671 - RNA, 19 nt, Homo sapiens
  misc_RNA (1)...(19): siRNA sense strand
gagcugcaucagucaaaca

SEQ ID NO: 1358672 - RNA, 19 nt, Homo sapiens
  misc_RNA (1)...(19): siRNA sense strand
ggcagcagacagaagaaga

SEQ ID NO: 1358673 - RNA, 19 nt, Homo sapiens
  misc_RNA (1)...(19): siRNA sense strand
caccugggcagcagacaga

SEQ ID NO: 1358674 - RNA, 19 nt, Homo sapiens
  misc_RNA (1)...(19): siRNA sense strand
guuccggcgucaaggugaa

SEQ ID NO: 1358675 - RNA, 19 nt, Homo sapiens
  misc_RNA (1)...(19): siRNA sense strand
gauaauaccuaaagaggaa

SEQ ID NO: 1358676 - RNA, 19 nt, Homo sapiens
  misc_RNA (1)...(19): siRNA sense strand
gaagagcaaccacaaguuu

SEQ ID NO: 1358677 - RNA, 19 nt, Homo sapiens
  misc_RNA (1)...(19): siRNA sense strand
cuaaagaggaacacuguaa

SEQ ID NO: 1358678 - RNA, 19 nt, Homo sapiens
  misc_RNA (1)...(19): siRNA sense strand
cauggaaggugaucugcaa

SEQ ID NO: 1358679 - RNA, 19 nt, Homo sapiens
  misc_RNA (1)...(19): siRNA sense strand
gaagauaauaccuaaagag

SEQ ID NO: 1358680 - RNA, 19 nt, Homo sapiens
  misc_RNA (1)...(19): siRNA sense strand
uaaagaggaacacuguaaa

SEQ ID NO: 1358681 - RNA, 19 nt, Homo sapiens
  misc_RNA (1)...(19): siRNA sense strand
agaagcaggugaagagcaa

SEQ ID NO: 1358682 - RNA, 19 nt, Homo sapiens
  misc_RNA (1)...(19): siRNA sense strand
agaagaagaucaggauaca

SEQ ID NO: 1358683 - RNA, 19 nt, Homo sapiens
  misc_RNA (1)...(19): siRNA sense strand
gcgucaaggugaagauaau

SEQ ID NO: 1358684 - RNA, 19 nt, Homo sapiens
  misc_RNA (1)...(19): siRNA sense strand
ggaaggugaucugcaagag

SEQ ID NO: 1358685 - RNA, 19 nt, Homo sapiens
  misc_RNA (1)...(19): siRNA sense strand
aagagcaaccacaaguuua

SEQ ID NO: 1358686 - RNA, 19 nt, Homo sapiens
  misc_RNA (1)...(19): siRNA sense strand
gugaagauaauaccuaaag

SEQ ID NO: 1358687 - RNA, 19 nt, Homo sapiens
  misc_RNA (1)...(19): siRNA sense strand
agagcaaccacaaguuuaa

SEQ ID NO: 1358688 - RNA, 19 nt, Homo sapiens
  misc_RNA (1)...(19): siRNA sense strand
gacagaagaagaucaggau

SEQ ID NO: 1358689 - RNA, 19 nt, Homo sapiens
  misc_RNA (1)...(19): siRNA sense strand
gaggaacacuguaaaaugc

SEQ ID NO: 1358690 - RNA, 19 nt, Homo sapiens
  misc_RNA (1)...(19): siRNA sense strand
gcagcagacagaagaagau

SEQ ID NO: 1358691 - RNA, 19 nt, Homo sapiens
  misc_RNA (1)...(19): siRNA sense strand
gugaagagcaaccacaagu

SEQ ID NO: 1358692 - RNA, 19 nt, Homo sapiens
  misc_RNA (1)...(19): siRNA sense strand
gcaagagcugcaucaguca

SEQ ID NO: 1358693 - RNA, 19 nt, Homo sapiens
  misc_RNA (1)...(19): siRNA sense strand
gcugaaagucgggauccua

SEQ ID NO: 1358694 - RNA, 19 nt, Homo sapiens
  misc_RNA (1)...(19): siRNA sense strand
ugaagagcaaccacaaguu

SEQ ID NO: 1358695 - RNA, 19 nt, Homo sapiens
  misc_RNA (1)...(19): siRNA sense strand
cagaagaagaucaggauac

SEQ ID NO: 1358696 - RNA, 19 nt, Homo sapiens
  misc_RNA (1)...(19): siRNA sense strand
gccagaagcaggugaagag

SEQ ID NO: 1358697 - RNA, 19 nt, Homo sapiens
  misc_RNA (1)...(19): siRNA sense strand
gcagacagaagaagaucag

SEQ ID NO: 1358698 - RNA, 19 nt, Homo sapiens
  misc_RNA (1)...(19): siRNA sense strand
cgacauggaaggugaucug

SEQ ID NO: 1358699 - RNA, 19 nt, Homo sapiens
  misc_RNA (1)...(19): siRNA sense strand
cgucaaggugaagauaaua

SEQ ID NO: 1358700 - RNA, 19 nt, Homo sapiens
  misc_RNA (1)...(19): siRNA sense strand
gaaagucgggauccuacac

SEQ ID NO: 1358701 - RNA, 19 nt, Homo sapiens
  misc_RNA (1)...(19): siRNA sense strand
acagaagaagaucaggaua

SEQ ID NO: 1358702 - RNA, 19 nt, Homo sapiens
  misc_RNA (1)...(19): siRNA sense strand
caagagcugcaucagucaa

SEQ ID NO: 1358703 - RNA, 19 nt, Homo sapiens
  misc_RNA (1)...(19): siRNA sense strand
ggcgucaaggugaagauaa

SEQ ID NO: 1358704 - RNA, 19 nt, Homo sapiens
  misc_RNA (1)...(19): siRNA sense strand
gagcugcaucagucaaaca

SEQ ID NO: 1358705 - RNA, 19 nt, Homo sapiens
  misc_RNA (1)...(19): siRNA sense strand
ggcagcagacagaagaaga

SEQ ID NO: 1358706 - RNA, 19 nt, Homo sapiens
  misc_RNA (1)...(19): siRNA sense strand
guuccggcgucaaggugaa

SEQ ID NO: 1358707 - RNA, 19 nt, Homo sapiens
  misc_RNA (1)...(19): siRNA sense strand
caccugggcagcagacaga

SEQ ID NO: 1358708 - RNA, 19 nt, Homo sapiens
  misc_RNA (1)...(19): siRNA sense strand
caagaagauuggucuguuu

SEQ ID NO: 1358709 - RNA, 19 nt, Homo sapiens
  misc_RNA (1)...(19): siRNA sense strand
gaucugcaccguccaguug

SEQ ID NO: 1358710 - RNA, 19 nt, Homo sapiens
  misc_RNA (1)...(19): siRNA sense strand
acaagaagauuggucuguu

SEQ ID NO: 1358711 - RNA, 19 nt, Homo sapiens
  misc_RNA (1)...(19): siRNA sense strand
gccggugacuuccacaaga

SEQ ID NO: 1358712 - RNA, 19 nt, Homo sapiens
  misc_RNA (1)...(19): siRNA sense strand
ugacagcagugagaagauc

SEQ ID NO: 1358713 - RNA, 19 nt, Homo sapiens
  misc_RNA (1)...(19): siRNA sense strand
ccggugacuuccacaagaa

SEQ ID NO: 1358714 - RNA, 19 nt, Homo sapiens
  misc_RNA (1)...(19): siRNA sense strand
gaagauuggucuguuuugu

SEQ ID NO: 1358715 - RNA, 19 nt, Homo sapiens
  misc_RNA (1)...(19): siRNA sense strand
ugacugugccggugacuuc

SEQ ID NO: 1358716 - RNA, 19 nt, Homo sapiens
  misc_RNA (1)...(19): siRNA sense strand
gagaccagcaguacgagau

SEQ ID NO: 1358717 - RNA, 19 nt, Homo sapiens
  misc_RNA (1)...(19): siRNA sense strand
gcagcucuacgacgugaug

SEQ ID NO: 1358718 - RNA, 19 nt, Homo sapiens
  misc_RNA (1)...(19): siRNA sense strand
gcgcgaggcagagaucgaa

SEQ ID NO: 1358719 - RNA, 19 nt, Homo sapiens
  misc_RNA (1)...(19): siRNA sense strand
caagaagauuggucuguuu

SEQ ID NO: 1358720 - RNA, 19 nt, Homo sapiens
  misc_RNA (1)...(19): siRNA sense strand
gaucugcaccguccaguug

SEQ ID NO: 1358721 - RNA, 19 nt, Homo sapiens
  misc_RNA (1)...(19): siRNA sense strand
acaagaagauuggucuguu

SEQ ID NO: 1358722 - RNA, 19 nt, Homo sapiens
  misc_RNA (1)...(19): siRNA sense strand
gccggugacuuccacaaga

SEQ ID NO: 1358723 - RNA, 19 nt, Homo sapiens
  misc_RNA (1)...(19): siRNA sense strand
ugacagcagugagaagauc

SEQ ID NO: 1358724 - RNA, 19 nt, Homo sapiens
  misc_RNA (1)...(19): siRNA sense strand
ccggugacuuccacaagaa

SEQ ID NO: 1358725 - RNA, 19 nt, Homo sapiens
  misc_RNA (1)...(19): siRNA sense strand
gaagauuggucuguuuugu

SEQ ID NO: 1358726 - RNA, 19 nt, Homo sapiens
  misc_RNA (1)...(19): siRNA sense strand
ugacugugccggugacuuc

SEQ ID NO: 1358727 - RNA, 19 nt, Homo sapiens
  misc_RNA (1)...(19): siRNA sense strand
gagaccagcaguacgagau

SEQ ID NO: 1358728 - RNA, 19 nt, Homo sapiens
  misc_RNA (1)...(19): siRNA sense strand
gcagcucuacgacgugaug

SEQ ID NO: 1358729 - RNA, 19 nt, Homo sapiens
  misc_RNA (1)...(19): siRNA sense strand
gcgcgaggcagagaucgaa

SEQ ID NO: 1358730 - RNA, 19 nt, Homo sapiens
  misc_RNA (1)...(19): siRNA sense strand
caagaagauuggucuguuu

SEQ ID NO: 1358731 - RNA, 19 nt, Homo sapiens
  misc_RNA (1)...(19): siRNA sense strand
gaucugcaccguccaguug

SEQ ID NO: 1358732 - RNA, 19 nt, Homo sapiens
  misc_RNA (1)...(19): siRNA sense strand
acaagaagauuggucuguu

SEQ ID NO: 1358733 - RNA, 19 nt, Homo sapiens
  misc_RNA (1)...(19): siRNA sense strand
gccggugacuuccacaaga

SEQ ID NO: 1358734 - RNA, 19 nt, Homo sapiens
  misc_RNA (1)...(19): siRNA sense strand
ugacagcagugagaagauc

SEQ ID NO: 1358735 - RNA, 19 nt, Homo sapiens
  misc_RNA (1)...(19): siRNA sense strand
ccggugacuuccacaagaa

SEQ ID NO: 1358736 - RNA, 19 nt, Homo sapiens
  misc_RNA (1)...(19): siRNA sense strand
gaagauuggucuguuuugu

SEQ ID NO: 1358737 - RNA, 19 nt, Homo sapiens
  misc_RNA (1)...(19): siRNA sense strand
ugacugugccggugacuuc

SEQ ID NO: 1358738 - RNA, 19 nt, Homo sapiens
  misc_RNA (1)...(19): siRNA sense strand
gagaccagcaguacgagau

SEQ ID NO: 1358739 - RNA, 19 nt, Homo sapiens
  misc_RNA (1)...(19): siRNA sense strand
gcagcucuacgacgugaug

SEQ ID NO: 1358740 - RNA, 19 nt, Homo sapiens
  misc_RNA (1)...(19): siRNA sense strand
gcgcgaggcagagaucgaa

SEQ ID NO: 1358741 - RNA, 19 nt, Homo sapiens
  misc_RNA (1)...(19): siRNA sense strand
caagaagauuggucuguuu

SEQ ID NO: 1358742 - RNA, 19 nt, Homo sapiens
  misc_RNA (1)...(19): siRNA sense strand
gaucugcaccguccaguug

SEQ ID NO: 1358743 - RNA, 19 nt, Homo sapiens
  misc_RNA (1)...(19): siRNA sense strand
acaagaagauuggucuguu

SEQ ID NO: 1358744 - RNA, 19 nt, Homo sapiens
  misc_RNA (1)...(19): siRNA sense strand
gccggugacuuccacaaga

SEQ ID NO: 1358745 - RNA, 19 nt, Homo sapiens
  misc_RNA (1)...(19): siRNA sense strand
ugacagcagugagaagauc

SEQ ID NO: 1358746 - RNA, 19 nt, Homo sapiens
  misc_RNA (1)...(19): siRNA sense strand
ccggugacuuccacaagaa

SEQ ID NO: 1358747 - RNA, 19 nt, Homo sapiens
  misc_RNA (1)...(19): siRNA sense strand
gaagauuggucuguuuugu

SEQ ID NO: 1358748 - RNA, 19 nt, Homo sapiens
  misc_RNA (1)...(19): siRNA sense strand
ugacugugccggugacuuc

SEQ ID NO: 1358749 - RNA, 19 nt, Homo sapiens
  misc_RNA (1)...(19): siRNA sense strand
gagaccagcaguacgagau

SEQ ID NO: 1358750 - RNA, 19 nt, Homo sapiens
  misc_RNA (1)...(19): siRNA sense strand
gcagcucuacgacgugaug

SEQ ID NO: 1358751 - RNA, 19 nt, Homo sapiens
  misc_RNA (1)...(19): siRNA sense strand
gcgcgaggcagagaucgaa

SEQ ID NO: 1358752 - RNA, 19 nt, Homo sapiens
  misc_RNA (1)...(19): siRNA sense strand
caagaagauuggucuguuu

SEQ ID NO: 1358753 - RNA, 19 nt, Homo sapiens
  misc_RNA (1)...(19): siRNA sense strand
acaagaagauuggucuguu

SEQ ID NO: 1358754 - RNA, 19 nt, Homo sapiens
  misc_RNA (1)...(19): siRNA sense strand
gccggugacuuccacaaga

SEQ ID NO: 1358755 - RNA, 19 nt, Homo sapiens
  misc_RNA (1)...(19): siRNA sense strand
ccggugacuuccacaagaa

SEQ ID NO: 1358756 - RNA, 19 nt, Homo sapiens
  misc_RNA (1)...(19): siRNA sense strand
gaagauuggucuguuuugu

SEQ ID NO: 1358757 - RNA, 19 nt, Homo sapiens
  misc_RNA (1)...(19): siRNA sense strand
ugacugugccggugacuuc

SEQ ID NO: 1358758 - RNA, 19 nt, Homo sapiens
  misc_RNA (1)...(19): siRNA sense strand
caagaagauuggucuguuu

SEQ ID NO: 1358759 - RNA, 19 nt, Homo sapiens
  misc_RNA (1)...(19): siRNA sense strand
acaagaagauuggucuguu

SEQ ID NO: 1358760 - RNA, 19 nt, Homo sapiens
  misc_RNA (1)...(19): siRNA sense strand
gccggugacuuccacaaga

SEQ ID NO: 1358761 - RNA, 19 nt, Homo sapiens
  misc_RNA (1)...(19): siRNA sense strand
ccggugacuuccacaagaa

SEQ ID NO: 1358762 - RNA, 19 nt, Homo sapiens
  misc_RNA (1)...(19): siRNA sense strand
gaagauuggucuguuuugu

SEQ ID NO: 1358763 - RNA, 19 nt, Homo sapiens
  misc_RNA (1)...(19): siRNA sense strand
ugacugugccggugacuuc

SEQ ID NO: 1358764 - RNA, 19 nt, Homo sapiens
  misc_RNA (1)...(19): siRNA sense strand
caagaagauuggucuguuu

SEQ ID NO: 1358765 - RNA, 19 nt, Homo sapiens
  misc_RNA (1)...(19): siRNA sense strand
gaucugcaccguccaguug

SEQ ID NO: 1358766 - RNA, 19 nt, Homo sapiens
  misc_RNA (1)...(19): siRNA sense strand
acaagaagauuggucuguu

SEQ ID NO: 1358767 - RNA, 19 nt, Homo sapiens
  misc_RNA (1)...(19): siRNA sense strand
gccggugacuuccacaaga

SEQ ID NO: 1358768 - RNA, 19 nt, Homo sapiens
  misc_RNA (1)...(19): siRNA sense strand
ugacagcagugagaagauc

SEQ ID NO: 1358769 - RNA, 19 nt, Homo sapiens
  misc_RNA (1)...(19): siRNA sense strand
ccggugacuuccacaagaa

SEQ ID NO: 1358770 - RNA, 19 nt, Homo sapiens
  misc_RNA (1)...(19): siRNA sense strand
gaagauuggucuguuuugu

SEQ ID NO: 1358771 - RNA, 19 nt, Homo sapiens
  misc_RNA (1)...(19): siRNA sense strand
ugacugugccggugacuuc

SEQ ID NO: 1358772 - RNA, 19 nt, Homo sapiens
  misc_RNA (1)...(19): siRNA sense strand
gagaccagcaguacgagau

SEQ ID NO: 1358773 - RNA, 19 nt, Homo sapiens
  misc_RNA (1)...(19): siRNA sense strand
gcagcucuacgacgugaug

SEQ ID NO: 1358774 - RNA, 19 nt, Homo sapiens
  misc_RNA (1)...(19): siRNA sense strand
gcgcgaggcagagaucgaa

SEQ ID NO: 1358775 - RNA, 19 nt, Homo sapiens
  misc_RNA (1)...(19): siRNA sense strand
caagaagauuggucuguuu

SEQ ID NO: 1358776 - RNA, 19 nt, Homo sapiens
  misc_RNA (1)...(19): siRNA sense strand
acaagaagauuggucuguu

SEQ ID NO: 1358777 - RNA, 19 nt, Homo sapiens
  misc_RNA (1)...(19): siRNA sense strand
gccggugacuuccacaaga

SEQ ID NO: 1358778 - RNA, 19 nt, Homo sapiens
  misc_RNA (1)...(19): siRNA sense strand
ccggugacuuccacaagaa

SEQ ID NO: 1358779 - RNA, 19 nt, Homo sapiens
  misc_RNA (1)...(19): siRNA sense strand
gaagauuggucuguuuugu

SEQ ID NO: 1358780 - RNA, 19 nt, Homo sapiens
  misc_RNA (1)...(19): siRNA sense strand
ugacugugccggugacuuc

SEQ ID NO: 1358781 - RNA, 19 nt, Homo sapiens
  misc_RNA (1)...(19): siRNA sense strand
caagaagauuggucuguuu

SEQ ID NO: 1358782 - RNA, 19 nt, Homo sapiens
  misc_RNA (1)...(19): siRNA sense strand
acaagaagauuggucuguu

SEQ ID NO: 1358783 - RNA, 19 nt, Homo sapiens
  misc_RNA (1)...(19): siRNA sense strand
gccggugacuuccacaaga

SEQ ID NO: 1358784 - RNA, 19 nt, Homo sapiens
  misc_RNA (1)...(19): siRNA sense strand
ccggugacuuccacaagaa

SEQ ID NO: 1358785 - RNA, 19 nt, Homo sapiens
  misc_RNA (1)...(19): siRNA sense strand
gaagauuggucuguuuugu

SEQ ID NO: 1358786 - RNA, 19 nt, Homo sapiens
  misc_RNA (1)...(19): siRNA sense strand
ugacugugccggugacuuc

SEQ ID NO: 1358787 - RNA, 19 nt, Homo sapiens
  misc_RNA (1)...(19): siRNA sense strand
caagaagauuggucuguuu

SEQ ID NO: 1358788 - RNA, 19 nt, Homo sapiens
  misc_RNA (1)...(19): siRNA sense strand
acaagaagauuggucuguu

SEQ ID NO: 1358789 - RNA, 19 nt, Homo sapiens
  misc_RNA (1)...(19): siRNA sense strand
gccggugacuuccacaaga

SEQ ID NO: 1358790 - RNA, 19 nt, Homo sapiens
  misc_RNA (1)...(19): siRNA sense strand
ccggugacuuccacaagaa

SEQ ID NO: 1358791 - RNA, 19 nt, Homo sapiens
  misc_RNA (1)...(19): siRNA sense strand
gaagauuggucuguuuugu

SEQ ID NO: 1358792 - RNA, 19 nt, Homo sapiens
  misc_RNA (1)...(19): siRNA sense strand
ugacugugccggugacuuc

SEQ ID NO: 1358793 - RNA, 19 nt, Homo sapiens
  misc_RNA (1)...(19): siRNA sense strand
caagaagauuggucuguuu

SEQ ID NO: 1358794 - RNA, 19 nt, Homo sapiens
  misc_RNA (1)...(19): siRNA sense strand
acaagaagauuggucuguu

SEQ ID NO: 1358795 - RNA, 19 nt, Homo sapiens
  misc_RNA (1)...(19): siRNA sense strand
gccggugacuuccacaaga

SEQ ID NO: 1358796 - RNA, 19 nt, Homo sapiens
  misc_RNA (1)...(19): siRNA sense strand
ccggugacuuccacaagaa

SEQ ID NO: 1358797 - RNA, 19 nt, Homo sapiens
  misc_RNA (1)...(19): siRNA sense strand
gaagauuggucuguuuugu

SEQ ID NO: 1358798 - RNA, 19 nt, Homo sapiens
  misc_RNA (1)...(19): siRNA sense strand
ugacugugccggugacuuc

SEQ ID NO: 1358799 - RNA, 19 nt, Homo sapiens
  misc_RNA (1)...(19): siRNA sense strand
caagaagauuggucuguuu

SEQ ID NO: 1358800 - RNA, 19 nt, Homo sapiens
  misc_RNA (1)...(19): siRNA sense strand
gaucugcaccguccaguug

SEQ ID NO: 1358801 - RNA, 19 nt, Homo sapiens
  misc_RNA (1)...(19): siRNA sense strand
acaagaagauuggucuguu

SEQ ID NO: 1358802 - RNA, 19 nt, Homo sapiens
  misc_RNA (1)...(19): siRNA sense strand
gccggugacuuccacaaga

SEQ ID NO: 1358803 - RNA, 19 nt, Homo sapiens
  misc_RNA (1)...(19): siRNA sense strand
ugacagcagugagaagauc

SEQ ID NO: 1358804 - RNA, 19 nt, Homo sapiens
  misc_RNA (1)...(19): siRNA sense strand
ccggugacuuccacaagaa

SEQ ID NO: 1358805 - RNA, 19 nt, Homo sapiens
  misc_RNA (1)...(19): siRNA sense strand
gaagauuggucuguuuugu

SEQ ID NO: 1358806 - RNA, 19 nt, Homo sapiens
  misc_RNA (1)...(19): siRNA sense strand
ugacugugccggugacuuc

SEQ ID NO: 1358807 - RNA, 19 nt, Homo sapiens
  misc_RNA (1)...(19): siRNA sense strand
gagaccagcaguacgagau

SEQ ID NO: 1358808 - RNA, 19 nt, Homo sapiens
  misc_RNA (1)...(19): siRNA sense strand
gcagcucuacgacgugaug

SEQ ID NO: 1358809 - RNA, 19 nt, Homo sapiens
  misc_RNA (1)...(19): siRNA sense strand
gcgcgaggcagagaucgaa

SEQ ID NO: 1358810 - RNA, 19 nt, Homo sapiens
  misc_RNA (1)...(19): siRNA sense strand
caagaagauuggucuguuu

SEQ ID NO: 1358811 - RNA, 19 nt, Homo sapiens
  misc_RNA (1)...(19): siRNA sense strand
gaucugcaccguccaguug

SEQ ID NO: 1358812 - RNA, 19 nt, Homo sapiens
  misc_RNA (1)...(19): siRNA sense strand
acaagaagauuggucuguu

SEQ ID NO: 1358813 - RNA, 19 nt, Homo sapiens
  misc_RNA (1)...(19): siRNA sense strand
gccggugacuuccacaaga

SEQ ID NO: 1358814 - RNA, 19 nt, Homo sapiens
  misc_RNA (1)...(19): siRNA sense strand
ugacagcagugagaagauc

SEQ ID NO: 1358815 - RNA, 19 nt, Homo sapiens
  misc_RNA (1)...(19): siRNA sense strand
ccggugacuuccacaagaa

SEQ ID NO: 1358816 - RNA, 19 nt, Homo sapiens
  misc_RNA (1)...(19): siRNA sense strand
gaagauuggucuguuuugu

SEQ ID NO: 1358817 - RNA, 19 nt, Homo sapiens
  misc_RNA (1)...(19): siRNA sense strand
ugacugugccggugacuuc

SEQ ID NO: 1358818 - RNA, 19 nt, Homo sapiens
  misc_RNA (1)...(19): siRNA sense strand
gagaccagcaguacgagau

SEQ ID NO: 1358819 - RNA, 19 nt, Homo sapiens
  misc_RNA (1)...(19): siRNA sense strand
gcagcucuacgacgugaug

SEQ ID NO: 1358820 - RNA, 19 nt, Homo sapiens
  misc_RNA (1)...(19): siRNA sense strand
gcgcgaggcagagaucgaa

SEQ ID NO: 1358821 - RNA, 19 nt, Homo sapiens
  misc_RNA (1)...(19): siRNA sense strand
caagaagauuggucuguuu

SEQ ID NO: 1358822 - RNA, 19 nt, Homo sapiens
  misc_RNA (1)...(19): siRNA sense strand
gaucugcaccguccaguug

SEQ ID NO: 1358823 - RNA, 19 nt, Homo sapiens
  misc_RNA (1)...(19): siRNA sense strand
acaagaagauuggucuguu

SEQ ID NO: 1358824 - RNA, 19 nt, Homo sapiens
  misc_RNA (1)...(19): siRNA sense strand
gccggugacuuccacaaga

SEQ ID NO: 1358825 - RNA, 19 nt, Homo sapiens
  misc_RNA (1)...(19): siRNA sense strand
ugacagcagugagaagauc

SEQ ID NO: 1358826 - RNA, 19 nt, Homo sapiens
  misc_RNA (1)...(19): siRNA sense strand
ccggugacuuccacaagaa

SEQ ID NO: 1358827 - RNA, 19 nt, Homo sapiens
  misc_RNA (1)...(19): siRNA sense strand
gaagauuggucuguuuugu

SEQ ID NO: 1358828 - RNA, 19 nt, Homo sapiens
  misc_RNA (1)...(19): siRNA sense strand
ugacugugccggugacuuc

SEQ ID NO: 1358829 - RNA, 19 nt, Homo sapiens
  misc_RNA (1)...(19): siRNA sense strand
gagaccagcaguacgagau

SEQ ID NO: 1358830 - RNA, 19 nt, Homo sapiens
  misc_RNA (1)...(19): siRNA sense strand
gcagcucuacgacgugaug

SEQ ID NO: 1358831 - RNA, 19 nt, Homo sapiens
  misc_RNA (1)...(19): siRNA sense strand
gcgcgaggcagagaucgaa

SEQ ID NO: 1358832 - RNA, 19 nt, Homo sapiens
  misc_RNA (1)...(19): siRNA sense strand
caagaagauuggucuguuu

SEQ ID NO: 1358833 - RNA, 19 nt, Homo sapiens
  misc_RNA (1)...(19): siRNA sense strand
gaucugcaccguccaguug

SEQ ID NO: 1358834 - RNA, 19 nt, Homo sapiens
  misc_RNA (1)...(19): siRNA sense strand
acaagaagauuggucuguu

SEQ ID NO: 1358835 - RNA, 19 nt, Homo sapiens
  misc_RNA (1)...(19): siRNA sense strand
gccggugacuuccacaaga

SEQ ID NO: 1358836 - RNA, 19 nt, Homo sapiens
  misc_RNA (1)...(19): siRNA sense strand
ugacagcagugagaagauc

SEQ ID NO: 1358837 - RNA, 19 nt, Homo sapiens
  misc_RNA (1)...(19): siRNA sense strand
ccggugacuuccacaagaa

SEQ ID NO: 1358838 - RNA, 19 nt, Homo sapiens
  misc_RNA (1)...(19): siRNA sense strand
gaagauuggucuguuuugu

SEQ ID NO: 1358839 - RNA, 19 nt, Homo sapiens
  misc_RNA (1)...(19): siRNA sense strand
ugacugugccggugacuuc

SEQ ID NO: 1358840 - RNA, 19 nt, Homo sapiens
  misc_RNA (1)...(19): siRNA sense strand
gagaccagcaguacgagau

SEQ ID NO: 1358841 - RNA, 19 nt, Homo sapiens
  misc_RNA (1)...(19): siRNA sense strand
gcagcucuacgacgugaug

SEQ ID NO: 1358842 - RNA, 19 nt, Homo sapiens
  misc_RNA (1)...(19): siRNA sense strand
gcgcgaggcagagaucgaa

SEQ ID NO: 1358843 - RNA, 19 nt, Homo sapiens
  misc_RNA (1)...(19): siRNA sense strand
caagaagauuggucuguuu

SEQ ID NO: 1358844 - RNA, 19 nt, Homo sapiens
  misc_RNA (1)...(19): siRNA sense strand
acaagaagauuggucuguu

SEQ ID NO: 1358845 - RNA, 19 nt, Homo sapiens
  misc_RNA (1)...(19): siRNA sense strand
gccggugacuuccacaaga

SEQ ID NO: 1358846 - RNA, 19 nt, Homo sapiens
  misc_RNA (1)...(19): siRNA sense strand
ccggugacuuccacaagaa

SEQ ID NO: 1358847 - RNA, 19 nt, Homo sapiens
  misc_RNA (1)...(19): siRNA sense strand
gaagauuggucuguuuugu

SEQ ID NO: 1358848 - RNA, 19 nt, Homo sapiens
  misc_RNA (1)...(19): siRNA sense strand
ugacugugccggugacuuc

SEQ ID NO: 1358849 - RNA, 19 nt, Homo sapiens
  misc_RNA (1)...(19): siRNA sense strand
caagaagauuggucuguuu

SEQ ID NO: 1358850 - RNA, 19 nt, Homo sapiens
  misc_RNA (1)...(19): siRNA sense strand
acaagaagauuggucuguu

SEQ ID NO: 1358851 - RNA, 19 nt, Homo sapiens
  misc_RNA (1)...(19): siRNA sense strand
gccggugacuuccacaaga

SEQ ID NO: 1358852 - RNA, 19 nt, Homo sapiens
  misc_RNA (1)...(19): siRNA sense strand
ccggugacuuccacaagaa

SEQ ID NO: 1358853 - RNA, 19 nt, Homo sapiens
  misc_RNA (1)...(19): siRNA sense strand
gaagauuggucuguuuugu

SEQ ID NO: 1358854 - RNA, 19 nt, Homo sapiens
  misc_RNA (1)...(19): siRNA sense strand
ugacugugccggugacuuc

SEQ ID NO: 1358855 - RNA, 19 nt, Homo sapiens
  misc_RNA (1)...(19): siRNA sense strand
caagaagauuggucuguuu

SEQ ID NO: 1358856 - RNA, 19 nt, Homo sapiens
  misc_RNA (1)...(19): siRNA sense strand
gaucugcaccguccaguug

SEQ ID NO: 1358857 - RNA, 19 nt, Homo sapiens
  misc_RNA (1)...(19): siRNA sense strand
acaagaagauuggucuguu

SEQ ID NO: 1358858 - RNA, 19 nt, Homo sapiens
  misc_RNA (1)...(19): siRNA sense strand
gccggugacuuccacaaga

SEQ ID NO: 1358859 - RNA, 19 nt, Homo sapiens
  misc_RNA (1)...(19): siRNA sense strand
ugacagcagugagaagauc

SEQ ID NO: 1358860 - RNA, 19 nt, Homo sapiens
  misc_RNA (1)...(19): siRNA sense strand
ccggugacuuccacaagaa

SEQ ID NO: 1358861 - RNA, 19 nt, Homo sapiens
  misc_RNA (1)...(19): siRNA sense strand
gaagauuggucuguuuugu

SEQ ID NO: 1358862 - RNA, 19 nt, Homo sapiens
  misc_RNA (1)...(19): siRNA sense strand
ugacugugccggugacuuc

SEQ ID NO: 1358863 - RNA, 19 nt, Homo sapiens
  misc_RNA (1)...(19): siRNA sense strand
gagaccagcaguacgagau

SEQ ID NO: 1358864 - RNA, 19 nt, Homo sapiens
  misc_RNA (1)...(19): siRNA sense strand
gcagcucuacgacgugaug

SEQ ID NO: 1358865 - RNA, 19 nt, Homo sapiens
  misc_RNA (1)...(19): siRNA sense strand
gcgcgaggcagagaucgaa

SEQ ID NO: 1358866 - RNA, 19 nt, Homo sapiens
  misc_RNA (1)...(19): siRNA sense strand
caagaagauuggucuguuu

SEQ ID NO: 1358867 - RNA, 19 nt, Homo sapiens
  misc_RNA (1)...(19): siRNA sense strand
acaagaagauuggucuguu

SEQ ID NO: 1358868 - RNA, 19 nt, Homo sapiens
  misc_RNA (1)...(19): siRNA sense strand
gccggugacuuccacaaga

SEQ ID NO: 1358869 - RNA, 19 nt, Homo sapiens
  misc_RNA (1)...(19): siRNA sense strand
ccggugacuuccacaagaa

SEQ ID NO: 1358870 - RNA, 19 nt, Homo sapiens
  misc_RNA (1)...(19): siRNA sense strand
gaagauuggucuguuuugu

SEQ ID NO: 1358871 - RNA, 19 nt, Homo sapiens
  misc_RNA (1)...(19): siRNA sense strand
ugacugugccggugacuuc

SEQ ID NO: 1358872 - RNA, 19 nt, Homo sapiens
  misc_RNA (1)...(19): siRNA sense strand
caagaagauuggucuguuu

SEQ ID NO: 1358873 - RNA, 19 nt, Homo sapiens
  misc_RNA (1)...(19): siRNA sense strand
acaagaagauuggucuguu

SEQ ID NO: 1358874 - RNA, 19 nt, Homo sapiens
  misc_RNA (1)...(19): siRNA sense strand
gccggugacuuccacaaga

SEQ ID NO: 1358875 - RNA, 19 nt, Homo sapiens
  misc_RNA (1)...(19): siRNA sense strand
ccggugacuuccacaagaa

SEQ ID NO: 1358876 - RNA, 19 nt, Homo sapiens
  misc_RNA (1)...(19): siRNA sense strand
gaagauuggucuguuuugu

SEQ ID NO: 1358877 - RNA, 19 nt, Homo sapiens
  misc_RNA (1)...(19): siRNA sense strand
ugacugugccggugacuuc

SEQ ID NO: 1358878 - RNA, 19 nt, Homo sapiens
  misc_RNA (1)...(19): siRNA sense strand
caagaagauuggucuguuu

SEQ ID NO: 1358879 - RNA, 19 nt, Homo sapiens
  misc_RNA (1)...(19): siRNA sense strand
acaagaagauuggucuguu

SEQ ID NO: 1358880 - RNA, 19 nt, Homo sapiens
  misc_RNA (1)...(19): siRNA sense strand
gccggugacuuccacaaga

SEQ ID NO: 1358881 - RNA, 19 nt, Homo sapiens
  misc_RNA (1)...(19): siRNA sense strand
ccggugacuuccacaagaa

SEQ ID NO: 1358882 - RNA, 19 nt, Homo sapiens
  misc_RNA (1)...(19): siRNA sense strand
gaagauuggucuguuuugu

SEQ ID NO: 1358883 - RNA, 19 nt, Homo sapiens
  misc_RNA (1)...(19): siRNA sense strand
ugacugugccggugacuuc

SEQ ID NO: 1358884 - RNA, 19 nt, Homo sapiens
  misc_RNA (1)...(19): siRNA sense strand
caagaagauuggucuguuu

SEQ ID NO: 1358885 - RNA, 19 nt, Homo sapiens
  misc_RNA (1)...(19): siRNA sense strand
acaagaagauuggucuguu

SEQ ID NO: 1358886 - RNA, 19 nt, Homo sapiens
  misc_RNA (1)...(19): siRNA sense strand
gccggugacuuccacaaga

SEQ ID NO: 1358887 - RNA, 19 nt, Homo sapiens
  misc_RNA (1)...(19): siRNA sense strand
ccggugacuuccacaagaa

SEQ ID NO: 1358888 - RNA, 19 nt, Homo sapiens
  misc_RNA (1)...(19): siRNA sense strand
gaagauuggucuguuuugu

SEQ ID NO: 1358889 - RNA, 19 nt, Homo sapiens
  misc_RNA (1)...(19): siRNA sense strand
ugacugugccggugacuuc

SEQ ID NO: 1358890 - RNA, 19 nt, Homo sapiens
  misc_RNA (1)...(19): siRNA sense strand
ggaauguucucuuucauca

SEQ ID NO: 1358891 - RNA, 19 nt, Homo sapiens
  misc_RNA (1)...(19): siRNA sense strand
guagaggacuggcaggaaa

SEQ ID NO: 1358892 - RNA, 19 nt, Homo sapiens
  misc_RNA (1)...(19): siRNA sense strand
gaacacaacagcugagcaa

SEQ ID NO: 1358893 - RNA, 19 nt, Homo sapiens
  misc_RNA (1)...(19): siRNA sense strand
gaacuucuacuaugucauc

SEQ ID NO: 1358894 - RNA, 19 nt, Homo sapiens
  misc_RNA (1)...(19): siRNA sense strand
ugauuggaauguucucuuu

SEQ ID NO: 1358895 - RNA, 19 nt, Homo sapiens
  misc_RNA (1)...(19): siRNA sense strand
caaaguugaugcugagaac

SEQ ID NO: 1358896 - RNA, 19 nt, Homo sapiens
  misc_RNA (1)...(19): siRNA sense strand
agccaaaucuugaaucuag

SEQ ID NO: 1358897 - RNA, 19 nt, Homo sapiens
  misc_RNA (1)...(19): siRNA sense strand
gacgggaacacuccaauga

SEQ ID NO: 1358898 - RNA, 19 nt, Homo sapiens
  misc_RNA (1)...(19): siRNA sense strand
ggugaugauuggaauguuc

SEQ ID NO: 1358899 - RNA, 19 nt, Homo sapiens
  misc_RNA (1)...(19): siRNA sense strand
ucuacuaugucauccugua

SEQ ID NO: 1358900 - RNA, 19 nt, Homo sapiens
  misc_RNA (1)...(19): siRNA sense strand
cgaaggccaccauccauga

SEQ ID NO: 1358901 - RNA, 19 nt, Homo sapiens
  misc_RNA (1)...(19): siRNA sense strand
caccauccaugagaacauu

SEQ ID NO: 1358902 - RNA, 19 nt, Homo sapiens
  misc_RNA (1)...(19): siRNA sense strand
aauguucucuuucaucauc

SEQ ID NO: 1358903 - RNA, 19 nt, Homo sapiens
  misc_RNA (1)...(19): siRNA sense strand
cacaacagcugagcaagag

SEQ ID NO: 1358904 - RNA, 19 nt, Homo sapiens
  misc_RNA (1)...(19): siRNA sense strand
ccaaaucuugaaucuagaa

SEQ ID NO: 1358905 - RNA, 19 nt, Homo sapiens
  misc_RNA (1)...(19): siRNA sense strand
acacaacagcugagcaaga

SEQ ID NO: 1358906 - RNA, 19 nt, Homo sapiens
  misc_RNA (1)...(19): siRNA sense strand
gccaaaucuugaaucuaga

SEQ ID NO: 1358907 - RNA, 19 nt, Homo sapiens
  misc_RNA (1)...(19): siRNA sense strand
ccaaaguugaugcugagaa

SEQ ID NO: 1358908 - RNA, 19 nt, Homo sapiens
  misc_RNA (1)...(19): siRNA sense strand
gagccaaaucuugaaucua

SEQ ID NO: 1358909 - RNA, 19 nt, Homo sapiens
  misc_RNA (1)...(19): siRNA sense strand
ugagcacugugaaauccaa

SEQ ID NO: 1358910 - RNA, 19 nt, Homo sapiens
  misc_RNA (1)...(19): siRNA sense strand
ggugagcacugugaaaucc

SEQ ID NO: 1358911 - RNA, 19 nt, Homo sapiens
  misc_RNA (1)...(19): siRNA sense strand
gacaauuggcgccagaaca

SEQ ID NO: 1358912 - RNA, 19 nt, Homo sapiens
  misc_RNA (1)...(19): siRNA sense strand
gaaaaguacaagagccaaa

SEQ ID NO: 1358913 - RNA, 19 nt, Homo sapiens
  misc_RNA (1)...(19): siRNA sense strand
agagccaaaucuugaaucu

SEQ ID NO: 1358914 - RNA, 19 nt, Homo sapiens
  misc_RNA (1)...(19): siRNA sense strand
auuggaauguucucuuuca

SEQ ID NO: 1358915 - RNA, 19 nt, Homo sapiens
  misc_RNA (1)...(19): siRNA sense strand
gcacugugaaauccaagag

SEQ ID NO: 1358916 - RNA, 19 nt, Homo sapiens
  misc_RNA (1)...(19): siRNA sense strand
gaaggccaccauccaugag

SEQ ID NO: 1358917 - RNA, 19 nt, Homo sapiens
  misc_RNA (1)...(19): siRNA sense strand
gcaaacggcuugaagauga

SEQ ID NO: 1358918 - RNA, 19 nt, Homo sapiens
  misc_RNA (1)...(19): siRNA sense strand
gaaggagucucaaaugaaa

SEQ ID NO: 1358919 - RNA, 19 nt, Homo sapiens
  misc_RNA (1)...(19): siRNA sense strand
gaacuaccauccgaagaua

SEQ ID NO: 1358920 - RNA, 19 nt, Homo sapiens
  misc_RNA (1)...(19): siRNA sense strand
caaaugaaauguacacaga

SEQ ID NO: 1358921 - RNA, 19 nt, Homo sapiens
  misc_RNA (1)...(19): siRNA sense strand
cgagagagccguauauuaa

SEQ ID NO: 1358922 - RNA, 19 nt, Homo sapiens
  misc_RNA (1)...(19): siRNA sense strand
gcaaagcucugaaaacaua

SEQ ID NO: 1358923 - RNA, 19 nt, Homo sapiens
  misc_RNA (1)...(19): siRNA sense strand
gaccugaucuucugcuuaa

SEQ ID NO: 1358924 - RNA, 19 nt, Homo sapiens
  misc_RNA (1)...(19): siRNA sense strand
gauagauccucuccagaua

SEQ ID NO: 1358925 - RNA, 19 nt, Homo sapiens
  misc_RNA (1)...(19): siRNA sense strand
gaagacacauggcagaaau

SEQ ID NO: 1358926 - RNA, 19 nt, Homo sapiens
  misc_RNA (1)...(19): siRNA sense strand
aaucugcucuccauauuua

SEQ ID NO: 1358927 - RNA, 19 nt, Homo sapiens
  misc_RNA (1)...(19): siRNA sense strand
cuacgucccugaaaucaua

SEQ ID NO: 1358928 - RNA, 19 nt, Homo sapiens
  misc_RNA (1)...(19): siRNA sense strand
caacaaggcccaucugcua

SEQ ID NO: 1358929 - RNA, 19 nt, Homo sapiens
  misc_RNA (1)...(19): siRNA sense strand
caucaaaucuaugcaguuu

SEQ ID NO: 1358930 - RNA, 19 nt, Homo sapiens
  misc_RNA (1)...(19): siRNA sense strand
agaguaaucuccauaaaga

SEQ ID NO: 1358931 - RNA, 19 nt, Homo sapiens
  misc_RNA (1)...(19): siRNA sense strand
gggagacgcuucauaacuu

SEQ ID NO: 1358932 - RNA, 19 nt, Homo sapiens
  misc_RNA (1)...(19): siRNA sense strand
cagcaucggugcacuugua

SEQ ID NO: 1358933 - RNA, 19 nt, Homo sapiens
  misc_RNA (1)...(19): siRNA sense strand
gaaugugucuauuuacuca

SEQ ID NO: 1358934 - RNA, 19 nt, Homo sapiens
  misc_RNA (1)...(19): siRNA sense strand
gcagaaauacuacuuggaa

SEQ ID NO: 1358935 - RNA, 19 nt, Homo sapiens
  misc_RNA (1)...(19): siRNA sense strand
gagcagccgucaacacuau

SEQ ID NO: 1358936 - RNA, 19 nt, Homo sapiens
  misc_RNA (1)...(19): siRNA sense strand
ccaagaagguacuuuagga

SEQ ID NO: 1358937 - RNA, 19 nt, Homo sapiens
  misc_RNA (1)...(19): siRNA sense strand
ucauaaagauugaggaaga

SEQ ID NO: 1358938 - RNA, 19 nt, Homo sapiens
  misc_RNA (1)...(19): siRNA sense strand
ggaaggagucucaaaugaa

SEQ ID NO: 1358939 - RNA, 19 nt, Homo sapiens
  misc_RNA (1)...(19): siRNA sense strand
gauccaagaagguacuuua

SEQ ID NO: 1358940 - RNA, 19 nt, Homo sapiens
  misc_RNA (1)...(19): siRNA sense strand
agaagguacuuuaggauuu

SEQ ID NO: 1358941 - RNA, 19 nt, Homo sapiens
  misc_RNA (1)...(19): siRNA sense strand
ccaaggagauagagaaagu

SEQ ID NO: 1358942 - RNA, 19 nt, Homo sapiens
  misc_RNA (1)...(19): siRNA sense strand
ucacucaaaugcugcagua

SEQ ID NO: 1358943 - RNA, 19 nt, Homo sapiens
  misc_RNA (1)...(19): siRNA sense strand
uaggaaaccgcaagaaaua

SEQ ID NO: 1358944 - RNA, 19 nt, Homo sapiens
  misc_RNA (1)...(19): siRNA sense strand
gagagccguauauuaauua

SEQ ID NO: 1358945 - RNA, 19 nt, Homo sapiens
  misc_RNA (1)...(19): siRNA sense strand
gaaggaggcccagaagauu

SEQ ID NO: 1358946 - RNA, 19 nt, Homo sapiens
  misc_RNA (1)...(19): siRNA sense strand
guacuucaaugacaauauc

SEQ ID NO: 1358947 - RNA, 19 nt, Homo sapiens
  misc_RNA (1)...(19): siRNA sense strand
gaaguuggcuugguuugag

SEQ ID NO: 1358948 - RNA, 19 nt, Homo sapiens
  misc_RNA (1)...(19): siRNA sense strand
ggaccgggaugacgucaau

SEQ ID NO: 1358949 - RNA, 19 nt, Homo sapiens
  misc_RNA (1)...(19): siRNA sense strand
ggagaguguuuccaacuuc

SEQ ID NO: 1358950 - RNA, 19 nt, Homo sapiens
  misc_RNA (1)...(19): siRNA sense strand
ggaggcagcagucuuagaa

SEQ ID NO: 1358951 - RNA, 19 nt, Homo sapiens
  misc_RNA (1)...(19): siRNA sense strand
acacauggcagaaauacua

SEQ ID NO: 1358952 - RNA, 19 nt, Homo sapiens
  misc_RNA (1)...(19): siRNA sense strand
ugaaucugcucuccauauu

SEQ ID NO: 1358953 - RNA, 19 nt, Homo sapiens
  misc_RNA (1)...(19): siRNA sense strand
guucacaccuccaggaaug

SEQ ID NO: 1358954 - RNA, 19 nt, Homo sapiens
  misc_RNA (1)...(19): siRNA sense strand
cugggaaugugucuauuua

SEQ ID NO: 1358955 - RNA, 19 nt, Homo sapiens
  misc_RNA (1)...(19): siRNA sense strand
gagcuggaauuggaaagaa

SEQ ID NO: 1358956 - RNA, 19 nt, Homo sapiens
  misc_RNA (1)...(19): siRNA sense strand
cgacggaccugaucuucug

SEQ ID NO: 1358957 - RNA, 19 nt, Homo sapiens
  misc_RNA (1)...(19): siRNA sense strand
gccaaccucuucuccauga

SEQ ID NO: 1358958 - RNA, 19 nt, Homo sapiens
  misc_RNA (1)...(19): siRNA sense strand
ucggugcacuuguaauaua

SEQ ID NO: 1358959 - RNA, 19 nt, Homo sapiens
  misc_RNA (1)...(19): siRNA sense strand
gaauuuaccggcugagaga

SEQ ID NO: 1358960 - RNA, 19 nt, Homo sapiens
  misc_RNA (1)...(19): siRNA sense strand
uggaaggagucucaaauga

SEQ ID NO: 1358961 - RNA, 19 nt, Homo sapiens
  misc_RNA (1)...(19): siRNA sense strand
ucgaauaucaugagaguaa

SEQ ID NO: 1358962 - RNA, 19 nt, Homo sapiens
  misc_RNA (1)...(19): siRNA sense strand
ggucauucauaaagauuga

SEQ ID NO: 1358963 - RNA, 19 nt, Homo sapiens
  misc_RNA (1)...(19): siRNA sense strand
agagagccguauauuaauu

SEQ ID NO: 1358964 - RNA, 19 nt, Homo sapiens
  misc_RNA (1)...(19): siRNA sense strand
agaaguacgugcaggaaga

SEQ ID NO: 1358965 - RNA, 19 nt, Homo sapiens
  misc_RNA (1)...(19): siRNA sense strand
cgacguacuucaaugacaa

SEQ ID NO: 1358966 - RNA, 19 nt, Homo sapiens
  misc_RNA (1)...(19): siRNA sense strand
gcagaguccugguugucuu

SEQ ID NO: 1358967 - RNA, 19 nt, Homo sapiens
  misc_RNA (1)...(19): siRNA sense strand
gcucaagcuccuaaugaua

SEQ ID NO: 1358968 - RNA, 19 nt, Homo sapiens
  misc_RNA (1)...(19): siRNA sense strand
gaaauacuacuuggaagga

SEQ ID NO: 1358969 - RNA, 19 nt, Homo sapiens
  misc_RNA (1)...(19): siRNA sense strand
gaugauauccgcccagaca

SEQ ID NO: 1358970 - RNA, 19 nt, Homo sapiens
  misc_RNA (1)...(19): siRNA sense strand
ggagacgcuucauaacuuc

SEQ ID NO: 1358971 - RNA, 19 nt, Homo sapiens
  misc_RNA (1)...(19): siRNA sense strand
ccaucaagcuggugaaucu

SEQ ID NO: 1358972 - RNA, 19 nt, Homo sapiens
  misc_RNA (1)...(19): siRNA sense strand
ggaagugaacucuguagug

SEQ ID NO: 1358973 - RNA, 19 nt, Homo sapiens
  misc_RNA (1)...(19): siRNA sense strand
caucggugcacuuguaaua

SEQ ID NO: 1358974 - RNA, 19 nt, Homo sapiens
  misc_RNA (1)...(19): siRNA sense strand
guuugugucuguguacuua

SEQ ID NO: 1358975 - RNA, 19 nt, Homo sapiens
  misc_RNA (1)...(19): siRNA sense strand
ggaccugaucuucugcuua

SEQ ID NO: 1358976 - RNA, 19 nt, Homo sapiens
  misc_RNA (1)...(19): siRNA sense strand
acaaagagguaugucauca

SEQ ID NO: 1358977 - RNA, 19 nt, Homo sapiens
  misc_RNA (1)...(19): siRNA sense strand
ccaguuagcucugcucgau

SEQ ID NO: 1358978 - RNA, 19 nt, Homo sapiens
  misc_RNA (1)...(19): siRNA sense strand
cgucaacacuaucaccaaa

SEQ ID NO: 1358979 - RNA, 19 nt, Homo sapiens
  misc_RNA (1)...(19): siRNA sense strand
gaaugggagacgcuucaua

SEQ ID NO: 1358980 - RNA, 19 nt, Homo sapiens
  misc_RNA (1)...(19): siRNA sense strand
gcacaaagagguaugucau

SEQ ID NO: 1358981 - RNA, 19 nt, Homo sapiens
  misc_RNA (1)...(19): siRNA sense strand
ggaccaagacgaugaugau

SEQ ID NO: 1358982 - RNA, 19 nt, Homo sapiens
  misc_RNA (1)...(19): siRNA sense strand
uuacucagguggaauuuua

SEQ ID NO: 1358983 - RNA, 19 nt, Homo sapiens
  misc_RNA (1)...(19): siRNA sense strand
ggagauagagaaagucauc

SEQ ID NO: 1358984 - RNA, 19 nt, Homo sapiens
  misc_RNA (1)...(19): siRNA sense strand
gaagguacuuuaggauuuu

SEQ ID NO: 1358985 - RNA, 19 nt, Homo sapiens
  misc_RNA (1)...(19): siRNA sense strand
ccgagagagccguauauua

SEQ ID NO: 1358986 - RNA, 19 nt, Homo sapiens
  misc_RNA (1)...(19): siRNA sense strand
caagauagagucagcagau

SEQ ID NO: 1358987 - RNA, 19 nt, Homo sapiens
  misc_RNA (1)...(19): siRNA sense strand
ugaacucuguaguggauuu

SEQ ID NO: 1358988 - RNA, 19 nt, Homo sapiens
  misc_RNA (1)...(19): siRNA sense strand
acuccaaugugaagaagua

SEQ ID NO: 1358989 - RNA, 19 nt, Homo sapiens
  misc_RNA (1)...(19): siRNA sense strand
gaaucugcucuccauauuu

SEQ ID NO: 1358990 - RNA, 19 nt, Homo sapiens
  misc_RNA (1)...(19): siRNA sense strand
cccagaagauuaacaaugg

SEQ ID NO: 1358991 - RNA, 19 nt, Homo sapiens
  misc_RNA (1)...(19): siRNA sense strand
cagccaaucagaauaauau

SEQ ID NO: 1358992 - RNA, 19 nt, Homo sapiens
  misc_RNA (1)...(19): siRNA sense strand
ggaagacacauggcagaaa

SEQ ID NO: 1358993 - RNA, 19 nt, Homo sapiens
  misc_RNA (1)...(19): siRNA sense strand
ugaaggacuuucugcacaa

SEQ ID NO: 1358994 - RNA, 19 nt, Homo sapiens
  misc_RNA (1)...(19): siRNA sense strand
gggaaugugucuauuuacu

SEQ ID NO: 1358995 - RNA, 19 nt, Homo sapiens
  misc_RNA (1)...(19): siRNA sense strand
ggauggcacucucaaacca

SEQ ID NO: 1358996 - RNA, 19 nt, Homo sapiens
  misc_RNA (1)...(19): siRNA sense strand
ugaugacccugauacagaa

SEQ ID NO: 1358997 - RNA, 19 nt, Homo sapiens
  misc_RNA (1)...(19): siRNA sense strand
cgauacuaauguucaguuu

SEQ ID NO: 1358998 - RNA, 19 nt, Homo sapiens
  misc_RNA (1)...(19): siRNA sense strand
auacuucgcugcaggacaa

SEQ ID NO: 1358999 - RNA, 19 nt, Homo sapiens
  misc_RNA (1)...(19): siRNA sense strand
gagagagccguauauuaau

SEQ ID NO: 1359000 - RNA, 19 nt, Homo sapiens
  misc_RNA (1)...(19): siRNA sense strand
cgaaggaggcccagaagau

SEQ ID NO: 1359001 - RNA, 19 nt, Homo sapiens
  misc_RNA (1)...(19): siRNA sense strand
cagccggguucauccauuu

SEQ ID NO: 1359002 - RNA, 19 nt, Homo sapiens
  misc_RNA (1)...(19): siRNA sense strand
gcagccggguucauccauu

SEQ ID NO: 1359003 - RNA, 19 nt, Homo sapiens
  misc_RNA (1)...(19): siRNA sense strand
cuucauagauucaucaaac

SEQ ID NO: 1359004 - RNA, 19 nt, Homo sapiens
  misc_RNA (1)...(19): siRNA sense strand
caucaaacccaauagaauc

SEQ ID NO: 1359005 - RNA, 19 nt, Homo sapiens
  misc_RNA (1)...(19): siRNA sense strand
uaagggcugucaacaucaa

SEQ ID NO: 1359006 - RNA, 19 nt, Homo sapiens
  misc_RNA (1)...(19): siRNA sense strand
ugauagccauugaguacaa

SEQ ID NO: 1359007 - RNA, 19 nt, Homo sapiens
  misc_RNA (1)...(19): siRNA sense strand
caauguccaccguugguua

SEQ ID NO: 1359008 - RNA, 19 nt, Homo sapiens
  misc_RNA (1)...(19): siRNA sense strand
gcacuuguaauauacuuca

SEQ ID NO: 1359009 - RNA, 19 nt, Homo sapiens
  misc_RNA (1)...(19): siRNA sense strand
ucacucaacaucaaaucua

SEQ ID NO: 1359010 - RNA, 19 nt, Homo sapiens
  misc_RNA (1)...(19): siRNA sense strand
uuuaagggcugucaacauc

SEQ ID NO: 1359011 - RNA, 19 nt, Homo sapiens
  misc_RNA (1)...(19): siRNA sense strand
cgacucuacugggauguuu

SEQ ID NO: 1359012 - RNA, 19 nt, Homo sapiens
  misc_RNA (1)...(19): siRNA sense strand
guuaauuccuggcaaugau

SEQ ID NO: 1359013 - RNA, 19 nt, Homo sapiens
  misc_RNA (1)...(19): siRNA sense strand
ugacaucacagaucccaaa

SEQ ID NO: 1359014 - RNA, 19 nt, Homo sapiens
  misc_RNA (1)...(19): siRNA sense strand
caaccgagagagccguaua

SEQ ID NO: 1359015 - RNA, 19 nt, Homo sapiens
  misc_RNA (1)...(19): siRNA sense strand
ggugaucuguucugcaaag

SEQ ID NO: 1359016 - RNA, 19 nt, Homo sapiens
  misc_RNA (1)...(19): siRNA sense strand
caucacagaucccaaaaga

SEQ ID NO: 1359017 - RNA, 19 nt, Homo sapiens
  misc_RNA (1)...(19): siRNA sense strand
gaacaagccuuaauuagga

SEQ ID NO: 1359018 - RNA, 19 nt, Homo sapiens
  misc_RNA (1)...(19): siRNA sense strand
gaaacaagaugcugacaaa

SEQ ID NO: 1359019 - RNA, 19 nt, Homo sapiens
  misc_RNA (1)...(19): siRNA sense strand
gaucaggaauuccauauuu

SEQ ID NO: 1359020 - RNA, 19 nt, Homo sapiens
  misc_RNA (1)...(19): siRNA sense strand
ggaagaaggugaucucuau

SEQ ID NO: 1359021 - RNA, 19 nt, Homo sapiens
  misc_RNA (1)...(19): siRNA sense strand
ggucagaacuuauguagaa

SEQ ID NO: 1359022 - RNA, 19 nt, Homo sapiens
  misc_RNA (1)...(19): siRNA sense strand
gcaggcagaucuucaauuu

SEQ ID NO: 1359023 - RNA, 19 nt, Homo sapiens
  misc_RNA (1)...(19): siRNA sense strand
guggagacauuacauauua

SEQ ID NO: 1359024 - RNA, 19 nt, Homo sapiens
  misc_RNA (1)...(19): siRNA sense strand
gaaaagggcugaaagaauu

SEQ ID NO: 1359025 - RNA, 19 nt, Homo sapiens
  misc_RNA (1)...(19): siRNA sense strand
gaaagaacuucaggacaua

SEQ ID NO: 1359026 - RNA, 19 nt, Homo sapiens
  misc_RNA (1)...(19): siRNA sense strand
gaacagaagagggcuauua

SEQ ID NO: 1359027 - RNA, 19 nt, Homo sapiens
  misc_RNA (1)...(19): siRNA sense strand
gaacuuauguagaagauca

SEQ ID NO: 1359028 - RNA, 19 nt, Homo sapiens
  misc_RNA (1)...(19): siRNA sense strand
gaugaaagaugaugaagga

SEQ ID NO: 1359029 - RNA, 19 nt, Homo sapiens
  misc_RNA (1)...(19): siRNA sense strand
gggagaagcugcccuuaaa

SEQ ID NO: 1359030 - RNA, 19 nt, Homo sapiens
  misc_RNA (1)...(19): siRNA sense strand
caaauuagaugacauugga

SEQ ID NO: 1359031 - RNA, 19 nt, Homo sapiens
  misc_RNA (1)...(19): siRNA sense strand
ccaaagaaguugugaaguu

SEQ ID NO: 1359032 - RNA, 19 nt, Homo sapiens
  misc_RNA (1)...(19): siRNA sense strand
caggaaagcuucaguuuga

SEQ ID NO: 1359033 - RNA, 19 nt, Homo sapiens
  misc_RNA (1)...(19): siRNA sense strand
gaaggcaucucuuacaaau

SEQ ID NO: 1359034 - RNA, 19 nt, Homo sapiens
  misc_RNA (1)...(19): siRNA sense strand
gaugaaagaugaccaggaa

SEQ ID NO: 1359035 - RNA, 19 nt, Homo sapiens
  misc_RNA (1)...(19): siRNA sense strand
ugaaggaacuuacacguuu

SEQ ID NO: 1359036 - RNA, 19 nt, Homo sapiens
  misc_RNA (1)...(19): siRNA sense strand
gguacucaaucacuaauua

SEQ ID NO: 1359037 - RNA, 19 nt, Homo sapiens
  misc_RNA (1)...(19): siRNA sense strand
gaccuuaccuguacagaaa

SEQ ID NO: 1359038 - RNA, 19 nt, Homo sapiens
  misc_RNA (1)...(19): siRNA sense strand
gaagagggcuauuaugaag

SEQ ID NO: 1359039 - RNA, 19 nt, Homo sapiens
  misc_RNA (1)...(19): siRNA sense strand
ugaagaagauggagaagaa

SEQ ID NO: 1359040 - RNA, 19 nt, Homo sapiens
  misc_RNA (1)...(19): siRNA sense strand
gaagagaaacgcuuuguug

SEQ ID NO: 1359041 - RNA, 19 nt, Homo sapiens
  misc_RNA (1)...(19): siRNA sense strand
gaaaucaaaucaacugaca

SEQ ID NO: 1359042 - RNA, 19 nt, Homo sapiens
  misc_RNA (1)...(19): siRNA sense strand
gaagaaugguguggaaauu

SEQ ID NO: 1359043 - RNA, 19 nt, Homo sapiens
  misc_RNA (1)...(19): siRNA sense strand
ggagaaagauaccaaaugg

SEQ ID NO: 1359044 - RNA, 19 nt, Homo sapiens
  misc_RNA (1)...(19): siRNA sense strand
caaagugaguuacaacaaa

SEQ ID NO: 1359045 - RNA, 19 nt, Homo sapiens
  misc_RNA (1)...(19): siRNA sense strand
cuaaagaggugaaacaaga

SEQ ID NO: 1359046 - RNA, 19 nt, Homo sapiens
  misc_RNA (1)...(19): siRNA sense strand
gagaauggcucaugaaggu

SEQ ID NO: 1359047 - RNA, 19 nt, Homo sapiens
  misc_RNA (1)...(19): siRNA sense strand
gaaacaauacugagaacua

SEQ ID NO: 1359048 - RNA, 19 nt, Homo sapiens
  misc_RNA (1)...(19): siRNA sense strand
gcaaauaacucaggagaag

SEQ ID NO: 1359049 - RNA, 19 nt, Homo sapiens
  misc_RNA (1)...(19): siRNA sense strand
gcagagccacuaacaaaua

SEQ ID NO: 1359050 - RNA, 19 nt, Homo sapiens
  misc_RNA (1)...(19): siRNA sense strand
guauaaagauggcauugaa

SEQ ID NO: 1359051 - RNA, 19 nt, Homo sapiens
  misc_RNA (1)...(19): siRNA sense strand
caucaaacauggagaaaga

SEQ ID NO: 1359052 - RNA, 19 nt, Homo sapiens
  misc_RNA (1)...(19): siRNA sense strand
gaaggaaaaugguaucaua

SEQ ID NO: 1359053 - RNA, 19 nt, Homo sapiens
  misc_RNA (1)...(19): siRNA sense strand
gaacaagaaacaauacuga

SEQ ID NO: 1359054 - RNA, 19 nt, Homo sapiens
  misc_RNA (1)...(19): siRNA sense strand
caacauagcuggagaaacc

SEQ ID NO: 1359055 - RNA, 19 nt, Homo sapiens
  misc_RNA (1)...(19): siRNA sense strand
gaagagcgcuuugaaguac

SEQ ID NO: 1359056 - RNA, 19 nt, Homo sapiens
  misc_RNA (1)...(19): siRNA sense strand
gaauugauguccuguggaa

SEQ ID NO: 1359057 - RNA, 19 nt, Homo sapiens
  misc_RNA (1)...(19): siRNA sense strand
gaaagaauccagagccaaa

SEQ ID NO: 1359058 - RNA, 19 nt, Homo sapiens
  misc_RNA (1)...(19): siRNA sense strand
ggauacagauacaaaguga

SEQ ID NO: 1359059 - RNA, 19 nt, Homo sapiens
  misc_RNA (1)...(19): siRNA sense strand
gcagaucacagacagaaua

SEQ ID NO: 1359060 - RNA, 19 nt, Homo sapiens
  misc_RNA (1)...(19): siRNA sense strand
gaaaccaacuguaaucucu

SEQ ID NO: 1359061 - RNA, 19 nt, Homo sapiens
  misc_RNA (1)...(19): siRNA sense strand
ggacauagaaguuccagaa

SEQ ID NO: 1359062 - RNA, 19 nt, Homo sapiens
  misc_RNA (1)...(19): siRNA sense strand
ggauauccauuaccaaaga

SEQ ID NO: 1359063 - RNA, 19 nt, Homo sapiens
  misc_RNA (1)...(19): siRNA sense strand
caaagaaguugugaaguug

SEQ ID NO: 1359064 - RNA, 19 nt, Homo sapiens
  misc_RNA (1)...(19): siRNA sense strand
caucaggaauguucacuuu

SEQ ID NO: 1359065 - RNA, 19 nt, Homo sapiens
  misc_RNA (1)...(19): siRNA sense strand
gaauuagagugcauuguau

SEQ ID NO: 1359066 - RNA, 19 nt, Homo sapiens
  misc_RNA (1)...(19): siRNA sense strand
uaaagaagaugguacucaa

SEQ ID NO: 1359067 - RNA, 19 nt, Homo sapiens
  misc_RNA (1)...(19): siRNA sense strand
uguggaagcucgucauaua

SEQ ID NO: 1359068 - RNA, 19 nt, Homo sapiens
  misc_RNA (1)...(19): siRNA sense strand
gaaaugaaagucagagcua

SEQ ID NO: 1359069 - RNA, 19 nt, Homo sapiens
  misc_RNA (1)...(19): siRNA sense strand
caaauggacuuucuacaag

SEQ ID NO: 1359070 - RNA, 19 nt, Homo sapiens
  misc_RNA (1)...(19): siRNA sense strand
ggaaaugccuguuuaucca

SEQ ID NO: 1359071 - RNA, 19 nt, Homo sapiens
  misc_RNA (1)...(19): siRNA sense strand
acacaaauauguaguggaa

SEQ ID NO: 1359072 - RNA, 19 nt, Homo sapiens
  misc_RNA (1)...(19): siRNA sense strand
ggaagaugcuggaaauuac

SEQ ID NO: 1359073 - RNA, 19 nt, Homo sapiens
  misc_RNA (1)...(19): siRNA sense strand
ccaaagaguuaacugaaga

SEQ ID NO: 1359074 - RNA, 19 nt, Homo sapiens
  misc_RNA (1)...(19): siRNA sense strand
cggaagagcugcgcaguaa

SEQ ID NO: 1359075 - RNA, 19 nt, Homo sapiens
  misc_RNA (1)...(19): siRNA sense strand
uaaggaagaugcuggaaau

SEQ ID NO: 1359076 - RNA, 19 nt, Homo sapiens
  misc_RNA (1)...(19): siRNA sense strand
ucagggaccuauucaguaa

SEQ ID NO: 1359077 - RNA, 19 nt, Homo sapiens
  misc_RNA (1)...(19): siRNA sense strand
gcacggaugucaccugcaa

SEQ ID NO: 1359078 - RNA, 19 nt, Homo sapiens
  misc_RNA (1)...(19): siRNA sense strand
gagaugugguuaugacuga

SEQ ID NO: 1359079 - RNA, 19 nt, Homo sapiens
  misc_RNA (1)...(19): siRNA sense strand
caagaacaaauccaaguua

SEQ ID NO: 1359080 - RNA, 19 nt, Homo sapiens
  misc_RNA (1)...(19): siRNA sense strand
gagaaacuauggcuacuag

SEQ ID NO: 1359081 - RNA, 19 nt, Homo sapiens
  misc_RNA (1)...(19): siRNA sense strand
ggagaagacugcuguaacu

SEQ ID NO: 1359082 - RNA, 19 nt, Homo sapiens
  misc_RNA (1)...(19): siRNA sense strand
gcacauaucaucacagauc

SEQ ID NO: 1359083 - RNA, 19 nt, Homo sapiens
  misc_RNA (1)...(19): siRNA sense strand
ggaaacacauuaaggacau

SEQ ID NO: 1359084 - RNA, 19 nt, Homo sapiens
  misc_RNA (1)...(19): siRNA sense strand
gaaauuaagccaagugaca

SEQ ID NO: 1359085 - RNA, 19 nt, Homo sapiens
  misc_RNA (1)...(19): siRNA sense strand
gaugaaagacggccaagaa

SEQ ID NO: 1359086 - RNA, 19 nt, Homo sapiens
  misc_RNA (1)...(19): siRNA sense strand
guuaaagucuccuuggaaa

SEQ ID NO: 1359087 - RNA, 19 nt, Homo sapiens
  misc_RNA (1)...(19): siRNA sense strand
gagcucaagucucgaaaga

SEQ ID NO: 1359088 - RNA, 19 nt, Homo sapiens
  misc_RNA (1)...(19): siRNA sense strand
gaaagaauuacccaugaaa

SEQ ID NO: 1359089 - RNA, 19 nt, Homo sapiens
  misc_RNA (1)...(19): siRNA sense strand
gaaggaaucuacacugcau

SEQ ID NO: 1359090 - RNA, 19 nt, Homo sapiens
  misc_RNA (1)...(19): siRNA sense strand
gauuaugaguuacugauga

SEQ ID NO: 1359091 - RNA, 19 nt, Homo sapiens
  misc_RNA (1)...(19): siRNA sense strand
ugaagaagcugauuaugag

SEQ ID NO: 1359092 - RNA, 19 nt, Homo sapiens
  misc_RNA (1)...(19): siRNA sense strand
gagaaacgcuuuguugagu

SEQ ID NO: 1359093 - RNA, 19 nt, Homo sapiens
  misc_RNA (1)...(19): siRNA sense strand
gcaggugucagaagaauuu

SEQ ID NO: 1359094 - RNA, 19 nt, Homo sapiens
  misc_RNA (1)...(19): siRNA sense strand
gaaauuuacuacagaagag

SEQ ID NO: 1359095 - RNA, 19 nt, Homo sapiens
  misc_RNA (1)...(19): siRNA sense strand
ggaaauugccgaagcuuau

SEQ ID NO: 1359096 - RNA, 19 nt, Homo sapiens
  misc_RNA (1)...(19): siRNA sense strand
gaaauugagaugagugaaa

SEQ ID NO: 1359097 - RNA, 19 nt, Homo sapiens
  misc_RNA (1)...(19): siRNA sense strand
cauagaaguuccagaauca

SEQ ID NO: 1359098 - RNA, 19 nt, Homo sapiens
  misc_RNA (1)...(19): siRNA sense strand
agacaaacccgaauugaaa

SEQ ID NO: 1359099 - RNA, 19 nt, Homo sapiens
  misc_RNA (1)...(19): siRNA sense strand
ggaacaauuuacucucuga

SEQ ID NO: 1359100 - RNA, 19 nt, Homo sapiens
  misc_RNA (1)...(19): siRNA sense strand
gaaaucaagcccaguucua

SEQ ID NO: 1359101 - RNA, 19 nt, Homo sapiens
  misc_RNA (1)...(19): siRNA sense strand
gaaagacggccaagaagug

SEQ ID NO: 1359102 - RNA, 19 nt, Homo sapiens
  misc_RNA (1)...(19): siRNA sense strand
ccaagcaauugaucacuuu

SEQ ID NO: 1359103 - RNA, 19 nt, Homo sapiens
  misc_RNA (1)...(19): siRNA sense strand
gagaaggcauuacuaccaa

SEQ ID NO: 1359104 - RNA, 19 nt, Homo sapiens
  misc_RNA (1)...(19): siRNA sense strand
gaaaacaguuguaccuaaa

SEQ ID NO: 1359105 - RNA, 19 nt, Homo sapiens
  misc_RNA (1)...(19): siRNA sense strand
caagaaaugcuuuaucaga

SEQ ID NO: 1359106 - RNA, 19 nt, Homo sapiens
  misc_RNA (1)...(19): siRNA sense strand
gaaggaacuuacacguuug

SEQ ID NO: 1359107 - RNA, 19 nt, Homo sapiens
  misc_RNA (1)...(19): siRNA sense strand
aaacagcgacuagucauua

SEQ ID NO: 1359108 - RNA, 19 nt, Homo sapiens
  misc_RNA (1)...(19): siRNA sense strand
caagugagacuccaaguga

SEQ ID NO: 1359109 - RNA, 19 nt, Homo sapiens
  misc_RNA (1)...(19): siRNA sense strand
gaaguugugucuccugauc

SEQ ID NO: 1359110 - RNA, 19 nt, Homo sapiens
  misc_RNA (1)...(19): siRNA sense strand
gaagaagcgagccauguuu

SEQ ID NO: 1359111 - RNA, 19 nt, Homo sapiens
  misc_RNA (1)...(19): siRNA sense strand
ccaggaagcuguguuugaa

SEQ ID NO: 1359112 - RNA, 19 nt, Homo sapiens
  misc_RNA (1)...(19): siRNA sense strand
gaaacaacagaaaccauuu

SEQ ID NO: 1359113 - RNA, 19 nt, Homo sapiens
  misc_RNA (1)...(19): siRNA sense strand
gcaagcuggugauuucuau

SEQ ID NO: 1359114 - RNA, 19 nt, Homo sapiens
  misc_RNA (1)...(19): siRNA sense strand
cauccaaccugcucaagaa

SEQ ID NO: 1359115 - RNA, 19 nt, Homo sapiens
  misc_RNA (1)...(19): siRNA sense strand
gaagauugaagcccacuuu

SEQ ID NO: 1359116 - RNA, 19 nt, Homo sapiens
  misc_RNA (1)...(19): siRNA sense strand
gcucagaucucagaaucaa

SEQ ID NO: 1359117 - RNA, 19 nt, Homo sapiens
  misc_RNA (1)...(19): siRNA sense strand
gaacaagccuuaauuagga

SEQ ID NO: 1359118 - RNA, 19 nt, Homo sapiens
  misc_RNA (1)...(19): siRNA sense strand
gaaacaagaugcugacaaa

SEQ ID NO: 1359119 - RNA, 19 nt, Homo sapiens
  misc_RNA (1)...(19): siRNA sense strand
gaucaggaauuccauauuu

SEQ ID NO: 1359120 - RNA, 19 nt, Homo sapiens
  misc_RNA (1)...(19): siRNA sense strand
ggaagaaggugaucucuau

SEQ ID NO: 1359121 - RNA, 19 nt, Homo sapiens
  misc_RNA (1)...(19): siRNA sense strand
ggucagaacuuauguagaa

SEQ ID NO: 1359122 - RNA, 19 nt, Homo sapiens
  misc_RNA (1)...(19): siRNA sense strand
gcaggcagaucuucaauuu

SEQ ID NO: 1359123 - RNA, 19 nt, Homo sapiens
  misc_RNA (1)...(19): siRNA sense strand
guggagacauuacauauua

SEQ ID NO: 1359124 - RNA, 19 nt, Homo sapiens
  misc_RNA (1)...(19): siRNA sense strand
gaaaagggcugaaagaauu

SEQ ID NO: 1359125 - RNA, 19 nt, Homo sapiens
  misc_RNA (1)...(19): siRNA sense strand
gaaagaacuucaggacaua

SEQ ID NO: 1359126 - RNA, 19 nt, Homo sapiens
  misc_RNA (1)...(19): siRNA sense strand
gaacagaagagggcuauua

SEQ ID NO: 1359127 - RNA, 19 nt, Homo sapiens
  misc_RNA (1)...(19): siRNA sense strand
gaacuuauguagaagauca

SEQ ID NO: 1359128 - RNA, 19 nt, Homo sapiens
  misc_RNA (1)...(19): siRNA sense strand
gaugaaagaugaugaagga

SEQ ID NO: 1359129 - RNA, 19 nt, Homo sapiens
  misc_RNA (1)...(19): siRNA sense strand
gggagaagcugcccuuaaa

SEQ ID NO: 1359130 - RNA, 19 nt, Homo sapiens
  misc_RNA (1)...(19): siRNA sense strand
caaauuagaugacauugga

SEQ ID NO: 1359131 - RNA, 19 nt, Homo sapiens
  misc_RNA (1)...(19): siRNA sense strand
ccaaagaaguugugaaguu

SEQ ID NO: 1359132 - RNA, 19 nt, Homo sapiens
  misc_RNA (1)...(19): siRNA sense strand
caggaaagcuucaguuuga

SEQ ID NO: 1359133 - RNA, 19 nt, Homo sapiens
  misc_RNA (1)...(19): siRNA sense strand
gaaggcaucucuuacaaau

SEQ ID NO: 1359134 - RNA, 19 nt, Homo sapiens
  misc_RNA (1)...(19): siRNA sense strand
gaugaaagaugaccaggaa

SEQ ID NO: 1359135 - RNA, 19 nt, Homo sapiens
  misc_RNA (1)...(19): siRNA sense strand
ugaaggaacuuacacguuu

SEQ ID NO: 1359136 - RNA, 19 nt, Homo sapiens
  misc_RNA (1)...(19): siRNA sense strand
gguacucaaucacuaauua

SEQ ID NO: 1359137 - RNA, 19 nt, Homo sapiens
  misc_RNA (1)...(19): siRNA sense strand
gaccuuaccuguacagaaa

SEQ ID NO: 1359138 - RNA, 19 nt, Homo sapiens
  misc_RNA (1)...(19): siRNA sense strand
gaagagggcuauuaugaag

SEQ ID NO: 1359139 - RNA, 19 nt, Homo sapiens
  misc_RNA (1)...(19): siRNA sense strand
ugaagaagauggagaagaa

SEQ ID NO: 1359140 - RNA, 19 nt, Homo sapiens
  misc_RNA (1)...(19): siRNA sense strand
gaagagaaacgcuuuguug

SEQ ID NO: 1359141 - RNA, 19 nt, Homo sapiens
  misc_RNA (1)...(19): siRNA sense strand
gaaaucaaaucaacugaca

SEQ ID NO: 1359142 - RNA, 19 nt, Homo sapiens
  misc_RNA (1)...(19): siRNA sense strand
gaagaaugguguggaaauu

SEQ ID NO: 1359143 - RNA, 19 nt, Homo sapiens
  misc_RNA (1)...(19): siRNA sense strand
ggagaaagauaccaaaugg

SEQ ID NO: 1359144 - RNA, 19 nt, Homo sapiens
  misc_RNA (1)...(19): siRNA sense strand
caaagugaguuacaacaaa

SEQ ID NO: 1359145 - RNA, 19 nt, Homo sapiens
  misc_RNA (1)...(19): siRNA sense strand
cuaaagaggugaaacaaga

SEQ ID NO: 1359146 - RNA, 19 nt, Homo sapiens
  misc_RNA (1)...(19): siRNA sense strand
gagaauggcucaugaaggu

SEQ ID NO: 1359147 - RNA, 19 nt, Homo sapiens
  misc_RNA (1)...(19): siRNA sense strand
gaaacaauacugagaacua

SEQ ID NO: 1359148 - RNA, 19 nt, Homo sapiens
  misc_RNA (1)...(19): siRNA sense strand
gcaaauaacucaggagaag

SEQ ID NO: 1359149 - RNA, 19 nt, Homo sapiens
  misc_RNA (1)...(19): siRNA sense strand
gcagagccacuaacaaaua

SEQ ID NO: 1359150 - RNA, 19 nt, Homo sapiens
  misc_RNA (1)...(19): siRNA sense strand
guauaaagauggcauugaa

SEQ ID NO: 1359151 - RNA, 19 nt, Homo sapiens
  misc_RNA (1)...(19): siRNA sense strand
caucaaacauggagaaaga

SEQ ID NO: 1359152 - RNA, 19 nt, Homo sapiens
  misc_RNA (1)...(19): siRNA sense strand
gaaggaaaaugguaucaua

SEQ ID NO: 1359153 - RNA, 19 nt, Homo sapiens
  misc_RNA (1)...(19): siRNA sense strand
gaacaagaaacaauacuga

SEQ ID NO: 1359154 - RNA, 19 nt, Homo sapiens
  misc_RNA (1)...(19): siRNA sense strand
caacauagcuggagaaacc

SEQ ID NO: 1359155 - RNA, 19 nt, Homo sapiens
  misc_RNA (1)...(19): siRNA sense strand
gaagagcgcuuugaaguac

SEQ ID NO: 1359156 - RNA, 19 nt, Homo sapiens
  misc_RNA (1)...(19): siRNA sense strand
gaauugauguccuguggaa

SEQ ID NO: 1359157 - RNA, 19 nt, Homo sapiens
  misc_RNA (1)...(19): siRNA sense strand
gaaagaauccagagccaaa

SEQ ID NO: 1359158 - RNA, 19 nt, Homo sapiens
  misc_RNA (1)...(19): siRNA sense strand
ggauacagauacaaaguga

SEQ ID NO: 1359159 - RNA, 19 nt, Homo sapiens
  misc_RNA (1)...(19): siRNA sense strand
gcagaucacagacagaaua

SEQ ID NO: 1359160 - RNA, 19 nt, Homo sapiens
  misc_RNA (1)...(19): siRNA sense strand
gaaaccaacuguaaucucu

SEQ ID NO: 1359161 - RNA, 19 nt, Homo sapiens
  misc_RNA (1)...(19): siRNA sense strand
ggacauagaaguuccagaa

SEQ ID NO: 1359162 - RNA, 19 nt, Homo sapiens
  misc_RNA (1)...(19): siRNA sense strand
ggauauccauuaccaaaga

SEQ ID NO: 1359163 - RNA, 19 nt, Homo sapiens
  misc_RNA (1)...(19): siRNA sense strand
caaagaaguugugaaguug

SEQ ID NO: 1359164 - RNA, 19 nt, Homo sapiens
  misc_RNA (1)...(19): siRNA sense strand
caucaggaauguucacuuu

SEQ ID NO: 1359165 - RNA, 19 nt, Homo sapiens
  misc_RNA (1)...(19): siRNA sense strand
gaauuagagugcauuguau

SEQ ID NO: 1359166 - RNA, 19 nt, Homo sapiens
  misc_RNA (1)...(19): siRNA sense strand
uaaagaagaugguacucaa

SEQ ID NO: 1359167 - RNA, 19 nt, Homo sapiens
  misc_RNA (1)...(19): siRNA sense strand
uguggaagcucgucauaua

SEQ ID NO: 1359168 - RNA, 19 nt, Homo sapiens
  misc_RNA (1)...(19): siRNA sense strand
gaaaugaaagucagagcua

SEQ ID NO: 1359169 - RNA, 19 nt, Homo sapiens
  misc_RNA (1)...(19): siRNA sense strand
caaauggacuuucuacaag

SEQ ID NO: 1359170 - RNA, 19 nt, Homo sapiens
  misc_RNA (1)...(19): siRNA sense strand
ggaaaugccuguuuaucca

SEQ ID NO: 1359171 - RNA, 19 nt, Homo sapiens
  misc_RNA (1)...(19): siRNA sense strand
acacaaauauguaguggaa

SEQ ID NO: 1359172 - RNA, 19 nt, Homo sapiens
  misc_RNA (1)...(19): siRNA sense strand
ggaagaugcuggaaauuac

SEQ ID NO: 1359173 - RNA, 19 nt, Homo sapiens
  misc_RNA (1)...(19): siRNA sense strand
ccaaagaguuaacugaaga

SEQ ID NO: 1359174 - RNA, 19 nt, Homo sapiens
  misc_RNA (1)...(19): siRNA sense strand
cggaagagcugcgcaguaa

SEQ ID NO: 1359175 - RNA, 19 nt, Homo sapiens
  misc_RNA (1)...(19): siRNA sense strand
uaaggaagaugcuggaaau

SEQ ID NO: 1359176 - RNA, 19 nt, Homo sapiens
  misc_RNA (1)...(19): siRNA sense strand
ucagggaccuauucaguaa

SEQ ID NO: 1359177 - RNA, 19 nt, Homo sapiens
  misc_RNA (1)...(19): siRNA sense strand
gcacggaugucaccugcaa

SEQ ID NO: 1359178 - RNA, 19 nt, Homo sapiens
  misc_RNA (1)...(19): siRNA sense strand
gagaugugguuaugacuga

SEQ ID NO: 1359179 - RNA, 19 nt, Homo sapiens
  misc_RNA (1)...(19): siRNA sense strand
caagaacaaauccaaguua

SEQ ID NO: 1359180 - RNA, 19 nt, Homo sapiens
  misc_RNA (1)...(19): siRNA sense strand
gagaaacuauggcuacuag

SEQ ID NO: 1359181 - RNA, 19 nt, Homo sapiens
  misc_RNA (1)...(19): siRNA sense strand
ggagaagacugcuguaacu

SEQ ID NO: 1359182 - RNA, 19 nt, Homo sapiens
  misc_RNA (1)...(19): siRNA sense strand
gcacauaucaucacagauc

SEQ ID NO: 1359183 - RNA, 19 nt, Homo sapiens
  misc_RNA (1)...(19): siRNA sense strand
ggaaacacauuaaggacau

SEQ ID NO: 1359184 - RNA, 19 nt, Homo sapiens
  misc_RNA (1)...(19): siRNA sense strand
gaaauuaagccaagugaca

SEQ ID NO: 1359185 - RNA, 19 nt, Homo sapiens
  misc_RNA (1)...(19): siRNA sense strand
gaugaaagacggccaagaa

SEQ ID NO: 1359186 - RNA, 19 nt, Homo sapiens
  misc_RNA (1)...(19): siRNA sense strand
guuaaagucuccuuggaaa

SEQ ID NO: 1359187 - RNA, 19 nt, Homo sapiens
  misc_RNA (1)...(19): siRNA sense strand
gagcucaagucucgaaaga

SEQ ID NO: 1359188 - RNA, 19 nt, Homo sapiens
  misc_RNA (1)...(19): siRNA sense strand
gaaagaauuacccaugaaa

SEQ ID NO: 1359189 - RNA, 19 nt, Homo sapiens
  misc_RNA (1)...(19): siRNA sense strand
gaaggaaucuacacugcau

SEQ ID NO: 1359190 - RNA, 19 nt, Homo sapiens
  misc_RNA (1)...(19): siRNA sense strand
gauuaugaguuacugauga

SEQ ID NO: 1359191 - RNA, 19 nt, Homo sapiens
  misc_RNA (1)...(19): siRNA sense strand
ugaagaagcugauuaugag

SEQ ID NO: 1359192 - RNA, 19 nt, Homo sapiens
  misc_RNA (1)...(19): siRNA sense strand
gagaaacgcuuuguugagu

SEQ ID NO: 1359193 - RNA, 19 nt, Homo sapiens
  misc_RNA (1)...(19): siRNA sense strand
gcaggugucagaagaauuu

SEQ ID NO: 1359194 - RNA, 19 nt, Homo sapiens
  misc_RNA (1)...(19): siRNA sense strand
gaaauuuacuacagaagag

SEQ ID NO: 1359195 - RNA, 19 nt, Homo sapiens
  misc_RNA (1)...(19): siRNA sense strand
ggaaauugccgaagcuuau

SEQ ID NO: 1359196 - RNA, 19 nt, Homo sapiens
  misc_RNA (1)...(19): siRNA sense strand
gaaauugagaugagugaaa

SEQ ID NO: 1359197 - RNA, 19 nt, Homo sapiens
  misc_RNA (1)...(19): siRNA sense strand
cauagaaguuccagaauca

SEQ ID NO: 1359198 - RNA, 19 nt, Homo sapiens
  misc_RNA (1)...(19): siRNA sense strand
agacaaacccgaauugaaa

SEQ ID NO: 1359199 - RNA, 19 nt, Homo sapiens
  misc_RNA (1)...(19): siRNA sense strand
ggaacaauuuacucucuga

SEQ ID NO: 1359200 - RNA, 19 nt, Homo sapiens
  misc_RNA (1)...(19): siRNA sense strand
gaaaucaagcccaguucua

SEQ ID NO: 1359201 - RNA, 19 nt, Homo sapiens
  misc_RNA (1)...(19): siRNA sense strand
gaaagacggccaagaagug

SEQ ID NO: 1359202 - RNA, 19 nt, Homo sapiens
  misc_RNA (1)...(19): siRNA sense strand
ccaagcaauugaucacuuu

SEQ ID NO: 1359203 - RNA, 19 nt, Homo sapiens
  misc_RNA (1)...(19): siRNA sense strand
gagaaggcauuacuaccaa

SEQ ID NO: 1359204 - RNA, 19 nt, Homo sapiens
  misc_RNA (1)...(19): siRNA sense strand
gaaaacaguuguaccuaaa

SEQ ID NO: 1359205 - RNA, 19 nt, Homo sapiens
  misc_RNA (1)...(19): siRNA sense strand
caagaaaugcuuuaucaga

SEQ ID NO: 1359206 - RNA, 19 nt, Homo sapiens
  misc_RNA (1)...(19): siRNA sense strand
gaaggaacuuacacguuug

SEQ ID NO: 1359207 - RNA, 19 nt, Homo sapiens
  misc_RNA (1)...(19): siRNA sense strand
aaacagcgacuagucauua

SEQ ID NO: 1359208 - RNA, 19 nt, Homo sapiens
  misc_RNA (1)...(19): siRNA sense strand
caagugagacuccaaguga

SEQ ID NO: 1359209 - RNA, 19 nt, Homo sapiens
  misc_RNA (1)...(19): siRNA sense strand
gaaguugugucuccugauc

SEQ ID NO: 1359210 - RNA, 19 nt, Homo sapiens
  misc_RNA (1)...(19): siRNA sense strand
gaagaagcgagccauguuu

SEQ ID NO: 1359211 - RNA, 19 nt, Homo sapiens
  misc_RNA (1)...(19): siRNA sense strand
ccaggaagcuguguuugaa

SEQ ID NO: 1359212 - RNA, 19 nt, Homo sapiens
  misc_RNA (1)...(19): siRNA sense strand
gaaacaacagaaaccauuu

SEQ ID NO: 1359213 - RNA, 19 nt, Homo sapiens
  misc_RNA (1)...(19): siRNA sense strand
gcaagcuggugauuucuau

SEQ ID NO: 1359214 - RNA, 19 nt, Homo sapiens
  misc_RNA (1)...(19): siRNA sense strand
cauccaaccugcucaagaa

SEQ ID NO: 1359215 - RNA, 19 nt, Homo sapiens
  misc_RNA (1)...(19): siRNA sense strand
gaagauugaagcccacuuu

SEQ ID NO: 1359216 - RNA, 19 nt, Homo sapiens
  misc_RNA (1)...(19): siRNA sense strand
gcucagaucucagaaucaa

SEQ ID NO: 1359217 - RNA, 19 nt, Homo sapiens
  misc_RNA (1)...(19): siRNA sense strand
gaacaagccuuaauuagga

SEQ ID NO: 1359218 - RNA, 19 nt, Homo sapiens
  misc_RNA (1)...(19): siRNA sense strand
gaaacaagaugcugacaaa

SEQ ID NO: 1359219 - RNA, 19 nt, Homo sapiens
  misc_RNA (1)...(19): siRNA sense strand
gaucaggaauuccauauuu

SEQ ID NO: 1359220 - RNA, 19 nt, Homo sapiens
  misc_RNA (1)...(19): siRNA sense strand
ggaagaaggugaucucuau

SEQ ID NO: 1359221 - RNA, 19 nt, Homo sapiens
  misc_RNA (1)...(19): siRNA sense strand
ggucagaacuuauguagaa

SEQ ID NO: 1359222 - RNA, 19 nt, Homo sapiens
  misc_RNA (1)...(19): siRNA sense strand
gcaggcagaucuucaauuu

SEQ ID NO: 1359223 - RNA, 19 nt, Homo sapiens
  misc_RNA (1)...(19): siRNA sense strand
guggagacauuacauauua

SEQ ID NO: 1359224 - RNA, 19 nt, Homo sapiens
  misc_RNA (1)...(19): siRNA sense strand
gaaaagggcugaaagaauu

SEQ ID NO: 1359225 - RNA, 19 nt, Homo sapiens
  misc_RNA (1)...(19): siRNA sense strand
gaaagaacuucaggacaua

SEQ ID NO: 1359226 - RNA, 19 nt, Homo sapiens
  misc_RNA (1)...(19): siRNA sense strand
gaacagaagagggcuauua

SEQ ID NO: 1359227 - RNA, 19 nt, Homo sapiens
  misc_RNA (1)...(19): siRNA sense strand
gaacuuauguagaagauca

SEQ ID NO: 1359228 - RNA, 19 nt, Homo sapiens
  misc_RNA (1)...(19): siRNA sense strand
gaugaaagaugaugaagga

SEQ ID NO: 1359229 - RNA, 19 nt, Homo sapiens
  misc_RNA (1)...(19): siRNA sense strand
gggagaagcugcccuuaaa

SEQ ID NO: 1359230 - RNA, 19 nt, Homo sapiens
  misc_RNA (1)...(19): siRNA sense strand
caaauuagaugacauugga

SEQ ID NO: 1359231 - RNA, 19 nt, Homo sapiens
  misc_RNA (1)...(19): siRNA sense strand
ccaaagaaguugugaaguu

SEQ ID NO: 1359232 - RNA, 19 nt, Homo sapiens
  misc_RNA (1)...(19): siRNA sense strand
caggaaagcuucaguuuga

SEQ ID NO: 1359233 - RNA, 19 nt, Homo sapiens
  misc_RNA (1)...(19): siRNA sense strand
gaaggcaucucuuacaaau

SEQ ID NO: 1359234 - RNA, 19 nt, Homo sapiens
  misc_RNA (1)...(19): siRNA sense strand
gaugaaagaugaccaggaa

SEQ ID NO: 1359235 - RNA, 19 nt, Homo sapiens
  misc_RNA (1)...(19): siRNA sense strand
ugaaggaacuuacacguuu

SEQ ID NO: 1359236 - RNA, 19 nt, Homo sapiens
  misc_RNA (1)...(19): siRNA sense strand
gguacucaaucacuaauua

SEQ ID NO: 1359237 - RNA, 19 nt, Homo sapiens
  misc_RNA (1)...(19): siRNA sense strand
gaccuuaccuguacagaaa

SEQ ID NO: 1359238 - RNA, 19 nt, Homo sapiens
  misc_RNA (1)...(19): siRNA sense strand
gaagagggcuauuaugaag

SEQ ID NO: 1359239 - RNA, 19 nt, Homo sapiens
  misc_RNA (1)...(19): siRNA sense strand
ugaagaagauggagaagaa

SEQ ID NO: 1359240 - RNA, 19 nt, Homo sapiens
  misc_RNA (1)...(19): siRNA sense strand
gaagagaaacgcuuuguug

SEQ ID NO: 1359241 - RNA, 19 nt, Homo sapiens
  misc_RNA (1)...(19): siRNA sense strand
gaaaucaaaucaacugaca

SEQ ID NO: 1359242 - RNA, 19 nt, Homo sapiens
  misc_RNA (1)...(19): siRNA sense strand
gaagaaugguguggaaauu

SEQ ID NO: 1359243 - RNA, 19 nt, Homo sapiens
  misc_RNA (1)...(19): siRNA sense strand
ggagaaagauaccaaaugg

SEQ ID NO: 1359244 - RNA, 19 nt, Homo sapiens
  misc_RNA (1)...(19): siRNA sense strand
caaagugaguuacaacaaa

SEQ ID NO: 1359245 - RNA, 19 nt, Homo sapiens
  misc_RNA (1)...(19): siRNA sense strand
cuaaagaggugaaacaaga

SEQ ID NO: 1359246 - RNA, 19 nt, Homo sapiens
  misc_RNA (1)...(19): siRNA sense strand
gagaauggcucaugaaggu

SEQ ID NO: 1359247 - RNA, 19 nt, Homo sapiens
  misc_RNA (1)...(19): siRNA sense strand
gaaacaauacugagaacua

SEQ ID NO: 1359248 - RNA, 19 nt, Homo sapiens
  misc_RNA (1)...(19): siRNA sense strand
gcaaauaacucaggagaag

SEQ ID NO: 1359249 - RNA, 19 nt, Homo sapiens
  misc_RNA (1)...(19): siRNA sense strand
gcagagccacuaacaaaua

SEQ ID NO: 1359250 - RNA, 19 nt, Homo sapiens
  misc_RNA (1)...(19): siRNA sense strand
guauaaagauggcauugaa

SEQ ID NO: 1359251 - RNA, 19 nt, Homo sapiens
  misc_RNA (1)...(19): siRNA sense strand
caucaaacauggagaaaga

SEQ ID NO: 1359252 - RNA, 19 nt, Homo sapiens
  misc_RNA (1)...(19): siRNA sense strand
gaaggaaaaugguaucaua

SEQ ID NO: 1359253 - RNA, 19 nt, Homo sapiens
  misc_RNA (1)...(19): siRNA sense strand
gaacaagaaacaauacuga

SEQ ID NO: 1359254 - RNA, 19 nt, Homo sapiens
  misc_RNA (1)...(19): siRNA sense strand
caacauagcuggagaaacc

SEQ ID NO: 1359255 - RNA, 19 nt, Homo sapiens
  misc_RNA (1)...(19): siRNA sense strand
gaagagcgcuuugaaguac

SEQ ID NO: 1359256 - RNA, 19 nt, Homo sapiens
  misc_RNA (1)...(19): siRNA sense strand
gaauugauguccuguggaa

SEQ ID NO: 1359257 - RNA, 19 nt, Homo sapiens
  misc_RNA (1)...(19): siRNA sense strand
gaaagaauccagagccaaa

SEQ ID NO: 1359258 - RNA, 19 nt, Homo sapiens
  misc_RNA (1)...(19): siRNA sense strand
ggauacagauacaaaguga

SEQ ID NO: 1359259 - RNA, 19 nt, Homo sapiens
  misc_RNA (1)...(19): siRNA sense strand
gcagaucacagacagaaua

SEQ ID NO: 1359260 - RNA, 19 nt, Homo sapiens
  misc_RNA (1)...(19): siRNA sense strand
gaaaccaacuguaaucucu

SEQ ID NO: 1359261 - RNA, 19 nt, Homo sapiens
  misc_RNA (1)...(19): siRNA sense strand
ggacauagaaguuccagaa

SEQ ID NO: 1359262 - RNA, 19 nt, Homo sapiens
  misc_RNA (1)...(19): siRNA sense strand
ggauauccauuaccaaaga

SEQ ID NO: 1359263 - RNA, 19 nt, Homo sapiens
  misc_RNA (1)...(19): siRNA sense strand
caaagaaguugugaaguug

SEQ ID NO: 1359264 - RNA, 19 nt, Homo sapiens
  misc_RNA (1)...(19): siRNA sense strand
caucaggaauguucacuuu

SEQ ID NO: 1359265 - RNA, 19 nt, Homo sapiens
  misc_RNA (1)...(19): siRNA sense strand
gaauuagagugcauuguau

SEQ ID NO: 1359266 - RNA, 19 nt, Homo sapiens
  misc_RNA (1)...(19): siRNA sense strand
uaaagaagaugguacucaa

SEQ ID NO: 1359267 - RNA, 19 nt, Homo sapiens
  misc_RNA (1)...(19): siRNA sense strand
uguggaagcucgucauaua

SEQ ID NO: 1359268 - RNA, 19 nt, Homo sapiens
  misc_RNA (1)...(19): siRNA sense strand
gaaaugaaagucagagcua

SEQ ID NO: 1359269 - RNA, 19 nt, Homo sapiens
  misc_RNA (1)...(19): siRNA sense strand
caaauggacuuucuacaag

SEQ ID NO: 1359270 - RNA, 19 nt, Homo sapiens
  misc_RNA (1)...(19): siRNA sense strand
ggaaaugccuguuuaucca

SEQ ID NO: 1359271 - RNA, 19 nt, Homo sapiens
  misc_RNA (1)...(19): siRNA sense strand
acacaaauauguaguggaa

SEQ ID NO: 1359272 - RNA, 19 nt, Homo sapiens
  misc_RNA (1)...(19): siRNA sense strand
ggaagaugcuggaaauuac

SEQ ID NO: 1359273 - RNA, 19 nt, Homo sapiens
  misc_RNA (1)...(19): siRNA sense strand
ccaaagaguuaacugaaga

SEQ ID NO: 1359274 - RNA, 19 nt, Homo sapiens
  misc_RNA (1)...(19): siRNA sense strand
cggaagagcugcgcaguaa

SEQ ID NO: 1359275 - RNA, 19 nt, Homo sapiens
  misc_RNA (1)...(19): siRNA sense strand
uaaggaagaugcuggaaau

SEQ ID NO: 1359276 - RNA, 19 nt, Homo sapiens
  misc_RNA (1)...(19): siRNA sense strand
ucagggaccuauucaguaa

SEQ ID NO: 1359277 - RNA, 19 nt, Homo sapiens
  misc_RNA (1)...(19): siRNA sense strand
gcacggaugucaccugcaa

SEQ ID NO: 1359278 - RNA, 19 nt, Homo sapiens
  misc_RNA (1)...(19): siRNA sense strand
gagaugugguuaugacuga

SEQ ID NO: 1359279 - RNA, 19 nt, Homo sapiens
  misc_RNA (1)...(19): siRNA sense strand
caagaacaaauccaaguua

SEQ ID NO: 1359280 - RNA, 19 nt, Homo sapiens
  misc_RNA (1)...(19): siRNA sense strand
gagaaacuauggcuacuag

SEQ ID NO: 1359281 - RNA, 19 nt, Homo sapiens
  misc_RNA (1)...(19): siRNA sense strand
ggagaagacugcuguaacu

SEQ ID NO: 1359282 - RNA, 19 nt, Homo sapiens
  misc_RNA (1)...(19): siRNA sense strand
gcacauaucaucacagauc

SEQ ID NO: 1359283 - RNA, 19 nt, Homo sapiens
  misc_RNA (1)...(19): siRNA sense strand
ggaaacacauuaaggacau

SEQ ID NO: 1359284 - RNA, 19 nt, Homo sapiens
  misc_RNA (1)...(19): siRNA sense strand
gaaauuaagccaagugaca

SEQ ID NO: 1359285 - RNA, 19 nt, Homo sapiens
  misc_RNA (1)...(19): siRNA sense strand
gaugaaagacggccaagaa

SEQ ID NO: 1359286 - RNA, 19 nt, Homo sapiens
  misc_RNA (1)...(19): siRNA sense strand
guuaaagucuccuuggaaa

SEQ ID NO: 1359287 - RNA, 19 nt, Homo sapiens
  misc_RNA (1)...(19): siRNA sense strand
gagcucaagucucgaaaga

SEQ ID NO: 1359288 - RNA, 19 nt, Homo sapiens
  misc_RNA (1)...(19): siRNA sense strand
gaaagaauuacccaugaaa

SEQ ID NO: 1359289 - RNA, 19 nt, Homo sapiens
  misc_RNA (1)...(19): siRNA sense strand
gaaggaaucuacacugcau

SEQ ID NO: 1359290 - RNA, 19 nt, Homo sapiens
  misc_RNA (1)...(19): siRNA sense strand
gauuaugaguuacugauga

SEQ ID NO: 1359291 - RNA, 19 nt, Homo sapiens
  misc_RNA (1)...(19): siRNA sense strand
ugaagaagcugauuaugag

SEQ ID NO: 1359292 - RNA, 19 nt, Homo sapiens
  misc_RNA (1)...(19): siRNA sense strand
gagaaacgcuuuguugagu

SEQ ID NO: 1359293 - RNA, 19 nt, Homo sapiens
  misc_RNA (1)...(19): siRNA sense strand
gcaggugucagaagaauuu

SEQ ID NO: 1359294 - RNA, 19 nt, Homo sapiens
  misc_RNA (1)...(19): siRNA sense strand
gaaauuuacuacagaagag

SEQ ID NO: 1359295 - RNA, 19 nt, Homo sapiens
  misc_RNA (1)...(19): siRNA sense strand
ggaaauugccgaagcuuau

SEQ ID NO: 1359296 - RNA, 19 nt, Homo sapiens
  misc_RNA (1)...(19): siRNA sense strand
gaaauugagaugagugaaa

SEQ ID NO: 1359297 - RNA, 19 nt, Homo sapiens
  misc_RNA (1)...(19): siRNA sense strand
cauagaaguuccagaauca

SEQ ID NO: 1359298 - RNA, 19 nt, Homo sapiens
  misc_RNA (1)...(19): siRNA sense strand
agacaaacccgaauugaaa

SEQ ID NO: 1359299 - RNA, 19 nt, Homo sapiens
  misc_RNA (1)...(19): siRNA sense strand
ggaacaauuuacucucuga

SEQ ID NO: 1359300 - RNA, 19 nt, Homo sapiens
  misc_RNA (1)...(19): siRNA sense strand
gaaaucaagcccaguucua

SEQ ID NO: 1359301 - RNA, 19 nt, Homo sapiens
  misc_RNA (1)...(19): siRNA sense strand
gaaagacggccaagaagug

SEQ ID NO: 1359302 - RNA, 19 nt, Homo sapiens
  misc_RNA (1)...(19): siRNA sense strand
ccaagcaauugaucacuuu

SEQ ID NO: 1359303 - RNA, 19 nt, Homo sapiens
  misc_RNA (1)...(19): siRNA sense strand
gagaaggcauuacuaccaa

SEQ ID NO: 1359304 - RNA, 19 nt, Homo sapiens
  misc_RNA (1)...(19): siRNA sense strand
gaaaacaguuguaccuaaa

SEQ ID NO: 1359305 - RNA, 19 nt, Homo sapiens
  misc_RNA (1)...(19): siRNA sense strand
caagaaaugcuuuaucaga

SEQ ID NO: 1359306 - RNA, 19 nt, Homo sapiens
  misc_RNA (1)...(19): siRNA sense strand
gaaggaacuuacacguuug

SEQ ID NO: 1359307 - RNA, 19 nt, Homo sapiens
  misc_RNA (1)...(19): siRNA sense strand
aaacagcgacuagucauua

SEQ ID NO: 1359308 - RNA, 19 nt, Homo sapiens
  misc_RNA (1)...(19): siRNA sense strand
caagugagacuccaaguga

SEQ ID NO: 1359309 - RNA, 19 nt, Homo sapiens
  misc_RNA (1)...(19): siRNA sense strand
gaaguugugucuccugauc

SEQ ID NO: 1359310 - RNA, 19 nt, Homo sapiens
  misc_RNA (1)...(19): siRNA sense strand
gaagaagcgagccauguuu

SEQ ID NO: 1359311 - RNA, 19 nt, Homo sapiens
  misc_RNA (1)...(19): siRNA sense strand
ccaggaagcuguguuugaa

SEQ ID NO: 1359312 - RNA, 19 nt, Homo sapiens
  misc_RNA (1)...(19): siRNA sense strand
gaaacaacagaaaccauuu

SEQ ID NO: 1359313 - RNA, 19 nt, Homo sapiens
  misc_RNA (1)...(19): siRNA sense strand
gcaagcuggugauuucuau

SEQ ID NO: 1359314 - RNA, 19 nt, Homo sapiens
  misc_RNA (1)...(19): siRNA sense strand
cauccaaccugcucaagaa

SEQ ID NO: 1359315 - RNA, 19 nt, Homo sapiens
  misc_RNA (1)...(19): siRNA sense strand
gaagauugaagcccacuuu

SEQ ID NO: 1359316 - RNA, 19 nt, Homo sapiens
  misc_RNA (1)...(19): siRNA sense strand
gcucagaucucagaaucaa

SEQ ID NO: 1359317 - RNA, 19 nt, Homo sapiens
  misc_RNA (1)...(19): siRNA sense strand
gaacaagccuuaauuagga

SEQ ID NO: 1359318 - RNA, 19 nt, Homo sapiens
  misc_RNA (1)...(19): siRNA sense strand
gaaacaagaugcugacaaa

SEQ ID NO: 1359319 - RNA, 19 nt, Homo sapiens
  misc_RNA (1)...(19): siRNA sense strand
gaucaggaauuccauauuu

SEQ ID NO: 1359320 - RNA, 19 nt, Homo sapiens
  misc_RNA (1)...(19): siRNA sense strand
ggaagaaggugaucucuau

SEQ ID NO: 1359321 - RNA, 19 nt, Homo sapiens
  misc_RNA (1)...(19): siRNA sense strand
ggucagaacuuauguagaa

SEQ ID NO: 1359322 - RNA, 19 nt, Homo sapiens
  misc_RNA (1)...(19): siRNA sense strand
gcaggcagaucuucaauuu

SEQ ID NO: 1359323 - RNA, 19 nt, Homo sapiens
  misc_RNA (1)...(19): siRNA sense strand
guggagacauuacauauua

SEQ ID NO: 1359324 - RNA, 19 nt, Homo sapiens
  misc_RNA (1)...(19): siRNA sense strand
gaaaagggcugaaagaauu

SEQ ID NO: 1359325 - RNA, 19 nt, Homo sapiens
  misc_RNA (1)...(19): siRNA sense strand
gaaagaacuucaggacaua

SEQ ID NO: 1359326 - RNA, 19 nt, Homo sapiens
  misc_RNA (1)...(19): siRNA sense strand
gaacagaagagggcuauua

SEQ ID NO: 1359327 - RNA, 19 nt, Homo sapiens
  misc_RNA (1)...(19): siRNA sense strand
gaacuuauguagaagauca

SEQ ID NO: 1359328 - RNA, 19 nt, Homo sapiens
  misc_RNA (1)...(19): siRNA sense strand
gaugaaagaugaugaagga

SEQ ID NO: 1359329 - RNA, 19 nt, Homo sapiens
  misc_RNA (1)...(19): siRNA sense strand
gggagaagcugcccuuaaa

SEQ ID NO: 1359330 - RNA, 19 nt, Homo sapiens
  misc_RNA (1)...(19): siRNA sense strand
caaauuagaugacauugga

SEQ ID NO: 1359331 - RNA, 19 nt, Homo sapiens
  misc_RNA (1)...(19): siRNA sense strand
ccaaagaaguugugaaguu

SEQ ID NO: 1359332 - RNA, 19 nt, Homo sapiens
  misc_RNA (1)...(19): siRNA sense strand
caggaaagcuucaguuuga

SEQ ID NO: 1359333 - RNA, 19 nt, Homo sapiens
  misc_RNA (1)...(19): siRNA sense strand
gaaggcaucucuuacaaau

SEQ ID NO: 1359334 - RNA, 19 nt, Homo sapiens
  misc_RNA (1)...(19): siRNA sense strand
gaugaaagaugaccaggaa

SEQ ID NO: 1359335 - RNA, 19 nt, Homo sapiens
  misc_RNA (1)...(19): siRNA sense strand
ugaaggaacuuacacguuu

SEQ ID NO: 1359336 - RNA, 19 nt, Homo sapiens
  misc_RNA (1)...(19): siRNA sense strand
gguacucaaucacuaauua

SEQ ID NO: 1359337 - RNA, 19 nt, Homo sapiens
  misc_RNA (1)...(19): siRNA sense strand
gaccuuaccuguacagaaa

SEQ ID NO: 1359338 - RNA, 19 nt, Homo sapiens
  misc_RNA (1)...(19): siRNA sense strand
gaagagggcuauuaugaag

SEQ ID NO: 1359339 - RNA, 19 nt, Homo sapiens
  misc_RNA (1)...(19): siRNA sense strand
ugaagaagauggagaagaa

SEQ ID NO: 1359340 - RNA, 19 nt, Homo sapiens
  misc_RNA (1)...(19): siRNA sense strand
gaagagaaacgcuuuguug

SEQ ID NO: 1359341 - RNA, 19 nt, Homo sapiens
  misc_RNA (1)...(19): siRNA sense strand
gaaaucaaaucaacugaca

SEQ ID NO: 1359342 - RNA, 19 nt, Homo sapiens
  misc_RNA (1)...(19): siRNA sense strand
gaagaaugguguggaaauu

SEQ ID NO: 1359343 - RNA, 19 nt, Homo sapiens
  misc_RNA (1)...(19): siRNA sense strand
ggagaaagauaccaaaugg

SEQ ID NO: 1359344 - RNA, 19 nt, Homo sapiens
  misc_RNA (1)...(19): siRNA sense strand
caaagugaguuacaacaaa

SEQ ID NO: 1359345 - RNA, 19 nt, Homo sapiens
  misc_RNA (1)...(19): siRNA sense strand
cuaaagaggugaaacaaga

SEQ ID NO: 1359346 - RNA, 19 nt, Homo sapiens
  misc_RNA (1)...(19): siRNA sense strand
gagaauggcucaugaaggu

SEQ ID NO: 1359347 - RNA, 19 nt, Homo sapiens
  misc_RNA (1)...(19): siRNA sense strand
gaaacaauacugagaacua

SEQ ID NO: 1359348 - RNA, 19 nt, Homo sapiens
  misc_RNA (1)...(19): siRNA sense strand
gcaaauaacucaggagaag

SEQ ID NO: 1359349 - RNA, 19 nt, Homo sapiens
  misc_RNA (1)...(19): siRNA sense strand
gcagagccacuaacaaaua

SEQ ID NO: 1359350 - RNA, 19 nt, Homo sapiens
  misc_RNA (1)...(19): siRNA sense strand
guauaaagauggcauugaa

SEQ ID NO: 1359351 - RNA, 19 nt, Homo sapiens
  misc_RNA (1)...(19): siRNA sense strand
caucaaacauggagaaaga

SEQ ID NO: 1359352 - RNA, 19 nt, Homo sapiens
  misc_RNA (1)...(19): siRNA sense strand
gaaggaaaaugguaucaua

SEQ ID NO: 1359353 - RNA, 19 nt, Homo sapiens
  misc_RNA (1)...(19): siRNA sense strand
gaacaagaaacaauacuga

SEQ ID NO: 1359354 - RNA, 19 nt, Homo sapiens
  misc_RNA (1)...(19): siRNA sense strand
caacauagcuggagaaacc

SEQ ID NO: 1359355 - RNA, 19 nt, Homo sapiens
  misc_RNA (1)...(19): siRNA sense strand
gaagagcgcuuugaaguac

SEQ ID NO: 1359356 - RNA, 19 nt, Homo sapiens
  misc_RNA (1)...(19): siRNA sense strand
gaauugauguccuguggaa

SEQ ID NO: 1359357 - RNA, 19 nt, Homo sapiens
  misc_RNA (1)...(19): siRNA sense strand
gaaagaauccagagccaaa

SEQ ID NO: 1359358 - RNA, 19 nt, Homo sapiens
  misc_RNA (1)...(19): siRNA sense strand
ggauacagauacaaaguga

SEQ ID NO: 1359359 - RNA, 19 nt, Homo sapiens
  misc_RNA (1)...(19): siRNA sense strand
gcagaucacagacagaaua

SEQ ID NO: 1359360 - RNA, 19 nt, Homo sapiens
  misc_RNA (1)...(19): siRNA sense strand
gaaaccaacuguaaucucu

SEQ ID NO: 1359361 - RNA, 19 nt, Homo sapiens
  misc_RNA (1)...(19): siRNA sense strand
ggacauagaaguuccagaa

SEQ ID NO: 1359362 - RNA, 19 nt, Homo sapiens
  misc_RNA (1)...(19): siRNA sense strand
ggauauccauuaccaaaga

SEQ ID NO: 1359363 - RNA, 19 nt, Homo sapiens
  misc_RNA (1)...(19): siRNA sense strand
caaagaaguugugaaguug

SEQ ID NO: 1359364 - RNA, 19 nt, Homo sapiens
  misc_RNA (1)...(19): siRNA sense strand
caucaggaauguucacuuu

SEQ ID NO: 1359365 - RNA, 19 nt, Homo sapiens
  misc_RNA (1)...(19): siRNA sense strand
gaauuagagugcauuguau

SEQ ID NO: 1359366 - RNA, 19 nt, Homo sapiens
  misc_RNA (1)...(19): siRNA sense strand
uaaagaagaugguacucaa

SEQ ID NO: 1359367 - RNA, 19 nt, Homo sapiens
  misc_RNA (1)...(19): siRNA sense strand
uguggaagcucgucauaua

SEQ ID NO: 1359368 - RNA, 19 nt, Homo sapiens
  misc_RNA (1)...(19): siRNA sense strand
gaaaugaaagucagagcua

SEQ ID NO: 1359369 - RNA, 19 nt, Homo sapiens
  misc_RNA (1)...(19): siRNA sense strand
caaauggacuuucuacaag

SEQ ID NO: 1359370 - RNA, 19 nt, Homo sapiens
  misc_RNA (1)...(19): siRNA sense strand
ggaaaugccuguuuaucca

SEQ ID NO: 1359371 - RNA, 19 nt, Homo sapiens
  misc_RNA (1)...(19): siRNA sense strand
acacaaauauguaguggaa

SEQ ID NO: 1359372 - RNA, 19 nt, Homo sapiens
  misc_RNA (1)...(19): siRNA sense strand
ggaagaugcuggaaauuac

SEQ ID NO: 1359373 - RNA, 19 nt, Homo sapiens
  misc_RNA (1)...(19): siRNA sense strand
ccaaagaguuaacugaaga

SEQ ID NO: 1359374 - RNA, 19 nt, Homo sapiens
  misc_RNA (1)...(19): siRNA sense strand
cggaagagcugcgcaguaa

SEQ ID NO: 1359375 - RNA, 19 nt, Homo sapiens
  misc_RNA (1)...(19): siRNA sense strand
uaaggaagaugcuggaaau

SEQ ID NO: 1359376 - RNA, 19 nt, Homo sapiens
  misc_RNA (1)...(19): siRNA sense strand
ucagggaccuauucaguaa

SEQ ID NO: 1359377 - RNA, 19 nt, Homo sapiens
  misc_RNA (1)...(19): siRNA sense strand
gcacggaugucaccugcaa

SEQ ID NO: 1359378 - RNA, 19 nt, Homo sapiens
  misc_RNA (1)...(19): siRNA sense strand
gagaugugguuaugacuga

SEQ ID NO: 1359379 - RNA, 19 nt, Homo sapiens
  misc_RNA (1)...(19): siRNA sense strand
caagaacaaauccaaguua

SEQ ID NO: 1359380 - RNA, 19 nt, Homo sapiens
  misc_RNA (1)...(19): siRNA sense strand
gagaaacuauggcuacuag

SEQ ID NO: 1359381 - RNA, 19 nt, Homo sapiens
  misc_RNA (1)...(19): siRNA sense strand
ggagaagacugcuguaacu

SEQ ID NO: 1359382 - RNA, 19 nt, Homo sapiens
  misc_RNA (1)...(19): siRNA sense strand
gcacauaucaucacagauc

SEQ ID NO: 1359383 - RNA, 19 nt, Homo sapiens
  misc_RNA (1)...(19): siRNA sense strand
ggaaacacauuaaggacau

SEQ ID NO: 1359384 - RNA, 19 nt, Homo sapiens
  misc_RNA (1)...(19): siRNA sense strand
gaaauuaagccaagugaca

SEQ ID NO: 1359385 - RNA, 19 nt, Homo sapiens
  misc_RNA (1)...(19): siRNA sense strand
gaugaaagacggccaagaa

SEQ ID NO: 1359386 - RNA, 19 nt, Homo sapiens
  misc_RNA (1)...(19): siRNA sense strand
guuaaagucuccuuggaaa

SEQ ID NO: 1359387 - RNA, 19 nt, Homo sapiens
  misc_RNA (1)...(19): siRNA sense strand
gagcucaagucucgaaaga

SEQ ID NO: 1359388 - RNA, 19 nt, Homo sapiens
  misc_RNA (1)...(19): siRNA sense strand
gaaagaauuacccaugaaa

SEQ ID NO: 1359389 - RNA, 19 nt, Homo sapiens
  misc_RNA (1)...(19): siRNA sense strand
gaaggaaucuacacugcau

SEQ ID NO: 1359390 - RNA, 19 nt, Homo sapiens
  misc_RNA (1)...(19): siRNA sense strand
gauuaugaguuacugauga

SEQ ID NO: 1359391 - RNA, 19 nt, Homo sapiens
  misc_RNA (1)...(19): siRNA sense strand
ugaagaagcugauuaugag

SEQ ID NO: 1359392 - RNA, 19 nt, Homo sapiens
  misc_RNA (1)...(19): siRNA sense strand
gagaaacgcuuuguugagu

SEQ ID NO: 1359393 - RNA, 19 nt, Homo sapiens
  misc_RNA (1)...(19): siRNA sense strand
gcaggugucagaagaauuu

SEQ ID NO: 1359394 - RNA, 19 nt, Homo sapiens
  misc_RNA (1)...(19): siRNA sense strand
gaaauuuacuacagaagag

SEQ ID NO: 1359395 - RNA, 19 nt, Homo sapiens
  misc_RNA (1)...(19): siRNA sense strand
ggaaauugccgaagcuuau

SEQ ID NO: 1359396 - RNA, 19 nt, Homo sapiens
  misc_RNA (1)...(19): siRNA sense strand
gaaauugagaugagugaaa

SEQ ID NO: 1359397 - RNA, 19 nt, Homo sapiens
  misc_RNA (1)...(19): siRNA sense strand
cauagaaguuccagaauca

SEQ ID NO: 1359398 - RNA, 19 nt, Homo sapiens
  misc_RNA (1)...(19): siRNA sense strand
agacaaacccgaauugaaa

SEQ ID NO: 1359399 - RNA, 19 nt, Homo sapiens
  misc_RNA (1)...(19): siRNA sense strand
ggaacaauuuacucucuga

SEQ ID NO: 1359400 - RNA, 19 nt, Homo sapiens
  misc_RNA (1)...(19): siRNA sense strand
gaaaucaagcccaguucua

SEQ ID NO: 1359401 - RNA, 19 nt, Homo sapiens
  misc_RNA (1)...(19): siRNA sense strand
gaaagacggccaagaagug

SEQ ID NO: 1359402 - RNA, 19 nt, Homo sapiens
  misc_RNA (1)...(19): siRNA sense strand
ccaagcaauugaucacuuu

SEQ ID NO: 1359403 - RNA, 19 nt, Homo sapiens
  misc_RNA (1)...(19): siRNA sense strand
gagaaggcauuacuaccaa

SEQ ID NO: 1359404 - RNA, 19 nt, Homo sapiens
  misc_RNA (1)...(19): siRNA sense strand
gaaaacaguuguaccuaaa

SEQ ID NO: 1359405 - RNA, 19 nt, Homo sapiens
  misc_RNA (1)...(19): siRNA sense strand
caagaaaugcuuuaucaga

SEQ ID NO: 1359406 - RNA, 19 nt, Homo sapiens
  misc_RNA (1)...(19): siRNA sense strand
gaaggaacuuacacguuug

SEQ ID NO: 1359407 - RNA, 19 nt, Homo sapiens
  misc_RNA (1)...(19): siRNA sense strand
aaacagcgacuagucauua

SEQ ID NO: 1359408 - RNA, 19 nt, Homo sapiens
  misc_RNA (1)...(19): siRNA sense strand
caagugagacuccaaguga

SEQ ID NO: 1359409 - RNA, 19 nt, Homo sapiens
  misc_RNA (1)...(19): siRNA sense strand
gaaguugugucuccugauc

SEQ ID NO: 1359410 - RNA, 19 nt, Homo sapiens
  misc_RNA (1)...(19): siRNA sense strand
gaagaagcgagccauguuu

SEQ ID NO: 1359411 - RNA, 19 nt, Homo sapiens
  misc_RNA (1)...(19): siRNA sense strand
ccaggaagcuguguuugaa

SEQ ID NO: 1359412 - RNA, 19 nt, Homo sapiens
  misc_RNA (1)...(19): siRNA sense strand
gaaacaacagaaaccauuu

SEQ ID NO: 1359413 - RNA, 19 nt, Homo sapiens
  misc_RNA (1)...(19): siRNA sense strand
gcaagcuggugauuucuau

SEQ ID NO: 1359414 - RNA, 19 nt, Homo sapiens
  misc_RNA (1)...(19): siRNA sense strand
cauccaaccugcucaagaa

SEQ ID NO: 1359415 - RNA, 19 nt, Homo sapiens
  misc_RNA (1)...(19): siRNA sense strand
gaagauugaagcccacuuu

SEQ ID NO: 1359416 - RNA, 19 nt, Homo sapiens
  misc_RNA (1)...(19): siRNA sense strand
gcucagaucucagaaucaa

SEQ ID NO: 1359417 - RNA, 19 nt, Homo sapiens
  misc_RNA (1)...(19): siRNA sense strand
gaacaagccuuaauuagga

SEQ ID NO: 1359418 - RNA, 19 nt, Homo sapiens
  misc_RNA (1)...(19): siRNA sense strand
gaaacaagaugcugacaaa

SEQ ID NO: 1359419 - RNA, 19 nt, Homo sapiens
  misc_RNA (1)...(19): siRNA sense strand
gaucaggaauuccauauuu

SEQ ID NO: 1359420 - RNA, 19 nt, Homo sapiens
  misc_RNA (1)...(19): siRNA sense strand
ggaagaaggugaucucuau

SEQ ID NO: 1359421 - RNA, 19 nt, Homo sapiens
  misc_RNA (1)...(19): siRNA sense strand
ggucagaacuuauguagaa

SEQ ID NO: 1359422 - RNA, 19 nt, Homo sapiens
  misc_RNA (1)...(19): siRNA sense strand
gcaggcagaucuucaauuu

SEQ ID NO: 1359423 - RNA, 19 nt, Homo sapiens
  misc_RNA (1)...(19): siRNA sense strand
guggagacauuacauauua

SEQ ID NO: 1359424 - RNA, 19 nt, Homo sapiens
  misc_RNA (1)...(19): siRNA sense strand
gaaaagggcugaaagaauu

SEQ ID NO: 1359425 - RNA, 19 nt, Homo sapiens
  misc_RNA (1)...(19): siRNA sense strand
gaaagaacuucaggacaua

SEQ ID NO: 1359426 - RNA, 19 nt, Homo sapiens
  misc_RNA (1)...(19): siRNA sense strand
gaacagaagagggcuauua

SEQ ID NO: 1359427 - RNA, 19 nt, Homo sapiens
  misc_RNA (1)...(19): siRNA sense strand
gaacuuauguagaagauca

SEQ ID NO: 1359428 - RNA, 19 nt, Homo sapiens
  misc_RNA (1)...(19): siRNA sense strand
gaugaaagaugaugaagga

SEQ ID NO: 1359429 - RNA, 19 nt, Homo sapiens
  misc_RNA (1)...(19): siRNA sense strand
gggagaagcugcccuuaaa

SEQ ID NO: 1359430 - RNA, 19 nt, Homo sapiens
  misc_RNA (1)...(19): siRNA sense strand
caaauuagaugacauugga

SEQ ID NO: 1359431 - RNA, 19 nt, Homo sapiens
  misc_RNA (1)...(19): siRNA sense strand
ccaaagaaguugugaaguu

SEQ ID NO: 1359432 - RNA, 19 nt, Homo sapiens
  misc_RNA (1)...(19): siRNA sense strand
caggaaagcuucaguuuga

SEQ ID NO: 1359433 - RNA, 19 nt, Homo sapiens
  misc_RNA (1)...(19): siRNA sense strand
gaaggcaucucuuacaaau

SEQ ID NO: 1359434 - RNA, 19 nt, Homo sapiens
  misc_RNA (1)...(19): siRNA sense strand
gaugaaagaugaccaggaa

SEQ ID NO: 1359435 - RNA, 19 nt, Homo sapiens
  misc_RNA (1)...(19): siRNA sense strand
ugaaggaacuuacacguuu

SEQ ID NO: 1359436 - RNA, 19 nt, Homo sapiens
  misc_RNA (1)...(19): siRNA sense strand
gguacucaaucacuaauua

SEQ ID NO: 1359437 - RNA, 19 nt, Homo sapiens
  misc_RNA (1)...(19): siRNA sense strand
gaccuuaccuguacagaaa

SEQ ID NO: 1359438 - RNA, 19 nt, Homo sapiens
  misc_RNA (1)...(19): siRNA sense strand
gaagagggcuauuaugaag

SEQ ID NO: 1359439 - RNA, 19 nt, Homo sapiens
  misc_RNA (1)...(19): siRNA sense strand
ugaagaagauggagaagaa

SEQ ID NO: 1359440 - RNA, 19 nt, Homo sapiens
  misc_RNA (1)...(19): siRNA sense strand
gaagagaaacgcuuuguug

SEQ ID NO: 1359441 - RNA, 19 nt, Homo sapiens
  misc_RNA (1)...(19): siRNA sense strand
gaaaucaaaucaacugaca

SEQ ID NO: 1359442 - RNA, 19 nt, Homo sapiens
  misc_RNA (1)...(19): siRNA sense strand
gaagaaugguguggaaauu

SEQ ID NO: 1359443 - RNA, 19 nt, Homo sapiens
  misc_RNA (1)...(19): siRNA sense strand
ggagaaagauaccaaaugg

SEQ ID NO: 1359444 - RNA, 19 nt, Homo sapiens
  misc_RNA (1)...(19): siRNA sense strand
caaagugaguuacaacaaa

SEQ ID NO: 1359445 - RNA, 19 nt, Homo sapiens
  misc_RNA (1)...(19): siRNA sense strand
cuaaagaggugaaacaaga

SEQ ID NO: 1359446 - RNA, 19 nt, Homo sapiens
  misc_RNA (1)...(19): siRNA sense strand
gagaauggcucaugaaggu

SEQ ID NO: 1359447 - RNA, 19 nt, Homo sapiens
  misc_RNA (1)...(19): siRNA sense strand
gaaacaauacugagaacua

SEQ ID NO: 1359448 - RNA, 19 nt, Homo sapiens
  misc_RNA (1)...(19): siRNA sense strand
gcaaauaacucaggagaag

SEQ ID NO: 1359449 - RNA, 19 nt, Homo sapiens
  misc_RNA (1)...(19): siRNA sense strand
gcagagccacuaacaaaua

SEQ ID NO: 1359450 - RNA, 19 nt, Homo sapiens
  misc_RNA (1)...(19): siRNA sense strand
guauaaagauggcauugaa

SEQ ID NO: 1359451 - RNA, 19 nt, Homo sapiens
  misc_RNA (1)...(19): siRNA sense strand
caucaaacauggagaaaga

SEQ ID NO: 1359452 - RNA, 19 nt, Homo sapiens
  misc_RNA (1)...(19): siRNA sense strand
gaaggaaaaugguaucaua

SEQ ID NO: 1359453 - RNA, 19 nt, Homo sapiens
  misc_RNA (1)...(19): siRNA sense strand
gaacaagaaacaauacuga

SEQ ID NO: 1359454 - RNA, 19 nt, Homo sapiens
  misc_RNA (1)...(19): siRNA sense strand
caacauagcuggagaaacc

SEQ ID NO: 1359455 - RNA, 19 nt, Homo sapiens
  misc_RNA (1)...(19): siRNA sense strand
gaagagcgcuuugaaguac

SEQ ID NO: 1359456 - RNA, 19 nt, Homo sapiens
  misc_RNA (1)...(19): siRNA sense strand
gaauugauguccuguggaa

SEQ ID NO: 1359457 - RNA, 19 nt, Homo sapiens
  misc_RNA (1)...(19): siRNA sense strand
gaaagaauccagagccaaa

SEQ ID NO: 1359458 - RNA, 19 nt, Homo sapiens
  misc_RNA (1)...(19): siRNA sense strand
ggauacagauacaaaguga

SEQ ID NO: 1359459 - RNA, 19 nt, Homo sapiens
  misc_RNA (1)...(19): siRNA sense strand
gcagaucacagacagaaua

SEQ ID NO: 1359460 - RNA, 19 nt, Homo sapiens
  misc_RNA (1)...(19): siRNA sense strand
gaaaccaacuguaaucucu

SEQ ID NO: 1359461 - RNA, 19 nt, Homo sapiens
  misc_RNA (1)...(19): siRNA sense strand
ggacauagaaguuccagaa

SEQ ID NO: 1359462 - RNA, 19 nt, Homo sapiens
  misc_RNA (1)...(19): siRNA sense strand
ggauauccauuaccaaaga

SEQ ID NO: 1359463 - RNA, 19 nt, Homo sapiens
  misc_RNA (1)...(19): siRNA sense strand
caaagaaguugugaaguug

SEQ ID NO: 1359464 - RNA, 19 nt, Homo sapiens
  misc_RNA (1)...(19): siRNA sense strand
caucaggaauguucacuuu

SEQ ID NO: 1359465 - RNA, 19 nt, Homo sapiens
  misc_RNA (1)...(19): siRNA sense strand
gaauuagagugcauuguau

SEQ ID NO: 1359466 - RNA, 19 nt, Homo sapiens
  misc_RNA (1)...(19): siRNA sense strand
uaaagaagaugguacucaa

SEQ ID NO: 1359467 - RNA, 19 nt, Homo sapiens
  misc_RNA (1)...(19): siRNA sense strand
uguggaagcucgucauaua

SEQ ID NO: 1359468 - RNA, 19 nt, Homo sapiens
  misc_RNA (1)...(19): siRNA sense strand
gaaaugaaagucagagcua

SEQ ID NO: 1359469 - RNA, 19 nt, Homo sapiens
  misc_RNA (1)...(19): siRNA sense strand
caaauggacuuucuacaag

SEQ ID NO: 1359470 - RNA, 19 nt, Homo sapiens
  misc_RNA (1)...(19): siRNA sense strand
ggaaaugccuguuuaucca

SEQ ID NO: 1359471 - RNA, 19 nt, Homo sapiens
  misc_RNA (1)...(19): siRNA sense strand
acacaaauauguaguggaa

SEQ ID NO: 1359472 - RNA, 19 nt, Homo sapiens
  misc_RNA (1)...(19): siRNA sense strand
ggaagaugcuggaaauuac

SEQ ID NO: 1359473 - RNA, 19 nt, Homo sapiens
  misc_RNA (1)...(19): siRNA sense strand
ccaaagaguuaacugaaga

SEQ ID NO: 1359474 - RNA, 19 nt, Homo sapiens
  misc_RNA (1)...(19): siRNA sense strand
cggaagagcugcgcaguaa

SEQ ID NO: 1359475 - RNA, 19 nt, Homo sapiens
  misc_RNA (1)...(19): siRNA sense strand
uaaggaagaugcuggaaau

SEQ ID NO: 1359476 - RNA, 19 nt, Homo sapiens
  misc_RNA (1)...(19): siRNA sense strand
ucagggaccuauucaguaa

SEQ ID NO: 1359477 - RNA, 19 nt, Homo sapiens
  misc_RNA (1)...(19): siRNA sense strand
gcacggaugucaccugcaa

SEQ ID NO: 1359478 - RNA, 19 nt, Homo sapiens
  misc_RNA (1)...(19): siRNA sense strand
gagaugugguuaugacuga

SEQ ID NO: 1359479 - RNA, 19 nt, Homo sapiens
  misc_RNA (1)...(19): siRNA sense strand
caagaacaaauccaaguua

SEQ ID NO: 1359480 - RNA, 19 nt, Homo sapiens
  misc_RNA (1)...(19): siRNA sense strand
gagaaacuauggcuacuag

SEQ ID NO: 1359481 - RNA, 19 nt, Homo sapiens
  misc_RNA (1)...(19): siRNA sense strand
ggagaagacugcuguaacu

SEQ ID NO: 1359482 - RNA, 19 nt, Homo sapiens
  misc_RNA (1)...(19): siRNA sense strand
gcacauaucaucacagauc

SEQ ID NO: 1359483 - RNA, 19 nt, Homo sapiens
  misc_RNA (1)...(19): siRNA sense strand
ggaaacacauuaaggacau

SEQ ID NO: 1359484 - RNA, 19 nt, Homo sapiens
  misc_RNA (1)...(19): siRNA sense strand
gaaauuaagccaagugaca

SEQ ID NO: 1359485 - RNA, 19 nt, Homo sapiens
  misc_RNA (1)...(19): siRNA sense strand
gaugaaagacggccaagaa

SEQ ID NO: 1359486 - RNA, 19 nt, Homo sapiens
  misc_RNA (1)...(19): siRNA sense strand
guuaaagucuccuuggaaa

SEQ ID NO: 1359487 - RNA, 19 nt, Homo sapiens
  misc_RNA (1)...(19): siRNA sense strand
gagcucaagucucgaaaga

SEQ ID NO: 1359488 - RNA, 19 nt, Homo sapiens
  misc_RNA (1)...(19): siRNA sense strand
gaaagaauuacccaugaaa

SEQ ID NO: 1359489 - RNA, 19 nt, Homo sapiens
  misc_RNA (1)...(19): siRNA sense strand
gaaggaaucuacacugcau

SEQ ID NO: 1359490 - RNA, 19 nt, Homo sapiens
  misc_RNA (1)...(19): siRNA sense strand
gauuaugaguuacugauga

SEQ ID NO: 1359491 - RNA, 19 nt, Homo sapiens
  misc_RNA (1)...(19): siRNA sense strand
ugaagaagcugauuaugag

SEQ ID NO: 1359492 - RNA, 19 nt, Homo sapiens
  misc_RNA (1)...(19): siRNA sense strand
gagaaacgcuuuguugagu

SEQ ID NO: 1359493 - RNA, 19 nt, Homo sapiens
  misc_RNA (1)...(19): siRNA sense strand
gcaggugucagaagaauuu

SEQ ID NO: 1359494 - RNA, 19 nt, Homo sapiens
  misc_RNA (1)...(19): siRNA sense strand
gaaauuuacuacagaagag

SEQ ID NO: 1359495 - RNA, 19 nt, Homo sapiens
  misc_RNA (1)...(19): siRNA sense strand
ggaaauugccgaagcuuau

SEQ ID NO: 1359496 - RNA, 19 nt, Homo sapiens
  misc_RNA (1)...(19): siRNA sense strand
gaaauugagaugagugaaa

SEQ ID NO: 1359497 - RNA, 19 nt, Homo sapiens
  misc_RNA (1)...(19): siRNA sense strand
cauagaaguuccagaauca

SEQ ID NO: 1359498 - RNA, 19 nt, Homo sapiens
  misc_RNA (1)...(19): siRNA sense strand
agacaaacccgaauugaaa

SEQ ID NO: 1359499 - RNA, 19 nt, Homo sapiens
  misc_RNA (1)...(19): siRNA sense strand
ggaacaauuuacucucuga

SEQ ID NO: 1359500 - RNA, 19 nt, Homo sapiens
  misc_RNA (1)...(19): siRNA sense strand
gaaaucaagcccaguucua

SEQ ID NO: 1359501 - RNA, 19 nt, Homo sapiens
  misc_RNA (1)...(19): siRNA sense strand
gaaagacggccaagaagug

SEQ ID NO: 1359502 - RNA, 19 nt, Homo sapiens
  misc_RNA (1)...(19): siRNA sense strand
ccaagcaauugaucacuuu

SEQ ID NO: 1359503 - RNA, 19 nt, Homo sapiens
  misc_RNA (1)...(19): siRNA sense strand
gagaaggcauuacuaccaa

SEQ ID NO: 1359504 - RNA, 19 nt, Homo sapiens
  misc_RNA (1)...(19): siRNA sense strand
gaaaacaguuguaccuaaa

SEQ ID NO: 1359505 - RNA, 19 nt, Homo sapiens
  misc_RNA (1)...(19): siRNA sense strand
caagaaaugcuuuaucaga

SEQ ID NO: 1359506 - RNA, 19 nt, Homo sapiens
  misc_RNA (1)...(19): siRNA sense strand
gaaggaacuuacacguuug

SEQ ID NO: 1359507 - RNA, 19 nt, Homo sapiens
  misc_RNA (1)...(19): siRNA sense strand
aaacagcgacuagucauua

SEQ ID NO: 1359508 - RNA, 19 nt, Homo sapiens
  misc_RNA (1)...(19): siRNA sense strand
caagugagacuccaaguga

SEQ ID NO: 1359509 - RNA, 19 nt, Homo sapiens
  misc_RNA (1)...(19): siRNA sense strand
gaaguugugucuccugauc

SEQ ID NO: 1359510 - RNA, 19 nt, Homo sapiens
  misc_RNA (1)...(19): siRNA sense strand
gaagaagcgagccauguuu

SEQ ID NO: 1359511 - RNA, 19 nt, Homo sapiens
  misc_RNA (1)...(19): siRNA sense strand
ccaggaagcuguguuugaa

SEQ ID NO: 1359512 - RNA, 19 nt, Homo sapiens
  misc_RNA (1)...(19): siRNA sense strand
gaaacaacagaaaccauuu

SEQ ID NO: 1359513 - RNA, 19 nt, Homo sapiens
  misc_RNA (1)...(19): siRNA sense strand
gcaagcuggugauuucuau

SEQ ID NO: 1359514 - RNA, 19 nt, Homo sapiens
  misc_RNA (1)...(19): siRNA sense strand
cauccaaccugcucaagaa

SEQ ID NO: 1359515 - RNA, 19 nt, Homo sapiens
  misc_RNA (1)...(19): siRNA sense strand
gaagauugaagcccacuuu

SEQ ID NO: 1359516 - RNA, 19 nt, Homo sapiens
  misc_RNA (1)...(19): siRNA sense strand
gcucagaucucagaaucaa

SEQ ID NO: 1359517 - RNA, 19 nt, Homo sapiens
  misc_RNA (1)...(19): siRNA sense strand
gauaauaccuaaagaggaa

SEQ ID NO: 1359518 - RNA, 19 nt, Homo sapiens
  misc_RNA (1)...(19): siRNA sense strand
gaagagcaaccacaaguuu

SEQ ID NO: 1359519 - RNA, 19 nt, Homo sapiens
  misc_RNA (1)...(19): siRNA sense strand
ccugaggucuggauucuuu

SEQ ID NO: 1359520 - RNA, 19 nt, Homo sapiens
  misc_RNA (1)...(19): siRNA sense strand
cuaaagaggaacacuguaa

SEQ ID NO: 1359521 - RNA, 19 nt, Homo sapiens
  misc_RNA (1)...(19): siRNA sense strand
cauggaaggugaucugcaa

SEQ ID NO: 1359522 - RNA, 19 nt, Homo sapiens
  misc_RNA (1)...(19): siRNA sense strand
gaagauaauaccuaaagag

SEQ ID NO: 1359523 - RNA, 19 nt, Homo sapiens
  misc_RNA (1)...(19): siRNA sense strand
uaaagaggaacacuguaaa

SEQ ID NO: 1359524 - RNA, 19 nt, Homo sapiens
  misc_RNA (1)...(19): siRNA sense strand
agaagcaggugaagagcaa

SEQ ID NO: 1359525 - RNA, 19 nt, Homo sapiens
  misc_RNA (1)...(19): siRNA sense strand
agaagaagaucaggauaca

SEQ ID NO: 1359526 - RNA, 19 nt, Homo sapiens
  misc_RNA (1)...(19): siRNA sense strand
gcgucaaggugaagauaau

SEQ ID NO: 1359527 - RNA, 19 nt, Homo sapiens
  misc_RNA (1)...(19): siRNA sense strand
ggaaggugaucugcaagag

SEQ ID NO: 1359528 - RNA, 19 nt, Homo sapiens
  misc_RNA (1)...(19): siRNA sense strand
aagagcaaccacaaguuua

SEQ ID NO: 1359529 - RNA, 19 nt, Homo sapiens
  misc_RNA (1)...(19): siRNA sense strand
gugaagauaauaccuaaag

SEQ ID NO: 1359530 - RNA, 19 nt, Homo sapiens
  misc_RNA (1)...(19): siRNA sense strand
agagcaaccacaaguuuaa

SEQ ID NO: 1359531 - RNA, 19 nt, Homo sapiens
  misc_RNA (1)...(19): siRNA sense strand
gacagaagaagaucaggau

SEQ ID NO: 1359532 - RNA, 19 nt, Homo sapiens
  misc_RNA (1)...(19): siRNA sense strand
gaggaacacuguaaaaugc

SEQ ID NO: 1359533 - RNA, 19 nt, Homo sapiens
  misc_RNA (1)...(19): siRNA sense strand
gcagcagacagaagaagau

SEQ ID NO: 1359534 - RNA, 19 nt, Homo sapiens
  misc_RNA (1)...(19): siRNA sense strand
gugaagagcaaccacaagu

SEQ ID NO: 1359535 - RNA, 19 nt, Homo sapiens
  misc_RNA (1)...(19): siRNA sense strand
gcugaaagucgggauccua

SEQ ID NO: 1359536 - RNA, 19 nt, Homo sapiens
  misc_RNA (1)...(19): siRNA sense strand
gcaagagcugcaucaguca

SEQ ID NO: 1359537 - RNA, 19 nt, Homo sapiens
  misc_RNA (1)...(19): siRNA sense strand
ugaagagcaaccacaaguu

SEQ ID NO: 1359538 - RNA, 19 nt, Homo sapiens
  misc_RNA (1)...(19): siRNA sense strand
cagaagaagaucaggauac

SEQ ID NO: 1359539 - RNA, 19 nt, Homo sapiens
  misc_RNA (1)...(19): siRNA sense strand
gccagaagcaggugaagag

SEQ ID NO: 1359540 - RNA, 19 nt, Homo sapiens
  misc_RNA (1)...(19): siRNA sense strand
gcagacagaagaagaucag

SEQ ID NO: 1359541 - RNA, 19 nt, Homo sapiens
  misc_RNA (1)...(19): siRNA sense strand
cgacauggaaggugaucug

SEQ ID NO: 1359542 - RNA, 19 nt, Homo sapiens
  misc_RNA (1)...(19): siRNA sense strand
gaaagucgggauccuacac

SEQ ID NO: 1359543 - RNA, 19 nt, Homo sapiens
  misc_RNA (1)...(19): siRNA sense strand
cgucaaggugaagauaaua

SEQ ID NO: 1359544 - RNA, 19 nt, Homo sapiens
  misc_RNA (1)...(19): siRNA sense strand
acagaagaagaucaggaua

SEQ ID NO: 1359545 - RNA, 19 nt, Homo sapiens
  misc_RNA (1)...(19): siRNA sense strand
caagagcugcaucagucaa

SEQ ID NO: 1359546 - RNA, 19 nt, Homo sapiens
  misc_RNA (1)...(19): siRNA sense strand
ggcgucaaggugaagauaa

SEQ ID NO: 1359547 - RNA, 19 nt, Homo sapiens
  misc_RNA (1)...(19): siRNA sense strand
ggcagcagacagaagaaga

SEQ ID NO: 1359548 - RNA, 19 nt, Homo sapiens
  misc_RNA (1)...(19): siRNA sense strand
gagcugcaucagucaaaca

SEQ ID NO: 1359549 - RNA, 19 nt, Homo sapiens
  misc_RNA (1)...(19): siRNA sense strand
caccugggcagcagacaga

SEQ ID NO: 1359550 - RNA, 19 nt, Homo sapiens
  misc_RNA (1)...(19): siRNA sense strand
guuccggcgucaaggugaa

SEQ ID NO: 1359551 - RNA, 19 nt, Homo sapiens
  misc_RNA (1)...(19): siRNA sense strand
cauggaaggugaucugcaa

SEQ ID NO: 1359552 - RNA, 19 nt, Homo sapiens
  misc_RNA (1)...(19): siRNA sense strand
agaagaagaucaggauaca

SEQ ID NO: 1359553 - RNA, 19 nt, Homo sapiens
  misc_RNA (1)...(19): siRNA sense strand
gcgucaaggugaagauaau

SEQ ID NO: 1359554 - RNA, 19 nt, Homo sapiens
  misc_RNA (1)...(19): siRNA sense strand
ggaaggugaucugcaagag

SEQ ID NO: 1359555 - RNA, 19 nt, Homo sapiens
  misc_RNA (1)...(19): siRNA sense strand
gacagaagaagaucaggau

SEQ ID NO: 1359556 - RNA, 19 nt, Homo sapiens
  misc_RNA (1)...(19): siRNA sense strand
gcagcagacagaagaagau

SEQ ID NO: 1359557 - RNA, 19 nt, Homo sapiens
  misc_RNA (1)...(19): siRNA sense strand
gcugaaagucgggauccua

SEQ ID NO: 1359558 - RNA, 19 nt, Homo sapiens
  misc_RNA (1)...(19): siRNA sense strand
gcaagagcugcaucaguca

SEQ ID NO: 1359559 - RNA, 19 nt, Homo sapiens
  misc_RNA (1)...(19): siRNA sense strand
cagaagaagaucaggauac

SEQ ID NO: 1359560 - RNA, 19 nt, Homo sapiens
  misc_RNA (1)...(19): siRNA sense strand
gcagacagaagaagaucag

SEQ ID NO: 1359561 - RNA, 19 nt, Homo sapiens
  misc_RNA (1)...(19): siRNA sense strand
cgacauggaaggugaucug

SEQ ID NO: 1359562 - RNA, 19 nt, Homo sapiens
  misc_RNA (1)...(19): siRNA sense strand
gaaagucgggauccuacac

SEQ ID NO: 1359563 - RNA, 19 nt, Homo sapiens
  misc_RNA (1)...(19): siRNA sense strand
cgucaaggugaagauaaua

SEQ ID NO: 1359564 - RNA, 19 nt, Homo sapiens
  misc_RNA (1)...(19): siRNA sense strand
acagaagaagaucaggaua

SEQ ID NO: 1359565 - RNA, 19 nt, Homo sapiens
  misc_RNA (1)...(19): siRNA sense strand
caagagcugcaucagucaa

SEQ ID NO: 1359566 - RNA, 19 nt, Homo sapiens
  misc_RNA (1)...(19): siRNA sense strand
ggcgucaaggugaagauaa

SEQ ID NO: 1359567 - RNA, 19 nt, Homo sapiens
  misc_RNA (1)...(19): siRNA sense strand
gagcugcaucagucaaaca

SEQ ID NO: 1359568 - RNA, 19 nt, Homo sapiens
  misc_RNA (1)...(19): siRNA sense strand
ggcagcagacagaagaaga

SEQ ID NO: 1359569 - RNA, 19 nt, Homo sapiens
  misc_RNA (1)...(19): siRNA sense strand
caccugggcagcagacaga

SEQ ID NO: 1359570 - RNA, 19 nt, Homo sapiens
  misc_RNA (1)...(19): siRNA sense strand
guuccggcgucaaggugaa

SEQ ID NO: 1359571 - RNA, 19 nt, Homo sapiens
  misc_RNA (1)...(19): siRNA sense strand
gauaauaccuaaagaggaa

SEQ ID NO: 1359572 - RNA, 19 nt, Homo sapiens
  misc_RNA (1)...(19): siRNA sense strand
gaagagcaaccacaaguuu

SEQ ID NO: 1359573 - RNA, 19 nt, Homo sapiens
  misc_RNA (1)...(19): siRNA sense strand
cuaaagaggaacacuguaa

SEQ ID NO: 1359574 - RNA, 19 nt, Homo sapiens
  misc_RNA (1)...(19): siRNA sense strand
cauggaaggugaucugcaa

SEQ ID NO: 1359575 - RNA, 19 nt, Homo sapiens
  misc_RNA (1)...(19): siRNA sense strand
gaagauaauaccuaaagag

SEQ ID NO: 1359576 - RNA, 19 nt, Homo sapiens
  misc_RNA (1)...(19): siRNA sense strand
uaaagaggaacacuguaaa

SEQ ID NO: 1359577 - RNA, 19 nt, Homo sapiens
  misc_RNA (1)...(19): siRNA sense strand
agaagcaggugaagagcaa

SEQ ID NO: 1359578 - RNA, 19 nt, Homo sapiens
  misc_RNA (1)...(19): siRNA sense strand
agaagaagaucaggauaca

SEQ ID NO: 1359579 - RNA, 19 nt, Homo sapiens
  misc_RNA (1)...(19): siRNA sense strand
gcgucaaggugaagauaau

SEQ ID NO: 1359580 - RNA, 19 nt, Homo sapiens
  misc_RNA (1)...(19): siRNA sense strand
ggaaggugaucugcaagag

SEQ ID NO: 1359581 - RNA, 19 nt, Homo sapiens
  misc_RNA (1)...(19): siRNA sense strand
aagagcaaccacaaguuua

SEQ ID NO: 1359582 - RNA, 19 nt, Homo sapiens
  misc_RNA (1)...(19): siRNA sense strand
gugaagauaauaccuaaag

SEQ ID NO: 1359583 - RNA, 19 nt, Homo sapiens
  misc_RNA (1)...(19): siRNA sense strand
agagcaaccacaaguuuaa

SEQ ID NO: 1359584 - RNA, 19 nt, Homo sapiens
  misc_RNA (1)...(19): siRNA sense strand
gacagaagaagaucaggau

SEQ ID NO: 1359585 - RNA, 19 nt, Homo sapiens
  misc_RNA (1)...(19): siRNA sense strand
gaggaacacuguaaaaugc

SEQ ID NO: 1359586 - RNA, 19 nt, Homo sapiens
  misc_RNA (1)...(19): siRNA sense strand
gcagcagacagaagaagau

SEQ ID NO: 1359587 - RNA, 19 nt, Homo sapiens
  misc_RNA (1)...(19): siRNA sense strand
gugaagagcaaccacaagu

SEQ ID NO: 1359588 - RNA, 19 nt, Homo sapiens
  misc_RNA (1)...(19): siRNA sense strand
gcaagagcugcaucaguca

SEQ ID NO: 1359589 - RNA, 19 nt, Homo sapiens
  misc_RNA (1)...(19): siRNA sense strand
gcugaaagucgggauccua

SEQ ID NO: 1359590 - RNA, 19 nt, Homo sapiens
  misc_RNA (1)...(19): siRNA sense strand
ugaagagcaaccacaaguu

SEQ ID NO: 1359591 - RNA, 19 nt, Homo sapiens
  misc_RNA (1)...(19): siRNA sense strand
cagaagaagaucaggauac

SEQ ID NO: 1359592 - RNA, 19 nt, Homo sapiens
  misc_RNA (1)...(19): siRNA sense strand
gccagaagcaggugaagag

SEQ ID NO: 1359593 - RNA, 19 nt, Homo sapiens
  misc_RNA (1)...(19): siRNA sense strand
gcagacagaagaagaucag

SEQ ID NO: 1359594 - RNA, 19 nt, Homo sapiens
  misc_RNA (1)...(19): siRNA sense strand
cgacauggaaggugaucug

SEQ ID NO: 1359595 - RNA, 19 nt, Homo sapiens
  misc_RNA (1)...(19): siRNA sense strand
cgucaaggugaagauaaua

SEQ ID NO: 1359596 - RNA, 19 nt, Homo sapiens
  misc_RNA (1)...(19): siRNA sense strand
gaaagucgggauccuacac

SEQ ID NO: 1359597 - RNA, 19 nt, Homo sapiens
  misc_RNA (1)...(19): siRNA sense strand
acagaagaagaucaggaua

SEQ ID NO: 1359598 - RNA, 19 nt, Homo sapiens
  misc_RNA (1)...(19): siRNA sense strand
caagagcugcaucagucaa

SEQ ID NO: 1359599 - RNA, 19 nt, Homo sapiens
  misc_RNA (1)...(19): siRNA sense strand
ggcgucaaggugaagauaa

SEQ ID NO: 1359600 - RNA, 19 nt, Homo sapiens
  misc_RNA (1)...(19): siRNA sense strand
gagcugcaucagucaaaca

SEQ ID NO: 1359601 - RNA, 19 nt, Homo sapiens
  misc_RNA (1)...(19): siRNA sense strand
ggcagcagacagaagaaga

SEQ ID NO: 1359602 - RNA, 19 nt, Homo sapiens
  misc_RNA (1)...(19): siRNA sense strand
guuccggcgucaaggugaa

SEQ ID NO: 1359603 - RNA, 19 nt, Homo sapiens
  misc_RNA (1)...(19): siRNA sense strand
caccugggcagcagacaga

SEQ ID NO: 1359604 - RNA, 19 nt, Homo sapiens
  misc_RNA (1)...(19): siRNA sense strand
caagaagauuggucuguuu

SEQ ID NO: 1359605 - RNA, 19 nt, Homo sapiens
  misc_RNA (1)...(19): siRNA sense strand
gaucugcaccguccaguug

SEQ ID NO: 1359606 - RNA, 19 nt, Homo sapiens
  misc_RNA (1)...(19): siRNA sense strand
acaagaagauuggucuguu

SEQ ID NO: 1359607 - RNA, 19 nt, Homo sapiens
  misc_RNA (1)...(19): siRNA sense strand
gccggugacuuccacaaga

SEQ ID NO: 1359608 - RNA, 19 nt, Homo sapiens
  misc_RNA (1)...(19): siRNA sense strand
ugacagcagugagaagauc

SEQ ID NO: 1359609 - RNA, 19 nt, Homo sapiens
  misc_RNA (1)...(19): siRNA sense strand
ccggugacuuccacaagaa

SEQ ID NO: 1359610 - RNA, 19 nt, Homo sapiens
  misc_RNA (1)...(19): siRNA sense strand
gaagauuggucuguuuugu

SEQ ID NO: 1359611 - RNA, 19 nt, Homo sapiens
  misc_RNA (1)...(19): siRNA sense strand
ugacugugccggugacuuc

SEQ ID NO: 1359612 - RNA, 19 nt, Homo sapiens
  misc_RNA (1)...(19): siRNA sense strand
gagaccagcaguacgagau

SEQ ID NO: 1359613 - RNA, 19 nt, Homo sapiens
  misc_RNA (1)...(19): siRNA sense strand
gcagcucuacgacgugaug

SEQ ID NO: 1359614 - RNA, 19 nt, Homo sapiens
  misc_RNA (1)...(19): siRNA sense strand
gcgcgaggcagagaucgaa

SEQ ID NO: 1359615 - RNA, 19 nt, Homo sapiens
  misc_RNA (1)...(19): siRNA sense strand
caagaagauuggucuguuu

SEQ ID NO: 1359616 - RNA, 19 nt, Homo sapiens
  misc_RNA (1)...(19): siRNA sense strand
gaucugcaccguccaguug

SEQ ID NO: 1359617 - RNA, 19 nt, Homo sapiens
  misc_RNA (1)...(19): siRNA sense strand
acaagaagauuggucuguu

SEQ ID NO: 1359618 - RNA, 19 nt, Homo sapiens
  misc_RNA (1)...(19): siRNA sense strand
gccggugacuuccacaaga

SEQ ID NO: 1359619 - RNA, 19 nt, Homo sapiens
  misc_RNA (1)...(19): siRNA sense strand
ugacagcagugagaagauc

SEQ ID NO: 1359620 - RNA, 19 nt, Homo sapiens
  misc_RNA (1)...(19): siRNA sense strand
ccggugacuuccacaagaa

SEQ ID NO: 1359621 - RNA, 19 nt, Homo sapiens
  misc_RNA (1)...(19): siRNA sense strand
gaagauuggucuguuuugu

SEQ ID NO: 1359622 - RNA, 19 nt, Homo sapiens
  misc_RNA (1)...(19): siRNA sense strand
ugacugugccggugacuuc

SEQ ID NO: 1359623 - RNA, 19 nt, Homo sapiens
  misc_RNA (1)...(19): siRNA sense strand
gagaccagcaguacgagau

SEQ ID NO: 1359624 - RNA, 19 nt, Homo sapiens
  misc_RNA (1)...(19): siRNA sense strand
gcagcucuacgacgugaug

SEQ ID NO: 1359625 - RNA, 19 nt, Homo sapiens
  misc_RNA (1)...(19): siRNA sense strand
gcgcgaggcagagaucgaa

SEQ ID NO: 1359626 - RNA, 19 nt, Homo sapiens
  misc_RNA (1)...(19): siRNA sense strand
caagaagauuggucuguuu

SEQ ID NO: 1359627 - RNA, 19 nt, Homo sapiens
  misc_RNA (1)...(19): siRNA sense strand
gaucugcaccguccaguug

SEQ ID NO: 1359628 - RNA, 19 nt, Homo sapiens
  misc_RNA (1)...(19): siRNA sense strand
acaagaagauuggucuguu

SEQ ID NO: 1359629 - RNA, 19 nt, Homo sapiens
  misc_RNA (1)...(19): siRNA sense strand
gccggugacuuccacaaga

SEQ ID NO: 1359630 - RNA, 19 nt, Homo sapiens
  misc_RNA (1)...(19): siRNA sense strand
ugacagcagugagaagauc

SEQ ID NO: 1359631 - RNA, 19 nt, Homo sapiens
  misc_RNA (1)...(19): siRNA sense strand
ccggugacuuccacaagaa

SEQ ID NO: 1359632 - RNA, 19 nt, Homo sapiens
  misc_RNA (1)...(19): siRNA sense strand
gaagauuggucuguuuugu

SEQ ID NO: 1359633 - RNA, 19 nt, Homo sapiens
  misc_RNA (1)...(19): siRNA sense strand
ugacugugccggugacuuc

SEQ ID NO: 1359634 - RNA, 19 nt, Homo sapiens
  misc_RNA (1)...(19): siRNA sense strand
gagaccagcaguacgagau

SEQ ID NO: 1359635 - RNA, 19 nt, Homo sapiens
  misc_RNA (1)...(19): siRNA sense strand
gcagcucuacgacgugaug

SEQ ID NO: 1359636 - RNA, 19 nt, Homo sapiens
  misc_RNA (1)...(19): siRNA sense strand
gcgcgaggcagagaucgaa

SEQ ID NO: 1359637 - RNA, 19 nt, Homo sapiens
  misc_RNA (1)...(19): siRNA sense strand
caagaagauuggucuguuu

SEQ ID NO: 1359638 - RNA, 19 nt, Homo sapiens
  misc_RNA (1)...(19): siRNA sense strand
gaucugcaccguccaguug

SEQ ID NO: 1359639 - RNA, 19 nt, Homo sapiens
  misc_RNA (1)...(19): siRNA sense strand
acaagaagauuggucuguu

SEQ ID NO: 1359640 - RNA, 19 nt, Homo sapiens
  misc_RNA (1)...(19): siRNA sense strand
gccggugacuuccacaaga

SEQ ID NO: 1359641 - RNA, 19 nt, Homo sapiens
  misc_RNA (1)...(19): siRNA sense strand
ugacagcagugagaagauc

SEQ ID NO: 1359642 - RNA, 19 nt, Homo sapiens
  misc_RNA (1)...(19): siRNA sense strand
ccggugacuuccacaagaa

SEQ ID NO: 1359643 - RNA, 19 nt, Homo sapiens
  misc_RNA (1)...(19): siRNA sense strand
gaagauuggucuguuuugu

SEQ ID NO: 1359644 - RNA, 19 nt, Homo sapiens
  misc_RNA (1)...(19): siRNA sense strand
ugacugugccggugacuuc

SEQ ID NO: 1359645 - RNA, 19 nt, Homo sapiens
  misc_RNA (1)...(19): siRNA sense strand
gagaccagcaguacgagau

SEQ ID NO: 1359646 - RNA, 19 nt, Homo sapiens
  misc_RNA (1)...(19): siRNA sense strand
gcagcucuacgacgugaug

SEQ ID NO: 1359647 - RNA, 19 nt, Homo sapiens
  misc_RNA (1)...(19): siRNA sense strand
gcgcgaggcagagaucgaa

SEQ ID NO: 1359648 - RNA, 19 nt, Homo sapiens
  misc_RNA (1)...(19): siRNA sense strand
caagaagauuggucuguuu

SEQ ID NO: 1359649 - RNA, 19 nt, Homo sapiens
  misc_RNA (1)...(19): siRNA sense strand
acaagaagauuggucuguu

SEQ ID NO: 1359650 - RNA, 19 nt, Homo sapiens
  misc_RNA (1)...(19): siRNA sense strand
gccggugacuuccacaaga

SEQ ID NO: 1359651 - RNA, 19 nt, Homo sapiens
  misc_RNA (1)...(19): siRNA sense strand
ccggugacuuccacaagaa

SEQ ID NO: 1359652 - RNA, 19 nt, Homo sapiens
  misc_RNA (1)...(19): siRNA sense strand
gaagauuggucuguuuugu

SEQ ID NO: 1359653 - RNA, 19 nt, Homo sapiens
  misc_RNA (1)...(19): siRNA sense strand
ugacugugccggugacuuc

SEQ ID NO: 1359654 - RNA, 19 nt, Homo sapiens
  misc_RNA (1)...(19): siRNA sense strand
caagaagauuggucuguuu

SEQ ID NO: 1359655 - RNA, 19 nt, Homo sapiens
  misc_RNA (1)...(19): siRNA sense strand
acaagaagauuggucuguu

SEQ ID NO: 1359656 - RNA, 19 nt, Homo sapiens
  misc_RNA (1)...(19): siRNA sense strand
gccggugacuuccacaaga

SEQ ID NO: 1359657 - RNA, 19 nt, Homo sapiens
  misc_RNA (1)...(19): siRNA sense strand
ccggugacuuccacaagaa

SEQ ID NO: 1359658 - RNA, 19 nt, Homo sapiens
  misc_RNA (1)...(19): siRNA sense strand
gaagauuggucuguuuugu

SEQ ID NO: 1359659 - RNA, 19 nt, Homo sapiens
  misc_RNA (1)...(19): siRNA sense strand
ugacugugccggugacuuc

SEQ ID NO: 1359660 - RNA, 19 nt, Homo sapiens
  misc_RNA (1)...(19): siRNA sense strand
caagaagauuggucuguuu

SEQ ID NO: 1359661 - RNA, 19 nt, Homo sapiens
  misc_RNA (1)...(19): siRNA sense strand
gaucugcaccguccaguug

SEQ ID NO: 1359662 - RNA, 19 nt, Homo sapiens
  misc_RNA (1)...(19): siRNA sense strand
acaagaagauuggucuguu

SEQ ID NO: 1359663 - RNA, 19 nt, Homo sapiens
  misc_RNA (1)...(19): siRNA sense strand
gccggugacuuccacaaga

SEQ ID NO: 1359664 - RNA, 19 nt, Homo sapiens
  misc_RNA (1)...(19): siRNA sense strand
ugacagcagugagaagauc

SEQ ID NO: 1359665 - RNA, 19 nt, Homo sapiens
  misc_RNA (1)...(19): siRNA sense strand
ccggugacuuccacaagaa

SEQ ID NO: 1359666 - RNA, 19 nt, Homo sapiens
  misc_RNA (1)...(19): siRNA sense strand
gaagauuggucuguuuugu

SEQ ID NO: 1359667 - RNA, 19 nt, Homo sapiens
  misc_RNA (1)...(19): siRNA sense strand
ugacugugccggugacuuc

SEQ ID NO: 1359668 - RNA, 19 nt, Homo sapiens
  misc_RNA (1)...(19): siRNA sense strand
gagaccagcaguacgagau

SEQ ID NO: 1359669 - RNA, 19 nt, Homo sapiens
  misc_RNA (1)...(19): siRNA sense strand
gcagcucuacgacgugaug

SEQ ID NO: 1359670 - RNA, 19 nt, Homo sapiens
  misc_RNA (1)...(19): siRNA sense strand
gcgcgaggcagagaucgaa

SEQ ID NO: 1359671 - RNA, 19 nt, Homo sapiens
  misc_RNA (1)...(19): siRNA sense strand
caagaagauuggucuguuu

SEQ ID NO: 1359672 - RNA, 19 nt, Homo sapiens
  misc_RNA (1)...(19): siRNA sense strand
acaagaagauuggucuguu

SEQ ID NO: 1359673 - RNA, 19 nt, Homo sapiens
  misc_RNA (1)...(19): siRNA sense strand
gccggugacuuccacaaga

SEQ ID NO: 1359674 - RNA, 19 nt, Homo sapiens
  misc_RNA (1)...(19): siRNA sense strand
ccggugacuuccacaagaa

SEQ ID NO: 1359675 - RNA, 19 nt, Homo sapiens
  misc_RNA (1)...(19): siRNA sense strand
gaagauuggucuguuuugu

SEQ ID NO: 1359676 - RNA, 19 nt, Homo sapiens
  misc_RNA (1)...(19): siRNA sense strand
ugacugugccggugacuuc

SEQ ID NO: 1359677 - RNA, 19 nt, Homo sapiens
  misc_RNA (1)...(19): siRNA sense strand
caagaagauuggucuguuu

SEQ ID NO: 1359678 - RNA, 19 nt, Homo sapiens
  misc_RNA (1)...(19): siRNA sense strand
acaagaagauuggucuguu

SEQ ID NO: 1359679 - RNA, 19 nt, Homo sapiens
  misc_RNA (1)...(19): siRNA sense strand
gccggugacuuccacaaga

SEQ ID NO: 1359680 - RNA, 19 nt, Homo sapiens
  misc_RNA (1)...(19): siRNA sense strand
ccggugacuuccacaagaa

SEQ ID NO: 1359681 - RNA, 19 nt, Homo sapiens
  misc_RNA (1)...(19): siRNA sense strand
gaagauuggucuguuuugu

SEQ ID NO: 1359682 - RNA, 19 nt, Homo sapiens
  misc_RNA (1)...(19): siRNA sense strand
ugacugugccggugacuuc

SEQ ID NO: 1359683 - RNA, 19 nt, Homo sapiens
  misc_RNA (1)...(19): siRNA sense strand
caagaagauuggucuguuu

SEQ ID NO: 1359684 - RNA, 19 nt, Homo sapiens
  misc_RNA (1)...(19): siRNA sense strand
acaagaagauuggucuguu

SEQ ID NO: 1359685 - RNA, 19 nt, Homo sapiens
  misc_RNA (1)...(19): siRNA sense strand
gccggugacuuccacaaga

SEQ ID NO: 1359686 - RNA, 19 nt, Homo sapiens
  misc_RNA (1)...(19): siRNA sense strand
ccggugacuuccacaagaa

SEQ ID NO: 1359687 - RNA, 19 nt, Homo sapiens
  misc_RNA (1)...(19): siRNA sense strand
gaagauuggucuguuuugu

SEQ ID NO: 1359688 - RNA, 19 nt, Homo sapiens
  misc_RNA (1)...(19): siRNA sense strand
ugacugugccggugacuuc

SEQ ID NO: 1359689 - RNA, 19 nt, Homo sapiens
  misc_RNA (1)...(19): siRNA sense strand
caagaagauuggucuguuu

SEQ ID NO: 1359690 - RNA, 19 nt, Homo sapiens
  misc_RNA (1)...(19): siRNA sense strand
acaagaagauuggucuguu

SEQ ID NO: 1359691 - RNA, 19 nt, Homo sapiens
  misc_RNA (1)...(19): siRNA sense strand
gccggugacuuccacaaga

SEQ ID NO: 1359692 - RNA, 19 nt, Homo sapiens
  misc_RNA (1)...(19): siRNA sense strand
ccggugacuuccacaagaa

SEQ ID NO: 1359693 - RNA, 19 nt, Homo sapiens
  misc_RNA (1)...(19): siRNA sense strand
gaagauuggucuguuuugu

SEQ ID NO: 1359694 - RNA, 19 nt, Homo sapiens
  misc_RNA (1)...(19): siRNA sense strand
ugacugugccggugacuuc

SEQ ID NO: 1359695 - RNA, 19 nt, Homo sapiens
  misc_RNA (1)...(19): siRNA sense strand
caagaagauuggucuguuu

SEQ ID NO: 1359696 - RNA, 19 nt, Homo sapiens
  misc_RNA (1)...(19): siRNA sense strand
gaucugcaccguccaguug

SEQ ID NO: 1359697 - RNA, 19 nt, Homo sapiens
  misc_RNA (1)...(19): siRNA sense strand
acaagaagauuggucuguu

SEQ ID NO: 1359698 - RNA, 19 nt, Homo sapiens
  misc_RNA (1)...(19): siRNA sense strand
gccggugacuuccacaaga

SEQ ID NO: 1359699 - RNA, 19 nt, Homo sapiens
  misc_RNA (1)...(19): siRNA sense strand
ugacagcagugagaagauc

SEQ ID NO: 1359700 - RNA, 19 nt, Homo sapiens
  misc_RNA (1)...(19): siRNA sense strand
ccggugacuuccacaagaa

SEQ ID NO: 1359701 - RNA, 19 nt, Homo sapiens
  misc_RNA (1)...(19): siRNA sense strand
gaagauuggucuguuuugu

SEQ ID NO: 1359702 - RNA, 19 nt, Homo sapiens
  misc_RNA (1)...(19): siRNA sense strand
ugacugugccggugacuuc

SEQ ID NO: 1359703 - RNA, 19 nt, Homo sapiens
  misc_RNA (1)...(19): siRNA sense strand
gagaccagcaguacgagau

SEQ ID NO: 1359704 - RNA, 19 nt, Homo sapiens
  misc_RNA (1)...(19): siRNA sense strand
gcagcucuacgacgugaug

SEQ ID NO: 1359705 - RNA, 19 nt, Homo sapiens
  misc_RNA (1)...(19): siRNA sense strand
gcgcgaggcagagaucgaa

SEQ ID NO: 1359706 - RNA, 19 nt, Homo sapiens
  misc_RNA (1)...(19): siRNA sense strand
caagaagauuggucuguuu

SEQ ID NO: 1359707 - RNA, 19 nt, Homo sapiens
  misc_RNA (1)...(19): siRNA sense strand
gaucugcaccguccaguug

SEQ ID NO: 1359708 - RNA, 19 nt, Homo sapiens
  misc_RNA (1)...(19): siRNA sense strand
acaagaagauuggucuguu

SEQ ID NO: 1359709 - RNA, 19 nt, Homo sapiens
  misc_RNA (1)...(19): siRNA sense strand
gccggugacuuccacaaga

SEQ ID NO: 1359710 - RNA, 19 nt, Homo sapiens
  misc_RNA (1)...(19): siRNA sense strand
ugacagcagugagaagauc

SEQ ID NO: 1359711 - RNA, 19 nt, Homo sapiens
  misc_RNA (1)...(19): siRNA sense strand
ccggugacuuccacaagaa

SEQ ID NO: 1359712 - RNA, 19 nt, Homo sapiens
  misc_RNA (1)...(19): siRNA sense strand
gaagauuggucuguuuugu

SEQ ID NO: 1359713 - RNA, 19 nt, Homo sapiens
  misc_RNA (1)...(19): siRNA sense strand
ugacugugccggugacuuc

SEQ ID NO: 1359714 - RNA, 19 nt, Homo sapiens
  misc_RNA (1)...(19): siRNA sense strand
gagaccagcaguacgagau

SEQ ID NO: 1359715 - RNA, 19 nt, Homo sapiens
  misc_RNA (1)...(19): siRNA sense strand
gcagcucuacgacgugaug

SEQ ID NO: 1359716 - RNA, 19 nt, Homo sapiens
  misc_RNA (1)...(19): siRNA sense strand
gcgcgaggcagagaucgaa

SEQ ID NO: 1359717 - RNA, 19 nt, Homo sapiens
  misc_RNA (1)...(19): siRNA sense strand
caagaagauuggucuguuu

SEQ ID NO: 1359718 - RNA, 19 nt, Homo sapiens
  misc_RNA (1)...(19): siRNA sense strand
gaucugcaccguccaguug

SEQ ID NO: 1359719 - RNA, 19 nt, Homo sapiens
  misc_RNA (1)...(19): siRNA sense strand
acaagaagauuggucuguu

SEQ ID NO: 1359720 - RNA, 19 nt, Homo sapiens
  misc_RNA (1)...(19): siRNA sense strand
gccggugacuuccacaaga

SEQ ID NO: 1359721 - RNA, 19 nt, Homo sapiens
  misc_RNA (1)...(19): siRNA sense strand
ugacagcagugagaagauc

SEQ ID NO: 1359722 - RNA, 19 nt, Homo sapiens
  misc_RNA (1)...(19): siRNA sense strand
ccggugacuuccacaagaa

SEQ ID NO: 1359723 - RNA, 19 nt, Homo sapiens
  misc_RNA (1)...(19): siRNA sense strand
gaagauuggucuguuuugu

SEQ ID NO: 1359724 - RNA, 19 nt, Homo sapiens
  misc_RNA (1)...(19): siRNA sense strand
ugacugugccggugacuuc

SEQ ID NO: 1359725 - RNA, 19 nt, Homo sapiens
  misc_RNA (1)...(19): siRNA sense strand
gagaccagcaguacgagau

SEQ ID NO: 1359726 - RNA, 19 nt, Homo sapiens
  misc_RNA (1)...(19): siRNA sense strand
gcagcucuacgacgugaug

SEQ ID NO: 1359727 - RNA, 19 nt, Homo sapiens
  misc_RNA (1)...(19): siRNA sense strand
gcgcgaggcagagaucgaa

SEQ ID NO: 1359728 - RNA, 19 nt, Homo sapiens
  misc_RNA (1)...(19): siRNA sense strand
caagaagauuggucuguuu

SEQ ID NO: 1359729 - RNA, 19 nt, Homo sapiens
  misc_RNA (1)...(19): siRNA sense strand
gaucugcaccguccaguug

SEQ ID NO: 1359730 - RNA, 19 nt, Homo sapiens
  misc_RNA (1)...(19): siRNA sense strand
acaagaagauuggucuguu

SEQ ID NO: 1359731 - RNA, 19 nt, Homo sapiens
  misc_RNA (1)...(19): siRNA sense strand
gccggugacuuccacaaga

SEQ ID NO: 1359732 - RNA, 19 nt, Homo sapiens
  misc_RNA (1)...(19): siRNA sense strand
ugacagcagugagaagauc

SEQ ID NO: 1359733 - RNA, 19 nt, Homo sapiens
  misc_RNA (1)...(19): siRNA sense strand
ccggugacuuccacaagaa

SEQ ID NO: 1359734 - RNA, 19 nt, Homo sapiens
  misc_RNA (1)...(19): siRNA sense strand
gaagauuggucuguuuugu

SEQ ID NO: 1359735 - RNA, 19 nt, Homo sapiens
  misc_RNA (1)...(19): siRNA sense strand
ugacugugccggugacuuc

SEQ ID NO: 1359736 - RNA, 19 nt, Homo sapiens
  misc_RNA (1)...(19): siRNA sense strand
gagaccagcaguacgagau

SEQ ID NO: 1359737 - RNA, 19 nt, Homo sapiens
  misc_RNA (1)...(19): siRNA sense strand
gcagcucuacgacgugaug

SEQ ID NO: 1359738 - RNA, 19 nt, Homo sapiens
  misc_RNA (1)...(19): siRNA sense strand
gcgcgaggcagagaucgaa

SEQ ID NO: 1359739 - RNA, 19 nt, Homo sapiens
  misc_RNA (1)...(19): siRNA sense strand
caagaagauuggucuguuu

SEQ ID NO: 1359740 - RNA, 19 nt, Homo sapiens
  misc_RNA (1)...(19): siRNA sense strand
acaagaagauuggucuguu

SEQ ID NO: 1359741 - RNA, 19 nt, Homo sapiens
  misc_RNA (1)...(19): siRNA sense strand
gccggugacuuccacaaga

SEQ ID NO: 1359742 - RNA, 19 nt, Homo sapiens
  misc_RNA (1)...(19): siRNA sense strand
ccggugacuuccacaagaa

SEQ ID NO: 1359743 - RNA, 19 nt, Homo sapiens
  misc_RNA (1)...(19): siRNA sense strand
gaagauuggucuguuuugu

SEQ ID NO: 1359744 - RNA, 19 nt, Homo sapiens
  misc_RNA (1)...(19): siRNA sense strand
ugacugugccggugacuuc

SEQ ID NO: 1359745 - RNA, 19 nt, Homo sapiens
  misc_RNA (1)...(19): siRNA sense strand
caagaagauuggucuguuu

SEQ ID NO: 1359746 - RNA, 19 nt, Homo sapiens
  misc_RNA (1)...(19): siRNA sense strand
acaagaagauuggucuguu

SEQ ID NO: 1359747 - RNA, 19 nt, Homo sapiens
  misc_RNA (1)...(19): siRNA sense strand
gccggugacuuccacaaga

SEQ ID NO: 1359748 - RNA, 19 nt, Homo sapiens
  misc_RNA (1)...(19): siRNA sense strand
ccggugacuuccacaagaa

SEQ ID NO: 1359749 - RNA, 19 nt, Homo sapiens
  misc_RNA (1)...(19): siRNA sense strand
gaagauuggucuguuuugu

SEQ ID NO: 1359750 - RNA, 19 nt, Homo sapiens
  misc_RNA (1)...(19): siRNA sense strand
ugacugugccggugacuuc

SEQ ID NO: 1359751 - RNA, 19 nt, Homo sapiens
  misc_RNA (1)...(19): siRNA sense strand
caagaagauuggucuguuu

SEQ ID NO: 1359752 - RNA, 19 nt, Homo sapiens
  misc_RNA (1)...(19): siRNA sense strand
gaucugcaccguccaguug

SEQ ID NO: 1359753 - RNA, 19 nt, Homo sapiens
  misc_RNA (1)...(19): siRNA sense strand
acaagaagauuggucuguu

SEQ ID NO: 1359754 - RNA, 19 nt, Homo sapiens
  misc_RNA (1)...(19): siRNA sense strand
gccggugacuuccacaaga

SEQ ID NO: 1359755 - RNA, 19 nt, Homo sapiens
  misc_RNA (1)...(19): siRNA sense strand
ugacagcagugagaagauc

SEQ ID NO: 1359756 - RNA, 19 nt, Homo sapiens
  misc_RNA (1)...(19): siRNA sense strand
ccggugacuuccacaagaa

SEQ ID NO: 1359757 - RNA, 19 nt, Homo sapiens
  misc_RNA (1)...(19): siRNA sense strand
gaagauuggucuguuuugu

SEQ ID NO: 1359758 - RNA, 19 nt, Homo sapiens
  misc_RNA (1)...(19): siRNA sense strand
ugacugugccggugacuuc

SEQ ID NO: 1359759 - RNA, 19 nt, Homo sapiens
  misc_RNA (1)...(19): siRNA sense strand
gagaccagcaguacgagau

SEQ ID NO: 1359760 - RNA, 19 nt, Homo sapiens
  misc_RNA (1)...(19): siRNA sense strand
gcagcucuacgacgugaug

SEQ ID NO: 1359761 - RNA, 19 nt, Homo sapiens
  misc_RNA (1)...(19): siRNA sense strand
gcgcgaggcagagaucgaa

SEQ ID NO: 1359762 - RNA, 19 nt, Homo sapiens
  misc_RNA (1)...(19): siRNA sense strand
caagaagauuggucuguuu

SEQ ID NO: 1359763 - RNA, 19 nt, Homo sapiens
  misc_RNA (1)...(19): siRNA sense strand
acaagaagauuggucuguu

SEQ ID NO: 1359764 - RNA, 19 nt, Homo sapiens
  misc_RNA (1)...(19): siRNA sense strand
gccggugacuuccacaaga

SEQ ID NO: 1359765 - RNA, 19 nt, Homo sapiens
  misc_RNA (1)...(19): siRNA sense strand
ccggugacuuccacaagaa

SEQ ID NO: 1359766 - RNA, 19 nt, Homo sapiens
  misc_RNA (1)...(19): siRNA sense strand
gaagauuggucuguuuugu

SEQ ID NO: 1359767 - RNA, 19 nt, Homo sapiens
  misc_RNA (1)...(19): siRNA sense strand
ugacugugccggugacuuc

SEQ ID NO: 1359768 - RNA, 19 nt, Homo sapiens
  misc_RNA (1)...(19): siRNA sense strand
caagaagauuggucuguuu

SEQ ID NO: 1359769 - RNA, 19 nt, Homo sapiens
  misc_RNA (1)...(19): siRNA sense strand
acaagaagauuggucuguu

SEQ ID NO: 1359770 - RNA, 19 nt, Homo sapiens
  misc_RNA (1)...(19): siRNA sense strand
gccggugacuuccacaaga

SEQ ID NO: 1359771 - RNA, 19 nt, Homo sapiens
  misc_RNA (1)...(19): siRNA sense strand
ccggugacuuccacaagaa

SEQ ID NO: 1359772 - RNA, 19 nt, Homo sapiens
  misc_RNA (1)...(19): siRNA sense strand
gaagauuggucuguuuugu

SEQ ID NO: 1359773 - RNA, 19 nt, Homo sapiens
  misc_RNA (1)...(19): siRNA sense strand
ugacugugccggugacuuc

SEQ ID NO: 1359774 - RNA, 19 nt, Homo sapiens
  misc_RNA (1)...(19): siRNA sense strand
caagaagauuggucuguuu

SEQ ID NO: 1359775 - RNA, 19 nt, Homo sapiens
  misc_RNA (1)...(19): siRNA sense strand
acaagaagauuggucuguu

SEQ ID NO: 1359776 - RNA, 19 nt, Homo sapiens
  misc_RNA (1)...(19): siRNA sense strand
gccggugacuuccacaaga

SEQ ID NO: 1359777 - RNA, 19 nt, Homo sapiens
  misc_RNA (1)...(19): siRNA sense strand
ccggugacuuccacaagaa

SEQ ID NO: 1359778 - RNA, 19 nt, Homo sapiens
  misc_RNA (1)...(19): siRNA sense strand
gaagauuggucuguuuugu

SEQ ID NO: 1359779 - RNA, 19 nt, Homo sapiens
  misc_RNA (1)...(19): siRNA sense strand
ugacugugccggugacuuc

SEQ ID NO: 1359780 - RNA, 19 nt, Homo sapiens
  misc_RNA (1)...(19): siRNA sense strand
caagaagauuggucuguuu

SEQ ID NO: 1359781 - RNA, 19 nt, Homo sapiens
  misc_RNA (1)...(19): siRNA sense strand
acaagaagauuggucuguu

SEQ ID NO: 1359782 - RNA, 19 nt, Homo sapiens
  misc_RNA (1)...(19): siRNA sense strand
gccggugacuuccacaaga

SEQ ID NO: 1359783 - RNA, 19 nt, Homo sapiens
  misc_RNA (1)...(19): siRNA sense strand
ccggugacuuccacaagaa

SEQ ID NO: 1359784 - RNA, 19 nt, Homo sapiens
  misc_RNA (1)...(19): siRNA sense strand
gaagauuggucuguuuugu

SEQ ID NO: 1359785 - RNA, 19 nt, Homo sapiens
  misc_RNA (1)...(19): siRNA sense strand
ugacugugccggugacuuc

SEQ ID NO: 1359786 - RNA, 19 nt, Homo sapiens
  misc_RNA (1)...(19): siRNA sense strand
ggaaagagaagcuugauuc

SEQ ID NO: 1359787 - RNA, 19 nt, Homo sapiens
  misc_RNA (1)...(19): siRNA sense strand
gaagcuugauucugugauu

SEQ ID NO: 1359788 - RNA, 19 nt, Homo sapiens
  misc_RNA (1)...(19): siRNA sense strand
ggugagugaugaaauggua

SEQ ID NO: 1359789 - RNA, 19 nt, Homo sapiens
  misc_RNA (1)...(19): siRNA sense strand
caaaagagcccaugaaaga

SEQ ID NO: 1359790 - RNA, 19 nt, Homo sapiens
  misc_RNA (1)...(19): siRNA sense strand
aggcagaaaugcucgauga

SEQ ID NO: 1359791 - RNA, 19 nt, Homo sapiens
  misc_RNA (1)...(19): siRNA sense strand
gcagaacccgaguauccua

SEQ ID NO: 1359792 - RNA, 19 nt, Homo sapiens
  misc_RNA (1)...(19): siRNA sense strand
gaacccgaguauccuaaag

SEQ ID NO: 1359793 - RNA, 19 nt, Homo sapiens
  misc_RNA (1)...(19): siRNA sense strand
aaagagcccaugaaagaug

SEQ ID NO: 1359794 - RNA, 19 nt, Homo sapiens
  misc_RNA (1)...(19): siRNA sense strand
gcugaaaacuucugugucu

SEQ ID NO: 1359795 - RNA, 19 nt, Homo sapiens
  misc_RNA (1)...(19): siRNA sense strand
gaauucagcaucccagacu

SEQ ID NO: 1359796 - RNA, 19 nt, Homo sapiens
  misc_RNA (1)...(19): siRNA sense strand
aagagcccaugaaagauga

SEQ ID NO: 1359797 - RNA, 19 nt, Homo sapiens
  misc_RNA (1)...(19): siRNA sense strand
gaagaggaaagagaagcuu

SEQ ID NO: 1359798 - RNA, 19 nt, Homo sapiens
  misc_RNA (1)...(19): siRNA sense strand
gaaggcaacuauggaugcu

SEQ ID NO: 1359799 - RNA, 19 nt, Homo sapiens
  misc_RNA (1)...(19): siRNA sense strand
ucacaggaaggcugauuca

SEQ ID NO: 1359800 - RNA, 19 nt, Homo sapiens
  misc_RNA (1)...(19): siRNA sense strand
uggagaagaggaaagagaa

SEQ ID NO: 1359801 - RNA, 19 nt, Homo sapiens
  misc_RNA (1)...(19): siRNA sense strand
acuggugagugaugaaaug

SEQ ID NO: 1359802 - RNA, 19 nt, Homo sapiens
  misc_RNA (1)...(19): siRNA sense strand
gcuugauucugugauugaa

SEQ ID NO: 1359803 - RNA, 19 nt, Homo sapiens
  misc_RNA (1)...(19): siRNA sense strand
gcugaaggcaacuauggau

SEQ ID NO: 1359804 - RNA, 19 nt, Homo sapiens
  misc_RNA (1)...(19): siRNA sense strand
ucauugagaagaauuugga

SEQ ID NO: 1359805 - RNA, 19 nt, Homo sapiens
  misc_RNA (1)...(19): siRNA sense strand
cagaacccgaguauccuaa

SEQ ID NO: 1359806 - RNA, 19 nt, Homo sapiens
  misc_RNA (1)...(19): siRNA sense strand
ggagaagaggaaagagaag

SEQ ID NO: 1359807 - RNA, 19 nt, Homo sapiens
  misc_RNA (1)...(19): siRNA sense strand
aagcuugauucugugauug

SEQ ID NO: 1359808 - RNA, 19 nt, Homo sapiens
  misc_RNA (1)...(19): siRNA sense strand
aaacuggugagugaugaaa

SEQ ID NO: 1359809 - RNA, 19 nt, Homo sapiens
  misc_RNA (1)...(19): siRNA sense strand
cuucugugucugccauuua

SEQ ID NO: 1359810 - RNA, 19 nt, Homo sapiens
  misc_RNA (1)...(19): siRNA sense strand
agaggaaagagaagcuuga

SEQ ID NO: 1359811 - RNA, 19 nt, Homo sapiens
  misc_RNA (1)...(19): siRNA sense strand
gaggaaagagaagcuugau

SEQ ID NO: 1359812 - RNA, 19 nt, Homo sapiens
  misc_RNA (1)...(19): siRNA sense strand
cggcagaacccgaguaucc

SEQ ID NO: 1359813 - RNA, 19 nt, Homo sapiens
  misc_RNA (1)...(19): siRNA sense strand
ggaaagagaagcuugauuc

SEQ ID NO: 1359814 - RNA, 19 nt, Homo sapiens
  misc_RNA (1)...(19): siRNA sense strand
gaagcuugauucugugauu

SEQ ID NO: 1359815 - RNA, 19 nt, Homo sapiens
  misc_RNA (1)...(19): siRNA sense strand
ggugagugaugaaauggua

SEQ ID NO: 1359816 - RNA, 19 nt, Homo sapiens
  misc_RNA (1)...(19): siRNA sense strand
caaaagagcccaugaaaga

SEQ ID NO: 1359817 - RNA, 19 nt, Homo sapiens
  misc_RNA (1)...(19): siRNA sense strand
aggcagaaaugcucgauga

SEQ ID NO: 1359818 - RNA, 19 nt, Homo sapiens
  misc_RNA (1)...(19): siRNA sense strand
gcagaacccgaguauccua

SEQ ID NO: 1359819 - RNA, 19 nt, Homo sapiens
  misc_RNA (1)...(19): siRNA sense strand
gaacccgaguauccuaaag

SEQ ID NO: 1359820 - RNA, 19 nt, Homo sapiens
  misc_RNA (1)...(19): siRNA sense strand
aaagagcccaugaaagaug

SEQ ID NO: 1359821 - RNA, 19 nt, Homo sapiens
  misc_RNA (1)...(19): siRNA sense strand
gcugaaaacuucugugucu

SEQ ID NO: 1359822 - RNA, 19 nt, Homo sapiens
  misc_RNA (1)...(19): siRNA sense strand
gaauucagcaucccagacu

SEQ ID NO: 1359823 - RNA, 19 nt, Homo sapiens
  misc_RNA (1)...(19): siRNA sense strand
aagagcccaugaaagauga

SEQ ID NO: 1359824 - RNA, 19 nt, Homo sapiens
  misc_RNA (1)...(19): siRNA sense strand
gaagaggaaagagaagcuu

SEQ ID NO: 1359825 - RNA, 19 nt, Homo sapiens
  misc_RNA (1)...(19): siRNA sense strand
gaaggcaacuauggaugcu

SEQ ID NO: 1359826 - RNA, 19 nt, Homo sapiens
  misc_RNA (1)...(19): siRNA sense strand
ucacaggaaggcugauuca

SEQ ID NO: 1359827 - RNA, 19 nt, Homo sapiens
  misc_RNA (1)...(19): siRNA sense strand
uggagaagaggaaagagaa

SEQ ID NO: 1359828 - RNA, 19 nt, Homo sapiens
  misc_RNA (1)...(19): siRNA sense strand
acuggugagugaugaaaug

SEQ ID NO: 1359829 - RNA, 19 nt, Homo sapiens
  misc_RNA (1)...(19): siRNA sense strand
gcuugauucugugauugaa

SEQ ID NO: 1359830 - RNA, 19 nt, Homo sapiens
  misc_RNA (1)...(19): siRNA sense strand
gcugaaggcaacuauggau

SEQ ID NO: 1359831 - RNA, 19 nt, Homo sapiens
  misc_RNA (1)...(19): siRNA sense strand
ucauugagaagaauuugga

SEQ ID NO: 1359832 - RNA, 19 nt, Homo sapiens
  misc_RNA (1)...(19): siRNA sense strand
cagaacccgaguauccuaa

SEQ ID NO: 1359833 - RNA, 19 nt, Homo sapiens
  misc_RNA (1)...(19): siRNA sense strand
ggagaagaggaaagagaag

SEQ ID NO: 1359834 - RNA, 19 nt, Homo sapiens
  misc_RNA (1)...(19): siRNA sense strand
aagcuugauucugugauug

SEQ ID NO: 1359835 - RNA, 19 nt, Homo sapiens
  misc_RNA (1)...(19): siRNA sense strand
aaacuggugagugaugaaa

SEQ ID NO: 1359836 - RNA, 19 nt, Homo sapiens
  misc_RNA (1)...(19): siRNA sense strand
cuucugugucugccauuua

SEQ ID NO: 1359837 - RNA, 19 nt, Homo sapiens
  misc_RNA (1)...(19): siRNA sense strand
agaggaaagagaagcuuga

SEQ ID NO: 1359838 - RNA, 19 nt, Homo sapiens
  misc_RNA (1)...(19): siRNA sense strand
gaggaaagagaagcuugau

SEQ ID NO: 1359839 - RNA, 19 nt, Homo sapiens
  misc_RNA (1)...(19): siRNA sense strand
cggcagaacccgaguaucc

SEQ ID NO: 1359840 - RNA, 19 nt, Homo sapiens
  misc_RNA (1)...(19): siRNA sense strand
ggaaagagaagcuugauuc

SEQ ID NO: 1359841 - RNA, 19 nt, Homo sapiens
  misc_RNA (1)...(19): siRNA sense strand
gaagcuugauucugugauu

SEQ ID NO: 1359842 - RNA, 19 nt, Homo sapiens
  misc_RNA (1)...(19): siRNA sense strand
ggugagugaugaaauggua

SEQ ID NO: 1359843 - RNA, 19 nt, Homo sapiens
  misc_RNA (1)...(19): siRNA sense strand
caaaagagcccaugaaaga

SEQ ID NO: 1359844 - RNA, 19 nt, Homo sapiens
  misc_RNA (1)...(19): siRNA sense strand
aggcagaaaugcucgauga

SEQ ID NO: 1359845 - RNA, 19 nt, Homo sapiens
  misc_RNA (1)...(19): siRNA sense strand
gcagaacccgaguauccua

SEQ ID NO: 1359846 - RNA, 19 nt, Homo sapiens
  misc_RNA (1)...(19): siRNA sense strand
gaacccgaguauccuaaag

SEQ ID NO: 1359847 - RNA, 19 nt, Homo sapiens
  misc_RNA (1)...(19): siRNA sense strand
aaagagcccaugaaagaug

SEQ ID NO: 1359848 - RNA, 19 nt, Homo sapiens
  misc_RNA (1)...(19): siRNA sense strand
gcugaaaacuucugugucu

SEQ ID NO: 1359849 - RNA, 19 nt, Homo sapiens
  misc_RNA (1)...(19): siRNA sense strand
gaauucagcaucccagacu

SEQ ID NO: 1359850 - RNA, 19 nt, Homo sapiens
  misc_RNA (1)...(19): siRNA sense strand
aagagcccaugaaagauga

SEQ ID NO: 1359851 - RNA, 19 nt, Homo sapiens
  misc_RNA (1)...(19): siRNA sense strand
gaagaggaaagagaagcuu

SEQ ID NO: 1359852 - RNA, 19 nt, Homo sapiens
  misc_RNA (1)...(19): siRNA sense strand
gaaggcaacuauggaugcu

SEQ ID NO: 1359853 - RNA, 19 nt, Homo sapiens
  misc_RNA (1)...(19): siRNA sense strand
ucacaggaaggcugauuca

SEQ ID NO: 1359854 - RNA, 19 nt, Homo sapiens
  misc_RNA (1)...(19): siRNA sense strand
uggagaagaggaaagagaa

SEQ ID NO: 1359855 - RNA, 19 nt, Homo sapiens
  misc_RNA (1)...(19): siRNA sense strand
acuggugagugaugaaaug

SEQ ID NO: 1359856 - RNA, 19 nt, Homo sapiens
  misc_RNA (1)...(19): siRNA sense strand
gcuugauucugugauugaa

SEQ ID NO: 1359857 - RNA, 19 nt, Homo sapiens
  misc_RNA (1)...(19): siRNA sense strand
gcugaaggcaacuauggau

SEQ ID NO: 1359858 - RNA, 19 nt, Homo sapiens
  misc_RNA (1)...(19): siRNA sense strand
ucauugagaagaauuugga

SEQ ID NO: 1359859 - RNA, 19 nt, Homo sapiens
  misc_RNA (1)...(19): siRNA sense strand
cagaacccgaguauccuaa

SEQ ID NO: 1359860 - RNA, 19 nt, Homo sapiens
  misc_RNA (1)...(19): siRNA sense strand
ggagaagaggaaagagaag

SEQ ID NO: 1359861 - RNA, 19 nt, Homo sapiens
  misc_RNA (1)...(19): siRNA sense strand
aagcuugauucugugauug

SEQ ID NO: 1359862 - RNA, 19 nt, Homo sapiens
  misc_RNA (1)...(19): siRNA sense strand
aaacuggugagugaugaaa

SEQ ID NO: 1359863 - RNA, 19 nt, Homo sapiens
  misc_RNA (1)...(19): siRNA sense strand
cuucugugucugccauuua

SEQ ID NO: 1359864 - RNA, 19 nt, Homo sapiens
  misc_RNA (1)...(19): siRNA sense strand
agaggaaagagaagcuuga

SEQ ID NO: 1359865 - RNA, 19 nt, Homo sapiens
  misc_RNA (1)...(19): siRNA sense strand
gaggaaagagaagcuugau

SEQ ID NO: 1359866 - RNA, 19 nt, Homo sapiens
  misc_RNA (1)...(19): siRNA sense strand
cggcagaacccgaguaucc

SEQ ID NO: 1359867 - RNA, 19 nt, Homo sapiens
  misc_RNA (1)...(19): siRNA sense strand
cagcagagaugaagacuug

SEQ ID NO: 1359868 - RNA, 19 nt, Homo sapiens
  misc_RNA (1)...(19): siRNA sense strand
aaacugcucucaccaccua

SEQ ID NO: 1359869 - RNA, 19 nt, Homo sapiens
  misc_RNA (1)...(19): siRNA sense strand
gcgccacccuccacaguaa

SEQ ID NO: 1359870 - RNA, 19 nt, Homo sapiens
  misc_RNA (1)...(19): siRNA sense strand
ccacagagauaagcaguca

SEQ ID NO: 1359871 - RNA, 19 nt, Homo sapiens
  misc_RNA (1)...(19): siRNA sense strand
gagauaagcagucaugagu

SEQ ID NO: 1359872 - RNA, 19 nt, Homo sapiens
  misc_RNA (1)...(19): siRNA sense strand
ccagggagcgguacauuug

SEQ ID NO: 1359873 - RNA, 19 nt, Homo sapiens
  misc_RNA (1)...(19): siRNA sense strand
caacacagcggccacaaca

SEQ ID NO: 1359874 - RNA, 19 nt, Homo sapiens
  misc_RNA (1)...(19): siRNA sense strand
ggccagcguugaaauggaa

SEQ ID NO: 1359875 - RNA, 19 nt, Homo sapiens
  misc_RNA (1)...(19): siRNA sense strand
gaacaaggccacgaauguc

SEQ ID NO: 1359876 - RNA, 19 nt, Homo sapiens
  misc_RNA (1)...(19): siRNA sense strand
cacaggaaccacagagaua

SEQ ID NO: 1359877 - RNA, 19 nt, Homo sapiens
  misc_RNA (1)...(19): siRNA sense strand
uagagacccugcccugguu

SEQ ID NO: 1359878 - RNA, 19 nt, Homo sapiens
  misc_RNA (1)...(19): siRNA sense strand
ugaacaaggccacgaaugu

SEQ ID NO: 1359879 - RNA, 19 nt, Homo sapiens
  misc_RNA (1)...(19): siRNA sense strand
caugcuaccucaagucaag

SEQ ID NO: 1359880 - RNA, 19 nt, Homo sapiens
  misc_RNA (1)...(19): siRNA sense strand
gcagagaugaagacuugga

SEQ ID NO: 1359881 - RNA, 19 nt, Homo sapiens
  misc_RNA (1)...(19): siRNA sense strand
ucucccagcucaaacaaca

SEQ ID NO: 1359882 - RNA, 19 nt, Homo sapiens
  misc_RNA (1)...(19): siRNA sense strand
uaccucaagucaaggcaaa

SEQ ID NO: 1359883 - RNA, 19 nt, Homo sapiens
  misc_RNA (1)...(19): siRNA sense strand
ccacaggaaccacagagau

SEQ ID NO: 1359884 - RNA, 19 nt, Homo sapiens
  misc_RNA (1)...(19): siRNA sense strand
acaggaaccacagagauaa

SEQ ID NO: 1359885 - RNA, 19 nt, Homo sapiens
  misc_RNA (1)...(19): siRNA sense strand
ggccacaacagcagcuauu

SEQ ID NO: 1359886 - RNA, 19 nt, Homo sapiens
  misc_RNA (1)...(19): siRNA sense strand
cccagucucaaaugcauua

SEQ ID NO: 1359887 - RNA, 19 nt, Homo sapiens
  misc_RNA (1)...(19): siRNA sense strand
acagagauaagcagucaug

SEQ ID NO: 1359888 - RNA, 19 nt, Homo sapiens
  misc_RNA (1)...(19): siRNA sense strand
acaucugggucaagagcua

SEQ ID NO: 1359889 - RNA, 19 nt, Homo sapiens
  misc_RNA (1)...(19): siRNA sense strand
gaccagcagcagagaugaa

SEQ ID NO: 1359890 - RNA, 19 nt, Homo sapiens
  misc_RNA (1)...(19): siRNA sense strand
acucugguuucaagcguaa

SEQ ID NO: 1359891 - RNA, 19 nt, Homo sapiens
  misc_RNA (1)...(19): siRNA sense strand
gggaccagcagcagagaug

SEQ ID NO: 1359892 - RNA, 19 nt, Homo sapiens
  misc_RNA (1)...(19): siRNA sense strand
gagaugaagacuuggaaaa

SEQ ID NO: 1359893 - RNA, 19 nt, Homo sapiens
  misc_RNA (1)...(19): siRNA sense strand
ggaccagcagcagagauga

SEQ ID NO: 1359894 - RNA, 19 nt, Homo sapiens
  misc_RNA (1)...(19): siRNA sense strand
ugucucuccuggcaugcua

SEQ ID NO: 1359895 - RNA, 19 nt, Homo sapiens
  misc_RNA (1)...(19): siRNA sense strand
gaugaagacuuggaaaacu

SEQ ID NO: 1359896 - RNA, 19 nt, Homo sapiens
  misc_RNA (1)...(19): siRNA sense strand
agucucaaaugcauuagag

SEQ ID NO: 1359897 - RNA, 19 nt, Homo sapiens
  misc_RNA (1)...(19): siRNA sense strand
cuucaucucccagcucaaa

SEQ ID NO: 1359898 - RNA, 19 nt, Homo sapiens
  misc_RNA (1)...(19): siRNA sense strand
ggcaugcuaccucaaguca

SEQ ID NO: 1359899 - RNA, 19 nt, Homo sapiens
  misc_RNA (1)...(19): siRNA sense strand
cagcagagaugaagacuug

SEQ ID NO: 1359900 - RNA, 19 nt, Homo sapiens
  misc_RNA (1)...(19): siRNA sense strand
aaacugcucucaccaccua

SEQ ID NO: 1359901 - RNA, 19 nt, Homo sapiens
  misc_RNA (1)...(19): siRNA sense strand
gcgccacccuccacaguaa

SEQ ID NO: 1359902 - RNA, 19 nt, Homo sapiens
  misc_RNA (1)...(19): siRNA sense strand
ccacagagauaagcaguca

SEQ ID NO: 1359903 - RNA, 19 nt, Homo sapiens
  misc_RNA (1)...(19): siRNA sense strand
gagauaagcagucaugagu

SEQ ID NO: 1359904 - RNA, 19 nt, Homo sapiens
  misc_RNA (1)...(19): siRNA sense strand
ccagggagcgguacauuug

SEQ ID NO: 1359905 - RNA, 19 nt, Homo sapiens
  misc_RNA (1)...(19): siRNA sense strand
caacacagcggccacaaca

SEQ ID NO: 1359906 - RNA, 19 nt, Homo sapiens
  misc_RNA (1)...(19): siRNA sense strand
ggccagcguugaaauggaa

SEQ ID NO: 1359907 - RNA, 19 nt, Homo sapiens
  misc_RNA (1)...(19): siRNA sense strand
gaacaaggccacgaauguc

SEQ ID NO: 1359908 - RNA, 19 nt, Homo sapiens
  misc_RNA (1)...(19): siRNA sense strand
cacaggaaccacagagaua

SEQ ID NO: 1359909 - RNA, 19 nt, Homo sapiens
  misc_RNA (1)...(19): siRNA sense strand
uagagacccugcccugguu

SEQ ID NO: 1359910 - RNA, 19 nt, Homo sapiens
  misc_RNA (1)...(19): siRNA sense strand
ugaacaaggccacgaaugu

SEQ ID NO: 1359911 - RNA, 19 nt, Homo sapiens
  misc_RNA (1)...(19): siRNA sense strand
caugcuaccucaagucaag

SEQ ID NO: 1359912 - RNA, 19 nt, Homo sapiens
  misc_RNA (1)...(19): siRNA sense strand
gcagagaugaagacuugga

SEQ ID NO: 1359913 - RNA, 19 nt, Homo sapiens
  misc_RNA (1)...(19): siRNA sense strand
ucucccagcucaaacaaca

SEQ ID NO: 1359914 - RNA, 19 nt, Homo sapiens
  misc_RNA (1)...(19): siRNA sense strand
uaccucaagucaaggcaaa

SEQ ID NO: 1359915 - RNA, 19 nt, Homo sapiens
  misc_RNA (1)...(19): siRNA sense strand
ccacaggaaccacagagau

SEQ ID NO: 1359916 - RNA, 19 nt, Homo sapiens
  misc_RNA (1)...(19): siRNA sense strand
acaggaaccacagagauaa

SEQ ID NO: 1359917 - RNA, 19 nt, Homo sapiens
  misc_RNA (1)...(19): siRNA sense strand
ggccacaacagcagcuauu

SEQ ID NO: 1359918 - RNA, 19 nt, Homo sapiens
  misc_RNA (1)...(19): siRNA sense strand
cccagucucaaaugcauua

SEQ ID NO: 1359919 - RNA, 19 nt, Homo sapiens
  misc_RNA (1)...(19): siRNA sense strand
acaucugggucaagagcua

SEQ ID NO: 1359920 - RNA, 19 nt, Homo sapiens
  misc_RNA (1)...(19): siRNA sense strand
acagagauaagcagucaug

SEQ ID NO: 1359921 - RNA, 19 nt, Homo sapiens
  misc_RNA (1)...(19): siRNA sense strand
acucugguuucaagcguaa

SEQ ID NO: 1359922 - RNA, 19 nt, Homo sapiens
  misc_RNA (1)...(19): siRNA sense strand
gaccagcagcagagaugaa

SEQ ID NO: 1359923 - RNA, 19 nt, Homo sapiens
  misc_RNA (1)...(19): siRNA sense strand
gggaccagcagcagagaug

SEQ ID NO: 1359924 - RNA, 19 nt, Homo sapiens
  misc_RNA (1)...(19): siRNA sense strand
gagaugaagacuuggaaaa

SEQ ID NO: 1359925 - RNA, 19 nt, Homo sapiens
  misc_RNA (1)...(19): siRNA sense strand
ggaccagcagcagagauga

SEQ ID NO: 1359926 - RNA, 19 nt, Homo sapiens
  misc_RNA (1)...(19): siRNA sense strand
ugucucuccuggcaugcua

SEQ ID NO: 1359927 - RNA, 19 nt, Homo sapiens
  misc_RNA (1)...(19): siRNA sense strand
gaugaagacuuggaaaacu

SEQ ID NO: 1359928 - RNA, 19 nt, Homo sapiens
  misc_RNA (1)...(19): siRNA sense strand
agucucaaaugcauuagag

SEQ ID NO: 1359929 - RNA, 19 nt, Homo sapiens
  misc_RNA (1)...(19): siRNA sense strand
cuucaucucccagcucaaa

SEQ ID NO: 1359930 - RNA, 19 nt, Homo sapiens
  misc_RNA (1)...(19): siRNA sense strand
ggcaugcuaccucaaguca

SEQ ID NO: 1359931 - RNA, 19 nt, Homo sapiens
  misc_RNA (1)...(19): siRNA sense strand
ccacggaucucaccuugaa

SEQ ID NO: 1359932 - RNA, 19 nt, Homo sapiens
  misc_RNA (1)...(19): siRNA sense strand
caggaaagcugcggcauug

SEQ ID NO: 1359933 - RNA, 19 nt, Homo sapiens
  misc_RNA (1)...(19): siRNA sense strand
gcccaucgcugccagagaa

SEQ ID NO: 1359934 - RNA, 19 nt, Homo sapiens
  misc_RNA (1)...(19): siRNA sense strand
ggaaacagccagccaagca

SEQ ID NO: 1359935 - RNA, 19 nt, Homo sapiens
  misc_RNA (1)...(19): siRNA sense strand
uggcuaugcuuucagcuuu

SEQ ID NO: 1359936 - RNA, 19 nt, Homo sapiens
  misc_RNA (1)...(19): siRNA sense strand
ggagagcugugggcagaga

SEQ ID NO: 1359937 - RNA, 19 nt, Homo sapiens
  misc_RNA (1)...(19): siRNA sense strand
cuaccuggcuggacuagug

SEQ ID NO: 1359938 - RNA, 19 nt, Homo sapiens
  misc_RNA (1)...(19): siRNA sense strand
cgacuuucuuuccaacuga

SEQ ID NO: 1359939 - RNA, 19 nt, Homo sapiens
  misc_RNA (1)...(19): siRNA sense strand
gggacuggcucuacuucga

SEQ ID NO: 1359940 - RNA, 19 nt, Homo sapiens
  misc_RNA (1)...(19): siRNA sense strand
gcuagaggcaguaaaugga

SEQ ID NO: 1359941 - RNA, 19 nt, Homo sapiens
  misc_RNA (1)...(19): siRNA sense strand
uagaggcaguaaauggaaa

SEQ ID NO: 1359942 - RNA, 19 nt, Homo sapiens
  misc_RNA (1)...(19): siRNA sense strand
uucgagaaguucaagauga

SEQ ID NO: 1359943 - RNA, 19 nt, Homo sapiens
  misc_RNA (1)...(19): siRNA sense strand
gcgcguccaucgacuuucu

SEQ ID NO: 1359944 - RNA, 19 nt, Homo sapiens
  misc_RNA (1)...(19): siRNA sense strand
ccaggaaagcugcggcauu

SEQ ID NO: 1359945 - RNA, 19 nt, Homo sapiens
  misc_RNA (1)...(19): siRNA sense strand
cuucaucgccaccuucaaa

SEQ ID NO: 1359946 - RNA, 19 nt, Homo sapiens
  misc_RNA (1)...(19): siRNA sense strand
ccagcuagaggcaguaaau

SEQ ID NO: 1359947 - RNA, 19 nt, Homo sapiens
  misc_RNA (1)...(19): siRNA sense strand
gaucauccagcacauagag

SEQ ID NO: 1359948 - RNA, 19 nt, Homo sapiens
  misc_RNA (1)...(19): siRNA sense strand
ggugguggccauugacuuc

SEQ ID NO: 1359949 - RNA, 19 nt, Homo sapiens
  misc_RNA (1)...(19): siRNA sense strand
ugaagcugcuguuccuagu

SEQ ID NO: 1359950 - RNA, 19 nt, Homo sapiens
  misc_RNA (1)...(19): siRNA sense strand
gcaggagcagcgugaacuu

SEQ ID NO: 1359951 - RNA, 19 nt, Homo sapiens
  misc_RNA (1)...(19): siRNA sense strand
ucuaguggcuaugcuuuca

SEQ ID NO: 1359952 - RNA, 19 nt, Homo sapiens
  misc_RNA (1)...(19): siRNA sense strand
gggaugcuccgaaugucuu

SEQ ID NO: 1359953 - RNA, 19 nt, Homo sapiens
  misc_RNA (1)...(19): siRNA sense strand
ucgcugcccuucuccuuca

SEQ ID NO: 1359954 - RNA, 19 nt, Homo sapiens
  misc_RNA (1)...(19): siRNA sense strand
gggccucaccauccucaaa

SEQ ID NO: 1359955 - RNA, 19 nt, Homo sapiens
  misc_RNA (1)...(19): siRNA sense strand
ccaucgacuuucuuuccaa

SEQ ID NO: 1359956 - RNA, 19 nt, Homo sapiens
  misc_RNA (1)...(19): siRNA sense strand
gcguacucaucaaccugua

SEQ ID NO: 1359957 - RNA, 19 nt, Homo sapiens
  misc_RNA (1)...(19): siRNA sense strand
ggcuaugcuuucagcuuug

SEQ ID NO: 1359958 - RNA, 19 nt, Homo sapiens
  misc_RNA (1)...(19): siRNA sense strand
ccugaggccauccacauga

SEQ ID NO: 1359959 - RNA, 19 nt, Homo sapiens
  misc_RNA (1)...(19): siRNA sense strand
ggagcagcgugaacuucgu

SEQ ID NO: 1359960 - RNA, 19 nt, Homo sapiens
  misc_RNA (1)...(19): siRNA sense strand
cuagaggcaguaaauggaa

SEQ ID NO: 1359961 - RNA, 19 nt, Homo sapiens
  misc_RNA (1)...(19): siRNA sense strand
gaagcugcuguuccuagug

SEQ ID NO: 1359962 - RNA, 19 nt, Homo sapiens
  misc_RNA (1)...(19): siRNA sense strand
gguggagucaggcguagga

SEQ ID NO: 1359963 - RNA, 19 nt, Homo sapiens
  misc_RNA (1)...(19): siRNA sense strand
acucagaugucaagaagua

SEQ ID NO: 1359964 - RNA, 19 nt, Homo sapiens
  misc_RNA (1)...(19): siRNA sense strand
gaaaggccuucaacugcaa

SEQ ID NO: 1359965 - RNA, 19 nt, Homo sapiens
  misc_RNA (1)...(19): siRNA sense strand
gaaugucccugcuccacaa

SEQ ID NO: 1359966 - RNA, 19 nt, Homo sapiens
  misc_RNA (1)...(19): siRNA sense strand
gcaaauacugcaacaagga

SEQ ID NO: 1359967 - RNA, 19 nt, Homo sapiens
  misc_RNA (1)...(19): siRNA sense strand
ccacucagaugucaagaag

SEQ ID NO: 1359968 - RNA, 19 nt, Homo sapiens
  misc_RNA (1)...(19): siRNA sense strand
caaauacugcaacaaggaa

SEQ ID NO: 1359969 - RNA, 19 nt, Homo sapiens
  misc_RNA (1)...(19): siRNA sense strand
ccaaucggaagccuaacua

SEQ ID NO: 1359970 - RNA, 19 nt, Homo sapiens
  misc_RNA (1)...(19): siRNA sense strand
gacccacacuggcgagaag

SEQ ID NO: 1359971 - RNA, 19 nt, Homo sapiens
  misc_RNA (1)...(19): siRNA sense strand
gcgagcugcaggacucuaa

SEQ ID NO: 1359972 - RNA, 19 nt, Homo sapiens
  misc_RNA (1)...(19): siRNA sense strand
gaguccggcugcucaggau

SEQ ID NO: 1359973 - RNA, 19 nt, Homo sapiens
  misc_RNA (1)...(19): siRNA sense strand
aauacugcaacaaggaaua

SEQ ID NO: 1359974 - RNA, 19 nt, Homo sapiens
  misc_RNA (1)...(19): siRNA sense strand
gagcugcaggacucuaauc

SEQ ID NO: 1359975 - RNA, 19 nt, Homo sapiens
  misc_RNA (1)...(19): siRNA sense strand
ggacccacacuggcgagaa

SEQ ID NO: 1359976 - RNA, 19 nt, Homo sapiens
  misc_RNA (1)...(19): siRNA sense strand
ggccuucaacugcaaauac

SEQ ID NO: 1359977 - RNA, 19 nt, Homo sapiens
  misc_RNA (1)...(19): siRNA sense strand
caaagugugugcaagcaaa

SEQ ID NO: 1359978 - RNA, 19 nt, Homo sapiens
  misc_RNA (1)...(19): siRNA sense strand
gaagauggacaaauauguu

SEQ ID NO: 1359979 - RNA, 19 nt, Homo sapiens
  misc_RNA (1)...(19): siRNA sense strand
uaacagaggcuuccuuuca

SEQ ID NO: 1359980 - RNA, 19 nt, Homo sapiens
  misc_RNA (1)...(19): siRNA sense strand
gauuagaaaugaagaugga

SEQ ID NO: 1359981 - RNA, 19 nt, Homo sapiens
  misc_RNA (1)...(19): siRNA sense strand
ccacguguuucgcaacuaa

SEQ ID NO: 1359982 - RNA, 19 nt, Homo sapiens
  misc_RNA (1)...(19): siRNA sense strand
gauaacagaggcuuccuuu

SEQ ID NO: 1359983 - RNA, 19 nt, Homo sapiens
  misc_RNA (1)...(19): siRNA sense strand
gcauuaguccuaucuugua

SEQ ID NO: 1359984 - RNA, 19 nt, Homo sapiens
  misc_RNA (1)...(19): siRNA sense strand
gucaacagauacaagauuu

SEQ ID NO: 1359985 - RNA, 19 nt, Homo sapiens
  misc_RNA (1)...(19): siRNA sense strand
uuaggaaucucuccacuau

SEQ ID NO: 1359986 - RNA, 19 nt, Homo sapiens
  misc_RNA (1)...(19): siRNA sense strand
ggaagcauuucauuguaau

SEQ ID NO: 1359987 - RNA, 19 nt, Homo sapiens
  misc_RNA (1)...(19): siRNA sense strand
gauacaagauuuccuuacu

SEQ ID NO: 1359988 - RNA, 19 nt, Homo sapiens
  misc_RNA (1)...(19): siRNA sense strand
ugaagaaguuccugaaucu

SEQ ID NO: 1359989 - RNA, 19 nt, Homo sapiens
  misc_RNA (1)...(19): siRNA sense strand
gaaguucccaccuugacua

SEQ ID NO: 1359990 - RNA, 19 nt, Homo sapiens
  misc_RNA (1)...(19): siRNA sense strand
cgagugaaguccuacaaau

SEQ ID NO: 1359991 - RNA, 19 nt, Homo sapiens
  misc_RNA (1)...(19): siRNA sense strand
gauggaagcauuucauugu

SEQ ID NO: 1359992 - RNA, 19 nt, Homo sapiens
  misc_RNA (1)...(19): siRNA sense strand
agugaaguccuacaaauua

SEQ ID NO: 1359993 - RNA, 19 nt, Homo sapiens
  misc_RNA (1)...(19): siRNA sense strand
uacaagauuuccuuacuga

SEQ ID NO: 1359994 - RNA, 19 nt, Homo sapiens
  misc_RNA (1)...(19): siRNA sense strand
gcauuucauuguaaucaga

SEQ ID NO: 1359995 - RNA, 19 nt, Homo sapiens
  misc_RNA (1)...(19): siRNA sense strand
uggaagcauuucauuguaa

SEQ ID NO: 1359996 - RNA, 19 nt, Homo sapiens
  misc_RNA (1)...(19): siRNA sense strand
aguccuaucuuguaaggua

SEQ ID NO: 1359997 - RNA, 19 nt, Homo sapiens
  misc_RNA (1)...(19): siRNA sense strand
agacccaagucaacagaua

SEQ ID NO: 1359998 - RNA, 19 nt, Homo sapiens
  misc_RNA (1)...(19): siRNA sense strand
gagugaaguccuacaaauu

SEQ ID NO: 1359999 - RNA, 19 nt, Homo sapiens
  misc_RNA (1)...(19): siRNA sense strand
gaaaugaagauggacaaau

SEQ ID NO: 1360000 - RNA, 19 nt, Homo sapiens
  misc_RNA (1)...(19): siRNA sense strand
uaacugcacuucgaaugug

SEQ ID NO: 1360001 - RNA, 19 nt, Homo sapiens
  misc_RNA (1)...(19): siRNA sense strand
cagcaccaauguuauuaau

SEQ ID NO: 1360002 - RNA, 19 nt, Homo sapiens
  misc_RNA (1)...(19): siRNA sense strand
cauuaguccuaucuuguaa

SEQ ID NO: 1360003 - RNA, 19 nt, Homo sapiens
  misc_RNA (1)...(19): siRNA sense strand
caagccuuauuucagguua

SEQ ID NO: 1360004 - RNA, 19 nt, Homo sapiens
  misc_RNA (1)...(19): siRNA sense strand
caagucaacagauacaaga

SEQ ID NO: 1360005 - RNA, 19 nt, Homo sapiens
  misc_RNA (1)...(19): siRNA sense strand
cagaggcuuccuuucauua

SEQ ID NO: 1360006 - RNA, 19 nt, Homo sapiens
  misc_RNA (1)...(19): siRNA sense strand
gacuuuaacugcacuucga

SEQ ID NO: 1360007 - RNA, 19 nt, Homo sapiens
  misc_RNA (1)...(19): siRNA sense strand
gcagcaccaauguuauuaa

SEQ ID NO: 1360008 - RNA, 19 nt, Homo sapiens
  misc_RNA (1)...(19): siRNA sense strand
gaaucucuccacuaucuug

SEQ ID NO: 1360009 - RNA, 19 nt, Homo sapiens
  misc_RNA (1)...(19): siRNA sense strand
acagaggcuuccuuucauu

SEQ ID NO: 1360010 - RNA, 19 nt, Homo sapiens
  misc_RNA (1)...(19): siRNA sense strand
gaggagacccuggacuuug

SEQ ID NO: 1360011 - RNA, 19 nt, Homo sapiens
  misc_RNA (1)...(19): siRNA sense strand
agacgaggaugaucaguac

SEQ ID NO: 1360012 - RNA, 19 nt, Homo sapiens
  misc_RNA (1)...(19): siRNA sense strand
cugcugcccugaugaagaa

SEQ ID NO: 1360013 - RNA, 19 nt, Homo sapiens
  misc_RNA (1)...(19): siRNA sense strand
caaaaucaauacacaggaa

SEQ ID NO: 1360014 - RNA, 19 nt, Homo sapiens
  misc_RNA (1)...(19): siRNA sense strand
aggaaucucuccacuaucu

SEQ ID NO: 1360015 - RNA, 19 nt, Homo sapiens
  misc_RNA (1)...(19): siRNA sense strand
aggagacccuggacuuuga

SEQ ID NO: 1360016 - RNA, 19 nt, Homo sapiens
  misc_RNA (1)...(19): siRNA sense strand
acaaaggcauuaguccuau

SEQ ID NO: 1360017 - RNA, 19 nt, Homo sapiens
  misc_RNA (1)...(19): siRNA sense strand
guaaucagacccaagucaa

SEQ ID NO: 1360018 - RNA, 19 nt, Homo sapiens
  misc_RNA (1)...(19): siRNA sense strand
aauuggauaugacgaguga

SEQ ID NO: 1360019 - RNA, 19 nt, Homo sapiens
  misc_RNA (1)...(19): siRNA sense strand
uacaaaggcauuaguccua

SEQ ID NO: 1360020 - RNA, 19 nt, Homo sapiens
  misc_RNA (1)...(19): siRNA sense strand
uaugacgagugaaguccua

SEQ ID NO: 1360021 - RNA, 19 nt, Homo sapiens
  misc_RNA (1)...(19): siRNA sense strand
gaugaagaaguuccugaau

SEQ ID NO: 1360022 - RNA, 19 nt, Homo sapiens
  misc_RNA (1)...(19): siRNA sense strand
gaggcuuccuuucauuaca

SEQ ID NO: 1360023 - RNA, 19 nt, Homo sapiens
  misc_RNA (1)...(19): siRNA sense strand
cugaaacccucuacaaagg

SEQ ID NO: 1360024 - RNA, 19 nt, Homo sapiens
  misc_RNA (1)...(19): siRNA sense strand
cagauacaagauuuccuua

SEQ ID NO: 1360025 - RNA, 19 nt, Homo sapiens
  misc_RNA (1)...(19): siRNA sense strand
ggccagccuugacaacguu

SEQ ID NO: 1360026 - RNA, 19 nt, Homo sapiens
  misc_RNA (1)...(19): siRNA sense strand
ucucuccacuaucuugaaa

SEQ ID NO: 1360027 - RNA, 19 nt, Homo sapiens
  misc_RNA (1)...(19): siRNA sense strand
aagaaguuccugaaucuga

SEQ ID NO: 1360028 - RNA, 19 nt, Homo sapiens
  misc_RNA (1)...(19): siRNA sense strand
uuacugaaacccucuacaa

SEQ ID NO: 1360029 - RNA, 19 nt, Homo sapiens
  misc_RNA (1)...(19): siRNA sense strand
gcaaagugugugcaagcaa

SEQ ID NO: 1360030 - RNA, 19 nt, Homo sapiens
  misc_RNA (1)...(19): siRNA sense strand
caaaggcauuaguccuauc

SEQ ID NO: 1360031 - RNA, 19 nt, Homo sapiens
  misc_RNA (1)...(19): siRNA sense strand
gugaaguccuacaaauuac

SEQ ID NO: 1360032 - RNA, 19 nt, Homo sapiens
  misc_RNA (1)...(19): siRNA sense strand
auggaagcauuucauugua

SEQ ID NO: 1360033 - RNA, 19 nt, Homo sapiens
  misc_RNA (1)...(19): siRNA sense strand
auacaagauuuccuuacug

SEQ ID NO: 1360034 - RNA, 19 nt, Homo sapiens
  misc_RNA (1)...(19): siRNA sense strand
ugaagcauuuucugaauug

SEQ ID NO: 1360035 - RNA, 19 nt, Homo sapiens
  misc_RNA (1)...(19): siRNA sense strand
aggcauuaguccuaucuug

SEQ ID NO: 1360036 - RNA, 19 nt, Homo sapiens
  misc_RNA (1)...(19): siRNA sense strand
augaagaaguuccugaauc

SEQ ID NO: 1360037 - RNA, 19 nt, Homo sapiens
  misc_RNA (1)...(19): siRNA sense strand
guuaggaaucucuccacua

SEQ ID NO: 1360038 - RNA, 19 nt, Homo sapiens
  misc_RNA (1)...(19): siRNA sense strand
gacccuggacuuugauuuc

SEQ ID NO: 1360039 - RNA, 19 nt, Homo sapiens
  misc_RNA (1)...(19): siRNA sense strand
ugaagauggacaaauaugu

SEQ ID NO: 1360040 - RNA, 19 nt, Homo sapiens
  misc_RNA (1)...(19): siRNA sense strand
cugauuugauggaagcauu

SEQ ID NO: 1360041 - RNA, 19 nt, Homo sapiens
  misc_RNA (1)...(19): siRNA sense strand
ugaggagacccuggacuuu

SEQ ID NO: 1360042 - RNA, 19 nt, Homo sapiens
  misc_RNA (1)...(19): siRNA sense strand
uaucaaaguaacaguggaa

SEQ ID NO: 1360043 - RNA, 19 nt, Homo sapiens
  misc_RNA (1)...(19): siRNA sense strand
ggauaugacgagugaaguc

SEQ ID NO: 1360044 - RNA, 19 nt, Homo sapiens
  misc_RNA (1)...(19): siRNA sense strand
aacagaggcuuccuuucau

SEQ ID NO: 1360045 - RNA, 19 nt, Homo sapiens
  misc_RNA (1)...(19): siRNA sense strand
aagacgaggaugaucagua

SEQ ID NO: 1360046 - RNA, 19 nt, Homo sapiens
  misc_RNA (1)...(19): siRNA sense strand
caccuugacuaucccaaag

SEQ ID NO: 1360047 - RNA, 19 nt, Homo sapiens
  misc_RNA (1)...(19): siRNA sense strand
uauuacugcugcccugaug

SEQ ID NO: 1360048 - RNA, 19 nt, Homo sapiens
  misc_RNA (1)...(19): siRNA sense strand
ggcauuaguccuaucuugu

SEQ ID NO: 1360049 - RNA, 19 nt, Homo sapiens
  misc_RNA (1)...(19): siRNA sense strand
acagauacaagauuuccuu

SEQ ID NO: 1360050 - RNA, 19 nt, Homo sapiens
  misc_RNA (1)...(19): siRNA sense strand
gugaagcauuuucugaauu

SEQ ID NO: 1360051 - RNA, 19 nt, Homo sapiens
  misc_RNA (1)...(19): siRNA sense strand
gaagaaguuccugaaucug

SEQ ID NO: 1360052 - RNA, 19 nt, Homo sapiens
  misc_RNA (1)...(19): siRNA sense strand
uacugaaacccucuacaaa

SEQ ID NO: 1360053 - RNA, 19 nt, Homo sapiens
  misc_RNA (1)...(19): siRNA sense strand
cugcagcaccaauguuauu

SEQ ID NO: 1360054 - RNA, 19 nt, Homo sapiens
  misc_RNA (1)...(19): siRNA sense strand
ugauggaagcauuucauug

SEQ ID NO: 1360055 - RNA, 19 nt, Homo sapiens
  misc_RNA (1)...(19): siRNA sense strand
ccaccuugacuaucccaaa

SEQ ID NO: 1360056 - RNA, 19 nt, Homo sapiens
  misc_RNA (1)...(19): siRNA sense strand
caaaguaacaguggaaaau

SEQ ID NO: 1360057 - RNA, 19 nt, Homo sapiens
  misc_RNA (1)...(19): siRNA sense strand
gaaguccuacaaauuacca

SEQ ID NO: 1360058 - RNA, 19 nt, Homo sapiens
  misc_RNA (1)...(19): siRNA sense strand
ugacccaacagauccaaga

SEQ ID NO: 1360059 - RNA, 19 nt, Homo sapiens
  misc_RNA (1)...(19): siRNA sense strand
ugaugaagaaguuccugaa

SEQ ID NO: 1360060 - RNA, 19 nt, Homo sapiens
  misc_RNA (1)...(19): siRNA sense strand
gugacagucugcaaaauca

SEQ ID NO: 1360061 - RNA, 19 nt, Homo sapiens
  misc_RNA (1)...(19): siRNA sense strand
guucccaccuugacuaucc

SEQ ID NO: 1360062 - RNA, 19 nt, Homo sapiens
  misc_RNA (1)...(19): siRNA sense strand
cuccugacaagccuuauuu

SEQ ID NO: 1360063 - RNA, 19 nt, Homo sapiens
  misc_RNA (1)...(19): siRNA sense strand
gacgagugaaguccuacaa

SEQ ID NO: 1360064 - RNA, 19 nt, Homo sapiens
  misc_RNA (1)...(19): siRNA sense strand
acugaaacccucuacaaag

SEQ ID NO: 1360065 - RNA, 19 nt, Homo sapiens
  misc_RNA (1)...(19): siRNA sense strand
agucaacagauacaagauu

SEQ ID NO: 1360066 - RNA, 19 nt, Homo sapiens
  misc_RNA (1)...(19): siRNA sense strand
aaggaggaguggugacagu

SEQ ID NO: 1360067 - RNA, 19 nt, Homo sapiens
  misc_RNA (1)...(19): siRNA sense strand
ccaagucaacagauacaag

SEQ ID NO: 1360068 - RNA, 19 nt, Homo sapiens
  misc_RNA (1)...(19): siRNA sense strand
ccugacaagccuuauuuca

SEQ ID NO: 1360069 - RNA, 19 nt, Homo sapiens
  misc_RNA (1)...(19): siRNA sense strand
gaagauggacaaauauguu

SEQ ID NO: 1360070 - RNA, 19 nt, Homo sapiens
  misc_RNA (1)...(19): siRNA sense strand
uaacagaggcuuccuuuca

SEQ ID NO: 1360071 - RNA, 19 nt, Homo sapiens
  misc_RNA (1)...(19): siRNA sense strand
gauuagaaaugaagaugga

SEQ ID NO: 1360072 - RNA, 19 nt, Homo sapiens
  misc_RNA (1)...(19): siRNA sense strand
gucaacagauacaagauuu

SEQ ID NO: 1360073 - RNA, 19 nt, Homo sapiens
  misc_RNA (1)...(19): siRNA sense strand
gauaacagaggcuuccuuu

SEQ ID NO: 1360074 - RNA, 19 nt, Homo sapiens
  misc_RNA (1)...(19): siRNA sense strand
gcauuaguccuaucuugua

SEQ ID NO: 1360075 - RNA, 19 nt, Homo sapiens
  misc_RNA (1)...(19): siRNA sense strand
ggaagcauuucauuguaau

SEQ ID NO: 1360076 - RNA, 19 nt, Homo sapiens
  misc_RNA (1)...(19): siRNA sense strand
gauacaagauuuccuuacu

SEQ ID NO: 1360077 - RNA, 19 nt, Homo sapiens
  misc_RNA (1)...(19): siRNA sense strand
ugaagaaguuccugaaucu

SEQ ID NO: 1360078 - RNA, 19 nt, Homo sapiens
  misc_RNA (1)...(19): siRNA sense strand
gaaguucccaccuugacua

SEQ ID NO: 1360079 - RNA, 19 nt, Homo sapiens
  misc_RNA (1)...(19): siRNA sense strand
cgagugaaguccuacaaau

SEQ ID NO: 1360080 - RNA, 19 nt, Homo sapiens
  misc_RNA (1)...(19): siRNA sense strand
gauggaagcauuucauugu

SEQ ID NO: 1360081 - RNA, 19 nt, Homo sapiens
  misc_RNA (1)...(19): siRNA sense strand
agugaaguccuacaaauua

SEQ ID NO: 1360082 - RNA, 19 nt, Homo sapiens
  misc_RNA (1)...(19): siRNA sense strand
uacaagauuuccuuacuga

SEQ ID NO: 1360083 - RNA, 19 nt, Homo sapiens
  misc_RNA (1)...(19): siRNA sense strand
gcauuucauuguaaucaga

SEQ ID NO: 1360084 - RNA, 19 nt, Homo sapiens
  misc_RNA (1)...(19): siRNA sense strand
uggaagcauuucauuguaa

SEQ ID NO: 1360085 - RNA, 19 nt, Homo sapiens
  misc_RNA (1)...(19): siRNA sense strand
aguccuaucuuguaaggua

SEQ ID NO: 1360086 - RNA, 19 nt, Homo sapiens
  misc_RNA (1)...(19): siRNA sense strand
agacccaagucaacagaua

SEQ ID NO: 1360087 - RNA, 19 nt, Homo sapiens
  misc_RNA (1)...(19): siRNA sense strand
gagugaaguccuacaaauu

SEQ ID NO: 1360088 - RNA, 19 nt, Homo sapiens
  misc_RNA (1)...(19): siRNA sense strand
gaaaugaagauggacaaau

SEQ ID NO: 1360089 - RNA, 19 nt, Homo sapiens
  misc_RNA (1)...(19): siRNA sense strand
cagcaccaauguuauuaau

SEQ ID NO: 1360090 - RNA, 19 nt, Homo sapiens
  misc_RNA (1)...(19): siRNA sense strand
cauuaguccuaucuuguaa

SEQ ID NO: 1360091 - RNA, 19 nt, Homo sapiens
  misc_RNA (1)...(19): siRNA sense strand
caagccuuauuucagguua

SEQ ID NO: 1360092 - RNA, 19 nt, Homo sapiens
  misc_RNA (1)...(19): siRNA sense strand
caagucaacagauacaaga

SEQ ID NO: 1360093 - RNA, 19 nt, Homo sapiens
  misc_RNA (1)...(19): siRNA sense strand
cagaggcuuccuuucauua

SEQ ID NO: 1360094 - RNA, 19 nt, Homo sapiens
  misc_RNA (1)...(19): siRNA sense strand
gcagcaccaauguuauuaa

SEQ ID NO: 1360095 - RNA, 19 nt, Homo sapiens
  misc_RNA (1)...(19): siRNA sense strand
gaggagacccuggacuuug

SEQ ID NO: 1360096 - RNA, 19 nt, Homo sapiens
  misc_RNA (1)...(19): siRNA sense strand
acagaggcuuccuuucauu

SEQ ID NO: 1360097 - RNA, 19 nt, Homo sapiens
  misc_RNA (1)...(19): siRNA sense strand
caaaaucaauacacaggaa

SEQ ID NO: 1360098 - RNA, 19 nt, Homo sapiens
  misc_RNA (1)...(19): siRNA sense strand
cugcugcccugaugaagaa

SEQ ID NO: 1360099 - RNA, 19 nt, Homo sapiens
  misc_RNA (1)...(19): siRNA sense strand
guaaucagacccaagucaa

SEQ ID NO: 1360100 - RNA, 19 nt, Homo sapiens
  misc_RNA (1)...(19): siRNA sense strand
aggagacccuggacuuuga

SEQ ID NO: 1360101 - RNA, 19 nt, Homo sapiens
  misc_RNA (1)...(19): siRNA sense strand
acaaaggcauuaguccuau

SEQ ID NO: 1360102 - RNA, 19 nt, Homo sapiens
  misc_RNA (1)...(19): siRNA sense strand
aauuggauaugacgaguga

SEQ ID NO: 1360103 - RNA, 19 nt, Homo sapiens
  misc_RNA (1)...(19): siRNA sense strand
uacaaaggcauuaguccua

SEQ ID NO: 1360104 - RNA, 19 nt, Homo sapiens
  misc_RNA (1)...(19): siRNA sense strand
uaugacgagugaaguccua

SEQ ID NO: 1360105 - RNA, 19 nt, Homo sapiens
  misc_RNA (1)...(19): siRNA sense strand
gaugaagaaguuccugaau

SEQ ID NO: 1360106 - RNA, 19 nt, Homo sapiens
  misc_RNA (1)...(19): siRNA sense strand
gaggcuuccuuucauuaca

SEQ ID NO: 1360107 - RNA, 19 nt, Homo sapiens
  misc_RNA (1)...(19): siRNA sense strand
cugaaacccucuacaaagg

SEQ ID NO: 1360108 - RNA, 19 nt, Homo sapiens
  misc_RNA (1)...(19): siRNA sense strand
cagauacaagauuuccuua

SEQ ID NO: 1360109 - RNA, 19 nt, Homo sapiens
  misc_RNA (1)...(19): siRNA sense strand
uuacugaaacccucuacaa

SEQ ID NO: 1360110 - RNA, 19 nt, Homo sapiens
  misc_RNA (1)...(19): siRNA sense strand
aagaaguuccugaaucuga

SEQ ID NO: 1360111 - RNA, 19 nt, Homo sapiens
  misc_RNA (1)...(19): siRNA sense strand
gugaaguccuacaaauuac

SEQ ID NO: 1360112 - RNA, 19 nt, Homo sapiens
  misc_RNA (1)...(19): siRNA sense strand
caaaggcauuaguccuauc

SEQ ID NO: 1360113 - RNA, 19 nt, Homo sapiens
  misc_RNA (1)...(19): siRNA sense strand
auggaagcauuucauugua

SEQ ID NO: 1360114 - RNA, 19 nt, Homo sapiens
  misc_RNA (1)...(19): siRNA sense strand
auacaagauuuccuuacug

SEQ ID NO: 1360115 - RNA, 19 nt, Homo sapiens
  misc_RNA (1)...(19): siRNA sense strand
ugaagcauuuucugaauug

SEQ ID NO: 1360116 - RNA, 19 nt, Homo sapiens
  misc_RNA (1)...(19): siRNA sense strand
aggcauuaguccuaucuug

SEQ ID NO: 1360117 - RNA, 19 nt, Homo sapiens
  misc_RNA (1)...(19): siRNA sense strand
augaagaaguuccugaauc

SEQ ID NO: 1360118 - RNA, 19 nt, Homo sapiens
  misc_RNA (1)...(19): siRNA sense strand
cugauuugauggaagcauu

SEQ ID NO: 1360119 - RNA, 19 nt, Homo sapiens
  misc_RNA (1)...(19): siRNA sense strand
ugaagauggacaaauaugu

SEQ ID NO: 1360120 - RNA, 19 nt, Homo sapiens
  misc_RNA (1)...(19): siRNA sense strand
gacccuggacuuugauuuc

SEQ ID NO: 1360121 - RNA, 19 nt, Homo sapiens
  misc_RNA (1)...(19): siRNA sense strand
ugaggagacccuggacuuu

SEQ ID NO: 1360122 - RNA, 19 nt, Homo sapiens
  misc_RNA (1)...(19): siRNA sense strand
ggauaugacgagugaaguc

SEQ ID NO: 1360123 - RNA, 19 nt, Homo sapiens
  misc_RNA (1)...(19): siRNA sense strand
aacagaggcuuccuuucau

SEQ ID NO: 1360124 - RNA, 19 nt, Homo sapiens
  misc_RNA (1)...(19): siRNA sense strand
caccuugacuaucccaaag

SEQ ID NO: 1360125 - RNA, 19 nt, Homo sapiens
  misc_RNA (1)...(19): siRNA sense strand
uauuacugcugcccugaug

SEQ ID NO: 1360126 - RNA, 19 nt, Homo sapiens
  misc_RNA (1)...(19): siRNA sense strand
ggcauuaguccuaucuugu

SEQ ID NO: 1360127 - RNA, 19 nt, Homo sapiens
  misc_RNA (1)...(19): siRNA sense strand
acagauacaagauuuccuu

SEQ ID NO: 1360128 - RNA, 19 nt, Homo sapiens
  misc_RNA (1)...(19): siRNA sense strand
gugaagcauuuucugaauu

SEQ ID NO: 1360129 - RNA, 19 nt, Homo sapiens
  misc_RNA (1)...(19): siRNA sense strand
gaagaaguuccugaaucug

SEQ ID NO: 1360130 - RNA, 19 nt, Homo sapiens
  misc_RNA (1)...(19): siRNA sense strand
uacugaaacccucuacaaa

SEQ ID NO: 1360131 - RNA, 19 nt, Homo sapiens
  misc_RNA (1)...(19): siRNA sense strand
ccaccuugacuaucccaaa

SEQ ID NO: 1360132 - RNA, 19 nt, Homo sapiens
  misc_RNA (1)...(19): siRNA sense strand
cugcagcaccaauguuauu

SEQ ID NO: 1360133 - RNA, 19 nt, Homo sapiens
  misc_RNA (1)...(19): siRNA sense strand
ugauggaagcauuucauug

SEQ ID NO: 1360134 - RNA, 19 nt, Homo sapiens
  misc_RNA (1)...(19): siRNA sense strand
gaaguccuacaaauuacca

SEQ ID NO: 1360135 - RNA, 19 nt, Homo sapiens
  misc_RNA (1)...(19): siRNA sense strand
ugaugaagaaguuccugaa

SEQ ID NO: 1360136 - RNA, 19 nt, Homo sapiens
  misc_RNA (1)...(19): siRNA sense strand
cuccugacaagccuuauuu

SEQ ID NO: 1360137 - RNA, 19 nt, Homo sapiens
  misc_RNA (1)...(19): siRNA sense strand
gugacagucugcaaaauca

SEQ ID NO: 1360138 - RNA, 19 nt, Homo sapiens
  misc_RNA (1)...(19): siRNA sense strand
guucccaccuugacuaucc

SEQ ID NO: 1360139 - RNA, 19 nt, Homo sapiens
  misc_RNA (1)...(19): siRNA sense strand
ccugacaagccuuauuuca

SEQ ID NO: 1360140 - RNA, 19 nt, Homo sapiens
  misc_RNA (1)...(19): siRNA sense strand
acugaaacccucuacaaag

SEQ ID NO: 1360141 - RNA, 19 nt, Homo sapiens
  misc_RNA (1)...(19): siRNA sense strand
agucaacagauacaagauu

SEQ ID NO: 1360142 - RNA, 19 nt, Homo sapiens
  misc_RNA (1)...(19): siRNA sense strand
gacgagugaaguccuacaa

SEQ ID NO: 1360143 - RNA, 19 nt, Homo sapiens
  misc_RNA (1)...(19): siRNA sense strand
ccaagucaacagauacaag

SEQ ID NO: 1360144 - RNA, 19 nt, Homo sapiens
  misc_RNA (1)...(19): siRNA sense strand
aaggaggaguggugacagu

SEQ ID NO: 1360145 - RNA, 19 nt, Homo sapiens
  misc_RNA (1)...(19): siRNA sense strand
caaagugugugcaagcaaa

SEQ ID NO: 1360146 - RNA, 19 nt, Homo sapiens
  misc_RNA (1)...(19): siRNA sense strand
gaagauggacaaauauguu

SEQ ID NO: 1360147 - RNA, 19 nt, Homo sapiens
  misc_RNA (1)...(19): siRNA sense strand
uaacagaggcuuccuuuca

SEQ ID NO: 1360148 - RNA, 19 nt, Homo sapiens
  misc_RNA (1)...(19): siRNA sense strand
gauuagaaaugaagaugga

SEQ ID NO: 1360149 - RNA, 19 nt, Homo sapiens
  misc_RNA (1)...(19): siRNA sense strand
ccacguguuucgcaacuaa

SEQ ID NO: 1360150 - RNA, 19 nt, Homo sapiens
  misc_RNA (1)...(19): siRNA sense strand
gauaacagaggcuuccuuu

SEQ ID NO: 1360151 - RNA, 19 nt, Homo sapiens
  misc_RNA (1)...(19): siRNA sense strand
gcauuaguccuaucuugua

SEQ ID NO: 1360152 - RNA, 19 nt, Homo sapiens
  misc_RNA (1)...(19): siRNA sense strand
gucaacagauacaagauuu

SEQ ID NO: 1360153 - RNA, 19 nt, Homo sapiens
  misc_RNA (1)...(19): siRNA sense strand
uuaggaaucucuccacuau

SEQ ID NO: 1360154 - RNA, 19 nt, Homo sapiens
  misc_RNA (1)...(19): siRNA sense strand
ggaagcauuucauuguaau

SEQ ID NO: 1360155 - RNA, 19 nt, Homo sapiens
  misc_RNA (1)...(19): siRNA sense strand
gauacaagauuuccuuacu

SEQ ID NO: 1360156 - RNA, 19 nt, Homo sapiens
  misc_RNA (1)...(19): siRNA sense strand
ugaagaaguuccugaaucu

SEQ ID NO: 1360157 - RNA, 19 nt, Homo sapiens
  misc_RNA (1)...(19): siRNA sense strand
gaaguucccaccuugacua

SEQ ID NO: 1360158 - RNA, 19 nt, Homo sapiens
  misc_RNA (1)...(19): siRNA sense strand
cgagugaaguccuacaaau

SEQ ID NO: 1360159 - RNA, 19 nt, Homo sapiens
  misc_RNA (1)...(19): siRNA sense strand
gauggaagcauuucauugu

SEQ ID NO: 1360160 - RNA, 19 nt, Homo sapiens
  misc_RNA (1)...(19): siRNA sense strand
agugaaguccuacaaauua

SEQ ID NO: 1360161 - RNA, 19 nt, Homo sapiens
  misc_RNA (1)...(19): siRNA sense strand
uacaagauuuccuuacuga

SEQ ID NO: 1360162 - RNA, 19 nt, Homo sapiens
  misc_RNA (1)...(19): siRNA sense strand
gcauuucauuguaaucaga

SEQ ID NO: 1360163 - RNA, 19 nt, Homo sapiens
  misc_RNA (1)...(19): siRNA sense strand
uggaagcauuucauuguaa

SEQ ID NO: 1360164 - RNA, 19 nt, Homo sapiens
  misc_RNA (1)...(19): siRNA sense strand
aguccuaucuuguaaggua

SEQ ID NO: 1360165 - RNA, 19 nt, Homo sapiens
  misc_RNA (1)...(19): siRNA sense strand
agacccaagucaacagaua

SEQ ID NO: 1360166 - RNA, 19 nt, Homo sapiens
  misc_RNA (1)...(19): siRNA sense strand
gagugaaguccuacaaauu

SEQ ID NO: 1360167 - RNA, 19 nt, Homo sapiens
  misc_RNA (1)...(19): siRNA sense strand
gaaaugaagauggacaaau

SEQ ID NO: 1360168 - RNA, 19 nt, Homo sapiens
  misc_RNA (1)...(19): siRNA sense strand
uaacugcacuucgaaugug

SEQ ID NO: 1360169 - RNA, 19 nt, Homo sapiens
  misc_RNA (1)...(19): siRNA sense strand
cagcaccaauguuauuaau

SEQ ID NO: 1360170 - RNA, 19 nt, Homo sapiens
  misc_RNA (1)...(19): siRNA sense strand
cauuaguccuaucuuguaa

SEQ ID NO: 1360171 - RNA, 19 nt, Homo sapiens
  misc_RNA (1)...(19): siRNA sense strand
caagccuuauuucagguua

SEQ ID NO: 1360172 - RNA, 19 nt, Homo sapiens
  misc_RNA (1)...(19): siRNA sense strand
caagucaacagauacaaga

SEQ ID NO: 1360173 - RNA, 19 nt, Homo sapiens
  misc_RNA (1)...(19): siRNA sense strand
cagaggcuuccuuucauua

SEQ ID NO: 1360174 - RNA, 19 nt, Homo sapiens
  misc_RNA (1)...(19): siRNA sense strand
gacuuuaacugcacuucga

SEQ ID NO: 1360175 - RNA, 19 nt, Homo sapiens
  misc_RNA (1)...(19): siRNA sense strand
gcagcaccaauguuauuaa

SEQ ID NO: 1360176 - RNA, 19 nt, Homo sapiens
  misc_RNA (1)...(19): siRNA sense strand
gaaucucuccacuaucuug

SEQ ID NO: 1360177 - RNA, 19 nt, Homo sapiens
  misc_RNA (1)...(19): siRNA sense strand
acagaggcuuccuuucauu

SEQ ID NO: 1360178 - RNA, 19 nt, Homo sapiens
  misc_RNA (1)...(19): siRNA sense strand
gaggagacccuggacuuug

SEQ ID NO: 1360179 - RNA, 19 nt, Homo sapiens
  misc_RNA (1)...(19): siRNA sense strand
agacgaggaugaucaguac

SEQ ID NO: 1360180 - RNA, 19 nt, Homo sapiens
  misc_RNA (1)...(19): siRNA sense strand
cugcugcccugaugaagaa

SEQ ID NO: 1360181 - RNA, 19 nt, Homo sapiens
  misc_RNA (1)...(19): siRNA sense strand
caaaaucaauacacaggaa

SEQ ID NO: 1360182 - RNA, 19 nt, Homo sapiens
  misc_RNA (1)...(19): siRNA sense strand
aggaaucucuccacuaucu

SEQ ID NO: 1360183 - RNA, 19 nt, Homo sapiens
  misc_RNA (1)...(19): siRNA sense strand
aggagacccuggacuuuga

SEQ ID NO: 1360184 - RNA, 19 nt, Homo sapiens
  misc_RNA (1)...(19): siRNA sense strand
acaaaggcauuaguccuau

SEQ ID NO: 1360185 - RNA, 19 nt, Homo sapiens
  misc_RNA (1)...(19): siRNA sense strand
guaaucagacccaagucaa

SEQ ID NO: 1360186 - RNA, 19 nt, Homo sapiens
  misc_RNA (1)...(19): siRNA sense strand
aauuggauaugacgaguga

SEQ ID NO: 1360187 - RNA, 19 nt, Homo sapiens
  misc_RNA (1)...(19): siRNA sense strand
uacaaaggcauuaguccua

SEQ ID NO: 1360188 - RNA, 19 nt, Homo sapiens
  misc_RNA (1)...(19): siRNA sense strand
uaugacgagugaaguccua

SEQ ID NO: 1360189 - RNA, 19 nt, Homo sapiens
  misc_RNA (1)...(19): siRNA sense strand
gaugaagaaguuccugaau

SEQ ID NO: 1360190 - RNA, 19 nt, Homo sapiens
  misc_RNA (1)...(19): siRNA sense strand
gaggcuuccuuucauuaca

SEQ ID NO: 1360191 - RNA, 19 nt, Homo sapiens
  misc_RNA (1)...(19): siRNA sense strand
cugaaacccucuacaaagg

SEQ ID NO: 1360192 - RNA, 19 nt, Homo sapiens
  misc_RNA (1)...(19): siRNA sense strand
cagauacaagauuuccuua

SEQ ID NO: 1360193 - RNA, 19 nt, Homo sapiens
  misc_RNA (1)...(19): siRNA sense strand
ggccagccuugacaacguu

SEQ ID NO: 1360194 - RNA, 19 nt, Homo sapiens
  misc_RNA (1)...(19): siRNA sense strand
ucucuccacuaucuugaaa

SEQ ID NO: 1360195 - RNA, 19 nt, Homo sapiens
  misc_RNA (1)...(19): siRNA sense strand
aagaaguuccugaaucuga

SEQ ID NO: 1360196 - RNA, 19 nt, Homo sapiens
  misc_RNA (1)...(19): siRNA sense strand
uuacugaaacccucuacaa

SEQ ID NO: 1360197 - RNA, 19 nt, Homo sapiens
  misc_RNA (1)...(19): siRNA sense strand
gcaaagugugugcaagcaa

SEQ ID NO: 1360198 - RNA, 19 nt, Homo sapiens
  misc_RNA (1)...(19): siRNA sense strand
caaaggcauuaguccuauc

SEQ ID NO: 1360199 - RNA, 19 nt, Homo sapiens
  misc_RNA (1)...(19): siRNA sense strand
gugaaguccuacaaauuac

SEQ ID NO: 1360200 - RNA, 19 nt, Homo sapiens
  misc_RNA (1)...(19): siRNA sense strand
auggaagcauuucauugua

SEQ ID NO: 1360201 - RNA, 19 nt, Homo sapiens
  misc_RNA (1)...(19): siRNA sense strand
auacaagauuuccuuacug

SEQ ID NO: 1360202 - RNA, 19 nt, Homo sapiens
  misc_RNA (1)...(19): siRNA sense strand
ugaagcauuuucugaauug

SEQ ID NO: 1360203 - RNA, 19 nt, Homo sapiens
  misc_RNA (1)...(19): siRNA sense strand
aggcauuaguccuaucuug

SEQ ID NO: 1360204 - RNA, 19 nt, Homo sapiens
  misc_RNA (1)...(19): siRNA sense strand
augaagaaguuccugaauc

SEQ ID NO: 1360205 - RNA, 19 nt, Homo sapiens
  misc_RNA (1)...(19): siRNA sense strand
guuaggaaucucuccacua

SEQ ID NO: 1360206 - RNA, 19 nt, Homo sapiens
  misc_RNA (1)...(19): siRNA sense strand
gacccuggacuuugauuuc

SEQ ID NO: 1360207 - RNA, 19 nt, Homo sapiens
  misc_RNA (1)...(19): siRNA sense strand
ugaagauggacaaauaugu

SEQ ID NO: 1360208 - RNA, 19 nt, Homo sapiens
  misc_RNA (1)...(19): siRNA sense strand
cugauuugauggaagcauu

SEQ ID NO: 1360209 - RNA, 19 nt, Homo sapiens
  misc_RNA (1)...(19): siRNA sense strand
ugaggagacccuggacuuu

SEQ ID NO: 1360210 - RNA, 19 nt, Homo sapiens
  misc_RNA (1)...(19): siRNA sense strand
uaucaaaguaacaguggaa

SEQ ID NO: 1360211 - RNA, 19 nt, Homo sapiens
  misc_RNA (1)...(19): siRNA sense strand
ggauaugacgagugaaguc

SEQ ID NO: 1360212 - RNA, 19 nt, Homo sapiens
  misc_RNA (1)...(19): siRNA sense strand
aacagaggcuuccuuucau

SEQ ID NO: 1360213 - RNA, 19 nt, Homo sapiens
  misc_RNA (1)...(19): siRNA sense strand
aagacgaggaugaucagua

SEQ ID NO: 1360214 - RNA, 19 nt, Homo sapiens
  misc_RNA (1)...(19): siRNA sense strand
caccuugacuaucccaaag

SEQ ID NO: 1360215 - RNA, 19 nt, Homo sapiens
  misc_RNA (1)...(19): siRNA sense strand
uauuacugcugcccugaug

SEQ ID NO: 1360216 - RNA, 19 nt, Homo sapiens
  misc_RNA (1)...(19): siRNA sense strand
ggcauuaguccuaucuugu

SEQ ID NO: 1360217 - RNA, 19 nt, Homo sapiens
  misc_RNA (1)...(19): siRNA sense strand
acagauacaagauuuccuu

SEQ ID NO: 1360218 - RNA, 19 nt, Homo sapiens
  misc_RNA (1)...(19): siRNA sense strand
gugaagcauuuucugaauu

SEQ ID NO: 1360219 - RNA, 19 nt, Homo sapiens
  misc_RNA (1)...(19): siRNA sense strand
gaagaaguuccugaaucug

SEQ ID NO: 1360220 - RNA, 19 nt, Homo sapiens
  misc_RNA (1)...(19): siRNA sense strand
uacugaaacccucuacaaa

SEQ ID NO: 1360221 - RNA, 19 nt, Homo sapiens
  misc_RNA (1)...(19): siRNA sense strand
cugcagcaccaauguuauu

SEQ ID NO: 1360222 - RNA, 19 nt, Homo sapiens
  misc_RNA (1)...(19): siRNA sense strand
ugauggaagcauuucauug

SEQ ID NO: 1360223 - RNA, 19 nt, Homo sapiens
  misc_RNA (1)...(19): siRNA sense strand
ccaccuugacuaucccaaa

SEQ ID NO: 1360224 - RNA, 19 nt, Homo sapiens
  misc_RNA (1)...(19): siRNA sense strand
caaaguaacaguggaaaau

SEQ ID NO: 1360225 - RNA, 19 nt, Homo sapiens
  misc_RNA (1)...(19): siRNA sense strand
gaaguccuacaaauuacca

SEQ ID NO: 1360226 - RNA, 19 nt, Homo sapiens
  misc_RNA (1)...(19): siRNA sense strand
ugacccaacagauccaaga

SEQ ID NO: 1360227 - RNA, 19 nt, Homo sapiens
  misc_RNA (1)...(19): siRNA sense strand
ugaugaagaaguuccugaa

SEQ ID NO: 1360228 - RNA, 19 nt, Homo sapiens
  misc_RNA (1)...(19): siRNA sense strand
gugacagucugcaaaauca

SEQ ID NO: 1360229 - RNA, 19 nt, Homo sapiens
  misc_RNA (1)...(19): siRNA sense strand
guucccaccuugacuaucc

SEQ ID NO: 1360230 - RNA, 19 nt, Homo sapiens
  misc_RNA (1)...(19): siRNA sense strand
cuccugacaagccuuauuu

SEQ ID NO: 1360231 - RNA, 19 nt, Homo sapiens
  misc_RNA (1)...(19): siRNA sense strand
gacgagugaaguccuacaa

SEQ ID NO: 1360232 - RNA, 19 nt, Homo sapiens
  misc_RNA (1)...(19): siRNA sense strand
acugaaacccucuacaaag

SEQ ID NO: 1360233 - RNA, 19 nt, Homo sapiens
  misc_RNA (1)...(19): siRNA sense strand
agucaacagauacaagauu

SEQ ID NO: 1360234 - RNA, 19 nt, Homo sapiens
  misc_RNA (1)...(19): siRNA sense strand
aaggaggaguggugacagu

SEQ ID NO: 1360235 - RNA, 19 nt, Homo sapiens
  misc_RNA (1)...(19): siRNA sense strand
ccaagucaacagauacaag

SEQ ID NO: 1360236 - RNA, 19 nt, Homo sapiens
  misc_RNA (1)...(19): siRNA sense strand
ccugacaagccuuauuuca

SEQ ID NO: 1360237 - RNA, 19 nt, Homo sapiens
  misc_RNA (1)...(19): siRNA sense strand
gaacaagccuuaauuagga

SEQ ID NO: 1360238 - RNA, 19 nt, Homo sapiens
  misc_RNA (1)...(19): siRNA sense strand
gaaacaagaugcugacaaa

SEQ ID NO: 1360239 - RNA, 19 nt, Homo sapiens
  misc_RNA (1)...(19): siRNA sense strand
gaucaggaauuccauauuu

SEQ ID NO: 1360240 - RNA, 19 nt, Homo sapiens
  misc_RNA (1)...(19): siRNA sense strand
ggaagaaggugaucucuau

SEQ ID NO: 1360241 - RNA, 19 nt, Homo sapiens
  misc_RNA (1)...(19): siRNA sense strand
ggucagaacuuauguagaa

SEQ ID NO: 1360242 - RNA, 19 nt, Homo sapiens
  misc_RNA (1)...(19): siRNA sense strand
gcaggcagaucuucaauuu

SEQ ID NO: 1360243 - RNA, 19 nt, Homo sapiens
  misc_RNA (1)...(19): siRNA sense strand
guggagacauuacauauua

SEQ ID NO: 1360244 - RNA, 19 nt, Homo sapiens
  misc_RNA (1)...(19): siRNA sense strand
gaaaagggcugaaagaauu

SEQ ID NO: 1360245 - RNA, 19 nt, Homo sapiens
  misc_RNA (1)...(19): siRNA sense strand
gaaagaacuucaggacaua

SEQ ID NO: 1360246 - RNA, 19 nt, Homo sapiens
  misc_RNA (1)...(19): siRNA sense strand
gaacagaagagggcuauua

SEQ ID NO: 1360247 - RNA, 19 nt, Homo sapiens
  misc_RNA (1)...(19): siRNA sense strand
gaacuuauguagaagauca

SEQ ID NO: 1360248 - RNA, 19 nt, Homo sapiens
  misc_RNA (1)...(19): siRNA sense strand
gaugaaagaugaugaagga

SEQ ID NO: 1360249 - RNA, 19 nt, Homo sapiens
  misc_RNA (1)...(19): siRNA sense strand
gggagaagcugcccuuaaa

SEQ ID NO: 1360250 - RNA, 19 nt, Homo sapiens
  misc_RNA (1)...(19): siRNA sense strand
caaauuagaugacauugga

SEQ ID NO: 1360251 - RNA, 19 nt, Homo sapiens
  misc_RNA (1)...(19): siRNA sense strand
ccaaagaaguugugaaguu

SEQ ID NO: 1360252 - RNA, 19 nt, Homo sapiens
  misc_RNA (1)...(19): siRNA sense strand
caggaaagcuucaguuuga

SEQ ID NO: 1360253 - RNA, 19 nt, Homo sapiens
  misc_RNA (1)...(19): siRNA sense strand
gaaggcaucucuuacaaau

SEQ ID NO: 1360254 - RNA, 19 nt, Homo sapiens
  misc_RNA (1)...(19): siRNA sense strand
gaugaaagaugaccaggaa

SEQ ID NO: 1360255 - RNA, 19 nt, Homo sapiens
  misc_RNA (1)...(19): siRNA sense strand
ugaaggaacuuacacguuu

SEQ ID NO: 1360256 - RNA, 19 nt, Homo sapiens
  misc_RNA (1)...(19): siRNA sense strand
gguacucaaucacuaauua

SEQ ID NO: 1360257 - RNA, 19 nt, Homo sapiens
  misc_RNA (1)...(19): siRNA sense strand
gaccuuaccuguacagaaa

SEQ ID NO: 1360258 - RNA, 19 nt, Homo sapiens
  misc_RNA (1)...(19): siRNA sense strand
gaagagggcuauuaugaag

SEQ ID NO: 1360259 - RNA, 19 nt, Homo sapiens
  misc_RNA (1)...(19): siRNA sense strand
ugaagaagauggagaagaa

SEQ ID NO: 1360260 - RNA, 19 nt, Homo sapiens
  misc_RNA (1)...(19): siRNA sense strand
gaagagaaacgcuuuguug

SEQ ID NO: 1360261 - RNA, 19 nt, Homo sapiens
  misc_RNA (1)...(19): siRNA sense strand
gaaaucaaaucaacugaca

SEQ ID NO: 1360262 - RNA, 19 nt, Homo sapiens
  misc_RNA (1)...(19): siRNA sense strand
gaagaaugguguggaaauu

SEQ ID NO: 1360263 - RNA, 19 nt, Homo sapiens
  misc_RNA (1)...(19): siRNA sense strand
ggagaaagauaccaaaugg

SEQ ID NO: 1360264 - RNA, 19 nt, Homo sapiens
  misc_RNA (1)...(19): siRNA sense strand
caaagugaguuacaacaaa

SEQ ID NO: 1360265 - RNA, 19 nt, Homo sapiens
  misc_RNA (1)...(19): siRNA sense strand
cuaaagaggugaaacaaga

SEQ ID NO: 1360266 - RNA, 19 nt, Homo sapiens
  misc_RNA (1)...(19): siRNA sense strand
gagaauggcucaugaaggu

SEQ ID NO: 1360267 - RNA, 19 nt, Homo sapiens
  misc_RNA (1)...(19): siRNA sense strand
gaaacaauacugagaacua

SEQ ID NO: 1360268 - RNA, 19 nt, Homo sapiens
  misc_RNA (1)...(19): siRNA sense strand
gcaaauaacucaggagaag

SEQ ID NO: 1360269 - RNA, 19 nt, Homo sapiens
  misc_RNA (1)...(19): siRNA sense strand
gcagagccacuaacaaaua

SEQ ID NO: 1360270 - RNA, 19 nt, Homo sapiens
  misc_RNA (1)...(19): siRNA sense strand
guauaaagauggcauugaa

SEQ ID NO: 1360271 - RNA, 19 nt, Homo sapiens
  misc_RNA (1)...(19): siRNA sense strand
caucaaacauggagaaaga

SEQ ID NO: 1360272 - RNA, 19 nt, Homo sapiens
  misc_RNA (1)...(19): siRNA sense strand
gaaggaaaaugguaucaua

SEQ ID NO: 1360273 - RNA, 19 nt, Homo sapiens
  misc_RNA (1)...(19): siRNA sense strand
gaacaagaaacaauacuga

SEQ ID NO: 1360274 - RNA, 19 nt, Homo sapiens
  misc_RNA (1)...(19): siRNA sense strand
caacauagcuggagaaacc

SEQ ID NO: 1360275 - RNA, 19 nt, Homo sapiens
  misc_RNA (1)...(19): siRNA sense strand
gaagagcgcuuugaaguac

SEQ ID NO: 1360276 - RNA, 19 nt, Homo sapiens
  misc_RNA (1)...(19): siRNA sense strand
gaauugauguccuguggaa

SEQ ID NO: 1360277 - RNA, 19 nt, Homo sapiens
  misc_RNA (1)...(19): siRNA sense strand
gaaagaauccagagccaaa

SEQ ID NO: 1360278 - RNA, 19 nt, Homo sapiens
  misc_RNA (1)...(19): siRNA sense strand
ggauacagauacaaaguga

SEQ ID NO: 1360279 - RNA, 19 nt, Homo sapiens
  misc_RNA (1)...(19): siRNA sense strand
gcagaucacagacagaaua

SEQ ID NO: 1360280 - RNA, 19 nt, Homo sapiens
  misc_RNA (1)...(19): siRNA sense strand
gaaaccaacuguaaucucu

SEQ ID NO: 1360281 - RNA, 19 nt, Homo sapiens
  misc_RNA (1)...(19): siRNA sense strand
ggacauagaaguuccagaa

SEQ ID NO: 1360282 - RNA, 19 nt, Homo sapiens
  misc_RNA (1)...(19): siRNA sense strand
ggauauccauuaccaaaga

SEQ ID NO: 1360283 - RNA, 19 nt, Homo sapiens
  misc_RNA (1)...(19): siRNA sense strand
caaagaaguugugaaguug

SEQ ID NO: 1360284 - RNA, 19 nt, Homo sapiens
  misc_RNA (1)...(19): siRNA sense strand
caucaggaauguucacuuu

SEQ ID NO: 1360285 - RNA, 19 nt, Homo sapiens
  misc_RNA (1)...(19): siRNA sense strand
gaauuagagugcauuguau

SEQ ID NO: 1360286 - RNA, 19 nt, Homo sapiens
  misc_RNA (1)...(19): siRNA sense strand
uaaagaagaugguacucaa

SEQ ID NO: 1360287 - RNA, 19 nt, Homo sapiens
  misc_RNA (1)...(19): siRNA sense strand
uguggaagcucgucauaua

SEQ ID NO: 1360288 - RNA, 19 nt, Homo sapiens
  misc_RNA (1)...(19): siRNA sense strand
gaaaugaaagucagagcua

SEQ ID NO: 1360289 - RNA, 19 nt, Homo sapiens
  misc_RNA (1)...(19): siRNA sense strand
caaauggacuuucuacaag

SEQ ID NO: 1360290 - RNA, 19 nt, Homo sapiens
  misc_RNA (1)...(19): siRNA sense strand
ggaaaugccuguuuaucca

SEQ ID NO: 1360291 - RNA, 19 nt, Homo sapiens
  misc_RNA (1)...(19): siRNA sense strand
acacaaauauguaguggaa

SEQ ID NO: 1360292 - RNA, 19 nt, Homo sapiens
  misc_RNA (1)...(19): siRNA sense strand
ggaagaugcuggaaauuac

SEQ ID NO: 1360293 - RNA, 19 nt, Homo sapiens
  misc_RNA (1)...(19): siRNA sense strand
ccaaagaguuaacugaaga

SEQ ID NO: 1360294 - RNA, 19 nt, Homo sapiens
  misc_RNA (1)...(19): siRNA sense strand
cggaagagcugcgcaguaa

SEQ ID NO: 1360295 - RNA, 19 nt, Homo sapiens
  misc_RNA (1)...(19): siRNA sense strand
uaaggaagaugcuggaaau

SEQ ID NO: 1360296 - RNA, 19 nt, Homo sapiens
  misc_RNA (1)...(19): siRNA sense strand
ucagggaccuauucaguaa

SEQ ID NO: 1360297 - RNA, 19 nt, Homo sapiens
  misc_RNA (1)...(19): siRNA sense strand
gcacggaugucaccugcaa

SEQ ID NO: 1360298 - RNA, 19 nt, Homo sapiens
  misc_RNA (1)...(19): siRNA sense strand
gagaugugguuaugacuga

SEQ ID NO: 1360299 - RNA, 19 nt, Homo sapiens
  misc_RNA (1)...(19): siRNA sense strand
caagaacaaauccaaguua

SEQ ID NO: 1360300 - RNA, 19 nt, Homo sapiens
  misc_RNA (1)...(19): siRNA sense strand
gagaaacuauggcuacuag

SEQ ID NO: 1360301 - RNA, 19 nt, Homo sapiens
  misc_RNA (1)...(19): siRNA sense strand
ggagaagacugcuguaacu

SEQ ID NO: 1360302 - RNA, 19 nt, Homo sapiens
  misc_RNA (1)...(19): siRNA sense strand
gcacauaucaucacagauc

SEQ ID NO: 1360303 - RNA, 19 nt, Homo sapiens
  misc_RNA (1)...(19): siRNA sense strand
ggaaacacauuaaggacau

SEQ ID NO: 1360304 - RNA, 19 nt, Homo sapiens
  misc_RNA (1)...(19): siRNA sense strand
gaaauuaagccaagugaca

SEQ ID NO: 1360305 - RNA, 19 nt, Homo sapiens
  misc_RNA (1)...(19): siRNA sense strand
gaugaaagacggccaagaa

SEQ ID NO: 1360306 - RNA, 19 nt, Homo sapiens
  misc_RNA (1)...(19): siRNA sense strand
guuaaagucuccuuggaaa

SEQ ID NO: 1360307 - RNA, 19 nt, Homo sapiens
  misc_RNA (1)...(19): siRNA sense strand
gagcucaagucucgaaaga

SEQ ID NO: 1360308 - RNA, 19 nt, Homo sapiens
  misc_RNA (1)...(19): siRNA sense strand
gaaagaauuacccaugaaa

SEQ ID NO: 1360309 - RNA, 19 nt, Homo sapiens
  misc_RNA (1)...(19): siRNA sense strand
gaaggaaucuacacugcau

SEQ ID NO: 1360310 - RNA, 19 nt, Homo sapiens
  misc_RNA (1)...(19): siRNA sense strand
gauuaugaguuacugauga

SEQ ID NO: 1360311 - RNA, 19 nt, Homo sapiens
  misc_RNA (1)...(19): siRNA sense strand
ugaagaagcugauuaugag

SEQ ID NO: 1360312 - RNA, 19 nt, Homo sapiens
  misc_RNA (1)...(19): siRNA sense strand
gagaaacgcuuuguugagu

SEQ ID NO: 1360313 - RNA, 19 nt, Homo sapiens
  misc_RNA (1)...(19): siRNA sense strand
gcaggugucagaagaauuu

SEQ ID NO: 1360314 - RNA, 19 nt, Homo sapiens
  misc_RNA (1)...(19): siRNA sense strand
gaaauuuacuacagaagag

SEQ ID NO: 1360315 - RNA, 19 nt, Homo sapiens
  misc_RNA (1)...(19): siRNA sense strand
ggaaauugccgaagcuuau

SEQ ID NO: 1360316 - RNA, 19 nt, Homo sapiens
  misc_RNA (1)...(19): siRNA sense strand
gaaauugagaugagugaaa

SEQ ID NO: 1360317 - RNA, 19 nt, Homo sapiens
  misc_RNA (1)...(19): siRNA sense strand
cauagaaguuccagaauca

SEQ ID NO: 1360318 - RNA, 19 nt, Homo sapiens
  misc_RNA (1)...(19): siRNA sense strand
agacaaacccgaauugaaa

SEQ ID NO: 1360319 - RNA, 19 nt, Homo sapiens
  misc_RNA (1)...(19): siRNA sense strand
ggaacaauuuacucucuga

SEQ ID NO: 1360320 - RNA, 19 nt, Homo sapiens
  misc_RNA (1)...(19): siRNA sense strand
gaaaucaagcccaguucua

SEQ ID NO: 1360321 - RNA, 19 nt, Homo sapiens
  misc_RNA (1)...(19): siRNA sense strand
gaaagacggccaagaagug

SEQ ID NO: 1360322 - RNA, 19 nt, Homo sapiens
  misc_RNA (1)...(19): siRNA sense strand
ccaagcaauugaucacuuu

SEQ ID NO: 1360323 - RNA, 19 nt, Homo sapiens
  misc_RNA (1)...(19): siRNA sense strand
gagaaggcauuacuaccaa

SEQ ID NO: 1360324 - RNA, 19 nt, Homo sapiens
  misc_RNA (1)...(19): siRNA sense strand
gaaaacaguuguaccuaaa

SEQ ID NO: 1360325 - RNA, 19 nt, Homo sapiens
  misc_RNA (1)...(19): siRNA sense strand
caagaaaugcuuuaucaga

SEQ ID NO: 1360326 - RNA, 19 nt, Homo sapiens
  misc_RNA (1)...(19): siRNA sense strand
gaaggaacuuacacguuug

SEQ ID NO: 1360327 - RNA, 19 nt, Homo sapiens
  misc_RNA (1)...(19): siRNA sense strand
aaacagcgacuagucauua

SEQ ID NO: 1360328 - RNA, 19 nt, Homo sapiens
  misc_RNA (1)...(19): siRNA sense strand
caagugagacuccaaguga

SEQ ID NO: 1360329 - RNA, 19 nt, Homo sapiens
  misc_RNA (1)...(19): siRNA sense strand
gaaguugugucuccugauc

SEQ ID NO: 1360330 - RNA, 19 nt, Homo sapiens
  misc_RNA (1)...(19): siRNA sense strand
gaagaagcgagccauguuu

SEQ ID NO: 1360331 - RNA, 19 nt, Homo sapiens
  misc_RNA (1)...(19): siRNA sense strand
ccaggaagcuguguuugaa

SEQ ID NO: 1360332 - RNA, 19 nt, Homo sapiens
  misc_RNA (1)...(19): siRNA sense strand
gaaacaacagaaaccauuu

SEQ ID NO: 1360333 - RNA, 19 nt, Homo sapiens
  misc_RNA (1)...(19): siRNA sense strand
gcaagcuggugauuucuau

SEQ ID NO: 1360334 - RNA, 19 nt, Homo sapiens
  misc_RNA (1)...(19): siRNA sense strand
cauccaaccugcucaagaa

SEQ ID NO: 1360335 - RNA, 19 nt, Homo sapiens
  misc_RNA (1)...(19): siRNA sense strand
gaagauugaagcccacuuu

SEQ ID NO: 1360336 - RNA, 19 nt, Homo sapiens
  misc_RNA (1)...(19): siRNA sense strand
gcucagaucucagaaucaa

SEQ ID NO: 1360337 - RNA, 19 nt, Homo sapiens
  misc_RNA (1)...(19): siRNA sense strand
gaacaagccuuaauuagga

SEQ ID NO: 1360338 - RNA, 19 nt, Homo sapiens
  misc_RNA (1)...(19): siRNA sense strand
gaaacaagaugcugacaaa

SEQ ID NO: 1360339 - RNA, 19 nt, Homo sapiens
  misc_RNA (1)...(19): siRNA sense strand
gaucaggaauuccauauuu

SEQ ID NO: 1360340 - RNA, 19 nt, Homo sapiens
  misc_RNA (1)...(19): siRNA sense strand
ggaagaaggugaucucuau

SEQ ID NO: 1360341 - RNA, 19 nt, Homo sapiens
  misc_RNA (1)...(19): siRNA sense strand
ggucagaacuuauguagaa

SEQ ID NO: 1360342 - RNA, 19 nt, Homo sapiens
  misc_RNA (1)...(19): siRNA sense strand
gcaggcagaucuucaauuu

SEQ ID NO: 1360343 - RNA, 19 nt, Homo sapiens
  misc_RNA (1)...(19): siRNA sense strand
guggagacauuacauauua

SEQ ID NO: 1360344 - RNA, 19 nt, Homo sapiens
  misc_RNA (1)...(19): siRNA sense strand
gaaaagggcugaaagaauu

SEQ ID NO: 1360345 - RNA, 19 nt, Homo sapiens
  misc_RNA (1)...(19): siRNA sense strand
gaaagaacuucaggacaua

SEQ ID NO: 1360346 - RNA, 19 nt, Homo sapiens
  misc_RNA (1)...(19): siRNA sense strand
gaacagaagagggcuauua

SEQ ID NO: 1360347 - RNA, 19 nt, Homo sapiens
  misc_RNA (1)...(19): siRNA sense strand
gaacuuauguagaagauca

SEQ ID NO: 1360348 - RNA, 19 nt, Homo sapiens
  misc_RNA (1)...(19): siRNA sense strand
gaugaaagaugaugaagga

SEQ ID NO: 1360349 - RNA, 19 nt, Homo sapiens
  misc_RNA (1)...(19): siRNA sense strand
gggagaagcugcccuuaaa

SEQ ID NO: 1360350 - RNA, 19 nt, Homo sapiens
  misc_RNA (1)...(19): siRNA sense strand
caaauuagaugacauugga

SEQ ID NO: 1360351 - RNA, 19 nt, Homo sapiens
  misc_RNA (1)...(19): siRNA sense strand
ccaaagaaguugugaaguu

SEQ ID NO: 1360352 - RNA, 19 nt, Homo sapiens
  misc_RNA (1)...(19): siRNA sense strand
caggaaagcuucaguuuga

SEQ ID NO: 1360353 - RNA, 19 nt, Homo sapiens
  misc_RNA (1)...(19): siRNA sense strand
gaaggcaucucuuacaaau

SEQ ID NO: 1360354 - RNA, 19 nt, Homo sapiens
  misc_RNA (1)...(19): siRNA sense strand
gaugaaagaugaccaggaa

SEQ ID NO: 1360355 - RNA, 19 nt, Homo sapiens
  misc_RNA (1)...(19): siRNA sense strand
ugaaggaacuuacacguuu

SEQ ID NO: 1360356 - RNA, 19 nt, Homo sapiens
  misc_RNA (1)...(19): siRNA sense strand
gguacucaaucacuaauua

SEQ ID NO: 1360357 - RNA, 19 nt, Homo sapiens
  misc_RNA (1)...(19): siRNA sense strand
gaccuuaccuguacagaaa

SEQ ID NO: 1360358 - RNA, 19 nt, Homo sapiens
  misc_RNA (1)...(19): siRNA sense strand
gaagagggcuauuaugaag

SEQ ID NO: 1360359 - RNA, 19 nt, Homo sapiens
  misc_RNA (1)...(19): siRNA sense strand
ugaagaagauggagaagaa

SEQ ID NO: 1360360 - RNA, 19 nt, Homo sapiens
  misc_RNA (1)...(19): siRNA sense strand
gaagagaaacgcuuuguug

SEQ ID NO: 1360361 - RNA, 19 nt, Homo sapiens
  misc_RNA (1)...(19): siRNA sense strand
gaaaucaaaucaacugaca

SEQ ID NO: 1360362 - RNA, 19 nt, Homo sapiens
  misc_RNA (1)...(19): siRNA sense strand
gaagaaugguguggaaauu

SEQ ID NO: 1360363 - RNA, 19 nt, Homo sapiens
  misc_RNA (1)...(19): siRNA sense strand
ggagaaagauaccaaaugg

SEQ ID NO: 1360364 - RNA, 19 nt, Homo sapiens
  misc_RNA (1)...(19): siRNA sense strand
caaagugaguuacaacaaa

SEQ ID NO: 1360365 - RNA, 19 nt, Homo sapiens
  misc_RNA (1)...(19): siRNA sense strand
cuaaagaggugaaacaaga

SEQ ID NO: 1360366 - RNA, 19 nt, Homo sapiens
  misc_RNA (1)...(19): siRNA sense strand
gagaauggcucaugaaggu

SEQ ID NO: 1360367 - RNA, 19 nt, Homo sapiens
  misc_RNA (1)...(19): siRNA sense strand
gaaacaauacugagaacua

SEQ ID NO: 1360368 - RNA, 19 nt, Homo sapiens
  misc_RNA (1)...(19): siRNA sense strand
gcaaauaacucaggagaag

SEQ ID NO: 1360369 - RNA, 19 nt, Homo sapiens
  misc_RNA (1)...(19): siRNA sense strand
gcagagccacuaacaaaua

SEQ ID NO: 1360370 - RNA, 19 nt, Homo sapiens
  misc_RNA (1)...(19): siRNA sense strand
guauaaagauggcauugaa

SEQ ID NO: 1360371 - RNA, 19 nt, Homo sapiens
  misc_RNA (1)...(19): siRNA sense strand
caucaaacauggagaaaga

SEQ ID NO: 1360372 - RNA, 19 nt, Homo sapiens
  misc_RNA (1)...(19): siRNA sense strand
gaaggaaaaugguaucaua

SEQ ID NO: 1360373 - RNA, 19 nt, Homo sapiens
  misc_RNA (1)...(19): siRNA sense strand
gaacaagaaacaauacuga

SEQ ID NO: 1360374 - RNA, 19 nt, Homo sapiens
  misc_RNA (1)...(19): siRNA sense strand
caacauagcuggagaaacc

SEQ ID NO: 1360375 - RNA, 19 nt, Homo sapiens
  misc_RNA (1)...(19): siRNA sense strand
gaagagcgcuuugaaguac

SEQ ID NO: 1360376 - RNA, 19 nt, Homo sapiens
  misc_RNA (1)...(19): siRNA sense strand
gaauugauguccuguggaa

SEQ ID NO: 1360377 - RNA, 19 nt, Homo sapiens
  misc_RNA (1)...(19): siRNA sense strand
gaaagaauccagagccaaa

SEQ ID NO: 1360378 - RNA, 19 nt, Homo sapiens
  misc_RNA (1)...(19): siRNA sense strand
ggauacagauacaaaguga

SEQ ID NO: 1360379 - RNA, 19 nt, Homo sapiens
  misc_RNA (1)...(19): siRNA sense strand
gcagaucacagacagaaua

SEQ ID NO: 1360380 - RNA, 19 nt, Homo sapiens
  misc_RNA (1)...(19): siRNA sense strand
gaaaccaacuguaaucucu

SEQ ID NO: 1360381 - RNA, 19 nt, Homo sapiens
  misc_RNA (1)...(19): siRNA sense strand
ggacauagaaguuccagaa

SEQ ID NO: 1360382 - RNA, 19 nt, Homo sapiens
  misc_RNA (1)...(19): siRNA sense strand
ggauauccauuaccaaaga

SEQ ID NO: 1360383 - RNA, 19 nt, Homo sapiens
  misc_RNA (1)...(19): siRNA sense strand
caaagaaguugugaaguug

SEQ ID NO: 1360384 - RNA, 19 nt, Homo sapiens
  misc_RNA (1)...(19): siRNA sense strand
caucaggaauguucacuuu

SEQ ID NO: 1360385 - RNA, 19 nt, Homo sapiens
  misc_RNA (1)...(19): siRNA sense strand
gaauuagagugcauuguau

SEQ ID NO: 1360386 - RNA, 19 nt, Homo sapiens
  misc_RNA (1)...(19): siRNA sense strand
uaaagaagaugguacucaa

SEQ ID NO: 1360387 - RNA, 19 nt, Homo sapiens
  misc_RNA (1)...(19): siRNA sense strand
uguggaagcucgucauaua

SEQ ID NO: 1360388 - RNA, 19 nt, Homo sapiens
  misc_RNA (1)...(19): siRNA sense strand
gaaaugaaagucagagcua

SEQ ID NO: 1360389 - RNA, 19 nt, Homo sapiens
  misc_RNA (1)...(19): siRNA sense strand
caaauggacuuucuacaag

SEQ ID NO: 1360390 - RNA, 19 nt, Homo sapiens
  misc_RNA (1)...(19): siRNA sense strand
ggaaaugccuguuuaucca

SEQ ID NO: 1360391 - RNA, 19 nt, Homo sapiens
  misc_RNA (1)...(19): siRNA sense strand
acacaaauauguaguggaa

SEQ ID NO: 1360392 - RNA, 19 nt, Homo sapiens
  misc_RNA (1)...(19): siRNA sense strand
ggaagaugcuggaaauuac

SEQ ID NO: 1360393 - RNA, 19 nt, Homo sapiens
  misc_RNA (1)...(19): siRNA sense strand
ccaaagaguuaacugaaga

SEQ ID NO: 1360394 - RNA, 19 nt, Homo sapiens
  misc_RNA (1)...(19): siRNA sense strand
cggaagagcugcgcaguaa

SEQ ID NO: 1360395 - RNA, 19 nt, Homo sapiens
  misc_RNA (1)...(19): siRNA sense strand
uaaggaagaugcuggaaau

SEQ ID NO: 1360396 - RNA, 19 nt, Homo sapiens
  misc_RNA (1)...(19): siRNA sense strand
ucagggaccuauucaguaa

SEQ ID NO: 1360397 - RNA, 19 nt, Homo sapiens
  misc_RNA (1)...(19): siRNA sense strand
gcacggaugucaccugcaa

SEQ ID NO: 1360398 - RNA, 19 nt, Homo sapiens
  misc_RNA (1)...(19): siRNA sense strand
gagaugugguuaugacuga

SEQ ID NO: 1360399 - RNA, 19 nt, Homo sapiens
  misc_RNA (1)...(19): siRNA sense strand
caagaacaaauccaaguua

SEQ ID NO: 1360400 - RNA, 19 nt, Homo sapiens
  misc_RNA (1)...(19): siRNA sense strand
gagaaacuauggcuacuag

SEQ ID NO: 1360401 - RNA, 19 nt, Homo sapiens
  misc_RNA (1)...(19): siRNA sense strand
ggagaagacugcuguaacu

SEQ ID NO: 1360402 - RNA, 19 nt, Homo sapiens
  misc_RNA (1)...(19): siRNA sense strand
gcacauaucaucacagauc

SEQ ID NO: 1360403 - RNA, 19 nt, Homo sapiens
  misc_RNA (1)...(19): siRNA sense strand
ggaaacacauuaaggacau

SEQ ID NO: 1360404 - RNA, 19 nt, Homo sapiens
  misc_RNA (1)...(19): siRNA sense strand
gaaauuaagccaagugaca

SEQ ID NO: 1360405 - RNA, 19 nt, Homo sapiens
  misc_RNA (1)...(19): siRNA sense strand
gaugaaagacggccaagaa

SEQ ID NO: 1360406 - RNA, 19 nt, Homo sapiens
  misc_RNA (1)...(19): siRNA sense strand
guuaaagucuccuuggaaa

SEQ ID NO: 1360407 - RNA, 19 nt, Homo sapiens
  misc_RNA (1)...(19): siRNA sense strand
gagcucaagucucgaaaga

SEQ ID NO: 1360408 - RNA, 19 nt, Homo sapiens
  misc_RNA (1)...(19): siRNA sense strand
gaaagaauuacccaugaaa

SEQ ID NO: 1360409 - RNA, 19 nt, Homo sapiens
  misc_RNA (1)...(19): siRNA sense strand
gaaggaaucuacacugcau

SEQ ID NO: 1360410 - RNA, 19 nt, Homo sapiens
  misc_RNA (1)...(19): siRNA sense strand
gauuaugaguuacugauga

SEQ ID NO: 1360411 - RNA, 19 nt, Homo sapiens
  misc_RNA (1)...(19): siRNA sense strand
ugaagaagcugauuaugag

SEQ ID NO: 1360412 - RNA, 19 nt, Homo sapiens
  misc_RNA (1)...(19): siRNA sense strand
gagaaacgcuuuguugagu

SEQ ID NO: 1360413 - RNA, 19 nt, Homo sapiens
  misc_RNA (1)...(19): siRNA sense strand
gcaggugucagaagaauuu

SEQ ID NO: 1360414 - RNA, 19 nt, Homo sapiens
  misc_RNA (1)...(19): siRNA sense strand
gaaauuuacuacagaagag

SEQ ID NO: 1360415 - RNA, 19 nt, Homo sapiens
  misc_RNA (1)...(19): siRNA sense strand
ggaaauugccgaagcuuau

SEQ ID NO: 1360416 - RNA, 19 nt, Homo sapiens
  misc_RNA (1)...(19): siRNA sense strand
gaaauugagaugagugaaa

SEQ ID NO: 1360417 - RNA, 19 nt, Homo sapiens
  misc_RNA (1)...(19): siRNA sense strand
cauagaaguuccagaauca

SEQ ID NO: 1360418 - RNA, 19 nt, Homo sapiens
  misc_RNA (1)...(19): siRNA sense strand
agacaaacccgaauugaaa

SEQ ID NO: 1360419 - RNA, 19 nt, Homo sapiens
  misc_RNA (1)...(19): siRNA sense strand
ggaacaauuuacucucuga

SEQ ID NO: 1360420 - RNA, 19 nt, Homo sapiens
  misc_RNA (1)...(19): siRNA sense strand
gaaaucaagcccaguucua

SEQ ID NO: 1360421 - RNA, 19 nt, Homo sapiens
  misc_RNA (1)...(19): siRNA sense strand
gaaagacggccaagaagug

SEQ ID NO: 1360422 - RNA, 19 nt, Homo sapiens
  misc_RNA (1)...(19): siRNA sense strand
ccaagcaauugaucacuuu

SEQ ID NO: 1360423 - RNA, 19 nt, Homo sapiens
  misc_RNA (1)...(19): siRNA sense strand
gagaaggcauuacuaccaa

SEQ ID NO: 1360424 - RNA, 19 nt, Homo sapiens
  misc_RNA (1)...(19): siRNA sense strand
gaaaacaguuguaccuaaa

SEQ ID NO: 1360425 - RNA, 19 nt, Homo sapiens
  misc_RNA (1)...(19): siRNA sense strand
caagaaaugcuuuaucaga

SEQ ID NO: 1360426 - RNA, 19 nt, Homo sapiens
  misc_RNA (1)...(19): siRNA sense strand
gaaggaacuuacacguuug

SEQ ID NO: 1360427 - RNA, 19 nt, Homo sapiens
  misc_RNA (1)...(19): siRNA sense strand
aaacagcgacuagucauua

SEQ ID NO: 1360428 - RNA, 19 nt, Homo sapiens
  misc_RNA (1)...(19): siRNA sense strand
caagugagacuccaaguga

SEQ ID NO: 1360429 - RNA, 19 nt, Homo sapiens
  misc_RNA (1)...(19): siRNA sense strand
gaaguugugucuccugauc

SEQ ID NO: 1360430 - RNA, 19 nt, Homo sapiens
  misc_RNA (1)...(19): siRNA sense strand
gaagaagcgagccauguuu

SEQ ID NO: 1360431 - RNA, 19 nt, Homo sapiens
  misc_RNA (1)...(19): siRNA sense strand
ccaggaagcuguguuugaa

SEQ ID NO: 1360432 - RNA, 19 nt, Homo sapiens
  misc_RNA (1)...(19): siRNA sense strand
gaaacaacagaaaccauuu

SEQ ID NO: 1360433 - RNA, 19 nt, Homo sapiens
  misc_RNA (1)...(19): siRNA sense strand
gcaagcuggugauuucuau

SEQ ID NO: 1360434 - RNA, 19 nt, Homo sapiens
  misc_RNA (1)...(19): siRNA sense strand
cauccaaccugcucaagaa

SEQ ID NO: 1360435 - RNA, 19 nt, Homo sapiens
  misc_RNA (1)...(19): siRNA sense strand
gaagauugaagcccacuuu

SEQ ID NO: 1360436 - RNA, 19 nt, Homo sapiens
  misc_RNA (1)...(19): siRNA sense strand
gcucagaucucagaaucaa

SEQ ID NO: 1360437 - RNA, 19 nt, Homo sapiens
  misc_RNA (1)...(19): siRNA sense strand
gaacaagccuuaauuagga

SEQ ID NO: 1360438 - RNA, 19 nt, Homo sapiens
  misc_RNA (1)...(19): siRNA sense strand
gaaacaagaugcugacaaa

SEQ ID NO: 1360439 - RNA, 19 nt, Homo sapiens
  misc_RNA (1)...(19): siRNA sense strand
gaucaggaauuccauauuu

SEQ ID NO: 1360440 - RNA, 19 nt, Homo sapiens
  misc_RNA (1)...(19): siRNA sense strand
ggaagaaggugaucucuau

SEQ ID NO: 1360441 - RNA, 19 nt, Homo sapiens
  misc_RNA (1)...(19): siRNA sense strand
ggucagaacuuauguagaa

SEQ ID NO: 1360442 - RNA, 19 nt, Homo sapiens
  misc_RNA (1)...(19): siRNA sense strand
gcaggcagaucuucaauuu

SEQ ID NO: 1360443 - RNA, 19 nt, Homo sapiens
  misc_RNA (1)...(19): siRNA sense strand
guggagacauuacauauua

SEQ ID NO: 1360444 - RNA, 19 nt, Homo sapiens
  misc_RNA (1)...(19): siRNA sense strand
gaaaagggcugaaagaauu

SEQ ID NO: 1360445 - RNA, 19 nt, Homo sapiens
  misc_RNA (1)...(19): siRNA sense strand
gaaagaacuucaggacaua

SEQ ID NO: 1360446 - RNA, 19 nt, Homo sapiens
  misc_RNA (1)...(19): siRNA sense strand
gaacagaagagggcuauua

SEQ ID NO: 1360447 - RNA, 19 nt, Homo sapiens
  misc_RNA (1)...(19): siRNA sense strand
gaacuuauguagaagauca

SEQ ID NO: 1360448 - RNA, 19 nt, Homo sapiens
  misc_RNA (1)...(19): siRNA sense strand
gaugaaagaugaugaagga

SEQ ID NO: 1360449 - RNA, 19 nt, Homo sapiens
  misc_RNA (1)...(19): siRNA sense strand
gggagaagcugcccuuaaa

SEQ ID NO: 1360450 - RNA, 19 nt, Homo sapiens
  misc_RNA (1)...(19): siRNA sense strand
caaauuagaugacauugga

SEQ ID NO: 1360451 - RNA, 19 nt, Homo sapiens
  misc_RNA (1)...(19): siRNA sense strand
ccaaagaaguugugaaguu

SEQ ID NO: 1360452 - RNA, 19 nt, Homo sapiens
  misc_RNA (1)...(19): siRNA sense strand
caggaaagcuucaguuuga

SEQ ID NO: 1360453 - RNA, 19 nt, Homo sapiens
  misc_RNA (1)...(19): siRNA sense strand
gaaggcaucucuuacaaau

SEQ ID NO: 1360454 - RNA, 19 nt, Homo sapiens
  misc_RNA (1)...(19): siRNA sense strand
gaugaaagaugaccaggaa

SEQ ID NO: 1360455 - RNA, 19 nt, Homo sapiens
  misc_RNA (1)...(19): siRNA sense strand
ugaaggaacuuacacguuu

SEQ ID NO: 1360456 - RNA, 19 nt, Homo sapiens
  misc_RNA (1)...(19): siRNA sense strand
gguacucaaucacuaauua

SEQ ID NO: 1360457 - RNA, 19 nt, Homo sapiens
  misc_RNA (1)...(19): siRNA sense strand
gaccuuaccuguacagaaa

SEQ ID NO: 1360458 - RNA, 19 nt, Homo sapiens
  misc_RNA (1)...(19): siRNA sense strand
gaagagggcuauuaugaag

SEQ ID NO: 1360459 - RNA, 19 nt, Homo sapiens
  misc_RNA (1)...(19): siRNA sense strand
ugaagaagauggagaagaa

SEQ ID NO: 1360460 - RNA, 19 nt, Homo sapiens
  misc_RNA (1)...(19): siRNA sense strand
gaagagaaacgcuuuguug

SEQ ID NO: 1360461 - RNA, 19 nt, Homo sapiens
  misc_RNA (1)...(19): siRNA sense strand
gaaaucaaaucaacugaca

SEQ ID NO: 1360462 - RNA, 19 nt, Homo sapiens
  misc_RNA (1)...(19): siRNA sense strand
gaagaaugguguggaaauu

SEQ ID NO: 1360463 - RNA, 19 nt, Homo sapiens
  misc_RNA (1)...(19): siRNA sense strand
ggagaaagauaccaaaugg

SEQ ID NO: 1360464 - RNA, 19 nt, Homo sapiens
  misc_RNA (1)...(19): siRNA sense strand
caaagugaguuacaacaaa

SEQ ID NO: 1360465 - RNA, 19 nt, Homo sapiens
  misc_RNA (1)...(19): siRNA sense strand
cuaaagaggugaaacaaga

SEQ ID NO: 1360466 - RNA, 19 nt, Homo sapiens
  misc_RNA (1)...(19): siRNA sense strand
gagaauggcucaugaaggu

SEQ ID NO: 1360467 - RNA, 19 nt, Homo sapiens
  misc_RNA (1)...(19): siRNA sense strand
gaaacaauacugagaacua

SEQ ID NO: 1360468 - RNA, 19 nt, Homo sapiens
  misc_RNA (1)...(19): siRNA sense strand
gcaaauaacucaggagaag

SEQ ID NO: 1360469 - RNA, 19 nt, Homo sapiens
  misc_RNA (1)...(19): siRNA sense strand
gcagagccacuaacaaaua

SEQ ID NO: 1360470 - RNA, 19 nt, Homo sapiens
  misc_RNA (1)...(19): siRNA sense strand
guauaaagauggcauugaa

SEQ ID NO: 1360471 - RNA, 19 nt, Homo sapiens
  misc_RNA (1)...(19): siRNA sense strand
caucaaacauggagaaaga

SEQ ID NO: 1360472 - RNA, 19 nt, Homo sapiens
  misc_RNA (1)...(19): siRNA sense strand
gaaggaaaaugguaucaua

SEQ ID NO: 1360473 - RNA, 19 nt, Homo sapiens
  misc_RNA (1)...(19): siRNA sense strand
gaacaagaaacaauacuga

SEQ ID NO: 1360474 - RNA, 19 nt, Homo sapiens
  misc_RNA (1)...(19): siRNA sense strand
caacauagcuggagaaacc

SEQ ID NO: 1360475 - RNA, 19 nt, Homo sapiens
  misc_RNA (1)...(19): siRNA sense strand
gaagagcgcuuugaaguac

SEQ ID NO: 1360476 - RNA, 19 nt, Homo sapiens
  misc_RNA (1)...(19): siRNA sense strand
gaauugauguccuguggaa

SEQ ID NO: 1360477 - RNA, 19 nt, Homo sapiens
  misc_RNA (1)...(19): siRNA sense strand
gaaagaauccagagccaaa

SEQ ID NO: 1360478 - RNA, 19 nt, Homo sapiens
  misc_RNA (1)...(19): siRNA sense strand
ggauacagauacaaaguga

SEQ ID NO: 1360479 - RNA, 19 nt, Homo sapiens
  misc_RNA (1)...(19): siRNA sense strand
gcagaucacagacagaaua

SEQ ID NO: 1360480 - RNA, 19 nt, Homo sapiens
  misc_RNA (1)...(19): siRNA sense strand
gaaaccaacuguaaucucu

SEQ ID NO: 1360481 - RNA, 19 nt, Homo sapiens
  misc_RNA (1)...(19): siRNA sense strand
ggacauagaaguuccagaa

SEQ ID NO: 1360482 - RNA, 19 nt, Homo sapiens
  misc_RNA (1)...(19): siRNA sense strand
ggauauccauuaccaaaga

SEQ ID NO: 1360483 - RNA, 19 nt, Homo sapiens
  misc_RNA (1)...(19): siRNA sense strand
caaagaaguugugaaguug

SEQ ID NO: 1360484 - RNA, 19 nt, Homo sapiens
  misc_RNA (1)...(19): siRNA sense strand
caucaggaauguucacuuu

SEQ ID NO: 1360485 - RNA, 19 nt, Homo sapiens
  misc_RNA (1)...(19): siRNA sense strand
gaauuagagugcauuguau

SEQ ID NO: 1360486 - RNA, 19 nt, Homo sapiens
  misc_RNA (1)...(19): siRNA sense strand
uaaagaagaugguacucaa

SEQ ID NO: 1360487 - RNA, 19 nt, Homo sapiens
  misc_RNA (1)...(19): siRNA sense strand
uguggaagcucgucauaua

SEQ ID NO: 1360488 - RNA, 19 nt, Homo sapiens
  misc_RNA (1)...(19): siRNA sense strand
gaaaugaaagucagagcua

SEQ ID NO: 1360489 - RNA, 19 nt, Homo sapiens
  misc_RNA (1)...(19): siRNA sense strand
caaauggacuuucuacaag

SEQ ID NO: 1360490 - RNA, 19 nt, Homo sapiens
  misc_RNA (1)...(19): siRNA sense strand
ggaaaugccuguuuaucca

SEQ ID NO: 1360491 - RNA, 19 nt, Homo sapiens
  misc_RNA (1)...(19): siRNA sense strand
acacaaauauguaguggaa

SEQ ID NO: 1360492 - RNA, 19 nt, Homo sapiens
  misc_RNA (1)...(19): siRNA sense strand
ggaagaugcuggaaauuac

SEQ ID NO: 1360493 - RNA, 19 nt, Homo sapiens
  misc_RNA (1)...(19): siRNA sense strand
ccaaagaguuaacugaaga

SEQ ID NO: 1360494 - RNA, 19 nt, Homo sapiens
  misc_RNA (1)...(19): siRNA sense strand
cggaagagcugcgcaguaa

SEQ ID NO: 1360495 - RNA, 19 nt, Homo sapiens
  misc_RNA (1)...(19): siRNA sense strand
uaaggaagaugcuggaaau

SEQ ID NO: 1360496 - RNA, 19 nt, Homo sapiens
  misc_RNA (1)...(19): siRNA sense strand
ucagggaccuauucaguaa

SEQ ID NO: 1360497 - RNA, 19 nt, Homo sapiens
  misc_RNA (1)...(19): siRNA sense strand
gcacggaugucaccugcaa

SEQ ID NO: 1360498 - RNA, 19 nt, Homo sapiens
  misc_RNA (1)...(19): siRNA sense strand
gagaugugguuaugacuga

SEQ ID NO: 1360499 - RNA, 19 nt, Homo sapiens
  misc_RNA (1)...(19): siRNA sense strand
caagaacaaauccaaguua

SEQ ID NO: 1360500 - RNA, 19 nt, Homo sapiens
  misc_RNA (1)...(19): siRNA sense strand
gagaaacuauggcuacuag

SEQ ID NO: 1360501 - RNA, 19 nt, Homo sapiens
  misc_RNA (1)...(19): siRNA sense strand
ggagaagacugcuguaacu

SEQ ID NO: 1360502 - RNA, 19 nt, Homo sapiens
  misc_RNA (1)...(19): siRNA sense strand
gcacauaucaucacagauc

SEQ ID NO: 1360503 - RNA, 19 nt, Homo sapiens
  misc_RNA (1)...(19): siRNA sense strand
ggaaacacauuaaggacau

SEQ ID NO: 1360504 - RNA, 19 nt, Homo sapiens
  misc_RNA (1)...(19): siRNA sense strand
gaaauuaagccaagugaca

SEQ ID NO: 1360505 - RNA, 19 nt, Homo sapiens
  misc_RNA (1)...(19): siRNA sense strand
gaugaaagacggccaagaa

SEQ ID NO: 1360506 - RNA, 19 nt, Homo sapiens
  misc_RNA (1)...(19): siRNA sense strand
guuaaagucuccuuggaaa

SEQ ID NO: 1360507 - RNA, 19 nt, Homo sapiens
  misc_RNA (1)...(19): siRNA sense strand
gagcucaagucucgaaaga

SEQ ID NO: 1360508 - RNA, 19 nt, Homo sapiens
  misc_RNA (1)...(19): siRNA sense strand
gaaagaauuacccaugaaa

SEQ ID NO: 1360509 - RNA, 19 nt, Homo sapiens
  misc_RNA (1)...(19): siRNA sense strand
gaaggaaucuacacugcau

SEQ ID NO: 1360510 - RNA, 19 nt, Homo sapiens
  misc_RNA (1)...(19): siRNA sense strand
gauuaugaguuacugauga

SEQ ID NO: 1360511 - RNA, 19 nt, Homo sapiens
  misc_RNA (1)...(19): siRNA sense strand
ugaagaagcugauuaugag

SEQ ID NO: 1360512 - RNA, 19 nt, Homo sapiens
  misc_RNA (1)...(19): siRNA sense strand
gagaaacgcuuuguugagu

SEQ ID NO: 1360513 - RNA, 19 nt, Homo sapiens
  misc_RNA (1)...(19): siRNA sense strand
gcaggugucagaagaauuu

SEQ ID NO: 1360514 - RNA, 19 nt, Homo sapiens
  misc_RNA (1)...(19): siRNA sense strand
gaaauuuacuacagaagag

SEQ ID NO: 1360515 - RNA, 19 nt, Homo sapiens
  misc_RNA (1)...(19): siRNA sense strand
ggaaauugccgaagcuuau

SEQ ID NO: 1360516 - RNA, 19 nt, Homo sapiens
  misc_RNA (1)...(19): siRNA sense strand
gaaauugagaugagugaaa

SEQ ID NO: 1360517 - RNA, 19 nt, Homo sapiens
  misc_RNA (1)...(19): siRNA sense strand
cauagaaguuccagaauca

SEQ ID NO: 1360518 - RNA, 19 nt, Homo sapiens
  misc_RNA (1)...(19): siRNA sense strand
agacaaacccgaauugaaa

SEQ ID NO: 1360519 - RNA, 19 nt, Homo sapiens
  misc_RNA (1)...(19): siRNA sense strand
ggaacaauuuacucucuga

SEQ ID NO: 1360520 - RNA, 19 nt, Homo sapiens
  misc_RNA (1)...(19): siRNA sense strand
gaaaucaagcccaguucua

SEQ ID NO: 1360521 - RNA, 19 nt, Homo sapiens
  misc_RNA (1)...(19): siRNA sense strand
gaaagacggccaagaagug

SEQ ID NO: 1360522 - RNA, 19 nt, Homo sapiens
  misc_RNA (1)...(19): siRNA sense strand
ccaagcaauugaucacuuu

SEQ ID NO: 1360523 - RNA, 19 nt, Homo sapiens
  misc_RNA (1)...(19): siRNA sense strand
gagaaggcauuacuaccaa

SEQ ID NO: 1360524 - RNA, 19 nt, Homo sapiens
  misc_RNA (1)...(19): siRNA sense strand
gaaaacaguuguaccuaaa

SEQ ID NO: 1360525 - RNA, 19 nt, Homo sapiens
  misc_RNA (1)...(19): siRNA sense strand
caagaaaugcuuuaucaga

SEQ ID NO: 1360526 - RNA, 19 nt, Homo sapiens
  misc_RNA (1)...(19): siRNA sense strand
gaaggaacuuacacguuug

SEQ ID NO: 1360527 - RNA, 19 nt, Homo sapiens
  misc_RNA (1)...(19): siRNA sense strand
aaacagcgacuagucauua

SEQ ID NO: 1360528 - RNA, 19 nt, Homo sapiens
  misc_RNA (1)...(19): siRNA sense strand
caagugagacuccaaguga

SEQ ID NO: 1360529 - RNA, 19 nt, Homo sapiens
  misc_RNA (1)...(19): siRNA sense strand
gaaguugugucuccugauc

SEQ ID NO: 1360530 - RNA, 19 nt, Homo sapiens
  misc_RNA (1)...(19): siRNA sense strand
gaagaagcgagccauguuu

SEQ ID NO: 1360531 - RNA, 19 nt, Homo sapiens
  misc_RNA (1)...(19): siRNA sense strand
ccaggaagcuguguuugaa

SEQ ID NO: 1360532 - RNA, 19 nt, Homo sapiens
  misc_RNA (1)...(19): siRNA sense strand
gaaacaacagaaaccauuu

SEQ ID NO: 1360533 - RNA, 19 nt, Homo sapiens
  misc_RNA (1)...(19): siRNA sense strand
gcaagcuggugauuucuau

SEQ ID NO: 1360534 - RNA, 19 nt, Homo sapiens
  misc_RNA (1)...(19): siRNA sense strand
cauccaaccugcucaagaa

SEQ ID NO: 1360535 - RNA, 19 nt, Homo sapiens
  misc_RNA (1)...(19): siRNA sense strand
gaagauugaagcccacuuu

SEQ ID NO: 1360536 - RNA, 19 nt, Homo sapiens
  misc_RNA (1)...(19): siRNA sense strand
gcucagaucucagaaucaa

SEQ ID NO: 1360537 - RNA, 19 nt, Homo sapiens
  misc_RNA (1)...(19): siRNA sense strand
gaacaagccuuaauuagga

SEQ ID NO: 1360538 - RNA, 19 nt, Homo sapiens
  misc_RNA (1)...(19): siRNA sense strand
gaaacaagaugcugacaaa

SEQ ID NO: 1360539 - RNA, 19 nt, Homo sapiens
  misc_RNA (1)...(19): siRNA sense strand
gaucaggaauuccauauuu

SEQ ID NO: 1360540 - RNA, 19 nt, Homo sapiens
  misc_RNA (1)...(19): siRNA sense strand
ggaagaaggugaucucuau

SEQ ID NO: 1360541 - RNA, 19 nt, Homo sapiens
  misc_RNA (1)...(19): siRNA sense strand
ggucagaacuuauguagaa

SEQ ID NO: 1360542 - RNA, 19 nt, Homo sapiens
  misc_RNA (1)...(19): siRNA sense strand
gcaggcagaucuucaauuu

SEQ ID NO: 1360543 - RNA, 19 nt, Homo sapiens
  misc_RNA (1)...(19): siRNA sense strand
guggagacauuacauauua

SEQ ID NO: 1360544 - RNA, 19 nt, Homo sapiens
  misc_RNA (1)...(19): siRNA sense strand
gaaaagggcugaaagaauu

SEQ ID NO: 1360545 - RNA, 19 nt, Homo sapiens
  misc_RNA (1)...(19): siRNA sense strand
gaaagaacuucaggacaua

SEQ ID NO: 1360546 - RNA, 19 nt, Homo sapiens
  misc_RNA (1)...(19): siRNA sense strand
gaacagaagagggcuauua

SEQ ID NO: 1360547 - RNA, 19 nt, Homo sapiens
  misc_RNA (1)...(19): siRNA sense strand
gaacuuauguagaagauca

SEQ ID NO: 1360548 - RNA, 19 nt, Homo sapiens
  misc_RNA (1)...(19): siRNA sense strand
gaugaaagaugaugaagga

SEQ ID NO: 1360549 - RNA, 19 nt, Homo sapiens
  misc_RNA (1)...(19): siRNA sense strand
gggagaagcugcccuuaaa

SEQ ID NO: 1360550 - RNA, 19 nt, Homo sapiens
  misc_RNA (1)...(19): siRNA sense strand
caaauuagaugacauugga

SEQ ID NO: 1360551 - RNA, 19 nt, Homo sapiens
  misc_RNA (1)...(19): siRNA sense strand
ccaaagaaguugugaaguu

SEQ ID NO: 1360552 - RNA, 19 nt, Homo sapiens
  misc_RNA (1)...(19): siRNA sense strand
caggaaagcuucaguuuga

SEQ ID NO: 1360553 - RNA, 19 nt, Homo sapiens
  misc_RNA (1)...(19): siRNA sense strand
gaaggcaucucuuacaaau

SEQ ID NO: 1360554 - RNA, 19 nt, Homo sapiens
  misc_RNA (1)...(19): siRNA sense strand
gaugaaagaugaccaggaa

SEQ ID NO: 1360555 - RNA, 19 nt, Homo sapiens
  misc_RNA (1)...(19): siRNA sense strand
ugaaggaacuuacacguuu

SEQ ID NO: 1360556 - RNA, 19 nt, Homo sapiens
  misc_RNA (1)...(19): siRNA sense strand
gguacucaaucacuaauua

SEQ ID NO: 1360557 - RNA, 19 nt, Homo sapiens
  misc_RNA (1)...(19): siRNA sense strand
gaccuuaccuguacagaaa

SEQ ID NO: 1360558 - RNA, 19 nt, Homo sapiens
  misc_RNA (1)...(19): siRNA sense strand
gaagagggcuauuaugaag

SEQ ID NO: 1360559 - RNA, 19 nt, Homo sapiens
  misc_RNA (1)...(19): siRNA sense strand
ugaagaagauggagaagaa

SEQ ID NO: 1360560 - RNA, 19 nt, Homo sapiens
  misc_RNA (1)...(19): siRNA sense strand
gaagagaaacgcuuuguug

SEQ ID NO: 1360561 - RNA, 19 nt, Homo sapiens
  misc_RNA (1)...(19): siRNA sense strand
gaaaucaaaucaacugaca

SEQ ID NO: 1360562 - RNA, 19 nt, Homo sapiens
  misc_RNA (1)...(19): siRNA sense strand
gaagaaugguguggaaauu

SEQ ID NO: 1360563 - RNA, 19 nt, Homo sapiens
  misc_RNA (1)...(19): siRNA sense strand
ggagaaagauaccaaaugg

SEQ ID NO: 1360564 - RNA, 19 nt, Homo sapiens
  misc_RNA (1)...(19): siRNA sense strand
caaagugaguuacaacaaa

SEQ ID NO: 1360565 - RNA, 19 nt, Homo sapiens
  misc_RNA (1)...(19): siRNA sense strand
cuaaagaggugaaacaaga

SEQ ID NO: 1360566 - RNA, 19 nt, Homo sapiens
  misc_RNA (1)...(19): siRNA sense strand
gagaauggcucaugaaggu

SEQ ID NO: 1360567 - RNA, 19 nt, Homo sapiens
  misc_RNA (1)...(19): siRNA sense strand
gaaacaauacugagaacua

SEQ ID NO: 1360568 - RNA, 19 nt, Homo sapiens
  misc_RNA (1)...(19): siRNA sense strand
gcaaauaacucaggagaag

SEQ ID NO: 1360569 - RNA, 19 nt, Homo sapiens
  misc_RNA (1)...(19): siRNA sense strand
gcagagccacuaacaaaua

SEQ ID NO: 1360570 - RNA, 19 nt, Homo sapiens
  misc_RNA (1)...(19): siRNA sense strand
guauaaagauggcauugaa

SEQ ID NO: 1360571 - RNA, 19 nt, Homo sapiens
  misc_RNA (1)...(19): siRNA sense strand
caucaaacauggagaaaga

SEQ ID NO: 1360572 - RNA, 19 nt, Homo sapiens
  misc_RNA (1)...(19): siRNA sense strand
gaaggaaaaugguaucaua

SEQ ID NO: 1360573 - RNA, 19 nt, Homo sapiens
  misc_RNA (1)...(19): siRNA sense strand
gaacaagaaacaauacuga

SEQ ID NO: 1360574 - RNA, 19 nt, Homo sapiens
  misc_RNA (1)...(19): siRNA sense strand
caacauagcuggagaaacc

SEQ ID NO: 1360575 - RNA, 19 nt, Homo sapiens
  misc_RNA (1)...(19): siRNA sense strand
gaagagcgcuuugaaguac

SEQ ID NO: 1360576 - RNA, 19 nt, Homo sapiens
  misc_RNA (1)...(19): siRNA sense strand
gaauugauguccuguggaa

SEQ ID NO: 1360577 - RNA, 19 nt, Homo sapiens
  misc_RNA (1)...(19): siRNA sense strand
gaaagaauccagagccaaa

SEQ ID NO: 1360578 - RNA, 19 nt, Homo sapiens
  misc_RNA (1)...(19): siRNA sense strand
ggauacagauacaaaguga

SEQ ID NO: 1360579 - RNA, 19 nt, Homo sapiens
  misc_RNA (1)...(19): siRNA sense strand
gcagaucacagacagaaua

SEQ ID NO: 1360580 - RNA, 19 nt, Homo sapiens
  misc_RNA (1)...(19): siRNA sense strand
gaaaccaacuguaaucucu

SEQ ID NO: 1360581 - RNA, 19 nt, Homo sapiens
  misc_RNA (1)...(19): siRNA sense strand
ggacauagaaguuccagaa

SEQ ID NO: 1360582 - RNA, 19 nt, Homo sapiens
  misc_RNA (1)...(19): siRNA sense strand
ggauauccauuaccaaaga

SEQ ID NO: 1360583 - RNA, 19 nt, Homo sapiens
  misc_RNA (1)...(19): siRNA sense strand
caaagaaguugugaaguug

SEQ ID NO: 1360584 - RNA, 19 nt, Homo sapiens
  misc_RNA (1)...(19): siRNA sense strand
caucaggaauguucacuuu

SEQ ID NO: 1360585 - RNA, 19 nt, Homo sapiens
  misc_RNA (1)...(19): siRNA sense strand
gaauuagagugcauuguau

SEQ ID NO: 1360586 - RNA, 19 nt, Homo sapiens
  misc_RNA (1)...(19): siRNA sense strand
uaaagaagaugguacucaa

SEQ ID NO: 1360587 - RNA, 19 nt, Homo sapiens
  misc_RNA (1)...(19): siRNA sense strand
uguggaagcucgucauaua

SEQ ID NO: 1360588 - RNA, 19 nt, Homo sapiens
  misc_RNA (1)...(19): siRNA sense strand
gaaaugaaagucagagcua

SEQ ID NO: 1360589 - RNA, 19 nt, Homo sapiens
  misc_RNA (1)...(19): siRNA sense strand
caaauggacuuucuacaag

SEQ ID NO: 1360590 - RNA, 19 nt, Homo sapiens
  misc_RNA (1)...(19): siRNA sense strand
ggaaaugccuguuuaucca

SEQ ID NO: 1360591 - RNA, 19 nt, Homo sapiens
  misc_RNA (1)...(19): siRNA sense strand
acacaaauauguaguggaa

SEQ ID NO: 1360592 - RNA, 19 nt, Homo sapiens
  misc_RNA (1)...(19): siRNA sense strand
ggaagaugcuggaaauuac

SEQ ID NO: 1360593 - RNA, 19 nt, Homo sapiens
  misc_RNA (1)...(19): siRNA sense strand
ccaaagaguuaacugaaga

SEQ ID NO: 1360594 - RNA, 19 nt, Homo sapiens
  misc_RNA (1)...(19): siRNA sense strand
cggaagagcugcgcaguaa

SEQ ID NO: 1360595 - RNA, 19 nt, Homo sapiens
  misc_RNA (1)...(19): siRNA sense strand
uaaggaagaugcuggaaau

SEQ ID NO: 1360596 - RNA, 19 nt, Homo sapiens
  misc_RNA (1)...(19): siRNA sense strand
ucagggaccuauucaguaa

SEQ ID NO: 1360597 - RNA, 19 nt, Homo sapiens
  misc_RNA (1)...(19): siRNA sense strand
gcacggaugucaccugcaa

SEQ ID NO: 1360598 - RNA, 19 nt, Homo sapiens
  misc_RNA (1)...(19): siRNA sense strand
gagaugugguuaugacuga

SEQ ID NO: 1360599 - RNA, 19 nt, Homo sapiens
  misc_RNA (1)...(19): siRNA sense strand
caagaacaaauccaaguua

SEQ ID NO: 1360600 - RNA, 19 nt, Homo sapiens
  misc_RNA (1)...(19): siRNA sense strand
gagaaacuauggcuacuag

SEQ ID NO: 1360601 - RNA, 19 nt, Homo sapiens
  misc_RNA (1)...(19): siRNA sense strand
ggagaagacugcuguaacu

SEQ ID NO: 1360602 - RNA, 19 nt, Homo sapiens
  misc_RNA (1)...(19): siRNA sense strand
gcacauaucaucacagauc

SEQ ID NO: 1360603 - RNA, 19 nt, Homo sapiens
  misc_RNA (1)...(19): siRNA sense strand
ggaaacacauuaaggacau

SEQ ID NO: 1360604 - RNA, 19 nt, Homo sapiens
  misc_RNA (1)...(19): siRNA sense strand
gaaauuaagccaagugaca

SEQ ID NO: 1360605 - RNA, 19 nt, Homo sapiens
  misc_RNA (1)...(19): siRNA sense strand
gaugaaagacggccaagaa

SEQ ID NO: 1360606 - RNA, 19 nt, Homo sapiens
  misc_RNA (1)...(19): siRNA sense strand
guuaaagucuccuuggaaa

SEQ ID NO: 1360607 - RNA, 19 nt, Homo sapiens
  misc_RNA (1)...(19): siRNA sense strand
gagcucaagucucgaaaga

SEQ ID NO: 1360608 - RNA, 19 nt, Homo sapiens
  misc_RNA (1)...(19): siRNA sense strand
gaaagaauuacccaugaaa

SEQ ID NO: 1360609 - RNA, 19 nt, Homo sapiens
  misc_RNA (1)...(19): siRNA sense strand
gaaggaaucuacacugcau

SEQ ID NO: 1360610 - RNA, 19 nt, Homo sapiens
  misc_RNA (1)...(19): siRNA sense strand
gauuaugaguuacugauga

SEQ ID NO: 1360611 - RNA, 19 nt, Homo sapiens
  misc_RNA (1)...(19): siRNA sense strand
ugaagaagcugauuaugag

SEQ ID NO: 1360612 - RNA, 19 nt, Homo sapiens
  misc_RNA (1)...(19): siRNA sense strand
gagaaacgcuuuguugagu

SEQ ID NO: 1360613 - RNA, 19 nt, Homo sapiens
  misc_RNA (1)...(19): siRNA sense strand
gcaggugucagaagaauuu

SEQ ID NO: 1360614 - RNA, 19 nt, Homo sapiens
  misc_RNA (1)...(19): siRNA sense strand
gaaauuuacuacagaagag

SEQ ID NO: 1360615 - RNA, 19 nt, Homo sapiens
  misc_RNA (1)...(19): siRNA sense strand
ggaaauugccgaagcuuau

SEQ ID NO: 1360616 - RNA, 19 nt, Homo sapiens
  misc_RNA (1)...(19): siRNA sense strand
gaaauugagaugagugaaa

SEQ ID NO: 1360617 - RNA, 19 nt, Homo sapiens
  misc_RNA (1)...(19): siRNA sense strand
cauagaaguuccagaauca

SEQ ID NO: 1360618 - RNA, 19 nt, Homo sapiens
  misc_RNA (1)...(19): siRNA sense strand
agacaaacccgaauugaaa

SEQ ID NO: 1360619 - RNA, 19 nt, Homo sapiens
  misc_RNA (1)...(19): siRNA sense strand
ggaacaauuuacucucuga

SEQ ID NO: 1360620 - RNA, 19 nt, Homo sapiens
  misc_RNA (1)...(19): siRNA sense strand
gaaaucaagcccaguucua

SEQ ID NO: 1360621 - RNA, 19 nt, Homo sapiens
  misc_RNA (1)...(19): siRNA sense strand
gaaagacggccaagaagug

SEQ ID NO: 1360622 - RNA, 19 nt, Homo sapiens
  misc_RNA (1)...(19): siRNA sense strand
ccaagcaauugaucacuuu

SEQ ID NO: 1360623 - RNA, 19 nt, Homo sapiens
  misc_RNA (1)...(19): siRNA sense strand
gagaaggcauuacuaccaa

SEQ ID NO: 1360624 - RNA, 19 nt, Homo sapiens
  misc_RNA (1)...(19): siRNA sense strand
gaaaacaguuguaccuaaa

SEQ ID NO: 1360625 - RNA, 19 nt, Homo sapiens
  misc_RNA (1)...(19): siRNA sense strand
caagaaaugcuuuaucaga

SEQ ID NO: 1360626 - RNA, 19 nt, Homo sapiens
  misc_RNA (1)...(19): siRNA sense strand
gaaggaacuuacacguuug

SEQ ID NO: 1360627 - RNA, 19 nt, Homo sapiens
  misc_RNA (1)...(19): siRNA sense strand
aaacagcgacuagucauua

SEQ ID NO: 1360628 - RNA, 19 nt, Homo sapiens
  misc_RNA (1)...(19): siRNA sense strand
caagugagacuccaaguga

SEQ ID NO: 1360629 - RNA, 19 nt, Homo sapiens
  misc_RNA (1)...(19): siRNA sense strand
gaaguugugucuccugauc

SEQ ID NO: 1360630 - RNA, 19 nt, Homo sapiens
  misc_RNA (1)...(19): siRNA sense strand
gaagaagcgagccauguuu

SEQ ID NO: 1360631 - RNA, 19 nt, Homo sapiens
  misc_RNA (1)...(19): siRNA sense strand
ccaggaagcuguguuugaa

SEQ ID NO: 1360632 - RNA, 19 nt, Homo sapiens
  misc_RNA (1)...(19): siRNA sense strand
gaaacaacagaaaccauuu

SEQ ID NO: 1360633 - RNA, 19 nt, Homo sapiens
  misc_RNA (1)...(19): siRNA sense strand
gcaagcuggugauuucuau

SEQ ID NO: 1360634 - RNA, 19 nt, Homo sapiens
  misc_RNA (1)...(19): siRNA sense strand
cauccaaccugcucaagaa

SEQ ID NO: 1360635 - RNA, 19 nt, Homo sapiens
  misc_RNA (1)...(19): siRNA sense strand
gaagauugaagcccacuuu

SEQ ID NO: 1360636 - RNA, 19 nt, Homo sapiens
  misc_RNA (1)...(19): siRNA sense strand
gcucagaucucagaaucaa

SEQ ID NO: 1360637 - RNA, 19 nt, Homo sapiens
  misc_RNA (1)...(19): siRNA sense strand
gaacaagccuuaauuagga

SEQ ID NO: 1360638 - RNA, 19 nt, Homo sapiens
  misc_RNA (1)...(19): siRNA sense strand
gaaacaagaugcugacaaa

SEQ ID NO: 1360639 - RNA, 19 nt, Homo sapiens
  misc_RNA (1)...(19): siRNA sense strand
gaucaggaauuccauauuu

SEQ ID NO: 1360640 - RNA, 19 nt, Homo sapiens
  misc_RNA (1)...(19): siRNA sense strand
ggaagaaggugaucucuau

SEQ ID NO: 1360641 - RNA, 19 nt, Homo sapiens
  misc_RNA (1)...(19): siRNA sense strand
ggucagaacuuauguagaa

SEQ ID NO: 1360642 - RNA, 19 nt, Homo sapiens
  misc_RNA (1)...(19): siRNA sense strand
gcaggcagaucuucaauuu

SEQ ID NO: 1360643 - RNA, 19 nt, Homo sapiens
  misc_RNA (1)...(19): siRNA sense strand
guggagacauuacauauua

SEQ ID NO: 1360644 - RNA, 19 nt, Homo sapiens
  misc_RNA (1)...(19): siRNA sense strand
gaaaagggcugaaagaauu

SEQ ID NO: 1360645 - RNA, 19 nt, Homo sapiens
  misc_RNA (1)...(19): siRNA sense strand
gaaagaacuucaggacaua

SEQ ID NO: 1360646 - RNA, 19 nt, Homo sapiens
  misc_RNA (1)...(19): siRNA sense strand
gaacagaagagggcuauua

SEQ ID NO: 1360647 - RNA, 19 nt, Homo sapiens
  misc_RNA (1)...(19): siRNA sense strand
gaacuuauguagaagauca

SEQ ID NO: 1360648 - RNA, 19 nt, Homo sapiens
  misc_RNA (1)...(19): siRNA sense strand
gaugaaagaugaugaagga

SEQ ID NO: 1360649 - RNA, 19 nt, Homo sapiens
  misc_RNA (1)...(19): siRNA sense strand
gggagaagcugcccuuaaa

SEQ ID NO: 1360650 - RNA, 19 nt, Homo sapiens
  misc_RNA (1)...(19): siRNA sense strand
caaauuagaugacauugga

SEQ ID NO: 1360651 - RNA, 19 nt, Homo sapiens
  misc_RNA (1)...(19): siRNA sense strand
ccaaagaaguugugaaguu

SEQ ID NO: 1360652 - RNA, 19 nt, Homo sapiens
  misc_RNA (1)...(19): siRNA sense strand
caggaaagcuucaguuuga

SEQ ID NO: 1360653 - RNA, 19 nt, Homo sapiens
  misc_RNA (1)...(19): siRNA sense strand
gaaggcaucucuuacaaau

SEQ ID NO: 1360654 - RNA, 19 nt, Homo sapiens
  misc_RNA (1)...(19): siRNA sense strand
gaugaaagaugaccaggaa

SEQ ID NO: 1360655 - RNA, 19 nt, Homo sapiens
  misc_RNA (1)...(19): siRNA sense strand
ugaaggaacuuacacguuu

SEQ ID NO: 1360656 - RNA, 19 nt, Homo sapiens
  misc_RNA (1)...(19): siRNA sense strand
gguacucaaucacuaauua

SEQ ID NO: 1360657 - RNA, 19 nt, Homo sapiens
  misc_RNA (1)...(19): siRNA sense strand
gaccuuaccuguacagaaa

SEQ ID NO: 1360658 - RNA, 19 nt, Homo sapiens
  misc_RNA (1)...(19): siRNA sense strand
gaagagggcuauuaugaag

SEQ ID NO: 1360659 - RNA, 19 nt, Homo sapiens
  misc_RNA (1)...(19): siRNA sense strand
ugaagaagauggagaagaa

SEQ ID NO: 1360660 - RNA, 19 nt, Homo sapiens
  misc_RNA (1)...(19): siRNA sense strand
gaagagaaacgcuuuguug

SEQ ID NO: 1360661 - RNA, 19 nt, Homo sapiens
  misc_RNA (1)...(19): siRNA sense strand
gaaaucaaaucaacugaca

SEQ ID NO: 1360662 - RNA, 19 nt, Homo sapiens
  misc_RNA (1)...(19): siRNA sense strand
gaagaaugguguggaaauu

SEQ ID NO: 1360663 - RNA, 19 nt, Homo sapiens
  misc_RNA (1)...(19): siRNA sense strand
ggagaaagauaccaaaugg

SEQ ID NO: 1360664 - RNA, 19 nt, Homo sapiens
  misc_RNA (1)...(19): siRNA sense strand
caaagugaguuacaacaaa

SEQ ID NO: 1360665 - RNA, 19 nt, Homo sapiens
  misc_RNA (1)...(19): siRNA sense strand
cuaaagaggugaaacaaga

SEQ ID NO: 1360666 - RNA, 19 nt, Homo sapiens
  misc_RNA (1)...(19): siRNA sense strand
gagaauggcucaugaaggu

SEQ ID NO: 1360667 - RNA, 19 nt, Homo sapiens
  misc_RNA (1)...(19): siRNA sense strand
gaaacaauacugagaacua

SEQ ID NO: 1360668 - RNA, 19 nt, Homo sapiens
  misc_RNA (1)...(19): siRNA sense strand
gcaaauaacucaggagaag

SEQ ID NO: 1360669 - RNA, 19 nt, Homo sapiens
  misc_RNA (1)...(19): siRNA sense strand
gcagagccacuaacaaaua

SEQ ID NO: 1360670 - RNA, 19 nt, Homo sapiens
  misc_RNA (1)...(19): siRNA sense strand
guauaaagauggcauugaa

SEQ ID NO: 1360671 - RNA, 19 nt, Homo sapiens
  misc_RNA (1)...(19): siRNA sense strand
caucaaacauggagaaaga

SEQ ID NO: 1360672 - RNA, 19 nt, Homo sapiens
  misc_RNA (1)...(19): siRNA sense strand
gaaggaaaaugguaucaua

SEQ ID NO: 1360673 - RNA, 19 nt, Homo sapiens
  misc_RNA (1)...(19): siRNA sense strand
gaacaagaaacaauacuga

SEQ ID NO: 1360674 - RNA, 19 nt, Homo sapiens
  misc_RNA (1)...(19): siRNA sense strand
caacauagcuggagaaacc

SEQ ID NO: 1360675 - RNA, 19 nt, Homo sapiens
  misc_RNA (1)...(19): siRNA sense strand
gaagagcgcuuugaaguac

SEQ ID NO: 1360676 - RNA, 19 nt, Homo sapiens
  misc_RNA (1)...(19): siRNA sense strand
gaauugauguccuguggaa

SEQ ID NO: 1360677 - RNA, 19 nt, Homo sapiens
  misc_RNA (1)...(19): siRNA sense strand
gaaagaauccagagccaaa

SEQ ID NO: 1360678 - RNA, 19 nt, Homo sapiens
  misc_RNA (1)...(19): siRNA sense strand
ggauacagauacaaaguga

SEQ ID NO: 1360679 - RNA, 19 nt, Homo sapiens
  misc_RNA (1)...(19): siRNA sense strand
gcagaucacagacagaaua

SEQ ID NO: 1360680 - RNA, 19 nt, Homo sapiens
  misc_RNA (1)...(19): siRNA sense strand
gaaaccaacuguaaucucu

SEQ ID NO: 1360681 - RNA, 19 nt, Homo sapiens
  misc_RNA (1)...(19): siRNA sense strand
ggacauagaaguuccagaa

SEQ ID NO: 1360682 - RNA, 19 nt, Homo sapiens
  misc_RNA (1)...(19): siRNA sense strand
ggauauccauuaccaaaga

SEQ ID NO: 1360683 - RNA, 19 nt, Homo sapiens
  misc_RNA (1)...(19): siRNA sense strand
caaagaaguugugaaguug

SEQ ID NO: 1360684 - RNA, 19 nt, Homo sapiens
  misc_RNA (1)...(19): siRNA sense strand
caucaggaauguucacuuu

SEQ ID NO: 1360685 - RNA, 19 nt, Homo sapiens
  misc_RNA (1)...(19): siRNA sense strand
gaauuagagugcauuguau

SEQ ID NO: 1360686 - RNA, 19 nt, Homo sapiens
  misc_RNA (1)...(19): siRNA sense strand
uaaagaagaugguacucaa

SEQ ID NO: 1360687 - RNA, 19 nt, Homo sapiens
  misc_RNA (1)...(19): siRNA sense strand
uguggaagcucgucauaua

SEQ ID NO: 1360688 - RNA, 19 nt, Homo sapiens
  misc_RNA (1)...(19): siRNA sense strand
gaaaugaaagucagagcua

SEQ ID NO: 1360689 - RNA, 19 nt, Homo sapiens
  misc_RNA (1)...(19): siRNA sense strand
caaauggacuuucuacaag

SEQ ID NO: 1360690 - RNA, 19 nt, Homo sapiens
  misc_RNA (1)...(19): siRNA sense strand
ggaaaugccuguuuaucca

SEQ ID NO: 1360691 - RNA, 19 nt, Homo sapiens
  misc_RNA (1)...(19): siRNA sense strand
acacaaauauguaguggaa

SEQ ID NO: 1360692 - RNA, 19 nt, Homo sapiens
  misc_RNA (1)...(19): siRNA sense strand
ggaagaugcuggaaauuac

SEQ ID NO: 1360693 - RNA, 19 nt, Homo sapiens
  misc_RNA (1)...(19): siRNA sense strand
ccaaagaguuaacugaaga

SEQ ID NO: 1360694 - RNA, 19 nt, Homo sapiens
  misc_RNA (1)...(19): siRNA sense strand
cggaagagcugcgcaguaa

SEQ ID NO: 1360695 - RNA, 19 nt, Homo sapiens
  misc_RNA (1)...(19): siRNA sense strand
uaaggaagaugcuggaaau

SEQ ID NO: 1360696 - RNA, 19 nt, Homo sapiens
  misc_RNA (1)...(19): siRNA sense strand
ucagggaccuauucaguaa

SEQ ID NO: 1360697 - RNA, 19 nt, Homo sapiens
  misc_RNA (1)...(19): siRNA sense strand
gcacggaugucaccugcaa

SEQ ID NO: 1360698 - RNA, 19 nt, Homo sapiens
  misc_RNA (1)...(19): siRNA sense strand
gagaugugguuaugacuga

SEQ ID NO: 1360699 - RNA, 19 nt, Homo sapiens
  misc_RNA (1)...(19): siRNA sense strand
caagaacaaauccaaguua

SEQ ID NO: 1360700 - RNA, 19 nt, Homo sapiens
  misc_RNA (1)...(19): siRNA sense strand
gagaaacuauggcuacuag

SEQ ID NO: 1360701 - RNA, 19 nt, Homo sapiens
  misc_RNA (1)...(19): siRNA sense strand
ggagaagacugcuguaacu

SEQ ID NO: 1360702 - RNA, 19 nt, Homo sapiens
  misc_RNA (1)...(19): siRNA sense strand
gcacauaucaucacagauc

SEQ ID NO: 1360703 - RNA, 19 nt, Homo sapiens
  misc_RNA (1)...(19): siRNA sense strand
ggaaacacauuaaggacau

SEQ ID NO: 1360704 - RNA, 19 nt, Homo sapiens
  misc_RNA (1)...(19): siRNA sense strand
gaaauuaagccaagugaca

SEQ ID NO: 1360705 - RNA, 19 nt, Homo sapiens
  misc_RNA (1)...(19): siRNA sense strand
gaugaaagacggccaagaa

SEQ ID NO: 1360706 - RNA, 19 nt, Homo sapiens
  misc_RNA (1)...(19): siRNA sense strand
guuaaagucuccuuggaaa

SEQ ID NO: 1360707 - RNA, 19 nt, Homo sapiens
  misc_RNA (1)...(19): siRNA sense strand
gagcucaagucucgaaaga

SEQ ID NO: 1360708 - RNA, 19 nt, Homo sapiens
  misc_RNA (1)...(19): siRNA sense strand
gaaagaauuacccaugaaa

SEQ ID NO: 1360709 - RNA, 19 nt, Homo sapiens
  misc_RNA (1)...(19): siRNA sense strand
gaaggaaucuacacugcau

SEQ ID NO: 1360710 - RNA, 19 nt, Homo sapiens
  misc_RNA (1)...(19): siRNA sense strand
gauuaugaguuacugauga

SEQ ID NO: 1360711 - RNA, 19 nt, Homo sapiens
  misc_RNA (1)...(19): siRNA sense strand
ugaagaagcugauuaugag

SEQ ID NO: 1360712 - RNA, 19 nt, Homo sapiens
  misc_RNA (1)...(19): siRNA sense strand
gagaaacgcuuuguugagu

SEQ ID NO: 1360713 - RNA, 19 nt, Homo sapiens
  misc_RNA (1)...(19): siRNA sense strand
gcaggugucagaagaauuu

SEQ ID NO: 1360714 - RNA, 19 nt, Homo sapiens
  misc_RNA (1)...(19): siRNA sense strand
gaaauuuacuacagaagag

SEQ ID NO: 1360715 - RNA, 19 nt, Homo sapiens
  misc_RNA (1)...(19): siRNA sense strand
ggaaauugccgaagcuuau

SEQ ID NO: 1360716 - RNA, 19 nt, Homo sapiens
  misc_RNA (1)...(19): siRNA sense strand
gaaauugagaugagugaaa

SEQ ID NO: 1360717 - RNA, 19 nt, Homo sapiens
  misc_RNA (1)...(19): siRNA sense strand
cauagaaguuccagaauca

SEQ ID NO: 1360718 - RNA, 19 nt, Homo sapiens
  misc_RNA (1)...(19): siRNA sense strand
agacaaacccgaauugaaa

SEQ ID NO: 1360719 - RNA, 19 nt, Homo sapiens
  misc_RNA (1)...(19): siRNA sense strand
ggaacaauuuacucucuga

SEQ ID NO: 1360720 - RNA, 19 nt, Homo sapiens
  misc_RNA (1)...(19): siRNA sense strand
gaaaucaagcccaguucua

SEQ ID NO: 1360721 - RNA, 19 nt, Homo sapiens
  misc_RNA (1)...(19): siRNA sense strand
gaaagacggccaagaagug

SEQ ID NO: 1360722 - RNA, 19 nt, Homo sapiens
  misc_RNA (1)...(19): siRNA sense strand
ccaagcaauugaucacuuu

SEQ ID NO: 1360723 - RNA, 19 nt, Homo sapiens
  misc_RNA (1)...(19): siRNA sense strand
gagaaggcauuacuaccaa

SEQ ID NO: 1360724 - RNA, 19 nt, Homo sapiens
  misc_RNA (1)...(19): siRNA sense strand
gaaaacaguuguaccuaaa

SEQ ID NO: 1360725 - RNA, 19 nt, Homo sapiens
  misc_RNA (1)...(19): siRNA sense strand
caagaaaugcuuuaucaga

SEQ ID NO: 1360726 - RNA, 19 nt, Homo sapiens
  misc_RNA (1)...(19): siRNA sense strand
gaaggaacuuacacguuug

SEQ ID NO: 1360727 - RNA, 19 nt, Homo sapiens
  misc_RNA (1)...(19): siRNA sense strand
aaacagcgacuagucauua

SEQ ID NO: 1360728 - RNA, 19 nt, Homo sapiens
  misc_RNA (1)...(19): siRNA sense strand
caagugagacuccaaguga

SEQ ID NO: 1360729 - RNA, 19 nt, Homo sapiens
  misc_RNA (1)...(19): siRNA sense strand
gaaguugugucuccugauc

SEQ ID NO: 1360730 - RNA, 19 nt, Homo sapiens
  misc_RNA (1)...(19): siRNA sense strand
gaagaagcgagccauguuu

SEQ ID NO: 1360731 - RNA, 19 nt, Homo sapiens
  misc_RNA (1)...(19): siRNA sense strand
ccaggaagcuguguuugaa

SEQ ID NO: 1360732 - RNA, 19 nt, Homo sapiens
  misc_RNA (1)...(19): siRNA sense strand
gaaacaacagaaaccauuu

SEQ ID NO: 1360733 - RNA, 19 nt, Homo sapiens
  misc_RNA (1)...(19): siRNA sense strand
gcaagcuggugauuucuau

SEQ ID NO: 1360734 - RNA, 19 nt, Homo sapiens
  misc_RNA (1)...(19): siRNA sense strand
cauccaaccugcucaagaa

SEQ ID NO: 1360735 - RNA, 19 nt, Homo sapiens
  misc_RNA (1)...(19): siRNA sense strand
gaagauugaagcccacuuu

SEQ ID NO: 1360736 - RNA, 19 nt, Homo sapiens
  misc_RNA (1)...(19): siRNA sense strand
gcucagaucucagaaucaa

SEQ ID NO: 1360737 - RNA, 19 nt, Homo sapiens
  misc_RNA (1)...(19): siRNA sense strand
caagaagauuggucuguuu

SEQ ID NO: 1360738 - RNA, 19 nt, Homo sapiens
  misc_RNA (1)...(19): siRNA sense strand
gaucugcaccguccaguug

SEQ ID NO: 1360739 - RNA, 19 nt, Homo sapiens
  misc_RNA (1)...(19): siRNA sense strand
acaagaagauuggucuguu

SEQ ID NO: 1360740 - RNA, 19 nt, Homo sapiens
  misc_RNA (1)...(19): siRNA sense strand
gccggugacuuccacaaga

SEQ ID NO: 1360741 - RNA, 19 nt, Homo sapiens
  misc_RNA (1)...(19): siRNA sense strand
ugacagcagugagaagauc

SEQ ID NO: 1360742 - RNA, 19 nt, Homo sapiens
  misc_RNA (1)...(19): siRNA sense strand
ccggugacuuccacaagaa

SEQ ID NO: 1360743 - RNA, 19 nt, Homo sapiens
  misc_RNA (1)...(19): siRNA sense strand
gaagauuggucuguuuugu

SEQ ID NO: 1360744 - RNA, 19 nt, Homo sapiens
  misc_RNA (1)...(19): siRNA sense strand
ugacugugccggugacuuc

SEQ ID NO: 1360745 - RNA, 19 nt, Homo sapiens
  misc_RNA (1)...(19): siRNA sense strand
gagaccagcaguacgagau

SEQ ID NO: 1360746 - RNA, 19 nt, Homo sapiens
  misc_RNA (1)...(19): siRNA sense strand
gcagcucuacgacgugaug

SEQ ID NO: 1360747 - RNA, 19 nt, Homo sapiens
  misc_RNA (1)...(19): siRNA sense strand
gcgcgaggcagagaucgaa

SEQ ID NO: 1360748 - RNA, 19 nt, Homo sapiens
  misc_RNA (1)...(19): siRNA sense strand
caagaagauuggucuguuu

SEQ ID NO: 1360749 - RNA, 19 nt, Homo sapiens
  misc_RNA (1)...(19): siRNA sense strand
gaucugcaccguccaguug

SEQ ID NO: 1360750 - RNA, 19 nt, Homo sapiens
  misc_RNA (1)...(19): siRNA sense strand
acaagaagauuggucuguu

SEQ ID NO: 1360751 - RNA, 19 nt, Homo sapiens
  misc_RNA (1)...(19): siRNA sense strand
gccggugacuuccacaaga

SEQ ID NO: 1360752 - RNA, 19 nt, Homo sapiens
  misc_RNA (1)...(19): siRNA sense strand
ugacagcagugagaagauc

SEQ ID NO: 1360753 - RNA, 19 nt, Homo sapiens
  misc_RNA (1)...(19): siRNA sense strand
ccggugacuuccacaagaa

SEQ ID NO: 1360754 - RNA, 19 nt, Homo sapiens
  misc_RNA (1)...(19): siRNA sense strand
gaagauuggucuguuuugu

SEQ ID NO: 1360755 - RNA, 19 nt, Homo sapiens
  misc_RNA (1)...(19): siRNA sense strand
ugacugugccggugacuuc

SEQ ID NO: 1360756 - RNA, 19 nt, Homo sapiens
  misc_RNA (1)...(19): siRNA sense strand
gagaccagcaguacgagau

SEQ ID NO: 1360757 - RNA, 19 nt, Homo sapiens
  misc_RNA (1)...(19): siRNA sense strand
gcagcucuacgacgugaug

SEQ ID NO: 1360758 - RNA, 19 nt, Homo sapiens
  misc_RNA (1)...(19): siRNA sense strand
gcgcgaggcagagaucgaa

SEQ ID NO: 1360759 - RNA, 19 nt, Homo sapiens
  misc_RNA (1)...(19): siRNA sense strand
caagaagauuggucuguuu

SEQ ID NO: 1360760 - RNA, 19 nt, Homo sapiens
  misc_RNA (1)...(19): siRNA sense strand
gaucugcaccguccaguug

SEQ ID NO: 1360761 - RNA, 19 nt, Homo sapiens
  misc_RNA (1)...(19): siRNA sense strand
acaagaagauuggucuguu

SEQ ID NO: 1360762 - RNA, 19 nt, Homo sapiens
  misc_RNA (1)...(19): siRNA sense strand
gccggugacuuccacaaga

SEQ ID NO: 1360763 - RNA, 19 nt, Homo sapiens
  misc_RNA (1)...(19): siRNA sense strand
ugacagcagugagaagauc

SEQ ID NO: 1360764 - RNA, 19 nt, Homo sapiens
  misc_RNA (1)...(19): siRNA sense strand
ccggugacuuccacaagaa

SEQ ID NO: 1360765 - RNA, 19 nt, Homo sapiens
  misc_RNA (1)...(19): siRNA sense strand
gaagauuggucuguuuugu

SEQ ID NO: 1360766 - RNA, 19 nt, Homo sapiens
  misc_RNA (1)...(19): siRNA sense strand
ugacugugccggugacuuc

SEQ ID NO: 1360767 - RNA, 19 nt, Homo sapiens
  misc_RNA (1)...(19): siRNA sense strand
gagaccagcaguacgagau

SEQ ID NO: 1360768 - RNA, 19 nt, Homo sapiens
  misc_RNA (1)...(19): siRNA sense strand
gcagcucuacgacgugaug

SEQ ID NO: 1360769 - RNA, 19 nt, Homo sapiens
  misc_RNA (1)...(19): siRNA sense strand
gcgcgaggcagagaucgaa

SEQ ID NO: 1360770 - RNA, 19 nt, Homo sapiens
  misc_RNA (1)...(19): siRNA sense strand
caagaagauuggucuguuu

SEQ ID NO: 1360771 - RNA, 19 nt, Homo sapiens
  misc_RNA (1)...(19): siRNA sense strand
gaucugcaccguccaguug

SEQ ID NO: 1360772 - RNA, 19 nt, Homo sapiens
  misc_RNA (1)...(19): siRNA sense strand
acaagaagauuggucuguu

SEQ ID NO: 1360773 - RNA, 19 nt, Homo sapiens
  misc_RNA (1)...(19): siRNA sense strand
gccggugacuuccacaaga

SEQ ID NO: 1360774 - RNA, 19 nt, Homo sapiens
  misc_RNA (1)...(19): siRNA sense strand
ugacagcagugagaagauc

SEQ ID NO: 1360775 - RNA, 19 nt, Homo sapiens
  misc_RNA (1)...(19): siRNA sense strand
ccggugacuuccacaagaa

SEQ ID NO: 1360776 - RNA, 19 nt, Homo sapiens
  misc_RNA (1)...(19): siRNA sense strand
gaagauuggucuguuuugu

SEQ ID NO: 1360777 - RNA, 19 nt, Homo sapiens
  misc_RNA (1)...(19): siRNA sense strand
ugacugugccggugacuuc

SEQ ID NO: 1360778 - RNA, 19 nt, Homo sapiens
  misc_RNA (1)...(19): siRNA sense strand
gagaccagcaguacgagau

SEQ ID NO: 1360779 - RNA, 19 nt, Homo sapiens
  misc_RNA (1)...(19): siRNA sense strand
gcagcucuacgacgugaug

SEQ ID NO: 1360780 - RNA, 19 nt, Homo sapiens
  misc_RNA (1)...(19): siRNA sense strand
gcgcgaggcagagaucgaa

SEQ ID NO: 1360781 - RNA, 19 nt, Homo sapiens
  misc_RNA (1)...(19): siRNA sense strand
caagaagauuggucuguuu

SEQ ID NO: 1360782 - RNA, 19 nt, Homo sapiens
  misc_RNA (1)...(19): siRNA sense strand
acaagaagauuggucuguu

SEQ ID NO: 1360783 - RNA, 19 nt, Homo sapiens
  misc_RNA (1)...(19): siRNA sense strand
gccggugacuuccacaaga

SEQ ID NO: 1360784 - RNA, 19 nt, Homo sapiens
  misc_RNA (1)...(19): siRNA sense strand
ccggugacuuccacaagaa

SEQ ID NO: 1360785 - RNA, 19 nt, Homo sapiens
  misc_RNA (1)...(19): siRNA sense strand
gaagauuggucuguuuugu

SEQ ID NO: 1360786 - RNA, 19 nt, Homo sapiens
  misc_RNA (1)...(19): siRNA sense strand
ugacugugccggugacuuc

SEQ ID NO: 1360787 - RNA, 19 nt, Homo sapiens
  misc_RNA (1)...(19): siRNA sense strand
caagaagauuggucuguuu

SEQ ID NO: 1360788 - RNA, 19 nt, Homo sapiens
  misc_RNA (1)...(19): siRNA sense strand
acaagaagauuggucuguu

SEQ ID NO: 1360789 - RNA, 19 nt, Homo sapiens
  misc_RNA (1)...(19): siRNA sense strand
gccggugacuuccacaaga

SEQ ID NO: 1360790 - RNA, 19 nt, Homo sapiens
  misc_RNA (1)...(19): siRNA sense strand
ccggugacuuccacaagaa

SEQ ID NO: 1360791 - RNA, 19 nt, Homo sapiens
  misc_RNA (1)...(19): siRNA sense strand
gaagauuggucuguuuugu

SEQ ID NO: 1360792 - RNA, 19 nt, Homo sapiens
  misc_RNA (1)...(19): siRNA sense strand
ugacugugccggugacuuc

SEQ ID NO: 1360793 - RNA, 19 nt, Homo sapiens
  misc_RNA (1)...(19): siRNA sense strand
caagaagauuggucuguuu

SEQ ID NO: 1360794 - RNA, 19 nt, Homo sapiens
  misc_RNA (1)...(19): siRNA sense strand
gaucugcaccguccaguug

SEQ ID NO: 1360795 - RNA, 19 nt, Homo sapiens
  misc_RNA (1)...(19): siRNA sense strand
acaagaagauuggucuguu

SEQ ID NO: 1360796 - RNA, 19 nt, Homo sapiens
  misc_RNA (1)...(19): siRNA sense strand
gccggugacuuccacaaga

SEQ ID NO: 1360797 - RNA, 19 nt, Homo sapiens
  misc_RNA (1)...(19): siRNA sense strand
ugacagcagugagaagauc

SEQ ID NO: 1360798 - RNA, 19 nt, Homo sapiens
  misc_RNA (1)...(19): siRNA sense strand
ccggugacuuccacaagaa

SEQ ID NO: 1360799 - RNA, 19 nt, Homo sapiens
  misc_RNA (1)...(19): siRNA sense strand
gaagauuggucuguuuugu

SEQ ID NO: 1360800 - RNA, 19 nt, Homo sapiens
  misc_RNA (1)...(19): siRNA sense strand
ugacugugccggugacuuc

SEQ ID NO: 1360801 - RNA, 19 nt, Homo sapiens
  misc_RNA (1)...(19): siRNA sense strand
gagaccagcaguacgagau

SEQ ID NO: 1360802 - RNA, 19 nt, Homo sapiens
  misc_RNA (1)...(19): siRNA sense strand
gcagcucuacgacgugaug

SEQ ID NO: 1360803 - RNA, 19 nt, Homo sapiens
  misc_RNA (1)...(19): siRNA sense strand
gcgcgaggcagagaucgaa

SEQ ID NO: 1360804 - RNA, 19 nt, Homo sapiens
  misc_RNA (1)...(19): siRNA sense strand
caagaagauuggucuguuu

SEQ ID NO: 1360805 - RNA, 19 nt, Homo sapiens
  misc_RNA (1)...(19): siRNA sense strand
acaagaagauuggucuguu

SEQ ID NO: 1360806 - RNA, 19 nt, Homo sapiens
  misc_RNA (1)...(19): siRNA sense strand
gccggugacuuccacaaga

SEQ ID NO: 1360807 - RNA, 19 nt, Homo sapiens
  misc_RNA (1)...(19): siRNA sense strand
ccggugacuuccacaagaa

SEQ ID NO: 1360808 - RNA, 19 nt, Homo sapiens
  misc_RNA (1)...(19): siRNA sense strand
gaagauuggucuguuuugu

SEQ ID NO: 1360809 - RNA, 19 nt, Homo sapiens
  misc_RNA (1)...(19): siRNA sense strand
ugacugugccggugacuuc

SEQ ID NO: 1360810 - RNA, 19 nt, Homo sapiens
  misc_RNA (1)...(19): siRNA sense strand
caagaagauuggucuguuu

SEQ ID NO: 1360811 - RNA, 19 nt, Homo sapiens
  misc_RNA (1)...(19): siRNA sense strand
acaagaagauuggucuguu

SEQ ID NO: 1360812 - RNA, 19 nt, Homo sapiens
  misc_RNA (1)...(19): siRNA sense strand
gccggugacuuccacaaga

SEQ ID NO: 1360813 - RNA, 19 nt, Homo sapiens
  misc_RNA (1)...(19): siRNA sense strand
ccggugacuuccacaagaa

SEQ ID NO: 1360814 - RNA, 19 nt, Homo sapiens
  misc_RNA (1)...(19): siRNA sense strand
gaagauuggucuguuuugu

SEQ ID NO: 1360815 - RNA, 19 nt, Homo sapiens
  misc_RNA (1)...(19): siRNA sense strand
ugacugugccggugacuuc

SEQ ID NO: 1360816 - RNA, 19 nt, Homo sapiens
  misc_RNA (1)...(19): siRNA sense strand
caagaagauuggucuguuu

SEQ ID NO: 1360817 - RNA, 19 nt, Homo sapiens
  misc_RNA (1)...(19): siRNA sense strand
acaagaagauuggucuguu

SEQ ID NO: 1360818 - RNA, 19 nt, Homo sapiens
  misc_RNA (1)...(19): siRNA sense strand
gccggugacuuccacaaga

SEQ ID NO: 1360819 - RNA, 19 nt, Homo sapiens
  misc_RNA (1)...(19): siRNA sense strand
ccggugacuuccacaagaa

SEQ ID NO: 1360820 - RNA, 19 nt, Homo sapiens
  misc_RNA (1)...(19): siRNA sense strand
gaagauuggucuguuuugu

SEQ ID NO: 1360821 - RNA, 19 nt, Homo sapiens
  misc_RNA (1)...(19): siRNA sense strand
ugacugugccggugacuuc

SEQ ID NO: 1360822 - RNA, 19 nt, Homo sapiens
  misc_RNA (1)...(19): siRNA sense strand
caagaagauuggucuguuu

SEQ ID NO: 1360823 - RNA, 19 nt, Homo sapiens
  misc_RNA (1)...(19): siRNA sense strand
acaagaagauuggucuguu

SEQ ID NO: 1360824 - RNA, 19 nt, Homo sapiens
  misc_RNA (1)...(19): siRNA sense strand
gccggugacuuccacaaga

SEQ ID NO: 1360825 - RNA, 19 nt, Homo sapiens
  misc_RNA (1)...(19): siRNA sense strand
ccggugacuuccacaagaa

SEQ ID NO: 1360826 - RNA, 19 nt, Homo sapiens
  misc_RNA (1)...(19): siRNA sense strand
gaagauuggucuguuuugu

SEQ ID NO: 1360827 - RNA, 19 nt, Homo sapiens
  misc_RNA (1)...(19): siRNA sense strand
ugacugugccggugacuuc

SEQ ID NO: 1360828 - RNA, 19 nt, Homo sapiens
  misc_RNA (1)...(19): siRNA sense strand
caagaagauuggucuguuu

SEQ ID NO: 1360829 - RNA, 19 nt, Homo sapiens
  misc_RNA (1)...(19): siRNA sense strand
gaucugcaccguccaguug

SEQ ID NO: 1360830 - RNA, 19 nt, Homo sapiens
  misc_RNA (1)...(19): siRNA sense strand
acaagaagauuggucuguu

SEQ ID NO: 1360831 - RNA, 19 nt, Homo sapiens
  misc_RNA (1)...(19): siRNA sense strand
gccggugacuuccacaaga

SEQ ID NO: 1360832 - RNA, 19 nt, Homo sapiens
  misc_RNA (1)...(19): siRNA sense strand
ugacagcagugagaagauc

SEQ ID NO: 1360833 - RNA, 19 nt, Homo sapiens
  misc_RNA (1)...(19): siRNA sense strand
ccggugacuuccacaagaa

SEQ ID NO: 1360834 - RNA, 19 nt, Homo sapiens
  misc_RNA (1)...(19): siRNA sense strand
gaagauuggucuguuuugu

SEQ ID NO: 1360835 - RNA, 19 nt, Homo sapiens
  misc_RNA (1)...(19): siRNA sense strand
ugacugugccggugacuuc

SEQ ID NO: 1360836 - RNA, 19 nt, Homo sapiens
  misc_RNA (1)...(19): siRNA sense strand
gagaccagcaguacgagau

SEQ ID NO: 1360837 - RNA, 19 nt, Homo sapiens
  misc_RNA (1)...(19): siRNA sense strand
gcagcucuacgacgugaug

SEQ ID NO: 1360838 - RNA, 19 nt, Homo sapiens
  misc_RNA (1)...(19): siRNA sense strand
gcgcgaggcagagaucgaa

SEQ ID NO: 1360839 - RNA, 19 nt, Homo sapiens
  misc_RNA (1)...(19): siRNA sense strand
caagaagauuggucuguuu

SEQ ID NO: 1360840 - RNA, 19 nt, Homo sapiens
  misc_RNA (1)...(19): siRNA sense strand
gaucugcaccguccaguug

SEQ ID NO: 1360841 - RNA, 19 nt, Homo sapiens
  misc_RNA (1)...(19): siRNA sense strand
acaagaagauuggucuguu

SEQ ID NO: 1360842 - RNA, 19 nt, Homo sapiens
  misc_RNA (1)...(19): siRNA sense strand
gccggugacuuccacaaga

SEQ ID NO: 1360843 - RNA, 19 nt, Homo sapiens
  misc_RNA (1)...(19): siRNA sense strand
ugacagcagugagaagauc

SEQ ID NO: 1360844 - RNA, 19 nt, Homo sapiens
  misc_RNA (1)...(19): siRNA sense strand
ccggugacuuccacaagaa

SEQ ID NO: 1360845 - RNA, 19 nt, Homo sapiens
  misc_RNA (1)...(19): siRNA sense strand
gaagauuggucuguuuugu

SEQ ID NO: 1360846 - RNA, 19 nt, Homo sapiens
  misc_RNA (1)...(19): siRNA sense strand
ugacugugccggugacuuc

SEQ ID NO: 1360847 - RNA, 19 nt, Homo sapiens
  misc_RNA (1)...(19): siRNA sense strand
gagaccagcaguacgagau

SEQ ID NO: 1360848 - RNA, 19 nt, Homo sapiens
  misc_RNA (1)...(19): siRNA sense strand
gcagcucuacgacgugaug

SEQ ID NO: 1360849 - RNA, 19 nt, Homo sapiens
  misc_RNA (1)...(19): siRNA sense strand
gcgcgaggcagagaucgaa

SEQ ID NO: 1360850 - RNA, 19 nt, Homo sapiens
  misc_RNA (1)...(19): siRNA sense strand
caagaagauuggucuguuu

SEQ ID NO: 1360851 - RNA, 19 nt, Homo sapiens
  misc_RNA (1)...(19): siRNA sense strand
gaucugcaccguccaguug

SEQ ID NO: 1360852 - RNA, 19 nt, Homo sapiens
  misc_RNA (1)...(19): siRNA sense strand
acaagaagauuggucuguu

SEQ ID NO: 1360853 - RNA, 19 nt, Homo sapiens
  misc_RNA (1)...(19): siRNA sense strand
gccggugacuuccacaaga

SEQ ID NO: 1360854 - RNA, 19 nt, Homo sapiens
  misc_RNA (1)...(19): siRNA sense strand
ugacagcagugagaagauc

SEQ ID NO: 1360855 - RNA, 19 nt, Homo sapiens
  misc_RNA (1)...(19): siRNA sense strand
ccggugacuuccacaagaa

SEQ ID NO: 1360856 - RNA, 19 nt, Homo sapiens
  misc_RNA (1)...(19): siRNA sense strand
gaagauuggucuguuuugu

SEQ ID NO: 1360857 - RNA, 19 nt, Homo sapiens
  misc_RNA (1)...(19): siRNA sense strand
ugacugugccggugacuuc

SEQ ID NO: 1360858 - RNA, 19 nt, Homo sapiens
  misc_RNA (1)...(19): siRNA sense strand
gagaccagcaguacgagau

SEQ ID NO: 1360859 - RNA, 19 nt, Homo sapiens
  misc_RNA (1)...(19): siRNA sense strand
gcagcucuacgacgugaug

SEQ ID NO: 1360860 - RNA, 19 nt, Homo sapiens
  misc_RNA (1)...(19): siRNA sense strand
gcgcgaggcagagaucgaa

SEQ ID NO: 1360861 - RNA, 19 nt, Homo sapiens
  misc_RNA (1)...(19): siRNA sense strand
caagaagauuggucuguuu

SEQ ID NO: 1360862 - RNA, 19 nt, Homo sapiens
  misc_RNA (1)...(19): siRNA sense strand
gaucugcaccguccaguug

SEQ ID NO: 1360863 - RNA, 19 nt, Homo sapiens
  misc_RNA (1)...(19): siRNA sense strand
acaagaagauuggucuguu

SEQ ID NO: 1360864 - RNA, 19 nt, Homo sapiens
  misc_RNA (1)...(19): siRNA sense strand
gccggugacuuccacaaga

SEQ ID NO: 1360865 - RNA, 19 nt, Homo sapiens
  misc_RNA (1)...(19): siRNA sense strand
ugacagcagugagaagauc

SEQ ID NO: 1360866 - RNA, 19 nt, Homo sapiens
  misc_RNA (1)...(19): siRNA sense strand
ccggugacuuccacaagaa

SEQ ID NO: 1360867 - RNA, 19 nt, Homo sapiens
  misc_RNA (1)...(19): siRNA sense strand
gaagauuggucuguuuugu

SEQ ID NO: 1360868 - RNA, 19 nt, Homo sapiens
  misc_RNA (1)...(19): siRNA sense strand
ugacugugccggugacuuc

SEQ ID NO: 1360869 - RNA, 19 nt, Homo sapiens
  misc_RNA (1)...(19): siRNA sense strand
gagaccagcaguacgagau

SEQ ID NO: 1360870 - RNA, 19 nt, Homo sapiens
  misc_RNA (1)...(19): siRNA sense strand
gcagcucuacgacgugaug

SEQ ID NO: 1360871 - RNA, 19 nt, Homo sapiens
  misc_RNA (1)...(19): siRNA sense strand
gcgcgaggcagagaucgaa

SEQ ID NO: 1360872 - RNA, 19 nt, Homo sapiens
  misc_RNA (1)...(19): siRNA sense strand
caagaagauuggucuguuu

SEQ ID NO: 1360873 - RNA, 19 nt, Homo sapiens
  misc_RNA (1)...(19): siRNA sense strand
acaagaagauuggucuguu

SEQ ID NO: 1360874 - RNA, 19 nt, Homo sapiens
  misc_RNA (1)...(19): siRNA sense strand
gccggugacuuccacaaga

SEQ ID NO: 1360875 - RNA, 19 nt, Homo sapiens
  misc_RNA (1)...(19): siRNA sense strand
ccggugacuuccacaagaa

SEQ ID NO: 1360876 - RNA, 19 nt, Homo sapiens
  misc_RNA (1)...(19): siRNA sense strand
gaagauuggucuguuuugu

SEQ ID NO: 1360877 - RNA, 19 nt, Homo sapiens
  misc_RNA (1)...(19): siRNA sense strand
ugacugugccggugacuuc

SEQ ID NO: 1360878 - RNA, 19 nt, Homo sapiens
  misc_RNA (1)...(19): siRNA sense strand
caagaagauuggucuguuu

SEQ ID NO: 1360879 - RNA, 19 nt, Homo sapiens
  misc_RNA (1)...(19): siRNA sense strand
acaagaagauuggucuguu

SEQ ID NO: 1360880 - RNA, 19 nt, Homo sapiens
  misc_RNA (1)...(19): siRNA sense strand
gccggugacuuccacaaga

SEQ ID NO: 1360881 - RNA, 19 nt, Homo sapiens
  misc_RNA (1)...(19): siRNA sense strand
ccggugacuuccacaagaa

SEQ ID NO: 1360882 - RNA, 19 nt, Homo sapiens
  misc_RNA (1)...(19): siRNA sense strand
gaagauuggucuguuuugu

SEQ ID NO: 1360883 - RNA, 19 nt, Homo sapiens
  misc_RNA (1)...(19): siRNA sense strand
ugacugugccggugacuuc

SEQ ID NO: 1360884 - RNA, 19 nt, Homo sapiens
  misc_RNA (1)...(19): siRNA sense strand
caagaagauuggucuguuu

SEQ ID NO: 1360885 - RNA, 19 nt, Homo sapiens
  misc_RNA (1)...(19): siRNA sense strand
gaucugcaccguccaguug

SEQ ID NO: 1360886 - RNA, 19 nt, Homo sapiens
  misc_RNA (1)...(19): siRNA sense strand
acaagaagauuggucuguu

SEQ ID NO: 1360887 - RNA, 19 nt, Homo sapiens
  misc_RNA (1)...(19): siRNA sense strand
gccggugacuuccacaaga

SEQ ID NO: 1360888 - RNA, 19 nt, Homo sapiens
  misc_RNA (1)...(19): siRNA sense strand
ugacagcagugagaagauc

SEQ ID NO: 1360889 - RNA, 19 nt, Homo sapiens
  misc_RNA (1)...(19): siRNA sense strand
ccggugacuuccacaagaa

SEQ ID NO: 1360890 - RNA, 19 nt, Homo sapiens
  misc_RNA (1)...(19): siRNA sense strand
gaagauuggucuguuuugu

SEQ ID NO: 1360891 - RNA, 19 nt, Homo sapiens
  misc_RNA (1)...(19): siRNA sense strand
ugacugugccggugacuuc

SEQ ID NO: 1360892 - RNA, 19 nt, Homo sapiens
  misc_RNA (1)...(19): siRNA sense strand
gagaccagcaguacgagau

SEQ ID NO: 1360893 - RNA, 19 nt, Homo sapiens
  misc_RNA (1)...(19): siRNA sense strand
gcagcucuacgacgugaug

SEQ ID NO: 1360894 - RNA, 19 nt, Homo sapiens
  misc_RNA (1)...(19): siRNA sense strand
gcgcgaggcagagaucgaa

SEQ ID NO: 1360895 - RNA, 19 nt, Homo sapiens
  misc_RNA (1)...(19): siRNA sense strand
caagaagauuggucuguuu

SEQ ID NO: 1360896 - RNA, 19 nt, Homo sapiens
  misc_RNA (1)...(19): siRNA sense strand
acaagaagauuggucuguu

SEQ ID NO: 1360897 - RNA, 19 nt, Homo sapiens
  misc_RNA (1)...(19): siRNA sense strand
gccggugacuuccacaaga

SEQ ID NO: 1360898 - RNA, 19 nt, Homo sapiens
  misc_RNA (1)...(19): siRNA sense strand
ccggugacuuccacaagaa

SEQ ID NO: 1360899 - RNA, 19 nt, Homo sapiens
  misc_RNA (1)...(19): siRNA sense strand
gaagauuggucuguuuugu

SEQ ID NO: 1360900 - RNA, 19 nt, Homo sapiens
  misc_RNA (1)...(19): siRNA sense strand
ugacugugccggugacuuc

SEQ ID NO: 1360901 - RNA, 19 nt, Homo sapiens
  misc_RNA (1)...(19): siRNA sense strand
caagaagauuggucuguuu

SEQ ID NO: 1360902 - RNA, 19 nt, Homo sapiens
  misc_RNA (1)...(19): siRNA sense strand
acaagaagauuggucuguu

SEQ ID NO: 1360903 - RNA, 19 nt, Homo sapiens
  misc_RNA (1)...(19): siRNA sense strand
gccggugacuuccacaaga

SEQ ID NO: 1360904 - RNA, 19 nt, Homo sapiens
  misc_RNA (1)...(19): siRNA sense strand
ccggugacuuccacaagaa

SEQ ID NO: 1360905 - RNA, 19 nt, Homo sapiens
  misc_RNA (1)...(19): siRNA sense strand
gaagauuggucuguuuugu

SEQ ID NO: 1360906 - RNA, 19 nt, Homo sapiens
  misc_RNA (1)...(19): siRNA sense strand
ugacugugccggugacuuc

SEQ ID NO: 1360907 - RNA, 19 nt, Homo sapiens
  misc_RNA (1)...(19): siRNA sense strand
caagaagauuggucuguuu

SEQ ID NO: 1360908 - RNA, 19 nt, Homo sapiens
  misc_RNA (1)...(19): siRNA sense strand
acaagaagauuggucuguu

SEQ ID NO: 1360909 - RNA, 19 nt, Homo sapiens
  misc_RNA (1)...(19): siRNA sense strand
gccggugacuuccacaaga

SEQ ID NO: 1360910 - RNA, 19 nt, Homo sapiens
  misc_RNA (1)...(19): siRNA sense strand
ccggugacuuccacaagaa

SEQ ID NO: 1360911 - RNA, 19 nt, Homo sapiens
  misc_RNA (1)...(19): siRNA sense strand
gaagauuggucuguuuugu

SEQ ID NO: 1360912 - RNA, 19 nt, Homo sapiens
  misc_RNA (1)...(19): siRNA sense strand
ugacugugccggugacuuc

SEQ ID NO: 1360913 - RNA, 19 nt, Homo sapiens
  misc_RNA (1)...(19): siRNA sense strand
caagaagauuggucuguuu

SEQ ID NO: 1360914 - RNA, 19 nt, Homo sapiens
  misc_RNA (1)...(19): siRNA sense strand
acaagaagauuggucuguu

SEQ ID NO: 1360915 - RNA, 19 nt, Homo sapiens
  misc_RNA (1)...(19): siRNA sense strand
gccggugacuuccacaaga

SEQ ID NO: 1360916 - RNA, 19 nt, Homo sapiens
  misc_RNA (1)...(19): siRNA sense strand
ccggugacuuccacaagaa

SEQ ID NO: 1360917 - RNA, 19 nt, Homo sapiens
  misc_RNA (1)...(19): siRNA sense strand
gaagauuggucuguuuugu

SEQ ID NO: 1360918 - RNA, 19 nt, Homo sapiens
  misc_RNA (1)...(19): siRNA sense strand
ugacugugccggugacuuc

SEQ ID NO: 1360919 - RNA, 19 nt, Homo sapiens
  misc_RNA (1)...(19): siRNA sense strand
gaaaggagaccaaguccaa

SEQ ID NO: 1360920 - RNA, 19 nt, Homo sapiens
  misc_RNA (1)...(19): siRNA sense strand
gcaaugaacaggaauggaa

SEQ ID NO: 1360921 - RNA, 19 nt, Homo sapiens
  misc_RNA (1)...(19): siRNA sense strand
gccagaagguggagcagua

SEQ ID NO: 1360922 - RNA, 19 nt, Homo sapiens
  misc_RNA (1)...(19): siRNA sense strand
gggaguaucugugaaggaa

SEQ ID NO: 1360923 - RNA, 19 nt, Homo sapiens
  misc_RNA (1)...(19): siRNA sense strand
gcccagcccucuccucaaa

SEQ ID NO: 1360924 - RNA, 19 nt, Homo sapiens
  misc_RNA (1)...(19): siRNA sense strand
gagaagggaguaucuguga

SEQ ID NO: 1360925 - RNA, 19 nt, Homo sapiens
  misc_RNA (1)...(19): siRNA sense strand
gaucagggcugggaacucu

SEQ ID NO: 1360926 - RNA, 19 nt, Homo sapiens
  misc_RNA (1)...(19): siRNA sense strand
cggcugguguucccaauaa

SEQ ID NO: 1360927 - RNA, 19 nt, Homo sapiens
  misc_RNA (1)...(19): siRNA sense strand
agacagggcucuucacacu

SEQ ID NO: 1360928 - RNA, 19 nt, Homo sapiens
  misc_RNA (1)...(19): siRNA sense strand
ggaggagcgugcagaacug

SEQ ID NO: 1360929 - RNA, 19 nt, Homo sapiens
  misc_RNA (1)...(19): siRNA sense strand
gaguaucugugaaggaaca

SEQ ID NO: 1360930 - RNA, 19 nt, Homo sapiens
  misc_RNA (1)...(19): siRNA sense strand
gaagggaguaucugugaag

SEQ ID NO: 1360931 - RNA, 19 nt, Homo sapiens
  misc_RNA (1)...(19): siRNA sense strand
aaacaucacagcccggauu

SEQ ID NO: 1360932 - RNA, 19 nt, Homo sapiens
  misc_RNA (1)...(19): siRNA sense strand
gccaggcaaugaacaggaa

SEQ ID NO: 1360933 - RNA, 19 nt, Homo sapiens
  misc_RNA (1)...(19): siRNA sense strand
ccguaacccugaccuguga

SEQ ID NO: 1360934 - RNA, 19 nt, Homo sapiens
  misc_RNA (1)...(19): siRNA sense strand
ggaagccccuggugccuaa

SEQ ID NO: 1360935 - RNA, 19 nt, Homo sapiens
  misc_RNA (1)...(19): siRNA sense strand
gcgagccacuggugcugaa

SEQ ID NO: 1360936 - RNA, 19 nt, Homo sapiens
  misc_RNA (1)...(19): siRNA sense strand
agccagaaauuguagauuc

SEQ ID NO: 1360937 - RNA, 19 nt, Homo sapiens
  misc_RNA (1)...(19): siRNA sense strand
ggaauggaaaggagaccaa

SEQ ID NO: 1360938 - RNA, 19 nt, Homo sapiens
  misc_RNA (1)...(19): siRNA sense strand
gaggcaggcgagaguagua

SEQ ID NO: 1360939 - RNA, 19 nt, Homo sapiens
  misc_RNA (1)...(19): siRNA sense strand
cgucccaccuucuccugua

SEQ ID NO: 1360940 - RNA, 19 nt, Homo sapiens
  misc_RNA (1)...(19): siRNA sense strand
caaugaacaggaauggaaa

SEQ ID NO: 1360941 - RNA, 19 nt, Homo sapiens
  misc_RNA (1)...(19): siRNA sense strand
caguguggcucguguccuu

SEQ ID NO: 1360942 - RNA, 19 nt, Homo sapiens
  misc_RNA (1)...(19): siRNA sense strand
gaagccagaaauuguagau

SEQ ID NO: 1360943 - RNA, 19 nt, Homo sapiens
  misc_RNA (1)...(19): siRNA sense strand
acacugcagucggagcuaa

SEQ ID NO: 1360944 - RNA, 19 nt, Homo sapiens
  misc_RNA (1)...(19): siRNA sense strand
ccagcccucuccucaaauc

SEQ ID NO: 1360945 - RNA, 19 nt, Homo sapiens
  misc_RNA (1)...(19): siRNA sense strand
guccgugucuaccagauuc

SEQ ID NO: 1360946 - RNA, 19 nt, Homo sapiens
  misc_RNA (1)...(19): siRNA sense strand
agaagggaguaucugugaa

SEQ ID NO: 1360947 - RNA, 19 nt, Homo sapiens
  misc_RNA (1)...(19): siRNA sense strand
gauucugccucugaacuca

SEQ ID NO: 1360948 - RNA, 19 nt, Homo sapiens
  misc_RNA (1)...(19): siRNA sense strand
gcaguaguaggugcucaaa

SEQ ID NO: 1360949 - RNA, 19 nt, Homo sapiens
  misc_RNA (1)...(19): siRNA sense strand
ccaauaagguggggacaug

SEQ ID NO: 1360950 - RNA, 19 nt, Homo sapiens
  misc_RNA (1)...(19): siRNA sense strand
ugggaagccagaaauugua

SEQ ID NO: 1360951 - RNA, 19 nt, Homo sapiens
  misc_RNA (1)...(19): siRNA sense strand
uguagauucugccucugaa

SEQ ID NO: 1360952 - RNA, 19 nt, Homo sapiens
  misc_RNA (1)...(19): siRNA sense strand
ggagcgugcagaacugaau

SEQ ID NO: 1360953 - RNA, 19 nt, Homo sapiens
  misc_RNA (1)...(19): siRNA sense strand
gugcugguccucagucugu

SEQ ID NO: 1360954 - RNA, 19 nt, Homo sapiens
  misc_RNA (1)...(19): siRNA sense strand
ggggucaucuuguggcaaa

SEQ ID NO: 1360955 - RNA, 19 nt, Homo sapiens
  misc_RNA (1)...(19): siRNA sense strand
gaggagcgugcagaacuga

SEQ ID NO: 1360956 - RNA, 19 nt, Homo sapiens
  misc_RNA (1)...(19): siRNA sense strand
ggagaccaaguccaacuac

SEQ ID NO: 1360957 - RNA, 19 nt, Homo sapiens
  misc_RNA (1)...(19): siRNA sense strand
gggaagccagaaauuguag

SEQ ID NO: 1360958 - RNA, 19 nt, Homo sapiens
  misc_RNA (1)...(19): siRNA sense strand
ggaagccagaaauuguaga

SEQ ID NO: 1360959 - RNA, 19 nt, Homo sapiens
  misc_RNA (1)...(19): siRNA sense strand
ugagacagggcucuucaca

SEQ ID NO: 1360960 - RNA, 19 nt, Homo sapiens
  misc_RNA (1)...(19): siRNA sense strand
gaaaggagaccaaguccaa

SEQ ID NO: 1360961 - RNA, 19 nt, Homo sapiens
  misc_RNA (1)...(19): siRNA sense strand
gcaaugaacaggaauggaa

SEQ ID NO: 1360962 - RNA, 19 nt, Homo sapiens
  misc_RNA (1)...(19): siRNA sense strand
gccagaagguggagcagua

SEQ ID NO: 1360963 - RNA, 19 nt, Homo sapiens
  misc_RNA (1)...(19): siRNA sense strand
gggaguaucugugaaggaa

SEQ ID NO: 1360964 - RNA, 19 nt, Homo sapiens
  misc_RNA (1)...(19): siRNA sense strand
gcccagcccucuccucaaa

SEQ ID NO: 1360965 - RNA, 19 nt, Homo sapiens
  misc_RNA (1)...(19): siRNA sense strand
gagaagggaguaucuguga

SEQ ID NO: 1360966 - RNA, 19 nt, Homo sapiens
  misc_RNA (1)...(19): siRNA sense strand
gaucagggcugggaacucu

SEQ ID NO: 1360967 - RNA, 19 nt, Homo sapiens
  misc_RNA (1)...(19): siRNA sense strand
cggcugguguucccaauaa

SEQ ID NO: 1360968 - RNA, 19 nt, Homo sapiens
  misc_RNA (1)...(19): siRNA sense strand
agacagggcucuucacacu

SEQ ID NO: 1360969 - RNA, 19 nt, Homo sapiens
  misc_RNA (1)...(19): siRNA sense strand
ggaggagcgugcagaacug

SEQ ID NO: 1360970 - RNA, 19 nt, Homo sapiens
  misc_RNA (1)...(19): siRNA sense strand
gaguaucugugaaggaaca

SEQ ID NO: 1360971 - RNA, 19 nt, Homo sapiens
  misc_RNA (1)...(19): siRNA sense strand
gaagggaguaucugugaag

SEQ ID NO: 1360972 - RNA, 19 nt, Homo sapiens
  misc_RNA (1)...(19): siRNA sense strand
aaacaucacagcccggauu

SEQ ID NO: 1360973 - RNA, 19 nt, Homo sapiens
  misc_RNA (1)...(19): siRNA sense strand
gccaggcaaugaacaggaa

SEQ ID NO: 1360974 - RNA, 19 nt, Homo sapiens
  misc_RNA (1)...(19): siRNA sense strand
ccguaacccugaccuguga

SEQ ID NO: 1360975 - RNA, 19 nt, Homo sapiens
  misc_RNA (1)...(19): siRNA sense strand
ggaagccccuggugccuaa

SEQ ID NO: 1360976 - RNA, 19 nt, Homo sapiens
  misc_RNA (1)...(19): siRNA sense strand
gcgagccacuggugcugaa

SEQ ID NO: 1360977 - RNA, 19 nt, Homo sapiens
  misc_RNA (1)...(19): siRNA sense strand
agccagaaauuguagauuc

SEQ ID NO: 1360978 - RNA, 19 nt, Homo sapiens
  misc_RNA (1)...(19): siRNA sense strand
ggaauggaaaggagaccaa

SEQ ID NO: 1360979 - RNA, 19 nt, Homo sapiens
  misc_RNA (1)...(19): siRNA sense strand
cgucccaccuucuccugua

SEQ ID NO: 1360980 - RNA, 19 nt, Homo sapiens
  misc_RNA (1)...(19): siRNA sense strand
caaugaacaggaauggaaa

SEQ ID NO: 1360981 - RNA, 19 nt, Homo sapiens
  misc_RNA (1)...(19): siRNA sense strand
caguguggcucguguccuu

SEQ ID NO: 1360982 - RNA, 19 nt, Homo sapiens
  misc_RNA (1)...(19): siRNA sense strand
gaagccagaaauuguagau

SEQ ID NO: 1360983 - RNA, 19 nt, Homo sapiens
  misc_RNA (1)...(19): siRNA sense strand
acacugcagucggagcuaa

SEQ ID NO: 1360984 - RNA, 19 nt, Homo sapiens
  misc_RNA (1)...(19): siRNA sense strand
ccagcccucuccucaaauc

SEQ ID NO: 1360985 - RNA, 19 nt, Homo sapiens
  misc_RNA (1)...(19): siRNA sense strand
guccgugucuaccagauuc

SEQ ID NO: 1360986 - RNA, 19 nt, Homo sapiens
  misc_RNA (1)...(19): siRNA sense strand
agaagggaguaucugugaa

SEQ ID NO: 1360987 - RNA, 19 nt, Homo sapiens
  misc_RNA (1)...(19): siRNA sense strand
gauucugccucugaacuca

SEQ ID NO: 1360988 - RNA, 19 nt, Homo sapiens
  misc_RNA (1)...(19): siRNA sense strand
gcaguaguaggugcucaaa

SEQ ID NO: 1360989 - RNA, 19 nt, Homo sapiens
  misc_RNA (1)...(19): siRNA sense strand
ccaauaagguggggacaug

SEQ ID NO: 1360990 - RNA, 19 nt, Homo sapiens
  misc_RNA (1)...(19): siRNA sense strand
ugggaagccagaaauugua

SEQ ID NO: 1360991 - RNA, 19 nt, Homo sapiens
  misc_RNA (1)...(19): siRNA sense strand
uguagauucugccucugaa

SEQ ID NO: 1360992 - RNA, 19 nt, Homo sapiens
  misc_RNA (1)...(19): siRNA sense strand
ggagcgugcagaacugaau

SEQ ID NO: 1360993 - RNA, 19 nt, Homo sapiens
  misc_RNA (1)...(19): siRNA sense strand
gugcugguccucagucugu

SEQ ID NO: 1360994 - RNA, 19 nt, Homo sapiens
  misc_RNA (1)...(19): siRNA sense strand
ggggucaucuuguggcaaa

SEQ ID NO: 1360995 - RNA, 19 nt, Homo sapiens
  misc_RNA (1)...(19): siRNA sense strand
gaggagcgugcagaacuga

SEQ ID NO: 1360996 - RNA, 19 nt, Homo sapiens
  misc_RNA (1)...(19): siRNA sense strand
ggagaccaaguccaacuac

SEQ ID NO: 1360997 - RNA, 19 nt, Homo sapiens
  misc_RNA (1)...(19): siRNA sense strand
gggaagccagaaauuguag

SEQ ID NO: 1360998 - RNA, 19 nt, Homo sapiens
  misc_RNA (1)...(19): siRNA sense strand
ggaagccagaaauuguaga

SEQ ID NO: 1360999 - RNA, 19 nt, Homo sapiens
  misc_RNA (1)...(19): siRNA sense strand
ugagacagggcucuucaca

SEQ ID NO: 1361000 - RNA, 19 nt, Homo sapiens
  misc_RNA (1)...(19): siRNA sense strand
gaacugggcuuucuucucu

SEQ ID NO: 1361001 - RNA, 19 nt, Homo sapiens
  misc_RNA (1)...(19): siRNA sense strand
ccacacaccugcccaauuc

SEQ ID NO: 1361002 - RNA, 19 nt, Homo sapiens
  misc_RNA (1)...(19): siRNA sense strand
gcaacgggcuccucaacga

SEQ ID NO: 1361003 - RNA, 19 nt, Homo sapiens
  misc_RNA (1)...(19): siRNA sense strand
gagcagcccucccucacaa

SEQ ID NO: 1361004 - RNA, 19 nt, Homo sapiens
  misc_RNA (1)...(19): siRNA sense strand
gaacuacccauccacaaga

SEQ ID NO: 1361005 - RNA, 19 nt, Homo sapiens
  misc_RNA (1)...(19): siRNA sense strand
gugauuguuuccaacuuua

SEQ ID NO: 1361006 - RNA, 19 nt, Homo sapiens
  misc_RNA (1)...(19): siRNA sense strand
gcuccagccuuaauuugaa

SEQ ID NO: 1361007 - RNA, 19 nt, Homo sapiens
  misc_RNA (1)...(19): siRNA sense strand
aagcaucccugccucguuu

SEQ ID NO: 1361008 - RNA, 19 nt, Homo sapiens
  misc_RNA (1)...(19): siRNA sense strand
gauaaacgcagggcacaaa

SEQ ID NO: 1361009 - RNA, 19 nt, Homo sapiens
  misc_RNA (1)...(19): siRNA sense strand
cuacgugacuggcuucuuc

SEQ ID NO: 1361010 - RNA, 19 nt, Homo sapiens
  misc_RNA (1)...(19): siRNA sense strand
ggagacauggugccuaaga

SEQ ID NO: 1361011 - RNA, 19 nt, Homo sapiens
  misc_RNA (1)...(19): siRNA sense strand
accagucgcuccagccuua

SEQ ID NO: 1361012 - RNA, 19 nt, Homo sapiens
  misc_RNA (1)...(19): siRNA sense strand
cuacaucggucuggucaug

SEQ ID NO: 1361013 - RNA, 19 nt, Homo sapiens
  misc_RNA (1)...(19): siRNA sense strand
ccacagccaucaucagcau

SEQ ID NO: 1361014 - RNA, 19 nt, Homo sapiens
  misc_RNA (1)...(19): siRNA sense strand
gcugcgugcucaacuucua

SEQ ID NO: 1361015 - RNA, 19 nt, Homo sapiens
  misc_RNA (1)...(19): siRNA sense strand
acgacgagcuggccuucua

SEQ ID NO: 1361016 - RNA, 19 nt, Homo sapiens
  misc_RNA (1)...(19): siRNA sense strand
ugugauuguuuccaacuuu

SEQ ID NO: 1361017 - RNA, 19 nt, Homo sapiens
  misc_RNA (1)...(19): siRNA sense strand
cacgaacauuccuuccaua

SEQ ID NO: 1361018 - RNA, 19 nt, Homo sapiens
  misc_RNA (1)...(19): siRNA sense strand
agaacaagcggcaggauga

SEQ ID NO: 1361019 - RNA, 19 nt, Homo sapiens
  misc_RNA (1)...(19): siRNA sense strand
acggagacauggugccuaa

SEQ ID NO: 1361020 - RNA, 19 nt, Homo sapiens
  misc_RNA (1)...(19): siRNA sense strand
caucaugcccuacuacauc

SEQ ID NO: 1361021 - RNA, 19 nt, Homo sapiens
  misc_RNA (1)...(19): siRNA sense strand
acacgaacauuccuuccau

SEQ ID NO: 1361022 - RNA, 19 nt, Homo sapiens
  misc_RNA (1)...(19): siRNA sense strand
gcuacucgguggccuucuu

SEQ ID NO: 1361023 - RNA, 19 nt, Homo sapiens
  misc_RNA (1)...(19): siRNA sense strand
ccagcaauguugucaaggu

SEQ ID NO: 1361024 - RNA, 19 nt, Homo sapiens
  misc_RNA (1)...(19): siRNA sense strand
guaguaagaagaccacaca

SEQ ID NO: 1361025 - RNA, 19 nt, Homo sapiens
  misc_RNA (1)...(19): siRNA sense strand
ggcaagaccaccucacuca

SEQ ID NO: 1361026 - RNA, 19 nt, Homo sapiens
  misc_RNA (1)...(19): siRNA sense strand
gccagucccugugauuguu

SEQ ID NO: 1361027 - RNA, 19 nt, Homo sapiens
  misc_RNA (1)...(19): siRNA sense strand
caagaccaccucacucauc

SEQ ID NO: 1361028 - RNA, 19 nt, Homo sapiens
  misc_RNA (1)...(19): siRNA sense strand
gacaacgacucggagaaca

SEQ ID NO: 1361029 - RNA, 19 nt, Homo sapiens
  misc_RNA (1)...(19): siRNA sense strand
uugaugagcagauguuuga

SEQ ID NO: 1361030 - RNA, 19 nt, Homo sapiens
  misc_RNA (1)...(19): siRNA sense strand
gagcugugccuccgaacug

SEQ ID NO: 1361031 - RNA, 19 nt, Homo sapiens
  misc_RNA (1)...(19): siRNA sense strand
cugcugcacugccuggaaa

SEQ ID NO: 1361032 - RNA, 19 nt, Homo sapiens
  misc_RNA (1)...(19): siRNA sense strand
gcuacgaggaguacaagga

SEQ ID NO: 1361033 - RNA, 19 nt, Homo sapiens
  misc_RNA (1)...(19): siRNA sense strand
gaucaccacagccaucauc

SEQ ID NO: 1361034 - RNA, 19 nt, Homo sapiens
  misc_RNA (1)...(19): siRNA sense strand
ugcaagagcucagcacgau

SEQ ID NO: 1361035 - RNA, 19 nt, Homo sapiens
  misc_RNA (1)...(19): siRNA sense strand
gccagcaaguucacaagca

SEQ ID NO: 1361036 - RNA, 19 nt, Homo sapiens
  misc_RNA (1)...(19): siRNA sense strand
ccagcaaguucacaagcau

SEQ ID NO: 1361037 - RNA, 19 nt, Homo sapiens
  misc_RNA (1)...(19): siRNA sense strand
acaagaagucccucacugu

SEQ ID NO: 1361038 - RNA, 19 nt, Homo sapiens
  misc_RNA (1)...(19): siRNA sense strand
gcagauguuugagcagaac

SEQ ID NO: 1361039 - RNA, 19 nt, Homo sapiens
  misc_RNA (1)...(19): siRNA sense strand
ccauggccaucaucaucuu

SEQ ID NO: 1361040 - RNA, 19 nt, Homo sapiens
  misc_RNA (1)...(19): siRNA sense strand
gcggcaggaugagcugauu

SEQ ID NO: 1361041 - RNA, 19 nt, Homo sapiens
  misc_RNA (1)...(19): siRNA sense strand
accacgaguuuauugauga

SEQ ID NO: 1361042 - RNA, 19 nt, Homo sapiens
  misc_RNA (1)...(19): siRNA sense strand
gcagcacggagaaggaguu

SEQ ID NO: 1361043 - RNA, 19 nt, Homo sapiens
  misc_RNA (1)...(19): siRNA sense strand
gagacauggugccuaagac

SEQ ID NO: 1361044 - RNA, 19 nt, Homo sapiens
  misc_RNA (1)...(19): siRNA sense strand
ucaacgaggacaccaagga

SEQ ID NO: 1361045 - RNA, 19 nt, Homo sapiens
  misc_RNA (1)...(19): siRNA sense strand
caggauccguguggccaaa

SEQ ID NO: 1361046 - RNA, 19 nt, Homo sapiens
  misc_RNA (1)...(19): siRNA sense strand
aaccacgaguuuauugaug

SEQ ID NO: 1361047 - RNA, 19 nt, Homo sapiens
  misc_RNA (1)...(19): siRNA sense strand
gaucuucaccguggaguac

SEQ ID NO: 1361048 - RNA, 19 nt, Homo sapiens
  misc_RNA (1)...(19): siRNA sense strand
caccaaggaguacuucuuc

SEQ ID NO: 1361049 - RNA, 19 nt, Homo sapiens
  misc_RNA (1)...(19): siRNA sense strand
gguacaccauugucaccau

SEQ ID NO: 1361050 - RNA, 19 nt, Homo sapiens
  misc_RNA (1)...(19): siRNA sense strand
cuucaggaucuucaaguuu

SEQ ID NO: 1361051 - RNA, 19 nt, Homo sapiens
  misc_RNA (1)...(19): siRNA sense strand
ggacaccaaggaguacuuc

SEQ ID NO: 1361052 - RNA, 19 nt, Homo sapiens
  misc_RNA (1)...(19): siRNA sense strand
acacaccugcccaauucua

SEQ ID NO: 1361053 - RNA, 19 nt, Homo sapiens
  misc_RNA (1)...(19): siRNA sense strand
ccaaggaguacuucuucga

SEQ ID NO: 1361054 - RNA, 19 nt, Homo sapiens
  misc_RNA (1)...(19): siRNA sense strand
gcaagaccaccucacucau

SEQ ID NO: 1361055 - RNA, 19 nt, Homo sapiens
  misc_RNA (1)...(19): siRNA sense strand
gaggagcacaugggcaaga

SEQ ID NO: 1361056 - RNA, 19 nt, Homo sapiens
  misc_RNA (1)...(19): siRNA sense strand
cauggugccuaagacgauu

SEQ ID NO: 1361057 - RNA, 19 nt, Homo sapiens
  misc_RNA (1)...(19): siRNA sense strand
caccauggccaucaucauc

SEQ ID NO: 1361058 - RNA, 19 nt, Homo sapiens
  misc_RNA (1)...(19): siRNA sense strand
cggcgugcgucaugaucuu

SEQ ID NO: 1361059 - RNA, 19 nt, Homo sapiens
  misc_RNA (1)...(19): siRNA sense strand
acgaggacaccaaggagua

SEQ ID NO: 1361060 - RNA, 19 nt, Homo sapiens
  misc_RNA (1)...(19): siRNA sense strand
ucuucaggaucuucaaguu

SEQ ID NO: 1361061 - RNA, 19 nt, Homo sapiens
  misc_RNA (1)...(19): siRNA sense strand
gaacaagcggcaggaugag

SEQ ID NO: 1361062 - RNA, 19 nt, Homo sapiens
  misc_RNA (1)...(19): siRNA sense strand
ccacgaguuuauugaugag

SEQ ID NO: 1361063 - RNA, 19 nt, Homo sapiens
  misc_RNA (1)...(19): siRNA sense strand
aaacaggcaguucgaaugc

SEQ ID NO: 1361064 - RNA, 19 nt, Homo sapiens
  misc_RNA (1)...(19): siRNA sense strand
gcucagcacgauccacauc

SEQ ID NO: 1361065 - RNA, 19 nt, Homo sapiens
  misc_RNA (1)...(19): siRNA sense strand
ggcuccaucugcuccuuga

SEQ ID NO: 1361066 - RNA, 19 nt, Homo sapiens
  misc_RNA (1)...(19): siRNA sense strand
uuccauagccagcaauguu

SEQ ID NO: 1361067 - RNA, 19 nt, Homo sapiens
  misc_RNA (1)...(19): siRNA sense strand
guuuauugaugagcagaug

SEQ ID NO: 1361068 - RNA, 19 nt, Homo sapiens
  misc_RNA (1)...(19): siRNA sense strand
cgacgugguggccaucaug

SEQ ID NO: 1361069 - RNA, 19 nt, Homo sapiens
  misc_RNA (1)...(19): siRNA sense strand
caagcaucccugccucguu

SEQ ID NO: 1361070 - RNA, 19 nt, Homo sapiens
  misc_RNA (1)...(19): siRNA sense strand
gaacugggcuuucuucucu

SEQ ID NO: 1361071 - RNA, 19 nt, Homo sapiens
  misc_RNA (1)...(19): siRNA sense strand
ccacacaccugcccaauuc

SEQ ID NO: 1361072 - RNA, 19 nt, Homo sapiens
  misc_RNA (1)...(19): siRNA sense strand
gcaacgggcuccucaacga

SEQ ID NO: 1361073 - RNA, 19 nt, Homo sapiens
  misc_RNA (1)...(19): siRNA sense strand
gagcagcccucccucacaa

SEQ ID NO: 1361074 - RNA, 19 nt, Homo sapiens
  misc_RNA (1)...(19): siRNA sense strand
gaacuacccauccacaaga

SEQ ID NO: 1361075 - RNA, 19 nt, Homo sapiens
  misc_RNA (1)...(19): siRNA sense strand
gugauuguuuccaacuuua

SEQ ID NO: 1361076 - RNA, 19 nt, Homo sapiens
  misc_RNA (1)...(19): siRNA sense strand
gcuccagccuuaauuugaa

SEQ ID NO: 1361077 - RNA, 19 nt, Homo sapiens
  misc_RNA (1)...(19): siRNA sense strand
aagcaucccugccucguuu

SEQ ID NO: 1361078 - RNA, 19 nt, Homo sapiens
  misc_RNA (1)...(19): siRNA sense strand
gauaaacgcagggcacaaa

SEQ ID NO: 1361079 - RNA, 19 nt, Homo sapiens
  misc_RNA (1)...(19): siRNA sense strand
cuacgugacuggcuucuuc

SEQ ID NO: 1361080 - RNA, 19 nt, Homo sapiens
  misc_RNA (1)...(19): siRNA sense strand
ggagacauggugccuaaga

SEQ ID NO: 1361081 - RNA, 19 nt, Homo sapiens
  misc_RNA (1)...(19): siRNA sense strand
accagucgcuccagccuua

SEQ ID NO: 1361082 - RNA, 19 nt, Homo sapiens
  misc_RNA (1)...(19): siRNA sense strand
cuacaucggucuggucaug

SEQ ID NO: 1361083 - RNA, 19 nt, Homo sapiens
  misc_RNA (1)...(19): siRNA sense strand
ccacagccaucaucagcau

SEQ ID NO: 1361084 - RNA, 19 nt, Homo sapiens
  misc_RNA (1)...(19): siRNA sense strand
gcugcgugcucaacuucua

SEQ ID NO: 1361085 - RNA, 19 nt, Homo sapiens
  misc_RNA (1)...(19): siRNA sense strand
acgacgagcuggccuucua

SEQ ID NO: 1361086 - RNA, 19 nt, Homo sapiens
  misc_RNA (1)...(19): siRNA sense strand
ugugauuguuuccaacuuu

SEQ ID NO: 1361087 - RNA, 19 nt, Homo sapiens
  misc_RNA (1)...(19): siRNA sense strand
cacgaacauuccuuccaua

SEQ ID NO: 1361088 - RNA, 19 nt, Homo sapiens
  misc_RNA (1)...(19): siRNA sense strand
agaacaagcggcaggauga

SEQ ID NO: 1361089 - RNA, 19 nt, Homo sapiens
  misc_RNA (1)...(19): siRNA sense strand
acggagacauggugccuaa

SEQ ID NO: 1361090 - RNA, 19 nt, Homo sapiens
  misc_RNA (1)...(19): siRNA sense strand
caucaugcccuacuacauc

SEQ ID NO: 1361091 - RNA, 19 nt, Homo sapiens
  misc_RNA (1)...(19): siRNA sense strand
acacgaacauuccuuccau

SEQ ID NO: 1361092 - RNA, 19 nt, Homo sapiens
  misc_RNA (1)...(19): siRNA sense strand
gcuacucgguggccuucuu

SEQ ID NO: 1361093 - RNA, 19 nt, Homo sapiens
  misc_RNA (1)...(19): siRNA sense strand
ccagcaauguugucaaggu

SEQ ID NO: 1361094 - RNA, 19 nt, Homo sapiens
  misc_RNA (1)...(19): siRNA sense strand
guaguaagaagaccacaca

SEQ ID NO: 1361095 - RNA, 19 nt, Homo sapiens
  misc_RNA (1)...(19): siRNA sense strand
ggcaagaccaccucacuca

SEQ ID NO: 1361096 - RNA, 19 nt, Homo sapiens
  misc_RNA (1)...(19): siRNA sense strand
gccagucccugugauuguu

SEQ ID NO: 1361097 - RNA, 19 nt, Homo sapiens
  misc_RNA (1)...(19): siRNA sense strand
caagaccaccucacucauc

SEQ ID NO: 1361098 - RNA, 19 nt, Homo sapiens
  misc_RNA (1)...(19): siRNA sense strand
gacaacgacucggagaaca

SEQ ID NO: 1361099 - RNA, 19 nt, Homo sapiens
  misc_RNA (1)...(19): siRNA sense strand
uugaugagcagauguuuga

SEQ ID NO: 1361100 - RNA, 19 nt, Homo sapiens
  misc_RNA (1)...(19): siRNA sense strand
gagcugugccuccgaacug

SEQ ID NO: 1361101 - RNA, 19 nt, Homo sapiens
  misc_RNA (1)...(19): siRNA sense strand
cugcugcacugccuggaaa

SEQ ID NO: 1361102 - RNA, 19 nt, Homo sapiens
  misc_RNA (1)...(19): siRNA sense strand
gcuacgaggaguacaagga

SEQ ID NO: 1361103 - RNA, 19 nt, Homo sapiens
  misc_RNA (1)...(19): siRNA sense strand
gaucaccacagccaucauc

SEQ ID NO: 1361104 - RNA, 19 nt, Homo sapiens
  misc_RNA (1)...(19): siRNA sense strand
ugcaagagcucagcacgau

SEQ ID NO: 1361105 - RNA, 19 nt, Homo sapiens
  misc_RNA (1)...(19): siRNA sense strand
gccagcaaguucacaagca

SEQ ID NO: 1361106 - RNA, 19 nt, Homo sapiens
  misc_RNA (1)...(19): siRNA sense strand
ccagcaaguucacaagcau

SEQ ID NO: 1361107 - RNA, 19 nt, Homo sapiens
  misc_RNA (1)...(19): siRNA sense strand
acaagaagucccucacugu

SEQ ID NO: 1361108 - RNA, 19 nt, Homo sapiens
  misc_RNA (1)...(19): siRNA sense strand
gcagauguuugagcagaac

SEQ ID NO: 1361109 - RNA, 19 nt, Homo sapiens
  misc_RNA (1)...(19): siRNA sense strand
ccauggccaucaucaucuu

SEQ ID NO: 1361110 - RNA, 19 nt, Homo sapiens
  misc_RNA (1)...(19): siRNA sense strand
gcggcaggaugagcugauu

SEQ ID NO: 1361111 - RNA, 19 nt, Homo sapiens
  misc_RNA (1)...(19): siRNA sense strand
accacgaguuuauugauga

SEQ ID NO: 1361112 - RNA, 19 nt, Homo sapiens
  misc_RNA (1)...(19): siRNA sense strand
gcagcacggagaaggaguu

SEQ ID NO: 1361113 - RNA, 19 nt, Homo sapiens
  misc_RNA (1)...(19): siRNA sense strand
gagacauggugccuaagac

SEQ ID NO: 1361114 - RNA, 19 nt, Homo sapiens
  misc_RNA (1)...(19): siRNA sense strand
ucaacgaggacaccaagga

SEQ ID NO: 1361115 - RNA, 19 nt, Homo sapiens
  misc_RNA (1)...(19): siRNA sense strand
caggauccguguggccaaa

SEQ ID NO: 1361116 - RNA, 19 nt, Homo sapiens
  misc_RNA (1)...(19): siRNA sense strand
aaccacgaguuuauugaug

SEQ ID NO: 1361117 - RNA, 19 nt, Homo sapiens
  misc_RNA (1)...(19): siRNA sense strand
gaucuucaccguggaguac

SEQ ID NO: 1361118 - RNA, 19 nt, Homo sapiens
  misc_RNA (1)...(19): siRNA sense strand
caccaaggaguacuucuuc

SEQ ID NO: 1361119 - RNA, 19 nt, Homo sapiens
  misc_RNA (1)...(19): siRNA sense strand
gguacaccauugucaccau

SEQ ID NO: 1361120 - RNA, 19 nt, Homo sapiens
  misc_RNA (1)...(19): siRNA sense strand
cuucaggaucuucaaguuu

SEQ ID NO: 1361121 - RNA, 19 nt, Homo sapiens
  misc_RNA (1)...(19): siRNA sense strand
ggacaccaaggaguacuuc

SEQ ID NO: 1361122 - RNA, 19 nt, Homo sapiens
  misc_RNA (1)...(19): siRNA sense strand
acacaccugcccaauucua

SEQ ID NO: 1361123 - RNA, 19 nt, Homo sapiens
  misc_RNA (1)...(19): siRNA sense strand
ccaaggaguacuucuucga

SEQ ID NO: 1361124 - RNA, 19 nt, Homo sapiens
  misc_RNA (1)...(19): siRNA sense strand
gcaagaccaccucacucau

SEQ ID NO: 1361125 - RNA, 19 nt, Homo sapiens
  misc_RNA (1)...(19): siRNA sense strand
gaggagcacaugggcaaga

SEQ ID NO: 1361126 - RNA, 19 nt, Homo sapiens
  misc_RNA (1)...(19): siRNA sense strand
cauggugccuaagacgauu

SEQ ID NO: 1361127 - RNA, 19 nt, Homo sapiens
  misc_RNA (1)...(19): siRNA sense strand
caccauggccaucaucauc

SEQ ID NO: 1361128 - RNA, 19 nt, Homo sapiens
  misc_RNA (1)...(19): siRNA sense strand
cggcgugcgucaugaucuu

SEQ ID NO: 1361129 - RNA, 19 nt, Homo sapiens
  misc_RNA (1)...(19): siRNA sense strand
acgaggacaccaaggagua

SEQ ID NO: 1361130 - RNA, 19 nt, Homo sapiens
  misc_RNA (1)...(19): siRNA sense strand
ucuucaggaucuucaaguu

SEQ ID NO: 1361131 - RNA, 19 nt, Homo sapiens
  misc_RNA (1)...(19): siRNA sense strand
gaacaagcggcaggaugag

SEQ ID NO: 1361132 - RNA, 19 nt, Homo sapiens
  misc_RNA (1)...(19): siRNA sense strand
ccacgaguuuauugaugag

SEQ ID NO: 1361133 - RNA, 19 nt, Homo sapiens
  misc_RNA (1)...(19): siRNA sense strand
aaacaggcaguucgaaugc

SEQ ID NO: 1361134 - RNA, 19 nt, Homo sapiens
  misc_RNA (1)...(19): siRNA sense strand
gcucagcacgauccacauc

SEQ ID NO: 1361135 - RNA, 19 nt, Homo sapiens
  misc_RNA (1)...(19): siRNA sense strand
ggcuccaucugcuccuuga

SEQ ID NO: 1361136 - RNA, 19 nt, Homo sapiens
  misc_RNA (1)...(19): siRNA sense strand
uuccauagccagcaauguu

SEQ ID NO: 1361137 - RNA, 19 nt, Homo sapiens
  misc_RNA (1)...(19): siRNA sense strand
guuuauugaugagcagaug

SEQ ID NO: 1361138 - RNA, 19 nt, Homo sapiens
  misc_RNA (1)...(19): siRNA sense strand
cgacgugguggccaucaug

SEQ ID NO: 1361139 - RNA, 19 nt, Homo sapiens
  misc_RNA (1)...(19): siRNA sense strand
caagcaucccugccucguu

SEQ ID NO: 1361140 - RNA, 19 nt, Homo sapiens
  misc_RNA (1)...(19): siRNA sense strand
ucauggagcucccaacuua

SEQ ID NO: 1361141 - RNA, 19 nt, Homo sapiens
  misc_RNA (1)...(19): siRNA sense strand
gaaggucacuguagaagau

SEQ ID NO: 1361142 - RNA, 19 nt, Homo sapiens
  misc_RNA (1)...(19): siRNA sense strand
gaacagaaaggaacaguga

SEQ ID NO: 1361143 - RNA, 19 nt, Homo sapiens
  misc_RNA (1)...(19): siRNA sense strand
gcaaggaaggugugauuua

SEQ ID NO: 1361144 - RNA, 19 nt, Homo sapiens
  misc_RNA (1)...(19): siRNA sense strand
gccaacagcugauauuuau

SEQ ID NO: 1361145 - RNA, 19 nt, Homo sapiens
  misc_RNA (1)...(19): siRNA sense strand
gcacacagcagaacucauu

SEQ ID NO: 1361146 - RNA, 19 nt, Homo sapiens
  misc_RNA (1)...(19): siRNA sense strand
gauaauagucugucucaaa

SEQ ID NO: 1361147 - RNA, 19 nt, Homo sapiens
  misc_RNA (1)...(19): siRNA sense strand
caacagagcauacgagaug

SEQ ID NO: 1361148 - RNA, 19 nt, Homo sapiens
  misc_RNA (1)...(19): siRNA sense strand
caaaugaacaugucaagaa

SEQ ID NO: 1361149 - RNA, 19 nt, Homo sapiens
  misc_RNA (1)...(19): siRNA sense strand
uaacagacuucaaacucua

SEQ ID NO: 1361150 - RNA, 19 nt, Homo sapiens
  misc_RNA (1)...(19): siRNA sense strand
gauaagugauacagaauuc

SEQ ID NO: 1361151 - RNA, 19 nt, Homo sapiens
  misc_RNA (1)...(19): siRNA sense strand
caacacaacagauaagaaa

SEQ ID NO: 1361152 - RNA, 19 nt, Homo sapiens
  misc_RNA (1)...(19): siRNA sense strand
cagcagaacucauuacaca

SEQ ID NO: 1361153 - RNA, 19 nt, Homo sapiens
  misc_RNA (1)...(19): siRNA sense strand
ucaagaaggccauaaauga

SEQ ID NO: 1361154 - RNA, 19 nt, Homo sapiens
  misc_RNA (1)...(19): siRNA sense strand
gauauuacguccugagcaa

SEQ ID NO: 1361155 - RNA, 19 nt, Homo sapiens
  misc_RNA (1)...(19): siRNA sense strand
gaacucauuacacaacuaa

SEQ ID NO: 1361156 - RNA, 19 nt, Homo sapiens
  misc_RNA (1)...(19): siRNA sense strand
uaagagccaucagauauga

SEQ ID NO: 1361157 - RNA, 19 nt, Homo sapiens
  misc_RNA (1)...(19): siRNA sense strand
ugaaggagcaguacauuga

SEQ ID NO: 1361158 - RNA, 19 nt, Homo sapiens
  misc_RNA (1)...(19): siRNA sense strand
gaagaaggucacuguagaa

SEQ ID NO: 1361159 - RNA, 19 nt, Homo sapiens
  misc_RNA (1)...(19): siRNA sense strand
agaagaaggucacuguaga

SEQ ID NO: 1361160 - RNA, 19 nt, Homo sapiens
  misc_RNA (1)...(19): siRNA sense strand
gaagaaacacgaggaugaa

SEQ ID NO: 1361161 - RNA, 19 nt, Homo sapiens
  misc_RNA (1)...(19): siRNA sense strand
guggauaagugauacagaa

SEQ ID NO: 1361162 - RNA, 19 nt, Homo sapiens
  misc_RNA (1)...(19): siRNA sense strand
ggccaacagcugauauuua

SEQ ID NO: 1361163 - RNA, 19 nt, Homo sapiens
  misc_RNA (1)...(19): siRNA sense strand
gcagaggaauuggaaagga

SEQ ID NO: 1361164 - RNA, 19 nt, Homo sapiens
  misc_RNA (1)...(19): siRNA sense strand
uaucaacacucguauacug

SEQ ID NO: 1361165 - RNA, 19 nt, Homo sapiens
  misc_RNA (1)...(19): siRNA sense strand
cgaagaaacacgaggauga

SEQ ID NO: 1361166 - RNA, 19 nt, Homo sapiens
  misc_RNA (1)...(19): siRNA sense strand
gauagagaguaugcacuuu

SEQ ID NO: 1361167 - RNA, 19 nt, Homo sapiens
  misc_RNA (1)...(19): siRNA sense strand
gggaaauucuaucacauca

SEQ ID NO: 1361168 - RNA, 19 nt, Homo sapiens
  misc_RNA (1)...(19): siRNA sense strand
ggaaaggaauagcaauugc

SEQ ID NO: 1361169 - RNA, 19 nt, Homo sapiens
  misc_RNA (1)...(19): siRNA sense strand
acagggacauugagauuga

SEQ ID NO: 1361170 - RNA, 19 nt, Homo sapiens
  misc_RNA (1)...(19): siRNA sense strand
gaggcuaaguggauaagug

SEQ ID NO: 1361171 - RNA, 19 nt, Homo sapiens
  misc_RNA (1)...(19): siRNA sense strand
gugcacaacacaacagaua

SEQ ID NO: 1361172 - RNA, 19 nt, Homo sapiens
  misc_RNA (1)...(19): siRNA sense strand
cgagggaaauucuaucaca

SEQ ID NO: 1361173 - RNA, 19 nt, Homo sapiens
  misc_RNA (1)...(19): siRNA sense strand
gcauuucccuacacguuau

SEQ ID NO: 1361174 - RNA, 19 nt, Homo sapiens
  misc_RNA (1)...(19): siRNA sense strand
gugacuggcuguaugaaga

SEQ ID NO: 1361175 - RNA, 19 nt, Homo sapiens
  misc_RNA (1)...(19): siRNA sense strand
gaucgucaccucggucaua

SEQ ID NO: 1361176 - RNA, 19 nt, Homo sapiens
  misc_RNA (1)...(19): siRNA sense strand
caaggaaggugugauuuac

SEQ ID NO: 1361177 - RNA, 19 nt, Homo sapiens
  misc_RNA (1)...(19): siRNA sense strand
gcuaaguggauaagugaua

SEQ ID NO: 1361178 - RNA, 19 nt, Homo sapiens
  misc_RNA (1)...(19): siRNA sense strand
cagaggaauuggaaaggaa

SEQ ID NO: 1361179 - RNA, 19 nt, Homo sapiens
  misc_RNA (1)...(19): siRNA sense strand
gcucugcucucucuccaau

SEQ ID NO: 1361180 - RNA, 19 nt, Homo sapiens
  misc_RNA (1)...(19): siRNA sense strand
gcaauugcacugcuuguca

SEQ ID NO: 1361181 - RNA, 19 nt, Homo sapiens
  misc_RNA (1)...(19): siRNA sense strand
gaauucaucuacagagaac

SEQ ID NO: 1361182 - RNA, 19 nt, Homo sapiens
  misc_RNA (1)...(19): siRNA sense strand
gaaacacgaggaugaaagu

SEQ ID NO: 1361183 - RNA, 19 nt, Homo sapiens
  misc_RNA (1)...(19): siRNA sense strand
gaaaggcuaauuacagcuu

SEQ ID NO: 1361184 - RNA, 19 nt, Homo sapiens
  misc_RNA (1)...(19): siRNA sense strand
cagaauucaucuacagaga

SEQ ID NO: 1361185 - RNA, 19 nt, Homo sapiens
  misc_RNA (1)...(19): siRNA sense strand
ccugugaccugguugagaa

SEQ ID NO: 1361186 - RNA, 19 nt, Homo sapiens
  misc_RNA (1)...(19): siRNA sense strand
gaaggugugauuuacaaug

SEQ ID NO: 1361187 - RNA, 19 nt, Homo sapiens
  misc_RNA (1)...(19): siRNA sense strand
ggucuccacuggcaaggaa

SEQ ID NO: 1361188 - RNA, 19 nt, Homo sapiens
  misc_RNA (1)...(19): siRNA sense strand
acaaauacuucuacugucu

SEQ ID NO: 1361189 - RNA, 19 nt, Homo sapiens
  misc_RNA (1)...(19): siRNA sense strand
gugagacuguggaauguug

SEQ ID NO: 1361190 - RNA, 19 nt, Homo sapiens
  misc_RNA (1)...(19): siRNA sense strand
ggauaagugauacagaauu

SEQ ID NO: 1361191 - RNA, 19 nt, Homo sapiens
  misc_RNA (1)...(19): siRNA sense strand
aaaggcuaauuacagcuua

SEQ ID NO: 1361192 - RNA, 19 nt, Homo sapiens
  misc_RNA (1)...(19): siRNA sense strand
acagaugccuaaaguggaa

SEQ ID NO: 1361193 - RNA, 19 nt, Homo sapiens
  misc_RNA (1)...(19): siRNA sense strand
gugcgaagguccugguguu

SEQ ID NO: 1361194 - RNA, 19 nt, Homo sapiens
  misc_RNA (1)...(19): siRNA sense strand
ccacagacagaaugaagaa

SEQ ID NO: 1361195 - RNA, 19 nt, Homo sapiens
  misc_RNA (1)...(19): siRNA sense strand
ggacgaggaggaggacuaa

SEQ ID NO: 1361196 - RNA, 19 nt, Homo sapiens
  misc_RNA (1)...(19): siRNA sense strand
ucugcucucucuccaauaa

SEQ ID NO: 1361197 - RNA, 19 nt, Homo sapiens
  misc_RNA (1)...(19): siRNA sense strand
caaggauggccgaaaguuu

SEQ ID NO: 1361198 - RNA, 19 nt, Homo sapiens
  misc_RNA (1)...(19): siRNA sense strand
gaacccauauaucaacacu

SEQ ID NO: 1361199 - RNA, 19 nt, Homo sapiens
  misc_RNA (1)...(19): siRNA sense strand
agaaacaaaugaacauguc

SEQ ID NO: 1361200 - RNA, 19 nt, Homo sapiens
  misc_RNA (1)...(19): siRNA sense strand
gagaugaugccgccugaug

SEQ ID NO: 1361201 - RNA, 19 nt, Homo sapiens
  misc_RNA (1)...(19): siRNA sense strand
ccauauaucaacacucgua

SEQ ID NO: 1361202 - RNA, 19 nt, Homo sapiens
  misc_RNA (1)...(19): siRNA sense strand
gauacagaauucaucuaca

SEQ ID NO: 1361203 - RNA, 19 nt, Homo sapiens
  misc_RNA (1)...(19): siRNA sense strand
cauacgagaugaccaaggu

SEQ ID NO: 1361204 - RNA, 19 nt, Homo sapiens
  misc_RNA (1)...(19): siRNA sense strand
gagcauacgagaugaccaa

SEQ ID NO: 1361205 - RNA, 19 nt, Homo sapiens
  misc_RNA (1)...(19): siRNA sense strand
gaauacagggacauugaga

SEQ ID NO: 1361206 - RNA, 19 nt, Homo sapiens
  misc_RNA (1)...(19): siRNA sense strand
gaaacaaauacuucuacug

SEQ ID NO: 1361207 - RNA, 19 nt, Homo sapiens
  misc_RNA (1)...(19): siRNA sense strand
gcacaacacaacagauaag

SEQ ID NO: 1361208 - RNA, 19 nt, Homo sapiens
  misc_RNA (1)...(19): siRNA sense strand
gaaaggaauagcaauugca

SEQ ID NO: 1361209 - RNA, 19 nt, Homo sapiens
  misc_RNA (1)...(19): siRNA sense strand
ggaagauaauagucugucu

SEQ ID NO: 1361210 - RNA, 19 nt, Homo sapiens
  misc_RNA (1)...(19): siRNA sense strand
gagggaaauucuaucacau

SEQ ID NO: 1361211 - RNA, 19 nt, Homo sapiens
  misc_RNA (1)...(19): siRNA sense strand
caauguggaacccauauau

SEQ ID NO: 1361212 - RNA, 19 nt, Homo sapiens
  misc_RNA (1)...(19): siRNA sense strand
aaaugaacaugucaagaag

SEQ ID NO: 1361213 - RNA, 19 nt, Homo sapiens
  misc_RNA (1)...(19): siRNA sense strand
ugacaccagcggaagauaa

SEQ ID NO: 1361214 - RNA, 19 nt, Homo sapiens
  misc_RNA (1)...(19): siRNA sense strand
gauccuagccuacgaugag

SEQ ID NO: 1361215 - RNA, 19 nt, Homo sapiens
  misc_RNA (1)...(19): siRNA sense strand
acucguauacuggauauua

SEQ ID NO: 1361216 - RNA, 19 nt, Homo sapiens
  misc_RNA (1)...(19): siRNA sense strand
gcgcgguggugguaaagug

SEQ ID NO: 1361217 - RNA, 19 nt, Homo sapiens
  misc_RNA (1)...(19): siRNA sense strand
gaaacaaaugaacauguca

SEQ ID NO: 1361218 - RNA, 19 nt, Homo sapiens
  misc_RNA (1)...(19): siRNA sense strand
cauuaagagccaucagaua

SEQ ID NO: 1361219 - RNA, 19 nt, Homo sapiens
  misc_RNA (1)...(19): siRNA sense strand
gcagaacucauuacacaac

SEQ ID NO: 1361220 - RNA, 19 nt, Homo sapiens
  misc_RNA (1)...(19): siRNA sense strand
ccauggacuugacaacaga

SEQ ID NO: 1361221 - RNA, 19 nt, Homo sapiens
  misc_RNA (1)...(19): siRNA sense strand
ggacgugaccaagauccua

SEQ ID NO: 1361222 - RNA, 19 nt, Homo sapiens
  misc_RNA (1)...(19): siRNA sense strand
gacaacauccaguccauca

SEQ ID NO: 1361223 - RNA, 19 nt, Homo sapiens
  misc_RNA (1)...(19): siRNA sense strand
aggaaggugugauuuacaa

SEQ ID NO: 1361224 - RNA, 19 nt, Homo sapiens
  misc_RNA (1)...(19): siRNA sense strand
gcuaauuacagcuuacaga

SEQ ID NO: 1361225 - RNA, 19 nt, Homo sapiens
  misc_RNA (1)...(19): siRNA sense strand
ccuacacguuauuggcuua

SEQ ID NO: 1361226 - RNA, 19 nt, Homo sapiens
  misc_RNA (1)...(19): siRNA sense strand
ugagauugaugauuacaac

SEQ ID NO: 1361227 - RNA, 19 nt, Homo sapiens
  misc_RNA (1)...(19): siRNA sense strand
guacuugggccuccaugga

SEQ ID NO: 1361228 - RNA, 19 nt, Homo sapiens
  misc_RNA (1)...(19): siRNA sense strand
uccaauaacagacuucaaa

SEQ ID NO: 1361229 - RNA, 19 nt, Homo sapiens
  misc_RNA (1)...(19): siRNA sense strand
guugagaacugcaccuacu

SEQ ID NO: 1361230 - RNA, 19 nt, Homo sapiens
  misc_RNA (1)...(19): siRNA sense strand
gauuuacaauggccucagu

SEQ ID NO: 1361231 - RNA, 19 nt, Homo sapiens
  misc_RNA (1)...(19): siRNA sense strand
ccaagauccuagccuacga

SEQ ID NO: 1361232 - RNA, 19 nt, Homo sapiens
  misc_RNA (1)...(19): siRNA sense strand
caauugcacugcuugucau

SEQ ID NO: 1361233 - RNA, 19 nt, Homo sapiens
  misc_RNA (1)...(19): siRNA sense strand
auuaagagccaucagauau

SEQ ID NO: 1361234 - RNA, 19 nt, Homo sapiens
  misc_RNA (1)...(19): siRNA sense strand
cauaaaugaccgacagaug

SEQ ID NO: 1361235 - RNA, 19 nt, Homo sapiens
  misc_RNA (1)...(19): siRNA sense strand
gaggaauuggaaaggaaua

SEQ ID NO: 1361236 - RNA, 19 nt, Homo sapiens
  misc_RNA (1)...(19): siRNA sense strand
uaaaggccaacagcugaua

SEQ ID NO: 1361237 - RNA, 19 nt, Homo sapiens
  misc_RNA (1)...(19): siRNA sense strand
caagaaggccauaaaugac

SEQ ID NO: 1361238 - RNA, 19 nt, Homo sapiens
  misc_RNA (1)...(19): siRNA sense strand
cagcaguuccugaucauuc

SEQ ID NO: 1361239 - RNA, 19 nt, Homo sapiens
  misc_RNA (1)...(19): siRNA sense strand
ggacauugagauugaugau

SEQ ID NO: 1361240 - RNA, 19 nt, Homo sapiens
  misc_RNA (1)...(19): siRNA sense strand
ucauggagcucccaacuua

SEQ ID NO: 1361241 - RNA, 19 nt, Homo sapiens
  misc_RNA (1)...(19): siRNA sense strand
gaaggucacuguagaagau

SEQ ID NO: 1361242 - RNA, 19 nt, Homo sapiens
  misc_RNA (1)...(19): siRNA sense strand
gaacagaaaggaacaguga

SEQ ID NO: 1361243 - RNA, 19 nt, Homo sapiens
  misc_RNA (1)...(19): siRNA sense strand
gcaaggaaggugugauuua

SEQ ID NO: 1361244 - RNA, 19 nt, Homo sapiens
  misc_RNA (1)...(19): siRNA sense strand
gccaacagcugauauuuau

SEQ ID NO: 1361245 - RNA, 19 nt, Homo sapiens
  misc_RNA (1)...(19): siRNA sense strand
gcacacagcagaacucauu

SEQ ID NO: 1361246 - RNA, 19 nt, Homo sapiens
  misc_RNA (1)...(19): siRNA sense strand
gauaauagucugucucaaa

SEQ ID NO: 1361247 - RNA, 19 nt, Homo sapiens
  misc_RNA (1)...(19): siRNA sense strand
caacagagcauacgagaug

SEQ ID NO: 1361248 - RNA, 19 nt, Homo sapiens
  misc_RNA (1)...(19): siRNA sense strand
caaaugaacaugucaagaa

SEQ ID NO: 1361249 - RNA, 19 nt, Homo sapiens
  misc_RNA (1)...(19): siRNA sense strand
uaacagacuucaaacucua

SEQ ID NO: 1361250 - RNA, 19 nt, Homo sapiens
  misc_RNA (1)...(19): siRNA sense strand
gauaagugauacagaauuc

SEQ ID NO: 1361251 - RNA, 19 nt, Homo sapiens
  misc_RNA (1)...(19): siRNA sense strand
caacacaacagauaagaaa

SEQ ID NO: 1361252 - RNA, 19 nt, Homo sapiens
  misc_RNA (1)...(19): siRNA sense strand
cagcagaacucauuacaca

SEQ ID NO: 1361253 - RNA, 19 nt, Homo sapiens
  misc_RNA (1)...(19): siRNA sense strand
ucaagaaggccauaaauga

SEQ ID NO: 1361254 - RNA, 19 nt, Homo sapiens
  misc_RNA (1)...(19): siRNA sense strand
gauauuacguccugagcaa

SEQ ID NO: 1361255 - RNA, 19 nt, Homo sapiens
  misc_RNA (1)...(19): siRNA sense strand
gaacucauuacacaacuaa

SEQ ID NO: 1361256 - RNA, 19 nt, Homo sapiens
  misc_RNA (1)...(19): siRNA sense strand
uaagagccaucagauauga

SEQ ID NO: 1361257 - RNA, 19 nt, Homo sapiens
  misc_RNA (1)...(19): siRNA sense strand
ugaaggagcaguacauuga

SEQ ID NO: 1361258 - RNA, 19 nt, Homo sapiens
  misc_RNA (1)...(19): siRNA sense strand
gaagaaggucacuguagaa

SEQ ID NO: 1361259 - RNA, 19 nt, Homo sapiens
  misc_RNA (1)...(19): siRNA sense strand
agaagaaggucacuguaga

SEQ ID NO: 1361260 - RNA, 19 nt, Homo sapiens
  misc_RNA (1)...(19): siRNA sense strand
gaagaaacacgaggaugaa

SEQ ID NO: 1361261 - RNA, 19 nt, Homo sapiens
  misc_RNA (1)...(19): siRNA sense strand
guggauaagugauacagaa

SEQ ID NO: 1361262 - RNA, 19 nt, Homo sapiens
  misc_RNA (1)...(19): siRNA sense strand
ggccaacagcugauauuua

SEQ ID NO: 1361263 - RNA, 19 nt, Homo sapiens
  misc_RNA (1)...(19): siRNA sense strand
gcagaggaauuggaaagga

SEQ ID NO: 1361264 - RNA, 19 nt, Homo sapiens
  misc_RNA (1)...(19): siRNA sense strand
uaucaacacucguauacug

SEQ ID NO: 1361265 - RNA, 19 nt, Homo sapiens
  misc_RNA (1)...(19): siRNA sense strand
cgaagaaacacgaggauga

SEQ ID NO: 1361266 - RNA, 19 nt, Homo sapiens
  misc_RNA (1)...(19): siRNA sense strand
gauagagaguaugcacuuu

SEQ ID NO: 1361267 - RNA, 19 nt, Homo sapiens
  misc_RNA (1)...(19): siRNA sense strand
gggaaauucuaucacauca

SEQ ID NO: 1361268 - RNA, 19 nt, Homo sapiens
  misc_RNA (1)...(19): siRNA sense strand
ggaaaggaauagcaauugc

SEQ ID NO: 1361269 - RNA, 19 nt, Homo sapiens
  misc_RNA (1)...(19): siRNA sense strand
acagggacauugagauuga

SEQ ID NO: 1361270 - RNA, 19 nt, Homo sapiens
  misc_RNA (1)...(19): siRNA sense strand
gaggcuaaguggauaagug

SEQ ID NO: 1361271 - RNA, 19 nt, Homo sapiens
  misc_RNA (1)...(19): siRNA sense strand
gugcacaacacaacagaua

SEQ ID NO: 1361272 - RNA, 19 nt, Homo sapiens
  misc_RNA (1)...(19): siRNA sense strand
cgagggaaauucuaucaca

SEQ ID NO: 1361273 - RNA, 19 nt, Homo sapiens
  misc_RNA (1)...(19): siRNA sense strand
gcauuucccuacacguuau

SEQ ID NO: 1361274 - RNA, 19 nt, Homo sapiens
  misc_RNA (1)...(19): siRNA sense strand
gugacuggcuguaugaaga

SEQ ID NO: 1361275 - RNA, 19 nt, Homo sapiens
  misc_RNA (1)...(19): siRNA sense strand
gaucgucaccucggucaua

SEQ ID NO: 1361276 - RNA, 19 nt, Homo sapiens
  misc_RNA (1)...(19): siRNA sense strand
caaggaaggugugauuuac

SEQ ID NO: 1361277 - RNA, 19 nt, Homo sapiens
  misc_RNA (1)...(19): siRNA sense strand
gcuaaguggauaagugaua

SEQ ID NO: 1361278 - RNA, 19 nt, Homo sapiens
  misc_RNA (1)...(19): siRNA sense strand
cagaggaauuggaaaggaa

SEQ ID NO: 1361279 - RNA, 19 nt, Homo sapiens
  misc_RNA (1)...(19): siRNA sense strand
gcucugcucucucuccaau

SEQ ID NO: 1361280 - RNA, 19 nt, Homo sapiens
  misc_RNA (1)...(19): siRNA sense strand
gcaauugcacugcuuguca

SEQ ID NO: 1361281 - RNA, 19 nt, Homo sapiens
  misc_RNA (1)...(19): siRNA sense strand
gaauucaucuacagagaac

SEQ ID NO: 1361282 - RNA, 19 nt, Homo sapiens
  misc_RNA (1)...(19): siRNA sense strand
gaaacacgaggaugaaagu

SEQ ID NO: 1361283 - RNA, 19 nt, Homo sapiens
  misc_RNA (1)...(19): siRNA sense strand
gaaaggcuaauuacagcuu

SEQ ID NO: 1361284 - RNA, 19 nt, Homo sapiens
  misc_RNA (1)...(19): siRNA sense strand
cagaauucaucuacagaga

SEQ ID NO: 1361285 - RNA, 19 nt, Homo sapiens
  misc_RNA (1)...(19): siRNA sense strand
ccugugaccugguugagaa

SEQ ID NO: 1361286 - RNA, 19 nt, Homo sapiens
  misc_RNA (1)...(19): siRNA sense strand
gaaggugugauuuacaaug

SEQ ID NO: 1361287 - RNA, 19 nt, Homo sapiens
  misc_RNA (1)...(19): siRNA sense strand
ggucuccacuggcaaggaa

SEQ ID NO: 1361288 - RNA, 19 nt, Homo sapiens
  misc_RNA (1)...(19): siRNA sense strand
acaaauacuucuacugucu

SEQ ID NO: 1361289 - RNA, 19 nt, Homo sapiens
  misc_RNA (1)...(19): siRNA sense strand
gugagacuguggaauguug

SEQ ID NO: 1361290 - RNA, 19 nt, Homo sapiens
  misc_RNA (1)...(19): siRNA sense strand
ggauaagugauacagaauu

SEQ ID NO: 1361291 - RNA, 19 nt, Homo sapiens
  misc_RNA (1)...(19): siRNA sense strand
aaaggcuaauuacagcuua

SEQ ID NO: 1361292 - RNA, 19 nt, Homo sapiens
  misc_RNA (1)...(19): siRNA sense strand
acagaugccuaaaguggaa

SEQ ID NO: 1361293 - RNA, 19 nt, Homo sapiens
  misc_RNA (1)...(19): siRNA sense strand
gugcgaagguccugguguu

SEQ ID NO: 1361294 - RNA, 19 nt, Homo sapiens
  misc_RNA (1)...(19): siRNA sense strand
ccacagacagaaugaagaa

SEQ ID NO: 1361295 - RNA, 19 nt, Homo sapiens
  misc_RNA (1)...(19): siRNA sense strand
ggacgaggaggaggacuaa

SEQ ID NO: 1361296 - RNA, 19 nt, Homo sapiens
  misc_RNA (1)...(19): siRNA sense strand
ucugcucucucuccaauaa

SEQ ID NO: 1361297 - RNA, 19 nt, Homo sapiens
  misc_RNA (1)...(19): siRNA sense strand
caaggauggccgaaaguuu

SEQ ID NO: 1361298 - RNA, 19 nt, Homo sapiens
  misc_RNA (1)...(19): siRNA sense strand
gaacccauauaucaacacu

SEQ ID NO: 1361299 - RNA, 19 nt, Homo sapiens
  misc_RNA (1)...(19): siRNA sense strand
agaaacaaaugaacauguc

SEQ ID NO: 1361300 - RNA, 19 nt, Homo sapiens
  misc_RNA (1)...(19): siRNA sense strand
gagaugaugccgccugaug

SEQ ID NO: 1361301 - RNA, 19 nt, Homo sapiens
  misc_RNA (1)...(19): siRNA sense strand
ccauauaucaacacucgua

SEQ ID NO: 1361302 - RNA, 19 nt, Homo sapiens
  misc_RNA (1)...(19): siRNA sense strand
gauacagaauucaucuaca

SEQ ID NO: 1361303 - RNA, 19 nt, Homo sapiens
  misc_RNA (1)...(19): siRNA sense strand
cauacgagaugaccaaggu

SEQ ID NO: 1361304 - RNA, 19 nt, Homo sapiens
  misc_RNA (1)...(19): siRNA sense strand
gagcauacgagaugaccaa

SEQ ID NO: 1361305 - RNA, 19 nt, Homo sapiens
  misc_RNA (1)...(19): siRNA sense strand
gaauacagggacauugaga

SEQ ID NO: 1361306 - RNA, 19 nt, Homo sapiens
  misc_RNA (1)...(19): siRNA sense strand
gaaacaaauacuucuacug

SEQ ID NO: 1361307 - RNA, 19 nt, Homo sapiens
  misc_RNA (1)...(19): siRNA sense strand
gcacaacacaacagauaag

SEQ ID NO: 1361308 - RNA, 19 nt, Homo sapiens
  misc_RNA (1)...(19): siRNA sense strand
gaaaggaauagcaauugca

SEQ ID NO: 1361309 - RNA, 19 nt, Homo sapiens
  misc_RNA (1)...(19): siRNA sense strand
ggaagauaauagucugucu

SEQ ID NO: 1361310 - RNA, 19 nt, Homo sapiens
  misc_RNA (1)...(19): siRNA sense strand
gagggaaauucuaucacau

SEQ ID NO: 1361311 - RNA, 19 nt, Homo sapiens
  misc_RNA (1)...(19): siRNA sense strand
caauguggaacccauauau

SEQ ID NO: 1361312 - RNA, 19 nt, Homo sapiens
  misc_RNA (1)...(19): siRNA sense strand
aaaugaacaugucaagaag

SEQ ID NO: 1361313 - RNA, 19 nt, Homo sapiens
  misc_RNA (1)...(19): siRNA sense strand
ugacaccagcggaagauaa

SEQ ID NO: 1361314 - RNA, 19 nt, Homo sapiens
  misc_RNA (1)...(19): siRNA sense strand
gauccuagccuacgaugag

SEQ ID NO: 1361315 - RNA, 19 nt, Homo sapiens
  misc_RNA (1)...(19): siRNA sense strand
acucguauacuggauauua

SEQ ID NO: 1361316 - RNA, 19 nt, Homo sapiens
  misc_RNA (1)...(19): siRNA sense strand
gcgcgguggugguaaagug

SEQ ID NO: 1361317 - RNA, 19 nt, Homo sapiens
  misc_RNA (1)...(19): siRNA sense strand
gaaacaaaugaacauguca

SEQ ID NO: 1361318 - RNA, 19 nt, Homo sapiens
  misc_RNA (1)...(19): siRNA sense strand
cauuaagagccaucagaua

SEQ ID NO: 1361319 - RNA, 19 nt, Homo sapiens
  misc_RNA (1)...(19): siRNA sense strand
gcagaacucauuacacaac

SEQ ID NO: 1361320 - RNA, 19 nt, Homo sapiens
  misc_RNA (1)...(19): siRNA sense strand
ccauggacuugacaacaga

SEQ ID NO: 1361321 - RNA, 19 nt, Homo sapiens
  misc_RNA (1)...(19): siRNA sense strand
ggacgugaccaagauccua

SEQ ID NO: 1361322 - RNA, 19 nt, Homo sapiens
  misc_RNA (1)...(19): siRNA sense strand
gacaacauccaguccauca

SEQ ID NO: 1361323 - RNA, 19 nt, Homo sapiens
  misc_RNA (1)...(19): siRNA sense strand
aggaaggugugauuuacaa

SEQ ID NO: 1361324 - RNA, 19 nt, Homo sapiens
  misc_RNA (1)...(19): siRNA sense strand
gcuaauuacagcuuacaga

SEQ ID NO: 1361325 - RNA, 19 nt, Homo sapiens
  misc_RNA (1)...(19): siRNA sense strand
ccuacacguuauuggcuua

SEQ ID NO: 1361326 - RNA, 19 nt, Homo sapiens
  misc_RNA (1)...(19): siRNA sense strand
ugagauugaugauuacaac

SEQ ID NO: 1361327 - RNA, 19 nt, Homo sapiens
  misc_RNA (1)...(19): siRNA sense strand
guacuugggccuccaugga

SEQ ID NO: 1361328 - RNA, 19 nt, Homo sapiens
  misc_RNA (1)...(19): siRNA sense strand
uccaauaacagacuucaaa

SEQ ID NO: 1361329 - RNA, 19 nt, Homo sapiens
  misc_RNA (1)...(19): siRNA sense strand
guugagaacugcaccuacu

SEQ ID NO: 1361330 - RNA, 19 nt, Homo sapiens
  misc_RNA (1)...(19): siRNA sense strand
gauuuacaauggccucagu

SEQ ID NO: 1361331 - RNA, 19 nt, Homo sapiens
  misc_RNA (1)...(19): siRNA sense strand
ccaagauccuagccuacga

SEQ ID NO: 1361332 - RNA, 19 nt, Homo sapiens
  misc_RNA (1)...(19): siRNA sense strand
caauugcacugcuugucau

SEQ ID NO: 1361333 - RNA, 19 nt, Homo sapiens
  misc_RNA (1)...(19): siRNA sense strand
auuaagagccaucagauau

SEQ ID NO: 1361334 - RNA, 19 nt, Homo sapiens
  misc_RNA (1)...(19): siRNA sense strand
cauaaaugaccgacagaug

SEQ ID NO: 1361335 - RNA, 19 nt, Homo sapiens
  misc_RNA (1)...(19): siRNA sense strand
gaggaauuggaaaggaaua

SEQ ID NO: 1361336 - RNA, 19 nt, Homo sapiens
  misc_RNA (1)...(19): siRNA sense strand
uaaaggccaacagcugaua

SEQ ID NO: 1361337 - RNA, 19 nt, Homo sapiens
  misc_RNA (1)...(19): siRNA sense strand
caagaaggccauaaaugac

SEQ ID NO: 1361338 - RNA, 19 nt, Homo sapiens
  misc_RNA (1)...(19): siRNA sense strand
cagcaguuccugaucauuc

SEQ ID NO: 1361339 - RNA, 19 nt, Homo sapiens
  misc_RNA (1)...(19): siRNA sense strand
ggacauugagauugaugau

SEQ ID NO: 1361340 - RNA, 19 nt, Homo sapiens
  misc_RNA (1)...(19): siRNA sense strand
ggaaagaucucugugaaga

SEQ ID NO: 1361341 - RNA, 19 nt, Homo sapiens
  misc_RNA (1)...(19): siRNA sense strand
ggaaacuacuggcaugaaa

SEQ ID NO: 1361342 - RNA, 19 nt, Homo sapiens
  misc_RNA (1)...(19): siRNA sense strand
ccaaagagaguggcaauua

SEQ ID NO: 1361343 - RNA, 19 nt, Homo sapiens
  misc_RNA (1)...(19): siRNA sense strand
caaagagaguggcaauuau

SEQ ID NO: 1361344 - RNA, 19 nt, Homo sapiens
  misc_RNA (1)...(19): siRNA sense strand
gggaagaaauauguacuaa

SEQ ID NO: 1361345 - RNA, 19 nt, Homo sapiens
  misc_RNA (1)...(19): siRNA sense strand
cauacuguguuacauguua

SEQ ID NO: 1361346 - RNA, 19 nt, Homo sapiens
  misc_RNA (1)...(19): siRNA sense strand
gagaauugccgacaaccua

SEQ ID NO: 1361347 - RNA, 19 nt, Homo sapiens
  misc_RNA (1)...(19): siRNA sense strand
ucucacaggugccaaguuu

SEQ ID NO: 1361348 - RNA, 19 nt, Homo sapiens
  misc_RNA (1)...(19): siRNA sense strand
aaggaaaucuucugccaaa

SEQ ID NO: 1361349 - RNA, 19 nt, Homo sapiens
  misc_RNA (1)...(19): siRNA sense strand
agaaggaguuugcucacua

SEQ ID NO: 1361350 - RNA, 19 nt, Homo sapiens
  misc_RNA (1)...(19): siRNA sense strand
uaggaaagaucucugugaa

SEQ ID NO: 1361351 - RNA, 19 nt, Homo sapiens
  misc_RNA (1)...(19): siRNA sense strand
gaauggacacugacaucua

SEQ ID NO: 1361352 - RNA, 19 nt, Homo sapiens
  misc_RNA (1)...(19): siRNA sense strand
ccaaaugcaaucacucuuu

SEQ ID NO: 1361353 - RNA, 19 nt, Homo sapiens
  misc_RNA (1)...(19): siRNA sense strand
gaaggaguuugcucacuac

SEQ ID NO: 1361354 - RNA, 19 nt, Homo sapiens
  misc_RNA (1)...(19): siRNA sense strand
gaaagaucucugugaagaa

SEQ ID NO: 1361355 - RNA, 19 nt, Homo sapiens
  misc_RNA (1)...(19): siRNA sense strand
aaagagaguggcaauuauu

SEQ ID NO: 1361356 - RNA, 19 nt, Homo sapiens
  misc_RNA (1)...(19): siRNA sense strand
gaauugccgacaaccuaua

SEQ ID NO: 1361357 - RNA, 19 nt, Homo sapiens
  misc_RNA (1)...(19): siRNA sense strand
guaggaaagaucucuguga

SEQ ID NO: 1361358 - RNA, 19 nt, Homo sapiens
  misc_RNA (1)...(19): siRNA sense strand
gcuccggaauggacacuga

SEQ ID NO: 1361359 - RNA, 19 nt, Homo sapiens
  misc_RNA (1)...(19): siRNA sense strand
gauaacuucaggugggaua

SEQ ID NO: 1361360 - RNA, 19 nt, Homo sapiens
  misc_RNA (1)...(19): siRNA sense strand
ggaaaugcucugucuccuu

SEQ ID NO: 1361361 - RNA, 19 nt, Homo sapiens
  misc_RNA (1)...(19): siRNA sense strand
gaccggcacuggcaugaag

SEQ ID NO: 1361362 - RNA, 19 nt, Homo sapiens
  misc_RNA (1)...(19): siRNA sense strand
ucacaggugccaaguuuau

SEQ ID NO: 1361363 - RNA, 19 nt, Homo sapiens
  misc_RNA (1)...(19): siRNA sense strand
uaaaggaugacaguccaua

SEQ ID NO: 1361364 - RNA, 19 nt, Homo sapiens
  misc_RNA (1)...(19): siRNA sense strand
uguaguggcuguaggaaag

SEQ ID NO: 1361365 - RNA, 19 nt, Homo sapiens
  misc_RNA (1)...(19): siRNA sense strand
gugccaaguuuaucugcuu

SEQ ID NO: 1361366 - RNA, 19 nt, Homo sapiens
  misc_RNA (1)...(19): siRNA sense strand
caaucacucuuugguggaa

SEQ ID NO: 1361367 - RNA, 19 nt, Homo sapiens
  misc_RNA (1)...(19): siRNA sense strand
aaagaucucugugaagaac

SEQ ID NO: 1361368 - RNA, 19 nt, Homo sapiens
  misc_RNA (1)...(19): siRNA sense strand
auuauugugugccauguuu

SEQ ID NO: 1361369 - RNA, 19 nt, Homo sapiens
  misc_RNA (1)...(19): siRNA sense strand
aauggacacugacaucuag

SEQ ID NO: 1361370 - RNA, 19 nt, Homo sapiens
  misc_RNA (1)...(19): siRNA sense strand
guguguagccuguuccaaa

SEQ ID NO: 1361371 - RNA, 19 nt, Homo sapiens
  misc_RNA (1)...(19): siRNA sense strand
gagaaggaguuugcucacu

SEQ ID NO: 1361372 - RNA, 19 nt, Homo sapiens
  misc_RNA (1)...(19): siRNA sense strand
uguguuacauguuaugauc

SEQ ID NO: 1361373 - RNA, 19 nt, Homo sapiens
  misc_RNA (1)...(19): siRNA sense strand
aaguuuaucugcuuucaag

SEQ ID NO: 1361374 - RNA, 19 nt, Homo sapiens
  misc_RNA (1)...(19): siRNA sense strand
gacaaccuauagggacaaa

SEQ ID NO: 1361375 - RNA, 19 nt, Homo sapiens
  misc_RNA (1)...(19): siRNA sense strand
ggacugcuacaaccaucuu

SEQ ID NO: 1361376 - RNA, 19 nt, Homo sapiens
  misc_RNA (1)...(19): siRNA sense strand
ccaaguuuaucugcuuuca

SEQ ID NO: 1361377 - RNA, 19 nt, Homo sapiens
  misc_RNA (1)...(19): siRNA sense strand
uaaagaguguuuucugugu

SEQ ID NO: 1361378 - RNA, 19 nt, Homo sapiens
  misc_RNA (1)...(19): siRNA sense strand
aaauguggcuccggaaugg

SEQ ID NO: 1361379 - RNA, 19 nt, Homo sapiens
  misc_RNA (1)...(19): siRNA sense strand
acaaguguguagccuguuc

SEQ ID NO: 1361380 - RNA, 19 nt, Homo sapiens
  misc_RNA (1)...(19): siRNA sense strand
ccagaacaaggaaaucuuc

SEQ ID NO: 1361381 - RNA, 19 nt, Homo sapiens
  misc_RNA (1)...(19): siRNA sense strand
uguaagaaggugauaacuu

SEQ ID NO: 1361382 - RNA, 19 nt, Homo sapiens
  misc_RNA (1)...(19): siRNA sense strand
cauaaagaguguuuucugu

SEQ ID NO: 1361383 - RNA, 19 nt, Homo sapiens
  misc_RNA (1)...(19): siRNA sense strand
gaaacuacuggcaugaaac

SEQ ID NO: 1361384 - RNA, 19 nt, Homo sapiens
  misc_RNA (1)...(19): siRNA sense strand
cauagcgaaugcuuuaacu

SEQ ID NO: 1361385 - RNA, 19 nt, Homo sapiens
  misc_RNA (1)...(19): siRNA sense strand
gcuacaaccaucuuuaugc

SEQ ID NO: 1361386 - RNA, 19 nt, Homo sapiens
  misc_RNA (1)...(19): siRNA sense strand
gcucacuacugcaacuuuu

SEQ ID NO: 1361387 - RNA, 19 nt, Homo sapiens
  misc_RNA (1)...(19): siRNA sense strand
ggaauuuaagggaaacuac

SEQ ID NO: 1361388 - RNA, 19 nt, Homo sapiens
  misc_RNA (1)...(19): siRNA sense strand
ggaauggacacugacaucu

SEQ ID NO: 1361389 - RNA, 19 nt, Homo sapiens
  misc_RNA (1)...(19): siRNA sense strand
gggaaacuacuggcaugaa

SEQ ID NO: 1361390 - RNA, 19 nt, Homo sapiens
  misc_RNA (1)...(19): siRNA sense strand
gaauuuaagggaaacuacu

SEQ ID NO: 1361391 - RNA, 19 nt, Homo sapiens
  misc_RNA (1)...(19): siRNA sense strand
gaucguguauuuucuaacu

SEQ ID NO: 1361392 - RNA, 19 nt, Homo sapiens
  misc_RNA (1)...(19): siRNA sense strand
uccauacuguguuacaugu

SEQ ID NO: 1361393 - RNA, 19 nt, Homo sapiens
  misc_RNA (1)...(19): siRNA sense strand
ugucaauacugcacagcau

SEQ ID NO: 1361394 - RNA, 19 nt, Homo sapiens
  misc_RNA (1)...(19): siRNA sense strand
ugccaaguuuaucugcuuu

SEQ ID NO: 1361395 - RNA, 19 nt, Homo sapiens
  misc_RNA (1)...(19): siRNA sense strand
ugggaagaaauauguacua

SEQ ID NO: 1361396 - RNA, 19 nt, Homo sapiens
  misc_RNA (1)...(19): siRNA sense strand
aaagaguguuuucugugua

SEQ ID NO: 1361397 - RNA, 19 nt, Homo sapiens
  misc_RNA (1)...(19): siRNA sense strand
ucaauacugcacagcauca

SEQ ID NO: 1361398 - RNA, 19 nt, Homo sapiens
  misc_RNA (1)...(19): siRNA sense strand
caaccuauagggacaaagc

SEQ ID NO: 1361399 - RNA, 19 nt, Homo sapiens
  misc_RNA (1)...(19): siRNA sense strand
gcaaacugcuguaauucaa

SEQ ID NO: 1361400 - RNA, 19 nt, Homo sapiens
  misc_RNA (1)...(19): siRNA sense strand
gaacauggauacagaacag

SEQ ID NO: 1361401 - RNA, 19 nt, Homo sapiens
  misc_RNA (1)...(19): siRNA sense strand
ucaggaaccuugucuguug

SEQ ID NO: 1361402 - RNA, 19 nt, Homo sapiens
  misc_RNA (1)...(19): siRNA sense strand
auaaauggaucaccagauu

SEQ ID NO: 1361403 - RNA, 19 nt, Homo sapiens
  misc_RNA (1)...(19): siRNA sense strand
caccggaccuaugcaauua

SEQ ID NO: 1361404 - RNA, 19 nt, Homo sapiens
  misc_RNA (1)...(19): siRNA sense strand
cagcaaugauucuggcuuu

SEQ ID NO: 1361405 - RNA, 19 nt, Homo sapiens
  misc_RNA (1)...(19): siRNA sense strand
acaagaacauggauacaga

SEQ ID NO: 1361406 - RNA, 19 nt, Homo sapiens
  misc_RNA (1)...(19): siRNA sense strand
aaugcaaacugcuguaauu

SEQ ID NO: 1361407 - RNA, 19 nt, Homo sapiens
  misc_RNA (1)...(19): siRNA sense strand
gcaauacccauaccacuuc

SEQ ID NO: 1361408 - RNA, 19 nt, Homo sapiens
  misc_RNA (1)...(19): siRNA sense strand
ccacgaaguugauaaugca

SEQ ID NO: 1361409 - RNA, 19 nt, Homo sapiens
  misc_RNA (1)...(19): siRNA sense strand
caguuaauauccagucauu

SEQ ID NO: 1361410 - RNA, 19 nt, Homo sapiens
  misc_RNA (1)...(19): siRNA sense strand
uaaauggaucaccagauua

SEQ ID NO: 1361411 - RNA, 19 nt, Homo sapiens
  misc_RNA (1)...(19): siRNA sense strand
caaauggcauggugucucu

SEQ ID NO: 1361412 - RNA, 19 nt, Homo sapiens
  misc_RNA (1)...(19): siRNA sense strand
gauccugaaugcagcaaug

SEQ ID NO: 1361413 - RNA, 19 nt, Homo sapiens
  misc_RNA (1)...(19): siRNA sense strand
aaacugcuguaauucaaga

SEQ ID NO: 1361414 - RNA, 19 nt, Homo sapiens
  misc_RNA (1)...(19): siRNA sense strand
gaacauugccagugcuaca

SEQ ID NO: 1361415 - RNA, 19 nt, Homo sapiens
  misc_RNA (1)...(19): siRNA sense strand
cagauuaucagaaagcaaa

SEQ ID NO: 1361416 - RNA, 19 nt, Homo sapiens
  misc_RNA (1)...(19): siRNA sense strand
ucaccuugcuggaauuaug

SEQ ID NO: 1361417 - RNA, 19 nt, Homo sapiens
  misc_RNA (1)...(19): siRNA sense strand
gcuuuucucucacuaaaua

SEQ ID NO: 1361418 - RNA, 19 nt, Homo sapiens
  misc_RNA (1)...(19): siRNA sense strand
gcaaugcaaacugcuguaa

SEQ ID NO: 1361419 - RNA, 19 nt, Homo sapiens
  misc_RNA (1)...(19): siRNA sense strand
gcugaauacuucugucuac

SEQ ID NO: 1361420 - RNA, 19 nt, Homo sapiens
  misc_RNA (1)...(19): siRNA sense strand
ggaccuaugcaauuacaug

SEQ ID NO: 1361421 - RNA, 19 nt, Homo sapiens
  misc_RNA (1)...(19): siRNA sense strand
uacacaggcuacccgauuu

SEQ ID NO: 1361422 - RNA, 19 nt, Homo sapiens
  misc_RNA (1)...(19): siRNA sense strand
ggaccagaagagcugaaua

SEQ ID NO: 1361423 - RNA, 19 nt, Homo sapiens
  misc_RNA (1)...(19): siRNA sense strand
cuacacaggcuacccgauu

SEQ ID NO: 1361424 - RNA, 19 nt, Homo sapiens
  misc_RNA (1)...(19): siRNA sense strand
ccagaagagcugaauacuu

SEQ ID NO: 1361425 - RNA, 19 nt, Homo sapiens
  misc_RNA (1)...(19): siRNA sense strand
gaucaccagauuaucagaa

SEQ ID NO: 1361426 - RNA, 19 nt, Homo sapiens
  misc_RNA (1)...(19): siRNA sense strand
aaauggaucaccagauuau

SEQ ID NO: 1361427 - RNA, 19 nt, Homo sapiens
  misc_RNA (1)...(19): siRNA sense strand
ucaccggaccuaugcaauu

SEQ ID NO: 1361428 - RNA, 19 nt, Homo sapiens
  misc_RNA (1)...(19): siRNA sense strand
gaccagaagagcugaauac

SEQ ID NO: 1361429 - RNA, 19 nt, Homo sapiens
  misc_RNA (1)...(19): siRNA sense strand
gauuuggggugcuguguuu

SEQ ID NO: 1361430 - RNA, 19 nt, Homo sapiens
  misc_RNA (1)...(19): siRNA sense strand
caagaacauggauacagaa

SEQ ID NO: 1361431 - RNA, 19 nt, Homo sapiens
  misc_RNA (1)...(19): siRNA sense strand
uugcuggaauuaugcguaa

SEQ ID NO: 1361432 - RNA, 19 nt, Homo sapiens
  misc_RNA (1)...(19): siRNA sense strand
aauauccagucauuaagga

SEQ ID NO: 1361433 - RNA, 19 nt, Homo sapiens
  misc_RNA (1)...(19): siRNA sense strand
cagaacaguuuuggaauga

SEQ ID NO: 1361434 - RNA, 19 nt, Homo sapiens
  misc_RNA (1)...(19): siRNA sense strand
gcaaugauucuggcuuugg

SEQ ID NO: 1361435 - RNA, 19 nt, Homo sapiens
  misc_RNA (1)...(19): siRNA sense strand
gauaaaacccacaagaaca

SEQ ID NO: 1361436 - RNA, 19 nt, Homo sapiens
  misc_RNA (1)...(19): siRNA sense strand
aaccuugucuguuguagca

SEQ ID NO: 1361437 - RNA, 19 nt, Homo sapiens
  misc_RNA (1)...(19): siRNA sense strand
cauggauacagaacaguuu

SEQ ID NO: 1361438 - RNA, 19 nt, Homo sapiens
  misc_RNA (1)...(19): siRNA sense strand
guaauucaagagaggaaau

SEQ ID NO: 1361439 - RNA, 19 nt, Homo sapiens
  misc_RNA (1)...(19): siRNA sense strand
ccugaaugcagcaaugauu

SEQ ID NO: 1361440 - RNA, 19 nt, Homo sapiens
  misc_RNA (1)...(19): siRNA sense strand
caggaaccuugucuguugu

SEQ ID NO: 1361441 - RNA, 19 nt, Homo sapiens
  misc_RNA (1)...(19): siRNA sense strand
gagcugaauacuucugucu

SEQ ID NO: 1361442 - RNA, 19 nt, Homo sapiens
  misc_RNA (1)...(19): siRNA sense strand
cagagucaccggaccuaug

SEQ ID NO: 1361443 - RNA, 19 nt, Homo sapiens
  misc_RNA (1)...(19): siRNA sense strand
gaacaguuuuggaaugaac

SEQ ID NO: 1361444 - RNA, 19 nt, Homo sapiens
  misc_RNA (1)...(19): siRNA sense strand
ccauccagauccugaaugc

SEQ ID NO: 1361445 - RNA, 19 nt, Homo sapiens
  misc_RNA (1)...(19): siRNA sense strand
gggauaaaacccacaagaa

SEQ ID NO: 1361446 - RNA, 19 nt, Homo sapiens
  misc_RNA (1)...(19): siRNA sense strand
ccauagccauguggugcaa

SEQ ID NO: 1361447 - RNA, 19 nt, Homo sapiens
  misc_RNA (1)...(19): siRNA sense strand
ggaaccuugucuguuguag

SEQ ID NO: 1361448 - RNA, 19 nt, Homo sapiens
  misc_RNA (1)...(19): siRNA sense strand
ccucaccucccaauucugu

SEQ ID NO: 1361449 - RNA, 19 nt, Homo sapiens
  misc_RNA (1)...(19): siRNA sense strand
caaugcaaacugcuguaau

SEQ ID NO: 1361450 - RNA, 19 nt, Homo sapiens
  misc_RNA (1)...(19): siRNA sense strand
aaacauggcugucauacau

SEQ ID NO: 1361451 - RNA, 19 nt, Homo sapiens
  misc_RNA (1)...(19): siRNA sense strand
ggaaaggauugcaagagaa

SEQ ID NO: 1361452 - RNA, 19 nt, Homo sapiens
  misc_RNA (1)...(19): siRNA sense strand
gauguaaagugcucuguug

SEQ ID NO: 1361453 - RNA, 19 nt, Homo sapiens
  misc_RNA (1)...(19): siRNA sense strand
ggaauaacaaugaugugua

SEQ ID NO: 1361454 - RNA, 19 nt, Homo sapiens
  misc_RNA (1)...(19): siRNA sense strand
caucagggaucuuaaucaa

SEQ ID NO: 1361455 - RNA, 19 nt, Homo sapiens
  misc_RNA (1)...(19): siRNA sense strand
uaacuacuauggcaacuca

SEQ ID NO: 1361456 - RNA, 19 nt, Homo sapiens
  misc_RNA (1)...(19): siRNA sense strand
ucagggaucuuaaucaaca

SEQ ID NO: 1361457 - RNA, 19 nt, Homo sapiens
  misc_RNA (1)...(19): siRNA sense strand
gaauaucaccagcucugua

SEQ ID NO: 1361458 - RNA, 19 nt, Homo sapiens
  misc_RNA (1)...(19): siRNA sense strand
uauaucggguacacaauuu

SEQ ID NO: 1361459 - RNA, 19 nt, Homo sapiens
  misc_RNA (1)...(19): siRNA sense strand
ucaggauccuugucaauug

SEQ ID NO: 1361460 - RNA, 19 nt, Homo sapiens
  misc_RNA (1)...(19): siRNA sense strand
guaaagugcucuguuguac

SEQ ID NO: 1361461 - RNA, 19 nt, Homo sapiens
  misc_RNA (1)...(19): siRNA sense strand
uggaaaggauugcaagaga

SEQ ID NO: 1361462 - RNA, 19 nt, Homo sapiens
  misc_RNA (1)...(19): siRNA sense strand
gaagggagaacccaaaguc

SEQ ID NO: 1361463 - RNA, 19 nt, Homo sapiens
  misc_RNA (1)...(19): siRNA sense strand
gguagucuaggaaugaaua

SEQ ID NO: 1361464 - RNA, 19 nt, Homo sapiens
  misc_RNA (1)...(19): siRNA sense strand
gugcuggaauucugcauug

SEQ ID NO: 1361465 - RNA, 19 nt, Homo sapiens
  misc_RNA (1)...(19): siRNA sense strand
guaacccuauuuccgugua

SEQ ID NO: 1361466 - RNA, 19 nt, Homo sapiens
  misc_RNA (1)...(19): siRNA sense strand
gcaucucccacaccacuua

SEQ ID NO: 1361467 - RNA, 19 nt, Homo sapiens
  misc_RNA (1)...(19): siRNA sense strand
gcauggugcuccucuuaag

SEQ ID NO: 1361468 - RNA, 19 nt, Homo sapiens
  misc_RNA (1)...(19): siRNA sense strand
gguccgagguagucuagga

SEQ ID NO: 1361469 - RNA, 19 nt, Homo sapiens
  misc_RNA (1)...(19): siRNA sense strand
gcagcaggaauuagaacua

SEQ ID NO: 1361470 - RNA, 19 nt, Homo sapiens
  misc_RNA (1)...(19): siRNA sense strand
gaaaggauugcaagagaag

SEQ ID NO: 1361471 - RNA, 19 nt, Homo sapiens
  misc_RNA (1)...(19): siRNA sense strand
uaagugugcuggaauucug

SEQ ID NO: 1361472 - RNA, 19 nt, Homo sapiens
  misc_RNA (1)...(19): siRNA sense strand
ggaucuuaaucaacacauu

SEQ ID NO: 1361473 - RNA, 19 nt, Homo sapiens
  misc_RNA (1)...(19): siRNA sense strand
guauaucggguacacaauu

SEQ ID NO: 1361474 - RNA, 19 nt, Homo sapiens
  misc_RNA (1)...(19): siRNA sense strand
gagguagucuaggaaugaa

SEQ ID NO: 1361475 - RNA, 19 nt, Homo sapiens
  misc_RNA (1)...(19): siRNA sense strand
gccaucacauucucacaug

SEQ ID NO: 1361476 - RNA, 19 nt, Homo sapiens
  misc_RNA (1)...(19): siRNA sense strand
gcaggaauuagaacuacaa

SEQ ID NO: 1361477 - RNA, 19 nt, Homo sapiens
  misc_RNA (1)...(19): siRNA sense strand
gggaaacauggcugucaua

SEQ ID NO: 1361478 - RNA, 19 nt, Homo sapiens
  misc_RNA (1)...(19): siRNA sense strand
gauucugacugcccugaug

SEQ ID NO: 1361479 - RNA, 19 nt, Homo sapiens
  misc_RNA (1)...(19): siRNA sense strand
ugucauacauucacaucug

SEQ ID NO: 1361480 - RNA, 19 nt, Homo sapiens
  misc_RNA (1)...(19): siRNA sense strand
gcaacucaaauaauuguca

SEQ ID NO: 1361481 - RNA, 19 nt, Homo sapiens
  misc_RNA (1)...(19): siRNA sense strand
gaaacauggcugucauaca

SEQ ID NO: 1361482 - RNA, 19 nt, Homo sapiens
  misc_RNA (1)...(19): siRNA sense strand
cgagguagucuaggaauga

SEQ ID NO: 1361483 - RNA, 19 nt, Homo sapiens
  misc_RNA (1)...(19): siRNA sense strand
gcaugggaauaacaaugau

SEQ ID NO: 1361484 - RNA, 19 nt, Homo sapiens
  misc_RNA (1)...(19): siRNA sense strand
ggaauuagaacuacaaaag

SEQ ID NO: 1361485 - RNA, 19 nt, Homo sapiens
  misc_RNA (1)...(19): siRNA sense strand
uguaaagugcucuguugua

SEQ ID NO: 1361486 - RNA, 19 nt, Homo sapiens
  misc_RNA (1)...(19): siRNA sense strand
gggagaacccaaaguccuu

SEQ ID NO: 1361487 - RNA, 19 nt, Homo sapiens
  misc_RNA (1)...(19): siRNA sense strand
ccucuuaagugugcuggaa

SEQ ID NO: 1361488 - RNA, 19 nt, Homo sapiens
  misc_RNA (1)...(19): siRNA sense strand
gacuauguccaucuuaaug

SEQ ID NO: 1361489 - RNA, 19 nt, Homo sapiens
  misc_RNA (1)...(19): siRNA sense strand
uuaauucugccaucacauu

SEQ ID NO: 1361490 - RNA, 19 nt, Homo sapiens
  misc_RNA (1)...(19): siRNA sense strand
gggaauaacaaugaugugu

SEQ ID NO: 1361491 - RNA, 19 nt, Homo sapiens
  misc_RNA (1)...(19): siRNA sense strand
ucuuaagugugcuggaauu

SEQ ID NO: 1361492 - RNA, 19 nt, Homo sapiens
  misc_RNA (1)...(19): siRNA sense strand
uggcauggugcuccucuua

SEQ ID NO: 1361493 - RNA, 19 nt, Homo sapiens
  misc_RNA (1)...(19): siRNA sense strand
uacuauggcaacucaaaua

SEQ ID NO: 1361494 - RNA, 19 nt, Homo sapiens
  misc_RNA (1)...(19): siRNA sense strand
cagcaggaauuagaacuac

SEQ ID NO: 1361495 - RNA, 19 nt, Homo sapiens
  misc_RNA (1)...(19): siRNA sense strand
gcaucagggaucuuaauca

SEQ ID NO: 1361496 - RNA, 19 nt, Homo sapiens
  misc_RNA (1)...(19): siRNA sense strand
ggauguaaagugcucuguu

SEQ ID NO: 1361497 - RNA, 19 nt, Homo sapiens
  misc_RNA (1)...(19): siRNA sense strand
uauggaaguaacccuauuu

SEQ ID NO: 1361498 - RNA, 19 nt, Homo sapiens
  misc_RNA (1)...(19): siRNA sense strand
uuauggaaguaacccuauu

SEQ ID NO: 1361499 - RNA, 19 nt, Homo sapiens
  misc_RNA (1)...(19): siRNA sense strand
ggcauggugcuccucuuaa

SEQ ID NO: 1361500 - RNA, 19 nt, Homo sapiens
  misc_RNA (1)...(19): siRNA sense strand
ggaaacauggcugucauac

SEQ ID NO: 1361501 - RNA, 19 nt, Homo sapiens
  misc_RNA (1)...(19): siRNA sense strand
acauggcugucauacauuc

SEQ ID NO: 1361502 - RNA, 19 nt, Homo sapiens
  misc_RNA (1)...(19): siRNA sense strand
gcaucuaauacuuauggaa

SEQ ID NO: 1361503 - RNA, 19 nt, Homo sapiens
  misc_RNA (1)...(19): siRNA sense strand
acuauggcaacucaaauaa

SEQ ID NO: 1361504 - RNA, 19 nt, Homo sapiens
  misc_RNA (1)...(19): siRNA sense strand
gucauacauucacaucugu

SEQ ID NO: 1361505 - RNA, 19 nt, Homo sapiens
  misc_RNA (1)...(19): siRNA sense strand
agccuuagcaugggaauaa

SEQ ID NO: 1361506 - RNA, 19 nt, Homo sapiens
  misc_RNA (1)...(19): siRNA sense strand
uaacccuauuuccguguau

SEQ ID NO: 1361507 - RNA, 19 nt, Homo sapiens
  misc_RNA (1)...(19): siRNA sense strand
ucucugccuuuggauguaa

SEQ ID NO: 1361508 - RNA, 19 nt, Homo sapiens
  misc_RNA (1)...(19): siRNA sense strand
uagcaugggaauaacaaug

SEQ ID NO: 1361509 - RNA, 19 nt, Homo sapiens
  misc_RNA (1)...(19): siRNA sense strand
ccgagguagucuaggaaug

SEQ ID NO: 1361510 - RNA, 19 nt, Homo sapiens
  misc_RNA (1)...(19): siRNA sense strand
acauuuagcuuggcguuuu

SEQ ID NO: 1361511 - RNA, 19 nt, Homo sapiens
  misc_RNA (1)...(19): siRNA sense strand
gucccucucugccuuugga

SEQ ID NO: 1361512 - RNA, 19 nt, Homo sapiens
  misc_RNA (1)...(19): siRNA sense strand
caggauccuugucaauugc

SEQ ID NO: 1361513 - RNA, 19 nt, Homo sapiens
  misc_RNA (1)...(19): siRNA sense strand
agucuaggaaugaauauca

SEQ ID NO: 1361514 - RNA, 19 nt, Homo sapiens
  misc_RNA (1)...(19): siRNA sense strand
aaacauggcugucauacau

SEQ ID NO: 1361515 - RNA, 19 nt, Homo sapiens
  misc_RNA (1)...(19): siRNA sense strand
ggaaaggauugcaagagaa

SEQ ID NO: 1361516 - RNA, 19 nt, Homo sapiens
  misc_RNA (1)...(19): siRNA sense strand
gauguaaagugcucuguug

SEQ ID NO: 1361517 - RNA, 19 nt, Homo sapiens
  misc_RNA (1)...(19): siRNA sense strand
ggaauaacaaugaugugua

SEQ ID NO: 1361518 - RNA, 19 nt, Homo sapiens
  misc_RNA (1)...(19): siRNA sense strand
caucagggaucuuaaucaa

SEQ ID NO: 1361519 - RNA, 19 nt, Homo sapiens
  misc_RNA (1)...(19): siRNA sense strand
uaacuacuauggcaacuca

SEQ ID NO: 1361520 - RNA, 19 nt, Homo sapiens
  misc_RNA (1)...(19): siRNA sense strand
ucagggaucuuaaucaaca

SEQ ID NO: 1361521 - RNA, 19 nt, Homo sapiens
  misc_RNA (1)...(19): siRNA sense strand
gaauaucaccagcucugua

SEQ ID NO: 1361522 - RNA, 19 nt, Homo sapiens
  misc_RNA (1)...(19): siRNA sense strand
uauaucggguacacaauuu

SEQ ID NO: 1361523 - RNA, 19 nt, Homo sapiens
  misc_RNA (1)...(19): siRNA sense strand
ucaggauccuugucaauug

SEQ ID NO: 1361524 - RNA, 19 nt, Homo sapiens
  misc_RNA (1)...(19): siRNA sense strand
guaaagugcucuguuguac

SEQ ID NO: 1361525 - RNA, 19 nt, Homo sapiens
  misc_RNA (1)...(19): siRNA sense strand
uggaaaggauugcaagaga

SEQ ID NO: 1361526 - RNA, 19 nt, Homo sapiens
  misc_RNA (1)...(19): siRNA sense strand
gaagggagaacccaaaguc

SEQ ID NO: 1361527 - RNA, 19 nt, Homo sapiens
  misc_RNA (1)...(19): siRNA sense strand
ugacaaccaugcaaggaau

SEQ ID NO: 1361528 - RNA, 19 nt, Homo sapiens
  misc_RNA (1)...(19): siRNA sense strand
gguagucuaggaaugaaua

SEQ ID NO: 1361529 - RNA, 19 nt, Homo sapiens
  misc_RNA (1)...(19): siRNA sense strand
gugcuggaauucugcauug

SEQ ID NO: 1361530 - RNA, 19 nt, Homo sapiens
  misc_RNA (1)...(19): siRNA sense strand
guaacccuauuuccgugua

SEQ ID NO: 1361531 - RNA, 19 nt, Homo sapiens
  misc_RNA (1)...(19): siRNA sense strand
gcaucucccacaccacuua

SEQ ID NO: 1361532 - RNA, 19 nt, Homo sapiens
  misc_RNA (1)...(19): siRNA sense strand
gcauggugcuccucuuaag

SEQ ID NO: 1361533 - RNA, 19 nt, Homo sapiens
  misc_RNA (1)...(19): siRNA sense strand
gguccgagguagucuagga

SEQ ID NO: 1361534 - RNA, 19 nt, Homo sapiens
  misc_RNA (1)...(19): siRNA sense strand
gcagcaggaauuagaacua

SEQ ID NO: 1361535 - RNA, 19 nt, Homo sapiens
  misc_RNA (1)...(19): siRNA sense strand
gaaaggauugcaagagaag

SEQ ID NO: 1361536 - RNA, 19 nt, Homo sapiens
  misc_RNA (1)...(19): siRNA sense strand
uaagugugcuggaauucug

SEQ ID NO: 1361537 - RNA, 19 nt, Homo sapiens
  misc_RNA (1)...(19): siRNA sense strand
ggaucuuaaucaacacauu

SEQ ID NO: 1361538 - RNA, 19 nt, Homo sapiens
  misc_RNA (1)...(19): siRNA sense strand
guauaucggguacacaauu

SEQ ID NO: 1361539 - RNA, 19 nt, Homo sapiens
  misc_RNA (1)...(19): siRNA sense strand
gagguagucuaggaaugaa

SEQ ID NO: 1361540 - RNA, 19 nt, Homo sapiens
  misc_RNA (1)...(19): siRNA sense strand
gccaucacauucucacaug

SEQ ID NO: 1361541 - RNA, 19 nt, Homo sapiens
  misc_RNA (1)...(19): siRNA sense strand
gggaaacauggcugucaua

SEQ ID NO: 1361542 - RNA, 19 nt, Homo sapiens
  misc_RNA (1)...(19): siRNA sense strand
gcaggaauuagaacuacaa

SEQ ID NO: 1361543 - RNA, 19 nt, Homo sapiens
  misc_RNA (1)...(19): siRNA sense strand
gauucugacugcccugaug

SEQ ID NO: 1361544 - RNA, 19 nt, Homo sapiens
  misc_RNA (1)...(19): siRNA sense strand
ugucauacauucacaucug

SEQ ID NO: 1361545 - RNA, 19 nt, Homo sapiens
  misc_RNA (1)...(19): siRNA sense strand
gcaacucaaauaauuguca

SEQ ID NO: 1361546 - RNA, 19 nt, Homo sapiens
  misc_RNA (1)...(19): siRNA sense strand
gaaacauggcugucauaca

SEQ ID NO: 1361547 - RNA, 19 nt, Homo sapiens
  misc_RNA (1)...(19): siRNA sense strand
cgagguagucuaggaauga

SEQ ID NO: 1361548 - RNA, 19 nt, Homo sapiens
  misc_RNA (1)...(19): siRNA sense strand
gcaugggaauaacaaugau

SEQ ID NO: 1361549 - RNA, 19 nt, Homo sapiens
  misc_RNA (1)...(19): siRNA sense strand
ggaauuagaacuacaaaag

SEQ ID NO: 1361550 - RNA, 19 nt, Homo sapiens
  misc_RNA (1)...(19): siRNA sense strand
uguaaagugcucuguugua

SEQ ID NO: 1361551 - RNA, 19 nt, Homo sapiens
  misc_RNA (1)...(19): siRNA sense strand
gggagaacccaaaguccuu

SEQ ID NO: 1361552 - RNA, 19 nt, Homo sapiens
  misc_RNA (1)...(19): siRNA sense strand
ccucuuaagugugcuggaa

SEQ ID NO: 1361553 - RNA, 19 nt, Homo sapiens
  misc_RNA (1)...(19): siRNA sense strand
gacuauguccaucuuaaug

SEQ ID NO: 1361554 - RNA, 19 nt, Homo sapiens
  misc_RNA (1)...(19): siRNA sense strand
uuaauucugccaucacauu

SEQ ID NO: 1361555 - RNA, 19 nt, Homo sapiens
  misc_RNA (1)...(19): siRNA sense strand
gggaauaacaaugaugugu

SEQ ID NO: 1361556 - RNA, 19 nt, Homo sapiens
  misc_RNA (1)...(19): siRNA sense strand
ucuuaagugugcuggaauu

SEQ ID NO: 1361557 - RNA, 19 nt, Homo sapiens
  misc_RNA (1)...(19): siRNA sense strand
uggcauggugcuccucuua

SEQ ID NO: 1361558 - RNA, 19 nt, Homo sapiens
  misc_RNA (1)...(19): siRNA sense strand
uacuauggcaacucaaaua

SEQ ID NO: 1361559 - RNA, 19 nt, Homo sapiens
  misc_RNA (1)...(19): siRNA sense strand
cagcaggaauuagaacuac

SEQ ID NO: 1361560 - RNA, 19 nt, Homo sapiens
  misc_RNA (1)...(19): siRNA sense strand
gcaucagggaucuuaauca

SEQ ID NO: 1361561 - RNA, 19 nt, Homo sapiens
  misc_RNA (1)...(19): siRNA sense strand
ggauguaaagugcucuguu

SEQ ID NO: 1361562 - RNA, 19 nt, Homo sapiens
  misc_RNA (1)...(19): siRNA sense strand
uauggaaguaacccuauuu

SEQ ID NO: 1361563 - RNA, 19 nt, Homo sapiens
  misc_RNA (1)...(19): siRNA sense strand
uuauggaaguaacccuauu

SEQ ID NO: 1361564 - RNA, 19 nt, Homo sapiens
  misc_RNA (1)...(19): siRNA sense strand
ggaaacauggcugucauac

SEQ ID NO: 1361565 - RNA, 19 nt, Homo sapiens
  misc_RNA (1)...(19): siRNA sense strand
ggcauggugcuccucuuaa

SEQ ID NO: 1361566 - RNA, 19 nt, Homo sapiens
  misc_RNA (1)...(19): siRNA sense strand
acauggcugucauacauuc

SEQ ID NO: 1361567 - RNA, 19 nt, Homo sapiens
  misc_RNA (1)...(19): siRNA sense strand
agccuuagcaugggaauaa

SEQ ID NO: 1361568 - RNA, 19 nt, Homo sapiens
  misc_RNA (1)...(19): siRNA sense strand
acuauggcaacucaaauaa

SEQ ID NO: 1361569 - RNA, 19 nt, Homo sapiens
  misc_RNA (1)...(19): siRNA sense strand
gucauacauucacaucugu

SEQ ID NO: 1361570 - RNA, 19 nt, Homo sapiens
  misc_RNA (1)...(19): siRNA sense strand
gcaucuaauacuuauggaa

SEQ ID NO: 1361571 - RNA, 19 nt, Homo sapiens
  misc_RNA (1)...(19): siRNA sense strand
uaacccuauuuccguguau

SEQ ID NO: 1361572 - RNA, 19 nt, Homo sapiens
  misc_RNA (1)...(19): siRNA sense strand
ucucugccuuuggauguaa

SEQ ID NO: 1361573 - RNA, 19 nt, Homo sapiens
  misc_RNA (1)...(19): siRNA sense strand
uagcaugggaauaacaaug

SEQ ID NO: 1361574 - RNA, 19 nt, Homo sapiens
  misc_RNA (1)...(19): siRNA sense strand
ccgagguagucuaggaaug

SEQ ID NO: 1361575 - RNA, 19 nt, Homo sapiens
  misc_RNA (1)...(19): siRNA sense strand
acauuuagcuuggcguuuu

SEQ ID NO: 1361576 - RNA, 19 nt, Homo sapiens
  misc_RNA (1)...(19): siRNA sense strand
gucccucucugccuuugga

SEQ ID NO: 1361577 - RNA, 19 nt, Homo sapiens
  misc_RNA (1)...(19): siRNA sense strand
caggauccuugucaauugc

SEQ ID NO: 1361578 - RNA, 19 nt, Homo sapiens
  misc_RNA (1)...(19): siRNA sense strand
agucuaggaaugaauauca

SEQ ID NO: 1361579 - RNA, 19 nt, Homo sapiens
  misc_RNA (1)...(19): siRNA sense strand
gaagaaagaccacagagaa

SEQ ID NO: 1361580 - RNA, 19 nt, Homo sapiens
  misc_RNA (1)...(19): siRNA sense strand
gauaugggcccucacauuu

SEQ ID NO: 1361581 - RNA, 19 nt, Homo sapiens
  misc_RNA (1)...(19): siRNA sense strand
gaaaucaguaugacaauga

SEQ ID NO: 1361582 - RNA, 19 nt, Homo sapiens
  misc_RNA (1)...(19): siRNA sense strand
gcuagacuguuauguaauu

SEQ ID NO: 1361583 - RNA, 19 nt, Homo sapiens
  misc_RNA (1)...(19): siRNA sense strand
gggcaggauucaucaaauu

SEQ ID NO: 1361584 - RNA, 19 nt, Homo sapiens
  misc_RNA (1)...(19): siRNA sense strand
gcuugcagcucaucagaaa

SEQ ID NO: 1361585 - RNA, 19 nt, Homo sapiens
  misc_RNA (1)...(19): siRNA sense strand
ggaccugacuacaaagaau

SEQ ID NO: 1361586 - RNA, 19 nt, Homo sapiens
  misc_RNA (1)...(19): siRNA sense strand
gaugcuagacuguuaugua

SEQ ID NO: 1361587 - RNA, 19 nt, Homo sapiens
  misc_RNA (1)...(19): siRNA sense strand
acaaugaugucacuguuug

SEQ ID NO: 1361588 - RNA, 19 nt, Homo sapiens
  misc_RNA (1)...(19): siRNA sense strand
ccaaucagcucguacuuac

SEQ ID NO: 1361589 - RNA, 19 nt, Homo sapiens
  misc_RNA (1)...(19): siRNA sense strand
cgucuuguaucucuaauug

SEQ ID NO: 1361590 - RNA, 19 nt, Homo sapiens
  misc_RNA (1)...(19): siRNA sense strand
guacuuacuuggagagaca

SEQ ID NO: 1361591 - RNA, 19 nt, Homo sapiens
  misc_RNA (1)...(19): siRNA sense strand
gcagagccauguccauugg

SEQ ID NO: 1361592 - RNA, 19 nt, Homo sapiens
  misc_RNA (1)...(19): siRNA sense strand
caguuggucugaaaucaaa

SEQ ID NO: 1361593 - RNA, 19 nt, Homo sapiens
  misc_RNA (1)...(19): siRNA sense strand
ccauuggaauuguugguaa

SEQ ID NO: 1361594 - RNA, 19 nt, Homo sapiens
  misc_RNA (1)...(19): siRNA sense strand
augcuagacuguuauguaa

SEQ ID NO: 1361595 - RNA, 19 nt, Homo sapiens
  misc_RNA (1)...(19): siRNA sense strand
cgaaaucaguaugacaaug

SEQ ID NO: 1361596 - RNA, 19 nt, Homo sapiens
  misc_RNA (1)...(19): siRNA sense strand
cugaauuuauggaguguaa

SEQ ID NO: 1361597 - RNA, 19 nt, Homo sapiens
  misc_RNA (1)...(19): siRNA sense strand
guccaucugcuaacuauuu

SEQ ID NO: 1361598 - RNA, 19 nt, Homo sapiens
  misc_RNA (1)...(19): siRNA sense strand
cgucaggaguguuuggauu

SEQ ID NO: 1361599 - RNA, 19 nt, Homo sapiens
  misc_RNA (1)...(19): siRNA sense strand
gccugugucucgucuugua

SEQ ID NO: 1361600 - RNA, 19 nt, Homo sapiens
  misc_RNA (1)...(19): siRNA sense strand
gauaccaacacaacgauau

SEQ ID NO: 1361601 - RNA, 19 nt, Homo sapiens
  misc_RNA (1)...(19): siRNA sense strand
gaaagaccacagagaaagg

SEQ ID NO: 1361602 - RNA, 19 nt, Homo sapiens
  misc_RNA (1)...(19): siRNA sense strand
gguguuggucuccuuauug

SEQ ID NO: 1361603 - RNA, 19 nt, Homo sapiens
  misc_RNA (1)...(19): siRNA sense strand
cauuggaauuguugguaaa

SEQ ID NO: 1361604 - RNA, 19 nt, Homo sapiens
  misc_RNA (1)...(19): siRNA sense strand
ccagauuuguauucgauag

SEQ ID NO: 1361605 - RNA, 19 nt, Homo sapiens
  misc_RNA (1)...(19): siRNA sense strand
ucuuguaucucuaauugga

SEQ ID NO: 1361606 - RNA, 19 nt, Homo sapiens
  misc_RNA (1)...(19): siRNA sense strand
gauagaccacugccugugu

SEQ ID NO: 1361607 - RNA, 19 nt, Homo sapiens
  misc_RNA (1)...(19): siRNA sense strand
aagaaagaccacagagaaa

SEQ ID NO: 1361608 - RNA, 19 nt, Homo sapiens
  misc_RNA (1)...(19): siRNA sense strand
cuacaaagaauguuuccau

SEQ ID NO: 1361609 - RNA, 19 nt, Homo sapiens
  misc_RNA (1)...(19): siRNA sense strand
cugcgugccuuaagagaga

SEQ ID NO: 1361610 - RNA, 19 nt, Homo sapiens
  misc_RNA (1)...(19): siRNA sense strand
gcuuacugcugaugcuaga

SEQ ID NO: 1361611 - RNA, 19 nt, Homo sapiens
  misc_RNA (1)...(19): siRNA sense strand
ugaagaaagaccacagaga

SEQ ID NO: 1361612 - RNA, 19 nt, Homo sapiens
  misc_RNA (1)...(19): siRNA sense strand
gaugaugugucuccauucc

SEQ ID NO: 1361613 - RNA, 19 nt, Homo sapiens
  misc_RNA (1)...(19): siRNA sense strand
caaucuaugaugaugauga

SEQ ID NO: 1361614 - RNA, 19 nt, Homo sapiens
  misc_RNA (1)...(19): siRNA sense strand
ugauaugggcccucacauu

SEQ ID NO: 1361615 - RNA, 19 nt, Homo sapiens
  misc_RNA (1)...(19): siRNA sense strand
aaaccuguccaucugcuaa

SEQ ID NO: 1361616 - RNA, 19 nt, Homo sapiens
  misc_RNA (1)...(19): siRNA sense strand
gaguuuacaaucuaugaug

SEQ ID NO: 1361617 - RNA, 19 nt, Homo sapiens
  misc_RNA (1)...(19): siRNA sense strand
ccagauaccaacacaacga

SEQ ID NO: 1361618 - RNA, 19 nt, Homo sapiens
  misc_RNA (1)...(19): siRNA sense strand
aaaggcugaugaaccaaug

SEQ ID NO: 1361619 - RNA, 19 nt, Homo sapiens
  misc_RNA (1)...(19): siRNA sense strand
gacuuggaguuuacaaucu

SEQ ID NO: 1361620 - RNA, 19 nt, Homo sapiens
  misc_RNA (1)...(19): siRNA sense strand
gaugauaugggcccucaca

SEQ ID NO: 1361621 - RNA, 19 nt, Homo sapiens
  misc_RNA (1)...(19): siRNA sense strand
ggcaggauucaucaaauug

SEQ ID NO: 1361622 - RNA, 19 nt, Homo sapiens
  misc_RNA (1)...(19): siRNA sense strand
ugaacuaguuaaacauggu

SEQ ID NO: 1361623 - RNA, 19 nt, Homo sapiens
  misc_RNA (1)...(19): siRNA sense strand
ccuuauugcugguuaugau

SEQ ID NO: 1361624 - RNA, 19 nt, Homo sapiens
  misc_RNA (1)...(19): siRNA sense strand
ggaagcaagacccagauac

SEQ ID NO: 1361625 - RNA, 19 nt, Homo sapiens
  misc_RNA (1)...(19): siRNA sense strand
agccacaguuggucugaaa

SEQ ID NO: 1361626 - RNA, 19 nt, Homo sapiens
  misc_RNA (1)...(19): siRNA sense strand
augaugaugugucuccauu

SEQ ID NO: 1361627 - RNA, 19 nt, Homo sapiens
  misc_RNA (1)...(19): siRNA sense strand
aaucagcucguacuuacuu

SEQ ID NO: 1361628 - RNA, 19 nt, Homo sapiens
  misc_RNA (1)...(19): siRNA sense strand
acuuggaguuuacaaucua

SEQ ID NO: 1361629 - RNA, 19 nt, Homo sapiens
  misc_RNA (1)...(19): siRNA sense strand
agaaaaggcugaugaacca

SEQ ID NO: 1361630 - RNA, 19 nt, Homo sapiens
  misc_RNA (1)...(19): siRNA sense strand
ugcugaugcuagacuguua

SEQ ID NO: 1361631 - RNA, 19 nt, Homo sapiens
  misc_RNA (1)...(19): siRNA sense strand
ggauuccagauuuguauuc

SEQ ID NO: 1361632 - RNA, 19 nt, Homo sapiens
  misc_RNA (1)...(19): siRNA sense strand
gcugaugaaccugcagaaa

SEQ ID NO: 1361633 - RNA, 19 nt, Homo sapiens
  misc_RNA (1)...(19): siRNA sense strand
gaccugacuacaaagaaug

SEQ ID NO: 1361634 - RNA, 19 nt, Homo sapiens
  misc_RNA (1)...(19): siRNA sense strand
cccaaucagcucguacuua

SEQ ID NO: 1361635 - RNA, 19 nt, Homo sapiens
  misc_RNA (1)...(19): siRNA sense strand
cacaguuggucugaaauca

SEQ ID NO: 1361636 - RNA, 19 nt, Homo sapiens
  misc_RNA (1)...(19): siRNA sense strand
cagggcaggauucaucaaa

SEQ ID NO: 1361637 - RNA, 19 nt, Homo sapiens
  misc_RNA (1)...(19): siRNA sense strand
ugguaaagacuuggaguuu

SEQ ID NO: 1361638 - RNA, 19 nt, Homo sapiens
  misc_RNA (1)...(19): siRNA sense strand
gaagcaagacccagauacc

SEQ ID NO: 1361639 - RNA, 19 nt, Homo sapiens
  misc_RNA (1)...(19): siRNA sense strand
uuccaaaccuguccaucug

SEQ ID NO: 1361640 - RNA, 19 nt, Homo sapiens
  misc_RNA (1)...(19): siRNA sense strand
agacccagauaccaacaca

SEQ ID NO: 1361641 - RNA, 19 nt, Homo sapiens
  misc_RNA (1)...(19): siRNA sense strand
cugcucaaccugcugauga

SEQ ID NO: 1361642 - RNA, 19 nt, Homo sapiens
  misc_RNA (1)...(19): siRNA sense strand
agacuuggaguuuacaauc

SEQ ID NO: 1361643 - RNA, 19 nt, Homo sapiens
  misc_RNA (1)...(19): siRNA sense strand
gaauuguugguaaagacuu

SEQ ID NO: 1361644 - RNA, 19 nt, Homo sapiens
  misc_RNA (1)...(19): siRNA sense strand
ccacaguuggucugaaauc

SEQ ID NO: 1361645 - RNA, 19 nt, Homo sapiens
  misc_RNA (1)...(19): siRNA sense strand
ugucucgucuuguaucucu

SEQ ID NO: 1361646 - RNA, 19 nt, Homo sapiens
  misc_RNA (1)...(19): siRNA sense strand
agaaagaccacagagaaag

SEQ ID NO: 1361647 - RNA, 19 nt, Homo sapiens
  misc_RNA (1)...(19): siRNA sense strand
cuaugaugaugaugaugug

SEQ ID NO: 1361648 - RNA, 19 nt, Homo sapiens
  misc_RNA (1)...(19): siRNA sense strand
ugacuacaaagaauguuuc

SEQ ID NO: 1361649 - RNA, 19 nt, Homo sapiens
  misc_RNA (1)...(19): siRNA sense strand
gcaauggaagcuguuaaac

SEQ ID NO: 1361650 - RNA, 19 nt, Homo sapiens
  misc_RNA (1)...(19): siRNA sense strand
ugaugaugaugaugugucu

SEQ ID NO: 1361651 - RNA, 19 nt, Homo sapiens
  misc_RNA (1)...(19): siRNA sense strand
ggaguuuacaaucuaugau

SEQ ID NO: 1361652 - RNA, 19 nt, Homo sapiens
  misc_RNA (1)...(19): siRNA sense strand
ggaauuguugguaaagacu

SEQ ID NO: 1361653 - RNA, 19 nt, Homo sapiens
  misc_RNA (1)...(19): siRNA sense strand
agagacgcuuccugcagaa

SEQ ID NO: 1361654 - RNA, 19 nt, Homo sapiens
  misc_RNA (1)...(19): siRNA sense strand
ugcaauggaagcuguuaaa

SEQ ID NO: 1361655 - RNA, 19 nt, Homo sapiens
  misc_RNA (1)...(19): siRNA sense strand
caagguucagccacaguug

SEQ ID NO: 1361656 - RNA, 19 nt, Homo sapiens
  misc_RNA (1)...(19): siRNA sense strand
ugaugaaccugcagaaaag

SEQ ID NO: 1361657 - RNA, 19 nt, Homo sapiens
  misc_RNA (1)...(19): siRNA sense strand
uggagcccguucccaauca

SEQ ID NO: 1361658 - RNA, 19 nt, Homo sapiens
  misc_RNA (1)...(19): siRNA sense strand
gaagaaagaccacagagaa

SEQ ID NO: 1361659 - RNA, 19 nt, Homo sapiens
  misc_RNA (1)...(19): siRNA sense strand
gauaugggcccucacauuu

SEQ ID NO: 1361660 - RNA, 19 nt, Homo sapiens
  misc_RNA (1)...(19): siRNA sense strand
gaaaucaguaugacaauga

SEQ ID NO: 1361661 - RNA, 19 nt, Homo sapiens
  misc_RNA (1)...(19): siRNA sense strand
gcuagacuguuauguaauu

SEQ ID NO: 1361662 - RNA, 19 nt, Homo sapiens
  misc_RNA (1)...(19): siRNA sense strand
gggcaggauucaucaaauu

SEQ ID NO: 1361663 - RNA, 19 nt, Homo sapiens
  misc_RNA (1)...(19): siRNA sense strand
gcuugcagcucaucagaaa

SEQ ID NO: 1361664 - RNA, 19 nt, Homo sapiens
  misc_RNA (1)...(19): siRNA sense strand
ggaccugacuacaaagaau

SEQ ID NO: 1361665 - RNA, 19 nt, Homo sapiens
  misc_RNA (1)...(19): siRNA sense strand
gaugcuagacuguuaugua

SEQ ID NO: 1361666 - RNA, 19 nt, Homo sapiens
  misc_RNA (1)...(19): siRNA sense strand
acaaugaugucacuguuug

SEQ ID NO: 1361667 - RNA, 19 nt, Homo sapiens
  misc_RNA (1)...(19): siRNA sense strand
ccaaucagcucguacuuac

SEQ ID NO: 1361668 - RNA, 19 nt, Homo sapiens
  misc_RNA (1)...(19): siRNA sense strand
cgucuuguaucucuaauug

SEQ ID NO: 1361669 - RNA, 19 nt, Homo sapiens
  misc_RNA (1)...(19): siRNA sense strand
guacuuacuuggagagaca

SEQ ID NO: 1361670 - RNA, 19 nt, Homo sapiens
  misc_RNA (1)...(19): siRNA sense strand
gcagagccauguccauugg

SEQ ID NO: 1361671 - RNA, 19 nt, Homo sapiens
  misc_RNA (1)...(19): siRNA sense strand
caguuggucugaaaucaaa

SEQ ID NO: 1361672 - RNA, 19 nt, Homo sapiens
  misc_RNA (1)...(19): siRNA sense strand
ccauuggaauuguugguaa

SEQ ID NO: 1361673 - RNA, 19 nt, Homo sapiens
  misc_RNA (1)...(19): siRNA sense strand
augcuagacuguuauguaa

SEQ ID NO: 1361674 - RNA, 19 nt, Homo sapiens
  misc_RNA (1)...(19): siRNA sense strand
cgaaaucaguaugacaaug

SEQ ID NO: 1361675 - RNA, 19 nt, Homo sapiens
  misc_RNA (1)...(19): siRNA sense strand
cugaauuuauggaguguaa

SEQ ID NO: 1361676 - RNA, 19 nt, Homo sapiens
  misc_RNA (1)...(19): siRNA sense strand
guccaucugcuaacuauuu

SEQ ID NO: 1361677 - RNA, 19 nt, Homo sapiens
  misc_RNA (1)...(19): siRNA sense strand
cgucaggaguguuuggauu

SEQ ID NO: 1361678 - RNA, 19 nt, Homo sapiens
  misc_RNA (1)...(19): siRNA sense strand
gccugugucucgucuugua

SEQ ID NO: 1361679 - RNA, 19 nt, Homo sapiens
  misc_RNA (1)...(19): siRNA sense strand
gauaccaacacaacgauau

SEQ ID NO: 1361680 - RNA, 19 nt, Homo sapiens
  misc_RNA (1)...(19): siRNA sense strand
gaaagaccacagagaaagg

SEQ ID NO: 1361681 - RNA, 19 nt, Homo sapiens
  misc_RNA (1)...(19): siRNA sense strand
gguguuggucuccuuauug

SEQ ID NO: 1361682 - RNA, 19 nt, Homo sapiens
  misc_RNA (1)...(19): siRNA sense strand
cauuggaauuguugguaaa

SEQ ID NO: 1361683 - RNA, 19 nt, Homo sapiens
  misc_RNA (1)...(19): siRNA sense strand
ccagauuuguauucgauag

SEQ ID NO: 1361684 - RNA, 19 nt, Homo sapiens
  misc_RNA (1)...(19): siRNA sense strand
ucuuguaucucuaauugga

SEQ ID NO: 1361685 - RNA, 19 nt, Homo sapiens
  misc_RNA (1)...(19): siRNA sense strand
gauagaccacugccugugu

SEQ ID NO: 1361686 - RNA, 19 nt, Homo sapiens
  misc_RNA (1)...(19): siRNA sense strand
aagaaagaccacagagaaa

SEQ ID NO: 1361687 - RNA, 19 nt, Homo sapiens
  misc_RNA (1)...(19): siRNA sense strand
cuacaaagaauguuuccau

SEQ ID NO: 1361688 - RNA, 19 nt, Homo sapiens
  misc_RNA (1)...(19): siRNA sense strand
cugcgugccuuaagagaga

SEQ ID NO: 1361689 - RNA, 19 nt, Homo sapiens
  misc_RNA (1)...(19): siRNA sense strand
gcuuacugcugaugcuaga

SEQ ID NO: 1361690 - RNA, 19 nt, Homo sapiens
  misc_RNA (1)...(19): siRNA sense strand
ugaagaaagaccacagaga

SEQ ID NO: 1361691 - RNA, 19 nt, Homo sapiens
  misc_RNA (1)...(19): siRNA sense strand
gaugaugugucuccauucc

SEQ ID NO: 1361692 - RNA, 19 nt, Homo sapiens
  misc_RNA (1)...(19): siRNA sense strand
caaucuaugaugaugauga

SEQ ID NO: 1361693 - RNA, 19 nt, Homo sapiens
  misc_RNA (1)...(19): siRNA sense strand
ugauaugggcccucacauu

SEQ ID NO: 1361694 - RNA, 19 nt, Homo sapiens
  misc_RNA (1)...(19): siRNA sense strand
aaaccuguccaucugcuaa

SEQ ID NO: 1361695 - RNA, 19 nt, Homo sapiens
  misc_RNA (1)...(19): siRNA sense strand
gaguuuacaaucuaugaug

SEQ ID NO: 1361696 - RNA, 19 nt, Homo sapiens
  misc_RNA (1)...(19): siRNA sense strand
ccagauaccaacacaacga

SEQ ID NO: 1361697 - RNA, 19 nt, Homo sapiens
  misc_RNA (1)...(19): siRNA sense strand
aaaggcugaugaaccaaug

SEQ ID NO: 1361698 - RNA, 19 nt, Homo sapiens
  misc_RNA (1)...(19): siRNA sense strand
gacuuggaguuuacaaucu

SEQ ID NO: 1361699 - RNA, 19 nt, Homo sapiens
  misc_RNA (1)...(19): siRNA sense strand
gaugauaugggcccucaca

SEQ ID NO: 1361700 - RNA, 19 nt, Homo sapiens
  misc_RNA (1)...(19): siRNA sense strand
ggcaggauucaucaaauug

SEQ ID NO: 1361701 - RNA, 19 nt, Homo sapiens
  misc_RNA (1)...(19): siRNA sense strand
ugaacuaguuaaacauggu

SEQ ID NO: 1361702 - RNA, 19 nt, Homo sapiens
  misc_RNA (1)...(19): siRNA sense strand
ccuuauugcugguuaugau

SEQ ID NO: 1361703 - RNA, 19 nt, Homo sapiens
  misc_RNA (1)...(19): siRNA sense strand
ggaagcaagacccagauac

SEQ ID NO: 1361704 - RNA, 19 nt, Homo sapiens
  misc_RNA (1)...(19): siRNA sense strand
agccacaguuggucugaaa

SEQ ID NO: 1361705 - RNA, 19 nt, Homo sapiens
  misc_RNA (1)...(19): siRNA sense strand
augaugaugugucuccauu

SEQ ID NO: 1361706 - RNA, 19 nt, Homo sapiens
  misc_RNA (1)...(19): siRNA sense strand
aaucagcucguacuuacuu

SEQ ID NO: 1361707 - RNA, 19 nt, Homo sapiens
  misc_RNA (1)...(19): siRNA sense strand
acuuggaguuuacaaucua

SEQ ID NO: 1361708 - RNA, 19 nt, Homo sapiens
  misc_RNA (1)...(19): siRNA sense strand
agaaaaggcugaugaacca

SEQ ID NO: 1361709 - RNA, 19 nt, Homo sapiens
  misc_RNA (1)...(19): siRNA sense strand
ugcugaugcuagacuguua

SEQ ID NO: 1361710 - RNA, 19 nt, Homo sapiens
  misc_RNA (1)...(19): siRNA sense strand
ggauuccagauuuguauuc

SEQ ID NO: 1361711 - RNA, 19 nt, Homo sapiens
  misc_RNA (1)...(19): siRNA sense strand
gcugaugaaccugcagaaa

SEQ ID NO: 1361712 - RNA, 19 nt, Homo sapiens
  misc_RNA (1)...(19): siRNA sense strand
gaccugacuacaaagaaug

SEQ ID NO: 1361713 - RNA, 19 nt, Homo sapiens
  misc_RNA (1)...(19): siRNA sense strand
cccaaucagcucguacuua

SEQ ID NO: 1361714 - RNA, 19 nt, Homo sapiens
  misc_RNA (1)...(19): siRNA sense strand
cacaguuggucugaaauca

SEQ ID NO: 1361715 - RNA, 19 nt, Homo sapiens
  misc_RNA (1)...(19): siRNA sense strand
cagggcaggauucaucaaa

SEQ ID NO: 1361716 - RNA, 19 nt, Homo sapiens
  misc_RNA (1)...(19): siRNA sense strand
ugguaaagacuuggaguuu

SEQ ID NO: 1361717 - RNA, 19 nt, Homo sapiens
  misc_RNA (1)...(19): siRNA sense strand
gaagcaagacccagauacc

SEQ ID NO: 1361718 - RNA, 19 nt, Homo sapiens
  misc_RNA (1)...(19): siRNA sense strand
uuccaaaccuguccaucug

SEQ ID NO: 1361719 - RNA, 19 nt, Homo sapiens
  misc_RNA (1)...(19): siRNA sense strand
agacccagauaccaacaca

SEQ ID NO: 1361720 - RNA, 19 nt, Homo sapiens
  misc_RNA (1)...(19): siRNA sense strand
cugcucaaccugcugauga

SEQ ID NO: 1361721 - RNA, 19 nt, Homo sapiens
  misc_RNA (1)...(19): siRNA sense strand
agacuuggaguuuacaauc

SEQ ID NO: 1361722 - RNA, 19 nt, Homo sapiens
  misc_RNA (1)...(19): siRNA sense strand
gaauuguugguaaagacuu

SEQ ID NO: 1361723 - RNA, 19 nt, Homo sapiens
  misc_RNA (1)...(19): siRNA sense strand
ccacaguuggucugaaauc

SEQ ID NO: 1361724 - RNA, 19 nt, Homo sapiens
  misc_RNA (1)...(19): siRNA sense strand
ugucucgucuuguaucucu

SEQ ID NO: 1361725 - RNA, 19 nt, Homo sapiens
  misc_RNA (1)...(19): siRNA sense strand
agaaagaccacagagaaag

SEQ ID NO: 1361726 - RNA, 19 nt, Homo sapiens
  misc_RNA (1)...(19): siRNA sense strand
cuaugaugaugaugaugug

SEQ ID NO: 1361727 - RNA, 19 nt, Homo sapiens
  misc_RNA (1)...(19): siRNA sense strand
ugacuacaaagaauguuuc

SEQ ID NO: 1361728 - RNA, 19 nt, Homo sapiens
  misc_RNA (1)...(19): siRNA sense strand
gcaauggaagcuguuaaac

SEQ ID NO: 1361729 - RNA, 19 nt, Homo sapiens
  misc_RNA (1)...(19): siRNA sense strand
ugaugaugaugaugugucu

SEQ ID NO: 1361730 - RNA, 19 nt, Homo sapiens
  misc_RNA (1)...(19): siRNA sense strand
ggaguuuacaaucuaugau

SEQ ID NO: 1361731 - RNA, 19 nt, Homo sapiens
  misc_RNA (1)...(19): siRNA sense strand
ggaauuguugguaaagacu

SEQ ID NO: 1361732 - RNA, 19 nt, Homo sapiens
  misc_RNA (1)...(19): siRNA sense strand
agagacgcuuccugcagaa

SEQ ID NO: 1361733 - RNA, 19 nt, Homo sapiens
  misc_RNA (1)...(19): siRNA sense strand
ugcaauggaagcuguuaaa

SEQ ID NO: 1361734 - RNA, 19 nt, Homo sapiens
  misc_RNA (1)...(19): siRNA sense strand
caagguucagccacaguug

SEQ ID NO: 1361735 - RNA, 19 nt, Homo sapiens
  misc_RNA (1)...(19): siRNA sense strand
ugaugaaccugcagaaaag

SEQ ID NO: 1361736 - RNA, 19 nt, Homo sapiens
  misc_RNA (1)...(19): siRNA sense strand
uggagcccguucccaauca

SEQ ID NO: 1361737 - RNA, 19 nt, Homo sapiens
  misc_RNA (1)...(19): siRNA sense strand
gaacuggacugucugauuc

SEQ ID NO: 1361738 - RNA, 19 nt, Homo sapiens
  misc_RNA (1)...(19): siRNA sense strand
guggaacgcugguuaaauu

SEQ ID NO: 1361739 - RNA, 19 nt, Homo sapiens
  misc_RNA (1)...(19): siRNA sense strand
ccaugaagcugcuggcaua

SEQ ID NO: 1361740 - RNA, 19 nt, Homo sapiens
  misc_RNA (1)...(19): siRNA sense strand
gaacauagacagaguugug

SEQ ID NO: 1361741 - RNA, 19 nt, Homo sapiens
  misc_RNA (1)...(19): siRNA sense strand
caacaacauuggcuccauu

SEQ ID NO: 1361742 - RNA, 19 nt, Homo sapiens
  misc_RNA (1)...(19): siRNA sense strand
gaccauguguggacgcaaa

SEQ ID NO: 1361743 - RNA, 19 nt, Homo sapiens
  misc_RNA (1)...(19): siRNA sense strand
gcaacaugaugaguaaaga

SEQ ID NO: 1361744 - RNA, 19 nt, Homo sapiens
  misc_RNA (1)...(19): siRNA sense strand
gggcucaggugucagcauu

SEQ ID NO: 1361745 - RNA, 19 nt, Homo sapiens
  misc_RNA (1)...(19): siRNA sense strand
uaauacugcuuaugggaaa

SEQ ID NO: 1361746 - RNA, 19 nt, Homo sapiens
  misc_RNA (1)...(19): siRNA sense strand
gaacgcugguuaaauuggu

SEQ ID NO: 1361747 - RNA, 19 nt, Homo sapiens
  misc_RNA (1)...(19): siRNA sense strand
agacagaguuguguuuguu

SEQ ID NO: 1361748 - RNA, 19 nt, Homo sapiens
  misc_RNA (1)...(19): siRNA sense strand
ugaagagcauccggaagua

SEQ ID NO: 1361749 - RNA, 19 nt, Homo sapiens
  misc_RNA (1)...(19): siRNA sense strand
gcaaagggaaccugcacuu

SEQ ID NO: 1361750 - RNA, 19 nt, Homo sapiens
  misc_RNA (1)...(19): siRNA sense strand
uacccuauguugcugguua

SEQ ID NO: 1361751 - RNA, 19 nt, Homo sapiens
  misc_RNA (1)...(19): siRNA sense strand
gaacuucucuagccuucac

SEQ ID NO: 1361752 - RNA, 19 nt, Homo sapiens
  misc_RNA (1)...(19): siRNA sense strand
caaaaugacugaugacaag

SEQ ID NO: 1361753 - RNA, 19 nt, Homo sapiens
  misc_RNA (1)...(19): siRNA sense strand
ugacuucuaauacugcuua

SEQ ID NO: 1361754 - RNA, 19 nt, Homo sapiens
  misc_RNA (1)...(19): siRNA sense strand
gagauuccaucagcaagga

SEQ ID NO: 1361755 - RNA, 19 nt, Homo sapiens
  misc_RNA (1)...(19): siRNA sense strand
ucccacaaauccugaauug

SEQ ID NO: 1361756 - RNA, 19 nt, Homo sapiens
  misc_RNA (1)...(19): siRNA sense strand
ggaugugcgcguugaauga

SEQ ID NO: 1361757 - RNA, 19 nt, Homo sapiens
  misc_RNA (1)...(19): siRNA sense strand
gccagaauguuacuauuuu

SEQ ID NO: 1361758 - RNA, 19 nt, Homo sapiens
  misc_RNA (1)...(19): siRNA sense strand
caacaugaugaguaaagaa

SEQ ID NO: 1361759 - RNA, 19 nt, Homo sapiens
  misc_RNA (1)...(19): siRNA sense strand
gaacaugaggguuauuuug

SEQ ID NO: 1361760 - RNA, 19 nt, Homo sapiens
  misc_RNA (1)...(19): siRNA sense strand
gagaacauagacagaguug

SEQ ID NO: 1361761 - RNA, 19 nt, Homo sapiens
  misc_RNA (1)...(19): siRNA sense strand
gcacagguucauucagaug

SEQ ID NO: 1361762 - RNA, 19 nt, Homo sapiens
  misc_RNA (1)...(19): siRNA sense strand
gcucggaugugcgcguuga

SEQ ID NO: 1361763 - RNA, 19 nt, Homo sapiens
  misc_RNA (1)...(19): siRNA sense strand
gaagagcauccggaaguau

SEQ ID NO: 1361764 - RNA, 19 nt, Homo sapiens
  misc_RNA (1)...(19): siRNA sense strand
uggaugaacuggacugucu

SEQ ID NO: 1361765 - RNA, 19 nt, Homo sapiens
  misc_RNA (1)...(19): siRNA sense strand
aauccugaauugugucaaa

SEQ ID NO: 1361766 - RNA, 19 nt, Homo sapiens
  misc_RNA (1)...(19): siRNA sense strand
gaaugagaacauagacaga

SEQ ID NO: 1361767 - RNA, 19 nt, Homo sapiens
  misc_RNA (1)...(19): siRNA sense strand
aagccguacugccuugaua

SEQ ID NO: 1361768 - RNA, 19 nt, Homo sapiens
  misc_RNA (1)...(19): siRNA sense strand
ugaacuggacugucugauu

SEQ ID NO: 1361769 - RNA, 19 nt, Homo sapiens
  misc_RNA (1)...(19): siRNA sense strand
gaguuguguuuguuggaaa

SEQ ID NO: 1361770 - RNA, 19 nt, Homo sapiens
  misc_RNA (1)...(19): siRNA sense strand
aaagggaaccugcacuuca

SEQ ID NO: 1361771 - RNA, 19 nt, Homo sapiens
  misc_RNA (1)...(19): siRNA sense strand
cauagacagaguuguguuu

SEQ ID NO: 1361772 - RNA, 19 nt, Homo sapiens
  misc_RNA (1)...(19): siRNA sense strand
caacggcaagccagaaugu

SEQ ID NO: 1361773 - RNA, 19 nt, Homo sapiens
  misc_RNA (1)...(19): siRNA sense strand
gcuaugcacagguucauuc

SEQ ID NO: 1361774 - RNA, 19 nt, Homo sapiens
  misc_RNA (1)...(19): siRNA sense strand
cgaagaggagcaagaggaa

SEQ ID NO: 1361775 - RNA, 19 nt, Homo sapiens
  misc_RNA (1)...(19): siRNA sense strand
caagccagaauguuacuau

SEQ ID NO: 1361776 - RNA, 19 nt, Homo sapiens
  misc_RNA (1)...(19): siRNA sense strand
augcacagguucauucaga

SEQ ID NO: 1361777 - RNA, 19 nt, Homo sapiens
  misc_RNA (1)...(19): siRNA sense strand
caccaucaccaacaacauu

SEQ ID NO: 1361778 - RNA, 19 nt, Homo sapiens
  misc_RNA (1)...(19): siRNA sense strand
uggagaaccugaagagcau

SEQ ID NO: 1361779 - RNA, 19 nt, Homo sapiens
  misc_RNA (1)...(19): siRNA sense strand
gaaguggagaaccugaaga

SEQ ID NO: 1361780 - RNA, 19 nt, Homo sapiens
  misc_RNA (1)...(19): siRNA sense strand
ugaagcugcuggcauaugc

SEQ ID NO: 1361781 - RNA, 19 nt, Homo sapiens
  misc_RNA (1)...(19): siRNA sense strand
gcagcugcauaaacuggau

SEQ ID NO: 1361782 - RNA, 19 nt, Homo sapiens
  misc_RNA (1)...(19): siRNA sense strand
gaggacuucagaaugauug

SEQ ID NO: 1361783 - RNA, 19 nt, Homo sapiens
  misc_RNA (1)...(19): siRNA sense strand
uuggcaacaugaugaguaa

SEQ ID NO: 1361784 - RNA, 19 nt, Homo sapiens
  misc_RNA (1)...(19): siRNA sense strand
acuccaaggacaacuauaa

SEQ ID NO: 1361785 - RNA, 19 nt, Homo sapiens
  misc_RNA (1)...(19): siRNA sense strand
acggcaagccagaauguua

SEQ ID NO: 1361786 - RNA, 19 nt, Homo sapiens
  misc_RNA (1)...(19): siRNA sense strand
gaugaacuggacugucuga

SEQ ID NO: 1361787 - RNA, 19 nt, Homo sapiens
  misc_RNA (1)...(19): siRNA sense strand
gcauaaacuggaugaacug

SEQ ID NO: 1361788 - RNA, 19 nt, Homo sapiens
  misc_RNA (1)...(19): siRNA sense strand
aaaugacugaugacaagua

SEQ ID NO: 1361789 - RNA, 19 nt, Homo sapiens
  misc_RNA (1)...(19): siRNA sense strand
uagacagaguuguguuugu

SEQ ID NO: 1361790 - RNA, 19 nt, Homo sapiens
  misc_RNA (1)...(19): siRNA sense strand
gaaaagcgagauuccauca

SEQ ID NO: 1361791 - RNA, 19 nt, Homo sapiens
  misc_RNA (1)...(19): siRNA sense strand
gcucaggugucagcauucu

SEQ ID NO: 1361792 - RNA, 19 nt, Homo sapiens
  misc_RNA (1)...(19): siRNA sense strand
aagccagaauguuacuauu

SEQ ID NO: 1361793 - RNA, 19 nt, Homo sapiens
  misc_RNA (1)...(19): siRNA sense strand
ggaaguggagaaccugaag

SEQ ID NO: 1361794 - RNA, 19 nt, Homo sapiens
  misc_RNA (1)...(19): siRNA sense strand
ugcauaaacuggaugaacu

SEQ ID NO: 1361795 - RNA, 19 nt, Homo sapiens
  misc_RNA (1)...(19): siRNA sense strand
gggcacuguuggaacuguu

SEQ ID NO: 1361796 - RNA, 19 nt, Homo sapiens
  misc_RNA (1)...(19): siRNA sense strand
caacugaaagcucuguuuu

SEQ ID NO: 1361797 - RNA, 19 nt, Homo sapiens
  misc_RNA (1)...(19): siRNA sense strand
guacuccaaggacaacuau

SEQ ID NO: 1361798 - RNA, 19 nt, Homo sapiens
  misc_RNA (1)...(19): siRNA sense strand
aagggaaccugcacuucau

SEQ ID NO: 1361799 - RNA, 19 nt, Homo sapiens
  misc_RNA (1)...(19): siRNA sense strand
caaagggaaccugcacuuc

SEQ ID NO: 1361800 - RNA, 19 nt, Homo sapiens
  misc_RNA (1)...(19): siRNA sense strand
agaguuguguuuguuggaa

SEQ ID NO: 1361801 - RNA, 19 nt, Homo sapiens
  misc_RNA (1)...(19): siRNA sense strand
aagagcauccggaaguauu

SEQ ID NO: 1361802 - RNA, 19 nt, Homo sapiens
  misc_RNA (1)...(19): siRNA sense strand
cgcguugaaugagaacaua

SEQ ID NO: 1361803 - RNA, 19 nt, Homo sapiens
  misc_RNA (1)...(19): siRNA sense strand
agccagaauguuacuauuu

SEQ ID NO: 1361804 - RNA, 19 nt, Homo sapiens
  misc_RNA (1)...(19): siRNA sense strand
gacagaguuguguuuguug

SEQ ID NO: 1361805 - RNA, 19 nt, Homo sapiens
  misc_RNA (1)...(19): siRNA sense strand
aacaugggcucagguguca

SEQ ID NO: 1361806 - RNA, 19 nt, Homo sapiens
  misc_RNA (1)...(19): siRNA sense strand
ucagcauucuagccgugua

SEQ ID NO: 1361807 - RNA, 19 nt, Homo sapiens
  misc_RNA (1)...(19): siRNA sense strand
acaacugaaagcucuguuu

SEQ ID NO: 1361808 - RNA, 19 nt, Homo sapiens
  misc_RNA (1)...(19): siRNA sense strand
ggacaacugaaagcucugu

SEQ ID NO: 1361809 - RNA, 19 nt, Homo sapiens
  misc_RNA (1)...(19): siRNA sense strand
gagcauccggaaguauuug

SEQ ID NO: 1361810 - RNA, 19 nt, Homo sapiens
  misc_RNA (1)...(19): siRNA sense strand
ggaacgcugguuaaauugg

SEQ ID NO: 1361811 - RNA, 19 nt, Homo sapiens
  misc_RNA (1)...(19): siRNA sense strand
cugaagagcauccggaagu

SEQ ID NO: 1361812 - RNA, 19 nt, Homo sapiens
  misc_RNA (1)...(19): siRNA sense strand
caacauuggcuccauugcu

SEQ ID NO: 1361813 - RNA, 19 nt, Homo sapiens
  misc_RNA (1)...(19): siRNA sense strand
gguggaacgcugguuaaau

SEQ ID NO: 1361814 - RNA, 19 nt, Homo sapiens
  misc_RNA (1)...(19): siRNA sense strand
cugguuaaauugguguauu

SEQ ID NO: 1361815 - RNA, 19 nt, Homo sapiens
  misc_RNA (1)...(19): siRNA sense strand
aaugacugaugacaaguag

SEQ ID NO: 1361816 - RNA, 19 nt, Homo sapiens
  misc_RNA (1)...(19): siRNA sense strand
caaggacaacuauaaaaga

SEQ ID NO: 1361817 - RNA, 19 nt, Homo sapiens
  misc_RNA (1)...(19): siRNA sense strand
gcaagccagaauguuacua

SEQ ID NO: 1361818 - RNA, 19 nt, Homo sapiens
  misc_RNA (1)...(19): siRNA sense strand
uggaacaugaggguuauuu

SEQ ID NO: 1361819 - RNA, 19 nt, Homo sapiens
  misc_RNA (1)...(19): siRNA sense strand
ggauauuacagccgaagag

SEQ ID NO: 1361820 - RNA, 19 nt, Homo sapiens
  misc_RNA (1)...(19): siRNA sense strand
ggcaacaugaugaguaaag

SEQ ID NO: 1361821 - RNA, 19 nt, Homo sapiens
  misc_RNA (1)...(19): siRNA sense strand
caaauccugaauuguguca

SEQ ID NO: 1361822 - RNA, 19 nt, Homo sapiens
  misc_RNA (1)...(19): siRNA sense strand
cuucuaauacugcuuaugg

SEQ ID NO: 1361823 - RNA, 19 nt, Homo sapiens
  misc_RNA (1)...(19): siRNA sense strand
ucaggugucagcauucuag

SEQ ID NO: 1361824 - RNA, 19 nt, Homo sapiens
  misc_RNA (1)...(19): siRNA sense strand
ccaaaggacaacugaaagc

SEQ ID NO: 1361825 - RNA, 19 nt, Homo sapiens
  misc_RNA (1)...(19): siRNA sense strand
gaacuggacugucugauuc

SEQ ID NO: 1361826 - RNA, 19 nt, Homo sapiens
  misc_RNA (1)...(19): siRNA sense strand
guggaacgcugguuaaauu

SEQ ID NO: 1361827 - RNA, 19 nt, Homo sapiens
  misc_RNA (1)...(19): siRNA sense strand
ccaugaagcugcuggcaua

SEQ ID NO: 1361828 - RNA, 19 nt, Homo sapiens
  misc_RNA (1)...(19): siRNA sense strand
gaacauagacagaguugug

SEQ ID NO: 1361829 - RNA, 19 nt, Homo sapiens
  misc_RNA (1)...(19): siRNA sense strand
caacaacauuggcuccauu

SEQ ID NO: 1361830 - RNA, 19 nt, Homo sapiens
  misc_RNA (1)...(19): siRNA sense strand
gaccauguguggacgcaaa

SEQ ID NO: 1361831 - RNA, 19 nt, Homo sapiens
  misc_RNA (1)...(19): siRNA sense strand
gcaacaugaugaguaaaga

SEQ ID NO: 1361832 - RNA, 19 nt, Homo sapiens
  misc_RNA (1)...(19): siRNA sense strand
gggcucaggugucagcauu

SEQ ID NO: 1361833 - RNA, 19 nt, Homo sapiens
  misc_RNA (1)...(19): siRNA sense strand
uaauacugcuuaugggaaa

SEQ ID NO: 1361834 - RNA, 19 nt, Homo sapiens
  misc_RNA (1)...(19): siRNA sense strand
gaacgcugguuaaauuggu

SEQ ID NO: 1361835 - RNA, 19 nt, Homo sapiens
  misc_RNA (1)...(19): siRNA sense strand
agacagaguuguguuuguu

SEQ ID NO: 1361836 - RNA, 19 nt, Homo sapiens
  misc_RNA (1)...(19): siRNA sense strand
ugaagagcauccggaagua

SEQ ID NO: 1361837 - RNA, 19 nt, Homo sapiens
  misc_RNA (1)...(19): siRNA sense strand
gcaaagggaaccugcacuu

SEQ ID NO: 1361838 - RNA, 19 nt, Homo sapiens
  misc_RNA (1)...(19): siRNA sense strand
uacccuauguugcugguua

SEQ ID NO: 1361839 - RNA, 19 nt, Homo sapiens
  misc_RNA (1)...(19): siRNA sense strand
gaacuucucuagccuucac

SEQ ID NO: 1361840 - RNA, 19 nt, Homo sapiens
  misc_RNA (1)...(19): siRNA sense strand
caaaaugacugaugacaag

SEQ ID NO: 1361841 - RNA, 19 nt, Homo sapiens
  misc_RNA (1)...(19): siRNA sense strand
ugacuucuaauacugcuua

SEQ ID NO: 1361842 - RNA, 19 nt, Homo sapiens
  misc_RNA (1)...(19): siRNA sense strand
gagauuccaucagcaagga

SEQ ID NO: 1361843 - RNA, 19 nt, Homo sapiens
  misc_RNA (1)...(19): siRNA sense strand
ucccacaaauccugaauug

SEQ ID NO: 1361844 - RNA, 19 nt, Homo sapiens
  misc_RNA (1)...(19): siRNA sense strand
ggaugugcgcguugaauga

SEQ ID NO: 1361845 - RNA, 19 nt, Homo sapiens
  misc_RNA (1)...(19): siRNA sense strand
gccagaauguuacuauuuu

SEQ ID NO: 1361846 - RNA, 19 nt, Homo sapiens
  misc_RNA (1)...(19): siRNA sense strand
caacaugaugaguaaagaa

SEQ ID NO: 1361847 - RNA, 19 nt, Homo sapiens
  misc_RNA (1)...(19): siRNA sense strand
gaacaugaggguuauuuug

SEQ ID NO: 1361848 - RNA, 19 nt, Homo sapiens
  misc_RNA (1)...(19): siRNA sense strand
gagaacauagacagaguug

SEQ ID NO: 1361849 - RNA, 19 nt, Homo sapiens
  misc_RNA (1)...(19): siRNA sense strand
gcacagguucauucagaug

SEQ ID NO: 1361850 - RNA, 19 nt, Homo sapiens
  misc_RNA (1)...(19): siRNA sense strand
gcucggaugugcgcguuga

SEQ ID NO: 1361851 - RNA, 19 nt, Homo sapiens
  misc_RNA (1)...(19): siRNA sense strand
gaagagcauccggaaguau

SEQ ID NO: 1361852 - RNA, 19 nt, Homo sapiens
  misc_RNA (1)...(19): siRNA sense strand
uggaugaacuggacugucu

SEQ ID NO: 1361853 - RNA, 19 nt, Homo sapiens
  misc_RNA (1)...(19): siRNA sense strand
aauccugaauugugucaaa

SEQ ID NO: 1361854 - RNA, 19 nt, Homo sapiens
  misc_RNA (1)...(19): siRNA sense strand
gaaugagaacauagacaga

SEQ ID NO: 1361855 - RNA, 19 nt, Homo sapiens
  misc_RNA (1)...(19): siRNA sense strand
aagccguacugccuugaua

SEQ ID NO: 1361856 - RNA, 19 nt, Homo sapiens
  misc_RNA (1)...(19): siRNA sense strand
ugaacuggacugucugauu

SEQ ID NO: 1361857 - RNA, 19 nt, Homo sapiens
  misc_RNA (1)...(19): siRNA sense strand
gaguuguguuuguuggaaa

SEQ ID NO: 1361858 - RNA, 19 nt, Homo sapiens
  misc_RNA (1)...(19): siRNA sense strand
aaagggaaccugcacuuca

SEQ ID NO: 1361859 - RNA, 19 nt, Homo sapiens
  misc_RNA (1)...(19): siRNA sense strand
cauagacagaguuguguuu

SEQ ID NO: 1361860 - RNA, 19 nt, Homo sapiens
  misc_RNA (1)...(19): siRNA sense strand
caacggcaagccagaaugu

SEQ ID NO: 1361861 - RNA, 19 nt, Homo sapiens
  misc_RNA (1)...(19): siRNA sense strand
gcuaugcacagguucauuc

SEQ ID NO: 1361862 - RNA, 19 nt, Homo sapiens
  misc_RNA (1)...(19): siRNA sense strand
cgaagaggagcaagaggaa

SEQ ID NO: 1361863 - RNA, 19 nt, Homo sapiens
  misc_RNA (1)...(19): siRNA sense strand
caagccagaauguuacuau

SEQ ID NO: 1361864 - RNA, 19 nt, Homo sapiens
  misc_RNA (1)...(19): siRNA sense strand
augcacagguucauucaga

SEQ ID NO: 1361865 - RNA, 19 nt, Homo sapiens
  misc_RNA (1)...(19): siRNA sense strand
caccaucaccaacaacauu

SEQ ID NO: 1361866 - RNA, 19 nt, Homo sapiens
  misc_RNA (1)...(19): siRNA sense strand
uggagaaccugaagagcau

SEQ ID NO: 1361867 - RNA, 19 nt, Homo sapiens
  misc_RNA (1)...(19): siRNA sense strand
gaaguggagaaccugaaga

SEQ ID NO: 1361868 - RNA, 19 nt, Homo sapiens
  misc_RNA (1)...(19): siRNA sense strand
ugaagcugcuggcauaugc

SEQ ID NO: 1361869 - RNA, 19 nt, Homo sapiens
  misc_RNA (1)...(19): siRNA sense strand
gcagcugcauaaacuggau

SEQ ID NO: 1361870 - RNA, 19 nt, Homo sapiens
  misc_RNA (1)...(19): siRNA sense strand
gaggacuucagaaugauug

SEQ ID NO: 1361871 - RNA, 19 nt, Homo sapiens
  misc_RNA (1)...(19): siRNA sense strand
uuggcaacaugaugaguaa

SEQ ID NO: 1361872 - RNA, 19 nt, Homo sapiens
  misc_RNA (1)...(19): siRNA sense strand
acuccaaggacaacuauaa

SEQ ID NO: 1361873 - RNA, 19 nt, Homo sapiens
  misc_RNA (1)...(19): siRNA sense strand
acggcaagccagaauguua

SEQ ID NO: 1361874 - RNA, 19 nt, Homo sapiens
  misc_RNA (1)...(19): siRNA sense strand
gaugaacuggacugucuga

SEQ ID NO: 1361875 - RNA, 19 nt, Homo sapiens
  misc_RNA (1)...(19): siRNA sense strand
gcauaaacuggaugaacug

SEQ ID NO: 1361876 - RNA, 19 nt, Homo sapiens
  misc_RNA (1)...(19): siRNA sense strand
aaaugacugaugacaagua

SEQ ID NO: 1361877 - RNA, 19 nt, Homo sapiens
  misc_RNA (1)...(19): siRNA sense strand
uagacagaguuguguuugu

SEQ ID NO: 1361878 - RNA, 19 nt, Homo sapiens
  misc_RNA (1)...(19): siRNA sense strand
gaaaagcgagauuccauca

SEQ ID NO: 1361879 - RNA, 19 nt, Homo sapiens
  misc_RNA (1)...(19): siRNA sense strand
gcucaggugucagcauucu

SEQ ID NO: 1361880 - RNA, 19 nt, Homo sapiens
  misc_RNA (1)...(19): siRNA sense strand
aagccagaauguuacuauu

SEQ ID NO: 1361881 - RNA, 19 nt, Homo sapiens
  misc_RNA (1)...(19): siRNA sense strand
ggaaguggagaaccugaag

SEQ ID NO: 1361882 - RNA, 19 nt, Homo sapiens
  misc_RNA (1)...(19): siRNA sense strand
ugcauaaacuggaugaacu

SEQ ID NO: 1361883 - RNA, 19 nt, Homo sapiens
  misc_RNA (1)...(19): siRNA sense strand
gggcacuguuggaacuguu

SEQ ID NO: 1361884 - RNA, 19 nt, Homo sapiens
  misc_RNA (1)...(19): siRNA sense strand
caacugaaagcucuguuuu

SEQ ID NO: 1361885 - RNA, 19 nt, Homo sapiens
  misc_RNA (1)...(19): siRNA sense strand
guacuccaaggacaacuau

SEQ ID NO: 1361886 - RNA, 19 nt, Homo sapiens
  misc_RNA (1)...(19): siRNA sense strand
aagggaaccugcacuucau

SEQ ID NO: 1361887 - RNA, 19 nt, Homo sapiens
  misc_RNA (1)...(19): siRNA sense strand
caaagggaaccugcacuuc

SEQ ID NO: 1361888 - RNA, 19 nt, Homo sapiens
  misc_RNA (1)...(19): siRNA sense strand
agaguuguguuuguuggaa

SEQ ID NO: 1361889 - RNA, 19 nt, Homo sapiens
  misc_RNA (1)...(19): siRNA sense strand
aagagcauccggaaguauu

SEQ ID NO: 1361890 - RNA, 19 nt, Homo sapiens
  misc_RNA (1)...(19): siRNA sense strand
cgcguugaaugagaacaua

SEQ ID NO: 1361891 - RNA, 19 nt, Homo sapiens
  misc_RNA (1)...(19): siRNA sense strand
agccagaauguuacuauuu

SEQ ID NO: 1361892 - RNA, 19 nt, Homo sapiens
  misc_RNA (1)...(19): siRNA sense strand
gacagaguuguguuuguug

SEQ ID NO: 1361893 - RNA, 19 nt, Homo sapiens
  misc_RNA (1)...(19): siRNA sense strand
aacaugggcucagguguca

SEQ ID NO: 1361894 - RNA, 19 nt, Homo sapiens
  misc_RNA (1)...(19): siRNA sense strand
ucagcauucuagccgugua

SEQ ID NO: 1361895 - RNA, 19 nt, Homo sapiens
  misc_RNA (1)...(19): siRNA sense strand
acaacugaaagcucuguuu

SEQ ID NO: 1361896 - RNA, 19 nt, Homo sapiens
  misc_RNA (1)...(19): siRNA sense strand
ggacaacugaaagcucugu

SEQ ID NO: 1361897 - RNA, 19 nt, Homo sapiens
  misc_RNA (1)...(19): siRNA sense strand
gagcauccggaaguauuug

SEQ ID NO: 1361898 - RNA, 19 nt, Homo sapiens
  misc_RNA (1)...(19): siRNA sense strand
ggaacgcugguuaaauugg

SEQ ID NO: 1361899 - RNA, 19 nt, Homo sapiens
  misc_RNA (1)...(19): siRNA sense strand
cugaagagcauccggaagu

SEQ ID NO: 1361900 - RNA, 19 nt, Homo sapiens
  misc_RNA (1)...(19): siRNA sense strand
caacauuggcuccauugcu

SEQ ID NO: 1361901 - RNA, 19 nt, Homo sapiens
  misc_RNA (1)...(19): siRNA sense strand
gguggaacgcugguuaaau

SEQ ID NO: 1361902 - RNA, 19 nt, Homo sapiens
  misc_RNA (1)...(19): siRNA sense strand
cugguuaaauugguguauu

SEQ ID NO: 1361903 - RNA, 19 nt, Homo sapiens
  misc_RNA (1)...(19): siRNA sense strand
aaugacugaugacaaguag

SEQ ID NO: 1361904 - RNA, 19 nt, Homo sapiens
  misc_RNA (1)...(19): siRNA sense strand
caaggacaacuauaaaaga

SEQ ID NO: 1361905 - RNA, 19 nt, Homo sapiens
  misc_RNA (1)...(19): siRNA sense strand
gcaagccagaauguuacua

SEQ ID NO: 1361906 - RNA, 19 nt, Homo sapiens
  misc_RNA (1)...(19): siRNA sense strand
uggaacaugaggguuauuu

SEQ ID NO: 1361907 - RNA, 19 nt, Homo sapiens
  misc_RNA (1)...(19): siRNA sense strand
ggauauuacagccgaagag

SEQ ID NO: 1361908 - RNA, 19 nt, Homo sapiens
  misc_RNA (1)...(19): siRNA sense strand
ggcaacaugaugaguaaag

SEQ ID NO: 1361909 - RNA, 19 nt, Homo sapiens
  misc_RNA (1)...(19): siRNA sense strand
caaauccugaauuguguca

SEQ ID NO: 1361910 - RNA, 19 nt, Homo sapiens
  misc_RNA (1)...(19): siRNA sense strand
cuucuaauacugcuuaugg

SEQ ID NO: 1361911 - RNA, 19 nt, Homo sapiens
  misc_RNA (1)...(19): siRNA sense strand
ucaggugucagcauucuag

SEQ ID NO: 1361912 - RNA, 19 nt, Homo sapiens
  misc_RNA (1)...(19): siRNA sense strand
ccaaaggacaacugaaagc

SEQ ID NO: 1361913 - RNA, 19 nt, Homo sapiens
  misc_RNA (1)...(19): siRNA sense strand
gaacuggacugucugauuc

SEQ ID NO: 1361914 - RNA, 19 nt, Homo sapiens
  misc_RNA (1)...(19): siRNA sense strand
guggaacgcugguuaaauu

SEQ ID NO: 1361915 - RNA, 19 nt, Homo sapiens
  misc_RNA (1)...(19): siRNA sense strand
ccaugaagcugcuggcaua

SEQ ID NO: 1361916 - RNA, 19 nt, Homo sapiens
  misc_RNA (1)...(19): siRNA sense strand
gaacauagacagaguugug

SEQ ID NO: 1361917 - RNA, 19 nt, Homo sapiens
  misc_RNA (1)...(19): siRNA sense strand
caacaacauuggcuccauu

SEQ ID NO: 1361918 - RNA, 19 nt, Homo sapiens
  misc_RNA (1)...(19): siRNA sense strand
gaccauguguggacgcaaa

SEQ ID NO: 1361919 - RNA, 19 nt, Homo sapiens
  misc_RNA (1)...(19): siRNA sense strand
gcaacaugaugaguaaaga

SEQ ID NO: 1361920 - RNA, 19 nt, Homo sapiens
  misc_RNA (1)...(19): siRNA sense strand
gggcucaggugucagcauu

SEQ ID NO: 1361921 - RNA, 19 nt, Homo sapiens
  misc_RNA (1)...(19): siRNA sense strand
uaauacugcuuaugggaaa

SEQ ID NO: 1361922 - RNA, 19 nt, Homo sapiens
  misc_RNA (1)...(19): siRNA sense strand
gaacgcugguuaaauuggu

SEQ ID NO: 1361923 - RNA, 19 nt, Homo sapiens
  misc_RNA (1)...(19): siRNA sense strand
agacagaguuguguuuguu

SEQ ID NO: 1361924 - RNA, 19 nt, Homo sapiens
  misc_RNA (1)...(19): siRNA sense strand
ugaagagcauccggaagua

SEQ ID NO: 1361925 - RNA, 19 nt, Homo sapiens
  misc_RNA (1)...(19): siRNA sense strand
gcaaagggaaccugcacuu

SEQ ID NO: 1361926 - RNA, 19 nt, Homo sapiens
  misc_RNA (1)...(19): siRNA sense strand
uacccuauguugcugguua

SEQ ID NO: 1361927 - RNA, 19 nt, Homo sapiens
  misc_RNA (1)...(19): siRNA sense strand
gaacuucucuagccuucac

SEQ ID NO: 1361928 - RNA, 19 nt, Homo sapiens
  misc_RNA (1)...(19): siRNA sense strand
caaaaugacugaugacaag

SEQ ID NO: 1361929 - RNA, 19 nt, Homo sapiens
  misc_RNA (1)...(19): siRNA sense strand
ugacuucuaauacugcuua

SEQ ID NO: 1361930 - RNA, 19 nt, Homo sapiens
  misc_RNA (1)...(19): siRNA sense strand
gagauuccaucagcaagga

SEQ ID NO: 1361931 - RNA, 19 nt, Homo sapiens
  misc_RNA (1)...(19): siRNA sense strand
ucccacaaauccugaauug

SEQ ID NO: 1361932 - RNA, 19 nt, Homo sapiens
  misc_RNA (1)...(19): siRNA sense strand
ggaugugcgcguugaauga

SEQ ID NO: 1361933 - RNA, 19 nt, Homo sapiens
  misc_RNA (1)...(19): siRNA sense strand
gccagaauguuacuauuuu

SEQ ID NO: 1361934 - RNA, 19 nt, Homo sapiens
  misc_RNA (1)...(19): siRNA sense strand
caacaugaugaguaaagaa

SEQ ID NO: 1361935 - RNA, 19 nt, Homo sapiens
  misc_RNA (1)...(19): siRNA sense strand
gaacaugaggguuauuuug

SEQ ID NO: 1361936 - RNA, 19 nt, Homo sapiens
  misc_RNA (1)...(19): siRNA sense strand
gagaacauagacagaguug

SEQ ID NO: 1361937 - RNA, 19 nt, Homo sapiens
  misc_RNA (1)...(19): siRNA sense strand
gcacagguucauucagaug

SEQ ID NO: 1361938 - RNA, 19 nt, Homo sapiens
  misc_RNA (1)...(19): siRNA sense strand
gcucggaugugcgcguuga

SEQ ID NO: 1361939 - RNA, 19 nt, Homo sapiens
  misc_RNA (1)...(19): siRNA sense strand
gaagagcauccggaaguau

SEQ ID NO: 1361940 - RNA, 19 nt, Homo sapiens
  misc_RNA (1)...(19): siRNA sense strand
uggaugaacuggacugucu

SEQ ID NO: 1361941 - RNA, 19 nt, Homo sapiens
  misc_RNA (1)...(19): siRNA sense strand
aauccugaauugugucaaa

SEQ ID NO: 1361942 - RNA, 19 nt, Homo sapiens
  misc_RNA (1)...(19): siRNA sense strand
gaaugagaacauagacaga

SEQ ID NO: 1361943 - RNA, 19 nt, Homo sapiens
  misc_RNA (1)...(19): siRNA sense strand
aagccguacugccuugaua

SEQ ID NO: 1361944 - RNA, 19 nt, Homo sapiens
  misc_RNA (1)...(19): siRNA sense strand
ugaacuggacugucugauu

SEQ ID NO: 1361945 - RNA, 19 nt, Homo sapiens
  misc_RNA (1)...(19): siRNA sense strand
gaguuguguuuguuggaaa

SEQ ID NO: 1361946 - RNA, 19 nt, Homo sapiens
  misc_RNA (1)...(19): siRNA sense strand
aaagggaaccugcacuuca

SEQ ID NO: 1361947 - RNA, 19 nt, Homo sapiens
  misc_RNA (1)...(19): siRNA sense strand
cauagacagaguuguguuu

SEQ ID NO: 1361948 - RNA, 19 nt, Homo sapiens
  misc_RNA (1)...(19): siRNA sense strand
caacggcaagccagaaugu

SEQ ID NO: 1361949 - RNA, 19 nt, Homo sapiens
  misc_RNA (1)...(19): siRNA sense strand
gcuaugcacagguucauuc

SEQ ID NO: 1361950 - RNA, 19 nt, Homo sapiens
  misc_RNA (1)...(19): siRNA sense strand
cgaagaggagcaagaggaa

SEQ ID NO: 1361951 - RNA, 19 nt, Homo sapiens
  misc_RNA (1)...(19): siRNA sense strand
caagccagaauguuacuau

SEQ ID NO: 1361952 - RNA, 19 nt, Homo sapiens
  misc_RNA (1)...(19): siRNA sense strand
augcacagguucauucaga

SEQ ID NO: 1361953 - RNA, 19 nt, Homo sapiens
  misc_RNA (1)...(19): siRNA sense strand
caccaucaccaacaacauu

SEQ ID NO: 1361954 - RNA, 19 nt, Homo sapiens
  misc_RNA (1)...(19): siRNA sense strand
uggagaaccugaagagcau

SEQ ID NO: 1361955 - RNA, 19 nt, Homo sapiens
  misc_RNA (1)...(19): siRNA sense strand
gaaguggagaaccugaaga

SEQ ID NO: 1361956 - RNA, 19 nt, Homo sapiens
  misc_RNA (1)...(19): siRNA sense strand
ugaagcugcuggcauaugc

SEQ ID NO: 1361957 - RNA, 19 nt, Homo sapiens
  misc_RNA (1)...(19): siRNA sense strand
gcagcugcauaaacuggau

SEQ ID NO: 1361958 - RNA, 19 nt, Homo sapiens
  misc_RNA (1)...(19): siRNA sense strand
gaggacuucagaaugauug

SEQ ID NO: 1361959 - RNA, 19 nt, Homo sapiens
  misc_RNA (1)...(19): siRNA sense strand
uuggcaacaugaugaguaa

SEQ ID NO: 1361960 - RNA, 19 nt, Homo sapiens
  misc_RNA (1)...(19): siRNA sense strand
acuccaaggacaacuauaa

SEQ ID NO: 1361961 - RNA, 19 nt, Homo sapiens
  misc_RNA (1)...(19): siRNA sense strand
acggcaagccagaauguua

SEQ ID NO: 1361962 - RNA, 19 nt, Homo sapiens
  misc_RNA (1)...(19): siRNA sense strand
gaugaacuggacugucuga

SEQ ID NO: 1361963 - RNA, 19 nt, Homo sapiens
  misc_RNA (1)...(19): siRNA sense strand
gcauaaacuggaugaacug

SEQ ID NO: 1361964 - RNA, 19 nt, Homo sapiens
  misc_RNA (1)...(19): siRNA sense strand
aaaugacugaugacaagua

SEQ ID NO: 1361965 - RNA, 19 nt, Homo sapiens
  misc_RNA (1)...(19): siRNA sense strand
uagacagaguuguguuugu

SEQ ID NO: 1361966 - RNA, 19 nt, Homo sapiens
  misc_RNA (1)...(19): siRNA sense strand
gaaaagcgagauuccauca

SEQ ID NO: 1361967 - RNA, 19 nt, Homo sapiens
  misc_RNA (1)...(19): siRNA sense strand
gcucaggugucagcauucu

SEQ ID NO: 1361968 - RNA, 19 nt, Homo sapiens
  misc_RNA (1)...(19): siRNA sense strand
aagccagaauguuacuauu

SEQ ID NO: 1361969 - RNA, 19 nt, Homo sapiens
  misc_RNA (1)...(19): siRNA sense strand
ggaaguggagaaccugaag

SEQ ID NO: 1361970 - RNA, 19 nt, Homo sapiens
  misc_RNA (1)...(19): siRNA sense strand
ugcauaaacuggaugaacu

SEQ ID NO: 1361971 - RNA, 19 nt, Homo sapiens
  misc_RNA (1)...(19): siRNA sense strand
gggcacuguuggaacuguu

SEQ ID NO: 1361972 - RNA, 19 nt, Homo sapiens
  misc_RNA (1)...(19): siRNA sense strand
caacugaaagcucuguuuu

SEQ ID NO: 1361973 - RNA, 19 nt, Homo sapiens
  misc_RNA (1)...(19): siRNA sense strand
guacuccaaggacaacuau

SEQ ID NO: 1361974 - RNA, 19 nt, Homo sapiens
  misc_RNA (1)...(19): siRNA sense strand
aagggaaccugcacuucau

SEQ ID NO: 1361975 - RNA, 19 nt, Homo sapiens
  misc_RNA (1)...(19): siRNA sense strand
caaagggaaccugcacuuc

SEQ ID NO: 1361976 - RNA, 19 nt, Homo sapiens
  misc_RNA (1)...(19): siRNA sense strand
agaguuguguuuguuggaa

SEQ ID NO: 1361977 - RNA, 19 nt, Homo sapiens
  misc_RNA (1)...(19): siRNA sense strand
aagagcauccggaaguauu

SEQ ID NO: 1361978 - RNA, 19 nt, Homo sapiens
  misc_RNA (1)...(19): siRNA sense strand
cgcguugaaugagaacaua

SEQ ID NO: 1361979 - RNA, 19 nt, Homo sapiens
  misc_RNA (1)...(19): siRNA sense strand
agccagaauguuacuauuu

SEQ ID NO: 1361980 - RNA, 19 nt, Homo sapiens
  misc_RNA (1)...(19): siRNA sense strand
gacagaguuguguuuguug

SEQ ID NO: 1361981 - RNA, 19 nt, Homo sapiens
  misc_RNA (1)...(19): siRNA sense strand
aacaugggcucagguguca

SEQ ID NO: 1361982 - RNA, 19 nt, Homo sapiens
  misc_RNA (1)...(19): siRNA sense strand
ucagcauucuagccgugua

SEQ ID NO: 1361983 - RNA, 19 nt, Homo sapiens
  misc_RNA (1)...(19): siRNA sense strand
acaacugaaagcucuguuu

SEQ ID NO: 1361984 - RNA, 19 nt, Homo sapiens
  misc_RNA (1)...(19): siRNA sense strand
ggacaacugaaagcucugu

SEQ ID NO: 1361985 - RNA, 19 nt, Homo sapiens
  misc_RNA (1)...(19): siRNA sense strand
gagcauccggaaguauuug

SEQ ID NO: 1361986 - RNA, 19 nt, Homo sapiens
  misc_RNA (1)...(19): siRNA sense strand
ggaacgcugguuaaauugg

SEQ ID NO: 1361987 - RNA, 19 nt, Homo sapiens
  misc_RNA (1)...(19): siRNA sense strand
cugaagagcauccggaagu

SEQ ID NO: 1361988 - RNA, 19 nt, Homo sapiens
  misc_RNA (1)...(19): siRNA sense strand
caacauuggcuccauugcu

SEQ ID NO: 1361989 - RNA, 19 nt, Homo sapiens
  misc_RNA (1)...(19): siRNA sense strand
gguggaacgcugguuaaau

SEQ ID NO: 1361990 - RNA, 19 nt, Homo sapiens
  misc_RNA (1)...(19): siRNA sense strand
cugguuaaauugguguauu

SEQ ID NO: 1361991 - RNA, 19 nt, Homo sapiens
  misc_RNA (1)...(19): siRNA sense strand
aaugacugaugacaaguag

SEQ ID NO: 1361992 - RNA, 19 nt, Homo sapiens
  misc_RNA (1)...(19): siRNA sense strand
caaggacaacuauaaaaga

SEQ ID NO: 1361993 - RNA, 19 nt, Homo sapiens
  misc_RNA (1)...(19): siRNA sense strand
gcaagccagaauguuacua

SEQ ID NO: 1361994 - RNA, 19 nt, Homo sapiens
  misc_RNA (1)...(19): siRNA sense strand
uggaacaugaggguuauuu

SEQ ID NO: 1361995 - RNA, 19 nt, Homo sapiens
  misc_RNA (1)...(19): siRNA sense strand
ggauauuacagccgaagag

SEQ ID NO: 1361996 - RNA, 19 nt, Homo sapiens
  misc_RNA (1)...(19): siRNA sense strand
ggcaacaugaugaguaaag

SEQ ID NO: 1361997 - RNA, 19 nt, Homo sapiens
  misc_RNA (1)...(19): siRNA sense strand
caaauccugaauuguguca

SEQ ID NO: 1361998 - RNA, 19 nt, Homo sapiens
  misc_RNA (1)...(19): siRNA sense strand
cuucuaauacugcuuaugg

SEQ ID NO: 1361999 - RNA, 19 nt, Homo sapiens
  misc_RNA (1)...(19): siRNA sense strand
ucaggugucagcauucuag

SEQ ID NO: 1362000 - RNA, 19 nt, Homo sapiens
  misc_RNA (1)...(19): siRNA sense strand
ccaaaggacaacugaaagc

SEQ ID NO: 1362001 - RNA, 19 nt, Homo sapiens
  misc_RNA (1)...(19): siRNA sense strand
gaacuggacugucugauuc

SEQ ID NO: 1362002 - RNA, 19 nt, Homo sapiens
  misc_RNA (1)...(19): siRNA sense strand
guggaacgcugguuaaauu

SEQ ID NO: 1362003 - RNA, 19 nt, Homo sapiens
  misc_RNA (1)...(19): siRNA sense strand
ccaugaagcugcuggcaua

SEQ ID NO: 1362004 - RNA, 19 nt, Homo sapiens
  misc_RNA (1)...(19): siRNA sense strand
gaacauagacagaguugug

SEQ ID NO: 1362005 - RNA, 19 nt, Homo sapiens
  misc_RNA (1)...(19): siRNA sense strand
caacaacauuggcuccauu

SEQ ID NO: 1362006 - RNA, 19 nt, Homo sapiens
  misc_RNA (1)...(19): siRNA sense strand
gaccauguguggacgcaaa

SEQ ID NO: 1362007 - RNA, 19 nt, Homo sapiens
  misc_RNA (1)...(19): siRNA sense strand
gcaacaugaugaguaaaga

SEQ ID NO: 1362008 - RNA, 19 nt, Homo sapiens
  misc_RNA (1)...(19): siRNA sense strand
gggcucaggugucagcauu

SEQ ID NO: 1362009 - RNA, 19 nt, Homo sapiens
  misc_RNA (1)...(19): siRNA sense strand
uaauacugcuuaugggaaa

SEQ ID NO: 1362010 - RNA, 19 nt, Homo sapiens
  misc_RNA (1)...(19): siRNA sense strand
gaacgcugguuaaauuggu

SEQ ID NO: 1362011 - RNA, 19 nt, Homo sapiens
  misc_RNA (1)...(19): siRNA sense strand
agacagaguuguguuuguu

SEQ ID NO: 1362012 - RNA, 19 nt, Homo sapiens
  misc_RNA (1)...(19): siRNA sense strand
ugaagagcauccggaagua

SEQ ID NO: 1362013 - RNA, 19 nt, Homo sapiens
  misc_RNA (1)...(19): siRNA sense strand
gcaaagggaaccugcacuu

SEQ ID NO: 1362014 - RNA, 19 nt, Homo sapiens
  misc_RNA (1)...(19): siRNA sense strand
uacccuauguugcugguua

SEQ ID NO: 1362015 - RNA, 19 nt, Homo sapiens
  misc_RNA (1)...(19): siRNA sense strand
gaacuucucuagccuucac

SEQ ID NO: 1362016 - RNA, 19 nt, Homo sapiens
  misc_RNA (1)...(19): siRNA sense strand
caaaaugacugaugacaag

SEQ ID NO: 1362017 - RNA, 19 nt, Homo sapiens
  misc_RNA (1)...(19): siRNA sense strand
ugacuucuaauacugcuua

SEQ ID NO: 1362018 - RNA, 19 nt, Homo sapiens
  misc_RNA (1)...(19): siRNA sense strand
gagauuccaucagcaagga

SEQ ID NO: 1362019 - RNA, 19 nt, Homo sapiens
  misc_RNA (1)...(19): siRNA sense strand
ucccacaaauccugaauug

SEQ ID NO: 1362020 - RNA, 19 nt, Homo sapiens
  misc_RNA (1)...(19): siRNA sense strand
ggaugugcgcguugaauga

SEQ ID NO: 1362021 - RNA, 19 nt, Homo sapiens
  misc_RNA (1)...(19): siRNA sense strand
gccagaauguuacuauuuu

SEQ ID NO: 1362022 - RNA, 19 nt, Homo sapiens
  misc_RNA (1)...(19): siRNA sense strand
caacaugaugaguaaagaa

SEQ ID NO: 1362023 - RNA, 19 nt, Homo sapiens
  misc_RNA (1)...(19): siRNA sense strand
gaacaugaggguuauuuug

SEQ ID NO: 1362024 - RNA, 19 nt, Homo sapiens
  misc_RNA (1)...(19): siRNA sense strand
gagaacauagacagaguug

SEQ ID NO: 1362025 - RNA, 19 nt, Homo sapiens
  misc_RNA (1)...(19): siRNA sense strand
gcacagguucauucagaug

SEQ ID NO: 1362026 - RNA, 19 nt, Homo sapiens
  misc_RNA (1)...(19): siRNA sense strand
gcucggaugugcgcguuga

SEQ ID NO: 1362027 - RNA, 19 nt, Homo sapiens
  misc_RNA (1)...(19): siRNA sense strand
gaagagcauccggaaguau

SEQ ID NO: 1362028 - RNA, 19 nt, Homo sapiens
  misc_RNA (1)...(19): siRNA sense strand
uggaugaacuggacugucu

SEQ ID NO: 1362029 - RNA, 19 nt, Homo sapiens
  misc_RNA (1)...(19): siRNA sense strand
aauccugaauugugucaaa

SEQ ID NO: 1362030 - RNA, 19 nt, Homo sapiens
  misc_RNA (1)...(19): siRNA sense strand
gaaugagaacauagacaga

SEQ ID NO: 1362031 - RNA, 19 nt, Homo sapiens
  misc_RNA (1)...(19): siRNA sense strand
aagccguacugccuugaua

SEQ ID NO: 1362032 - RNA, 19 nt, Homo sapiens
  misc_RNA (1)...(19): siRNA sense strand
ugaacuggacugucugauu

SEQ ID NO: 1362033 - RNA, 19 nt, Homo sapiens
  misc_RNA (1)...(19): siRNA sense strand
gaguuguguuuguuggaaa

SEQ ID NO: 1362034 - RNA, 19 nt, Homo sapiens
  misc_RNA (1)...(19): siRNA sense strand
aaagggaaccugcacuuca

SEQ ID NO: 1362035 - RNA, 19 nt, Homo sapiens
  misc_RNA (1)...(19): siRNA sense strand
cauagacagaguuguguuu

SEQ ID NO: 1362036 - RNA, 19 nt, Homo sapiens
  misc_RNA (1)...(19): siRNA sense strand
caacggcaagccagaaugu

SEQ ID NO: 1362037 - RNA, 19 nt, Homo sapiens
  misc_RNA (1)...(19): siRNA sense strand
gcuaugcacagguucauuc

SEQ ID NO: 1362038 - RNA, 19 nt, Homo sapiens
  misc_RNA (1)...(19): siRNA sense strand
cgaagaggagcaagaggaa

SEQ ID NO: 1362039 - RNA, 19 nt, Homo sapiens
  misc_RNA (1)...(19): siRNA sense strand
caagccagaauguuacuau

SEQ ID NO: 1362040 - RNA, 19 nt, Homo sapiens
  misc_RNA (1)...(19): siRNA sense strand
augcacagguucauucaga

SEQ ID NO: 1362041 - RNA, 19 nt, Homo sapiens
  misc_RNA (1)...(19): siRNA sense strand
caccaucaccaacaacauu

SEQ ID NO: 1362042 - RNA, 19 nt, Homo sapiens
  misc_RNA (1)...(19): siRNA sense strand
uggagaaccugaagagcau

SEQ ID NO: 1362043 - RNA, 19 nt, Homo sapiens
  misc_RNA (1)...(19): siRNA sense strand
gaaguggagaaccugaaga

SEQ ID NO: 1362044 - RNA, 19 nt, Homo sapiens
  misc_RNA (1)...(19): siRNA sense strand
ugaagcugcuggcauaugc

SEQ ID NO: 1362045 - RNA, 19 nt, Homo sapiens
  misc_RNA (1)...(19): siRNA sense strand
gcagcugcauaaacuggau

SEQ ID NO: 1362046 - RNA, 19 nt, Homo sapiens
  misc_RNA (1)...(19): siRNA sense strand
gaggacuucagaaugauug

SEQ ID NO: 1362047 - RNA, 19 nt, Homo sapiens
  misc_RNA (1)...(19): siRNA sense strand
uuggcaacaugaugaguaa

SEQ ID NO: 1362048 - RNA, 19 nt, Homo sapiens
  misc_RNA (1)...(19): siRNA sense strand
acuccaaggacaacuauaa

SEQ ID NO: 1362049 - RNA, 19 nt, Homo sapiens
  misc_RNA (1)...(19): siRNA sense strand
acggcaagccagaauguua

SEQ ID NO: 1362050 - RNA, 19 nt, Homo sapiens
  misc_RNA (1)...(19): siRNA sense strand
gaugaacuggacugucuga

SEQ ID NO: 1362051 - RNA, 19 nt, Homo sapiens
  misc_RNA (1)...(19): siRNA sense strand
gcauaaacuggaugaacug

SEQ ID NO: 1362052 - RNA, 19 nt, Homo sapiens
  misc_RNA (1)...(19): siRNA sense strand
aaaugacugaugacaagua

SEQ ID NO: 1362053 - RNA, 19 nt, Homo sapiens
  misc_RNA (1)...(19): siRNA sense strand
uagacagaguuguguuugu

SEQ ID NO: 1362054 - RNA, 19 nt, Homo sapiens
  misc_RNA (1)...(19): siRNA sense strand
gaaaagcgagauuccauca

SEQ ID NO: 1362055 - RNA, 19 nt, Homo sapiens
  misc_RNA (1)...(19): siRNA sense strand
gcucaggugucagcauucu

SEQ ID NO: 1362056 - RNA, 19 nt, Homo sapiens
  misc_RNA (1)...(19): siRNA sense strand
aagccagaauguuacuauu

SEQ ID NO: 1362057 - RNA, 19 nt, Homo sapiens
  misc_RNA (1)...(19): siRNA sense strand
ggaaguggagaaccugaag

SEQ ID NO: 1362058 - RNA, 19 nt, Homo sapiens
  misc_RNA (1)...(19): siRNA sense strand
ugcauaaacuggaugaacu

SEQ ID NO: 1362059 - RNA, 19 nt, Homo sapiens
  misc_RNA (1)...(19): siRNA sense strand
gggcacuguuggaacuguu

SEQ ID NO: 1362060 - RNA, 19 nt, Homo sapiens
  misc_RNA (1)...(19): siRNA sense strand
caacugaaagcucuguuuu

SEQ ID NO: 1362061 - RNA, 19 nt, Homo sapiens
  misc_RNA (1)...(19): siRNA sense strand
guacuccaaggacaacuau

SEQ ID NO: 1362062 - RNA, 19 nt, Homo sapiens
  misc_RNA (1)...(19): siRNA sense strand
aagggaaccugcacuucau

SEQ ID NO: 1362063 - RNA, 19 nt, Homo sapiens
  misc_RNA (1)...(19): siRNA sense strand
caaagggaaccugcacuuc

SEQ ID NO: 1362064 - RNA, 19 nt, Homo sapiens
  misc_RNA (1)...(19): siRNA sense strand
agaguuguguuuguuggaa

SEQ ID NO: 1362065 - RNA, 19 nt, Homo sapiens
  misc_RNA (1)...(19): siRNA sense strand
aagagcauccggaaguauu

SEQ ID NO: 1362066 - RNA, 19 nt, Homo sapiens
  misc_RNA (1)...(19): siRNA sense strand
cgcguugaaugagaacaua

SEQ ID NO: 1362067 - RNA, 19 nt, Homo sapiens
  misc_RNA (1)...(19): siRNA sense strand
agccagaauguuacuauuu

SEQ ID NO: 1362068 - RNA, 19 nt, Homo sapiens
  misc_RNA (1)...(19): siRNA sense strand
gacagaguuguguuuguug

SEQ ID NO: 1362069 - RNA, 19 nt, Homo sapiens
  misc_RNA (1)...(19): siRNA sense strand
aacaugggcucagguguca

SEQ ID NO: 1362070 - RNA, 19 nt, Homo sapiens
  misc_RNA (1)...(19): siRNA sense strand
ucagcauucuagccgugua

SEQ ID NO: 1362071 - RNA, 19 nt, Homo sapiens
  misc_RNA (1)...(19): siRNA sense strand
acaacugaaagcucuguuu

SEQ ID NO: 1362072 - RNA, 19 nt, Homo sapiens
  misc_RNA (1)...(19): siRNA sense strand
ggacaacugaaagcucugu

SEQ ID NO: 1362073 - RNA, 19 nt, Homo sapiens
  misc_RNA (1)...(19): siRNA sense strand
gagcauccggaaguauuug

SEQ ID NO: 1362074 - RNA, 19 nt, Homo sapiens
  misc_RNA (1)...(19): siRNA sense strand
ggaacgcugguuaaauugg

SEQ ID NO: 1362075 - RNA, 19 nt, Homo sapiens
  misc_RNA (1)...(19): siRNA sense strand
cugaagagcauccggaagu

SEQ ID NO: 1362076 - RNA, 19 nt, Homo sapiens
  misc_RNA (1)...(19): siRNA sense strand
caacauuggcuccauugcu

SEQ ID NO: 1362077 - RNA, 19 nt, Homo sapiens
  misc_RNA (1)...(19): siRNA sense strand
gguggaacgcugguuaaau

SEQ ID NO: 1362078 - RNA, 19 nt, Homo sapiens
  misc_RNA (1)...(19): siRNA sense strand
cugguuaaauugguguauu

SEQ ID NO: 1362079 - RNA, 19 nt, Homo sapiens
  misc_RNA (1)...(19): siRNA sense strand
aaugacugaugacaaguag

SEQ ID NO: 1362080 - RNA, 19 nt, Homo sapiens
  misc_RNA (1)...(19): siRNA sense strand
caaggacaacuauaaaaga

SEQ ID NO: 1362081 - RNA, 19 nt, Homo sapiens
  misc_RNA (1)...(19): siRNA sense strand
gcaagccagaauguuacua

SEQ ID NO: 1362082 - RNA, 19 nt, Homo sapiens
  misc_RNA (1)...(19): siRNA sense strand
uggaacaugaggguuauuu

SEQ ID NO: 1362083 - RNA, 19 nt, Homo sapiens
  misc_RNA (1)...(19): siRNA sense strand
ggauauuacagccgaagag

SEQ ID NO: 1362084 - RNA, 19 nt, Homo sapiens
  misc_RNA (1)...(19): siRNA sense strand
ggcaacaugaugaguaaag

SEQ ID NO: 1362085 - RNA, 19 nt, Homo sapiens
  misc_RNA (1)...(19): siRNA sense strand
caaauccugaauuguguca

SEQ ID NO: 1362086 - RNA, 19 nt, Homo sapiens
  misc_RNA (1)...(19): siRNA sense strand
cuucuaauacugcuuaugg

SEQ ID NO: 1362087 - RNA, 19 nt, Homo sapiens
  misc_RNA (1)...(19): siRNA sense strand
ucaggugucagcauucuag

SEQ ID NO: 1362088 - RNA, 19 nt, Homo sapiens
  misc_RNA (1)...(19): siRNA sense strand
ccaaaggacaacugaaagc

SEQ ID NO: 1362089 - RNA, 19 nt, Homo sapiens
  misc_RNA (1)...(19): siRNA sense strand
gaacuggacugucugauuc

SEQ ID NO: 1362090 - RNA, 19 nt, Homo sapiens
  misc_RNA (1)...(19): siRNA sense strand
guggaacgcugguuaaauu

SEQ ID NO: 1362091 - RNA, 19 nt, Homo sapiens
  misc_RNA (1)...(19): siRNA sense strand
ccaugaagcugcuggcaua

SEQ ID NO: 1362092 - RNA, 19 nt, Homo sapiens
  misc_RNA (1)...(19): siRNA sense strand
gaacauagacagaguugug

SEQ ID NO: 1362093 - RNA, 19 nt, Homo sapiens
  misc_RNA (1)...(19): siRNA sense strand
caacaacauuggcuccauu

SEQ ID NO: 1362094 - RNA, 19 nt, Homo sapiens
  misc_RNA (1)...(19): siRNA sense strand
gaccauguguggacgcaaa

SEQ ID NO: 1362095 - RNA, 19 nt, Homo sapiens
  misc_RNA (1)...(19): siRNA sense strand
gcaacaugaugaguaaaga

SEQ ID NO: 1362096 - RNA, 19 nt, Homo sapiens
  misc_RNA (1)...(19): siRNA sense strand
gggcucaggugucagcauu

SEQ ID NO: 1362097 - RNA, 19 nt, Homo sapiens
  misc_RNA (1)...(19): siRNA sense strand
uaauacugcuuaugggaaa

SEQ ID NO: 1362098 - RNA, 19 nt, Homo sapiens
  misc_RNA (1)...(19): siRNA sense strand
gaacgcugguuaaauuggu

SEQ ID NO: 1362099 - RNA, 19 nt, Homo sapiens
  misc_RNA (1)...(19): siRNA sense strand
agacagaguuguguuuguu

SEQ ID NO: 1362100 - RNA, 19 nt, Homo sapiens
  misc_RNA (1)...(19): siRNA sense strand
ugaagagcauccggaagua

SEQ ID NO: 1362101 - RNA, 19 nt, Homo sapiens
  misc_RNA (1)...(19): siRNA sense strand
gcaaagggaaccugcacuu

SEQ ID NO: 1362102 - RNA, 19 nt, Homo sapiens
  misc_RNA (1)...(19): siRNA sense strand
uacccuauguugcugguua

SEQ ID NO: 1362103 - RNA, 19 nt, Homo sapiens
  misc_RNA (1)...(19): siRNA sense strand
gaacuucucuagccuucac

SEQ ID NO: 1362104 - RNA, 19 nt, Homo sapiens
  misc_RNA (1)...(19): siRNA sense strand
caaaaugacugaugacaag

SEQ ID NO: 1362105 - RNA, 19 nt, Homo sapiens
  misc_RNA (1)...(19): siRNA sense strand
ugacuucuaauacugcuua

SEQ ID NO: 1362106 - RNA, 19 nt, Homo sapiens
  misc_RNA (1)...(19): siRNA sense strand
gagauuccaucagcaagga

SEQ ID NO: 1362107 - RNA, 19 nt, Homo sapiens
  misc_RNA (1)...(19): siRNA sense strand
ucccacaaauccugaauug

SEQ ID NO: 1362108 - RNA, 19 nt, Homo sapiens
  misc_RNA (1)...(19): siRNA sense strand
ggaugugcgcguugaauga

SEQ ID NO: 1362109 - RNA, 19 nt, Homo sapiens
  misc_RNA (1)...(19): siRNA sense strand
gccagaauguuacuauuuu

SEQ ID NO: 1362110 - RNA, 19 nt, Homo sapiens
  misc_RNA (1)...(19): siRNA sense strand
caacaugaugaguaaagaa

SEQ ID NO: 1362111 - RNA, 19 nt, Homo sapiens
  misc_RNA (1)...(19): siRNA sense strand
gaacaugaggguuauuuug

SEQ ID NO: 1362112 - RNA, 19 nt, Homo sapiens
  misc_RNA (1)...(19): siRNA sense strand
gagaacauagacagaguug

SEQ ID NO: 1362113 - RNA, 19 nt, Homo sapiens
  misc_RNA (1)...(19): siRNA sense strand
gcacagguucauucagaug

SEQ ID NO: 1362114 - RNA, 19 nt, Homo sapiens
  misc_RNA (1)...(19): siRNA sense strand
gcucggaugugcgcguuga

SEQ ID NO: 1362115 - RNA, 19 nt, Homo sapiens
  misc_RNA (1)...(19): siRNA sense strand
gaagagcauccggaaguau

SEQ ID NO: 1362116 - RNA, 19 nt, Homo sapiens
  misc_RNA (1)...(19): siRNA sense strand
uggaugaacuggacugucu

SEQ ID NO: 1362117 - RNA, 19 nt, Homo sapiens
  misc_RNA (1)...(19): siRNA sense strand
aauccugaauugugucaaa

SEQ ID NO: 1362118 - RNA, 19 nt, Homo sapiens
  misc_RNA (1)...(19): siRNA sense strand
gaaugagaacauagacaga

SEQ ID NO: 1362119 - RNA, 19 nt, Homo sapiens
  misc_RNA (1)...(19): siRNA sense strand
aagccguacugccuugaua

SEQ ID NO: 1362120 - RNA, 19 nt, Homo sapiens
  misc_RNA (1)...(19): siRNA sense strand
ugaacuggacugucugauu

SEQ ID NO: 1362121 - RNA, 19 nt, Homo sapiens
  misc_RNA (1)...(19): siRNA sense strand
gaguuguguuuguuggaaa

SEQ ID NO: 1362122 - RNA, 19 nt, Homo sapiens
  misc_RNA (1)...(19): siRNA sense strand
aaagggaaccugcacuuca

SEQ ID NO: 1362123 - RNA, 19 nt, Homo sapiens
  misc_RNA (1)...(19): siRNA sense strand
cauagacagaguuguguuu

SEQ ID NO: 1362124 - RNA, 19 nt, Homo sapiens
  misc_RNA (1)...(19): siRNA sense strand
caacggcaagccagaaugu

SEQ ID NO: 1362125 - RNA, 19 nt, Homo sapiens
  misc_RNA (1)...(19): siRNA sense strand
gcuaugcacagguucauuc

SEQ ID NO: 1362126 - RNA, 19 nt, Homo sapiens
  misc_RNA (1)...(19): siRNA sense strand
cgaagaggagcaagaggaa

SEQ ID NO: 1362127 - RNA, 19 nt, Homo sapiens
  misc_RNA (1)...(19): siRNA sense strand
caagccagaauguuacuau

SEQ ID NO: 1362128 - RNA, 19 nt, Homo sapiens
  misc_RNA (1)...(19): siRNA sense strand
augcacagguucauucaga

SEQ ID NO: 1362129 - RNA, 19 nt, Homo sapiens
  misc_RNA (1)...(19): siRNA sense strand
caccaucaccaacaacauu

SEQ ID NO: 1362130 - RNA, 19 nt, Homo sapiens
  misc_RNA (1)...(19): siRNA sense strand
uggagaaccugaagagcau

SEQ ID NO: 1362131 - RNA, 19 nt, Homo sapiens
  misc_RNA (1)...(19): siRNA sense strand
gaaguggagaaccugaaga

SEQ ID NO: 1362132 - RNA, 19 nt, Homo sapiens
  misc_RNA (1)...(19): siRNA sense strand
ugaagcugcuggcauaugc

SEQ ID NO: 1362133 - RNA, 19 nt, Homo sapiens
  misc_RNA (1)...(19): siRNA sense strand
gcagcugcauaaacuggau

SEQ ID NO: 1362134 - RNA, 19 nt, Homo sapiens
  misc_RNA (1)...(19): siRNA sense strand
gaggacuucagaaugauug

SEQ ID NO: 1362135 - RNA, 19 nt, Homo sapiens
  misc_RNA (1)...(19): siRNA sense strand
uuggcaacaugaugaguaa

SEQ ID NO: 1362136 - RNA, 19 nt, Homo sapiens
  misc_RNA (1)...(19): siRNA sense strand
acuccaaggacaacuauaa

SEQ ID NO: 1362137 - RNA, 19 nt, Homo sapiens
  misc_RNA (1)...(19): siRNA sense strand
acggcaagccagaauguua

SEQ ID NO: 1362138 - RNA, 19 nt, Homo sapiens
  misc_RNA (1)...(19): siRNA sense strand
gaugaacuggacugucuga

SEQ ID NO: 1362139 - RNA, 19 nt, Homo sapiens
  misc_RNA (1)...(19): siRNA sense strand
gcauaaacuggaugaacug

SEQ ID NO: 1362140 - RNA, 19 nt, Homo sapiens
  misc_RNA (1)...(19): siRNA sense strand
aaaugacugaugacaagua

SEQ ID NO: 1362141 - RNA, 19 nt, Homo sapiens
  misc_RNA (1)...(19): siRNA sense strand
uagacagaguuguguuugu

SEQ ID NO: 1362142 - RNA, 19 nt, Homo sapiens
  misc_RNA (1)...(19): siRNA sense strand
gaaaagcgagauuccauca

SEQ ID NO: 1362143 - RNA, 19 nt, Homo sapiens
  misc_RNA (1)...(19): siRNA sense strand
gcucaggugucagcauucu

SEQ ID NO: 1362144 - RNA, 19 nt, Homo sapiens
  misc_RNA (1)...(19): siRNA sense strand
aagccagaauguuacuauu

SEQ ID NO: 1362145 - RNA, 19 nt, Homo sapiens
  misc_RNA (1)...(19): siRNA sense strand
ggaaguggagaaccugaag

SEQ ID NO: 1362146 - RNA, 19 nt, Homo sapiens
  misc_RNA (1)...(19): siRNA sense strand
ugcauaaacuggaugaacu

SEQ ID NO: 1362147 - RNA, 19 nt, Homo sapiens
  misc_RNA (1)...(19): siRNA sense strand
gggcacuguuggaacuguu

SEQ ID NO: 1362148 - RNA, 19 nt, Homo sapiens
  misc_RNA (1)...(19): siRNA sense strand
caacugaaagcucuguuuu

SEQ ID NO: 1362149 - RNA, 19 nt, Homo sapiens
  misc_RNA (1)...(19): siRNA sense strand
guacuccaaggacaacuau

SEQ ID NO: 1362150 - RNA, 19 nt, Homo sapiens
  misc_RNA (1)...(19): siRNA sense strand
aagggaaccugcacuucau

SEQ ID NO: 1362151 - RNA, 19 nt, Homo sapiens
  misc_RNA (1)...(19): siRNA sense strand
caaagggaaccugcacuuc

SEQ ID NO: 1362152 - RNA, 19 nt, Homo sapiens
  misc_RNA (1)...(19): siRNA sense strand
agaguuguguuuguuggaa

SEQ ID NO: 1362153 - RNA, 19 nt, Homo sapiens
  misc_RNA (1)...(19): siRNA sense strand
aagagcauccggaaguauu

SEQ ID NO: 1362154 - RNA, 19 nt, Homo sapiens
  misc_RNA (1)...(19): siRNA sense strand
cgcguugaaugagaacaua

SEQ ID NO: 1362155 - RNA, 19 nt, Homo sapiens
  misc_RNA (1)...(19): siRNA sense strand
agccagaauguuacuauuu

SEQ ID NO: 1362156 - RNA, 19 nt, Homo sapiens
  misc_RNA (1)...(19): siRNA sense strand
gacagaguuguguuuguug

SEQ ID NO: 1362157 - RNA, 19 nt, Homo sapiens
  misc_RNA (1)...(19): siRNA sense strand
aacaugggcucagguguca

SEQ ID NO: 1362158 - RNA, 19 nt, Homo sapiens
  misc_RNA (1)...(19): siRNA sense strand
ucagcauucuagccgugua

SEQ ID NO: 1362159 - RNA, 19 nt, Homo sapiens
  misc_RNA (1)...(19): siRNA sense strand
acaacugaaagcucuguuu

SEQ ID NO: 1362160 - RNA, 19 nt, Homo sapiens
  misc_RNA (1)...(19): siRNA sense strand
ggacaacugaaagcucugu

SEQ ID NO: 1362161 - RNA, 19 nt, Homo sapiens
  misc_RNA (1)...(19): siRNA sense strand
gagcauccggaaguauuug

SEQ ID NO: 1362162 - RNA, 19 nt, Homo sapiens
  misc_RNA (1)...(19): siRNA sense strand
ggaacgcugguuaaauugg

SEQ ID NO: 1362163 - RNA, 19 nt, Homo sapiens
  misc_RNA (1)...(19): siRNA sense strand
cugaagagcauccggaagu

SEQ ID NO: 1362164 - RNA, 19 nt, Homo sapiens
  misc_RNA (1)...(19): siRNA sense strand
caacauuggcuccauugcu

SEQ ID NO: 1362165 - RNA, 19 nt, Homo sapiens
  misc_RNA (1)...(19): siRNA sense strand
gguggaacgcugguuaaau

SEQ ID NO: 1362166 - RNA, 19 nt, Homo sapiens
  misc_RNA (1)...(19): siRNA sense strand
cugguuaaauugguguauu

SEQ ID NO: 1362167 - RNA, 19 nt, Homo sapiens
  misc_RNA (1)...(19): siRNA sense strand
aaugacugaugacaaguag

SEQ ID NO: 1362168 - RNA, 19 nt, Homo sapiens
  misc_RNA (1)...(19): siRNA sense strand
caaggacaacuauaaaaga

SEQ ID NO: 1362169 - RNA, 19 nt, Homo sapiens
  misc_RNA (1)...(19): siRNA sense strand
gcaagccagaauguuacua

SEQ ID NO: 1362170 - RNA, 19 nt, Homo sapiens
  misc_RNA (1)...(19): siRNA sense strand
uggaacaugaggguuauuu

SEQ ID NO: 1362171 - RNA, 19 nt, Homo sapiens
  misc_RNA (1)...(19): siRNA sense strand
ggauauuacagccgaagag

SEQ ID NO: 1362172 - RNA, 19 nt, Homo sapiens
  misc_RNA (1)...(19): siRNA sense strand
ggcaacaugaugaguaaag

SEQ ID NO: 1362173 - RNA, 19 nt, Homo sapiens
  misc_RNA (1)...(19): siRNA sense strand
caaauccugaauuguguca

SEQ ID NO: 1362174 - RNA, 19 nt, Homo sapiens
  misc_RNA (1)...(19): siRNA sense strand
cuucuaauacugcuuaugg

SEQ ID NO: 1362175 - RNA, 19 nt, Homo sapiens
  misc_RNA (1)...(19): siRNA sense strand
ucaggugucagcauucuag

SEQ ID NO: 1362176 - RNA, 19 nt, Homo sapiens
  misc_RNA (1)...(19): siRNA sense strand
ccaaaggacaacugaaagc

SEQ ID NO: 1362177 - RNA, 19 nt, Homo sapiens
  misc_RNA (1)...(19): siRNA sense strand
gaacuggacugucugauuc

SEQ ID NO: 1362178 - RNA, 19 nt, Homo sapiens
  misc_RNA (1)...(19): siRNA sense strand
guggaacgcugguuaaauu

SEQ ID NO: 1362179 - RNA, 19 nt, Homo sapiens
  misc_RNA (1)...(19): siRNA sense strand
ccaugaagcugcuggcaua

SEQ ID NO: 1362180 - RNA, 19 nt, Homo sapiens
  misc_RNA (1)...(19): siRNA sense strand
gaacauagacagaguugug

SEQ ID NO: 1362181 - RNA, 19 nt, Homo sapiens
  misc_RNA (1)...(19): siRNA sense strand
caacaacauuggcuccauu

SEQ ID NO: 1362182 - RNA, 19 nt, Homo sapiens
  misc_RNA (1)...(19): siRNA sense strand
gaccauguguggacgcaaa

SEQ ID NO: 1362183 - RNA, 19 nt, Homo sapiens
  misc_RNA (1)...(19): siRNA sense strand
gcaacaugaugaguaaaga

SEQ ID NO: 1362184 - RNA, 19 nt, Homo sapiens
  misc_RNA (1)...(19): siRNA sense strand
gggcucaggugucagcauu

SEQ ID NO: 1362185 - RNA, 19 nt, Homo sapiens
  misc_RNA (1)...(19): siRNA sense strand
uaauacugcuuaugggaaa

SEQ ID NO: 1362186 - RNA, 19 nt, Homo sapiens
  misc_RNA (1)...(19): siRNA sense strand
gaacgcugguuaaauuggu

SEQ ID NO: 1362187 - RNA, 19 nt, Homo sapiens
  misc_RNA (1)...(19): siRNA sense strand
agacagaguuguguuuguu

SEQ ID NO: 1362188 - RNA, 19 nt, Homo sapiens
  misc_RNA (1)...(19): siRNA sense strand
ugaagagcauccggaagua

SEQ ID NO: 1362189 - RNA, 19 nt, Homo sapiens
  misc_RNA (1)...(19): siRNA sense strand
gcaaagggaaccugcacuu

SEQ ID NO: 1362190 - RNA, 19 nt, Homo sapiens
  misc_RNA (1)...(19): siRNA sense strand
uacccuauguugcugguua

SEQ ID NO: 1362191 - RNA, 19 nt, Homo sapiens
  misc_RNA (1)...(19): siRNA sense strand
gaacuucucuagccuucac

SEQ ID NO: 1362192 - RNA, 19 nt, Homo sapiens
  misc_RNA (1)...(19): siRNA sense strand
caaaaugacugaugacaag

SEQ ID NO: 1362193 - RNA, 19 nt, Homo sapiens
  misc_RNA (1)...(19): siRNA sense strand
ugacuucuaauacugcuua

SEQ ID NO: 1362194 - RNA, 19 nt, Homo sapiens
  misc_RNA (1)...(19): siRNA sense strand
gagauuccaucagcaagga

SEQ ID NO: 1362195 - RNA, 19 nt, Homo sapiens
  misc_RNA (1)...(19): siRNA sense strand
ucccacaaauccugaauug

SEQ ID NO: 1362196 - RNA, 19 nt, Homo sapiens
  misc_RNA (1)...(19): siRNA sense strand
ggaugugcgcguugaauga

SEQ ID NO: 1362197 - RNA, 19 nt, Homo sapiens
  misc_RNA (1)...(19): siRNA sense strand
gccagaauguuacuauuuu

SEQ ID NO: 1362198 - RNA, 19 nt, Homo sapiens
  misc_RNA (1)...(19): siRNA sense strand
caacaugaugaguaaagaa

SEQ ID NO: 1362199 - RNA, 19 nt, Homo sapiens
  misc_RNA (1)...(19): siRNA sense strand
gaacaugaggguuauuuug

SEQ ID NO: 1362200 - RNA, 19 nt, Homo sapiens
  misc_RNA (1)...(19): siRNA sense strand
gagaacauagacagaguug

SEQ ID NO: 1362201 - RNA, 19 nt, Homo sapiens
  misc_RNA (1)...(19): siRNA sense strand
gcacagguucauucagaug

SEQ ID NO: 1362202 - RNA, 19 nt, Homo sapiens
  misc_RNA (1)...(19): siRNA sense strand
gcucggaugugcgcguuga

SEQ ID NO: 1362203 - RNA, 19 nt, Homo sapiens
  misc_RNA (1)...(19): siRNA sense strand
gaagagcauccggaaguau

SEQ ID NO: 1362204 - RNA, 19 nt, Homo sapiens
  misc_RNA (1)...(19): siRNA sense strand
uggaugaacuggacugucu

SEQ ID NO: 1362205 - RNA, 19 nt, Homo sapiens
  misc_RNA (1)...(19): siRNA sense strand
aauccugaauugugucaaa

SEQ ID NO: 1362206 - RNA, 19 nt, Homo sapiens
  misc_RNA (1)...(19): siRNA sense strand
gaaugagaacauagacaga

SEQ ID NO: 1362207 - RNA, 19 nt, Homo sapiens
  misc_RNA (1)...(19): siRNA sense strand
aagccguacugccuugaua

SEQ ID NO: 1362208 - RNA, 19 nt, Homo sapiens
  misc_RNA (1)...(19): siRNA sense strand
ugaacuggacugucugauu

SEQ ID NO: 1362209 - RNA, 19 nt, Homo sapiens
  misc_RNA (1)...(19): siRNA sense strand
gaguuguguuuguuggaaa

SEQ ID NO: 1362210 - RNA, 19 nt, Homo sapiens
  misc_RNA (1)...(19): siRNA sense strand
aaagggaaccugcacuuca

SEQ ID NO: 1362211 - RNA, 19 nt, Homo sapiens
  misc_RNA (1)...(19): siRNA sense strand
cauagacagaguuguguuu

SEQ ID NO: 1362212 - RNA, 19 nt, Homo sapiens
  misc_RNA (1)...(19): siRNA sense strand
caacggcaagccagaaugu

SEQ ID NO: 1362213 - RNA, 19 nt, Homo sapiens
  misc_RNA (1)...(19): siRNA sense strand
gcuaugcacagguucauuc

SEQ ID NO: 1362214 - RNA, 19 nt, Homo sapiens
  misc_RNA (1)...(19): siRNA sense strand
cgaagaggagcaagaggaa

SEQ ID NO: 1362215 - RNA, 19 nt, Homo sapiens
  misc_RNA (1)...(19): siRNA sense strand
caagccagaauguuacuau

SEQ ID NO: 1362216 - RNA, 19 nt, Homo sapiens
  misc_RNA (1)...(19): siRNA sense strand
augcacagguucauucaga

SEQ ID NO: 1362217 - RNA, 19 nt, Homo sapiens
  misc_RNA (1)...(19): siRNA sense strand
caccaucaccaacaacauu

SEQ ID NO: 1362218 - RNA, 19 nt, Homo sapiens
  misc_RNA (1)...(19): siRNA sense strand
uggagaaccugaagagcau

SEQ ID NO: 1362219 - RNA, 19 nt, Homo sapiens
  misc_RNA (1)...(19): siRNA sense strand
gaaguggagaaccugaaga

SEQ ID NO: 1362220 - RNA, 19 nt, Homo sapiens
  misc_RNA (1)...(19): siRNA sense strand
ugaagcugcuggcauaugc

SEQ ID NO: 1362221 - RNA, 19 nt, Homo sapiens
  misc_RNA (1)...(19): siRNA sense strand
gcagcugcauaaacuggau

SEQ ID NO: 1362222 - RNA, 19 nt, Homo sapiens
  misc_RNA (1)...(19): siRNA sense strand
gaggacuucagaaugauug

SEQ ID NO: 1362223 - RNA, 19 nt, Homo sapiens
  misc_RNA (1)...(19): siRNA sense strand
uuggcaacaugaugaguaa

SEQ ID NO: 1362224 - RNA, 19 nt, Homo sapiens
  misc_RNA (1)...(19): siRNA sense strand
acuccaaggacaacuauaa

SEQ ID NO: 1362225 - RNA, 19 nt, Homo sapiens
  misc_RNA (1)...(19): siRNA sense strand
acggcaagccagaauguua

SEQ ID NO: 1362226 - RNA, 19 nt, Homo sapiens
  misc_RNA (1)...(19): siRNA sense strand
gaugaacuggacugucuga

SEQ ID NO: 1362227 - RNA, 19 nt, Homo sapiens
  misc_RNA (1)...(19): siRNA sense strand
gcauaaacuggaugaacug

SEQ ID NO: 1362228 - RNA, 19 nt, Homo sapiens
  misc_RNA (1)...(19): siRNA sense strand
aaaugacugaugacaagua

SEQ ID NO: 1362229 - RNA, 19 nt, Homo sapiens
  misc_RNA (1)...(19): siRNA sense strand
uagacagaguuguguuugu

SEQ ID NO: 1362230 - RNA, 19 nt, Homo sapiens
  misc_RNA (1)...(19): siRNA sense strand
gaaaagcgagauuccauca

SEQ ID NO: 1362231 - RNA, 19 nt, Homo sapiens
  misc_RNA (1)...(19): siRNA sense strand
gcucaggugucagcauucu

SEQ ID NO: 1362232 - RNA, 19 nt, Homo sapiens
  misc_RNA (1)...(19): siRNA sense strand
aagccagaauguuacuauu

SEQ ID NO: 1362233 - RNA, 19 nt, Homo sapiens
  misc_RNA (1)...(19): siRNA sense strand
ggaaguggagaaccugaag

SEQ ID NO: 1362234 - RNA, 19 nt, Homo sapiens
  misc_RNA (1)...(19): siRNA sense strand
ugcauaaacuggaugaacu

SEQ ID NO: 1362235 - RNA, 19 nt, Homo sapiens
  misc_RNA (1)...(19): siRNA sense strand
gggcacuguuggaacuguu

SEQ ID NO: 1362236 - RNA, 19 nt, Homo sapiens
  misc_RNA (1)...(19): siRNA sense strand
caacugaaagcucuguuuu

SEQ ID NO: 1362237 - RNA, 19 nt, Homo sapiens
  misc_RNA (1)...(19): siRNA sense strand
guacuccaaggacaacuau

SEQ ID NO: 1362238 - RNA, 19 nt, Homo sapiens
  misc_RNA (1)...(19): siRNA sense strand
aagggaaccugcacuucau

SEQ ID NO: 1362239 - RNA, 19 nt, Homo sapiens
  misc_RNA (1)...(19): siRNA sense strand
caaagggaaccugcacuuc

SEQ ID NO: 1362240 - RNA, 19 nt, Homo sapiens
  misc_RNA (1)...(19): siRNA sense strand
agaguuguguuuguuggaa

SEQ ID NO: 1362241 - RNA, 19 nt, Homo sapiens
  misc_RNA (1)...(19): siRNA sense strand
aagagcauccggaaguauu

SEQ ID NO: 1362242 - RNA, 19 nt, Homo sapiens
  misc_RNA (1)...(19): siRNA sense strand
cgcguugaaugagaacaua

SEQ ID NO: 1362243 - RNA, 19 nt, Homo sapiens
  misc_RNA (1)...(19): siRNA sense strand
agccagaauguuacuauuu

SEQ ID NO: 1362244 - RNA, 19 nt, Homo sapiens
  misc_RNA (1)...(19): siRNA sense strand
gacagaguuguguuuguug

SEQ ID NO: 1362245 - RNA, 19 nt, Homo sapiens
  misc_RNA (1)...(19): siRNA sense strand
aacaugggcucagguguca

SEQ ID NO: 1362246 - RNA, 19 nt, Homo sapiens
  misc_RNA (1)...(19): siRNA sense strand
ucagcauucuagccgugua

SEQ ID NO: 1362247 - RNA, 19 nt, Homo sapiens
  misc_RNA (1)...(19): siRNA sense strand
acaacugaaagcucuguuu

SEQ ID NO: 1362248 - RNA, 19 nt, Homo sapiens
  misc_RNA (1)...(19): siRNA sense strand
ggacaacugaaagcucugu

SEQ ID NO: 1362249 - RNA, 19 nt, Homo sapiens
  misc_RNA (1)...(19): siRNA sense strand
gagcauccggaaguauuug

SEQ ID NO: 1362250 - RNA, 19 nt, Homo sapiens
  misc_RNA (1)...(19): siRNA sense strand
ggaacgcugguuaaauugg

SEQ ID NO: 1362251 - RNA, 19 nt, Homo sapiens
  misc_RNA (1)...(19): siRNA sense strand
cugaagagcauccggaagu

SEQ ID NO: 1362252 - RNA, 19 nt, Homo sapiens
  misc_RNA (1)...(19): siRNA sense strand
caacauuggcuccauugcu

SEQ ID NO: 1362253 - RNA, 19 nt, Homo sapiens
  misc_RNA (1)...(19): siRNA sense strand
gguggaacgcugguuaaau

SEQ ID NO: 1362254 - RNA, 19 nt, Homo sapiens
  misc_RNA (1)...(19): siRNA sense strand
cugguuaaauugguguauu

SEQ ID NO: 1362255 - RNA, 19 nt, Homo sapiens
  misc_RNA (1)...(19): siRNA sense strand
aaugacugaugacaaguag

SEQ ID NO: 1362256 - RNA, 19 nt, Homo sapiens
  misc_RNA (1)...(19): siRNA sense strand
caaggacaacuauaaaaga

SEQ ID NO: 1362257 - RNA, 19 nt, Homo sapiens
  misc_RNA (1)...(19): siRNA sense strand
gcaagccagaauguuacua

SEQ ID NO: 1362258 - RNA, 19 nt, Homo sapiens
  misc_RNA (1)...(19): siRNA sense strand
uggaacaugaggguuauuu

SEQ ID NO: 1362259 - RNA, 19 nt, Homo sapiens
  misc_RNA (1)...(19): siRNA sense strand
ggauauuacagccgaagag

SEQ ID NO: 1362260 - RNA, 19 nt, Homo sapiens
  misc_RNA (1)...(19): siRNA sense strand
ggcaacaugaugaguaaag

SEQ ID NO: 1362261 - RNA, 19 nt, Homo sapiens
  misc_RNA (1)...(19): siRNA sense strand
caaauccugaauuguguca

SEQ ID NO: 1362262 - RNA, 19 nt, Homo sapiens
  misc_RNA (1)...(19): siRNA sense strand
cuucuaauacugcuuaugg

SEQ ID NO: 1362263 - RNA, 19 nt, Homo sapiens
  misc_RNA (1)...(19): siRNA sense strand
ucaggugucagcauucuag

SEQ ID NO: 1362264 - RNA, 19 nt, Homo sapiens
  misc_RNA (1)...(19): siRNA sense strand
ccaaaggacaacugaaagc

SEQ ID NO: 1362265 - RNA, 19 nt, Homo sapiens
  misc_RNA (1)...(19): siRNA sense strand
ggucagagccucagaauug

SEQ ID NO: 1362266 - RNA, 19 nt, Homo sapiens
  misc_RNA (1)...(19): siRNA sense strand
gacaugagcuuugcugaaa

SEQ ID NO: 1362267 - RNA, 19 nt, Homo sapiens
  misc_RNA (1)...(19): siRNA sense strand
gauaaacgcccacaacaau

SEQ ID NO: 1362268 - RNA, 19 nt, Homo sapiens
  misc_RNA (1)...(19): siRNA sense strand
uaaaguaaaccaugcagua

SEQ ID NO: 1362269 - RNA, 19 nt, Homo sapiens
  misc_RNA (1)...(19): siRNA sense strand
caugagcuuugcugaaaua

SEQ ID NO: 1362270 - RNA, 19 nt, Homo sapiens
  misc_RNA (1)...(19): siRNA sense strand
gagcuuugcugaaauaaaa

SEQ ID NO: 1362271 - RNA, 19 nt, Homo sapiens
  misc_RNA (1)...(19): siRNA sense strand
cuacaacccugugagcuuu

SEQ ID NO: 1362272 - RNA, 19 nt, Homo sapiens
  misc_RNA (1)...(19): siRNA sense strand
aaauggcacugaaccaauu

SEQ ID NO: 1362273 - RNA, 19 nt, Homo sapiens
  misc_RNA (1)...(19): siRNA sense strand
gaagauaaacgcccacaac

SEQ ID NO: 1362274 - RNA, 19 nt, Homo sapiens
  misc_RNA (1)...(19): siRNA sense strand
gcaacuggaggaagauaaa

SEQ ID NO: 1362275 - RNA, 19 nt, Homo sapiens
  misc_RNA (1)...(19): siRNA sense strand
ccauaaaacuccagauaaa

SEQ ID NO: 1362276 - RNA, 19 nt, Homo sapiens
  misc_RNA (1)...(19): siRNA sense strand
gaguauauccuguacaaca

SEQ ID NO: 1362277 - RNA, 19 nt, Homo sapiens
  misc_RNA (1)...(19): siRNA sense strand
gaacggguacuuccucauc

SEQ ID NO: 1362278 - RNA, 19 nt, Homo sapiens
  misc_RNA (1)...(19): siRNA sense strand
uagccaacaucacaaucua

SEQ ID NO: 1362279 - RNA, 19 nt, Homo sapiens
  misc_RNA (1)...(19): siRNA sense strand
cacaaucuaugacgaggaa

SEQ ID NO: 1362280 - RNA, 19 nt, Homo sapiens
  misc_RNA (1)...(19): siRNA sense strand
ccggaaagaugcuguccuu

SEQ ID NO: 1362281 - RNA, 19 nt, Homo sapiens
  misc_RNA (1)...(19): siRNA sense strand
ucgaguauauccuguacaa

SEQ ID NO: 1362282 - RNA, 19 nt, Homo sapiens
  misc_RNA (1)...(19): siRNA sense strand
gaaccaauuuucagacaug

SEQ ID NO: 1362283 - RNA, 19 nt, Homo sapiens
  misc_RNA (1)...(19): siRNA sense strand
gaauugcucagccaccaaa

SEQ ID NO: 1362284 - RNA, 19 nt, Homo sapiens
  misc_RNA (1)...(19): siRNA sense strand
ggaugguuauugcaaguuc

SEQ ID NO: 1362285 - RNA, 19 nt, Homo sapiens
  misc_RNA (1)...(19): siRNA sense strand
acucaggacuucaugaugu

SEQ ID NO: 1362286 - RNA, 19 nt, Homo sapiens
  misc_RNA (1)...(19): siRNA sense strand
gccaggcuuucgaguauau

SEQ ID NO: 1362287 - RNA, 19 nt, Homo sapiens
  misc_RNA (1)...(19): siRNA sense strand
ccugugagcuuugccuuug

SEQ ID NO: 1362288 - RNA, 19 nt, Homo sapiens
  misc_RNA (1)...(19): siRNA sense strand
gcgcccaggacuucaauaa

SEQ ID NO: 1362289 - RNA, 19 nt, Homo sapiens
  misc_RNA (1)...(19): siRNA sense strand
agucauggaugucuaagca

SEQ ID NO: 1362290 - RNA, 19 nt, Homo sapiens
  misc_RNA (1)...(19): siRNA sense strand
gcuguuggguauggagaaa

SEQ ID NO: 1362291 - RNA, 19 nt, Homo sapiens
  misc_RNA (1)...(19): siRNA sense strand
ggcaguugcuggacuuucu

SEQ ID NO: 1362292 - RNA, 19 nt, Homo sapiens
  misc_RNA (1)...(19): siRNA sense strand
ucaagucauggaugucuaa

SEQ ID NO: 1362293 - RNA, 19 nt, Homo sapiens
  misc_RNA (1)...(19): siRNA sense strand
uccaguacuuccugccaua

SEQ ID NO: 1362294 - RNA, 19 nt, Homo sapiens
  misc_RNA (1)...(19): siRNA sense strand
cuaagcaccguaagaccua

SEQ ID NO: 1362295 - RNA, 19 nt, Homo sapiens
  misc_RNA (1)...(19): siRNA sense strand
aguauauccuguacaacaa

SEQ ID NO: 1362296 - RNA, 19 nt, Homo sapiens
  misc_RNA (1)...(19): siRNA sense strand
ggaugucuaagcaccguaa

SEQ ID NO: 1362297 - RNA, 19 nt, Homo sapiens
  misc_RNA (1)...(19): siRNA sense strand
aguacuggcuguuggguau

SEQ ID NO: 1362298 - RNA, 19 nt, Homo sapiens
  misc_RNA (1)...(19): siRNA sense strand
cucaggacuucaugaugua

SEQ ID NO: 1362299 - RNA, 19 nt, Homo sapiens
  misc_RNA (1)...(19): siRNA sense strand
gccaacaucacaaucuaug

SEQ ID NO: 1362300 - RNA, 19 nt, Homo sapiens
  misc_RNA (1)...(19): siRNA sense strand
agacaugagcuuugcugaa

SEQ ID NO: 1362301 - RNA, 19 nt, Homo sapiens
  misc_RNA (1)...(19): siRNA sense strand
caccguaagaccuacagua

SEQ ID NO: 1362302 - RNA, 19 nt, Homo sapiens
  misc_RNA (1)...(19): siRNA sense strand
uaaacgcccacaacaaugg

SEQ ID NO: 1362303 - RNA, 19 nt, Homo sapiens
  misc_RNA (1)...(19): siRNA sense strand
agauaaacgcccacaacaa

SEQ ID NO: 1362304 - RNA, 19 nt, Homo sapiens
  misc_RNA (1)...(19): siRNA sense strand
caacaucacaaucuaugac

SEQ ID NO: 1362305 - RNA, 19 nt, Homo sapiens
  misc_RNA (1)...(19): siRNA sense strand
caucggcuuugucaaggau

SEQ ID NO: 1362306 - RNA, 19 nt, Homo sapiens
  misc_RNA (1)...(19): siRNA sense strand
gcucagccaccaaaaguaa

SEQ ID NO: 1362307 - RNA, 19 nt, Homo sapiens
  misc_RNA (1)...(19): siRNA sense strand
aaaaugggaucccuuacug

SEQ ID NO: 1362308 - RNA, 19 nt, Homo sapiens
  misc_RNA (1)...(19): siRNA sense strand
ggaagauaaacgcccacaa

SEQ ID NO: 1362309 - RNA, 19 nt, Homo sapiens
  misc_RNA (1)...(19): siRNA sense strand
gggaaugaacggguacuuc

SEQ ID NO: 1362310 - RNA, 19 nt, Homo sapiens
  misc_RNA (1)...(19): siRNA sense strand
ccaacaucacaaucuauga

SEQ ID NO: 1362311 - RNA, 19 nt, Homo sapiens
  misc_RNA (1)...(19): siRNA sense strand
ggccaucggcuuugucaag

SEQ ID NO: 1362312 - RNA, 19 nt, Homo sapiens
  misc_RNA (1)...(19): siRNA sense strand
caacaaugggaaccacaca

SEQ ID NO: 1362313 - RNA, 19 nt, Homo sapiens
  misc_RNA (1)...(19): siRNA sense strand
gccauaaaacuccagauaa

SEQ ID NO: 1362314 - RNA, 19 nt, Homo sapiens
  misc_RNA (1)...(19): siRNA sense strand
caggacuucaugauguaua

SEQ ID NO: 1362315 - RNA, 19 nt, Homo sapiens
  misc_RNA (1)...(19): siRNA sense strand
gggaaccacacauuuaaaa

SEQ ID NO: 1362316 - RNA, 19 nt, Homo sapiens
  misc_RNA (1)...(19): siRNA sense strand
guagccaacaucacaaucu

SEQ ID NO: 1362317 - RNA, 19 nt, Homo sapiens
  misc_RNA (1)...(19): siRNA sense strand
aagauaaacgcccacaaca

SEQ ID NO: 1362318 - RNA, 19 nt, Homo sapiens
  misc_RNA (1)...(19): siRNA sense strand
ugacucaggacuucaugau

SEQ ID NO: 1362319 - RNA, 19 nt, Homo sapiens
  misc_RNA (1)...(19): siRNA sense strand
gacuucaugauguauagaa

SEQ ID NO: 1362320 - RNA, 19 nt, Homo sapiens
  misc_RNA (1)...(19): siRNA sense strand
cgugaacuccuuagagaag

SEQ ID NO: 1362321 - RNA, 19 nt, Homo sapiens
  misc_RNA (1)...(19): siRNA sense strand
gcgcggaaagaacaugugu

SEQ ID NO: 1362322 - RNA, 19 nt, Homo sapiens
  misc_RNA (1)...(19): siRNA sense strand
ccaguacuuccugccauaa

SEQ ID NO: 1362323 - RNA, 19 nt, Homo sapiens
  misc_RNA (1)...(19): siRNA sense strand
cagcaacuggaggaagaua

SEQ ID NO: 1362324 - RNA, 19 nt, Homo sapiens
  misc_RNA (1)...(19): siRNA sense strand
ggucagagccucagaauug

SEQ ID NO: 1362325 - RNA, 19 nt, Homo sapiens
  misc_RNA (1)...(19): siRNA sense strand
gacaugagcuuugcugaaa

SEQ ID NO: 1362326 - RNA, 19 nt, Homo sapiens
  misc_RNA (1)...(19): siRNA sense strand
gauaaacgcccacaacaau

SEQ ID NO: 1362327 - RNA, 19 nt, Homo sapiens
  misc_RNA (1)...(19): siRNA sense strand
uaaaguaaaccaugcagua

SEQ ID NO: 1362328 - RNA, 19 nt, Homo sapiens
  misc_RNA (1)...(19): siRNA sense strand
caugagcuuugcugaaaua

SEQ ID NO: 1362329 - RNA, 19 nt, Homo sapiens
  misc_RNA (1)...(19): siRNA sense strand
gagcuuugcugaaauaaaa

SEQ ID NO: 1362330 - RNA, 19 nt, Homo sapiens
  misc_RNA (1)...(19): siRNA sense strand
cuacaacccugugagcuuu

SEQ ID NO: 1362331 - RNA, 19 nt, Homo sapiens
  misc_RNA (1)...(19): siRNA sense strand
aaauggcacugaaccaauu

SEQ ID NO: 1362332 - RNA, 19 nt, Homo sapiens
  misc_RNA (1)...(19): siRNA sense strand
gaagauaaacgcccacaac

SEQ ID NO: 1362333 - RNA, 19 nt, Homo sapiens
  misc_RNA (1)...(19): siRNA sense strand
gcaacuggaggaagauaaa

SEQ ID NO: 1362334 - RNA, 19 nt, Homo sapiens
  misc_RNA (1)...(19): siRNA sense strand
ccauaaaacuccagauaaa

SEQ ID NO: 1362335 - RNA, 19 nt, Homo sapiens
  misc_RNA (1)...(19): siRNA sense strand
gaguauauccuguacaaca

SEQ ID NO: 1362336 - RNA, 19 nt, Homo sapiens
  misc_RNA (1)...(19): siRNA sense strand
gaacggguacuuccucauc

SEQ ID NO: 1362337 - RNA, 19 nt, Homo sapiens
  misc_RNA (1)...(19): siRNA sense strand
uagccaacaucacaaucua

SEQ ID NO: 1362338 - RNA, 19 nt, Homo sapiens
  misc_RNA (1)...(19): siRNA sense strand
cacaaucuaugacgaggaa

SEQ ID NO: 1362339 - RNA, 19 nt, Homo sapiens
  misc_RNA (1)...(19): siRNA sense strand
ccggaaagaugcuguccuu

SEQ ID NO: 1362340 - RNA, 19 nt, Homo sapiens
  misc_RNA (1)...(19): siRNA sense strand
ucgaguauauccuguacaa

SEQ ID NO: 1362341 - RNA, 19 nt, Homo sapiens
  misc_RNA (1)...(19): siRNA sense strand
gaaccaauuuucagacaug

SEQ ID NO: 1362342 - RNA, 19 nt, Homo sapiens
  misc_RNA (1)...(19): siRNA sense strand
gaauugcucagccaccaaa

SEQ ID NO: 1362343 - RNA, 19 nt, Homo sapiens
  misc_RNA (1)...(19): siRNA sense strand
ggaugguuauugcaaguuc

SEQ ID NO: 1362344 - RNA, 19 nt, Homo sapiens
  misc_RNA (1)...(19): siRNA sense strand
acucaggacuucaugaugu

SEQ ID NO: 1362345 - RNA, 19 nt, Homo sapiens
  misc_RNA (1)...(19): siRNA sense strand
gccaggcuuucgaguauau

SEQ ID NO: 1362346 - RNA, 19 nt, Homo sapiens
  misc_RNA (1)...(19): siRNA sense strand
ccugugagcuuugccuuug

SEQ ID NO: 1362347 - RNA, 19 nt, Homo sapiens
  misc_RNA (1)...(19): siRNA sense strand
gcgcccaggacuucaauaa

SEQ ID NO: 1362348 - RNA, 19 nt, Homo sapiens
  misc_RNA (1)...(19): siRNA sense strand
agucauggaugucuaagca

SEQ ID NO: 1362349 - RNA, 19 nt, Homo sapiens
  misc_RNA (1)...(19): siRNA sense strand
gcuguuggguauggagaaa

SEQ ID NO: 1362350 - RNA, 19 nt, Homo sapiens
  misc_RNA (1)...(19): siRNA sense strand
ggcaguugcuggacuuucu

SEQ ID NO: 1362351 - RNA, 19 nt, Homo sapiens
  misc_RNA (1)...(19): siRNA sense strand
ugcgugaacuccuuagaga

SEQ ID NO: 1362352 - RNA, 19 nt, Homo sapiens
  misc_RNA (1)...(19): siRNA sense strand
ucaagucauggaugucuaa

SEQ ID NO: 1362353 - RNA, 19 nt, Homo sapiens
  misc_RNA (1)...(19): siRNA sense strand
uccaguacuuccugccaua

SEQ ID NO: 1362354 - RNA, 19 nt, Homo sapiens
  misc_RNA (1)...(19): siRNA sense strand
cuaagcaccguaagaccua

SEQ ID NO: 1362355 - RNA, 19 nt, Homo sapiens
  misc_RNA (1)...(19): siRNA sense strand
aguauauccuguacaacaa

SEQ ID NO: 1362356 - RNA, 19 nt, Homo sapiens
  misc_RNA (1)...(19): siRNA sense strand
ggaugucuaagcaccguaa

SEQ ID NO: 1362357 - RNA, 19 nt, Homo sapiens
  misc_RNA (1)...(19): siRNA sense strand
aguacuggcuguuggguau

SEQ ID NO: 1362358 - RNA, 19 nt, Homo sapiens
  misc_RNA (1)...(19): siRNA sense strand
cucaggacuucaugaugua

SEQ ID NO: 1362359 - RNA, 19 nt, Homo sapiens
  misc_RNA (1)...(19): siRNA sense strand
gccaacaucacaaucuaug

SEQ ID NO: 1362360 - RNA, 19 nt, Homo sapiens
  misc_RNA (1)...(19): siRNA sense strand
agacaugagcuuugcugaa

SEQ ID NO: 1362361 - RNA, 19 nt, Homo sapiens
  misc_RNA (1)...(19): siRNA sense strand
caccguaagaccuacagua

SEQ ID NO: 1362362 - RNA, 19 nt, Homo sapiens
  misc_RNA (1)...(19): siRNA sense strand
agauaaacgcccacaacaa

SEQ ID NO: 1362363 - RNA, 19 nt, Homo sapiens
  misc_RNA (1)...(19): siRNA sense strand
caacaucacaaucuaugac

SEQ ID NO: 1362364 - RNA, 19 nt, Homo sapiens
  misc_RNA (1)...(19): siRNA sense strand
caucggcuuugucaaggau

SEQ ID NO: 1362365 - RNA, 19 nt, Homo sapiens
  misc_RNA (1)...(19): siRNA sense strand
uaaacgcccacaacaaugg

SEQ ID NO: 1362366 - RNA, 19 nt, Homo sapiens
  misc_RNA (1)...(19): siRNA sense strand
gcucagccaccaaaaguaa

SEQ ID NO: 1362367 - RNA, 19 nt, Homo sapiens
  misc_RNA (1)...(19): siRNA sense strand
aaaaugggaucccuuacug

SEQ ID NO: 1362368 - RNA, 19 nt, Homo sapiens
  misc_RNA (1)...(19): siRNA sense strand
ggccaucggcuuugucaag

SEQ ID NO: 1362369 - RNA, 19 nt, Homo sapiens
  misc_RNA (1)...(19): siRNA sense strand
gggaaugaacggguacuuc

SEQ ID NO: 1362370 - RNA, 19 nt, Homo sapiens
  misc_RNA (1)...(19): siRNA sense strand
ggaagauaaacgcccacaa

SEQ ID NO: 1362371 - RNA, 19 nt, Homo sapiens
  misc_RNA (1)...(19): siRNA sense strand
ccaacaucacaaucuauga

SEQ ID NO: 1362372 - RNA, 19 nt, Homo sapiens
  misc_RNA (1)...(19): siRNA sense strand
caacaaugggaaccacaca

SEQ ID NO: 1362373 - RNA, 19 nt, Homo sapiens
  misc_RNA (1)...(19): siRNA sense strand
gccauaaaacuccagauaa

SEQ ID NO: 1362374 - RNA, 19 nt, Homo sapiens
  misc_RNA (1)...(19): siRNA sense strand
gggaaccacacauuuaaaa

SEQ ID NO: 1362375 - RNA, 19 nt, Homo sapiens
  misc_RNA (1)...(19): siRNA sense strand
caggacuucaugauguaua

SEQ ID NO: 1362376 - RNA, 19 nt, Homo sapiens
  misc_RNA (1)...(19): siRNA sense strand
aagauaaacgcccacaaca

SEQ ID NO: 1362377 - RNA, 19 nt, Homo sapiens
  misc_RNA (1)...(19): siRNA sense strand
ugacucaggacuucaugau

SEQ ID NO: 1362378 - RNA, 19 nt, Homo sapiens
  misc_RNA (1)...(19): siRNA sense strand
guagccaacaucacaaucu

SEQ ID NO: 1362379 - RNA, 19 nt, Homo sapiens
  misc_RNA (1)...(19): siRNA sense strand
gacuucaugauguauagaa

SEQ ID NO: 1362380 - RNA, 19 nt, Homo sapiens
  misc_RNA (1)...(19): siRNA sense strand
ccgccgaacugugcgugaa

SEQ ID NO: 1362381 - RNA, 19 nt, Homo sapiens
  misc_RNA (1)...(19): siRNA sense strand
gcgcggaaagaacaugugu

SEQ ID NO: 1362382 - RNA, 19 nt, Homo sapiens
  misc_RNA (1)...(19): siRNA sense strand
ccaguacuuccugccauaa

SEQ ID NO: 1362383 - RNA, 19 nt, Homo sapiens
  misc_RNA (1)...(19): siRNA sense strand
cagcaacuggaggaagaua

SEQ ID NO: 1362384 - RNA, 19 nt, Homo sapiens
  misc_RNA (1)...(19): siRNA sense strand
cgugaacuccuuagagaag

SEQ ID NO: 1362385 - RNA, 19 nt, Homo sapiens
  misc_RNA (1)...(19): siRNA sense strand
ggucagagccucagaauug

SEQ ID NO: 1362386 - RNA, 19 nt, Homo sapiens
  misc_RNA (1)...(19): siRNA sense strand
gacaugagcuuugcugaaa

SEQ ID NO: 1362387 - RNA, 19 nt, Homo sapiens
  misc_RNA (1)...(19): siRNA sense strand
gauaaacgcccacaacaau

SEQ ID NO: 1362388 - RNA, 19 nt, Homo sapiens
  misc_RNA (1)...(19): siRNA sense strand
uaaaguaaaccaugcagua

SEQ ID NO: 1362389 - RNA, 19 nt, Homo sapiens
  misc_RNA (1)...(19): siRNA sense strand
caugagcuuugcugaaaua

SEQ ID NO: 1362390 - RNA, 19 nt, Homo sapiens
  misc_RNA (1)...(19): siRNA sense strand
gagcuuugcugaaauaaaa

SEQ ID NO: 1362391 - RNA, 19 nt, Homo sapiens
  misc_RNA (1)...(19): siRNA sense strand
cuacaacccugugagcuuu

SEQ ID NO: 1362392 - RNA, 19 nt, Homo sapiens
  misc_RNA (1)...(19): siRNA sense strand
aaauggcacugaaccaauu

SEQ ID NO: 1362393 - RNA, 19 nt, Homo sapiens
  misc_RNA (1)...(19): siRNA sense strand
gaagauaaacgcccacaac

SEQ ID NO: 1362394 - RNA, 19 nt, Homo sapiens
  misc_RNA (1)...(19): siRNA sense strand
gcaacuggaggaagauaaa

SEQ ID NO: 1362395 - RNA, 19 nt, Homo sapiens
  misc_RNA (1)...(19): siRNA sense strand
ccauaaaacuccagauaaa

SEQ ID NO: 1362396 - RNA, 19 nt, Homo sapiens
  misc_RNA (1)...(19): siRNA sense strand
gaguauauccuguacaaca

SEQ ID NO: 1362397 - RNA, 19 nt, Homo sapiens
  misc_RNA (1)...(19): siRNA sense strand
gaacggguacuuccucauc

SEQ ID NO: 1362398 - RNA, 19 nt, Homo sapiens
  misc_RNA (1)...(19): siRNA sense strand
uagccaacaucacaaucua

SEQ ID NO: 1362399 - RNA, 19 nt, Homo sapiens
  misc_RNA (1)...(19): siRNA sense strand
cacaaucuaugacgaggaa

SEQ ID NO: 1362400 - RNA, 19 nt, Homo sapiens
  misc_RNA (1)...(19): siRNA sense strand
ccggaaagaugcuguccuu

SEQ ID NO: 1362401 - RNA, 19 nt, Homo sapiens
  misc_RNA (1)...(19): siRNA sense strand
ucgaguauauccuguacaa

SEQ ID NO: 1362402 - RNA, 19 nt, Homo sapiens
  misc_RNA (1)...(19): siRNA sense strand
gaaccaauuuucagacaug

SEQ ID NO: 1362403 - RNA, 19 nt, Homo sapiens
  misc_RNA (1)...(19): siRNA sense strand
gaauugcucagccaccaaa

SEQ ID NO: 1362404 - RNA, 19 nt, Homo sapiens
  misc_RNA (1)...(19): siRNA sense strand
ggaugguuauugcaaguuc

SEQ ID NO: 1362405 - RNA, 19 nt, Homo sapiens
  misc_RNA (1)...(19): siRNA sense strand
acucaggacuucaugaugu

SEQ ID NO: 1362406 - RNA, 19 nt, Homo sapiens
  misc_RNA (1)...(19): siRNA sense strand
gccaggcuuucgaguauau

SEQ ID NO: 1362407 - RNA, 19 nt, Homo sapiens
  misc_RNA (1)...(19): siRNA sense strand
ccugugagcuuugccuuug

SEQ ID NO: 1362408 - RNA, 19 nt, Homo sapiens
  misc_RNA (1)...(19): siRNA sense strand
gcgcccaggacuucaauaa

SEQ ID NO: 1362409 - RNA, 19 nt, Homo sapiens
  misc_RNA (1)...(19): siRNA sense strand
agucauggaugucuaagca

SEQ ID NO: 1362410 - RNA, 19 nt, Homo sapiens
  misc_RNA (1)...(19): siRNA sense strand
gcuguuggguauggagaaa

SEQ ID NO: 1362411 - RNA, 19 nt, Homo sapiens
  misc_RNA (1)...(19): siRNA sense strand
ggcaguugcuggacuuucu

SEQ ID NO: 1362412 - RNA, 19 nt, Homo sapiens
  misc_RNA (1)...(19): siRNA sense strand
ucaagucauggaugucuaa

SEQ ID NO: 1362413 - RNA, 19 nt, Homo sapiens
  misc_RNA (1)...(19): siRNA sense strand
uccaguacuuccugccaua

SEQ ID NO: 1362414 - RNA, 19 nt, Homo sapiens
  misc_RNA (1)...(19): siRNA sense strand
cuaagcaccguaagaccua

SEQ ID NO: 1362415 - RNA, 19 nt, Homo sapiens
  misc_RNA (1)...(19): siRNA sense strand
aguauauccuguacaacaa

SEQ ID NO: 1362416 - RNA, 19 nt, Homo sapiens
  misc_RNA (1)...(19): siRNA sense strand
ggaugucuaagcaccguaa

SEQ ID NO: 1362417 - RNA, 19 nt, Homo sapiens
  misc_RNA (1)...(19): siRNA sense strand
aguacuggcuguuggguau

SEQ ID NO: 1362418 - RNA, 19 nt, Homo sapiens
  misc_RNA (1)...(19): siRNA sense strand
cucaggacuucaugaugua

SEQ ID NO: 1362419 - RNA, 19 nt, Homo sapiens
  misc_RNA (1)...(19): siRNA sense strand
gccaacaucacaaucuaug

SEQ ID NO: 1362420 - RNA, 19 nt, Homo sapiens
  misc_RNA (1)...(19): siRNA sense strand
agacaugagcuuugcugaa

SEQ ID NO: 1362421 - RNA, 19 nt, Homo sapiens
  misc_RNA (1)...(19): siRNA sense strand
caccguaagaccuacagua

SEQ ID NO: 1362422 - RNA, 19 nt, Homo sapiens
  misc_RNA (1)...(19): siRNA sense strand
uaaacgcccacaacaaugg

SEQ ID NO: 1362423 - RNA, 19 nt, Homo sapiens
  misc_RNA (1)...(19): siRNA sense strand
agauaaacgcccacaacaa

SEQ ID NO: 1362424 - RNA, 19 nt, Homo sapiens
  misc_RNA (1)...(19): siRNA sense strand
caacaucacaaucuaugac

SEQ ID NO: 1362425 - RNA, 19 nt, Homo sapiens
  misc_RNA (1)...(19): siRNA sense strand
caucggcuuugucaaggau

SEQ ID NO: 1362426 - RNA, 19 nt, Homo sapiens
  misc_RNA (1)...(19): siRNA sense strand
gcucagccaccaaaaguaa

SEQ ID NO: 1362427 - RNA, 19 nt, Homo sapiens
  misc_RNA (1)...(19): siRNA sense strand
aaaaugggaucccuuacug

SEQ ID NO: 1362428 - RNA, 19 nt, Homo sapiens
  misc_RNA (1)...(19): siRNA sense strand
ggaagauaaacgcccacaa

SEQ ID NO: 1362429 - RNA, 19 nt, Homo sapiens
  misc_RNA (1)...(19): siRNA sense strand
gggaaugaacggguacuuc

SEQ ID NO: 1362430 - RNA, 19 nt, Homo sapiens
  misc_RNA (1)...(19): siRNA sense strand
ccaacaucacaaucuauga

SEQ ID NO: 1362431 - RNA, 19 nt, Homo sapiens
  misc_RNA (1)...(19): siRNA sense strand
ggccaucggcuuugucaag

SEQ ID NO: 1362432 - RNA, 19 nt, Homo sapiens
  misc_RNA (1)...(19): siRNA sense strand
caacaaugggaaccacaca

SEQ ID NO: 1362433 - RNA, 19 nt, Homo sapiens
  misc_RNA (1)...(19): siRNA sense strand
gccauaaaacuccagauaa

SEQ ID NO: 1362434 - RNA, 19 nt, Homo sapiens
  misc_RNA (1)...(19): siRNA sense strand
caggacuucaugauguaua

SEQ ID NO: 1362435 - RNA, 19 nt, Homo sapiens
  misc_RNA (1)...(19): siRNA sense strand
gggaaccacacauuuaaaa

SEQ ID NO: 1362436 - RNA, 19 nt, Homo sapiens
  misc_RNA (1)...(19): siRNA sense strand
guagccaacaucacaaucu

SEQ ID NO: 1362437 - RNA, 19 nt, Homo sapiens
  misc_RNA (1)...(19): siRNA sense strand
aagauaaacgcccacaaca

SEQ ID NO: 1362438 - RNA, 19 nt, Homo sapiens
  misc_RNA (1)...(19): siRNA sense strand
ugacucaggacuucaugau

SEQ ID NO: 1362439 - RNA, 19 nt, Homo sapiens
  misc_RNA (1)...(19): siRNA sense strand
gacuucaugauguauagaa

SEQ ID NO: 1362440 - RNA, 19 nt, Homo sapiens
  misc_RNA (1)...(19): siRNA sense strand
cgugaacuccuuagagaag

SEQ ID NO: 1362441 - RNA, 19 nt, Homo sapiens
  misc_RNA (1)...(19): siRNA sense strand
gcgcggaaagaacaugugu

SEQ ID NO: 1362442 - RNA, 19 nt, Homo sapiens
  misc_RNA (1)...(19): siRNA sense strand
ccaguacuuccugccauaa

SEQ ID NO: 1362443 - RNA, 19 nt, Homo sapiens
  misc_RNA (1)...(19): siRNA sense strand
cagcaacuggaggaagaua

SEQ ID NO: 1362444 - RNA, 19 nt, Homo sapiens
  misc_RNA (1)...(19): siRNA sense strand
ggucagagccucagaauug

SEQ ID NO: 1362445 - RNA, 19 nt, Homo sapiens
  misc_RNA (1)...(19): siRNA sense strand
gacaugagcuuugcugaaa

SEQ ID NO: 1362446 - RNA, 19 nt, Homo sapiens
  misc_RNA (1)...(19): siRNA sense strand
gauaaacgcccacaacaau

SEQ ID NO: 1362447 - RNA, 19 nt, Homo sapiens
  misc_RNA (1)...(19): siRNA sense strand
uaaaguaaaccaugcagua

SEQ ID NO: 1362448 - RNA, 19 nt, Homo sapiens
  misc_RNA (1)...(19): siRNA sense strand
caugagcuuugcugaaaua

SEQ ID NO: 1362449 - RNA, 19 nt, Homo sapiens
  misc_RNA (1)...(19): siRNA sense strand
gagcuuugcugaaauaaaa

SEQ ID NO: 1362450 - RNA, 19 nt, Homo sapiens
  misc_RNA (1)...(19): siRNA sense strand
cuacaacccugugagcuuu

SEQ ID NO: 1362451 - RNA, 19 nt, Homo sapiens
  misc_RNA (1)...(19): siRNA sense strand
aaauggcacugaaccaauu

SEQ ID NO: 1362452 - RNA, 19 nt, Homo sapiens
  misc_RNA (1)...(19): siRNA sense strand
gaagauaaacgcccacaac

SEQ ID NO: 1362453 - RNA, 19 nt, Homo sapiens
  misc_RNA (1)...(19): siRNA sense strand
gcaacuggaggaagauaaa

SEQ ID NO: 1362454 - RNA, 19 nt, Homo sapiens
  misc_RNA (1)...(19): siRNA sense strand
ccauaaaacuccagauaaa

SEQ ID NO: 1362455 - RNA, 19 nt, Homo sapiens
  misc_RNA (1)...(19): siRNA sense strand
gaguauauccuguacaaca

SEQ ID NO: 1362456 - RNA, 19 nt, Homo sapiens
  misc_RNA (1)...(19): siRNA sense strand
gaacggguacuuccucauc

SEQ ID NO: 1362457 - RNA, 19 nt, Homo sapiens
  misc_RNA (1)...(19): siRNA sense strand
uagccaacaucacaaucua

SEQ ID NO: 1362458 - RNA, 19 nt, Homo sapiens
  misc_RNA (1)...(19): siRNA sense strand
cacaaucuaugacgaggaa

SEQ ID NO: 1362459 - RNA, 19 nt, Homo sapiens
  misc_RNA (1)...(19): siRNA sense strand
ccggaaagaugcuguccuu

SEQ ID NO: 1362460 - RNA, 19 nt, Homo sapiens
  misc_RNA (1)...(19): siRNA sense strand
ucgaguauauccuguacaa

SEQ ID NO: 1362461 - RNA, 19 nt, Homo sapiens
  misc_RNA (1)...(19): siRNA sense strand
gaaccaauuuucagacaug

SEQ ID NO: 1362462 - RNA, 19 nt, Homo sapiens
  misc_RNA (1)...(19): siRNA sense strand
gaauugcucagccaccaaa

SEQ ID NO: 1362463 - RNA, 19 nt, Homo sapiens
  misc_RNA (1)...(19): siRNA sense strand
ggaugguuauugcaaguuc

SEQ ID NO: 1362464 - RNA, 19 nt, Homo sapiens
  misc_RNA (1)...(19): siRNA sense strand
acucaggacuucaugaugu

SEQ ID NO: 1362465 - RNA, 19 nt, Homo sapiens
  misc_RNA (1)...(19): siRNA sense strand
gccaggcuuucgaguauau

SEQ ID NO: 1362466 - RNA, 19 nt, Homo sapiens
  misc_RNA (1)...(19): siRNA sense strand
ccugugagcuuugccuuug

SEQ ID NO: 1362467 - RNA, 19 nt, Homo sapiens
  misc_RNA (1)...(19): siRNA sense strand
gcgcccaggacuucaauaa

SEQ ID NO: 1362468 - RNA, 19 nt, Homo sapiens
  misc_RNA (1)...(19): siRNA sense strand
agucauggaugucuaagca

SEQ ID NO: 1362469 - RNA, 19 nt, Homo sapiens
  misc_RNA (1)...(19): siRNA sense strand
gcuguuggguauggagaaa

SEQ ID NO: 1362470 - RNA, 19 nt, Homo sapiens
  misc_RNA (1)...(19): siRNA sense strand
ggcaguugcuggacuuucu

SEQ ID NO: 1362471 - RNA, 19 nt, Homo sapiens
  misc_RNA (1)...(19): siRNA sense strand
ugcgugaacuccuuagaga

SEQ ID NO: 1362472 - RNA, 19 nt, Homo sapiens
  misc_RNA (1)...(19): siRNA sense strand
ucaagucauggaugucuaa

SEQ ID NO: 1362473 - RNA, 19 nt, Homo sapiens
  misc_RNA (1)...(19): siRNA sense strand
uccaguacuuccugccaua

SEQ ID NO: 1362474 - RNA, 19 nt, Homo sapiens
  misc_RNA (1)...(19): siRNA sense strand
cuaagcaccguaagaccua

SEQ ID NO: 1362475 - RNA, 19 nt, Homo sapiens
  misc_RNA (1)...(19): siRNA sense strand
aguauauccuguacaacaa

SEQ ID NO: 1362476 - RNA, 19 nt, Homo sapiens
  misc_RNA (1)...(19): siRNA sense strand
ggaugucuaagcaccguaa

SEQ ID NO: 1362477 - RNA, 19 nt, Homo sapiens
  misc_RNA (1)...(19): siRNA sense strand
aguacuggcuguuggguau

SEQ ID NO: 1362478 - RNA, 19 nt, Homo sapiens
  misc_RNA (1)...(19): siRNA sense strand
cucaggacuucaugaugua

SEQ ID NO: 1362479 - RNA, 19 nt, Homo sapiens
  misc_RNA (1)...(19): siRNA sense strand
gccaacaucacaaucuaug

SEQ ID NO: 1362480 - RNA, 19 nt, Homo sapiens
  misc_RNA (1)...(19): siRNA sense strand
agacaugagcuuugcugaa

SEQ ID NO: 1362481 - RNA, 19 nt, Homo sapiens
  misc_RNA (1)...(19): siRNA sense strand
caccguaagaccuacagua

SEQ ID NO: 1362482 - RNA, 19 nt, Homo sapiens
  misc_RNA (1)...(19): siRNA sense strand
agauaaacgcccacaacaa

SEQ ID NO: 1362483 - RNA, 19 nt, Homo sapiens
  misc_RNA (1)...(19): siRNA sense strand
caacaucacaaucuaugac

SEQ ID NO: 1362484 - RNA, 19 nt, Homo sapiens
  misc_RNA (1)...(19): siRNA sense strand
caucggcuuugucaaggau

SEQ ID NO: 1362485 - RNA, 19 nt, Homo sapiens
  misc_RNA (1)...(19): siRNA sense strand
uaaacgcccacaacaaugg

SEQ ID NO: 1362486 - RNA, 19 nt, Homo sapiens
  misc_RNA (1)...(19): siRNA sense strand
gcucagccaccaaaaguaa

SEQ ID NO: 1362487 - RNA, 19 nt, Homo sapiens
  misc_RNA (1)...(19): siRNA sense strand
aaaaugggaucccuuacug

SEQ ID NO: 1362488 - RNA, 19 nt, Homo sapiens
  misc_RNA (1)...(19): siRNA sense strand
ggccaucggcuuugucaag

SEQ ID NO: 1362489 - RNA, 19 nt, Homo sapiens
  misc_RNA (1)...(19): siRNA sense strand
gggaaugaacggguacuuc

SEQ ID NO: 1362490 - RNA, 19 nt, Homo sapiens
  misc_RNA (1)...(19): siRNA sense strand
ggaagauaaacgcccacaa

SEQ ID NO: 1362491 - RNA, 19 nt, Homo sapiens
  misc_RNA (1)...(19): siRNA sense strand
ccaacaucacaaucuauga

SEQ ID NO: 1362492 - RNA, 19 nt, Homo sapiens
  misc_RNA (1)...(19): siRNA sense strand
caacaaugggaaccacaca

SEQ ID NO: 1362493 - RNA, 19 nt, Homo sapiens
  misc_RNA (1)...(19): siRNA sense strand
gccauaaaacuccagauaa

SEQ ID NO: 1362494 - RNA, 19 nt, Homo sapiens
  misc_RNA (1)...(19): siRNA sense strand
gggaaccacacauuuaaaa

SEQ ID NO: 1362495 - RNA, 19 nt, Homo sapiens
  misc_RNA (1)...(19): siRNA sense strand
caggacuucaugauguaua

SEQ ID NO: 1362496 - RNA, 19 nt, Homo sapiens
  misc_RNA (1)...(19): siRNA sense strand
aagauaaacgcccacaaca

SEQ ID NO: 1362497 - RNA, 19 nt, Homo sapiens
  misc_RNA (1)...(19): siRNA sense strand
ugacucaggacuucaugau

SEQ ID NO: 1362498 - RNA, 19 nt, Homo sapiens
  misc_RNA (1)...(19): siRNA sense strand
guagccaacaucacaaucu

SEQ ID NO: 1362499 - RNA, 19 nt, Homo sapiens
  misc_RNA (1)...(19): siRNA sense strand
gacuucaugauguauagaa

SEQ ID NO: 1362500 - RNA, 19 nt, Homo sapiens
  misc_RNA (1)...(19): siRNA sense strand
ccgccgaacugugcgugaa

SEQ ID NO: 1362501 - RNA, 19 nt, Homo sapiens
  misc_RNA (1)...(19): siRNA sense strand
gcgcggaaagaacaugugu

SEQ ID NO: 1362502 - RNA, 19 nt, Homo sapiens
  misc_RNA (1)...(19): siRNA sense strand
ccaguacuuccugccauaa

SEQ ID NO: 1362503 - RNA, 19 nt, Homo sapiens
  misc_RNA (1)...(19): siRNA sense strand
cagcaacuggaggaagaua

SEQ ID NO: 1362504 - RNA, 19 nt, Homo sapiens
  misc_RNA (1)...(19): siRNA sense strand
cgugaacuccuuagagaag

SEQ ID NO: 1362505 - RNA, 19 nt, Homo sapiens
  misc_RNA (1)...(19): siRNA sense strand
agacagaucugcaugaaca

SEQ ID NO: 1362506 - RNA, 19 nt, Homo sapiens
  misc_RNA (1)...(19): siRNA sense strand
gcacaccgccuugcacaua

SEQ ID NO: 1362507 - RNA, 19 nt, Homo sapiens
  misc_RNA (1)...(19): siRNA sense strand
ggaagaucuuugccuuuga

SEQ ID NO: 1362508 - RNA, 19 nt, Homo sapiens
  misc_RNA (1)...(19): siRNA sense strand
ucacuuggcugcucuucug

SEQ ID NO: 1362509 - RNA, 19 nt, Homo sapiens
  misc_RNA (1)...(19): siRNA sense strand
gaagaucuuugccuuugac

SEQ ID NO: 1362510 - RNA, 19 nt, Homo sapiens
  misc_RNA (1)...(19): siRNA sense strand
caaagcaucagcaccagaa

SEQ ID NO: 1362511 - RNA, 19 nt, Homo sapiens
  misc_RNA (1)...(19): siRNA sense strand
cuucuucguugcuguaauu

SEQ ID NO: 1362512 - RNA, 19 nt, Homo sapiens
  misc_RNA (1)...(19): siRNA sense strand
cuucguugcuguaauugaa

SEQ ID NO: 1362513 - RNA, 19 nt, Homo sapiens
  misc_RNA (1)...(19): siRNA sense strand
caauaaagaccagucacuu

SEQ ID NO: 1362514 - RNA, 19 nt, Homo sapiens
  misc_RNA (1)...(19): siRNA sense strand
gcaauaaagaccagucacu

SEQ ID NO: 1362515 - RNA, 19 nt, Homo sapiens
  misc_RNA (1)...(19): siRNA sense strand
aauaaagaccagucacuug

SEQ ID NO: 1362516 - RNA, 19 nt, Homo sapiens
  misc_RNA (1)...(19): siRNA sense strand
gccaggaggagaaugaaga

SEQ ID NO: 1362517 - RNA, 19 nt, Homo sapiens
  misc_RNA (1)...(19): siRNA sense strand
gcaugaacacccacuguac

SEQ ID NO: 1362518 - RNA, 19 nt, Homo sapiens
  misc_RNA (1)...(19): siRNA sense strand
agagaaagaagagagcaaa

SEQ ID NO: 1362519 - RNA, 19 nt, Homo sapiens
  misc_RNA (1)...(19): siRNA sense strand
uaauugaacgggucgagau

SEQ ID NO: 1362520 - RNA, 19 nt, Homo sapiens
  misc_RNA (1)...(19): siRNA sense strand
agacagaucugcaugaaca

SEQ ID NO: 1362521 - RNA, 19 nt, Homo sapiens
  misc_RNA (1)...(19): siRNA sense strand
gcacaccgccuugcacaua

SEQ ID NO: 1362522 - RNA, 19 nt, Homo sapiens
  misc_RNA (1)...(19): siRNA sense strand
ggaagaucuuugccuuuga

SEQ ID NO: 1362523 - RNA, 19 nt, Homo sapiens
  misc_RNA (1)...(19): siRNA sense strand
ucacuuggcugcucuucug

SEQ ID NO: 1362524 - RNA, 19 nt, Homo sapiens
  misc_RNA (1)...(19): siRNA sense strand
gaagaucuuugccuuugac

SEQ ID NO: 1362525 - RNA, 19 nt, Homo sapiens
  misc_RNA (1)...(19): siRNA sense strand
caaagcaucagcaccagaa

SEQ ID NO: 1362526 - RNA, 19 nt, Homo sapiens
  misc_RNA (1)...(19): siRNA sense strand
cuucuucguugcuguaauu

SEQ ID NO: 1362527 - RNA, 19 nt, Homo sapiens
  misc_RNA (1)...(19): siRNA sense strand
cuucguugcuguaauugaa

SEQ ID NO: 1362528 - RNA, 19 nt, Homo sapiens
  misc_RNA (1)...(19): siRNA sense strand
caauaaagaccagucacuu

SEQ ID NO: 1362529 - RNA, 19 nt, Homo sapiens
  misc_RNA (1)...(19): siRNA sense strand
gcaauaaagaccagucacu

SEQ ID NO: 1362530 - RNA, 19 nt, Homo sapiens
  misc_RNA (1)...(19): siRNA sense strand
aauaaagaccagucacuug

SEQ ID NO: 1362531 - RNA, 19 nt, Homo sapiens
  misc_RNA (1)...(19): siRNA sense strand
gccaggaggagaaugaaga

SEQ ID NO: 1362532 - RNA, 19 nt, Homo sapiens
  misc_RNA (1)...(19): siRNA sense strand
gcaugaacacccacuguac

SEQ ID NO: 1362533 - RNA, 19 nt, Homo sapiens
  misc_RNA (1)...(19): siRNA sense strand
agagaaagaagagagcaaa

SEQ ID NO: 1362534 - RNA, 19 nt, Homo sapiens
  misc_RNA (1)...(19): siRNA sense strand
uaauugaacgggucgagau

SEQ ID NO: 1362535 - RNA, 19 nt, Homo sapiens
  misc_RNA (1)...(19): siRNA sense strand
cggcucgucuacuccaugu

SEQ ID NO: 1362536 - RNA, 19 nt, Homo sapiens
  misc_RNA (1)...(19): siRNA sense strand
agacagaucugcaugaaca

SEQ ID NO: 1362537 - RNA, 19 nt, Homo sapiens
  misc_RNA (1)...(19): siRNA sense strand
ggaagaucuuugccuuuga

SEQ ID NO: 1362538 - RNA, 19 nt, Homo sapiens
  misc_RNA (1)...(19): siRNA sense strand
ucacuuggcugcucuucug

SEQ ID NO: 1362539 - RNA, 19 nt, Homo sapiens
  misc_RNA (1)...(19): siRNA sense strand
gaagaucuuugccuuugac

SEQ ID NO: 1362540 - RNA, 19 nt, Homo sapiens
  misc_RNA (1)...(19): siRNA sense strand
caauaaagaccagucacuu

SEQ ID NO: 1362541 - RNA, 19 nt, Homo sapiens
  misc_RNA (1)...(19): siRNA sense strand
gcaauaaagaccagucacu

SEQ ID NO: 1362542 - RNA, 19 nt, Homo sapiens
  misc_RNA (1)...(19): siRNA sense strand
aauaaagaccagucacuug

SEQ ID NO: 1362543 - RNA, 19 nt, Homo sapiens
  misc_RNA (1)...(19): siRNA sense strand
gccaggaggagaaugaaga

SEQ ID NO: 1362544 - RNA, 19 nt, Homo sapiens
  misc_RNA (1)...(19): siRNA sense strand
gcaugaacacccacuguac

SEQ ID NO: 1362545 - RNA, 19 nt, Homo sapiens
  misc_RNA (1)...(19): siRNA sense strand
cuucuucguugcuguaauu

SEQ ID NO: 1362546 - RNA, 19 nt, Homo sapiens
  misc_RNA (1)...(19): siRNA sense strand
cuucguugcuguaauugaa

SEQ ID NO: 1362547 - RNA, 19 nt, Homo sapiens
  misc_RNA (1)...(19): siRNA sense strand
gccaggaggagaaugaaga

SEQ ID NO: 1362548 - RNA, 19 nt, Homo sapiens
  misc_RNA (1)...(19): siRNA sense strand
agaaaucacugcuucagaa

SEQ ID NO: 1362549 - RNA, 19 nt, Homo sapiens
  misc_RNA (1)...(19): siRNA sense strand
agcaauagcuggaaucauu

SEQ ID NO: 1362550 - RNA, 19 nt, Homo sapiens
  misc_RNA (1)...(19): siRNA sense strand
cagauccuguuuggaauua

SEQ ID NO: 1362551 - RNA, 19 nt, Homo sapiens
  misc_RNA (1)...(19): siRNA sense strand
ggaguuaucuuccuuuuca

SEQ ID NO: 1362552 - RNA, 19 nt, Homo sapiens
  misc_RNA (1)...(19): siRNA sense strand
aaucacugcuucagaauau

SEQ ID NO: 1362553 - RNA, 19 nt, Homo sapiens
  misc_RNA (1)...(19): siRNA sense strand
gaauaugaguccacagaac

SEQ ID NO: 1362554 - RNA, 19 nt, Homo sapiens
  misc_RNA (1)...(19): siRNA sense strand
uugaugacuuucagcauua

SEQ ID NO: 1362555 - RNA, 19 nt, Homo sapiens
  misc_RNA (1)...(19): siRNA sense strand
gauccuguuuggaauuaug

SEQ ID NO: 1362556 - RNA, 19 nt, Homo sapiens
  misc_RNA (1)...(19): siRNA sense strand
ucucugccuuucucaauuu

SEQ ID NO: 1362557 - RNA, 19 nt, Homo sapiens
  misc_RNA (1)...(19): siRNA sense strand
ucuggagccuuccuaauug

SEQ ID NO: 1362558 - RNA, 19 nt, Homo sapiens
  misc_RNA (1)...(19): siRNA sense strand
gaaaucacugcuucagaau

SEQ ID NO: 1362559 - RNA, 19 nt, Homo sapiens
  misc_RNA (1)...(19): siRNA sense strand
cacauuugguuucauccua

SEQ ID NO: 1362560 - RNA, 19 nt, Homo sapiens
  misc_RNA (1)...(19): siRNA sense strand
cagaauaugaguccacaga

SEQ ID NO: 1362561 - RNA, 19 nt, Homo sapiens
  misc_RNA (1)...(19): siRNA sense strand
ugagccgaauaaugaauuu

SEQ ID NO: 1362562 - RNA, 19 nt, Homo sapiens
  misc_RNA (1)...(19): siRNA sense strand
guccuguucuugggaauuu

SEQ ID NO: 1362563 - RNA, 19 nt, Homo sapiens
  misc_RNA (1)...(19): siRNA sense strand
cuacauuugugguuauucu

SEQ ID NO: 1362564 - RNA, 19 nt, Homo sapiens
  misc_RNA (1)...(19): siRNA sense strand
ggacuauccagauccuguu

SEQ ID NO: 1362565 - RNA, 19 nt, Homo sapiens
  misc_RNA (1)...(19): siRNA sense strand
auugaugacuuucagcauu

SEQ ID NO: 1362566 - RNA, 19 nt, Homo sapiens
  misc_RNA (1)...(19): siRNA sense strand
ccucacauuugguuucauc

SEQ ID NO: 1362567 - RNA, 19 nt, Homo sapiens
  misc_RNA (1)...(19): siRNA sense strand
cuuccuaauugcagugaaa

SEQ ID NO: 1362568 - RNA, 19 nt, Homo sapiens
  misc_RNA (1)...(19): siRNA sense strand
cagaggauugugauuguga

SEQ ID NO: 1362569 - RNA, 19 nt, Homo sapiens
  misc_RNA (1)...(19): siRNA sense strand
ucacugcuucagaauauga

SEQ ID NO: 1362570 - RNA, 19 nt, Homo sapiens
  misc_RNA (1)...(19): siRNA sense strand
aaaucacugcuucagaaua

SEQ ID NO: 1362571 - RNA, 19 nt, Homo sapiens
  misc_RNA (1)...(19): siRNA sense strand
ccagauccuguuuggaauu

SEQ ID NO: 1362572 - RNA, 19 nt, Homo sapiens
  misc_RNA (1)...(19): siRNA sense strand
uuacauugaugacuuucag

SEQ ID NO: 1362573 - RNA, 19 nt, Homo sapiens
  misc_RNA (1)...(19): siRNA sense strand
cagaaaucacugcuucaga

SEQ ID NO: 1362574 - RNA, 19 nt, Homo sapiens
  misc_RNA (1)...(19): siRNA sense strand
ggagcaauagcuggaauca

SEQ ID NO: 1362575 - RNA, 19 nt, Homo sapiens
  misc_RNA (1)...(19): siRNA sense strand
gaccuuuucuuuuggaguu

SEQ ID NO: 1362576 - RNA, 19 nt, Homo sapiens
  misc_RNA (1)...(19): siRNA sense strand
ugacuuucagcauuauuga

SEQ ID NO: 1362577 - RNA, 19 nt, Homo sapiens
  misc_RNA (1)...(19): siRNA sense strand
gguuucauccuagaucaaa

SEQ ID NO: 1362578 - RNA, 19 nt, Homo sapiens
  misc_RNA (1)...(19): siRNA sense strand
agguuucccuuuauauuuc

SEQ ID NO: 1362579 - RNA, 19 nt, Homo sapiens
  misc_RNA (1)...(19): siRNA sense strand
cucagaggauugugauugu

SEQ ID NO: 1362580 - RNA, 19 nt, Homo sapiens
  misc_RNA (1)...(19): siRNA sense strand
ggaauuaugaccuuuucuu

SEQ ID NO: 1362581 - RNA, 19 nt, Homo sapiens
  misc_RNA (1)...(19): siRNA sense strand
ucauuucucugccuuucuc

SEQ ID NO: 1362582 - RNA, 19 nt, Homo sapiens
  misc_RNA (1)...(19): siRNA sense strand
gcucuguuuuguucauuaa

SEQ ID NO: 1362583 - RNA, 19 nt, Homo sapiens
  misc_RNA (1)...(19): siRNA sense strand
aaucauucuccucacauuu

SEQ ID NO: 1362584 - RNA, 19 nt, Homo sapiens
  misc_RNA (1)...(19): siRNA sense strand
agaggauugugauugugaa

SEQ ID NO: 1362585 - RNA, 19 nt, Homo sapiens
  misc_RNA (1)...(19): siRNA sense strand
ucagaggauugugauugug

SEQ ID NO: 1362586 - RNA, 19 nt, Homo sapiens
  misc_RNA (1)...(19): siRNA sense strand
cuuagggacuauccagauc

SEQ ID NO: 1362587 - RNA, 19 nt, Homo sapiens
  misc_RNA (1)...(19): siRNA sense strand
ccacucagaggauugugau

SEQ ID NO: 1362588 - RNA, 19 nt, Homo sapiens
  misc_RNA (1)...(19): siRNA sense strand
ggcuguuacuguccuguuc

SEQ ID NO: 1362589 - RNA, 19 nt, Homo sapiens
  misc_RNA (1)...(19): siRNA sense strand
cauccuagaucaaaacuac

SEQ ID NO: 1362590 - RNA, 19 nt, Homo sapiens
  misc_RNA (1)...(19): siRNA sense strand
gacuauccagauccuguuu

SEQ ID NO: 1362591 - RNA, 19 nt, Homo sapiens
  misc_RNA (1)...(19): siRNA sense strand
acucagaggauugugauug

SEQ ID NO: 1362592 - RNA, 19 nt, Homo sapiens
  misc_RNA (1)...(19): siRNA sense strand
agaauaugaguccacagaa

SEQ ID NO: 1362593 - RNA, 19 nt, Homo sapiens
  misc_RNA (1)...(19): siRNA sense strand
agacagaucugcaugaaca

SEQ ID NO: 1362594 - RNA, 19 nt, Homo sapiens
  misc_RNA (1)...(19): siRNA sense strand
gcacaccgccuugcacaua

SEQ ID NO: 1362595 - RNA, 19 nt, Homo sapiens
  misc_RNA (1)...(19): siRNA sense strand
ggaagaucuuugccuuuga

SEQ ID NO: 1362596 - RNA, 19 nt, Homo sapiens
  misc_RNA (1)...(19): siRNA sense strand
ucacuuggcugcucuucug

SEQ ID NO: 1362597 - RNA, 19 nt, Homo sapiens
  misc_RNA (1)...(19): siRNA sense strand
gaagaucuuugccuuugac

SEQ ID NO: 1362598 - RNA, 19 nt, Homo sapiens
  misc_RNA (1)...(19): siRNA sense strand
caaagcaucagcaccagaa

SEQ ID NO: 1362599 - RNA, 19 nt, Homo sapiens
  misc_RNA (1)...(19): siRNA sense strand
cuucuucguugcuguaauu

SEQ ID NO: 1362600 - RNA, 19 nt, Homo sapiens
  misc_RNA (1)...(19): siRNA sense strand
cuucguugcuguaauugaa

SEQ ID NO: 1362601 - RNA, 19 nt, Homo sapiens
  misc_RNA (1)...(19): siRNA sense strand
caauaaagaccagucacuu

SEQ ID NO: 1362602 - RNA, 19 nt, Homo sapiens
  misc_RNA (1)...(19): siRNA sense strand
gcaauaaagaccagucacu

SEQ ID NO: 1362603 - RNA, 19 nt, Homo sapiens
  misc_RNA (1)...(19): siRNA sense strand
aauaaagaccagucacuug

SEQ ID NO: 1362604 - RNA, 19 nt, Homo sapiens
  misc_RNA (1)...(19): siRNA sense strand
gccaggaggagaaugaaga

SEQ ID NO: 1362605 - RNA, 19 nt, Homo sapiens
  misc_RNA (1)...(19): siRNA sense strand
gcaugaacacccacuguac

SEQ ID NO: 1362606 - RNA, 19 nt, Homo sapiens
  misc_RNA (1)...(19): siRNA sense strand
agagaaagaagagagcaaa

SEQ ID NO: 1362607 - RNA, 19 nt, Homo sapiens
  misc_RNA (1)...(19): siRNA sense strand
uaauugaacgggucgagau

SEQ ID NO: 1362608 - RNA, 19 nt, Homo sapiens
  misc_RNA (1)...(19): siRNA sense strand
agacagaucugcaugaaca

SEQ ID NO: 1362609 - RNA, 19 nt, Homo sapiens
  misc_RNA (1)...(19): siRNA sense strand
gcacaccgccuugcacaua

SEQ ID NO: 1362610 - RNA, 19 nt, Homo sapiens
  misc_RNA (1)...(19): siRNA sense strand
ggaagaucuuugccuuuga

SEQ ID NO: 1362611 - RNA, 19 nt, Homo sapiens
  misc_RNA (1)...(19): siRNA sense strand
ucacuuggcugcucuucug

SEQ ID NO: 1362612 - RNA, 19 nt, Homo sapiens
  misc_RNA (1)...(19): siRNA sense strand
gaagaucuuugccuuugac

SEQ ID NO: 1362613 - RNA, 19 nt, Homo sapiens
  misc_RNA (1)...(19): siRNA sense strand
caaagcaucagcaccagaa

SEQ ID NO: 1362614 - RNA, 19 nt, Homo sapiens
  misc_RNA (1)...(19): siRNA sense strand
cuucuucguugcuguaauu

SEQ ID NO: 1362615 - RNA, 19 nt, Homo sapiens
  misc_RNA (1)...(19): siRNA sense strand
cuucguugcuguaauugaa

SEQ ID NO: 1362616 - RNA, 19 nt, Homo sapiens
  misc_RNA (1)...(19): siRNA sense strand
caauaaagaccagucacuu

SEQ ID NO: 1362617 - RNA, 19 nt, Homo sapiens
  misc_RNA (1)...(19): siRNA sense strand
gcaauaaagaccagucacu

SEQ ID NO: 1362618 - RNA, 19 nt, Homo sapiens
  misc_RNA (1)...(19): siRNA sense strand
aauaaagaccagucacuug

SEQ ID NO: 1362619 - RNA, 19 nt, Homo sapiens
  misc_RNA (1)...(19): siRNA sense strand
gccaggaggagaaugaaga

SEQ ID NO: 1362620 - RNA, 19 nt, Homo sapiens
  misc_RNA (1)...(19): siRNA sense strand
gcaugaacacccacuguac

SEQ ID NO: 1362621 - RNA, 19 nt, Homo sapiens
  misc_RNA (1)...(19): siRNA sense strand
agagaaagaagagagcaaa

SEQ ID NO: 1362622 - RNA, 19 nt, Homo sapiens
  misc_RNA (1)...(19): siRNA sense strand
uaauugaacgggucgagau

SEQ ID NO: 1362623 - RNA, 19 nt, Homo sapiens
  misc_RNA (1)...(19): siRNA sense strand
cggcucgucuacuccaugu

SEQ ID NO: 1362624 - RNA, 19 nt, Homo sapiens
  misc_RNA (1)...(19): siRNA sense strand
agacagaucugcaugaaca

SEQ ID NO: 1362625 - RNA, 19 nt, Homo sapiens
  misc_RNA (1)...(19): siRNA sense strand
ggaagaucuuugccuuuga

SEQ ID NO: 1362626 - RNA, 19 nt, Homo sapiens
  misc_RNA (1)...(19): siRNA sense strand
ucacuuggcugcucuucug

SEQ ID NO: 1362627 - RNA, 19 nt, Homo sapiens
  misc_RNA (1)...(19): siRNA sense strand
gaagaucuuugccuuugac

SEQ ID NO: 1362628 - RNA, 19 nt, Homo sapiens
  misc_RNA (1)...(19): siRNA sense strand
caauaaagaccagucacuu

SEQ ID NO: 1362629 - RNA, 19 nt, Homo sapiens
  misc_RNA (1)...(19): siRNA sense strand
gcaauaaagaccagucacu

SEQ ID NO: 1362630 - RNA, 19 nt, Homo sapiens
  misc_RNA (1)...(19): siRNA sense strand
aauaaagaccagucacuug

SEQ ID NO: 1362631 - RNA, 19 nt, Homo sapiens
  misc_RNA (1)...(19): siRNA sense strand
gccaggaggagaaugaaga

SEQ ID NO: 1362632 - RNA, 19 nt, Homo sapiens
  misc_RNA (1)...(19): siRNA sense strand
gcaugaacacccacuguac

SEQ ID NO: 1362633 - RNA, 19 nt, Homo sapiens
  misc_RNA (1)...(19): siRNA sense strand
cuucuucguugcuguaauu

SEQ ID NO: 1362634 - RNA, 19 nt, Homo sapiens
  misc_RNA (1)...(19): siRNA sense strand
cuucguugcuguaauugaa

SEQ ID NO: 1362635 - RNA, 19 nt, Homo sapiens
  misc_RNA (1)...(19): siRNA sense strand
gccaggaggagaaugaaga

SEQ ID NO: 1362636 - RNA, 19 nt, Homo sapiens
  misc_RNA (1)...(19): siRNA sense strand
ccaaguaacucuccucuuu

SEQ ID NO: 1362637 - RNA, 19 nt, Homo sapiens
  misc_RNA (1)...(19): siRNA sense strand
gaagcgagaugaauccuau

SEQ ID NO: 1362638 - RNA, 19 nt, Homo sapiens
  misc_RNA (1)...(19): siRNA sense strand
caaaguaggucuuccagau

SEQ ID NO: 1362639 - RNA, 19 nt, Homo sapiens
  misc_RNA (1)...(19): siRNA sense strand
ggauugauauucuugacua

SEQ ID NO: 1362640 - RNA, 19 nt, Homo sapiens
  misc_RNA (1)...(19): siRNA sense strand
caaauggacugaagcugaa

SEQ ID NO: 1362641 - RNA, 19 nt, Homo sapiens
  misc_RNA (1)...(19): siRNA sense strand
gguuugagcugaugcguuu

SEQ ID NO: 1362642 - RNA, 19 nt, Homo sapiens
  misc_RNA (1)...(19): siRNA sense strand
gaaccaagacucacuuaga

SEQ ID NO: 1362643 - RNA, 19 nt, Homo sapiens
  misc_RNA (1)...(19): siRNA sense strand
acaaggagaugccuauuga

SEQ ID NO: 1362644 - RNA, 19 nt, Homo sapiens
  misc_RNA (1)...(19): siRNA sense strand
ccaaagacuucccagguuu

SEQ ID NO: 1362645 - RNA, 19 nt, Homo sapiens
  misc_RNA (1)...(19): siRNA sense strand
gaaaaugccucuuccuuug

SEQ ID NO: 1362646 - RNA, 19 nt, Homo sapiens
  misc_RNA (1)...(19): siRNA sense strand
gagcauacguggaacuuca

SEQ ID NO: 1362647 - RNA, 19 nt, Homo sapiens
  misc_RNA (1)...(19): siRNA sense strand
agauacagcuugauccaua

SEQ ID NO: 1362648 - RNA, 19 nt, Homo sapiens
  misc_RNA (1)...(19): siRNA sense strand
agaagucucugaaagcuaa

SEQ ID NO: 1362649 - RNA, 19 nt, Homo sapiens
  misc_RNA (1)...(19): siRNA sense strand
gaaucaaggugucuguaga

SEQ ID NO: 1362650 - RNA, 19 nt, Homo sapiens
  misc_RNA (1)...(19): siRNA sense strand
gcgcagaggucauccuaug

SEQ ID NO: 1362651 - RNA, 19 nt, Homo sapiens
  misc_RNA (1)...(19): siRNA sense strand
ggagaugccuauugaccaa

SEQ ID NO: 1362652 - RNA, 19 nt, Homo sapiens
  misc_RNA (1)...(19): siRNA sense strand
gagaugaauccuauuauga

SEQ ID NO: 1362653 - RNA, 19 nt, Homo sapiens
  misc_RNA (1)...(19): siRNA sense strand
uuaaagagauacagcuuga

SEQ ID NO: 1362654 - RNA, 19 nt, Homo sapiens
  misc_RNA (1)...(19): siRNA sense strand
agacagaaguaguucauga

SEQ ID NO: 1362655 - RNA, 19 nt, Homo sapiens
  misc_RNA (1)...(19): siRNA sense strand
gugagaagcuugaacaucu

SEQ ID NO: 1362656 - RNA, 19 nt, Homo sapiens
  misc_RNA (1)...(19): siRNA sense strand
guugagaacuucaguguag

SEQ ID NO: 1362657 - RNA, 19 nt, Homo sapiens
  misc_RNA (1)...(19): siRNA sense strand
gagcaaucaagaaucauua

SEQ ID NO: 1362658 - RNA, 19 nt, Homo sapiens
  misc_RNA (1)...(19): siRNA sense strand
gaaauucccucugauuggu

SEQ ID NO: 1362659 - RNA, 19 nt, Homo sapiens
  misc_RNA (1)...(19): siRNA sense strand
aggaggagcugaugaaguu

SEQ ID NO: 1362660 - RNA, 19 nt, Homo sapiens
  misc_RNA (1)...(19): siRNA sense strand
caaauuagagcuuggauca

SEQ ID NO: 1362661 - RNA, 19 nt, Homo sapiens
  misc_RNA (1)...(19): siRNA sense strand
cgagaugaauccuauuaug

SEQ ID NO: 1362662 - RNA, 19 nt, Homo sapiens
  misc_RNA (1)...(19): siRNA sense strand
gaaacaaggagaugccuau

SEQ ID NO: 1362663 - RNA, 19 nt, Homo sapiens
  misc_RNA (1)...(19): siRNA sense strand
gcagcgagcuugcuacaac

SEQ ID NO: 1362664 - RNA, 19 nt, Homo sapiens
  misc_RNA (1)...(19): siRNA sense strand
gcagugguauggaagauag

SEQ ID NO: 1362665 - RNA, 19 nt, Homo sapiens
  misc_RNA (1)...(19): siRNA sense strand
gaugaauccuauuaugaga

SEQ ID NO: 1362666 - RNA, 19 nt, Homo sapiens
  misc_RNA (1)...(19): siRNA sense strand
gcagauguauuaugaacag

SEQ ID NO: 1362667 - RNA, 19 nt, Homo sapiens
  misc_RNA (1)...(19): siRNA sense strand
gcuguucaaucuucucaaa

SEQ ID NO: 1362668 - RNA, 19 nt, Homo sapiens
  misc_RNA (1)...(19): siRNA sense strand
caagaaauucccucugauu

SEQ ID NO: 1362669 - RNA, 19 nt, Homo sapiens
  misc_RNA (1)...(19): siRNA sense strand
aaccaagacucacuuagaa

SEQ ID NO: 1362670 - RNA, 19 nt, Homo sapiens
  misc_RNA (1)...(19): siRNA sense strand
gcugugauaacucaaauuu

SEQ ID NO: 1362671 - RNA, 19 nt, Homo sapiens
  misc_RNA (1)...(19): siRNA sense strand
gaacuacgaggagcaagaa

SEQ ID NO: 1362672 - RNA, 19 nt, Homo sapiens
  misc_RNA (1)...(19): siRNA sense strand
gaaccugucauucaaguca

SEQ ID NO: 1362673 - RNA, 19 nt, Homo sapiens
  misc_RNA (1)...(19): siRNA sense strand
guacaagaauuugagcaau

SEQ ID NO: 1362674 - RNA, 19 nt, Homo sapiens
  misc_RNA (1)...(19): siRNA sense strand
gagcugaugcguuucaaga

SEQ ID NO: 1362675 - RNA, 19 nt, Homo sapiens
  misc_RNA (1)...(19): siRNA sense strand
ggacucaugugcuuuaucc

SEQ ID NO: 1362676 - RNA, 19 nt, Homo sapiens
  misc_RNA (1)...(19): siRNA sense strand
uaaaauuggugacugcaua

SEQ ID NO: 1362677 - RNA, 19 nt, Homo sapiens
  misc_RNA (1)...(19): siRNA sense strand
gaaguugccagcuguuuca

SEQ ID NO: 1362678 - RNA, 19 nt, Homo sapiens
  misc_RNA (1)...(19): siRNA sense strand
gaagaagaauaugaugucu

SEQ ID NO: 1362679 - RNA, 19 nt, Homo sapiens
  misc_RNA (1)...(19): siRNA sense strand
gauacagcuugauccauau

SEQ ID NO: 1362680 - RNA, 19 nt, Homo sapiens
  misc_RNA (1)...(19): siRNA sense strand
agauugaacaugugucuua

SEQ ID NO: 1362681 - RNA, 19 nt, Homo sapiens
  misc_RNA (1)...(19): siRNA sense strand
gagaaccaagacucacuua

SEQ ID NO: 1362682 - RNA, 19 nt, Homo sapiens
  misc_RNA (1)...(19): siRNA sense strand
cauccagguugaaauagaa

SEQ ID NO: 1362683 - RNA, 19 nt, Homo sapiens
  misc_RNA (1)...(19): siRNA sense strand
agacagcccacucgcaaua

SEQ ID NO: 1362684 - RNA, 19 nt, Homo sapiens
  misc_RNA (1)...(19): siRNA sense strand
ccacaaauccaggcaaaug

SEQ ID NO: 1362685 - RNA, 19 nt, Homo sapiens
  misc_RNA (1)...(19): siRNA sense strand
aaagugcugugauaacuca

SEQ ID NO: 1362686 - RNA, 19 nt, Homo sapiens
  misc_RNA (1)...(19): siRNA sense strand
gagaauuccugagaagaag

SEQ ID NO: 1362687 - RNA, 19 nt, Homo sapiens
  misc_RNA (1)...(19): siRNA sense strand
gagaagaagaauaugaugu

SEQ ID NO: 1362688 - RNA, 19 nt, Homo sapiens
  misc_RNA (1)...(19): siRNA sense strand
acauccaacucccaaagua

SEQ ID NO: 1362689 - RNA, 19 nt, Homo sapiens
  misc_RNA (1)...(19): siRNA sense strand
aauuagagcuuggaucaga

SEQ ID NO: 1362690 - RNA, 19 nt, Homo sapiens
  misc_RNA (1)...(19): siRNA sense strand
gagcaugucuggggaguuu

SEQ ID NO: 1362691 - RNA, 19 nt, Homo sapiens
  misc_RNA (1)...(19): siRNA sense strand
uuaagguccugugacaaua

SEQ ID NO: 1362692 - RNA, 19 nt, Homo sapiens
  misc_RNA (1)...(19): siRNA sense strand
ucaagacuuuguauaaugg

SEQ ID NO: 1362693 - RNA, 19 nt, Homo sapiens
  misc_RNA (1)...(19): siRNA sense strand
uguugaaagugcugugaua

SEQ ID NO: 1362694 - RNA, 19 nt, Homo sapiens
  misc_RNA (1)...(19): siRNA sense strand
gaaagccuaggauuccaaa

SEQ ID NO: 1362695 - RNA, 19 nt, Homo sapiens
  misc_RNA (1)...(19): siRNA sense strand
aaguaggucuuccagauga

SEQ ID NO: 1362696 - RNA, 19 nt, Homo sapiens
  misc_RNA (1)...(19): siRNA sense strand
ccagggagcauacguggaa

SEQ ID NO: 1362697 - RNA, 19 nt, Homo sapiens
  misc_RNA (1)...(19): siRNA sense strand
ccagucagcugagaaccaa

SEQ ID NO: 1362698 - RNA, 19 nt, Homo sapiens
  misc_RNA (1)...(19): siRNA sense strand
ucaacuauaucugugagaa

SEQ ID NO: 1362699 - RNA, 19 nt, Homo sapiens
  misc_RNA (1)...(19): siRNA sense strand
ggaaagaugaaggcaguga

SEQ ID NO: 1362700 - RNA, 19 nt, Homo sapiens
  misc_RNA (1)...(19): siRNA sense strand
gcuugaacaucuccaguca

SEQ ID NO: 1362701 - RNA, 19 nt, Homo sapiens
  misc_RNA (1)...(19): siRNA sense strand
accaagaaauucccucuga

SEQ ID NO: 1362702 - RNA, 19 nt, Homo sapiens
  misc_RNA (1)...(19): siRNA sense strand
acaagaauuugagcaauca

SEQ ID NO: 1362703 - RNA, 19 nt, Homo sapiens
  misc_RNA (1)...(19): siRNA sense strand
ucauaagugugugaaugua

SEQ ID NO: 1362704 - RNA, 19 nt, Homo sapiens
  misc_RNA (1)...(19): siRNA sense strand
ugaaagugcugugauaacu

SEQ ID NO: 1362705 - RNA, 19 nt, Homo sapiens
  misc_RNA (1)...(19): siRNA sense strand
gcugagaauuccugagaag

SEQ ID NO: 1362706 - RNA, 19 nt, Homo sapiens
  misc_RNA (1)...(19): siRNA sense strand
gauccauauuguaggcuuu

SEQ ID NO: 1362707 - RNA, 19 nt, Homo sapiens
  misc_RNA (1)...(19): siRNA sense strand
ccaagaaauucccucugau

SEQ ID NO: 1362708 - RNA, 19 nt, Homo sapiens
  misc_RNA (1)...(19): siRNA sense strand
uagaucggcuuccagacaa

SEQ ID NO: 1362709 - RNA, 19 nt, Homo sapiens
  misc_RNA (1)...(19): siRNA sense strand
ugagaauuccugagaagaa

SEQ ID NO: 1362710 - RNA, 19 nt, Homo sapiens
  misc_RNA (1)...(19): siRNA sense strand
cuacgaggagcaagaaauu

SEQ ID NO: 1362711 - RNA, 19 nt, Homo sapiens
  misc_RNA (1)...(19): siRNA sense strand
gaagauugaacaugugucu

SEQ ID NO: 1362712 - RNA, 19 nt, Homo sapiens
  misc_RNA (1)...(19): siRNA sense strand
cuugaagucuguagugguu

SEQ ID NO: 1362713 - RNA, 19 nt, Homo sapiens
  misc_RNA (1)...(19): siRNA sense strand
uuuaucccaugccuuguua

SEQ ID NO: 1362714 - RNA, 19 nt, Homo sapiens
  misc_RNA (1)...(19): siRNA sense strand
uggagaagacccagauaaa

SEQ ID NO: 1362715 - RNA, 19 nt, Homo sapiens
  misc_RNA (1)...(19): siRNA sense strand
uacaagaauuugagcaauc

SEQ ID NO: 1362716 - RNA, 19 nt, Homo sapiens
  misc_RNA (1)...(19): siRNA sense strand
ggucuuucaugcugagaau

SEQ ID NO: 1362717 - RNA, 19 nt, Homo sapiens
  misc_RNA (1)...(19): siRNA sense strand
ccagaaucaucuucagaca

SEQ ID NO: 1362718 - RNA, 19 nt, Homo sapiens
  misc_RNA (1)...(19): siRNA sense strand
gagaagacccagauaaaau

SEQ ID NO: 1362719 - RNA, 19 nt, Homo sapiens
  misc_RNA (1)...(19): siRNA sense strand
uggaucagaccaagaaauu

SEQ ID NO: 1362720 - RNA, 19 nt, Homo sapiens
  misc_RNA (1)...(19): siRNA sense strand
gugugaauguacaagaauu

SEQ ID NO: 1362721 - RNA, 19 nt, Homo sapiens
  misc_RNA (1)...(19): siRNA sense strand
gacagaaguaguucaugaa

SEQ ID NO: 1362722 - RNA, 19 nt, Homo sapiens
  misc_RNA (1)...(19): siRNA sense strand
cagggacucaugugcuuua

SEQ ID NO: 1362723 - RNA, 19 nt, Homo sapiens
  misc_RNA (1)...(19): siRNA sense strand
ugaauccuauuaugagaag

SEQ ID NO: 1362724 - RNA, 19 nt, Homo sapiens
  misc_RNA (1)...(19): siRNA sense strand
ucuaugcacugucuaugug

SEQ ID NO: 1362725 - RNA, 19 nt, Homo sapiens
  misc_RNA (1)...(19): siRNA sense strand
uaacucuccucuuucuaca

SEQ ID NO: 1362726 - RNA, 19 nt, Homo sapiens
  misc_RNA (1)...(19): siRNA sense strand
aagguccugugacaauaua

SEQ ID NO: 1362727 - RNA, 19 nt, Homo sapiens
  misc_RNA (1)...(19): siRNA sense strand
gugugugaauguacaagaa

SEQ ID NO: 1362728 - RNA, 19 nt, Homo sapiens
  misc_RNA (1)...(19): siRNA sense strand
aaagaugaaggcagugauu

SEQ ID NO: 1362729 - RNA, 19 nt, Homo sapiens
  misc_RNA (1)...(19): siRNA sense strand
gaauuccugagaagaagaa

SEQ ID NO: 1362730 - RNA, 19 nt, Homo sapiens
  misc_RNA (1)...(19): siRNA sense strand
guaacucuccucuuucuac

SEQ ID NO: 1362731 - RNA, 19 nt, Homo sapiens
  misc_RNA (1)...(19): siRNA sense strand
ggagaagacccagauaaaa

SEQ ID NO: 1362732 - RNA, 19 nt, Homo sapiens
  misc_RNA (1)...(19): siRNA sense strand
gaauguacaagaauuugag

SEQ ID NO: 1362733 - RNA, 19 nt, Homo sapiens
  misc_RNA (1)...(19): siRNA sense strand
gggguaaagucacaaaaga

SEQ ID NO: 1362734 - RNA, 19 nt, Homo sapiens
  misc_RNA (1)...(19): siRNA sense strand
gagaaucaaggugucugua

SEQ ID NO: 1362735 - RNA, 19 nt, Homo sapiens
  misc_RNA (1)...(19): siRNA sense strand
gguauccauuugcuacugu

SEQ ID NO: 1362736 - RNA, 19 nt, Homo sapiens
  misc_RNA (1)...(19): siRNA sense strand
gaagguaccugaagaagaa

SEQ ID NO: 1362737 - RNA, 19 nt, Homo sapiens
  misc_RNA (1)...(19): siRNA sense strand
gaagaggacccuuuaaauu

SEQ ID NO: 1362738 - RNA, 19 nt, Homo sapiens
  misc_RNA (1)...(19): siRNA sense strand
guaaagcaaccaagaaaua

SEQ ID NO: 1362739 - RNA, 19 nt, Homo sapiens
  misc_RNA (1)...(19): siRNA sense strand
agaagaagcugacaguauu

SEQ ID NO: 1362740 - RNA, 19 nt, Homo sapiens
  misc_RNA (1)...(19): siRNA sense strand
ggaaaguucucacuauauc

SEQ ID NO: 1362741 - RNA, 19 nt, Homo sapiens
  misc_RNA (1)...(19): siRNA sense strand
ccacaggucucucaaacaa

SEQ ID NO: 1362742 - RNA, 19 nt, Homo sapiens
  misc_RNA (1)...(19): siRNA sense strand
ucaacagcaucauuaguua

SEQ ID NO: 1362743 - RNA, 19 nt, Homo sapiens
  misc_RNA (1)...(19): siRNA sense strand
caggaaaguucucacuaua

SEQ ID NO: 1362744 - RNA, 19 nt, Homo sapiens
  misc_RNA (1)...(19): siRNA sense strand
gcaaguauuucaacagcuu

SEQ ID NO: 1362745 - RNA, 19 nt, Homo sapiens
  misc_RNA (1)...(19): siRNA sense strand
gaagaaauaggaaguacaa

SEQ ID NO: 1362746 - RNA, 19 nt, Homo sapiens
  misc_RNA (1)...(19): siRNA sense strand
gauuuaagcauucggguua

SEQ ID NO: 1362747 - RNA, 19 nt, Homo sapiens
  misc_RNA (1)...(19): siRNA sense strand
gaaucuauuugcugaagaa

SEQ ID NO: 1362748 - RNA, 19 nt, Homo sapiens
  misc_RNA (1)...(19): siRNA sense strand
aaacuaguguuccacaauu

SEQ ID NO: 1362749 - RNA, 19 nt, Homo sapiens
  misc_RNA (1)...(19): siRNA sense strand
ggugauacaucuuccaaug

SEQ ID NO: 1362750 - RNA, 19 nt, Homo sapiens
  misc_RNA (1)...(19): siRNA sense strand
ugaagaagguauagaggaa

SEQ ID NO: 1362751 - RNA, 19 nt, Homo sapiens
  misc_RNA (1)...(19): siRNA sense strand
guauggaugugauucugua

SEQ ID NO: 1362752 - RNA, 19 nt, Homo sapiens
  misc_RNA (1)...(19): siRNA sense strand
uaaugaagacccucaagua

SEQ ID NO: 1362753 - RNA, 19 nt, Homo sapiens
  misc_RNA (1)...(19): siRNA sense strand
ccgcacagcuugcaccaaa

SEQ ID NO: 1362754 - RNA, 19 nt, Homo sapiens
  misc_RNA (1)...(19): siRNA sense strand
gaaugaauuucuagggaau

SEQ ID NO: 1362755 - RNA, 19 nt, Homo sapiens
  misc_RNA (1)...(19): siRNA sense strand
aaacuccagugcaaacuuu

SEQ ID NO: 1362756 - RNA, 19 nt, Homo sapiens
  misc_RNA (1)...(19): siRNA sense strand
gcauucggguuacugauga

SEQ ID NO: 1362757 - RNA, 19 nt, Homo sapiens
  misc_RNA (1)...(19): siRNA sense strand
ucaggaaaguucucacuau

SEQ ID NO: 1362758 - RNA, 19 nt, Homo sapiens
  misc_RNA (1)...(19): siRNA sense strand
gaaaaugccaccagugaua

SEQ ID NO: 1362759 - RNA, 19 nt, Homo sapiens
  misc_RNA (1)...(19): siRNA sense strand
ugauacaucuuccaaugaa

SEQ ID NO: 1362760 - RNA, 19 nt, Homo sapiens
  misc_RNA (1)...(19): siRNA sense strand
gaacugggcacuucaaacu

SEQ ID NO: 1362761 - RNA, 19 nt, Homo sapiens
  misc_RNA (1)...(19): siRNA sense strand
gaagaagcugacaguauuu

SEQ ID NO: 1362762 - RNA, 19 nt, Homo sapiens
  misc_RNA (1)...(19): siRNA sense strand
gauaggaaacacuuagaaa

SEQ ID NO: 1362763 - RNA, 19 nt, Homo sapiens
  misc_RNA (1)...(19): siRNA sense strand
ucagguggauuuaagcauu

SEQ ID NO: 1362764 - RNA, 19 nt, Homo sapiens
  misc_RNA (1)...(19): siRNA sense strand
gaauuucuagggaauauug

SEQ ID NO: 1362765 - RNA, 19 nt, Homo sapiens
  misc_RNA (1)...(19): siRNA sense strand
gaaauaggaaguacaagag

SEQ ID NO: 1362766 - RNA, 19 nt, Homo sapiens
  misc_RNA (1)...(19): siRNA sense strand
cagcagaacugggcacuuc

SEQ ID NO: 1362767 - RNA, 19 nt, Homo sapiens
  misc_RNA (1)...(19): siRNA sense strand
uggccagccuucaguaaua

SEQ ID NO: 1362768 - RNA, 19 nt, Homo sapiens
  misc_RNA (1)...(19): siRNA sense strand
ccacaaacaguagugauaa

SEQ ID NO: 1362769 - RNA, 19 nt, Homo sapiens
  misc_RNA (1)...(19): siRNA sense strand
gaagaagaagcugacagua

SEQ ID NO: 1362770 - RNA, 19 nt, Homo sapiens
  misc_RNA (1)...(19): siRNA sense strand
guuauugucugucaguaug

SEQ ID NO: 1362771 - RNA, 19 nt, Homo sapiens
  misc_RNA (1)...(19): siRNA sense strand
ugaagacccucaaguaaac

SEQ ID NO: 1362772 - RNA, 19 nt, Homo sapiens
  misc_RNA (1)...(19): siRNA sense strand
uaucuggucaccuuuauaa

SEQ ID NO: 1362773 - RNA, 19 nt, Homo sapiens
  misc_RNA (1)...(19): siRNA sense strand
guacaagagaugcagauga

SEQ ID NO: 1362774 - RNA, 19 nt, Homo sapiens
  misc_RNA (1)...(19): siRNA sense strand
ugaaggaguucggaaucua

SEQ ID NO: 1362775 - RNA, 19 nt, Homo sapiens
  misc_RNA (1)...(19): siRNA sense strand
gagaugcagaugagaauga

SEQ ID NO: 1362776 - RNA, 19 nt, Homo sapiens
  misc_RNA (1)...(19): siRNA sense strand
uagaagaggacccuuuaaa

SEQ ID NO: 1362777 - RNA, 19 nt, Homo sapiens
  misc_RNA (1)...(19): siRNA sense strand
caaacaguagugauaauga

SEQ ID NO: 1362778 - RNA, 19 nt, Homo sapiens
  misc_RNA (1)...(19): siRNA sense strand
gaaggaguucggaaucuau

SEQ ID NO: 1362779 - RNA, 19 nt, Homo sapiens
  misc_RNA (1)...(19): siRNA sense strand
caagagaugcagaugagaa

SEQ ID NO: 1362780 - RNA, 19 nt, Homo sapiens
  misc_RNA (1)...(19): siRNA sense strand
acaggucucucaaacaaau

SEQ ID NO: 1362781 - RNA, 19 nt, Homo sapiens
  misc_RNA (1)...(19): siRNA sense strand
gacuguaucuggucaccuu

SEQ ID NO: 1362782 - RNA, 19 nt, Homo sapiens
  misc_RNA (1)...(19): siRNA sense strand
aagaggacccuuuaaauuc

SEQ ID NO: 1362783 - RNA, 19 nt, Homo sapiens
  misc_RNA (1)...(19): siRNA sense strand
cuaauucucagguggauuu

SEQ ID NO: 1362784 - RNA, 19 nt, Homo sapiens
  misc_RNA (1)...(19): siRNA sense strand
caccagugauauacuugua

SEQ ID NO: 1362785 - RNA, 19 nt, Homo sapiens
  misc_RNA (1)...(19): siRNA sense strand
ggaaucuauuugcugaaga

SEQ ID NO: 1362786 - RNA, 19 nt, Homo sapiens
  misc_RNA (1)...(19): siRNA sense strand
gccacaaacaguagugaua

SEQ ID NO: 1362787 - RNA, 19 nt, Homo sapiens
  misc_RNA (1)...(19): siRNA sense strand
ggaugugccagaccuguuu

SEQ ID NO: 1362788 - RNA, 19 nt, Homo sapiens
  misc_RNA (1)...(19): siRNA sense strand
cauccaaucaccucuguuu

SEQ ID NO: 1362789 - RNA, 19 nt, Homo sapiens
  misc_RNA (1)...(19): siRNA sense strand
aaugaagacccucaaguaa

SEQ ID NO: 1362790 - RNA, 19 nt, Homo sapiens
  misc_RNA (1)...(19): siRNA sense strand
gaagcuuuguugugucauc

SEQ ID NO: 1362791 - RNA, 19 nt, Homo sapiens
  misc_RNA (1)...(19): siRNA sense strand
gucaacagcaucauuaguu

SEQ ID NO: 1362792 - RNA, 19 nt, Homo sapiens
  misc_RNA (1)...(19): siRNA sense strand
guagauggaagcggugaua

SEQ ID NO: 1362793 - RNA, 19 nt, Homo sapiens
  misc_RNA (1)...(19): siRNA sense strand
gguuacugaugaugauauu

SEQ ID NO: 1362794 - RNA, 19 nt, Homo sapiens
  misc_RNA (1)...(19): siRNA sense strand
agaggaacccagcaacaua

SEQ ID NO: 1362795 - RNA, 19 nt, Homo sapiens
  misc_RNA (1)...(19): siRNA sense strand
aaucgugccugaagcuuug

SEQ ID NO: 1362796 - RNA, 19 nt, Homo sapiens
  misc_RNA (1)...(19): siRNA sense strand
ccaauuauggugacagaga

SEQ ID NO: 1362797 - RNA, 19 nt, Homo sapiens
  misc_RNA (1)...(19): siRNA sense strand
uguagaagaggacccuuua

SEQ ID NO: 1362798 - RNA, 19 nt, Homo sapiens
  misc_RNA (1)...(19): siRNA sense strand
gaagcugacaguauuucaa

SEQ ID NO: 1362799 - RNA, 19 nt, Homo sapiens
  misc_RNA (1)...(19): siRNA sense strand
gaaaguucucacuauauca

SEQ ID NO: 1362800 - RNA, 19 nt, Homo sapiens
  misc_RNA (1)...(19): siRNA sense strand
ggaguucggaaucuauuug

SEQ ID NO: 1362801 - RNA, 19 nt, Homo sapiens
  misc_RNA (1)...(19): siRNA sense strand
ucaccucuguuuacucuuc

SEQ ID NO: 1362802 - RNA, 19 nt, Homo sapiens
  misc_RNA (1)...(19): siRNA sense strand
uacaagagaugcagaugag

SEQ ID NO: 1362803 - RNA, 19 nt, Homo sapiens
  misc_RNA (1)...(19): siRNA sense strand
agaaauaggaaguacaaga

SEQ ID NO: 1362804 - RNA, 19 nt, Homo sapiens
  misc_RNA (1)...(19): siRNA sense strand
caccagcacgugacugaua

SEQ ID NO: 1362805 - RNA, 19 nt, Homo sapiens
  misc_RNA (1)...(19): siRNA sense strand
guaauacaaacuaguguuc

SEQ ID NO: 1362806 - RNA, 19 nt, Homo sapiens
  misc_RNA (1)...(19): siRNA sense strand
agaagaggacccuuuaaau

SEQ ID NO: 1362807 - RNA, 19 nt, Homo sapiens
  misc_RNA (1)...(19): siRNA sense strand
aagaagaagcugacaguau

SEQ ID NO: 1362808 - RNA, 19 nt, Homo sapiens
  misc_RNA (1)...(19): siRNA sense strand
gcauccaauucagcaagua

SEQ ID NO: 1362809 - RNA, 19 nt, Homo sapiens
  misc_RNA (1)...(19): siRNA sense strand
gaauugaaaccgugcuaca

SEQ ID NO: 1362810 - RNA, 19 nt, Homo sapiens
  misc_RNA (1)...(19): siRNA sense strand
caacagcaucauuaguuau

SEQ ID NO: 1362811 - RNA, 19 nt, Homo sapiens
  misc_RNA (1)...(19): siRNA sense strand
agaggacccuuuaaauucu

SEQ ID NO: 1362812 - RNA, 19 nt, Homo sapiens
  misc_RNA (1)...(19): siRNA sense strand
guagaagaggacccuuuaa

SEQ ID NO: 1362813 - RNA, 19 nt, Homo sapiens
  misc_RNA (1)...(19): siRNA sense strand
caaacuaguguuccacaau

SEQ ID NO: 1362814 - RNA, 19 nt, Homo sapiens
  misc_RNA (1)...(19): siRNA sense strand
ccagugcaaacuuuacuuu

SEQ ID NO: 1362815 - RNA, 19 nt, Homo sapiens
  misc_RNA (1)...(19): siRNA sense strand
gcacagcuugcaccaaaca

SEQ ID NO: 1362816 - RNA, 19 nt, Homo sapiens
  misc_RNA (1)...(19): siRNA sense strand
cacaaacaguagugauaau

SEQ ID NO: 1362817 - RNA, 19 nt, Homo sapiens
  misc_RNA (1)...(19): siRNA sense strand
ugccuaaacucuacagauc

SEQ ID NO: 1362818 - RNA, 19 nt, Homo sapiens
  misc_RNA (1)...(19): siRNA sense strand
gccugaagcuuuguugugu

SEQ ID NO: 1362819 - RNA, 19 nt, Homo sapiens
  misc_RNA (1)...(19): siRNA sense strand
guagauaggaaacacuuag

SEQ ID NO: 1362820 - RNA, 19 nt, Homo sapiens
  misc_RNA (1)...(19): siRNA sense strand
ucuuccagguguuguauuu

SEQ ID NO: 1362821 - RNA, 19 nt, Homo sapiens
  misc_RNA (1)...(19): siRNA sense strand
gaaaugagcauaaaaucgu

SEQ ID NO: 1362822 - RNA, 19 nt, Homo sapiens
  misc_RNA (1)...(19): siRNA sense strand
ccuaaacucuacagaucug

SEQ ID NO: 1362823 - RNA, 19 nt, Homo sapiens
  misc_RNA (1)...(19): siRNA sense strand
ccaaucaccucuguuuacu

SEQ ID NO: 1362824 - RNA, 19 nt, Homo sapiens
  misc_RNA (1)...(19): siRNA sense strand
uggaagcggugauacaucu

SEQ ID NO: 1362825 - RNA, 19 nt, Homo sapiens
  misc_RNA (1)...(19): siRNA sense strand
aaucaccucuguuuacucu

SEQ ID NO: 1362826 - RNA, 19 nt, Homo sapiens
  misc_RNA (1)...(19): siRNA sense strand
ugguagaacucuuccaagu

SEQ ID NO: 1362827 - RNA, 19 nt, Homo sapiens
  misc_RNA (1)...(19): siRNA sense strand
ucuauuugcugaagaaggu

SEQ ID NO: 1362828 - RNA, 19 nt, Homo sapiens
  misc_RNA (1)...(19): siRNA sense strand
cuucagaaauagcauccaa

SEQ ID NO: 1362829 - RNA, 19 nt, Homo sapiens
  misc_RNA (1)...(19): siRNA sense strand
ugaagcagcucugggaaac

SEQ ID NO: 1362830 - RNA, 19 nt, Homo sapiens
  misc_RNA (1)...(19): siRNA sense strand
gguauagaggaacaaguuu

SEQ ID NO: 1362831 - RNA, 19 nt, Homo sapiens
  misc_RNA (1)...(19): siRNA sense strand
agauguaauugaaggaguu

SEQ ID NO: 1362832 - RNA, 19 nt, Homo sapiens
  misc_RNA (1)...(19): siRNA sense strand
ucuguuuacucuucaguug

SEQ ID NO: 1362833 - RNA, 19 nt, Homo sapiens
  misc_RNA (1)...(19): siRNA sense strand
gagaauugaaaccgugcua

SEQ ID NO: 1362834 - RNA, 19 nt, Homo sapiens
  misc_RNA (1)...(19): siRNA sense strand
caauucagcaaguauuuca

SEQ ID NO: 1362835 - RNA, 19 nt, Homo sapiens
  misc_RNA (1)...(19): siRNA sense strand
caaguaaacauuguagaag

SEQ ID NO: 1362836 - RNA, 19 nt, Homo sapiens
  misc_RNA (1)...(19): siRNA sense strand
gaagguaccugaagaagaa

SEQ ID NO: 1362837 - RNA, 19 nt, Homo sapiens
  misc_RNA (1)...(19): siRNA sense strand
gaagaggacccuuuaaauu

SEQ ID NO: 1362838 - RNA, 19 nt, Homo sapiens
  misc_RNA (1)...(19): siRNA sense strand
guaaagcaaccaagaaaua

SEQ ID NO: 1362839 - RNA, 19 nt, Homo sapiens
  misc_RNA (1)...(19): siRNA sense strand
agaagaagcugacaguauu

SEQ ID NO: 1362840 - RNA, 19 nt, Homo sapiens
  misc_RNA (1)...(19): siRNA sense strand
ggaaaguucucacuauauc

SEQ ID NO: 1362841 - RNA, 19 nt, Homo sapiens
  misc_RNA (1)...(19): siRNA sense strand
ccacaggucucucaaacaa

SEQ ID NO: 1362842 - RNA, 19 nt, Homo sapiens
  misc_RNA (1)...(19): siRNA sense strand
ucaacagcaucauuaguua

SEQ ID NO: 1362843 - RNA, 19 nt, Homo sapiens
  misc_RNA (1)...(19): siRNA sense strand
caggaaaguucucacuaua

SEQ ID NO: 1362844 - RNA, 19 nt, Homo sapiens
  misc_RNA (1)...(19): siRNA sense strand
gcaaguauuucaacagcuu

SEQ ID NO: 1362845 - RNA, 19 nt, Homo sapiens
  misc_RNA (1)...(19): siRNA sense strand
gaagaaauaggaaguacaa

SEQ ID NO: 1362846 - RNA, 19 nt, Homo sapiens
  misc_RNA (1)...(19): siRNA sense strand
gauuuaagcauucggguua

SEQ ID NO: 1362847 - RNA, 19 nt, Homo sapiens
  misc_RNA (1)...(19): siRNA sense strand
gaaucuauuugcugaagaa

SEQ ID NO: 1362848 - RNA, 19 nt, Homo sapiens
  misc_RNA (1)...(19): siRNA sense strand
aaacuaguguuccacaauu

SEQ ID NO: 1362849 - RNA, 19 nt, Homo sapiens
  misc_RNA (1)...(19): siRNA sense strand
ggugauacaucuuccaaug

SEQ ID NO: 1362850 - RNA, 19 nt, Homo sapiens
  misc_RNA (1)...(19): siRNA sense strand
ugaagaagguauagaggaa

SEQ ID NO: 1362851 - RNA, 19 nt, Homo sapiens
  misc_RNA (1)...(19): siRNA sense strand
guauggaugugauucugua

SEQ ID NO: 1362852 - RNA, 19 nt, Homo sapiens
  misc_RNA (1)...(19): siRNA sense strand
uaaugaagacccucaagua

SEQ ID NO: 1362853 - RNA, 19 nt, Homo sapiens
  misc_RNA (1)...(19): siRNA sense strand
ccgcacagcuugcaccaaa

SEQ ID NO: 1362854 - RNA, 19 nt, Homo sapiens
  misc_RNA (1)...(19): siRNA sense strand
gaaugaauuucuagggaau

SEQ ID NO: 1362855 - RNA, 19 nt, Homo sapiens
  misc_RNA (1)...(19): siRNA sense strand
aaacuccagugcaaacuuu

SEQ ID NO: 1362856 - RNA, 19 nt, Homo sapiens
  misc_RNA (1)...(19): siRNA sense strand
gcauucggguuacugauga

SEQ ID NO: 1362857 - RNA, 19 nt, Homo sapiens
  misc_RNA (1)...(19): siRNA sense strand
ucaggaaaguucucacuau

SEQ ID NO: 1362858 - RNA, 19 nt, Homo sapiens
  misc_RNA (1)...(19): siRNA sense strand
gaaaaugccaccagugaua

SEQ ID NO: 1362859 - RNA, 19 nt, Homo sapiens
  misc_RNA (1)...(19): siRNA sense strand
ugauacaucuuccaaugaa

SEQ ID NO: 1362860 - RNA, 19 nt, Homo sapiens
  misc_RNA (1)...(19): siRNA sense strand
gaacugggcacuucaaacu

SEQ ID NO: 1362861 - RNA, 19 nt, Homo sapiens
  misc_RNA (1)...(19): siRNA sense strand
gaagaagcugacaguauuu

SEQ ID NO: 1362862 - RNA, 19 nt, Homo sapiens
  misc_RNA (1)...(19): siRNA sense strand
gauaggaaacacuuagaaa

SEQ ID NO: 1362863 - RNA, 19 nt, Homo sapiens
  misc_RNA (1)...(19): siRNA sense strand
ucagguggauuuaagcauu

SEQ ID NO: 1362864 - RNA, 19 nt, Homo sapiens
  misc_RNA (1)...(19): siRNA sense strand
gaauuucuagggaauauug

SEQ ID NO: 1362865 - RNA, 19 nt, Homo sapiens
  misc_RNA (1)...(19): siRNA sense strand
gaaauaggaaguacaagag

SEQ ID NO: 1362866 - RNA, 19 nt, Homo sapiens
  misc_RNA (1)...(19): siRNA sense strand
cagcagaacugggcacuuc

SEQ ID NO: 1362867 - RNA, 19 nt, Homo sapiens
  misc_RNA (1)...(19): siRNA sense strand
uggccagccuucaguaaua

SEQ ID NO: 1362868 - RNA, 19 nt, Homo sapiens
  misc_RNA (1)...(19): siRNA sense strand
ccacaaacaguagugauaa

SEQ ID NO: 1362869 - RNA, 19 nt, Homo sapiens
  misc_RNA (1)...(19): siRNA sense strand
gaagaagaagcugacagua

SEQ ID NO: 1362870 - RNA, 19 nt, Homo sapiens
  misc_RNA (1)...(19): siRNA sense strand
guuauugucugucaguaug

SEQ ID NO: 1362871 - RNA, 19 nt, Homo sapiens
  misc_RNA (1)...(19): siRNA sense strand
ugaagacccucaaguaaac

SEQ ID NO: 1362872 - RNA, 19 nt, Homo sapiens
  misc_RNA (1)...(19): siRNA sense strand
uaucuggucaccuuuauaa

SEQ ID NO: 1362873 - RNA, 19 nt, Homo sapiens
  misc_RNA (1)...(19): siRNA sense strand
guacaagagaugcagauga

SEQ ID NO: 1362874 - RNA, 19 nt, Homo sapiens
  misc_RNA (1)...(19): siRNA sense strand
ugaaggaguucggaaucua

SEQ ID NO: 1362875 - RNA, 19 nt, Homo sapiens
  misc_RNA (1)...(19): siRNA sense strand
gagaugcagaugagaauga

SEQ ID NO: 1362876 - RNA, 19 nt, Homo sapiens
  misc_RNA (1)...(19): siRNA sense strand
uagaagaggacccuuuaaa

SEQ ID NO: 1362877 - RNA, 19 nt, Homo sapiens
  misc_RNA (1)...(19): siRNA sense strand
caaacaguagugauaauga

SEQ ID NO: 1362878 - RNA, 19 nt, Homo sapiens
  misc_RNA (1)...(19): siRNA sense strand
gaaggaguucggaaucuau

SEQ ID NO: 1362879 - RNA, 19 nt, Homo sapiens
  misc_RNA (1)...(19): siRNA sense strand
caagagaugcagaugagaa

SEQ ID NO: 1362880 - RNA, 19 nt, Homo sapiens
  misc_RNA (1)...(19): siRNA sense strand
acaggucucucaaacaaau

SEQ ID NO: 1362881 - RNA, 19 nt, Homo sapiens
  misc_RNA (1)...(19): siRNA sense strand
gacuguaucuggucaccuu

SEQ ID NO: 1362882 - RNA, 19 nt, Homo sapiens
  misc_RNA (1)...(19): siRNA sense strand
aagaggacccuuuaaauuc

SEQ ID NO: 1362883 - RNA, 19 nt, Homo sapiens
  misc_RNA (1)...(19): siRNA sense strand
cuaauucucagguggauuu

SEQ ID NO: 1362884 - RNA, 19 nt, Homo sapiens
  misc_RNA (1)...(19): siRNA sense strand
caccagugauauacuugua

SEQ ID NO: 1362885 - RNA, 19 nt, Homo sapiens
  misc_RNA (1)...(19): siRNA sense strand
ggaaucuauuugcugaaga

SEQ ID NO: 1362886 - RNA, 19 nt, Homo sapiens
  misc_RNA (1)...(19): siRNA sense strand
gccacaaacaguagugaua

SEQ ID NO: 1362887 - RNA, 19 nt, Homo sapiens
  misc_RNA (1)...(19): siRNA sense strand
ggaugugccagaccuguuu

SEQ ID NO: 1362888 - RNA, 19 nt, Homo sapiens
  misc_RNA (1)...(19): siRNA sense strand
cauccaaucaccucuguuu

SEQ ID NO: 1362889 - RNA, 19 nt, Homo sapiens
  misc_RNA (1)...(19): siRNA sense strand
aaugaagacccucaaguaa

SEQ ID NO: 1362890 - RNA, 19 nt, Homo sapiens
  misc_RNA (1)...(19): siRNA sense strand
gaagcuuuguugugucauc

SEQ ID NO: 1362891 - RNA, 19 nt, Homo sapiens
  misc_RNA (1)...(19): siRNA sense strand
gucaacagcaucauuaguu

SEQ ID NO: 1362892 - RNA, 19 nt, Homo sapiens
  misc_RNA (1)...(19): siRNA sense strand
guagauggaagcggugaua

SEQ ID NO: 1362893 - RNA, 19 nt, Homo sapiens
  misc_RNA (1)...(19): siRNA sense strand
gguuacugaugaugauauu

SEQ ID NO: 1362894 - RNA, 19 nt, Homo sapiens
  misc_RNA (1)...(19): siRNA sense strand
agaggaacccagcaacaua

SEQ ID NO: 1362895 - RNA, 19 nt, Homo sapiens
  misc_RNA (1)...(19): siRNA sense strand
aaucgugccugaagcuuug

SEQ ID NO: 1362896 - RNA, 19 nt, Homo sapiens
  misc_RNA (1)...(19): siRNA sense strand
ccaauuauggugacagaga

SEQ ID NO: 1362897 - RNA, 19 nt, Homo sapiens
  misc_RNA (1)...(19): siRNA sense strand
uguagaagaggacccuuua

SEQ ID NO: 1362898 - RNA, 19 nt, Homo sapiens
  misc_RNA (1)...(19): siRNA sense strand
gaagcugacaguauuucaa

SEQ ID NO: 1362899 - RNA, 19 nt, Homo sapiens
  misc_RNA (1)...(19): siRNA sense strand
gaaaguucucacuauauca

SEQ ID NO: 1362900 - RNA, 19 nt, Homo sapiens
  misc_RNA (1)...(19): siRNA sense strand
ggaguucggaaucuauuug

SEQ ID NO: 1362901 - RNA, 19 nt, Homo sapiens
  misc_RNA (1)...(19): siRNA sense strand
ucaccucuguuuacucuuc

SEQ ID NO: 1362902 - RNA, 19 nt, Homo sapiens
  misc_RNA (1)...(19): siRNA sense strand
uacaagagaugcagaugag

SEQ ID NO: 1362903 - RNA, 19 nt, Homo sapiens
  misc_RNA (1)...(19): siRNA sense strand
agaaauaggaaguacaaga

SEQ ID NO: 1362904 - RNA, 19 nt, Homo sapiens
  misc_RNA (1)...(19): siRNA sense strand
caccagcacgugacugaua

SEQ ID NO: 1362905 - RNA, 19 nt, Homo sapiens
  misc_RNA (1)...(19): siRNA sense strand
guaauacaaacuaguguuc

SEQ ID NO: 1362906 - RNA, 19 nt, Homo sapiens
  misc_RNA (1)...(19): siRNA sense strand
agaagaggacccuuuaaau

SEQ ID NO: 1362907 - RNA, 19 nt, Homo sapiens
  misc_RNA (1)...(19): siRNA sense strand
aagaagaagcugacaguau

SEQ ID NO: 1362908 - RNA, 19 nt, Homo sapiens
  misc_RNA (1)...(19): siRNA sense strand
gcauccaauucagcaagua

SEQ ID NO: 1362909 - RNA, 19 nt, Homo sapiens
  misc_RNA (1)...(19): siRNA sense strand
gaauugaaaccgugcuaca

SEQ ID NO: 1362910 - RNA, 19 nt, Homo sapiens
  misc_RNA (1)...(19): siRNA sense strand
caacagcaucauuaguuau

SEQ ID NO: 1362911 - RNA, 19 nt, Homo sapiens
  misc_RNA (1)...(19): siRNA sense strand
agaggacccuuuaaauucu

SEQ ID NO: 1362912 - RNA, 19 nt, Homo sapiens
  misc_RNA (1)...(19): siRNA sense strand
guagaagaggacccuuuaa

SEQ ID NO: 1362913 - RNA, 19 nt, Homo sapiens
  misc_RNA (1)...(19): siRNA sense strand
caaacuaguguuccacaau

SEQ ID NO: 1362914 - RNA, 19 nt, Homo sapiens
  misc_RNA (1)...(19): siRNA sense strand
ccagugcaaacuuuacuuu

SEQ ID NO: 1362915 - RNA, 19 nt, Homo sapiens
  misc_RNA (1)...(19): siRNA sense strand
gcacagcuugcaccaaaca

SEQ ID NO: 1362916 - RNA, 19 nt, Homo sapiens
  misc_RNA (1)...(19): siRNA sense strand
cacaaacaguagugauaau

SEQ ID NO: 1362917 - RNA, 19 nt, Homo sapiens
  misc_RNA (1)...(19): siRNA sense strand
ugccuaaacucuacagauc

SEQ ID NO: 1362918 - RNA, 19 nt, Homo sapiens
  misc_RNA (1)...(19): siRNA sense strand
gccugaagcuuuguugugu

SEQ ID NO: 1362919 - RNA, 19 nt, Homo sapiens
  misc_RNA (1)...(19): siRNA sense strand
guagauaggaaacacuuag

SEQ ID NO: 1362920 - RNA, 19 nt, Homo sapiens
  misc_RNA (1)...(19): siRNA sense strand
ucuuccagguguuguauuu

SEQ ID NO: 1362921 - RNA, 19 nt, Homo sapiens
  misc_RNA (1)...(19): siRNA sense strand
gaaaugagcauaaaaucgu

SEQ ID NO: 1362922 - RNA, 19 nt, Homo sapiens
  misc_RNA (1)...(19): siRNA sense strand
ccuaaacucuacagaucug

SEQ ID NO: 1362923 - RNA, 19 nt, Homo sapiens
  misc_RNA (1)...(19): siRNA sense strand
ccaaucaccucuguuuacu

SEQ ID NO: 1362924 - RNA, 19 nt, Homo sapiens
  misc_RNA (1)...(19): siRNA sense strand
uggaagcggugauacaucu

SEQ ID NO: 1362925 - RNA, 19 nt, Homo sapiens
  misc_RNA (1)...(19): siRNA sense strand
aaucaccucuguuuacucu

SEQ ID NO: 1362926 - RNA, 19 nt, Homo sapiens
  misc_RNA (1)...(19): siRNA sense strand
ugguagaacucuuccaagu

SEQ ID NO: 1362927 - RNA, 19 nt, Homo sapiens
  misc_RNA (1)...(19): siRNA sense strand
ucuauuugcugaagaaggu

SEQ ID NO: 1362928 - RNA, 19 nt, Homo sapiens
  misc_RNA (1)...(19): siRNA sense strand
cuucagaaauagcauccaa

SEQ ID NO: 1362929 - RNA, 19 nt, Homo sapiens
  misc_RNA (1)...(19): siRNA sense strand
ugaagcagcucugggaaac

SEQ ID NO: 1362930 - RNA, 19 nt, Homo sapiens
  misc_RNA (1)...(19): siRNA sense strand
gguauagaggaacaaguuu

SEQ ID NO: 1362931 - RNA, 19 nt, Homo sapiens
  misc_RNA (1)...(19): siRNA sense strand
agauguaauugaaggaguu

SEQ ID NO: 1362932 - RNA, 19 nt, Homo sapiens
  misc_RNA (1)...(19): siRNA sense strand
ucuguuuacucuucaguug

SEQ ID NO: 1362933 - RNA, 19 nt, Homo sapiens
  misc_RNA (1)...(19): siRNA sense strand
gagaauugaaaccgugcua

SEQ ID NO: 1362934 - RNA, 19 nt, Homo sapiens
  misc_RNA (1)...(19): siRNA sense strand
caauucagcaaguauuuca

SEQ ID NO: 1362935 - RNA, 19 nt, Homo sapiens
  misc_RNA (1)...(19): siRNA sense strand
caaguaaacauuguagaag

SEQ ID NO: 1362936 - RNA, 19 nt, Homo sapiens
  misc_RNA (1)...(19): siRNA sense strand
uaacagaacucaacaaaug

SEQ ID NO: 1362937 - RNA, 19 nt, Homo sapiens
  misc_RNA (1)...(19): siRNA sense strand
gaacauaggcaaugagauu

SEQ ID NO: 1362938 - RNA, 19 nt, Homo sapiens
  misc_RNA (1)...(19): siRNA sense strand
caacagagaucguauugau

SEQ ID NO: 1362939 - RNA, 19 nt, Homo sapiens
  misc_RNA (1)...(19): siRNA sense strand
acagagagcucaccagauu

SEQ ID NO: 1362940 - RNA, 19 nt, Homo sapiens
  misc_RNA (1)...(19): siRNA sense strand
gaaacucauugacagcuaa

SEQ ID NO: 1362941 - RNA, 19 nt, Homo sapiens
  misc_RNA (1)...(19): siRNA sense strand
cagagaagaugaaauggaa

SEQ ID NO: 1362942 - RNA, 19 nt, Homo sapiens
  misc_RNA (1)...(19): siRNA sense strand
gaagagaaccugacucaag

SEQ ID NO: 1362943 - RNA, 19 nt, Homo sapiens
  misc_RNA (1)...(19): siRNA sense strand
gcaaagaaacucauugaca

SEQ ID NO: 1362944 - RNA, 19 nt, Homo sapiens
  misc_RNA (1)...(19): siRNA sense strand
agagaagacuuuaacagaa

SEQ ID NO: 1362945 - RNA, 19 nt, Homo sapiens
  misc_RNA (1)...(19): siRNA sense strand
gagcaaagaaacucauuga

SEQ ID NO: 1362946 - RNA, 19 nt, Homo sapiens
  misc_RNA (1)...(19): siRNA sense strand
gaaucaagaccaucacuau

SEQ ID NO: 1362947 - RNA, 19 nt, Homo sapiens
  misc_RNA (1)...(19): siRNA sense strand
caacuaaaccgcauagaag

SEQ ID NO: 1362948 - RNA, 19 nt, Homo sapiens
  misc_RNA (1)...(19): siRNA sense strand
gagaagacuuuaacagaac

SEQ ID NO: 1362949 - RNA, 19 nt, Homo sapiens
  misc_RNA (1)...(19): siRNA sense strand
ccaaauaaauaaggacaug

SEQ ID NO: 1362950 - RNA, 19 nt, Homo sapiens
  misc_RNA (1)...(19): siRNA sense strand
uaaauaaggacaugagaga

SEQ ID NO: 1362951 - RNA, 19 nt, Homo sapiens
  misc_RNA (1)...(19): siRNA sense strand
agacauggcccugaacaua

SEQ ID NO: 1362952 - RNA, 19 nt, Homo sapiens
  misc_RNA (1)...(19): siRNA sense strand
agaagaaauucaacagaga

SEQ ID NO: 1362953 - RNA, 19 nt, Homo sapiens
  misc_RNA (1)...(19): siRNA sense strand
gaacaaaaggaacaacuaa

SEQ ID NO: 1362954 - RNA, 19 nt, Homo sapiens
  misc_RNA (1)...(19): siRNA sense strand
aagaugaaauggaagagaa

SEQ ID NO: 1362955 - RNA, 19 nt, Homo sapiens
  misc_RNA (1)...(19): siRNA sense strand
cagagaagacuuuaacaga

SEQ ID NO: 1362956 - RNA, 19 nt, Homo sapiens
  misc_RNA (1)...(19): siRNA sense strand
ucacuaugcuggaugaaca

SEQ ID NO: 1362957 - RNA, 19 nt, Homo sapiens
  misc_RNA (1)...(19): siRNA sense strand
gagcucaccagauuacuga

SEQ ID NO: 1362958 - RNA, 19 nt, Homo sapiens
  misc_RNA (1)...(19): siRNA sense strand
ggaaucaagaccaucacua

SEQ ID NO: 1362959 - RNA, 19 nt, Homo sapiens
  misc_RNA (1)...(19): siRNA sense strand
gaacaacuaaaccgcauag

SEQ ID NO: 1362960 - RNA, 19 nt, Homo sapiens
  misc_RNA (1)...(19): siRNA sense strand
acagagaucguauugauau

SEQ ID NO: 1362961 - RNA, 19 nt, Homo sapiens
  misc_RNA (1)...(19): siRNA sense strand
gagagacagagaagacuuu

SEQ ID NO: 1362962 - RNA, 19 nt, Homo sapiens
  misc_RNA (1)...(19): siRNA sense strand
gagaagaugaaauggaaga

SEQ ID NO: 1362963 - RNA, 19 nt, Homo sapiens
  misc_RNA (1)...(19): siRNA sense strand
aagagaaccugacucaagu

SEQ ID NO: 1362964 - RNA, 19 nt, Homo sapiens
  misc_RNA (1)...(19): siRNA sense strand
ccagauuacugaugagucu

SEQ ID NO: 1362965 - RNA, 19 nt, Homo sapiens
  misc_RNA (1)...(19): siRNA sense strand
uaacuaaugaugccagaga

SEQ ID NO: 1362966 - RNA, 19 nt, Homo sapiens
  misc_RNA (1)...(19): siRNA sense strand
gcaggaaucaagaccauca

SEQ ID NO: 1362967 - RNA, 19 nt, Homo sapiens
  misc_RNA (1)...(19): siRNA sense strand
gaagaugaaauggaagaga

SEQ ID NO: 1362968 - RNA, 19 nt, Homo sapiens
  misc_RNA (1)...(19): siRNA sense strand
gcaguauccugggaaaucu

SEQ ID NO: 1362969 - RNA, 19 nt, Homo sapiens
  misc_RNA (1)...(19): siRNA sense strand
gcucaaaauccacaaauaa

SEQ ID NO: 1362970 - RNA, 19 nt, Homo sapiens
  misc_RNA (1)...(19): siRNA sense strand
gaaaguacgaggagaaucc

SEQ ID NO: 1362971 - RNA, 19 nt, Homo sapiens
  misc_RNA (1)...(19): siRNA sense strand
uaaaagacauggcccugaa

SEQ ID NO: 1362972 - RNA, 19 nt, Homo sapiens
  misc_RNA (1)...(19): siRNA sense strand
gagaucguauugauauugc

SEQ ID NO: 1362973 - RNA, 19 nt, Homo sapiens
  misc_RNA (1)...(19): siRNA sense strand
agaaacucauugacagcua

SEQ ID NO: 1362974 - RNA, 19 nt, Homo sapiens
  misc_RNA (1)...(19): siRNA sense strand
ggaacaacuaaaccgcaua

SEQ ID NO: 1362975 - RNA, 19 nt, Homo sapiens
  misc_RNA (1)...(19): siRNA sense strand
cagagaucguauugauauu

SEQ ID NO: 1362976 - RNA, 19 nt, Homo sapiens
  misc_RNA (1)...(19): siRNA sense strand
ugacucaagugggcaguau

SEQ ID NO: 1362977 - RNA, 19 nt, Homo sapiens
  misc_RNA (1)...(19): siRNA sense strand
acaacuaaaccgcauagaa

SEQ ID NO: 1362978 - RNA, 19 nt, Homo sapiens
  misc_RNA (1)...(19): siRNA sense strand
gacauggcccugaacauag

SEQ ID NO: 1362979 - RNA, 19 nt, Homo sapiens
  misc_RNA (1)...(19): siRNA sense strand
gaccaucacuaugcuggau

SEQ ID NO: 1362980 - RNA, 19 nt, Homo sapiens
  misc_RNA (1)...(19): siRNA sense strand
aacaaaugcuguggccuuu

SEQ ID NO: 1362981 - RNA, 19 nt, Homo sapiens
  misc_RNA (1)...(19): siRNA sense strand
aauccuggguuuagccauu

SEQ ID NO: 1362982 - RNA, 19 nt, Homo sapiens
  misc_RNA (1)...(19): siRNA sense strand
ccagagaagaugaaaugga

SEQ ID NO: 1362983 - RNA, 19 nt, Homo sapiens
  misc_RNA (1)...(19): siRNA sense strand
gacaugagagagacagaga

SEQ ID NO: 1362984 - RNA, 19 nt, Homo sapiens
  misc_RNA (1)...(19): siRNA sense strand
cagagagcucaccagauua

SEQ ID NO: 1362985 - RNA, 19 nt, Homo sapiens
  misc_RNA (1)...(19): siRNA sense strand
gagacagagaagacuuuaa

SEQ ID NO: 1362986 - RNA, 19 nt, Homo sapiens
  misc_RNA (1)...(19): siRNA sense strand
aauaaggacaugagagaga

SEQ ID NO: 1362987 - RNA, 19 nt, Homo sapiens
  misc_RNA (1)...(19): siRNA sense strand
ucagaagaaauucaacaga

SEQ ID NO: 1362988 - RNA, 19 nt, Homo sapiens
  misc_RNA (1)...(19): siRNA sense strand
agacagagaagacuuuaac

SEQ ID NO: 1362989 - RNA, 19 nt, Homo sapiens
  misc_RNA (1)...(19): siRNA sense strand
cuuugugucugcccaugua

SEQ ID NO: 1362990 - RNA, 19 nt, Homo sapiens
  misc_RNA (1)...(19): siRNA sense strand
ugccagagaagaugaaaug

SEQ ID NO: 1362991 - RNA, 19 nt, Homo sapiens
  misc_RNA (1)...(19): siRNA sense strand
acugaugagucucuggaaa

SEQ ID NO: 1362992 - RNA, 19 nt, Homo sapiens
  misc_RNA (1)...(19): siRNA sense strand
ggagaauccuggguuuagc

SEQ ID NO: 1362993 - RNA, 19 nt, Homo sapiens
  misc_RNA (1)...(19): siRNA sense strand
uggaagagaaccugacuca

SEQ ID NO: 1362994 - RNA, 19 nt, Homo sapiens
  misc_RNA (1)...(19): siRNA sense strand
ugugucugcccauguaaua

SEQ ID NO: 1362995 - RNA, 19 nt, Homo sapiens
  misc_RNA (1)...(19): siRNA sense strand
uaaaacgaaucacagacaa

SEQ ID NO: 1362996 - RNA, 19 nt, Homo sapiens
  misc_RNA (1)...(19): siRNA sense strand
ugaugagucucuggaaagu

SEQ ID NO: 1362997 - RNA, 19 nt, Homo sapiens
  misc_RNA (1)...(19): siRNA sense strand
caucagaagaaauucaaca

SEQ ID NO: 1362998 - RNA, 19 nt, Homo sapiens
  misc_RNA (1)...(19): siRNA sense strand
cagacaaggcugacaccaa

SEQ ID NO: 1362999 - RNA, 19 nt, Homo sapiens
  misc_RNA (1)...(19): siRNA sense strand
ggcaguauccugggaaauc

SEQ ID NO: 1363000 - RNA, 19 nt, Homo sapiens
  misc_RNA (1)...(19): siRNA sense strand
cucaccagauuacugauga

SEQ ID NO: 1363001 - RNA, 19 nt, Homo sapiens
  misc_RNA (1)...(19): siRNA sense strand
gaugagucucuggaaagua

SEQ ID NO: 1363002 - RNA, 19 nt, Homo sapiens
  misc_RNA (1)...(19): siRNA sense strand
cuaaugaugccagagaaga

SEQ ID NO: 1363003 - RNA, 19 nt, Homo sapiens
  misc_RNA (1)...(19): siRNA sense strand
ccaaugccagagcaaagaa

SEQ ID NO: 1363004 - RNA, 19 nt, Homo sapiens
  misc_RNA (1)...(19): siRNA sense strand
ucaagaccaucacuaugcu

SEQ ID NO: 1363005 - RNA, 19 nt, Homo sapiens
  misc_RNA (1)...(19): siRNA sense strand
ggaagagaaccugacucaa

SEQ ID NO: 1363006 - RNA, 19 nt, Homo sapiens
  misc_RNA (1)...(19): siRNA sense strand
agagacagagaagacuuua

SEQ ID NO: 1363007 - RNA, 19 nt, Homo sapiens
  misc_RNA (1)...(19): siRNA sense strand
gccaaugccagagcaaaga

SEQ ID NO: 1363008 - RNA, 19 nt, Homo sapiens
  misc_RNA (1)...(19): siRNA sense strand
agagaucguauugauauug

SEQ ID NO: 1363009 - RNA, 19 nt, Homo sapiens
  misc_RNA (1)...(19): siRNA sense strand
gcucaccagauuacugaug

SEQ ID NO: 1363010 - RNA, 19 nt, Homo sapiens
  misc_RNA (1)...(19): siRNA sense strand
ugagagagacagagaagac

SEQ ID NO: 1363011 - RNA, 19 nt, Homo sapiens
  misc_RNA (1)...(19): siRNA sense strand
aaucaagaccaucacuaug

SEQ ID NO: 1363012 - RNA, 19 nt, Homo sapiens
  misc_RNA (1)...(19): siRNA sense strand
uggaccaaauaaauaagga

SEQ ID NO: 1363013 - RNA, 19 nt, Homo sapiens
  misc_RNA (1)...(19): siRNA sense strand
cagagcaaagaaacucauu

SEQ ID NO: 1363014 - RNA, 19 nt, Homo sapiens
  misc_RNA (1)...(19): siRNA sense strand
aacagagaucguauugaua

SEQ ID NO: 1363015 - RNA, 19 nt, Homo sapiens
  misc_RNA (1)...(19): siRNA sense strand
gacaccaacagagaucgua

SEQ ID NO: 1363016 - RNA, 19 nt, Homo sapiens
  misc_RNA (1)...(19): siRNA sense strand
uaaugaugccagagaagau

SEQ ID NO: 1363017 - RNA, 19 nt, Homo sapiens
  misc_RNA (1)...(19): siRNA sense strand
ccacaaauaaaacgaauca

SEQ ID NO: 1363018 - RNA, 19 nt, Homo sapiens
  misc_RNA (1)...(19): siRNA sense strand
caggaugcaggaaucaaga

SEQ ID NO: 1363019 - RNA, 19 nt, Homo sapiens
  misc_RNA (1)...(19): siRNA sense strand
ggaaaguacgaggagaauc

SEQ ID NO: 1363020 - RNA, 19 nt, Homo sapiens
  misc_RNA (1)...(19): siRNA sense strand
uaacagaacucaacaaaug

SEQ ID NO: 1363021 - RNA, 19 nt, Homo sapiens
  misc_RNA (1)...(19): siRNA sense strand
gaacauaggcaaugagauu

SEQ ID NO: 1363022 - RNA, 19 nt, Homo sapiens
  misc_RNA (1)...(19): siRNA sense strand
caacagagaucguauugau

SEQ ID NO: 1363023 - RNA, 19 nt, Homo sapiens
  misc_RNA (1)...(19): siRNA sense strand
acagagagcucaccagauu

SEQ ID NO: 1363024 - RNA, 19 nt, Homo sapiens
  misc_RNA (1)...(19): siRNA sense strand
gaaacucauugacagcuaa

SEQ ID NO: 1363025 - RNA, 19 nt, Homo sapiens
  misc_RNA (1)...(19): siRNA sense strand
cagagaagaugaaauggaa

SEQ ID NO: 1363026 - RNA, 19 nt, Homo sapiens
  misc_RNA (1)...(19): siRNA sense strand
gaagagaaccugacucaag

SEQ ID NO: 1363027 - RNA, 19 nt, Homo sapiens
  misc_RNA (1)...(19): siRNA sense strand
gcaaagaaacucauugaca

SEQ ID NO: 1363028 - RNA, 19 nt, Homo sapiens
  misc_RNA (1)...(19): siRNA sense strand
agagaagacuuuaacagaa

SEQ ID NO: 1363029 - RNA, 19 nt, Homo sapiens
  misc_RNA (1)...(19): siRNA sense strand
gagcaaagaaacucauuga

SEQ ID NO: 1363030 - RNA, 19 nt, Homo sapiens
  misc_RNA (1)...(19): siRNA sense strand
gaaucaagaccaucacuau

SEQ ID NO: 1363031 - RNA, 19 nt, Homo sapiens
  misc_RNA (1)...(19): siRNA sense strand
caacuaaaccgcauagaag

SEQ ID NO: 1363032 - RNA, 19 nt, Homo sapiens
  misc_RNA (1)...(19): siRNA sense strand
gagaagacuuuaacagaac

SEQ ID NO: 1363033 - RNA, 19 nt, Homo sapiens
  misc_RNA (1)...(19): siRNA sense strand
ccaaauaaauaaggacaug

SEQ ID NO: 1363034 - RNA, 19 nt, Homo sapiens
  misc_RNA (1)...(19): siRNA sense strand
uaaauaaggacaugagaga

SEQ ID NO: 1363035 - RNA, 19 nt, Homo sapiens
  misc_RNA (1)...(19): siRNA sense strand
agacauggcccugaacaua

SEQ ID NO: 1363036 - RNA, 19 nt, Homo sapiens
  misc_RNA (1)...(19): siRNA sense strand
agaagaaauucaacagaga

SEQ ID NO: 1363037 - RNA, 19 nt, Homo sapiens
  misc_RNA (1)...(19): siRNA sense strand
gaacaaaaggaacaacuaa

SEQ ID NO: 1363038 - RNA, 19 nt, Homo sapiens
  misc_RNA (1)...(19): siRNA sense strand
aagaugaaauggaagagaa

SEQ ID NO: 1363039 - RNA, 19 nt, Homo sapiens
  misc_RNA (1)...(19): siRNA sense strand
cagagaagacuuuaacaga

SEQ ID NO: 1363040 - RNA, 19 nt, Homo sapiens
  misc_RNA (1)...(19): siRNA sense strand
ucacuaugcuggaugaaca

SEQ ID NO: 1363041 - RNA, 19 nt, Homo sapiens
  misc_RNA (1)...(19): siRNA sense strand
gagcucaccagauuacuga

SEQ ID NO: 1363042 - RNA, 19 nt, Homo sapiens
  misc_RNA (1)...(19): siRNA sense strand
ggaaucaagaccaucacua

SEQ ID NO: 1363043 - RNA, 19 nt, Homo sapiens
  misc_RNA (1)...(19): siRNA sense strand
gaacaacuaaaccgcauag

SEQ ID NO: 1363044 - RNA, 19 nt, Homo sapiens
  misc_RNA (1)...(19): siRNA sense strand
acagagaucguauugauau

SEQ ID NO: 1363045 - RNA, 19 nt, Homo sapiens
  misc_RNA (1)...(19): siRNA sense strand
gagagacagagaagacuuu

SEQ ID NO: 1363046 - RNA, 19 nt, Homo sapiens
  misc_RNA (1)...(19): siRNA sense strand
gagaagaugaaauggaaga

SEQ ID NO: 1363047 - RNA, 19 nt, Homo sapiens
  misc_RNA (1)...(19): siRNA sense strand
aagagaaccugacucaagu

SEQ ID NO: 1363048 - RNA, 19 nt, Homo sapiens
  misc_RNA (1)...(19): siRNA sense strand
ccagauuacugaugagucu

SEQ ID NO: 1363049 - RNA, 19 nt, Homo sapiens
  misc_RNA (1)...(19): siRNA sense strand
uaacuaaugaugccagaga

SEQ ID NO: 1363050 - RNA, 19 nt, Homo sapiens
  misc_RNA (1)...(19): siRNA sense strand
gcaggaaucaagaccauca

SEQ ID NO: 1363051 - RNA, 19 nt, Homo sapiens
  misc_RNA (1)...(19): siRNA sense strand
gaagaugaaauggaagaga

SEQ ID NO: 1363052 - RNA, 19 nt, Homo sapiens
  misc_RNA (1)...(19): siRNA sense strand
gcaguauccugggaaaucu

SEQ ID NO: 1363053 - RNA, 19 nt, Homo sapiens
  misc_RNA (1)...(19): siRNA sense strand
gcucaaaauccacaaauaa

SEQ ID NO: 1363054 - RNA, 19 nt, Homo sapiens
  misc_RNA (1)...(19): siRNA sense strand
gaaaguacgaggagaaucc

SEQ ID NO: 1363055 - RNA, 19 nt, Homo sapiens
  misc_RNA (1)...(19): siRNA sense strand
uaaaagacauggcccugaa

SEQ ID NO: 1363056 - RNA, 19 nt, Homo sapiens
  misc_RNA (1)...(19): siRNA sense strand
gagaucguauugauauugc

SEQ ID NO: 1363057 - RNA, 19 nt, Homo sapiens
  misc_RNA (1)...(19): siRNA sense strand
agaaacucauugacagcua

SEQ ID NO: 1363058 - RNA, 19 nt, Homo sapiens
  misc_RNA (1)...(19): siRNA sense strand
ggaacaacuaaaccgcaua

SEQ ID NO: 1363059 - RNA, 19 nt, Homo sapiens
  misc_RNA (1)...(19): siRNA sense strand
cagagaucguauugauauu

SEQ ID NO: 1363060 - RNA, 19 nt, Homo sapiens
  misc_RNA (1)...(19): siRNA sense strand
ugacucaagugggcaguau

SEQ ID NO: 1363061 - RNA, 19 nt, Homo sapiens
  misc_RNA (1)...(19): siRNA sense strand
acaacuaaaccgcauagaa

SEQ ID NO: 1363062 - RNA, 19 nt, Homo sapiens
  misc_RNA (1)...(19): siRNA sense strand
gacauggcccugaacauag

SEQ ID NO: 1363063 - RNA, 19 nt, Homo sapiens
  misc_RNA (1)...(19): siRNA sense strand
gaccaucacuaugcuggau

SEQ ID NO: 1363064 - RNA, 19 nt, Homo sapiens
  misc_RNA (1)...(19): siRNA sense strand
aacaaaugcuguggccuuu

SEQ ID NO: 1363065 - RNA, 19 nt, Homo sapiens
  misc_RNA (1)...(19): siRNA sense strand
aauccuggguuuagccauu

SEQ ID NO: 1363066 - RNA, 19 nt, Homo sapiens
  misc_RNA (1)...(19): siRNA sense strand
ccagagaagaugaaaugga

SEQ ID NO: 1363067 - RNA, 19 nt, Homo sapiens
  misc_RNA (1)...(19): siRNA sense strand
gacaugagagagacagaga

SEQ ID NO: 1363068 - RNA, 19 nt, Homo sapiens
  misc_RNA (1)...(19): siRNA sense strand
cagagagcucaccagauua

SEQ ID NO: 1363069 - RNA, 19 nt, Homo sapiens
  misc_RNA (1)...(19): siRNA sense strand
gagacagagaagacuuuaa

SEQ ID NO: 1363070 - RNA, 19 nt, Homo sapiens
  misc_RNA (1)...(19): siRNA sense strand
aauaaggacaugagagaga

SEQ ID NO: 1363071 - RNA, 19 nt, Homo sapiens
  misc_RNA (1)...(19): siRNA sense strand
ucagaagaaauucaacaga

SEQ ID NO: 1363072 - RNA, 19 nt, Homo sapiens
  misc_RNA (1)...(19): siRNA sense strand
agacagagaagacuuuaac

SEQ ID NO: 1363073 - RNA, 19 nt, Homo sapiens
  misc_RNA (1)...(19): siRNA sense strand
cuuugugucugcccaugua

SEQ ID NO: 1363074 - RNA, 19 nt, Homo sapiens
  misc_RNA (1)...(19): siRNA sense strand
ugccagagaagaugaaaug

SEQ ID NO: 1363075 - RNA, 19 nt, Homo sapiens
  misc_RNA (1)...(19): siRNA sense strand
acugaugagucucuggaaa

SEQ ID NO: 1363076 - RNA, 19 nt, Homo sapiens
  misc_RNA (1)...(19): siRNA sense strand
ggagaauccuggguuuagc

SEQ ID NO: 1363077 - RNA, 19 nt, Homo sapiens
  misc_RNA (1)...(19): siRNA sense strand
uggaagagaaccugacuca

SEQ ID NO: 1363078 - RNA, 19 nt, Homo sapiens
  misc_RNA (1)...(19): siRNA sense strand
ugugucugcccauguaaua

SEQ ID NO: 1363079 - RNA, 19 nt, Homo sapiens
  misc_RNA (1)...(19): siRNA sense strand
uaaaacgaaucacagacaa

SEQ ID NO: 1363080 - RNA, 19 nt, Homo sapiens
  misc_RNA (1)...(19): siRNA sense strand
ugaugagucucuggaaagu

SEQ ID NO: 1363081 - RNA, 19 nt, Homo sapiens
  misc_RNA (1)...(19): siRNA sense strand
caucagaagaaauucaaca

SEQ ID NO: 1363082 - RNA, 19 nt, Homo sapiens
  misc_RNA (1)...(19): siRNA sense strand
cagacaaggcugacaccaa

SEQ ID NO: 1363083 - RNA, 19 nt, Homo sapiens
  misc_RNA (1)...(19): siRNA sense strand
ggcaguauccugggaaauc

SEQ ID NO: 1363084 - RNA, 19 nt, Homo sapiens
  misc_RNA (1)...(19): siRNA sense strand
cucaccagauuacugauga

SEQ ID NO: 1363085 - RNA, 19 nt, Homo sapiens
  misc_RNA (1)...(19): siRNA sense strand
gaugagucucuggaaagua

SEQ ID NO: 1363086 - RNA, 19 nt, Homo sapiens
  misc_RNA (1)...(19): siRNA sense strand
cuaaugaugccagagaaga

SEQ ID NO: 1363087 - RNA, 19 nt, Homo sapiens
  misc_RNA (1)...(19): siRNA sense strand
ccaaugccagagcaaagaa

SEQ ID NO: 1363088 - RNA, 19 nt, Homo sapiens
  misc_RNA (1)...(19): siRNA sense strand
ucaagaccaucacuaugcu

SEQ ID NO: 1363089 - RNA, 19 nt, Homo sapiens
  misc_RNA (1)...(19): siRNA sense strand
ggaagagaaccugacucaa

SEQ ID NO: 1363090 - RNA, 19 nt, Homo sapiens
  misc_RNA (1)...(19): siRNA sense strand
agagacagagaagacuuua

SEQ ID NO: 1363091 - RNA, 19 nt, Homo sapiens
  misc_RNA (1)...(19): siRNA sense strand
gccaaugccagagcaaaga

SEQ ID NO: 1363092 - RNA, 19 nt, Homo sapiens
  misc_RNA (1)...(19): siRNA sense strand
agagaucguauugauauug

SEQ ID NO: 1363093 - RNA, 19 nt, Homo sapiens
  misc_RNA (1)...(19): siRNA sense strand
gcucaccagauuacugaug

SEQ ID NO: 1363094 - RNA, 19 nt, Homo sapiens
  misc_RNA (1)...(19): siRNA sense strand
ugagagagacagagaagac

SEQ ID NO: 1363095 - RNA, 19 nt, Homo sapiens
  misc_RNA (1)...(19): siRNA sense strand
aaucaagaccaucacuaug

SEQ ID NO: 1363096 - RNA, 19 nt, Homo sapiens
  misc_RNA (1)...(19): siRNA sense strand
uggaccaaauaaauaagga

SEQ ID NO: 1363097 - RNA, 19 nt, Homo sapiens
  misc_RNA (1)...(19): siRNA sense strand
cagagcaaagaaacucauu

SEQ ID NO: 1363098 - RNA, 19 nt, Homo sapiens
  misc_RNA (1)...(19): siRNA sense strand
aacagagaucguauugaua

SEQ ID NO: 1363099 - RNA, 19 nt, Homo sapiens
  misc_RNA (1)...(19): siRNA sense strand
gacaccaacagagaucgua

SEQ ID NO: 1363100 - RNA, 19 nt, Homo sapiens
  misc_RNA (1)...(19): siRNA sense strand
uaaugaugccagagaagau

SEQ ID NO: 1363101 - RNA, 19 nt, Homo sapiens
  misc_RNA (1)...(19): siRNA sense strand
ccacaaauaaaacgaauca

SEQ ID NO: 1363102 - RNA, 19 nt, Homo sapiens
  misc_RNA (1)...(19): siRNA sense strand
caggaugcaggaaucaaga

SEQ ID NO: 1363103 - RNA, 19 nt, Homo sapiens
  misc_RNA (1)...(19): siRNA sense strand
ggaaaguacgaggagaauc

SEQ ID NO: 1363104 - RNA, 19 nt, Homo sapiens
  misc_RNA (1)...(19): siRNA sense strand
uaacagaacucaacaaaug

SEQ ID NO: 1363105 - RNA, 19 nt, Homo sapiens
  misc_RNA (1)...(19): siRNA sense strand
gaacauaggcaaugagauu

SEQ ID NO: 1363106 - RNA, 19 nt, Homo sapiens
  misc_RNA (1)...(19): siRNA sense strand
caacagagaucguauugau

SEQ ID NO: 1363107 - RNA, 19 nt, Homo sapiens
  misc_RNA (1)...(19): siRNA sense strand
acagagagcucaccagauu

SEQ ID NO: 1363108 - RNA, 19 nt, Homo sapiens
  misc_RNA (1)...(19): siRNA sense strand
gaaacucauugacagcuaa

SEQ ID NO: 1363109 - RNA, 19 nt, Homo sapiens
  misc_RNA (1)...(19): siRNA sense strand
cagagaagaugaaauggaa

SEQ ID NO: 1363110 - RNA, 19 nt, Homo sapiens
  misc_RNA (1)...(19): siRNA sense strand
gaagagaaccugacucaag

SEQ ID NO: 1363111 - RNA, 19 nt, Homo sapiens
  misc_RNA (1)...(19): siRNA sense strand
gcaaagaaacucauugaca

SEQ ID NO: 1363112 - RNA, 19 nt, Homo sapiens
  misc_RNA (1)...(19): siRNA sense strand
agagaagacuuuaacagaa

SEQ ID NO: 1363113 - RNA, 19 nt, Homo sapiens
  misc_RNA (1)...(19): siRNA sense strand
gagcaaagaaacucauuga

SEQ ID NO: 1363114 - RNA, 19 nt, Homo sapiens
  misc_RNA (1)...(19): siRNA sense strand
gaaucaagaccaucacuau

SEQ ID NO: 1363115 - RNA, 19 nt, Homo sapiens
  misc_RNA (1)...(19): siRNA sense strand
caacuaaaccgcauagaag

SEQ ID NO: 1363116 - RNA, 19 nt, Homo sapiens
  misc_RNA (1)...(19): siRNA sense strand
gagaagacuuuaacagaac

SEQ ID NO: 1363117 - RNA, 19 nt, Homo sapiens
  misc_RNA (1)...(19): siRNA sense strand
ccaaauaaauaaggacaug

SEQ ID NO: 1363118 - RNA, 19 nt, Homo sapiens
  misc_RNA (1)...(19): siRNA sense strand
uaaauaaggacaugagaga

SEQ ID NO: 1363119 - RNA, 19 nt, Homo sapiens
  misc_RNA (1)...(19): siRNA sense strand
agacauggcccugaacaua

SEQ ID NO: 1363120 - RNA, 19 nt, Homo sapiens
  misc_RNA (1)...(19): siRNA sense strand
agaagaaauucaacagaga

SEQ ID NO: 1363121 - RNA, 19 nt, Homo sapiens
  misc_RNA (1)...(19): siRNA sense strand
gaacaaaaggaacaacuaa

SEQ ID NO: 1363122 - RNA, 19 nt, Homo sapiens
  misc_RNA (1)...(19): siRNA sense strand
aagaugaaauggaagagaa

SEQ ID NO: 1363123 - RNA, 19 nt, Homo sapiens
  misc_RNA (1)...(19): siRNA sense strand
cagagaagacuuuaacaga

SEQ ID NO: 1363124 - RNA, 19 nt, Homo sapiens
  misc_RNA (1)...(19): siRNA sense strand
ucacuaugcuggaugaaca

SEQ ID NO: 1363125 - RNA, 19 nt, Homo sapiens
  misc_RNA (1)...(19): siRNA sense strand
gagcucaccagauuacuga

SEQ ID NO: 1363126 - RNA, 19 nt, Homo sapiens
  misc_RNA (1)...(19): siRNA sense strand
ggaaucaagaccaucacua

SEQ ID NO: 1363127 - RNA, 19 nt, Homo sapiens
  misc_RNA (1)...(19): siRNA sense strand
gaacaacuaaaccgcauag

SEQ ID NO: 1363128 - RNA, 19 nt, Homo sapiens
  misc_RNA (1)...(19): siRNA sense strand
acagagaucguauugauau

SEQ ID NO: 1363129 - RNA, 19 nt, Homo sapiens
  misc_RNA (1)...(19): siRNA sense strand
gagagacagagaagacuuu

SEQ ID NO: 1363130 - RNA, 19 nt, Homo sapiens
  misc_RNA (1)...(19): siRNA sense strand
gagaagaugaaauggaaga

SEQ ID NO: 1363131 - RNA, 19 nt, Homo sapiens
  misc_RNA (1)...(19): siRNA sense strand
aagagaaccugacucaagu

SEQ ID NO: 1363132 - RNA, 19 nt, Homo sapiens
  misc_RNA (1)...(19): siRNA sense strand
ccagauuacugaugagucu

SEQ ID NO: 1363133 - RNA, 19 nt, Homo sapiens
  misc_RNA (1)...(19): siRNA sense strand
uaacuaaugaugccagaga

SEQ ID NO: 1363134 - RNA, 19 nt, Homo sapiens
  misc_RNA (1)...(19): siRNA sense strand
gcaggaaucaagaccauca

SEQ ID NO: 1363135 - RNA, 19 nt, Homo sapiens
  misc_RNA (1)...(19): siRNA sense strand
gaagaugaaauggaagaga

SEQ ID NO: 1363136 - RNA, 19 nt, Homo sapiens
  misc_RNA (1)...(19): siRNA sense strand
gcaguauccugggaaaucu

SEQ ID NO: 1363137 - RNA, 19 nt, Homo sapiens
  misc_RNA (1)...(19): siRNA sense strand
gcucaaaauccacaaauaa

SEQ ID NO: 1363138 - RNA, 19 nt, Homo sapiens
  misc_RNA (1)...(19): siRNA sense strand
gaaaguacgaggagaaucc

SEQ ID NO: 1363139 - RNA, 19 nt, Homo sapiens
  misc_RNA (1)...(19): siRNA sense strand
uaaaagacauggcccugaa

SEQ ID NO: 1363140 - RNA, 19 nt, Homo sapiens
  misc_RNA (1)...(19): siRNA sense strand
gagaucguauugauauugc

SEQ ID NO: 1363141 - RNA, 19 nt, Homo sapiens
  misc_RNA (1)...(19): siRNA sense strand
agaaacucauugacagcua

SEQ ID NO: 1363142 - RNA, 19 nt, Homo sapiens
  misc_RNA (1)...(19): siRNA sense strand
ggaacaacuaaaccgcaua

SEQ ID NO: 1363143 - RNA, 19 nt, Homo sapiens
  misc_RNA (1)...(19): siRNA sense strand
cagagaucguauugauauu

SEQ ID NO: 1363144 - RNA, 19 nt, Homo sapiens
  misc_RNA (1)...(19): siRNA sense strand
ugacucaagugggcaguau

SEQ ID NO: 1363145 - RNA, 19 nt, Homo sapiens
  misc_RNA (1)...(19): siRNA sense strand
acaacuaaaccgcauagaa

SEQ ID NO: 1363146 - RNA, 19 nt, Homo sapiens
  misc_RNA (1)...(19): siRNA sense strand
gacauggcccugaacauag

SEQ ID NO: 1363147 - RNA, 19 nt, Homo sapiens
  misc_RNA (1)...(19): siRNA sense strand
gaccaucacuaugcuggau

SEQ ID NO: 1363148 - RNA, 19 nt, Homo sapiens
  misc_RNA (1)...(19): siRNA sense strand
aacaaaugcuguggccuuu

SEQ ID NO: 1363149 - RNA, 19 nt, Homo sapiens
  misc_RNA (1)...(19): siRNA sense strand
aauccuggguuuagccauu

SEQ ID NO: 1363150 - RNA, 19 nt, Homo sapiens
  misc_RNA (1)...(19): siRNA sense strand
ccagagaagaugaaaugga

SEQ ID NO: 1363151 - RNA, 19 nt, Homo sapiens
  misc_RNA (1)...(19): siRNA sense strand
gacaugagagagacagaga

SEQ ID NO: 1363152 - RNA, 19 nt, Homo sapiens
  misc_RNA (1)...(19): siRNA sense strand
cagagagcucaccagauua

SEQ ID NO: 1363153 - RNA, 19 nt, Homo sapiens
  misc_RNA (1)...(19): siRNA sense strand
gagacagagaagacuuuaa

SEQ ID NO: 1363154 - RNA, 19 nt, Homo sapiens
  misc_RNA (1)...(19): siRNA sense strand
aauaaggacaugagagaga

SEQ ID NO: 1363155 - RNA, 19 nt, Homo sapiens
  misc_RNA (1)...(19): siRNA sense strand
ucagaagaaauucaacaga

SEQ ID NO: 1363156 - RNA, 19 nt, Homo sapiens
  misc_RNA (1)...(19): siRNA sense strand
agacagagaagacuuuaac

SEQ ID NO: 1363157 - RNA, 19 nt, Homo sapiens
  misc_RNA (1)...(19): siRNA sense strand
cuuugugucugcccaugua

SEQ ID NO: 1363158 - RNA, 19 nt, Homo sapiens
  misc_RNA (1)...(19): siRNA sense strand
ugccagagaagaugaaaug

SEQ ID NO: 1363159 - RNA, 19 nt, Homo sapiens
  misc_RNA (1)...(19): siRNA sense strand
acugaugagucucuggaaa

SEQ ID NO: 1363160 - RNA, 19 nt, Homo sapiens
  misc_RNA (1)...(19): siRNA sense strand
ggagaauccuggguuuagc

SEQ ID NO: 1363161 - RNA, 19 nt, Homo sapiens
  misc_RNA (1)...(19): siRNA sense strand
uggaagagaaccugacuca

SEQ ID NO: 1363162 - RNA, 19 nt, Homo sapiens
  misc_RNA (1)...(19): siRNA sense strand
ugugucugcccauguaaua

SEQ ID NO: 1363163 - RNA, 19 nt, Homo sapiens
  misc_RNA (1)...(19): siRNA sense strand
uaaaacgaaucacagacaa

SEQ ID NO: 1363164 - RNA, 19 nt, Homo sapiens
  misc_RNA (1)...(19): siRNA sense strand
ugaugagucucuggaaagu

SEQ ID NO: 1363165 - RNA, 19 nt, Homo sapiens
  misc_RNA (1)...(19): siRNA sense strand
caucagaagaaauucaaca

SEQ ID NO: 1363166 - RNA, 19 nt, Homo sapiens
  misc_RNA (1)...(19): siRNA sense strand
cagacaaggcugacaccaa

SEQ ID NO: 1363167 - RNA, 19 nt, Homo sapiens
  misc_RNA (1)...(19): siRNA sense strand
ggcaguauccugggaaauc

SEQ ID NO: 1363168 - RNA, 19 nt, Homo sapiens
  misc_RNA (1)...(19): siRNA sense strand
cucaccagauuacugauga

SEQ ID NO: 1363169 - RNA, 19 nt, Homo sapiens
  misc_RNA (1)...(19): siRNA sense strand
gaugagucucuggaaagua

SEQ ID NO: 1363170 - RNA, 19 nt, Homo sapiens
  misc_RNA (1)...(19): siRNA sense strand
cuaaugaugccagagaaga

SEQ ID NO: 1363171 - RNA, 19 nt, Homo sapiens
  misc_RNA (1)...(19): siRNA sense strand
ccaaugccagagcaaagaa

SEQ ID NO: 1363172 - RNA, 19 nt, Homo sapiens
  misc_RNA (1)...(19): siRNA sense strand
ucaagaccaucacuaugcu

SEQ ID NO: 1363173 - RNA, 19 nt, Homo sapiens
  misc_RNA (1)...(19): siRNA sense strand
ggaagagaaccugacucaa

SEQ ID NO: 1363174 - RNA, 19 nt, Homo sapiens
  misc_RNA (1)...(19): siRNA sense strand
agagacagagaagacuuua

SEQ ID NO: 1363175 - RNA, 19 nt, Homo sapiens
  misc_RNA (1)...(19): siRNA sense strand
gccaaugccagagcaaaga

SEQ ID NO: 1363176 - RNA, 19 nt, Homo sapiens
  misc_RNA (1)...(19): siRNA sense strand
agagaucguauugauauug

SEQ ID NO: 1363177 - RNA, 19 nt, Homo sapiens
  misc_RNA (1)...(19): siRNA sense strand
gcucaccagauuacugaug

SEQ ID NO: 1363178 - RNA, 19 nt, Homo sapiens
  misc_RNA (1)...(19): siRNA sense strand
ugagagagacagagaagac

SEQ ID NO: 1363179 - RNA, 19 nt, Homo sapiens
  misc_RNA (1)...(19): siRNA sense strand
aaucaagaccaucacuaug

SEQ ID NO: 1363180 - RNA, 19 nt, Homo sapiens
  misc_RNA (1)...(19): siRNA sense strand
uggaccaaauaaauaagga

SEQ ID NO: 1363181 - RNA, 19 nt, Homo sapiens
  misc_RNA (1)...(19): siRNA sense strand
cagagcaaagaaacucauu

SEQ ID NO: 1363182 - RNA, 19 nt, Homo sapiens
  misc_RNA (1)...(19): siRNA sense strand
aacagagaucguauugaua

SEQ ID NO: 1363183 - RNA, 19 nt, Homo sapiens
  misc_RNA (1)...(19): siRNA sense strand
gacaccaacagagaucgua

SEQ ID NO: 1363184 - RNA, 19 nt, Homo sapiens
  misc_RNA (1)...(19): siRNA sense strand
uaaugaugccagagaagau

SEQ ID NO: 1363185 - RNA, 19 nt, Homo sapiens
  misc_RNA (1)...(19): siRNA sense strand
ccacaaauaaaacgaauca

SEQ ID NO: 1363186 - RNA, 19 nt, Homo sapiens
  misc_RNA (1)...(19): siRNA sense strand
caggaugcaggaaucaaga

SEQ ID NO: 1363187 - RNA, 19 nt, Homo sapiens
  misc_RNA (1)...(19): siRNA sense strand
ggaaaguacgaggagaauc

SEQ ID NO: 1363188 - RNA, 19 nt, Homo sapiens
  misc_RNA (1)...(19): siRNA sense strand
uaacagaacucaacaaaug

SEQ ID NO: 1363189 - RNA, 19 nt, Homo sapiens
  misc_RNA (1)...(19): siRNA sense strand
gaacauaggcaaugagauu

SEQ ID NO: 1363190 - RNA, 19 nt, Homo sapiens
  misc_RNA (1)...(19): siRNA sense strand
caacagagaucguauugau

SEQ ID NO: 1363191 - RNA, 19 nt, Homo sapiens
  misc_RNA (1)...(19): siRNA sense strand
acagagagcucaccagauu

SEQ ID NO: 1363192 - RNA, 19 nt, Homo sapiens
  misc_RNA (1)...(19): siRNA sense strand
gaaacucauugacagcuaa

SEQ ID NO: 1363193 - RNA, 19 nt, Homo sapiens
  misc_RNA (1)...(19): siRNA sense strand
cagagaagaugaaauggaa

SEQ ID NO: 1363194 - RNA, 19 nt, Homo sapiens
  misc_RNA (1)...(19): siRNA sense strand
gaagagaaccugacucaag

SEQ ID NO: 1363195 - RNA, 19 nt, Homo sapiens
  misc_RNA (1)...(19): siRNA sense strand
gcaaagaaacucauugaca

SEQ ID NO: 1363196 - RNA, 19 nt, Homo sapiens
  misc_RNA (1)...(19): siRNA sense strand
agagaagacuuuaacagaa

SEQ ID NO: 1363197 - RNA, 19 nt, Homo sapiens
  misc_RNA (1)...(19): siRNA sense strand
gagcaaagaaacucauuga

SEQ ID NO: 1363198 - RNA, 19 nt, Homo sapiens
  misc_RNA (1)...(19): siRNA sense strand
gaaucaagaccaucacuau

SEQ ID NO: 1363199 - RNA, 19 nt, Homo sapiens
  misc_RNA (1)...(19): siRNA sense strand
caacuaaaccgcauagaag

SEQ ID NO: 1363200 - RNA, 19 nt, Homo sapiens
  misc_RNA (1)...(19): siRNA sense strand
gagaagacuuuaacagaac

SEQ ID NO: 1363201 - RNA, 19 nt, Homo sapiens
  misc_RNA (1)...(19): siRNA sense strand
ccaaauaaauaaggacaug

SEQ ID NO: 1363202 - RNA, 19 nt, Homo sapiens
  misc_RNA (1)...(19): siRNA sense strand
uaaauaaggacaugagaga

SEQ ID NO: 1363203 - RNA, 19 nt, Homo sapiens
  misc_RNA (1)...(19): siRNA sense strand
agacauggcccugaacaua

SEQ ID NO: 1363204 - RNA, 19 nt, Homo sapiens
  misc_RNA (1)...(19): siRNA sense strand
agaagaaauucaacagaga

SEQ ID NO: 1363205 - RNA, 19 nt, Homo sapiens
  misc_RNA (1)...(19): siRNA sense strand
gaacaaaaggaacaacuaa

SEQ ID NO: 1363206 - RNA, 19 nt, Homo sapiens
  misc_RNA (1)...(19): siRNA sense strand
aagaugaaauggaagagaa

SEQ ID NO: 1363207 - RNA, 19 nt, Homo sapiens
  misc_RNA (1)...(19): siRNA sense strand
cagagaagacuuuaacaga

SEQ ID NO: 1363208 - RNA, 19 nt, Homo sapiens
  misc_RNA (1)...(19): siRNA sense strand
ucacuaugcuggaugaaca

SEQ ID NO: 1363209 - RNA, 19 nt, Homo sapiens
  misc_RNA (1)...(19): siRNA sense strand
gagcucaccagauuacuga

SEQ ID NO: 1363210 - RNA, 19 nt, Homo sapiens
  misc_RNA (1)...(19): siRNA sense strand
ggaaucaagaccaucacua

SEQ ID NO: 1363211 - RNA, 19 nt, Homo sapiens
  misc_RNA (1)...(19): siRNA sense strand
gaacaacuaaaccgcauag

SEQ ID NO: 1363212 - RNA, 19 nt, Homo sapiens
  misc_RNA (1)...(19): siRNA sense strand
acagagaucguauugauau

SEQ ID NO: 1363213 - RNA, 19 nt, Homo sapiens
  misc_RNA (1)...(19): siRNA sense strand
gagagacagagaagacuuu

SEQ ID NO: 1363214 - RNA, 19 nt, Homo sapiens
  misc_RNA (1)...(19): siRNA sense strand
gagaagaugaaauggaaga

SEQ ID NO: 1363215 - RNA, 19 nt, Homo sapiens
  misc_RNA (1)...(19): siRNA sense strand
aagagaaccugacucaagu

SEQ ID NO: 1363216 - RNA, 19 nt, Homo sapiens
  misc_RNA (1)...(19): siRNA sense strand
ccagauuacugaugagucu

SEQ ID NO: 1363217 - RNA, 19 nt, Homo sapiens
  misc_RNA (1)...(19): siRNA sense strand
uaacuaaugaugccagaga

SEQ ID NO: 1363218 - RNA, 19 nt, Homo sapiens
  misc_RNA (1)...(19): siRNA sense strand
gcaggaaucaagaccauca

SEQ ID NO: 1363219 - RNA, 19 nt, Homo sapiens
  misc_RNA (1)...(19): siRNA sense strand
gaagaugaaauggaagaga

SEQ ID NO: 1363220 - RNA, 19 nt, Homo sapiens
  misc_RNA (1)...(19): siRNA sense strand
gcaguauccugggaaaucu

SEQ ID NO: 1363221 - RNA, 19 nt, Homo sapiens
  misc_RNA (1)...(19): siRNA sense strand
gcucaaaauccacaaauaa

SEQ ID NO: 1363222 - RNA, 19 nt, Homo sapiens
  misc_RNA (1)...(19): siRNA sense strand
gaaaguacgaggagaaucc

SEQ ID NO: 1363223 - RNA, 19 nt, Homo sapiens
  misc_RNA (1)...(19): siRNA sense strand
uaaaagacauggcccugaa

SEQ ID NO: 1363224 - RNA, 19 nt, Homo sapiens
  misc_RNA (1)...(19): siRNA sense strand
gagaucguauugauauugc

SEQ ID NO: 1363225 - RNA, 19 nt, Homo sapiens
  misc_RNA (1)...(19): siRNA sense strand
agaaacucauugacagcua

SEQ ID NO: 1363226 - RNA, 19 nt, Homo sapiens
  misc_RNA (1)...(19): siRNA sense strand
ggaacaacuaaaccgcaua

SEQ ID NO: 1363227 - RNA, 19 nt, Homo sapiens
  misc_RNA (1)...(19): siRNA sense strand
cagagaucguauugauauu

SEQ ID NO: 1363228 - RNA, 19 nt, Homo sapiens
  misc_RNA (1)...(19): siRNA sense strand
ugacucaagugggcaguau

SEQ ID NO: 1363229 - RNA, 19 nt, Homo sapiens
  misc_RNA (1)...(19): siRNA sense strand
acaacuaaaccgcauagaa

SEQ ID NO: 1363230 - RNA, 19 nt, Homo sapiens
  misc_RNA (1)...(19): siRNA sense strand
gacauggcccugaacauag

SEQ ID NO: 1363231 - RNA, 19 nt, Homo sapiens
  misc_RNA (1)...(19): siRNA sense strand
gaccaucacuaugcuggau

SEQ ID NO: 1363232 - RNA, 19 nt, Homo sapiens
  misc_RNA (1)...(19): siRNA sense strand
aacaaaugcuguggccuuu

SEQ ID NO: 1363233 - RNA, 19 nt, Homo sapiens
  misc_RNA (1)...(19): siRNA sense strand
aauccuggguuuagccauu

SEQ ID NO: 1363234 - RNA, 19 nt, Homo sapiens
  misc_RNA (1)...(19): siRNA sense strand
ccagagaagaugaaaugga

SEQ ID NO: 1363235 - RNA, 19 nt, Homo sapiens
  misc_RNA (1)...(19): siRNA sense strand
gacaugagagagacagaga

SEQ ID NO: 1363236 - RNA, 19 nt, Homo sapiens
  misc_RNA (1)...(19): siRNA sense strand
cagagagcucaccagauua

SEQ ID NO: 1363237 - RNA, 19 nt, Homo sapiens
  misc_RNA (1)...(19): siRNA sense strand
gagacagagaagacuuuaa

SEQ ID NO: 1363238 - RNA, 19 nt, Homo sapiens
  misc_RNA (1)...(19): siRNA sense strand
aauaaggacaugagagaga

SEQ ID NO: 1363239 - RNA, 19 nt, Homo sapiens
  misc_RNA (1)...(19): siRNA sense strand
ucagaagaaauucaacaga

SEQ ID NO: 1363240 - RNA, 19 nt, Homo sapiens
  misc_RNA (1)...(19): siRNA sense strand
agacagagaagacuuuaac

SEQ ID NO: 1363241 - RNA, 19 nt, Homo sapiens
  misc_RNA (1)...(19): siRNA sense strand
cuuugugucugcccaugua

SEQ ID NO: 1363242 - RNA, 19 nt, Homo sapiens
  misc_RNA (1)...(19): siRNA sense strand
ugccagagaagaugaaaug

SEQ ID NO: 1363243 - RNA, 19 nt, Homo sapiens
  misc_RNA (1)...(19): siRNA sense strand
acugaugagucucuggaaa

SEQ ID NO: 1363244 - RNA, 19 nt, Homo sapiens
  misc_RNA (1)...(19): siRNA sense strand
ggagaauccuggguuuagc

SEQ ID NO: 1363245 - RNA, 19 nt, Homo sapiens
  misc_RNA (1)...(19): siRNA sense strand
uggaagagaaccugacuca

SEQ ID NO: 1363246 - RNA, 19 nt, Homo sapiens
  misc_RNA (1)...(19): siRNA sense strand
ugugucugcccauguaaua

SEQ ID NO: 1363247 - RNA, 19 nt, Homo sapiens
  misc_RNA (1)...(19): siRNA sense strand
uaaaacgaaucacagacaa

SEQ ID NO: 1363248 - RNA, 19 nt, Homo sapiens
  misc_RNA (1)...(19): siRNA sense strand
ugaugagucucuggaaagu

SEQ ID NO: 1363249 - RNA, 19 nt, Homo sapiens
  misc_RNA (1)...(19): siRNA sense strand
caucagaagaaauucaaca

SEQ ID NO: 1363250 - RNA, 19 nt, Homo sapiens
  misc_RNA (1)...(19): siRNA sense strand
cagacaaggcugacaccaa

SEQ ID NO: 1363251 - RNA, 19 nt, Homo sapiens
  misc_RNA (1)...(19): siRNA sense strand
ggcaguauccugggaaauc

SEQ ID NO: 1363252 - RNA, 19 nt, Homo sapiens
  misc_RNA (1)...(19): siRNA sense strand
cucaccagauuacugauga

SEQ ID NO: 1363253 - RNA, 19 nt, Homo sapiens
  misc_RNA (1)...(19): siRNA sense strand
gaugagucucuggaaagua

SEQ ID NO: 1363254 - RNA, 19 nt, Homo sapiens
  misc_RNA (1)...(19): siRNA sense strand
cuaaugaugccagagaaga

SEQ ID NO: 1363255 - RNA, 19 nt, Homo sapiens
  misc_RNA (1)...(19): siRNA sense strand
ccaaugccagagcaaagaa

SEQ ID NO: 1363256 - RNA, 19 nt, Homo sapiens
  misc_RNA (1)...(19): siRNA sense strand
ucaagaccaucacuaugcu

SEQ ID NO: 1363257 - RNA, 19 nt, Homo sapiens
  misc_RNA (1)...(19): siRNA sense strand
ggaagagaaccugacucaa

SEQ ID NO: 1363258 - RNA, 19 nt, Homo sapiens
  misc_RNA (1)...(19): siRNA sense strand
agagacagagaagacuuua

SEQ ID NO: 1363259 - RNA, 19 nt, Homo sapiens
  misc_RNA (1)...(19): siRNA sense strand
gccaaugccagagcaaaga

SEQ ID NO: 1363260 - RNA, 19 nt, Homo sapiens
  misc_RNA (1)...(19): siRNA sense strand
agagaucguauugauauug

SEQ ID NO: 1363261 - RNA, 19 nt, Homo sapiens
  misc_RNA (1)...(19): siRNA sense strand
gcucaccagauuacugaug

SEQ ID NO: 1363262 - RNA, 19 nt, Homo sapiens
  misc_RNA (1)...(19): siRNA sense strand
ugagagagacagagaagac

SEQ ID NO: 1363263 - RNA, 19 nt, Homo sapiens
  misc_RNA (1)...(19): siRNA sense strand
aaucaagaccaucacuaug

SEQ ID NO: 1363264 - RNA, 19 nt, Homo sapiens
  misc_RNA (1)...(19): siRNA sense strand
uggaccaaauaaauaagga

SEQ ID NO: 1363265 - RNA, 19 nt, Homo sapiens
  misc_RNA (1)...(19): siRNA sense strand
cagagcaaagaaacucauu

SEQ ID NO: 1363266 - RNA, 19 nt, Homo sapiens
  misc_RNA (1)...(19): siRNA sense strand
aacagagaucguauugaua

SEQ ID NO: 1363267 - RNA, 19 nt, Homo sapiens
  misc_RNA (1)...(19): siRNA sense strand
gacaccaacagagaucgua

SEQ ID NO: 1363268 - RNA, 19 nt, Homo sapiens
  misc_RNA (1)...(19): siRNA sense strand
uaaugaugccagagaagau

SEQ ID NO: 1363269 - RNA, 19 nt, Homo sapiens
  misc_RNA (1)...(19): siRNA sense strand
ccacaaauaaaacgaauca

SEQ ID NO: 1363270 - RNA, 19 nt, Homo sapiens
  misc_RNA (1)...(19): siRNA sense strand
caggaugcaggaaucaaga

SEQ ID NO: 1363271 - RNA, 19 nt, Homo sapiens
  misc_RNA (1)...(19): siRNA sense strand
ggaaaguacgaggagaauc

SEQ ID NO: 1363272 - RNA, 19 nt, Homo sapiens
  misc_RNA (1)...(19): siRNA sense strand
ucaagaagauuccuuauga

SEQ ID NO: 1363273 - RNA, 19 nt, Homo sapiens
  misc_RNA (1)...(19): siRNA sense strand
gagaucaccucguccauga

SEQ ID NO: 1363274 - RNA, 19 nt, Homo sapiens
  misc_RNA (1)...(19): siRNA sense strand
ccaacaagauuccagauga

SEQ ID NO: 1363275 - RNA, 19 nt, Homo sapiens
  misc_RNA (1)...(19): siRNA sense strand
ccacuaagcacuucaauga

SEQ ID NO: 1363276 - RNA, 19 nt, Homo sapiens
  misc_RNA (1)...(19): siRNA sense strand
ucaacaaacugccuacaaa

SEQ ID NO: 1363277 - RNA, 19 nt, Homo sapiens
  misc_RNA (1)...(19): siRNA sense strand
aagcaaagguaacgcaaua

SEQ ID NO: 1363278 - RNA, 19 nt, Homo sapiens
  misc_RNA (1)...(19): siRNA sense strand
ggacaaggauggaugaaac

SEQ ID NO: 1363279 - RNA, 19 nt, Homo sapiens
  misc_RNA (1)...(19): siRNA sense strand
gucgugaacuggacaauaa

SEQ ID NO: 1363280 - RNA, 19 nt, Homo sapiens
  misc_RNA (1)...(19): siRNA sense strand
gaaccgcagugcaaucuuc

SEQ ID NO: 1363281 - RNA, 19 nt, Homo sapiens
  misc_RNA (1)...(19): siRNA sense strand
gcacuucaaugacaucagu

SEQ ID NO: 1363282 - RNA, 19 nt, Homo sapiens
  misc_RNA (1)...(19): siRNA sense strand
ggaccaaucuuuuguaaug

SEQ ID NO: 1363283 - RNA, 19 nt, Homo sapiens
  misc_RNA (1)...(19): siRNA sense strand
ccaacuaaaucuccaacaa

SEQ ID NO: 1363284 - RNA, 19 nt, Homo sapiens
  misc_RNA (1)...(19): siRNA sense strand
gcaaagguaacgcaauauu

SEQ ID NO: 1363285 - RNA, 19 nt, Homo sapiens
  misc_RNA (1)...(19): siRNA sense strand
ggagucagauauugaucaa

SEQ ID NO: 1363286 - RNA, 19 nt, Homo sapiens
  misc_RNA (1)...(19): siRNA sense strand
caaagguaacgcaauauuu

SEQ ID NO: 1363287 - RNA, 19 nt, Homo sapiens
  misc_RNA (1)...(19): siRNA sense strand
gaccaacgaugagcucaaa

SEQ ID NO: 1363288 - RNA, 19 nt, Homo sapiens
  misc_RNA (1)...(19): siRNA sense strand
uaacuugauugcuucagaa

SEQ ID NO: 1363289 - RNA, 19 nt, Homo sapiens
  misc_RNA (1)...(19): siRNA sense strand
caacaacacccaaaucagu

SEQ ID NO: 1363290 - RNA, 19 nt, Homo sapiens
  misc_RNA (1)...(19): siRNA sense strand
caacuacaaugccguacug

SEQ ID NO: 1363291 - RNA, 19 nt, Homo sapiens
  misc_RNA (1)...(19): siRNA sense strand
ggccguagcugacauaugc

SEQ ID NO: 1363292 - RNA, 19 nt, Homo sapiens
  misc_RNA (1)...(19): siRNA sense strand
ggaugaaacuggaaaagaa

SEQ ID NO: 1363293 - RNA, 19 nt, Homo sapiens
  misc_RNA (1)...(19): siRNA sense strand
caagcacucucaggacuuu

SEQ ID NO: 1363294 - RNA, 19 nt, Homo sapiens
  misc_RNA (1)...(19): siRNA sense strand
gacuaaagcuuugauugau

SEQ ID NO: 1363295 - RNA, 19 nt, Homo sapiens
  misc_RNA (1)...(19): siRNA sense strand
guaacuugauugcuucaga

SEQ ID NO: 1363296 - RNA, 19 nt, Homo sapiens
  misc_RNA (1)...(19): siRNA sense strand
cgagucuucucuccgaaua

SEQ ID NO: 1363297 - RNA, 19 nt, Homo sapiens
  misc_RNA (1)...(19): siRNA sense strand
gaauggagacaaggaguuu

SEQ ID NO: 1363298 - RNA, 19 nt, Homo sapiens
  misc_RNA (1)...(19): siRNA sense strand
ucaaugacaucaguaacuu

SEQ ID NO: 1363299 - RNA, 19 nt, Homo sapiens
  misc_RNA (1)...(19): siRNA sense strand
gagaggagucagauauuga

SEQ ID NO: 1363300 - RNA, 19 nt, Homo sapiens
  misc_RNA (1)...(19): siRNA sense strand
acgaugagcucaaaugcaa

SEQ ID NO: 1363301 - RNA, 19 nt, Homo sapiens
  misc_RNA (1)...(19): siRNA sense strand
gagagaggagucagauauu

SEQ ID NO: 1363302 - RNA, 19 nt, Homo sapiens
  misc_RNA (1)...(19): siRNA sense strand
ccaguggccagaacaauaa

SEQ ID NO: 1363303 - RNA, 19 nt, Homo sapiens
  misc_RNA (1)...(19): siRNA sense strand
acugaaacaucaccaacua

SEQ ID NO: 1363304 - RNA, 19 nt, Homo sapiens
  misc_RNA (1)...(19): siRNA sense strand
ggcggaagcucucccugaa

SEQ ID NO: 1363305 - RNA, 19 nt, Homo sapiens
  misc_RNA (1)...(19): siRNA sense strand
aaauagagcaccaagcaaa

SEQ ID NO: 1363306 - RNA, 19 nt, Homo sapiens
  misc_RNA (1)...(19): siRNA sense strand
agacuaaagcuuugauuga

SEQ ID NO: 1363307 - RNA, 19 nt, Homo sapiens
  misc_RNA (1)...(19): siRNA sense strand
caacaagauuccagaugag

SEQ ID NO: 1363308 - RNA, 19 nt, Homo sapiens
  misc_RNA (1)...(19): siRNA sense strand
aaacaucaccaacuaaauc

SEQ ID NO: 1363309 - RNA, 19 nt, Homo sapiens
  misc_RNA (1)...(19): siRNA sense strand
gaaacaucaccaacuaaau

SEQ ID NO: 1363310 - RNA, 19 nt, Homo sapiens
  misc_RNA (1)...(19): siRNA sense strand
ugaaacaucaccaacuaaa

SEQ ID NO: 1363311 - RNA, 19 nt, Homo sapiens
  misc_RNA (1)...(19): siRNA sense strand
ugagagaggagucagauau

SEQ ID NO: 1363312 - RNA, 19 nt, Homo sapiens
  misc_RNA (1)...(19): siRNA sense strand
uagaucaccucgucuucaa

SEQ ID NO: 1363313 - RNA, 19 nt, Homo sapiens
  misc_RNA (1)...(19): siRNA sense strand
aagcagagcucagaagucu

SEQ ID NO: 1363314 - RNA, 19 nt, Homo sapiens
  misc_RNA (1)...(19): siRNA sense strand
agagaggagucagauauug

SEQ ID NO: 1363315 - RNA, 19 nt, Homo sapiens
  misc_RNA (1)...(19): siRNA sense strand
caagaagauuccuuaugag

SEQ ID NO: 1363316 - RNA, 19 nt, Homo sapiens
  misc_RNA (1)...(19): siRNA sense strand
cggaagcucucccugaaca

SEQ ID NO: 1363317 - RNA, 19 nt, Homo sapiens
  misc_RNA (1)...(19): siRNA sense strand
ggaauggagacaaggaguu

SEQ ID NO: 1363318 - RNA, 19 nt, Homo sapiens
  misc_RNA (1)...(19): siRNA sense strand
ccagaggaauggagacaag

SEQ ID NO: 1363319 - RNA, 19 nt, Homo sapiens
  misc_RNA (1)...(19): siRNA sense strand
gagaaguaccggaggaugu

SEQ ID NO: 1363320 - RNA, 19 nt, Homo sapiens
  misc_RNA (1)...(19): siRNA sense strand
acuaagcacuucaaugaca

SEQ ID NO: 1363321 - RNA, 19 nt, Homo sapiens
  misc_RNA (1)...(19): siRNA sense strand
gaaagccucuacgagucuu

SEQ ID NO: 1363322 - RNA, 19 nt, Homo sapiens
  misc_RNA (1)...(19): siRNA sense strand
gaacaauaagcuccuguac

SEQ ID NO: 1363323 - RNA, 19 nt, Homo sapiens
  misc_RNA (1)...(19): siRNA sense strand
gcaagcagagcucagaagu

SEQ ID NO: 1363324 - RNA, 19 nt, Homo sapiens
  misc_RNA (1)...(19): siRNA sense strand
gagcaccaagcaaagguaa

SEQ ID NO: 1363325 - RNA, 19 nt, Homo sapiens
  misc_RNA (1)...(19): siRNA sense strand
cauauuauccgagagauuc

SEQ ID NO: 1363326 - RNA, 19 nt, Homo sapiens
  misc_RNA (1)...(19): siRNA sense strand
gucaacuucuccaagauga

SEQ ID NO: 1363327 - RNA, 19 nt, Homo sapiens
  misc_RNA (1)...(19): siRNA sense strand
ccaccaaucgugucuugaa

SEQ ID NO: 1363328 - RNA, 19 nt, Homo sapiens
  misc_RNA (1)...(19): siRNA sense strand
ccgagagauucgccaguuu

SEQ ID NO: 1363329 - RNA, 19 nt, Homo sapiens
  misc_RNA (1)...(19): siRNA sense strand
cagcuucaccaacaagauu

SEQ ID NO: 1363330 - RNA, 19 nt, Homo sapiens
  misc_RNA (1)...(19): siRNA sense strand
uguaauggaugaagaaagc

SEQ ID NO: 1363331 - RNA, 19 nt, Homo sapiens
  misc_RNA (1)...(19): siRNA sense strand
gccgcugccuccacaacua

SEQ ID NO: 1363332 - RNA, 19 nt, Homo sapiens
  misc_RNA (1)...(19): siRNA sense strand
gaaaaccacuaagcacuuc

SEQ ID NO: 1363333 - RNA, 19 nt, Homo sapiens
  misc_RNA (1)...(19): siRNA sense strand
uggaggagaucacgcagau

SEQ ID NO: 1363334 - RNA, 19 nt, Homo sapiens
  misc_RNA (1)...(19): siRNA sense strand
uaacaauggagucgucaug

SEQ ID NO: 1363335 - RNA, 19 nt, Homo sapiens
  misc_RNA (1)...(19): siRNA sense strand
gaugauggugauacugaaa

SEQ ID NO: 1363336 - RNA, 19 nt, Homo sapiens
  misc_RNA (1)...(19): siRNA sense strand
ccagagugaugauggugau

SEQ ID NO: 1363337 - RNA, 19 nt, Homo sapiens
  misc_RNA (1)...(19): siRNA sense strand
ucaccgaccuggccuucau

SEQ ID NO: 1363338 - RNA, 19 nt, Homo sapiens
  misc_RNA (1)...(19): siRNA sense strand
gugaugauggugauacuga

SEQ ID NO: 1363339 - RNA, 19 nt, Homo sapiens
  misc_RNA (1)...(19): siRNA sense strand
caacuaaaucuccaacaac

SEQ ID NO: 1363340 - RNA, 19 nt, Homo sapiens
  misc_RNA (1)...(19): siRNA sense strand
gagauucgccaguuucaac

SEQ ID NO: 1363341 - RNA, 19 nt, Homo sapiens
  misc_RNA (1)...(19): siRNA sense strand
cagcugacccugcuagauc

SEQ ID NO: 1363342 - RNA, 19 nt, Homo sapiens
  misc_RNA (1)...(19): siRNA sense strand
aacuaaaucuccaacaaca

SEQ ID NO: 1363343 - RNA, 19 nt, Homo sapiens
  misc_RNA (1)...(19): siRNA sense strand
ccaacgaugagcucaaaug

SEQ ID NO: 1363344 - RNA, 19 nt, Homo sapiens
  misc_RNA (1)...(19): siRNA sense strand
aauauuuacuggaccaauc

SEQ ID NO: 1363345 - RNA, 19 nt, Homo sapiens
  misc_RNA (1)...(19): siRNA sense strand
caaacugccuacaaaauag

SEQ ID NO: 1363346 - RNA, 19 nt, Homo sapiens
  misc_RNA (1)...(19): siRNA sense strand
gaggaguucuucggacaag

SEQ ID NO: 1363347 - RNA, 19 nt, Homo sapiens
  misc_RNA (1)...(19): siRNA sense strand
ggucaacuucuccaagaug

SEQ ID NO: 1363348 - RNA, 19 nt, Homo sapiens
  misc_RNA (1)...(19): siRNA sense strand
gcagacuaaagcuuugauu

SEQ ID NO: 1363349 - RNA, 19 nt, Homo sapiens
  misc_RNA (1)...(19): siRNA sense strand
ggaguucuucggacaagga

SEQ ID NO: 1363350 - RNA, 19 nt, Homo sapiens
  misc_RNA (1)...(19): siRNA sense strand
cagacuaaagcuuugauug

SEQ ID NO: 1363351 - RNA, 19 nt, Homo sapiens
  misc_RNA (1)...(19): siRNA sense strand
acaaacugccuacaaaaua

SEQ ID NO: 1363352 - RNA, 19 nt, Homo sapiens
  misc_RNA (1)...(19): siRNA sense strand
gcagagcagccaccaaucg

SEQ ID NO: 1363353 - RNA, 19 nt, Homo sapiens
  misc_RNA (1)...(19): siRNA sense strand
gagagauucgccaguuuca

SEQ ID NO: 1363354 - RNA, 19 nt, Homo sapiens
  misc_RNA (1)...(19): siRNA sense strand
cuggucaacuucuccaaga

SEQ ID NO: 1363355 - RNA, 19 nt, Homo sapiens
  misc_RNA (1)...(19): siRNA sense strand
gaagacggccuggucaacu

SEQ ID NO: 1363356 - RNA, 19 nt, Homo sapiens
  misc_RNA (1)...(19): siRNA sense strand
aagacggccuggucaacuu

SEQ ID NO: 1363357 - RNA, 19 nt, Homo sapiens
  misc_RNA (1)...(19): siRNA sense strand
uccagcagcuucaccaaca

SEQ ID NO: 1363358 - RNA, 19 nt, Homo sapiens
  misc_RNA (1)...(19): siRNA sense strand
ccgcagagcagccaccaau

SEQ ID NO: 1363359 - RNA, 19 nt, Homo sapiens
  misc_RNA (1)...(19): siRNA sense strand
caaaauagagcaccaagca

SEQ ID NO: 1363360 - RNA, 19 nt, Homo sapiens
  misc_RNA (1)...(19): siRNA sense strand
caacaaacugccuacaaaa

SEQ ID NO: 1363361 - RNA, 19 nt, Homo sapiens
  misc_RNA (1)...(19): siRNA sense strand
gaagcucucccugaacauc

SEQ ID NO: 1363362 - RNA, 19 nt, Homo sapiens
  misc_RNA (1)...(19): siRNA sense strand
ggauggaugaaacuggaaa

SEQ ID NO: 1363363 - RNA, 19 nt, Homo sapiens
  misc_RNA (1)...(19): siRNA sense strand
ccaaucgugucuugaacgu

SEQ ID NO: 1363364 - RNA, 19 nt, Homo sapiens
  misc_RNA (1)...(19): siRNA sense strand
ugaugauggugauacugaa

SEQ ID NO: 1363365 - RNA, 19 nt, Homo sapiens
  misc_RNA (1)...(19): siRNA sense strand
cgagagauucgccaguuuc

SEQ ID NO: 1363366 - RNA, 19 nt, Homo sapiens
  misc_RNA (1)...(19): siRNA sense strand
gaccuccugucgugaacug

SEQ ID NO: 1363367 - RNA, 19 nt, Homo sapiens
  misc_RNA (1)...(19): siRNA sense strand
cuucagcgcucagcaagca

SEQ ID NO: 1363368 - RNA, 19 nt, Homo sapiens
  misc_RNA (1)...(19): siRNA sense strand
ccacucagcccuggagauc

SEQ ID NO: 1363369 - RNA, 19 nt, Homo sapiens
  misc_RNA (1)...(19): siRNA sense strand
aaugacaucaguaacuuga

SEQ ID NO: 1363370 - RNA, 19 nt, Homo sapiens
  misc_RNA (1)...(19): siRNA sense strand
ccagcagcuucaccaacaa

SEQ ID NO: 1363371 - RNA, 19 nt, Homo sapiens
  misc_RNA (1)...(19): siRNA sense strand
ggacaccagcaagcucuau

SEQ ID NO: 1363372 - RNA, 19 nt, Homo sapiens
  misc_RNA (1)...(19): siRNA sense strand
ucaagaagauuccuuauga

SEQ ID NO: 1363373 - RNA, 19 nt, Homo sapiens
  misc_RNA (1)...(19): siRNA sense strand
gagaucaccucguccauga

SEQ ID NO: 1363374 - RNA, 19 nt, Homo sapiens
  misc_RNA (1)...(19): siRNA sense strand
ccaacaagauuccagauga

SEQ ID NO: 1363375 - RNA, 19 nt, Homo sapiens
  misc_RNA (1)...(19): siRNA sense strand
ccacuaagcacuucaauga

SEQ ID NO: 1363376 - RNA, 19 nt, Homo sapiens
  misc_RNA (1)...(19): siRNA sense strand
ucaacaaacugccuacaaa

SEQ ID NO: 1363377 - RNA, 19 nt, Homo sapiens
  misc_RNA (1)...(19): siRNA sense strand
aagcaaagguaacgcaaua

SEQ ID NO: 1363378 - RNA, 19 nt, Homo sapiens
  misc_RNA (1)...(19): siRNA sense strand
ggacaaggauggaugaaac

SEQ ID NO: 1363379 - RNA, 19 nt, Homo sapiens
  misc_RNA (1)...(19): siRNA sense strand
gucgugaacuggacaauaa

SEQ ID NO: 1363380 - RNA, 19 nt, Homo sapiens
  misc_RNA (1)...(19): siRNA sense strand
gaaccgcagugcaaucuuc

SEQ ID NO: 1363381 - RNA, 19 nt, Homo sapiens
  misc_RNA (1)...(19): siRNA sense strand
gcacuucaaugacaucagu

SEQ ID NO: 1363382 - RNA, 19 nt, Homo sapiens
  misc_RNA (1)...(19): siRNA sense strand
ggaccaaucuuuuguaaug

SEQ ID NO: 1363383 - RNA, 19 nt, Homo sapiens
  misc_RNA (1)...(19): siRNA sense strand
ccaacuaaaucuccaacaa

SEQ ID NO: 1363384 - RNA, 19 nt, Homo sapiens
  misc_RNA (1)...(19): siRNA sense strand
gcaaagguaacgcaauauu

SEQ ID NO: 1363385 - RNA, 19 nt, Homo sapiens
  misc_RNA (1)...(19): siRNA sense strand
ggagucagauauugaucaa

SEQ ID NO: 1363386 - RNA, 19 nt, Homo sapiens
  misc_RNA (1)...(19): siRNA sense strand
caaagguaacgcaauauuu

SEQ ID NO: 1363387 - RNA, 19 nt, Homo sapiens
  misc_RNA (1)...(19): siRNA sense strand
gaccaacgaugagcucaaa

SEQ ID NO: 1363388 - RNA, 19 nt, Homo sapiens
  misc_RNA (1)...(19): siRNA sense strand
uaacuugauugcuucagaa

SEQ ID NO: 1363389 - RNA, 19 nt, Homo sapiens
  misc_RNA (1)...(19): siRNA sense strand
caacaacacccaaaucagu

SEQ ID NO: 1363390 - RNA, 19 nt, Homo sapiens
  misc_RNA (1)...(19): siRNA sense strand
caacuacaaugccguacug

SEQ ID NO: 1363391 - RNA, 19 nt, Homo sapiens
  misc_RNA (1)...(19): siRNA sense strand
ggccguagcugacauaugc

SEQ ID NO: 1363392 - RNA, 19 nt, Homo sapiens
  misc_RNA (1)...(19): siRNA sense strand
ggaugaaacuggaaaagaa

SEQ ID NO: 1363393 - RNA, 19 nt, Homo sapiens
  misc_RNA (1)...(19): siRNA sense strand
caagcacucucaggacuuu

SEQ ID NO: 1363394 - RNA, 19 nt, Homo sapiens
  misc_RNA (1)...(19): siRNA sense strand
gacuaaagcuuugauugau

SEQ ID NO: 1363395 - RNA, 19 nt, Homo sapiens
  misc_RNA (1)...(19): siRNA sense strand
guaacuugauugcuucaga

SEQ ID NO: 1363396 - RNA, 19 nt, Homo sapiens
  misc_RNA (1)...(19): siRNA sense strand
cgagucuucucuccgaaua

SEQ ID NO: 1363397 - RNA, 19 nt, Homo sapiens
  misc_RNA (1)...(19): siRNA sense strand
gaauggagacaaggaguuu

SEQ ID NO: 1363398 - RNA, 19 nt, Homo sapiens
  misc_RNA (1)...(19): siRNA sense strand
ucaaugacaucaguaacuu

SEQ ID NO: 1363399 - RNA, 19 nt, Homo sapiens
  misc_RNA (1)...(19): siRNA sense strand
gagaggagucagauauuga

SEQ ID NO: 1363400 - RNA, 19 nt, Homo sapiens
  misc_RNA (1)...(19): siRNA sense strand
acgaugagcucaaaugcaa

SEQ ID NO: 1363401 - RNA, 19 nt, Homo sapiens
  misc_RNA (1)...(19): siRNA sense strand
gagagaggagucagauauu

SEQ ID NO: 1363402 - RNA, 19 nt, Homo sapiens
  misc_RNA (1)...(19): siRNA sense strand
acugaaacaucaccaacua

SEQ ID NO: 1363403 - RNA, 19 nt, Homo sapiens
  misc_RNA (1)...(19): siRNA sense strand
agacuaaagcuuugauuga

SEQ ID NO: 1363404 - RNA, 19 nt, Homo sapiens
  misc_RNA (1)...(19): siRNA sense strand
aaauagagcaccaagcaaa

SEQ ID NO: 1363405 - RNA, 19 nt, Homo sapiens
  misc_RNA (1)...(19): siRNA sense strand
ugaaacaucaccaacuaaa

SEQ ID NO: 1363406 - RNA, 19 nt, Homo sapiens
  misc_RNA (1)...(19): siRNA sense strand
caacaagauuccagaugag

SEQ ID NO: 1363407 - RNA, 19 nt, Homo sapiens
  misc_RNA (1)...(19): siRNA sense strand
aaacaucaccaacuaaauc

SEQ ID NO: 1363408 - RNA, 19 nt, Homo sapiens
  misc_RNA (1)...(19): siRNA sense strand
gaaacaucaccaacuaaau

SEQ ID NO: 1363409 - RNA, 19 nt, Homo sapiens
  misc_RNA (1)...(19): siRNA sense strand
ugagagaggagucagauau

SEQ ID NO: 1363410 - RNA, 19 nt, Homo sapiens
  misc_RNA (1)...(19): siRNA sense strand
uagaucaccucgucuucaa

SEQ ID NO: 1363411 - RNA, 19 nt, Homo sapiens
  misc_RNA (1)...(19): siRNA sense strand
aagcagagcucagaagucu

SEQ ID NO: 1363412 - RNA, 19 nt, Homo sapiens
  misc_RNA (1)...(19): siRNA sense strand
agagaggagucagauauug

SEQ ID NO: 1363413 - RNA, 19 nt, Homo sapiens
  misc_RNA (1)...(19): siRNA sense strand
caagaagauuccuuaugag

SEQ ID NO: 1363414 - RNA, 19 nt, Homo sapiens
  misc_RNA (1)...(19): siRNA sense strand
gagaaguaccggaggaugu

SEQ ID NO: 1363415 - RNA, 19 nt, Homo sapiens
  misc_RNA (1)...(19): siRNA sense strand
ggaauggagacaaggaguu

SEQ ID NO: 1363416 - RNA, 19 nt, Homo sapiens
  misc_RNA (1)...(19): siRNA sense strand
ccagaggaauggagacaag

SEQ ID NO: 1363417 - RNA, 19 nt, Homo sapiens
  misc_RNA (1)...(19): siRNA sense strand
acuaagcacuucaaugaca

SEQ ID NO: 1363418 - RNA, 19 nt, Homo sapiens
  misc_RNA (1)...(19): siRNA sense strand
gaaagccucuacgagucuu

SEQ ID NO: 1363419 - RNA, 19 nt, Homo sapiens
  misc_RNA (1)...(19): siRNA sense strand
gcaagcagagcucagaagu

SEQ ID NO: 1363420 - RNA, 19 nt, Homo sapiens
  misc_RNA (1)...(19): siRNA sense strand
gagcaccaagcaaagguaa

SEQ ID NO: 1363421 - RNA, 19 nt, Homo sapiens
  misc_RNA (1)...(19): siRNA sense strand
cauauuauccgagagauuc

SEQ ID NO: 1363422 - RNA, 19 nt, Homo sapiens
  misc_RNA (1)...(19): siRNA sense strand
gucaacuucuccaagauga

SEQ ID NO: 1363423 - RNA, 19 nt, Homo sapiens
  misc_RNA (1)...(19): siRNA sense strand
ccaccaaucgugucuugaa

SEQ ID NO: 1363424 - RNA, 19 nt, Homo sapiens
  misc_RNA (1)...(19): siRNA sense strand
ccgagagauucgccaguuu

SEQ ID NO: 1363425 - RNA, 19 nt, Homo sapiens
  misc_RNA (1)...(19): siRNA sense strand
gaugauggugauacugaaa

SEQ ID NO: 1363426 - RNA, 19 nt, Homo sapiens
  misc_RNA (1)...(19): siRNA sense strand
uguaauggaugaagaaagc

SEQ ID NO: 1363427 - RNA, 19 nt, Homo sapiens
  misc_RNA (1)...(19): siRNA sense strand
gccgcugccuccacaacua

SEQ ID NO: 1363428 - RNA, 19 nt, Homo sapiens
  misc_RNA (1)...(19): siRNA sense strand
cagcuucaccaacaagauu

SEQ ID NO: 1363429 - RNA, 19 nt, Homo sapiens
  misc_RNA (1)...(19): siRNA sense strand
gaaaaccacuaagcacuuc

SEQ ID NO: 1363430 - RNA, 19 nt, Homo sapiens
  misc_RNA (1)...(19): siRNA sense strand
uggaggagaucacgcagau

SEQ ID NO: 1363431 - RNA, 19 nt, Homo sapiens
  misc_RNA (1)...(19): siRNA sense strand
uaacaauggagucgucaug

SEQ ID NO: 1363432 - RNA, 19 nt, Homo sapiens
  misc_RNA (1)...(19): siRNA sense strand
ccagagugaugauggugau

SEQ ID NO: 1363433 - RNA, 19 nt, Homo sapiens
  misc_RNA (1)...(19): siRNA sense strand
ucaccgaccuggccuucau

SEQ ID NO: 1363434 - RNA, 19 nt, Homo sapiens
  misc_RNA (1)...(19): siRNA sense strand
gugaugauggugauacuga

SEQ ID NO: 1363435 - RNA, 19 nt, Homo sapiens
  misc_RNA (1)...(19): siRNA sense strand
caacuaaaucuccaacaac

SEQ ID NO: 1363436 - RNA, 19 nt, Homo sapiens
  misc_RNA (1)...(19): siRNA sense strand
gagauucgccaguuucaac

SEQ ID NO: 1363437 - RNA, 19 nt, Homo sapiens
  misc_RNA (1)...(19): siRNA sense strand
cagcugacccugcuagauc

SEQ ID NO: 1363438 - RNA, 19 nt, Homo sapiens
  misc_RNA (1)...(19): siRNA sense strand
aacuaaaucuccaacaaca

SEQ ID NO: 1363439 - RNA, 19 nt, Homo sapiens
  misc_RNA (1)...(19): siRNA sense strand
ccaacgaugagcucaaaug

SEQ ID NO: 1363440 - RNA, 19 nt, Homo sapiens
  misc_RNA (1)...(19): siRNA sense strand
aauauuuacuggaccaauc

SEQ ID NO: 1363441 - RNA, 19 nt, Homo sapiens
  misc_RNA (1)...(19): siRNA sense strand
caaacugccuacaaaauag

SEQ ID NO: 1363442 - RNA, 19 nt, Homo sapiens
  misc_RNA (1)...(19): siRNA sense strand
gaggaguucuucggacaag

SEQ ID NO: 1363443 - RNA, 19 nt, Homo sapiens
  misc_RNA (1)...(19): siRNA sense strand
ggucaacuucuccaagaug

SEQ ID NO: 1363444 - RNA, 19 nt, Homo sapiens
  misc_RNA (1)...(19): siRNA sense strand
gcagacuaaagcuuugauu

SEQ ID NO: 1363445 - RNA, 19 nt, Homo sapiens
  misc_RNA (1)...(19): siRNA sense strand
ggaguucuucggacaagga

SEQ ID NO: 1363446 - RNA, 19 nt, Homo sapiens
  misc_RNA (1)...(19): siRNA sense strand
cagacuaaagcuuugauug

SEQ ID NO: 1363447 - RNA, 19 nt, Homo sapiens
  misc_RNA (1)...(19): siRNA sense strand
acaaacugccuacaaaaua

SEQ ID NO: 1363448 - RNA, 19 nt, Homo sapiens
  misc_RNA (1)...(19): siRNA sense strand
gcagagcagccaccaaucg

SEQ ID NO: 1363449 - RNA, 19 nt, Homo sapiens
  misc_RNA (1)...(19): siRNA sense strand
gagagauucgccaguuuca

SEQ ID NO: 1363450 - RNA, 19 nt, Homo sapiens
  misc_RNA (1)...(19): siRNA sense strand
cuggucaacuucuccaaga

SEQ ID NO: 1363451 - RNA, 19 nt, Homo sapiens
  misc_RNA (1)...(19): siRNA sense strand
gaagacggccuggucaacu

SEQ ID NO: 1363452 - RNA, 19 nt, Homo sapiens
  misc_RNA (1)...(19): siRNA sense strand
aagacggccuggucaacuu

SEQ ID NO: 1363453 - RNA, 19 nt, Homo sapiens
  misc_RNA (1)...(19): siRNA sense strand
uccagcagcuucaccaaca

SEQ ID NO: 1363454 - RNA, 19 nt, Homo sapiens
  misc_RNA (1)...(19): siRNA sense strand
ccgcagagcagccaccaau

SEQ ID NO: 1363455 - RNA, 19 nt, Homo sapiens
  misc_RNA (1)...(19): siRNA sense strand
caaaauagagcaccaagca

SEQ ID NO: 1363456 - RNA, 19 nt, Homo sapiens
  misc_RNA (1)...(19): siRNA sense strand
caacaaacugccuacaaaa

SEQ ID NO: 1363457 - RNA, 19 nt, Homo sapiens
  misc_RNA (1)...(19): siRNA sense strand
ggauggaugaaacuggaaa

SEQ ID NO: 1363458 - RNA, 19 nt, Homo sapiens
  misc_RNA (1)...(19): siRNA sense strand
ccaaucgugucuugaacgu

SEQ ID NO: 1363459 - RNA, 19 nt, Homo sapiens
  misc_RNA (1)...(19): siRNA sense strand
gaccuccugucgugaacug

SEQ ID NO: 1363460 - RNA, 19 nt, Homo sapiens
  misc_RNA (1)...(19): siRNA sense strand
cgagagauucgccaguuuc

SEQ ID NO: 1363461 - RNA, 19 nt, Homo sapiens
  misc_RNA (1)...(19): siRNA sense strand
ugaugauggugauacugaa

SEQ ID NO: 1363462 - RNA, 19 nt, Homo sapiens
  misc_RNA (1)...(19): siRNA sense strand
ccacucagcccuggagauc

SEQ ID NO: 1363463 - RNA, 19 nt, Homo sapiens
  misc_RNA (1)...(19): siRNA sense strand
cuucagcgcucagcaagca

SEQ ID NO: 1363464 - RNA, 19 nt, Homo sapiens
  misc_RNA (1)...(19): siRNA sense strand
ccagcagcuucaccaacaa

SEQ ID NO: 1363465 - RNA, 19 nt, Homo sapiens
  misc_RNA (1)...(19): siRNA sense strand
ggacaccagcaagcucuau

SEQ ID NO: 1363466 - RNA, 19 nt, Homo sapiens
  misc_RNA (1)...(19): siRNA sense strand
aaugacaucaguaacuuga

SEQ ID NO: 1363467 - RNA, 19 nt, Homo sapiens
  misc_RNA (1)...(19): siRNA sense strand
cuaagcacuucaaugacau

SEQ ID NO: 1363468 - RNA, 19 nt, Homo sapiens
  misc_RNA (1)...(19): siRNA sense strand
agucuucucuccgaauaga

SEQ ID NO: 1363469 - RNA, 19 nt, Homo sapiens
  misc_RNA (1)...(19): siRNA sense strand
uccaaaagcuugugucauc

SEQ ID NO: 1363470 - RNA, 19 nt, Homo sapiens
  misc_RNA (1)...(19): siRNA sense strand
ugagcgccaucgagaagug

SEQ ID NO: 1363471 - RNA, 19 nt, Homo sapiens
  misc_RNA (1)...(19): siRNA sense strand
ggugagcgccaucgagaag

SEQ ID NO: 1363472 - RNA, 19 nt, Homo sapiens
  misc_RNA (1)...(19): siRNA sense strand
ggucauagcugugcuguuu

SEQ ID NO: 1363473 - RNA, 19 nt, Homo sapiens
  misc_RNA (1)...(19): siRNA sense strand
gagaugaauugcacuauuu

SEQ ID NO: 1363474 - RNA, 19 nt, Homo sapiens
  misc_RNA (1)...(19): siRNA sense strand
gaacucgaauccucuuuaa

SEQ ID NO: 1363475 - RNA, 19 nt, Homo sapiens
  misc_RNA (1)...(19): siRNA sense strand
gaacauuggucugucuaua

SEQ ID NO: 1363476 - RNA, 19 nt, Homo sapiens
  misc_RNA (1)...(19): siRNA sense strand
gagcuauguugccuaauua

SEQ ID NO: 1363477 - RNA, 19 nt, Homo sapiens
  misc_RNA (1)...(19): siRNA sense strand
gaaaugcugucucuucaug

SEQ ID NO: 1363478 - RNA, 19 nt, Homo sapiens
  misc_RNA (1)...(19): siRNA sense strand
ccaagaauaucuacagaaa

SEQ ID NO: 1363479 - RNA, 19 nt, Homo sapiens
  misc_RNA (1)...(19): siRNA sense strand
gagaauguauuuacuccua

SEQ ID NO: 1363480 - RNA, 19 nt, Homo sapiens
  misc_RNA (1)...(19): siRNA sense strand
ucucugaccuuacuuauaa

SEQ ID NO: 1363481 - RNA, 19 nt, Homo sapiens
  misc_RNA (1)...(19): siRNA sense strand
ggagcuauguugccuaauu

SEQ ID NO: 1363482 - RNA, 19 nt, Homo sapiens
  misc_RNA (1)...(19): siRNA sense strand
gaagaaaccaaguaugaaa

SEQ ID NO: 1363483 - RNA, 19 nt, Homo sapiens
  misc_RNA (1)...(19): siRNA sense strand
ggaaucagcagaauaggua

SEQ ID NO: 1363484 - RNA, 19 nt, Homo sapiens
  misc_RNA (1)...(19): siRNA sense strand
ugaagaagguauuguugua

SEQ ID NO: 1363485 - RNA, 19 nt, Homo sapiens
  misc_RNA (1)...(19): siRNA sense strand
gauucucucuuaccaaaua

SEQ ID NO: 1363486 - RNA, 19 nt, Homo sapiens
  misc_RNA (1)...(19): siRNA sense strand
agaaagaauuccuguguuu

SEQ ID NO: 1363487 - RNA, 19 nt, Homo sapiens
  misc_RNA (1)...(19): siRNA sense strand
gaccagaauuaucaaauga

SEQ ID NO: 1363488 - RNA, 19 nt, Homo sapiens
  misc_RNA (1)...(19): siRNA sense strand
gaauugcacuauuuaagga

SEQ ID NO: 1363489 - RNA, 19 nt, Homo sapiens
  misc_RNA (1)...(19): siRNA sense strand
ggaugaaaguauugacaaa

SEQ ID NO: 1363490 - RNA, 19 nt, Homo sapiens
  misc_RNA (1)...(19): siRNA sense strand
acaagcagcugacuuaugu

SEQ ID NO: 1363491 - RNA, 19 nt, Homo sapiens
  misc_RNA (1)...(19): siRNA sense strand
gaugcuauauucugugaaa

SEQ ID NO: 1363492 - RNA, 19 nt, Homo sapiens
  misc_RNA (1)...(19): siRNA sense strand
cagauacugugaaucauuu

SEQ ID NO: 1363493 - RNA, 19 nt, Homo sapiens
  misc_RNA (1)...(19): siRNA sense strand
ucaacaagcagcugacuua

SEQ ID NO: 1363494 - RNA, 19 nt, Homo sapiens
  misc_RNA (1)...(19): siRNA sense strand
guggaggaauuuaaugaua

SEQ ID NO: 1363495 - RNA, 19 nt, Homo sapiens
  misc_RNA (1)...(19): siRNA sense strand
gugguaaagugaaauguaa

SEQ ID NO: 1363496 - RNA, 19 nt, Homo sapiens
  misc_RNA (1)...(19): siRNA sense strand
ggaaauguauacugauuac

SEQ ID NO: 1363497 - RNA, 19 nt, Homo sapiens
  misc_RNA (1)...(19): siRNA sense strand
gaaacuuacugaacugcuu

SEQ ID NO: 1363498 - RNA, 19 nt, Homo sapiens
  misc_RNA (1)...(19): siRNA sense strand
gauaagauacuaccagaug

SEQ ID NO: 1363499 - RNA, 19 nt, Homo sapiens
  misc_RNA (1)...(19): siRNA sense strand
acaagaagcuuuucaauga

SEQ ID NO: 1363500 - RNA, 19 nt, Homo sapiens
  misc_RNA (1)...(19): siRNA sense strand
guuaggacuucaggaauua

SEQ ID NO: 1363501 - RNA, 19 nt, Homo sapiens
  misc_RNA (1)...(19): siRNA sense strand
gagaugcuauauucuguga

SEQ ID NO: 1363502 - RNA, 19 nt, Homo sapiens
  misc_RNA (1)...(19): siRNA sense strand
ggugaugacuguagaagga

SEQ ID NO: 1363503 - RNA, 19 nt, Homo sapiens
  misc_RNA (1)...(19): siRNA sense strand
gaaguuaccucugugacau

SEQ ID NO: 1363504 - RNA, 19 nt, Homo sapiens
  misc_RNA (1)...(19): siRNA sense strand
ggaggaauuuaaugauaga

SEQ ID NO: 1363505 - RNA, 19 nt, Homo sapiens
  misc_RNA (1)...(19): siRNA sense strand
gcagcugacuuauguuuua

SEQ ID NO: 1363506 - RNA, 19 nt, Homo sapiens
  misc_RNA (1)...(19): siRNA sense strand
ggaacucgaauccucuuua

SEQ ID NO: 1363507 - RNA, 19 nt, Homo sapiens
  misc_RNA (1)...(19): siRNA sense strand
gaagagaugaauugcacua

SEQ ID NO: 1363508 - RNA, 19 nt, Homo sapiens
  misc_RNA (1)...(19): siRNA sense strand
gugaagaaaccaaguauga

SEQ ID NO: 1363509 - RNA, 19 nt, Homo sapiens
  misc_RNA (1)...(19): siRNA sense strand
gaagaauugcagaagauuu

SEQ ID NO: 1363510 - RNA, 19 nt, Homo sapiens
  misc_RNA (1)...(19): siRNA sense strand
gaagaagguauuguuguaa

SEQ ID NO: 1363511 - RNA, 19 nt, Homo sapiens
  misc_RNA (1)...(19): siRNA sense strand
gaaauuugcagaaccuaga

SEQ ID NO: 1363512 - RNA, 19 nt, Homo sapiens
  misc_RNA (1)...(19): siRNA sense strand
cgaccagaauuaucaaaug

SEQ ID NO: 1363513 - RNA, 19 nt, Homo sapiens
  misc_RNA (1)...(19): siRNA sense strand
uuuaagaggugcagaauca

SEQ ID NO: 1363514 - RNA, 19 nt, Homo sapiens
  misc_RNA (1)...(19): siRNA sense strand
caaacuaugagaugucuuu

SEQ ID NO: 1363515 - RNA, 19 nt, Homo sapiens
  misc_RNA (1)...(19): siRNA sense strand
caucugugcugaaguuaga

SEQ ID NO: 1363516 - RNA, 19 nt, Homo sapiens
  misc_RNA (1)...(19): siRNA sense strand
agagaaaggucagcauuug

SEQ ID NO: 1363517 - RNA, 19 nt, Homo sapiens
  misc_RNA (1)...(19): siRNA sense strand
gaaaaggggagaaucauuu

SEQ ID NO: 1363518 - RNA, 19 nt, Homo sapiens
  misc_RNA (1)...(19): siRNA sense strand
ugaagcauaugaacauguu

SEQ ID NO: 1363519 - RNA, 19 nt, Homo sapiens
  misc_RNA (1)...(19): siRNA sense strand
ggagaaucauuuggaauca

SEQ ID NO: 1363520 - RNA, 19 nt, Homo sapiens
  misc_RNA (1)...(19): siRNA sense strand
gacacgagccugaacauug

SEQ ID NO: 1363521 - RNA, 19 nt, Homo sapiens
  misc_RNA (1)...(19): siRNA sense strand
gcaguuaggacuucaggaa

SEQ ID NO: 1363522 - RNA, 19 nt, Homo sapiens
  misc_RNA (1)...(19): siRNA sense strand
gauacuaccagauguaaau

SEQ ID NO: 1363523 - RNA, 19 nt, Homo sapiens
  misc_RNA (1)...(19): siRNA sense strand
gaugaaaugcugucucuuc

SEQ ID NO: 1363524 - RNA, 19 nt, Homo sapiens
  misc_RNA (1)...(19): siRNA sense strand
gugaaucauuugcuuauca

SEQ ID NO: 1363525 - RNA, 19 nt, Homo sapiens
  misc_RNA (1)...(19): siRNA sense strand
gaauguauuuacuccuaug

SEQ ID NO: 1363526 - RNA, 19 nt, Homo sapiens
  misc_RNA (1)...(19): siRNA sense strand
cagaauagguagcaaaauu

SEQ ID NO: 1363527 - RNA, 19 nt, Homo sapiens
  misc_RNA (1)...(19): siRNA sense strand
gcauauagaagugauaguu

SEQ ID NO: 1363528 - RNA, 19 nt, Homo sapiens
  misc_RNA (1)...(19): siRNA sense strand
agaauuucauggugcauuu

SEQ ID NO: 1363529 - RNA, 19 nt, Homo sapiens
  misc_RNA (1)...(19): siRNA sense strand
aaaccuugcugcauggaaa

SEQ ID NO: 1363530 - RNA, 19 nt, Homo sapiens
  misc_RNA (1)...(19): siRNA sense strand
caugaagaauugcagaaga

SEQ ID NO: 1363531 - RNA, 19 nt, Homo sapiens
  misc_RNA (1)...(19): siRNA sense strand
acauaggccuucuuugcua

SEQ ID NO: 1363532 - RNA, 19 nt, Homo sapiens
  misc_RNA (1)...(19): siRNA sense strand
gaaggcccauacauagaug

SEQ ID NO: 1363533 - RNA, 19 nt, Homo sapiens
  misc_RNA (1)...(19): siRNA sense strand
uagauuugaucccuucauu

SEQ ID NO: 1363534 - RNA, 19 nt, Homo sapiens
  misc_RNA (1)...(19): siRNA sense strand
gaaguuagaauugaagcaa

SEQ ID NO: 1363535 - RNA, 19 nt, Homo sapiens
  misc_RNA (1)...(19): siRNA sense strand
gugcugaaguuagaauuga

SEQ ID NO: 1363536 - RNA, 19 nt, Homo sapiens
  misc_RNA (1)...(19): siRNA sense strand
agagaugaauugcacuauu

SEQ ID NO: 1363537 - RNA, 19 nt, Homo sapiens
  misc_RNA (1)...(19): siRNA sense strand
aagcagcaaugaagcauau

SEQ ID NO: 1363538 - RNA, 19 nt, Homo sapiens
  misc_RNA (1)...(19): siRNA sense strand
uuacauuccagaucuguua

SEQ ID NO: 1363539 - RNA, 19 nt, Homo sapiens
  misc_RNA (1)...(19): siRNA sense strand
ccaaguagaccagaacuga

SEQ ID NO: 1363540 - RNA, 19 nt, Homo sapiens
  misc_RNA (1)...(19): siRNA sense strand
gaugacaguccaccugaaa

SEQ ID NO: 1363541 - RNA, 19 nt, Homo sapiens
  misc_RNA (1)...(19): siRNA sense strand
uaagauacuaccagaugua

SEQ ID NO: 1363542 - RNA, 19 nt, Homo sapiens
  misc_RNA (1)...(19): siRNA sense strand
gaauaucuacagaaacuuc

SEQ ID NO: 1363543 - RNA, 19 nt, Homo sapiens
  misc_RNA (1)...(19): siRNA sense strand
gcagaaauuugcagaaccu

SEQ ID NO: 1363544 - RNA, 19 nt, Homo sapiens
  misc_RNA (1)...(19): siRNA sense strand
gcaaugaagcauauagaag

SEQ ID NO: 1363545 - RNA, 19 nt, Homo sapiens
  misc_RNA (1)...(19): siRNA sense strand
caaguguauuggugaagaa

SEQ ID NO: 1363546 - RNA, 19 nt, Homo sapiens
  misc_RNA (1)...(19): siRNA sense strand
cguuuggucucacucauaa

SEQ ID NO: 1363547 - RNA, 19 nt, Homo sapiens
  misc_RNA (1)...(19): siRNA sense strand
auacaaacccaagcaguua

SEQ ID NO: 1363548 - RNA, 19 nt, Homo sapiens
  misc_RNA (1)...(19): siRNA sense strand
aaagaaagaauuccugugu

SEQ ID NO: 1363549 - RNA, 19 nt, Homo sapiens
  misc_RNA (1)...(19): siRNA sense strand
gcugaaggcccauacauag

SEQ ID NO: 1363550 - RNA, 19 nt, Homo sapiens
  misc_RNA (1)...(19): siRNA sense strand
guagaagagauucaaagaa

SEQ ID NO: 1363551 - RNA, 19 nt, Homo sapiens
  misc_RNA (1)...(19): siRNA sense strand
gcaacagacugcagaucuc

SEQ ID NO: 1363552 - RNA, 19 nt, Homo sapiens
  misc_RNA (1)...(19): siRNA sense strand
caaugaagcauauagaagu

SEQ ID NO: 1363553 - RNA, 19 nt, Homo sapiens
  misc_RNA (1)...(19): siRNA sense strand
uaugaaagcaucagacuuc

SEQ ID NO: 1363554 - RNA, 19 nt, Homo sapiens
  misc_RNA (1)...(19): siRNA sense strand
augauuaccugauguaugu

SEQ ID NO: 1363555 - RNA, 19 nt, Homo sapiens
  misc_RNA (1)...(19): siRNA sense strand
gauuugaucccuucauugu

SEQ ID NO: 1363556 - RNA, 19 nt, Homo sapiens
  misc_RNA (1)...(19): siRNA sense strand
ugcagaaccuagaaauaaa

SEQ ID NO: 1363557 - RNA, 19 nt, Homo sapiens
  misc_RNA (1)...(19): siRNA sense strand
ugaaccggcuucuccuuug

SEQ ID NO: 1363558 - RNA, 19 nt, Homo sapiens
  misc_RNA (1)...(19): siRNA sense strand
gaaaacaacaagaagcuuu

SEQ ID NO: 1363559 - RNA, 19 nt, Homo sapiens
  misc_RNA (1)...(19): siRNA sense strand
cauccagaacugaguaaua

SEQ ID NO: 1363560 - RNA, 19 nt, Homo sapiens
  misc_RNA (1)...(19): siRNA sense strand
uugcagaaccuagaaauaa

SEQ ID NO: 1363561 - RNA, 19 nt, Homo sapiens
  misc_RNA (1)...(19): siRNA sense strand
uaucuucaguguaaacuag

SEQ ID NO: 1363562 - RNA, 19 nt, Homo sapiens
  misc_RNA (1)...(19): siRNA sense strand
cugauucucucuuaccaaa

SEQ ID NO: 1363563 - RNA, 19 nt, Homo sapiens
  misc_RNA (1)...(19): siRNA sense strand
cgacauaggccuucuuugc

SEQ ID NO: 1363564 - RNA, 19 nt, Homo sapiens
  misc_RNA (1)...(19): siRNA sense strand
uaaaccaaguagaccagaa

SEQ ID NO: 1363565 - RNA, 19 nt, Homo sapiens
  misc_RNA (1)...(19): siRNA sense strand
gaaaggucagcauuuggaa

SEQ ID NO: 1363566 - RNA, 19 nt, Homo sapiens
  misc_RNA (1)...(19): siRNA sense strand
gaguauuucagacaacuuu

SEQ ID NO: 1363567 - RNA, 19 nt, Homo sapiens
  misc_RNA (1)...(19): siRNA sense strand
gaaccggcuucuccuuugg

SEQ ID NO: 1363568 - RNA, 19 nt, Homo sapiens
  misc_RNA (1)...(19): siRNA sense strand
aagaaagaauuccuguguu

SEQ ID NO: 1363569 - RNA, 19 nt, Homo sapiens
  misc_RNA (1)...(19): siRNA sense strand
ggaaguuaccucugugaca

SEQ ID NO: 1363570 - RNA, 19 nt, Homo sapiens
  misc_RNA (1)...(19): siRNA sense strand
gaaaccaaguaugaaagca

SEQ ID NO: 1363571 - RNA, 19 nt, Homo sapiens
  misc_RNA (1)...(19): siRNA sense strand
ucaaguguauuggugaaga

SEQ ID NO: 1363572 - RNA, 19 nt, Homo sapiens
  misc_RNA (1)...(19): siRNA sense strand
ggucauagcugugcuguuu

SEQ ID NO: 1363573 - RNA, 19 nt, Homo sapiens
  misc_RNA (1)...(19): siRNA sense strand
gagaugaauugcacuauuu

SEQ ID NO: 1363574 - RNA, 19 nt, Homo sapiens
  misc_RNA (1)...(19): siRNA sense strand
gaacucgaauccucuuuaa

SEQ ID NO: 1363575 - RNA, 19 nt, Homo sapiens
  misc_RNA (1)...(19): siRNA sense strand
gaacauuggucugucuaua

SEQ ID NO: 1363576 - RNA, 19 nt, Homo sapiens
  misc_RNA (1)...(19): siRNA sense strand
gagcuauguugccuaauua

SEQ ID NO: 1363577 - RNA, 19 nt, Homo sapiens
  misc_RNA (1)...(19): siRNA sense strand
gaaaugcugucucuucaug

SEQ ID NO: 1363578 - RNA, 19 nt, Homo sapiens
  misc_RNA (1)...(19): siRNA sense strand
ccaagaauaucuacagaaa

SEQ ID NO: 1363579 - RNA, 19 nt, Homo sapiens
  misc_RNA (1)...(19): siRNA sense strand
gagaauguauuuacuccua

SEQ ID NO: 1363580 - RNA, 19 nt, Homo sapiens
  misc_RNA (1)...(19): siRNA sense strand
ucucugaccuuacuuauaa

SEQ ID NO: 1363581 - RNA, 19 nt, Homo sapiens
  misc_RNA (1)...(19): siRNA sense strand
ggagcuauguugccuaauu

SEQ ID NO: 1363582 - RNA, 19 nt, Homo sapiens
  misc_RNA (1)...(19): siRNA sense strand
gaagaaaccaaguaugaaa

SEQ ID NO: 1363583 - RNA, 19 nt, Homo sapiens
  misc_RNA (1)...(19): siRNA sense strand
ggaaucagcagaauaggua

SEQ ID NO: 1363584 - RNA, 19 nt, Homo sapiens
  misc_RNA (1)...(19): siRNA sense strand
ugaagaagguauuguugua

SEQ ID NO: 1363585 - RNA, 19 nt, Homo sapiens
  misc_RNA (1)...(19): siRNA sense strand
gauucucucuuaccaaaua

SEQ ID NO: 1363586 - RNA, 19 nt, Homo sapiens
  misc_RNA (1)...(19): siRNA sense strand
agaaagaauuccuguguuu

SEQ ID NO: 1363587 - RNA, 19 nt, Homo sapiens
  misc_RNA (1)...(19): siRNA sense strand
gaccagaauuaucaaauga

SEQ ID NO: 1363588 - RNA, 19 nt, Homo sapiens
  misc_RNA (1)...(19): siRNA sense strand
gaauugcacuauuuaagga

SEQ ID NO: 1363589 - RNA, 19 nt, Homo sapiens
  misc_RNA (1)...(19): siRNA sense strand
ggaugaaaguauugacaaa

SEQ ID NO: 1363590 - RNA, 19 nt, Homo sapiens
  misc_RNA (1)...(19): siRNA sense strand
acaagcagcugacuuaugu

SEQ ID NO: 1363591 - RNA, 19 nt, Homo sapiens
  misc_RNA (1)...(19): siRNA sense strand
gaugcuauauucugugaaa

SEQ ID NO: 1363592 - RNA, 19 nt, Homo sapiens
  misc_RNA (1)...(19): siRNA sense strand
cagauacugugaaucauuu

SEQ ID NO: 1363593 - RNA, 19 nt, Homo sapiens
  misc_RNA (1)...(19): siRNA sense strand
ucaacaagcagcugacuua

SEQ ID NO: 1363594 - RNA, 19 nt, Homo sapiens
  misc_RNA (1)...(19): siRNA sense strand
guggaggaauuuaaugaua

SEQ ID NO: 1363595 - RNA, 19 nt, Homo sapiens
  misc_RNA (1)...(19): siRNA sense strand
gugguaaagugaaauguaa

SEQ ID NO: 1363596 - RNA, 19 nt, Homo sapiens
  misc_RNA (1)...(19): siRNA sense strand
ggaaauguauacugauuac

SEQ ID NO: 1363597 - RNA, 19 nt, Homo sapiens
  misc_RNA (1)...(19): siRNA sense strand
gaaacuuacugaacugcuu

SEQ ID NO: 1363598 - RNA, 19 nt, Homo sapiens
  misc_RNA (1)...(19): siRNA sense strand
gauaagauacuaccagaug

SEQ ID NO: 1363599 - RNA, 19 nt, Homo sapiens
  misc_RNA (1)...(19): siRNA sense strand
acaagaagcuuuucaauga

SEQ ID NO: 1363600 - RNA, 19 nt, Homo sapiens
  misc_RNA (1)...(19): siRNA sense strand
guuaggacuucaggaauua

SEQ ID NO: 1363601 - RNA, 19 nt, Homo sapiens
  misc_RNA (1)...(19): siRNA sense strand
gagaugcuauauucuguga

SEQ ID NO: 1363602 - RNA, 19 nt, Homo sapiens
  misc_RNA (1)...(19): siRNA sense strand
ggugaugacuguagaagga

SEQ ID NO: 1363603 - RNA, 19 nt, Homo sapiens
  misc_RNA (1)...(19): siRNA sense strand
gaaguuaccucugugacau

SEQ ID NO: 1363604 - RNA, 19 nt, Homo sapiens
  misc_RNA (1)...(19): siRNA sense strand
ggaggaauuuaaugauaga

SEQ ID NO: 1363605 - RNA, 19 nt, Homo sapiens
  misc_RNA (1)...(19): siRNA sense strand
gcagcugacuuauguuuua

SEQ ID NO: 1363606 - RNA, 19 nt, Homo sapiens
  misc_RNA (1)...(19): siRNA sense strand
ggaacucgaauccucuuua

SEQ ID NO: 1363607 - RNA, 19 nt, Homo sapiens
  misc_RNA (1)...(19): siRNA sense strand
gaagagaugaauugcacua

SEQ ID NO: 1363608 - RNA, 19 nt, Homo sapiens
  misc_RNA (1)...(19): siRNA sense strand
gugaagaaaccaaguauga

SEQ ID NO: 1363609 - RNA, 19 nt, Homo sapiens
  misc_RNA (1)...(19): siRNA sense strand
gaagaauugcagaagauuu

SEQ ID NO: 1363610 - RNA, 19 nt, Homo sapiens
  misc_RNA (1)...(19): siRNA sense strand
gaagaagguauuguuguaa

SEQ ID NO: 1363611 - RNA, 19 nt, Homo sapiens
  misc_RNA (1)...(19): siRNA sense strand
gaaauuugcagaaccuaga

SEQ ID NO: 1363612 - RNA, 19 nt, Homo sapiens
  misc_RNA (1)...(19): siRNA sense strand
cgaccagaauuaucaaaug

SEQ ID NO: 1363613 - RNA, 19 nt, Homo sapiens
  misc_RNA (1)...(19): siRNA sense strand
uuuaagaggugcagaauca

SEQ ID NO: 1363614 - RNA, 19 nt, Homo sapiens
  misc_RNA (1)...(19): siRNA sense strand
caaacuaugagaugucuuu

SEQ ID NO: 1363615 - RNA, 19 nt, Homo sapiens
  misc_RNA (1)...(19): siRNA sense strand
caucugugcugaaguuaga

SEQ ID NO: 1363616 - RNA, 19 nt, Homo sapiens
  misc_RNA (1)...(19): siRNA sense strand
agagaaaggucagcauuug

SEQ ID NO: 1363617 - RNA, 19 nt, Homo sapiens
  misc_RNA (1)...(19): siRNA sense strand
gaaaaggggagaaucauuu

SEQ ID NO: 1363618 - RNA, 19 nt, Homo sapiens
  misc_RNA (1)...(19): siRNA sense strand
ugaagcauaugaacauguu

SEQ ID NO: 1363619 - RNA, 19 nt, Homo sapiens
  misc_RNA (1)...(19): siRNA sense strand
ggagaaucauuuggaauca

SEQ ID NO: 1363620 - RNA, 19 nt, Homo sapiens
  misc_RNA (1)...(19): siRNA sense strand
gacacgagccugaacauug

SEQ ID NO: 1363621 - RNA, 19 nt, Homo sapiens
  misc_RNA (1)...(19): siRNA sense strand
gcaguuaggacuucaggaa

SEQ ID NO: 1363622 - RNA, 19 nt, Homo sapiens
  misc_RNA (1)...(19): siRNA sense strand
gauacuaccagauguaaau

SEQ ID NO: 1363623 - RNA, 19 nt, Homo sapiens
  misc_RNA (1)...(19): siRNA sense strand
gaugaaaugcugucucuuc

SEQ ID NO: 1363624 - RNA, 19 nt, Homo sapiens
  misc_RNA (1)...(19): siRNA sense strand
gugaaucauuugcuuauca

SEQ ID NO: 1363625 - RNA, 19 nt, Homo sapiens
  misc_RNA (1)...(19): siRNA sense strand
gaauguauuuacuccuaug

SEQ ID NO: 1363626 - RNA, 19 nt, Homo sapiens
  misc_RNA (1)...(19): siRNA sense strand
cagaauagguagcaaaauu

SEQ ID NO: 1363627 - RNA, 19 nt, Homo sapiens
  misc_RNA (1)...(19): siRNA sense strand
gcauauagaagugauaguu

SEQ ID NO: 1363628 - RNA, 19 nt, Homo sapiens
  misc_RNA (1)...(19): siRNA sense strand
agaauuucauggugcauuu

SEQ ID NO: 1363629 - RNA, 19 nt, Homo sapiens
  misc_RNA (1)...(19): siRNA sense strand
aaaccuugcugcauggaaa

SEQ ID NO: 1363630 - RNA, 19 nt, Homo sapiens
  misc_RNA (1)...(19): siRNA sense strand
caugaagaauugcagaaga

SEQ ID NO: 1363631 - RNA, 19 nt, Homo sapiens
  misc_RNA (1)...(19): siRNA sense strand
acauaggccuucuuugcua

SEQ ID NO: 1363632 - RNA, 19 nt, Homo sapiens
  misc_RNA (1)...(19): siRNA sense strand
gaaggcccauacauagaug

SEQ ID NO: 1363633 - RNA, 19 nt, Homo sapiens
  misc_RNA (1)...(19): siRNA sense strand
uagauuugaucccuucauu

SEQ ID NO: 1363634 - RNA, 19 nt, Homo sapiens
  misc_RNA (1)...(19): siRNA sense strand
gaaguuagaauugaagcaa

SEQ ID NO: 1363635 - RNA, 19 nt, Homo sapiens
  misc_RNA (1)...(19): siRNA sense strand
gugcugaaguuagaauuga

SEQ ID NO: 1363636 - RNA, 19 nt, Homo sapiens
  misc_RNA (1)...(19): siRNA sense strand
agagaugaauugcacuauu

SEQ ID NO: 1363637 - RNA, 19 nt, Homo sapiens
  misc_RNA (1)...(19): siRNA sense strand
aagcagcaaugaagcauau

SEQ ID NO: 1363638 - RNA, 19 nt, Homo sapiens
  misc_RNA (1)...(19): siRNA sense strand
uuacauuccagaucuguua

SEQ ID NO: 1363639 - RNA, 19 nt, Homo sapiens
  misc_RNA (1)...(19): siRNA sense strand
ccaaguagaccagaacuga

SEQ ID NO: 1363640 - RNA, 19 nt, Homo sapiens
  misc_RNA (1)...(19): siRNA sense strand
gaugacaguccaccugaaa

SEQ ID NO: 1363641 - RNA, 19 nt, Homo sapiens
  misc_RNA (1)...(19): siRNA sense strand
uaagauacuaccagaugua

SEQ ID NO: 1363642 - RNA, 19 nt, Homo sapiens
  misc_RNA (1)...(19): siRNA sense strand
gaauaucuacagaaacuuc

SEQ ID NO: 1363643 - RNA, 19 nt, Homo sapiens
  misc_RNA (1)...(19): siRNA sense strand
gcagaaauuugcagaaccu

SEQ ID NO: 1363644 - RNA, 19 nt, Homo sapiens
  misc_RNA (1)...(19): siRNA sense strand
gcaaugaagcauauagaag

SEQ ID NO: 1363645 - RNA, 19 nt, Homo sapiens
  misc_RNA (1)...(19): siRNA sense strand
caaguguauuggugaagaa

SEQ ID NO: 1363646 - RNA, 19 nt, Homo sapiens
  misc_RNA (1)...(19): siRNA sense strand
cguuuggucucacucauaa

SEQ ID NO: 1363647 - RNA, 19 nt, Homo sapiens
  misc_RNA (1)...(19): siRNA sense strand
auacaaacccaagcaguua

SEQ ID NO: 1363648 - RNA, 19 nt, Homo sapiens
  misc_RNA (1)...(19): siRNA sense strand
aaagaaagaauuccugugu

SEQ ID NO: 1363649 - RNA, 19 nt, Homo sapiens
  misc_RNA (1)...(19): siRNA sense strand
gcugaaggcccauacauag

SEQ ID NO: 1363650 - RNA, 19 nt, Homo sapiens
  misc_RNA (1)...(19): siRNA sense strand
guagaagagauucaaagaa

SEQ ID NO: 1363651 - RNA, 19 nt, Homo sapiens
  misc_RNA (1)...(19): siRNA sense strand
gcaacagacugcagaucuc

SEQ ID NO: 1363652 - RNA, 19 nt, Homo sapiens
  misc_RNA (1)...(19): siRNA sense strand
caaugaagcauauagaagu

SEQ ID NO: 1363653 - RNA, 19 nt, Homo sapiens
  misc_RNA (1)...(19): siRNA sense strand
uaugaaagcaucagacuuc

SEQ ID NO: 1363654 - RNA, 19 nt, Homo sapiens
  misc_RNA (1)...(19): siRNA sense strand
augauuaccugauguaugu

SEQ ID NO: 1363655 - RNA, 19 nt, Homo sapiens
  misc_RNA (1)...(19): siRNA sense strand
gauuugaucccuucauugu

SEQ ID NO: 1363656 - RNA, 19 nt, Homo sapiens
  misc_RNA (1)...(19): siRNA sense strand
ugcagaaccuagaaauaaa

SEQ ID NO: 1363657 - RNA, 19 nt, Homo sapiens
  misc_RNA (1)...(19): siRNA sense strand
ugaaccggcuucuccuuug

SEQ ID NO: 1363658 - RNA, 19 nt, Homo sapiens
  misc_RNA (1)...(19): siRNA sense strand
gaaaacaacaagaagcuuu

SEQ ID NO: 1363659 - RNA, 19 nt, Homo sapiens
  misc_RNA (1)...(19): siRNA sense strand
cauccagaacugaguaaua

SEQ ID NO: 1363660 - RNA, 19 nt, Homo sapiens
  misc_RNA (1)...(19): siRNA sense strand
uugcagaaccuagaaauaa

SEQ ID NO: 1363661 - RNA, 19 nt, Homo sapiens
  misc_RNA (1)...(19): siRNA sense strand
uaucuucaguguaaacuag

SEQ ID NO: 1363662 - RNA, 19 nt, Homo sapiens
  misc_RNA (1)...(19): siRNA sense strand
cugauucucucuuaccaaa

SEQ ID NO: 1363663 - RNA, 19 nt, Homo sapiens
  misc_RNA (1)...(19): siRNA sense strand
cgacauaggccuucuuugc

SEQ ID NO: 1363664 - RNA, 19 nt, Homo sapiens
  misc_RNA (1)...(19): siRNA sense strand
uaaaccaaguagaccagaa

SEQ ID NO: 1363665 - RNA, 19 nt, Homo sapiens
  misc_RNA (1)...(19): siRNA sense strand
gaaaggucagcauuuggaa

SEQ ID NO: 1363666 - RNA, 19 nt, Homo sapiens
  misc_RNA (1)...(19): siRNA sense strand
gaguauuucagacaacuuu

SEQ ID NO: 1363667 - RNA, 19 nt, Homo sapiens
  misc_RNA (1)...(19): siRNA sense strand
gaaccggcuucuccuuugg

SEQ ID NO: 1363668 - RNA, 19 nt, Homo sapiens
  misc_RNA (1)...(19): siRNA sense strand
aagaaagaauuccuguguu

SEQ ID NO: 1363669 - RNA, 19 nt, Homo sapiens
  misc_RNA (1)...(19): siRNA sense strand
ggaaguuaccucugugaca

SEQ ID NO: 1363670 - RNA, 19 nt, Homo sapiens
  misc_RNA (1)...(19): siRNA sense strand
gaaaccaaguaugaaagca

SEQ ID NO: 1363671 - RNA, 19 nt, Homo sapiens
  misc_RNA (1)...(19): siRNA sense strand
ucaaguguauuggugaaga

SEQ ID NO: 1363672 - RNA, 19 nt, Homo sapiens
  misc_RNA (1)...(19): siRNA sense strand
gaagaaaucucacuaauuc

SEQ ID NO: 1363673 - RNA, 19 nt, Homo sapiens
  misc_RNA (1)...(19): siRNA sense strand
gaagaagaaaucucacuaa

SEQ ID NO: 1363674 - RNA, 19 nt, Homo sapiens
  misc_RNA (1)...(19): siRNA sense strand
aggaguaccuggaguauaa

SEQ ID NO: 1363675 - RNA, 19 nt, Homo sapiens
  misc_RNA (1)...(19): siRNA sense strand
gaacagaagaagaagaaau

SEQ ID NO: 1363676 - RNA, 19 nt, Homo sapiens
  misc_RNA (1)...(19): siRNA sense strand
gcggcacgcugcuaaguuu

SEQ ID NO: 1363677 - RNA, 19 nt, Homo sapiens
  misc_RNA (1)...(19): siRNA sense strand
uagcugcucuuucuucuug

SEQ ID NO: 1363678 - RNA, 19 nt, Homo sapiens
  misc_RNA (1)...(19): siRNA sense strand
ggccagaacugaagcagau

SEQ ID NO: 1363679 - RNA, 19 nt, Homo sapiens
  misc_RNA (1)...(19): siRNA sense strand
gguuagaguucacacuuga

SEQ ID NO: 1363680 - RNA, 19 nt, Homo sapiens
  misc_RNA (1)...(19): siRNA sense strand
ucacagggcugcugauggu

SEQ ID NO: 1363681 - RNA, 19 nt, Homo sapiens
  misc_RNA (1)...(19): siRNA sense strand
gagaggaguaccuggagua

SEQ ID NO: 1363682 - RNA, 19 nt, Homo sapiens
  misc_RNA (1)...(19): siRNA sense strand
uacaguagcugcucuuucu

SEQ ID NO: 1363683 - RNA, 19 nt, Homo sapiens
  misc_RNA (1)...(19): siRNA sense strand
guacaugugcucccuguca

SEQ ID NO: 1363684 - RNA, 19 nt, Homo sapiens
  misc_RNA (1)...(19): siRNA sense strand
ccagaacugaagcagauua

SEQ ID NO: 1363685 - RNA, 19 nt, Homo sapiens
  misc_RNA (1)...(19): siRNA sense strand
acagcuggcuccaauuuca

SEQ ID NO: 1363686 - RNA, 19 nt, Homo sapiens
  misc_RNA (1)...(19): siRNA sense strand
guuuacagcuggcuccaau

SEQ ID NO: 1363687 - RNA, 19 nt, Homo sapiens
  misc_RNA (1)...(19): siRNA sense strand
agaagaagaagaaaucuca

SEQ ID NO: 1363688 - RNA, 19 nt, Homo sapiens
  misc_RNA (1)...(19): siRNA sense strand
aaucacagccuggaguaua

SEQ ID NO: 1363689 - RNA, 19 nt, Homo sapiens
  misc_RNA (1)...(19): siRNA sense strand
gguuucggcauccuucuua

SEQ ID NO: 1363690 - RNA, 19 nt, Homo sapiens
  misc_RNA (1)...(19): siRNA sense strand
uuacagcuggcuccaauuu

SEQ ID NO: 1363691 - RNA, 19 nt, Homo sapiens
  misc_RNA (1)...(19): siRNA sense strand
ccacgggccugccuuucau

SEQ ID NO: 1363692 - RNA, 19 nt, Homo sapiens
  misc_RNA (1)...(19): siRNA sense strand
ugucauuguuccacuauuc

SEQ ID NO: 1363693 - RNA, 19 nt, Homo sapiens
  misc_RNA (1)...(19): siRNA sense strand
gaacugaagcagauuaccu

SEQ ID NO: 1363694 - RNA, 19 nt, Homo sapiens
  misc_RNA (1)...(19): siRNA sense strand
gaggaguaccuggaguaua

SEQ ID NO: 1363695 - RNA, 19 nt, Homo sapiens
  misc_RNA (1)...(19): siRNA sense strand
agaagaagaaaucucacua

SEQ ID NO: 1363696 - RNA, 19 nt, Homo sapiens
  misc_RNA (1)...(19): siRNA sense strand
ugaaucacagccuggagua

SEQ ID NO: 1363697 - RNA, 19 nt, Homo sapiens
  misc_RNA (1)...(19): siRNA sense strand
ucgaacagaagaagaagaa

SEQ ID NO: 1363698 - RNA, 19 nt, Homo sapiens
  misc_RNA (1)...(19): siRNA sense strand
gaugguggucuucggagaa

SEQ ID NO: 1363699 - RNA, 19 nt, Homo sapiens
  misc_RNA (1)...(19): siRNA sense strand
uauuggaacucaggugaug

SEQ ID NO: 1363700 - RNA, 19 nt, Homo sapiens
  misc_RNA (1)...(19): siRNA sense strand
cgaucgaacagaagaagaa

SEQ ID NO: 1363701 - RNA, 19 nt, Homo sapiens
  misc_RNA (1)...(19): siRNA sense strand
cagccuggaguauacagua

SEQ ID NO: 1363702 - RNA, 19 nt, Homo sapiens
  misc_RNA (1)...(19): siRNA sense strand
cucaggugaugcuguguaa

SEQ ID NO: 1363703 - RNA, 19 nt, Homo sapiens
  misc_RNA (1)...(19): siRNA sense strand
gaaaucucacuaauucacu

SEQ ID NO: 1363704 - RNA, 19 nt, Homo sapiens
  misc_RNA (1)...(19): siRNA sense strand
aaaagucuguccuuggauu

SEQ ID NO: 1363705 - RNA, 19 nt, Homo sapiens
  misc_RNA (1)...(19): siRNA sense strand
caucugcggcgucagcuau

SEQ ID NO: 1363706 - RNA, 19 nt, Homo sapiens
  misc_RNA (1)...(19): siRNA sense strand
ggugaccaguggaguguac

SEQ ID NO: 1363707 - RNA, 19 nt, Homo sapiens
  misc_RNA (1)...(19): siRNA sense strand
ccgccucgcuaccagauag

SEQ ID NO: 1363708 - RNA, 19 nt, Homo sapiens
  misc_RNA (1)...(19): siRNA sense strand
uaccuggaguauaagaaga

SEQ ID NO: 1363709 - RNA, 19 nt, Homo sapiens
  misc_RNA (1)...(19): siRNA sense strand
gcucuuucuucuugguuag

SEQ ID NO: 1363710 - RNA, 19 nt, Homo sapiens
  misc_RNA (1)...(19): siRNA sense strand
guaccuggaguauaagaag

SEQ ID NO: 1363711 - RNA, 19 nt, Homo sapiens
  misc_RNA (1)...(19): siRNA sense strand
ggaguguacgcuugguuuc

SEQ ID NO: 1363712 - RNA, 19 nt, Homo sapiens
  misc_RNA (1)...(19): siRNA sense strand
gcagauuaccuggcucagu

SEQ ID NO: 1363713 - RNA, 19 nt, Homo sapiens
  misc_RNA (1)...(19): siRNA sense strand
cuuccgcgaucgaacagaa

SEQ ID NO: 1363714 - RNA, 19 nt, Homo sapiens
  misc_RNA (1)...(19): siRNA sense strand
ugugcucccugucauuguu

SEQ ID NO: 1363715 - RNA, 19 nt, Homo sapiens
  misc_RNA (1)...(19): siRNA sense strand
ugguuagaguucacacuug

SEQ ID NO: 1363716 - RNA, 19 nt, Homo sapiens
  misc_RNA (1)...(19): siRNA sense strand
aacagaagaagaagaaauc

SEQ ID NO: 1363717 - RNA, 19 nt, Homo sapiens
  misc_RNA (1)...(19): siRNA sense strand
gaaucacagccuggaguau

SEQ ID NO: 1363718 - RNA, 19 nt, Homo sapiens
  misc_RNA (1)...(19): siRNA sense strand
gacaguguggcgauucuuc

SEQ ID NO: 1363719 - RNA, 19 nt, Homo sapiens
  misc_RNA (1)...(19): siRNA sense strand
guccuuggauuccuuucuc

SEQ ID NO: 1363720 - RNA, 19 nt, Homo sapiens
  misc_RNA (1)...(19): siRNA sense strand
cuucuuacgucgggugguu

SEQ ID NO: 1363721 - RNA, 19 nt, Homo sapiens
  misc_RNA (1)...(19): siRNA sense strand
caugugcucccugucauug

SEQ ID NO: 1363722 - RNA, 19 nt, Homo sapiens
  misc_RNA (1)...(19): siRNA sense strand
gaagaaaucucacuaauuc

SEQ ID NO: 1363723 - RNA, 19 nt, Homo sapiens
  misc_RNA (1)...(19): siRNA sense strand
gaagaagaaaucucacuaa

SEQ ID NO: 1363724 - RNA, 19 nt, Homo sapiens
  misc_RNA (1)...(19): siRNA sense strand
aggaguaccuggaguauaa

SEQ ID NO: 1363725 - RNA, 19 nt, Homo sapiens
  misc_RNA (1)...(19): siRNA sense strand
gaacagaagaagaagaaau

SEQ ID NO: 1363726 - RNA, 19 nt, Homo sapiens
  misc_RNA (1)...(19): siRNA sense strand
uagcugcucuuucuucuug

SEQ ID NO: 1363727 - RNA, 19 nt, Homo sapiens
  misc_RNA (1)...(19): siRNA sense strand
ggccagaacugaagcagau

SEQ ID NO: 1363728 - RNA, 19 nt, Homo sapiens
  misc_RNA (1)...(19): siRNA sense strand
gguuagaguucacacuuga

SEQ ID NO: 1363729 - RNA, 19 nt, Homo sapiens
  misc_RNA (1)...(19): siRNA sense strand
ucacagggcugcugauggu

SEQ ID NO: 1363730 - RNA, 19 nt, Homo sapiens
  misc_RNA (1)...(19): siRNA sense strand
gagaggaguaccuggagua

SEQ ID NO: 1363731 - RNA, 19 nt, Homo sapiens
  misc_RNA (1)...(19): siRNA sense strand
uacaguagcugcucuuucu

SEQ ID NO: 1363732 - RNA, 19 nt, Homo sapiens
  misc_RNA (1)...(19): siRNA sense strand
ccagaacugaagcagauua

SEQ ID NO: 1363733 - RNA, 19 nt, Homo sapiens
  misc_RNA (1)...(19): siRNA sense strand
acagcuggcuccaauuuca

SEQ ID NO: 1363734 - RNA, 19 nt, Homo sapiens
  misc_RNA (1)...(19): siRNA sense strand
guuuacagcuggcuccaau

SEQ ID NO: 1363735 - RNA, 19 nt, Homo sapiens
  misc_RNA (1)...(19): siRNA sense strand
agaagaagaagaaaucuca

SEQ ID NO: 1363736 - RNA, 19 nt, Homo sapiens
  misc_RNA (1)...(19): siRNA sense strand
aaucacagccuggaguaua

SEQ ID NO: 1363737 - RNA, 19 nt, Homo sapiens
  misc_RNA (1)...(19): siRNA sense strand
gguuucggcauccuucuua

SEQ ID NO: 1363738 - RNA, 19 nt, Homo sapiens
  misc_RNA (1)...(19): siRNA sense strand
uuacagcuggcuccaauuu

SEQ ID NO: 1363739 - RNA, 19 nt, Homo sapiens
  misc_RNA (1)...(19): siRNA sense strand
ccacgggccugccuuucau

SEQ ID NO: 1363740 - RNA, 19 nt, Homo sapiens
  misc_RNA (1)...(19): siRNA sense strand
ugucauuguuccacuauuc

SEQ ID NO: 1363741 - RNA, 19 nt, Homo sapiens
  misc_RNA (1)...(19): siRNA sense strand
gaacugaagcagauuaccu

SEQ ID NO: 1363742 - RNA, 19 nt, Homo sapiens
  misc_RNA (1)...(19): siRNA sense strand
gaggaguaccuggaguaua

SEQ ID NO: 1363743 - RNA, 19 nt, Homo sapiens
  misc_RNA (1)...(19): siRNA sense strand
agaagaagaaaucucacua

SEQ ID NO: 1363744 - RNA, 19 nt, Homo sapiens
  misc_RNA (1)...(19): siRNA sense strand
ugaaucacagccuggagua

SEQ ID NO: 1363745 - RNA, 19 nt, Homo sapiens
  misc_RNA (1)...(19): siRNA sense strand
ucgaacagaagaagaagaa

SEQ ID NO: 1363746 - RNA, 19 nt, Homo sapiens
  misc_RNA (1)...(19): siRNA sense strand
gaugguggucuucggagaa

SEQ ID NO: 1363747 - RNA, 19 nt, Homo sapiens
  misc_RNA (1)...(19): siRNA sense strand
uauuggaacucaggugaug

SEQ ID NO: 1363748 - RNA, 19 nt, Homo sapiens
  misc_RNA (1)...(19): siRNA sense strand
cgaucgaacagaagaagaa

SEQ ID NO: 1363749 - RNA, 19 nt, Homo sapiens
  misc_RNA (1)...(19): siRNA sense strand
cagccuggaguauacagua

SEQ ID NO: 1363750 - RNA, 19 nt, Homo sapiens
  misc_RNA (1)...(19): siRNA sense strand
cucaggugaugcuguguaa

SEQ ID NO: 1363751 - RNA, 19 nt, Homo sapiens
  misc_RNA (1)...(19): siRNA sense strand
gaaaucucacuaauucacu

SEQ ID NO: 1363752 - RNA, 19 nt, Homo sapiens
  misc_RNA (1)...(19): siRNA sense strand
ggugaccaguggaguguac

SEQ ID NO: 1363753 - RNA, 19 nt, Homo sapiens
  misc_RNA (1)...(19): siRNA sense strand
aaaagucuguccuuggauu

SEQ ID NO: 1363754 - RNA, 19 nt, Homo sapiens
  misc_RNA (1)...(19): siRNA sense strand
caucugcggcgucagcuau

SEQ ID NO: 1363755 - RNA, 19 nt, Homo sapiens
  misc_RNA (1)...(19): siRNA sense strand
uaccuggaguauaagaaga

SEQ ID NO: 1363756 - RNA, 19 nt, Homo sapiens
  misc_RNA (1)...(19): siRNA sense strand
gcucuuucuucuugguuag

SEQ ID NO: 1363757 - RNA, 19 nt, Homo sapiens
  misc_RNA (1)...(19): siRNA sense strand
guaccuggaguauaagaag

SEQ ID NO: 1363758 - RNA, 19 nt, Homo sapiens
  misc_RNA (1)...(19): siRNA sense strand
ggaguguacgcuugguuuc

SEQ ID NO: 1363759 - RNA, 19 nt, Homo sapiens
  misc_RNA (1)...(19): siRNA sense strand
gcagauuaccuggcucagu

SEQ ID NO: 1363760 - RNA, 19 nt, Homo sapiens
  misc_RNA (1)...(19): siRNA sense strand
cuuccgcgaucgaacagaa

SEQ ID NO: 1363761 - RNA, 19 nt, Homo sapiens
  misc_RNA (1)...(19): siRNA sense strand
ugguuagaguucacacuug

SEQ ID NO: 1363762 - RNA, 19 nt, Homo sapiens
  misc_RNA (1)...(19): siRNA sense strand
aacagaagaagaagaaauc

SEQ ID NO: 1363763 - RNA, 19 nt, Homo sapiens
  misc_RNA (1)...(19): siRNA sense strand
gacaguguggcgauucuuc

SEQ ID NO: 1363764 - RNA, 19 nt, Homo sapiens
  misc_RNA (1)...(19): siRNA sense strand
gaaucacagccuggaguau

SEQ ID NO: 1363765 - RNA, 19 nt, Homo sapiens
  misc_RNA (1)...(19): siRNA sense strand
cuucuuacgucgggugguu

SEQ ID NO: 1363766 - RNA, 19 nt, Homo sapiens
  misc_RNA (1)...(19): siRNA sense strand
guccuuggauuccuuucuc

SEQ ID NO: 1363767 - RNA, 19 nt, Homo sapiens
  misc_RNA (1)...(19): siRNA sense strand
gaugauggauucugugugu

SEQ ID NO: 1363768 - RNA, 19 nt, Homo sapiens
  misc_RNA (1)...(19): siRNA sense strand
gaagugaaacugugugaga

SEQ ID NO: 1363769 - RNA, 19 nt, Homo sapiens
  misc_RNA (1)...(19): siRNA sense strand
gacauuggcugacaucaca

SEQ ID NO: 1363770 - RNA, 19 nt, Homo sapiens
  misc_RNA (1)...(19): siRNA sense strand
cgccaggccuuucccaaua

SEQ ID NO: 1363771 - RNA, 19 nt, Homo sapiens
  misc_RNA (1)...(19): siRNA sense strand
gugagaagauggcccaguu

SEQ ID NO: 1363772 - RNA, 19 nt, Homo sapiens
  misc_RNA (1)...(19): siRNA sense strand
gaaacugugugagaagaug

SEQ ID NO: 1363773 - RNA, 19 nt, Homo sapiens
  misc_RNA (1)...(19): siRNA sense strand
gaagauggcccaguuugau

SEQ ID NO: 1363774 - RNA, 19 nt, Homo sapiens
  misc_RNA (1)...(19): siRNA sense strand
caagaguaccuuuguguug

SEQ ID NO: 1363775 - RNA, 19 nt, Homo sapiens
  misc_RNA (1)...(19): siRNA sense strand
ucucaucacuggaauguuc

SEQ ID NO: 1363776 - RNA, 19 nt, Homo sapiens
  misc_RNA (1)...(19): siRNA sense strand
gccauugccuacuauguga

SEQ ID NO: 1363777 - RNA, 19 nt, Homo sapiens
  misc_RNA (1)...(19): siRNA sense strand
aacaauagcagcuccauuu

SEQ ID NO: 1363778 - RNA, 19 nt, Homo sapiens
  misc_RNA (1)...(19): siRNA sense strand
gagaagauggcccaguuug

SEQ ID NO: 1363779 - RNA, 19 nt, Homo sapiens
  misc_RNA (1)...(19): siRNA sense strand
guaccuuuguguuggauga

SEQ ID NO: 1363780 - RNA, 19 nt, Homo sapiens
  misc_RNA (1)...(19): siRNA sense strand
caacgccauugccuacuau

SEQ ID NO: 1363781 - RNA, 19 nt, Homo sapiens
  misc_RNA (1)...(19): siRNA sense strand
gcugcuggaugcuuacuug

SEQ ID NO: 1363782 - RNA, 19 nt, Homo sapiens
  misc_RNA (1)...(19): siRNA sense strand
ccacugagaaugcaaagga

SEQ ID NO: 1363783 - RNA, 19 nt, Homo sapiens
  misc_RNA (1)...(19): siRNA sense strand
ucucaucgcugcucaguac

SEQ ID NO: 1363784 - RNA, 19 nt, Homo sapiens
  misc_RNA (1)...(19): siRNA sense strand
gcagagacccaaccuaaaa

SEQ ID NO: 1363785 - RNA, 19 nt, Homo sapiens
  misc_RNA (1)...(19): siRNA sense strand
gcaaggucccagcauuuga

SEQ ID NO: 1363786 - RNA, 19 nt, Homo sapiens
  misc_RNA (1)...(19): siRNA sense strand
gggagcacuuugauaagga

SEQ ID NO: 1363787 - RNA, 19 nt, Homo sapiens
  misc_RNA (1)...(19): siRNA sense strand
caucaugcaccacaacaaa

SEQ ID NO: 1363788 - RNA, 19 nt, Homo sapiens
  misc_RNA (1)...(19): siRNA sense strand
ugggugagcuuugcugauu

SEQ ID NO: 1363789 - RNA, 19 nt, Homo sapiens
  misc_RNA (1)...(19): siRNA sense strand
aggaggagauggaugaaug

SEQ ID NO: 1363790 - RNA, 19 nt, Homo sapiens
  misc_RNA (1)...(19): siRNA sense strand
uggacaagcugaggaagaa

SEQ ID NO: 1363791 - RNA, 19 nt, Homo sapiens
  misc_RNA (1)...(19): siRNA sense strand
gcuggaugcuuacuugaag

SEQ ID NO: 1363792 - RNA, 19 nt, Homo sapiens
  misc_RNA (1)...(19): siRNA sense strand
acaaacaggccacugagaa

SEQ ID NO: 1363793 - RNA, 19 nt, Homo sapiens
  misc_RNA (1)...(19): siRNA sense strand
aauagcagcuccauuucug

SEQ ID NO: 1363794 - RNA, 19 nt, Homo sapiens
  misc_RNA (1)...(19): siRNA sense strand
gcaaucucaucacuggaau

SEQ ID NO: 1363795 - RNA, 19 nt, Homo sapiens
  misc_RNA (1)...(19): siRNA sense strand
gagcugcaaucucaucacu

SEQ ID NO: 1363796 - RNA, 19 nt, Homo sapiens
  misc_RNA (1)...(19): siRNA sense strand
ucugggagcacuuugauaa

SEQ ID NO: 1363797 - RNA, 19 nt, Homo sapiens
  misc_RNA (1)...(19): siRNA sense strand
gauggauucuguguguuug

SEQ ID NO: 1363798 - RNA, 19 nt, Homo sapiens
  misc_RNA (1)...(19): siRNA sense strand
caaacaggccacugagaau

SEQ ID NO: 1363799 - RNA, 19 nt, Homo sapiens
  misc_RNA (1)...(19): siRNA sense strand
ccuacuaugugagcaauga

SEQ ID NO: 1363800 - RNA, 19 nt, Homo sapiens
  misc_RNA (1)...(19): siRNA sense strand
gugaaacugugugagaaga

SEQ ID NO: 1363801 - RNA, 19 nt, Homo sapiens
  misc_RNA (1)...(19): siRNA sense strand
cagauuggcagguggacua

SEQ ID NO: 1363802 - RNA, 19 nt, Homo sapiens
  misc_RNA (1)...(19): siRNA sense strand
ugagggugaugauggauuc

SEQ ID NO: 1363803 - RNA, 19 nt, Homo sapiens
  misc_RNA (1)...(19): siRNA sense strand
gccaggagcuugccuuucc

SEQ ID NO: 1363804 - RNA, 19 nt, Homo sapiens
  misc_RNA (1)...(19): siRNA sense strand
gcucaccugcccaagagua

SEQ ID NO: 1363805 - RNA, 19 nt, Homo sapiens
  misc_RNA (1)...(19): siRNA sense strand
gaggaagugaggcgaauuc

SEQ ID NO: 1363806 - RNA, 19 nt, Homo sapiens
  misc_RNA (1)...(19): siRNA sense strand
uugcagagacccaaccuaa

SEQ ID NO: 1363807 - RNA, 19 nt, Homo sapiens
  misc_RNA (1)...(19): siRNA sense strand
cugggacccuguacacgua

SEQ ID NO: 1363808 - RNA, 19 nt, Homo sapiens
  misc_RNA (1)...(19): siRNA sense strand
cggcaaggucccagcauuu

SEQ ID NO: 1363809 - RNA, 19 nt, Homo sapiens
  misc_RNA (1)...(19): siRNA sense strand
caacaauagcagcuccauu

SEQ ID NO: 1363810 - RNA, 19 nt, Homo sapiens
  misc_RNA (1)...(19): siRNA sense strand
acaacaaacaggccacuga

SEQ ID NO: 1363811 - RNA, 19 nt, Homo sapiens
  misc_RNA (1)...(19): siRNA sense strand
cgagugacauuggcugaca

SEQ ID NO: 1363812 - RNA, 19 nt, Homo sapiens
  misc_RNA (1)...(19): siRNA sense strand
gaacucacucagaccuuca

SEQ ID NO: 1363813 - RNA, 19 nt, Homo sapiens
  misc_RNA (1)...(19): siRNA sense strand
ccaagaguaccuuuguguu

SEQ ID NO: 1363814 - RNA, 19 nt, Homo sapiens
  misc_RNA (1)...(19): siRNA sense strand
ugauggauucuguguguuu

SEQ ID NO: 1363815 - RNA, 19 nt, Homo sapiens
  misc_RNA (1)...(19): siRNA sense strand
gaauuuaagcgcaaguacu

SEQ ID NO: 1363816 - RNA, 19 nt, Homo sapiens
  misc_RNA (1)...(19): siRNA sense strand
ggacacaccacggaaagag

SEQ ID NO: 1363817 - RNA, 19 nt, Homo sapiens
  misc_RNA (1)...(19): siRNA sense strand
caaccgcaccccugaauuu

SEQ ID NO: 1363818 - RNA, 19 nt, Homo sapiens
  misc_RNA (1)...(19): siRNA sense strand
uggcugacaucacaguugu

SEQ ID NO: 1363819 - RNA, 19 nt, Homo sapiens
  misc_RNA (1)...(19): siRNA sense strand
gacaagcugaggaagaaug

SEQ ID NO: 1363820 - RNA, 19 nt, Homo sapiens
  misc_RNA (1)...(19): siRNA sense strand
gcccaagaguaccuuugug

SEQ ID NO: 1363821 - RNA, 19 nt, Homo sapiens
  misc_RNA (1)...(19): siRNA sense strand
ggaggagauggaugaaugu

SEQ ID NO: 1363822 - RNA, 19 nt, Homo sapiens
  misc_RNA (1)...(19): siRNA sense strand
ccggcaaggucccagcauu

SEQ ID NO: 1363823 - RNA, 19 nt, Homo sapiens
  misc_RNA (1)...(19): siRNA sense strand
uguguuggaugaauuuaag

SEQ ID NO: 1363824 - RNA, 19 nt, Homo sapiens
  misc_RNA (1)...(19): siRNA sense strand
aagugaaacugugugagaa

SEQ ID NO: 1363825 - RNA, 19 nt, Homo sapiens
  misc_RNA (1)...(19): siRNA sense strand
gggugaugauggauucugu

SEQ ID NO: 1363826 - RNA, 19 nt, Homo sapiens
  misc_RNA (1)...(19): siRNA sense strand
ggcaaggucccagcauuug

SEQ ID NO: 1363827 - RNA, 19 nt, Homo sapiens
  misc_RNA (1)...(19): siRNA sense strand
uggcccaguuugaugcuaa

SEQ ID NO: 1363828 - RNA, 19 nt, Homo sapiens
  misc_RNA (1)...(19): siRNA sense strand
aaacaggccacugagaaug

SEQ ID NO: 1363829 - RNA, 19 nt, Homo sapiens
  misc_RNA (1)...(19): siRNA sense strand
agaaugccuucgccagugu

SEQ ID NO: 1363830 - RNA, 19 nt, Homo sapiens
  misc_RNA (1)...(19): siRNA sense strand
guacuccaaugaggacaca

SEQ ID NO: 1363831 - RNA, 19 nt, Homo sapiens
  misc_RNA (1)...(19): siRNA sense strand
agaagauggcccaguuuga

SEQ ID NO: 1363832 - RNA, 19 nt, Homo sapiens
  misc_RNA (1)...(19): siRNA sense strand
uguuguggcucuauaagca

SEQ ID NO: 1363833 - RNA, 19 nt, Homo sapiens
  misc_RNA (1)...(19): siRNA sense strand
ggaagugaggcgaauucug

SEQ ID NO: 1363834 - RNA, 19 nt, Homo sapiens
  misc_RNA (1)...(19): siRNA sense strand
aaaggacacaccacggaaa

SEQ ID NO: 1363835 - RNA, 19 nt, Homo sapiens
  misc_RNA (1)...(19): siRNA sense strand
ugagaagauggcccaguuu

SEQ ID NO: 1363836 - RNA, 19 nt, Homo sapiens
  misc_RNA (1)...(19): siRNA sense strand
acacaccacggaaagagaa

SEQ ID NO: 1363837 - RNA, 19 nt, Homo sapiens
  misc_RNA (1)...(19): siRNA sense strand
ggaggaagugaggcgaauu

SEQ ID NO: 1363838 - RNA, 19 nt, Homo sapiens
  misc_RNA (1)...(19): siRNA sense strand
caauagcagcuccauuucu

SEQ ID NO: 1363839 - RNA, 19 nt, Homo sapiens
  misc_RNA (1)...(19): siRNA sense strand
gccaggccuuucccaauac

SEQ ID NO: 1363840 - RNA, 19 nt, Homo sapiens
  misc_RNA (1)...(19): siRNA sense strand
agacgcugguucgagagua

SEQ ID NO: 1363841 - RNA, 19 nt, Homo sapiens
  misc_RNA (1)...(19): siRNA sense strand
ggcccaguuugaugcuaaa

SEQ ID NO: 1363842 - RNA, 19 nt, Homo sapiens
  misc_RNA (1)...(19): siRNA sense strand
gggugagcuuugcugauuc

SEQ ID NO: 1363843 - RNA, 19 nt, Homo sapiens
  misc_RNA (1)...(19): siRNA sense strand
aagcgcaaguacuccaaug

SEQ ID NO: 1363844 - RNA, 19 nt, Homo sapiens
  misc_RNA (1)...(19): siRNA sense strand
agaguaccuuuguguugga

SEQ ID NO: 1363845 - RNA, 19 nt, Homo sapiens
  misc_RNA (1)...(19): siRNA sense strand
ucgcucaccugcccaagag

SEQ ID NO: 1363846 - RNA, 19 nt, Homo sapiens
  misc_RNA (1)...(19): siRNA sense strand
cugaggaggagauggauga

SEQ ID NO: 1363847 - RNA, 19 nt, Homo sapiens
  misc_RNA (1)...(19): siRNA sense strand
gggcgaacgagugacauug

SEQ ID NO: 1363848 - RNA, 19 nt, Homo sapiens
  misc_RNA (1)...(19): siRNA sense strand
ucauacacauggcggaaac

SEQ ID NO: 1363849 - RNA, 19 nt, Homo sapiens
  misc_RNA (1)...(19): siRNA sense strand
gcgcaaguacuccaaugag

SEQ ID NO: 1363850 - RNA, 19 nt, Homo sapiens
  misc_RNA (1)...(19): siRNA sense strand
gcugguuccucaccugcau

SEQ ID NO: 1363851 - RNA, 19 nt, Homo sapiens
  misc_RNA (1)...(19): siRNA sense strand
gaaugcaaaggaggaagug

SEQ ID NO: 1363852 - RNA, 19 nt, Homo sapiens
  misc_RNA (1)...(19): siRNA sense strand
guacacguauccugaaaac

SEQ ID NO: 1363853 - RNA, 19 nt, Homo sapiens
  misc_RNA (1)...(19): siRNA sense strand
ccuuuguguuggaugaauu

SEQ ID NO: 1363854 - RNA, 19 nt, Homo sapiens
  misc_RNA (1)...(19): siRNA sense strand
gacacaccacggaaagaga

SEQ ID NO: 1363855 - RNA, 19 nt, Homo sapiens
  misc_RNA (1)...(19): siRNA sense strand
ccaccccacuuccauuuug

SEQ ID NO: 1363856 - RNA, 19 nt, Homo sapiens
  misc_RNA (1)...(19): siRNA sense strand
ggagauugcucaagaaauu

SEQ ID NO: 1363857 - RNA, 19 nt, Homo sapiens
  misc_RNA (1)...(19): siRNA sense strand
gaugggcugucuuucauua

SEQ ID NO: 1363858 - RNA, 19 nt, Homo sapiens
  misc_RNA (1)...(19): siRNA sense strand
gaaaugaugggcugucuuu

SEQ ID NO: 1363859 - RNA, 19 nt, Homo sapiens
  misc_RNA (1)...(19): siRNA sense strand
guacaaaugaugacaagua

SEQ ID NO: 1363860 - RNA, 19 nt, Homo sapiens
  misc_RNA (1)...(19): siRNA sense strand
ggagcagacugaauuuauu

SEQ ID NO: 1363861 - RNA, 19 nt, Homo sapiens
  misc_RNA (1)...(19): siRNA sense strand
gaaaguauagagaagagua

SEQ ID NO: 1363862 - RNA, 19 nt, Homo sapiens
  misc_RNA (1)...(19): siRNA sense strand
gcagauagcuacagcaaaa

SEQ ID NO: 1363863 - RNA, 19 nt, Homo sapiens
  misc_RNA (1)...(19): siRNA sense strand
gauagaaucaacuugguua

SEQ ID NO: 1363864 - RNA, 19 nt, Homo sapiens
  misc_RNA (1)...(19): siRNA sense strand
gaacggauucccuuugauu

SEQ ID NO: 1363865 - RNA, 19 nt, Homo sapiens
  misc_RNA (1)...(19): siRNA sense strand
gcauaaacuugagaucuuu

SEQ ID NO: 1363866 - RNA, 19 nt, Homo sapiens
  misc_RNA (1)...(19): siRNA sense strand
gggaggagauugcucaaga

SEQ ID NO: 1363867 - RNA, 19 nt, Homo sapiens
  misc_RNA (1)...(19): siRNA sense strand
ggaagaauuucaggaguug

SEQ ID NO: 1363868 - RNA, 19 nt, Homo sapiens
  misc_RNA (1)...(19): siRNA sense strand
cuacucauauguacgauaa

SEQ ID NO: 1363869 - RNA, 19 nt, Homo sapiens
  misc_RNA (1)...(19): siRNA sense strand
guucauggguacauuguuu

SEQ ID NO: 1363870 - RNA, 19 nt, Homo sapiens
  misc_RNA (1)...(19): siRNA sense strand
ucagcgagauccaauguaa

SEQ ID NO: 1363871 - RNA, 19 nt, Homo sapiens
  misc_RNA (1)...(19): siRNA sense strand
ggacgcaacauuaaugaaa

SEQ ID NO: 1363872 - RNA, 19 nt, Homo sapiens
  misc_RNA (1)...(19): siRNA sense strand
gaagauggguguuauucag

SEQ ID NO: 1363873 - RNA, 19 nt, Homo sapiens
  misc_RNA (1)...(19): siRNA sense strand
cgaagggcguuuaaagaaa

SEQ ID NO: 1363874 - RNA, 19 nt, Homo sapiens
  misc_RNA (1)...(19): siRNA sense strand
ggagaggaacagcgauuua

SEQ ID NO: 1363875 - RNA, 19 nt, Homo sapiens
  misc_RNA (1)...(19): siRNA sense strand
agaguaaacugaacaacaa

SEQ ID NO: 1363876 - RNA, 19 nt, Homo sapiens
  misc_RNA (1)...(19): siRNA sense strand
aaagcaagauguccgaauu

SEQ ID NO: 1363877 - RNA, 19 nt, Homo sapiens
  misc_RNA (1)...(19): siRNA sense strand
ucaaguaugucaucucuca

SEQ ID NO: 1363878 - RNA, 19 nt, Homo sapiens
  misc_RNA (1)...(19): siRNA sense strand
gaagaggcccguaguuuua

SEQ ID NO: 1363879 - RNA, 19 nt, Homo sapiens
  misc_RNA (1)...(19): siRNA sense strand
acagcaaggucaacaaauu

SEQ ID NO: 1363880 - RNA, 19 nt, Homo sapiens
  misc_RNA (1)...(19): siRNA sense strand
gcgaagggcguuuaaagaa

SEQ ID NO: 1363881 - RNA, 19 nt, Homo sapiens
  misc_RNA (1)...(19): siRNA sense strand
gccaaggaaugaagaagaa

SEQ ID NO: 1363882 - RNA, 19 nt, Homo sapiens
  misc_RNA (1)...(19): siRNA sense strand
ggaggagauugcucaagaa

SEQ ID NO: 1363883 - RNA, 19 nt, Homo sapiens
  misc_RNA (1)...(19): siRNA sense strand
gagggcgaguggucaauaa

SEQ ID NO: 1363884 - RNA, 19 nt, Homo sapiens
  misc_RNA (1)...(19): siRNA sense strand
gaaguugcaugcccuuaag

SEQ ID NO: 1363885 - RNA, 19 nt, Homo sapiens
  misc_RNA (1)...(19): siRNA sense strand
ugagaucuuucacccauuu

SEQ ID NO: 1363886 - RNA, 19 nt, Homo sapiens
  misc_RNA (1)...(19): siRNA sense strand
caaagccuccuguccauuu

SEQ ID NO: 1363887 - RNA, 19 nt, Homo sapiens
  misc_RNA (1)...(19): siRNA sense strand
gaagugguuuguugugcuu

SEQ ID NO: 1363888 - RNA, 19 nt, Homo sapiens
  misc_RNA (1)...(19): siRNA sense strand
gaaauugacggaagguuca

SEQ ID NO: 1363889 - RNA, 19 nt, Homo sapiens
  misc_RNA (1)...(19): siRNA sense strand
caaaugaugacaaguaugu

SEQ ID NO: 1363890 - RNA, 19 nt, Homo sapiens
  misc_RNA (1)...(19): siRNA sense strand
gaaugguucugacagugaa

SEQ ID NO: 1363891 - RNA, 19 nt, Homo sapiens
  misc_RNA (1)...(19): siRNA sense strand
uugaagcucuuauaccuaa

SEQ ID NO: 1363892 - RNA, 19 nt, Homo sapiens
  misc_RNA (1)...(19): siRNA sense strand
uaugucaucucucaccuaa

SEQ ID NO: 1363893 - RNA, 19 nt, Homo sapiens
  misc_RNA (1)...(19): siRNA sense strand
ugaaagauguauugaguac

SEQ ID NO: 1363894 - RNA, 19 nt, Homo sapiens
  misc_RNA (1)...(19): siRNA sense strand
aagcaaaucagucaaguuu

SEQ ID NO: 1363895 - RNA, 19 nt, Homo sapiens
  misc_RNA (1)...(19): siRNA sense strand
uugauuaguucucgguuua

SEQ ID NO: 1363896 - RNA, 19 nt, Homo sapiens
  misc_RNA (1)...(19): siRNA sense strand
gagaggaacagcgauuuaa

SEQ ID NO: 1363897 - RNA, 19 nt, Homo sapiens
  misc_RNA (1)...(19): siRNA sense strand
uagugcaacucauugauaa

SEQ ID NO: 1363898 - RNA, 19 nt, Homo sapiens
  misc_RNA (1)...(19): siRNA sense strand
gaguuucacuuggaccaua

SEQ ID NO: 1363899 - RNA, 19 nt, Homo sapiens
  misc_RNA (1)...(19): siRNA sense strand
acucaaaccugcaggauuc

SEQ ID NO: 1363900 - RNA, 19 nt, Homo sapiens
  misc_RNA (1)...(19): siRNA sense strand
caaucggacugcacaagaa

SEQ ID NO: 1363901 - RNA, 19 nt, Homo sapiens
  misc_RNA (1)...(19): siRNA sense strand
gggaagaggcccguaguuu

SEQ ID NO: 1363902 - RNA, 19 nt, Homo sapiens
  misc_RNA (1)...(19): siRNA sense strand
gaagggcguuuaaagaaaa

SEQ ID NO: 1363903 - RNA, 19 nt, Homo sapiens
  misc_RNA (1)...(19): siRNA sense strand
cggauucccuuugauuuaa

SEQ ID NO: 1363904 - RNA, 19 nt, Homo sapiens
  misc_RNA (1)...(19): siRNA sense strand
gcaggccucuccagaauac

SEQ ID NO: 1363905 - RNA, 19 nt, Homo sapiens
  misc_RNA (1)...(19): siRNA sense strand
ggcgaguggucaauaauga

SEQ ID NO: 1363906 - RNA, 19 nt, Homo sapiens
  misc_RNA (1)...(19): siRNA sense strand
acggaaagcugcugguuga

SEQ ID NO: 1363907 - RNA, 19 nt, Homo sapiens
  misc_RNA (1)...(19): siRNA sense strand
guagggaacagcuaacuga

SEQ ID NO: 1363908 - RNA, 19 nt, Homo sapiens
  misc_RNA (1)...(19): siRNA sense strand
guugaucugcgaauuguua

SEQ ID NO: 1363909 - RNA, 19 nt, Homo sapiens
  misc_RNA (1)...(19): siRNA sense strand
gcagcagagucagcagaua

SEQ ID NO: 1363910 - RNA, 19 nt, Homo sapiens
  misc_RNA (1)...(19): siRNA sense strand
ucuccaaucucuacaauca

SEQ ID NO: 1363911 - RNA, 19 nt, Homo sapiens
  misc_RNA (1)...(19): siRNA sense strand
gggcaugaauaggaacuuu

SEQ ID NO: 1363912 - RNA, 19 nt, Homo sapiens
  misc_RNA (1)...(19): siRNA sense strand
gagcagacugaauuuauug

SEQ ID NO: 1363913 - RNA, 19 nt, Homo sapiens
  misc_RNA (1)...(19): siRNA sense strand
gcaaacaaaggaacacuag

SEQ ID NO: 1363914 - RNA, 19 nt, Homo sapiens
  misc_RNA (1)...(19): siRNA sense strand
ggaagaaagaggaggauca

SEQ ID NO: 1363915 - RNA, 19 nt, Homo sapiens
  misc_RNA (1)...(19): siRNA sense strand
gaacuggagggaaaugaug

SEQ ID NO: 1363916 - RNA, 19 nt, Homo sapiens
  misc_RNA (1)...(19): siRNA sense strand
gaaagagccgguugguuca

SEQ ID NO: 1363917 - RNA, 19 nt, Homo sapiens
  misc_RNA (1)...(19): siRNA sense strand
gagcauaucgagcguagga

SEQ ID NO: 1363918 - RNA, 19 nt, Homo sapiens
  misc_RNA (1)...(19): siRNA sense strand
ggaaugguucugacaguga

SEQ ID NO: 1363919 - RNA, 19 nt, Homo sapiens
  misc_RNA (1)...(19): siRNA sense strand
ccgaagagguguuuaacuc

SEQ ID NO: 1363920 - RNA, 19 nt, Homo sapiens
  misc_RNA (1)...(19): siRNA sense strand
gacggaagguucacaagca

SEQ ID NO: 1363921 - RNA, 19 nt, Homo sapiens
  misc_RNA (1)...(19): siRNA sense strand
gaaucgcuauccuauguag

SEQ ID NO: 1363922 - RNA, 19 nt, Homo sapiens
  misc_RNA (1)...(19): siRNA sense strand
cagcuuguguggacgcuaa

SEQ ID NO: 1363923 - RNA, 19 nt, Homo sapiens
  misc_RNA (1)...(19): siRNA sense strand
gguguugagcgguacauua

SEQ ID NO: 1363924 - RNA, 19 nt, Homo sapiens
  misc_RNA (1)...(19): siRNA sense strand
agagacaguuugaucaaga

SEQ ID NO: 1363925 - RNA, 19 nt, Homo sapiens
  misc_RNA (1)...(19): siRNA sense strand
gcagagacaguuugaucaa

SEQ ID NO: 1363926 - RNA, 19 nt, Homo sapiens
  misc_RNA (1)...(19): siRNA sense strand
gagaguaaacugaacaaca

SEQ ID NO: 1363927 - RNA, 19 nt, Homo sapiens
  misc_RNA (1)...(19): siRNA sense strand
acacaucacugccuucucu

SEQ ID NO: 1363928 - RNA, 19 nt, Homo sapiens
  misc_RNA (1)...(19): siRNA sense strand
gcaugaauaggaacuuuga

SEQ ID NO: 1363929 - RNA, 19 nt, Homo sapiens
  misc_RNA (1)...(19): siRNA sense strand
uaaacaaggucagccacaa

SEQ ID NO: 1363930 - RNA, 19 nt, Homo sapiens
  misc_RNA (1)...(19): siRNA sense strand
gagcgagggcgcaagguuu

SEQ ID NO: 1363931 - RNA, 19 nt, Homo sapiens
  misc_RNA (1)...(19): siRNA sense strand
cuauggaacuggagggaaa

SEQ ID NO: 1363932 - RNA, 19 nt, Homo sapiens
  misc_RNA (1)...(19): siRNA sense strand
uagagaagcugaggaacga

SEQ ID NO: 1363933 - RNA, 19 nt, Homo sapiens
  misc_RNA (1)...(19): siRNA sense strand
ggacucagaaagccaagaa

SEQ ID NO: 1363934 - RNA, 19 nt, Homo sapiens
  misc_RNA (1)...(19): siRNA sense strand
gcacauacuuuugccuuaa

SEQ ID NO: 1363935 - RNA, 19 nt, Homo sapiens
  misc_RNA (1)...(19): siRNA sense strand
ugacaaguaugugauagau

SEQ ID NO: 1363936 - RNA, 19 nt, Homo sapiens
  misc_RNA (1)...(19): siRNA sense strand
ucccaaaccuguaaaucuu

SEQ ID NO: 1363937 - RNA, 19 nt, Homo sapiens
  misc_RNA (1)...(19): siRNA sense strand
cuagcaaacuucagugugu

SEQ ID NO: 1363938 - RNA, 19 nt, Homo sapiens
  misc_RNA (1)...(19): siRNA sense strand
gcaggacuuugagcagaaa

SEQ ID NO: 1363939 - RNA, 19 nt, Homo sapiens
  misc_RNA (1)...(19): siRNA sense strand
ccacagccuucccgaaaca

SEQ ID NO: 1363940 - RNA, 19 nt, Homo sapiens
  misc_RNA (1)...(19): siRNA sense strand
ugacagcacccaaggcaaa

SEQ ID NO: 1363941 - RNA, 19 nt, Homo sapiens
  misc_RNA (1)...(19): siRNA sense strand
gguuacggacgcaacauua

SEQ ID NO: 1363942 - RNA, 19 nt, Homo sapiens
  misc_RNA (1)...(19): siRNA sense strand
gcuauccuauguaguggaa

SEQ ID NO: 1363943 - RNA, 19 nt, Homo sapiens
  misc_RNA (1)...(19): siRNA sense strand
gagaagauggguguuauuc

SEQ ID NO: 1363944 - RNA, 19 nt, Homo sapiens
  misc_RNA (1)...(19): siRNA sense strand
gaacuggagcuggaugcua

SEQ ID NO: 1363945 - RNA, 19 nt, Homo sapiens
  misc_RNA (1)...(19): siRNA sense strand
gcucuuauaccuaaucuag

SEQ ID NO: 1363946 - RNA, 19 nt, Homo sapiens
  misc_RNA (1)...(19): siRNA sense strand
ugaauaggaacuuugauga

SEQ ID NO: 1363947 - RNA, 19 nt, Homo sapiens
  misc_RNA (1)...(19): siRNA sense strand
cugcuagcaucaaagauuu

SEQ ID NO: 1363948 - RNA, 19 nt, Homo sapiens
  misc_RNA (1)...(19): siRNA sense strand
aggauuguguggaauguaa

SEQ ID NO: 1363949 - RNA, 19 nt, Homo sapiens
  misc_RNA (1)...(19): siRNA sense strand
gcagaucgacuugguggaa

SEQ ID NO: 1363950 - RNA, 19 nt, Homo sapiens
  misc_RNA (1)...(19): siRNA sense strand
aaucgaggcuacucauaug

SEQ ID NO: 1363951 - RNA, 19 nt, Homo sapiens
  misc_RNA (1)...(19): siRNA sense strand
gaggagauugcucaagaaa

SEQ ID NO: 1363952 - RNA, 19 nt, Homo sapiens
  misc_RNA (1)...(19): siRNA sense strand
uuacgugccuuucuuugug

SEQ ID NO: 1363953 - RNA, 19 nt, Homo sapiens
  misc_RNA (1)...(19): siRNA sense strand
ggaagaggcccguaguuuu

SEQ ID NO: 1363954 - RNA, 19 nt, Homo sapiens
  misc_RNA (1)...(19): siRNA sense strand
gcucaaguuugucuccaau

SEQ ID NO: 1363955 - RNA, 19 nt, Homo sapiens
  misc_RNA (1)...(19): siRNA sense strand
cagacugaauuuauugaug

SEQ ID NO: 1363956 - RNA, 19 nt, Homo sapiens
  misc_RNA (1)...(19): siRNA sense strand
ggagauugcucaagaaauu

SEQ ID NO: 1363957 - RNA, 19 nt, Homo sapiens
  misc_RNA (1)...(19): siRNA sense strand
gaugggcugucuuucauua

SEQ ID NO: 1363958 - RNA, 19 nt, Homo sapiens
  misc_RNA (1)...(19): siRNA sense strand
gaaaugaugggcugucuuu

SEQ ID NO: 1363959 - RNA, 19 nt, Homo sapiens
  misc_RNA (1)...(19): siRNA sense strand
guacaaaugaugacaagua

SEQ ID NO: 1363960 - RNA, 19 nt, Homo sapiens
  misc_RNA (1)...(19): siRNA sense strand
ggagcagacugaauuuauu

SEQ ID NO: 1363961 - RNA, 19 nt, Homo sapiens
  misc_RNA (1)...(19): siRNA sense strand
gaaaguauagagaagagua

SEQ ID NO: 1363962 - RNA, 19 nt, Homo sapiens
  misc_RNA (1)...(19): siRNA sense strand
gcagauagcuacagcaaaa

SEQ ID NO: 1363963 - RNA, 19 nt, Homo sapiens
  misc_RNA (1)...(19): siRNA sense strand
gauagaaucaacuugguua

SEQ ID NO: 1363964 - RNA, 19 nt, Homo sapiens
  misc_RNA (1)...(19): siRNA sense strand
gaacggauucccuuugauu

SEQ ID NO: 1363965 - RNA, 19 nt, Homo sapiens
  misc_RNA (1)...(19): siRNA sense strand
gcauaaacuugagaucuuu

SEQ ID NO: 1363966 - RNA, 19 nt, Homo sapiens
  misc_RNA (1)...(19): siRNA sense strand
gggaggagauugcucaaga

SEQ ID NO: 1363967 - RNA, 19 nt, Homo sapiens
  misc_RNA (1)...(19): siRNA sense strand
ggaagaauuucaggaguug

SEQ ID NO: 1363968 - RNA, 19 nt, Homo sapiens
  misc_RNA (1)...(19): siRNA sense strand
cuacucauauguacgauaa

SEQ ID NO: 1363969 - RNA, 19 nt, Homo sapiens
  misc_RNA (1)...(19): siRNA sense strand
guucauggguacauuguuu

SEQ ID NO: 1363970 - RNA, 19 nt, Homo sapiens
  misc_RNA (1)...(19): siRNA sense strand
ucagcgagauccaauguaa

SEQ ID NO: 1363971 - RNA, 19 nt, Homo sapiens
  misc_RNA (1)...(19): siRNA sense strand
ggacgcaacauuaaugaaa

SEQ ID NO: 1363972 - RNA, 19 nt, Homo sapiens
  misc_RNA (1)...(19): siRNA sense strand
gaagauggguguuauucag

SEQ ID NO: 1363973 - RNA, 19 nt, Homo sapiens
  misc_RNA (1)...(19): siRNA sense strand
cgaagggcguuuaaagaaa

SEQ ID NO: 1363974 - RNA, 19 nt, Homo sapiens
  misc_RNA (1)...(19): siRNA sense strand
ggagaggaacagcgauuua

SEQ ID NO: 1363975 - RNA, 19 nt, Homo sapiens
  misc_RNA (1)...(19): siRNA sense strand
agaguaaacugaacaacaa

SEQ ID NO: 1363976 - RNA, 19 nt, Homo sapiens
  misc_RNA (1)...(19): siRNA sense strand
aaagcaagauguccgaauu

SEQ ID NO: 1363977 - RNA, 19 nt, Homo sapiens
  misc_RNA (1)...(19): siRNA sense strand
ucaaguaugucaucucuca

SEQ ID NO: 1363978 - RNA, 19 nt, Homo sapiens
  misc_RNA (1)...(19): siRNA sense strand
gaagaggcccguaguuuua

SEQ ID NO: 1363979 - RNA, 19 nt, Homo sapiens
  misc_RNA (1)...(19): siRNA sense strand
acagcaaggucaacaaauu

SEQ ID NO: 1363980 - RNA, 19 nt, Homo sapiens
  misc_RNA (1)...(19): siRNA sense strand
gcgaagggcguuuaaagaa

SEQ ID NO: 1363981 - RNA, 19 nt, Homo sapiens
  misc_RNA (1)...(19): siRNA sense strand
gccaaggaaugaagaagaa

SEQ ID NO: 1363982 - RNA, 19 nt, Homo sapiens
  misc_RNA (1)...(19): siRNA sense strand
ggaggagauugcucaagaa

SEQ ID NO: 1363983 - RNA, 19 nt, Homo sapiens
  misc_RNA (1)...(19): siRNA sense strand
gagggcgaguggucaauaa

SEQ ID NO: 1363984 - RNA, 19 nt, Homo sapiens
  misc_RNA (1)...(19): siRNA sense strand
gaaguugcaugcccuuaag

SEQ ID NO: 1363985 - RNA, 19 nt, Homo sapiens
  misc_RNA (1)...(19): siRNA sense strand
ugagaucuuucacccauuu

SEQ ID NO: 1363986 - RNA, 19 nt, Homo sapiens
  misc_RNA (1)...(19): siRNA sense strand
caaagccuccuguccauuu

SEQ ID NO: 1363987 - RNA, 19 nt, Homo sapiens
  misc_RNA (1)...(19): siRNA sense strand
gaagugguuuguugugcuu

SEQ ID NO: 1363988 - RNA, 19 nt, Homo sapiens
  misc_RNA (1)...(19): siRNA sense strand
gaaauugacggaagguuca

SEQ ID NO: 1363989 - RNA, 19 nt, Homo sapiens
  misc_RNA (1)...(19): siRNA sense strand
caaaugaugacaaguaugu

SEQ ID NO: 1363990 - RNA, 19 nt, Homo sapiens
  misc_RNA (1)...(19): siRNA sense strand
gaaugguucugacagugaa

SEQ ID NO: 1363991 - RNA, 19 nt, Homo sapiens
  misc_RNA (1)...(19): siRNA sense strand
uugaagcucuuauaccuaa

SEQ ID NO: 1363992 - RNA, 19 nt, Homo sapiens
  misc_RNA (1)...(19): siRNA sense strand
uaugucaucucucaccuaa

SEQ ID NO: 1363993 - RNA, 19 nt, Homo sapiens
  misc_RNA (1)...(19): siRNA sense strand
ugaaagauguauugaguac

SEQ ID NO: 1363994 - RNA, 19 nt, Homo sapiens
  misc_RNA (1)...(19): siRNA sense strand
aagcaaaucagucaaguuu

SEQ ID NO: 1363995 - RNA, 19 nt, Homo sapiens
  misc_RNA (1)...(19): siRNA sense strand
uugauuaguucucgguuua

SEQ ID NO: 1363996 - RNA, 19 nt, Homo sapiens
  misc_RNA (1)...(19): siRNA sense strand
gagaggaacagcgauuuaa

SEQ ID NO: 1363997 - RNA, 19 nt, Homo sapiens
  misc_RNA (1)...(19): siRNA sense strand
uagugcaacucauugauaa

SEQ ID NO: 1363998 - RNA, 19 nt, Homo sapiens
  misc_RNA (1)...(19): siRNA sense strand
gaguuucacuuggaccaua

SEQ ID NO: 1363999 - RNA, 19 nt, Homo sapiens
  misc_RNA (1)...(19): siRNA sense strand
acucaaaccugcaggauuc

SEQ ID NO: 1364000 - RNA, 19 nt, Homo sapiens
  misc_RNA (1)...(19): siRNA sense strand
caaucggacugcacaagaa

SEQ ID NO: 1364001 - RNA, 19 nt, Homo sapiens
  misc_RNA (1)...(19): siRNA sense strand
gggaagaggcccguaguuu

SEQ ID NO: 1364002 - RNA, 19 nt, Homo sapiens
  misc_RNA (1)...(19): siRNA sense strand
gaagggcguuuaaagaaaa

SEQ ID NO: 1364003 - RNA, 19 nt, Homo sapiens
  misc_RNA (1)...(19): siRNA sense strand
cggauucccuuugauuuaa

SEQ ID NO: 1364004 - RNA, 19 nt, Homo sapiens
  misc_RNA (1)...(19): siRNA sense strand
gcaggccucuccagaauac

SEQ ID NO: 1364005 - RNA, 19 nt, Homo sapiens
  misc_RNA (1)...(19): siRNA sense strand
ggcgaguggucaauaauga

SEQ ID NO: 1364006 - RNA, 19 nt, Homo sapiens
  misc_RNA (1)...(19): siRNA sense strand
acggaaagcugcugguuga

SEQ ID NO: 1364007 - RNA, 19 nt, Homo sapiens
  misc_RNA (1)...(19): siRNA sense strand
guagggaacagcuaacuga

SEQ ID NO: 1364008 - RNA, 19 nt, Homo sapiens
  misc_RNA (1)...(19): siRNA sense strand
guugaucugcgaauuguua

SEQ ID NO: 1364009 - RNA, 19 nt, Homo sapiens
  misc_RNA (1)...(19): siRNA sense strand
gcagcagagucagcagaua

SEQ ID NO: 1364010 - RNA, 19 nt, Homo sapiens
  misc_RNA (1)...(19): siRNA sense strand
ucuccaaucucuacaauca

SEQ ID NO: 1364011 - RNA, 19 nt, Homo sapiens
  misc_RNA (1)...(19): siRNA sense strand
gggcaugaauaggaacuuu

SEQ ID NO: 1364012 - RNA, 19 nt, Homo sapiens
  misc_RNA (1)...(19): siRNA sense strand
gagcagacugaauuuauug

SEQ ID NO: 1364013 - RNA, 19 nt, Homo sapiens
  misc_RNA (1)...(19): siRNA sense strand
ggaagaaagaggaggauca

SEQ ID NO: 1364014 - RNA, 19 nt, Homo sapiens
  misc_RNA (1)...(19): siRNA sense strand
gaacuggagggaaaugaug

SEQ ID NO: 1364015 - RNA, 19 nt, Homo sapiens
  misc_RNA (1)...(19): siRNA sense strand
gaaagagccgguugguuca

SEQ ID NO: 1364016 - RNA, 19 nt, Homo sapiens
  misc_RNA (1)...(19): siRNA sense strand
gagcauaucgagcguagga

SEQ ID NO: 1364017 - RNA, 19 nt, Homo sapiens
  misc_RNA (1)...(19): siRNA sense strand
ggaaugguucugacaguga

SEQ ID NO: 1364018 - RNA, 19 nt, Homo sapiens
  misc_RNA (1)...(19): siRNA sense strand
ccgaagagguguuuaacuc

SEQ ID NO: 1364019 - RNA, 19 nt, Homo sapiens
  misc_RNA (1)...(19): siRNA sense strand
gacggaagguucacaagca

SEQ ID NO: 1364020 - RNA, 19 nt, Homo sapiens
  misc_RNA (1)...(19): siRNA sense strand
gaaucgcuauccuauguag

SEQ ID NO: 1364021 - RNA, 19 nt, Homo sapiens
  misc_RNA (1)...(19): siRNA sense strand
cagcuuguguggacgcuaa

SEQ ID NO: 1364022 - RNA, 19 nt, Homo sapiens
  misc_RNA (1)...(19): siRNA sense strand
gguguugagcgguacauua

SEQ ID NO: 1364023 - RNA, 19 nt, Homo sapiens
  misc_RNA (1)...(19): siRNA sense strand
agagacaguuugaucaaga

SEQ ID NO: 1364024 - RNA, 19 nt, Homo sapiens
  misc_RNA (1)...(19): siRNA sense strand
gcagagacaguuugaucaa

SEQ ID NO: 1364025 - RNA, 19 nt, Homo sapiens
  misc_RNA (1)...(19): siRNA sense strand
gagaguaaacugaacaaca

SEQ ID NO: 1364026 - RNA, 19 nt, Homo sapiens
  misc_RNA (1)...(19): siRNA sense strand
acacaucacugccuucucu

SEQ ID NO: 1364027 - RNA, 19 nt, Homo sapiens
  misc_RNA (1)...(19): siRNA sense strand
gcaugaauaggaacuuuga

SEQ ID NO: 1364028 - RNA, 19 nt, Homo sapiens
  misc_RNA (1)...(19): siRNA sense strand
uaaacaaggucagccacaa

SEQ ID NO: 1364029 - RNA, 19 nt, Homo sapiens
  misc_RNA (1)...(19): siRNA sense strand
gagcgagggcgcaagguuu

SEQ ID NO: 1364030 - RNA, 19 nt, Homo sapiens
  misc_RNA (1)...(19): siRNA sense strand
cuauggaacuggagggaaa

SEQ ID NO: 1364031 - RNA, 19 nt, Homo sapiens
  misc_RNA (1)...(19): siRNA sense strand
uagagaagcugaggaacga

SEQ ID NO: 1364032 - RNA, 19 nt, Homo sapiens
  misc_RNA (1)...(19): siRNA sense strand
ggacucagaaagccaagaa

SEQ ID NO: 1364033 - RNA, 19 nt, Homo sapiens
  misc_RNA (1)...(19): siRNA sense strand
gcacauacuuuugccuuaa

SEQ ID NO: 1364034 - RNA, 19 nt, Homo sapiens
  misc_RNA (1)...(19): siRNA sense strand
ugacaaguaugugauagau

SEQ ID NO: 1364035 - RNA, 19 nt, Homo sapiens
  misc_RNA (1)...(19): siRNA sense strand
ucccaaaccuguaaaucuu

SEQ ID NO: 1364036 - RNA, 19 nt, Homo sapiens
  misc_RNA (1)...(19): siRNA sense strand
cuagcaaacuucagugugu

SEQ ID NO: 1364037 - RNA, 19 nt, Homo sapiens
  misc_RNA (1)...(19): siRNA sense strand
gcaggacuuugagcagaaa

SEQ ID NO: 1364038 - RNA, 19 nt, Homo sapiens
  misc_RNA (1)...(19): siRNA sense strand
ugacagcacccaaggcaaa

SEQ ID NO: 1364039 - RNA, 19 nt, Homo sapiens
  misc_RNA (1)...(19): siRNA sense strand
gguuacggacgcaacauua

SEQ ID NO: 1364040 - RNA, 19 nt, Homo sapiens
  misc_RNA (1)...(19): siRNA sense strand
gcuauccuauguaguggaa

SEQ ID NO: 1364041 - RNA, 19 nt, Homo sapiens
  misc_RNA (1)...(19): siRNA sense strand
gagaagauggguguuauuc

SEQ ID NO: 1364042 - RNA, 19 nt, Homo sapiens
  misc_RNA (1)...(19): siRNA sense strand
gaacuggagcuggaugcua

SEQ ID NO: 1364043 - RNA, 19 nt, Homo sapiens
  misc_RNA (1)...(19): siRNA sense strand
gcucuuauaccuaaucuag

SEQ ID NO: 1364044 - RNA, 19 nt, Homo sapiens
  misc_RNA (1)...(19): siRNA sense strand
ugaauaggaacuuugauga

SEQ ID NO: 1364045 - RNA, 19 nt, Homo sapiens
  misc_RNA (1)...(19): siRNA sense strand
cugcuagcaucaaagauuu

SEQ ID NO: 1364046 - RNA, 19 nt, Homo sapiens
  misc_RNA (1)...(19): siRNA sense strand
aggauuguguggaauguaa

SEQ ID NO: 1364047 - RNA, 19 nt, Homo sapiens
  misc_RNA (1)...(19): siRNA sense strand
gcagaucgacuugguggaa

SEQ ID NO: 1364048 - RNA, 19 nt, Homo sapiens
  misc_RNA (1)...(19): siRNA sense strand
aaucgaggcuacucauaug

SEQ ID NO: 1364049 - RNA, 19 nt, Homo sapiens
  misc_RNA (1)...(19): siRNA sense strand
gaggagauugcucaagaaa

SEQ ID NO: 1364050 - RNA, 19 nt, Homo sapiens
  misc_RNA (1)...(19): siRNA sense strand
uuacgugccuuucuuugug

SEQ ID NO: 1364051 - RNA, 19 nt, Homo sapiens
  misc_RNA (1)...(19): siRNA sense strand
ggaagaggcccguaguuuu

SEQ ID NO: 1364052 - RNA, 19 nt, Homo sapiens
  misc_RNA (1)...(19): siRNA sense strand
gcucaaguuugucuccaau

SEQ ID NO: 1364053 - RNA, 19 nt, Homo sapiens
  misc_RNA (1)...(19): siRNA sense strand
cagacugaauuuauugaug

SEQ ID NO: 1364054 - RNA, 19 nt, Homo sapiens
  misc_RNA (1)...(19): siRNA sense strand
gguuugauccuucugacua

SEQ ID NO: 1364055 - RNA, 19 nt, Homo sapiens
  misc_RNA (1)...(19): siRNA sense strand
ccugggagaguaacuauuu

SEQ ID NO: 1364056 - RNA, 19 nt, Homo sapiens
  misc_RNA (1)...(19): siRNA sense strand
caacacaccuuccaugaca

SEQ ID NO: 1364057 - RNA, 19 nt, Homo sapiens
  misc_RNA (1)...(19): siRNA sense strand
gcacggugaugcgguauga

SEQ ID NO: 1364058 - RNA, 19 nt, Homo sapiens
  misc_RNA (1)...(19): siRNA sense strand
ggugauuguuggugacuuu

SEQ ID NO: 1364059 - RNA, 19 nt, Homo sapiens
  misc_RNA (1)...(19): siRNA sense strand
ccucaauacuccgcaaaua

SEQ ID NO: 1364060 - RNA, 19 nt, Homo sapiens
  misc_RNA (1)...(19): siRNA sense strand
gaagguuuauugugauugg

SEQ ID NO: 1364061 - RNA, 19 nt, Homo sapiens
  misc_RNA (1)...(19): siRNA sense strand
ggacggccauguuguggau

SEQ ID NO: 1364062 - RNA, 19 nt, Homo sapiens
  misc_RNA (1)...(19): siRNA sense strand
gaugcgguaugaagagauu

SEQ ID NO: 1364063 - RNA, 19 nt, Homo sapiens
  misc_RNA (1)...(19): siRNA sense strand
cgacacagaccgaaucaug

SEQ ID NO: 1364064 - RNA, 19 nt, Homo sapiens
  misc_RNA (1)...(19): siRNA sense strand
acuggaagguuuauuguga

SEQ ID NO: 1364065 - RNA, 19 nt, Homo sapiens
  misc_RNA (1)...(19): siRNA sense strand
aaagccagcuguacaucaa

SEQ ID NO: 1364066 - RNA, 19 nt, Homo sapiens
  misc_RNA (1)...(19): siRNA sense strand
gauauggaggugauuguug

SEQ ID NO: 1364067 - RNA, 19 nt, Homo sapiens
  misc_RNA (1)...(19): siRNA sense strand
ggaacgaggcagauaugga

SEQ ID NO: 1364068 - RNA, 19 nt, Homo sapiens
  misc_RNA (1)...(19): siRNA sense strand
caucaaccaucccaugucu

SEQ ID NO: 1364069 - RNA, 19 nt, Homo sapiens
  misc_RNA (1)...(19): siRNA sense strand
gacacagaccgaaucauga

SEQ ID NO: 1364070 - RNA, 19 nt, Homo sapiens
  misc_RNA (1)...(19): siRNA sense strand
gaaagagccagggauuauc

SEQ ID NO: 1364071 - RNA, 19 nt, Homo sapiens
  misc_RNA (1)...(19): siRNA sense strand
guggagcguuucaccuuug

SEQ ID NO: 1364072 - RNA, 19 nt, Homo sapiens
  misc_RNA (1)...(19): siRNA sense strand
guuggugacuuugggauug

SEQ ID NO: 1364073 - RNA, 19 nt, Homo sapiens
  misc_RNA (1)...(19): siRNA sense strand
ucaauacuccgcaaauaca

SEQ ID NO: 1364074 - RNA, 19 nt, Homo sapiens
  misc_RNA (1)...(19): siRNA sense strand
caugaaucacuccucaaua

SEQ ID NO: 1364075 - RNA, 19 nt, Homo sapiens
  misc_RNA (1)...(19): siRNA sense strand
acacagaccgaaucaugaa

SEQ ID NO: 1364076 - RNA, 19 nt, Homo sapiens
  misc_RNA (1)...(19): siRNA sense strand
gcagauauggaggugauug

SEQ ID NO: 1364077 - RNA, 19 nt, Homo sapiens
  misc_RNA (1)...(19): siRNA sense strand
gggauuaucugcacaaaac

SEQ ID NO: 1364078 - RNA, 19 nt, Homo sapiens
  misc_RNA (1)...(19): siRNA sense strand
uggaagguuuauugugauu

SEQ ID NO: 1364079 - RNA, 19 nt, Homo sapiens
  misc_RNA (1)...(19): siRNA sense strand
augaaucacuccucaauac

SEQ ID NO: 1364080 - RNA, 19 nt, Homo sapiens
  misc_RNA (1)...(19): siRNA sense strand
gcugcauccucuccaaugu

SEQ ID NO: 1364081 - RNA, 19 nt, Homo sapiens
  misc_RNA (1)...(19): siRNA sense strand
cagaccgaaucaugaauca

SEQ ID NO: 1364082 - RNA, 19 nt, Homo sapiens
  misc_RNA (1)...(19): siRNA sense strand
guaugaagagauugagcua

SEQ ID NO: 1364083 - RNA, 19 nt, Homo sapiens
  misc_RNA (1)...(19): siRNA sense strand
gaaagccucagccggaucu

SEQ ID NO: 1364084 - RNA, 19 nt, Homo sapiens
  misc_RNA (1)...(19): siRNA sense strand
gaaucacuccucaauacuc

SEQ ID NO: 1364085 - RNA, 19 nt, Homo sapiens
  misc_RNA (1)...(19): siRNA sense strand
acggccauguuguggauua

SEQ ID NO: 1364086 - RNA, 19 nt, Homo sapiens
  misc_RNA (1)...(19): siRNA sense strand
aaacagggccucgugucaa

SEQ ID NO: 1364087 - RNA, 19 nt, Homo sapiens
  misc_RNA (1)...(19): siRNA sense strand
gucaacacaccuuccauga

SEQ ID NO: 1364088 - RNA, 19 nt, Homo sapiens
  misc_RNA (1)...(19): siRNA sense strand
gagcguuucaccuuuguag

SEQ ID NO: 1364089 - RNA, 19 nt, Homo sapiens
  misc_RNA (1)...(19): siRNA sense strand
ccauuuaccagaacagcaa

SEQ ID NO: 1364090 - RNA, 19 nt, Homo sapiens
  misc_RNA (1)...(19): siRNA sense strand
ucaaccaucccaugucugu

SEQ ID NO: 1364091 - RNA, 19 nt, Homo sapiens
  misc_RNA (1)...(19): siRNA sense strand
gaccgaaucaugaaucacu

SEQ ID NO: 1364092 - RNA, 19 nt, Homo sapiens
  misc_RNA (1)...(19): siRNA sense strand
gugaugcgguaugaagaga

SEQ ID NO: 1364093 - RNA, 19 nt, Homo sapiens
  misc_RNA (1)...(19): siRNA sense strand
caucgacuacauccucaaa

SEQ ID NO: 1364094 - RNA, 19 nt, Homo sapiens
  misc_RNA (1)...(19): siRNA sense strand
ccacugcagccaagaucuu

SEQ ID NO: 1364095 - RNA, 19 nt, Homo sapiens
  misc_RNA (1)...(19): siRNA sense strand
ucaugaaucacuccucaau

SEQ ID NO: 1364096 - RNA, 19 nt, Homo sapiens
  misc_RNA (1)...(19): siRNA sense strand
gggaugcagccgacacaga

SEQ ID NO: 1364097 - RNA, 19 nt, Homo sapiens
  misc_RNA (1)...(19): siRNA sense strand
aggcagauauggaggugau

SEQ ID NO: 1364098 - RNA, 19 nt, Homo sapiens
  misc_RNA (1)...(19): siRNA sense strand
gcguuucaccuuuguagau

SEQ ID NO: 1364099 - RNA, 19 nt, Homo sapiens
  misc_RNA (1)...(19): siRNA sense strand
ccacgacuccuauggaaaa

SEQ ID NO: 1364100 - RNA, 19 nt, Homo sapiens
  misc_RNA (1)...(19): siRNA sense strand
ucaccuuuguagaugagaa

SEQ ID NO: 1364101 - RNA, 19 nt, Homo sapiens
  misc_RNA (1)...(19): siRNA sense strand
caccgggaccucaugaaga

SEQ ID NO: 1364102 - RNA, 19 nt, Homo sapiens
  misc_RNA (1)...(19): siRNA sense strand
acagcaacguggccaccaa

SEQ ID NO: 1364103 - RNA, 19 nt, Homo sapiens
  misc_RNA (1)...(19): siRNA sense strand
caauacuccgcaaauacaa

SEQ ID NO: 1364104 - RNA, 19 nt, Homo sapiens
  misc_RNA (1)...(19): siRNA sense strand
cccagccggucaucgacua

SEQ ID NO: 1364105 - RNA, 19 nt, Homo sapiens
  misc_RNA (1)...(19): siRNA sense strand
cagggauuaucugcacaaa

SEQ ID NO: 1364106 - RNA, 19 nt, Homo sapiens
  misc_RNA (1)...(19): siRNA sense strand
ugcauccucuccaauguca

SEQ ID NO: 1364107 - RNA, 19 nt, Homo sapiens
  misc_RNA (1)...(19): siRNA sense strand
caucccaugucuguuguca

SEQ ID NO: 1364108 - RNA, 19 nt, Homo sapiens
  misc_RNA (1)...(19): siRNA sense strand
aaccaucccaugucuguug

SEQ ID NO: 1364109 - RNA, 19 nt, Homo sapiens
  misc_RNA (1)...(19): siRNA sense strand
ggaagguuuauugugauug

SEQ ID NO: 1364110 - RNA, 19 nt, Homo sapiens
  misc_RNA (1)...(19): siRNA sense strand
aaagagccagggauuaucu

SEQ ID NO: 1364111 - RNA, 19 nt, Homo sapiens
  misc_RNA (1)...(19): siRNA sense strand
ggcaccgucucaucaugug

SEQ ID NO: 1364112 - RNA, 19 nt, Homo sapiens
  misc_RNA (1)...(19): siRNA sense strand
ccucuccaaugucaacaca

SEQ ID NO: 1364113 - RNA, 19 nt, Homo sapiens
  misc_RNA (1)...(19): siRNA sense strand
gugauuggcgggauugucu

SEQ ID NO: 1364114 - RNA, 19 nt, Homo sapiens
  misc_RNA (1)...(19): siRNA sense strand
cguuucaccuuuguagaug

SEQ ID NO: 1364115 - RNA, 19 nt, Homo sapiens
  misc_RNA (1)...(19): siRNA sense strand
caacacaccuuccaugaca

SEQ ID NO: 1364116 - RNA, 19 nt, Homo sapiens
  misc_RNA (1)...(19): siRNA sense strand
gcacggugaugcgguauga

SEQ ID NO: 1364117 - RNA, 19 nt, Homo sapiens
  misc_RNA (1)...(19): siRNA sense strand
ggugauuguuggugacuuu

SEQ ID NO: 1364118 - RNA, 19 nt, Homo sapiens
  misc_RNA (1)...(19): siRNA sense strand
ccucaauacuccgcaaaua

SEQ ID NO: 1364119 - RNA, 19 nt, Homo sapiens
  misc_RNA (1)...(19): siRNA sense strand
gaagguuuauugugauugg

SEQ ID NO: 1364120 - RNA, 19 nt, Homo sapiens
  misc_RNA (1)...(19): siRNA sense strand
ggacggccauguuguggau

SEQ ID NO: 1364121 - RNA, 19 nt, Homo sapiens
  misc_RNA (1)...(19): siRNA sense strand
gaugcgguaugaagagauu

SEQ ID NO: 1364122 - RNA, 19 nt, Homo sapiens
  misc_RNA (1)...(19): siRNA sense strand
cgacacagaccgaaucaug

SEQ ID NO: 1364123 - RNA, 19 nt, Homo sapiens
  misc_RNA (1)...(19): siRNA sense strand
acuggaagguuuauuguga

SEQ ID NO: 1364124 - RNA, 19 nt, Homo sapiens
  misc_RNA (1)...(19): siRNA sense strand
aaagccagcuguacaucaa

SEQ ID NO: 1364125 - RNA, 19 nt, Homo sapiens
  misc_RNA (1)...(19): siRNA sense strand
gauauggaggugauuguug

SEQ ID NO: 1364126 - RNA, 19 nt, Homo sapiens
  misc_RNA (1)...(19): siRNA sense strand
ggaacgaggcagauaugga

SEQ ID NO: 1364127 - RNA, 19 nt, Homo sapiens
  misc_RNA (1)...(19): siRNA sense strand
caucaaccaucccaugucu

SEQ ID NO: 1364128 - RNA, 19 nt, Homo sapiens
  misc_RNA (1)...(19): siRNA sense strand
gacacagaccgaaucauga

SEQ ID NO: 1364129 - RNA, 19 nt, Homo sapiens
  misc_RNA (1)...(19): siRNA sense strand
gaaagagccagggauuauc

SEQ ID NO: 1364130 - RNA, 19 nt, Homo sapiens
  misc_RNA (1)...(19): siRNA sense strand
guggagcguuucaccuuug

SEQ ID NO: 1364131 - RNA, 19 nt, Homo sapiens
  misc_RNA (1)...(19): siRNA sense strand
guuggugacuuugggauug

SEQ ID NO: 1364132 - RNA, 19 nt, Homo sapiens
  misc_RNA (1)...(19): siRNA sense strand
ucaauacuccgcaaauaca

SEQ ID NO: 1364133 - RNA, 19 nt, Homo sapiens
  misc_RNA (1)...(19): siRNA sense strand
caugaaucacuccucaaua

SEQ ID NO: 1364134 - RNA, 19 nt, Homo sapiens
  misc_RNA (1)...(19): siRNA sense strand
acacagaccgaaucaugaa

SEQ ID NO: 1364135 - RNA, 19 nt, Homo sapiens
  misc_RNA (1)...(19): siRNA sense strand
gcagauauggaggugauug

SEQ ID NO: 1364136 - RNA, 19 nt, Homo sapiens
  misc_RNA (1)...(19): siRNA sense strand
gggauuaucugcacaaaac

SEQ ID NO: 1364137 - RNA, 19 nt, Homo sapiens
  misc_RNA (1)...(19): siRNA sense strand
uggaagguuuauugugauu

SEQ ID NO: 1364138 - RNA, 19 nt, Homo sapiens
  misc_RNA (1)...(19): siRNA sense strand
augaaucacuccucaauac

SEQ ID NO: 1364139 - RNA, 19 nt, Homo sapiens
  misc_RNA (1)...(19): siRNA sense strand
gcugcauccucuccaaugu

SEQ ID NO: 1364140 - RNA, 19 nt, Homo sapiens
  misc_RNA (1)...(19): siRNA sense strand
cagaccgaaucaugaauca

SEQ ID NO: 1364141 - RNA, 19 nt, Homo sapiens
  misc_RNA (1)...(19): siRNA sense strand
guaugaagagauugagcua

SEQ ID NO: 1364142 - RNA, 19 nt, Homo sapiens
  misc_RNA (1)...(19): siRNA sense strand
gaaagccucagccggaucu

SEQ ID NO: 1364143 - RNA, 19 nt, Homo sapiens
  misc_RNA (1)...(19): siRNA sense strand
gaaucacuccucaauacuc

SEQ ID NO: 1364144 - RNA, 19 nt, Homo sapiens
  misc_RNA (1)...(19): siRNA sense strand
acggccauguuguggauua

SEQ ID NO: 1364145 - RNA, 19 nt, Homo sapiens
  misc_RNA (1)...(19): siRNA sense strand
aaacagggccucgugucaa

SEQ ID NO: 1364146 - RNA, 19 nt, Homo sapiens
  misc_RNA (1)...(19): siRNA sense strand
gucaacacaccuuccauga

SEQ ID NO: 1364147 - RNA, 19 nt, Homo sapiens
  misc_RNA (1)...(19): siRNA sense strand
gagcguuucaccuuuguag

SEQ ID NO: 1364148 - RNA, 19 nt, Homo sapiens
  misc_RNA (1)...(19): siRNA sense strand
ccauuuaccagaacagcaa

SEQ ID NO: 1364149 - RNA, 19 nt, Homo sapiens
  misc_RNA (1)...(19): siRNA sense strand
ucaaccaucccaugucugu

SEQ ID NO: 1364150 - RNA, 19 nt, Homo sapiens
  misc_RNA (1)...(19): siRNA sense strand
gaccgaaucaugaaucacu

SEQ ID NO: 1364151 - RNA, 19 nt, Homo sapiens
  misc_RNA (1)...(19): siRNA sense strand
gugaugcgguaugaagaga

SEQ ID NO: 1364152 - RNA, 19 nt, Homo sapiens
  misc_RNA (1)...(19): siRNA sense strand
caucgacuacauccucaaa

SEQ ID NO: 1364153 - RNA, 19 nt, Homo sapiens
  misc_RNA (1)...(19): siRNA sense strand
ccacugcagccaagaucuu

SEQ ID NO: 1364154 - RNA, 19 nt, Homo sapiens
  misc_RNA (1)...(19): siRNA sense strand
ucaugaaucacuccucaau

SEQ ID NO: 1364155 - RNA, 19 nt, Homo sapiens
  misc_RNA (1)...(19): siRNA sense strand
gggaugcagccgacacaga

SEQ ID NO: 1364156 - RNA, 19 nt, Homo sapiens
  misc_RNA (1)...(19): siRNA sense strand
aggcagauauggaggugau

SEQ ID NO: 1364157 - RNA, 19 nt, Homo sapiens
  misc_RNA (1)...(19): siRNA sense strand
gcguuucaccuuuguagau

SEQ ID NO: 1364158 - RNA, 19 nt, Homo sapiens
  misc_RNA (1)...(19): siRNA sense strand
ccacgacuccuauggaaaa

SEQ ID NO: 1364159 - RNA, 19 nt, Homo sapiens
  misc_RNA (1)...(19): siRNA sense strand
ucaccuuuguagaugagaa

SEQ ID NO: 1364160 - RNA, 19 nt, Homo sapiens
  misc_RNA (1)...(19): siRNA sense strand
caccgggaccucaugaaga

SEQ ID NO: 1364161 - RNA, 19 nt, Homo sapiens
  misc_RNA (1)...(19): siRNA sense strand
acagcaacguggccaccaa

SEQ ID NO: 1364162 - RNA, 19 nt, Homo sapiens
  misc_RNA (1)...(19): siRNA sense strand
caauacuccgcaaauacaa

SEQ ID NO: 1364163 - RNA, 19 nt, Homo sapiens
  misc_RNA (1)...(19): siRNA sense strand
cccagccggucaucgacua

SEQ ID NO: 1364164 - RNA, 19 nt, Homo sapiens
  misc_RNA (1)...(19): siRNA sense strand
cagggauuaucugcacaaa

SEQ ID NO: 1364165 - RNA, 19 nt, Homo sapiens
  misc_RNA (1)...(19): siRNA sense strand
ugcauccucuccaauguca

SEQ ID NO: 1364166 - RNA, 19 nt, Homo sapiens
  misc_RNA (1)...(19): siRNA sense strand
caucccaugucuguuguca

SEQ ID NO: 1364167 - RNA, 19 nt, Homo sapiens
  misc_RNA (1)...(19): siRNA sense strand
aaccaucccaugucuguug

SEQ ID NO: 1364168 - RNA, 19 nt, Homo sapiens
  misc_RNA (1)...(19): siRNA sense strand
ggaagguuuauugugauug

SEQ ID NO: 1364169 - RNA, 19 nt, Homo sapiens
  misc_RNA (1)...(19): siRNA sense strand
aaagagccagggauuaucu

SEQ ID NO: 1364170 - RNA, 19 nt, Homo sapiens
  misc_RNA (1)...(19): siRNA sense strand
ggcaccgucucaucaugug

SEQ ID NO: 1364171 - RNA, 19 nt, Homo sapiens
  misc_RNA (1)...(19): siRNA sense strand
ccucuccaaugucaacaca

SEQ ID NO: 1364172 - RNA, 19 nt, Homo sapiens
  misc_RNA (1)...(19): siRNA sense strand
gugauuggcgggauugucu

SEQ ID NO: 1364173 - RNA, 19 nt, Homo sapiens
  misc_RNA (1)...(19): siRNA sense strand
cguuucaccuuuguagaug

SEQ ID NO: 1364174 - RNA, 19 nt, Homo sapiens
  misc_RNA (1)...(19): siRNA sense strand
gaaggagggugaccugaua

SEQ ID NO: 1364175 - RNA, 19 nt, Homo sapiens
  misc_RNA (1)...(19): siRNA sense strand
ggaagcagcgugaguuuga

SEQ ID NO: 1364176 - RNA, 19 nt, Homo sapiens
  misc_RNA (1)...(19): siRNA sense strand
agaagaacaucuacaguga

SEQ ID NO: 1364177 - RNA, 19 nt, Homo sapiens
  misc_RNA (1)...(19): siRNA sense strand
gaugaucccuugcugacuu

SEQ ID NO: 1364178 - RNA, 19 nt, Homo sapiens
  misc_RNA (1)...(19): siRNA sense strand
caaagugcgugaggaguuu

SEQ ID NO: 1364179 - RNA, 19 nt, Homo sapiens
  misc_RNA (1)...(19): siRNA sense strand
gagcugaaagcgcgcaaua

SEQ ID NO: 1364180 - RNA, 19 nt, Homo sapiens
  misc_RNA (1)...(19): siRNA sense strand
gcaaagugcgugaggaguu

SEQ ID NO: 1364181 - RNA, 19 nt, Homo sapiens
  misc_RNA (1)...(19): siRNA sense strand
guacggcucucaucaacuc

SEQ ID NO: 1364182 - RNA, 19 nt, Homo sapiens
  misc_RNA (1)...(19): siRNA sense strand
agaaggagcuggagaagac

SEQ ID NO: 1364183 - RNA, 19 nt, Homo sapiens
  misc_RNA (1)...(19): siRNA sense strand
cuaccgaccugguguggaa

SEQ ID NO: 1364184 - RNA, 19 nt, Homo sapiens
  misc_RNA (1)...(19): siRNA sense strand
ggaugaggagggcaaguuu

SEQ ID NO: 1364185 - RNA, 19 nt, Homo sapiens
  misc_RNA (1)...(19): siRNA sense strand
ugaaagcgcgcaauaccaa

SEQ ID NO: 1364186 - RNA, 19 nt, Homo sapiens
  misc_RNA (1)...(19): siRNA sense strand
cgugugcgcucgcuggaaa

SEQ ID NO: 1364187 - RNA, 19 nt, Homo sapiens
  misc_RNA (1)...(19): siRNA sense strand
ucacccggcugcaggagaa

SEQ ID NO: 1364188 - RNA, 19 nt, Homo sapiens
  misc_RNA (1)...(19): siRNA sense strand
ucacagcacgcacgcacua

SEQ ID NO: 1364189 - RNA, 19 nt, Homo sapiens
  misc_RNA (1)...(19): siRNA sense strand
ucagccagcuccagaagca

SEQ ID NO: 1364190 - RNA, 19 nt, Homo sapiens
  misc_RNA (1)...(19): siRNA sense strand
gcagaucaagcgccagaau

SEQ ID NO: 1364191 - RNA, 19 nt, Homo sapiens
  misc_RNA (1)...(19): siRNA sense strand
agaacaggcugcagaccau

SEQ ID NO: 1364192 - RNA, 19 nt, Homo sapiens
  misc_RNA (1)...(19): siRNA sense strand
gagcuggagaagacuuauu

SEQ ID NO: 1364193 - RNA, 19 nt, Homo sapiens
  misc_RNA (1)...(19): siRNA sense strand
gaugaggagggcaaguuug

SEQ ID NO: 1364194 - RNA, 19 nt, Homo sapiens
  misc_RNA (1)...(19): siRNA sense strand
cugccaagcuggacaaugc

SEQ ID NO: 1364195 - RNA, 19 nt, Homo sapiens
  misc_RNA (1)...(19): siRNA sense strand
cggaugcgcugcaggaacu

SEQ ID NO: 1364196 - RNA, 19 nt, Homo sapiens
  misc_RNA (1)...(19): siRNA sense strand
gcguacggcucucaucaac

SEQ ID NO: 1364197 - RNA, 19 nt, Homo sapiens
  misc_RNA (1)...(19): siRNA sense strand
aggaccagguggagcagua

SEQ ID NO: 1364198 - RNA, 19 nt, Homo sapiens
  misc_RNA (1)...(19): siRNA sense strand
gcgccagaauggagaugau

SEQ ID NO: 1364199 - RNA, 19 nt, Homo sapiens
  misc_RNA (1)...(19): siRNA sense strand
gaccagguggagcaguaua

SEQ ID NO: 1364200 - RNA, 19 nt, Homo sapiens
  misc_RNA (1)...(19): siRNA sense strand
gcggguggaugcugagaac

SEQ ID NO: 1364201 - RNA, 19 nt, Homo sapiens
  misc_RNA (1)...(19): siRNA sense strand
gaagcagcgugaguuugag

SEQ ID NO: 1364202 - RNA, 19 nt, Homo sapiens
  misc_RNA (1)...(19): siRNA sense strand
gaucaagcgccagaaugga

SEQ ID NO: 1364203 - RNA, 19 nt, Homo sapiens
  misc_RNA (1)...(19): siRNA sense strand
auaagaaggagcuggagaa

SEQ ID NO: 1364204 - RNA, 19 nt, Homo sapiens
  misc_RNA (1)...(19): siRNA sense strand
gcuuggcggucuacaucga

SEQ ID NO: 1364205 - RNA, 19 nt, Homo sapiens
  misc_RNA (1)...(19): siRNA sense strand
ggacgaguaccaggagcuu

SEQ ID NO: 1364206 - RNA, 19 nt, Homo sapiens
  misc_RNA (1)...(19): siRNA sense strand
agaccaagcgccgucauga

SEQ ID NO: 1364207 - RNA, 19 nt, Homo sapiens
  misc_RNA (1)...(19): siRNA sense strand
cagaucaagcgccagaaug

SEQ ID NO: 1364208 - RNA, 19 nt, Homo sapiens
  misc_RNA (1)...(19): siRNA sense strand
caagcuggcccuggacaug

SEQ ID NO: 1364209 - RNA, 19 nt, Homo sapiens
  misc_RNA (1)...(19): siRNA sense strand
ugaaggaggaacuggacuu

SEQ ID NO: 1364210 - RNA, 19 nt, Homo sapiens
  misc_RNA (1)...(19): siRNA sense strand
gagaccaagcgccgucaug

SEQ ID NO: 1364211 - RNA, 19 nt, Homo sapiens
  misc_RNA (1)...(19): siRNA sense strand
uggaggcucugcugaacuc

SEQ ID NO: 1364212 - RNA, 19 nt, Homo sapiens
  misc_RNA (1)...(19): siRNA sense strand
augaucccuugcugacuua

SEQ ID NO: 1364213 - RNA, 19 nt, Homo sapiens
  misc_RNA (1)...(19): siRNA sense strand
gggaagcagcgugaguuug

SEQ ID NO: 1364214 - RNA, 19 nt, Homo sapiens
  misc_RNA (1)...(19): siRNA sense strand
gcaacuucaggaugagaug

SEQ ID NO: 1364215 - RNA, 19 nt, Homo sapiens
  misc_RNA (1)...(19): siRNA sense strand
cgagguguccggcaucaag

SEQ ID NO: 1364216 - RNA, 19 nt, Homo sapiens
  misc_RNA (1)...(19): siRNA sense strand
uaggugaggccaagaagca

SEQ ID NO: 1364217 - RNA, 19 nt, Homo sapiens
  misc_RNA (1)...(19): siRNA sense strand
ggaguuuaaggagcugaaa

SEQ ID NO: 1364218 - RNA, 19 nt, Homo sapiens
  misc_RNA (1)...(19): siRNA sense strand
ccagaagaacaucuacagu

SEQ ID NO: 1364219 - RNA, 19 nt, Homo sapiens
  misc_RNA (1)...(19): siRNA sense strand
gaaggagggugaccugaua

SEQ ID NO: 1364220 - RNA, 19 nt, Homo sapiens
  misc_RNA (1)...(19): siRNA sense strand
ggaagcagcgugaguuuga

SEQ ID NO: 1364221 - RNA, 19 nt, Homo sapiens
  misc_RNA (1)...(19): siRNA sense strand
agaagaacaucuacaguga

SEQ ID NO: 1364222 - RNA, 19 nt, Homo sapiens
  misc_RNA (1)...(19): siRNA sense strand
gaugaucccuugcugacuu

SEQ ID NO: 1364223 - RNA, 19 nt, Homo sapiens
  misc_RNA (1)...(19): siRNA sense strand
caaagugcgugaggaguuu

SEQ ID NO: 1364224 - RNA, 19 nt, Homo sapiens
  misc_RNA (1)...(19): siRNA sense strand
gagcugaaagcgcgcaaua

SEQ ID NO: 1364225 - RNA, 19 nt, Homo sapiens
  misc_RNA (1)...(19): siRNA sense strand
gcaaagugcgugaggaguu

SEQ ID NO: 1364226 - RNA, 19 nt, Homo sapiens
  misc_RNA (1)...(19): siRNA sense strand
guacggcucucaucaacuc

SEQ ID NO: 1364227 - RNA, 19 nt, Homo sapiens
  misc_RNA (1)...(19): siRNA sense strand
agaaggagcuggagaagac

SEQ ID NO: 1364228 - RNA, 19 nt, Homo sapiens
  misc_RNA (1)...(19): siRNA sense strand
cuaccgaccugguguggaa

SEQ ID NO: 1364229 - RNA, 19 nt, Homo sapiens
  misc_RNA (1)...(19): siRNA sense strand
ggaugaggagggcaaguuu

SEQ ID NO: 1364230 - RNA, 19 nt, Homo sapiens
  misc_RNA (1)...(19): siRNA sense strand
ugaaagcgcgcaauaccaa

SEQ ID NO: 1364231 - RNA, 19 nt, Homo sapiens
  misc_RNA (1)...(19): siRNA sense strand
cgugugcgcucgcuggaaa

SEQ ID NO: 1364232 - RNA, 19 nt, Homo sapiens
  misc_RNA (1)...(19): siRNA sense strand
ucacccggcugcaggagaa

SEQ ID NO: 1364233 - RNA, 19 nt, Homo sapiens
  misc_RNA (1)...(19): siRNA sense strand
ucacagcacgcacgcacua

SEQ ID NO: 1364234 - RNA, 19 nt, Homo sapiens
  misc_RNA (1)...(19): siRNA sense strand
ucagccagcuccagaagca

SEQ ID NO: 1364235 - RNA, 19 nt, Homo sapiens
  misc_RNA (1)...(19): siRNA sense strand
gcagaucaagcgccagaau

SEQ ID NO: 1364236 - RNA, 19 nt, Homo sapiens
  misc_RNA (1)...(19): siRNA sense strand
agaacaggcugcagaccau

SEQ ID NO: 1364237 - RNA, 19 nt, Homo sapiens
  misc_RNA (1)...(19): siRNA sense strand
gagcuggagaagacuuauu

SEQ ID NO: 1364238 - RNA, 19 nt, Homo sapiens
  misc_RNA (1)...(19): siRNA sense strand
gaugaggagggcaaguuug

SEQ ID NO: 1364239 - RNA, 19 nt, Homo sapiens
  misc_RNA (1)...(19): siRNA sense strand
cugccaagcuggacaaugc

SEQ ID NO: 1364240 - RNA, 19 nt, Homo sapiens
  misc_RNA (1)...(19): siRNA sense strand
cggaugcgcugcaggaacu

SEQ ID NO: 1364241 - RNA, 19 nt, Homo sapiens
  misc_RNA (1)...(19): siRNA sense strand
gcguacggcucucaucaac

SEQ ID NO: 1364242 - RNA, 19 nt, Homo sapiens
  misc_RNA (1)...(19): siRNA sense strand
aggaccagguggagcagua

SEQ ID NO: 1364243 - RNA, 19 nt, Homo sapiens
  misc_RNA (1)...(19): siRNA sense strand
gcgccagaauggagaugau

SEQ ID NO: 1364244 - RNA, 19 nt, Homo sapiens
  misc_RNA (1)...(19): siRNA sense strand
gaccagguggagcaguaua

SEQ ID NO: 1364245 - RNA, 19 nt, Homo sapiens
  misc_RNA (1)...(19): siRNA sense strand
gcggguggaugcugagaac

SEQ ID NO: 1364246 - RNA, 19 nt, Homo sapiens
  misc_RNA (1)...(19): siRNA sense strand
gaagcagcgugaguuugag

SEQ ID NO: 1364247 - RNA, 19 nt, Homo sapiens
  misc_RNA (1)...(19): siRNA sense strand
gaucaagcgccagaaugga

SEQ ID NO: 1364248 - RNA, 19 nt, Homo sapiens
  misc_RNA (1)...(19): siRNA sense strand
auaagaaggagcuggagaa

SEQ ID NO: 1364249 - RNA, 19 nt, Homo sapiens
  misc_RNA (1)...(19): siRNA sense strand
gcuuggcggucuacaucga

SEQ ID NO: 1364250 - RNA, 19 nt, Homo sapiens
  misc_RNA (1)...(19): siRNA sense strand
ggacgaguaccaggagcuu

SEQ ID NO: 1364251 - RNA, 19 nt, Homo sapiens
  misc_RNA (1)...(19): siRNA sense strand
agaccaagcgccgucauga

SEQ ID NO: 1364252 - RNA, 19 nt, Homo sapiens
  misc_RNA (1)...(19): siRNA sense strand
cagaucaagcgccagaaug

SEQ ID NO: 1364253 - RNA, 19 nt, Homo sapiens
  misc_RNA (1)...(19): siRNA sense strand
caagcuggcccuggacaug

SEQ ID NO: 1364254 - RNA, 19 nt, Homo sapiens
  misc_RNA (1)...(19): siRNA sense strand
ugaaggaggaacuggacuu

SEQ ID NO: 1364255 - RNA, 19 nt, Homo sapiens
  misc_RNA (1)...(19): siRNA sense strand
gagaccaagcgccgucaug

SEQ ID NO: 1364256 - RNA, 19 nt, Homo sapiens
  misc_RNA (1)...(19): siRNA sense strand
uggaggcucugcugaacuc

SEQ ID NO: 1364257 - RNA, 19 nt, Homo sapiens
  misc_RNA (1)...(19): siRNA sense strand
augaucccuugcugacuua

SEQ ID NO: 1364258 - RNA, 19 nt, Homo sapiens
  misc_RNA (1)...(19): siRNA sense strand
gggaagcagcgugaguuug

SEQ ID NO: 1364259 - RNA, 19 nt, Homo sapiens
  misc_RNA (1)...(19): siRNA sense strand
gcaacuucaggaugagaug

SEQ ID NO: 1364260 - RNA, 19 nt, Homo sapiens
  misc_RNA (1)...(19): siRNA sense strand
cgagguguccggcaucaag

SEQ ID NO: 1364261 - RNA, 19 nt, Homo sapiens
  misc_RNA (1)...(19): siRNA sense strand
uaggugaggccaagaagca

SEQ ID NO: 1364262 - RNA, 19 nt, Homo sapiens
  misc_RNA (1)...(19): siRNA sense strand
ggaguuuaaggagcugaaa

SEQ ID NO: 1364263 - RNA, 19 nt, Homo sapiens
  misc_RNA (1)...(19): siRNA sense strand
ccagaagaacaucuacagu

SEQ ID NO: 1364264 - RNA, 19 nt, Homo sapiens
  misc_RNA (1)...(19): siRNA sense strand
gaaggagggugaccugaua

SEQ ID NO: 1364265 - RNA, 19 nt, Homo sapiens
  misc_RNA (1)...(19): siRNA sense strand
ggaagcagcgugaguuuga

SEQ ID NO: 1364266 - RNA, 19 nt, Homo sapiens
  misc_RNA (1)...(19): siRNA sense strand
agaagaacaucuacaguga

SEQ ID NO: 1364267 - RNA, 19 nt, Homo sapiens
  misc_RNA (1)...(19): siRNA sense strand
gaugaucccuugcugacuu

SEQ ID NO: 1364268 - RNA, 19 nt, Homo sapiens
  misc_RNA (1)...(19): siRNA sense strand
caaagugcgugaggaguuu

SEQ ID NO: 1364269 - RNA, 19 nt, Homo sapiens
  misc_RNA (1)...(19): siRNA sense strand
gagcugaaagcgcgcaaua

SEQ ID NO: 1364270 - RNA, 19 nt, Homo sapiens
  misc_RNA (1)...(19): siRNA sense strand
gcaaagugcgugaggaguu

SEQ ID NO: 1364271 - RNA, 19 nt, Homo sapiens
  misc_RNA (1)...(19): siRNA sense strand
guacggcucucaucaacuc

SEQ ID NO: 1364272 - RNA, 19 nt, Homo sapiens
  misc_RNA (1)...(19): siRNA sense strand
agaaggagcuggagaagac

SEQ ID NO: 1364273 - RNA, 19 nt, Homo sapiens
  misc_RNA (1)...(19): siRNA sense strand
cuaccgaccugguguggaa

SEQ ID NO: 1364274 - RNA, 19 nt, Homo sapiens
  misc_RNA (1)...(19): siRNA sense strand
ggaugaggagggcaaguuu

SEQ ID NO: 1364275 - RNA, 19 nt, Homo sapiens
  misc_RNA (1)...(19): siRNA sense strand
ugaaagcgcgcaauaccaa

SEQ ID NO: 1364276 - RNA, 19 nt, Homo sapiens
  misc_RNA (1)...(19): siRNA sense strand
cgugugcgcucgcuggaaa

SEQ ID NO: 1364277 - RNA, 19 nt, Homo sapiens
  misc_RNA (1)...(19): siRNA sense strand
ucacccggcugcaggagaa

SEQ ID NO: 1364278 - RNA, 19 nt, Homo sapiens
  misc_RNA (1)...(19): siRNA sense strand
ucacagcacgcacgcacua

SEQ ID NO: 1364279 - RNA, 19 nt, Homo sapiens
  misc_RNA (1)...(19): siRNA sense strand
ucagccagcuccagaagca

SEQ ID NO: 1364280 - RNA, 19 nt, Homo sapiens
  misc_RNA (1)...(19): siRNA sense strand
gcagaucaagcgccagaau

SEQ ID NO: 1364281 - RNA, 19 nt, Homo sapiens
  misc_RNA (1)...(19): siRNA sense strand
agaacaggcugcagaccau

SEQ ID NO: 1364282 - RNA, 19 nt, Homo sapiens
  misc_RNA (1)...(19): siRNA sense strand
gagcuggagaagacuuauu

SEQ ID NO: 1364283 - RNA, 19 nt, Homo sapiens
  misc_RNA (1)...(19): siRNA sense strand
gaugaggagggcaaguuug

SEQ ID NO: 1364284 - RNA, 19 nt, Homo sapiens
  misc_RNA (1)...(19): siRNA sense strand
cugccaagcuggacaaugc

SEQ ID NO: 1364285 - RNA, 19 nt, Homo sapiens
  misc_RNA (1)...(19): siRNA sense strand
cggaugcgcugcaggaacu

SEQ ID NO: 1364286 - RNA, 19 nt, Homo sapiens
  misc_RNA (1)...(19): siRNA sense strand
gcguacggcucucaucaac

SEQ ID NO: 1364287 - RNA, 19 nt, Homo sapiens
  misc_RNA (1)...(19): siRNA sense strand
aggaccagguggagcagua

SEQ ID NO: 1364288 - RNA, 19 nt, Homo sapiens
  misc_RNA (1)...(19): siRNA sense strand
gcgccagaauggagaugau

SEQ ID NO: 1364289 - RNA, 19 nt, Homo sapiens
  misc_RNA (1)...(19): siRNA sense strand
gaccagguggagcaguaua

SEQ ID NO: 1364290 - RNA, 19 nt, Homo sapiens
  misc_RNA (1)...(19): siRNA sense strand
gcggguggaugcugagaac

SEQ ID NO: 1364291 - RNA, 19 nt, Homo sapiens
  misc_RNA (1)...(19): siRNA sense strand
gaagcagcgugaguuugag

SEQ ID NO: 1364292 - RNA, 19 nt, Homo sapiens
  misc_RNA (1)...(19): siRNA sense strand
gaucaagcgccagaaugga

SEQ ID NO: 1364293 - RNA, 19 nt, Homo sapiens
  misc_RNA (1)...(19): siRNA sense strand
auaagaaggagcuggagaa

SEQ ID NO: 1364294 - RNA, 19 nt, Homo sapiens
  misc_RNA (1)...(19): siRNA sense strand
gcuuggcggucuacaucga

SEQ ID NO: 1364295 - RNA, 19 nt, Homo sapiens
  misc_RNA (1)...(19): siRNA sense strand
ggacgaguaccaggagcuu

SEQ ID NO: 1364296 - RNA, 19 nt, Homo sapiens
  misc_RNA (1)...(19): siRNA sense strand
agaccaagcgccgucauga

SEQ ID NO: 1364297 - RNA, 19 nt, Homo sapiens
  misc_RNA (1)...(19): siRNA sense strand
cagaucaagcgccagaaug

SEQ ID NO: 1364298 - RNA, 19 nt, Homo sapiens
  misc_RNA (1)...(19): siRNA sense strand
caagcuggcccuggacaug

SEQ ID NO: 1364299 - RNA, 19 nt, Homo sapiens
  misc_RNA (1)...(19): siRNA sense strand
ugaaggaggaacuggacuu

SEQ ID NO: 1364300 - RNA, 19 nt, Homo sapiens
  misc_RNA (1)...(19): siRNA sense strand
gagaccaagcgccgucaug

SEQ ID NO: 1364301 - RNA, 19 nt, Homo sapiens
  misc_RNA (1)...(19): siRNA sense strand
uggaggcucugcugaacuc

SEQ ID NO: 1364302 - RNA, 19 nt, Homo sapiens
  misc_RNA (1)...(19): siRNA sense strand
augaucccuugcugacuua

SEQ ID NO: 1364303 - RNA, 19 nt, Homo sapiens
  misc_RNA (1)...(19): siRNA sense strand
gggaagcagcgugaguuug

SEQ ID NO: 1364304 - RNA, 19 nt, Homo sapiens
  misc_RNA (1)...(19): siRNA sense strand
gcaacuucaggaugagaug

SEQ ID NO: 1364305 - RNA, 19 nt, Homo sapiens
  misc_RNA (1)...(19): siRNA sense strand
cgagguguccggcaucaag

SEQ ID NO: 1364306 - RNA, 19 nt, Homo sapiens
  misc_RNA (1)...(19): siRNA sense strand
uaggugaggccaagaagca

SEQ ID NO: 1364307 - RNA, 19 nt, Homo sapiens
  misc_RNA (1)...(19): siRNA sense strand
ggaguuuaaggagcugaaa

SEQ ID NO: 1364308 - RNA, 19 nt, Homo sapiens
  misc_RNA (1)...(19): siRNA sense strand
ccagaagaacaucuacagu

SEQ ID NO: 1364309 - RNA, 19 nt, Homo sapiens
  misc_RNA (1)...(19): siRNA sense strand
gaaggagggugaccugaua

SEQ ID NO: 1364310 - RNA, 19 nt, Homo sapiens
  misc_RNA (1)...(19): siRNA sense strand
ggaagcagcgugaguuuga

SEQ ID NO: 1364311 - RNA, 19 nt, Homo sapiens
  misc_RNA (1)...(19): siRNA sense strand
agaagaacaucuacaguga

SEQ ID NO: 1364312 - RNA, 19 nt, Homo sapiens
  misc_RNA (1)...(19): siRNA sense strand
gaugaucccuugcugacuu

SEQ ID NO: 1364313 - RNA, 19 nt, Homo sapiens
  misc_RNA (1)...(19): siRNA sense strand
caaagugcgugaggaguuu

SEQ ID NO: 1364314 - RNA, 19 nt, Homo sapiens
  misc_RNA (1)...(19): siRNA sense strand
gagcugaaagcgcgcaaua

SEQ ID NO: 1364315 - RNA, 19 nt, Homo sapiens
  misc_RNA (1)...(19): siRNA sense strand
gcaaagugcgugaggaguu

SEQ ID NO: 1364316 - RNA, 19 nt, Homo sapiens
  misc_RNA (1)...(19): siRNA sense strand
guacggcucucaucaacuc

SEQ ID NO: 1364317 - RNA, 19 nt, Homo sapiens
  misc_RNA (1)...(19): siRNA sense strand
agaaggagcuggagaagac

SEQ ID NO: 1364318 - RNA, 19 nt, Homo sapiens
  misc_RNA (1)...(19): siRNA sense strand
cuaccgaccugguguggaa

SEQ ID NO: 1364319 - RNA, 19 nt, Homo sapiens
  misc_RNA (1)...(19): siRNA sense strand
ggaugaggagggcaaguuu

SEQ ID NO: 1364320 - RNA, 19 nt, Homo sapiens
  misc_RNA (1)...(19): siRNA sense strand
ugaaagcgcgcaauaccaa

SEQ ID NO: 1364321 - RNA, 19 nt, Homo sapiens
  misc_RNA (1)...(19): siRNA sense strand
cgugugcgcucgcuggaaa

SEQ ID NO: 1364322 - RNA, 19 nt, Homo sapiens
  misc_RNA (1)...(19): siRNA sense strand
ucacccggcugcaggagaa

SEQ ID NO: 1364323 - RNA, 19 nt, Homo sapiens
  misc_RNA (1)...(19): siRNA sense strand
ucacagcacgcacgcacua

SEQ ID NO: 1364324 - RNA, 19 nt, Homo sapiens
  misc_RNA (1)...(19): siRNA sense strand
ucagccagcuccagaagca

SEQ ID NO: 1364325 - RNA, 19 nt, Homo sapiens
  misc_RNA (1)...(19): siRNA sense strand
gcagaucaagcgccagaau

SEQ ID NO: 1364326 - RNA, 19 nt, Homo sapiens
  misc_RNA (1)...(19): siRNA sense strand
agaacaggcugcagaccau

SEQ ID NO: 1364327 - RNA, 19 nt, Homo sapiens
  misc_RNA (1)...(19): siRNA sense strand
gagcuggagaagacuuauu

SEQ ID NO: 1364328 - RNA, 19 nt, Homo sapiens
  misc_RNA (1)...(19): siRNA sense strand
gaugaggagggcaaguuug

SEQ ID NO: 1364329 - RNA, 19 nt, Homo sapiens
  misc_RNA (1)...(19): siRNA sense strand
cugccaagcuggacaaugc

SEQ ID NO: 1364330 - RNA, 19 nt, Homo sapiens
  misc_RNA (1)...(19): siRNA sense strand
cggaugcgcugcaggaacu

SEQ ID NO: 1364331 - RNA, 19 nt, Homo sapiens
  misc_RNA (1)...(19): siRNA sense strand
gcguacggcucucaucaac

SEQ ID NO: 1364332 - RNA, 19 nt, Homo sapiens
  misc_RNA (1)...(19): siRNA sense strand
aggaccagguggagcagua

SEQ ID NO: 1364333 - RNA, 19 nt, Homo sapiens
  misc_RNA (1)...(19): siRNA sense strand
gcgccagaauggagaugau

SEQ ID NO: 1364334 - RNA, 19 nt, Homo sapiens
  misc_RNA (1)...(19): siRNA sense strand
gaccagguggagcaguaua

SEQ ID NO: 1364335 - RNA, 19 nt, Homo sapiens
  misc_RNA (1)...(19): siRNA sense strand
gcggguggaugcugagaac

SEQ ID NO: 1364336 - RNA, 19 nt, Homo sapiens
  misc_RNA (1)...(19): siRNA sense strand
gaagcagcgugaguuugag

SEQ ID NO: 1364337 - RNA, 19 nt, Homo sapiens
  misc_RNA (1)...(19): siRNA sense strand
gaucaagcgccagaaugga

SEQ ID NO: 1364338 - RNA, 19 nt, Homo sapiens
  misc_RNA (1)...(19): siRNA sense strand
auaagaaggagcuggagaa

SEQ ID NO: 1364339 - RNA, 19 nt, Homo sapiens
  misc_RNA (1)...(19): siRNA sense strand
gcuuggcggucuacaucga

SEQ ID NO: 1364340 - RNA, 19 nt, Homo sapiens
  misc_RNA (1)...(19): siRNA sense strand
ggacgaguaccaggagcuu

SEQ ID NO: 1364341 - RNA, 19 nt, Homo sapiens
  misc_RNA (1)...(19): siRNA sense strand
agaccaagcgccgucauga

SEQ ID NO: 1364342 - RNA, 19 nt, Homo sapiens
  misc_RNA (1)...(19): siRNA sense strand
cagaucaagcgccagaaug

SEQ ID NO: 1364343 - RNA, 19 nt, Homo sapiens
  misc_RNA (1)...(19): siRNA sense strand
caagcuggcccuggacaug

SEQ ID NO: 1364344 - RNA, 19 nt, Homo sapiens
  misc_RNA (1)...(19): siRNA sense strand
ugaaggaggaacuggacuu

SEQ ID NO: 1364345 - RNA, 19 nt, Homo sapiens
  misc_RNA (1)...(19): siRNA sense strand
gagaccaagcgccgucaug

SEQ ID NO: 1364346 - RNA, 19 nt, Homo sapiens
  misc_RNA (1)...(19): siRNA sense strand
uggaggcucugcugaacuc

SEQ ID NO: 1364347 - RNA, 19 nt, Homo sapiens
  misc_RNA (1)...(19): siRNA sense strand
augaucccuugcugacuua

SEQ ID NO: 1364348 - RNA, 19 nt, Homo sapiens
  misc_RNA (1)...(19): siRNA sense strand
gggaagcagcgugaguuug

SEQ ID NO: 1364349 - RNA, 19 nt, Homo sapiens
  misc_RNA (1)...(19): siRNA sense strand
gcaacuucaggaugagaug

SEQ ID NO: 1364350 - RNA, 19 nt, Homo sapiens
  misc_RNA (1)...(19): siRNA sense strand
cgagguguccggcaucaag

SEQ ID NO: 1364351 - RNA, 19 nt, Homo sapiens
  misc_RNA (1)...(19): siRNA sense strand
uaggugaggccaagaagca

SEQ ID NO: 1364352 - RNA, 19 nt, Homo sapiens
  misc_RNA (1)...(19): siRNA sense strand
ggaguuuaaggagcugaaa

SEQ ID NO: 1364353 - RNA, 19 nt, Homo sapiens
  misc_RNA (1)...(19): siRNA sense strand
ccagaagaacaucuacagu

SEQ ID NO: 1364354 - RNA, 19 nt, Homo sapiens
  misc_RNA (1)...(19): siRNA sense strand
gaaggagggugaccugaua

SEQ ID NO: 1364355 - RNA, 19 nt, Homo sapiens
  misc_RNA (1)...(19): siRNA sense strand
ggaagcagcgugaguuuga

SEQ ID NO: 1364356 - RNA, 19 nt, Homo sapiens
  misc_RNA (1)...(19): siRNA sense strand
agaagaacaucuacaguga

SEQ ID NO: 1364357 - RNA, 19 nt, Homo sapiens
  misc_RNA (1)...(19): siRNA sense strand
gaugaucccuugcugacuu

SEQ ID NO: 1364358 - RNA, 19 nt, Homo sapiens
  misc_RNA (1)...(19): siRNA sense strand
caaagugcgugaggaguuu

SEQ ID NO: 1364359 - RNA, 19 nt, Homo sapiens
  misc_RNA (1)...(19): siRNA sense strand
gagcugaaagcgcgcaaua

SEQ ID NO: 1364360 - RNA, 19 nt, Homo sapiens
  misc_RNA (1)...(19): siRNA sense strand
gcaaagugcgugaggaguu

SEQ ID NO: 1364361 - RNA, 19 nt, Homo sapiens
  misc_RNA (1)...(19): siRNA sense strand
guacggcucucaucaacuc

SEQ ID NO: 1364362 - RNA, 19 nt, Homo sapiens
  misc_RNA (1)...(19): siRNA sense strand
agaaggagcuggagaagac

SEQ ID NO: 1364363 - RNA, 19 nt, Homo sapiens
  misc_RNA (1)...(19): siRNA sense strand
cuaccgaccugguguggaa

SEQ ID NO: 1364364 - RNA, 19 nt, Homo sapiens
  misc_RNA (1)...(19): siRNA sense strand
ggaugaggagggcaaguuu

SEQ ID NO: 1364365 - RNA, 19 nt, Homo sapiens
  misc_RNA (1)...(19): siRNA sense strand
ugaaagcgcgcaauaccaa

SEQ ID NO: 1364366 - RNA, 19 nt, Homo sapiens
  misc_RNA (1)...(19): siRNA sense strand
cgugugcgcucgcuggaaa

SEQ ID NO: 1364367 - RNA, 19 nt, Homo sapiens
  misc_RNA (1)...(19): siRNA sense strand
ucacccggcugcaggagaa

SEQ ID NO: 1364368 - RNA, 19 nt, Homo sapiens
  misc_RNA (1)...(19): siRNA sense strand
ucacagcacgcacgcacua

SEQ ID NO: 1364369 - RNA, 19 nt, Homo sapiens
  misc_RNA (1)...(19): siRNA sense strand
ucagccagcuccagaagca

SEQ ID NO: 1364370 - RNA, 19 nt, Homo sapiens
  misc_RNA (1)...(19): siRNA sense strand
gcagaucaagcgccagaau

SEQ ID NO: 1364371 - RNA, 19 nt, Homo sapiens
  misc_RNA (1)...(19): siRNA sense strand
agaacaggcugcagaccau

SEQ ID NO: 1364372 - RNA, 19 nt, Homo sapiens
  misc_RNA (1)...(19): siRNA sense strand
gagcuggagaagacuuauu

SEQ ID NO: 1364373 - RNA, 19 nt, Homo sapiens
  misc_RNA (1)...(19): siRNA sense strand
gaugaggagggcaaguuug

SEQ ID NO: 1364374 - RNA, 19 nt, Homo sapiens
  misc_RNA (1)...(19): siRNA sense strand
cugccaagcuggacaaugc

SEQ ID NO: 1364375 - RNA, 19 nt, Homo sapiens
  misc_RNA (1)...(19): siRNA sense strand
cggaugcgcugcaggaacu

SEQ ID NO: 1364376 - RNA, 19 nt, Homo sapiens
  misc_RNA (1)...(19): siRNA sense strand
gcguacggcucucaucaac

SEQ ID NO: 1364377 - RNA, 19 nt, Homo sapiens
  misc_RNA (1)...(19): siRNA sense strand
aggaccagguggagcagua

SEQ ID NO: 1364378 - RNA, 19 nt, Homo sapiens
  misc_RNA (1)...(19): siRNA sense strand
gcgccagaauggagaugau

SEQ ID NO: 1364379 - RNA, 19 nt, Homo sapiens
  misc_RNA (1)...(19): siRNA sense strand
gaccagguggagcaguaua

SEQ ID NO: 1364380 - RNA, 19 nt, Homo sapiens
  misc_RNA (1)...(19): siRNA sense strand
gcggguggaugcugagaac

SEQ ID NO: 1364381 - RNA, 19 nt, Homo sapiens
  misc_RNA (1)...(19): siRNA sense strand
gaagcagcgugaguuugag

SEQ ID NO: 1364382 - RNA, 19 nt, Homo sapiens
  misc_RNA (1)...(19): siRNA sense strand
gaucaagcgccagaaugga

SEQ ID NO: 1364383 - RNA, 19 nt, Homo sapiens
  misc_RNA (1)...(19): siRNA sense strand
auaagaaggagcuggagaa

SEQ ID NO: 1364384 - RNA, 19 nt, Homo sapiens
  misc_RNA (1)...(19): siRNA sense strand
gcuuggcggucuacaucga

SEQ ID NO: 1364385 - RNA, 19 nt, Homo sapiens
  misc_RNA (1)...(19): siRNA sense strand
ggacgaguaccaggagcuu

SEQ ID NO: 1364386 - RNA, 19 nt, Homo sapiens
  misc_RNA (1)...(19): siRNA sense strand
agaccaagcgccgucauga

SEQ ID NO: 1364387 - RNA, 19 nt, Homo sapiens
  misc_RNA (1)...(19): siRNA sense strand
cagaucaagcgccagaaug

SEQ ID NO: 1364388 - RNA, 19 nt, Homo sapiens
  misc_RNA (1)...(19): siRNA sense strand
caagcuggcccuggacaug

SEQ ID NO: 1364389 - RNA, 19 nt, Homo sapiens
  misc_RNA (1)...(19): siRNA sense strand
ugaaggaggaacuggacuu

SEQ ID NO: 1364390 - RNA, 19 nt, Homo sapiens
  misc_RNA (1)...(19): siRNA sense strand
gagaccaagcgccgucaug

SEQ ID NO: 1364391 - RNA, 19 nt, Homo sapiens
  misc_RNA (1)...(19): siRNA sense strand
uggaggcucugcugaacuc

SEQ ID NO: 1364392 - RNA, 19 nt, Homo sapiens
  misc_RNA (1)...(19): siRNA sense strand
augaucccuugcugacuua

SEQ ID NO: 1364393 - RNA, 19 nt, Homo sapiens
  misc_RNA (1)...(19): siRNA sense strand
gggaagcagcgugaguuug

SEQ ID NO: 1364394 - RNA, 19 nt, Homo sapiens
  misc_RNA (1)...(19): siRNA sense strand
gcaacuucaggaugagaug

SEQ ID NO: 1364395 - RNA, 19 nt, Homo sapiens
  misc_RNA (1)...(19): siRNA sense strand
cgagguguccggcaucaag

SEQ ID NO: 1364396 - RNA, 19 nt, Homo sapiens
  misc_RNA (1)...(19): siRNA sense strand
uaggugaggccaagaagca

SEQ ID NO: 1364397 - RNA, 19 nt, Homo sapiens
  misc_RNA (1)...(19): siRNA sense strand
ggaguuuaaggagcugaaa

SEQ ID NO: 1364398 - RNA, 19 nt, Homo sapiens
  misc_RNA (1)...(19): siRNA sense strand
ccagaagaacaucuacagu

SEQ ID NO: 1364399 - RNA, 19 nt, Homo sapiens
  misc_RNA (1)...(19): siRNA sense strand
gaaggagggugaccugaua

SEQ ID NO: 1364400 - RNA, 19 nt, Homo sapiens
  misc_RNA (1)...(19): siRNA sense strand
ggaagcagcgugaguuuga

SEQ ID NO: 1364401 - RNA, 19 nt, Homo sapiens
  misc_RNA (1)...(19): siRNA sense strand
agaagaacaucuacaguga

SEQ ID NO: 1364402 - RNA, 19 nt, Homo sapiens
  misc_RNA (1)...(19): siRNA sense strand
gaugaucccuugcugacuu

SEQ ID NO: 1364403 - RNA, 19 nt, Homo sapiens
  misc_RNA (1)...(19): siRNA sense strand
caaagugcgugaggaguuu

SEQ ID NO: 1364404 - RNA, 19 nt, Homo sapiens
  misc_RNA (1)...(19): siRNA sense strand
gagcugaaagcgcgcaaua

SEQ ID NO: 1364405 - RNA, 19 nt, Homo sapiens
  misc_RNA (1)...(19): siRNA sense strand
gcaaagugcgugaggaguu

SEQ ID NO: 1364406 - RNA, 19 nt, Homo sapiens
  misc_RNA (1)...(19): siRNA sense strand
guacggcucucaucaacuc

SEQ ID NO: 1364407 - RNA, 19 nt, Homo sapiens
  misc_RNA (1)...(19): siRNA sense strand
agaaggagcuggagaagac

SEQ ID NO: 1364408 - RNA, 19 nt, Homo sapiens
  misc_RNA (1)...(19): siRNA sense strand
cuaccgaccugguguggaa

SEQ ID NO: 1364409 - RNA, 19 nt, Homo sapiens
  misc_RNA (1)...(19): siRNA sense strand
ggaugaggagggcaaguuu

SEQ ID NO: 1364410 - RNA, 19 nt, Homo sapiens
  misc_RNA (1)...(19): siRNA sense strand
ugaaagcgcgcaauaccaa

SEQ ID NO: 1364411 - RNA, 19 nt, Homo sapiens
  misc_RNA (1)...(19): siRNA sense strand
cgugugcgcucgcuggaaa

SEQ ID NO: 1364412 - RNA, 19 nt, Homo sapiens
  misc_RNA (1)...(19): siRNA sense strand
ucacccggcugcaggagaa

SEQ ID NO: 1364413 - RNA, 19 nt, Homo sapiens
  misc_RNA (1)...(19): siRNA sense strand
ucacagcacgcacgcacua

SEQ ID NO: 1364414 - RNA, 19 nt, Homo sapiens
  misc_RNA (1)...(19): siRNA sense strand
ucagccagcuccagaagca

SEQ ID NO: 1364415 - RNA, 19 nt, Homo sapiens
  misc_RNA (1)...(19): siRNA sense strand
gcagaucaagcgccagaau

SEQ ID NO: 1364416 - RNA, 19 nt, Homo sapiens
  misc_RNA (1)...(19): siRNA sense strand
agaacaggcugcagaccau

SEQ ID NO: 1364417 - RNA, 19 nt, Homo sapiens
  misc_RNA (1)...(19): siRNA sense strand
gagcuggagaagacuuauu

SEQ ID NO: 1364418 - RNA, 19 nt, Homo sapiens
  misc_RNA (1)...(19): siRNA sense strand
gaugaggagggcaaguuug

SEQ ID NO: 1364419 - RNA, 19 nt, Homo sapiens
  misc_RNA (1)...(19): siRNA sense strand
cugccaagcuggacaaugc

SEQ ID NO: 1364420 - RNA, 19 nt, Homo sapiens
  misc_RNA (1)...(19): siRNA sense strand
cggaugcgcugcaggaacu

SEQ ID NO: 1364421 - RNA, 19 nt, Homo sapiens
  misc_RNA (1)...(19): siRNA sense strand
gcguacggcucucaucaac

SEQ ID NO: 1364422 - RNA, 19 nt, Homo sapiens
  misc_RNA (1)...(19): siRNA sense strand
aggaccagguggagcagua

SEQ ID NO: 1364423 - RNA, 19 nt, Homo sapiens
  misc_RNA (1)...(19): siRNA sense strand
gcgccagaauggagaugau

SEQ ID NO: 1364424 - RNA, 19 nt, Homo sapiens
  misc_RNA (1)...(19): siRNA sense strand
gaccagguggagcaguaua

SEQ ID NO: 1364425 - RNA, 19 nt, Homo sapiens
  misc_RNA (1)...(19): siRNA sense strand
gcggguggaugcugagaac

SEQ ID NO: 1364426 - RNA, 19 nt, Homo sapiens
  misc_RNA (1)...(19): siRNA sense strand
gaagcagcgugaguuugag

SEQ ID NO: 1364427 - RNA, 19 nt, Homo sapiens
  misc_RNA (1)...(19): siRNA sense strand
gaucaagcgccagaaugga

SEQ ID NO: 1364428 - RNA, 19 nt, Homo sapiens
  misc_RNA (1)...(19): siRNA sense strand
auaagaaggagcuggagaa

SEQ ID NO: 1364429 - RNA, 19 nt, Homo sapiens
  misc_RNA (1)...(19): siRNA sense strand
gcuuggcggucuacaucga

SEQ ID NO: 1364430 - RNA, 19 nt, Homo sapiens
  misc_RNA (1)...(19): siRNA sense strand
ggacgaguaccaggagcuu

SEQ ID NO: 1364431 - RNA, 19 nt, Homo sapiens
  misc_RNA (1)...(19): siRNA sense strand
agaccaagcgccgucauga

SEQ ID NO: 1364432 - RNA, 19 nt, Homo sapiens
  misc_RNA (1)...(19): siRNA sense strand
cagaucaagcgccagaaug

SEQ ID NO: 1364433 - RNA, 19 nt, Homo sapiens
  misc_RNA (1)...(19): siRNA sense strand
caagcuggcccuggacaug

SEQ ID NO: 1364434 - RNA, 19 nt, Homo sapiens
  misc_RNA (1)...(19): siRNA sense strand
ugaaggaggaacuggacuu

SEQ ID NO: 1364435 - RNA, 19 nt, Homo sapiens
  misc_RNA (1)...(19): siRNA sense strand
gagaccaagcgccgucaug

SEQ ID NO: 1364436 - RNA, 19 nt, Homo sapiens
  misc_RNA (1)...(19): siRNA sense strand
uggaggcucugcugaacuc

SEQ ID NO: 1364437 - RNA, 19 nt, Homo sapiens
  misc_RNA (1)...(19): siRNA sense strand
augaucccuugcugacuua

SEQ ID NO: 1364438 - RNA, 19 nt, Homo sapiens
  misc_RNA (1)...(19): siRNA sense strand
gggaagcagcgugaguuug

SEQ ID NO: 1364439 - RNA, 19 nt, Homo sapiens
  misc_RNA (1)...(19): siRNA sense strand
gcaacuucaggaugagaug

SEQ ID NO: 1364440 - RNA, 19 nt, Homo sapiens
  misc_RNA (1)...(19): siRNA sense strand
cgagguguccggcaucaag

SEQ ID NO: 1364441 - RNA, 19 nt, Homo sapiens
  misc_RNA (1)...(19): siRNA sense strand
uaggugaggccaagaagca

SEQ ID NO: 1364442 - RNA, 19 nt, Homo sapiens
  misc_RNA (1)...(19): siRNA sense strand
ggaguuuaaggagcugaaa

SEQ ID NO: 1364443 - RNA, 19 nt, Homo sapiens
  misc_RNA (1)...(19): siRNA sense strand
ccagaagaacaucuacagu

SEQ ID NO: 1364444 - RNA, 19 nt, Homo sapiens
  misc_RNA (1)...(19): siRNA sense strand
aagaagagguuuacuguuu

SEQ ID NO: 1364445 - RNA, 19 nt, Homo sapiens
  misc_RNA (1)...(19): siRNA sense strand
gggaagaagugaaugguuu

SEQ ID NO: 1364446 - RNA, 19 nt, Homo sapiens
  misc_RNA (1)...(19): siRNA sense strand
gaagauuccugccaagaga

SEQ ID NO: 1364447 - RNA, 19 nt, Homo sapiens
  misc_RNA (1)...(19): siRNA sense strand
gagcaggacuaaacgaauu

SEQ ID NO: 1364448 - RNA, 19 nt, Homo sapiens
  misc_RNA (1)...(19): siRNA sense strand
gaaacuggauggaaaauuu

SEQ ID NO: 1364449 - RNA, 19 nt, Homo sapiens
  misc_RNA (1)...(19): siRNA sense strand
gaagaaacaguuccauauu

SEQ ID NO: 1364450 - RNA, 19 nt, Homo sapiens
  misc_RNA (1)...(19): siRNA sense strand
gaaagcugcccaaguguaa

SEQ ID NO: 1364451 - RNA, 19 nt, Homo sapiens
  misc_RNA (1)...(19): siRNA sense strand
caggagauaugcagaguuu

SEQ ID NO: 1364452 - RNA, 19 nt, Homo sapiens
  misc_RNA (1)...(19): siRNA sense strand
gaagagguuuacuguuuau

SEQ ID NO: 1364453 - RNA, 19 nt, Homo sapiens
  misc_RNA (1)...(19): siRNA sense strand
agaagagguuuacuguuua

SEQ ID NO: 1364454 - RNA, 19 nt, Homo sapiens
  misc_RNA (1)...(19): siRNA sense strand
ggaggcagaugaugcauuc

SEQ ID NO: 1364455 - RNA, 19 nt, Homo sapiens
  misc_RNA (1)...(19): siRNA sense strand
ugaaauugcuagugcauug

SEQ ID NO: 1364456 - RNA, 19 nt, Homo sapiens
  misc_RNA (1)...(19): siRNA sense strand
caacugacuuugauuucuu

SEQ ID NO: 1364457 - RNA, 19 nt, Homo sapiens
  misc_RNA (1)...(19): siRNA sense strand
gaagauuccaccaccauuu

SEQ ID NO: 1364458 - RNA, 19 nt, Homo sapiens
  misc_RNA (1)...(19): siRNA sense strand
gcugaaauguaugacaaua

SEQ ID NO: 1364459 - RNA, 19 nt, Homo sapiens
  misc_RNA (1)...(19): siRNA sense strand
ugacaccacuaccacauuu

SEQ ID NO: 1364460 - RNA, 19 nt, Homo sapiens
  misc_RNA (1)...(19): siRNA sense strand
gaugauaucagaaacuuug

SEQ ID NO: 1364461 - RNA, 19 nt, Homo sapiens
  misc_RNA (1)...(19): siRNA sense strand
ggagauaugcagaguuuga

SEQ ID NO: 1364462 - RNA, 19 nt, Homo sapiens
  misc_RNA (1)...(19): siRNA sense strand
ggaaagcugcccaagugua

SEQ ID NO: 1364463 - RNA, 19 nt, Homo sapiens
  misc_RNA (1)...(19): siRNA sense strand
aaggaaagcugcccaagug

SEQ ID NO: 1364464 - RNA, 19 nt, Homo sapiens
  misc_RNA (1)...(19): siRNA sense strand
gaacguaaugugcucuuga

SEQ ID NO: 1364465 - RNA, 19 nt, Homo sapiens
  misc_RNA (1)...(19): siRNA sense strand
gauaugcagaguuugauaa

SEQ ID NO: 1364466 - RNA, 19 nt, Homo sapiens
  misc_RNA (1)...(19): siRNA sense strand
aagaaacaguuccauauuc

SEQ ID NO: 1364467 - RNA, 19 nt, Homo sapiens
  misc_RNA (1)...(19): siRNA sense strand
ugacacagcauuuacagaa

SEQ ID NO: 1364468 - RNA, 19 nt, Homo sapiens
  misc_RNA (1)...(19): siRNA sense strand
gcauuggguuacuuacauu

SEQ ID NO: 1364469 - RNA, 19 nt, Homo sapiens
  misc_RNA (1)...(19): siRNA sense strand
gaccagaugauaucagaaa

SEQ ID NO: 1364470 - RNA, 19 nt, Homo sapiens
  misc_RNA (1)...(19): siRNA sense strand
guguguaucuucugacuau

SEQ ID NO: 1364471 - RNA, 19 nt, Homo sapiens
  misc_RNA (1)...(19): siRNA sense strand
ccaccaccauuuaauccua

SEQ ID NO: 1364472 - RNA, 19 nt, Homo sapiens
  misc_RNA (1)...(19): siRNA sense strand
cagaagaaacaguuccaua

SEQ ID NO: 1364473 - RNA, 19 nt, Homo sapiens
  misc_RNA (1)...(19): siRNA sense strand
gggcugaccuuguacaaaa

SEQ ID NO: 1364474 - RNA, 19 nt, Homo sapiens
  misc_RNA (1)...(19): siRNA sense strand
gacaauauccuucacaaac

SEQ ID NO: 1364475 - RNA, 19 nt, Homo sapiens
  misc_RNA (1)...(19): siRNA sense strand
gaugaugcauucguugguu

SEQ ID NO: 1364476 - RNA, 19 nt, Homo sapiens
  misc_RNA (1)...(19): siRNA sense strand
cagaugauaucagaaacuu

SEQ ID NO: 1364477 - RNA, 19 nt, Homo sapiens
  misc_RNA (1)...(19): siRNA sense strand
aagaaggaauugcuauuuc

SEQ ID NO: 1364478 - RNA, 19 nt, Homo sapiens
  misc_RNA (1)...(19): siRNA sense strand
uauagugaaugccagugua

SEQ ID NO: 1364479 - RNA, 19 nt, Homo sapiens
  misc_RNA (1)...(19): siRNA sense strand
acacagcauuuacagaaga

SEQ ID NO: 1364480 - RNA, 19 nt, Homo sapiens
  misc_RNA (1)...(19): siRNA sense strand
gccgagauguugcugaaau

SEQ ID NO: 1364481 - RNA, 19 nt, Homo sapiens
  misc_RNA (1)...(19): siRNA sense strand
uuagguauccagaacuuua

SEQ ID NO: 1364482 - RNA, 19 nt, Homo sapiens
  misc_RNA (1)...(19): siRNA sense strand
agaagaaacaguuccauau

SEQ ID NO: 1364483 - RNA, 19 nt, Homo sapiens
  misc_RNA (1)...(19): siRNA sense strand
ggaagaagugaaugguuug

SEQ ID NO: 1364484 - RNA, 19 nt, Homo sapiens
  misc_RNA (1)...(19): siRNA sense strand
guaaagaaggaauugcuau

SEQ ID NO: 1364485 - RNA, 19 nt, Homo sapiens
  misc_RNA (1)...(19): siRNA sense strand
gagaucacaccauggacua

SEQ ID NO: 1364486 - RNA, 19 nt, Homo sapiens
  misc_RNA (1)...(19): siRNA sense strand
gagauguugcugaaaugua

SEQ ID NO: 1364487 - RNA, 19 nt, Homo sapiens
  misc_RNA (1)...(19): siRNA sense strand
caaagacgagcaggacuaa

SEQ ID NO: 1364488 - RNA, 19 nt, Homo sapiens
  misc_RNA (1)...(19): siRNA sense strand
agauguugcugaaauguau

SEQ ID NO: 1364489 - RNA, 19 nt, Homo sapiens
  misc_RNA (1)...(19): siRNA sense strand
cauuauuccuuccaaacaa

SEQ ID NO: 1364490 - RNA, 19 nt, Homo sapiens
  misc_RNA (1)...(19): siRNA sense strand
gcacagagcuagguuuuac

SEQ ID NO: 1364491 - RNA, 19 nt, Homo sapiens
  misc_RNA (1)...(19): siRNA sense strand
ccaaacaacugaaaagcuu

SEQ ID NO: 1364492 - RNA, 19 nt, Homo sapiens
  misc_RNA (1)...(19): siRNA sense strand
uggaagaacuccuagaaaa

SEQ ID NO: 1364493 - RNA, 19 nt, Homo sapiens
  misc_RNA (1)...(19): siRNA sense strand
cagcuccgaugaacacaga

SEQ ID NO: 1364494 - RNA, 19 nt, Homo sapiens
  misc_RNA (1)...(19): siRNA sense strand
aagauuccaccaccauuua

SEQ ID NO: 1364495 - RNA, 19 nt, Homo sapiens
  misc_RNA (1)...(19): siRNA sense strand
gcuauggcccugaagauuc

SEQ ID NO: 1364496 - RNA, 19 nt, Homo sapiens
  misc_RNA (1)...(19): siRNA sense strand
uggaaauccucaugccaaa

SEQ ID NO: 1364497 - RNA, 19 nt, Homo sapiens
  misc_RNA (1)...(19): siRNA sense strand
ucagagcauuccuucaaau

SEQ ID NO: 1364498 - RNA, 19 nt, Homo sapiens
  misc_RNA (1)...(19): siRNA sense strand
gucagagcauuccuucaaa

SEQ ID NO: 1364499 - RNA, 19 nt, Homo sapiens
  misc_RNA (1)...(19): siRNA sense strand
aaagagaucacaccaugga

SEQ ID NO: 1364500 - RNA, 19 nt, Homo sapiens
  misc_RNA (1)...(19): siRNA sense strand
aaacuuugacacagcauuu

SEQ ID NO: 1364501 - RNA, 19 nt, Homo sapiens
  misc_RNA (1)...(19): siRNA sense strand
gaagaugaggaugaaagaa

SEQ ID NO: 1364502 - RNA, 19 nt, Homo sapiens
  misc_RNA (1)...(19): siRNA sense strand
aacggaaacuggauggaaa

SEQ ID NO: 1364503 - RNA, 19 nt, Homo sapiens
  misc_RNA (1)...(19): siRNA sense strand
ggcagaugaugcauucguu

SEQ ID NO: 1364504 - RNA, 19 nt, Homo sapiens
  misc_RNA (1)...(19): siRNA sense strand
caccaccauuuaauccuaa

SEQ ID NO: 1364505 - RNA, 19 nt, Homo sapiens
  misc_RNA (1)...(19): siRNA sense strand
uaucagaaacuuugacaca

SEQ ID NO: 1364506 - RNA, 19 nt, Homo sapiens
  misc_RNA (1)...(19): siRNA sense strand
auaaaguucugguuucagu

SEQ ID NO: 1364507 - RNA, 19 nt, Homo sapiens
  misc_RNA (1)...(19): siRNA sense strand
ugucaaaguguuacagaaa

SEQ ID NO: 1364508 - RNA, 19 nt, Homo sapiens
  misc_RNA (1)...(19): siRNA sense strand
acaaagacgagcaggacua

SEQ ID NO: 1364509 - RNA, 19 nt, Homo sapiens
  misc_RNA (1)...(19): siRNA sense strand
agaagugaaugguuugucu

SEQ ID NO: 1364510 - RNA, 19 nt, Homo sapiens
  misc_RNA (1)...(19): siRNA sense strand
gaaggaauugcuauuucug

SEQ ID NO: 1364511 - RNA, 19 nt, Homo sapiens
  misc_RNA (1)...(19): siRNA sense strand
gcauuauuccuuccaaaca

SEQ ID NO: 1364512 - RNA, 19 nt, Homo sapiens
  misc_RNA (1)...(19): siRNA sense strand
gaagugaaugguuugucuu

SEQ ID NO: 1364513 - RNA, 19 nt, Homo sapiens
  misc_RNA (1)...(19): siRNA sense strand
ugucagagcauuccuucaa

SEQ ID NO: 1364514 - RNA, 19 nt, Homo sapiens
  misc_RNA (1)...(19): siRNA sense strand
ccaacugacuuugauuucu

SEQ ID NO: 1364515 - RNA, 19 nt, Homo sapiens
  misc_RNA (1)...(19): siRNA sense strand
uugguuggauugcauuauu

SEQ ID NO: 1364516 - RNA, 19 nt, Homo sapiens
  misc_RNA (1)...(19): siRNA sense strand
uuaugcaccuccuucagaa

SEQ ID NO: 1364517 - RNA, 19 nt, Homo sapiens
  misc_RNA (1)...(19): siRNA sense strand
gaaacuuugacacagcauu

SEQ ID NO: 1364518 - RNA, 19 nt, Homo sapiens
  misc_RNA (1)...(19): siRNA sense strand
caccauggacuacaaggaa

SEQ ID NO: 1364519 - RNA, 19 nt, Homo sapiens
  misc_RNA (1)...(19): siRNA sense strand
gguauccagaacuuuauaa

SEQ ID NO: 1364520 - RNA, 19 nt, Homo sapiens
  misc_RNA (1)...(19): siRNA sense strand
gacacagcauuuacagaag

SEQ ID NO: 1364521 - RNA, 19 nt, Homo sapiens
  misc_RNA (1)...(19): siRNA sense strand
uggaccagaugauaucaga

SEQ ID NO: 1364522 - RNA, 19 nt, Homo sapiens
  misc_RNA (1)...(19): siRNA sense strand
caaggaaagcugcccaagu

SEQ ID NO: 1364523 - RNA, 19 nt, Homo sapiens
  misc_RNA (1)...(19): siRNA sense strand
uugcugaaauguaugacaa

SEQ ID NO: 1364524 - RNA, 19 nt, Homo sapiens
  misc_RNA (1)...(19): siRNA sense strand
gaaacaguuccauauucug

SEQ ID NO: 1364525 - RNA, 19 nt, Homo sapiens
  misc_RNA (1)...(19): siRNA sense strand
gauaucagaaacuuugaca

SEQ ID NO: 1364526 - RNA, 19 nt, Homo sapiens
  misc_RNA (1)...(19): siRNA sense strand
ugacaauauccuucacaaa

SEQ ID NO: 1364527 - RNA, 19 nt, Homo sapiens
  misc_RNA (1)...(19): siRNA sense strand
cuaguuagguauccagaac

SEQ ID NO: 1364528 - RNA, 19 nt, Homo sapiens
  misc_RNA (1)...(19): siRNA sense strand
ccgagauguugcugaaaug

SEQ ID NO: 1364529 - RNA, 19 nt, Homo sapiens
  misc_RNA (1)...(19): siRNA sense strand
ggaauugcuauuucugaca

SEQ ID NO: 1364530 - RNA, 19 nt, Homo sapiens
  misc_RNA (1)...(19): siRNA sense strand
guuuuacgcugcugaaauu

SEQ ID NO: 1364531 - RNA, 19 nt, Homo sapiens
  misc_RNA (1)...(19): siRNA sense strand
aaacggaaacuggauggaa

SEQ ID NO: 1364532 - RNA, 19 nt, Homo sapiens
  misc_RNA (1)...(19): siRNA sense strand
ugaagaugaggaugaaaga

SEQ ID NO: 1364533 - RNA, 19 nt, Homo sapiens
  misc_RNA (1)...(19): siRNA sense strand
aacguaaugugcucuugaa

SEQ ID NO: 1364534 - RNA, 19 nt, Homo sapiens
  misc_RNA (1)...(19): siRNA sense strand
agaugaggaugaaagaagu

SEQ ID NO: 1364535 - RNA, 19 nt, Homo sapiens
  misc_RNA (1)...(19): siRNA sense strand
cacagcauuuacagaagaa

SEQ ID NO: 1364536 - RNA, 19 nt, Homo sapiens
  misc_RNA (1)...(19): siRNA sense strand
aauaguauacagagacuug

SEQ ID NO: 1364537 - RNA, 19 nt, Homo sapiens
  misc_RNA (1)...(19): siRNA sense strand
ucucagaagcuacacucua

SEQ ID NO: 1364538 - RNA, 19 nt, Homo sapiens
  misc_RNA (1)...(19): siRNA sense strand
gaagaagugaaugguuugu

SEQ ID NO: 1364539 - RNA, 19 nt, Homo sapiens
  misc_RNA (1)...(19): siRNA sense strand
caagagaauauuuggugau

SEQ ID NO: 1364540 - RNA, 19 nt, Homo sapiens
  misc_RNA (1)...(19): siRNA sense strand
cgaugaacacagagagaaa

SEQ ID NO: 1364541 - RNA, 19 nt, Homo sapiens
  misc_RNA (1)...(19): siRNA sense strand
ugccaaaccaacugacuuu

SEQ ID NO: 1364542 - RNA, 19 nt, Homo sapiens
  misc_RNA (1)...(19): siRNA sense strand
uaacagauuuugggcuuug

SEQ ID NO: 1364543 - RNA, 19 nt, Homo sapiens
  misc_RNA (1)...(19): siRNA sense strand
ggauucaguaggacauguu

SEQ ID NO: 1364544 - RNA, 19 nt, Homo sapiens
  misc_RNA (1)...(19): siRNA sense strand
aagaagagguuuacuguuu

SEQ ID NO: 1364545 - RNA, 19 nt, Homo sapiens
  misc_RNA (1)...(19): siRNA sense strand
gggaagaagugaaugguuu

SEQ ID NO: 1364546 - RNA, 19 nt, Homo sapiens
  misc_RNA (1)...(19): siRNA sense strand
gaagauuccugccaagaga

SEQ ID NO: 1364547 - RNA, 19 nt, Homo sapiens
  misc_RNA (1)...(19): siRNA sense strand
gagcaggacuaaacgaauu

SEQ ID NO: 1364548 - RNA, 19 nt, Homo sapiens
  misc_RNA (1)...(19): siRNA sense strand
gaaacuggauggaaaauuu

SEQ ID NO: 1364549 - RNA, 19 nt, Homo sapiens
  misc_RNA (1)...(19): siRNA sense strand
gaagaaacaguuccauauu

SEQ ID NO: 1364550 - RNA, 19 nt, Homo sapiens
  misc_RNA (1)...(19): siRNA sense strand
gaaagcugcccaaguguaa

SEQ ID NO: 1364551 - RNA, 19 nt, Homo sapiens
  misc_RNA (1)...(19): siRNA sense strand
caggagauaugcagaguuu

SEQ ID NO: 1364552 - RNA, 19 nt, Homo sapiens
  misc_RNA (1)...(19): siRNA sense strand
gaagagguuuacuguuuau

SEQ ID NO: 1364553 - RNA, 19 nt, Homo sapiens
  misc_RNA (1)...(19): siRNA sense strand
agaagagguuuacuguuua

SEQ ID NO: 1364554 - RNA, 19 nt, Homo sapiens
  misc_RNA (1)...(19): siRNA sense strand
ggaggcagaugaugcauuc

SEQ ID NO: 1364555 - RNA, 19 nt, Homo sapiens
  misc_RNA (1)...(19): siRNA sense strand
ugaaauugcuagugcauug

SEQ ID NO: 1364556 - RNA, 19 nt, Homo sapiens
  misc_RNA (1)...(19): siRNA sense strand
caacugacuuugauuucuu

SEQ ID NO: 1364557 - RNA, 19 nt, Homo sapiens
  misc_RNA (1)...(19): siRNA sense strand
gaagauuccaccaccauuu

SEQ ID NO: 1364558 - RNA, 19 nt, Homo sapiens
  misc_RNA (1)...(19): siRNA sense strand
gcugaaauguaugacaaua

SEQ ID NO: 1364559 - RNA, 19 nt, Homo sapiens
  misc_RNA (1)...(19): siRNA sense strand
ugacaccacuaccacauuu

SEQ ID NO: 1364560 - RNA, 19 nt, Homo sapiens
  misc_RNA (1)...(19): siRNA sense strand
gaugauaucagaaacuuug

SEQ ID NO: 1364561 - RNA, 19 nt, Homo sapiens
  misc_RNA (1)...(19): siRNA sense strand
ggagauaugcagaguuuga

SEQ ID NO: 1364562 - RNA, 19 nt, Homo sapiens
  misc_RNA (1)...(19): siRNA sense strand
ggaaagcugcccaagugua

SEQ ID NO: 1364563 - RNA, 19 nt, Homo sapiens
  misc_RNA (1)...(19): siRNA sense strand
aaggaaagcugcccaagug

SEQ ID NO: 1364564 - RNA, 19 nt, Homo sapiens
  misc_RNA (1)...(19): siRNA sense strand
gaacguaaugugcucuuga

SEQ ID NO: 1364565 - RNA, 19 nt, Homo sapiens
  misc_RNA (1)...(19): siRNA sense strand
gauaugcagaguuugauaa

SEQ ID NO: 1364566 - RNA, 19 nt, Homo sapiens
  misc_RNA (1)...(19): siRNA sense strand
aagaaacaguuccauauuc

SEQ ID NO: 1364567 - RNA, 19 nt, Homo sapiens
  misc_RNA (1)...(19): siRNA sense strand
ugacacagcauuuacagaa

SEQ ID NO: 1364568 - RNA, 19 nt, Homo sapiens
  misc_RNA (1)...(19): siRNA sense strand
gcauuggguuacuuacauu

SEQ ID NO: 1364569 - RNA, 19 nt, Homo sapiens
  misc_RNA (1)...(19): siRNA sense strand
gaccagaugauaucagaaa

SEQ ID NO: 1364570 - RNA, 19 nt, Homo sapiens
  misc_RNA (1)...(19): siRNA sense strand
guguguaucuucugacuau

SEQ ID NO: 1364571 - RNA, 19 nt, Homo sapiens
  misc_RNA (1)...(19): siRNA sense strand
ccaccaccauuuaauccua

SEQ ID NO: 1364572 - RNA, 19 nt, Homo sapiens
  misc_RNA (1)...(19): siRNA sense strand
cagaagaaacaguuccaua

SEQ ID NO: 1364573 - RNA, 19 nt, Homo sapiens
  misc_RNA (1)...(19): siRNA sense strand
gggcugaccuuguacaaaa

SEQ ID NO: 1364574 - RNA, 19 nt, Homo sapiens
  misc_RNA (1)...(19): siRNA sense strand
gacaauauccuucacaaac

SEQ ID NO: 1364575 - RNA, 19 nt, Homo sapiens
  misc_RNA (1)...(19): siRNA sense strand
gaugaugcauucguugguu

SEQ ID NO: 1364576 - RNA, 19 nt, Homo sapiens
  misc_RNA (1)...(19): siRNA sense strand
cagaugauaucagaaacuu

SEQ ID NO: 1364577 - RNA, 19 nt, Homo sapiens
  misc_RNA (1)...(19): siRNA sense strand
aagaaggaauugcuauuuc

SEQ ID NO: 1364578 - RNA, 19 nt, Homo sapiens
  misc_RNA (1)...(19): siRNA sense strand
uauagugaaugccagugua

SEQ ID NO: 1364579 - RNA, 19 nt, Homo sapiens
  misc_RNA (1)...(19): siRNA sense strand
acacagcauuuacagaaga

SEQ ID NO: 1364580 - RNA, 19 nt, Homo sapiens
  misc_RNA (1)...(19): siRNA sense strand
gccgagauguugcugaaau

SEQ ID NO: 1364581 - RNA, 19 nt, Homo sapiens
  misc_RNA (1)...(19): siRNA sense strand
uuagguauccagaacuuua

SEQ ID NO: 1364582 - RNA, 19 nt, Homo sapiens
  misc_RNA (1)...(19): siRNA sense strand
agaagaaacaguuccauau

SEQ ID NO: 1364583 - RNA, 19 nt, Homo sapiens
  misc_RNA (1)...(19): siRNA sense strand
ggaagaagugaaugguuug

SEQ ID NO: 1364584 - RNA, 19 nt, Homo sapiens
  misc_RNA (1)...(19): siRNA sense strand
guaaagaaggaauugcuau

SEQ ID NO: 1364585 - RNA, 19 nt, Homo sapiens
  misc_RNA (1)...(19): siRNA sense strand
gagaucacaccauggacua

SEQ ID NO: 1364586 - RNA, 19 nt, Homo sapiens
  misc_RNA (1)...(19): siRNA sense strand
gagauguugcugaaaugua

SEQ ID NO: 1364587 - RNA, 19 nt, Homo sapiens
  misc_RNA (1)...(19): siRNA sense strand
caaagacgagcaggacuaa

SEQ ID NO: 1364588 - RNA, 19 nt, Homo sapiens
  misc_RNA (1)...(19): siRNA sense strand
agauguugcugaaauguau

SEQ ID NO: 1364589 - RNA, 19 nt, Homo sapiens
  misc_RNA (1)...(19): siRNA sense strand
cauuauuccuuccaaacaa

SEQ ID NO: 1364590 - RNA, 19 nt, Homo sapiens
  misc_RNA (1)...(19): siRNA sense strand
gcacagagcuagguuuuac

SEQ ID NO: 1364591 - RNA, 19 nt, Homo sapiens
  misc_RNA (1)...(19): siRNA sense strand
ccaaacaacugaaaagcuu

SEQ ID NO: 1364592 - RNA, 19 nt, Homo sapiens
  misc_RNA (1)...(19): siRNA sense strand
uggaagaacuccuagaaaa

SEQ ID NO: 1364593 - RNA, 19 nt, Homo sapiens
  misc_RNA (1)...(19): siRNA sense strand
cagcuccgaugaacacaga

SEQ ID NO: 1364594 - RNA, 19 nt, Homo sapiens
  misc_RNA (1)...(19): siRNA sense strand
aagauuccaccaccauuua

SEQ ID NO: 1364595 - RNA, 19 nt, Homo sapiens
  misc_RNA (1)...(19): siRNA sense strand
gcuauggcccugaagauuc

SEQ ID NO: 1364596 - RNA, 19 nt, Homo sapiens
  misc_RNA (1)...(19): siRNA sense strand
uggaaauccucaugccaaa

SEQ ID NO: 1364597 - RNA, 19 nt, Homo sapiens
  misc_RNA (1)...(19): siRNA sense strand
ucagagcauuccuucaaau

SEQ ID NO: 1364598 - RNA, 19 nt, Homo sapiens
  misc_RNA (1)...(19): siRNA sense strand
gucagagcauuccuucaaa

SEQ ID NO: 1364599 - RNA, 19 nt, Homo sapiens
  misc_RNA (1)...(19): siRNA sense strand
aaagagaucacaccaugga

SEQ ID NO: 1364600 - RNA, 19 nt, Homo sapiens
  misc_RNA (1)...(19): siRNA sense strand
aaacuuugacacagcauuu

SEQ ID NO: 1364601 - RNA, 19 nt, Homo sapiens
  misc_RNA (1)...(19): siRNA sense strand
gaagaugaggaugaaagaa

SEQ ID NO: 1364602 - RNA, 19 nt, Homo sapiens
  misc_RNA (1)...(19): siRNA sense strand
aacggaaacuggauggaaa

SEQ ID NO: 1364603 - RNA, 19 nt, Homo sapiens
  misc_RNA (1)...(19): siRNA sense strand
ggcagaugaugcauucguu

SEQ ID NO: 1364604 - RNA, 19 nt, Homo sapiens
  misc_RNA (1)...(19): siRNA sense strand
caccaccauuuaauccuaa

SEQ ID NO: 1364605 - RNA, 19 nt, Homo sapiens
  misc_RNA (1)...(19): siRNA sense strand
uaucagaaacuuugacaca

SEQ ID NO: 1364606 - RNA, 19 nt, Homo sapiens
  misc_RNA (1)...(19): siRNA sense strand
auaaaguucugguuucagu

SEQ ID NO: 1364607 - RNA, 19 nt, Homo sapiens
  misc_RNA (1)...(19): siRNA sense strand
ugucaaaguguuacagaaa

SEQ ID NO: 1364608 - RNA, 19 nt, Homo sapiens
  misc_RNA (1)...(19): siRNA sense strand
acaaagacgagcaggacua

SEQ ID NO: 1364609 - RNA, 19 nt, Homo sapiens
  misc_RNA (1)...(19): siRNA sense strand
agaagugaaugguuugucu

SEQ ID NO: 1364610 - RNA, 19 nt, Homo sapiens
  misc_RNA (1)...(19): siRNA sense strand
gaaggaauugcuauuucug

SEQ ID NO: 1364611 - RNA, 19 nt, Homo sapiens
  misc_RNA (1)...(19): siRNA sense strand
gcauuauuccuuccaaaca

SEQ ID NO: 1364612 - RNA, 19 nt, Homo sapiens
  misc_RNA (1)...(19): siRNA sense strand
gaagugaaugguuugucuu

SEQ ID NO: 1364613 - RNA, 19 nt, Homo sapiens
  misc_RNA (1)...(19): siRNA sense strand
ugucagagcauuccuucaa

SEQ ID NO: 1364614 - RNA, 19 nt, Homo sapiens
  misc_RNA (1)...(19): siRNA sense strand
ccaacugacuuugauuucu

SEQ ID NO: 1364615 - RNA, 19 nt, Homo sapiens
  misc_RNA (1)...(19): siRNA sense strand
uugguuggauugcauuauu

SEQ ID NO: 1364616 - RNA, 19 nt, Homo sapiens
  misc_RNA (1)...(19): siRNA sense strand
uuaugcaccuccuucagaa

SEQ ID NO: 1364617 - RNA, 19 nt, Homo sapiens
  misc_RNA (1)...(19): siRNA sense strand
gaaacuuugacacagcauu

SEQ ID NO: 1364618 - RNA, 19 nt, Homo sapiens
  misc_RNA (1)...(19): siRNA sense strand
caccauggacuacaaggaa

SEQ ID NO: 1364619 - RNA, 19 nt, Homo sapiens
  misc_RNA (1)...(19): siRNA sense strand
gguauccagaacuuuauaa

SEQ ID NO: 1364620 - RNA, 19 nt, Homo sapiens
  misc_RNA (1)...(19): siRNA sense strand
gacacagcauuuacagaag

SEQ ID NO: 1364621 - RNA, 19 nt, Homo sapiens
  misc_RNA (1)...(19): siRNA sense strand
uggaccagaugauaucaga

SEQ ID NO: 1364622 - RNA, 19 nt, Homo sapiens
  misc_RNA (1)...(19): siRNA sense strand
caaggaaagcugcccaagu

SEQ ID NO: 1364623 - RNA, 19 nt, Homo sapiens
  misc_RNA (1)...(19): siRNA sense strand
uugcugaaauguaugacaa

SEQ ID NO: 1364624 - RNA, 19 nt, Homo sapiens
  misc_RNA (1)...(19): siRNA sense strand
gaaacaguuccauauucug

SEQ ID NO: 1364625 - RNA, 19 nt, Homo sapiens
  misc_RNA (1)...(19): siRNA sense strand
gauaucagaaacuuugaca

SEQ ID NO: 1364626 - RNA, 19 nt, Homo sapiens
  misc_RNA (1)...(19): siRNA sense strand
ugacaauauccuucacaaa

SEQ ID NO: 1364627 - RNA, 19 nt, Homo sapiens
  misc_RNA (1)...(19): siRNA sense strand
cuaguuagguauccagaac

SEQ ID NO: 1364628 - RNA, 19 nt, Homo sapiens
  misc_RNA (1)...(19): siRNA sense strand
ccgagauguugcugaaaug

SEQ ID NO: 1364629 - RNA, 19 nt, Homo sapiens
  misc_RNA (1)...(19): siRNA sense strand
ggaauugcuauuucugaca

SEQ ID NO: 1364630 - RNA, 19 nt, Homo sapiens
  misc_RNA (1)...(19): siRNA sense strand
guuuuacgcugcugaaauu

SEQ ID NO: 1364631 - RNA, 19 nt, Homo sapiens
  misc_RNA (1)...(19): siRNA sense strand
aaacggaaacuggauggaa

SEQ ID NO: 1364632 - RNA, 19 nt, Homo sapiens
  misc_RNA (1)...(19): siRNA sense strand
ugaagaugaggaugaaaga

SEQ ID NO: 1364633 - RNA, 19 nt, Homo sapiens
  misc_RNA (1)...(19): siRNA sense strand
aacguaaugugcucuugaa

SEQ ID NO: 1364634 - RNA, 19 nt, Homo sapiens
  misc_RNA (1)...(19): siRNA sense strand
agaugaggaugaaagaagu

SEQ ID NO: 1364635 - RNA, 19 nt, Homo sapiens
  misc_RNA (1)...(19): siRNA sense strand
cacagcauuuacagaagaa

SEQ ID NO: 1364636 - RNA, 19 nt, Homo sapiens
  misc_RNA (1)...(19): siRNA sense strand
aauaguauacagagacuug

SEQ ID NO: 1364637 - RNA, 19 nt, Homo sapiens
  misc_RNA (1)...(19): siRNA sense strand
ucucagaagcuacacucua

SEQ ID NO: 1364638 - RNA, 19 nt, Homo sapiens
  misc_RNA (1)...(19): siRNA sense strand
gaagaagugaaugguuugu

SEQ ID NO: 1364639 - RNA, 19 nt, Homo sapiens
  misc_RNA (1)...(19): siRNA sense strand
caagagaauauuuggugau

SEQ ID NO: 1364640 - RNA, 19 nt, Homo sapiens
  misc_RNA (1)...(19): siRNA sense strand
cgaugaacacagagagaaa

SEQ ID NO: 1364641 - RNA, 19 nt, Homo sapiens
  misc_RNA (1)...(19): siRNA sense strand
ugccaaaccaacugacuuu

SEQ ID NO: 1364642 - RNA, 19 nt, Homo sapiens
  misc_RNA (1)...(19): siRNA sense strand
uaacagauuuugggcuuug

SEQ ID NO: 1364643 - RNA, 19 nt, Homo sapiens
  misc_RNA (1)...(19): siRNA sense strand
ggauucaguaggacauguu

SEQ ID NO: 1364644 - RNA, 19 nt, Homo sapiens
  misc_RNA (1)...(19): siRNA sense strand
aagaagagguuuacuguuu

SEQ ID NO: 1364645 - RNA, 19 nt, Homo sapiens
  misc_RNA (1)...(19): siRNA sense strand
gggaagaagugaaugguuu

SEQ ID NO: 1364646 - RNA, 19 nt, Homo sapiens
  misc_RNA (1)...(19): siRNA sense strand
gaagauuccugccaagaga

SEQ ID NO: 1364647 - RNA, 19 nt, Homo sapiens
  misc_RNA (1)...(19): siRNA sense strand
gagcaggacuaaacgaauu

SEQ ID NO: 1364648 - RNA, 19 nt, Homo sapiens
  misc_RNA (1)...(19): siRNA sense strand
gaaacuggauggaaaauuu

SEQ ID NO: 1364649 - RNA, 19 nt, Homo sapiens
  misc_RNA (1)...(19): siRNA sense strand
gaagaaacaguuccauauu

SEQ ID NO: 1364650 - RNA, 19 nt, Homo sapiens
  misc_RNA (1)...(19): siRNA sense strand
gaaagcugcccaaguguaa

SEQ ID NO: 1364651 - RNA, 19 nt, Homo sapiens
  misc_RNA (1)...(19): siRNA sense strand
caggagauaugcagaguuu

SEQ ID NO: 1364652 - RNA, 19 nt, Homo sapiens
  misc_RNA (1)...(19): siRNA sense strand
gaagagguuuacuguuuau

SEQ ID NO: 1364653 - RNA, 19 nt, Homo sapiens
  misc_RNA (1)...(19): siRNA sense strand
agaagagguuuacuguuua

SEQ ID NO: 1364654 - RNA, 19 nt, Homo sapiens
  misc_RNA (1)...(19): siRNA sense strand
ggaggcagaugaugcauuc

SEQ ID NO: 1364655 - RNA, 19 nt, Homo sapiens
  misc_RNA (1)...(19): siRNA sense strand
ugaaauugcuagugcauug

SEQ ID NO: 1364656 - RNA, 19 nt, Homo sapiens
  misc_RNA (1)...(19): siRNA sense strand
caacugacuuugauuucuu

SEQ ID NO: 1364657 - RNA, 19 nt, Homo sapiens
  misc_RNA (1)...(19): siRNA sense strand
gaagauuccaccaccauuu

SEQ ID NO: 1364658 - RNA, 19 nt, Homo sapiens
  misc_RNA (1)...(19): siRNA sense strand
gcugaaauguaugacaaua

SEQ ID NO: 1364659 - RNA, 19 nt, Homo sapiens
  misc_RNA (1)...(19): siRNA sense strand
ugacaccacuaccacauuu

SEQ ID NO: 1364660 - RNA, 19 nt, Homo sapiens
  misc_RNA (1)...(19): siRNA sense strand
gaugauaucagaaacuuug

SEQ ID NO: 1364661 - RNA, 19 nt, Homo sapiens
  misc_RNA (1)...(19): siRNA sense strand
ggagauaugcagaguuuga

SEQ ID NO: 1364662 - RNA, 19 nt, Homo sapiens
  misc_RNA (1)...(19): siRNA sense strand
ggaaagcugcccaagugua

SEQ ID NO: 1364663 - RNA, 19 nt, Homo sapiens
  misc_RNA (1)...(19): siRNA sense strand
aaggaaagcugcccaagug

SEQ ID NO: 1364664 - RNA, 19 nt, Homo sapiens
  misc_RNA (1)...(19): siRNA sense strand
gaacguaaugugcucuuga

SEQ ID NO: 1364665 - RNA, 19 nt, Homo sapiens
  misc_RNA (1)...(19): siRNA sense strand
gauaugcagaguuugauaa

SEQ ID NO: 1364666 - RNA, 19 nt, Homo sapiens
  misc_RNA (1)...(19): siRNA sense strand
aagaaacaguuccauauuc

SEQ ID NO: 1364667 - RNA, 19 nt, Homo sapiens
  misc_RNA (1)...(19): siRNA sense strand
ugacacagcauuuacagaa

SEQ ID NO: 1364668 - RNA, 19 nt, Homo sapiens
  misc_RNA (1)...(19): siRNA sense strand
gcauuggguuacuuacauu

SEQ ID NO: 1364669 - RNA, 19 nt, Homo sapiens
  misc_RNA (1)...(19): siRNA sense strand
gaccagaugauaucagaaa

SEQ ID NO: 1364670 - RNA, 19 nt, Homo sapiens
  misc_RNA (1)...(19): siRNA sense strand
guguguaucuucugacuau

SEQ ID NO: 1364671 - RNA, 19 nt, Homo sapiens
  misc_RNA (1)...(19): siRNA sense strand
ccaccaccauuuaauccua

SEQ ID NO: 1364672 - RNA, 19 nt, Homo sapiens
  misc_RNA (1)...(19): siRNA sense strand
cagaagaaacaguuccaua

SEQ ID NO: 1364673 - RNA, 19 nt, Homo sapiens
  misc_RNA (1)...(19): siRNA sense strand
gggcugaccuuguacaaaa

SEQ ID NO: 1364674 - RNA, 19 nt, Homo sapiens
  misc_RNA (1)...(19): siRNA sense strand
gacaauauccuucacaaac

SEQ ID NO: 1364675 - RNA, 19 nt, Homo sapiens
  misc_RNA (1)...(19): siRNA sense strand
gaugaugcauucguugguu

SEQ ID NO: 1364676 - RNA, 19 nt, Homo sapiens
  misc_RNA (1)...(19): siRNA sense strand
cagaugauaucagaaacuu

SEQ ID NO: 1364677 - RNA, 19 nt, Homo sapiens
  misc_RNA (1)...(19): siRNA sense strand
aagaaggaauugcuauuuc

SEQ ID NO: 1364678 - RNA, 19 nt, Homo sapiens
  misc_RNA (1)...(19): siRNA sense strand
uauagugaaugccagugua

SEQ ID NO: 1364679 - RNA, 19 nt, Homo sapiens
  misc_RNA (1)...(19): siRNA sense strand
acacagcauuuacagaaga

SEQ ID NO: 1364680 - RNA, 19 nt, Homo sapiens
  misc_RNA (1)...(19): siRNA sense strand
gccgagauguugcugaaau

SEQ ID NO: 1364681 - RNA, 19 nt, Homo sapiens
  misc_RNA (1)...(19): siRNA sense strand
uuagguauccagaacuuua

SEQ ID NO: 1364682 - RNA, 19 nt, Homo sapiens
  misc_RNA (1)...(19): siRNA sense strand
agaagaaacaguuccauau

SEQ ID NO: 1364683 - RNA, 19 nt, Homo sapiens
  misc_RNA (1)...(19): siRNA sense strand
ggaagaagugaaugguuug

SEQ ID NO: 1364684 - RNA, 19 nt, Homo sapiens
  misc_RNA (1)...(19): siRNA sense strand
guaaagaaggaauugcuau

SEQ ID NO: 1364685 - RNA, 19 nt, Homo sapiens
  misc_RNA (1)...(19): siRNA sense strand
gagaucacaccauggacua

SEQ ID NO: 1364686 - RNA, 19 nt, Homo sapiens
  misc_RNA (1)...(19): siRNA sense strand
gagauguugcugaaaugua

SEQ ID NO: 1364687 - RNA, 19 nt, Homo sapiens
  misc_RNA (1)...(19): siRNA sense strand
caaagacgagcaggacuaa

SEQ ID NO: 1364688 - RNA, 19 nt, Homo sapiens
  misc_RNA (1)...(19): siRNA sense strand
agauguugcugaaauguau

SEQ ID NO: 1364689 - RNA, 19 nt, Homo sapiens
  misc_RNA (1)...(19): siRNA sense strand
cauuauuccuuccaaacaa

SEQ ID NO: 1364690 - RNA, 19 nt, Homo sapiens
  misc_RNA (1)...(19): siRNA sense strand
gcacagagcuagguuuuac

SEQ ID NO: 1364691 - RNA, 19 nt, Homo sapiens
  misc_RNA (1)...(19): siRNA sense strand
ccaaacaacugaaaagcuu

SEQ ID NO: 1364692 - RNA, 19 nt, Homo sapiens
  misc_RNA (1)...(19): siRNA sense strand
uggaagaacuccuagaaaa

SEQ ID NO: 1364693 - RNA, 19 nt, Homo sapiens
  misc_RNA (1)...(19): siRNA sense strand
cagcuccgaugaacacaga

SEQ ID NO: 1364694 - RNA, 19 nt, Homo sapiens
  misc_RNA (1)...(19): siRNA sense strand
aagauuccaccaccauuua

SEQ ID NO: 1364695 - RNA, 19 nt, Homo sapiens
  misc_RNA (1)...(19): siRNA sense strand
gcuauggcccugaagauuc

SEQ ID NO: 1364696 - RNA, 19 nt, Homo sapiens
  misc_RNA (1)...(19): siRNA sense strand
uggaaauccucaugccaaa

SEQ ID NO: 1364697 - RNA, 19 nt, Homo sapiens
  misc_RNA (1)...(19): siRNA sense strand
ucagagcauuccuucaaau

SEQ ID NO: 1364698 - RNA, 19 nt, Homo sapiens
  misc_RNA (1)...(19): siRNA sense strand
gucagagcauuccuucaaa

SEQ ID NO: 1364699 - RNA, 19 nt, Homo sapiens
  misc_RNA (1)...(19): siRNA sense strand
aaagagaucacaccaugga

SEQ ID NO: 1364700 - RNA, 19 nt, Homo sapiens
  misc_RNA (1)...(19): siRNA sense strand
aaacuuugacacagcauuu

SEQ ID NO: 1364701 - RNA, 19 nt, Homo sapiens
  misc_RNA (1)...(19): siRNA sense strand
gaagaugaggaugaaagaa

SEQ ID NO: 1364702 - RNA, 19 nt, Homo sapiens
  misc_RNA (1)...(19): siRNA sense strand
aacggaaacuggauggaaa

SEQ ID NO: 1364703 - RNA, 19 nt, Homo sapiens
  misc_RNA (1)...(19): siRNA sense strand
ggcagaugaugcauucguu

SEQ ID NO: 1364704 - RNA, 19 nt, Homo sapiens
  misc_RNA (1)...(19): siRNA sense strand
caccaccauuuaauccuaa

SEQ ID NO: 1364705 - RNA, 19 nt, Homo sapiens
  misc_RNA (1)...(19): siRNA sense strand
uaucagaaacuuugacaca

SEQ ID NO: 1364706 - RNA, 19 nt, Homo sapiens
  misc_RNA (1)...(19): siRNA sense strand
auaaaguucugguuucagu

SEQ ID NO: 1364707 - RNA, 19 nt, Homo sapiens
  misc_RNA (1)...(19): siRNA sense strand
ugucaaaguguuacagaaa

SEQ ID NO: 1364708 - RNA, 19 nt, Homo sapiens
  misc_RNA (1)...(19): siRNA sense strand
acaaagacgagcaggacua

SEQ ID NO: 1364709 - RNA, 19 nt, Homo sapiens
  misc_RNA (1)...(19): siRNA sense strand
agaagugaaugguuugucu

SEQ ID NO: 1364710 - RNA, 19 nt, Homo sapiens
  misc_RNA (1)...(19): siRNA sense strand
gaaggaauugcuauuucug

SEQ ID NO: 1364711 - RNA, 19 nt, Homo sapiens
  misc_RNA (1)...(19): siRNA sense strand
gcauuauuccuuccaaaca

SEQ ID NO: 1364712 - RNA, 19 nt, Homo sapiens
  misc_RNA (1)...(19): siRNA sense strand
gaagugaaugguuugucuu

SEQ ID NO: 1364713 - RNA, 19 nt, Homo sapiens
  misc_RNA (1)...(19): siRNA sense strand
ugucagagcauuccuucaa

SEQ ID NO: 1364714 - RNA, 19 nt, Homo sapiens
  misc_RNA (1)...(19): siRNA sense strand
ccaacugacuuugauuucu

SEQ ID NO: 1364715 - RNA, 19 nt, Homo sapiens
  misc_RNA (1)...(19): siRNA sense strand
uugguuggauugcauuauu

SEQ ID NO: 1364716 - RNA, 19 nt, Homo sapiens
  misc_RNA (1)...(19): siRNA sense strand
uuaugcaccuccuucagaa

SEQ ID NO: 1364717 - RNA, 19 nt, Homo sapiens
  misc_RNA (1)...(19): siRNA sense strand
gaaacuuugacacagcauu

SEQ ID NO: 1364718 - RNA, 19 nt, Homo sapiens
  misc_RNA (1)...(19): siRNA sense strand
caccauggacuacaaggaa

SEQ ID NO: 1364719 - RNA, 19 nt, Homo sapiens
  misc_RNA (1)...(19): siRNA sense strand
gguauccagaacuuuauaa

SEQ ID NO: 1364720 - RNA, 19 nt, Homo sapiens
  misc_RNA (1)...(19): siRNA sense strand
gacacagcauuuacagaag

SEQ ID NO: 1364721 - RNA, 19 nt, Homo sapiens
  misc_RNA (1)...(19): siRNA sense strand
uggaccagaugauaucaga

SEQ ID NO: 1364722 - RNA, 19 nt, Homo sapiens
  misc_RNA (1)...(19): siRNA sense strand
caaggaaagcugcccaagu

SEQ ID NO: 1364723 - RNA, 19 nt, Homo sapiens
  misc_RNA (1)...(19): siRNA sense strand
uugcugaaauguaugacaa

SEQ ID NO: 1364724 - RNA, 19 nt, Homo sapiens
  misc_RNA (1)...(19): siRNA sense strand
gaaacaguuccauauucug

SEQ ID NO: 1364725 - RNA, 19 nt, Homo sapiens
  misc_RNA (1)...(19): siRNA sense strand
gauaucagaaacuuugaca

SEQ ID NO: 1364726 - RNA, 19 nt, Homo sapiens
  misc_RNA (1)...(19): siRNA sense strand
ugacaauauccuucacaaa

SEQ ID NO: 1364727 - RNA, 19 nt, Homo sapiens
  misc_RNA (1)...(19): siRNA sense strand
cuaguuagguauccagaac

SEQ ID NO: 1364728 - RNA, 19 nt, Homo sapiens
  misc_RNA (1)...(19): siRNA sense strand
ccgagauguugcugaaaug

SEQ ID NO: 1364729 - RNA, 19 nt, Homo sapiens
  misc_RNA (1)...(19): siRNA sense strand
ggaauugcuauuucugaca

SEQ ID NO: 1364730 - RNA, 19 nt, Homo sapiens
  misc_RNA (1)...(19): siRNA sense strand
guuuuacgcugcugaaauu

SEQ ID NO: 1364731 - RNA, 19 nt, Homo sapiens
  misc_RNA (1)...(19): siRNA sense strand
aaacggaaacuggauggaa

SEQ ID NO: 1364732 - RNA, 19 nt, Homo sapiens
  misc_RNA (1)...(19): siRNA sense strand
ugaagaugaggaugaaaga

SEQ ID NO: 1364733 - RNA, 19 nt, Homo sapiens
  misc_RNA (1)...(19): siRNA sense strand
aacguaaugugcucuugaa

SEQ ID NO: 1364734 - RNA, 19 nt, Homo sapiens
  misc_RNA (1)...(19): siRNA sense strand
agaugaggaugaaagaagu

SEQ ID NO: 1364735 - RNA, 19 nt, Homo sapiens
  misc_RNA (1)...(19): siRNA sense strand
cacagcauuuacagaagaa

SEQ ID NO: 1364736 - RNA, 19 nt, Homo sapiens
  misc_RNA (1)...(19): siRNA sense strand
aauaguauacagagacuug

SEQ ID NO: 1364737 - RNA, 19 nt, Homo sapiens
  misc_RNA (1)...(19): siRNA sense strand
ucucagaagcuacacucua

SEQ ID NO: 1364738 - RNA, 19 nt, Homo sapiens
  misc_RNA (1)...(19): siRNA sense strand
gaagaagugaaugguuugu

SEQ ID NO: 1364739 - RNA, 19 nt, Homo sapiens
  misc_RNA (1)...(19): siRNA sense strand
caagagaauauuuggugau

SEQ ID NO: 1364740 - RNA, 19 nt, Homo sapiens
  misc_RNA (1)...(19): siRNA sense strand
cgaugaacacagagagaaa

SEQ ID NO: 1364741 - RNA, 19 nt, Homo sapiens
  misc_RNA (1)...(19): siRNA sense strand
ugccaaaccaacugacuuu

SEQ ID NO: 1364742 - RNA, 19 nt, Homo sapiens
  misc_RNA (1)...(19): siRNA sense strand
uaacagauuuugggcuuug

SEQ ID NO: 1364743 - RNA, 19 nt, Homo sapiens
  misc_RNA (1)...(19): siRNA sense strand
ggauucaguaggacauguu

SEQ ID NO: 1364744 - RNA, 19 nt, Homo sapiens
  misc_RNA (1)...(19): siRNA sense strand
aagaagagguuuacuguuu

SEQ ID NO: 1364745 - RNA, 19 nt, Homo sapiens
  misc_RNA (1)...(19): siRNA sense strand
gggaagaagugaaugguuu

SEQ ID NO: 1364746 - RNA, 19 nt, Homo sapiens
  misc_RNA (1)...(19): siRNA sense strand
gaagauuccugccaagaga

SEQ ID NO: 1364747 - RNA, 19 nt, Homo sapiens
  misc_RNA (1)...(19): siRNA sense strand
gagcaggacuaaacgaauu

SEQ ID NO: 1364748 - RNA, 19 nt, Homo sapiens
  misc_RNA (1)...(19): siRNA sense strand
gaaacuggauggaaaauuu

SEQ ID NO: 1364749 - RNA, 19 nt, Homo sapiens
  misc_RNA (1)...(19): siRNA sense strand
gaagaaacaguuccauauu

SEQ ID NO: 1364750 - RNA, 19 nt, Homo sapiens
  misc_RNA (1)...(19): siRNA sense strand
gaaagcugcccaaguguaa

SEQ ID NO: 1364751 - RNA, 19 nt, Homo sapiens
  misc_RNA (1)...(19): siRNA sense strand
caggagauaugcagaguuu

SEQ ID NO: 1364752 - RNA, 19 nt, Homo sapiens
  misc_RNA (1)...(19): siRNA sense strand
gaagagguuuacuguuuau

SEQ ID NO: 1364753 - RNA, 19 nt, Homo sapiens
  misc_RNA (1)...(19): siRNA sense strand
agaagagguuuacuguuua

SEQ ID NO: 1364754 - RNA, 19 nt, Homo sapiens
  misc_RNA (1)...(19): siRNA sense strand
ggaggcagaugaugcauuc

SEQ ID NO: 1364755 - RNA, 19 nt, Homo sapiens
  misc_RNA (1)...(19): siRNA sense strand
ugaaauugcuagugcauug

SEQ ID NO: 1364756 - RNA, 19 nt, Homo sapiens
  misc_RNA (1)...(19): siRNA sense strand
caacugacuuugauuucuu

SEQ ID NO: 1364757 - RNA, 19 nt, Homo sapiens
  misc_RNA (1)...(19): siRNA sense strand
gaagauuccaccaccauuu

SEQ ID NO: 1364758 - RNA, 19 nt, Homo sapiens
  misc_RNA (1)...(19): siRNA sense strand
gcugaaauguaugacaaua

SEQ ID NO: 1364759 - RNA, 19 nt, Homo sapiens
  misc_RNA (1)...(19): siRNA sense strand
ugacaccacuaccacauuu

SEQ ID NO: 1364760 - RNA, 19 nt, Homo sapiens
  misc_RNA (1)...(19): siRNA sense strand
gaugauaucagaaacuuug

SEQ ID NO: 1364761 - RNA, 19 nt, Homo sapiens
  misc_RNA (1)...(19): siRNA sense strand
ggagauaugcagaguuuga

SEQ ID NO: 1364762 - RNA, 19 nt, Homo sapiens
  misc_RNA (1)...(19): siRNA sense strand
ggaaagcugcccaagugua

SEQ ID NO: 1364763 - RNA, 19 nt, Homo sapiens
  misc_RNA (1)...(19): siRNA sense strand
aaggaaagcugcccaagug

SEQ ID NO: 1364764 - RNA, 19 nt, Homo sapiens
  misc_RNA (1)...(19): siRNA sense strand
gaacguaaugugcucuuga

SEQ ID NO: 1364765 - RNA, 19 nt, Homo sapiens
  misc_RNA (1)...(19): siRNA sense strand
gauaugcagaguuugauaa

SEQ ID NO: 1364766 - RNA, 19 nt, Homo sapiens
  misc_RNA (1)...(19): siRNA sense strand
aagaaacaguuccauauuc

SEQ ID NO: 1364767 - RNA, 19 nt, Homo sapiens
  misc_RNA (1)...(19): siRNA sense strand
ugacacagcauuuacagaa

SEQ ID NO: 1364768 - RNA, 19 nt, Homo sapiens
  misc_RNA (1)...(19): siRNA sense strand
gcauuggguuacuuacauu

SEQ ID NO: 1364769 - RNA, 19 nt, Homo sapiens
  misc_RNA (1)...(19): siRNA sense strand
gaccagaugauaucagaaa

SEQ ID NO: 1364770 - RNA, 19 nt, Homo sapiens
  misc_RNA (1)...(19): siRNA sense strand
guguguaucuucugacuau

SEQ ID NO: 1364771 - RNA, 19 nt, Homo sapiens
  misc_RNA (1)...(19): siRNA sense strand
ccaccaccauuuaauccua

SEQ ID NO: 1364772 - RNA, 19 nt, Homo sapiens
  misc_RNA (1)...(19): siRNA sense strand
cagaagaaacaguuccaua

SEQ ID NO: 1364773 - RNA, 19 nt, Homo sapiens
  misc_RNA (1)...(19): siRNA sense strand
gggcugaccuuguacaaaa

SEQ ID NO: 1364774 - RNA, 19 nt, Homo sapiens
  misc_RNA (1)...(19): siRNA sense strand
gacaauauccuucacaaac

SEQ ID NO: 1364775 - RNA, 19 nt, Homo sapiens
  misc_RNA (1)...(19): siRNA sense strand
gaugaugcauucguugguu

SEQ ID NO: 1364776 - RNA, 19 nt, Homo sapiens
  misc_RNA (1)...(19): siRNA sense strand
cagaugauaucagaaacuu

SEQ ID NO: 1364777 - RNA, 19 nt, Homo sapiens
  misc_RNA (1)...(19): siRNA sense strand
aagaaggaauugcuauuuc

SEQ ID NO: 1364778 - RNA, 19 nt, Homo sapiens
  misc_RNA (1)...(19): siRNA sense strand
uauagugaaugccagugua

SEQ ID NO: 1364779 - RNA, 19 nt, Homo sapiens
  misc_RNA (1)...(19): siRNA sense strand
acacagcauuuacagaaga

SEQ ID NO: 1364780 - RNA, 19 nt, Homo sapiens
  misc_RNA (1)...(19): siRNA sense strand
gccgagauguugcugaaau

SEQ ID NO: 1364781 - RNA, 19 nt, Homo sapiens
  misc_RNA (1)...(19): siRNA sense strand
uuagguauccagaacuuua

SEQ ID NO: 1364782 - RNA, 19 nt, Homo sapiens
  misc_RNA (1)...(19): siRNA sense strand
agaagaaacaguuccauau

SEQ ID NO: 1364783 - RNA, 19 nt, Homo sapiens
  misc_RNA (1)...(19): siRNA sense strand
ggaagaagugaaugguuug

SEQ ID NO: 1364784 - RNA, 19 nt, Homo sapiens
  misc_RNA (1)...(19): siRNA sense strand
guaaagaaggaauugcuau

SEQ ID NO: 1364785 - RNA, 19 nt, Homo sapiens
  misc_RNA (1)...(19): siRNA sense strand
gagaucacaccauggacua

SEQ ID NO: 1364786 - RNA, 19 nt, Homo sapiens
  misc_RNA (1)...(19): siRNA sense strand
gagauguugcugaaaugua

SEQ ID NO: 1364787 - RNA, 19 nt, Homo sapiens
  misc_RNA (1)...(19): siRNA sense strand
caaagacgagcaggacuaa

SEQ ID NO: 1364788 - RNA, 19 nt, Homo sapiens
  misc_RNA (1)...(19): siRNA sense strand
agauguugcugaaauguau

SEQ ID NO: 1364789 - RNA, 19 nt, Homo sapiens
  misc_RNA (1)...(19): siRNA sense strand
cauuauuccuuccaaacaa

SEQ ID NO: 1364790 - RNA, 19 nt, Homo sapiens
  misc_RNA (1)...(19): siRNA sense strand
gcacagagcuagguuuuac

SEQ ID NO: 1364791 - RNA, 19 nt, Homo sapiens
  misc_RNA (1)...(19): siRNA sense strand
ccaaacaacugaaaagcuu

SEQ ID NO: 1364792 - RNA, 19 nt, Homo sapiens
  misc_RNA (1)...(19): siRNA sense strand
uggaagaacuccuagaaaa

SEQ ID NO: 1364793 - RNA, 19 nt, Homo sapiens
  misc_RNA (1)...(19): siRNA sense strand
cagcuccgaugaacacaga

SEQ ID NO: 1364794 - RNA, 19 nt, Homo sapiens
  misc_RNA (1)...(19): siRNA sense strand
aagauuccaccaccauuua

SEQ ID NO: 1364795 - RNA, 19 nt, Homo sapiens
  misc_RNA (1)...(19): siRNA sense strand
gcuauggcccugaagauuc

SEQ ID NO: 1364796 - RNA, 19 nt, Homo sapiens
  misc_RNA (1)...(19): siRNA sense strand
uggaaauccucaugccaaa

SEQ ID NO: 1364797 - RNA, 19 nt, Homo sapiens
  misc_RNA (1)...(19): siRNA sense strand
ucagagcauuccuucaaau

SEQ ID NO: 1364798 - RNA, 19 nt, Homo sapiens
  misc_RNA (1)...(19): siRNA sense strand
gucagagcauuccuucaaa

SEQ ID NO: 1364799 - RNA, 19 nt, Homo sapiens
  misc_RNA (1)...(19): siRNA sense strand
aaagagaucacaccaugga

SEQ ID NO: 1364800 - RNA, 19 nt, Homo sapiens
  misc_RNA (1)...(19): siRNA sense strand
aaacuuugacacagcauuu

SEQ ID NO: 1364801 - RNA, 19 nt, Homo sapiens
  misc_RNA (1)...(19): siRNA sense strand
gaagaugaggaugaaagaa

SEQ ID NO: 1364802 - RNA, 19 nt, Homo sapiens
  misc_RNA (1)...(19): siRNA sense strand
aacggaaacuggauggaaa

SEQ ID NO: 1364803 - RNA, 19 nt, Homo sapiens
  misc_RNA (1)...(19): siRNA sense strand
ggcagaugaugcauucguu

SEQ ID NO: 1364804 - RNA, 19 nt, Homo sapiens
  misc_RNA (1)...(19): siRNA sense strand
caccaccauuuaauccuaa

SEQ ID NO: 1364805 - RNA, 19 nt, Homo sapiens
  misc_RNA (1)...(19): siRNA sense strand
uaucagaaacuuugacaca

SEQ ID NO: 1364806 - RNA, 19 nt, Homo sapiens
  misc_RNA (1)...(19): siRNA sense strand
auaaaguucugguuucagu

SEQ ID NO: 1364807 - RNA, 19 nt, Homo sapiens
  misc_RNA (1)...(19): siRNA sense strand
ugucaaaguguuacagaaa

SEQ ID NO: 1364808 - RNA, 19 nt, Homo sapiens
  misc_RNA (1)...(19): siRNA sense strand
acaaagacgagcaggacua

SEQ ID NO: 1364809 - RNA, 19 nt, Homo sapiens
  misc_RNA (1)...(19): siRNA sense strand
agaagugaaugguuugucu

SEQ ID NO: 1364810 - RNA, 19 nt, Homo sapiens
  misc_RNA (1)...(19): siRNA sense strand
gaaggaauugcuauuucug

SEQ ID NO: 1364811 - RNA, 19 nt, Homo sapiens
  misc_RNA (1)...(19): siRNA sense strand
gcauuauuccuuccaaaca

SEQ ID NO: 1364812 - RNA, 19 nt, Homo sapiens
  misc_RNA (1)...(19): siRNA sense strand
gaagugaaugguuugucuu

SEQ ID NO: 1364813 - RNA, 19 nt, Homo sapiens
  misc_RNA (1)...(19): siRNA sense strand
ugucagagcauuccuucaa

SEQ ID NO: 1364814 - RNA, 19 nt, Homo sapiens
  misc_RNA (1)...(19): siRNA sense strand
ccaacugacuuugauuucu

SEQ ID NO: 1364815 - RNA, 19 nt, Homo sapiens
  misc_RNA (1)...(19): siRNA sense strand
uugguuggauugcauuauu

SEQ ID NO: 1364816 - RNA, 19 nt, Homo sapiens
  misc_RNA (1)...(19): siRNA sense strand
uuaugcaccuccuucagaa

SEQ ID NO: 1364817 - RNA, 19 nt, Homo sapiens
  misc_RNA (1)...(19): siRNA sense strand
gaaacuuugacacagcauu

SEQ ID NO: 1364818 - RNA, 19 nt, Homo sapiens
  misc_RNA (1)...(19): siRNA sense strand
caccauggacuacaaggaa

SEQ ID NO: 1364819 - RNA, 19 nt, Homo sapiens
  misc_RNA (1)...(19): siRNA sense strand
gguauccagaacuuuauaa

SEQ ID NO: 1364820 - RNA, 19 nt, Homo sapiens
  misc_RNA (1)...(19): siRNA sense strand
gacacagcauuuacagaag

SEQ ID NO: 1364821 - RNA, 19 nt, Homo sapiens
  misc_RNA (1)...(19): siRNA sense strand
uggaccagaugauaucaga

SEQ ID NO: 1364822 - RNA, 19 nt, Homo sapiens
  misc_RNA (1)...(19): siRNA sense strand
caaggaaagcugcccaagu

SEQ ID NO: 1364823 - RNA, 19 nt, Homo sapiens
  misc_RNA (1)...(19): siRNA sense strand
uugcugaaauguaugacaa

SEQ ID NO: 1364824 - RNA, 19 nt, Homo sapiens
  misc_RNA (1)...(19): siRNA sense strand
gaaacaguuccauauucug

SEQ ID NO: 1364825 - RNA, 19 nt, Homo sapiens
  misc_RNA (1)...(19): siRNA sense strand
gauaucagaaacuuugaca

SEQ ID NO: 1364826 - RNA, 19 nt, Homo sapiens
  misc_RNA (1)...(19): siRNA sense strand
ugacaauauccuucacaaa

SEQ ID NO: 1364827 - RNA, 19 nt, Homo sapiens
  misc_RNA (1)...(19): siRNA sense strand
cuaguuagguauccagaac

SEQ ID NO: 1364828 - RNA, 19 nt, Homo sapiens
  misc_RNA (1)...(19): siRNA sense strand
ccgagauguugcugaaaug

SEQ ID NO: 1364829 - RNA, 19 nt, Homo sapiens
  misc_RNA (1)...(19): siRNA sense strand
ggaauugcuauuucugaca

SEQ ID NO: 1364830 - RNA, 19 nt, Homo sapiens
  misc_RNA (1)...(19): siRNA sense strand
guuuuacgcugcugaaauu

SEQ ID NO: 1364831 - RNA, 19 nt, Homo sapiens
  misc_RNA (1)...(19): siRNA sense strand
aaacggaaacuggauggaa

SEQ ID NO: 1364832 - RNA, 19 nt, Homo sapiens
  misc_RNA (1)...(19): siRNA sense strand
ugaagaugaggaugaaaga

SEQ ID NO: 1364833 - RNA, 19 nt, Homo sapiens
  misc_RNA (1)...(19): siRNA sense strand
aacguaaugugcucuugaa

SEQ ID NO: 1364834 - RNA, 19 nt, Homo sapiens
  misc_RNA (1)...(19): siRNA sense strand
agaugaggaugaaagaagu

SEQ ID NO: 1364835 - RNA, 19 nt, Homo sapiens
  misc_RNA (1)...(19): siRNA sense strand
cacagcauuuacagaagaa

SEQ ID NO: 1364836 - RNA, 19 nt, Homo sapiens
  misc_RNA (1)...(19): siRNA sense strand
aauaguauacagagacuug

SEQ ID NO: 1364837 - RNA, 19 nt, Homo sapiens
  misc_RNA (1)...(19): siRNA sense strand
ucucagaagcuacacucua

SEQ ID NO: 1364838 - RNA, 19 nt, Homo sapiens
  misc_RNA (1)...(19): siRNA sense strand
gaagaagugaaugguuugu

SEQ ID NO: 1364839 - RNA, 19 nt, Homo sapiens
  misc_RNA (1)...(19): siRNA sense strand
caagagaauauuuggugau

SEQ ID NO: 1364840 - RNA, 19 nt, Homo sapiens
  misc_RNA (1)...(19): siRNA sense strand
cgaugaacacagagagaaa

SEQ ID NO: 1364841 - RNA, 19 nt, Homo sapiens
  misc_RNA (1)...(19): siRNA sense strand
ugccaaaccaacugacuuu

SEQ ID NO: 1364842 - RNA, 19 nt, Homo sapiens
  misc_RNA (1)...(19): siRNA sense strand
uaacagauuuugggcuuug

SEQ ID NO: 1364843 - RNA, 19 nt, Homo sapiens
  misc_RNA (1)...(19): siRNA sense strand
ggauucaguaggacauguu

SEQ ID NO: 1364844 - RNA, 19 nt, Homo sapiens
  misc_RNA (1)...(19): siRNA sense strand
agacagagcucagggaaua

SEQ ID NO: 1364845 - RNA, 19 nt, Homo sapiens
  misc_RNA (1)...(19): siRNA sense strand
ggaccaggcugucaacaug

SEQ ID NO: 1364846 - RNA, 19 nt, Homo sapiens
  misc_RNA (1)...(19): siRNA sense strand
caaccagucucgaggcuuu

SEQ ID NO: 1364847 - RNA, 19 nt, Homo sapiens
  misc_RNA (1)...(19): siRNA sense strand
gaaggaaggauggcagaaa

SEQ ID NO: 1364848 - RNA, 19 nt, Homo sapiens
  misc_RNA (1)...(19): siRNA sense strand
gaagucguagauuguguua

SEQ ID NO: 1364849 - RNA, 19 nt, Homo sapiens
  misc_RNA (1)...(19): siRNA sense strand
ccacguggcagcaaggaua

SEQ ID NO: 1364850 - RNA, 19 nt, Homo sapiens
  misc_RNA (1)...(19): siRNA sense strand
gcgauaacaguaaaucaaa

SEQ ID NO: 1364851 - RNA, 19 nt, Homo sapiens
  misc_RNA (1)...(19): siRNA sense strand
gggcagcaccucuggcuuu

SEQ ID NO: 1364852 - RNA, 19 nt, Homo sapiens
  misc_RNA (1)...(19): siRNA sense strand
caggagcgauaacaguaaa

SEQ ID NO: 1364853 - RNA, 19 nt, Homo sapiens
  misc_RNA (1)...(19): siRNA sense strand
gagaagucguagauugugu

SEQ ID NO: 1364854 - RNA, 19 nt, Homo sapiens
  misc_RNA (1)...(19): siRNA sense strand
ucacggagguagucaugau

SEQ ID NO: 1364855 - RNA, 19 nt, Homo sapiens
  misc_RNA (1)...(19): siRNA sense strand
gcagcuacuuuucccaaua

SEQ ID NO: 1364856 - RNA, 19 nt, Homo sapiens
  misc_RNA (1)...(19): siRNA sense strand
agucguagauuguguuauc

SEQ ID NO: 1364857 - RNA, 19 nt, Homo sapiens
  misc_RNA (1)...(19): siRNA sense strand
gauauuugucgguggaauu

SEQ ID NO: 1364858 - RNA, 19 nt, Homo sapiens
  misc_RNA (1)...(19): siRNA sense strand
uuaaagacccaaacugugu

SEQ ID NO: 1364859 - RNA, 19 nt, Homo sapiens
  misc_RNA (1)...(19): siRNA sense strand
ccaauauggagaagucgua

SEQ ID NO: 1364860 - RNA, 19 nt, Homo sapiens
  misc_RNA (1)...(19): siRNA sense strand
gccagcagccuccuuccua

SEQ ID NO: 1364861 - RNA, 19 nt, Homo sapiens
  misc_RNA (1)...(19): siRNA sense strand
guagauuguguuaucauga

SEQ ID NO: 1364862 - RNA, 19 nt, Homo sapiens
  misc_RNA (1)...(19): siRNA sense strand
ggaaggauggcagaaagga

SEQ ID NO: 1364863 - RNA, 19 nt, Homo sapiens
  misc_RNA (1)...(19): siRNA sense strand
gcagaccgcacacgcuaga

SEQ ID NO: 1364864 - RNA, 19 nt, Homo sapiens
  misc_RNA (1)...(19): siRNA sense strand
ggagguagucaugaucuau

SEQ ID NO: 1364865 - RNA, 19 nt, Homo sapiens
  misc_RNA (1)...(19): siRNA sense strand
auggagaagucguagauug

SEQ ID NO: 1364866 - RNA, 19 nt, Homo sapiens
  misc_RNA (1)...(19): siRNA sense strand
cgacagcucagccagacuu

SEQ ID NO: 1364867 - RNA, 19 nt, Homo sapiens
  misc_RNA (1)...(19): siRNA sense strand
ccaggagcgauaacaguaa

SEQ ID NO: 1364868 - RNA, 19 nt, Homo sapiens
  misc_RNA (1)...(19): siRNA sense strand
aaaggacccaggagcgaua

SEQ ID NO: 1364869 - RNA, 19 nt, Homo sapiens
  misc_RNA (1)...(19): siRNA sense strand
ucucgaggcuuuggguuug

SEQ ID NO: 1364870 - RNA, 19 nt, Homo sapiens
  misc_RNA (1)...(19): siRNA sense strand
ggagaagucguagauugug

SEQ ID NO: 1364871 - RNA, 19 nt, Homo sapiens
  misc_RNA (1)...(19): siRNA sense strand
gcagaaccacaacgugcaa

SEQ ID NO: 1364872 - RNA, 19 nt, Homo sapiens
  misc_RNA (1)...(19): siRNA sense strand
cguagauuguguuaucaug

SEQ ID NO: 1364873 - RNA, 19 nt, Homo sapiens
  misc_RNA (1)...(19): siRNA sense strand
gccccgagguuuuggauuu

SEQ ID NO: 1364874 - RNA, 19 nt, Homo sapiens
  misc_RNA (1)...(19): siRNA sense strand
gagguagucaugaucuaug

SEQ ID NO: 1364875 - RNA, 19 nt, Homo sapiens
  misc_RNA (1)...(19): siRNA sense strand
gcucagggaauacuucaag

SEQ ID NO: 1364876 - RNA, 19 nt, Homo sapiens
  misc_RNA (1)...(19): siRNA sense strand
aaggaaggauggcagaaag

SEQ ID NO: 1364877 - RNA, 19 nt, Homo sapiens
  misc_RNA (1)...(19): siRNA sense strand
gagcgauaacaguaaauca

SEQ ID NO: 1364878 - RNA, 19 nt, Homo sapiens
  misc_RNA (1)...(19): siRNA sense strand
gacgagggcagaaccacaa

SEQ ID NO: 1364879 - RNA, 19 nt, Homo sapiens
  misc_RNA (1)...(19): siRNA sense strand
cccaggagcgauaacagua

SEQ ID NO: 1364880 - RNA, 19 nt, Homo sapiens
  misc_RNA (1)...(19): siRNA sense strand
cggagguagucaugaucua

SEQ ID NO: 1364881 - RNA, 19 nt, Homo sapiens
  misc_RNA (1)...(19): siRNA sense strand
ggaugcagccggagagaac

SEQ ID NO: 1364882 - RNA, 19 nt, Homo sapiens
  misc_RNA (1)...(19): siRNA sense strand
ggcgauugguggcuaugga

SEQ ID NO: 1364883 - RNA, 19 nt, Homo sapiens
  misc_RNA (1)...(19): siRNA sense strand
ucagggaauacuucaagaa

SEQ ID NO: 1364884 - RNA, 19 nt, Homo sapiens
  misc_RNA (1)...(19): siRNA sense strand
ggucacggagguagucaug

SEQ ID NO: 1364885 - RNA, 19 nt, Homo sapiens
  misc_RNA (1)...(19): siRNA sense strand
gagcacgacccaagagacu

SEQ ID NO: 1364886 - RNA, 19 nt, Homo sapiens
  misc_RNA (1)...(19): siRNA sense strand
gaucuaugacgccgagaag

SEQ ID NO: 1364887 - RNA, 19 nt, Homo sapiens
  misc_RNA (1)...(19): siRNA sense strand
gagcucagggaauacuuca

SEQ ID NO: 1364888 - RNA, 19 nt, Homo sapiens
  misc_RNA (1)...(19): siRNA sense strand
ggcagcaccucuggcuuuc

SEQ ID NO: 1364889 - RNA, 19 nt, Homo sapiens
  misc_RNA (1)...(19): siRNA sense strand
gagaacacggccgaaggaa

SEQ ID NO: 1364890 - RNA, 19 nt, Homo sapiens
  misc_RNA (1)...(19): siRNA sense strand
ggagcgauaacaguaaauc

SEQ ID NO: 1364891 - RNA, 19 nt, Homo sapiens
  misc_RNA (1)...(19): siRNA sense strand
cagcuacuuuucccaauau

SEQ ID NO: 1364892 - RNA, 19 nt, Homo sapiens
  misc_RNA (1)...(19): siRNA sense strand
agagaacacggccgaagga

SEQ ID NO: 1364893 - RNA, 19 nt, Homo sapiens
  misc_RNA (1)...(19): siRNA sense strand
uggagaagucguagauugu

SEQ ID NO: 1364894 - RNA, 19 nt, Homo sapiens
  misc_RNA (1)...(19): siRNA sense strand
ggacccaggagcgauaaca

SEQ ID NO: 1364895 - RNA, 19 nt, Homo sapiens
  misc_RNA (1)...(19): siRNA sense strand
acaauuguggugagacaga

SEQ ID NO: 1364896 - RNA, 19 nt, Homo sapiens
  misc_RNA (1)...(19): siRNA sense strand
agacagagcucagggaaua

SEQ ID NO: 1364897 - RNA, 19 nt, Homo sapiens
  misc_RNA (1)...(19): siRNA sense strand
ggaccaggcugucaacaug

SEQ ID NO: 1364898 - RNA, 19 nt, Homo sapiens
  misc_RNA (1)...(19): siRNA sense strand
caaccagucucgaggcuuu

SEQ ID NO: 1364899 - RNA, 19 nt, Homo sapiens
  misc_RNA (1)...(19): siRNA sense strand
gaaggaaggauggcagaaa

SEQ ID NO: 1364900 - RNA, 19 nt, Homo sapiens
  misc_RNA (1)...(19): siRNA sense strand
gaagucguagauuguguua

SEQ ID NO: 1364901 - RNA, 19 nt, Homo sapiens
  misc_RNA (1)...(19): siRNA sense strand
ccacguggcagcaaggaua

SEQ ID NO: 1364902 - RNA, 19 nt, Homo sapiens
  misc_RNA (1)...(19): siRNA sense strand
gcgauaacaguaaaucaaa

SEQ ID NO: 1364903 - RNA, 19 nt, Homo sapiens
  misc_RNA (1)...(19): siRNA sense strand
gggcagcaccucuggcuuu

SEQ ID NO: 1364904 - RNA, 19 nt, Homo sapiens
  misc_RNA (1)...(19): siRNA sense strand
caggagcgauaacaguaaa

SEQ ID NO: 1364905 - RNA, 19 nt, Homo sapiens
  misc_RNA (1)...(19): siRNA sense strand
gagaagucguagauugugu

SEQ ID NO: 1364906 - RNA, 19 nt, Homo sapiens
  misc_RNA (1)...(19): siRNA sense strand
ucacggagguagucaugau

SEQ ID NO: 1364907 - RNA, 19 nt, Homo sapiens
  misc_RNA (1)...(19): siRNA sense strand
gcagcuacuuuucccaaua

SEQ ID NO: 1364908 - RNA, 19 nt, Homo sapiens
  misc_RNA (1)...(19): siRNA sense strand
agucguagauuguguuauc

SEQ ID NO: 1364909 - RNA, 19 nt, Homo sapiens
  misc_RNA (1)...(19): siRNA sense strand
gauauuugucgguggaauu

SEQ ID NO: 1364910 - RNA, 19 nt, Homo sapiens
  misc_RNA (1)...(19): siRNA sense strand
uuaaagacccaaacugugu

SEQ ID NO: 1364911 - RNA, 19 nt, Homo sapiens
  misc_RNA (1)...(19): siRNA sense strand
ccaauauggagaagucgua

SEQ ID NO: 1364912 - RNA, 19 nt, Homo sapiens
  misc_RNA (1)...(19): siRNA sense strand
guagauuguguuaucauga

SEQ ID NO: 1364913 - RNA, 19 nt, Homo sapiens
  misc_RNA (1)...(19): siRNA sense strand
ggaaggauggcagaaagga

SEQ ID NO: 1364914 - RNA, 19 nt, Homo sapiens
  misc_RNA (1)...(19): siRNA sense strand
gcagaccgcacacgcuaga

SEQ ID NO: 1364915 - RNA, 19 nt, Homo sapiens
  misc_RNA (1)...(19): siRNA sense strand
ggagguagucaugaucuau

SEQ ID NO: 1364916 - RNA, 19 nt, Homo sapiens
  misc_RNA (1)...(19): siRNA sense strand
auggagaagucguagauug

SEQ ID NO: 1364917 - RNA, 19 nt, Homo sapiens
  misc_RNA (1)...(19): siRNA sense strand
cgacagcucagccagacuu

SEQ ID NO: 1364918 - RNA, 19 nt, Homo sapiens
  misc_RNA (1)...(19): siRNA sense strand
ccaggagcgauaacaguaa

SEQ ID NO: 1364919 - RNA, 19 nt, Homo sapiens
  misc_RNA (1)...(19): siRNA sense strand
aaaggacccaggagcgaua

SEQ ID NO: 1364920 - RNA, 19 nt, Homo sapiens
  misc_RNA (1)...(19): siRNA sense strand
ucucgaggcuuuggguuug

SEQ ID NO: 1364921 - RNA, 19 nt, Homo sapiens
  misc_RNA (1)...(19): siRNA sense strand
ggagaagucguagauugug

SEQ ID NO: 1364922 - RNA, 19 nt, Homo sapiens
  misc_RNA (1)...(19): siRNA sense strand
cguagauuguguuaucaug

SEQ ID NO: 1364923 - RNA, 19 nt, Homo sapiens
  misc_RNA (1)...(19): siRNA sense strand
gccccgagguuuuggauuu

SEQ ID NO: 1364924 - RNA, 19 nt, Homo sapiens
  misc_RNA (1)...(19): siRNA sense strand
gagguagucaugaucuaug

SEQ ID NO: 1364925 - RNA, 19 nt, Homo sapiens
  misc_RNA (1)...(19): siRNA sense strand
gcucagggaauacuucaag

SEQ ID NO: 1364926 - RNA, 19 nt, Homo sapiens
  misc_RNA (1)...(19): siRNA sense strand
aaggaaggauggcagaaag

SEQ ID NO: 1364927 - RNA, 19 nt, Homo sapiens
  misc_RNA (1)...(19): siRNA sense strand
gagcgauaacaguaaauca

SEQ ID NO: 1364928 - RNA, 19 nt, Homo sapiens
  misc_RNA (1)...(19): siRNA sense strand
cccaggagcgauaacagua

SEQ ID NO: 1364929 - RNA, 19 nt, Homo sapiens
  misc_RNA (1)...(19): siRNA sense strand
cggagguagucaugaucua

SEQ ID NO: 1364930 - RNA, 19 nt, Homo sapiens
  misc_RNA (1)...(19): siRNA sense strand
ggaugcagccggagagaac

SEQ ID NO: 1364931 - RNA, 19 nt, Homo sapiens
  misc_RNA (1)...(19): siRNA sense strand
ggcgauugguggcuaugga

SEQ ID NO: 1364932 - RNA, 19 nt, Homo sapiens
  misc_RNA (1)...(19): siRNA sense strand
ucagggaauacuucaagaa

SEQ ID NO: 1364933 - RNA, 19 nt, Homo sapiens
  misc_RNA (1)...(19): siRNA sense strand
ggucacggagguagucaug

SEQ ID NO: 1364934 - RNA, 19 nt, Homo sapiens
  misc_RNA (1)...(19): siRNA sense strand
gagcacgacccaagagacu

SEQ ID NO: 1364935 - RNA, 19 nt, Homo sapiens
  misc_RNA (1)...(19): siRNA sense strand
gaucuaugacgccgagaag

SEQ ID NO: 1364936 - RNA, 19 nt, Homo sapiens
  misc_RNA (1)...(19): siRNA sense strand
gagcucagggaauacuuca

SEQ ID NO: 1364937 - RNA, 19 nt, Homo sapiens
  misc_RNA (1)...(19): siRNA sense strand
ggcagcaccucuggcuuuc

SEQ ID NO: 1364938 - RNA, 19 nt, Homo sapiens
  misc_RNA (1)...(19): siRNA sense strand
gagaacacggccgaaggaa

SEQ ID NO: 1364939 - RNA, 19 nt, Homo sapiens
  misc_RNA (1)...(19): siRNA sense strand
ggagcgauaacaguaaauc

SEQ ID NO: 1364940 - RNA, 19 nt, Homo sapiens
  misc_RNA (1)...(19): siRNA sense strand
agagaacacggccgaagga

SEQ ID NO: 1364941 - RNA, 19 nt, Homo sapiens
  misc_RNA (1)...(19): siRNA sense strand
cagcuacuuuucccaauau

SEQ ID NO: 1364942 - RNA, 19 nt, Homo sapiens
  misc_RNA (1)...(19): siRNA sense strand
uggagaagucguagauugu

SEQ ID NO: 1364943 - RNA, 19 nt, Homo sapiens
  misc_RNA (1)...(19): siRNA sense strand
ggacccaggagcgauaaca

SEQ ID NO: 1364944 - RNA, 19 nt, Homo sapiens
  misc_RNA (1)...(19): siRNA sense strand
acaauuguggugagacaga

SEQ ID NO: 1364945 - RNA, 19 nt, Homo sapiens
  misc_RNA (1)...(19): siRNA sense strand
ucaaaugucuccgguauua

SEQ ID NO: 1364946 - RNA, 19 nt, Homo sapiens
  misc_RNA (1)...(19): siRNA sense strand
caacugcuaugauguguuu

SEQ ID NO: 1364947 - RNA, 19 nt, Homo sapiens
  misc_RNA (1)...(19): siRNA sense strand
gaagguagcugagcagaca

SEQ ID NO: 1364948 - RNA, 19 nt, Homo sapiens
  misc_RNA (1)...(19): siRNA sense strand
gaaacgugguugugaugaa

SEQ ID NO: 1364949 - RNA, 19 nt, Homo sapiens
  misc_RNA (1)...(19): siRNA sense strand
gcagcaaccucaagagagu

SEQ ID NO: 1364950 - RNA, 19 nt, Homo sapiens
  misc_RNA (1)...(19): siRNA sense strand
ggaaaaccauccccauuga

SEQ ID NO: 1364951 - RNA, 19 nt, Homo sapiens
  misc_RNA (1)...(19): siRNA sense strand
ucaaagugccucagaagaa

SEQ ID NO: 1364952 - RNA, 19 nt, Homo sapiens
  misc_RNA (1)...(19): siRNA sense strand
ucuccuaccugguggauuu

SEQ ID NO: 1364953 - RNA, 19 nt, Homo sapiens
  misc_RNA (1)...(19): siRNA sense strand
gaucaaggaggcuggcuuu

SEQ ID NO: 1364954 - RNA, 19 nt, Homo sapiens
  misc_RNA (1)...(19): siRNA sense strand
gcaaccagauuuucauaaa

SEQ ID NO: 1364955 - RNA, 19 nt, Homo sapiens
  misc_RNA (1)...(19): siRNA sense strand
ggacaaaguggcauucaca

SEQ ID NO: 1364956 - RNA, 19 nt, Homo sapiens
  misc_RNA (1)...(19): siRNA sense strand
ccucaaaugucuccgguau

SEQ ID NO: 1364957 - RNA, 19 nt, Homo sapiens
  misc_RNA (1)...(19): siRNA sense strand
caaggaagauguggacaag

SEQ ID NO: 1364958 - RNA, 19 nt, Homo sapiens
  misc_RNA (1)...(19): siRNA sense strand
gcagcugucuucacaaagg

SEQ ID NO: 1364959 - RNA, 19 nt, Homo sapiens
  misc_RNA (1)...(19): siRNA sense strand
ccgcagcugucuucacaaa

SEQ ID NO: 1364960 - RNA, 19 nt, Homo sapiens
  misc_RNA (1)...(19): siRNA sense strand
caacauugugccuggauuu

SEQ ID NO: 1364961 - RNA, 19 nt, Homo sapiens
  misc_RNA (1)...(19): siRNA sense strand
ugaugcagauccugaaguu

SEQ ID NO: 1364962 - RNA, 19 nt, Homo sapiens
  misc_RNA (1)...(19): siRNA sense strand
gagcagcaaccucaagaga

SEQ ID NO: 1364963 - RNA, 19 nt, Homo sapiens
  misc_RNA (1)...(19): siRNA sense strand
gcaugaccaucgccaagga

SEQ ID NO: 1364964 - RNA, 19 nt, Homo sapiens
  misc_RNA (1)...(19): siRNA sense strand
caugucagaugccgauaug

SEQ ID NO: 1364965 - RNA, 19 nt, Homo sapiens
  misc_RNA (1)...(19): siRNA sense strand
ggccgcagcugucuucaca

SEQ ID NO: 1364966 - RNA, 19 nt, Homo sapiens
  misc_RNA (1)...(19): siRNA sense strand
ggagacuucuucagcuaca

SEQ ID NO: 1364967 - RNA, 19 nt, Homo sapiens
  misc_RNA (1)...(19): siRNA sense strand
gagccaacaauuccacgua

SEQ ID NO: 1364968 - RNA, 19 nt, Homo sapiens
  misc_RNA (1)...(19): siRNA sense strand
caaagugccucagaagaac

SEQ ID NO: 1364969 - RNA, 19 nt, Homo sapiens
  misc_RNA (1)...(19): siRNA sense strand
cggcugggcugauaaguac

SEQ ID NO: 1364970 - RNA, 19 nt, Homo sapiens
  misc_RNA (1)...(19): siRNA sense strand
gaauuucccgcuccugaug

SEQ ID NO: 1364971 - RNA, 19 nt, Homo sapiens
  misc_RNA (1)...(19): siRNA sense strand
cuggagaggucaucuguca

SEQ ID NO: 1364972 - RNA, 19 nt, Homo sapiens
  misc_RNA (1)...(19): siRNA sense strand
gaagauccucggcuacauc

SEQ ID NO: 1364973 - RNA, 19 nt, Homo sapiens
  misc_RNA (1)...(19): siRNA sense strand
uggccaaccugaucaagga

SEQ ID NO: 1364974 - RNA, 19 nt, Homo sapiens
  misc_RNA (1)...(19): siRNA sense strand
aguacgggcugcaggcaua

SEQ ID NO: 1364975 - RNA, 19 nt, Homo sapiens
  misc_RNA (1)...(19): siRNA sense strand
ccaugaggauguggacaaa

SEQ ID NO: 1364976 - RNA, 19 nt, Homo sapiens
  misc_RNA (1)...(19): siRNA sense strand
ccacuucgcccuguucuuc

SEQ ID NO: 1364977 - RNA, 19 nt, Homo sapiens
  misc_RNA (1)...(19): siRNA sense strand
gaucuucgggccagugaug

SEQ ID NO: 1364978 - RNA, 19 nt, Homo sapiens
  misc_RNA (1)...(19): siRNA sense strand
ggaaacgugguugugauga

SEQ ID NO: 1364979 - RNA, 19 nt, Homo sapiens
  misc_RNA (1)...(19): siRNA sense strand
gaccauagaggagguuguu

SEQ ID NO: 1364980 - RNA, 19 nt, Homo sapiens
  misc_RNA (1)...(19): siRNA sense strand
gggaagagccccaacauca

SEQ ID NO: 1364981 - RNA, 19 nt, Homo sapiens
  misc_RNA (1)...(19): siRNA sense strand
ggucaacugcuaugaugug

SEQ ID NO: 1364982 - RNA, 19 nt, Homo sapiens
  misc_RNA (1)...(19): siRNA sense strand
ugggucaacugcuaugaug

SEQ ID NO: 1364983 - RNA, 19 nt, Homo sapiens
  misc_RNA (1)...(19): siRNA sense strand
ggagcccagucacccuuug

SEQ ID NO: 1364984 - RNA, 19 nt, Homo sapiens
  misc_RNA (1)...(19): siRNA sense strand
uggagacccuggacaaugg

SEQ ID NO: 1364985 - RNA, 19 nt, Homo sapiens
  misc_RNA (1)...(19): siRNA sense strand
gcaggaggacaucuaugau

SEQ ID NO: 1364986 - RNA, 19 nt, Homo sapiens
  misc_RNA (1)...(19): siRNA sense strand
gacaauggcaagcccuaug

SEQ ID NO: 1364987 - RNA, 19 nt, Homo sapiens
  misc_RNA (1)...(19): siRNA sense strand
aaaugucuccgguauuaug

SEQ ID NO: 1364988 - RNA, 19 nt, Homo sapiens
  misc_RNA (1)...(19): siRNA sense strand
gggagcagcaaccucaaga

SEQ ID NO: 1364989 - RNA, 19 nt, Homo sapiens
  misc_RNA (1)...(19): siRNA sense strand
ucaacauugugccuggauu

SEQ ID NO: 1364990 - RNA, 19 nt, Homo sapiens
  misc_RNA (1)...(19): siRNA sense strand
aaacgugguugugaugaag

SEQ ID NO: 1364991 - RNA, 19 nt, Homo sapiens
  misc_RNA (1)...(19): siRNA sense strand
acggagacuucuucagcua

SEQ ID NO: 1364992 - RNA, 19 nt, Homo sapiens
  misc_RNA (1)...(19): siRNA sense strand
ugaccgugguuacuucauc

SEQ ID NO: 1364993 - RNA, 19 nt, Homo sapiens
  misc_RNA (1)...(19): siRNA sense strand
cagucaaagugccucagaa

SEQ ID NO: 1364994 - RNA, 19 nt, Homo sapiens
  misc_RNA (1)...(19): siRNA sense strand
uaugccggcugggcugaua

SEQ ID NO: 1364995 - RNA, 19 nt, Homo sapiens
  misc_RNA (1)...(19): siRNA sense strand
cauccagcccacuguguuu

SEQ ID NO: 1364996 - RNA, 19 nt, Homo sapiens
  misc_RNA (1)...(19): siRNA sense strand
ccacuguguuuggagaugu

SEQ ID NO: 1364997 - RNA, 19 nt, Homo sapiens
  misc_RNA (1)...(19): siRNA sense strand
gaaguucaagaccauagag

SEQ ID NO: 1364998 - RNA, 19 nt, Homo sapiens
  misc_RNA (1)...(19): siRNA sense strand
ggacaauggcaagcccuau

SEQ ID NO: 1364999 - RNA, 19 nt, Homo sapiens
  misc_RNA (1)...(19): siRNA sense strand
cagcuacacacgccaugaa

SEQ ID NO: 1365000 - RNA, 19 nt, Homo sapiens
  misc_RNA (1)...(19): siRNA sense strand
cagcugucuucacaaagga

SEQ ID NO: 1365001 - RNA, 19 nt, Homo sapiens
  misc_RNA (1)...(19): siRNA sense strand
ggccgcagguggaugaaac

SEQ ID NO: 1365002 - RNA, 19 nt, Homo sapiens
  misc_RNA (1)...(19): siRNA sense strand
ugcaggaggacaucuauga

SEQ ID NO: 1365003 - RNA, 19 nt, Homo sapiens
  misc_RNA (1)...(19): siRNA sense strand
ucagaugccgauauggauu

SEQ ID NO: 1365004 - RNA, 19 nt, Homo sapiens
  misc_RNA (1)...(19): siRNA sense strand
ggucaucugucagguagcu

SEQ ID NO: 1365005 - RNA, 19 nt, Homo sapiens
  misc_RNA (1)...(19): siRNA sense strand
gagaucuucgggccaguga

SEQ ID NO: 1365006 - RNA, 19 nt, Homo sapiens
  misc_RNA (1)...(19): siRNA sense strand
cagaugccgauauggauug

SEQ ID NO: 1365007 - RNA, 19 nt, Homo sapiens
  misc_RNA (1)...(19): siRNA sense strand
ugauaaguaccacgggaaa

SEQ ID NO: 1365008 - RNA, 19 nt, Homo sapiens
  misc_RNA (1)...(19): siRNA sense strand
ugucagaugccgauaugga

SEQ ID NO: 1365009 - RNA, 19 nt, Homo sapiens
  misc_RNA (1)...(19): siRNA sense strand
ggcaagcccuaugucaucu

SEQ ID NO: 1365010 - RNA, 19 nt, Homo sapiens
  misc_RNA (1)...(19): siRNA sense strand
augaggauguggacaaagu

SEQ ID NO: 1365011 - RNA, 19 nt, Homo sapiens
  misc_RNA (1)...(19): siRNA sense strand
ccugguggauuuggacaug

SEQ ID NO: 1365012 - RNA, 19 nt, Homo sapiens
  misc_RNA (1)...(19): siRNA sense strand
ugccucagaagaacucaua

SEQ ID NO: 1365013 - RNA, 19 nt, Homo sapiens
  misc_RNA (1)...(19): siRNA sense strand
gucaaagugccucagaaga

SEQ ID NO: 1365014 - RNA, 19 nt, Homo sapiens
  misc_RNA (1)...(19): siRNA sense strand
uuugguggcuacaagaugu

SEQ ID NO: 1365015 - RNA, 19 nt, Homo sapiens
  misc_RNA (1)...(19): siRNA sense strand
acaaggaagauguggacaa

SEQ ID NO: 1365016 - RNA, 19 nt, Homo sapiens
  misc_RNA (1)...(19): siRNA sense strand
ccggcugggcugauaagua

SEQ ID NO: 1365017 - RNA, 19 nt, Homo sapiens
  misc_RNA (1)...(19): siRNA sense strand
gauccucggcuacaucaac

SEQ ID NO: 1365018 - RNA, 19 nt, Homo sapiens
  misc_RNA (1)...(19): siRNA sense strand
uggcaagcccuaugucauc

SEQ ID NO: 1365019 - RNA, 19 nt, Homo sapiens
  misc_RNA (1)...(19): siRNA sense strand
gaagagccccaacaucauc

SEQ ID NO: 1365020 - RNA, 19 nt, Homo sapiens
  misc_RNA (1)...(19): siRNA sense strand
cacaggcuccacugagauu

SEQ ID NO: 1365021 - RNA, 19 nt, Homo sapiens
  misc_RNA (1)...(19): siRNA sense strand
ccucaccgcccucuaugug

SEQ ID NO: 1365022 - RNA, 19 nt, Homo sapiens
  misc_RNA (1)...(19): siRNA sense strand
cuggaaacgugguugugau

SEQ ID NO: 1365023 - RNA, 19 nt, Homo sapiens
  misc_RNA (1)...(19): siRNA sense strand
cuacauaacuuccuacgua

SEQ ID NO: 1365024 - RNA, 19 nt, Homo sapiens
  misc_RNA (1)...(19): siRNA sense strand
gcaagaagccacccuccuu

SEQ ID NO: 1365025 - RNA, 19 nt, Homo sapiens
  misc_RNA (1)...(19): siRNA sense strand
caaggacgguucuuacaca

SEQ ID NO: 1365026 - RNA, 19 nt, Homo sapiens
  misc_RNA (1)...(19): siRNA sense strand
ggaagcuguuggaugauga

SEQ ID NO: 1365027 - RNA, 19 nt, Homo sapiens
  misc_RNA (1)...(19): siRNA sense strand
gccagauccugcagaagua

SEQ ID NO: 1365028 - RNA, 19 nt, Homo sapiens
  misc_RNA (1)...(19): siRNA sense strand
cagcaugccugaacuacau

SEQ ID NO: 1365029 - RNA, 19 nt, Homo sapiens
  misc_RNA (1)...(19): siRNA sense strand
ugaacuacauaacuuccua

SEQ ID NO: 1365030 - RNA, 19 nt, Homo sapiens
  misc_RNA (1)...(19): siRNA sense strand
ugcggaagcuguuggauga

SEQ ID NO: 1365031 - RNA, 19 nt, Homo sapiens
  misc_RNA (1)...(19): siRNA sense strand
ugacaaggcccugagcuuu

SEQ ID NO: 1365032 - RNA, 19 nt, Homo sapiens
  misc_RNA (1)...(19): siRNA sense strand
gacaaggcccugagcuuug

SEQ ID NO: 1365033 - RNA, 19 nt, Homo sapiens
  misc_RNA (1)...(19): siRNA sense strand
gcccaaggaugcugucaag

SEQ ID NO: 1365034 - RNA, 19 nt, Homo sapiens
  misc_RNA (1)...(19): siRNA sense strand
ugccugaacuacauaacuu

SEQ ID NO: 1365035 - RNA, 19 nt, Homo sapiens
  misc_RNA (1)...(19): siRNA sense strand
cugcagaaguacuccuauu

SEQ ID NO: 1365036 - RNA, 19 nt, Homo sapiens
  misc_RNA (1)...(19): siRNA sense strand
uacauaacuuccuacguau

SEQ ID NO: 1365037 - RNA, 19 nt, Homo sapiens
  misc_RNA (1)...(19): siRNA sense strand
gcagaaguacuccuauugc

SEQ ID NO: 1365038 - RNA, 19 nt, Homo sapiens
  misc_RNA (1)...(19): siRNA sense strand
gagcgucacggccaagugu

SEQ ID NO: 1365039 - RNA, 19 nt, Homo sapiens
  misc_RNA (1)...(19): siRNA sense strand
acacaggcuucaucaaggu

SEQ ID NO: 1365040 - RNA, 19 nt, Homo sapiens
  misc_RNA (1)...(19): siRNA sense strand
aagggcacgugaagucauu

SEQ ID NO: 1365041 - RNA, 19 nt, Homo sapiens
  misc_RNA (1)...(19): siRNA sense strand
gcacaagggcacgugaagu

SEQ ID NO: 1365042 - RNA, 19 nt, Homo sapiens
  misc_RNA (1)...(19): siRNA sense strand
ucugugcccuccagcaaga

SEQ ID NO: 1365043 - RNA, 19 nt, Homo sapiens
  misc_RNA (1)...(19): siRNA sense strand
cggaagcuguuggaugaug

SEQ ID NO: 1365044 - RNA, 19 nt, Homo sapiens
  misc_RNA (1)...(19): siRNA sense strand
uuacacaggcuucaucaag

SEQ ID NO: 1365045 - RNA, 19 nt, Homo sapiens
  misc_RNA (1)...(19): siRNA sense strand
uugaggcccugcugcgaaa

SEQ ID NO: 1365046 - RNA, 19 nt, Homo sapiens
  misc_RNA (1)...(19): siRNA sense strand
cacaagggcacgugaaguc

SEQ ID NO: 1365047 - RNA, 19 nt, Homo sapiens
  misc_RNA (1)...(19): siRNA sense strand
ggacggggcacaaguguca

SEQ ID NO: 1365048 - RNA, 19 nt, Homo sapiens
  misc_RNA (1)...(19): siRNA sense strand
caaguuugcacucuuugag

SEQ ID NO: 1365049 - RNA, 19 nt, Homo sapiens
  misc_RNA (1)...(19): siRNA sense strand
cgccagauccugcagaagu

SEQ ID NO: 1365050 - RNA, 19 nt, Homo sapiens
  misc_RNA (1)...(19): siRNA sense strand
gcaugccugaacuacauaa

SEQ ID NO: 1365051 - RNA, 19 nt, Homo sapiens
  misc_RNA (1)...(19): siRNA sense strand
cuacauaacuuccuacgua

SEQ ID NO: 1365052 - RNA, 19 nt, Homo sapiens
  misc_RNA (1)...(19): siRNA sense strand
gcaagaagccacccuccuu

SEQ ID NO: 1365053 - RNA, 19 nt, Homo sapiens
  misc_RNA (1)...(19): siRNA sense strand
caaggacgguucuuacaca

SEQ ID NO: 1365054 - RNA, 19 nt, Homo sapiens
  misc_RNA (1)...(19): siRNA sense strand
ggaagcuguuggaugauga

SEQ ID NO: 1365055 - RNA, 19 nt, Homo sapiens
  misc_RNA (1)...(19): siRNA sense strand
gccagauccugcagaagua

SEQ ID NO: 1365056 - RNA, 19 nt, Homo sapiens
  misc_RNA (1)...(19): siRNA sense strand
cagcaugccugaacuacau

SEQ ID NO: 1365057 - RNA, 19 nt, Homo sapiens
  misc_RNA (1)...(19): siRNA sense strand
ugaacuacauaacuuccua

SEQ ID NO: 1365058 - RNA, 19 nt, Homo sapiens
  misc_RNA (1)...(19): siRNA sense strand
ugcggaagcuguuggauga

SEQ ID NO: 1365059 - RNA, 19 nt, Homo sapiens
  misc_RNA (1)...(19): siRNA sense strand
ugacaaggcccugagcuuu

SEQ ID NO: 1365060 - RNA, 19 nt, Homo sapiens
  misc_RNA (1)...(19): siRNA sense strand
gacaaggcccugagcuuug

SEQ ID NO: 1365061 - RNA, 19 nt, Homo sapiens
  misc_RNA (1)...(19): siRNA sense strand
gcccaaggaugcugucaag

SEQ ID NO: 1365062 - RNA, 19 nt, Homo sapiens
  misc_RNA (1)...(19): siRNA sense strand
ugccugaacuacauaacuu

SEQ ID NO: 1365063 - RNA, 19 nt, Homo sapiens
  misc_RNA (1)...(19): siRNA sense strand
cugcagaaguacuccuauu

SEQ ID NO: 1365064 - RNA, 19 nt, Homo sapiens
  misc_RNA (1)...(19): siRNA sense strand
uacauaacuuccuacguau

SEQ ID NO: 1365065 - RNA, 19 nt, Homo sapiens
  misc_RNA (1)...(19): siRNA sense strand
gcagaaguacuccuauugc

SEQ ID NO: 1365066 - RNA, 19 nt, Homo sapiens
  misc_RNA (1)...(19): siRNA sense strand
gagcgucacggccaagugu

SEQ ID NO: 1365067 - RNA, 19 nt, Homo sapiens
  misc_RNA (1)...(19): siRNA sense strand
acacaggcuucaucaaggu

SEQ ID NO: 1365068 - RNA, 19 nt, Homo sapiens
  misc_RNA (1)...(19): siRNA sense strand
aagggcacgugaagucauu

SEQ ID NO: 1365069 - RNA, 19 nt, Homo sapiens
  misc_RNA (1)...(19): siRNA sense strand
gcacaagggcacgugaagu

SEQ ID NO: 1365070 - RNA, 19 nt, Homo sapiens
  misc_RNA (1)...(19): siRNA sense strand
ucugugcccuccagcaaga

SEQ ID NO: 1365071 - RNA, 19 nt, Homo sapiens
  misc_RNA (1)...(19): siRNA sense strand
cggaagcuguuggaugaug

SEQ ID NO: 1365072 - RNA, 19 nt, Homo sapiens
  misc_RNA (1)...(19): siRNA sense strand
uuacacaggcuucaucaag

SEQ ID NO: 1365073 - RNA, 19 nt, Homo sapiens
  misc_RNA (1)...(19): siRNA sense strand
uugaggcccugcugcgaaa

SEQ ID NO: 1365074 - RNA, 19 nt, Homo sapiens
  misc_RNA (1)...(19): siRNA sense strand
cacaagggcacgugaaguc

SEQ ID NO: 1365075 - RNA, 19 nt, Homo sapiens
  misc_RNA (1)...(19): siRNA sense strand
ggacggggcacaaguguca

SEQ ID NO: 1365076 - RNA, 19 nt, Homo sapiens
  misc_RNA (1)...(19): siRNA sense strand
caaguuugcacucuuugag

SEQ ID NO: 1365077 - RNA, 19 nt, Homo sapiens
  misc_RNA (1)...(19): siRNA sense strand
cgccagauccugcagaagu

SEQ ID NO: 1365078 - RNA, 19 nt, Homo sapiens
  misc_RNA (1)...(19): siRNA sense strand
gcaugccugaacuacauaa

SEQ ID NO: 1365079 - RNA, 19 nt, Homo sapiens
  misc_RNA (1)...(19): siRNA sense strand
cuacauaacuuccuacgua

SEQ ID NO: 1365080 - RNA, 19 nt, Homo sapiens
  misc_RNA (1)...(19): siRNA sense strand
gcaagaagccacccuccuu

SEQ ID NO: 1365081 - RNA, 19 nt, Homo sapiens
  misc_RNA (1)...(19): siRNA sense strand
caaggacgguucuuacaca

SEQ ID NO: 1365082 - RNA, 19 nt, Homo sapiens
  misc_RNA (1)...(19): siRNA sense strand
ggaagcuguuggaugauga

SEQ ID NO: 1365083 - RNA, 19 nt, Homo sapiens
  misc_RNA (1)...(19): siRNA sense strand
gccagauccugcagaagua

SEQ ID NO: 1365084 - RNA, 19 nt, Homo sapiens
  misc_RNA (1)...(19): siRNA sense strand
cagcaugccugaacuacau

SEQ ID NO: 1365085 - RNA, 19 nt, Homo sapiens
  misc_RNA (1)...(19): siRNA sense strand
ugaacuacauaacuuccua

SEQ ID NO: 1365086 - RNA, 19 nt, Homo sapiens
  misc_RNA (1)...(19): siRNA sense strand
ugcggaagcuguuggauga

SEQ ID NO: 1365087 - RNA, 19 nt, Homo sapiens
  misc_RNA (1)...(19): siRNA sense strand
ugacaaggcccugagcuuu

SEQ ID NO: 1365088 - RNA, 19 nt, Homo sapiens
  misc_RNA (1)...(19): siRNA sense strand
gacaaggcccugagcuuug

SEQ ID NO: 1365089 - RNA, 19 nt, Homo sapiens
  misc_RNA (1)...(19): siRNA sense strand
gcccaaggaugcugucaag

SEQ ID NO: 1365090 - RNA, 19 nt, Homo sapiens
  misc_RNA (1)...(19): siRNA sense strand
ugccugaacuacauaacuu

SEQ ID NO: 1365091 - RNA, 19 nt, Homo sapiens
  misc_RNA (1)...(19): siRNA sense strand
cugcagaaguacuccuauu

SEQ ID NO: 1365092 - RNA, 19 nt, Homo sapiens
  misc_RNA (1)...(19): siRNA sense strand
uacauaacuuccuacguau

SEQ ID NO: 1365093 - RNA, 19 nt, Homo sapiens
  misc_RNA (1)...(19): siRNA sense strand
gcagaaguacuccuauugc

SEQ ID NO: 1365094 - RNA, 19 nt, Homo sapiens
  misc_RNA (1)...(19): siRNA sense strand
gagcgucacggccaagugu

SEQ ID NO: 1365095 - RNA, 19 nt, Homo sapiens
  misc_RNA (1)...(19): siRNA sense strand
acacaggcuucaucaaggu

SEQ ID NO: 1365096 - RNA, 19 nt, Homo sapiens
  misc_RNA (1)...(19): siRNA sense strand
aagggcacgugaagucauu

SEQ ID NO: 1365097 - RNA, 19 nt, Homo sapiens
  misc_RNA (1)...(19): siRNA sense strand
gcacaagggcacgugaagu

SEQ ID NO: 1365098 - RNA, 19 nt, Homo sapiens
  misc_RNA (1)...(19): siRNA sense strand
ucugugcccuccagcaaga

SEQ ID NO: 1365099 - RNA, 19 nt, Homo sapiens
  misc_RNA (1)...(19): siRNA sense strand
cggaagcuguuggaugaug

SEQ ID NO: 1365100 - RNA, 19 nt, Homo sapiens
  misc_RNA (1)...(19): siRNA sense strand
uuacacaggcuucaucaag

SEQ ID NO: 1365101 - RNA, 19 nt, Homo sapiens
  misc_RNA (1)...(19): siRNA sense strand
uugaggcccugcugcgaaa

SEQ ID NO: 1365102 - RNA, 19 nt, Homo sapiens
  misc_RNA (1)...(19): siRNA sense strand
cacaagggcacgugaaguc

SEQ ID NO: 1365103 - RNA, 19 nt, Homo sapiens
  misc_RNA (1)...(19): siRNA sense strand
ggacggggcacaaguguca

SEQ ID NO: 1365104 - RNA, 19 nt, Homo sapiens
  misc_RNA (1)...(19): siRNA sense strand
caaguuugcacucuuugag

SEQ ID NO: 1365105 - RNA, 19 nt, Homo sapiens
  misc_RNA (1)...(19): siRNA sense strand
cgccagauccugcagaagu

SEQ ID NO: 1365106 - RNA, 19 nt, Homo sapiens
  misc_RNA (1)...(19): siRNA sense strand
gcaugccugaacuacauaa

SEQ ID NO: 1365107 - RNA, 19 nt, Homo sapiens
  misc_RNA (1)...(19): siRNA sense strand
cuacauaacuuccuacgua

SEQ ID NO: 1365108 - RNA, 19 nt, Homo sapiens
  misc_RNA (1)...(19): siRNA sense strand
gcaagaagccacccuccuu

SEQ ID NO: 1365109 - RNA, 19 nt, Homo sapiens
  misc_RNA (1)...(19): siRNA sense strand
caaggacgguucuuacaca

SEQ ID NO: 1365110 - RNA, 19 nt, Homo sapiens
  misc_RNA (1)...(19): siRNA sense strand
ggaagcuguuggaugauga

SEQ ID NO: 1365111 - RNA, 19 nt, Homo sapiens
  misc_RNA (1)...(19): siRNA sense strand
gccagauccugcagaagua

SEQ ID NO: 1365112 - RNA, 19 nt, Homo sapiens
  misc_RNA (1)...(19): siRNA sense strand
cagcaugccugaacuacau

SEQ ID NO: 1365113 - RNA, 19 nt, Homo sapiens
  misc_RNA (1)...(19): siRNA sense strand
ugaacuacauaacuuccua

SEQ ID NO: 1365114 - RNA, 19 nt, Homo sapiens
  misc_RNA (1)...(19): siRNA sense strand
ugcggaagcuguuggauga

SEQ ID NO: 1365115 - RNA, 19 nt, Homo sapiens
  misc_RNA (1)...(19): siRNA sense strand
ugacaaggcccugagcuuu

SEQ ID NO: 1365116 - RNA, 19 nt, Homo sapiens
  misc_RNA (1)...(19): siRNA sense strand
gacaaggcccugagcuuug

SEQ ID NO: 1365117 - RNA, 19 nt, Homo sapiens
  misc_RNA (1)...(19): siRNA sense strand
gcccaaggaugcugucaag

SEQ ID NO: 1365118 - RNA, 19 nt, Homo sapiens
  misc_RNA (1)...(19): siRNA sense strand
ugccugaacuacauaacuu

SEQ ID NO: 1365119 - RNA, 19 nt, Homo sapiens
  misc_RNA (1)...(19): siRNA sense strand
cugcagaaguacuccuauu

SEQ ID NO: 1365120 - RNA, 19 nt, Homo sapiens
  misc_RNA (1)...(19): siRNA sense strand
uacauaacuuccuacguau

SEQ ID NO: 1365121 - RNA, 19 nt, Homo sapiens
  misc_RNA (1)...(19): siRNA sense strand
gcagaaguacuccuauugc

SEQ ID NO: 1365122 - RNA, 19 nt, Homo sapiens
  misc_RNA (1)...(19): siRNA sense strand
gagcgucacggccaagugu

SEQ ID NO: 1365123 - RNA, 19 nt, Homo sapiens
  misc_RNA (1)...(19): siRNA sense strand
acacaggcuucaucaaggu

SEQ ID NO: 1365124 - RNA, 19 nt, Homo sapiens
  misc_RNA (1)...(19): siRNA sense strand
aagggcacgugaagucauu

SEQ ID NO: 1365125 - RNA, 19 nt, Homo sapiens
  misc_RNA (1)...(19): siRNA sense strand
gcacaagggcacgugaagu

SEQ ID NO: 1365126 - RNA, 19 nt, Homo sapiens
  misc_RNA (1)...(19): siRNA sense strand
ucugugcccuccagcaaga

SEQ ID NO: 1365127 - RNA, 19 nt, Homo sapiens
  misc_RNA (1)...(19): siRNA sense strand
cggaagcuguuggaugaug

SEQ ID NO: 1365128 - RNA, 19 nt, Homo sapiens
  misc_RNA (1)...(19): siRNA sense strand
uuacacaggcuucaucaag

SEQ ID NO: 1365129 - RNA, 19 nt, Homo sapiens
  misc_RNA (1)...(19): siRNA sense strand
uugaggcccugcugcgaaa

SEQ ID NO: 1365130 - RNA, 19 nt, Homo sapiens
  misc_RNA (1)...(19): siRNA sense strand
cacaagggcacgugaaguc

SEQ ID NO: 1365131 - RNA, 19 nt, Homo sapiens
  misc_RNA (1)...(19): siRNA sense strand
ggacggggcacaaguguca

SEQ ID NO: 1365132 - RNA, 19 nt, Homo sapiens
  misc_RNA (1)...(19): siRNA sense strand
caaguuugcacucuuugag

SEQ ID NO: 1365133 - RNA, 19 nt, Homo sapiens
  misc_RNA (1)...(19): siRNA sense strand
cgccagauccugcagaagu

SEQ ID NO: 1365134 - RNA, 19 nt, Homo sapiens
  misc_RNA (1)...(19): siRNA sense strand
gcaugccugaacuacauaa

SEQ ID NO: 1365135 - RNA, 19 nt, Homo sapiens
  misc_RNA (1)...(19): siRNA sense strand
cuacauaacuuccuacgua

SEQ ID NO: 1365136 - RNA, 19 nt, Homo sapiens
  misc_RNA (1)...(19): siRNA sense strand
gcaagaagccacccuccuu

SEQ ID NO: 1365137 - RNA, 19 nt, Homo sapiens
  misc_RNA (1)...(19): siRNA sense strand
caaggacgguucuuacaca

SEQ ID NO: 1365138 - RNA, 19 nt, Homo sapiens
  misc_RNA (1)...(19): siRNA sense strand
ggaagcuguuggaugauga

SEQ ID NO: 1365139 - RNA, 19 nt, Homo sapiens
  misc_RNA (1)...(19): siRNA sense strand
gccagauccugcagaagua

SEQ ID NO: 1365140 - RNA, 19 nt, Homo sapiens
  misc_RNA (1)...(19): siRNA sense strand
cagcaugccugaacuacau

SEQ ID NO: 1365141 - RNA, 19 nt, Homo sapiens
  misc_RNA (1)...(19): siRNA sense strand
ugaacuacauaacuuccua

SEQ ID NO: 1365142 - RNA, 19 nt, Homo sapiens
  misc_RNA (1)...(19): siRNA sense strand
ugcggaagcuguuggauga

SEQ ID NO: 1365143 - RNA, 19 nt, Homo sapiens
  misc_RNA (1)...(19): siRNA sense strand
ugacaaggcccugagcuuu

SEQ ID NO: 1365144 - RNA, 19 nt, Homo sapiens
  misc_RNA (1)...(19): siRNA sense strand
gacaaggcccugagcuuug

SEQ ID NO: 1365145 - RNA, 19 nt, Homo sapiens
  misc_RNA (1)...(19): siRNA sense strand
gcccaaggaugcugucaag

SEQ ID NO: 1365146 - RNA, 19 nt, Homo sapiens
  misc_RNA (1)...(19): siRNA sense strand
ugccugaacuacauaacuu

SEQ ID NO: 1365147 - RNA, 19 nt, Homo sapiens
  misc_RNA (1)...(19): siRNA sense strand
cugcagaaguacuccuauu

SEQ ID NO: 1365148 - RNA, 19 nt, Homo sapiens
  misc_RNA (1)...(19): siRNA sense strand
uacauaacuuccuacguau

SEQ ID NO: 1365149 - RNA, 19 nt, Homo sapiens
  misc_RNA (1)...(19): siRNA sense strand
gcagaaguacuccuauugc

SEQ ID NO: 1365150 - RNA, 19 nt, Homo sapiens
  misc_RNA (1)...(19): siRNA sense strand
gagcgucacggccaagugu

SEQ ID NO: 1365151 - RNA, 19 nt, Homo sapiens
  misc_RNA (1)...(19): siRNA sense strand
acacaggcuucaucaaggu

SEQ ID NO: 1365152 - RNA, 19 nt, Homo sapiens
  misc_RNA (1)...(19): siRNA sense strand
aagggcacgugaagucauu

SEQ ID NO: 1365153 - RNA, 19 nt, Homo sapiens
  misc_RNA (1)...(19): siRNA sense strand
gcacaagggcacgugaagu

SEQ ID NO: 1365154 - RNA, 19 nt, Homo sapiens
  misc_RNA (1)...(19): siRNA sense strand
ucugugcccuccagcaaga

SEQ ID NO: 1365155 - RNA, 19 nt, Homo sapiens
  misc_RNA (1)...(19): siRNA sense strand
cggaagcuguuggaugaug

SEQ ID NO: 1365156 - RNA, 19 nt, Homo sapiens
  misc_RNA (1)...(19): siRNA sense strand
uuacacaggcuucaucaag

SEQ ID NO: 1365157 - RNA, 19 nt, Homo sapiens
  misc_RNA (1)...(19): siRNA sense strand
uugaggcccugcugcgaaa

SEQ ID NO: 1365158 - RNA, 19 nt, Homo sapiens
  misc_RNA (1)...(19): siRNA sense strand
cacaagggcacgugaaguc

SEQ ID NO: 1365159 - RNA, 19 nt, Homo sapiens
  misc_RNA (1)...(19): siRNA sense strand
ggacggggcacaaguguca

SEQ ID NO: 1365160 - RNA, 19 nt, Homo sapiens
  misc_RNA (1)...(19): siRNA sense strand
caaguuugcacucuuugag

SEQ ID NO: 1365161 - RNA, 19 nt, Homo sapiens
  misc_RNA (1)...(19): siRNA sense strand
cgccagauccugcagaagu

SEQ ID NO: 1365162 - RNA, 19 nt, Homo sapiens
  misc_RNA (1)...(19): siRNA sense strand
gcaugccugaacuacauaa

SEQ ID NO: 1365163 - RNA, 19 nt, Homo sapiens
  misc_RNA (1)...(19): siRNA sense strand
gcaagaagccacccuccuu

SEQ ID NO: 1365164 - RNA, 19 nt, Homo sapiens
  misc_RNA (1)...(19): siRNA sense strand
caaggacgguucuuacaca

SEQ ID NO: 1365165 - RNA, 19 nt, Homo sapiens
  misc_RNA (1)...(19): siRNA sense strand
gcccaaggaugcugucaag

SEQ ID NO: 1365166 - RNA, 19 nt, Homo sapiens
  misc_RNA (1)...(19): siRNA sense strand
acacaggcuucaucaaggu

SEQ ID NO: 1365167 - RNA, 19 nt, Homo sapiens
  misc_RNA (1)...(19): siRNA sense strand
uuacacaggcuucaucaag

SEQ ID NO: 1365168 - RNA, 19 nt, Homo sapiens
  misc_RNA (1)...(19): siRNA sense strand
ucugugcccuccagcaaga

SEQ ID NO: 1365169 - RNA, 19 nt, Homo sapiens
  misc_RNA (1)...(19): siRNA sense strand
ggacggggcacaaguguca

SEQ ID NO: 1365170 - RNA, 19 nt, Homo sapiens
  misc_RNA (1)...(19): siRNA sense strand
gaaggucuccgaugucaua

SEQ ID NO: 1365171 - RNA, 19 nt, Homo sapiens
  misc_RNA (1)...(19): siRNA sense strand
gaucauacaugcgcuguga

SEQ ID NO: 1365172 - RNA, 19 nt, Homo sapiens
  misc_RNA (1)...(19): siRNA sense strand
gccgugagcuggugaagaa

SEQ ID NO: 1365173 - RNA, 19 nt, Homo sapiens
  misc_RNA (1)...(19): siRNA sense strand
ugaagaaggucuccgaugu

SEQ ID NO: 1365174 - RNA, 19 nt, Homo sapiens
  misc_RNA (1)...(19): siRNA sense strand
ggagcuggcuguaccugaa

SEQ ID NO: 1365175 - RNA, 19 nt, Homo sapiens
  misc_RNA (1)...(19): siRNA sense strand
gaucaugccuggguagugu

SEQ ID NO: 1365176 - RNA, 19 nt, Homo sapiens
  misc_RNA (1)...(19): siRNA sense strand
ugggacaucuggaaaggua

SEQ ID NO: 1365177 - RNA, 19 nt, Homo sapiens
  misc_RNA (1)...(19): siRNA sense strand
caaggaguucuuugaagua

SEQ ID NO: 1365178 - RNA, 19 nt, Homo sapiens
  misc_RNA (1)...(19): siRNA sense strand
acaaggaguucuuugaagu

SEQ ID NO: 1365179 - RNA, 19 nt, Homo sapiens
  misc_RNA (1)...(19): siRNA sense strand
gaaccuggcagaucuagag

SEQ ID NO: 1365180 - RNA, 19 nt, Homo sapiens
  misc_RNA (1)...(19): siRNA sense strand
ggucuccgaugucauaugg

SEQ ID NO: 1365181 - RNA, 19 nt, Homo sapiens
  misc_RNA (1)...(19): siRNA sense strand
ccacugucauccaggacua

SEQ ID NO: 1365182 - RNA, 19 nt, Homo sapiens
  misc_RNA (1)...(19): siRNA sense strand
acgaggagaucuacaagga

SEQ ID NO: 1365183 - RNA, 19 nt, Homo sapiens
  misc_RNA (1)...(19): siRNA sense strand
cgucaucccuaccaacguu

SEQ ID NO: 1365184 - RNA, 19 nt, Homo sapiens
  misc_RNA (1)...(19): siRNA sense strand
gaagaaggucuccgauguc

SEQ ID NO: 1365185 - RNA, 19 nt, Homo sapiens
  misc_RNA (1)...(19): siRNA sense strand
gggaagacgaggagaucua

SEQ ID NO: 1365186 - RNA, 19 nt, Homo sapiens
  misc_RNA (1)...(19): siRNA sense strand
gaacacaucuaccccuaca

SEQ ID NO: 1365187 - RNA, 19 nt, Homo sapiens
  misc_RNA (1)...(19): siRNA sense strand
gaagaugaagggcaugaag

SEQ ID NO: 1365188 - RNA, 19 nt, Homo sapiens
  misc_RNA (1)...(19): siRNA sense strand
ugacuacacucugucuuuc

SEQ ID NO: 1365189 - RNA, 19 nt, Homo sapiens
  misc_RNA (1)...(19): siRNA sense strand
cuacaaggaguucuuugaa

SEQ ID NO: 1365190 - RNA, 19 nt, Homo sapiens
  misc_RNA (1)...(19): siRNA sense strand
cagaaggugcgcauaguga

SEQ ID NO: 1365191 - RNA, 19 nt, Homo sapiens
  misc_RNA (1)...(19): siRNA sense strand
gccaucaacccuuccauug

SEQ ID NO: 1365192 - RNA, 19 nt, Homo sapiens
  misc_RNA (1)...(19): siRNA sense strand
gugacuacacucugucuuu

SEQ ID NO: 1365193 - RNA, 19 nt, Homo sapiens
  misc_RNA (1)...(19): siRNA sense strand
ugaaguagccaaugauguc

SEQ ID NO: 1365194 - RNA, 19 nt, Homo sapiens
  misc_RNA (1)...(19): siRNA sense strand
gaucuacaaggaguucuuu

SEQ ID NO: 1365195 - RNA, 19 nt, Homo sapiens
  misc_RNA (1)...(19): siRNA sense strand
gcagaaggugcgcauagug

SEQ ID NO: 1365196 - RNA, 19 nt, Homo sapiens
  misc_RNA (1)...(19): siRNA sense strand
aagaaggucuccgauguca

SEQ ID NO: 1365197 - RNA, 19 nt, Homo sapiens
  misc_RNA (1)...(19): siRNA sense strand
gaccuacuaucgggaugaa

SEQ ID NO: 1365198 - RNA, 19 nt, Homo sapiens
  misc_RNA (1)...(19): siRNA sense strand
uagggaaccuggcagaucu

SEQ ID NO: 1365199 - RNA, 19 nt, Homo sapiens
  misc_RNA (1)...(19): siRNA sense strand
ucuccgaugucauauggaa

SEQ ID NO: 1365200 - RNA, 19 nt, Homo sapiens
  misc_RNA (1)...(19): siRNA sense strand
gagaagaugaagggcauga

SEQ ID NO: 1365201 - RNA, 19 nt, Homo sapiens
  misc_RNA (1)...(19): siRNA sense strand
cgacguggugcgccuguuu

SEQ ID NO: 1365202 - RNA, 19 nt, Homo sapiens
  misc_RNA (1)...(19): siRNA sense strand
ucuuugaaguagccaauga

SEQ ID NO: 1365203 - RNA, 19 nt, Homo sapiens
  misc_RNA (1)...(19): siRNA sense strand
uacaaggaguucuuugaag

SEQ ID NO: 1365204 - RNA, 19 nt, Homo sapiens
  misc_RNA (1)...(19): siRNA sense strand
ccugaaaggaucauacaug

SEQ ID NO: 1365205 - RNA, 19 nt, Homo sapiens
  misc_RNA (1)...(19): siRNA sense strand
gaaguagccaaugauguca

SEQ ID NO: 1365206 - RNA, 19 nt, Homo sapiens
  misc_RNA (1)...(19): siRNA sense strand
ccacauccagucccucuuc

SEQ ID NO: 1365207 - RNA, 19 nt, Homo sapiens
  misc_RNA (1)...(19): siRNA sense strand
ggcagaaggugcgcauagu

SEQ ID NO: 1365208 - RNA, 19 nt, Homo sapiens
  misc_RNA (1)...(19): siRNA sense strand
gcagaugaagaagcagaaa

SEQ ID NO: 1365209 - RNA, 19 nt, Homo sapiens
  misc_RNA (1)...(19): siRNA sense strand
cagcuccgguguggccuuu

SEQ ID NO: 1365210 - RNA, 19 nt, Homo sapiens
  misc_RNA (1)...(19): siRNA sense strand
gaccugggacaucuggaaa

SEQ ID NO: 1365211 - RNA, 19 nt, Homo sapiens
  misc_RNA (1)...(19): siRNA sense strand
gagcuggcuguaccugaaa

SEQ ID NO: 1365212 - RNA, 19 nt, Homo sapiens
  misc_RNA (1)...(19): siRNA sense strand
cagacccacucacccucua

SEQ ID NO: 1365213 - RNA, 19 nt, Homo sapiens
  misc_RNA (1)...(19): siRNA sense strand
ggagaucuacaaggaguuc

SEQ ID NO: 1365214 - RNA, 19 nt, Homo sapiens
  misc_RNA (1)...(19): siRNA sense strand
gcugugaccgcaagaugga

SEQ ID NO: 1365215 - RNA, 19 nt, Homo sapiens
  misc_RNA (1)...(19): siRNA sense strand
ggaagccuccugggacugu

SEQ ID NO: 1365216 - RNA, 19 nt, Homo sapiens
  misc_RNA (1)...(19): siRNA sense strand
gggcugggccaccuuucuu

SEQ ID NO: 1365217 - RNA, 19 nt, Homo sapiens
  misc_RNA (1)...(19): siRNA sense strand
ucuaugaccugggacaucu

SEQ ID NO: 1365218 - RNA, 19 nt, Homo sapiens
  misc_RNA (1)...(19): siRNA sense strand
ugaaggaggcagccagcuu

SEQ ID NO: 1365219 - RNA, 19 nt, Homo sapiens
  misc_RNA (1)...(19): siRNA sense strand
ggaagacgaggagaucuac

SEQ ID NO: 1365220 - RNA, 19 nt, Homo sapiens
  misc_RNA (1)...(19): siRNA sense strand
ccucagccaagaccuacua

SEQ ID NO: 1365221 - RNA, 19 nt, Homo sapiens
  misc_RNA (1)...(19): siRNA sense strand
agucgcaagugcagaugaa

SEQ ID NO: 1365222 - RNA, 19 nt, Homo sapiens
  misc_RNA (1)...(19): siRNA sense strand
ucuacaaggaguucuuuga

SEQ ID NO: 1365223 - RNA, 19 nt, Homo sapiens
  misc_RNA (1)...(19): siRNA sense strand
ugcucuggcugcucuauga

SEQ ID NO: 1365224 - RNA, 19 nt, Homo sapiens
  misc_RNA (1)...(19): siRNA sense strand
gcagcgcaaaggccucuga

SEQ ID NO: 1365225 - RNA, 19 nt, Homo sapiens
  misc_RNA (1)...(19): siRNA sense strand
agauggagguggcguucau

SEQ ID NO: 1365226 - RNA, 19 nt, Homo sapiens
  misc_RNA (1)...(19): siRNA sense strand
gaugaagaagcagaaagug

SEQ ID NO: 1365227 - RNA, 19 nt, Homo sapiens
  misc_RNA (1)...(19): siRNA sense strand
cgcaagugcagaugaagaa

SEQ ID NO: 1365228 - RNA, 19 nt, Homo sapiens
  misc_RNA (1)...(19): siRNA sense strand
uccagucccucuucagcuu

SEQ ID NO: 1365229 - RNA, 19 nt, Homo sapiens
  misc_RNA (1)...(19): siRNA sense strand
gcgcugugaccgcaagaug

SEQ ID NO: 1365230 - RNA, 19 nt, Homo sapiens
  misc_RNA (1)...(19): siRNA sense strand
uggccgaccugucuaucau

SEQ ID NO: 1365231 - RNA, 19 nt, Homo sapiens
  misc_RNA (1)...(19): siRNA sense strand
aaggaguucuuugaaguag

SEQ ID NO: 1365232 - RNA, 19 nt, Homo sapiens
  misc_RNA (1)...(19): siRNA sense strand
cagccaagaccuacuaucg

SEQ ID NO: 1365233 - RNA, 19 nt, Homo sapiens
  misc_RNA (1)...(19): siRNA sense strand
gucccucuauccucgagaa

SEQ ID NO: 1365234 - RNA, 19 nt, Homo sapiens
  misc_RNA (1)...(19): siRNA sense strand
gccaucaagcugcaacuca

SEQ ID NO: 1365235 - RNA, 19 nt, Homo sapiens
  misc_RNA (1)...(19): siRNA sense strand
ccgacucgcuggagcuucu

SEQ ID NO: 1365236 - RNA, 19 nt, Homo sapiens
  misc_RNA (1)...(19): siRNA sense strand
gaaggucuccgaugucaua

SEQ ID NO: 1365237 - RNA, 19 nt, Homo sapiens
  misc_RNA (1)...(19): siRNA sense strand
gaucauacaugcgcuguga

SEQ ID NO: 1365238 - RNA, 19 nt, Homo sapiens
  misc_RNA (1)...(19): siRNA sense strand
gccgugagcuggugaagaa

SEQ ID NO: 1365239 - RNA, 19 nt, Homo sapiens
  misc_RNA (1)...(19): siRNA sense strand
ugaagaaggucuccgaugu

SEQ ID NO: 1365240 - RNA, 19 nt, Homo sapiens
  misc_RNA (1)...(19): siRNA sense strand
ggagcuggcuguaccugaa

SEQ ID NO: 1365241 - RNA, 19 nt, Homo sapiens
  misc_RNA (1)...(19): siRNA sense strand
gaucaugccuggguagugu

SEQ ID NO: 1365242 - RNA, 19 nt, Homo sapiens
  misc_RNA (1)...(19): siRNA sense strand
ugggacaucuggaaaggua

SEQ ID NO: 1365243 - RNA, 19 nt, Homo sapiens
  misc_RNA (1)...(19): siRNA sense strand
caaggaguucuuugaagua

SEQ ID NO: 1365244 - RNA, 19 nt, Homo sapiens
  misc_RNA (1)...(19): siRNA sense strand
acaaggaguucuuugaagu

SEQ ID NO: 1365245 - RNA, 19 nt, Homo sapiens
  misc_RNA (1)...(19): siRNA sense strand
gaaccuggcagaucuagag

SEQ ID NO: 1365246 - RNA, 19 nt, Homo sapiens
  misc_RNA (1)...(19): siRNA sense strand
ggucuccgaugucauaugg

SEQ ID NO: 1365247 - RNA, 19 nt, Homo sapiens
  misc_RNA (1)...(19): siRNA sense strand
ccacugucauccaggacua

SEQ ID NO: 1365248 - RNA, 19 nt, Homo sapiens
  misc_RNA (1)...(19): siRNA sense strand
acgaggagaucuacaagga

SEQ ID NO: 1365249 - RNA, 19 nt, Homo sapiens
  misc_RNA (1)...(19): siRNA sense strand
cgucaucccuaccaacguu

SEQ ID NO: 1365250 - RNA, 19 nt, Homo sapiens
  misc_RNA (1)...(19): siRNA sense strand
gaagaaggucuccgauguc

SEQ ID NO: 1365251 - RNA, 19 nt, Homo sapiens
  misc_RNA (1)...(19): siRNA sense strand
gggaagacgaggagaucua

SEQ ID NO: 1365252 - RNA, 19 nt, Homo sapiens
  misc_RNA (1)...(19): siRNA sense strand
gaacacaucuaccccuaca

SEQ ID NO: 1365253 - RNA, 19 nt, Homo sapiens
  misc_RNA (1)...(19): siRNA sense strand
gaagaugaagggcaugaag

SEQ ID NO: 1365254 - RNA, 19 nt, Homo sapiens
  misc_RNA (1)...(19): siRNA sense strand
ugacuacacucugucuuuc

SEQ ID NO: 1365255 - RNA, 19 nt, Homo sapiens
  misc_RNA (1)...(19): siRNA sense strand
cuacaaggaguucuuugaa

SEQ ID NO: 1365256 - RNA, 19 nt, Homo sapiens
  misc_RNA (1)...(19): siRNA sense strand
cagaaggugcgcauaguga

SEQ ID NO: 1365257 - RNA, 19 nt, Homo sapiens
  misc_RNA (1)...(19): siRNA sense strand
gccaucaacccuuccauug

SEQ ID NO: 1365258 - RNA, 19 nt, Homo sapiens
  misc_RNA (1)...(19): siRNA sense strand
gugacuacacucugucuuu

SEQ ID NO: 1365259 - RNA, 19 nt, Homo sapiens
  misc_RNA (1)...(19): siRNA sense strand
ugaaguagccaaugauguc

SEQ ID NO: 1365260 - RNA, 19 nt, Homo sapiens
  misc_RNA (1)...(19): siRNA sense strand
gaucuacaaggaguucuuu

SEQ ID NO: 1365261 - RNA, 19 nt, Homo sapiens
  misc_RNA (1)...(19): siRNA sense strand
gcagaaggugcgcauagug

SEQ ID NO: 1365262 - RNA, 19 nt, Homo sapiens
  misc_RNA (1)...(19): siRNA sense strand
aagaaggucuccgauguca

SEQ ID NO: 1365263 - RNA, 19 nt, Homo sapiens
  misc_RNA (1)...(19): siRNA sense strand
gaccuacuaucgggaugaa

SEQ ID NO: 1365264 - RNA, 19 nt, Homo sapiens
  misc_RNA (1)...(19): siRNA sense strand
uagggaaccuggcagaucu

SEQ ID NO: 1365265 - RNA, 19 nt, Homo sapiens
  misc_RNA (1)...(19): siRNA sense strand
ucuccgaugucauauggaa

SEQ ID NO: 1365266 - RNA, 19 nt, Homo sapiens
  misc_RNA (1)...(19): siRNA sense strand
gagaagaugaagggcauga

SEQ ID NO: 1365267 - RNA, 19 nt, Homo sapiens
  misc_RNA (1)...(19): siRNA sense strand
cgacguggugcgccuguuu

SEQ ID NO: 1365268 - RNA, 19 nt, Homo sapiens
  misc_RNA (1)...(19): siRNA sense strand
ucuuugaaguagccaauga

SEQ ID NO: 1365269 - RNA, 19 nt, Homo sapiens
  misc_RNA (1)...(19): siRNA sense strand
uacaaggaguucuuugaag

SEQ ID NO: 1365270 - RNA, 19 nt, Homo sapiens
  misc_RNA (1)...(19): siRNA sense strand
ccugaaaggaucauacaug

SEQ ID NO: 1365271 - RNA, 19 nt, Homo sapiens
  misc_RNA (1)...(19): siRNA sense strand
gaaguagccaaugauguca

SEQ ID NO: 1365272 - RNA, 19 nt, Homo sapiens
  misc_RNA (1)...(19): siRNA sense strand
ccacauccagucccucuuc

SEQ ID NO: 1365273 - RNA, 19 nt, Homo sapiens
  misc_RNA (1)...(19): siRNA sense strand
ggcagaaggugcgcauagu

SEQ ID NO: 1365274 - RNA, 19 nt, Homo sapiens
  misc_RNA (1)...(19): siRNA sense strand
gcagaugaagaagcagaaa

SEQ ID NO: 1365275 - RNA, 19 nt, Homo sapiens
  misc_RNA (1)...(19): siRNA sense strand
cagcuccgguguggccuuu

SEQ ID NO: 1365276 - RNA, 19 nt, Homo sapiens
  misc_RNA (1)...(19): siRNA sense strand
gaccugggacaucuggaaa

SEQ ID NO: 1365277 - RNA, 19 nt, Homo sapiens
  misc_RNA (1)...(19): siRNA sense strand
gagcuggcuguaccugaaa

SEQ ID NO: 1365278 - RNA, 19 nt, Homo sapiens
  misc_RNA (1)...(19): siRNA sense strand
cagacccacucacccucua

SEQ ID NO: 1365279 - RNA, 19 nt, Homo sapiens
  misc_RNA (1)...(19): siRNA sense strand
ggagaucuacaaggaguuc

SEQ ID NO: 1365280 - RNA, 19 nt, Homo sapiens
  misc_RNA (1)...(19): siRNA sense strand
gcugugaccgcaagaugga

SEQ ID NO: 1365281 - RNA, 19 nt, Homo sapiens
  misc_RNA (1)...(19): siRNA sense strand
ggaagccuccugggacugu

SEQ ID NO: 1365282 - RNA, 19 nt, Homo sapiens
  misc_RNA (1)...(19): siRNA sense strand
gggcugggccaccuuucuu

SEQ ID NO: 1365283 - RNA, 19 nt, Homo sapiens
  misc_RNA (1)...(19): siRNA sense strand
ucuaugaccugggacaucu

SEQ ID NO: 1365284 - RNA, 19 nt, Homo sapiens
  misc_RNA (1)...(19): siRNA sense strand
ugaaggaggcagccagcuu

SEQ ID NO: 1365285 - RNA, 19 nt, Homo sapiens
  misc_RNA (1)...(19): siRNA sense strand
ggaagacgaggagaucuac

SEQ ID NO: 1365286 - RNA, 19 nt, Homo sapiens
  misc_RNA (1)...(19): siRNA sense strand
ccucagccaagaccuacua

SEQ ID NO: 1365287 - RNA, 19 nt, Homo sapiens
  misc_RNA (1)...(19): siRNA sense strand
agucgcaagugcagaugaa

SEQ ID NO: 1365288 - RNA, 19 nt, Homo sapiens
  misc_RNA (1)...(19): siRNA sense strand
ucuacaaggaguucuuuga

SEQ ID NO: 1365289 - RNA, 19 nt, Homo sapiens
  misc_RNA (1)...(19): siRNA sense strand
ugcucuggcugcucuauga

SEQ ID NO: 1365290 - RNA, 19 nt, Homo sapiens
  misc_RNA (1)...(19): siRNA sense strand
gcagcgcaaaggccucuga

SEQ ID NO: 1365291 - RNA, 19 nt, Homo sapiens
  misc_RNA (1)...(19): siRNA sense strand
agauggagguggcguucau

SEQ ID NO: 1365292 - RNA, 19 nt, Homo sapiens
  misc_RNA (1)...(19): siRNA sense strand
gaugaagaagcagaaagug

SEQ ID NO: 1365293 - RNA, 19 nt, Homo sapiens
  misc_RNA (1)...(19): siRNA sense strand
cgcaagugcagaugaagaa

SEQ ID NO: 1365294 - RNA, 19 nt, Homo sapiens
  misc_RNA (1)...(19): siRNA sense strand
uccagucccucuucagcuu

SEQ ID NO: 1365295 - RNA, 19 nt, Homo sapiens
  misc_RNA (1)...(19): siRNA sense strand
gcgcugugaccgcaagaug

SEQ ID NO: 1365296 - RNA, 19 nt, Homo sapiens
  misc_RNA (1)...(19): siRNA sense strand
uggccgaccugucuaucau

SEQ ID NO: 1365297 - RNA, 19 nt, Homo sapiens
  misc_RNA (1)...(19): siRNA sense strand
aaggaguucuuugaaguag

SEQ ID NO: 1365298 - RNA, 19 nt, Homo sapiens
  misc_RNA (1)...(19): siRNA sense strand
cagccaagaccuacuaucg

SEQ ID NO: 1365299 - RNA, 19 nt, Homo sapiens
  misc_RNA (1)...(19): siRNA sense strand
gucccucuauccucgagaa

SEQ ID NO: 1365300 - RNA, 19 nt, Homo sapiens
  misc_RNA (1)...(19): siRNA sense strand
gccaucaagcugcaacuca

SEQ ID NO: 1365301 - RNA, 19 nt, Homo sapiens
  misc_RNA (1)...(19): siRNA sense strand
ccgacucgcuggagcuucu

SEQ ID NO: 1365302 - RNA, 19 nt, Homo sapiens
  misc_RNA (1)...(19): siRNA sense strand
gaaggucuccgaugucaua

SEQ ID NO: 1365303 - RNA, 19 nt, Homo sapiens
  misc_RNA (1)...(19): siRNA sense strand
gaucauacaugcgcuguga

SEQ ID NO: 1365304 - RNA, 19 nt, Homo sapiens
  misc_RNA (1)...(19): siRNA sense strand
gccgugagcuggugaagaa

SEQ ID NO: 1365305 - RNA, 19 nt, Homo sapiens
  misc_RNA (1)...(19): siRNA sense strand
ugaagaaggucuccgaugu

SEQ ID NO: 1365306 - RNA, 19 nt, Homo sapiens
  misc_RNA (1)...(19): siRNA sense strand
ggagcuggcuguaccugaa

SEQ ID NO: 1365307 - RNA, 19 nt, Homo sapiens
  misc_RNA (1)...(19): siRNA sense strand
gaucaugccuggguagugu

SEQ ID NO: 1365308 - RNA, 19 nt, Homo sapiens
  misc_RNA (1)...(19): siRNA sense strand
ugggacaucuggaaaggua

SEQ ID NO: 1365309 - RNA, 19 nt, Homo sapiens
  misc_RNA (1)...(19): siRNA sense strand
caaggaguucuuugaagua

SEQ ID NO: 1365310 - RNA, 19 nt, Homo sapiens
  misc_RNA (1)...(19): siRNA sense strand
acaaggaguucuuugaagu

SEQ ID NO: 1365311 - RNA, 19 nt, Homo sapiens
  misc_RNA (1)...(19): siRNA sense strand
gaaccuggcagaucuagag

SEQ ID NO: 1365312 - RNA, 19 nt, Homo sapiens
  misc_RNA (1)...(19): siRNA sense strand
ggucuccgaugucauaugg

SEQ ID NO: 1365313 - RNA, 19 nt, Homo sapiens
  misc_RNA (1)...(19): siRNA sense strand
ccacugucauccaggacua

SEQ ID NO: 1365314 - RNA, 19 nt, Homo sapiens
  misc_RNA (1)...(19): siRNA sense strand
acgaggagaucuacaagga

SEQ ID NO: 1365315 - RNA, 19 nt, Homo sapiens
  misc_RNA (1)...(19): siRNA sense strand
cgucaucccuaccaacguu

SEQ ID NO: 1365316 - RNA, 19 nt, Homo sapiens
  misc_RNA (1)...(19): siRNA sense strand
gaagaaggucuccgauguc

SEQ ID NO: 1365317 - RNA, 19 nt, Homo sapiens
  misc_RNA (1)...(19): siRNA sense strand
gggaagacgaggagaucua

SEQ ID NO: 1365318 - RNA, 19 nt, Homo sapiens
  misc_RNA (1)...(19): siRNA sense strand
gaacacaucuaccccuaca

SEQ ID NO: 1365319 - RNA, 19 nt, Homo sapiens
  misc_RNA (1)...(19): siRNA sense strand
gaagaugaagggcaugaag

SEQ ID NO: 1365320 - RNA, 19 nt, Homo sapiens
  misc_RNA (1)...(19): siRNA sense strand
ugacuacacucugucuuuc

SEQ ID NO: 1365321 - RNA, 19 nt, Homo sapiens
  misc_RNA (1)...(19): siRNA sense strand
cuacaaggaguucuuugaa

SEQ ID NO: 1365322 - RNA, 19 nt, Homo sapiens
  misc_RNA (1)...(19): siRNA sense strand
cagaaggugcgcauaguga

SEQ ID NO: 1365323 - RNA, 19 nt, Homo sapiens
  misc_RNA (1)...(19): siRNA sense strand
gccaucaacccuuccauug

SEQ ID NO: 1365324 - RNA, 19 nt, Homo sapiens
  misc_RNA (1)...(19): siRNA sense strand
gugacuacacucugucuuu

SEQ ID NO: 1365325 - RNA, 19 nt, Homo sapiens
  misc_RNA (1)...(19): siRNA sense strand
ugaaguagccaaugauguc

SEQ ID NO: 1365326 - RNA, 19 nt, Homo sapiens
  misc_RNA (1)...(19): siRNA sense strand
gaucuacaaggaguucuuu

SEQ ID NO: 1365327 - RNA, 19 nt, Homo sapiens
  misc_RNA (1)...(19): siRNA sense strand
gcagaaggugcgcauagug

SEQ ID NO: 1365328 - RNA, 19 nt, Homo sapiens
  misc_RNA (1)...(19): siRNA sense strand
aagaaggucuccgauguca

SEQ ID NO: 1365329 - RNA, 19 nt, Homo sapiens
  misc_RNA (1)...(19): siRNA sense strand
gaccuacuaucgggaugaa

SEQ ID NO: 1365330 - RNA, 19 nt, Homo sapiens
  misc_RNA (1)...(19): siRNA sense strand
uagggaaccuggcagaucu

SEQ ID NO: 1365331 - RNA, 19 nt, Homo sapiens
  misc_RNA (1)...(19): siRNA sense strand
ucuccgaugucauauggaa

SEQ ID NO: 1365332 - RNA, 19 nt, Homo sapiens
  misc_RNA (1)...(19): siRNA sense strand
gagaagaugaagggcauga

SEQ ID NO: 1365333 - RNA, 19 nt, Homo sapiens
  misc_RNA (1)...(19): siRNA sense strand
cgacguggugcgccuguuu

SEQ ID NO: 1365334 - RNA, 19 nt, Homo sapiens
  misc_RNA (1)...(19): siRNA sense strand
ucuuugaaguagccaauga

SEQ ID NO: 1365335 - RNA, 19 nt, Homo sapiens
  misc_RNA (1)...(19): siRNA sense strand
uacaaggaguucuuugaag

SEQ ID NO: 1365336 - RNA, 19 nt, Homo sapiens
  misc_RNA (1)...(19): siRNA sense strand
ccugaaaggaucauacaug

SEQ ID NO: 1365337 - RNA, 19 nt, Homo sapiens
  misc_RNA (1)...(19): siRNA sense strand
gaaguagccaaugauguca

SEQ ID NO: 1365338 - RNA, 19 nt, Homo sapiens
  misc_RNA (1)...(19): siRNA sense strand
ccacauccagucccucuuc

SEQ ID NO: 1365339 - RNA, 19 nt, Homo sapiens
  misc_RNA (1)...(19): siRNA sense strand
ggcagaaggugcgcauagu

SEQ ID NO: 1365340 - RNA, 19 nt, Homo sapiens
  misc_RNA (1)...(19): siRNA sense strand
gcagaugaagaagcagaaa

SEQ ID NO: 1365341 - RNA, 19 nt, Homo sapiens
  misc_RNA (1)...(19): siRNA sense strand
cagcuccgguguggccuuu

SEQ ID NO: 1365342 - RNA, 19 nt, Homo sapiens
  misc_RNA (1)...(19): siRNA sense strand
gaccugggacaucuggaaa

SEQ ID NO: 1365343 - RNA, 19 nt, Homo sapiens
  misc_RNA (1)...(19): siRNA sense strand
gagcuggcuguaccugaaa

SEQ ID NO: 1365344 - RNA, 19 nt, Homo sapiens
  misc_RNA (1)...(19): siRNA sense strand
cagacccacucacccucua

SEQ ID NO: 1365345 - RNA, 19 nt, Homo sapiens
  misc_RNA (1)...(19): siRNA sense strand
ggagaucuacaaggaguuc

SEQ ID NO: 1365346 - RNA, 19 nt, Homo sapiens
  misc_RNA (1)...(19): siRNA sense strand
gcugugaccgcaagaugga

SEQ ID NO: 1365347 - RNA, 19 nt, Homo sapiens
  misc_RNA (1)...(19): siRNA sense strand
ggaagccuccugggacugu

SEQ ID NO: 1365348 - RNA, 19 nt, Homo sapiens
  misc_RNA (1)...(19): siRNA sense strand
gggcugggccaccuuucuu

SEQ ID NO: 1365349 - RNA, 19 nt, Homo sapiens
  misc_RNA (1)...(19): siRNA sense strand
ucuaugaccugggacaucu

SEQ ID NO: 1365350 - RNA, 19 nt, Homo sapiens
  misc_RNA (1)...(19): siRNA sense strand
ugaaggaggcagccagcuu

SEQ ID NO: 1365351 - RNA, 19 nt, Homo sapiens
  misc_RNA (1)...(19): siRNA sense strand
ggaagacgaggagaucuac

SEQ ID NO: 1365352 - RNA, 19 nt, Homo sapiens
  misc_RNA (1)...(19): siRNA sense strand
ccucagccaagaccuacua

SEQ ID NO: 1365353 - RNA, 19 nt, Homo sapiens
  misc_RNA (1)...(19): siRNA sense strand
agucgcaagugcagaugaa

SEQ ID NO: 1365354 - RNA, 19 nt, Homo sapiens
  misc_RNA (1)...(19): siRNA sense strand
ucuacaaggaguucuuuga

SEQ ID NO: 1365355 - RNA, 19 nt, Homo sapiens
  misc_RNA (1)...(19): siRNA sense strand
ugcucuggcugcucuauga

SEQ ID NO: 1365356 - RNA, 19 nt, Homo sapiens
  misc_RNA (1)...(19): siRNA sense strand
gcagcgcaaaggccucuga

SEQ ID NO: 1365357 - RNA, 19 nt, Homo sapiens
  misc_RNA (1)...(19): siRNA sense strand
agauggagguggcguucau

SEQ ID NO: 1365358 - RNA, 19 nt, Homo sapiens
  misc_RNA (1)...(19): siRNA sense strand
gaugaagaagcagaaagug

SEQ ID NO: 1365359 - RNA, 19 nt, Homo sapiens
  misc_RNA (1)...(19): siRNA sense strand
cgcaagugcagaugaagaa

SEQ ID NO: 1365360 - RNA, 19 nt, Homo sapiens
  misc_RNA (1)...(19): siRNA sense strand
uccagucccucuucagcuu

SEQ ID NO: 1365361 - RNA, 19 nt, Homo sapiens
  misc_RNA (1)...(19): siRNA sense strand
gcgcugugaccgcaagaug

SEQ ID NO: 1365362 - RNA, 19 nt, Homo sapiens
  misc_RNA (1)...(19): siRNA sense strand
uggccgaccugucuaucau

SEQ ID NO: 1365363 - RNA, 19 nt, Homo sapiens
  misc_RNA (1)...(19): siRNA sense strand
aaggaguucuuugaaguag

SEQ ID NO: 1365364 - RNA, 19 nt, Homo sapiens
  misc_RNA (1)...(19): siRNA sense strand
cagccaagaccuacuaucg

SEQ ID NO: 1365365 - RNA, 19 nt, Homo sapiens
  misc_RNA (1)...(19): siRNA sense strand
gucccucuauccucgagaa

SEQ ID NO: 1365366 - RNA, 19 nt, Homo sapiens
  misc_RNA (1)...(19): siRNA sense strand
gccaucaagcugcaacuca

SEQ ID NO: 1365367 - RNA, 19 nt, Homo sapiens
  misc_RNA (1)...(19): siRNA sense strand
ccgacucgcuggagcuucu

SEQ ID NO: 1365368 - RNA, 19 nt, Homo sapiens
  misc_RNA (1)...(19): siRNA sense strand
gaaggucuccgaugucaua

SEQ ID NO: 1365369 - RNA, 19 nt, Homo sapiens
  misc_RNA (1)...(19): siRNA sense strand
gaucauacaugcgcuguga

SEQ ID NO: 1365370 - RNA, 19 nt, Homo sapiens
  misc_RNA (1)...(19): siRNA sense strand
gccgugagcuggugaagaa

SEQ ID NO: 1365371 - RNA, 19 nt, Homo sapiens
  misc_RNA (1)...(19): siRNA sense strand
ugaagaaggucuccgaugu

SEQ ID NO: 1365372 - RNA, 19 nt, Homo sapiens
  misc_RNA (1)...(19): siRNA sense strand
ggagcuggcuguaccugaa

SEQ ID NO: 1365373 - RNA, 19 nt, Homo sapiens
  misc_RNA (1)...(19): siRNA sense strand
gaucaugccuggguagugu

SEQ ID NO: 1365374 - RNA, 19 nt, Homo sapiens
  misc_RNA (1)...(19): siRNA sense strand
ugggacaucuggaaaggua

SEQ ID NO: 1365375 - RNA, 19 nt, Homo sapiens
  misc_RNA (1)...(19): siRNA sense strand
caaggaguucuuugaagua

SEQ ID NO: 1365376 - RNA, 19 nt, Homo sapiens
  misc_RNA (1)...(19): siRNA sense strand
acaaggaguucuuugaagu

SEQ ID NO: 1365377 - RNA, 19 nt, Homo sapiens
  misc_RNA (1)...(19): siRNA sense strand
gaaccuggcagaucuagag

SEQ ID NO: 1365378 - RNA, 19 nt, Homo sapiens
  misc_RNA (1)...(19): siRNA sense strand
ggucuccgaugucauaugg

SEQ ID NO: 1365379 - RNA, 19 nt, Homo sapiens
  misc_RNA (1)...(19): siRNA sense strand
ccacugucauccaggacua

SEQ ID NO: 1365380 - RNA, 19 nt, Homo sapiens
  misc_RNA (1)...(19): siRNA sense strand
acgaggagaucuacaagga

SEQ ID NO: 1365381 - RNA, 19 nt, Homo sapiens
  misc_RNA (1)...(19): siRNA sense strand
cgucaucccuaccaacguu

SEQ ID NO: 1365382 - RNA, 19 nt, Homo sapiens
  misc_RNA (1)...(19): siRNA sense strand
gaagaaggucuccgauguc

SEQ ID NO: 1365383 - RNA, 19 nt, Homo sapiens
  misc_RNA (1)...(19): siRNA sense strand
gggaagacgaggagaucua

SEQ ID NO: 1365384 - RNA, 19 nt, Homo sapiens
  misc_RNA (1)...(19): siRNA sense strand
gaacacaucuaccccuaca

SEQ ID NO: 1365385 - RNA, 19 nt, Homo sapiens
  misc_RNA (1)...(19): siRNA sense strand
gaagaugaagggcaugaag

SEQ ID NO: 1365386 - RNA, 19 nt, Homo sapiens
  misc_RNA (1)...(19): siRNA sense strand
ugacuacacucugucuuuc

SEQ ID NO: 1365387 - RNA, 19 nt, Homo sapiens
  misc_RNA (1)...(19): siRNA sense strand
cuacaaggaguucuuugaa

SEQ ID NO: 1365388 - RNA, 19 nt, Homo sapiens
  misc_RNA (1)...(19): siRNA sense strand
cagaaggugcgcauaguga

SEQ ID NO: 1365389 - RNA, 19 nt, Homo sapiens
  misc_RNA (1)...(19): siRNA sense strand
gccaucaacccuuccauug

SEQ ID NO: 1365390 - RNA, 19 nt, Homo sapiens
  misc_RNA (1)...(19): siRNA sense strand
gugacuacacucugucuuu

SEQ ID NO: 1365391 - RNA, 19 nt, Homo sapiens
  misc_RNA (1)...(19): siRNA sense strand
ugaaguagccaaugauguc

SEQ ID NO: 1365392 - RNA, 19 nt, Homo sapiens
  misc_RNA (1)...(19): siRNA sense strand
gaucuacaaggaguucuuu

SEQ ID NO: 1365393 - RNA, 19 nt, Homo sapiens
  misc_RNA (1)...(19): siRNA sense strand
gcagaaggugcgcauagug

SEQ ID NO: 1365394 - RNA, 19 nt, Homo sapiens
  misc_RNA (1)...(19): siRNA sense strand
aagaaggucuccgauguca

SEQ ID NO: 1365395 - RNA, 19 nt, Homo sapiens
  misc_RNA (1)...(19): siRNA sense strand
gaccuacuaucgggaugaa

SEQ ID NO: 1365396 - RNA, 19 nt, Homo sapiens
  misc_RNA (1)...(19): siRNA sense strand
uagggaaccuggcagaucu

SEQ ID NO: 1365397 - RNA, 19 nt, Homo sapiens
  misc_RNA (1)...(19): siRNA sense strand
ucuccgaugucauauggaa

SEQ ID NO: 1365398 - RNA, 19 nt, Homo sapiens
  misc_RNA (1)...(19): siRNA sense strand
gagaagaugaagggcauga

SEQ ID NO: 1365399 - RNA, 19 nt, Homo sapiens
  misc_RNA (1)...(19): siRNA sense strand
cgacguggugcgccuguuu

SEQ ID NO: 1365400 - RNA, 19 nt, Homo sapiens
  misc_RNA (1)...(19): siRNA sense strand
ucuuugaaguagccaauga

SEQ ID NO: 1365401 - RNA, 19 nt, Homo sapiens
  misc_RNA (1)...(19): siRNA sense strand
uacaaggaguucuuugaag

SEQ ID NO: 1365402 - RNA, 19 nt, Homo sapiens
  misc_RNA (1)...(19): siRNA sense strand
ccugaaaggaucauacaug

SEQ ID NO: 1365403 - RNA, 19 nt, Homo sapiens
  misc_RNA (1)...(19): siRNA sense strand
gaaguagccaaugauguca

SEQ ID NO: 1365404 - RNA, 19 nt, Homo sapiens
  misc_RNA (1)...(19): siRNA sense strand
ccacauccagucccucuuc

SEQ ID NO: 1365405 - RNA, 19 nt, Homo sapiens
  misc_RNA (1)...(19): siRNA sense strand
ggcagaaggugcgcauagu

SEQ ID NO: 1365406 - RNA, 19 nt, Homo sapiens
  misc_RNA (1)...(19): siRNA sense strand
gcagaugaagaagcagaaa

SEQ ID NO: 1365407 - RNA, 19 nt, Homo sapiens
  misc_RNA (1)...(19): siRNA sense strand
cagcuccgguguggccuuu

SEQ ID NO: 1365408 - RNA, 19 nt, Homo sapiens
  misc_RNA (1)...(19): siRNA sense strand
gaccugggacaucuggaaa

SEQ ID NO: 1365409 - RNA, 19 nt, Homo sapiens
  misc_RNA (1)...(19): siRNA sense strand
gagcuggcuguaccugaaa

SEQ ID NO: 1365410 - RNA, 19 nt, Homo sapiens
  misc_RNA (1)...(19): siRNA sense strand
cagacccacucacccucua

SEQ ID NO: 1365411 - RNA, 19 nt, Homo sapiens
  misc_RNA (1)...(19): siRNA sense strand
ggagaucuacaaggaguuc

SEQ ID NO: 1365412 - RNA, 19 nt, Homo sapiens
  misc_RNA (1)...(19): siRNA sense strand
gcugugaccgcaagaugga

SEQ ID NO: 1365413 - RNA, 19 nt, Homo sapiens
  misc_RNA (1)...(19): siRNA sense strand
ggaagccuccugggacugu

SEQ ID NO: 1365414 - RNA, 19 nt, Homo sapiens
  misc_RNA (1)...(19): siRNA sense strand
gggcugggccaccuuucuu

SEQ ID NO: 1365415 - RNA, 19 nt, Homo sapiens
  misc_RNA (1)...(19): siRNA sense strand
ucuaugaccugggacaucu

SEQ ID NO: 1365416 - RNA, 19 nt, Homo sapiens
  misc_RNA (1)...(19): siRNA sense strand
ugaaggaggcagccagcuu

SEQ ID NO: 1365417 - RNA, 19 nt, Homo sapiens
  misc_RNA (1)...(19): siRNA sense strand
ggaagacgaggagaucuac

SEQ ID NO: 1365418 - RNA, 19 nt, Homo sapiens
  misc_RNA (1)...(19): siRNA sense strand
ccucagccaagaccuacua

SEQ ID NO: 1365419 - RNA, 19 nt, Homo sapiens
  misc_RNA (1)...(19): siRNA sense strand
agucgcaagugcagaugaa

SEQ ID NO: 1365420 - RNA, 19 nt, Homo sapiens
  misc_RNA (1)...(19): siRNA sense strand
ucuacaaggaguucuuuga

SEQ ID NO: 1365421 - RNA, 19 nt, Homo sapiens
  misc_RNA (1)...(19): siRNA sense strand
ugcucuggcugcucuauga

SEQ ID NO: 1365422 - RNA, 19 nt, Homo sapiens
  misc_RNA (1)...(19): siRNA sense strand
gcagcgcaaaggccucuga

SEQ ID NO: 1365423 - RNA, 19 nt, Homo sapiens
  misc_RNA (1)...(19): siRNA sense strand
agauggagguggcguucau

SEQ ID NO: 1365424 - RNA, 19 nt, Homo sapiens
  misc_RNA (1)...(19): siRNA sense strand
gaugaagaagcagaaagug

SEQ ID NO: 1365425 - RNA, 19 nt, Homo sapiens
  misc_RNA (1)...(19): siRNA sense strand
cgcaagugcagaugaagaa

SEQ ID NO: 1365426 - RNA, 19 nt, Homo sapiens
  misc_RNA (1)...(19): siRNA sense strand
uccagucccucuucagcuu

SEQ ID NO: 1365427 - RNA, 19 nt, Homo sapiens
  misc_RNA (1)...(19): siRNA sense strand
gcgcugugaccgcaagaug

SEQ ID NO: 1365428 - RNA, 19 nt, Homo sapiens
  misc_RNA (1)...(19): siRNA sense strand
uggccgaccugucuaucau

SEQ ID NO: 1365429 - RNA, 19 nt, Homo sapiens
  misc_RNA (1)...(19): siRNA sense strand
aaggaguucuuugaaguag

SEQ ID NO: 1365430 - RNA, 19 nt, Homo sapiens
  misc_RNA (1)...(19): siRNA sense strand
cagccaagaccuacuaucg

SEQ ID NO: 1365431 - RNA, 19 nt, Homo sapiens
  misc_RNA (1)...(19): siRNA sense strand
gucccucuauccucgagaa

SEQ ID NO: 1365432 - RNA, 19 nt, Homo sapiens
  misc_RNA (1)...(19): siRNA sense strand
gccaucaagcugcaacuca

SEQ ID NO: 1365433 - RNA, 19 nt, Homo sapiens
  misc_RNA (1)...(19): siRNA sense strand
ccgacucgcuggagcuucu

SEQ ID NO: 1365434 - RNA, 19 nt, Homo sapiens
  misc_RNA (1)...(19): siRNA sense strand
gaaggucuccgaugucaua

SEQ ID NO: 1365435 - RNA, 19 nt, Homo sapiens
  misc_RNA (1)...(19): siRNA sense strand
gaucauacaugcgcuguga

SEQ ID NO: 1365436 - RNA, 19 nt, Homo sapiens
  misc_RNA (1)...(19): siRNA sense strand
gccgugagcuggugaagaa

SEQ ID NO: 1365437 - RNA, 19 nt, Homo sapiens
  misc_RNA (1)...(19): siRNA sense strand
ugaagaaggucuccgaugu

SEQ ID NO: 1365438 - RNA, 19 nt, Homo sapiens
  misc_RNA (1)...(19): siRNA sense strand
ggagcuggcuguaccugaa

SEQ ID NO: 1365439 - RNA, 19 nt, Homo sapiens
  misc_RNA (1)...(19): siRNA sense strand
gaucaugccuggguagugu

SEQ ID NO: 1365440 - RNA, 19 nt, Homo sapiens
  misc_RNA (1)...(19): siRNA sense strand
ugggacaucuggaaaggua

SEQ ID NO: 1365441 - RNA, 19 nt, Homo sapiens
  misc_RNA (1)...(19): siRNA sense strand
caaggaguucuuugaagua

SEQ ID NO: 1365442 - RNA, 19 nt, Homo sapiens
  misc_RNA (1)...(19): siRNA sense strand
acaaggaguucuuugaagu

SEQ ID NO: 1365443 - RNA, 19 nt, Homo sapiens
  misc_RNA (1)...(19): siRNA sense strand
gaaccuggcagaucuagag

SEQ ID NO: 1365444 - RNA, 19 nt, Homo sapiens
  misc_RNA (1)...(19): siRNA sense strand
ggucuccgaugucauaugg

SEQ ID NO: 1365445 - RNA, 19 nt, Homo sapiens
  misc_RNA (1)...(19): siRNA sense strand
ccacugucauccaggacua

SEQ ID NO: 1365446 - RNA, 19 nt, Homo sapiens
  misc_RNA (1)...(19): siRNA sense strand
acgaggagaucuacaagga

SEQ ID NO: 1365447 - RNA, 19 nt, Homo sapiens
  misc_RNA (1)...(19): siRNA sense strand
cgucaucccuaccaacguu

SEQ ID NO: 1365448 - RNA, 19 nt, Homo sapiens
  misc_RNA (1)...(19): siRNA sense strand
gaagaaggucuccgauguc

SEQ ID NO: 1365449 - RNA, 19 nt, Homo sapiens
  misc_RNA (1)...(19): siRNA sense strand
gggaagacgaggagaucua

SEQ ID NO: 1365450 - RNA, 19 nt, Homo sapiens
  misc_RNA (1)...(19): siRNA sense strand
gaacacaucuaccccuaca

SEQ ID NO: 1365451 - RNA, 19 nt, Homo sapiens
  misc_RNA (1)...(19): siRNA sense strand
gaagaugaagggcaugaag

SEQ ID NO: 1365452 - RNA, 19 nt, Homo sapiens
  misc_RNA (1)...(19): siRNA sense strand
ugacuacacucugucuuuc

SEQ ID NO: 1365453 - RNA, 19 nt, Homo sapiens
  misc_RNA (1)...(19): siRNA sense strand
cuacaaggaguucuuugaa

SEQ ID NO: 1365454 - RNA, 19 nt, Homo sapiens
  misc_RNA (1)...(19): siRNA sense strand
cagaaggugcgcauaguga

SEQ ID NO: 1365455 - RNA, 19 nt, Homo sapiens
  misc_RNA (1)...(19): siRNA sense strand
gccaucaacccuuccauug

SEQ ID NO: 1365456 - RNA, 19 nt, Homo sapiens
  misc_RNA (1)...(19): siRNA sense strand
gugacuacacucugucuuu

SEQ ID NO: 1365457 - RNA, 19 nt, Homo sapiens
  misc_RNA (1)...(19): siRNA sense strand
ugaaguagccaaugauguc

SEQ ID NO: 1365458 - RNA, 19 nt, Homo sapiens
  misc_RNA (1)...(19): siRNA sense strand
gaucuacaaggaguucuuu

SEQ ID NO: 1365459 - RNA, 19 nt, Homo sapiens
  misc_RNA (1)...(19): siRNA sense strand
gcagaaggugcgcauagug

SEQ ID NO: 1365460 - RNA, 19 nt, Homo sapiens
  misc_RNA (1)...(19): siRNA sense strand
aagaaggucuccgauguca

SEQ ID NO: 1365461 - RNA, 19 nt, Homo sapiens
  misc_RNA (1)...(19): siRNA sense strand
gaccuacuaucgggaugaa

SEQ ID NO: 1365462 - RNA, 19 nt, Homo sapiens
  misc_RNA (1)...(19): siRNA sense strand
uagggaaccuggcagaucu

SEQ ID NO: 1365463 - RNA, 19 nt, Homo sapiens
  misc_RNA (1)...(19): siRNA sense strand
ucuccgaugucauauggaa

SEQ ID NO: 1365464 - RNA, 19 nt, Homo sapiens
  misc_RNA (1)...(19): siRNA sense strand
gagaagaugaagggcauga

SEQ ID NO: 1365465 - RNA, 19 nt, Homo sapiens
  misc_RNA (1)...(19): siRNA sense strand
cgacguggugcgccuguuu

SEQ ID NO: 1365466 - RNA, 19 nt, Homo sapiens
  misc_RNA (1)...(19): siRNA sense strand
ucuuugaaguagccaauga

SEQ ID NO: 1365467 - RNA, 19 nt, Homo sapiens
  misc_RNA (1)...(19): siRNA sense strand
uacaaggaguucuuugaag

SEQ ID NO: 1365468 - RNA, 19 nt, Homo sapiens
  misc_RNA (1)...(19): siRNA sense strand
ccugaaaggaucauacaug

SEQ ID NO: 1365469 - RNA, 19 nt, Homo sapiens
  misc_RNA (1)...(19): siRNA sense strand
gaaguagccaaugauguca

SEQ ID NO: 1365470 - RNA, 19 nt, Homo sapiens
  misc_RNA (1)...(19): siRNA sense strand
ccacauccagucccucuuc

SEQ ID NO: 1365471 - RNA, 19 nt, Homo sapiens
  misc_RNA (1)...(19): siRNA sense strand
ggcagaaggugcgcauagu

SEQ ID NO: 1365472 - RNA, 19 nt, Homo sapiens
  misc_RNA (1)...(19): siRNA sense strand
gcagaugaagaagcagaaa

SEQ ID NO: 1365473 - RNA, 19 nt, Homo sapiens
  misc_RNA (1)...(19): siRNA sense strand
cagcuccgguguggccuuu

SEQ ID NO: 1365474 - RNA, 19 nt, Homo sapiens
  misc_RNA (1)...(19): siRNA sense strand
gaccugggacaucuggaaa

SEQ ID NO: 1365475 - RNA, 19 nt, Homo sapiens
  misc_RNA (1)...(19): siRNA sense strand
gagcuggcuguaccugaaa

SEQ ID NO: 1365476 - RNA, 19 nt, Homo sapiens
  misc_RNA (1)...(19): siRNA sense strand
cagacccacucacccucua

SEQ ID NO: 1365477 - RNA, 19 nt, Homo sapiens
  misc_RNA (1)...(19): siRNA sense strand
ggagaucuacaaggaguuc

SEQ ID NO: 1365478 - RNA, 19 nt, Homo sapiens
  misc_RNA (1)...(19): siRNA sense strand
gcugugaccgcaagaugga

SEQ ID NO: 1365479 - RNA, 19 nt, Homo sapiens
  misc_RNA (1)...(19): siRNA sense strand
ggaagccuccugggacugu

SEQ ID NO: 1365480 - RNA, 19 nt, Homo sapiens
  misc_RNA (1)...(19): siRNA sense strand
gggcugggccaccuuucuu

SEQ ID NO: 1365481 - RNA, 19 nt, Homo sapiens
  misc_RNA (1)...(19): siRNA sense strand
ucuaugaccugggacaucu

SEQ ID NO: 1365482 - RNA, 19 nt, Homo sapiens
  misc_RNA (1)...(19): siRNA sense strand
ugaaggaggcagccagcuu

SEQ ID NO: 1365483 - RNA, 19 nt, Homo sapiens
  misc_RNA (1)...(19): siRNA sense strand
ggaagacgaggagaucuac

SEQ ID NO: 1365484 - RNA, 19 nt, Homo sapiens
  misc_RNA (1)...(19): siRNA sense strand
ccucagccaagaccuacua

SEQ ID NO: 1365485 - RNA, 19 nt, Homo sapiens
  misc_RNA (1)...(19): siRNA sense strand
agucgcaagugcagaugaa

SEQ ID NO: 1365486 - RNA, 19 nt, Homo sapiens
  misc_RNA (1)...(19): siRNA sense strand
ucuacaaggaguucuuuga

SEQ ID NO: 1365487 - RNA, 19 nt, Homo sapiens
  misc_RNA (1)...(19): siRNA sense strand
ugcucuggcugcucuauga

SEQ ID NO: 1365488 - RNA, 19 nt, Homo sapiens
  misc_RNA (1)...(19): siRNA sense strand
gcagcgcaaaggccucuga

SEQ ID NO: 1365489 - RNA, 19 nt, Homo sapiens
  misc_RNA (1)...(19): siRNA sense strand
agauggagguggcguucau

SEQ ID NO: 1365490 - RNA, 19 nt, Homo sapiens
  misc_RNA (1)...(19): siRNA sense strand
gaugaagaagcagaaagug

SEQ ID NO: 1365491 - RNA, 19 nt, Homo sapiens
  misc_RNA (1)...(19): siRNA sense strand
cgcaagugcagaugaagaa

SEQ ID NO: 1365492 - RNA, 19 nt, Homo sapiens
  misc_RNA (1)...(19): siRNA sense strand
uccagucccucuucagcuu

SEQ ID NO: 1365493 - RNA, 19 nt, Homo sapiens
  misc_RNA (1)...(19): siRNA sense strand
gcgcugugaccgcaagaug

SEQ ID NO: 1365494 - RNA, 19 nt, Homo sapiens
  misc_RNA (1)...(19): siRNA sense strand
uggccgaccugucuaucau

SEQ ID NO: 1365495 - RNA, 19 nt, Homo sapiens
  misc_RNA (1)...(19): siRNA sense strand
aaggaguucuuugaaguag

SEQ ID NO: 1365496 - RNA, 19 nt, Homo sapiens
  misc_RNA (1)...(19): siRNA sense strand
cagccaagaccuacuaucg

SEQ ID NO: 1365497 - RNA, 19 nt, Homo sapiens
  misc_RNA (1)...(19): siRNA sense strand
gucccucuauccucgagaa

SEQ ID NO: 1365498 - RNA, 19 nt, Homo sapiens
  misc_RNA (1)...(19): siRNA sense strand
gccaucaagcugcaacuca

SEQ ID NO: 1365499 - RNA, 19 nt, Homo sapiens
  misc_RNA (1)...(19): siRNA sense strand
ccgacucgcuggagcuucu

SEQ ID NO: 1365500 - RNA, 19 nt, Homo sapiens
  misc_RNA (1)...(19): siRNA sense strand
gaaggucuccgaugucaua

SEQ ID NO: 1365501 - RNA, 19 nt, Homo sapiens
  misc_RNA (1)...(19): siRNA sense strand
gaucauacaugcgcuguga

SEQ ID NO: 1365502 - RNA, 19 nt, Homo sapiens
  misc_RNA (1)...(19): siRNA sense strand
gccgugagcuggugaagaa

SEQ ID NO: 1365503 - RNA, 19 nt, Homo sapiens
  misc_RNA (1)...(19): siRNA sense strand
ugaagaaggucuccgaugu

SEQ ID NO: 1365504 - RNA, 19 nt, Homo sapiens
  misc_RNA (1)...(19): siRNA sense strand
ggagcuggcuguaccugaa

SEQ ID NO: 1365505 - RNA, 19 nt, Homo sapiens
  misc_RNA (1)...(19): siRNA sense strand
gaucaugccuggguagugu

SEQ ID NO: 1365506 - RNA, 19 nt, Homo sapiens
  misc_RNA (1)...(19): siRNA sense strand
ugggacaucuggaaaggua

SEQ ID NO: 1365507 - RNA, 19 nt, Homo sapiens
  misc_RNA (1)...(19): siRNA sense strand
caaggaguucuuugaagua

SEQ ID NO: 1365508 - RNA, 19 nt, Homo sapiens
  misc_RNA (1)...(19): siRNA sense strand
acaaggaguucuuugaagu

SEQ ID NO: 1365509 - RNA, 19 nt, Homo sapiens
  misc_RNA (1)...(19): siRNA sense strand
gaaccuggcagaucuagag

SEQ ID NO: 1365510 - RNA, 19 nt, Homo sapiens
  misc_RNA (1)...(19): siRNA sense strand
ggucuccgaugucauaugg

SEQ ID NO: 1365511 - RNA, 19 nt, Homo sapiens
  misc_RNA (1)...(19): siRNA sense strand
ccacugucauccaggacua

SEQ ID NO: 1365512 - RNA, 19 nt, Homo sapiens
  misc_RNA (1)...(19): siRNA sense strand
acgaggagaucuacaagga

SEQ ID NO: 1365513 - RNA, 19 nt, Homo sapiens
  misc_RNA (1)...(19): siRNA sense strand
cgucaucccuaccaacguu

SEQ ID NO: 1365514 - RNA, 19 nt, Homo sapiens
  misc_RNA (1)...(19): siRNA sense strand
gaagaaggucuccgauguc

SEQ ID NO: 1365515 - RNA, 19 nt, Homo sapiens
  misc_RNA (1)...(19): siRNA sense strand
gggaagacgaggagaucua

SEQ ID NO: 1365516 - RNA, 19 nt, Homo sapiens
  misc_RNA (1)...(19): siRNA sense strand
gaacacaucuaccccuaca

SEQ ID NO: 1365517 - RNA, 19 nt, Homo sapiens
  misc_RNA (1)...(19): siRNA sense strand
gaagaugaagggcaugaag

SEQ ID NO: 1365518 - RNA, 19 nt, Homo sapiens
  misc_RNA (1)...(19): siRNA sense strand
ugacuacacucugucuuuc

SEQ ID NO: 1365519 - RNA, 19 nt, Homo sapiens
  misc_RNA (1)...(19): siRNA sense strand
cuacaaggaguucuuugaa

SEQ ID NO: 1365520 - RNA, 19 nt, Homo sapiens
  misc_RNA (1)...(19): siRNA sense strand
cagaaggugcgcauaguga

SEQ ID NO: 1365521 - RNA, 19 nt, Homo sapiens
  misc_RNA (1)...(19): siRNA sense strand
gccaucaacccuuccauug

SEQ ID NO: 1365522 - RNA, 19 nt, Homo sapiens
  misc_RNA (1)...(19): siRNA sense strand
gugacuacacucugucuuu

SEQ ID NO: 1365523 - RNA, 19 nt, Homo sapiens
  misc_RNA (1)...(19): siRNA sense strand
ugaaguagccaaugauguc

SEQ ID NO: 1365524 - RNA, 19 nt, Homo sapiens
  misc_RNA (1)...(19): siRNA sense strand
gaucuacaaggaguucuuu

SEQ ID NO: 1365525 - RNA, 19 nt, Homo sapiens
  misc_RNA (1)...(19): siRNA sense strand
gcagaaggugcgcauagug

SEQ ID NO: 1365526 - RNA, 19 nt, Homo sapiens
  misc_RNA (1)...(19): siRNA sense strand
aagaaggucuccgauguca

SEQ ID NO: 1365527 - RNA, 19 nt, Homo sapiens
  misc_RNA (1)...(19): siRNA sense strand
gaccuacuaucgggaugaa

SEQ ID NO: 1365528 - RNA, 19 nt, Homo sapiens
  misc_RNA (1)...(19): siRNA sense strand
uagggaaccuggcagaucu

SEQ ID NO: 1365529 - RNA, 19 nt, Homo sapiens
  misc_RNA (1)...(19): siRNA sense strand
ucuccgaugucauauggaa

SEQ ID NO: 1365530 - RNA, 19 nt, Homo sapiens
  misc_RNA (1)...(19): siRNA sense strand
gagaagaugaagggcauga

SEQ ID NO: 1365531 - RNA, 19 nt, Homo sapiens
  misc_RNA (1)...(19): siRNA sense strand
cgacguggugcgccuguuu

SEQ ID NO: 1365532 - RNA, 19 nt, Homo sapiens
  misc_RNA (1)...(19): siRNA sense strand
ucuuugaaguagccaauga

SEQ ID NO: 1365533 - RNA, 19 nt, Homo sapiens
  misc_RNA (1)...(19): siRNA sense strand
uacaaggaguucuuugaag

SEQ ID NO: 1365534 - RNA, 19 nt, Homo sapiens
  misc_RNA (1)...(19): siRNA sense strand
ccugaaaggaucauacaug

SEQ ID NO: 1365535 - RNA, 19 nt, Homo sapiens
  misc_RNA (1)...(19): siRNA sense strand
gaaguagccaaugauguca

SEQ ID NO: 1365536 - RNA, 19 nt, Homo sapiens
  misc_RNA (1)...(19): siRNA sense strand
ccacauccagucccucuuc

SEQ ID NO: 1365537 - RNA, 19 nt, Homo sapiens
  misc_RNA (1)...(19): siRNA sense strand
ggcagaaggugcgcauagu

SEQ ID NO: 1365538 - RNA, 19 nt, Homo sapiens
  misc_RNA (1)...(19): siRNA sense strand
gcagaugaagaagcagaaa

SEQ ID NO: 1365539 - RNA, 19 nt, Homo sapiens
  misc_RNA (1)...(19): siRNA sense strand
cagcuccgguguggccuuu

SEQ ID NO: 1365540 - RNA, 19 nt, Homo sapiens
  misc_RNA (1)...(19): siRNA sense strand
gaccugggacaucuggaaa

SEQ ID NO: 1365541 - RNA, 19 nt, Homo sapiens
  misc_RNA (1)...(19): siRNA sense strand
gagcuggcuguaccugaaa

SEQ ID NO: 1365542 - RNA, 19 nt, Homo sapiens
  misc_RNA (1)...(19): siRNA sense strand
cagacccacucacccucua

SEQ ID NO: 1365543 - RNA, 19 nt, Homo sapiens
  misc_RNA (1)...(19): siRNA sense strand
ggagaucuacaaggaguuc

SEQ ID NO: 1365544 - RNA, 19 nt, Homo sapiens
  misc_RNA (1)...(19): siRNA sense strand
gcugugaccgcaagaugga

SEQ ID NO: 1365545 - RNA, 19 nt, Homo sapiens
  misc_RNA (1)...(19): siRNA sense strand
ggaagccuccugggacugu

SEQ ID NO: 1365546 - RNA, 19 nt, Homo sapiens
  misc_RNA (1)...(19): siRNA sense strand
gggcugggccaccuuucuu

SEQ ID NO: 1365547 - RNA, 19 nt, Homo sapiens
  misc_RNA (1)...(19): siRNA sense strand
ucuaugaccugggacaucu

SEQ ID NO: 1365548 - RNA, 19 nt, Homo sapiens
  misc_RNA (1)...(19): siRNA sense strand
ugaaggaggcagccagcuu

SEQ ID NO: 1365549 - RNA, 19 nt, Homo sapiens
  misc_RNA (1)...(19): siRNA sense strand
ggaagacgaggagaucuac

SEQ ID NO: 1365550 - RNA, 19 nt, Homo sapiens
  misc_RNA (1)...(19): siRNA sense strand
ccucagccaagaccuacua

SEQ ID NO: 1365551 - RNA, 19 nt, Homo sapiens
  misc_RNA (1)...(19): siRNA sense strand
agucgcaagugcagaugaa

SEQ ID NO: 1365552 - RNA, 19 nt, Homo sapiens
  misc_RNA (1)...(19): siRNA sense strand
ucuacaaggaguucuuuga

SEQ ID NO: 1365553 - RNA, 19 nt, Homo sapiens
  misc_RNA (1)...(19): siRNA sense strand
ugcucuggcugcucuauga

SEQ ID NO: 1365554 - RNA, 19 nt, Homo sapiens
  misc_RNA (1)...(19): siRNA sense strand
gcagcgcaaaggccucuga

SEQ ID NO: 1365555 - RNA, 19 nt, Homo sapiens
  misc_RNA (1)...(19): siRNA sense strand
agauggagguggcguucau

SEQ ID NO: 1365556 - RNA, 19 nt, Homo sapiens
  misc_RNA (1)...(19): siRNA sense strand
gaugaagaagcagaaagug

SEQ ID NO: 1365557 - RNA, 19 nt, Homo sapiens
  misc_RNA (1)...(19): siRNA sense strand
cgcaagugcagaugaagaa

SEQ ID NO: 1365558 - RNA, 19 nt, Homo sapiens
  misc_RNA (1)...(19): siRNA sense strand
uccagucccucuucagcuu

SEQ ID NO: 1365559 - RNA, 19 nt, Homo sapiens
  misc_RNA (1)...(19): siRNA sense strand
gcgcugugaccgcaagaug

SEQ ID NO: 1365560 - RNA, 19 nt, Homo sapiens
  misc_RNA (1)...(19): siRNA sense strand
uggccgaccugucuaucau

SEQ ID NO: 1365561 - RNA, 19 nt, Homo sapiens
  misc_RNA (1)...(19): siRNA sense strand
aaggaguucuuugaaguag

SEQ ID NO: 1365562 - RNA, 19 nt, Homo sapiens
  misc_RNA (1)...(19): siRNA sense strand
cagccaagaccuacuaucg

SEQ ID NO: 1365563 - RNA, 19 nt, Homo sapiens
  misc_RNA (1)...(19): siRNA sense strand
gucccucuauccucgagaa

SEQ ID NO: 1365564 - RNA, 19 nt, Homo sapiens
  misc_RNA (1)...(19): siRNA sense strand
gccaucaagcugcaacuca

SEQ ID NO: 1365565 - RNA, 19 nt, Homo sapiens
  misc_RNA (1)...(19): siRNA sense strand
ccgacucgcuggagcuucu

SEQ ID NO: 1365566 - RNA, 19 nt, Homo sapiens
  misc_RNA (1)...(19): siRNA sense strand
gaaggucuccgaugucaua

SEQ ID NO: 1365567 - RNA, 19 nt, Homo sapiens
  misc_RNA (1)...(19): siRNA sense strand
gaucauacaugcgcuguga

SEQ ID NO: 1365568 - RNA, 19 nt, Homo sapiens
  misc_RNA (1)...(19): siRNA sense strand
gccgugagcuggugaagaa

SEQ ID NO: 1365569 - RNA, 19 nt, Homo sapiens
  misc_RNA (1)...(19): siRNA sense strand
ugaagaaggucuccgaugu

SEQ ID NO: 1365570 - RNA, 19 nt, Homo sapiens
  misc_RNA (1)...(19): siRNA sense strand
ggagcuggcuguaccugaa

SEQ ID NO: 1365571 - RNA, 19 nt, Homo sapiens
  misc_RNA (1)...(19): siRNA sense strand
gaucaugccuggguagugu

SEQ ID NO: 1365572 - RNA, 19 nt, Homo sapiens
  misc_RNA (1)...(19): siRNA sense strand
ugggacaucuggaaaggua

SEQ ID NO: 1365573 - RNA, 19 nt, Homo sapiens
  misc_RNA (1)...(19): siRNA sense strand
caaggaguucuuugaagua

SEQ ID NO: 1365574 - RNA, 19 nt, Homo sapiens
  misc_RNA (1)...(19): siRNA sense strand
acaaggaguucuuugaagu

SEQ ID NO: 1365575 - RNA, 19 nt, Homo sapiens
  misc_RNA (1)...(19): siRNA sense strand
gaaccuggcagaucuagag

SEQ ID NO: 1365576 - RNA, 19 nt, Homo sapiens
  misc_RNA (1)...(19): siRNA sense strand
ggucuccgaugucauaugg

SEQ ID NO: 1365577 - RNA, 19 nt, Homo sapiens
  misc_RNA (1)...(19): siRNA sense strand
ccacugucauccaggacua

SEQ ID NO: 1365578 - RNA, 19 nt, Homo sapiens
  misc_RNA (1)...(19): siRNA sense strand
acgaggagaucuacaagga

SEQ ID NO: 1365579 - RNA, 19 nt, Homo sapiens
  misc_RNA (1)...(19): siRNA sense strand
cgucaucccuaccaacguu

SEQ ID NO: 1365580 - RNA, 19 nt, Homo sapiens
  misc_RNA (1)...(19): siRNA sense strand
gaagaaggucuccgauguc

SEQ ID NO: 1365581 - RNA, 19 nt, Homo sapiens
  misc_RNA (1)...(19): siRNA sense strand
gggaagacgaggagaucua

SEQ ID NO: 1365582 - RNA, 19 nt, Homo sapiens
  misc_RNA (1)...(19): siRNA sense strand
gaacacaucuaccccuaca

SEQ ID NO: 1365583 - RNA, 19 nt, Homo sapiens
  misc_RNA (1)...(19): siRNA sense strand
gaagaugaagggcaugaag

SEQ ID NO: 1365584 - RNA, 19 nt, Homo sapiens
  misc_RNA (1)...(19): siRNA sense strand
ugacuacacucugucuuuc

SEQ ID NO: 1365585 - RNA, 19 nt, Homo sapiens
  misc_RNA (1)...(19): siRNA sense strand
cuacaaggaguucuuugaa

SEQ ID NO: 1365586 - RNA, 19 nt, Homo sapiens
  misc_RNA (1)...(19): siRNA sense strand
cagaaggugcgcauaguga

SEQ ID NO: 1365587 - RNA, 19 nt, Homo sapiens
  misc_RNA (1)...(19): siRNA sense strand
gccaucaacccuuccauug

SEQ ID NO: 1365588 - RNA, 19 nt, Homo sapiens
  misc_RNA (1)...(19): siRNA sense strand
gugacuacacucugucuuu

SEQ ID NO: 1365589 - RNA, 19 nt, Homo sapiens
  misc_RNA (1)...(19): siRNA sense strand
ugaaguagccaaugauguc

SEQ ID NO: 1365590 - RNA, 19 nt, Homo sapiens
  misc_RNA (1)...(19): siRNA sense strand
gaucuacaaggaguucuuu

SEQ ID NO: 1365591 - RNA, 19 nt, Homo sapiens
  misc_RNA (1)...(19): siRNA sense strand
gcagaaggugcgcauagug

SEQ ID NO: 1365592 - RNA, 19 nt, Homo sapiens
  misc_RNA (1)...(19): siRNA sense strand
aagaaggucuccgauguca

SEQ ID NO: 1365593 - RNA, 19 nt, Homo sapiens
  misc_RNA (1)...(19): siRNA sense strand
gaccuacuaucgggaugaa

SEQ ID NO: 1365594 - RNA, 19 nt, Homo sapiens
  misc_RNA (1)...(19): siRNA sense strand
uagggaaccuggcagaucu

SEQ ID NO: 1365595 - RNA, 19 nt, Homo sapiens
  misc_RNA (1)...(19): siRNA sense strand
ucuccgaugucauauggaa

SEQ ID NO: 1365596 - RNA, 19 nt, Homo sapiens
  misc_RNA (1)...(19): siRNA sense strand
gagaagaugaagggcauga

SEQ ID NO: 1365597 - RNA, 19 nt, Homo sapiens
  misc_RNA (1)...(19): siRNA sense strand
cgacguggugcgccuguuu

SEQ ID NO: 1365598 - RNA, 19 nt, Homo sapiens
  misc_RNA (1)...(19): siRNA sense strand
ucuuugaaguagccaauga

SEQ ID NO: 1365599 - RNA, 19 nt, Homo sapiens
  misc_RNA (1)...(19): siRNA sense strand
uacaaggaguucuuugaag

SEQ ID NO: 1365600 - RNA, 19 nt, Homo sapiens
  misc_RNA (1)...(19): siRNA sense strand
ccugaaaggaucauacaug

SEQ ID NO: 1365601 - RNA, 19 nt, Homo sapiens
  misc_RNA (1)...(19): siRNA sense strand
gaaguagccaaugauguca

SEQ ID NO: 1365602 - RNA, 19 nt, Homo sapiens
  misc_RNA (1)...(19): siRNA sense strand
ccacauccagucccucuuc

SEQ ID NO: 1365603 - RNA, 19 nt, Homo sapiens
  misc_RNA (1)...(19): siRNA sense strand
ggcagaaggugcgcauagu

SEQ ID NO: 1365604 - RNA, 19 nt, Homo sapiens
  misc_RNA (1)...(19): siRNA sense strand
gcagaugaagaagcagaaa

SEQ ID NO: 1365605 - RNA, 19 nt, Homo sapiens
  misc_RNA (1)...(19): siRNA sense strand
cagcuccgguguggccuuu

SEQ ID NO: 1365606 - RNA, 19 nt, Homo sapiens
  misc_RNA (1)...(19): siRNA sense strand
gaccugggacaucuggaaa

SEQ ID NO: 1365607 - RNA, 19 nt, Homo sapiens
  misc_RNA (1)...(19): siRNA sense strand
gagcuggcuguaccugaaa

SEQ ID NO: 1365608 - RNA, 19 nt, Homo sapiens
  misc_RNA (1)...(19): siRNA sense strand
cagacccacucacccucua

SEQ ID NO: 1365609 - RNA, 19 nt, Homo sapiens
  misc_RNA (1)...(19): siRNA sense strand
ggagaucuacaaggaguuc

SEQ ID NO: 1365610 - RNA, 19 nt, Homo sapiens
  misc_RNA (1)...(19): siRNA sense strand
gcugugaccgcaagaugga

SEQ ID NO: 1365611 - RNA, 19 nt, Homo sapiens
  misc_RNA (1)...(19): siRNA sense strand
ggaagccuccugggacugu

SEQ ID NO: 1365612 - RNA, 19 nt, Homo sapiens
  misc_RNA (1)...(19): siRNA sense strand
gggcugggccaccuuucuu

SEQ ID NO: 1365613 - RNA, 19 nt, Homo sapiens
  misc_RNA (1)...(19): siRNA sense strand
ucuaugaccugggacaucu

SEQ ID NO: 1365614 - RNA, 19 nt, Homo sapiens
  misc_RNA (1)...(19): siRNA sense strand
ugaaggaggcagccagcuu

SEQ ID NO: 1365615 - RNA, 19 nt, Homo sapiens
  misc_RNA (1)...(19): siRNA sense strand
ggaagacgaggagaucuac

SEQ ID NO: 1365616 - RNA, 19 nt, Homo sapiens
  misc_RNA (1)...(19): siRNA sense strand
ccucagccaagaccuacua

SEQ ID NO: 1365617 - RNA, 19 nt, Homo sapiens
  misc_RNA (1)...(19): siRNA sense strand
agucgcaagugcagaugaa

SEQ ID NO: 1365618 - RNA, 19 nt, Homo sapiens
  misc_RNA (1)...(19): siRNA sense strand
ucuacaaggaguucuuuga

SEQ ID NO: 1365619 - RNA, 19 nt, Homo sapiens
  misc_RNA (1)...(19): siRNA sense strand
ugcucuggcugcucuauga

SEQ ID NO: 1365620 - RNA, 19 nt, Homo sapiens
  misc_RNA (1)...(19): siRNA sense strand
gcagcgcaaaggccucuga

SEQ ID NO: 1365621 - RNA, 19 nt, Homo sapiens
  misc_RNA (1)...(19): siRNA sense strand
agauggagguggcguucau

SEQ ID NO: 1365622 - RNA, 19 nt, Homo sapiens
  misc_RNA (1)...(19): siRNA sense strand
gaugaagaagcagaaagug

SEQ ID NO: 1365623 - RNA, 19 nt, Homo sapiens
  misc_RNA (1)...(19): siRNA sense strand
cgcaagugcagaugaagaa

SEQ ID NO: 1365624 - RNA, 19 nt, Homo sapiens
  misc_RNA (1)...(19): siRNA sense strand
uccagucccucuucagcuu

SEQ ID NO: 1365625 - RNA, 19 nt, Homo sapiens
  misc_RNA (1)...(19): siRNA sense strand
gcgcugugaccgcaagaug

SEQ ID NO: 1365626 - RNA, 19 nt, Homo sapiens
  misc_RNA (1)...(19): siRNA sense strand
uggccgaccugucuaucau

SEQ ID NO: 1365627 - RNA, 19 nt, Homo sapiens
  misc_RNA (1)...(19): siRNA sense strand
aaggaguucuuugaaguag

SEQ ID NO: 1365628 - RNA, 19 nt, Homo sapiens
  misc_RNA (1)...(19): siRNA sense strand
cagccaagaccuacuaucg

SEQ ID NO: 1365629 - RNA, 19 nt, Homo sapiens
  misc_RNA (1)...(19): siRNA sense strand
gucccucuauccucgagaa

SEQ ID NO: 1365630 - RNA, 19 nt, Homo sapiens
  misc_RNA (1)...(19): siRNA sense strand
gccaucaagcugcaacuca

SEQ ID NO: 1365631 - RNA, 19 nt, Homo sapiens
  misc_RNA (1)...(19): siRNA sense strand
ccgacucgcuggagcuucu

SEQ ID NO: 1365632 - RNA, 19 nt, Homo sapiens
  misc_RNA (1)...(19): siRNA sense strand
gaaggucuccgaugucaua

SEQ ID NO: 1365633 - RNA, 19 nt, Homo sapiens
  misc_RNA (1)...(19): siRNA sense strand
gaucauacaugcgcuguga

SEQ ID NO: 1365634 - RNA, 19 nt, Homo sapiens
  misc_RNA (1)...(19): siRNA sense strand
gccgugagcuggugaagaa

SEQ ID NO: 1365635 - RNA, 19 nt, Homo sapiens
  misc_RNA (1)...(19): siRNA sense strand
ugaagaaggucuccgaugu

SEQ ID NO: 1365636 - RNA, 19 nt, Homo sapiens
  misc_RNA (1)...(19): siRNA sense strand
ggagcuggcuguaccugaa

SEQ ID NO: 1365637 - RNA, 19 nt, Homo sapiens
  misc_RNA (1)...(19): siRNA sense strand
gaucaugccuggguagugu

SEQ ID NO: 1365638 - RNA, 19 nt, Homo sapiens
  misc_RNA (1)...(19): siRNA sense strand
ugggacaucuggaaaggua

SEQ ID NO: 1365639 - RNA, 19 nt, Homo sapiens
  misc_RNA (1)...(19): siRNA sense strand
caaggaguucuuugaagua

SEQ ID NO: 1365640 - RNA, 19 nt, Homo sapiens
  misc_RNA (1)...(19): siRNA sense strand
acaaggaguucuuugaagu

SEQ ID NO: 1365641 - RNA, 19 nt, Homo sapiens
  misc_RNA (1)...(19): siRNA sense strand
gaaccuggcagaucuagag

SEQ ID NO: 1365642 - RNA, 19 nt, Homo sapiens
  misc_RNA (1)...(19): siRNA sense strand
ggucuccgaugucauaugg

SEQ ID NO: 1365643 - RNA, 19 nt, Homo sapiens
  misc_RNA (1)...(19): siRNA sense strand
ccacugucauccaggacua

SEQ ID NO: 1365644 - RNA, 19 nt, Homo sapiens
  misc_RNA (1)...(19): siRNA sense strand
acgaggagaucuacaagga

SEQ ID NO: 1365645 - RNA, 19 nt, Homo sapiens
  misc_RNA (1)...(19): siRNA sense strand
cgucaucccuaccaacguu

SEQ ID NO: 1365646 - RNA, 19 nt, Homo sapiens
  misc_RNA (1)...(19): siRNA sense strand
gaagaaggucuccgauguc

SEQ ID NO: 1365647 - RNA, 19 nt, Homo sapiens
  misc_RNA (1)...(19): siRNA sense strand
gggaagacgaggagaucua

SEQ ID NO: 1365648 - RNA, 19 nt, Homo sapiens
  misc_RNA (1)...(19): siRNA sense strand
gaacacaucuaccccuaca

SEQ ID NO: 1365649 - RNA, 19 nt, Homo sapiens
  misc_RNA (1)...(19): siRNA sense strand
gaagaugaagggcaugaag

SEQ ID NO: 1365650 - RNA, 19 nt, Homo sapiens
  misc_RNA (1)...(19): siRNA sense strand
ugacuacacucugucuuuc

SEQ ID NO: 1365651 - RNA, 19 nt, Homo sapiens
  misc_RNA (1)...(19): siRNA sense strand
cuacaaggaguucuuugaa

SEQ ID NO: 1365652 - RNA, 19 nt, Homo sapiens
  misc_RNA (1)...(19): siRNA sense strand
cagaaggugcgcauaguga

SEQ ID NO: 1365653 - RNA, 19 nt, Homo sapiens
  misc_RNA (1)...(19): siRNA sense strand
gccaucaacccuuccauug

SEQ ID NO: 1365654 - RNA, 19 nt, Homo sapiens
  misc_RNA (1)...(19): siRNA sense strand
gugacuacacucugucuuu

SEQ ID NO: 1365655 - RNA, 19 nt, Homo sapiens
  misc_RNA (1)...(19): siRNA sense strand
ugaaguagccaaugauguc

SEQ ID NO: 1365656 - RNA, 19 nt, Homo sapiens
  misc_RNA (1)...(19): siRNA sense strand
gaucuacaaggaguucuuu

SEQ ID NO: 1365657 - RNA, 19 nt, Homo sapiens
  misc_RNA (1)...(19): siRNA sense strand
gcagaaggugcgcauagug

SEQ ID NO: 1365658 - RNA, 19 nt, Homo sapiens
  misc_RNA (1)...(19): siRNA sense strand
aagaaggucuccgauguca

SEQ ID NO: 1365659 - RNA, 19 nt, Homo sapiens
  misc_RNA (1)...(19): siRNA sense strand
gaccuacuaucgggaugaa

SEQ ID NO: 1365660 - RNA, 19 nt, Homo sapiens
  misc_RNA (1)...(19): siRNA sense strand
uagggaaccuggcagaucu

SEQ ID NO: 1365661 - RNA, 19 nt, Homo sapiens
  misc_RNA (1)...(19): siRNA sense strand
ucuccgaugucauauggaa

SEQ ID NO: 1365662 - RNA, 19 nt, Homo sapiens
  misc_RNA (1)...(19): siRNA sense strand
gagaagaugaagggcauga

SEQ ID NO: 1365663 - RNA, 19 nt, Homo sapiens
  misc_RNA (1)...(19): siRNA sense strand
cgacguggugcgccuguuu

SEQ ID NO: 1365664 - RNA, 19 nt, Homo sapiens
  misc_RNA (1)...(19): siRNA sense strand
ucuuugaaguagccaauga

SEQ ID NO: 1365665 - RNA, 19 nt, Homo sapiens
  misc_RNA (1)...(19): siRNA sense strand
uacaaggaguucuuugaag

SEQ ID NO: 1365666 - RNA, 19 nt, Homo sapiens
  misc_RNA (1)...(19): siRNA sense strand
ccugaaaggaucauacaug

SEQ ID NO: 1365667 - RNA, 19 nt, Homo sapiens
  misc_RNA (1)...(19): siRNA sense strand
gaaguagccaaugauguca

SEQ ID NO: 1365668 - RNA, 19 nt, Homo sapiens
  misc_RNA (1)...(19): siRNA sense strand
ccacauccagucccucuuc

SEQ ID NO: 1365669 - RNA, 19 nt, Homo sapiens
  misc_RNA (1)...(19): siRNA sense strand
ggcagaaggugcgcauagu

SEQ ID NO: 1365670 - RNA, 19 nt, Homo sapiens
  misc_RNA (1)...(19): siRNA sense strand
gcagaugaagaagcagaaa

SEQ ID NO: 1365671 - RNA, 19 nt, Homo sapiens
  misc_RNA (1)...(19): siRNA sense strand
cagcuccgguguggccuuu

SEQ ID NO: 1365672 - RNA, 19 nt, Homo sapiens
  misc_RNA (1)...(19): siRNA sense strand
gaccugggacaucuggaaa

SEQ ID NO: 1365673 - RNA, 19 nt, Homo sapiens
  misc_RNA (1)...(19): siRNA sense strand
gagcuggcuguaccugaaa

SEQ ID NO: 1365674 - RNA, 19 nt, Homo sapiens
  misc_RNA (1)...(19): siRNA sense strand
cagacccacucacccucua

SEQ ID NO: 1365675 - RNA, 19 nt, Homo sapiens
  misc_RNA (1)...(19): siRNA sense strand
ggagaucuacaaggaguuc

SEQ ID NO: 1365676 - RNA, 19 nt, Homo sapiens
  misc_RNA (1)...(19): siRNA sense strand
gcugugaccgcaagaugga

SEQ ID NO: 1365677 - RNA, 19 nt, Homo sapiens
  misc_RNA (1)...(19): siRNA sense strand
ggaagccuccugggacugu

SEQ ID NO: 1365678 - RNA, 19 nt, Homo sapiens
  misc_RNA (1)...(19): siRNA sense strand
gggcugggccaccuuucuu

SEQ ID NO: 1365679 - RNA, 19 nt, Homo sapiens
  misc_RNA (1)...(19): siRNA sense strand
ucuaugaccugggacaucu

SEQ ID NO: 1365680 - RNA, 19 nt, Homo sapiens
  misc_RNA (1)...(19): siRNA sense strand
ugaaggaggcagccagcuu

SEQ ID NO: 1365681 - RNA, 19 nt, Homo sapiens
  misc_RNA (1)...(19): siRNA sense strand
ggaagacgaggagaucuac

SEQ ID NO: 1365682 - RNA, 19 nt, Homo sapiens
  misc_RNA (1)...(19): siRNA sense strand
ccucagccaagaccuacua

SEQ ID NO: 1365683 - RNA, 19 nt, Homo sapiens
  misc_RNA (1)...(19): siRNA sense strand
agucgcaagugcagaugaa

SEQ ID NO: 1365684 - RNA, 19 nt, Homo sapiens
  misc_RNA (1)...(19): siRNA sense strand
ucuacaaggaguucuuuga

SEQ ID NO: 1365685 - RNA, 19 nt, Homo sapiens
  misc_RNA (1)...(19): siRNA sense strand
ugcucuggcugcucuauga

SEQ ID NO: 1365686 - RNA, 19 nt, Homo sapiens
  misc_RNA (1)...(19): siRNA sense strand
gcagcgcaaaggccucuga

SEQ ID NO: 1365687 - RNA, 19 nt, Homo sapiens
  misc_RNA (1)...(19): siRNA sense strand
agauggagguggcguucau

SEQ ID NO: 1365688 - RNA, 19 nt, Homo sapiens
  misc_RNA (1)...(19): siRNA sense strand
gaugaagaagcagaaagug

SEQ ID NO: 1365689 - RNA, 19 nt, Homo sapiens
  misc_RNA (1)...(19): siRNA sense strand
cgcaagugcagaugaagaa

SEQ ID NO: 1365690 - RNA, 19 nt, Homo sapiens
  misc_RNA (1)...(19): siRNA sense strand
uccagucccucuucagcuu

SEQ ID NO: 1365691 - RNA, 19 nt, Homo sapiens
  misc_RNA (1)...(19): siRNA sense strand
gcgcugugaccgcaagaug

SEQ ID NO: 1365692 - RNA, 19 nt, Homo sapiens
  misc_RNA (1)...(19): siRNA sense strand
uggccgaccugucuaucau

SEQ ID NO: 1365693 - RNA, 19 nt, Homo sapiens
  misc_RNA (1)...(19): siRNA sense strand
aaggaguucuuugaaguag

SEQ ID NO: 1365694 - RNA, 19 nt, Homo sapiens
  misc_RNA (1)...(19): siRNA sense strand
cagccaagaccuacuaucg

SEQ ID NO: 1365695 - RNA, 19 nt, Homo sapiens
  misc_RNA (1)...(19): siRNA sense strand
gucccucuauccucgagaa

SEQ ID NO: 1365696 - RNA, 19 nt, Homo sapiens
  misc_RNA (1)...(19): siRNA sense strand
gccaucaagcugcaacuca

SEQ ID NO: 1365697 - RNA, 19 nt, Homo sapiens
  misc_RNA (1)...(19): siRNA sense strand
ccgacucgcuggagcuucu

SEQ ID NO: 1365698 - RNA, 19 nt, Homo sapiens
  misc_RNA (1)...(19): siRNA sense strand
gaaggucuccgaugucaua

SEQ ID NO: 1365699 - RNA, 19 nt, Homo sapiens
  misc_RNA (1)...(19): siRNA sense strand
gaucauacaugcgcuguga

SEQ ID NO: 1365700 - RNA, 19 nt, Homo sapiens
  misc_RNA (1)...(19): siRNA sense strand
gccgugagcuggugaagaa

SEQ ID NO: 1365701 - RNA, 19 nt, Homo sapiens
  misc_RNA (1)...(19): siRNA sense strand
ugaagaaggucuccgaugu

SEQ ID NO: 1365702 - RNA, 19 nt, Homo sapiens
  misc_RNA (1)...(19): siRNA sense strand
ggagcuggcuguaccugaa

SEQ ID NO: 1365703 - RNA, 19 nt, Homo sapiens
  misc_RNA (1)...(19): siRNA sense strand
gaucaugccuggguagugu

SEQ ID NO: 1365704 - RNA, 19 nt, Homo sapiens
  misc_RNA (1)...(19): siRNA sense strand
ugggacaucuggaaaggua

SEQ ID NO: 1365705 - RNA, 19 nt, Homo sapiens
  misc_RNA (1)...(19): siRNA sense strand
caaggaguucuuugaagua

SEQ ID NO: 1365706 - RNA, 19 nt, Homo sapiens
  misc_RNA (1)...(19): siRNA sense strand
acaaggaguucuuugaagu

SEQ ID NO: 1365707 - RNA, 19 nt, Homo sapiens
  misc_RNA (1)...(19): siRNA sense strand
gaaccuggcagaucuagag

SEQ ID NO: 1365708 - RNA, 19 nt, Homo sapiens
  misc_RNA (1)...(19): siRNA sense strand
ggucuccgaugucauaugg

SEQ ID NO: 1365709 - RNA, 19 nt, Homo sapiens
  misc_RNA (1)...(19): siRNA sense strand
ccacugucauccaggacua

SEQ ID NO: 1365710 - RNA, 19 nt, Homo sapiens
  misc_RNA (1)...(19): siRNA sense strand
acgaggagaucuacaagga

SEQ ID NO: 1365711 - RNA, 19 nt, Homo sapiens
  misc_RNA (1)...(19): siRNA sense strand
cgucaucccuaccaacguu

SEQ ID NO: 1365712 - RNA, 19 nt, Homo sapiens
  misc_RNA (1)...(19): siRNA sense strand
gaagaaggucuccgauguc

SEQ ID NO: 1365713 - RNA, 19 nt, Homo sapiens
  misc_RNA (1)...(19): siRNA sense strand
gggaagacgaggagaucua

SEQ ID NO: 1365714 - RNA, 19 nt, Homo sapiens
  misc_RNA (1)...(19): siRNA sense strand
gaacacaucuaccccuaca

SEQ ID NO: 1365715 - RNA, 19 nt, Homo sapiens
  misc_RNA (1)...(19): siRNA sense strand
gaagaugaagggcaugaag

SEQ ID NO: 1365716 - RNA, 19 nt, Homo sapiens
  misc_RNA (1)...(19): siRNA sense strand
ugacuacacucugucuuuc

SEQ ID NO: 1365717 - RNA, 19 nt, Homo sapiens
  misc_RNA (1)...(19): siRNA sense strand
cuacaaggaguucuuugaa

SEQ ID NO: 1365718 - RNA, 19 nt, Homo sapiens
  misc_RNA (1)...(19): siRNA sense strand
cagaaggugcgcauaguga

SEQ ID NO: 1365719 - RNA, 19 nt, Homo sapiens
  misc_RNA (1)...(19): siRNA sense strand
gccaucaacccuuccauug

SEQ ID NO: 1365720 - RNA, 19 nt, Homo sapiens
  misc_RNA (1)...(19): siRNA sense strand
gugacuacacucugucuuu

SEQ ID NO: 1365721 - RNA, 19 nt, Homo sapiens
  misc_RNA (1)...(19): siRNA sense strand
ugaaguagccaaugauguc

SEQ ID NO: 1365722 - RNA, 19 nt, Homo sapiens
  misc_RNA (1)...(19): siRNA sense strand
gaucuacaaggaguucuuu

SEQ ID NO: 1365723 - RNA, 19 nt, Homo sapiens
  misc_RNA (1)...(19): siRNA sense strand
gcagaaggugcgcauagug

SEQ ID NO: 1365724 - RNA, 19 nt, Homo sapiens
  misc_RNA (1)...(19): siRNA sense strand
aagaaggucuccgauguca

SEQ ID NO: 1365725 - RNA, 19 nt, Homo sapiens
  misc_RNA (1)...(19): siRNA sense strand
gaccuacuaucgggaugaa

SEQ ID NO: 1365726 - RNA, 19 nt, Homo sapiens
  misc_RNA (1)...(19): siRNA sense strand
uagggaaccuggcagaucu

SEQ ID NO: 1365727 - RNA, 19 nt, Homo sapiens
  misc_RNA (1)...(19): siRNA sense strand
ucuccgaugucauauggaa

SEQ ID NO: 1365728 - RNA, 19 nt, Homo sapiens
  misc_RNA (1)...(19): siRNA sense strand
gagaagaugaagggcauga

SEQ ID NO: 1365729 - RNA, 19 nt, Homo sapiens
  misc_RNA (1)...(19): siRNA sense strand
cgacguggugcgccuguuu

SEQ ID NO: 1365730 - RNA, 19 nt, Homo sapiens
  misc_RNA (1)...(19): siRNA sense strand
ucuuugaaguagccaauga

SEQ ID NO: 1365731 - RNA, 19 nt, Homo sapiens
  misc_RNA (1)...(19): siRNA sense strand
uacaaggaguucuuugaag

SEQ ID NO: 1365732 - RNA, 19 nt, Homo sapiens
  misc_RNA (1)...(19): siRNA sense strand
ccugaaaggaucauacaug

SEQ ID NO: 1365733 - RNA, 19 nt, Homo sapiens
  misc_RNA (1)...(19): siRNA sense strand
gaaguagccaaugauguca

SEQ ID NO: 1365734 - RNA, 19 nt, Homo sapiens
  misc_RNA (1)...(19): siRNA sense strand
ccacauccagucccucuuc

SEQ ID NO: 1365735 - RNA, 19 nt, Homo sapiens
  misc_RNA (1)...(19): siRNA sense strand
ggcagaaggugcgcauagu

SEQ ID NO: 1365736 - RNA, 19 nt, Homo sapiens
  misc_RNA (1)...(19): siRNA sense strand
gcagaugaagaagcagaaa

SEQ ID NO: 1365737 - RNA, 19 nt, Homo sapiens
  misc_RNA (1)...(19): siRNA sense strand
cagcuccgguguggccuuu

SEQ ID NO: 1365738 - RNA, 19 nt, Homo sapiens
  misc_RNA (1)...(19): siRNA sense strand
gaccugggacaucuggaaa

SEQ ID NO: 1365739 - RNA, 19 nt, Homo sapiens
  misc_RNA (1)...(19): siRNA sense strand
gagcuggcuguaccugaaa

SEQ ID NO: 1365740 - RNA, 19 nt, Homo sapiens
  misc_RNA (1)...(19): siRNA sense strand
cagacccacucacccucua

SEQ ID NO: 1365741 - RNA, 19 nt, Homo sapiens
  misc_RNA (1)...(19): siRNA sense strand
ggagaucuacaaggaguuc

SEQ ID NO: 1365742 - RNA, 19 nt, Homo sapiens
  misc_RNA (1)...(19): siRNA sense strand
gcugugaccgcaagaugga

SEQ ID NO: 1365743 - RNA, 19 nt, Homo sapiens
  misc_RNA (1)...(19): siRNA sense strand
ggaagccuccugggacugu

SEQ ID NO: 1365744 - RNA, 19 nt, Homo sapiens
  misc_RNA (1)...(19): siRNA sense strand
gggcugggccaccuuucuu

SEQ ID NO: 1365745 - RNA, 19 nt, Homo sapiens
  misc_RNA (1)...(19): siRNA sense strand
ucuaugaccugggacaucu

SEQ ID NO: 1365746 - RNA, 19 nt, Homo sapiens
  misc_RNA (1)...(19): siRNA sense strand
ugaaggaggcagccagcuu

SEQ ID NO: 1365747 - RNA, 19 nt, Homo sapiens
  misc_RNA (1)...(19): siRNA sense strand
ggaagacgaggagaucuac

SEQ ID NO: 1365748 - RNA, 19 nt, Homo sapiens
  misc_RNA (1)...(19): siRNA sense strand
ccucagccaagaccuacua

SEQ ID NO: 1365749 - RNA, 19 nt, Homo sapiens
  misc_RNA (1)...(19): siRNA sense strand
agucgcaagugcagaugaa

SEQ ID NO: 1365750 - RNA, 19 nt, Homo sapiens
  misc_RNA (1)...(19): siRNA sense strand
ucuacaaggaguucuuuga

SEQ ID NO: 1365751 - RNA, 19 nt, Homo sapiens
  misc_RNA (1)...(19): siRNA sense strand
ugcucuggcugcucuauga

SEQ ID NO: 1365752 - RNA, 19 nt, Homo sapiens
  misc_RNA (1)...(19): siRNA sense strand
gcagcgcaaaggccucuga

SEQ ID NO: 1365753 - RNA, 19 nt, Homo sapiens
  misc_RNA (1)...(19): siRNA sense strand
agauggagguggcguucau

SEQ ID NO: 1365754 - RNA, 19 nt, Homo sapiens
  misc_RNA (1)...(19): siRNA sense strand
gaugaagaagcagaaagug

SEQ ID NO: 1365755 - RNA, 19 nt, Homo sapiens
  misc_RNA (1)...(19): siRNA sense strand
cgcaagugcagaugaagaa

SEQ ID NO: 1365756 - RNA, 19 nt, Homo sapiens
  misc_RNA (1)...(19): siRNA sense strand
uccagucccucuucagcuu

SEQ ID NO: 1365757 - RNA, 19 nt, Homo sapiens
  misc_RNA (1)...(19): siRNA sense strand
gcgcugugaccgcaagaug

SEQ ID NO: 1365758 - RNA, 19 nt, Homo sapiens
  misc_RNA (1)...(19): siRNA sense strand
uggccgaccugucuaucau

SEQ ID NO: 1365759 - RNA, 19 nt, Homo sapiens
  misc_RNA (1)...(19): siRNA sense strand
aaggaguucuuugaaguag

SEQ ID NO: 1365760 - RNA, 19 nt, Homo sapiens
  misc_RNA (1)...(19): siRNA sense strand
cagccaagaccuacuaucg

SEQ ID NO: 1365761 - RNA, 19 nt, Homo sapiens
  misc_RNA (1)...(19): siRNA sense strand
gucccucuauccucgagaa

SEQ ID NO: 1365762 - RNA, 19 nt, Homo sapiens
  misc_RNA (1)...(19): siRNA sense strand
gccaucaagcugcaacuca

SEQ ID NO: 1365763 - RNA, 19 nt, Homo sapiens
  misc_RNA (1)...(19): siRNA sense strand
ccgacucgcuggagcuucu

SEQ ID NO: 1365764 - RNA, 19 nt, Homo sapiens
  misc_RNA (1)...(19): siRNA sense strand
gaaggucuccgaugucaua

SEQ ID NO: 1365765 - RNA, 19 nt, Homo sapiens
  misc_RNA (1)...(19): siRNA sense strand
gaucauacaugcgcuguga

SEQ ID NO: 1365766 - RNA, 19 nt, Homo sapiens
  misc_RNA (1)...(19): siRNA sense strand
gccgugagcuggugaagaa

SEQ ID NO: 1365767 - RNA, 19 nt, Homo sapiens
  misc_RNA (1)...(19): siRNA sense strand
ugaagaaggucuccgaugu

SEQ ID NO: 1365768 - RNA, 19 nt, Homo sapiens
  misc_RNA (1)...(19): siRNA sense strand
ggagcuggcuguaccugaa

SEQ ID NO: 1365769 - RNA, 19 nt, Homo sapiens
  misc_RNA (1)...(19): siRNA sense strand
gaucaugccuggguagugu

SEQ ID NO: 1365770 - RNA, 19 nt, Homo sapiens
  misc_RNA (1)...(19): siRNA sense strand
ugggacaucuggaaaggua

SEQ ID NO: 1365771 - RNA, 19 nt, Homo sapiens
  misc_RNA (1)...(19): siRNA sense strand
caaggaguucuuugaagua

SEQ ID NO: 1365772 - RNA, 19 nt, Homo sapiens
  misc_RNA (1)...(19): siRNA sense strand
acaaggaguucuuugaagu

SEQ ID NO: 1365773 - RNA, 19 nt, Homo sapiens
  misc_RNA (1)...(19): siRNA sense strand
gaaccuggcagaucuagag

SEQ ID NO: 1365774 - RNA, 19 nt, Homo sapiens
  misc_RNA (1)...(19): siRNA sense strand
ggucuccgaugucauaugg

SEQ ID NO: 1365775 - RNA, 19 nt, Homo sapiens
  misc_RNA (1)...(19): siRNA sense strand
ccacugucauccaggacua

SEQ ID NO: 1365776 - RNA, 19 nt, Homo sapiens
  misc_RNA (1)...(19): siRNA sense strand
acgaggagaucuacaagga

SEQ ID NO: 1365777 - RNA, 19 nt, Homo sapiens
  misc_RNA (1)...(19): siRNA sense strand
cgucaucccuaccaacguu

SEQ ID NO: 1365778 - RNA, 19 nt, Homo sapiens
  misc_RNA (1)...(19): siRNA sense strand
gaagaaggucuccgauguc

SEQ ID NO: 1365779 - RNA, 19 nt, Homo sapiens
  misc_RNA (1)...(19): siRNA sense strand
gggaagacgaggagaucua

SEQ ID NO: 1365780 - RNA, 19 nt, Homo sapiens
  misc_RNA (1)...(19): siRNA sense strand
gaacacaucuaccccuaca

SEQ ID NO: 1365781 - RNA, 19 nt, Homo sapiens
  misc_RNA (1)...(19): siRNA sense strand
gaagaugaagggcaugaag

SEQ ID NO: 1365782 - RNA, 19 nt, Homo sapiens
  misc_RNA (1)...(19): siRNA sense strand
ugacuacacucugucuuuc

SEQ ID NO: 1365783 - RNA, 19 nt, Homo sapiens
  misc_RNA (1)...(19): siRNA sense strand
cuacaaggaguucuuugaa

SEQ ID NO: 1365784 - RNA, 19 nt, Homo sapiens
  misc_RNA (1)...(19): siRNA sense strand
cagaaggugcgcauaguga

SEQ ID NO: 1365785 - RNA, 19 nt, Homo sapiens
  misc_RNA (1)...(19): siRNA sense strand
gccaucaacccuuccauug

SEQ ID NO: 1365786 - RNA, 19 nt, Homo sapiens
  misc_RNA (1)...(19): siRNA sense strand
gugacuacacucugucuuu

SEQ ID NO: 1365787 - RNA, 19 nt, Homo sapiens
  misc_RNA (1)...(19): siRNA sense strand
ugaaguagccaaugauguc

SEQ ID NO: 1365788 - RNA, 19 nt, Homo sapiens
  misc_RNA (1)...(19): siRNA sense strand
gaucuacaaggaguucuuu

SEQ ID NO: 1365789 - RNA, 19 nt, Homo sapiens
  misc_RNA (1)...(19): siRNA sense strand
gcagaaggugcgcauagug

SEQ ID NO: 1365790 - RNA, 19 nt, Homo sapiens
  misc_RNA (1)...(19): siRNA sense strand
aagaaggucuccgauguca

SEQ ID NO: 1365791 - RNA, 19 nt, Homo sapiens
  misc_RNA (1)...(19): siRNA sense strand
gaccuacuaucgggaugaa

SEQ ID NO: 1365792 - RNA, 19 nt, Homo sapiens
  misc_RNA (1)...(19): siRNA sense strand
uagggaaccuggcagaucu

SEQ ID NO: 1365793 - RNA, 19 nt, Homo sapiens
  misc_RNA (1)...(19): siRNA sense strand
ucuccgaugucauauggaa

SEQ ID NO: 1365794 - RNA, 19 nt, Homo sapiens
  misc_RNA (1)...(19): siRNA sense strand
gagaagaugaagggcauga

SEQ ID NO: 1365795 - RNA, 19 nt, Homo sapiens
  misc_RNA (1)...(19): siRNA sense strand
cgacguggugcgccuguuu

SEQ ID NO: 1365796 - RNA, 19 nt, Homo sapiens
  misc_RNA (1)...(19): siRNA sense strand
ucuuugaaguagccaauga

SEQ ID NO: 1365797 - RNA, 19 nt, Homo sapiens
  misc_RNA (1)...(19): siRNA sense strand
uacaaggaguucuuugaag

SEQ ID NO: 1365798 - RNA, 19 nt, Homo sapiens
  misc_RNA (1)...(19): siRNA sense strand
ccugaaaggaucauacaug

SEQ ID NO: 1365799 - RNA, 19 nt, Homo sapiens
  misc_RNA (1)...(19): siRNA sense strand
gaaguagccaaugauguca

SEQ ID NO: 1365800 - RNA, 19 nt, Homo sapiens
  misc_RNA (1)...(19): siRNA sense strand
ccacauccagucccucuuc

SEQ ID NO: 1365801 - RNA, 19 nt, Homo sapiens
  misc_RNA (1)...(19): siRNA sense strand
ggcagaaggugcgcauagu

SEQ ID NO: 1365802 - RNA, 19 nt, Homo sapiens
  misc_RNA (1)...(19): siRNA sense strand
gcagaugaagaagcagaaa

SEQ ID NO: 1365803 - RNA, 19 nt, Homo sapiens
  misc_RNA (1)...(19): siRNA sense strand
cagcuccgguguggccuuu

SEQ ID NO: 1365804 - RNA, 19 nt, Homo sapiens
  misc_RNA (1)...(19): siRNA sense strand
gaccugggacaucuggaaa

SEQ ID NO: 1365805 - RNA, 19 nt, Homo sapiens
  misc_RNA (1)...(19): siRNA sense strand
gagcuggcuguaccugaaa

SEQ ID NO: 1365806 - RNA, 19 nt, Homo sapiens
  misc_RNA (1)...(19): siRNA sense strand
cagacccacucacccucua

SEQ ID NO: 1365807 - RNA, 19 nt, Homo sapiens
  misc_RNA (1)...(19): siRNA sense strand
ggagaucuacaaggaguuc

SEQ ID NO: 1365808 - RNA, 19 nt, Homo sapiens
  misc_RNA (1)...(19): siRNA sense strand
gcugugaccgcaagaugga

SEQ ID NO: 1365809 - RNA, 19 nt, Homo sapiens
  misc_RNA (1)...(19): siRNA sense strand
ggaagccuccugggacugu

SEQ ID NO: 1365810 - RNA, 19 nt, Homo sapiens
  misc_RNA (1)...(19): siRNA sense strand
gggcugggccaccuuucuu

SEQ ID NO: 1365811 - RNA, 19 nt, Homo sapiens
  misc_RNA (1)...(19): siRNA sense strand
ucuaugaccugggacaucu

SEQ ID NO: 1365812 - RNA, 19 nt, Homo sapiens
  misc_RNA (1)...(19): siRNA sense strand
ugaaggaggcagccagcuu

SEQ ID NO: 1365813 - RNA, 19 nt, Homo sapiens
  misc_RNA (1)...(19): siRNA sense strand
ggaagacgaggagaucuac

SEQ ID NO: 1365814 - RNA, 19 nt, Homo sapiens
  misc_RNA (1)...(19): siRNA sense strand
ccucagccaagaccuacua

SEQ ID NO: 1365815 - RNA, 19 nt, Homo sapiens
  misc_RNA (1)...(19): siRNA sense strand
agucgcaagugcagaugaa

SEQ ID NO: 1365816 - RNA, 19 nt, Homo sapiens
  misc_RNA (1)...(19): siRNA sense strand
ucuacaaggaguucuuuga

SEQ ID NO: 1365817 - RNA, 19 nt, Homo sapiens
  misc_RNA (1)...(19): siRNA sense strand
ugcucuggcugcucuauga

SEQ ID NO: 1365818 - RNA, 19 nt, Homo sapiens
  misc_RNA (1)...(19): siRNA sense strand
gcagcgcaaaggccucuga

SEQ ID NO: 1365819 - RNA, 19 nt, Homo sapiens
  misc_RNA (1)...(19): siRNA sense strand
agauggagguggcguucau

SEQ ID NO: 1365820 - RNA, 19 nt, Homo sapiens
  misc_RNA (1)...(19): siRNA sense strand
gaugaagaagcagaaagug

SEQ ID NO: 1365821 - RNA, 19 nt, Homo sapiens
  misc_RNA (1)...(19): siRNA sense strand
cgcaagugcagaugaagaa

SEQ ID NO: 1365822 - RNA, 19 nt, Homo sapiens
  misc_RNA (1)...(19): siRNA sense strand
uccagucccucuucagcuu

SEQ ID NO: 1365823 - RNA, 19 nt, Homo sapiens
  misc_RNA (1)...(19): siRNA sense strand
gcgcugugaccgcaagaug

SEQ ID NO: 1365824 - RNA, 19 nt, Homo sapiens
  misc_RNA (1)...(19): siRNA sense strand
uggccgaccugucuaucau

SEQ ID NO: 1365825 - RNA, 19 nt, Homo sapiens
  misc_RNA (1)...(19): siRNA sense strand
aaggaguucuuugaaguag

SEQ ID NO: 1365826 - RNA, 19 nt, Homo sapiens
  misc_RNA (1)...(19): siRNA sense strand
cagccaagaccuacuaucg

SEQ ID NO: 1365827 - RNA, 19 nt, Homo sapiens
  misc_RNA (1)...(19): siRNA sense strand
gucccucuauccucgagaa

SEQ ID NO: 1365828 - RNA, 19 nt, Homo sapiens
  misc_RNA (1)...(19): siRNA sense strand
gccaucaagcugcaacuca

SEQ ID NO: 1365829 - RNA, 19 nt, Homo sapiens
  misc_RNA (1)...(19): siRNA sense strand
ccgacucgcuggagcuucu

SEQ ID NO: 1365830 - RNA, 19 nt, Homo sapiens
  misc_RNA (1)...(19): siRNA sense strand
gaaggucuccgaugucaua

SEQ ID NO: 1365831 - RNA, 19 nt, Homo sapiens
  misc_RNA (1)...(19): siRNA sense strand
gaucauacaugcgcuguga

SEQ ID NO: 1365832 - RNA, 19 nt, Homo sapiens
  misc_RNA (1)...(19): siRNA sense strand
gccgugagcuggugaagaa

SEQ ID NO: 1365833 - RNA, 19 nt, Homo sapiens
  misc_RNA (1)...(19): siRNA sense strand
ugaagaaggucuccgaugu

SEQ ID NO: 1365834 - RNA, 19 nt, Homo sapiens
  misc_RNA (1)...(19): siRNA sense strand
ggagcuggcuguaccugaa

SEQ ID NO: 1365835 - RNA, 19 nt, Homo sapiens
  misc_RNA (1)...(19): siRNA sense strand
gaucaugccuggguagugu

SEQ ID NO: 1365836 - RNA, 19 nt, Homo sapiens
  misc_RNA (1)...(19): siRNA sense strand
ugggacaucuggaaaggua

SEQ ID NO: 1365837 - RNA, 19 nt, Homo sapiens
  misc_RNA (1)...(19): siRNA sense strand
caaggaguucuuugaagua

SEQ ID NO: 1365838 - RNA, 19 nt, Homo sapiens
  misc_RNA (1)...(19): siRNA sense strand
acaaggaguucuuugaagu

SEQ ID NO: 1365839 - RNA, 19 nt, Homo sapiens
  misc_RNA (1)...(19): siRNA sense strand
gaaccuggcagaucuagag

SEQ ID NO: 1365840 - RNA, 19 nt, Homo sapiens
  misc_RNA (1)...(19): siRNA sense strand
ggucuccgaugucauaugg

SEQ ID NO: 1365841 - RNA, 19 nt, Homo sapiens
  misc_RNA (1)...(19): siRNA sense strand
ccacugucauccaggacua

SEQ ID NO: 1365842 - RNA, 19 nt, Homo sapiens
  misc_RNA (1)...(19): siRNA sense strand
acgaggagaucuacaagga

SEQ ID NO: 1365843 - RNA, 19 nt, Homo sapiens
  misc_RNA (1)...(19): siRNA sense strand
cgucaucccuaccaacguu

SEQ ID NO: 1365844 - RNA, 19 nt, Homo sapiens
  misc_RNA (1)...(19): siRNA sense strand
gaagaaggucuccgauguc

SEQ ID NO: 1365845 - RNA, 19 nt, Homo sapiens
  misc_RNA (1)...(19): siRNA sense strand
gggaagacgaggagaucua

SEQ ID NO: 1365846 - RNA, 19 nt, Homo sapiens
  misc_RNA (1)...(19): siRNA sense strand
gaacacaucuaccccuaca

SEQ ID NO: 1365847 - RNA, 19 nt, Homo sapiens
  misc_RNA (1)...(19): siRNA sense strand
gaagaugaagggcaugaag

SEQ ID NO: 1365848 - RNA, 19 nt, Homo sapiens
  misc_RNA (1)...(19): siRNA sense strand
ugacuacacucugucuuuc

SEQ ID NO: 1365849 - RNA, 19 nt, Homo sapiens
  misc_RNA (1)...(19): siRNA sense strand
cuacaaggaguucuuugaa

SEQ ID NO: 1365850 - RNA, 19 nt, Homo sapiens
  misc_RNA (1)...(19): siRNA sense strand
cagaaggugcgcauaguga

SEQ ID NO: 1365851 - RNA, 19 nt, Homo sapiens
  misc_RNA (1)...(19): siRNA sense strand
gccaucaacccuuccauug

SEQ ID NO: 1365852 - RNA, 19 nt, Homo sapiens
  misc_RNA (1)...(19): siRNA sense strand
gugacuacacucugucuuu

SEQ ID NO: 1365853 - RNA, 19 nt, Homo sapiens
  misc_RNA (1)...(19): siRNA sense strand
ugaaguagccaaugauguc

SEQ ID NO: 1365854 - RNA, 19 nt, Homo sapiens
  misc_RNA (1)...(19): siRNA sense strand
gaucuacaaggaguucuuu

SEQ ID NO: 1365855 - RNA, 19 nt, Homo sapiens
  misc_RNA (1)...(19): siRNA sense strand
gcagaaggugcgcauagug

SEQ ID NO: 1365856 - RNA, 19 nt, Homo sapiens
  misc_RNA (1)...(19): siRNA sense strand
aagaaggucuccgauguca

SEQ ID NO: 1365857 - RNA, 19 nt, Homo sapiens
  misc_RNA (1)...(19): siRNA sense strand
gaccuacuaucgggaugaa

SEQ ID NO: 1365858 - RNA, 19 nt, Homo sapiens
  misc_RNA (1)...(19): siRNA sense strand
uagggaaccuggcagaucu

SEQ ID NO: 1365859 - RNA, 19 nt, Homo sapiens
  misc_RNA (1)...(19): siRNA sense strand
ucuccgaugucauauggaa

SEQ ID NO: 1365860 - RNA, 19 nt, Homo sapiens
  misc_RNA (1)...(19): siRNA sense strand
gagaagaugaagggcauga

SEQ ID NO: 1365861 - RNA, 19 nt, Homo sapiens
  misc_RNA (1)...(19): siRNA sense strand
cgacguggugcgccuguuu

SEQ ID NO: 1365862 - RNA, 19 nt, Homo sapiens
  misc_RNA (1)...(19): siRNA sense strand
ucuuugaaguagccaauga

SEQ ID NO: 1365863 - RNA, 19 nt, Homo sapiens
  misc_RNA (1)...(19): siRNA sense strand
uacaaggaguucuuugaag

SEQ ID NO: 1365864 - RNA, 19 nt, Homo sapiens
  misc_RNA (1)...(19): siRNA sense strand
ccugaaaggaucauacaug

SEQ ID NO: 1365865 - RNA, 19 nt, Homo sapiens
  misc_RNA (1)...(19): siRNA sense strand
gaaguagccaaugauguca

SEQ ID NO: 1365866 - RNA, 19 nt, Homo sapiens
  misc_RNA (1)...(19): siRNA sense strand
ccacauccagucccucuuc

SEQ ID NO: 1365867 - RNA, 19 nt, Homo sapiens
  misc_RNA (1)...(19): siRNA sense strand
ggcagaaggugcgcauagu

SEQ ID NO: 1365868 - RNA, 19 nt, Homo sapiens
  misc_RNA (1)...(19): siRNA sense strand
gcagaugaagaagcagaaa

SEQ ID NO: 1365869 - RNA, 19 nt, Homo sapiens
  misc_RNA (1)...(19): siRNA sense strand
cagcuccgguguggccuuu

SEQ ID NO: 1365870 - RNA, 19 nt, Homo sapiens
  misc_RNA (1)...(19): siRNA sense strand
gaccugggacaucuggaaa

SEQ ID NO: 1365871 - RNA, 19 nt, Homo sapiens
  misc_RNA (1)...(19): siRNA sense strand
gagcuggcuguaccugaaa

SEQ ID NO: 1365872 - RNA, 19 nt, Homo sapiens
  misc_RNA (1)...(19): siRNA sense strand
cagacccacucacccucua

SEQ ID NO: 1365873 - RNA, 19 nt, Homo sapiens
  misc_RNA (1)...(19): siRNA sense strand
ggagaucuacaaggaguuc

SEQ ID NO: 1365874 - RNA, 19 nt, Homo sapiens
  misc_RNA (1)...(19): siRNA sense strand
gcugugaccgcaagaugga

SEQ ID NO: 1365875 - RNA, 19 nt, Homo sapiens
  misc_RNA (1)...(19): siRNA sense strand
ggaagccuccugggacugu

SEQ ID NO: 1365876 - RNA, 19 nt, Homo sapiens
  misc_RNA (1)...(19): siRNA sense strand
gggcugggccaccuuucuu

SEQ ID NO: 1365877 - RNA, 19 nt, Homo sapiens
  misc_RNA (1)...(19): siRNA sense strand
ucuaugaccugggacaucu

SEQ ID NO: 1365878 - RNA, 19 nt, Homo sapiens
  misc_RNA (1)...(19): siRNA sense strand
ugaaggaggcagccagcuu

SEQ ID NO: 1365879 - RNA, 19 nt, Homo sapiens
  misc_RNA (1)...(19): siRNA sense strand
ggaagacgaggagaucuac

SEQ ID NO: 1365880 - RNA, 19 nt, Homo sapiens
  misc_RNA (1)...(19): siRNA sense strand
ccucagccaagaccuacua

SEQ ID NO: 1365881 - RNA, 19 nt, Homo sapiens
  misc_RNA (1)...(19): siRNA sense strand
agucgcaagugcagaugaa

SEQ ID NO: 1365882 - RNA, 19 nt, Homo sapiens
  misc_RNA (1)...(19): siRNA sense strand
ucuacaaggaguucuuuga

SEQ ID NO: 1365883 - RNA, 19 nt, Homo sapiens
  misc_RNA (1)...(19): siRNA sense strand
ugcucuggcugcucuauga

SEQ ID NO: 1365884 - RNA, 19 nt, Homo sapiens
  misc_RNA (1)...(19): siRNA sense strand
gcagcgcaaaggccucuga

SEQ ID NO: 1365885 - RNA, 19 nt, Homo sapiens
  misc_RNA (1)...(19): siRNA sense strand
agauggagguggcguucau

SEQ ID NO: 1365886 - RNA, 19 nt, Homo sapiens
  misc_RNA (1)...(19): siRNA sense strand
gaugaagaagcagaaagug

SEQ ID NO: 1365887 - RNA, 19 nt, Homo sapiens
  misc_RNA (1)...(19): siRNA sense strand
cgcaagugcagaugaagaa

SEQ ID NO: 1365888 - RNA, 19 nt, Homo sapiens
  misc_RNA (1)...(19): siRNA sense strand
uccagucccucuucagcuu

SEQ ID NO: 1365889 - RNA, 19 nt, Homo sapiens
  misc_RNA (1)...(19): siRNA sense strand
gcgcugugaccgcaagaug

SEQ ID NO: 1365890 - RNA, 19 nt, Homo sapiens
  misc_RNA (1)...(19): siRNA sense strand
uggccgaccugucuaucau

SEQ ID NO: 1365891 - RNA, 19 nt, Homo sapiens
  misc_RNA (1)...(19): siRNA sense strand
aaggaguucuuugaaguag

SEQ ID NO: 1365892 - RNA, 19 nt, Homo sapiens
  misc_RNA (1)...(19): siRNA sense strand
cagccaagaccuacuaucg

SEQ ID NO: 1365893 - RNA, 19 nt, Homo sapiens
  misc_RNA (1)...(19): siRNA sense strand
gucccucuauccucgagaa

SEQ ID NO: 1365894 - RNA, 19 nt, Homo sapiens
  misc_RNA (1)...(19): siRNA sense strand
gccaucaagcugcaacuca

SEQ ID NO: 1365895 - RNA, 19 nt, Homo sapiens
  misc_RNA (1)...(19): siRNA sense strand
ccgacucgcuggagcuucu

SEQ ID NO: 1365896 - RNA, 19 nt, Homo sapiens
  misc_RNA (1)...(19): siRNA sense strand
gaaggucuccgaugucaua

SEQ ID NO: 1365897 - RNA, 19 nt, Homo sapiens
  misc_RNA (1)...(19): siRNA sense strand
gaucauacaugcgcuguga

SEQ ID NO: 1365898 - RNA, 19 nt, Homo sapiens
  misc_RNA (1)...(19): siRNA sense strand
gccgugagcuggugaagaa

SEQ ID NO: 1365899 - RNA, 19 nt, Homo sapiens
  misc_RNA (1)...(19): siRNA sense strand
ugaagaaggucuccgaugu

SEQ ID NO: 1365900 - RNA, 19 nt, Homo sapiens
  misc_RNA (1)...(19): siRNA sense strand
ggagcuggcuguaccugaa

SEQ ID NO: 1365901 - RNA, 19 nt, Homo sapiens
  misc_RNA (1)...(19): siRNA sense strand
gaucaugccuggguagugu

SEQ ID NO: 1365902 - RNA, 19 nt, Homo sapiens
  misc_RNA (1)...(19): siRNA sense strand
ugggacaucuggaaaggua

SEQ ID NO: 1365903 - RNA, 19 nt, Homo sapiens
  misc_RNA (1)...(19): siRNA sense strand
caaggaguucuuugaagua

SEQ ID NO: 1365904 - RNA, 19 nt, Homo sapiens
  misc_RNA (1)...(19): siRNA sense strand
acaaggaguucuuugaagu

SEQ ID NO: 1365905 - RNA, 19 nt, Homo sapiens
  misc_RNA (1)...(19): siRNA sense strand
gaaccuggcagaucuagag

SEQ ID NO: 1365906 - RNA, 19 nt, Homo sapiens
  misc_RNA (1)...(19): siRNA sense strand
ggucuccgaugucauaugg

SEQ ID NO: 1365907 - RNA, 19 nt, Homo sapiens
  misc_RNA (1)...(19): siRNA sense strand
ccacugucauccaggacua

SEQ ID NO: 1365908 - RNA, 19 nt, Homo sapiens
  misc_RNA (1)...(19): siRNA sense strand
acgaggagaucuacaagga

SEQ ID NO: 1365909 - RNA, 19 nt, Homo sapiens
  misc_RNA (1)...(19): siRNA sense strand
cgucaucccuaccaacguu

SEQ ID NO: 1365910 - RNA, 19 nt, Homo sapiens
  misc_RNA (1)...(19): siRNA sense strand
gaagaaggucuccgauguc

SEQ ID NO: 1365911 - RNA, 19 nt, Homo sapiens
  misc_RNA (1)...(19): siRNA sense strand
gggaagacgaggagaucua

SEQ ID NO: 1365912 - RNA, 19 nt, Homo sapiens
  misc_RNA (1)...(19): siRNA sense strand
gaacacaucuaccccuaca

SEQ ID NO: 1365913 - RNA, 19 nt, Homo sapiens
  misc_RNA (1)...(19): siRNA sense strand
gaagaugaagggcaugaag

SEQ ID NO: 1365914 - RNA, 19 nt, Homo sapiens
  misc_RNA (1)...(19): siRNA sense strand
ugacuacacucugucuuuc

SEQ ID NO: 1365915 - RNA, 19 nt, Homo sapiens
  misc_RNA (1)...(19): siRNA sense strand
cuacaaggaguucuuugaa

SEQ ID NO: 1365916 - RNA, 19 nt, Homo sapiens
  misc_RNA (1)...(19): siRNA sense strand
cagaaggugcgcauaguga

SEQ ID NO: 1365917 - RNA, 19 nt, Homo sapiens
  misc_RNA (1)...(19): siRNA sense strand
gccaucaacccuuccauug

SEQ ID NO: 1365918 - RNA, 19 nt, Homo sapiens
  misc_RNA (1)...(19): siRNA sense strand
gugacuacacucugucuuu

SEQ ID NO: 1365919 - RNA, 19 nt, Homo sapiens
  misc_RNA (1)...(19): siRNA sense strand
ugaaguagccaaugauguc

SEQ ID NO: 1365920 - RNA, 19 nt, Homo sapiens
  misc_RNA (1)...(19): siRNA sense strand
gaucuacaaggaguucuuu

SEQ ID NO: 1365921 - RNA, 19 nt, Homo sapiens
  misc_RNA (1)...(19): siRNA sense strand
gcagaaggugcgcauagug

SEQ ID NO: 1365922 - RNA, 19 nt, Homo sapiens
  misc_RNA (1)...(19): siRNA sense strand
aagaaggucuccgauguca

SEQ ID NO: 1365923 - RNA, 19 nt, Homo sapiens
  misc_RNA (1)...(19): siRNA sense strand
gaccuacuaucgggaugaa

SEQ ID NO: 1365924 - RNA, 19 nt, Homo sapiens
  misc_RNA (1)...(19): siRNA sense strand
uagggaaccuggcagaucu

SEQ ID NO: 1365925 - RNA, 19 nt, Homo sapiens
  misc_RNA (1)...(19): siRNA sense strand
ucuccgaugucauauggaa

SEQ ID NO: 1365926 - RNA, 19 nt, Homo sapiens
  misc_RNA (1)...(19): siRNA sense strand
gagaagaugaagggcauga

SEQ ID NO: 1365927 - RNA, 19 nt, Homo sapiens
  misc_RNA (1)...(19): siRNA sense strand
cgacguggugcgccuguuu

SEQ ID NO: 1365928 - RNA, 19 nt, Homo sapiens
  misc_RNA (1)...(19): siRNA sense strand
ucuuugaaguagccaauga

SEQ ID NO: 1365929 - RNA, 19 nt, Homo sapiens
  misc_RNA (1)...(19): siRNA sense strand
uacaaggaguucuuugaag

SEQ ID NO: 1365930 - RNA, 19 nt, Homo sapiens
  misc_RNA (1)...(19): siRNA sense strand
ccugaaaggaucauacaug

SEQ ID NO: 1365931 - RNA, 19 nt, Homo sapiens
  misc_RNA (1)...(19): siRNA sense strand
gaaguagccaaugauguca

SEQ ID NO: 1365932 - RNA, 19 nt, Homo sapiens
  misc_RNA (1)...(19): siRNA sense strand
ccacauccagucccucuuc

SEQ ID NO: 1365933 - RNA, 19 nt, Homo sapiens
  misc_RNA (1)...(19): siRNA sense strand
ggcagaaggugcgcauagu

SEQ ID NO: 1365934 - RNA, 19 nt, Homo sapiens
  misc_RNA (1)...(19): siRNA sense strand
gcagaugaagaagcagaaa

SEQ ID NO: 1365935 - RNA, 19 nt, Homo sapiens
  misc_RNA (1)...(19): siRNA sense strand
cagcuccgguguggccuuu

SEQ ID NO: 1365936 - RNA, 19 nt, Homo sapiens
  misc_RNA (1)...(19): siRNA sense strand
gaccugggacaucuggaaa

SEQ ID NO: 1365937 - RNA, 19 nt, Homo sapiens
  misc_RNA (1)...(19): siRNA sense strand
gagcuggcuguaccugaaa

SEQ ID NO: 1365938 - RNA, 19 nt, Homo sapiens
  misc_RNA (1)...(19): siRNA sense strand
cagacccacucacccucua

SEQ ID NO: 1365939 - RNA, 19 nt, Homo sapiens
  misc_RNA (1)...(19): siRNA sense strand
ggagaucuacaaggaguuc

SEQ ID NO: 1365940 - RNA, 19 nt, Homo sapiens
  misc_RNA (1)...(19): siRNA sense strand
gcugugaccgcaagaugga

SEQ ID NO: 1365941 - RNA, 19 nt, Homo sapiens
  misc_RNA (1)...(19): siRNA sense strand
ggaagccuccugggacugu

SEQ ID NO: 1365942 - RNA, 19 nt, Homo sapiens
  misc_RNA (1)...(19): siRNA sense strand
gggcugggccaccuuucuu

SEQ ID NO: 1365943 - RNA, 19 nt, Homo sapiens
  misc_RNA (1)...(19): siRNA sense strand
ucuaugaccugggacaucu

SEQ ID NO: 1365944 - RNA, 19 nt, Homo sapiens
  misc_RNA (1)...(19): siRNA sense strand
ugaaggaggcagccagcuu

SEQ ID NO: 1365945 - RNA, 19 nt, Homo sapiens
  misc_RNA (1)...(19): siRNA sense strand
ggaagacgaggagaucuac

SEQ ID NO: 1365946 - RNA, 19 nt, Homo sapiens
  misc_RNA (1)...(19): siRNA sense strand
ccucagccaagaccuacua

SEQ ID NO: 1365947 - RNA, 19 nt, Homo sapiens
  misc_RNA (1)...(19): siRNA sense strand
agucgcaagugcagaugaa

SEQ ID NO: 1365948 - RNA, 19 nt, Homo sapiens
  misc_RNA (1)...(19): siRNA sense strand
ucuacaaggaguucuuuga

SEQ ID NO: 1365949 - RNA, 19 nt, Homo sapiens
  misc_RNA (1)...(19): siRNA sense strand
ugcucuggcugcucuauga

SEQ ID NO: 1365950 - RNA, 19 nt, Homo sapiens
  misc_RNA (1)...(19): siRNA sense strand
gcagcgcaaaggccucuga

SEQ ID NO: 1365951 - RNA, 19 nt, Homo sapiens
  misc_RNA (1)...(19): siRNA sense strand
agauggagguggcguucau

SEQ ID NO: 1365952 - RNA, 19 nt, Homo sapiens
  misc_RNA (1)...(19): siRNA sense strand
gaugaagaagcagaaagug

SEQ ID NO: 1365953 - RNA, 19 nt, Homo sapiens
  misc_RNA (1)...(19): siRNA sense strand
cgcaagugcagaugaagaa

SEQ ID NO: 1365954 - RNA, 19 nt, Homo sapiens
  misc_RNA (1)...(19): siRNA sense strand
uccagucccucuucagcuu

SEQ ID NO: 1365955 - RNA, 19 nt, Homo sapiens
  misc_RNA (1)...(19): siRNA sense strand
gcgcugugaccgcaagaug

SEQ ID NO: 1365956 - RNA, 19 nt, Homo sapiens
  misc_RNA (1)...(19): siRNA sense strand
uggccgaccugucuaucau

SEQ ID NO: 1365957 - RNA, 19 nt, Homo sapiens
  misc_RNA (1)...(19): siRNA sense strand
aaggaguucuuugaaguag

SEQ ID NO: 1365958 - RNA, 19 nt, Homo sapiens
  misc_RNA (1)...(19): siRNA sense strand
cagccaagaccuacuaucg

SEQ ID NO: 1365959 - RNA, 19 nt, Homo sapiens
  misc_RNA (1)...(19): siRNA sense strand
gucccucuauccucgagaa

SEQ ID NO: 1365960 - RNA, 19 nt, Homo sapiens
  misc_RNA (1)...(19): siRNA sense strand
gccaucaagcugcaacuca

SEQ ID NO: 1365961 - RNA, 19 nt, Homo sapiens
  misc_RNA (1)...(19): siRNA sense strand
ccgacucgcuggagcuucu

SEQ ID NO: 1365962 - RNA, 19 nt, Homo sapiens
  misc_RNA (1)...(19): siRNA sense strand
gaaggucuccgaugucaua

SEQ ID NO: 1365963 - RNA, 19 nt, Homo sapiens
  misc_RNA (1)...(19): siRNA sense strand
gaucauacaugcgcuguga

SEQ ID NO: 1365964 - RNA, 19 nt, Homo sapiens
  misc_RNA (1)...(19): siRNA sense strand
gccgugagcuggugaagaa

SEQ ID NO: 1365965 - RNA, 19 nt, Homo sapiens
  misc_RNA (1)...(19): siRNA sense strand
ugaagaaggucuccgaugu

SEQ ID NO: 1365966 - RNA, 19 nt, Homo sapiens
  misc_RNA (1)...(19): siRNA sense strand
ggagcuggcuguaccugaa

SEQ ID NO: 1365967 - RNA, 19 nt, Homo sapiens
  misc_RNA (1)...(19): siRNA sense strand
gaucaugccuggguagugu

SEQ ID NO: 1365968 - RNA, 19 nt, Homo sapiens
  misc_RNA (1)...(19): siRNA sense strand
ugggacaucuggaaaggua

SEQ ID NO: 1365969 - RNA, 19 nt, Homo sapiens
  misc_RNA (1)...(19): siRNA sense strand
caaggaguucuuugaagua

SEQ ID NO: 1365970 - RNA, 19 nt, Homo sapiens
  misc_RNA (1)...(19): siRNA sense strand
acaaggaguucuuugaagu

SEQ ID NO: 1365971 - RNA, 19 nt, Homo sapiens
  misc_RNA (1)...(19): siRNA sense strand
gaaccuggcagaucuagag

SEQ ID NO: 1365972 - RNA, 19 nt, Homo sapiens
  misc_RNA (1)...(19): siRNA sense strand
ggucuccgaugucauaugg

SEQ ID NO: 1365973 - RNA, 19 nt, Homo sapiens
  misc_RNA (1)...(19): siRNA sense strand
ccacugucauccaggacua

SEQ ID NO: 1365974 - RNA, 19 nt, Homo sapiens
  misc_RNA (1)...(19): siRNA sense strand
acgaggagaucuacaagga

SEQ ID NO: 1365975 - RNA, 19 nt, Homo sapiens
  misc_RNA (1)...(19): siRNA sense strand
cgucaucccuaccaacguu

SEQ ID NO: 1365976 - RNA, 19 nt, Homo sapiens
  misc_RNA (1)...(19): siRNA sense strand
gaagaaggucuccgauguc

SEQ ID NO: 1365977 - RNA, 19 nt, Homo sapiens
  misc_RNA (1)...(19): siRNA sense strand
gggaagacgaggagaucua

SEQ ID NO: 1365978 - RNA, 19 nt, Homo sapiens
  misc_RNA (1)...(19): siRNA sense strand
gaacacaucuaccccuaca

SEQ ID NO: 1365979 - RNA, 19 nt, Homo sapiens
  misc_RNA (1)...(19): siRNA sense strand
gaagaugaagggcaugaag

SEQ ID NO: 1365980 - RNA, 19 nt, Homo sapiens
  misc_RNA (1)...(19): siRNA sense strand
ugacuacacucugucuuuc

SEQ ID NO: 1365981 - RNA, 19 nt, Homo sapiens
  misc_RNA (1)...(19): siRNA sense strand
cuacaaggaguucuuugaa

SEQ ID NO: 1365982 - RNA, 19 nt, Homo sapiens
  misc_RNA (1)...(19): siRNA sense strand
cagaaggugcgcauaguga

SEQ ID NO: 1365983 - RNA, 19 nt, Homo sapiens
  misc_RNA (1)...(19): siRNA sense strand
gccaucaacccuuccauug

SEQ ID NO: 1365984 - RNA, 19 nt, Homo sapiens
  misc_RNA (1)...(19): siRNA sense strand
gugacuacacucugucuuu

SEQ ID NO: 1365985 - RNA, 19 nt, Homo sapiens
  misc_RNA (1)...(19): siRNA sense strand
ugaaguagccaaugauguc

SEQ ID NO: 1365986 - RNA, 19 nt, Homo sapiens
  misc_RNA (1)...(19): siRNA sense strand
gaucuacaaggaguucuuu

SEQ ID NO: 1365987 - RNA, 19 nt, Homo sapiens
  misc_RNA (1)...(19): siRNA sense strand
gcagaaggugcgcauagug

SEQ ID NO: 1365988 - RNA, 19 nt, Homo sapiens
  misc_RNA (1)...(19): siRNA sense strand
aagaaggucuccgauguca

SEQ ID NO: 1365989 - RNA, 19 nt, Homo sapiens
  misc_RNA (1)...(19): siRNA sense strand
gaccuacuaucgggaugaa

SEQ ID NO: 1365990 - RNA, 19 nt, Homo sapiens
  misc_RNA (1)...(19): siRNA sense strand
uagggaaccuggcagaucu

SEQ ID NO: 1365991 - RNA, 19 nt, Homo sapiens
  misc_RNA (1)...(19): siRNA sense strand
ucuccgaugucauauggaa

SEQ ID NO: 1365992 - RNA, 19 nt, Homo sapiens
  misc_RNA (1)...(19): siRNA sense strand
gagaagaugaagggcauga

SEQ ID NO: 1365993 - RNA, 19 nt, Homo sapiens
  misc_RNA (1)...(19): siRNA sense strand
cgacguggugcgccuguuu

SEQ ID NO: 1365994 - RNA, 19 nt, Homo sapiens
  misc_RNA (1)...(19): siRNA sense strand
ucuuugaaguagccaauga

SEQ ID NO: 1365995 - RNA, 19 nt, Homo sapiens
  misc_RNA (1)...(19): siRNA sense strand
uacaaggaguucuuugaag

SEQ ID NO: 1365996 - RNA, 19 nt, Homo sapiens
  misc_RNA (1)...(19): siRNA sense strand
ccugaaaggaucauacaug

SEQ ID NO: 1365997 - RNA, 19 nt, Homo sapiens
  misc_RNA (1)...(19): siRNA sense strand
gaaguagccaaugauguca

SEQ ID NO: 1365998 - RNA, 19 nt, Homo sapiens
  misc_RNA (1)...(19): siRNA sense strand
ccacauccagucccucuuc

SEQ ID NO: 1365999 - RNA, 19 nt, Homo sapiens
  misc_RNA (1)...(19): siRNA sense strand
ggcagaaggugcgcauagu

SEQ ID NO: 1366000 - RNA, 19 nt, Homo sapiens
  misc_RNA (1)...(19): siRNA sense strand
gcagaugaagaagcagaaa

SEQ ID NO: 1366001 - RNA, 19 nt, Homo sapiens
  misc_RNA (1)...(19): siRNA sense strand
cagcuccgguguggccuuu

SEQ ID NO: 1366002 - RNA, 19 nt, Homo sapiens
  misc_RNA (1)...(19): siRNA sense strand
gaccugggacaucuggaaa

SEQ ID NO: 1366003 - RNA, 19 nt, Homo sapiens
  misc_RNA (1)...(19): siRNA sense strand
gagcuggcuguaccugaaa

SEQ ID NO: 1366004 - RNA, 19 nt, Homo sapiens
  misc_RNA (1)...(19): siRNA sense strand
cagacccacucacccucua

SEQ ID NO: 1366005 - RNA, 19 nt, Homo sapiens
  misc_RNA (1)...(19): siRNA sense strand
ggagaucuacaaggaguuc

SEQ ID NO: 1366006 - RNA, 19 nt, Homo sapiens
  misc_RNA (1)...(19): siRNA sense strand
gcugugaccgcaagaugga

SEQ ID NO: 1366007 - RNA, 19 nt, Homo sapiens
  misc_RNA (1)...(19): siRNA sense strand
ggaagccuccugggacugu

SEQ ID NO: 1366008 - RNA, 19 nt, Homo sapiens
  misc_RNA (1)...(19): siRNA sense strand
gggcugggccaccuuucuu

SEQ ID NO: 1366009 - RNA, 19 nt, Homo sapiens
  misc_RNA (1)...(19): siRNA sense strand
ucuaugaccugggacaucu

SEQ ID NO: 1366010 - RNA, 19 nt, Homo sapiens
  misc_RNA (1)...(19): siRNA sense strand
ugaaggaggcagccagcuu

SEQ ID NO: 1366011 - RNA, 19 nt, Homo sapiens
  misc_RNA (1)...(19): siRNA sense strand
ggaagacgaggagaucuac

SEQ ID NO: 1366012 - RNA, 19 nt, Homo sapiens
  misc_RNA (1)...(19): siRNA sense strand
ccucagccaagaccuacua

SEQ ID NO: 1366013 - RNA, 19 nt, Homo sapiens
  misc_RNA (1)...(19): siRNA sense strand
agucgcaagugcagaugaa

SEQ ID NO: 1366014 - RNA, 19 nt, Homo sapiens
  misc_RNA (1)...(19): siRNA sense strand
ucuacaaggaguucuuuga

SEQ ID NO: 1366015 - RNA, 19 nt, Homo sapiens
  misc_RNA (1)...(19): siRNA sense strand
ugcucuggcugcucuauga

SEQ ID NO: 1366016 - RNA, 19 nt, Homo sapiens
  misc_RNA (1)...(19): siRNA sense strand
gcagcgcaaaggccucuga

SEQ ID NO: 1366017 - RNA, 19 nt, Homo sapiens
  misc_RNA (1)...(19): siRNA sense strand
agauggagguggcguucau

SEQ ID NO: 1366018 - RNA, 19 nt, Homo sapiens
  misc_RNA (1)...(19): siRNA sense strand
gaugaagaagcagaaagug

SEQ ID NO: 1366019 - RNA, 19 nt, Homo sapiens
  misc_RNA (1)...(19): siRNA sense strand
cgcaagugcagaugaagaa

SEQ ID NO: 1366020 - RNA, 19 nt, Homo sapiens
  misc_RNA (1)...(19): siRNA sense strand
uccagucccucuucagcuu

SEQ ID NO: 1366021 - RNA, 19 nt, Homo sapiens
  misc_RNA (1)...(19): siRNA sense strand
gcgcugugaccgcaagaug

SEQ ID NO: 1366022 - RNA, 19 nt, Homo sapiens
  misc_RNA (1)...(19): siRNA sense strand
uggccgaccugucuaucau

SEQ ID NO: 1366023 - RNA, 19 nt, Homo sapiens
  misc_RNA (1)...(19): siRNA sense strand
aaggaguucuuugaaguag

SEQ ID NO: 1366024 - RNA, 19 nt, Homo sapiens
  misc_RNA (1)...(19): siRNA sense strand
cagccaagaccuacuaucg

SEQ ID NO: 1366025 - RNA, 19 nt, Homo sapiens
  misc_RNA (1)...(19): siRNA sense strand
gucccucuauccucgagaa

SEQ ID NO: 1366026 - RNA, 19 nt, Homo sapiens
  misc_RNA (1)...(19): siRNA sense strand
gccaucaagcugcaacuca

SEQ ID NO: 1366027 - RNA, 19 nt, Homo sapiens
  misc_RNA (1)...(19): siRNA sense strand
ccgacucgcuggagcuucu

SEQ ID NO: 1366028 - RNA, 19 nt, Homo sapiens
  misc_RNA (1)...(19): siRNA sense strand
gaaggucuccgaugucaua

SEQ ID NO: 1366029 - RNA, 19 nt, Homo sapiens
  misc_RNA (1)...(19): siRNA sense strand
gaucauacaugcgcuguga

SEQ ID NO: 1366030 - RNA, 19 nt, Homo sapiens
  misc_RNA (1)...(19): siRNA sense strand
gccgugagcuggugaagaa

SEQ ID NO: 1366031 - RNA, 19 nt, Homo sapiens
  misc_RNA (1)...(19): siRNA sense strand
ugaagaaggucuccgaugu

SEQ ID NO: 1366032 - RNA, 19 nt, Homo sapiens
  misc_RNA (1)...(19): siRNA sense strand
ggagcuggcuguaccugaa

SEQ ID NO: 1366033 - RNA, 19 nt, Homo sapiens
  misc_RNA (1)...(19): siRNA sense strand
gaucaugccuggguagugu

SEQ ID NO: 1366034 - RNA, 19 nt, Homo sapiens
  misc_RNA (1)...(19): siRNA sense strand
ugggacaucuggaaaggua

SEQ ID NO: 1366035 - RNA, 19 nt, Homo sapiens
  misc_RNA (1)...(19): siRNA sense strand
caaggaguucuuugaagua

SEQ ID NO: 1366036 - RNA, 19 nt, Homo sapiens
  misc_RNA (1)...(19): siRNA sense strand
acaaggaguucuuugaagu

SEQ ID NO: 1366037 - RNA, 19 nt, Homo sapiens
  misc_RNA (1)...(19): siRNA sense strand
gaaccuggcagaucuagag

SEQ ID NO: 1366038 - RNA, 19 nt, Homo sapiens
  misc_RNA (1)...(19): siRNA sense strand
ggucuccgaugucauaugg

SEQ ID NO: 1366039 - RNA, 19 nt, Homo sapiens
  misc_RNA (1)...(19): siRNA sense strand
ccacugucauccaggacua

SEQ ID NO: 1366040 - RNA, 19 nt, Homo sapiens
  misc_RNA (1)...(19): siRNA sense strand
acgaggagaucuacaagga

SEQ ID NO: 1366041 - RNA, 19 nt, Homo sapiens
  misc_RNA (1)...(19): siRNA sense strand
cgucaucccuaccaacguu

SEQ ID NO: 1366042 - RNA, 19 nt, Homo sapiens
  misc_RNA (1)...(19): siRNA sense strand
gaagaaggucuccgauguc

SEQ ID NO: 1366043 - RNA, 19 nt, Homo sapiens
  misc_RNA (1)...(19): siRNA sense strand
gggaagacgaggagaucua

SEQ ID NO: 1366044 - RNA, 19 nt, Homo sapiens
  misc_RNA (1)...(19): siRNA sense strand
gaacacaucuaccccuaca

SEQ ID NO: 1366045 - RNA, 19 nt, Homo sapiens
  misc_RNA (1)...(19): siRNA sense strand
gaagaugaagggcaugaag

SEQ ID NO: 1366046 - RNA, 19 nt, Homo sapiens
  misc_RNA (1)...(19): siRNA sense strand
ugacuacacucugucuuuc

SEQ ID NO: 1366047 - RNA, 19 nt, Homo sapiens
  misc_RNA (1)...(19): siRNA sense strand
cuacaaggaguucuuugaa

SEQ ID NO: 1366048 - RNA, 19 nt, Homo sapiens
  misc_RNA (1)...(19): siRNA sense strand
cagaaggugcgcauaguga

SEQ ID NO: 1366049 - RNA, 19 nt, Homo sapiens
  misc_RNA (1)...(19): siRNA sense strand
gccaucaacccuuccauug

SEQ ID NO: 1366050 - RNA, 19 nt, Homo sapiens
  misc_RNA (1)...(19): siRNA sense strand
gugacuacacucugucuuu

SEQ ID NO: 1366051 - RNA, 19 nt, Homo sapiens
  misc_RNA (1)...(19): siRNA sense strand
ugaaguagccaaugauguc

SEQ ID NO: 1366052 - RNA, 19 nt, Homo sapiens
  misc_RNA (1)...(19): siRNA sense strand
gaucuacaaggaguucuuu

SEQ ID NO: 1366053 - RNA, 19 nt, Homo sapiens
  misc_RNA (1)...(19): siRNA sense strand
gcagaaggugcgcauagug

SEQ ID NO: 1366054 - RNA, 19 nt, Homo sapiens
  misc_RNA (1)...(19): siRNA sense strand
aagaaggucuccgauguca

SEQ ID NO: 1366055 - RNA, 19 nt, Homo sapiens
  misc_RNA (1)...(19): siRNA sense strand
gaccuacuaucgggaugaa

SEQ ID NO: 1366056 - RNA, 19 nt, Homo sapiens
  misc_RNA (1)...(19): siRNA sense strand
uagggaaccuggcagaucu

SEQ ID NO: 1366057 - RNA, 19 nt, Homo sapiens
  misc_RNA (1)...(19): siRNA sense strand
ucuccgaugucauauggaa

SEQ ID NO: 1366058 - RNA, 19 nt, Homo sapiens
  misc_RNA (1)...(19): siRNA sense strand
gagaagaugaagggcauga

SEQ ID NO: 1366059 - RNA, 19 nt, Homo sapiens
  misc_RNA (1)...(19): siRNA sense strand
cgacguggugcgccuguuu

SEQ ID NO: 1366060 - RNA, 19 nt, Homo sapiens
  misc_RNA (1)...(19): siRNA sense strand
ucuuugaaguagccaauga

SEQ ID NO: 1366061 - RNA, 19 nt, Homo sapiens
  misc_RNA (1)...(19): siRNA sense strand
uacaaggaguucuuugaag

SEQ ID NO: 1366062 - RNA, 19 nt, Homo sapiens
  misc_RNA (1)...(19): siRNA sense strand
ccugaaaggaucauacaug

SEQ ID NO: 1366063 - RNA, 19 nt, Homo sapiens
  misc_RNA (1)...(19): siRNA sense strand
gaaguagccaaugauguca

SEQ ID NO: 1366064 - RNA, 19 nt, Homo sapiens
  misc_RNA (1)...(19): siRNA sense strand
ccacauccagucccucuuc

SEQ ID NO: 1366065 - RNA, 19 nt, Homo sapiens
  misc_RNA (1)...(19): siRNA sense strand
ggcagaaggugcgcauagu

SEQ ID NO: 1366066 - RNA, 19 nt, Homo sapiens
  misc_RNA (1)...(19): siRNA sense strand
gcagaugaagaagcagaaa

SEQ ID NO: 1366067 - RNA, 19 nt, Homo sapiens
  misc_RNA (1)...(19): siRNA sense strand
cagcuccgguguggccuuu

SEQ ID NO: 1366068 - RNA, 19 nt, Homo sapiens
  misc_RNA (1)...(19): siRNA sense strand
gaccugggacaucuggaaa

SEQ ID NO: 1366069 - RNA, 19 nt, Homo sapiens
  misc_RNA (1)...(19): siRNA sense strand
gagcuggcuguaccugaaa

SEQ ID NO: 1366070 - RNA, 19 nt, Homo sapiens
  misc_RNA (1)...(19): siRNA sense strand
cagacccacucacccucua

SEQ ID NO: 1366071 - RNA, 19 nt, Homo sapiens
  misc_RNA (1)...(19): siRNA sense strand
ggagaucuacaaggaguuc

SEQ ID NO: 1366072 - RNA, 19 nt, Homo sapiens
  misc_RNA (1)...(19): siRNA sense strand
gcugugaccgcaagaugga

SEQ ID NO: 1366073 - RNA, 19 nt, Homo sapiens
  misc_RNA (1)...(19): siRNA sense strand
ggaagccuccugggacugu

SEQ ID NO: 1366074 - RNA, 19 nt, Homo sapiens
  misc_RNA (1)...(19): siRNA sense strand
gggcugggccaccuuucuu

SEQ ID NO: 1366075 - RNA, 19 nt, Homo sapiens
  misc_RNA (1)...(19): siRNA sense strand
ucuaugaccugggacaucu

SEQ ID NO: 1366076 - RNA, 19 nt, Homo sapiens
  misc_RNA (1)...(19): siRNA sense strand
ugaaggaggcagccagcuu

SEQ ID NO: 1366077 - RNA, 19 nt, Homo sapiens
  misc_RNA (1)...(19): siRNA sense strand
ggaagacgaggagaucuac

SEQ ID NO: 1366078 - RNA, 19 nt, Homo sapiens
  misc_RNA (1)...(19): siRNA sense strand
ccucagccaagaccuacua

SEQ ID NO: 1366079 - RNA, 19 nt, Homo sapiens
  misc_RNA (1)...(19): siRNA sense strand
agucgcaagugcagaugaa

SEQ ID NO: 1366080 - RNA, 19 nt, Homo sapiens
  misc_RNA (1)...(19): siRNA sense strand
ucuacaaggaguucuuuga

SEQ ID NO: 1366081 - RNA, 19 nt, Homo sapiens
  misc_RNA (1)...(19): siRNA sense strand
ugcucuggcugcucuauga

SEQ ID NO: 1366082 - RNA, 19 nt, Homo sapiens
  misc_RNA (1)...(19): siRNA sense strand
gcagcgcaaaggccucuga

SEQ ID NO: 1366083 - RNA, 19 nt, Homo sapiens
  misc_RNA (1)...(19): siRNA sense strand
agauggagguggcguucau

SEQ ID NO: 1366084 - RNA, 19 nt, Homo sapiens
  misc_RNA (1)...(19): siRNA sense strand
gaugaagaagcagaaagug

SEQ ID NO: 1366085 - RNA, 19 nt, Homo sapiens
  misc_RNA (1)...(19): siRNA sense strand
cgcaagugcagaugaagaa

SEQ ID NO: 1366086 - RNA, 19 nt, Homo sapiens
  misc_RNA (1)...(19): siRNA sense strand
uccagucccucuucagcuu

SEQ ID NO: 1366087 - RNA, 19 nt, Homo sapiens
  misc_RNA (1)...(19): siRNA sense strand
gcgcugugaccgcaagaug

SEQ ID NO: 1366088 - RNA, 19 nt, Homo sapiens
  misc_RNA (1)...(19): siRNA sense strand
uggccgaccugucuaucau

SEQ ID NO: 1366089 - RNA, 19 nt, Homo sapiens
  misc_RNA (1)...(19): siRNA sense strand
aaggaguucuuugaaguag

SEQ ID NO: 1366090 - RNA, 19 nt, Homo sapiens
  misc_RNA (1)...(19): siRNA sense strand
cagccaagaccuacuaucg

SEQ ID NO: 1366091 - RNA, 19 nt, Homo sapiens
  misc_RNA (1)...(19): siRNA sense strand
gucccucuauccucgagaa

SEQ ID NO: 1366092 - RNA, 19 nt, Homo sapiens
  misc_RNA (1)...(19): siRNA sense strand
gccaucaagcugcaacuca

SEQ ID NO: 1366093 - RNA, 19 nt, Homo sapiens
  misc_RNA (1)...(19): siRNA sense strand
ccgacucgcuggagcuucu

SEQ ID NO: 1366094 - RNA, 19 nt, Homo sapiens
  misc_RNA (1)...(19): siRNA sense strand
gaacaagccuccguccaaa

SEQ ID NO: 1366095 - RNA, 19 nt, Homo sapiens
  misc_RNA (1)...(19): siRNA sense strand
gacagcaccugcagugaua

SEQ ID NO: 1366096 - RNA, 19 nt, Homo sapiens
  misc_RNA (1)...(19): siRNA sense strand
gaacccugcugcuggauga

SEQ ID NO: 1366097 - RNA, 19 nt, Homo sapiens
  misc_RNA (1)...(19): siRNA sense strand
ucaagaaccugcucaacau

SEQ ID NO: 1366098 - RNA, 19 nt, Homo sapiens
  misc_RNA (1)...(19): siRNA sense strand
ggaacaagccuccguccaa

SEQ ID NO: 1366099 - RNA, 19 nt, Homo sapiens
  misc_RNA (1)...(19): siRNA sense strand
cggagaagaucaucaucaa

SEQ ID NO: 1366100 - RNA, 19 nt, Homo sapiens
  misc_RNA (1)...(19): siRNA sense strand
ggagacccaugaggccuuu

SEQ ID NO: 1366101 - RNA, 19 nt, Homo sapiens
  misc_RNA (1)...(19): siRNA sense strand
ggacagcaccugcagugau

SEQ ID NO: 1366102 - RNA, 19 nt, Homo sapiens
  misc_RNA (1)...(19): siRNA sense strand
caugaggccuuuaauaucg

SEQ ID NO: 1366103 - RNA, 19 nt, Homo sapiens
  misc_RNA (1)...(19): siRNA sense strand
ccuacgugcucaacuacua

SEQ ID NO: 1366104 - RNA, 19 nt, Homo sapiens
  misc_RNA (1)...(19): siRNA sense strand
guaaugaccacaccgacuu

SEQ ID NO: 1366105 - RNA, 19 nt, Homo sapiens
  misc_RNA (1)...(19): siRNA sense strand
aagaggagcucaccuucug

SEQ ID NO: 1366106 - RNA, 19 nt, Homo sapiens
  misc_RNA (1)...(19): siRNA sense strand
gcacgcgacaugagaccua

SEQ ID NO: 1366107 - RNA, 19 nt, Homo sapiens
  misc_RNA (1)...(19): siRNA sense strand
ccaagaaacggaagaagca

SEQ ID NO: 1366108 - RNA, 19 nt, Homo sapiens
  misc_RNA (1)...(19): siRNA sense strand
cgacgagaccgacguggaa

SEQ ID NO: 1366109 - RNA, 19 nt, Homo sapiens
  misc_RNA (1)...(19): siRNA sense strand
caacaucaucgacuuugug

SEQ ID NO: 1366110 - RNA, 19 nt, Homo sapiens
  misc_RNA (1)...(19): siRNA sense strand
gcguaugugugcugugguu

SEQ ID NO: 1366111 - RNA, 19 nt, Homo sapiens
  misc_RNA (1)...(19): siRNA sense strand
cccaugaggccuuuaauau

SEQ ID NO: 1366112 - RNA, 19 nt, Homo sapiens
  misc_RNA (1)...(19): siRNA sense strand
gcucaacaucaucgacuuu

SEQ ID NO: 1366113 - RNA, 19 nt, Homo sapiens
  misc_RNA (1)...(19): siRNA sense strand
ucaacaacuucggcaugua

SEQ ID NO: 1366114 - RNA, 19 nt, Homo sapiens
  misc_RNA (1)...(19): siRNA sense strand
ucgccuacgugcucaacua

SEQ ID NO: 1366115 - RNA, 19 nt, Homo sapiens
  misc_RNA (1)...(19): siRNA sense strand
cagcuggagucacccaugu

SEQ ID NO: 1366116 - RNA, 19 nt, Homo sapiens
  misc_RNA (1)...(19): siRNA sense strand
gggaagaggguaugaucga

SEQ ID NO: 1366117 - RNA, 19 nt, Homo sapiens
  misc_RNA (1)...(19): siRNA sense strand
ggcgggagguagagacaga

SEQ ID NO: 1366118 - RNA, 19 nt, Homo sapiens
  misc_RNA (1)...(19): siRNA sense strand
ccaugaggccuuuaauauc

SEQ ID NO: 1366119 - RNA, 19 nt, Homo sapiens
  misc_RNA (1)...(19): siRNA sense strand
caacaacuucggcauguac

SEQ ID NO: 1366120 - RNA, 19 nt, Homo sapiens
  misc_RNA (1)...(19): siRNA sense strand
gucaacaacuucggcaugu

SEQ ID NO: 1366121 - RNA, 19 nt, Homo sapiens
  misc_RNA (1)...(19): siRNA sense strand
aaugaguuccugcugcuua

SEQ ID NO: 1366122 - RNA, 19 nt, Homo sapiens
  misc_RNA (1)...(19): siRNA sense strand
gucaagaaccugcucaaca

SEQ ID NO: 1366123 - RNA, 19 nt, Homo sapiens
  misc_RNA (1)...(19): siRNA sense strand
cagagcccauccugaccua

SEQ ID NO: 1366124 - RNA, 19 nt, Homo sapiens
  misc_RNA (1)...(19): siRNA sense strand
aggaggcgcucgacaucuu

SEQ ID NO: 1366125 - RNA, 19 nt, Homo sapiens
  misc_RNA (1)...(19): siRNA sense strand
gaccacaccgacuucaaga

SEQ ID NO: 1366126 - RNA, 19 nt, Homo sapiens
  misc_RNA (1)...(19): siRNA sense strand
gaccgcaacgugacagaga

SEQ ID NO: 1366127 - RNA, 19 nt, Homo sapiens
  misc_RNA (1)...(19): siRNA sense strand
ugagcggccugucauccaa

SEQ ID NO: 1366128 - RNA, 19 nt, Homo sapiens
  misc_RNA (1)...(19): siRNA sense strand
ucaacaucaucgacuuugu

SEQ ID NO: 1366129 - RNA, 19 nt, Homo sapiens
  misc_RNA (1)...(19): siRNA sense strand
ggagacauguaccccaaga

SEQ ID NO: 1366130 - RNA, 19 nt, Homo sapiens
  misc_RNA (1)...(19): siRNA sense strand
gggcugcgaguucuucuuc

SEQ ID NO: 1366131 - RNA, 19 nt, Homo sapiens
  misc_RNA (1)...(19): siRNA sense strand
gcugcgaguucuucuucga

SEQ ID NO: 1366132 - RNA, 19 nt, Homo sapiens
  misc_RNA (1)...(19): siRNA sense strand
ggccagcaccaaugaguuc

SEQ ID NO: 1366133 - RNA, 19 nt, Homo sapiens
  misc_RNA (1)...(19): siRNA sense strand
ggccuuugccucucucuuc

SEQ ID NO: 1366134 - RNA, 19 nt, Homo sapiens
  misc_RNA (1)...(19): siRNA sense strand
acaccgacuucaagaacau

SEQ ID NO: 1366135 - RNA, 19 nt, Homo sapiens
  misc_RNA (1)...(19): siRNA sense strand
acacugggcuacggagaca

SEQ ID NO: 1366136 - RNA, 19 nt, Homo sapiens
  misc_RNA (1)...(19): siRNA sense strand
gaaccugcucaacaucauc

SEQ ID NO: 1366137 - RNA, 19 nt, Homo sapiens
  misc_RNA (1)...(19): siRNA sense strand
ccacaccgacuucaagaac

SEQ ID NO: 1366138 - RNA, 19 nt, Homo sapiens
  misc_RNA (1)...(19): siRNA sense strand
caagcucacacgccacuuc

SEQ ID NO: 1366139 - RNA, 19 nt, Homo sapiens
  misc_RNA (1)...(19): siRNA sense strand
uugccaccaugaucuacua

SEQ ID NO: 1366140 - RNA, 19 nt, Homo sapiens
  misc_RNA (1)...(19): siRNA sense strand
acccaugaggccuuuaaua

SEQ ID NO: 1366141 - RNA, 19 nt, Homo sapiens
  misc_RNA (1)...(19): siRNA sense strand
ugagggccagcaccaauga

SEQ ID NO: 1366142 - RNA, 19 nt, Homo sapiens
  misc_RNA (1)...(19): siRNA sense strand
gagcccauccugaccuaca

SEQ ID NO: 1366143 - RNA, 19 nt, Homo sapiens
  misc_RNA (1)...(19): siRNA sense strand
gcaugugggcgcucuucga

SEQ ID NO: 1366144 - RNA, 19 nt, Homo sapiens
  misc_RNA (1)...(19): siRNA sense strand
gcgaggcgucggagaagau

SEQ ID NO: 1366145 - RNA, 19 nt, Homo sapiens
  misc_RNA (1)...(19): siRNA sense strand
caagaaccugcucaacauc

SEQ ID NO: 1366146 - RNA, 19 nt, Homo sapiens
  misc_RNA (1)...(19): siRNA sense strand
acgcuggacuucgucaaga

SEQ ID NO: 1366147 - RNA, 19 nt, Homo sapiens
  misc_RNA (1)...(19): siRNA sense strand
gguaugaucgagaggaaac

SEQ ID NO: 1366148 - RNA, 19 nt, Homo sapiens
  misc_RNA (1)...(19): siRNA sense strand
ccauguacugcaagucuga

SEQ ID NO: 1366149 - RNA, 19 nt, Homo sapiens
  misc_RNA (1)...(19): siRNA sense strand
caacuucggcauguacuac

SEQ ID NO: 1366150 - RNA, 19 nt, Homo sapiens
  misc_RNA (1)...(19): siRNA sense strand
agaagaucaucaucaacgu

SEQ ID NO: 1366151 - RNA, 19 nt, Homo sapiens
  misc_RNA (1)...(19): siRNA sense strand
ucgaagaggagcucaccuu

SEQ ID NO: 1366152 - RNA, 19 nt, Homo sapiens
  misc_RNA (1)...(19): siRNA sense strand
gaacaagccuccguccaaa

SEQ ID NO: 1366153 - RNA, 19 nt, Homo sapiens
  misc_RNA (1)...(19): siRNA sense strand
gacagcaccugcagugaua

SEQ ID NO: 1366154 - RNA, 19 nt, Homo sapiens
  misc_RNA (1)...(19): siRNA sense strand
gaacccugcugcuggauga

SEQ ID NO: 1366155 - RNA, 19 nt, Homo sapiens
  misc_RNA (1)...(19): siRNA sense strand
ucaagaaccugcucaacau

SEQ ID NO: 1366156 - RNA, 19 nt, Homo sapiens
  misc_RNA (1)...(19): siRNA sense strand
ggaacaagccuccguccaa

SEQ ID NO: 1366157 - RNA, 19 nt, Homo sapiens
  misc_RNA (1)...(19): siRNA sense strand
cggagaagaucaucaucaa

SEQ ID NO: 1366158 - RNA, 19 nt, Homo sapiens
  misc_RNA (1)...(19): siRNA sense strand
ggagacccaugaggccuuu

SEQ ID NO: 1366159 - RNA, 19 nt, Homo sapiens
  misc_RNA (1)...(19): siRNA sense strand
ggacagcaccugcagugau

SEQ ID NO: 1366160 - RNA, 19 nt, Homo sapiens
  misc_RNA (1)...(19): siRNA sense strand
caugaggccuuuaauaucg

SEQ ID NO: 1366161 - RNA, 19 nt, Homo sapiens
  misc_RNA (1)...(19): siRNA sense strand
ccuacgugcucaacuacua

SEQ ID NO: 1366162 - RNA, 19 nt, Homo sapiens
  misc_RNA (1)...(19): siRNA sense strand
guaaugaccacaccgacuu

SEQ ID NO: 1366163 - RNA, 19 nt, Homo sapiens
  misc_RNA (1)...(19): siRNA sense strand
aagaggagcucaccuucug

SEQ ID NO: 1366164 - RNA, 19 nt, Homo sapiens
  misc_RNA (1)...(19): siRNA sense strand
gcacgcgacaugagaccua

SEQ ID NO: 1366165 - RNA, 19 nt, Homo sapiens
  misc_RNA (1)...(19): siRNA sense strand
ccaagaaacggaagaagca

SEQ ID NO: 1366166 - RNA, 19 nt, Homo sapiens
  misc_RNA (1)...(19): siRNA sense strand
cgacgagaccgacguggaa

SEQ ID NO: 1366167 - RNA, 19 nt, Homo sapiens
  misc_RNA (1)...(19): siRNA sense strand
caacaucaucgacuuugug

SEQ ID NO: 1366168 - RNA, 19 nt, Homo sapiens
  misc_RNA (1)...(19): siRNA sense strand
gcguaugugugcugugguu

SEQ ID NO: 1366169 - RNA, 19 nt, Homo sapiens
  misc_RNA (1)...(19): siRNA sense strand
cccaugaggccuuuaauau

SEQ ID NO: 1366170 - RNA, 19 nt, Homo sapiens
  misc_RNA (1)...(19): siRNA sense strand
gcucaacaucaucgacuuu

SEQ ID NO: 1366171 - RNA, 19 nt, Homo sapiens
  misc_RNA (1)...(19): siRNA sense strand
ucaacaacuucggcaugua

SEQ ID NO: 1366172 - RNA, 19 nt, Homo sapiens
  misc_RNA (1)...(19): siRNA sense strand
ucgccuacgugcucaacua

SEQ ID NO: 1366173 - RNA, 19 nt, Homo sapiens
  misc_RNA (1)...(19): siRNA sense strand
cagcuggagucacccaugu

SEQ ID NO: 1366174 - RNA, 19 nt, Homo sapiens
  misc_RNA (1)...(19): siRNA sense strand
gggaagaggguaugaucga

SEQ ID NO: 1366175 - RNA, 19 nt, Homo sapiens
  misc_RNA (1)...(19): siRNA sense strand
ggcgggagguagagacaga

SEQ ID NO: 1366176 - RNA, 19 nt, Homo sapiens
  misc_RNA (1)...(19): siRNA sense strand
ccaugaggccuuuaauauc

SEQ ID NO: 1366177 - RNA, 19 nt, Homo sapiens
  misc_RNA (1)...(19): siRNA sense strand
caacaacuucggcauguac

SEQ ID NO: 1366178 - RNA, 19 nt, Homo sapiens
  misc_RNA (1)...(19): siRNA sense strand
gucaacaacuucggcaugu

SEQ ID NO: 1366179 - RNA, 19 nt, Homo sapiens
  misc_RNA (1)...(19): siRNA sense strand
aaugaguuccugcugcuua

SEQ ID NO: 1366180 - RNA, 19 nt, Homo sapiens
  misc_RNA (1)...(19): siRNA sense strand
gucaagaaccugcucaaca

SEQ ID NO: 1366181 - RNA, 19 nt, Homo sapiens
  misc_RNA (1)...(19): siRNA sense strand
cagagcccauccugaccua

SEQ ID NO: 1366182 - RNA, 19 nt, Homo sapiens
  misc_RNA (1)...(19): siRNA sense strand
aggaggcgcucgacaucuu

SEQ ID NO: 1366183 - RNA, 19 nt, Homo sapiens
  misc_RNA (1)...(19): siRNA sense strand
gaccacaccgacuucaaga

SEQ ID NO: 1366184 - RNA, 19 nt, Homo sapiens
  misc_RNA (1)...(19): siRNA sense strand
gaccgcaacgugacagaga

SEQ ID NO: 1366185 - RNA, 19 nt, Homo sapiens
  misc_RNA (1)...(19): siRNA sense strand
ugagcggccugucauccaa

SEQ ID NO: 1366186 - RNA, 19 nt, Homo sapiens
  misc_RNA (1)...(19): siRNA sense strand
ucaacaucaucgacuuugu

SEQ ID NO: 1366187 - RNA, 19 nt, Homo sapiens
  misc_RNA (1)...(19): siRNA sense strand
ggagacauguaccccaaga

SEQ ID NO: 1366188 - RNA, 19 nt, Homo sapiens
  misc_RNA (1)...(19): siRNA sense strand
gggcugcgaguucuucuuc

SEQ ID NO: 1366189 - RNA, 19 nt, Homo sapiens
  misc_RNA (1)...(19): siRNA sense strand
gcugcgaguucuucuucga

SEQ ID NO: 1366190 - RNA, 19 nt, Homo sapiens
  misc_RNA (1)...(19): siRNA sense strand
ggccagcaccaaugaguuc

SEQ ID NO: 1366191 - RNA, 19 nt, Homo sapiens
  misc_RNA (1)...(19): siRNA sense strand
ggccuuugccucucucuuc

SEQ ID NO: 1366192 - RNA, 19 nt, Homo sapiens
  misc_RNA (1)...(19): siRNA sense strand
acaccgacuucaagaacau

SEQ ID NO: 1366193 - RNA, 19 nt, Homo sapiens
  misc_RNA (1)...(19): siRNA sense strand
acacugggcuacggagaca

SEQ ID NO: 1366194 - RNA, 19 nt, Homo sapiens
  misc_RNA (1)...(19): siRNA sense strand
gaaccugcucaacaucauc

SEQ ID NO: 1366195 - RNA, 19 nt, Homo sapiens
  misc_RNA (1)...(19): siRNA sense strand
ccacaccgacuucaagaac

SEQ ID NO: 1366196 - RNA, 19 nt, Homo sapiens
  misc_RNA (1)...(19): siRNA sense strand
caagcucacacgccacuuc

SEQ ID NO: 1366197 - RNA, 19 nt, Homo sapiens
  misc_RNA (1)...(19): siRNA sense strand
uugccaccaugaucuacua

SEQ ID NO: 1366198 - RNA, 19 nt, Homo sapiens
  misc_RNA (1)...(19): siRNA sense strand
acccaugaggccuuuaaua

SEQ ID NO: 1366199 - RNA, 19 nt, Homo sapiens
  misc_RNA (1)...(19): siRNA sense strand
ugagggccagcaccaauga

SEQ ID NO: 1366200 - RNA, 19 nt, Homo sapiens
  misc_RNA (1)...(19): siRNA sense strand
gagcccauccugaccuaca

SEQ ID NO: 1366201 - RNA, 19 nt, Homo sapiens
  misc_RNA (1)...(19): siRNA sense strand
gcaugugggcgcucuucga

SEQ ID NO: 1366202 - RNA, 19 nt, Homo sapiens
  misc_RNA (1)...(19): siRNA sense strand
gcgaggcgucggagaagau

SEQ ID NO: 1366203 - RNA, 19 nt, Homo sapiens
  misc_RNA (1)...(19): siRNA sense strand
caagaaccugcucaacauc

SEQ ID NO: 1366204 - RNA, 19 nt, Homo sapiens
  misc_RNA (1)...(19): siRNA sense strand
acgcuggacuucgucaaga

SEQ ID NO: 1366205 - RNA, 19 nt, Homo sapiens
  misc_RNA (1)...(19): siRNA sense strand
gguaugaucgagaggaaac

SEQ ID NO: 1366206 - RNA, 19 nt, Homo sapiens
  misc_RNA (1)...(19): siRNA sense strand
ccauguacugcaagucuga

SEQ ID NO: 1366207 - RNA, 19 nt, Homo sapiens
  misc_RNA (1)...(19): siRNA sense strand
caacuucggcauguacuac

SEQ ID NO: 1366208 - RNA, 19 nt, Homo sapiens
  misc_RNA (1)...(19): siRNA sense strand
agaagaucaucaucaacgu

SEQ ID NO: 1366209 - RNA, 19 nt, Homo sapiens
  misc_RNA (1)...(19): siRNA sense strand
ucgaagaggagcucaccuu

SEQ ID NO: 1366210 - RNA, 19 nt, Homo sapiens
  misc_RNA (1)...(19): siRNA sense strand
ggaaauggcugagcguuua

SEQ ID NO: 1366211 - RNA, 19 nt, Homo sapiens
  misc_RNA (1)...(19): siRNA sense strand
gcguuuagcugacaaauau

SEQ ID NO: 1366212 - RNA, 19 nt, Homo sapiens
  misc_RNA (1)...(19): siRNA sense strand
gaaagucuaguacucaaua

SEQ ID NO: 1366213 - RNA, 19 nt, Homo sapiens
  misc_RNA (1)...(19): siRNA sense strand
gaacacauccuuuguacga

SEQ ID NO: 1366214 - RNA, 19 nt, Homo sapiens
  misc_RNA (1)...(19): siRNA sense strand
uagaagaucucaguuauug

SEQ ID NO: 1366215 - RNA, 19 nt, Homo sapiens
  misc_RNA (1)...(19): siRNA sense strand
ucaaacagguuacuaugaa

SEQ ID NO: 1366216 - RNA, 19 nt, Homo sapiens
  misc_RNA (1)...(19): siRNA sense strand
gggcuaacuuggauucaua

SEQ ID NO: 1366217 - RNA, 19 nt, Homo sapiens
  misc_RNA (1)...(19): siRNA sense strand
gagagacuuuccugacaua

SEQ ID NO: 1366218 - RNA, 19 nt, Homo sapiens
  misc_RNA (1)...(19): siRNA sense strand
acacagcccuggaaauauu

SEQ ID NO: 1366219 - RNA, 19 nt, Homo sapiens
  misc_RNA (1)...(19): siRNA sense strand
ccaaguguccuucaagaua

SEQ ID NO: 1366220 - RNA, 19 nt, Homo sapiens
  misc_RNA (1)...(19): siRNA sense strand
ucacaaauuucuuggauca

SEQ ID NO: 1366221 - RNA, 19 nt, Homo sapiens
  misc_RNA (1)...(19): siRNA sense strand
cggcaaagaugaaguagug

SEQ ID NO: 1366222 - RNA, 19 nt, Homo sapiens
  misc_RNA (1)...(19): siRNA sense strand
gaaagugcauucaguccau

SEQ ID NO: 1366223 - RNA, 19 nt, Homo sapiens
  misc_RNA (1)...(19): siRNA sense strand
caaguguccuucaagauau

SEQ ID NO: 1366224 - RNA, 19 nt, Homo sapiens
  misc_RNA (1)...(19): siRNA sense strand
gaaagaauuacagcugaua

SEQ ID NO: 1366225 - RNA, 19 nt, Homo sapiens
  misc_RNA (1)...(19): siRNA sense strand
gaucagaugaagaagauaa

SEQ ID NO: 1366226 - RNA, 19 nt, Homo sapiens
  misc_RNA (1)...(19): siRNA sense strand
gagauugcuuugcauaaau

SEQ ID NO: 1366227 - RNA, 19 nt, Homo sapiens
  misc_RNA (1)...(19): siRNA sense strand
agaggagggugaacauaua

SEQ ID NO: 1366228 - RNA, 19 nt, Homo sapiens
  misc_RNA (1)...(19): siRNA sense strand
agacagcaguugcauuuga

SEQ ID NO: 1366229 - RNA, 19 nt, Homo sapiens
  misc_RNA (1)...(19): siRNA sense strand
caaacagguuacuaugaaa

SEQ ID NO: 1366230 - RNA, 19 nt, Homo sapiens
  misc_RNA (1)...(19): siRNA sense strand
ggacuuaugguauuagaau

SEQ ID NO: 1366231 - RNA, 19 nt, Homo sapiens
  misc_RNA (1)...(19): siRNA sense strand
uuacacagcccuggaaaua

SEQ ID NO: 1366232 - RNA, 19 nt, Homo sapiens
  misc_RNA (1)...(19): siRNA sense strand
ucauagagaucccaagugu

SEQ ID NO: 1366233 - RNA, 19 nt, Homo sapiens
  misc_RNA (1)...(19): siRNA sense strand
gaacauauaagggaaaugg

SEQ ID NO: 1366234 - RNA, 19 nt, Homo sapiens
  misc_RNA (1)...(19): siRNA sense strand
uggcagaccuggcuuccua

SEQ ID NO: 1366235 - RNA, 19 nt, Homo sapiens
  misc_RNA (1)...(19): siRNA sense strand
ccaccucucugacucuaaa

SEQ ID NO: 1366236 - RNA, 19 nt, Homo sapiens
  misc_RNA (1)...(19): siRNA sense strand
gggaaauggugaagcaaau

SEQ ID NO: 1366237 - RNA, 19 nt, Homo sapiens
  misc_RNA (1)...(19): siRNA sense strand
gcggagggucaaauuauua

SEQ ID NO: 1366238 - RNA, 19 nt, Homo sapiens
  misc_RNA (1)...(19): siRNA sense strand
ggagagacuuuccugacau

SEQ ID NO: 1366239 - RNA, 19 nt, Homo sapiens
  misc_RNA (1)...(19): siRNA sense strand
uacaggaacucucuacaga

SEQ ID NO: 1366240 - RNA, 19 nt, Homo sapiens
  misc_RNA (1)...(19): siRNA sense strand
uaagggaaauggugaagca

SEQ ID NO: 1366241 - RNA, 19 nt, Homo sapiens
  misc_RNA (1)...(19): siRNA sense strand
gaagaucucaguuauuguc

SEQ ID NO: 1366242 - RNA, 19 nt, Homo sapiens
  misc_RNA (1)...(19): siRNA sense strand
ucaugaagcugguguacau

SEQ ID NO: 1366243 - RNA, 19 nt, Homo sapiens
  misc_RNA (1)...(19): siRNA sense strand
gcaaucauguaaacuucug

SEQ ID NO: 1366244 - RNA, 19 nt, Homo sapiens
  misc_RNA (1)...(19): siRNA sense strand
gauauccgcaaucauguaa

SEQ ID NO: 1366245 - RNA, 19 nt, Homo sapiens
  misc_RNA (1)...(19): siRNA sense strand
cgagaaacguggucuuugg

SEQ ID NO: 1366246 - RNA, 19 nt, Homo sapiens
  misc_RNA (1)...(19): siRNA sense strand
ucgagaagauguugaagug

SEQ ID NO: 1366247 - RNA, 19 nt, Homo sapiens
  misc_RNA (1)...(19): siRNA sense strand
gauuguaccugacauucug

SEQ ID NO: 1366248 - RNA, 19 nt, Homo sapiens
  misc_RNA (1)...(19): siRNA sense strand
agagauugcuuugcauaaa

SEQ ID NO: 1366249 - RNA, 19 nt, Homo sapiens
  misc_RNA (1)...(19): siRNA sense strand
gaaauggugaagcaaauca

SEQ ID NO: 1366250 - RNA, 19 nt, Homo sapiens
  misc_RNA (1)...(19): siRNA sense strand
aaucaggaaugcuguauca

SEQ ID NO: 1366251 - RNA, 19 nt, Homo sapiens
  misc_RNA (1)...(19): siRNA sense strand
ugacauacaucagucuguu

SEQ ID NO: 1366252 - RNA, 19 nt, Homo sapiens
  misc_RNA (1)...(19): siRNA sense strand
gcaguugcauuugacuuug

SEQ ID NO: 1366253 - RNA, 19 nt, Homo sapiens
  misc_RNA (1)...(19): siRNA sense strand
ccacuaacgugauaauacu

SEQ ID NO: 1366254 - RNA, 19 nt, Homo sapiens
  misc_RNA (1)...(19): siRNA sense strand
agagacagcaguugcauuu

SEQ ID NO: 1366255 - RNA, 19 nt, Homo sapiens
  misc_RNA (1)...(19): siRNA sense strand
ccucauuccuucucuguau

SEQ ID NO: 1366256 - RNA, 19 nt, Homo sapiens
  misc_RNA (1)...(19): siRNA sense strand
cacuguacaucuuauauga

SEQ ID NO: 1366257 - RNA, 19 nt, Homo sapiens
  misc_RNA (1)...(19): siRNA sense strand
gaaaaucaacagugaauug

SEQ ID NO: 1366258 - RNA, 19 nt, Homo sapiens
  misc_RNA (1)...(19): siRNA sense strand
gaaagaggagggugaacau

SEQ ID NO: 1366259 - RNA, 19 nt, Homo sapiens
  misc_RNA (1)...(19): siRNA sense strand
acaaauaugaggaagcuaa

SEQ ID NO: 1366260 - RNA, 19 nt, Homo sapiens
  misc_RNA (1)...(19): siRNA sense strand
gaagauaaggauaguuuac

SEQ ID NO: 1366261 - RNA, 19 nt, Homo sapiens
  misc_RNA (1)...(19): siRNA sense strand
agauaucacuguacucaug

SEQ ID NO: 1366262 - RNA, 19 nt, Homo sapiens
  misc_RNA (1)...(19): siRNA sense strand
aagaugaaguaguggcaua

SEQ ID NO: 1366263 - RNA, 19 nt, Homo sapiens
  misc_RNA (1)...(19): siRNA sense strand
guuaacaucagacaacgua

SEQ ID NO: 1366264 - RNA, 19 nt, Homo sapiens
  misc_RNA (1)...(19): siRNA sense strand
gacaacguaaucagaauuu

SEQ ID NO: 1366265 - RNA, 19 nt, Homo sapiens
  misc_RNA (1)...(19): siRNA sense strand
acuagaagaucucaguuau

SEQ ID NO: 1366266 - RNA, 19 nt, Homo sapiens
  misc_RNA (1)...(19): siRNA sense strand
agaaacaacuagaagaucu

SEQ ID NO: 1366267 - RNA, 19 nt, Homo sapiens
  misc_RNA (1)...(19): siRNA sense strand
gacacccacuaacgugaua

SEQ ID NO: 1366268 - RNA, 19 nt, Homo sapiens
  misc_RNA (1)...(19): siRNA sense strand
caagauaucacuguacuca

SEQ ID NO: 1366269 - RNA, 19 nt, Homo sapiens
  misc_RNA (1)...(19): siRNA sense strand
ccucauauggccguuauua

SEQ ID NO: 1366270 - RNA, 19 nt, Homo sapiens
  misc_RNA (1)...(19): siRNA sense strand
guacauaguguugggcuaa

SEQ ID NO: 1366271 - RNA, 19 nt, Homo sapiens
  misc_RNA (1)...(19): siRNA sense strand
aaucaacagugaauuguag

SEQ ID NO: 1366272 - RNA, 19 nt, Homo sapiens
  misc_RNA (1)...(19): siRNA sense strand
gaggagggugaacauauaa

SEQ ID NO: 1366273 - RNA, 19 nt, Homo sapiens
  misc_RNA (1)...(19): siRNA sense strand
uaaggauaguuuacaggaa

SEQ ID NO: 1366274 - RNA, 19 nt, Homo sapiens
  misc_RNA (1)...(19): siRNA sense strand
guuugaauguguugaguug

SEQ ID NO: 1366275 - RNA, 19 nt, Homo sapiens
  misc_RNA (1)...(19): siRNA sense strand
cgaagaggaaagucuagua

SEQ ID NO: 1366276 - RNA, 19 nt, Homo sapiens
  misc_RNA (1)...(19): siRNA sense strand
aaacggcaaagaugaagua

SEQ ID NO: 1366277 - RNA, 19 nt, Homo sapiens
  misc_RNA (1)...(19): siRNA sense strand
cagcgaaagugcauucagu

SEQ ID NO: 1366278 - RNA, 19 nt, Homo sapiens
  misc_RNA (1)...(19): siRNA sense strand
aaacaggacuuggcaaagg

SEQ ID NO: 1366279 - RNA, 19 nt, Homo sapiens
  misc_RNA (1)...(19): siRNA sense strand
acaaauuucuuggaucaga

SEQ ID NO: 1366280 - RNA, 19 nt, Homo sapiens
  misc_RNA (1)...(19): siRNA sense strand
cagucaaacuucauagaga

SEQ ID NO: 1366281 - RNA, 19 nt, Homo sapiens
  misc_RNA (1)...(19): siRNA sense strand
ggaaagcuguuggguccau

SEQ ID NO: 1366282 - RNA, 19 nt, Homo sapiens
  misc_RNA (1)...(19): siRNA sense strand
ccaguucucucugauagug

SEQ ID NO: 1366283 - RNA, 19 nt, Homo sapiens
  misc_RNA (1)...(19): siRNA sense strand
cuacagaacagaaaugcuu

SEQ ID NO: 1366284 - RNA, 19 nt, Homo sapiens
  misc_RNA (1)...(19): siRNA sense strand
ggaacucucuacagaacag

SEQ ID NO: 1366285 - RNA, 19 nt, Homo sapiens
  misc_RNA (1)...(19): siRNA sense strand
gaagaggaaagucuaguac

SEQ ID NO: 1366286 - RNA, 19 nt, Homo sapiens
  misc_RNA (1)...(19): siRNA sense strand
ccagagauugcuuugcaua

SEQ ID NO: 1366287 - RNA, 19 nt, Homo sapiens
  misc_RNA (1)...(19): siRNA sense strand
gaugaagaagauaaggaua

SEQ ID NO: 1366288 - RNA, 19 nt, Homo sapiens
  misc_RNA (1)...(19): siRNA sense strand
gaucccaaguguccuucaa

SEQ ID NO: 1366289 - RNA, 19 nt, Homo sapiens
  misc_RNA (1)...(19): siRNA sense strand
uaccagagauugcuuugca

SEQ ID NO: 1366290 - RNA, 19 nt, Homo sapiens
  misc_RNA (1)...(19): siRNA sense strand
ggacaaaacggcaaagaug

SEQ ID NO: 1366291 - RNA, 19 nt, Homo sapiens
  misc_RNA (1)...(19): siRNA sense strand
cugaucaacuucgacauuu

SEQ ID NO: 1366292 - RNA, 19 nt, Homo sapiens
  misc_RNA (1)...(19): siRNA sense strand
caaauaugaggaagcuaaa

SEQ ID NO: 1366293 - RNA, 19 nt, Homo sapiens
  misc_RNA (1)...(19): siRNA sense strand
gggaaauggcugagcguuu

SEQ ID NO: 1366294 - RNA, 19 nt, Homo sapiens
  misc_RNA (1)...(19): siRNA sense strand
acagaaaugcuuuguugaa

SEQ ID NO: 1366295 - RNA, 19 nt, Homo sapiens
  misc_RNA (1)...(19): siRNA sense strand
gaaagcuguuggguccauu

SEQ ID NO: 1366296 - RNA, 19 nt, Homo sapiens
  misc_RNA (1)...(19): siRNA sense strand
gacauacaucagucuguua

SEQ ID NO: 1366297 - RNA, 19 nt, Homo sapiens
  misc_RNA (1)...(19): siRNA sense strand
caaauuucuuggaucagau

SEQ ID NO: 1366298 - RNA, 19 nt, Homo sapiens
  misc_RNA (1)...(19): siRNA sense strand
ggaaaagucugcgggaaau

SEQ ID NO: 1366299 - RNA, 19 nt, Homo sapiens
  misc_RNA (1)...(19): siRNA sense strand
ucaaacaggacuuggcaaa

SEQ ID NO: 1366300 - RNA, 19 nt, Homo sapiens
  misc_RNA (1)...(19): siRNA sense strand
ugaagaagauaaggauagu

SEQ ID NO: 1366301 - RNA, 19 nt, Homo sapiens
  misc_RNA (1)...(19): siRNA sense strand
uggaucagaugaagaagau

SEQ ID NO: 1366302 - RNA, 19 nt, Homo sapiens
  misc_RNA (1)...(19): siRNA sense strand
gacgagaaacguggucuuu

SEQ ID NO: 1366303 - RNA, 19 nt, Homo sapiens
  misc_RNA (1)...(19): siRNA sense strand
ucagagagcaguacauucu

SEQ ID NO: 1366304 - RNA, 19 nt, Homo sapiens
  misc_RNA (1)...(19): siRNA sense strand
guugaacacauccuuugua

SEQ ID NO: 1366305 - RNA, 19 nt, Homo sapiens
  misc_RNA (1)...(19): siRNA sense strand
auauggccguuauuaagua

SEQ ID NO: 1366306 - RNA, 19 nt, Homo sapiens
  misc_RNA (1)...(19): siRNA sense strand
cgcaguugcugacgagaaa

SEQ ID NO: 1366307 - RNA, 19 nt, Homo sapiens
  misc_RNA (1)...(19): siRNA sense strand
ugacaaauaugaggaagcu

SEQ ID NO: 1366308 - RNA, 19 nt, Homo sapiens
  misc_RNA (1)...(19): siRNA sense strand
cagcggagggucaaauuau

SEQ ID NO: 1366309 - RNA, 19 nt, Homo sapiens
  misc_RNA (1)...(19): siRNA sense strand
gcaguacauucucaaacag

SEQ ID NO: 1366310 - RNA, 19 nt, Homo sapiens
  misc_RNA (1)...(19): siRNA sense strand
ugaaacagaugacaccaaa

SEQ ID NO: 1366311 - RNA, 19 nt, Homo sapiens
  misc_RNA (1)...(19): siRNA sense strand
gagcaaggcuagucuccaa

SEQ ID NO: 1366312 - RNA, 19 nt, Homo sapiens
  misc_RNA (1)...(19): siRNA sense strand
gcagucacauuuauggaaa

SEQ ID NO: 1366313 - RNA, 19 nt, Homo sapiens
  misc_RNA (1)...(19): siRNA sense strand
gauggaaggugcaacauag

SEQ ID NO: 1366314 - RNA, 19 nt, Homo sapiens
  misc_RNA (1)...(19): siRNA sense strand
ccaugugccuuuauaauga

SEQ ID NO: 1366315 - RNA, 19 nt, Homo sapiens
  misc_RNA (1)...(19): siRNA sense strand
gaaggagagaccauuauuu

SEQ ID NO: 1366316 - RNA, 19 nt, Homo sapiens
  misc_RNA (1)...(19): siRNA sense strand
ccagaucaauaucaacuuu

SEQ ID NO: 1366317 - RNA, 19 nt, Homo sapiens
  misc_RNA (1)...(19): siRNA sense strand
guucaaacaucuucggaaa

SEQ ID NO: 1366318 - RNA, 19 nt, Homo sapiens
  misc_RNA (1)...(19): siRNA sense strand
ucaaacaucuucggaaaug

SEQ ID NO: 1366319 - RNA, 19 nt, Homo sapiens
  misc_RNA (1)...(19): siRNA sense strand
caacauagaauuuggcaau

SEQ ID NO: 1366320 - RNA, 19 nt, Homo sapiens
  misc_RNA (1)...(19): siRNA sense strand
gaagagaggcuaugacaac

SEQ ID NO: 1366321 - RNA, 19 nt, Homo sapiens
  misc_RNA (1)...(19): siRNA sense strand
uagcguacauucacaaaga

SEQ ID NO: 1366322 - RNA, 19 nt, Homo sapiens
  misc_RNA (1)...(19): siRNA sense strand
ccagcaggacuuugaauua

SEQ ID NO: 1366323 - RNA, 19 nt, Homo sapiens
  misc_RNA (1)...(19): siRNA sense strand
gaggcacagucaagguuua

SEQ ID NO: 1366324 - RNA, 19 nt, Homo sapiens
  misc_RNA (1)...(19): siRNA sense strand
gaccucagcuuuucuguuu

SEQ ID NO: 1366325 - RNA, 19 nt, Homo sapiens
  misc_RNA (1)...(19): siRNA sense strand
gcaggacuuugaauuagug

SEQ ID NO: 1366326 - RNA, 19 nt, Homo sapiens
  misc_RNA (1)...(19): siRNA sense strand
gggaagcuuugccuccuaa

SEQ ID NO: 1366327 - RNA, 19 nt, Homo sapiens
  misc_RNA (1)...(19): siRNA sense strand
gaaggugcaacauagaauu

SEQ ID NO: 1366328 - RNA, 19 nt, Homo sapiens
  misc_RNA (1)...(19): siRNA sense strand
gcacagucaagguuuauau

SEQ ID NO: 1366329 - RNA, 19 nt, Homo sapiens
  misc_RNA (1)...(19): siRNA sense strand
gacagaaaguauguucaaa

SEQ ID NO: 1366330 - RNA, 19 nt, Homo sapiens
  misc_RNA (1)...(19): siRNA sense strand
gauguuagagccaggauga

SEQ ID NO: 1366331 - RNA, 19 nt, Homo sapiens
  misc_RNA (1)...(19): siRNA sense strand
cugcuuaucuuucagucua

SEQ ID NO: 1366332 - RNA, 19 nt, Homo sapiens
  misc_RNA (1)...(19): siRNA sense strand
aaacgugccaagaccauua

SEQ ID NO: 1366333 - RNA, 19 nt, Homo sapiens
  misc_RNA (1)...(19): siRNA sense strand
cagcaggacuuugaauuag

SEQ ID NO: 1366334 - RNA, 19 nt, Homo sapiens
  misc_RNA (1)...(19): siRNA sense strand
uuccauaacuuuagcaaga

SEQ ID NO: 1366335 - RNA, 19 nt, Homo sapiens
  misc_RNA (1)...(19): siRNA sense strand
gcaaagagcaaggcuaguc

SEQ ID NO: 1366336 - RNA, 19 nt, Homo sapiens
  misc_RNA (1)...(19): siRNA sense strand
agacaaaggaagggaaaua

SEQ ID NO: 1366337 - RNA, 19 nt, Homo sapiens
  misc_RNA (1)...(19): siRNA sense strand
ucacauuuauggaaagcuu

SEQ ID NO: 1366338 - RNA, 19 nt, Homo sapiens
  misc_RNA (1)...(19): siRNA sense strand
cauagaauuuggcaaugug

SEQ ID NO: 1366339 - RNA, 19 nt, Homo sapiens
  misc_RNA (1)...(19): siRNA sense strand
gcaguagcguacauucaca

SEQ ID NO: 1366340 - RNA, 19 nt, Homo sapiens
  misc_RNA (1)...(19): siRNA sense strand
gaacgcagugaucagcaaa

SEQ ID NO: 1366341 - RNA, 19 nt, Homo sapiens
  misc_RNA (1)...(19): siRNA sense strand
ugacagaaaguauguucaa

SEQ ID NO: 1366342 - RNA, 19 nt, Homo sapiens
  misc_RNA (1)...(19): siRNA sense strand
agaagucaaugaaacagau

SEQ ID NO: 1366343 - RNA, 19 nt, Homo sapiens
  misc_RNA (1)...(19): siRNA sense strand
ugaaggagagaccauuauu

SEQ ID NO: 1366344 - RNA, 19 nt, Homo sapiens
  misc_RNA (1)...(19): siRNA sense strand
gaccucaaguggagauaca

SEQ ID NO: 1366345 - RNA, 19 nt, Homo sapiens
  misc_RNA (1)...(19): siRNA sense strand
caagacaaaggaagggaaa

SEQ ID NO: 1366346 - RNA, 19 nt, Homo sapiens
  misc_RNA (1)...(19): siRNA sense strand
caaggcuagucuccaaaga

SEQ ID NO: 1366347 - RNA, 19 nt, Homo sapiens
  misc_RNA (1)...(19): siRNA sense strand
gccaugugccuuuauaaug

SEQ ID NO: 1366348 - RNA, 19 nt, Homo sapiens
  misc_RNA (1)...(19): siRNA sense strand
ggaaggugcaacauagaau

SEQ ID NO: 1366349 - RNA, 19 nt, Homo sapiens
  misc_RNA (1)...(19): siRNA sense strand
ucaagugaccauuggauau

SEQ ID NO: 1366350 - RNA, 19 nt, Homo sapiens
  misc_RNA (1)...(19): siRNA sense strand
ggaggcacagucaagguuu

SEQ ID NO: 1366351 - RNA, 19 nt, Homo sapiens
  misc_RNA (1)...(19): siRNA sense strand
gcuuaucuuucagucuaua

SEQ ID NO: 1366352 - RNA, 19 nt, Homo sapiens
  misc_RNA (1)...(19): siRNA sense strand
gaucacaacagcccuuucu

SEQ ID NO: 1366353 - RNA, 19 nt, Homo sapiens
  misc_RNA (1)...(19): siRNA sense strand
gauauggauucaggugugu

SEQ ID NO: 1366354 - RNA, 19 nt, Homo sapiens
  misc_RNA (1)...(19): siRNA sense strand
ugucagaagucaaugaaac

SEQ ID NO: 1366355 - RNA, 19 nt, Homo sapiens
  misc_RNA (1)...(19): siRNA sense strand
ccaacuucaucuugucaga

SEQ ID NO: 1366356 - RNA, 19 nt, Homo sapiens
  misc_RNA (1)...(19): siRNA sense strand
ucacaacagcccuuucuuc

SEQ ID NO: 1366357 - RNA, 19 nt, Homo sapiens
  misc_RNA (1)...(19): siRNA sense strand
cuuauuggcagucacauuu

SEQ ID NO: 1366358 - RNA, 19 nt, Homo sapiens
  misc_RNA (1)...(19): siRNA sense strand
caagugaccauuggauaug

SEQ ID NO: 1366359 - RNA, 19 nt, Homo sapiens
  misc_RNA (1)...(19): siRNA sense strand
aggcuagucuccaaagaug

SEQ ID NO: 1366360 - RNA, 19 nt, Homo sapiens
  misc_RNA (1)...(19): siRNA sense strand
gccaagaccauuacguuca

SEQ ID NO: 1366361 - RNA, 19 nt, Homo sapiens
  misc_RNA (1)...(19): siRNA sense strand
ucuuuggucuccuguggua

SEQ ID NO: 1366362 - RNA, 19 nt, Homo sapiens
  misc_RNA (1)...(19): siRNA sense strand
ggaugaagagaggcuauga

SEQ ID NO: 1366363 - RNA, 19 nt, Homo sapiens
  misc_RNA (1)...(19): siRNA sense strand
ccauuacguucagcaagaa

SEQ ID NO: 1366364 - RNA, 19 nt, Homo sapiens
  misc_RNA (1)...(19): siRNA sense strand
ccugaaggagagaccauua

SEQ ID NO: 1366365 - RNA, 19 nt, Homo sapiens
  misc_RNA (1)...(19): siRNA sense strand
cagucaagguuuauauucu

SEQ ID NO: 1366366 - RNA, 19 nt, Homo sapiens
  misc_RNA (1)...(19): siRNA sense strand
ucaggugugugacagaaca

SEQ ID NO: 1366367 - RNA, 19 nt, Homo sapiens
  misc_RNA (1)...(19): siRNA sense strand
agacucaagugaccauugg

SEQ ID NO: 1366368 - RNA, 19 nt, Homo sapiens
  misc_RNA (1)...(19): siRNA sense strand
gguaugcaguagcguacau

SEQ ID NO: 1366369 - RNA, 19 nt, Homo sapiens
  misc_RNA (1)...(19): siRNA sense strand
ugugccaugugccuuuaua

SEQ ID NO: 1366370 - RNA, 19 nt, Homo sapiens
  misc_RNA (1)...(19): siRNA sense strand
uauuggcagucacauuuau

SEQ ID NO: 1366371 - RNA, 19 nt, Homo sapiens
  misc_RNA (1)...(19): siRNA sense strand
ccaagaccauuacguucag

SEQ ID NO: 1366372 - RNA, 19 nt, Homo sapiens
  misc_RNA (1)...(19): siRNA sense strand
gugccaagaccauuacguu

SEQ ID NO: 1366373 - RNA, 19 nt, Homo sapiens
  misc_RNA (1)...(19): siRNA sense strand
gagacucaagugaccauug

SEQ ID NO: 1366374 - RNA, 19 nt, Homo sapiens
  misc_RNA (1)...(19): siRNA sense strand
gaagucaaugaaacagaug

SEQ ID NO: 1366375 - RNA, 19 nt, Homo sapiens
  misc_RNA (1)...(19): siRNA sense strand
caucuugucagaagucaau

SEQ ID NO: 1366376 - RNA, 19 nt, Homo sapiens
  misc_RNA (1)...(19): siRNA sense strand
gagagaccauuauuuugga

SEQ ID NO: 1366377 - RNA, 19 nt, Homo sapiens
  misc_RNA (1)...(19): siRNA sense strand
gcaaggcuagucuccaaag

SEQ ID NO: 1366378 - RNA, 19 nt, Homo sapiens
  misc_RNA (1)...(19): siRNA sense strand
caagaucuccaggcccaaa

SEQ ID NO: 1366379 - RNA, 19 nt, Homo sapiens
  misc_RNA (1)...(19): siRNA sense strand
ggcagucacauuuauggaa

SEQ ID NO: 1366380 - RNA, 19 nt, Homo sapiens
  misc_RNA (1)...(19): siRNA sense strand
accauuacguucagcaaga

SEQ ID NO: 1366381 - RNA, 19 nt, Homo sapiens
  misc_RNA (1)...(19): siRNA sense strand
gaucaggguguugacagaa

SEQ ID NO: 1366382 - RNA, 19 nt, Homo sapiens
  misc_RNA (1)...(19): siRNA sense strand
caacuucaucuugucagaa

SEQ ID NO: 1366383 - RNA, 19 nt, Homo sapiens
  misc_RNA (1)...(19): siRNA sense strand
gaccagaucaauaucaacu

SEQ ID NO: 1366384 - RNA, 19 nt, Homo sapiens
  misc_RNA (1)...(19): siRNA sense strand
uggaccagaucaauaucaa

SEQ ID NO: 1366385 - RNA, 19 nt, Homo sapiens
  misc_RNA (1)...(19): siRNA sense strand
gaagcuuugccuccuaauc

SEQ ID NO: 1366386 - RNA, 19 nt, Homo sapiens
  misc_RNA (1)...(19): siRNA sense strand
gagaauauuaauggcuuga

SEQ ID NO: 1366387 - RNA, 19 nt, Homo sapiens
  misc_RNA (1)...(19): siRNA sense strand
agauggaaggugcaacaua

SEQ ID NO: 1366388 - RNA, 19 nt, Homo sapiens
  misc_RNA (1)...(19): siRNA sense strand
ggugcaacauagaauuugg

SEQ ID NO: 1366389 - RNA, 19 nt, Homo sapiens
  misc_RNA (1)...(19): siRNA sense strand
uggcuaaucucaggaagag

SEQ ID NO: 1366390 - RNA, 19 nt, Homo sapiens
  misc_RNA (1)...(19): siRNA sense strand
agaacgcagugaucagcaa

SEQ ID NO: 1366391 - RNA, 19 nt, Homo sapiens
  misc_RNA (1)...(19): siRNA sense strand
aaagauggaaggugcaaca

SEQ ID NO: 1366392 - RNA, 19 nt, Homo sapiens
  misc_RNA (1)...(19): siRNA sense strand
gggaaauaccgaguggauu

SEQ ID NO: 1366393 - RNA, 19 nt, Homo sapiens
  misc_RNA (1)...(19): siRNA sense strand
ggagagaccauuauuuugg

SEQ ID NO: 1366394 - RNA, 19 nt, Homo sapiens
  misc_RNA (1)...(19): siRNA sense strand
gugccuuuauaaugagaaa

SEQ ID NO: 1366395 - RNA, 19 nt, Homo sapiens
  misc_RNA (1)...(19): siRNA sense strand
guuagagccaggaugaaga

SEQ ID NO: 1366396 - RNA, 19 nt, Homo sapiens
  misc_RNA (1)...(19): siRNA sense strand
cagucuauacuuggaguua

SEQ ID NO: 1366397 - RNA, 19 nt, Homo sapiens
  misc_RNA (1)...(19): siRNA sense strand
ccauaacuuuagcaagaca

SEQ ID NO: 1366398 - RNA, 19 nt, Homo sapiens
  misc_RNA (1)...(19): siRNA sense strand
ggauuuccauaacuuuagc

SEQ ID NO: 1366399 - RNA, 19 nt, Homo sapiens
  misc_RNA (1)...(19): siRNA sense strand
gacaaaggaagggaaauac

SEQ ID NO: 1366400 - RNA, 19 nt, Homo sapiens
  misc_RNA (1)...(19): siRNA sense strand
cccauaguauccaagacaa

SEQ ID NO: 1366401 - RNA, 19 nt, Homo sapiens
  misc_RNA (1)...(19): siRNA sense strand
uuauuggcagucacauuua

SEQ ID NO: 1366402 - RNA, 19 nt, Homo sapiens
  misc_RNA (1)...(19): siRNA sense strand
gcaagaacgcagugaucag

SEQ ID NO: 1366403 - RNA, 19 nt, Homo sapiens
  misc_RNA (1)...(19): siRNA sense strand
cagcaagaacgcagugauc

SEQ ID NO: 1366404 - RNA, 19 nt, Homo sapiens
  misc_RNA (1)...(19): siRNA sense strand
caaagagcaaggcuagucu

SEQ ID NO: 1366405 - RNA, 19 nt, Homo sapiens
  misc_RNA (1)...(19): siRNA sense strand
aaggugcaacauagaauuu

SEQ ID NO: 1366406 - RNA, 19 nt, Homo sapiens
  misc_RNA (1)...(19): siRNA sense strand
aaggagagaccauuauuuu

SEQ ID NO: 1366407 - RNA, 19 nt, Homo sapiens
  misc_RNA (1)...(19): siRNA sense strand
gguguugacagaaaguaug

SEQ ID NO: 1366408 - RNA, 19 nt, Homo sapiens
  misc_RNA (1)...(19): siRNA sense strand
acagucaagguuuauauuc

SEQ ID NO: 1366409 - RNA, 19 nt, Homo sapiens
  misc_RNA (1)...(19): siRNA sense strand
cagaugacaccaaaaugua

SEQ ID NO: 1366410 - RNA, 19 nt, Homo sapiens
  misc_RNA (1)...(19): siRNA sense strand
ugaaacagaugacaccaaa

SEQ ID NO: 1366411 - RNA, 19 nt, Homo sapiens
  misc_RNA (1)...(19): siRNA sense strand
gagcaaggcuagucuccaa

SEQ ID NO: 1366412 - RNA, 19 nt, Homo sapiens
  misc_RNA (1)...(19): siRNA sense strand
gcagucacauuuauggaaa

SEQ ID NO: 1366413 - RNA, 19 nt, Homo sapiens
  misc_RNA (1)...(19): siRNA sense strand
gauggaaggugcaacauag

SEQ ID NO: 1366414 - RNA, 19 nt, Homo sapiens
  misc_RNA (1)...(19): siRNA sense strand
ccaugugccuuuauaauga

SEQ ID NO: 1366415 - RNA, 19 nt, Homo sapiens
  misc_RNA (1)...(19): siRNA sense strand
gaaggagagaccauuauuu

SEQ ID NO: 1366416 - RNA, 19 nt, Homo sapiens
  misc_RNA (1)...(19): siRNA sense strand
ccagaucaauaucaacuuu

SEQ ID NO: 1366417 - RNA, 19 nt, Homo sapiens
  misc_RNA (1)...(19): siRNA sense strand
guucaaacaucuucggaaa

SEQ ID NO: 1366418 - RNA, 19 nt, Homo sapiens
  misc_RNA (1)...(19): siRNA sense strand
ucaaacaucuucggaaaug

SEQ ID NO: 1366419 - RNA, 19 nt, Homo sapiens
  misc_RNA (1)...(19): siRNA sense strand
caacauagaauuuggcaau

SEQ ID NO: 1366420 - RNA, 19 nt, Homo sapiens
  misc_RNA (1)...(19): siRNA sense strand
gaagagaggcuaugacaac

SEQ ID NO: 1366421 - RNA, 19 nt, Homo sapiens
  misc_RNA (1)...(19): siRNA sense strand
uagcguacauucacaaaga

SEQ ID NO: 1366422 - RNA, 19 nt, Homo sapiens
  misc_RNA (1)...(19): siRNA sense strand
ccagcaggacuuugaauua

SEQ ID NO: 1366423 - RNA, 19 nt, Homo sapiens
  misc_RNA (1)...(19): siRNA sense strand
gaggcacagucaagguuua

SEQ ID NO: 1366424 - RNA, 19 nt, Homo sapiens
  misc_RNA (1)...(19): siRNA sense strand
gaccucagcuuuucuguuu

SEQ ID NO: 1366425 - RNA, 19 nt, Homo sapiens
  misc_RNA (1)...(19): siRNA sense strand
gcaggacuuugaauuagug

SEQ ID NO: 1366426 - RNA, 19 nt, Homo sapiens
  misc_RNA (1)...(19): siRNA sense strand
gggaagcuuugccuccuaa

SEQ ID NO: 1366427 - RNA, 19 nt, Homo sapiens
  misc_RNA (1)...(19): siRNA sense strand
gaaggugcaacauagaauu

SEQ ID NO: 1366428 - RNA, 19 nt, Homo sapiens
  misc_RNA (1)...(19): siRNA sense strand
gcacagucaagguuuauau

SEQ ID NO: 1366429 - RNA, 19 nt, Homo sapiens
  misc_RNA (1)...(19): siRNA sense strand
gauguuagagccaggauga

SEQ ID NO: 1366430 - RNA, 19 nt, Homo sapiens
  misc_RNA (1)...(19): siRNA sense strand
cugcuuaucuuucagucua

SEQ ID NO: 1366431 - RNA, 19 nt, Homo sapiens
  misc_RNA (1)...(19): siRNA sense strand
aaacgugccaagaccauua

SEQ ID NO: 1366432 - RNA, 19 nt, Homo sapiens
  misc_RNA (1)...(19): siRNA sense strand
cagcaggacuuugaauuag

SEQ ID NO: 1366433 - RNA, 19 nt, Homo sapiens
  misc_RNA (1)...(19): siRNA sense strand
uuccauaacuuuagcaaga

SEQ ID NO: 1366434 - RNA, 19 nt, Homo sapiens
  misc_RNA (1)...(19): siRNA sense strand
ucacauuuauggaaagcuu

SEQ ID NO: 1366435 - RNA, 19 nt, Homo sapiens
  misc_RNA (1)...(19): siRNA sense strand
agacaaaggaagggaaaua

SEQ ID NO: 1366436 - RNA, 19 nt, Homo sapiens
  misc_RNA (1)...(19): siRNA sense strand
gcaaagagcaaggcuaguc

SEQ ID NO: 1366437 - RNA, 19 nt, Homo sapiens
  misc_RNA (1)...(19): siRNA sense strand
cauagaauuuggcaaugug

SEQ ID NO: 1366438 - RNA, 19 nt, Homo sapiens
  misc_RNA (1)...(19): siRNA sense strand
gcaguagcguacauucaca

SEQ ID NO: 1366439 - RNA, 19 nt, Homo sapiens
  misc_RNA (1)...(19): siRNA sense strand
gaacgcagugaucagcaaa

SEQ ID NO: 1366440 - RNA, 19 nt, Homo sapiens
  misc_RNA (1)...(19): siRNA sense strand
gaccucaaguggagauaca

SEQ ID NO: 1366441 - RNA, 19 nt, Homo sapiens
  misc_RNA (1)...(19): siRNA sense strand
agaagucaaugaaacagau

SEQ ID NO: 1366442 - RNA, 19 nt, Homo sapiens
  misc_RNA (1)...(19): siRNA sense strand
ugaaggagagaccauuauu

SEQ ID NO: 1366443 - RNA, 19 nt, Homo sapiens
  misc_RNA (1)...(19): siRNA sense strand
caaggcuagucuccaaaga

SEQ ID NO: 1366444 - RNA, 19 nt, Homo sapiens
  misc_RNA (1)...(19): siRNA sense strand
gccaugugccuuuauaaug

SEQ ID NO: 1366445 - RNA, 19 nt, Homo sapiens
  misc_RNA (1)...(19): siRNA sense strand
caagacaaaggaagggaaa

SEQ ID NO: 1366446 - RNA, 19 nt, Homo sapiens
  misc_RNA (1)...(19): siRNA sense strand
ggaggcacagucaagguuu

SEQ ID NO: 1366447 - RNA, 19 nt, Homo sapiens
  misc_RNA (1)...(19): siRNA sense strand
ggaaggugcaacauagaau

SEQ ID NO: 1366448 - RNA, 19 nt, Homo sapiens
  misc_RNA (1)...(19): siRNA sense strand
ucaagugaccauuggauau

SEQ ID NO: 1366449 - RNA, 19 nt, Homo sapiens
  misc_RNA (1)...(19): siRNA sense strand
gcuuaucuuucagucuaua

SEQ ID NO: 1366450 - RNA, 19 nt, Homo sapiens
  misc_RNA (1)...(19): siRNA sense strand
gaucacaacagcccuuucu

SEQ ID NO: 1366451 - RNA, 19 nt, Homo sapiens
  misc_RNA (1)...(19): siRNA sense strand
gauauggauucaggugugu

SEQ ID NO: 1366452 - RNA, 19 nt, Homo sapiens
  misc_RNA (1)...(19): siRNA sense strand
ugucagaagucaaugaaac

SEQ ID NO: 1366453 - RNA, 19 nt, Homo sapiens
  misc_RNA (1)...(19): siRNA sense strand
ccaacuucaucuugucaga

SEQ ID NO: 1366454 - RNA, 19 nt, Homo sapiens
  misc_RNA (1)...(19): siRNA sense strand
ucacaacagcccuuucuuc

SEQ ID NO: 1366455 - RNA, 19 nt, Homo sapiens
  misc_RNA (1)...(19): siRNA sense strand
cuuauuggcagucacauuu

SEQ ID NO: 1366456 - RNA, 19 nt, Homo sapiens
  misc_RNA (1)...(19): siRNA sense strand
caagugaccauuggauaug

SEQ ID NO: 1366457 - RNA, 19 nt, Homo sapiens
  misc_RNA (1)...(19): siRNA sense strand
gccaagaccauuacguuca

SEQ ID NO: 1366458 - RNA, 19 nt, Homo sapiens
  misc_RNA (1)...(19): siRNA sense strand
aggcuagucuccaaagaug

SEQ ID NO: 1366459 - RNA, 19 nt, Homo sapiens
  misc_RNA (1)...(19): siRNA sense strand
ucuuuggucuccuguggua

SEQ ID NO: 1366460 - RNA, 19 nt, Homo sapiens
  misc_RNA (1)...(19): siRNA sense strand
ggaugaagagaggcuauga

SEQ ID NO: 1366461 - RNA, 19 nt, Homo sapiens
  misc_RNA (1)...(19): siRNA sense strand
ccauuacguucagcaagaa

SEQ ID NO: 1366462 - RNA, 19 nt, Homo sapiens
  misc_RNA (1)...(19): siRNA sense strand
ccugaaggagagaccauua

SEQ ID NO: 1366463 - RNA, 19 nt, Homo sapiens
  misc_RNA (1)...(19): siRNA sense strand
agacucaagugaccauugg

SEQ ID NO: 1366464 - RNA, 19 nt, Homo sapiens
  misc_RNA (1)...(19): siRNA sense strand
cagucaagguuuauauucu

SEQ ID NO: 1366465 - RNA, 19 nt, Homo sapiens
  misc_RNA (1)...(19): siRNA sense strand
ucaggugugugacagaaca

SEQ ID NO: 1366466 - RNA, 19 nt, Homo sapiens
  misc_RNA (1)...(19): siRNA sense strand
gguaugcaguagcguacau

SEQ ID NO: 1366467 - RNA, 19 nt, Homo sapiens
  misc_RNA (1)...(19): siRNA sense strand
ugugccaugugccuuuaua

SEQ ID NO: 1366468 - RNA, 19 nt, Homo sapiens
  misc_RNA (1)...(19): siRNA sense strand
uauuggcagucacauuuau

SEQ ID NO: 1366469 - RNA, 19 nt, Homo sapiens
  misc_RNA (1)...(19): siRNA sense strand
ccaagaccauuacguucag

SEQ ID NO: 1366470 - RNA, 19 nt, Homo sapiens
  misc_RNA (1)...(19): siRNA sense strand
gugccaagaccauuacguu

SEQ ID NO: 1366471 - RNA, 19 nt, Homo sapiens
  misc_RNA (1)...(19): siRNA sense strand
gcaaggcuagucuccaaag

SEQ ID NO: 1366472 - RNA, 19 nt, Homo sapiens
  misc_RNA (1)...(19): siRNA sense strand
gaagucaaugaaacagaug

SEQ ID NO: 1366473 - RNA, 19 nt, Homo sapiens
  misc_RNA (1)...(19): siRNA sense strand
caucuugucagaagucaau

SEQ ID NO: 1366474 - RNA, 19 nt, Homo sapiens
  misc_RNA (1)...(19): siRNA sense strand
gagagaccauuauuuugga

SEQ ID NO: 1366475 - RNA, 19 nt, Homo sapiens
  misc_RNA (1)...(19): siRNA sense strand
gagacucaagugaccauug

SEQ ID NO: 1366476 - RNA, 19 nt, Homo sapiens
  misc_RNA (1)...(19): siRNA sense strand
caagaucuccaggcccaaa

SEQ ID NO: 1366477 - RNA, 19 nt, Homo sapiens
  misc_RNA (1)...(19): siRNA sense strand
ggcagucacauuuauggaa

SEQ ID NO: 1366478 - RNA, 19 nt, Homo sapiens
  misc_RNA (1)...(19): siRNA sense strand
accauuacguucagcaaga

SEQ ID NO: 1366479 - RNA, 19 nt, Homo sapiens
  misc_RNA (1)...(19): siRNA sense strand
caacuucaucuugucagaa

SEQ ID NO: 1366480 - RNA, 19 nt, Homo sapiens
  misc_RNA (1)...(19): siRNA sense strand
gaccagaucaauaucaacu

SEQ ID NO: 1366481 - RNA, 19 nt, Homo sapiens
  misc_RNA (1)...(19): siRNA sense strand
uggaccagaucaauaucaa

SEQ ID NO: 1366482 - RNA, 19 nt, Homo sapiens
  misc_RNA (1)...(19): siRNA sense strand
gaagcuuugccuccuaauc

SEQ ID NO: 1366483 - RNA, 19 nt, Homo sapiens
  misc_RNA (1)...(19): siRNA sense strand
gagaauauuaauggcuuga

SEQ ID NO: 1366484 - RNA, 19 nt, Homo sapiens
  misc_RNA (1)...(19): siRNA sense strand
agauggaaggugcaacaua

SEQ ID NO: 1366485 - RNA, 19 nt, Homo sapiens
  misc_RNA (1)...(19): siRNA sense strand
ggugcaacauagaauuugg

SEQ ID NO: 1366486 - RNA, 19 nt, Homo sapiens
  misc_RNA (1)...(19): siRNA sense strand
uggcuaaucucaggaagag

SEQ ID NO: 1366487 - RNA, 19 nt, Homo sapiens
  misc_RNA (1)...(19): siRNA sense strand
aaagauggaaggugcaaca

SEQ ID NO: 1366488 - RNA, 19 nt, Homo sapiens
  misc_RNA (1)...(19): siRNA sense strand
gggaaauaccgaguggauu

SEQ ID NO: 1366489 - RNA, 19 nt, Homo sapiens
  misc_RNA (1)...(19): siRNA sense strand
ggagagaccauuauuuugg

SEQ ID NO: 1366490 - RNA, 19 nt, Homo sapiens
  misc_RNA (1)...(19): siRNA sense strand
agaacgcagugaucagcaa

SEQ ID NO: 1366491 - RNA, 19 nt, Homo sapiens
  misc_RNA (1)...(19): siRNA sense strand
gugccuuuauaaugagaaa

SEQ ID NO: 1366492 - RNA, 19 nt, Homo sapiens
  misc_RNA (1)...(19): siRNA sense strand
guuagagccaggaugaaga

SEQ ID NO: 1366493 - RNA, 19 nt, Homo sapiens
  misc_RNA (1)...(19): siRNA sense strand
cagucuauacuuggaguua

SEQ ID NO: 1366494 - RNA, 19 nt, Homo sapiens
  misc_RNA (1)...(19): siRNA sense strand
ccauaacuuuagcaagaca

SEQ ID NO: 1366495 - RNA, 19 nt, Homo sapiens
  misc_RNA (1)...(19): siRNA sense strand
ggauuuccauaacuuuagc

SEQ ID NO: 1366496 - RNA, 19 nt, Homo sapiens
  misc_RNA (1)...(19): siRNA sense strand
gacaaaggaagggaaauac

SEQ ID NO: 1366497 - RNA, 19 nt, Homo sapiens
  misc_RNA (1)...(19): siRNA sense strand
cccauaguauccaagacaa

SEQ ID NO: 1366498 - RNA, 19 nt, Homo sapiens
  misc_RNA (1)...(19): siRNA sense strand
uuauuggcagucacauuua

SEQ ID NO: 1366499 - RNA, 19 nt, Homo sapiens
  misc_RNA (1)...(19): siRNA sense strand
gcaagaacgcagugaucag

SEQ ID NO: 1366500 - RNA, 19 nt, Homo sapiens
  misc_RNA (1)...(19): siRNA sense strand
cagcaagaacgcagugauc

SEQ ID NO: 1366501 - RNA, 19 nt, Homo sapiens
  misc_RNA (1)...(19): siRNA sense strand
caaagagcaaggcuagucu

SEQ ID NO: 1366502 - RNA, 19 nt, Homo sapiens
  misc_RNA (1)...(19): siRNA sense strand
aaggagagaccauuauuuu

SEQ ID NO: 1366503 - RNA, 19 nt, Homo sapiens
  misc_RNA (1)...(19): siRNA sense strand
aaggugcaacauagaauuu

SEQ ID NO: 1366504 - RNA, 19 nt, Homo sapiens
  misc_RNA (1)...(19): siRNA sense strand
acagucaagguuuauauuc

SEQ ID NO: 1366505 - RNA, 19 nt, Homo sapiens
  misc_RNA (1)...(19): siRNA sense strand
cagaugacaccaaaaugua

SEQ ID NO: 1366506 - RNA, 19 nt, Homo sapiens
  misc_RNA (1)...(19): siRNA sense strand
cacagucaagguuuauauu

SEQ ID NO: 1366507 - RNA, 19 nt, Homo sapiens
  misc_RNA (1)...(19): siRNA sense strand
aaacagaugacaccaaaau

SEQ ID NO: 1366508 - RNA, 19 nt, Homo sapiens
  misc_RNA (1)...(19): siRNA sense strand
gccaaguccggacauccua

SEQ ID NO: 1366509 - RNA, 19 nt, Homo sapiens
  misc_RNA (1)...(19): siRNA sense strand
cagaagucaaugaaacaga

SEQ ID NO: 1366510 - RNA, 19 nt, Homo sapiens
  misc_RNA (1)...(19): siRNA sense strand
ugaaacagaugacaccaaa

SEQ ID NO: 1366511 - RNA, 19 nt, Homo sapiens
  misc_RNA (1)...(19): siRNA sense strand
gagcaaggcuagucuccaa

SEQ ID NO: 1366512 - RNA, 19 nt, Homo sapiens
  misc_RNA (1)...(19): siRNA sense strand
gcagucacauuuauggaaa

SEQ ID NO: 1366513 - RNA, 19 nt, Homo sapiens
  misc_RNA (1)...(19): siRNA sense strand
gauggaaggugcaacauag

SEQ ID NO: 1366514 - RNA, 19 nt, Homo sapiens
  misc_RNA (1)...(19): siRNA sense strand
ccaugugccuuuauaauga

SEQ ID NO: 1366515 - RNA, 19 nt, Homo sapiens
  misc_RNA (1)...(19): siRNA sense strand
gaaggagagaccauuauuu

SEQ ID NO: 1366516 - RNA, 19 nt, Homo sapiens
  misc_RNA (1)...(19): siRNA sense strand
ccagaucaauaucaacuuu

SEQ ID NO: 1366517 - RNA, 19 nt, Homo sapiens
  misc_RNA (1)...(19): siRNA sense strand
guucaaacaucuucggaaa

SEQ ID NO: 1366518 - RNA, 19 nt, Homo sapiens
  misc_RNA (1)...(19): siRNA sense strand
ucaaacaucuucggaaaug

SEQ ID NO: 1366519 - RNA, 19 nt, Homo sapiens
  misc_RNA (1)...(19): siRNA sense strand
caacauagaauuuggcaau

SEQ ID NO: 1366520 - RNA, 19 nt, Homo sapiens
  misc_RNA (1)...(19): siRNA sense strand
gaagagaggcuaugacaac

SEQ ID NO: 1366521 - RNA, 19 nt, Homo sapiens
  misc_RNA (1)...(19): siRNA sense strand
uagcguacauucacaaaga

SEQ ID NO: 1366522 - RNA, 19 nt, Homo sapiens
  misc_RNA (1)...(19): siRNA sense strand
ccagcaggacuuugaauua

SEQ ID NO: 1366523 - RNA, 19 nt, Homo sapiens
  misc_RNA (1)...(19): siRNA sense strand
gaggcacagucaagguuua

SEQ ID NO: 1366524 - RNA, 19 nt, Homo sapiens
  misc_RNA (1)...(19): siRNA sense strand
gaccucagcuuuucuguuu

SEQ ID NO: 1366525 - RNA, 19 nt, Homo sapiens
  misc_RNA (1)...(19): siRNA sense strand
gcaggacuuugaauuagug

SEQ ID NO: 1366526 - RNA, 19 nt, Homo sapiens
  misc_RNA (1)...(19): siRNA sense strand
gggaagcuuugccuccuaa

SEQ ID NO: 1366527 - RNA, 19 nt, Homo sapiens
  misc_RNA (1)...(19): siRNA sense strand
gaaggugcaacauagaauu

SEQ ID NO: 1366528 - RNA, 19 nt, Homo sapiens
  misc_RNA (1)...(19): siRNA sense strand
gcacagucaagguuuauau

SEQ ID NO: 1366529 - RNA, 19 nt, Homo sapiens
  misc_RNA (1)...(19): siRNA sense strand
gacagaaaguauguucaaa

SEQ ID NO: 1366530 - RNA, 19 nt, Homo sapiens
  misc_RNA (1)...(19): siRNA sense strand
gauguuagagccaggauga

SEQ ID NO: 1366531 - RNA, 19 nt, Homo sapiens
  misc_RNA (1)...(19): siRNA sense strand
cugcuuaucuuucagucua

SEQ ID NO: 1366532 - RNA, 19 nt, Homo sapiens
  misc_RNA (1)...(19): siRNA sense strand
aaacgugccaagaccauua

SEQ ID NO: 1366533 - RNA, 19 nt, Homo sapiens
  misc_RNA (1)...(19): siRNA sense strand
cagcaggacuuugaauuag

SEQ ID NO: 1366534 - RNA, 19 nt, Homo sapiens
  misc_RNA (1)...(19): siRNA sense strand
uuccauaacuuuagcaaga

SEQ ID NO: 1366535 - RNA, 19 nt, Homo sapiens
  misc_RNA (1)...(19): siRNA sense strand
gcaaagagcaaggcuaguc

SEQ ID NO: 1366536 - RNA, 19 nt, Homo sapiens
  misc_RNA (1)...(19): siRNA sense strand
agacaaaggaagggaaaua

SEQ ID NO: 1366537 - RNA, 19 nt, Homo sapiens
  misc_RNA (1)...(19): siRNA sense strand
ucacauuuauggaaagcuu

SEQ ID NO: 1366538 - RNA, 19 nt, Homo sapiens
  misc_RNA (1)...(19): siRNA sense strand
cauagaauuuggcaaugug

SEQ ID NO: 1366539 - RNA, 19 nt, Homo sapiens
  misc_RNA (1)...(19): siRNA sense strand
gcaguagcguacauucaca

SEQ ID NO: 1366540 - RNA, 19 nt, Homo sapiens
  misc_RNA (1)...(19): siRNA sense strand
gaacgcagugaucagcaaa

SEQ ID NO: 1366541 - RNA, 19 nt, Homo sapiens
  misc_RNA (1)...(19): siRNA sense strand
ugacagaaaguauguucaa

SEQ ID NO: 1366542 - RNA, 19 nt, Homo sapiens
  misc_RNA (1)...(19): siRNA sense strand
agaagucaaugaaacagau

SEQ ID NO: 1366543 - RNA, 19 nt, Homo sapiens
  misc_RNA (1)...(19): siRNA sense strand
ugaaggagagaccauuauu

SEQ ID NO: 1366544 - RNA, 19 nt, Homo sapiens
  misc_RNA (1)...(19): siRNA sense strand
gaccucaaguggagauaca

SEQ ID NO: 1366545 - RNA, 19 nt, Homo sapiens
  misc_RNA (1)...(19): siRNA sense strand
caagacaaaggaagggaaa

SEQ ID NO: 1366546 - RNA, 19 nt, Homo sapiens
  misc_RNA (1)...(19): siRNA sense strand
caaggcuagucuccaaaga

SEQ ID NO: 1366547 - RNA, 19 nt, Homo sapiens
  misc_RNA (1)...(19): siRNA sense strand
gccaugugccuuuauaaug

SEQ ID NO: 1366548 - RNA, 19 nt, Homo sapiens
  misc_RNA (1)...(19): siRNA sense strand
ggaaggugcaacauagaau

SEQ ID NO: 1366549 - RNA, 19 nt, Homo sapiens
  misc_RNA (1)...(19): siRNA sense strand
ucaagugaccauuggauau

SEQ ID NO: 1366550 - RNA, 19 nt, Homo sapiens
  misc_RNA (1)...(19): siRNA sense strand
ggaggcacagucaagguuu

SEQ ID NO: 1366551 - RNA, 19 nt, Homo sapiens
  misc_RNA (1)...(19): siRNA sense strand
gcuuaucuuucagucuaua

SEQ ID NO: 1366552 - RNA, 19 nt, Homo sapiens
  misc_RNA (1)...(19): siRNA sense strand
gaucacaacagcccuuucu

SEQ ID NO: 1366553 - RNA, 19 nt, Homo sapiens
  misc_RNA (1)...(19): siRNA sense strand
gauauggauucaggugugu

SEQ ID NO: 1366554 - RNA, 19 nt, Homo sapiens
  misc_RNA (1)...(19): siRNA sense strand
ugucagaagucaaugaaac

SEQ ID NO: 1366555 - RNA, 19 nt, Homo sapiens
  misc_RNA (1)...(19): siRNA sense strand
ccaacuucaucuugucaga

SEQ ID NO: 1366556 - RNA, 19 nt, Homo sapiens
  misc_RNA (1)...(19): siRNA sense strand
ucacaacagcccuuucuuc

SEQ ID NO: 1366557 - RNA, 19 nt, Homo sapiens
  misc_RNA (1)...(19): siRNA sense strand
cuuauuggcagucacauuu

SEQ ID NO: 1366558 - RNA, 19 nt, Homo sapiens
  misc_RNA (1)...(19): siRNA sense strand
caagugaccauuggauaug

SEQ ID NO: 1366559 - RNA, 19 nt, Homo sapiens
  misc_RNA (1)...(19): siRNA sense strand
aggcuagucuccaaagaug

SEQ ID NO: 1366560 - RNA, 19 nt, Homo sapiens
  misc_RNA (1)...(19): siRNA sense strand
gccaagaccauuacguuca

SEQ ID NO: 1366561 - RNA, 19 nt, Homo sapiens
  misc_RNA (1)...(19): siRNA sense strand
ucuuuggucuccuguggua

SEQ ID NO: 1366562 - RNA, 19 nt, Homo sapiens
  misc_RNA (1)...(19): siRNA sense strand
ggaugaagagaggcuauga

SEQ ID NO: 1366563 - RNA, 19 nt, Homo sapiens
  misc_RNA (1)...(19): siRNA sense strand
ccauuacguucagcaagaa

SEQ ID NO: 1366564 - RNA, 19 nt, Homo sapiens
  misc_RNA (1)...(19): siRNA sense strand
ccugaaggagagaccauua

SEQ ID NO: 1366565 - RNA, 19 nt, Homo sapiens
  misc_RNA (1)...(19): siRNA sense strand
cagucaagguuuauauucu

SEQ ID NO: 1366566 - RNA, 19 nt, Homo sapiens
  misc_RNA (1)...(19): siRNA sense strand
ucaggugugugacagaaca

SEQ ID NO: 1366567 - RNA, 19 nt, Homo sapiens
  misc_RNA (1)...(19): siRNA sense strand
agacucaagugaccauugg

SEQ ID NO: 1366568 - RNA, 19 nt, Homo sapiens
  misc_RNA (1)...(19): siRNA sense strand
gguaugcaguagcguacau

SEQ ID NO: 1366569 - RNA, 19 nt, Homo sapiens
  misc_RNA (1)...(19): siRNA sense strand
ugugccaugugccuuuaua

SEQ ID NO: 1366570 - RNA, 19 nt, Homo sapiens
  misc_RNA (1)...(19): siRNA sense strand
uauuggcagucacauuuau

SEQ ID NO: 1366571 - RNA, 19 nt, Homo sapiens
  misc_RNA (1)...(19): siRNA sense strand
ccaagaccauuacguucag

SEQ ID NO: 1366572 - RNA, 19 nt, Homo sapiens
  misc_RNA (1)...(19): siRNA sense strand
gugccaagaccauuacguu

SEQ ID NO: 1366573 - RNA, 19 nt, Homo sapiens
  misc_RNA (1)...(19): siRNA sense strand
gagacucaagugaccauug

SEQ ID NO: 1366574 - RNA, 19 nt, Homo sapiens
  misc_RNA (1)...(19): siRNA sense strand
gaagucaaugaaacagaug

SEQ ID NO: 1366575 - RNA, 19 nt, Homo sapiens
  misc_RNA (1)...(19): siRNA sense strand
caucuugucagaagucaau

SEQ ID NO: 1366576 - RNA, 19 nt, Homo sapiens
  misc_RNA (1)...(19): siRNA sense strand
gagagaccauuauuuugga

SEQ ID NO: 1366577 - RNA, 19 nt, Homo sapiens
  misc_RNA (1)...(19): siRNA sense strand
gcaaggcuagucuccaaag

SEQ ID NO: 1366578 - RNA, 19 nt, Homo sapiens
  misc_RNA (1)...(19): siRNA sense strand
caagaucuccaggcccaaa

SEQ ID NO: 1366579 - RNA, 19 nt, Homo sapiens
  misc_RNA (1)...(19): siRNA sense strand
ggcagucacauuuauggaa

SEQ ID NO: 1366580 - RNA, 19 nt, Homo sapiens
  misc_RNA (1)...(19): siRNA sense strand
accauuacguucagcaaga

SEQ ID NO: 1366581 - RNA, 19 nt, Homo sapiens
  misc_RNA (1)...(19): siRNA sense strand
gaucaggguguugacagaa

SEQ ID NO: 1366582 - RNA, 19 nt, Homo sapiens
  misc_RNA (1)...(19): siRNA sense strand
caacuucaucuugucagaa

SEQ ID NO: 1366583 - RNA, 19 nt, Homo sapiens
  misc_RNA (1)...(19): siRNA sense strand
gaccagaucaauaucaacu

SEQ ID NO: 1366584 - RNA, 19 nt, Homo sapiens
  misc_RNA (1)...(19): siRNA sense strand
uggaccagaucaauaucaa

SEQ ID NO: 1366585 - RNA, 19 nt, Homo sapiens
  misc_RNA (1)...(19): siRNA sense strand
gaagcuuugccuccuaauc

SEQ ID NO: 1366586 - RNA, 19 nt, Homo sapiens
  misc_RNA (1)...(19): siRNA sense strand
gagaauauuaauggcuuga

SEQ ID NO: 1366587 - RNA, 19 nt, Homo sapiens
  misc_RNA (1)...(19): siRNA sense strand
agauggaaggugcaacaua

SEQ ID NO: 1366588 - RNA, 19 nt, Homo sapiens
  misc_RNA (1)...(19): siRNA sense strand
ggugcaacauagaauuugg

SEQ ID NO: 1366589 - RNA, 19 nt, Homo sapiens
  misc_RNA (1)...(19): siRNA sense strand
uggcuaaucucaggaagag

SEQ ID NO: 1366590 - RNA, 19 nt, Homo sapiens
  misc_RNA (1)...(19): siRNA sense strand
agaacgcagugaucagcaa

SEQ ID NO: 1366591 - RNA, 19 nt, Homo sapiens
  misc_RNA (1)...(19): siRNA sense strand
aaagauggaaggugcaaca

SEQ ID NO: 1366592 - RNA, 19 nt, Homo sapiens
  misc_RNA (1)...(19): siRNA sense strand
gggaaauaccgaguggauu

SEQ ID NO: 1366593 - RNA, 19 nt, Homo sapiens
  misc_RNA (1)...(19): siRNA sense strand
ggagagaccauuauuuugg

SEQ ID NO: 1366594 - RNA, 19 nt, Homo sapiens
  misc_RNA (1)...(19): siRNA sense strand
gugccuuuauaaugagaaa

SEQ ID NO: 1366595 - RNA, 19 nt, Homo sapiens
  misc_RNA (1)...(19): siRNA sense strand
guuagagccaggaugaaga

SEQ ID NO: 1366596 - RNA, 19 nt, Homo sapiens
  misc_RNA (1)...(19): siRNA sense strand
cagucuauacuuggaguua

SEQ ID NO: 1366597 - RNA, 19 nt, Homo sapiens
  misc_RNA (1)...(19): siRNA sense strand
ccauaacuuuagcaagaca

SEQ ID NO: 1366598 - RNA, 19 nt, Homo sapiens
  misc_RNA (1)...(19): siRNA sense strand
ggauuuccauaacuuuagc

SEQ ID NO: 1366599 - RNA, 19 nt, Homo sapiens
  misc_RNA (1)...(19): siRNA sense strand
gacaaaggaagggaaauac

SEQ ID NO: 1366600 - RNA, 19 nt, Homo sapiens
  misc_RNA (1)...(19): siRNA sense strand
cccauaguauccaagacaa

SEQ ID NO: 1366601 - RNA, 19 nt, Homo sapiens
  misc_RNA (1)...(19): siRNA sense strand
uuauuggcagucacauuua

SEQ ID NO: 1366602 - RNA, 19 nt, Homo sapiens
  misc_RNA (1)...(19): siRNA sense strand
gcaagaacgcagugaucag

SEQ ID NO: 1366603 - RNA, 19 nt, Homo sapiens
  misc_RNA (1)...(19): siRNA sense strand
cagcaagaacgcagugauc

SEQ ID NO: 1366604 - RNA, 19 nt, Homo sapiens
  misc_RNA (1)...(19): siRNA sense strand
caaagagcaaggcuagucu

SEQ ID NO: 1366605 - RNA, 19 nt, Homo sapiens
  misc_RNA (1)...(19): siRNA sense strand
aaggugcaacauagaauuu

SEQ ID NO: 1366606 - RNA, 19 nt, Homo sapiens
  misc_RNA (1)...(19): siRNA sense strand
aaggagagaccauuauuuu

SEQ ID NO: 1366607 - RNA, 19 nt, Homo sapiens
  misc_RNA (1)...(19): siRNA sense strand
gguguugacagaaaguaug

SEQ ID NO: 1366608 - RNA, 19 nt, Homo sapiens
  misc_RNA (1)...(19): siRNA sense strand
acagucaagguuuauauuc

SEQ ID NO: 1366609 - RNA, 19 nt, Homo sapiens
  misc_RNA (1)...(19): siRNA sense strand
cagaugacaccaaaaugua

SEQ ID NO: 1366610 - RNA, 19 nt, Homo sapiens
  misc_RNA (1)...(19): siRNA sense strand
ugaaacagaugacaccaaa

SEQ ID NO: 1366611 - RNA, 19 nt, Homo sapiens
  misc_RNA (1)...(19): siRNA sense strand
gagcaaggcuagucuccaa

SEQ ID NO: 1366612 - RNA, 19 nt, Homo sapiens
  misc_RNA (1)...(19): siRNA sense strand
gcagucacauuuauggaaa

SEQ ID NO: 1366613 - RNA, 19 nt, Homo sapiens
  misc_RNA (1)...(19): siRNA sense strand
gauggaaggugcaacauag

SEQ ID NO: 1366614 - RNA, 19 nt, Homo sapiens
  misc_RNA (1)...(19): siRNA sense strand
ccaugugccuuuauaauga

SEQ ID NO: 1366615 - RNA, 19 nt, Homo sapiens
  misc_RNA (1)...(19): siRNA sense strand
gaaggagagaccauuauuu

SEQ ID NO: 1366616 - RNA, 19 nt, Homo sapiens
  misc_RNA (1)...(19): siRNA sense strand
ccagaucaauaucaacuuu

SEQ ID NO: 1366617 - RNA, 19 nt, Homo sapiens
  misc_RNA (1)...(19): siRNA sense strand
guucaaacaucuucggaaa

SEQ ID NO: 1366618 - RNA, 19 nt, Homo sapiens
  misc_RNA (1)...(19): siRNA sense strand
ucaaacaucuucggaaaug

SEQ ID NO: 1366619 - RNA, 19 nt, Homo sapiens
  misc_RNA (1)...(19): siRNA sense strand
caacauagaauuuggcaau

SEQ ID NO: 1366620 - RNA, 19 nt, Homo sapiens
  misc_RNA (1)...(19): siRNA sense strand
gaagagaggcuaugacaac

SEQ ID NO: 1366621 - RNA, 19 nt, Homo sapiens
  misc_RNA (1)...(19): siRNA sense strand
uagcguacauucacaaaga

SEQ ID NO: 1366622 - RNA, 19 nt, Homo sapiens
  misc_RNA (1)...(19): siRNA sense strand
ccagcaggacuuugaauua

SEQ ID NO: 1366623 - RNA, 19 nt, Homo sapiens
  misc_RNA (1)...(19): siRNA sense strand
gaggcacagucaagguuua

SEQ ID NO: 1366624 - RNA, 19 nt, Homo sapiens
  misc_RNA (1)...(19): siRNA sense strand
gaccucagcuuuucuguuu

SEQ ID NO: 1366625 - RNA, 19 nt, Homo sapiens
  misc_RNA (1)...(19): siRNA sense strand
gcaggacuuugaauuagug

SEQ ID NO: 1366626 - RNA, 19 nt, Homo sapiens
  misc_RNA (1)...(19): siRNA sense strand
gggaagcuuugccuccuaa

SEQ ID NO: 1366627 - RNA, 19 nt, Homo sapiens
  misc_RNA (1)...(19): siRNA sense strand
gaaggugcaacauagaauu

SEQ ID NO: 1366628 - RNA, 19 nt, Homo sapiens
  misc_RNA (1)...(19): siRNA sense strand
gcacagucaagguuuauau

SEQ ID NO: 1366629 - RNA, 19 nt, Homo sapiens
  misc_RNA (1)...(19): siRNA sense strand
gauguuagagccaggauga

SEQ ID NO: 1366630 - RNA, 19 nt, Homo sapiens
  misc_RNA (1)...(19): siRNA sense strand
cugcuuaucuuucagucua

SEQ ID NO: 1366631 - RNA, 19 nt, Homo sapiens
  misc_RNA (1)...(19): siRNA sense strand
aaacgugccaagaccauua

SEQ ID NO: 1366632 - RNA, 19 nt, Homo sapiens
  misc_RNA (1)...(19): siRNA sense strand
cagcaggacuuugaauuag

SEQ ID NO: 1366633 - RNA, 19 nt, Homo sapiens
  misc_RNA (1)...(19): siRNA sense strand
uuccauaacuuuagcaaga

SEQ ID NO: 1366634 - RNA, 19 nt, Homo sapiens
  misc_RNA (1)...(19): siRNA sense strand
ucacauuuauggaaagcuu

SEQ ID NO: 1366635 - RNA, 19 nt, Homo sapiens
  misc_RNA (1)...(19): siRNA sense strand
agacaaaggaagggaaaua

SEQ ID NO: 1366636 - RNA, 19 nt, Homo sapiens
  misc_RNA (1)...(19): siRNA sense strand
gcaaagagcaaggcuaguc

SEQ ID NO: 1366637 - RNA, 19 nt, Homo sapiens
  misc_RNA (1)...(19): siRNA sense strand
cauagaauuuggcaaugug

SEQ ID NO: 1366638 - RNA, 19 nt, Homo sapiens
  misc_RNA (1)...(19): siRNA sense strand
gcaguagcguacauucaca

SEQ ID NO: 1366639 - RNA, 19 nt, Homo sapiens
  misc_RNA (1)...(19): siRNA sense strand
gaacgcagugaucagcaaa

SEQ ID NO: 1366640 - RNA, 19 nt, Homo sapiens
  misc_RNA (1)...(19): siRNA sense strand
gaccucaaguggagauaca

SEQ ID NO: 1366641 - RNA, 19 nt, Homo sapiens
  misc_RNA (1)...(19): siRNA sense strand
agaagucaaugaaacagau

SEQ ID NO: 1366642 - RNA, 19 nt, Homo sapiens
  misc_RNA (1)...(19): siRNA sense strand
ugaaggagagaccauuauu

SEQ ID NO: 1366643 - RNA, 19 nt, Homo sapiens
  misc_RNA (1)...(19): siRNA sense strand
caaggcuagucuccaaaga

SEQ ID NO: 1366644 - RNA, 19 nt, Homo sapiens
  misc_RNA (1)...(19): siRNA sense strand
gccaugugccuuuauaaug

SEQ ID NO: 1366645 - RNA, 19 nt, Homo sapiens
  misc_RNA (1)...(19): siRNA sense strand
caagacaaaggaagggaaa

SEQ ID NO: 1366646 - RNA, 19 nt, Homo sapiens
  misc_RNA (1)...(19): siRNA sense strand
ggaggcacagucaagguuu

SEQ ID NO: 1366647 - RNA, 19 nt, Homo sapiens
  misc_RNA (1)...(19): siRNA sense strand
ggaaggugcaacauagaau

SEQ ID NO: 1366648 - RNA, 19 nt, Homo sapiens
  misc_RNA (1)...(19): siRNA sense strand
ucaagugaccauuggauau

SEQ ID NO: 1366649 - RNA, 19 nt, Homo sapiens
  misc_RNA (1)...(19): siRNA sense strand
gcuuaucuuucagucuaua

SEQ ID NO: 1366650 - RNA, 19 nt, Homo sapiens
  misc_RNA (1)...(19): siRNA sense strand
gaucacaacagcccuuucu

SEQ ID NO: 1366651 - RNA, 19 nt, Homo sapiens
  misc_RNA (1)...(19): siRNA sense strand
gauauggauucaggugugu

SEQ ID NO: 1366652 - RNA, 19 nt, Homo sapiens
  misc_RNA (1)...(19): siRNA sense strand
ugucagaagucaaugaaac

SEQ ID NO: 1366653 - RNA, 19 nt, Homo sapiens
  misc_RNA (1)...(19): siRNA sense strand
ccaacuucaucuugucaga

SEQ ID NO: 1366654 - RNA, 19 nt, Homo sapiens
  misc_RNA (1)...(19): siRNA sense strand
ucacaacagcccuuucuuc

SEQ ID NO: 1366655 - RNA, 19 nt, Homo sapiens
  misc_RNA (1)...(19): siRNA sense strand
cuuauuggcagucacauuu

SEQ ID NO: 1366656 - RNA, 19 nt, Homo sapiens
  misc_RNA (1)...(19): siRNA sense strand
caagugaccauuggauaug

SEQ ID NO: 1366657 - RNA, 19 nt, Homo sapiens
  misc_RNA (1)...(19): siRNA sense strand
gccaagaccauuacguuca

SEQ ID NO: 1366658 - RNA, 19 nt, Homo sapiens
  misc_RNA (1)...(19): siRNA sense strand
aggcuagucuccaaagaug

SEQ ID NO: 1366659 - RNA, 19 nt, Homo sapiens
  misc_RNA (1)...(19): siRNA sense strand
ucuuuggucuccuguggua

SEQ ID NO: 1366660 - RNA, 19 nt, Homo sapiens
  misc_RNA (1)...(19): siRNA sense strand
ggaugaagagaggcuauga

SEQ ID NO: 1366661 - RNA, 19 nt, Homo sapiens
  misc_RNA (1)...(19): siRNA sense strand
ccauuacguucagcaagaa

SEQ ID NO: 1366662 - RNA, 19 nt, Homo sapiens
  misc_RNA (1)...(19): siRNA sense strand
ccugaaggagagaccauua

SEQ ID NO: 1366663 - RNA, 19 nt, Homo sapiens
  misc_RNA (1)...(19): siRNA sense strand
agacucaagugaccauugg

SEQ ID NO: 1366664 - RNA, 19 nt, Homo sapiens
  misc_RNA (1)...(19): siRNA sense strand
cagucaagguuuauauucu

SEQ ID NO: 1366665 - RNA, 19 nt, Homo sapiens
  misc_RNA (1)...(19): siRNA sense strand
ucaggugugugacagaaca

SEQ ID NO: 1366666 - RNA, 19 nt, Homo sapiens
  misc_RNA (1)...(19): siRNA sense strand
gguaugcaguagcguacau

SEQ ID NO: 1366667 - RNA, 19 nt, Homo sapiens
  misc_RNA (1)...(19): siRNA sense strand
ugugccaugugccuuuaua

SEQ ID NO: 1366668 - RNA, 19 nt, Homo sapiens
  misc_RNA (1)...(19): siRNA sense strand
uauuggcagucacauuuau

SEQ ID NO: 1366669 - RNA, 19 nt, Homo sapiens
  misc_RNA (1)...(19): siRNA sense strand
ccaagaccauuacguucag

SEQ ID NO: 1366670 - RNA, 19 nt, Homo sapiens
  misc_RNA (1)...(19): siRNA sense strand
gugccaagaccauuacguu

SEQ ID NO: 1366671 - RNA, 19 nt, Homo sapiens
  misc_RNA (1)...(19): siRNA sense strand
gcaaggcuagucuccaaag

SEQ ID NO: 1366672 - RNA, 19 nt, Homo sapiens
  misc_RNA (1)...(19): siRNA sense strand
gaagucaaugaaacagaug

SEQ ID NO: 1366673 - RNA, 19 nt, Homo sapiens
  misc_RNA (1)...(19): siRNA sense strand
caucuugucagaagucaau

SEQ ID NO: 1366674 - RNA, 19 nt, Homo sapiens
  misc_RNA (1)...(19): siRNA sense strand
gagagaccauuauuuugga

SEQ ID NO: 1366675 - RNA, 19 nt, Homo sapiens
  misc_RNA (1)...(19): siRNA sense strand
gagacucaagugaccauug

SEQ ID NO: 1366676 - RNA, 19 nt, Homo sapiens
  misc_RNA (1)...(19): siRNA sense strand
caagaucuccaggcccaaa

SEQ ID NO: 1366677 - RNA, 19 nt, Homo sapiens
  misc_RNA (1)...(19): siRNA sense strand
ggcagucacauuuauggaa

SEQ ID NO: 1366678 - RNA, 19 nt, Homo sapiens
  misc_RNA (1)...(19): siRNA sense strand
accauuacguucagcaaga

SEQ ID NO: 1366679 - RNA, 19 nt, Homo sapiens
  misc_RNA (1)...(19): siRNA sense strand
caacuucaucuugucagaa

SEQ ID NO: 1366680 - RNA, 19 nt, Homo sapiens
  misc_RNA (1)...(19): siRNA sense strand
gaccagaucaauaucaacu

SEQ ID NO: 1366681 - RNA, 19 nt, Homo sapiens
  misc_RNA (1)...(19): siRNA sense strand
uggaccagaucaauaucaa

SEQ ID NO: 1366682 - RNA, 19 nt, Homo sapiens
  misc_RNA (1)...(19): siRNA sense strand
gaagcuuugccuccuaauc

SEQ ID NO: 1366683 - RNA, 19 nt, Homo sapiens
  misc_RNA (1)...(19): siRNA sense strand
gagaauauuaauggcuuga

SEQ ID NO: 1366684 - RNA, 19 nt, Homo sapiens
  misc_RNA (1)...(19): siRNA sense strand
agauggaaggugcaacaua

SEQ ID NO: 1366685 - RNA, 19 nt, Homo sapiens
  misc_RNA (1)...(19): siRNA sense strand
ggugcaacauagaauuugg

SEQ ID NO: 1366686 - RNA, 19 nt, Homo sapiens
  misc_RNA (1)...(19): siRNA sense strand
uggcuaaucucaggaagag

SEQ ID NO: 1366687 - RNA, 19 nt, Homo sapiens
  misc_RNA (1)...(19): siRNA sense strand
aaagauggaaggugcaaca

SEQ ID NO: 1366688 - RNA, 19 nt, Homo sapiens
  misc_RNA (1)...(19): siRNA sense strand
gggaaauaccgaguggauu

SEQ ID NO: 1366689 - RNA, 19 nt, Homo sapiens
  misc_RNA (1)...(19): siRNA sense strand
ggagagaccauuauuuugg

SEQ ID NO: 1366690 - RNA, 19 nt, Homo sapiens
  misc_RNA (1)...(19): siRNA sense strand
agaacgcagugaucagcaa

SEQ ID NO: 1366691 - RNA, 19 nt, Homo sapiens
  misc_RNA (1)...(19): siRNA sense strand
gugccuuuauaaugagaaa

SEQ ID NO: 1366692 - RNA, 19 nt, Homo sapiens
  misc_RNA (1)...(19): siRNA sense strand
guuagagccaggaugaaga

SEQ ID NO: 1366693 - RNA, 19 nt, Homo sapiens
  misc_RNA (1)...(19): siRNA sense strand
cagucuauacuuggaguua

SEQ ID NO: 1366694 - RNA, 19 nt, Homo sapiens
  misc_RNA (1)...(19): siRNA sense strand
ccauaacuuuagcaagaca

SEQ ID NO: 1366695 - RNA, 19 nt, Homo sapiens
  misc_RNA (1)...(19): siRNA sense strand
ggauuuccauaacuuuagc

SEQ ID NO: 1366696 - RNA, 19 nt, Homo sapiens
  misc_RNA (1)...(19): siRNA sense strand
gacaaaggaagggaaauac

SEQ ID NO: 1366697 - RNA, 19 nt, Homo sapiens
  misc_RNA (1)...(19): siRNA sense strand
cccauaguauccaagacaa

SEQ ID NO: 1366698 - RNA, 19 nt, Homo sapiens
  misc_RNA (1)...(19): siRNA sense strand
uuauuggcagucacauuua

SEQ ID NO: 1366699 - RNA, 19 nt, Homo sapiens
  misc_RNA (1)...(19): siRNA sense strand
gcaagaacgcagugaucag

SEQ ID NO: 1366700 - RNA, 19 nt, Homo sapiens
  misc_RNA (1)...(19): siRNA sense strand
cagcaagaacgcagugauc

SEQ ID NO: 1366701 - RNA, 19 nt, Homo sapiens
  misc_RNA (1)...(19): siRNA sense strand
caaagagcaaggcuagucu

SEQ ID NO: 1366702 - RNA, 19 nt, Homo sapiens
  misc_RNA (1)...(19): siRNA sense strand
aaggagagaccauuauuuu

SEQ ID NO: 1366703 - RNA, 19 nt, Homo sapiens
  misc_RNA (1)...(19): siRNA sense strand
aaggugcaacauagaauuu

SEQ ID NO: 1366704 - RNA, 19 nt, Homo sapiens
  misc_RNA (1)...(19): siRNA sense strand
acagucaagguuuauauuc

SEQ ID NO: 1366705 - RNA, 19 nt, Homo sapiens
  misc_RNA (1)...(19): siRNA sense strand
cagaugacaccaaaaugua

SEQ ID NO: 1366706 - RNA, 19 nt, Homo sapiens
  misc_RNA (1)...(19): siRNA sense strand
cacagucaagguuuauauu

SEQ ID NO: 1366707 - RNA, 19 nt, Homo sapiens
  misc_RNA (1)...(19): siRNA sense strand
aaacagaugacaccaaaau

SEQ ID NO: 1366708 - RNA, 19 nt, Homo sapiens
  misc_RNA (1)...(19): siRNA sense strand
gccaaguccggacauccua

SEQ ID NO: 1366709 - RNA, 19 nt, Homo sapiens
  misc_RNA (1)...(19): siRNA sense strand
cagaagucaaugaaacaga

SEQ ID NO: 1366710 - RNA, 19 nt, Homo sapiens
  misc_RNA (1)...(19): siRNA sense strand
ugaaacagaugacaccaaa

SEQ ID NO: 1366711 - RNA, 19 nt, Homo sapiens
  misc_RNA (1)...(19): siRNA sense strand
gagcaaggcuagucuccaa

SEQ ID NO: 1366712 - RNA, 19 nt, Homo sapiens
  misc_RNA (1)...(19): siRNA sense strand
gcagucacauuuauggaaa

SEQ ID NO: 1366713 - RNA, 19 nt, Homo sapiens
  misc_RNA (1)...(19): siRNA sense strand
gauggaaggugcaacauag

SEQ ID NO: 1366714 - RNA, 19 nt, Homo sapiens
  misc_RNA (1)...(19): siRNA sense strand
ccaugugccuuuauaauga

SEQ ID NO: 1366715 - RNA, 19 nt, Homo sapiens
  misc_RNA (1)...(19): siRNA sense strand
gaaggagagaccauuauuu

SEQ ID NO: 1366716 - RNA, 19 nt, Homo sapiens
  misc_RNA (1)...(19): siRNA sense strand
ccagaucaauaucaacuuu

SEQ ID NO: 1366717 - RNA, 19 nt, Homo sapiens
  misc_RNA (1)...(19): siRNA sense strand
guucaaacaucuucggaaa

SEQ ID NO: 1366718 - RNA, 19 nt, Homo sapiens
  misc_RNA (1)...(19): siRNA sense strand
ucaaacaucuucggaaaug

SEQ ID NO: 1366719 - RNA, 19 nt, Homo sapiens
  misc_RNA (1)...(19): siRNA sense strand
caacauagaauuuggcaau

SEQ ID NO: 1366720 - RNA, 19 nt, Homo sapiens
  misc_RNA (1)...(19): siRNA sense strand
gaagagaggcuaugacaac

SEQ ID NO: 1366721 - RNA, 19 nt, Homo sapiens
  misc_RNA (1)...(19): siRNA sense strand
uagcguacauucacaaaga

SEQ ID NO: 1366722 - RNA, 19 nt, Homo sapiens
  misc_RNA (1)...(19): siRNA sense strand
ccagcaggacuuugaauua

SEQ ID NO: 1366723 - RNA, 19 nt, Homo sapiens
  misc_RNA (1)...(19): siRNA sense strand
gaggcacagucaagguuua

SEQ ID NO: 1366724 - RNA, 19 nt, Homo sapiens
  misc_RNA (1)...(19): siRNA sense strand
gaccucagcuuuucuguuu

SEQ ID NO: 1366725 - RNA, 19 nt, Homo sapiens
  misc_RNA (1)...(19): siRNA sense strand
gcaggacuuugaauuagug

SEQ ID NO: 1366726 - RNA, 19 nt, Homo sapiens
  misc_RNA (1)...(19): siRNA sense strand
gggaagcuuugccuccuaa

SEQ ID NO: 1366727 - RNA, 19 nt, Homo sapiens
  misc_RNA (1)...(19): siRNA sense strand
gaaggugcaacauagaauu

SEQ ID NO: 1366728 - RNA, 19 nt, Homo sapiens
  misc_RNA (1)...(19): siRNA sense strand
gcacagucaagguuuauau

SEQ ID NO: 1366729 - RNA, 19 nt, Homo sapiens
  misc_RNA (1)...(19): siRNA sense strand
gauguuagagccaggauga

SEQ ID NO: 1366730 - RNA, 19 nt, Homo sapiens
  misc_RNA (1)...(19): siRNA sense strand
cugcuuaucuuucagucua

SEQ ID NO: 1366731 - RNA, 19 nt, Homo sapiens
  misc_RNA (1)...(19): siRNA sense strand
aaacgugccaagaccauua

SEQ ID NO: 1366732 - RNA, 19 nt, Homo sapiens
  misc_RNA (1)...(19): siRNA sense strand
cagcaggacuuugaauuag

SEQ ID NO: 1366733 - RNA, 19 nt, Homo sapiens
  misc_RNA (1)...(19): siRNA sense strand
uuccauaacuuuagcaaga

SEQ ID NO: 1366734 - RNA, 19 nt, Homo sapiens
  misc_RNA (1)...(19): siRNA sense strand
ucacauuuauggaaagcuu

SEQ ID NO: 1366735 - RNA, 19 nt, Homo sapiens
  misc_RNA (1)...(19): siRNA sense strand
agacaaaggaagggaaaua

SEQ ID NO: 1366736 - RNA, 19 nt, Homo sapiens
  misc_RNA (1)...(19): siRNA sense strand
gcaaagagcaaggcuaguc

SEQ ID NO: 1366737 - RNA, 19 nt, Homo sapiens
  misc_RNA (1)...(19): siRNA sense strand
cauagaauuuggcaaugug

SEQ ID NO: 1366738 - RNA, 19 nt, Homo sapiens
  misc_RNA (1)...(19): siRNA sense strand
gcaguagcguacauucaca

SEQ ID NO: 1366739 - RNA, 19 nt, Homo sapiens
  misc_RNA (1)...(19): siRNA sense strand
gaacgcagugaucagcaaa

SEQ ID NO: 1366740 - RNA, 19 nt, Homo sapiens
  misc_RNA (1)...(19): siRNA sense strand
gaccucaaguggagauaca

SEQ ID NO: 1366741 - RNA, 19 nt, Homo sapiens
  misc_RNA (1)...(19): siRNA sense strand
agaagucaaugaaacagau

SEQ ID NO: 1366742 - RNA, 19 nt, Homo sapiens
  misc_RNA (1)...(19): siRNA sense strand
ugaaggagagaccauuauu

SEQ ID NO: 1366743 - RNA, 19 nt, Homo sapiens
  misc_RNA (1)...(19): siRNA sense strand
caaggcuagucuccaaaga

SEQ ID NO: 1366744 - RNA, 19 nt, Homo sapiens
  misc_RNA (1)...(19): siRNA sense strand
gccaugugccuuuauaaug

SEQ ID NO: 1366745 - RNA, 19 nt, Homo sapiens
  misc_RNA (1)...(19): siRNA sense strand
caagacaaaggaagggaaa

SEQ ID NO: 1366746 - RNA, 19 nt, Homo sapiens
  misc_RNA (1)...(19): siRNA sense strand
ggaggcacagucaagguuu

SEQ ID NO: 1366747 - RNA, 19 nt, Homo sapiens
  misc_RNA (1)...(19): siRNA sense strand
ggaaggugcaacauagaau

SEQ ID NO: 1366748 - RNA, 19 nt, Homo sapiens
  misc_RNA (1)...(19): siRNA sense strand
ucaagugaccauuggauau

SEQ ID NO: 1366749 - RNA, 19 nt, Homo sapiens
  misc_RNA (1)...(19): siRNA sense strand
gcuuaucuuucagucuaua

SEQ ID NO: 1366750 - RNA, 19 nt, Homo sapiens
  misc_RNA (1)...(19): siRNA sense strand
gaucacaacagcccuuucu

SEQ ID NO: 1366751 - RNA, 19 nt, Homo sapiens
  misc_RNA (1)...(19): siRNA sense strand
gauauggauucaggugugu

SEQ ID NO: 1366752 - RNA, 19 nt, Homo sapiens
  misc_RNA (1)...(19): siRNA sense strand
ugucagaagucaaugaaac

SEQ ID NO: 1366753 - RNA, 19 nt, Homo sapiens
  misc_RNA (1)...(19): siRNA sense strand
ccaacuucaucuugucaga

SEQ ID NO: 1366754 - RNA, 19 nt, Homo sapiens
  misc_RNA (1)...(19): siRNA sense strand
ucacaacagcccuuucuuc

SEQ ID NO: 1366755 - RNA, 19 nt, Homo sapiens
  misc_RNA (1)...(19): siRNA sense strand
cuuauuggcagucacauuu

SEQ ID NO: 1366756 - RNA, 19 nt, Homo sapiens
  misc_RNA (1)...(19): siRNA sense strand
caagugaccauuggauaug

SEQ ID NO: 1366757 - RNA, 19 nt, Homo sapiens
  misc_RNA (1)...(19): siRNA sense strand
gccaagaccauuacguuca

SEQ ID NO: 1366758 - RNA, 19 nt, Homo sapiens
  misc_RNA (1)...(19): siRNA sense strand
aggcuagucuccaaagaug

SEQ ID NO: 1366759 - RNA, 19 nt, Homo sapiens
  misc_RNA (1)...(19): siRNA sense strand
ucuuuggucuccuguggua

SEQ ID NO: 1366760 - RNA, 19 nt, Homo sapiens
  misc_RNA (1)...(19): siRNA sense strand
ggaugaagagaggcuauga

SEQ ID NO: 1366761 - RNA, 19 nt, Homo sapiens
  misc_RNA (1)...(19): siRNA sense strand
ccauuacguucagcaagaa

SEQ ID NO: 1366762 - RNA, 19 nt, Homo sapiens
  misc_RNA (1)...(19): siRNA sense strand
ccugaaggagagaccauua

SEQ ID NO: 1366763 - RNA, 19 nt, Homo sapiens
  misc_RNA (1)...(19): siRNA sense strand
agacucaagugaccauugg

SEQ ID NO: 1366764 - RNA, 19 nt, Homo sapiens
  misc_RNA (1)...(19): siRNA sense strand
cagucaagguuuauauucu

SEQ ID NO: 1366765 - RNA, 19 nt, Homo sapiens
  misc_RNA (1)...(19): siRNA sense strand
ucaggugugugacagaaca

SEQ ID NO: 1366766 - RNA, 19 nt, Homo sapiens
  misc_RNA (1)...(19): siRNA sense strand
gguaugcaguagcguacau

SEQ ID NO: 1366767 - RNA, 19 nt, Homo sapiens
  misc_RNA (1)...(19): siRNA sense strand
ugugccaugugccuuuaua

SEQ ID NO: 1366768 - RNA, 19 nt, Homo sapiens
  misc_RNA (1)...(19): siRNA sense strand
uauuggcagucacauuuau

SEQ ID NO: 1366769 - RNA, 19 nt, Homo sapiens
  misc_RNA (1)...(19): siRNA sense strand
ccaagaccauuacguucag

SEQ ID NO: 1366770 - RNA, 19 nt, Homo sapiens
  misc_RNA (1)...(19): siRNA sense strand
gugccaagaccauuacguu

SEQ ID NO: 1366771 - RNA, 19 nt, Homo sapiens
  misc_RNA (1)...(19): siRNA sense strand
gcaaggcuagucuccaaag

SEQ ID NO: 1366772 - RNA, 19 nt, Homo sapiens
  misc_RNA (1)...(19): siRNA sense strand
gaagucaaugaaacagaug

SEQ ID NO: 1366773 - RNA, 19 nt, Homo sapiens
  misc_RNA (1)...(19): siRNA sense strand
caucuugucagaagucaau

SEQ ID NO: 1366774 - RNA, 19 nt, Homo sapiens
  misc_RNA (1)...(19): siRNA sense strand
gagagaccauuauuuugga

SEQ ID NO: 1366775 - RNA, 19 nt, Homo sapiens
  misc_RNA (1)...(19): siRNA sense strand
gagacucaagugaccauug

SEQ ID NO: 1366776 - RNA, 19 nt, Homo sapiens
  misc_RNA (1)...(19): siRNA sense strand
caagaucuccaggcccaaa

SEQ ID NO: 1366777 - RNA, 19 nt, Homo sapiens
  misc_RNA (1)...(19): siRNA sense strand
ggcagucacauuuauggaa

SEQ ID NO: 1366778 - RNA, 19 nt, Homo sapiens
  misc_RNA (1)...(19): siRNA sense strand
accauuacguucagcaaga

SEQ ID NO: 1366779 - RNA, 19 nt, Homo sapiens
  misc_RNA (1)...(19): siRNA sense strand
caacuucaucuugucagaa

SEQ ID NO: 1366780 - RNA, 19 nt, Homo sapiens
  misc_RNA (1)...(19): siRNA sense strand
gaccagaucaauaucaacu

SEQ ID NO: 1366781 - RNA, 19 nt, Homo sapiens
  misc_RNA (1)...(19): siRNA sense strand
uggaccagaucaauaucaa

SEQ ID NO: 1366782 - RNA, 19 nt, Homo sapiens
  misc_RNA (1)...(19): siRNA sense strand
gaagcuuugccuccuaauc

SEQ ID NO: 1366783 - RNA, 19 nt, Homo sapiens
  misc_RNA (1)...(19): siRNA sense strand
gagaauauuaauggcuuga

SEQ ID NO: 1366784 - RNA, 19 nt, Homo sapiens
  misc_RNA (1)...(19): siRNA sense strand
agauggaaggugcaacaua

SEQ ID NO: 1366785 - RNA, 19 nt, Homo sapiens
  misc_RNA (1)...(19): siRNA sense strand
ggugcaacauagaauuugg

SEQ ID NO: 1366786 - RNA, 19 nt, Homo sapiens
  misc_RNA (1)...(19): siRNA sense strand
uggcuaaucucaggaagag

SEQ ID NO: 1366787 - RNA, 19 nt, Homo sapiens
  misc_RNA (1)...(19): siRNA sense strand
aaagauggaaggugcaaca

SEQ ID NO: 1366788 - RNA, 19 nt, Homo sapiens
  misc_RNA (1)...(19): siRNA sense strand
gggaaauaccgaguggauu

SEQ ID NO: 1366789 - RNA, 19 nt, Homo sapiens
  misc_RNA (1)...(19): siRNA sense strand
ggagagaccauuauuuugg

SEQ ID NO: 1366790 - RNA, 19 nt, Homo sapiens
  misc_RNA (1)...(19): siRNA sense strand
agaacgcagugaucagcaa

SEQ ID NO: 1366791 - RNA, 19 nt, Homo sapiens
  misc_RNA (1)...(19): siRNA sense strand
gugccuuuauaaugagaaa

SEQ ID NO: 1366792 - RNA, 19 nt, Homo sapiens
  misc_RNA (1)...(19): siRNA sense strand
guuagagccaggaugaaga

SEQ ID NO: 1366793 - RNA, 19 nt, Homo sapiens
  misc_RNA (1)...(19): siRNA sense strand
cagucuauacuuggaguua

SEQ ID NO: 1366794 - RNA, 19 nt, Homo sapiens
  misc_RNA (1)...(19): siRNA sense strand
ccauaacuuuagcaagaca

SEQ ID NO: 1366795 - RNA, 19 nt, Homo sapiens
  misc_RNA (1)...(19): siRNA sense strand
ggauuuccauaacuuuagc

SEQ ID NO: 1366796 - RNA, 19 nt, Homo sapiens
  misc_RNA (1)...(19): siRNA sense strand
gacaaaggaagggaaauac

SEQ ID NO: 1366797 - RNA, 19 nt, Homo sapiens
  misc_RNA (1)...(19): siRNA sense strand
cccauaguauccaagacaa

SEQ ID NO: 1366798 - RNA, 19 nt, Homo sapiens
  misc_RNA (1)...(19): siRNA sense strand
uuauuggcagucacauuua

SEQ ID NO: 1366799 - RNA, 19 nt, Homo sapiens
  misc_RNA (1)...(19): siRNA sense strand
gcaagaacgcagugaucag

SEQ ID NO: 1366800 - RNA, 19 nt, Homo sapiens
  misc_RNA (1)...(19): siRNA sense strand
cagcaagaacgcagugauc

SEQ ID NO: 1366801 - RNA, 19 nt, Homo sapiens
  misc_RNA (1)...(19): siRNA sense strand
caaagagcaaggcuagucu

SEQ ID NO: 1366802 - RNA, 19 nt, Homo sapiens
  misc_RNA (1)...(19): siRNA sense strand
aaggagagaccauuauuuu

SEQ ID NO: 1366803 - RNA, 19 nt, Homo sapiens
  misc_RNA (1)...(19): siRNA sense strand
aaggugcaacauagaauuu

SEQ ID NO: 1366804 - RNA, 19 nt, Homo sapiens
  misc_RNA (1)...(19): siRNA sense strand
acagucaagguuuauauuc

SEQ ID NO: 1366805 - RNA, 19 nt, Homo sapiens
  misc_RNA (1)...(19): siRNA sense strand
cagaugacaccaaaaugua

SEQ ID NO: 1366806 - RNA, 19 nt, Homo sapiens
  misc_RNA (1)...(19): siRNA sense strand
cacagucaagguuuauauu

SEQ ID NO: 1366807 - RNA, 19 nt, Homo sapiens
  misc_RNA (1)...(19): siRNA sense strand
aaacagaugacaccaaaau

SEQ ID NO: 1366808 - RNA, 19 nt, Homo sapiens
  misc_RNA (1)...(19): siRNA sense strand
gccaaguccggacauccua

SEQ ID NO: 1366809 - RNA, 19 nt, Homo sapiens
  misc_RNA (1)...(19): siRNA sense strand
cagaagucaaugaaacaga

SEQ ID NO: 1366810 - RNA, 19 nt, Homo sapiens
  misc_RNA (1)...(19): siRNA sense strand
ugaaacagaugacaccaaa

SEQ ID NO: 1366811 - RNA, 19 nt, Homo sapiens
  misc_RNA (1)...(19): siRNA sense strand
gagcaaggcuagucuccaa

SEQ ID NO: 1366812 - RNA, 19 nt, Homo sapiens
  misc_RNA (1)...(19): siRNA sense strand
gcagucacauuuauggaaa

SEQ ID NO: 1366813 - RNA, 19 nt, Homo sapiens
  misc_RNA (1)...(19): siRNA sense strand
gauggaaggugcaacauag

SEQ ID NO: 1366814 - RNA, 19 nt, Homo sapiens
  misc_RNA (1)...(19): siRNA sense strand
ccaugugccuuuauaauga

SEQ ID NO: 1366815 - RNA, 19 nt, Homo sapiens
  misc_RNA (1)...(19): siRNA sense strand
gaaggagagaccauuauuu

SEQ ID NO: 1366816 - RNA, 19 nt, Homo sapiens
  misc_RNA (1)...(19): siRNA sense strand
ccagaucaauaucaacuuu

SEQ ID NO: 1366817 - RNA, 19 nt, Homo sapiens
  misc_RNA (1)...(19): siRNA sense strand
guucaaacaucuucggaaa

SEQ ID NO: 1366818 - RNA, 19 nt, Homo sapiens
  misc_RNA (1)...(19): siRNA sense strand
ucaaacaucuucggaaaug

SEQ ID NO: 1366819 - RNA, 19 nt, Homo sapiens
  misc_RNA (1)...(19): siRNA sense strand
caacauagaauuuggcaau

SEQ ID NO: 1366820 - RNA, 19 nt, Homo sapiens
  misc_RNA (1)...(19): siRNA sense strand
gaagagaggcuaugacaac

SEQ ID NO: 1366821 - RNA, 19 nt, Homo sapiens
  misc_RNA (1)...(19): siRNA sense strand
uagcguacauucacaaaga

SEQ ID NO: 1366822 - RNA, 19 nt, Homo sapiens
  misc_RNA (1)...(19): siRNA sense strand
ccagcaggacuuugaauua

SEQ ID NO: 1366823 - RNA, 19 nt, Homo sapiens
  misc_RNA (1)...(19): siRNA sense strand
gaggcacagucaagguuua

SEQ ID NO: 1366824 - RNA, 19 nt, Homo sapiens
  misc_RNA (1)...(19): siRNA sense strand
gaccucagcuuuucuguuu

SEQ ID NO: 1366825 - RNA, 19 nt, Homo sapiens
  misc_RNA (1)...(19): siRNA sense strand
gcaggacuuugaauuagug

SEQ ID NO: 1366826 - RNA, 19 nt, Homo sapiens
  misc_RNA (1)...(19): siRNA sense strand
gggaagcuuugccuccuaa

SEQ ID NO: 1366827 - RNA, 19 nt, Homo sapiens
  misc_RNA (1)...(19): siRNA sense strand
gaaggugcaacauagaauu

SEQ ID NO: 1366828 - RNA, 19 nt, Homo sapiens
  misc_RNA (1)...(19): siRNA sense strand
gcacagucaagguuuauau

SEQ ID NO: 1366829 - RNA, 19 nt, Homo sapiens
  misc_RNA (1)...(19): siRNA sense strand
gacagaaaguauguucaaa

SEQ ID NO: 1366830 - RNA, 19 nt, Homo sapiens
  misc_RNA (1)...(19): siRNA sense strand
gauguuagagccaggauga

SEQ ID NO: 1366831 - RNA, 19 nt, Homo sapiens
  misc_RNA (1)...(19): siRNA sense strand
cugcuuaucuuucagucua

SEQ ID NO: 1366832 - RNA, 19 nt, Homo sapiens
  misc_RNA (1)...(19): siRNA sense strand
aaacgugccaagaccauua

SEQ ID NO: 1366833 - RNA, 19 nt, Homo sapiens
  misc_RNA (1)...(19): siRNA sense strand
cagcaggacuuugaauuag

SEQ ID NO: 1366834 - RNA, 19 nt, Homo sapiens
  misc_RNA (1)...(19): siRNA sense strand
uuccauaacuuuagcaaga

SEQ ID NO: 1366835 - RNA, 19 nt, Homo sapiens
  misc_RNA (1)...(19): siRNA sense strand
gcaaagagcaaggcuaguc

SEQ ID NO: 1366836 - RNA, 19 nt, Homo sapiens
  misc_RNA (1)...(19): siRNA sense strand
agacaaaggaagggaaaua

SEQ ID NO: 1366837 - RNA, 19 nt, Homo sapiens
  misc_RNA (1)...(19): siRNA sense strand
ucacauuuauggaaagcuu

SEQ ID NO: 1366838 - RNA, 19 nt, Homo sapiens
  misc_RNA (1)...(19): siRNA sense strand
cauagaauuuggcaaugug

SEQ ID NO: 1366839 - RNA, 19 nt, Homo sapiens
  misc_RNA (1)...(19): siRNA sense strand
gcaguagcguacauucaca

SEQ ID NO: 1366840 - RNA, 19 nt, Homo sapiens
  misc_RNA (1)...(19): siRNA sense strand
gaacgcagugaucagcaaa

SEQ ID NO: 1366841 - RNA, 19 nt, Homo sapiens
  misc_RNA (1)...(19): siRNA sense strand
ugacagaaaguauguucaa

SEQ ID NO: 1366842 - RNA, 19 nt, Homo sapiens
  misc_RNA (1)...(19): siRNA sense strand
agaagucaaugaaacagau

SEQ ID NO: 1366843 - RNA, 19 nt, Homo sapiens
  misc_RNA (1)...(19): siRNA sense strand
ugaaggagagaccauuauu

SEQ ID NO: 1366844 - RNA, 19 nt, Homo sapiens
  misc_RNA (1)...(19): siRNA sense strand
gaccucaaguggagauaca

SEQ ID NO: 1366845 - RNA, 19 nt, Homo sapiens
  misc_RNA (1)...(19): siRNA sense strand
caagacaaaggaagggaaa

SEQ ID NO: 1366846 - RNA, 19 nt, Homo sapiens
  misc_RNA (1)...(19): siRNA sense strand
caaggcuagucuccaaaga

SEQ ID NO: 1366847 - RNA, 19 nt, Homo sapiens
  misc_RNA (1)...(19): siRNA sense strand
gccaugugccuuuauaaug

SEQ ID NO: 1366848 - RNA, 19 nt, Homo sapiens
  misc_RNA (1)...(19): siRNA sense strand
ggaaggugcaacauagaau

SEQ ID NO: 1366849 - RNA, 19 nt, Homo sapiens
  misc_RNA (1)...(19): siRNA sense strand
ucaagugaccauuggauau

SEQ ID NO: 1366850 - RNA, 19 nt, Homo sapiens
  misc_RNA (1)...(19): siRNA sense strand
ggaggcacagucaagguuu

SEQ ID NO: 1366851 - RNA, 19 nt, Homo sapiens
  misc_RNA (1)...(19): siRNA sense strand
gcuuaucuuucagucuaua

SEQ ID NO: 1366852 - RNA, 19 nt, Homo sapiens
  misc_RNA (1)...(19): siRNA sense strand
gaucacaacagcccuuucu

SEQ ID NO: 1366853 - RNA, 19 nt, Homo sapiens
  misc_RNA (1)...(19): siRNA sense strand
gauauggauucaggugugu

SEQ ID NO: 1366854 - RNA, 19 nt, Homo sapiens
  misc_RNA (1)...(19): siRNA sense strand
ugucagaagucaaugaaac

SEQ ID NO: 1366855 - RNA, 19 nt, Homo sapiens
  misc_RNA (1)...(19): siRNA sense strand
ccaacuucaucuugucaga

SEQ ID NO: 1366856 - RNA, 19 nt, Homo sapiens
  misc_RNA (1)...(19): siRNA sense strand
ucacaacagcccuuucuuc

SEQ ID NO: 1366857 - RNA, 19 nt, Homo sapiens
  misc_RNA (1)...(19): siRNA sense strand
cuuauuggcagucacauuu

SEQ ID NO: 1366858 - RNA, 19 nt, Homo sapiens
  misc_RNA (1)...(19): siRNA sense strand
caagugaccauuggauaug

SEQ ID NO: 1366859 - RNA, 19 nt, Homo sapiens
  misc_RNA (1)...(19): siRNA sense strand
aggcuagucuccaaagaug

SEQ ID NO: 1366860 - RNA, 19 nt, Homo sapiens
  misc_RNA (1)...(19): siRNA sense strand
gccaagaccauuacguuca

SEQ ID NO: 1366861 - RNA, 19 nt, Homo sapiens
  misc_RNA (1)...(19): siRNA sense strand
ucuuuggucuccuguggua

SEQ ID NO: 1366862 - RNA, 19 nt, Homo sapiens
  misc_RNA (1)...(19): siRNA sense strand
ggaugaagagaggcuauga

SEQ ID NO: 1366863 - RNA, 19 nt, Homo sapiens
  misc_RNA (1)...(19): siRNA sense strand
ccauuacguucagcaagaa

SEQ ID NO: 1366864 - RNA, 19 nt, Homo sapiens
  misc_RNA (1)...(19): siRNA sense strand
ccugaaggagagaccauua

SEQ ID NO: 1366865 - RNA, 19 nt, Homo sapiens
  misc_RNA (1)...(19): siRNA sense strand
cagucaagguuuauauucu

SEQ ID NO: 1366866 - RNA, 19 nt, Homo sapiens
  misc_RNA (1)...(19): siRNA sense strand
ucaggugugugacagaaca

SEQ ID NO: 1366867 - RNA, 19 nt, Homo sapiens
  misc_RNA (1)...(19): siRNA sense strand
agacucaagugaccauugg

SEQ ID NO: 1366868 - RNA, 19 nt, Homo sapiens
  misc_RNA (1)...(19): siRNA sense strand
gguaugcaguagcguacau

SEQ ID NO: 1366869 - RNA, 19 nt, Homo sapiens
  misc_RNA (1)...(19): siRNA sense strand
ugugccaugugccuuuaua

SEQ ID NO: 1366870 - RNA, 19 nt, Homo sapiens
  misc_RNA (1)...(19): siRNA sense strand
uauuggcagucacauuuau

SEQ ID NO: 1366871 - RNA, 19 nt, Homo sapiens
  misc_RNA (1)...(19): siRNA sense strand
ccaagaccauuacguucag

SEQ ID NO: 1366872 - RNA, 19 nt, Homo sapiens
  misc_RNA (1)...(19): siRNA sense strand
gugccaagaccauuacguu

SEQ ID NO: 1366873 - RNA, 19 nt, Homo sapiens
  misc_RNA (1)...(19): siRNA sense strand
gagacucaagugaccauug

SEQ ID NO: 1366874 - RNA, 19 nt, Homo sapiens
  misc_RNA (1)...(19): siRNA sense strand
gaagucaaugaaacagaug

SEQ ID NO: 1366875 - RNA, 19 nt, Homo sapiens
  misc_RNA (1)...(19): siRNA sense strand
caucuugucagaagucaau

SEQ ID NO: 1366876 - RNA, 19 nt, Homo sapiens
  misc_RNA (1)...(19): siRNA sense strand
gagagaccauuauuuugga

SEQ ID NO: 1366877 - RNA, 19 nt, Homo sapiens
  misc_RNA (1)...(19): siRNA sense strand
gcaaggcuagucuccaaag

SEQ ID NO: 1366878 - RNA, 19 nt, Homo sapiens
  misc_RNA (1)...(19): siRNA sense strand
caagaucuccaggcccaaa

SEQ ID NO: 1366879 - RNA, 19 nt, Homo sapiens
  misc_RNA (1)...(19): siRNA sense strand
ggcagucacauuuauggaa

SEQ ID NO: 1366880 - RNA, 19 nt, Homo sapiens
  misc_RNA (1)...(19): siRNA sense strand
accauuacguucagcaaga

SEQ ID NO: 1366881 - RNA, 19 nt, Homo sapiens
  misc_RNA (1)...(19): siRNA sense strand
gaucaggguguugacagaa

SEQ ID NO: 1366882 - RNA, 19 nt, Homo sapiens
  misc_RNA (1)...(19): siRNA sense strand
caacuucaucuugucagaa

SEQ ID NO: 1366883 - RNA, 19 nt, Homo sapiens
  misc_RNA (1)...(19): siRNA sense strand
gaccagaucaauaucaacu

SEQ ID NO: 1366884 - RNA, 19 nt, Homo sapiens
  misc_RNA (1)...(19): siRNA sense strand
uggaccagaucaauaucaa

SEQ ID NO: 1366885 - RNA, 19 nt, Homo sapiens
  misc_RNA (1)...(19): siRNA sense strand
gaagcuuugccuccuaauc

SEQ ID NO: 1366886 - RNA, 19 nt, Homo sapiens
  misc_RNA (1)...(19): siRNA sense strand
gagaauauuaauggcuuga

SEQ ID NO: 1366887 - RNA, 19 nt, Homo sapiens
  misc_RNA (1)...(19): siRNA sense strand
agauggaaggugcaacaua

SEQ ID NO: 1366888 - RNA, 19 nt, Homo sapiens
  misc_RNA (1)...(19): siRNA sense strand
ggugcaacauagaauuugg

SEQ ID NO: 1366889 - RNA, 19 nt, Homo sapiens
  misc_RNA (1)...(19): siRNA sense strand
uggcuaaucucaggaagag

SEQ ID NO: 1366890 - RNA, 19 nt, Homo sapiens
  misc_RNA (1)...(19): siRNA sense strand
agaacgcagugaucagcaa

SEQ ID NO: 1366891 - RNA, 19 nt, Homo sapiens
  misc_RNA (1)...(19): siRNA sense strand
aaagauggaaggugcaaca

SEQ ID NO: 1366892 - RNA, 19 nt, Homo sapiens
  misc_RNA (1)...(19): siRNA sense strand
gggaaauaccgaguggauu

SEQ ID NO: 1366893 - RNA, 19 nt, Homo sapiens
  misc_RNA (1)...(19): siRNA sense strand
ggagagaccauuauuuugg

SEQ ID NO: 1366894 - RNA, 19 nt, Homo sapiens
  misc_RNA (1)...(19): siRNA sense strand
gugccuuuauaaugagaaa

SEQ ID NO: 1366895 - RNA, 19 nt, Homo sapiens
  misc_RNA (1)...(19): siRNA sense strand
guuagagccaggaugaaga

SEQ ID NO: 1366896 - RNA, 19 nt, Homo sapiens
  misc_RNA (1)...(19): siRNA sense strand
cagucuauacuuggaguua

SEQ ID NO: 1366897 - RNA, 19 nt, Homo sapiens
  misc_RNA (1)...(19): siRNA sense strand
ccauaacuuuagcaagaca

SEQ ID NO: 1366898 - RNA, 19 nt, Homo sapiens
  misc_RNA (1)...(19): siRNA sense strand
ggauuuccauaacuuuagc

SEQ ID NO: 1366899 - RNA, 19 nt, Homo sapiens
  misc_RNA (1)...(19): siRNA sense strand
gacaaaggaagggaaauac

SEQ ID NO: 1366900 - RNA, 19 nt, Homo sapiens
  misc_RNA (1)...(19): siRNA sense strand
cccauaguauccaagacaa

SEQ ID NO: 1366901 - RNA, 19 nt, Homo sapiens
  misc_RNA (1)...(19): siRNA sense strand
uuauuggcagucacauuua

SEQ ID NO: 1366902 - RNA, 19 nt, Homo sapiens
  misc_RNA (1)...(19): siRNA sense strand
gcaagaacgcagugaucag

SEQ ID NO: 1366903 - RNA, 19 nt, Homo sapiens
  misc_RNA (1)...(19): siRNA sense strand
cagcaagaacgcagugauc

SEQ ID NO: 1366904 - RNA, 19 nt, Homo sapiens
  misc_RNA (1)...(19): siRNA sense strand
caaagagcaaggcuagucu

SEQ ID NO: 1366905 - RNA, 19 nt, Homo sapiens
  misc_RNA (1)...(19): siRNA sense strand
aaggugcaacauagaauuu

SEQ ID NO: 1366906 - RNA, 19 nt, Homo sapiens
  misc_RNA (1)...(19): siRNA sense strand
aaggagagaccauuauuuu

SEQ ID NO: 1366907 - RNA, 19 nt, Homo sapiens
  misc_RNA (1)...(19): siRNA sense strand
gguguugacagaaaguaug

SEQ ID NO: 1366908 - RNA, 19 nt, Homo sapiens
  misc_RNA (1)...(19): siRNA sense strand
acagucaagguuuauauuc

SEQ ID NO: 1366909 - RNA, 19 nt, Homo sapiens
  misc_RNA (1)...(19): siRNA sense strand
cagaugacaccaaaaugua

SEQ ID NO: 1366910 - RNA, 19 nt, Homo sapiens
  misc_RNA (1)...(19): siRNA sense strand
ugaaacagaugacaccaaa

SEQ ID NO: 1366911 - RNA, 19 nt, Homo sapiens
  misc_RNA (1)...(19): siRNA sense strand
gagcaaggcuagucuccaa

SEQ ID NO: 1366912 - RNA, 19 nt, Homo sapiens
  misc_RNA (1)...(19): siRNA sense strand
gcagucacauuuauggaaa

SEQ ID NO: 1366913 - RNA, 19 nt, Homo sapiens
  misc_RNA (1)...(19): siRNA sense strand
gauggaaggugcaacauag

SEQ ID NO: 1366914 - RNA, 19 nt, Homo sapiens
  misc_RNA (1)...(19): siRNA sense strand
ccaugugccuuuauaauga

SEQ ID NO: 1366915 - RNA, 19 nt, Homo sapiens
  misc_RNA (1)...(19): siRNA sense strand
gaaggagagaccauuauuu

SEQ ID NO: 1366916 - RNA, 19 nt, Homo sapiens
  misc_RNA (1)...(19): siRNA sense strand
ccagaucaauaucaacuuu

SEQ ID NO: 1366917 - RNA, 19 nt, Homo sapiens
  misc_RNA (1)...(19): siRNA sense strand
guucaaacaucuucggaaa

SEQ ID NO: 1366918 - RNA, 19 nt, Homo sapiens
  misc_RNA (1)...(19): siRNA sense strand
ucaaacaucuucggaaaug

SEQ ID NO: 1366919 - RNA, 19 nt, Homo sapiens
  misc_RNA (1)...(19): siRNA sense strand
caacauagaauuuggcaau

SEQ ID NO: 1366920 - RNA, 19 nt, Homo sapiens
  misc_RNA (1)...(19): siRNA sense strand
gaagagaggcuaugacaac

SEQ ID NO: 1366921 - RNA, 19 nt, Homo sapiens
  misc_RNA (1)...(19): siRNA sense strand
uagcguacauucacaaaga

SEQ ID NO: 1366922 - RNA, 19 nt, Homo sapiens
  misc_RNA (1)...(19): siRNA sense strand
ccagcaggacuuugaauua

SEQ ID NO: 1366923 - RNA, 19 nt, Homo sapiens
  misc_RNA (1)...(19): siRNA sense strand
gaggcacagucaagguuua

SEQ ID NO: 1366924 - RNA, 19 nt, Homo sapiens
  misc_RNA (1)...(19): siRNA sense strand
gaccucagcuuuucuguuu

SEQ ID NO: 1366925 - RNA, 19 nt, Homo sapiens
  misc_RNA (1)...(19): siRNA sense strand
gcaggacuuugaauuagug

SEQ ID NO: 1366926 - RNA, 19 nt, Homo sapiens
  misc_RNA (1)...(19): siRNA sense strand
gggaagcuuugccuccuaa

SEQ ID NO: 1366927 - RNA, 19 nt, Homo sapiens
  misc_RNA (1)...(19): siRNA sense strand
gaaggugcaacauagaauu

SEQ ID NO: 1366928 - RNA, 19 nt, Homo sapiens
  misc_RNA (1)...(19): siRNA sense strand
gcacagucaagguuuauau

SEQ ID NO: 1366929 - RNA, 19 nt, Homo sapiens
  misc_RNA (1)...(19): siRNA sense strand
gauguuagagccaggauga

SEQ ID NO: 1366930 - RNA, 19 nt, Homo sapiens
  misc_RNA (1)...(19): siRNA sense strand
cugcuuaucuuucagucua

SEQ ID NO: 1366931 - RNA, 19 nt, Homo sapiens
  misc_RNA (1)...(19): siRNA sense strand
aaacgugccaagaccauua

SEQ ID NO: 1366932 - RNA, 19 nt, Homo sapiens
  misc_RNA (1)...(19): siRNA sense strand
cagcaggacuuugaauuag

SEQ ID NO: 1366933 - RNA, 19 nt, Homo sapiens
  misc_RNA (1)...(19): siRNA sense strand
uuccauaacuuuagcaaga

SEQ ID NO: 1366934 - RNA, 19 nt, Homo sapiens
  misc_RNA (1)...(19): siRNA sense strand
ucacauuuauggaaagcuu

SEQ ID NO: 1366935 - RNA, 19 nt, Homo sapiens
  misc_RNA (1)...(19): siRNA sense strand
agacaaaggaagggaaaua

SEQ ID NO: 1366936 - RNA, 19 nt, Homo sapiens
  misc_RNA (1)...(19): siRNA sense strand
gcaaagagcaaggcuaguc

SEQ ID NO: 1366937 - RNA, 19 nt, Homo sapiens
  misc_RNA (1)...(19): siRNA sense strand
cauagaauuuggcaaugug

SEQ ID NO: 1366938 - RNA, 19 nt, Homo sapiens
  misc_RNA (1)...(19): siRNA sense strand
gcaguagcguacauucaca

SEQ ID NO: 1366939 - RNA, 19 nt, Homo sapiens
  misc_RNA (1)...(19): siRNA sense strand
gaacgcagugaucagcaaa

SEQ ID NO: 1366940 - RNA, 19 nt, Homo sapiens
  misc_RNA (1)...(19): siRNA sense strand
gaccucaaguggagauaca

SEQ ID NO: 1366941 - RNA, 19 nt, Homo sapiens
  misc_RNA (1)...(19): siRNA sense strand
agaagucaaugaaacagau

SEQ ID NO: 1366942 - RNA, 19 nt, Homo sapiens
  misc_RNA (1)...(19): siRNA sense strand
ugaaggagagaccauuauu

SEQ ID NO: 1366943 - RNA, 19 nt, Homo sapiens
  misc_RNA (1)...(19): siRNA sense strand
caaggcuagucuccaaaga

SEQ ID NO: 1366944 - RNA, 19 nt, Homo sapiens
  misc_RNA (1)...(19): siRNA sense strand
gccaugugccuuuauaaug

SEQ ID NO: 1366945 - RNA, 19 nt, Homo sapiens
  misc_RNA (1)...(19): siRNA sense strand
caagacaaaggaagggaaa

SEQ ID NO: 1366946 - RNA, 19 nt, Homo sapiens
  misc_RNA (1)...(19): siRNA sense strand
ggaggcacagucaagguuu

SEQ ID NO: 1366947 - RNA, 19 nt, Homo sapiens
  misc_RNA (1)...(19): siRNA sense strand
ggaaggugcaacauagaau

SEQ ID NO: 1366948 - RNA, 19 nt, Homo sapiens
  misc_RNA (1)...(19): siRNA sense strand
ucaagugaccauuggauau

SEQ ID NO: 1366949 - RNA, 19 nt, Homo sapiens
  misc_RNA (1)...(19): siRNA sense strand
gcuuaucuuucagucuaua

SEQ ID NO: 1366950 - RNA, 19 nt, Homo sapiens
  misc_RNA (1)...(19): siRNA sense strand
gaucacaacagcccuuucu

SEQ ID NO: 1366951 - RNA, 19 nt, Homo sapiens
  misc_RNA (1)...(19): siRNA sense strand
gauauggauucaggugugu

SEQ ID NO: 1366952 - RNA, 19 nt, Homo sapiens
  misc_RNA (1)...(19): siRNA sense strand
ugucagaagucaaugaaac

SEQ ID NO: 1366953 - RNA, 19 nt, Homo sapiens
  misc_RNA (1)...(19): siRNA sense strand
ccaacuucaucuugucaga

SEQ ID NO: 1366954 - RNA, 19 nt, Homo sapiens
  misc_RNA (1)...(19): siRNA sense strand
ucacaacagcccuuucuuc

SEQ ID NO: 1366955 - RNA, 19 nt, Homo sapiens
  misc_RNA (1)...(19): siRNA sense strand
cuuauuggcagucacauuu

SEQ ID NO: 1366956 - RNA, 19 nt, Homo sapiens
  misc_RNA (1)...(19): siRNA sense strand
caagugaccauuggauaug

SEQ ID NO: 1366957 - RNA, 19 nt, Homo sapiens
  misc_RNA (1)...(19): siRNA sense strand
gccaagaccauuacguuca

SEQ ID NO: 1366958 - RNA, 19 nt, Homo sapiens
  misc_RNA (1)...(19): siRNA sense strand
aggcuagucuccaaagaug

SEQ ID NO: 1366959 - RNA, 19 nt, Homo sapiens
  misc_RNA (1)...(19): siRNA sense strand
ucuuuggucuccuguggua

SEQ ID NO: 1366960 - RNA, 19 nt, Homo sapiens
  misc_RNA (1)...(19): siRNA sense strand
ggaugaagagaggcuauga

SEQ ID NO: 1366961 - RNA, 19 nt, Homo sapiens
  misc_RNA (1)...(19): siRNA sense strand
ccauuacguucagcaagaa

SEQ ID NO: 1366962 - RNA, 19 nt, Homo sapiens
  misc_RNA (1)...(19): siRNA sense strand
ccugaaggagagaccauua

SEQ ID NO: 1366963 - RNA, 19 nt, Homo sapiens
  misc_RNA (1)...(19): siRNA sense strand
agacucaagugaccauugg

SEQ ID NO: 1366964 - RNA, 19 nt, Homo sapiens
  misc_RNA (1)...(19): siRNA sense strand
cagucaagguuuauauucu

SEQ ID NO: 1366965 - RNA, 19 nt, Homo sapiens
  misc_RNA (1)...(19): siRNA sense strand
ucaggugugugacagaaca

SEQ ID NO: 1366966 - RNA, 19 nt, Homo sapiens
  misc_RNA (1)...(19): siRNA sense strand
gguaugcaguagcguacau

SEQ ID NO: 1366967 - RNA, 19 nt, Homo sapiens
  misc_RNA (1)...(19): siRNA sense strand
ugugccaugugccuuuaua

SEQ ID NO: 1366968 - RNA, 19 nt, Homo sapiens
  misc_RNA (1)...(19): siRNA sense strand
uauuggcagucacauuuau

SEQ ID NO: 1366969 - RNA, 19 nt, Homo sapiens
  misc_RNA (1)...(19): siRNA sense strand
ccaagaccauuacguucag

SEQ ID NO: 1366970 - RNA, 19 nt, Homo sapiens
  misc_RNA (1)...(19): siRNA sense strand
gugccaagaccauuacguu

SEQ ID NO: 1366971 - RNA, 19 nt, Homo sapiens
  misc_RNA (1)...(19): siRNA sense strand
gcaaggcuagucuccaaag

SEQ ID NO: 1366972 - RNA, 19 nt, Homo sapiens
  misc_RNA (1)...(19): siRNA sense strand
gaagucaaugaaacagaug

SEQ ID NO: 1366973 - RNA, 19 nt, Homo sapiens
  misc_RNA (1)...(19): siRNA sense strand
caucuugucagaagucaau

SEQ ID NO: 1366974 - RNA, 19 nt, Homo sapiens
  misc_RNA (1)...(19): siRNA sense strand
gagagaccauuauuuugga

SEQ ID NO: 1366975 - RNA, 19 nt, Homo sapiens
  misc_RNA (1)...(19): siRNA sense strand
gagacucaagugaccauug

SEQ ID NO: 1366976 - RNA, 19 nt, Homo sapiens
  misc_RNA (1)...(19): siRNA sense strand
caagaucuccaggcccaaa

SEQ ID NO: 1366977 - RNA, 19 nt, Homo sapiens
  misc_RNA (1)...(19): siRNA sense strand
ggcagucacauuuauggaa

SEQ ID NO: 1366978 - RNA, 19 nt, Homo sapiens
  misc_RNA (1)...(19): siRNA sense strand
accauuacguucagcaaga

SEQ ID NO: 1366979 - RNA, 19 nt, Homo sapiens
  misc_RNA (1)...(19): siRNA sense strand
caacuucaucuugucagaa

SEQ ID NO: 1366980 - RNA, 19 nt, Homo sapiens
  misc_RNA (1)...(19): siRNA sense strand
gaccagaucaauaucaacu

SEQ ID NO: 1366981 - RNA, 19 nt, Homo sapiens
  misc_RNA (1)...(19): siRNA sense strand
uggaccagaucaauaucaa

SEQ ID NO: 1366982 - RNA, 19 nt, Homo sapiens
  misc_RNA (1)...(19): siRNA sense strand
gaagcuuugccuccuaauc

SEQ ID NO: 1366983 - RNA, 19 nt, Homo sapiens
  misc_RNA (1)...(19): siRNA sense strand
gagaauauuaauggcuuga

SEQ ID NO: 1366984 - RNA, 19 nt, Homo sapiens
  misc_RNA (1)...(19): siRNA sense strand
agauggaaggugcaacaua

SEQ ID NO: 1366985 - RNA, 19 nt, Homo sapiens
  misc_RNA (1)...(19): siRNA sense strand
ggugcaacauagaauuugg

SEQ ID NO: 1366986 - RNA, 19 nt, Homo sapiens
  misc_RNA (1)...(19): siRNA sense strand
uggcuaaucucaggaagag

SEQ ID NO: 1366987 - RNA, 19 nt, Homo sapiens
  misc_RNA (1)...(19): siRNA sense strand
aaagauggaaggugcaaca

SEQ ID NO: 1366988 - RNA, 19 nt, Homo sapiens
  misc_RNA (1)...(19): siRNA sense strand
gggaaauaccgaguggauu

SEQ ID NO: 1366989 - RNA, 19 nt, Homo sapiens
  misc_RNA (1)...(19): siRNA sense strand
ggagagaccauuauuuugg

SEQ ID NO: 1366990 - RNA, 19 nt, Homo sapiens
  misc_RNA (1)...(19): siRNA sense strand
agaacgcagugaucagcaa

SEQ ID NO: 1366991 - RNA, 19 nt, Homo sapiens
  misc_RNA (1)...(19): siRNA sense strand
gugccuuuauaaugagaaa

SEQ ID NO: 1366992 - RNA, 19 nt, Homo sapiens
  misc_RNA (1)...(19): siRNA sense strand
guuagagccaggaugaaga

SEQ ID NO: 1366993 - RNA, 19 nt, Homo sapiens
  misc_RNA (1)...(19): siRNA sense strand
cagucuauacuuggaguua

SEQ ID NO: 1366994 - RNA, 19 nt, Homo sapiens
  misc_RNA (1)...(19): siRNA sense strand
ccauaacuuuagcaagaca

SEQ ID NO: 1366995 - RNA, 19 nt, Homo sapiens
  misc_RNA (1)...(19): siRNA sense strand
ggauuuccauaacuuuagc

SEQ ID NO: 1366996 - RNA, 19 nt, Homo sapiens
  misc_RNA (1)...(19): siRNA sense strand
gacaaaggaagggaaauac

SEQ ID NO: 1366997 - RNA, 19 nt, Homo sapiens
  misc_RNA (1)...(19): siRNA sense strand
cccauaguauccaagacaa

SEQ ID NO: 1366998 - RNA, 19 nt, Homo sapiens
  misc_RNA (1)...(19): siRNA sense strand
uuauuggcagucacauuua

SEQ ID NO: 1366999 - RNA, 19 nt, Homo sapiens
  misc_RNA (1)...(19): siRNA sense strand
gcaagaacgcagugaucag

SEQ ID NO: 1367000 - RNA, 19 nt, Homo sapiens
  misc_RNA (1)...(19): siRNA sense strand
cagcaagaacgcagugauc

SEQ ID NO: 1367001 - RNA, 19 nt, Homo sapiens
  misc_RNA (1)...(19): siRNA sense strand
caaagagcaaggcuagucu

SEQ ID NO: 1367002 - RNA, 19 nt, Homo sapiens
  misc_RNA (1)...(19): siRNA sense strand
aaggagagaccauuauuuu

SEQ ID NO: 1367003 - RNA, 19 nt, Homo sapiens
  misc_RNA (1)...(19): siRNA sense strand
aaggugcaacauagaauuu

SEQ ID NO: 1367004 - RNA, 19 nt, Homo sapiens
  misc_RNA (1)...(19): siRNA sense strand
acagucaagguuuauauuc

SEQ ID NO: 1367005 - RNA, 19 nt, Homo sapiens
  misc_RNA (1)...(19): siRNA sense strand
cagaugacaccaaaaugua

SEQ ID NO: 1367006 - RNA, 19 nt, Homo sapiens
  misc_RNA (1)...(19): siRNA sense strand
cacagucaagguuuauauu

SEQ ID NO: 1367007 - RNA, 19 nt, Homo sapiens
  misc_RNA (1)...(19): siRNA sense strand
aaacagaugacaccaaaau

SEQ ID NO: 1367008 - RNA, 19 nt, Homo sapiens
  misc_RNA (1)...(19): siRNA sense strand
gccaaguccggacauccua

SEQ ID NO: 1367009 - RNA, 19 nt, Homo sapiens
  misc_RNA (1)...(19): siRNA sense strand
cagaagucaaugaaacaga

SEQ ID NO: 1367010 - RNA, 19 nt, Homo sapiens
  misc_RNA (1)...(19): siRNA sense strand
ugaaacagaugacaccaaa

SEQ ID NO: 1367011 - RNA, 19 nt, Homo sapiens
  misc_RNA (1)...(19): siRNA sense strand
gagcaaggcuagucuccaa

SEQ ID NO: 1367012 - RNA, 19 nt, Homo sapiens
  misc_RNA (1)...(19): siRNA sense strand
gcagucacauuuauggaaa

SEQ ID NO: 1367013 - RNA, 19 nt, Homo sapiens
  misc_RNA (1)...(19): siRNA sense strand
gauggaaggugcaacauag

SEQ ID NO: 1367014 - RNA, 19 nt, Homo sapiens
  misc_RNA (1)...(19): siRNA sense strand
ccaugugccuuuauaauga

SEQ ID NO: 1367015 - RNA, 19 nt, Homo sapiens
  misc_RNA (1)...(19): siRNA sense strand
gaaggagagaccauuauuu

SEQ ID NO: 1367016 - RNA, 19 nt, Homo sapiens
  misc_RNA (1)...(19): siRNA sense strand
ccagaucaauaucaacuuu

SEQ ID NO: 1367017 - RNA, 19 nt, Homo sapiens
  misc_RNA (1)...(19): siRNA sense strand
guucaaacaucuucggaaa

SEQ ID NO: 1367018 - RNA, 19 nt, Homo sapiens
  misc_RNA (1)...(19): siRNA sense strand
ucaaacaucuucggaaaug

SEQ ID NO: 1367019 - RNA, 19 nt, Homo sapiens
  misc_RNA (1)...(19): siRNA sense strand
caacauagaauuuggcaau

SEQ ID NO: 1367020 - RNA, 19 nt, Homo sapiens
  misc_RNA (1)...(19): siRNA sense strand
gaagagaggcuaugacaac

SEQ ID NO: 1367021 - RNA, 19 nt, Homo sapiens
  misc_RNA (1)...(19): siRNA sense strand
uagcguacauucacaaaga

SEQ ID NO: 1367022 - RNA, 19 nt, Homo sapiens
  misc_RNA (1)...(19): siRNA sense strand
ccagcaggacuuugaauua

SEQ ID NO: 1367023 - RNA, 19 nt, Homo sapiens
  misc_RNA (1)...(19): siRNA sense strand
gaggcacagucaagguuua

SEQ ID NO: 1367024 - RNA, 19 nt, Homo sapiens
  misc_RNA (1)...(19): siRNA sense strand
gaccucagcuuuucuguuu

SEQ ID NO: 1367025 - RNA, 19 nt, Homo sapiens
  misc_RNA (1)...(19): siRNA sense strand
gcaggacuuugaauuagug

SEQ ID NO: 1367026 - RNA, 19 nt, Homo sapiens
  misc_RNA (1)...(19): siRNA sense strand
gggaagcuuugccuccuaa

SEQ ID NO: 1367027 - RNA, 19 nt, Homo sapiens
  misc_RNA (1)...(19): siRNA sense strand
gaaggugcaacauagaauu

SEQ ID NO: 1367028 - RNA, 19 nt, Homo sapiens
  misc_RNA (1)...(19): siRNA sense strand
gcacagucaagguuuauau

SEQ ID NO: 1367029 - RNA, 19 nt, Homo sapiens
  misc_RNA (1)...(19): siRNA sense strand
gacagaaaguauguucaaa

SEQ ID NO: 1367030 - RNA, 19 nt, Homo sapiens
  misc_RNA (1)...(19): siRNA sense strand
gauguuagagccaggauga

SEQ ID NO: 1367031 - RNA, 19 nt, Homo sapiens
  misc_RNA (1)...(19): siRNA sense strand
cugcuuaucuuucagucua

SEQ ID NO: 1367032 - RNA, 19 nt, Homo sapiens
  misc_RNA (1)...(19): siRNA sense strand
aaacgugccaagaccauua

SEQ ID NO: 1367033 - RNA, 19 nt, Homo sapiens
  misc_RNA (1)...(19): siRNA sense strand
cagcaggacuuugaauuag

SEQ ID NO: 1367034 - RNA, 19 nt, Homo sapiens
  misc_RNA (1)...(19): siRNA sense strand
uuccauaacuuuagcaaga

SEQ ID NO: 1367035 - RNA, 19 nt, Homo sapiens
  misc_RNA (1)...(19): siRNA sense strand
gcaaagagcaaggcuaguc

SEQ ID NO: 1367036 - RNA, 19 nt, Homo sapiens
  misc_RNA (1)...(19): siRNA sense strand
agacaaaggaagggaaaua

SEQ ID NO: 1367037 - RNA, 19 nt, Homo sapiens
  misc_RNA (1)...(19): siRNA sense strand
ucacauuuauggaaagcuu

SEQ ID NO: 1367038 - RNA, 19 nt, Homo sapiens
  misc_RNA (1)...(19): siRNA sense strand
cauagaauuuggcaaugug

SEQ ID NO: 1367039 - RNA, 19 nt, Homo sapiens
  misc_RNA (1)...(19): siRNA sense strand
gcaguagcguacauucaca

SEQ ID NO: 1367040 - RNA, 19 nt, Homo sapiens
  misc_RNA (1)...(19): siRNA sense strand
gaacgcagugaucagcaaa

SEQ ID NO: 1367041 - RNA, 19 nt, Homo sapiens
  misc_RNA (1)...(19): siRNA sense strand
ugacagaaaguauguucaa

SEQ ID NO: 1367042 - RNA, 19 nt, Homo sapiens
  misc_RNA (1)...(19): siRNA sense strand
agaagucaaugaaacagau

SEQ ID NO: 1367043 - RNA, 19 nt, Homo sapiens
  misc_RNA (1)...(19): siRNA sense strand
ugaaggagagaccauuauu

SEQ ID NO: 1367044 - RNA, 19 nt, Homo sapiens
  misc_RNA (1)...(19): siRNA sense strand
gaccucaaguggagauaca

SEQ ID NO: 1367045 - RNA, 19 nt, Homo sapiens
  misc_RNA (1)...(19): siRNA sense strand
caagacaaaggaagggaaa

SEQ ID NO: 1367046 - RNA, 19 nt, Homo sapiens
  misc_RNA (1)...(19): siRNA sense strand
caaggcuagucuccaaaga

SEQ ID NO: 1367047 - RNA, 19 nt, Homo sapiens
  misc_RNA (1)...(19): siRNA sense strand
gccaugugccuuuauaaug

SEQ ID NO: 1367048 - RNA, 19 nt, Homo sapiens
  misc_RNA (1)...(19): siRNA sense strand
ggaaggugcaacauagaau

SEQ ID NO: 1367049 - RNA, 19 nt, Homo sapiens
  misc_RNA (1)...(19): siRNA sense strand
ucaagugaccauuggauau

SEQ ID NO: 1367050 - RNA, 19 nt, Homo sapiens
  misc_RNA (1)...(19): siRNA sense strand
ggaggcacagucaagguuu

SEQ ID NO: 1367051 - RNA, 19 nt, Homo sapiens
  misc_RNA (1)...(19): siRNA sense strand
gcuuaucuuucagucuaua

SEQ ID NO: 1367052 - RNA, 19 nt, Homo sapiens
  misc_RNA (1)...(19): siRNA sense strand
gaucacaacagcccuuucu

SEQ ID NO: 1367053 - RNA, 19 nt, Homo sapiens
  misc_RNA (1)...(19): siRNA sense strand
gauauggauucaggugugu

SEQ ID NO: 1367054 - RNA, 19 nt, Homo sapiens
  misc_RNA (1)...(19): siRNA sense strand
ugucagaagucaaugaaac

SEQ ID NO: 1367055 - RNA, 19 nt, Homo sapiens
  misc_RNA (1)...(19): siRNA sense strand
ccaacuucaucuugucaga

SEQ ID NO: 1367056 - RNA, 19 nt, Homo sapiens
  misc_RNA (1)...(19): siRNA sense strand
ucacaacagcccuuucuuc

SEQ ID NO: 1367057 - RNA, 19 nt, Homo sapiens
  misc_RNA (1)...(19): siRNA sense strand
cuuauuggcagucacauuu

SEQ ID NO: 1367058 - RNA, 19 nt, Homo sapiens
  misc_RNA (1)...(19): siRNA sense strand
caagugaccauuggauaug

SEQ ID NO: 1367059 - RNA, 19 nt, Homo sapiens
  misc_RNA (1)...(19): siRNA sense strand
aggcuagucuccaaagaug

SEQ ID NO: 1367060 - RNA, 19 nt, Homo sapiens
  misc_RNA (1)...(19): siRNA sense strand
gccaagaccauuacguuca

SEQ ID NO: 1367061 - RNA, 19 nt, Homo sapiens
  misc_RNA (1)...(19): siRNA sense strand
ucuuuggucuccuguggua

SEQ ID NO: 1367062 - RNA, 19 nt, Homo sapiens
  misc_RNA (1)...(19): siRNA sense strand
ggaugaagagaggcuauga

SEQ ID NO: 1367063 - RNA, 19 nt, Homo sapiens
  misc_RNA (1)...(19): siRNA sense strand
ccauuacguucagcaagaa

SEQ ID NO: 1367064 - RNA, 19 nt, Homo sapiens
  misc_RNA (1)...(19): siRNA sense strand
ccugaaggagagaccauua

SEQ ID NO: 1367065 - RNA, 19 nt, Homo sapiens
  misc_RNA (1)...(19): siRNA sense strand
cagucaagguuuauauucu

SEQ ID NO: 1367066 - RNA, 19 nt, Homo sapiens
  misc_RNA (1)...(19): siRNA sense strand
ucaggugugugacagaaca

SEQ ID NO: 1367067 - RNA, 19 nt, Homo sapiens
  misc_RNA (1)...(19): siRNA sense strand
agacucaagugaccauugg

SEQ ID NO: 1367068 - RNA, 19 nt, Homo sapiens
  misc_RNA (1)...(19): siRNA sense strand
gguaugcaguagcguacau

SEQ ID NO: 1367069 - RNA, 19 nt, Homo sapiens
  misc_RNA (1)...(19): siRNA sense strand
ugugccaugugccuuuaua

SEQ ID NO: 1367070 - RNA, 19 nt, Homo sapiens
  misc_RNA (1)...(19): siRNA sense strand
uauuggcagucacauuuau

SEQ ID NO: 1367071 - RNA, 19 nt, Homo sapiens
  misc_RNA (1)...(19): siRNA sense strand
ccaagaccauuacguucag

SEQ ID NO: 1367072 - RNA, 19 nt, Homo sapiens
  misc_RNA (1)...(19): siRNA sense strand
gugccaagaccauuacguu

SEQ ID NO: 1367073 - RNA, 19 nt, Homo sapiens
  misc_RNA (1)...(19): siRNA sense strand
gagacucaagugaccauug

SEQ ID NO: 1367074 - RNA, 19 nt, Homo sapiens
  misc_RNA (1)...(19): siRNA sense strand
gaagucaaugaaacagaug

SEQ ID NO: 1367075 - RNA, 19 nt, Homo sapiens
  misc_RNA (1)...(19): siRNA sense strand
caucuugucagaagucaau

SEQ ID NO: 1367076 - RNA, 19 nt, Homo sapiens
  misc_RNA (1)...(19): siRNA sense strand
gagagaccauuauuuugga

SEQ ID NO: 1367077 - RNA, 19 nt, Homo sapiens
  misc_RNA (1)...(19): siRNA sense strand
gcaaggcuagucuccaaag

SEQ ID NO: 1367078 - RNA, 19 nt, Homo sapiens
  misc_RNA (1)...(19): siRNA sense strand
caagaucuccaggcccaaa

SEQ ID NO: 1367079 - RNA, 19 nt, Homo sapiens
  misc_RNA (1)...(19): siRNA sense strand
ggcagucacauuuauggaa

SEQ ID NO: 1367080 - RNA, 19 nt, Homo sapiens
  misc_RNA (1)...(19): siRNA sense strand
accauuacguucagcaaga

SEQ ID NO: 1367081 - RNA, 19 nt, Homo sapiens
  misc_RNA (1)...(19): siRNA sense strand
gaucaggguguugacagaa

SEQ ID NO: 1367082 - RNA, 19 nt, Homo sapiens
  misc_RNA (1)...(19): siRNA sense strand
caacuucaucuugucagaa

SEQ ID NO: 1367083 - RNA, 19 nt, Homo sapiens
  misc_RNA (1)...(19): siRNA sense strand
gaccagaucaauaucaacu

SEQ ID NO: 1367084 - RNA, 19 nt, Homo sapiens
  misc_RNA (1)...(19): siRNA sense strand
uggaccagaucaauaucaa

SEQ ID NO: 1367085 - RNA, 19 nt, Homo sapiens
  misc_RNA (1)...(19): siRNA sense strand
gaagcuuugccuccuaauc

SEQ ID NO: 1367086 - RNA, 19 nt, Homo sapiens
  misc_RNA (1)...(19): siRNA sense strand
gagaauauuaauggcuuga

SEQ ID NO: 1367087 - RNA, 19 nt, Homo sapiens
  misc_RNA (1)...(19): siRNA sense strand
agauggaaggugcaacaua

SEQ ID NO: 1367088 - RNA, 19 nt, Homo sapiens
  misc_RNA (1)...(19): siRNA sense strand
ggugcaacauagaauuugg

SEQ ID NO: 1367089 - RNA, 19 nt, Homo sapiens
  misc_RNA (1)...(19): siRNA sense strand
uggcuaaucucaggaagag

SEQ ID NO: 1367090 - RNA, 19 nt, Homo sapiens
  misc_RNA (1)...(19): siRNA sense strand
agaacgcagugaucagcaa

SEQ ID NO: 1367091 - RNA, 19 nt, Homo sapiens
  misc_RNA (1)...(19): siRNA sense strand
aaagauggaaggugcaaca

SEQ ID NO: 1367092 - RNA, 19 nt, Homo sapiens
  misc_RNA (1)...(19): siRNA sense strand
gggaaauaccgaguggauu

SEQ ID NO: 1367093 - RNA, 19 nt, Homo sapiens
  misc_RNA (1)...(19): siRNA sense strand
ggagagaccauuauuuugg

SEQ ID NO: 1367094 - RNA, 19 nt, Homo sapiens
  misc_RNA (1)...(19): siRNA sense strand
gugccuuuauaaugagaaa

SEQ ID NO: 1367095 - RNA, 19 nt, Homo sapiens
  misc_RNA (1)...(19): siRNA sense strand
guuagagccaggaugaaga

SEQ ID NO: 1367096 - RNA, 19 nt, Homo sapiens
  misc_RNA (1)...(19): siRNA sense strand
cagucuauacuuggaguua

SEQ ID NO: 1367097 - RNA, 19 nt, Homo sapiens
  misc_RNA (1)...(19): siRNA sense strand
ccauaacuuuagcaagaca

SEQ ID NO: 1367098 - RNA, 19 nt, Homo sapiens
  misc_RNA (1)...(19): siRNA sense strand
ggauuuccauaacuuuagc

SEQ ID NO: 1367099 - RNA, 19 nt, Homo sapiens
  misc_RNA (1)...(19): siRNA sense strand
gacaaaggaagggaaauac

SEQ ID NO: 1367100 - RNA, 19 nt, Homo sapiens
  misc_RNA (1)...(19): siRNA sense strand
cccauaguauccaagacaa

SEQ ID NO: 1367101 - RNA, 19 nt, Homo sapiens
  misc_RNA (1)...(19): siRNA sense strand
uuauuggcagucacauuua

SEQ ID NO: 1367102 - RNA, 19 nt, Homo sapiens
  misc_RNA (1)...(19): siRNA sense strand
gcaagaacgcagugaucag

SEQ ID NO: 1367103 - RNA, 19 nt, Homo sapiens
  misc_RNA (1)...(19): siRNA sense strand
cagcaagaacgcagugauc

SEQ ID NO: 1367104 - RNA, 19 nt, Homo sapiens
  misc_RNA (1)...(19): siRNA sense strand
caaagagcaaggcuagucu

SEQ ID NO: 1367105 - RNA, 19 nt, Homo sapiens
  misc_RNA (1)...(19): siRNA sense strand
aaggugcaacauagaauuu

SEQ ID NO: 1367106 - RNA, 19 nt, Homo sapiens
  misc_RNA (1)...(19): siRNA sense strand
aaggagagaccauuauuuu

SEQ ID NO: 1367107 - RNA, 19 nt, Homo sapiens
  misc_RNA (1)...(19): siRNA sense strand
gguguugacagaaaguaug

SEQ ID NO: 1367108 - RNA, 19 nt, Homo sapiens
  misc_RNA (1)...(19): siRNA sense strand
acagucaagguuuauauuc

SEQ ID NO: 1367109 - RNA, 19 nt, Homo sapiens
  misc_RNA (1)...(19): siRNA sense strand
cagaugacaccaaaaugua

SEQ ID NO: 1367110 - RNA, 19 nt, Homo sapiens
  misc_RNA (1)...(19): siRNA sense strand
ugaaacagaugacaccaaa

SEQ ID NO: 1367111 - RNA, 19 nt, Homo sapiens
  misc_RNA (1)...(19): siRNA sense strand
gagcaaggcuagucuccaa

SEQ ID NO: 1367112 - RNA, 19 nt, Homo sapiens
  misc_RNA (1)...(19): siRNA sense strand
gcagucacauuuauggaaa

SEQ ID NO: 1367113 - RNA, 19 nt, Homo sapiens
  misc_RNA (1)...(19): siRNA sense strand
gauggaaggugcaacauag

SEQ ID NO: 1367114 - RNA, 19 nt, Homo sapiens
  misc_RNA (1)...(19): siRNA sense strand
ccaugugccuuuauaauga

SEQ ID NO: 1367115 - RNA, 19 nt, Homo sapiens
  misc_RNA (1)...(19): siRNA sense strand
gaaggagagaccauuauuu

SEQ ID NO: 1367116 - RNA, 19 nt, Homo sapiens
  misc_RNA (1)...(19): siRNA sense strand
ccagaucaauaucaacuuu

SEQ ID NO: 1367117 - RNA, 19 nt, Homo sapiens
  misc_RNA (1)...(19): siRNA sense strand
guucaaacaucuucggaaa

SEQ ID NO: 1367118 - RNA, 19 nt, Homo sapiens
  misc_RNA (1)...(19): siRNA sense strand
ucaaacaucuucggaaaug

SEQ ID NO: 1367119 - RNA, 19 nt, Homo sapiens
  misc_RNA (1)...(19): siRNA sense strand
caacauagaauuuggcaau

SEQ ID NO: 1367120 - RNA, 19 nt, Homo sapiens
  misc_RNA (1)...(19): siRNA sense strand
gaagagaggcuaugacaac

SEQ ID NO: 1367121 - RNA, 19 nt, Homo sapiens
  misc_RNA (1)...(19): siRNA sense strand
uagcguacauucacaaaga

SEQ ID NO: 1367122 - RNA, 19 nt, Homo sapiens
  misc_RNA (1)...(19): siRNA sense strand
ccagcaggacuuugaauua

SEQ ID NO: 1367123 - RNA, 19 nt, Homo sapiens
  misc_RNA (1)...(19): siRNA sense strand
gaggcacagucaagguuua

SEQ ID NO: 1367124 - RNA, 19 nt, Homo sapiens
  misc_RNA (1)...(19): siRNA sense strand
gaccucagcuuuucuguuu

SEQ ID NO: 1367125 - RNA, 19 nt, Homo sapiens
  misc_RNA (1)...(19): siRNA sense strand
gcaggacuuugaauuagug

SEQ ID NO: 1367126 - RNA, 19 nt, Homo sapiens
  misc_RNA (1)...(19): siRNA sense strand
gggaagcuuugccuccuaa

SEQ ID NO: 1367127 - RNA, 19 nt, Homo sapiens
  misc_RNA (1)...(19): siRNA sense strand
gaaggugcaacauagaauu

SEQ ID NO: 1367128 - RNA, 19 nt, Homo sapiens
  misc_RNA (1)...(19): siRNA sense strand
gcacagucaagguuuauau

SEQ ID NO: 1367129 - RNA, 19 nt, Homo sapiens
  misc_RNA (1)...(19): siRNA sense strand
gauguuagagccaggauga

SEQ ID NO: 1367130 - RNA, 19 nt, Homo sapiens
  misc_RNA (1)...(19): siRNA sense strand
cugcuuaucuuucagucua

SEQ ID NO: 1367131 - RNA, 19 nt, Homo sapiens
  misc_RNA (1)...(19): siRNA sense strand
aaacgugccaagaccauua

SEQ ID NO: 1367132 - RNA, 19 nt, Homo sapiens
  misc_RNA (1)...(19): siRNA sense strand
cagcaggacuuugaauuag

SEQ ID NO: 1367133 - RNA, 19 nt, Homo sapiens
  misc_RNA (1)...(19): siRNA sense strand
uuccauaacuuuagcaaga

SEQ ID NO: 1367134 - RNA, 19 nt, Homo sapiens
  misc_RNA (1)...(19): siRNA sense strand
ucacauuuauggaaagcuu

SEQ ID NO: 1367135 - RNA, 19 nt, Homo sapiens
  misc_RNA (1)...(19): siRNA sense strand
agacaaaggaagggaaaua

SEQ ID NO: 1367136 - RNA, 19 nt, Homo sapiens
  misc_RNA (1)...(19): siRNA sense strand
gcaaagagcaaggcuaguc

SEQ ID NO: 1367137 - RNA, 19 nt, Homo sapiens
  misc_RNA (1)...(19): siRNA sense strand
cauagaauuuggcaaugug

SEQ ID NO: 1367138 - RNA, 19 nt, Homo sapiens
  misc_RNA (1)...(19): siRNA sense strand
gcaguagcguacauucaca

SEQ ID NO: 1367139 - RNA, 19 nt, Homo sapiens
  misc_RNA (1)...(19): siRNA sense strand
gaacgcagugaucagcaaa

SEQ ID NO: 1367140 - RNA, 19 nt, Homo sapiens
  misc_RNA (1)...(19): siRNA sense strand
gaccucaaguggagauaca

SEQ ID NO: 1367141 - RNA, 19 nt, Homo sapiens
  misc_RNA (1)...(19): siRNA sense strand
agaagucaaugaaacagau

SEQ ID NO: 1367142 - RNA, 19 nt, Homo sapiens
  misc_RNA (1)...(19): siRNA sense strand
ugaaggagagaccauuauu

SEQ ID NO: 1367143 - RNA, 19 nt, Homo sapiens
  misc_RNA (1)...(19): siRNA sense strand
caaggcuagucuccaaaga

SEQ ID NO: 1367144 - RNA, 19 nt, Homo sapiens
  misc_RNA (1)...(19): siRNA sense strand
gccaugugccuuuauaaug

SEQ ID NO: 1367145 - RNA, 19 nt, Homo sapiens
  misc_RNA (1)...(19): siRNA sense strand
caagacaaaggaagggaaa

SEQ ID NO: 1367146 - RNA, 19 nt, Homo sapiens
  misc_RNA (1)...(19): siRNA sense strand
ggaggcacagucaagguuu

SEQ ID NO: 1367147 - RNA, 19 nt, Homo sapiens
  misc_RNA (1)...(19): siRNA sense strand
ggaaggugcaacauagaau

SEQ ID NO: 1367148 - RNA, 19 nt, Homo sapiens
  misc_RNA (1)...(19): siRNA sense strand
ucaagugaccauuggauau

SEQ ID NO: 1367149 - RNA, 19 nt, Homo sapiens
  misc_RNA (1)...(19): siRNA sense strand
gcuuaucuuucagucuaua

SEQ ID NO: 1367150 - RNA, 19 nt, Homo sapiens
  misc_RNA (1)...(19): siRNA sense strand
gaucacaacagcccuuucu

SEQ ID NO: 1367151 - RNA, 19 nt, Homo sapiens
  misc_RNA (1)...(19): siRNA sense strand
gauauggauucaggugugu

SEQ ID NO: 1367152 - RNA, 19 nt, Homo sapiens
  misc_RNA (1)...(19): siRNA sense strand
ugucagaagucaaugaaac

SEQ ID NO: 1367153 - RNA, 19 nt, Homo sapiens
  misc_RNA (1)...(19): siRNA sense strand
ccaacuucaucuugucaga

SEQ ID NO: 1367154 - RNA, 19 nt, Homo sapiens
  misc_RNA (1)...(19): siRNA sense strand
ucacaacagcccuuucuuc

SEQ ID NO: 1367155 - RNA, 19 nt, Homo sapiens
  misc_RNA (1)...(19): siRNA sense strand
cuuauuggcagucacauuu

SEQ ID NO: 1367156 - RNA, 19 nt, Homo sapiens
  misc_RNA (1)...(19): siRNA sense strand
caagugaccauuggauaug

SEQ ID NO: 1367157 - RNA, 19 nt, Homo sapiens
  misc_RNA (1)...(19): siRNA sense strand
gccaagaccauuacguuca

SEQ ID NO: 1367158 - RNA, 19 nt, Homo sapiens
  misc_RNA (1)...(19): siRNA sense strand
aggcuagucuccaaagaug

SEQ ID NO: 1367159 - RNA, 19 nt, Homo sapiens
  misc_RNA (1)...(19): siRNA sense strand
ucuuuggucuccuguggua

SEQ ID NO: 1367160 - RNA, 19 nt, Homo sapiens
  misc_RNA (1)...(19): siRNA sense strand
ggaugaagagaggcuauga

SEQ ID NO: 1367161 - RNA, 19 nt, Homo sapiens
  misc_RNA (1)...(19): siRNA sense strand
ccauuacguucagcaagaa

SEQ ID NO: 1367162 - RNA, 19 nt, Homo sapiens
  misc_RNA (1)...(19): siRNA sense strand
ccugaaggagagaccauua

SEQ ID NO: 1367163 - RNA, 19 nt, Homo sapiens
  misc_RNA (1)...(19): siRNA sense strand
agacucaagugaccauugg

SEQ ID NO: 1367164 - RNA, 19 nt, Homo sapiens
  misc_RNA (1)...(19): siRNA sense strand
cagucaagguuuauauucu

SEQ ID NO: 1367165 - RNA, 19 nt, Homo sapiens
  misc_RNA (1)...(19): siRNA sense strand
ucaggugugugacagaaca

SEQ ID NO: 1367166 - RNA, 19 nt, Homo sapiens
  misc_RNA (1)...(19): siRNA sense strand
gguaugcaguagcguacau

SEQ ID NO: 1367167 - RNA, 19 nt, Homo sapiens
  misc_RNA (1)...(19): siRNA sense strand
ugugccaugugccuuuaua

SEQ ID NO: 1367168 - RNA, 19 nt, Homo sapiens
  misc_RNA (1)...(19): siRNA sense strand
uauuggcagucacauuuau

SEQ ID NO: 1367169 - RNA, 19 nt, Homo sapiens
  misc_RNA (1)...(19): siRNA sense strand
ccaagaccauuacguucag

SEQ ID NO: 1367170 - RNA, 19 nt, Homo sapiens
  misc_RNA (1)...(19): siRNA sense strand
gugccaagaccauuacguu

SEQ ID NO: 1367171 - RNA, 19 nt, Homo sapiens
  misc_RNA (1)...(19): siRNA sense strand
gcaaggcuagucuccaaag

SEQ ID NO: 1367172 - RNA, 19 nt, Homo sapiens
  misc_RNA (1)...(19): siRNA sense strand
gaagucaaugaaacagaug

SEQ ID NO: 1367173 - RNA, 19 nt, Homo sapiens
  misc_RNA (1)...(19): siRNA sense strand
caucuugucagaagucaau

SEQ ID NO: 1367174 - RNA, 19 nt, Homo sapiens
  misc_RNA (1)...(19): siRNA sense strand
gagagaccauuauuuugga

SEQ ID NO: 1367175 - RNA, 19 nt, Homo sapiens
  misc_RNA (1)...(19): siRNA sense strand
gagacucaagugaccauug

SEQ ID NO: 1367176 - RNA, 19 nt, Homo sapiens
  misc_RNA (1)...(19): siRNA sense strand
caagaucuccaggcccaaa

SEQ ID NO: 1367177 - RNA, 19 nt, Homo sapiens
  misc_RNA (1)...(19): siRNA sense strand
ggcagucacauuuauggaa

SEQ ID NO: 1367178 - RNA, 19 nt, Homo sapiens
  misc_RNA (1)...(19): siRNA sense strand
accauuacguucagcaaga

SEQ ID NO: 1367179 - RNA, 19 nt, Homo sapiens
  misc_RNA (1)...(19): siRNA sense strand
caacuucaucuugucagaa

SEQ ID NO: 1367180 - RNA, 19 nt, Homo sapiens
  misc_RNA (1)...(19): siRNA sense strand
gaccagaucaauaucaacu

SEQ ID NO: 1367181 - RNA, 19 nt, Homo sapiens
  misc_RNA (1)...(19): siRNA sense strand
uggaccagaucaauaucaa

SEQ ID NO: 1367182 - RNA, 19 nt, Homo sapiens
  misc_RNA (1)...(19): siRNA sense strand
gaagcuuugccuccuaauc

SEQ ID NO: 1367183 - RNA, 19 nt, Homo sapiens
  misc_RNA (1)...(19): siRNA sense strand
gagaauauuaauggcuuga

SEQ ID NO: 1367184 - RNA, 19 nt, Homo sapiens
  misc_RNA (1)...(19): siRNA sense strand
agauggaaggugcaacaua

SEQ ID NO: 1367185 - RNA, 19 nt, Homo sapiens
  misc_RNA (1)...(19): siRNA sense strand
ggugcaacauagaauuugg

SEQ ID NO: 1367186 - RNA, 19 nt, Homo sapiens
  misc_RNA (1)...(19): siRNA sense strand
uggcuaaucucaggaagag

SEQ ID NO: 1367187 - RNA, 19 nt, Homo sapiens
  misc_RNA (1)...(19): siRNA sense strand
aaagauggaaggugcaaca

SEQ ID NO: 1367188 - RNA, 19 nt, Homo sapiens
  misc_RNA (1)...(19): siRNA sense strand
gggaaauaccgaguggauu

SEQ ID NO: 1367189 - RNA, 19 nt, Homo sapiens
  misc_RNA (1)...(19): siRNA sense strand
ggagagaccauuauuuugg

SEQ ID NO: 1367190 - RNA, 19 nt, Homo sapiens
  misc_RNA (1)...(19): siRNA sense strand
agaacgcagugaucagcaa

SEQ ID NO: 1367191 - RNA, 19 nt, Homo sapiens
  misc_RNA (1)...(19): siRNA sense strand
gugccuuuauaaugagaaa

SEQ ID NO: 1367192 - RNA, 19 nt, Homo sapiens
  misc_RNA (1)...(19): siRNA sense strand
guuagagccaggaugaaga

SEQ ID NO: 1367193 - RNA, 19 nt, Homo sapiens
  misc_RNA (1)...(19): siRNA sense strand
cagucuauacuuggaguua

SEQ ID NO: 1367194 - RNA, 19 nt, Homo sapiens
  misc_RNA (1)...(19): siRNA sense strand
ccauaacuuuagcaagaca

SEQ ID NO: 1367195 - RNA, 19 nt, Homo sapiens
  misc_RNA (1)...(19): siRNA sense strand
ggauuuccauaacuuuagc

SEQ ID NO: 1367196 - RNA, 19 nt, Homo sapiens
  misc_RNA (1)...(19): siRNA sense strand
gacaaaggaagggaaauac

SEQ ID NO: 1367197 - RNA, 19 nt, Homo sapiens
  misc_RNA (1)...(19): siRNA sense strand
cccauaguauccaagacaa

SEQ ID NO: 1367198 - RNA, 19 nt, Homo sapiens
  misc_RNA (1)...(19): siRNA sense strand
uuauuggcagucacauuua

SEQ ID NO: 1367199 - RNA, 19 nt, Homo sapiens
  misc_RNA (1)...(19): siRNA sense strand
gcaagaacgcagugaucag

SEQ ID NO: 1367200 - RNA, 19 nt, Homo sapiens
  misc_RNA (1)...(19): siRNA sense strand
cagcaagaacgcagugauc

SEQ ID NO: 1367201 - RNA, 19 nt, Homo sapiens
  misc_RNA (1)...(19): siRNA sense strand
caaagagcaaggcuagucu

SEQ ID NO: 1367202 - RNA, 19 nt, Homo sapiens
  misc_RNA (1)...(19): siRNA sense strand
aaggagagaccauuauuuu

SEQ ID NO: 1367203 - RNA, 19 nt, Homo sapiens
  misc_RNA (1)...(19): siRNA sense strand
aaggugcaacauagaauuu

SEQ ID NO: 1367204 - RNA, 19 nt, Homo sapiens
  misc_RNA (1)...(19): siRNA sense strand
acagucaagguuuauauuc

SEQ ID NO: 1367205 - RNA, 19 nt, Homo sapiens
  misc_RNA (1)...(19): siRNA sense strand
cagaugacaccaaaaugua

SEQ ID NO: 1367206 - RNA, 19 nt, Homo sapiens
  misc_RNA (1)...(19): siRNA sense strand
cacagucaagguuuauauu

SEQ ID NO: 1367207 - RNA, 19 nt, Homo sapiens
  misc_RNA (1)...(19): siRNA sense strand
aaacagaugacaccaaaau

SEQ ID NO: 1367208 - RNA, 19 nt, Homo sapiens
  misc_RNA (1)...(19): siRNA sense strand
gccaaguccggacauccua

SEQ ID NO: 1367209 - RNA, 19 nt, Homo sapiens
  misc_RNA (1)...(19): siRNA sense strand
cagaagucaaugaaacaga

SEQ ID NO: 1367210 - RNA, 19 nt, Homo sapiens
  misc_RNA (1)...(19): siRNA sense strand
ugaaacagaugacaccaaa

SEQ ID NO: 1367211 - RNA, 19 nt, Homo sapiens
  misc_RNA (1)...(19): siRNA sense strand
gagcaaggcuagucuccaa

SEQ ID NO: 1367212 - RNA, 19 nt, Homo sapiens
  misc_RNA (1)...(19): siRNA sense strand
gcagucacauuuauggaaa

SEQ ID NO: 1367213 - RNA, 19 nt, Homo sapiens
  misc_RNA (1)...(19): siRNA sense strand
gauggaaggugcaacauag

SEQ ID NO: 1367214 - RNA, 19 nt, Homo sapiens
  misc_RNA (1)...(19): siRNA sense strand
ccaugugccuuuauaauga

SEQ ID NO: 1367215 - RNA, 19 nt, Homo sapiens
  misc_RNA (1)...(19): siRNA sense strand
gaaggagagaccauuauuu

SEQ ID NO: 1367216 - RNA, 19 nt, Homo sapiens
  misc_RNA (1)...(19): siRNA sense strand
ccagaucaauaucaacuuu

SEQ ID NO: 1367217 - RNA, 19 nt, Homo sapiens
  misc_RNA (1)...(19): siRNA sense strand
guucaaacaucuucggaaa

SEQ ID NO: 1367218 - RNA, 19 nt, Homo sapiens
  misc_RNA (1)...(19): siRNA sense strand
ucaaacaucuucggaaaug

SEQ ID NO: 1367219 - RNA, 19 nt, Homo sapiens
  misc_RNA (1)...(19): siRNA sense strand
caacauagaauuuggcaau

SEQ ID NO: 1367220 - RNA, 19 nt, Homo sapiens
  misc_RNA (1)...(19): siRNA sense strand
gaagagaggcuaugacaac

SEQ ID NO: 1367221 - RNA, 19 nt, Homo sapiens
  misc_RNA (1)...(19): siRNA sense strand
uagcguacauucacaaaga

SEQ ID NO: 1367222 - RNA, 19 nt, Homo sapiens
  misc_RNA (1)...(19): siRNA sense strand
ccagcaggacuuugaauua

SEQ ID NO: 1367223 - RNA, 19 nt, Homo sapiens
  misc_RNA (1)...(19): siRNA sense strand
gaggcacagucaagguuua

SEQ ID NO: 1367224 - RNA, 19 nt, Homo sapiens
  misc_RNA (1)...(19): siRNA sense strand
gaccucagcuuuucuguuu

SEQ ID NO: 1367225 - RNA, 19 nt, Homo sapiens
  misc_RNA (1)...(19): siRNA sense strand
gcaggacuuugaauuagug

SEQ ID NO: 1367226 - RNA, 19 nt, Homo sapiens
  misc_RNA (1)...(19): siRNA sense strand
gggaagcuuugccuccuaa

SEQ ID NO: 1367227 - RNA, 19 nt, Homo sapiens
  misc_RNA (1)...(19): siRNA sense strand
gaaggugcaacauagaauu

SEQ ID NO: 1367228 - RNA, 19 nt, Homo sapiens
  misc_RNA (1)...(19): siRNA sense strand
gcacagucaagguuuauau

SEQ ID NO: 1367229 - RNA, 19 nt, Homo sapiens
  misc_RNA (1)...(19): siRNA sense strand
gauguuagagccaggauga

SEQ ID NO: 1367230 - RNA, 19 nt, Homo sapiens
  misc_RNA (1)...(19): siRNA sense strand
cugcuuaucuuucagucua

SEQ ID NO: 1367231 - RNA, 19 nt, Homo sapiens
  misc_RNA (1)...(19): siRNA sense strand
aaacgugccaagaccauua

SEQ ID NO: 1367232 - RNA, 19 nt, Homo sapiens
  misc_RNA (1)...(19): siRNA sense strand
cagcaggacuuugaauuag

SEQ ID NO: 1367233 - RNA, 19 nt, Homo sapiens
  misc_RNA (1)...(19): siRNA sense strand
uuccauaacuuuagcaaga

SEQ ID NO: 1367234 - RNA, 19 nt, Homo sapiens
  misc_RNA (1)...(19): siRNA sense strand
ucacauuuauggaaagcuu

SEQ ID NO: 1367235 - RNA, 19 nt, Homo sapiens
  misc_RNA (1)...(19): siRNA sense strand
agacaaaggaagggaaaua

SEQ ID NO: 1367236 - RNA, 19 nt, Homo sapiens
  misc_RNA (1)...(19): siRNA sense strand
gcaaagagcaaggcuaguc

SEQ ID NO: 1367237 - RNA, 19 nt, Homo sapiens
  misc_RNA (1)...(19): siRNA sense strand
cauagaauuuggcaaugug

SEQ ID NO: 1367238 - RNA, 19 nt, Homo sapiens
  misc_RNA (1)...(19): siRNA sense strand
gcaguagcguacauucaca

SEQ ID NO: 1367239 - RNA, 19 nt, Homo sapiens
  misc_RNA (1)...(19): siRNA sense strand
gaacgcagugaucagcaaa

SEQ ID NO: 1367240 - RNA, 19 nt, Homo sapiens
  misc_RNA (1)...(19): siRNA sense strand
gaccucaaguggagauaca

SEQ ID NO: 1367241 - RNA, 19 nt, Homo sapiens
  misc_RNA (1)...(19): siRNA sense strand
agaagucaaugaaacagau

SEQ ID NO: 1367242 - RNA, 19 nt, Homo sapiens
  misc_RNA (1)...(19): siRNA sense strand
ugaaggagagaccauuauu

SEQ ID NO: 1367243 - RNA, 19 nt, Homo sapiens
  misc_RNA (1)...(19): siRNA sense strand
caaggcuagucuccaaaga

SEQ ID NO: 1367244 - RNA, 19 nt, Homo sapiens
  misc_RNA (1)...(19): siRNA sense strand
gccaugugccuuuauaaug

SEQ ID NO: 1367245 - RNA, 19 nt, Homo sapiens
  misc_RNA (1)...(19): siRNA sense strand
caagacaaaggaagggaaa

SEQ ID NO: 1367246 - RNA, 19 nt, Homo sapiens
  misc_RNA (1)...(19): siRNA sense strand
ggaggcacagucaagguuu

SEQ ID NO: 1367247 - RNA, 19 nt, Homo sapiens
  misc_RNA (1)...(19): siRNA sense strand
ggaaggugcaacauagaau

SEQ ID NO: 1367248 - RNA, 19 nt, Homo sapiens
  misc_RNA (1)...(19): siRNA sense strand
ucaagugaccauuggauau

SEQ ID NO: 1367249 - RNA, 19 nt, Homo sapiens
  misc_RNA (1)...(19): siRNA sense strand
gcuuaucuuucagucuaua

SEQ ID NO: 1367250 - RNA, 19 nt, Homo sapiens
  misc_RNA (1)...(19): siRNA sense strand
gaucacaacagcccuuucu

SEQ ID NO: 1367251 - RNA, 19 nt, Homo sapiens
  misc_RNA (1)...(19): siRNA sense strand
gauauggauucaggugugu

SEQ ID NO: 1367252 - RNA, 19 nt, Homo sapiens
  misc_RNA (1)...(19): siRNA sense strand
ugucagaagucaaugaaac

SEQ ID NO: 1367253 - RNA, 19 nt, Homo sapiens
  misc_RNA (1)...(19): siRNA sense strand
ccaacuucaucuugucaga

SEQ ID NO: 1367254 - RNA, 19 nt, Homo sapiens
  misc_RNA (1)...(19): siRNA sense strand
ucacaacagcccuuucuuc

SEQ ID NO: 1367255 - RNA, 19 nt, Homo sapiens
  misc_RNA (1)...(19): siRNA sense strand
cuuauuggcagucacauuu

SEQ ID NO: 1367256 - RNA, 19 nt, Homo sapiens
  misc_RNA (1)...(19): siRNA sense strand
caagugaccauuggauaug

SEQ ID NO: 1367257 - RNA, 19 nt, Homo sapiens
  misc_RNA (1)...(19): siRNA sense strand
gccaagaccauuacguuca

SEQ ID NO: 1367258 - RNA, 19 nt, Homo sapiens
  misc_RNA (1)...(19): siRNA sense strand
aggcuagucuccaaagaug

SEQ ID NO: 1367259 - RNA, 19 nt, Homo sapiens
  misc_RNA (1)...(19): siRNA sense strand
ucuuuggucuccuguggua

SEQ ID NO: 1367260 - RNA, 19 nt, Homo sapiens
  misc_RNA (1)...(19): siRNA sense strand
ggaugaagagaggcuauga

SEQ ID NO: 1367261 - RNA, 19 nt, Homo sapiens
  misc_RNA (1)...(19): siRNA sense strand
ccauuacguucagcaagaa

SEQ ID NO: 1367262 - RNA, 19 nt, Homo sapiens
  misc_RNA (1)...(19): siRNA sense strand
ccugaaggagagaccauua

SEQ ID NO: 1367263 - RNA, 19 nt, Homo sapiens
  misc_RNA (1)...(19): siRNA sense strand
agacucaagugaccauugg

SEQ ID NO: 1367264 - RNA, 19 nt, Homo sapiens
  misc_RNA (1)...(19): siRNA sense strand
cagucaagguuuauauucu

SEQ ID NO: 1367265 - RNA, 19 nt, Homo sapiens
  misc_RNA (1)...(19): siRNA sense strand
ucaggugugugacagaaca

SEQ ID NO: 1367266 - RNA, 19 nt, Homo sapiens
  misc_RNA (1)...(19): siRNA sense strand
gguaugcaguagcguacau

SEQ ID NO: 1367267 - RNA, 19 nt, Homo sapiens
  misc_RNA (1)...(19): siRNA sense strand
ugugccaugugccuuuaua

SEQ ID NO: 1367268 - RNA, 19 nt, Homo sapiens
  misc_RNA (1)...(19): siRNA sense strand
uauuggcagucacauuuau

SEQ ID NO: 1367269 - RNA, 19 nt, Homo sapiens
  misc_RNA (1)...(19): siRNA sense strand
ccaagaccauuacguucag

SEQ ID NO: 1367270 - RNA, 19 nt, Homo sapiens
  misc_RNA (1)...(19): siRNA sense strand
gugccaagaccauuacguu

SEQ ID NO: 1367271 - RNA, 19 nt, Homo sapiens
  misc_RNA (1)...(19): siRNA sense strand
gcaaggcuagucuccaaag

SEQ ID NO: 1367272 - RNA, 19 nt, Homo sapiens
  misc_RNA (1)...(19): siRNA sense strand
gaagucaaugaaacagaug

SEQ ID NO: 1367273 - RNA, 19 nt, Homo sapiens
  misc_RNA (1)...(19): siRNA sense strand
caucuugucagaagucaau

SEQ ID NO: 1367274 - RNA, 19 nt, Homo sapiens
  misc_RNA (1)...(19): siRNA sense strand
gagagaccauuauuuugga

SEQ ID NO: 1367275 - RNA, 19 nt, Homo sapiens
  misc_RNA (1)...(19): siRNA sense strand
gagacucaagugaccauug

SEQ ID NO: 1367276 - RNA, 19 nt, Homo sapiens
  misc_RNA (1)...(19): siRNA sense strand
caagaucuccaggcccaaa

SEQ ID NO: 1367277 - RNA, 19 nt, Homo sapiens
  misc_RNA (1)...(19): siRNA sense strand
ggcagucacauuuauggaa

SEQ ID NO: 1367278 - RNA, 19 nt, Homo sapiens
  misc_RNA (1)...(19): siRNA sense strand
accauuacguucagcaaga

SEQ ID NO: 1367279 - RNA, 19 nt, Homo sapiens
  misc_RNA (1)...(19): siRNA sense strand
caacuucaucuugucagaa

SEQ ID NO: 1367280 - RNA, 19 nt, Homo sapiens
  misc_RNA (1)...(19): siRNA sense strand
gaccagaucaauaucaacu

SEQ ID NO: 1367281 - RNA, 19 nt, Homo sapiens
  misc_RNA (1)...(19): siRNA sense strand
uggaccagaucaauaucaa

SEQ ID NO: 1367282 - RNA, 19 nt, Homo sapiens
  misc_RNA (1)...(19): siRNA sense strand
gaagcuuugccuccuaauc

SEQ ID NO: 1367283 - RNA, 19 nt, Homo sapiens
  misc_RNA (1)...(19): siRNA sense strand
gagaauauuaauggcuuga

SEQ ID NO: 1367284 - RNA, 19 nt, Homo sapiens
  misc_RNA (1)...(19): siRNA sense strand
agauggaaggugcaacaua

SEQ ID NO: 1367285 - RNA, 19 nt, Homo sapiens
  misc_RNA (1)...(19): siRNA sense strand
ggugcaacauagaauuugg

SEQ ID NO: 1367286 - RNA, 19 nt, Homo sapiens
  misc_RNA (1)...(19): siRNA sense strand
uggcuaaucucaggaagag

SEQ ID NO: 1367287 - RNA, 19 nt, Homo sapiens
  misc_RNA (1)...(19): siRNA sense strand
aaagauggaaggugcaaca

SEQ ID NO: 1367288 - RNA, 19 nt, Homo sapiens
  misc_RNA (1)...(19): siRNA sense strand
gggaaauaccgaguggauu

SEQ ID NO: 1367289 - RNA, 19 nt, Homo sapiens
  misc_RNA (1)...(19): siRNA sense strand
ggagagaccauuauuuugg

SEQ ID NO: 1367290 - RNA, 19 nt, Homo sapiens
  misc_RNA (1)...(19): siRNA sense strand
agaacgcagugaucagcaa

SEQ ID NO: 1367291 - RNA, 19 nt, Homo sapiens
  misc_RNA (1)...(19): siRNA sense strand
gugccuuuauaaugagaaa

SEQ ID NO: 1367292 - RNA, 19 nt, Homo sapiens
  misc_RNA (1)...(19): siRNA sense strand
guuagagccaggaugaaga

SEQ ID NO: 1367293 - RNA, 19 nt, Homo sapiens
  misc_RNA (1)...(19): siRNA sense strand
cagucuauacuuggaguua

SEQ ID NO: 1367294 - RNA, 19 nt, Homo sapiens
  misc_RNA (1)...(19): siRNA sense strand
ccauaacuuuagcaagaca

SEQ ID NO: 1367295 - RNA, 19 nt, Homo sapiens
  misc_RNA (1)...(19): siRNA sense strand
ggauuuccauaacuuuagc

SEQ ID NO: 1367296 - RNA, 19 nt, Homo sapiens
  misc_RNA (1)...(19): siRNA sense strand
gacaaaggaagggaaauac

SEQ ID NO: 1367297 - RNA, 19 nt, Homo sapiens
  misc_RNA (1)...(19): siRNA sense strand
cccauaguauccaagacaa

SEQ ID NO: 1367298 - RNA, 19 nt, Homo sapiens
  misc_RNA (1)...(19): siRNA sense strand
uuauuggcagucacauuua

SEQ ID NO: 1367299 - RNA, 19 nt, Homo sapiens
  misc_RNA (1)...(19): siRNA sense strand
gcaagaacgcagugaucag

SEQ ID NO: 1367300 - RNA, 19 nt, Homo sapiens
  misc_RNA (1)...(19): siRNA sense strand
cagcaagaacgcagugauc

SEQ ID NO: 1367301 - RNA, 19 nt, Homo sapiens
  misc_RNA (1)...(19): siRNA sense strand
caaagagcaaggcuagucu

SEQ ID NO: 1367302 - RNA, 19 nt, Homo sapiens
  misc_RNA (1)...(19): siRNA sense strand
aaggagagaccauuauuuu

SEQ ID NO: 1367303 - RNA, 19 nt, Homo sapiens
  misc_RNA (1)...(19): siRNA sense strand
aaggugcaacauagaauuu

SEQ ID NO: 1367304 - RNA, 19 nt, Homo sapiens
  misc_RNA (1)...(19): siRNA sense strand
acagucaagguuuauauuc

SEQ ID NO: 1367305 - RNA, 19 nt, Homo sapiens
  misc_RNA (1)...(19): siRNA sense strand
cagaugacaccaaaaugua

SEQ ID NO: 1367306 - RNA, 19 nt, Homo sapiens
  misc_RNA (1)...(19): siRNA sense strand
cacagucaagguuuauauu

SEQ ID NO: 1367307 - RNA, 19 nt, Homo sapiens
  misc_RNA (1)...(19): siRNA sense strand
aaacagaugacaccaaaau

SEQ ID NO: 1367308 - RNA, 19 nt, Homo sapiens
  misc_RNA (1)...(19): siRNA sense strand
gccaaguccggacauccua

SEQ ID NO: 1367309 - RNA, 19 nt, Homo sapiens
  misc_RNA (1)...(19): siRNA sense strand
cagaagucaaugaaacaga

SEQ ID NO: 1367310 - RNA, 19 nt, Homo sapiens
  misc_RNA (1)...(19): siRNA sense strand
ugaaacagaugacaccaaa

SEQ ID NO: 1367311 - RNA, 19 nt, Homo sapiens
  misc_RNA (1)...(19): siRNA sense strand
gagcaaggcuagucuccaa

SEQ ID NO: 1367312 - RNA, 19 nt, Homo sapiens
  misc_RNA (1)...(19): siRNA sense strand
gcagucacauuuauggaaa

SEQ ID NO: 1367313 - RNA, 19 nt, Homo sapiens
  misc_RNA (1)...(19): siRNA sense strand
gauggaaggugcaacauag

SEQ ID NO: 1367314 - RNA, 19 nt, Homo sapiens
  misc_RNA (1)...(19): siRNA sense strand
ccaugugccuuuauaauga

SEQ ID NO: 1367315 - RNA, 19 nt, Homo sapiens
  misc_RNA (1)...(19): siRNA sense strand
gaaggagagaccauuauuu

SEQ ID NO: 1367316 - RNA, 19 nt, Homo sapiens
  misc_RNA (1)...(19): siRNA sense strand
ccagaucaauaucaacuuu

SEQ ID NO: 1367317 - RNA, 19 nt, Homo sapiens
  misc_RNA (1)...(19): siRNA sense strand
guucaaacaucuucggaaa

SEQ ID NO: 1367318 - RNA, 19 nt, Homo sapiens
  misc_RNA (1)...(19): siRNA sense strand
ucaaacaucuucggaaaug

SEQ ID NO: 1367319 - RNA, 19 nt, Homo sapiens
  misc_RNA (1)...(19): siRNA sense strand
caacauagaauuuggcaau

SEQ ID NO: 1367320 - RNA, 19 nt, Homo sapiens
  misc_RNA (1)...(19): siRNA sense strand
gaagagaggcuaugacaac

SEQ ID NO: 1367321 - RNA, 19 nt, Homo sapiens
  misc_RNA (1)...(19): siRNA sense strand
uagcguacauucacaaaga

SEQ ID NO: 1367322 - RNA, 19 nt, Homo sapiens
  misc_RNA (1)...(19): siRNA sense strand
ccagcaggacuuugaauua

SEQ ID NO: 1367323 - RNA, 19 nt, Homo sapiens
  misc_RNA (1)...(19): siRNA sense strand
gaggcacagucaagguuua

SEQ ID NO: 1367324 - RNA, 19 nt, Homo sapiens
  misc_RNA (1)...(19): siRNA sense strand
gaccucagcuuuucuguuu

SEQ ID NO: 1367325 - RNA, 19 nt, Homo sapiens
  misc_RNA (1)...(19): siRNA sense strand
gcaggacuuugaauuagug

SEQ ID NO: 1367326 - RNA, 19 nt, Homo sapiens
  misc_RNA (1)...(19): siRNA sense strand
gggaagcuuugccuccuaa

SEQ ID NO: 1367327 - RNA, 19 nt, Homo sapiens
  misc_RNA (1)...(19): siRNA sense strand
gaaggugcaacauagaauu

SEQ ID NO: 1367328 - RNA, 19 nt, Homo sapiens
  misc_RNA (1)...(19): siRNA sense strand
gcacagucaagguuuauau

SEQ ID NO: 1367329 - RNA, 19 nt, Homo sapiens
  misc_RNA (1)...(19): siRNA sense strand
gacagaaaguauguucaaa

SEQ ID NO: 1367330 - RNA, 19 nt, Homo sapiens
  misc_RNA (1)...(19): siRNA sense strand
gauguuagagccaggauga

SEQ ID NO: 1367331 - RNA, 19 nt, Homo sapiens
  misc_RNA (1)...(19): siRNA sense strand
cugcuuaucuuucagucua

SEQ ID NO: 1367332 - RNA, 19 nt, Homo sapiens
  misc_RNA (1)...(19): siRNA sense strand
aaacgugccaagaccauua

SEQ ID NO: 1367333 - RNA, 19 nt, Homo sapiens
  misc_RNA (1)...(19): siRNA sense strand
cagcaggacuuugaauuag

SEQ ID NO: 1367334 - RNA, 19 nt, Homo sapiens
  misc_RNA (1)...(19): siRNA sense strand
uuccauaacuuuagcaaga

SEQ ID NO: 1367335 - RNA, 19 nt, Homo sapiens
  misc_RNA (1)...(19): siRNA sense strand
gcaaagagcaaggcuaguc

SEQ ID NO: 1367336 - RNA, 19 nt, Homo sapiens
  misc_RNA (1)...(19): siRNA sense strand
agacaaaggaagggaaaua

SEQ ID NO: 1367337 - RNA, 19 nt, Homo sapiens
  misc_RNA (1)...(19): siRNA sense strand
ucacauuuauggaaagcuu

SEQ ID NO: 1367338 - RNA, 19 nt, Homo sapiens
  misc_RNA (1)...(19): siRNA sense strand
cauagaauuuggcaaugug

SEQ ID NO: 1367339 - RNA, 19 nt, Homo sapiens
  misc_RNA (1)...(19): siRNA sense strand
gcaguagcguacauucaca

SEQ ID NO: 1367340 - RNA, 19 nt, Homo sapiens
  misc_RNA (1)...(19): siRNA sense strand
gaacgcagugaucagcaaa

SEQ ID NO: 1367341 - RNA, 19 nt, Homo sapiens
  misc_RNA (1)...(19): siRNA sense strand
ugacagaaaguauguucaa

SEQ ID NO: 1367342 - RNA, 19 nt, Homo sapiens
  misc_RNA (1)...(19): siRNA sense strand
agaagucaaugaaacagau

SEQ ID NO: 1367343 - RNA, 19 nt, Homo sapiens
  misc_RNA (1)...(19): siRNA sense strand
ugaaggagagaccauuauu

SEQ ID NO: 1367344 - RNA, 19 nt, Homo sapiens
  misc_RNA (1)...(19): siRNA sense strand
gaccucaaguggagauaca

SEQ ID NO: 1367345 - RNA, 19 nt, Homo sapiens
  misc_RNA (1)...(19): siRNA sense strand
caagacaaaggaagggaaa

SEQ ID NO: 1367346 - RNA, 19 nt, Homo sapiens
  misc_RNA (1)...(19): siRNA sense strand
caaggcuagucuccaaaga

SEQ ID NO: 1367347 - RNA, 19 nt, Homo sapiens
  misc_RNA (1)...(19): siRNA sense strand
gccaugugccuuuauaaug

SEQ ID NO: 1367348 - RNA, 19 nt, Homo sapiens
  misc_RNA (1)...(19): siRNA sense strand
ggaaggugcaacauagaau

SEQ ID NO: 1367349 - RNA, 19 nt, Homo sapiens
  misc_RNA (1)...(19): siRNA sense strand
ucaagugaccauuggauau

SEQ ID NO: 1367350 - RNA, 19 nt, Homo sapiens
  misc_RNA (1)...(19): siRNA sense strand
ggaggcacagucaagguuu

SEQ ID NO: 1367351 - RNA, 19 nt, Homo sapiens
  misc_RNA (1)...(19): siRNA sense strand
gcuuaucuuucagucuaua

SEQ ID NO: 1367352 - RNA, 19 nt, Homo sapiens
  misc_RNA (1)...(19): siRNA sense strand
gaucacaacagcccuuucu

SEQ ID NO: 1367353 - RNA, 19 nt, Homo sapiens
  misc_RNA (1)...(19): siRNA sense strand
gauauggauucaggugugu

SEQ ID NO: 1367354 - RNA, 19 nt, Homo sapiens
  misc_RNA (1)...(19): siRNA sense strand
ugucagaagucaaugaaac

SEQ ID NO: 1367355 - RNA, 19 nt, Homo sapiens
  misc_RNA (1)...(19): siRNA sense strand
ccaacuucaucuugucaga

SEQ ID NO: 1367356 - RNA, 19 nt, Homo sapiens
  misc_RNA (1)...(19): siRNA sense strand
ucacaacagcccuuucuuc

SEQ ID NO: 1367357 - RNA, 19 nt, Homo sapiens
  misc_RNA (1)...(19): siRNA sense strand
cuuauuggcagucacauuu

SEQ ID NO: 1367358 - RNA, 19 nt, Homo sapiens
  misc_RNA (1)...(19): siRNA sense strand
caagugaccauuggauaug

SEQ ID NO: 1367359 - RNA, 19 nt, Homo sapiens
  misc_RNA (1)...(19): siRNA sense strand
aggcuagucuccaaagaug

SEQ ID NO: 1367360 - RNA, 19 nt, Homo sapiens
  misc_RNA (1)...(19): siRNA sense strand
gccaagaccauuacguuca

SEQ ID NO: 1367361 - RNA, 19 nt, Homo sapiens
  misc_RNA (1)...(19): siRNA sense strand
ucuuuggucuccuguggua

SEQ ID NO: 1367362 - RNA, 19 nt, Homo sapiens
  misc_RNA (1)...(19): siRNA sense strand
ggaugaagagaggcuauga

SEQ ID NO: 1367363 - RNA, 19 nt, Homo sapiens
  misc_RNA (1)...(19): siRNA sense strand
ccauuacguucagcaagaa

SEQ ID NO: 1367364 - RNA, 19 nt, Homo sapiens
  misc_RNA (1)...(19): siRNA sense strand
ccugaaggagagaccauua

SEQ ID NO: 1367365 - RNA, 19 nt, Homo sapiens
  misc_RNA (1)...(19): siRNA sense strand
cagucaagguuuauauucu

SEQ ID NO: 1367366 - RNA, 19 nt, Homo sapiens
  misc_RNA (1)...(19): siRNA sense strand
ucaggugugugacagaaca

SEQ ID NO: 1367367 - RNA, 19 nt, Homo sapiens
  misc_RNA (1)...(19): siRNA sense strand
agacucaagugaccauugg

SEQ ID NO: 1367368 - RNA, 19 nt, Homo sapiens
  misc_RNA (1)...(19): siRNA sense strand
gguaugcaguagcguacau

SEQ ID NO: 1367369 - RNA, 19 nt, Homo sapiens
  misc_RNA (1)...(19): siRNA sense strand
ugugccaugugccuuuaua

SEQ ID NO: 1367370 - RNA, 19 nt, Homo sapiens
  misc_RNA (1)...(19): siRNA sense strand
uauuggcagucacauuuau

SEQ ID NO: 1367371 - RNA, 19 nt, Homo sapiens
  misc_RNA (1)...(19): siRNA sense strand
ccaagaccauuacguucag

SEQ ID NO: 1367372 - RNA, 19 nt, Homo sapiens
  misc_RNA (1)...(19): siRNA sense strand
gugccaagaccauuacguu

SEQ ID NO: 1367373 - RNA, 19 nt, Homo sapiens
  misc_RNA (1)...(19): siRNA sense strand
gagacucaagugaccauug

SEQ ID NO: 1367374 - RNA, 19 nt, Homo sapiens
  misc_RNA (1)...(19): siRNA sense strand
gaagucaaugaaacagaug

SEQ ID NO: 1367375 - RNA, 19 nt, Homo sapiens
  misc_RNA (1)...(19): siRNA sense strand
caucuugucagaagucaau

SEQ ID NO: 1367376 - RNA, 19 nt, Homo sapiens
  misc_RNA (1)...(19): siRNA sense strand
gagagaccauuauuuugga

SEQ ID NO: 1367377 - RNA, 19 nt, Homo sapiens
  misc_RNA (1)...(19): siRNA sense strand
gcaaggcuagucuccaaag

SEQ ID NO: 1367378 - RNA, 19 nt, Homo sapiens
  misc_RNA (1)...(19): siRNA sense strand
caagaucuccaggcccaaa

SEQ ID NO: 1367379 - RNA, 19 nt, Homo sapiens
  misc_RNA (1)...(19): siRNA sense strand
ggcagucacauuuauggaa

SEQ ID NO: 1367380 - RNA, 19 nt, Homo sapiens
  misc_RNA (1)...(19): siRNA sense strand
accauuacguucagcaaga

SEQ ID NO: 1367381 - RNA, 19 nt, Homo sapiens
  misc_RNA (1)...(19): siRNA sense strand
gaucaggguguugacagaa

SEQ ID NO: 1367382 - RNA, 19 nt, Homo sapiens
  misc_RNA (1)...(19): siRNA sense strand
caacuucaucuugucagaa

SEQ ID NO: 1367383 - RNA, 19 nt, Homo sapiens
  misc_RNA (1)...(19): siRNA sense strand
gaccagaucaauaucaacu

SEQ ID NO: 1367384 - RNA, 19 nt, Homo sapiens
  misc_RNA (1)...(19): siRNA sense strand
uggaccagaucaauaucaa

SEQ ID NO: 1367385 - RNA, 19 nt, Homo sapiens
  misc_RNA (1)...(19): siRNA sense strand
gaagcuuugccuccuaauc

SEQ ID NO: 1367386 - RNA, 19 nt, Homo sapiens
  misc_RNA (1)...(19): siRNA sense strand
gagaauauuaauggcuuga

SEQ ID NO: 1367387 - RNA, 19 nt, Homo sapiens
  misc_RNA (1)...(19): siRNA sense strand
agauggaaggugcaacaua

SEQ ID NO: 1367388 - RNA, 19 nt, Homo sapiens
  misc_RNA (1)...(19): siRNA sense strand
ggugcaacauagaauuugg

SEQ ID NO: 1367389 - RNA, 19 nt, Homo sapiens
  misc_RNA (1)...(19): siRNA sense strand
uggcuaaucucaggaagag

SEQ ID NO: 1367390 - RNA, 19 nt, Homo sapiens
  misc_RNA (1)...(19): siRNA sense strand
agaacgcagugaucagcaa

SEQ ID NO: 1367391 - RNA, 19 nt, Homo sapiens
  misc_RNA (1)...(19): siRNA sense strand
aaagauggaaggugcaaca

SEQ ID NO: 1367392 - RNA, 19 nt, Homo sapiens
  misc_RNA (1)...(19): siRNA sense strand
gggaaauaccgaguggauu

SEQ ID NO: 1367393 - RNA, 19 nt, Homo sapiens
  misc_RNA (1)...(19): siRNA sense strand
ggagagaccauuauuuugg

SEQ ID NO: 1367394 - RNA, 19 nt, Homo sapiens
  misc_RNA (1)...(19): siRNA sense strand
gugccuuuauaaugagaaa

SEQ ID NO: 1367395 - RNA, 19 nt, Homo sapiens
  misc_RNA (1)...(19): siRNA sense strand
guuagagccaggaugaaga

SEQ ID NO: 1367396 - RNA, 19 nt, Homo sapiens
  misc_RNA (1)...(19): siRNA sense strand
cagucuauacuuggaguua

SEQ ID NO: 1367397 - RNA, 19 nt, Homo sapiens
  misc_RNA (1)...(19): siRNA sense strand
ccauaacuuuagcaagaca

SEQ ID NO: 1367398 - RNA, 19 nt, Homo sapiens
  misc_RNA (1)...(19): siRNA sense strand
ggauuuccauaacuuuagc

SEQ ID NO: 1367399 - RNA, 19 nt, Homo sapiens
  misc_RNA (1)...(19): siRNA sense strand
gacaaaggaagggaaauac

SEQ ID NO: 1367400 - RNA, 19 nt, Homo sapiens
  misc_RNA (1)...(19): siRNA sense strand
cccauaguauccaagacaa

SEQ ID NO: 1367401 - RNA, 19 nt, Homo sapiens
  misc_RNA (1)...(19): siRNA sense strand
uuauuggcagucacauuua

SEQ ID NO: 1367402 - RNA, 19 nt, Homo sapiens
  misc_RNA (1)...(19): siRNA sense strand
gcaagaacgcagugaucag

SEQ ID NO: 1367403 - RNA, 19 nt, Homo sapiens
  misc_RNA (1)...(19): siRNA sense strand
cagcaagaacgcagugauc

SEQ ID NO: 1367404 - RNA, 19 nt, Homo sapiens
  misc_RNA (1)...(19): siRNA sense strand
caaagagcaaggcuagucu

SEQ ID NO: 1367405 - RNA, 19 nt, Homo sapiens
  misc_RNA (1)...(19): siRNA sense strand
aaggugcaacauagaauuu

SEQ ID NO: 1367406 - RNA, 19 nt, Homo sapiens
  misc_RNA (1)...(19): siRNA sense strand
aaggagagaccauuauuuu

SEQ ID NO: 1367407 - RNA, 19 nt, Homo sapiens
  misc_RNA (1)...(19): siRNA sense strand
gguguugacagaaaguaug

SEQ ID NO: 1367408 - RNA, 19 nt, Homo sapiens
  misc_RNA (1)...(19): siRNA sense strand
acagucaagguuuauauuc

SEQ ID NO: 1367409 - RNA, 19 nt, Homo sapiens
  misc_RNA (1)...(19): siRNA sense strand
cagaugacaccaaaaugua

SEQ ID NO: 1367410 - RNA, 19 nt, Homo sapiens
  misc_RNA (1)...(19): siRNA sense strand
ugaaacagaugacaccaaa

SEQ ID NO: 1367411 - RNA, 19 nt, Homo sapiens
  misc_RNA (1)...(19): siRNA sense strand
gagcaaggcuagucuccaa

SEQ ID NO: 1367412 - RNA, 19 nt, Homo sapiens
  misc_RNA (1)...(19): siRNA sense strand
gcagucacauuuauggaaa

SEQ ID NO: 1367413 - RNA, 19 nt, Homo sapiens
  misc_RNA (1)...(19): siRNA sense strand
gauggaaggugcaacauag

SEQ ID NO: 1367414 - RNA, 19 nt, Homo sapiens
  misc_RNA (1)...(19): siRNA sense strand
ccaugugccuuuauaauga

SEQ ID NO: 1367415 - RNA, 19 nt, Homo sapiens
  misc_RNA (1)...(19): siRNA sense strand
gaaggagagaccauuauuu

SEQ ID NO: 1367416 - RNA, 19 nt, Homo sapiens
  misc_RNA (1)...(19): siRNA sense strand
ccagaucaauaucaacuuu

SEQ ID NO: 1367417 - RNA, 19 nt, Homo sapiens
  misc_RNA (1)...(19): siRNA sense strand
guucaaacaucuucggaaa

SEQ ID NO: 1367418 - RNA, 19 nt, Homo sapiens
  misc_RNA (1)...(19): siRNA sense strand
ucaaacaucuucggaaaug

SEQ ID NO: 1367419 - RNA, 19 nt, Homo sapiens
  misc_RNA (1)...(19): siRNA sense strand
caacauagaauuuggcaau

SEQ ID NO: 1367420 - RNA, 19 nt, Homo sapiens
  misc_RNA (1)...(19): siRNA sense strand
gaagagaggcuaugacaac

SEQ ID NO: 1367421 - RNA, 19 nt, Homo sapiens
  misc_RNA (1)...(19): siRNA sense strand
uagcguacauucacaaaga

SEQ ID NO: 1367422 - RNA, 19 nt, Homo sapiens
  misc_RNA (1)...(19): siRNA sense strand
ccagcaggacuuugaauua

SEQ ID NO: 1367423 - RNA, 19 nt, Homo sapiens
  misc_RNA (1)...(19): siRNA sense strand
gaggcacagucaagguuua

SEQ ID NO: 1367424 - RNA, 19 nt, Homo sapiens
  misc_RNA (1)...(19): siRNA sense strand
gaccucagcuuuucuguuu

SEQ ID NO: 1367425 - RNA, 19 nt, Homo sapiens
  misc_RNA (1)...(19): siRNA sense strand
gcaggacuuugaauuagug

SEQ ID NO: 1367426 - RNA, 19 nt, Homo sapiens
  misc_RNA (1)...(19): siRNA sense strand
gggaagcuuugccuccuaa

SEQ ID NO: 1367427 - RNA, 19 nt, Homo sapiens
  misc_RNA (1)...(19): siRNA sense strand
gaaggugcaacauagaauu

SEQ ID NO: 1367428 - RNA, 19 nt, Homo sapiens
  misc_RNA (1)...(19): siRNA sense strand
gcacagucaagguuuauau

SEQ ID NO: 1367429 - RNA, 19 nt, Homo sapiens
  misc_RNA (1)...(19): siRNA sense strand
gauguuagagccaggauga

SEQ ID NO: 1367430 - RNA, 19 nt, Homo sapiens
  misc_RNA (1)...(19): siRNA sense strand
cugcuuaucuuucagucua

SEQ ID NO: 1367431 - RNA, 19 nt, Homo sapiens
  misc_RNA (1)...(19): siRNA sense strand
aaacgugccaagaccauua

SEQ ID NO: 1367432 - RNA, 19 nt, Homo sapiens
  misc_RNA (1)...(19): siRNA sense strand
cagcaggacuuugaauuag

SEQ ID NO: 1367433 - RNA, 19 nt, Homo sapiens
  misc_RNA (1)...(19): siRNA sense strand
uuccauaacuuuagcaaga

SEQ ID NO: 1367434 - RNA, 19 nt, Homo sapiens
  misc_RNA (1)...(19): siRNA sense strand
ucacauuuauggaaagcuu

SEQ ID NO: 1367435 - RNA, 19 nt, Homo sapiens
  misc_RNA (1)...(19): siRNA sense strand
agacaaaggaagggaaaua

SEQ ID NO: 1367436 - RNA, 19 nt, Homo sapiens
  misc_RNA (1)...(19): siRNA sense strand
gcaaagagcaaggcuaguc

SEQ ID NO: 1367437 - RNA, 19 nt, Homo sapiens
  misc_RNA (1)...(19): siRNA sense strand
cauagaauuuggcaaugug

SEQ ID NO: 1367438 - RNA, 19 nt, Homo sapiens
  misc_RNA (1)...(19): siRNA sense strand
gcaguagcguacauucaca

SEQ ID NO: 1367439 - RNA, 19 nt, Homo sapiens
  misc_RNA (1)...(19): siRNA sense strand
gaacgcagugaucagcaaa

SEQ ID NO: 1367440 - RNA, 19 nt, Homo sapiens
  misc_RNA (1)...(19): siRNA sense strand
gaccucaaguggagauaca

SEQ ID NO: 1367441 - RNA, 19 nt, Homo sapiens
  misc_RNA (1)...(19): siRNA sense strand
agaagucaaugaaacagau

SEQ ID NO: 1367442 - RNA, 19 nt, Homo sapiens
  misc_RNA (1)...(19): siRNA sense strand
ugaaggagagaccauuauu

SEQ ID NO: 1367443 - RNA, 19 nt, Homo sapiens
  misc_RNA (1)...(19): siRNA sense strand
caaggcuagucuccaaaga

SEQ ID NO: 1367444 - RNA, 19 nt, Homo sapiens
  misc_RNA (1)...(19): siRNA sense strand
gccaugugccuuuauaaug

SEQ ID NO: 1367445 - RNA, 19 nt, Homo sapiens
  misc_RNA (1)...(19): siRNA sense strand
caagacaaaggaagggaaa

SEQ ID NO: 1367446 - RNA, 19 nt, Homo sapiens
  misc_RNA (1)...(19): siRNA sense strand
ggaggcacagucaagguuu

SEQ ID NO: 1367447 - RNA, 19 nt, Homo sapiens
  misc_RNA (1)...(19): siRNA sense strand
ggaaggugcaacauagaau

SEQ ID NO: 1367448 - RNA, 19 nt, Homo sapiens
  misc_RNA (1)...(19): siRNA sense strand
ucaagugaccauuggauau

SEQ ID NO: 1367449 - RNA, 19 nt, Homo sapiens
  misc_RNA (1)...(19): siRNA sense strand
gcuuaucuuucagucuaua

SEQ ID NO: 1367450 - RNA, 19 nt, Homo sapiens
  misc_RNA (1)...(19): siRNA sense strand
gaucacaacagcccuuucu

SEQ ID NO: 1367451 - RNA, 19 nt, Homo sapiens
  misc_RNA (1)...(19): siRNA sense strand
gauauggauucaggugugu

SEQ ID NO: 1367452 - RNA, 19 nt, Homo sapiens
  misc_RNA (1)...(19): siRNA sense strand
ugucagaagucaaugaaac

SEQ ID NO: 1367453 - RNA, 19 nt, Homo sapiens
  misc_RNA (1)...(19): siRNA sense strand
ccaacuucaucuugucaga

SEQ ID NO: 1367454 - RNA, 19 nt, Homo sapiens
  misc_RNA (1)...(19): siRNA sense strand
ucacaacagcccuuucuuc

SEQ ID NO: 1367455 - RNA, 19 nt, Homo sapiens
  misc_RNA (1)...(19): siRNA sense strand
cuuauuggcagucacauuu

SEQ ID NO: 1367456 - RNA, 19 nt, Homo sapiens
  misc_RNA (1)...(19): siRNA sense strand
caagugaccauuggauaug

SEQ ID NO: 1367457 - RNA, 19 nt, Homo sapiens
  misc_RNA (1)...(19): siRNA sense strand
gccaagaccauuacguuca

SEQ ID NO: 1367458 - RNA, 19 nt, Homo sapiens
  misc_RNA (1)...(19): siRNA sense strand
aggcuagucuccaaagaug

SEQ ID NO: 1367459 - RNA, 19 nt, Homo sapiens
  misc_RNA (1)...(19): siRNA sense strand
ucuuuggucuccuguggua

SEQ ID NO: 1367460 - RNA, 19 nt, Homo sapiens
  misc_RNA (1)...(19): siRNA sense strand
ggaugaagagaggcuauga

SEQ ID NO: 1367461 - RNA, 19 nt, Homo sapiens
  misc_RNA (1)...(19): siRNA sense strand
ccauuacguucagcaagaa

SEQ ID NO: 1367462 - RNA, 19 nt, Homo sapiens
  misc_RNA (1)...(19): siRNA sense strand
ccugaaggagagaccauua

SEQ ID NO: 1367463 - RNA, 19 nt, Homo sapiens
  misc_RNA (1)...(19): siRNA sense strand
agacucaagugaccauugg

SEQ ID NO: 1367464 - RNA, 19 nt, Homo sapiens
  misc_RNA (1)...(19): siRNA sense strand
cagucaagguuuauauucu

SEQ ID NO: 1367465 - RNA, 19 nt, Homo sapiens
  misc_RNA (1)...(19): siRNA sense strand
ucaggugugugacagaaca

SEQ ID NO: 1367466 - RNA, 19 nt, Homo sapiens
  misc_RNA (1)...(19): siRNA sense strand
gguaugcaguagcguacau

SEQ ID NO: 1367467 - RNA, 19 nt, Homo sapiens
  misc_RNA (1)...(19): siRNA sense strand
ugugccaugugccuuuaua

SEQ ID NO: 1367468 - RNA, 19 nt, Homo sapiens
  misc_RNA (1)...(19): siRNA sense strand
uauuggcagucacauuuau

SEQ ID NO: 1367469 - RNA, 19 nt, Homo sapiens
  misc_RNA (1)...(19): siRNA sense strand
ccaagaccauuacguucag

SEQ ID NO: 1367470 - RNA, 19 nt, Homo sapiens
  misc_RNA (1)...(19): siRNA sense strand
gugccaagaccauuacguu

SEQ ID NO: 1367471 - RNA, 19 nt, Homo sapiens
  misc_RNA (1)...(19): siRNA sense strand
gcaaggcuagucuccaaag

SEQ ID NO: 1367472 - RNA, 19 nt, Homo sapiens
  misc_RNA (1)...(19): siRNA sense strand
gaagucaaugaaacagaug

SEQ ID NO: 1367473 - RNA, 19 nt, Homo sapiens
  misc_RNA (1)...(19): siRNA sense strand
caucuugucagaagucaau

SEQ ID NO: 1367474 - RNA, 19 nt, Homo sapiens
  misc_RNA (1)...(19): siRNA sense strand
gagagaccauuauuuugga

SEQ ID NO: 1367475 - RNA, 19 nt, Homo sapiens
  misc_RNA (1)...(19): siRNA sense strand
gagacucaagugaccauug

SEQ ID NO: 1367476 - RNA, 19 nt, Homo sapiens
  misc_RNA (1)...(19): siRNA sense strand
caagaucuccaggcccaaa

SEQ ID NO: 1367477 - RNA, 19 nt, Homo sapiens
  misc_RNA (1)...(19): siRNA sense strand
ggcagucacauuuauggaa

SEQ ID NO: 1367478 - RNA, 19 nt, Homo sapiens
  misc_RNA (1)...(19): siRNA sense strand
accauuacguucagcaaga

SEQ ID NO: 1367479 - RNA, 19 nt, Homo sapiens
  misc_RNA (1)...(19): siRNA sense strand
caacuucaucuugucagaa

SEQ ID NO: 1367480 - RNA, 19 nt, Homo sapiens
  misc_RNA (1)...(19): siRNA sense strand
gaccagaucaauaucaacu

SEQ ID NO: 1367481 - RNA, 19 nt, Homo sapiens
  misc_RNA (1)...(19): siRNA sense strand
uggaccagaucaauaucaa

SEQ ID NO: 1367482 - RNA, 19 nt, Homo sapiens
  misc_RNA (1)...(19): siRNA sense strand
gaagcuuugccuccuaauc

SEQ ID NO: 1367483 - RNA, 19 nt, Homo sapiens
  misc_RNA (1)...(19): siRNA sense strand
gagaauauuaauggcuuga

SEQ ID NO: 1367484 - RNA, 19 nt, Homo sapiens
  misc_RNA (1)...(19): siRNA sense strand
agauggaaggugcaacaua

SEQ ID NO: 1367485 - RNA, 19 nt, Homo sapiens
  misc_RNA (1)...(19): siRNA sense strand
ggugcaacauagaauuugg

SEQ ID NO: 1367486 - RNA, 19 nt, Homo sapiens
  misc_RNA (1)...(19): siRNA sense strand
uggcuaaucucaggaagag

SEQ ID NO: 1367487 - RNA, 19 nt, Homo sapiens
  misc_RNA (1)...(19): siRNA sense strand
aaagauggaaggugcaaca

SEQ ID NO: 1367488 - RNA, 19 nt, Homo sapiens
  misc_RNA (1)...(19): siRNA sense strand
gggaaauaccgaguggauu

SEQ ID NO: 1367489 - RNA, 19 nt, Homo sapiens
  misc_RNA (1)...(19): siRNA sense strand
ggagagaccauuauuuugg

SEQ ID NO: 1367490 - RNA, 19 nt, Homo sapiens
  misc_RNA (1)...(19): siRNA sense strand
agaacgcagugaucagcaa

SEQ ID NO: 1367491 - RNA, 19 nt, Homo sapiens
  misc_RNA (1)...(19): siRNA sense strand
gugccuuuauaaugagaaa

SEQ ID NO: 1367492 - RNA, 19 nt, Homo sapiens
  misc_RNA (1)...(19): siRNA sense strand
guuagagccaggaugaaga

SEQ ID NO: 1367493 - RNA, 19 nt, Homo sapiens
  misc_RNA (1)...(19): siRNA sense strand
cagucuauacuuggaguua

SEQ ID NO: 1367494 - RNA, 19 nt, Homo sapiens
  misc_RNA (1)...(19): siRNA sense strand
ccauaacuuuagcaagaca

SEQ ID NO: 1367495 - RNA, 19 nt, Homo sapiens
  misc_RNA (1)...(19): siRNA sense strand
ggauuuccauaacuuuagc

SEQ ID NO: 1367496 - RNA, 19 nt, Homo sapiens
  misc_RNA (1)...(19): siRNA sense strand
gacaaaggaagggaaauac

SEQ ID NO: 1367497 - RNA, 19 nt, Homo sapiens
  misc_RNA (1)...(19): siRNA sense strand
cccauaguauccaagacaa

SEQ ID NO: 1367498 - RNA, 19 nt, Homo sapiens
  misc_RNA (1)...(19): siRNA sense strand
uuauuggcagucacauuua

SEQ ID NO: 1367499 - RNA, 19 nt, Homo sapiens
  misc_RNA (1)...(19): siRNA sense strand
gcaagaacgcagugaucag

SEQ ID NO: 1367500 - RNA, 19 nt, Homo sapiens
  misc_RNA (1)...(19): siRNA sense strand
cagcaagaacgcagugauc

SEQ ID NO: 1367501 - RNA, 19 nt, Homo sapiens
  misc_RNA (1)...(19): siRNA sense strand
caaagagcaaggcuagucu

SEQ ID NO: 1367502 - RNA, 19 nt, Homo sapiens
  misc_RNA (1)...(19): siRNA sense strand
aaggagagaccauuauuuu

SEQ ID NO: 1367503 - RNA, 19 nt, Homo sapiens
  misc_RNA (1)...(19): siRNA sense strand
aaggugcaacauagaauuu

SEQ ID NO: 1367504 - RNA, 19 nt, Homo sapiens
  misc_RNA (1)...(19): siRNA sense strand
acagucaagguuuauauuc

SEQ ID NO: 1367505 - RNA, 19 nt, Homo sapiens
  misc_RNA (1)...(19): siRNA sense strand
cagaugacaccaaaaugua

SEQ ID NO: 1367506 - RNA, 19 nt, Homo sapiens
  misc_RNA (1)...(19): siRNA sense strand
cacagucaagguuuauauu

SEQ ID NO: 1367507 - RNA, 19 nt, Homo sapiens
  misc_RNA (1)...(19): siRNA sense strand
aaacagaugacaccaaaau

SEQ ID NO: 1367508 - RNA, 19 nt, Homo sapiens
  misc_RNA (1)...(19): siRNA sense strand
gccaaguccggacauccua

SEQ ID NO: 1367509 - RNA, 19 nt, Homo sapiens
  misc_RNA (1)...(19): siRNA sense strand
cagaagucaaugaaacaga

SEQ ID NO: 1367510 - RNA, 19 nt, Homo sapiens
  misc_RNA (1)...(19): siRNA sense strand
ugaaacagaugacaccaaa

SEQ ID NO: 1367511 - RNA, 19 nt, Homo sapiens
  misc_RNA (1)...(19): siRNA sense strand
gagcaaggcuagucuccaa

SEQ ID NO: 1367512 - RNA, 19 nt, Homo sapiens
  misc_RNA (1)...(19): siRNA sense strand
gcagucacauuuauggaaa

SEQ ID NO: 1367513 - RNA, 19 nt, Homo sapiens
  misc_RNA (1)...(19): siRNA sense strand
gauggaaggugcaacauag

SEQ ID NO: 1367514 - RNA, 19 nt, Homo sapiens
  misc_RNA (1)...(19): siRNA sense strand
ccaugugccuuuauaauga

SEQ ID NO: 1367515 - RNA, 19 nt, Homo sapiens
  misc_RNA (1)...(19): siRNA sense strand
gaaggagagaccauuauuu

SEQ ID NO: 1367516 - RNA, 19 nt, Homo sapiens
  misc_RNA (1)...(19): siRNA sense strand
ccagaucaauaucaacuuu

SEQ ID NO: 1367517 - RNA, 19 nt, Homo sapiens
  misc_RNA (1)...(19): siRNA sense strand
guucaaacaucuucggaaa

SEQ ID NO: 1367518 - RNA, 19 nt, Homo sapiens
  misc_RNA (1)...(19): siRNA sense strand
ucaaacaucuucggaaaug

SEQ ID NO: 1367519 - RNA, 19 nt, Homo sapiens
  misc_RNA (1)...(19): siRNA sense strand
caacauagaauuuggcaau

SEQ ID NO: 1367520 - RNA, 19 nt, Homo sapiens
  misc_RNA (1)...(19): siRNA sense strand
gaagagaggcuaugacaac

SEQ ID NO: 1367521 - RNA, 19 nt, Homo sapiens
  misc_RNA (1)...(19): siRNA sense strand
uagcguacauucacaaaga

SEQ ID NO: 1367522 - RNA, 19 nt, Homo sapiens
  misc_RNA (1)...(19): siRNA sense strand
ccagcaggacuuugaauua

SEQ ID NO: 1367523 - RNA, 19 nt, Homo sapiens
  misc_RNA (1)...(19): siRNA sense strand
gaggcacagucaagguuua

SEQ ID NO: 1367524 - RNA, 19 nt, Homo sapiens
  misc_RNA (1)...(19): siRNA sense strand
gaccucagcuuuucuguuu

SEQ ID NO: 1367525 - RNA, 19 nt, Homo sapiens
  misc_RNA (1)...(19): siRNA sense strand
gcaggacuuugaauuagug

SEQ ID NO: 1367526 - RNA, 19 nt, Homo sapiens
  misc_RNA (1)...(19): siRNA sense strand
gggaagcuuugccuccuaa

SEQ ID NO: 1367527 - RNA, 19 nt, Homo sapiens
  misc_RNA (1)...(19): siRNA sense strand
gaaggugcaacauagaauu

SEQ ID NO: 1367528 - RNA, 19 nt, Homo sapiens
  misc_RNA (1)...(19): siRNA sense strand
gcacagucaagguuuauau

SEQ ID NO: 1367529 - RNA, 19 nt, Homo sapiens
  misc_RNA (1)...(19): siRNA sense strand
gacagaaaguauguucaaa

SEQ ID NO: 1367530 - RNA, 19 nt, Homo sapiens
  misc_RNA (1)...(19): siRNA sense strand
gauguuagagccaggauga

SEQ ID NO: 1367531 - RNA, 19 nt, Homo sapiens
  misc_RNA (1)...(19): siRNA sense strand
cugcuuaucuuucagucua

SEQ ID NO: 1367532 - RNA, 19 nt, Homo sapiens
  misc_RNA (1)...(19): siRNA sense strand
aaacgugccaagaccauua

SEQ ID NO: 1367533 - RNA, 19 nt, Homo sapiens
  misc_RNA (1)...(19): siRNA sense strand
cagcaggacuuugaauuag

SEQ ID NO: 1367534 - RNA, 19 nt, Homo sapiens
  misc_RNA (1)...(19): siRNA sense strand
uuccauaacuuuagcaaga

SEQ ID NO: 1367535 - RNA, 19 nt, Homo sapiens
  misc_RNA (1)...(19): siRNA sense strand
gcaaagagcaaggcuaguc

SEQ ID NO: 1367536 - RNA, 19 nt, Homo sapiens
  misc_RNA (1)...(19): siRNA sense strand
agacaaaggaagggaaaua

SEQ ID NO: 1367537 - RNA, 19 nt, Homo sapiens
  misc_RNA (1)...(19): siRNA sense strand
ucacauuuauggaaagcuu

SEQ ID NO: 1367538 - RNA, 19 nt, Homo sapiens
  misc_RNA (1)...(19): siRNA sense strand
cauagaauuuggcaaugug

SEQ ID NO: 1367539 - RNA, 19 nt, Homo sapiens
  misc_RNA (1)...(19): siRNA sense strand
gcaguagcguacauucaca

SEQ ID NO: 1367540 - RNA, 19 nt, Homo sapiens
  misc_RNA (1)...(19): siRNA sense strand
gaacgcagugaucagcaaa

SEQ ID NO: 1367541 - RNA, 19 nt, Homo sapiens
  misc_RNA (1)...(19): siRNA sense strand
ugacagaaaguauguucaa

SEQ ID NO: 1367542 - RNA, 19 nt, Homo sapiens
  misc_RNA (1)...(19): siRNA sense strand
agaagucaaugaaacagau

SEQ ID NO: 1367543 - RNA, 19 nt, Homo sapiens
  misc_RNA (1)...(19): siRNA sense strand
ugaaggagagaccauuauu

SEQ ID NO: 1367544 - RNA, 19 nt, Homo sapiens
  misc_RNA (1)...(19): siRNA sense strand
gaccucaaguggagauaca

SEQ ID NO: 1367545 - RNA, 19 nt, Homo sapiens
  misc_RNA (1)...(19): siRNA sense strand
caagacaaaggaagggaaa

SEQ ID NO: 1367546 - RNA, 19 nt, Homo sapiens
  misc_RNA (1)...(19): siRNA sense strand
caaggcuagucuccaaaga

SEQ ID NO: 1367547 - RNA, 19 nt, Homo sapiens
  misc_RNA (1)...(19): siRNA sense strand
gccaugugccuuuauaaug

SEQ ID NO: 1367548 - RNA, 19 nt, Homo sapiens
  misc_RNA (1)...(19): siRNA sense strand
ggaaggugcaacauagaau

SEQ ID NO: 1367549 - RNA, 19 nt, Homo sapiens
  misc_RNA (1)...(19): siRNA sense strand
ucaagugaccauuggauau

SEQ ID NO: 1367550 - RNA, 19 nt, Homo sapiens
  misc_RNA (1)...(19): siRNA sense strand
ggaggcacagucaagguuu

SEQ ID NO: 1367551 - RNA, 19 nt, Homo sapiens
  misc_RNA (1)...(19): siRNA sense strand
gcuuaucuuucagucuaua

SEQ ID NO: 1367552 - RNA, 19 nt, Homo sapiens
  misc_RNA (1)...(19): siRNA sense strand
gaucacaacagcccuuucu

SEQ ID NO: 1367553 - RNA, 19 nt, Homo sapiens
  misc_RNA (1)...(19): siRNA sense strand
gauauggauucaggugugu

SEQ ID NO: 1367554 - RNA, 19 nt, Homo sapiens
  misc_RNA (1)...(19): siRNA sense strand
ugucagaagucaaugaaac

SEQ ID NO: 1367555 - RNA, 19 nt, Homo sapiens
  misc_RNA (1)...(19): siRNA sense strand
ccaacuucaucuugucaga

SEQ ID NO: 1367556 - RNA, 19 nt, Homo sapiens
  misc_RNA (1)...(19): siRNA sense strand
ucacaacagcccuuucuuc

SEQ ID NO: 1367557 - RNA, 19 nt, Homo sapiens
  misc_RNA (1)...(19): siRNA sense strand
cuuauuggcagucacauuu

SEQ ID NO: 1367558 - RNA, 19 nt, Homo sapiens
  misc_RNA (1)...(19): siRNA sense strand
caagugaccauuggauaug

SEQ ID NO: 1367559 - RNA, 19 nt, Homo sapiens
  misc_RNA (1)...(19): siRNA sense strand
aggcuagucuccaaagaug

SEQ ID NO: 1367560 - RNA, 19 nt, Homo sapiens
  misc_RNA (1)...(19): siRNA sense strand
gccaagaccauuacguuca

SEQ ID NO: 1367561 - RNA, 19 nt, Homo sapiens
  misc_RNA (1)...(19): siRNA sense strand
ucuuuggucuccuguggua

SEQ ID NO: 1367562 - RNA, 19 nt, Homo sapiens
  misc_RNA (1)...(19): siRNA sense strand
ggaugaagagaggcuauga

SEQ ID NO: 1367563 - RNA, 19 nt, Homo sapiens
  misc_RNA (1)...(19): siRNA sense strand
ccauuacguucagcaagaa

SEQ ID NO: 1367564 - RNA, 19 nt, Homo sapiens
  misc_RNA (1)...(19): siRNA sense strand
ccugaaggagagaccauua

SEQ ID NO: 1367565 - RNA, 19 nt, Homo sapiens
  misc_RNA (1)...(19): siRNA sense strand
cagucaagguuuauauucu

SEQ ID NO: 1367566 - RNA, 19 nt, Homo sapiens
  misc_RNA (1)...(19): siRNA sense strand
ucaggugugugacagaaca

SEQ ID NO: 1367567 - RNA, 19 nt, Homo sapiens
  misc_RNA (1)...(19): siRNA sense strand
agacucaagugaccauugg

SEQ ID NO: 1367568 - RNA, 19 nt, Homo sapiens
  misc_RNA (1)...(19): siRNA sense strand
gguaugcaguagcguacau

SEQ ID NO: 1367569 - RNA, 19 nt, Homo sapiens
  misc_RNA (1)...(19): siRNA sense strand
ugugccaugugccuuuaua

SEQ ID NO: 1367570 - RNA, 19 nt, Homo sapiens
  misc_RNA (1)...(19): siRNA sense strand
uauuggcagucacauuuau

SEQ ID NO: 1367571 - RNA, 19 nt, Homo sapiens
  misc_RNA (1)...(19): siRNA sense strand
ccaagaccauuacguucag

SEQ ID NO: 1367572 - RNA, 19 nt, Homo sapiens
  misc_RNA (1)...(19): siRNA sense strand
gugccaagaccauuacguu

SEQ ID NO: 1367573 - RNA, 19 nt, Homo sapiens
  misc_RNA (1)...(19): siRNA sense strand
gagacucaagugaccauug

SEQ ID NO: 1367574 - RNA, 19 nt, Homo sapiens
  misc_RNA (1)...(19): siRNA sense strand
gaagucaaugaaacagaug

SEQ ID NO: 1367575 - RNA, 19 nt, Homo sapiens
  misc_RNA (1)...(19): siRNA sense strand
caucuugucagaagucaau

SEQ ID NO: 1367576 - RNA, 19 nt, Homo sapiens
  misc_RNA (1)...(19): siRNA sense strand
gagagaccauuauuuugga

SEQ ID NO: 1367577 - RNA, 19 nt, Homo sapiens
  misc_RNA (1)...(19): siRNA sense strand
gcaaggcuagucuccaaag

SEQ ID NO: 1367578 - RNA, 19 nt, Homo sapiens
  misc_RNA (1)...(19): siRNA sense strand
caagaucuccaggcccaaa

SEQ ID NO: 1367579 - RNA, 19 nt, Homo sapiens
  misc_RNA (1)...(19): siRNA sense strand
ggcagucacauuuauggaa

SEQ ID NO: 1367580 - RNA, 19 nt, Homo sapiens
  misc_RNA (1)...(19): siRNA sense strand
accauuacguucagcaaga

SEQ ID NO: 1367581 - RNA, 19 nt, Homo sapiens
  misc_RNA (1)...(19): siRNA sense strand
gaucaggguguugacagaa

SEQ ID NO: 1367582 - RNA, 19 nt, Homo sapiens
  misc_RNA (1)...(19): siRNA sense strand
caacuucaucuugucagaa

SEQ ID NO: 1367583 - RNA, 19 nt, Homo sapiens
  misc_RNA (1)...(19): siRNA sense strand
gaccagaucaauaucaacu

SEQ ID NO: 1367584 - RNA, 19 nt, Homo sapiens
  misc_RNA (1)...(19): siRNA sense strand
uggaccagaucaauaucaa

SEQ ID NO: 1367585 - RNA, 19 nt, Homo sapiens
  misc_RNA (1)...(19): siRNA sense strand
gaagcuuugccuccuaauc

SEQ ID NO: 1367586 - RNA, 19 nt, Homo sapiens
  misc_RNA (1)...(19): siRNA sense strand
gagaauauuaauggcuuga

SEQ ID NO: 1367587 - RNA, 19 nt, Homo sapiens
  misc_RNA (1)...(19): siRNA sense strand
agauggaaggugcaacaua

SEQ ID NO: 1367588 - RNA, 19 nt, Homo sapiens
  misc_RNA (1)...(19): siRNA sense strand
ggugcaacauagaauuugg

SEQ ID NO: 1367589 - RNA, 19 nt, Homo sapiens
  misc_RNA (1)...(19): siRNA sense strand
uggcuaaucucaggaagag

SEQ ID NO: 1367590 - RNA, 19 nt, Homo sapiens
  misc_RNA (1)...(19): siRNA sense strand
agaacgcagugaucagcaa

SEQ ID NO: 1367591 - RNA, 19 nt, Homo sapiens
  misc_RNA (1)...(19): siRNA sense strand
aaagauggaaggugcaaca

SEQ ID NO: 1367592 - RNA, 19 nt, Homo sapiens
  misc_RNA (1)...(19): siRNA sense strand
gggaaauaccgaguggauu

SEQ ID NO: 1367593 - RNA, 19 nt, Homo sapiens
  misc_RNA (1)...(19): siRNA sense strand
ggagagaccauuauuuugg

SEQ ID NO: 1367594 - RNA, 19 nt, Homo sapiens
  misc_RNA (1)...(19): siRNA sense strand
gugccuuuauaaugagaaa

SEQ ID NO: 1367595 - RNA, 19 nt, Homo sapiens
  misc_RNA (1)...(19): siRNA sense strand
guuagagccaggaugaaga

SEQ ID NO: 1367596 - RNA, 19 nt, Homo sapiens
  misc_RNA (1)...(19): siRNA sense strand
cagucuauacuuggaguua

SEQ ID NO: 1367597 - RNA, 19 nt, Homo sapiens
  misc_RNA (1)...(19): siRNA sense strand
ccauaacuuuagcaagaca

SEQ ID NO: 1367598 - RNA, 19 nt, Homo sapiens
  misc_RNA (1)...(19): siRNA sense strand
ggauuuccauaacuuuagc

SEQ ID NO: 1367599 - RNA, 19 nt, Homo sapiens
  misc_RNA (1)...(19): siRNA sense strand
gacaaaggaagggaaauac

SEQ ID NO: 1367600 - RNA, 19 nt, Homo sapiens
  misc_RNA (1)...(19): siRNA sense strand
cccauaguauccaagacaa

SEQ ID NO: 1367601 - RNA, 19 nt, Homo sapiens
  misc_RNA (1)...(19): siRNA sense strand
uuauuggcagucacauuua

SEQ ID NO: 1367602 - RNA, 19 nt, Homo sapiens
  misc_RNA (1)...(19): siRNA sense strand
gcaagaacgcagugaucag

SEQ ID NO: 1367603 - RNA, 19 nt, Homo sapiens
  misc_RNA (1)...(19): siRNA sense strand
cagcaagaacgcagugauc

SEQ ID NO: 1367604 - RNA, 19 nt, Homo sapiens
  misc_RNA (1)...(19): siRNA sense strand
caaagagcaaggcuagucu

SEQ ID NO: 1367605 - RNA, 19 nt, Homo sapiens
  misc_RNA (1)...(19): siRNA sense strand
aaggugcaacauagaauuu

SEQ ID NO: 1367606 - RNA, 19 nt, Homo sapiens
  misc_RNA (1)...(19): siRNA sense strand
aaggagagaccauuauuuu

SEQ ID NO: 1367607 - RNA, 19 nt, Homo sapiens
  misc_RNA (1)...(19): siRNA sense strand
gguguugacagaaaguaug

SEQ ID NO: 1367608 - RNA, 19 nt, Homo sapiens
  misc_RNA (1)...(19): siRNA sense strand
acagucaagguuuauauuc

SEQ ID NO: 1367609 - RNA, 19 nt, Homo sapiens
  misc_RNA (1)...(19): siRNA sense strand
cagaugacaccaaaaugua

SEQ ID NO: 1367610 - RNA, 19 nt, Homo sapiens
  misc_RNA (1)...(19): siRNA sense strand
ugaaacagaugacaccaaa

SEQ ID NO: 1367611 - RNA, 19 nt, Homo sapiens
  misc_RNA (1)...(19): siRNA sense strand
gagcaaggcuagucuccaa

SEQ ID NO: 1367612 - RNA, 19 nt, Homo sapiens
  misc_RNA (1)...(19): siRNA sense strand
gcagucacauuuauggaaa

SEQ ID NO: 1367613 - RNA, 19 nt, Homo sapiens
  misc_RNA (1)...(19): siRNA sense strand
gauggaaggugcaacauag

SEQ ID NO: 1367614 - RNA, 19 nt, Homo sapiens
  misc_RNA (1)...(19): siRNA sense strand
ccaugugccuuuauaauga

SEQ ID NO: 1367615 - RNA, 19 nt, Homo sapiens
  misc_RNA (1)...(19): siRNA sense strand
gaaggagagaccauuauuu

SEQ ID NO: 1367616 - RNA, 19 nt, Homo sapiens
  misc_RNA (1)...(19): siRNA sense strand
ccagaucaauaucaacuuu

SEQ ID NO: 1367617 - RNA, 19 nt, Homo sapiens
  misc_RNA (1)...(19): siRNA sense strand
guucaaacaucuucggaaa

SEQ ID NO: 1367618 - RNA, 19 nt, Homo sapiens
  misc_RNA (1)...(19): siRNA sense strand
ucaaacaucuucggaaaug

SEQ ID NO: 1367619 - RNA, 19 nt, Homo sapiens
  misc_RNA (1)...(19): siRNA sense strand
caacauagaauuuggcaau

SEQ ID NO: 1367620 - RNA, 19 nt, Homo sapiens
  misc_RNA (1)...(19): siRNA sense strand
gaagagaggcuaugacaac

SEQ ID NO: 1367621 - RNA, 19 nt, Homo sapiens
  misc_RNA (1)...(19): siRNA sense strand
uagcguacauucacaaaga

SEQ ID NO: 1367622 - RNA, 19 nt, Homo sapiens
  misc_RNA (1)...(19): siRNA sense strand
ccagcaggacuuugaauua

SEQ ID NO: 1367623 - RNA, 19 nt, Homo sapiens
  misc_RNA (1)...(19): siRNA sense strand
gaggcacagucaagguuua

SEQ ID NO: 1367624 - RNA, 19 nt, Homo sapiens
  misc_RNA (1)...(19): siRNA sense strand
gaccucagcuuuucuguuu

SEQ ID NO: 1367625 - RNA, 19 nt, Homo sapiens
  misc_RNA (1)...(19): siRNA sense strand
gcaggacuuugaauuagug

SEQ ID NO: 1367626 - RNA, 19 nt, Homo sapiens
  misc_RNA (1)...(19): siRNA sense strand
gggaagcuuugccuccuaa

SEQ ID NO: 1367627 - RNA, 19 nt, Homo sapiens
  misc_RNA (1)...(19): siRNA sense strand
gaaggugcaacauagaauu

SEQ ID NO: 1367628 - RNA, 19 nt, Homo sapiens
  misc_RNA (1)...(19): siRNA sense strand
gcacagucaagguuuauau

SEQ ID NO: 1367629 - RNA, 19 nt, Homo sapiens
  misc_RNA (1)...(19): siRNA sense strand
gauguuagagccaggauga

SEQ ID NO: 1367630 - RNA, 19 nt, Homo sapiens
  misc_RNA (1)...(19): siRNA sense strand
cugcuuaucuuucagucua

SEQ ID NO: 1367631 - RNA, 19 nt, Homo sapiens
  misc_RNA (1)...(19): siRNA sense strand
aaacgugccaagaccauua

SEQ ID NO: 1367632 - RNA, 19 nt, Homo sapiens
  misc_RNA (1)...(19): siRNA sense strand
cagcaggacuuugaauuag

SEQ ID NO: 1367633 - RNA, 19 nt, Homo sapiens
  misc_RNA (1)...(19): siRNA sense strand
uuccauaacuuuagcaaga

SEQ ID NO: 1367634 - RNA, 19 nt, Homo sapiens
  misc_RNA (1)...(19): siRNA sense strand
ucacauuuauggaaagcuu

SEQ ID NO: 1367635 - RNA, 19 nt, Homo sapiens
  misc_RNA (1)...(19): siRNA sense strand
agacaaaggaagggaaaua

SEQ ID NO: 1367636 - RNA, 19 nt, Homo sapiens
  misc_RNA (1)...(19): siRNA sense strand
gcaaagagcaaggcuaguc

SEQ ID NO: 1367637 - RNA, 19 nt, Homo sapiens
  misc_RNA (1)...(19): siRNA sense strand
cauagaauuuggcaaugug

SEQ ID NO: 1367638 - RNA, 19 nt, Homo sapiens
  misc_RNA (1)...(19): siRNA sense strand
gcaguagcguacauucaca

SEQ ID NO: 1367639 - RNA, 19 nt, Homo sapiens
  misc_RNA (1)...(19): siRNA sense strand
gaacgcagugaucagcaaa

SEQ ID NO: 1367640 - RNA, 19 nt, Homo sapiens
  misc_RNA (1)...(19): siRNA sense strand
gaccucaaguggagauaca

SEQ ID NO: 1367641 - RNA, 19 nt, Homo sapiens
  misc_RNA (1)...(19): siRNA sense strand
agaagucaaugaaacagau

SEQ ID NO: 1367642 - RNA, 19 nt, Homo sapiens
  misc_RNA (1)...(19): siRNA sense strand
ugaaggagagaccauuauu

SEQ ID NO: 1367643 - RNA, 19 nt, Homo sapiens
  misc_RNA (1)...(19): siRNA sense strand
caaggcuagucuccaaaga

SEQ ID NO: 1367644 - RNA, 19 nt, Homo sapiens
  misc_RNA (1)...(19): siRNA sense strand
gccaugugccuuuauaaug

SEQ ID NO: 1367645 - RNA, 19 nt, Homo sapiens
  misc_RNA (1)...(19): siRNA sense strand
caagacaaaggaagggaaa

SEQ ID NO: 1367646 - RNA, 19 nt, Homo sapiens
  misc_RNA (1)...(19): siRNA sense strand
ggaggcacagucaagguuu

SEQ ID NO: 1367647 - RNA, 19 nt, Homo sapiens
  misc_RNA (1)...(19): siRNA sense strand
ggaaggugcaacauagaau

SEQ ID NO: 1367648 - RNA, 19 nt, Homo sapiens
  misc_RNA (1)...(19): siRNA sense strand
ucaagugaccauuggauau

SEQ ID NO: 1367649 - RNA, 19 nt, Homo sapiens
  misc_RNA (1)...(19): siRNA sense strand
gcuuaucuuucagucuaua

SEQ ID NO: 1367650 - RNA, 19 nt, Homo sapiens
  misc_RNA (1)...(19): siRNA sense strand
gaucacaacagcccuuucu

SEQ ID NO: 1367651 - RNA, 19 nt, Homo sapiens
  misc_RNA (1)...(19): siRNA sense strand
gauauggauucaggugugu

SEQ ID NO: 1367652 - RNA, 19 nt, Homo sapiens
  misc_RNA (1)...(19): siRNA sense strand
ugucagaagucaaugaaac

SEQ ID NO: 1367653 - RNA, 19 nt, Homo sapiens
  misc_RNA (1)...(19): siRNA sense strand
ccaacuucaucuugucaga

SEQ ID NO: 1367654 - RNA, 19 nt, Homo sapiens
  misc_RNA (1)...(19): siRNA sense strand
ucacaacagcccuuucuuc

SEQ ID NO: 1367655 - RNA, 19 nt, Homo sapiens
  misc_RNA (1)...(19): siRNA sense strand
cuuauuggcagucacauuu

SEQ ID NO: 1367656 - RNA, 19 nt, Homo sapiens
  misc_RNA (1)...(19): siRNA sense strand
caagugaccauuggauaug

SEQ ID NO: 1367657 - RNA, 19 nt, Homo sapiens
  misc_RNA (1)...(19): siRNA sense strand
gccaagaccauuacguuca

SEQ ID NO: 1367658 - RNA, 19 nt, Homo sapiens
  misc_RNA (1)...(19): siRNA sense strand
aggcuagucuccaaagaug

SEQ ID NO: 1367659 - RNA, 19 nt, Homo sapiens
  misc_RNA (1)...(19): siRNA sense strand
ucuuuggucuccuguggua

SEQ ID NO: 1367660 - RNA, 19 nt, Homo sapiens
  misc_RNA (1)...(19): siRNA sense strand
ggaugaagagaggcuauga

SEQ ID NO: 1367661 - RNA, 19 nt, Homo sapiens
  misc_RNA (1)...(19): siRNA sense strand
ccauuacguucagcaagaa

SEQ ID NO: 1367662 - RNA, 19 nt, Homo sapiens
  misc_RNA (1)...(19): siRNA sense strand
ccugaaggagagaccauua

SEQ ID NO: 1367663 - RNA, 19 nt, Homo sapiens
  misc_RNA (1)...(19): siRNA sense strand
agacucaagugaccauugg

SEQ ID NO: 1367664 - RNA, 19 nt, Homo sapiens
  misc_RNA (1)...(19): siRNA sense strand
cagucaagguuuauauucu

SEQ ID NO: 1367665 - RNA, 19 nt, Homo sapiens
  misc_RNA (1)...(19): siRNA sense strand
ucaggugugugacagaaca

SEQ ID NO: 1367666 - RNA, 19 nt, Homo sapiens
  misc_RNA (1)...(19): siRNA sense strand
gguaugcaguagcguacau

SEQ ID NO: 1367667 - RNA, 19 nt, Homo sapiens
  misc_RNA (1)...(19): siRNA sense strand
ugugccaugugccuuuaua

SEQ ID NO: 1367668 - RNA, 19 nt, Homo sapiens
  misc_RNA (1)...(19): siRNA sense strand
uauuggcagucacauuuau

SEQ ID NO: 1367669 - RNA, 19 nt, Homo sapiens
  misc_RNA (1)...(19): siRNA sense strand
ccaagaccauuacguucag

SEQ ID NO: 1367670 - RNA, 19 nt, Homo sapiens
  misc_RNA (1)...(19): siRNA sense strand
gugccaagaccauuacguu

SEQ ID NO: 1367671 - RNA, 19 nt, Homo sapiens
  misc_RNA (1)...(19): siRNA sense strand
gcaaggcuagucuccaaag

SEQ ID NO: 1367672 - RNA, 19 nt, Homo sapiens
  misc_RNA (1)...(19): siRNA sense strand
gaagucaaugaaacagaug

SEQ ID NO: 1367673 - RNA, 19 nt, Homo sapiens
  misc_RNA (1)...(19): siRNA sense strand
caucuugucagaagucaau

SEQ ID NO: 1367674 - RNA, 19 nt, Homo sapiens
  misc_RNA (1)...(19): siRNA sense strand
gagagaccauuauuuugga

SEQ ID NO: 1367675 - RNA, 19 nt, Homo sapiens
  misc_RNA (1)...(19): siRNA sense strand
gagacucaagugaccauug

SEQ ID NO: 1367676 - RNA, 19 nt, Homo sapiens
  misc_RNA (1)...(19): siRNA sense strand
caagaucuccaggcccaaa

SEQ ID NO: 1367677 - RNA, 19 nt, Homo sapiens
  misc_RNA (1)...(19): siRNA sense strand
ggcagucacauuuauggaa

SEQ ID NO: 1367678 - RNA, 19 nt, Homo sapiens
  misc_RNA (1)...(19): siRNA sense strand
accauuacguucagcaaga

SEQ ID NO: 1367679 - RNA, 19 nt, Homo sapiens
  misc_RNA (1)...(19): siRNA sense strand
caacuucaucuugucagaa

SEQ ID NO: 1367680 - RNA, 19 nt, Homo sapiens
  misc_RNA (1)...(19): siRNA sense strand
gaccagaucaauaucaacu

SEQ ID NO: 1367681 - RNA, 19 nt, Homo sapiens
  misc_RNA (1)...(19): siRNA sense strand
uggaccagaucaauaucaa

SEQ ID NO: 1367682 - RNA, 19 nt, Homo sapiens
  misc_RNA (1)...(19): siRNA sense strand
gaagcuuugccuccuaauc

SEQ ID NO: 1367683 - RNA, 19 nt, Homo sapiens
  misc_RNA (1)...(19): siRNA sense strand
gagaauauuaauggcuuga

SEQ ID NO: 1367684 - RNA, 19 nt, Homo sapiens
  misc_RNA (1)...(19): siRNA sense strand
agauggaaggugcaacaua

SEQ ID NO: 1367685 - RNA, 19 nt, Homo sapiens
  misc_RNA (1)...(19): siRNA sense strand
ggugcaacauagaauuugg

SEQ ID NO: 1367686 - RNA, 19 nt, Homo sapiens
  misc_RNA (1)...(19): siRNA sense strand
uggcuaaucucaggaagag

SEQ ID NO: 1367687 - RNA, 19 nt, Homo sapiens
  misc_RNA (1)...(19): siRNA sense strand
aaagauggaaggugcaaca

SEQ ID NO: 1367688 - RNA, 19 nt, Homo sapiens
  misc_RNA (1)...(19): siRNA sense strand
gggaaauaccgaguggauu

SEQ ID NO: 1367689 - RNA, 19 nt, Homo sapiens
  misc_RNA (1)...(19): siRNA sense strand
ggagagaccauuauuuugg

SEQ ID NO: 1367690 - RNA, 19 nt, Homo sapiens
  misc_RNA (1)...(19): siRNA sense strand
agaacgcagugaucagcaa

SEQ ID NO: 1367691 - RNA, 19 nt, Homo sapiens
  misc_RNA (1)...(19): siRNA sense strand
gugccuuuauaaugagaaa

SEQ ID NO: 1367692 - RNA, 19 nt, Homo sapiens
  misc_RNA (1)...(19): siRNA sense strand
guuagagccaggaugaaga

SEQ ID NO: 1367693 - RNA, 19 nt, Homo sapiens
  misc_RNA (1)...(19): siRNA sense strand
cagucuauacuuggaguua

SEQ ID NO: 1367694 - RNA, 19 nt, Homo sapiens
  misc_RNA (1)...(19): siRNA sense strand
ccauaacuuuagcaagaca

SEQ ID NO: 1367695 - RNA, 19 nt, Homo sapiens
  misc_RNA (1)...(19): siRNA sense strand
ggauuuccauaacuuuagc

SEQ ID NO: 1367696 - RNA, 19 nt, Homo sapiens
  misc_RNA (1)...(19): siRNA sense strand
gacaaaggaagggaaauac

SEQ ID NO: 1367697 - RNA, 19 nt, Homo sapiens
  misc_RNA (1)...(19): siRNA sense strand
cccauaguauccaagacaa

SEQ ID NO: 1367698 - RNA, 19 nt, Homo sapiens
  misc_RNA (1)...(19): siRNA sense strand
uuauuggcagucacauuua

SEQ ID NO: 1367699 - RNA, 19 nt, Homo sapiens
  misc_RNA (1)...(19): siRNA sense strand
gcaagaacgcagugaucag

SEQ ID NO: 1367700 - RNA, 19 nt, Homo sapiens
  misc_RNA (1)...(19): siRNA sense strand
cagcaagaacgcagugauc

SEQ ID NO: 1367701 - RNA, 19 nt, Homo sapiens
  misc_RNA (1)...(19): siRNA sense strand
caaagagcaaggcuagucu

SEQ ID NO: 1367702 - RNA, 19 nt, Homo sapiens
  misc_RNA (1)...(19): siRNA sense strand
aaggagagaccauuauuuu

SEQ ID NO: 1367703 - RNA, 19 nt, Homo sapiens
  misc_RNA (1)...(19): siRNA sense strand
aaggugcaacauagaauuu

SEQ ID NO: 1367704 - RNA, 19 nt, Homo sapiens
  misc_RNA (1)...(19): siRNA sense strand
acagucaagguuuauauuc

SEQ ID NO: 1367705 - RNA, 19 nt, Homo sapiens
  misc_RNA (1)...(19): siRNA sense strand
cagaugacaccaaaaugua

SEQ ID NO: 1367706 - RNA, 19 nt, Homo sapiens
  misc_RNA (1)...(19): siRNA sense strand
cacagucaagguuuauauu

SEQ ID NO: 1367707 - RNA, 19 nt, Homo sapiens
  misc_RNA (1)...(19): siRNA sense strand
aaacagaugacaccaaaau

SEQ ID NO: 1367708 - RNA, 19 nt, Homo sapiens
  misc_RNA (1)...(19): siRNA sense strand
gccaaguccggacauccua

SEQ ID NO: 1367709 - RNA, 19 nt, Homo sapiens
  misc_RNA (1)...(19): siRNA sense strand
cagaagucaaugaaacaga

SEQ ID NO: 1367710 - RNA, 19 nt, Homo sapiens
  misc_RNA (1)...(19): siRNA sense strand
ugaaacagaugacaccaaa

SEQ ID NO: 1367711 - RNA, 19 nt, Homo sapiens
  misc_RNA (1)...(19): siRNA sense strand
gagcaaggcuagucuccaa

SEQ ID NO: 1367712 - RNA, 19 nt, Homo sapiens
  misc_RNA (1)...(19): siRNA sense strand
gcagucacauuuauggaaa

SEQ ID NO: 1367713 - RNA, 19 nt, Homo sapiens
  misc_RNA (1)...(19): siRNA sense strand
gauggaaggugcaacauag

SEQ ID NO: 1367714 - RNA, 19 nt, Homo sapiens
  misc_RNA (1)...(19): siRNA sense strand
ccaugugccuuuauaauga

SEQ ID NO: 1367715 - RNA, 19 nt, Homo sapiens
  misc_RNA (1)...(19): siRNA sense strand
gaaggagagaccauuauuu

SEQ ID NO: 1367716 - RNA, 19 nt, Homo sapiens
  misc_RNA (1)...(19): siRNA sense strand
ccagaucaauaucaacuuu

SEQ ID NO: 1367717 - RNA, 19 nt, Homo sapiens
  misc_RNA (1)...(19): siRNA sense strand
guucaaacaucuucggaaa

SEQ ID NO: 1367718 - RNA, 19 nt, Homo sapiens
  misc_RNA (1)...(19): siRNA sense strand
ucaaacaucuucggaaaug

SEQ ID NO: 1367719 - RNA, 19 nt, Homo sapiens
  misc_RNA (1)...(19): siRNA sense strand
caacauagaauuuggcaau

SEQ ID NO: 1367720 - RNA, 19 nt, Homo sapiens
  misc_RNA (1)...(19): siRNA sense strand
gaagagaggcuaugacaac

SEQ ID NO: 1367721 - RNA, 19 nt, Homo sapiens
  misc_RNA (1)...(19): siRNA sense strand
uagcguacauucacaaaga

SEQ ID NO: 1367722 - RNA, 19 nt, Homo sapiens
  misc_RNA (1)...(19): siRNA sense strand
ccagcaggacuuugaauua

SEQ ID NO: 1367723 - RNA, 19 nt, Homo sapiens
  misc_RNA (1)...(19): siRNA sense strand
gaggcacagucaagguuua

SEQ ID NO: 1367724 - RNA, 19 nt, Homo sapiens
  misc_RNA (1)...(19): siRNA sense strand
gaccucagcuuuucuguuu

SEQ ID NO: 1367725 - RNA, 19 nt, Homo sapiens
  misc_RNA (1)...(19): siRNA sense strand
gcaggacuuugaauuagug

SEQ ID NO: 1367726 - RNA, 19 nt, Homo sapiens
  misc_RNA (1)...(19): siRNA sense strand
gggaagcuuugccuccuaa

SEQ ID NO: 1367727 - RNA, 19 nt, Homo sapiens
  misc_RNA (1)...(19): siRNA sense strand
gaaggugcaacauagaauu

SEQ ID NO: 1367728 - RNA, 19 nt, Homo sapiens
  misc_RNA (1)...(19): siRNA sense strand
gcacagucaagguuuauau

SEQ ID NO: 1367729 - RNA, 19 nt, Homo sapiens
  misc_RNA (1)...(19): siRNA sense strand
gauguuagagccaggauga

SEQ ID NO: 1367730 - RNA, 19 nt, Homo sapiens
  misc_RNA (1)...(19): siRNA sense strand
cugcuuaucuuucagucua

SEQ ID NO: 1367731 - RNA, 19 nt, Homo sapiens
  misc_RNA (1)...(19): siRNA sense strand
aaacgugccaagaccauua

SEQ ID NO: 1367732 - RNA, 19 nt, Homo sapiens
  misc_RNA (1)...(19): siRNA sense strand
cagcaggacuuugaauuag

SEQ ID NO: 1367733 - RNA, 19 nt, Homo sapiens
  misc_RNA (1)...(19): siRNA sense strand
uuccauaacuuuagcaaga

SEQ ID NO: 1367734 - RNA, 19 nt, Homo sapiens
  misc_RNA (1)...(19): siRNA sense strand
ucacauuuauggaaagcuu

SEQ ID NO: 1367735 - RNA, 19 nt, Homo sapiens
  misc_RNA (1)...(19): siRNA sense strand
agacaaaggaagggaaaua

SEQ ID NO: 1367736 - RNA, 19 nt, Homo sapiens
  misc_RNA (1)...(19): siRNA sense strand
gcaaagagcaaggcuaguc

SEQ ID NO: 1367737 - RNA, 19 nt, Homo sapiens
  misc_RNA (1)...(19): siRNA sense strand
cauagaauuuggcaaugug

SEQ ID NO: 1367738 - RNA, 19 nt, Homo sapiens
  misc_RNA (1)...(19): siRNA sense strand
gcaguagcguacauucaca

SEQ ID NO: 1367739 - RNA, 19 nt, Homo sapiens
  misc_RNA (1)...(19): siRNA sense strand
gaacgcagugaucagcaaa

SEQ ID NO: 1367740 - RNA, 19 nt, Homo sapiens
  misc_RNA (1)...(19): siRNA sense strand
gaccucaaguggagauaca

SEQ ID NO: 1367741 - RNA, 19 nt, Homo sapiens
  misc_RNA (1)...(19): siRNA sense strand
agaagucaaugaaacagau

SEQ ID NO: 1367742 - RNA, 19 nt, Homo sapiens
  misc_RNA (1)...(19): siRNA sense strand
ugaaggagagaccauuauu

SEQ ID NO: 1367743 - RNA, 19 nt, Homo sapiens
  misc_RNA (1)...(19): siRNA sense strand
caaggcuagucuccaaaga

SEQ ID NO: 1367744 - RNA, 19 nt, Homo sapiens
  misc_RNA (1)...(19): siRNA sense strand
gccaugugccuuuauaaug

SEQ ID NO: 1367745 - RNA, 19 nt, Homo sapiens
  misc_RNA (1)...(19): siRNA sense strand
caagacaaaggaagggaaa

SEQ ID NO: 1367746 - RNA, 19 nt, Homo sapiens
  misc_RNA (1)...(19): siRNA sense strand
ggaggcacagucaagguuu

SEQ ID NO: 1367747 - RNA, 19 nt, Homo sapiens
  misc_RNA (1)...(19): siRNA sense strand
ggaaggugcaacauagaau

SEQ ID NO: 1367748 - RNA, 19 nt, Homo sapiens
  misc_RNA (1)...(19): siRNA sense strand
ucaagugaccauuggauau

SEQ ID NO: 1367749 - RNA, 19 nt, Homo sapiens
  misc_RNA (1)...(19): siRNA sense strand
gcuuaucuuucagucuaua

SEQ ID NO: 1367750 - RNA, 19 nt, Homo sapiens
  misc_RNA (1)...(19): siRNA sense strand
gaucacaacagcccuuucu

SEQ ID NO: 1367751 - RNA, 19 nt, Homo sapiens
  misc_RNA (1)...(19): siRNA sense strand
gauauggauucaggugugu

SEQ ID NO: 1367752 - RNA, 19 nt, Homo sapiens
  misc_RNA (1)...(19): siRNA sense strand
ugucagaagucaaugaaac

SEQ ID NO: 1367753 - RNA, 19 nt, Homo sapiens
  misc_RNA (1)...(19): siRNA sense strand
ccaacuucaucuugucaga

SEQ ID NO: 1367754 - RNA, 19 nt, Homo sapiens
  misc_RNA (1)...(19): siRNA sense strand
ucacaacagcccuuucuuc

SEQ ID NO: 1367755 - RNA, 19 nt, Homo sapiens
  misc_RNA (1)...(19): siRNA sense strand
cuuauuggcagucacauuu

SEQ ID NO: 1367756 - RNA, 19 nt, Homo sapiens
  misc_RNA (1)...(19): siRNA sense strand
caagugaccauuggauaug

SEQ ID NO: 1367757 - RNA, 19 nt, Homo sapiens
  misc_RNA (1)...(19): siRNA sense strand
gccaagaccauuacguuca

SEQ ID NO: 1367758 - RNA, 19 nt, Homo sapiens
  misc_RNA (1)...(19): siRNA sense strand
aggcuagucuccaaagaug

SEQ ID NO: 1367759 - RNA, 19 nt, Homo sapiens
  misc_RNA (1)...(19): siRNA sense strand
ucuuuggucuccuguggua

SEQ ID NO: 1367760 - RNA, 19 nt, Homo sapiens
  misc_RNA (1)...(19): siRNA sense strand
ggaugaagagaggcuauga

SEQ ID NO: 1367761 - RNA, 19 nt, Homo sapiens
  misc_RNA (1)...(19): siRNA sense strand
ccauuacguucagcaagaa

SEQ ID NO: 1367762 - RNA, 19 nt, Homo sapiens
  misc_RNA (1)...(19): siRNA sense strand
ccugaaggagagaccauua

SEQ ID NO: 1367763 - RNA, 19 nt, Homo sapiens
  misc_RNA (1)...(19): siRNA sense strand
agacucaagugaccauugg

SEQ ID NO: 1367764 - RNA, 19 nt, Homo sapiens
  misc_RNA (1)...(19): siRNA sense strand
cagucaagguuuauauucu

SEQ ID NO: 1367765 - RNA, 19 nt, Homo sapiens
  misc_RNA (1)...(19): siRNA sense strand
ucaggugugugacagaaca

SEQ ID NO: 1367766 - RNA, 19 nt, Homo sapiens
  misc_RNA (1)...(19): siRNA sense strand
gguaugcaguagcguacau

SEQ ID NO: 1367767 - RNA, 19 nt, Homo sapiens
  misc_RNA (1)...(19): siRNA sense strand
ugugccaugugccuuuaua

SEQ ID NO: 1367768 - RNA, 19 nt, Homo sapiens
  misc_RNA (1)...(19): siRNA sense strand
uauuggcagucacauuuau

SEQ ID NO: 1367769 - RNA, 19 nt, Homo sapiens
  misc_RNA (1)...(19): siRNA sense strand
ccaagaccauuacguucag

SEQ ID NO: 1367770 - RNA, 19 nt, Homo sapiens
  misc_RNA (1)...(19): siRNA sense strand
gugccaagaccauuacguu

SEQ ID NO: 1367771 - RNA, 19 nt, Homo sapiens
  misc_RNA (1)...(19): siRNA sense strand
gcaaggcuagucuccaaag

SEQ ID NO: 1367772 - RNA, 19 nt, Homo sapiens
  misc_RNA (1)...(19): siRNA sense strand
gaagucaaugaaacagaug

SEQ ID NO: 1367773 - RNA, 19 nt, Homo sapiens
  misc_RNA (1)...(19): siRNA sense strand
caucuugucagaagucaau

SEQ ID NO: 1367774 - RNA, 19 nt, Homo sapiens
  misc_RNA (1)...(19): siRNA sense strand
gagagaccauuauuuugga

SEQ ID NO: 1367775 - RNA, 19 nt, Homo sapiens
  misc_RNA (1)...(19): siRNA sense strand
gagacucaagugaccauug

SEQ ID NO: 1367776 - RNA, 19 nt, Homo sapiens
  misc_RNA (1)...(19): siRNA sense strand
caagaucuccaggcccaaa

SEQ ID NO: 1367777 - RNA, 19 nt, Homo sapiens
  misc_RNA (1)...(19): siRNA sense strand
ggcagucacauuuauggaa

SEQ ID NO: 1367778 - RNA, 19 nt, Homo sapiens
  misc_RNA (1)...(19): siRNA sense strand
accauuacguucagcaaga

SEQ ID NO: 1367779 - RNA, 19 nt, Homo sapiens
  misc_RNA (1)...(19): siRNA sense strand
caacuucaucuugucagaa

SEQ ID NO: 1367780 - RNA, 19 nt, Homo sapiens
  misc_RNA (1)...(19): siRNA sense strand
gaccagaucaauaucaacu

SEQ ID NO: 1367781 - RNA, 19 nt, Homo sapiens
  misc_RNA (1)...(19): siRNA sense strand
uggaccagaucaauaucaa

SEQ ID NO: 1367782 - RNA, 19 nt, Homo sapiens
  misc_RNA (1)...(19): siRNA sense strand
gaagcuuugccuccuaauc

SEQ ID NO: 1367783 - RNA, 19 nt, Homo sapiens
  misc_RNA (1)...(19): siRNA sense strand
gagaauauuaauggcuuga

SEQ ID NO: 1367784 - RNA, 19 nt, Homo sapiens
  misc_RNA (1)...(19): siRNA sense strand
agauggaaggugcaacaua

SEQ ID NO: 1367785 - RNA, 19 nt, Homo sapiens
  misc_RNA (1)...(19): siRNA sense strand
ggugcaacauagaauuugg

SEQ ID NO: 1367786 - RNA, 19 nt, Homo sapiens
  misc_RNA (1)...(19): siRNA sense strand
uggcuaaucucaggaagag

SEQ ID NO: 1367787 - RNA, 19 nt, Homo sapiens
  misc_RNA (1)...(19): siRNA sense strand
aaagauggaaggugcaaca

SEQ ID NO: 1367788 - RNA, 19 nt, Homo sapiens
  misc_RNA (1)...(19): siRNA sense strand
gggaaauaccgaguggauu

SEQ ID NO: 1367789 - RNA, 19 nt, Homo sapiens
  misc_RNA (1)...(19): siRNA sense strand
ggagagaccauuauuuugg

SEQ ID NO: 1367790 - RNA, 19 nt, Homo sapiens
  misc_RNA (1)...(19): siRNA sense strand
agaacgcagugaucagcaa

SEQ ID NO: 1367791 - RNA, 19 nt, Homo sapiens
  misc_RNA (1)...(19): siRNA sense strand
gugccuuuauaaugagaaa

SEQ ID NO: 1367792 - RNA, 19 nt, Homo sapiens
  misc_RNA (1)...(19): siRNA sense strand
guuagagccaggaugaaga

SEQ ID NO: 1367793 - RNA, 19 nt, Homo sapiens
  misc_RNA (1)...(19): siRNA sense strand
cagucuauacuuggaguua

SEQ ID NO: 1367794 - RNA, 19 nt, Homo sapiens
  misc_RNA (1)...(19): siRNA sense strand
ccauaacuuuagcaagaca

SEQ ID NO: 1367795 - RNA, 19 nt, Homo sapiens
  misc_RNA (1)...(19): siRNA sense strand
ggauuuccauaacuuuagc

SEQ ID NO: 1367796 - RNA, 19 nt, Homo sapiens
  misc_RNA (1)...(19): siRNA sense strand
gacaaaggaagggaaauac

SEQ ID NO: 1367797 - RNA, 19 nt, Homo sapiens
  misc_RNA (1)...(19): siRNA sense strand
cccauaguauccaagacaa

SEQ ID NO: 1367798 - RNA, 19 nt, Homo sapiens
  misc_RNA (1)...(19): siRNA sense strand
uuauuggcagucacauuua

SEQ ID NO: 1367799 - RNA, 19 nt, Homo sapiens
  misc_RNA (1)...(19): siRNA sense strand
gcaagaacgcagugaucag

SEQ ID NO: 1367800 - RNA, 19 nt, Homo sapiens
  misc_RNA (1)...(19): siRNA sense strand
cagcaagaacgcagugauc

SEQ ID NO: 1367801 - RNA, 19 nt, Homo sapiens
  misc_RNA (1)...(19): siRNA sense strand
caaagagcaaggcuagucu

SEQ ID NO: 1367802 - RNA, 19 nt, Homo sapiens
  misc_RNA (1)...(19): siRNA sense strand
aaggagagaccauuauuuu

SEQ ID NO: 1367803 - RNA, 19 nt, Homo sapiens
  misc_RNA (1)...(19): siRNA sense strand
aaggugcaacauagaauuu

SEQ ID NO: 1367804 - RNA, 19 nt, Homo sapiens
  misc_RNA (1)...(19): siRNA sense strand
acagucaagguuuauauuc

SEQ ID NO: 1367805 - RNA, 19 nt, Homo sapiens
  misc_RNA (1)...(19): siRNA sense strand
cagaugacaccaaaaugua

SEQ ID NO: 1367806 - RNA, 19 nt, Homo sapiens
  misc_RNA (1)...(19): siRNA sense strand
cacagucaagguuuauauu

SEQ ID NO: 1367807 - RNA, 19 nt, Homo sapiens
  misc_RNA (1)...(19): siRNA sense strand
aaacagaugacaccaaaau

SEQ ID NO: 1367808 - RNA, 19 nt, Homo sapiens
  misc_RNA (1)...(19): siRNA sense strand
gccaaguccggacauccua

SEQ ID NO: 1367809 - RNA, 19 nt, Homo sapiens
  misc_RNA (1)...(19): siRNA sense strand
cagaagucaaugaaacaga

SEQ ID NO: 1367810 - RNA, 19 nt, Homo sapiens
  misc_RNA (1)...(19): siRNA sense strand
ugaaacagaugacaccaaa

SEQ ID NO: 1367811 - RNA, 19 nt, Homo sapiens
  misc_RNA (1)...(19): siRNA sense strand
gagcaaggcuagucuccaa

SEQ ID NO: 1367812 - RNA, 19 nt, Homo sapiens
  misc_RNA (1)...(19): siRNA sense strand
gcagucacauuuauggaaa

SEQ ID NO: 1367813 - RNA, 19 nt, Homo sapiens
  misc_RNA (1)...(19): siRNA sense strand
gauggaaggugcaacauag

SEQ ID NO: 1367814 - RNA, 19 nt, Homo sapiens
  misc_RNA (1)...(19): siRNA sense strand
ccaugugccuuuauaauga

SEQ ID NO: 1367815 - RNA, 19 nt, Homo sapiens
  misc_RNA (1)...(19): siRNA sense strand
gaaggagagaccauuauuu

SEQ ID NO: 1367816 - RNA, 19 nt, Homo sapiens
  misc_RNA (1)...(19): siRNA sense strand
ccagaucaauaucaacuuu

SEQ ID NO: 1367817 - RNA, 19 nt, Homo sapiens
  misc_RNA (1)...(19): siRNA sense strand
guucaaacaucuucggaaa

SEQ ID NO: 1367818 - RNA, 19 nt, Homo sapiens
  misc_RNA (1)...(19): siRNA sense strand
ucaaacaucuucggaaaug

SEQ ID NO: 1367819 - RNA, 19 nt, Homo sapiens
  misc_RNA (1)...(19): siRNA sense strand
caacauagaauuuggcaau

SEQ ID NO: 1367820 - RNA, 19 nt, Homo sapiens
  misc_RNA (1)...(19): siRNA sense strand
gaagagaggcuaugacaac

SEQ ID NO: 1367821 - RNA, 19 nt, Homo sapiens
  misc_RNA (1)...(19): siRNA sense strand
uagcguacauucacaaaga

SEQ ID NO: 1367822 - RNA, 19 nt, Homo sapiens
  misc_RNA (1)...(19): siRNA sense strand
ccagcaggacuuugaauua

SEQ ID NO: 1367823 - RNA, 19 nt, Homo sapiens
  misc_RNA (1)...(19): siRNA sense strand
gaggcacagucaagguuua

SEQ ID NO: 1367824 - RNA, 19 nt, Homo sapiens
  misc_RNA (1)...(19): siRNA sense strand
gaccucagcuuuucuguuu

SEQ ID NO: 1367825 - RNA, 19 nt, Homo sapiens
  misc_RNA (1)...(19): siRNA sense strand
gcaggacuuugaauuagug

SEQ ID NO: 1367826 - RNA, 19 nt, Homo sapiens
  misc_RNA (1)...(19): siRNA sense strand
gggaagcuuugccuccuaa

SEQ ID NO: 1367827 - RNA, 19 nt, Homo sapiens
  misc_RNA (1)...(19): siRNA sense strand
gaaggugcaacauagaauu

SEQ ID NO: 1367828 - RNA, 19 nt, Homo sapiens
  misc_RNA (1)...(19): siRNA sense strand
gcacagucaagguuuauau

SEQ ID NO: 1367829 - RNA, 19 nt, Homo sapiens
  misc_RNA (1)...(19): siRNA sense strand
gacagaaaguauguucaaa

SEQ ID NO: 1367830 - RNA, 19 nt, Homo sapiens
  misc_RNA (1)...(19): siRNA sense strand
gauguuagagccaggauga

SEQ ID NO: 1367831 - RNA, 19 nt, Homo sapiens
  misc_RNA (1)...(19): siRNA sense strand
cugcuuaucuuucagucua

SEQ ID NO: 1367832 - RNA, 19 nt, Homo sapiens
  misc_RNA (1)...(19): siRNA sense strand
aaacgugccaagaccauua

SEQ ID NO: 1367833 - RNA, 19 nt, Homo sapiens
  misc_RNA (1)...(19): siRNA sense strand
cagcaggacuuugaauuag

SEQ ID NO: 1367834 - RNA, 19 nt, Homo sapiens
  misc_RNA (1)...(19): siRNA sense strand
uuccauaacuuuagcaaga

SEQ ID NO: 1367835 - RNA, 19 nt, Homo sapiens
  misc_RNA (1)...(19): siRNA sense strand
gcaaagagcaaggcuaguc

SEQ ID NO: 1367836 - RNA, 19 nt, Homo sapiens
  misc_RNA (1)...(19): siRNA sense strand
agacaaaggaagggaaaua

SEQ ID NO: 1367837 - RNA, 19 nt, Homo sapiens
  misc_RNA (1)...(19): siRNA sense strand
ucacauuuauggaaagcuu

SEQ ID NO: 1367838 - RNA, 19 nt, Homo sapiens
  misc_RNA (1)...(19): siRNA sense strand
cauagaauuuggcaaugug

SEQ ID NO: 1367839 - RNA, 19 nt, Homo sapiens
  misc_RNA (1)...(19): siRNA sense strand
gcaguagcguacauucaca

SEQ ID NO: 1367840 - RNA, 19 nt, Homo sapiens
  misc_RNA (1)...(19): siRNA sense strand
gaacgcagugaucagcaaa

SEQ ID NO: 1367841 - RNA, 19 nt, Homo sapiens
  misc_RNA (1)...(19): siRNA sense strand
ugacagaaaguauguucaa

SEQ ID NO: 1367842 - RNA, 19 nt, Homo sapiens
  misc_RNA (1)...(19): siRNA sense strand
agaagucaaugaaacagau

SEQ ID NO: 1367843 - RNA, 19 nt, Homo sapiens
  misc_RNA (1)...(19): siRNA sense strand
ugaaggagagaccauuauu

SEQ ID NO: 1367844 - RNA, 19 nt, Homo sapiens
  misc_RNA (1)...(19): siRNA sense strand
gaccucaaguggagauaca

SEQ ID NO: 1367845 - RNA, 19 nt, Homo sapiens
  misc_RNA (1)...(19): siRNA sense strand
caagacaaaggaagggaaa

SEQ ID NO: 1367846 - RNA, 19 nt, Homo sapiens
  misc_RNA (1)...(19): siRNA sense strand
caaggcuagucuccaaaga

SEQ ID NO: 1367847 - RNA, 19 nt, Homo sapiens
  misc_RNA (1)...(19): siRNA sense strand
gccaugugccuuuauaaug

SEQ ID NO: 1367848 - RNA, 19 nt, Homo sapiens
  misc_RNA (1)...(19): siRNA sense strand
ggaaggugcaacauagaau

SEQ ID NO: 1367849 - RNA, 19 nt, Homo sapiens
  misc_RNA (1)...(19): siRNA sense strand
ucaagugaccauuggauau

SEQ ID NO: 1367850 - RNA, 19 nt, Homo sapiens
  misc_RNA (1)...(19): siRNA sense strand
ggaggcacagucaagguuu

SEQ ID NO: 1367851 - RNA, 19 nt, Homo sapiens
  misc_RNA (1)...(19): siRNA sense strand
gcuuaucuuucagucuaua

SEQ ID NO: 1367852 - RNA, 19 nt, Homo sapiens
  misc_RNA (1)...(19): siRNA sense strand
gaucacaacagcccuuucu

SEQ ID NO: 1367853 - RNA, 19 nt, Homo sapiens
  misc_RNA (1)...(19): siRNA sense strand
gauauggauucaggugugu

SEQ ID NO: 1367854 - RNA, 19 nt, Homo sapiens
  misc_RNA (1)...(19): siRNA sense strand
ugucagaagucaaugaaac

SEQ ID NO: 1367855 - RNA, 19 nt, Homo sapiens
  misc_RNA (1)...(19): siRNA sense strand
ccaacuucaucuugucaga

SEQ ID NO: 1367856 - RNA, 19 nt, Homo sapiens
  misc_RNA (1)...(19): siRNA sense strand
ucacaacagcccuuucuuc

SEQ ID NO: 1367857 - RNA, 19 nt, Homo sapiens
  misc_RNA (1)...(19): siRNA sense strand
cuuauuggcagucacauuu

SEQ ID NO: 1367858 - RNA, 19 nt, Homo sapiens
  misc_RNA (1)...(19): siRNA sense strand
caagugaccauuggauaug

SEQ ID NO: 1367859 - RNA, 19 nt, Homo sapiens
  misc_RNA (1)...(19): siRNA sense strand
aggcuagucuccaaagaug

SEQ ID NO: 1367860 - RNA, 19 nt, Homo sapiens
  misc_RNA (1)...(19): siRNA sense strand
gccaagaccauuacguuca

SEQ ID NO: 1367861 - RNA, 19 nt, Homo sapiens
  misc_RNA (1)...(19): siRNA sense strand
ucuuuggucuccuguggua

SEQ ID NO: 1367862 - RNA, 19 nt, Homo sapiens
  misc_RNA (1)...(19): siRNA sense strand
ggaugaagagaggcuauga

SEQ ID NO: 1367863 - RNA, 19 nt, Homo sapiens
  misc_RNA (1)...(19): siRNA sense strand
ccauuacguucagcaagaa

SEQ ID NO: 1367864 - RNA, 19 nt, Homo sapiens
  misc_RNA (1)...(19): siRNA sense strand
ccugaaggagagaccauua

SEQ ID NO: 1367865 - RNA, 19 nt, Homo sapiens
  misc_RNA (1)...(19): siRNA sense strand
cagucaagguuuauauucu

SEQ ID NO: 1367866 - RNA, 19 nt, Homo sapiens
  misc_RNA (1)...(19): siRNA sense strand
ucaggugugugacagaaca

SEQ ID NO: 1367867 - RNA, 19 nt, Homo sapiens
  misc_RNA (1)...(19): siRNA sense strand
agacucaagugaccauugg

SEQ ID NO: 1367868 - RNA, 19 nt, Homo sapiens
  misc_RNA (1)...(19): siRNA sense strand
gguaugcaguagcguacau

SEQ ID NO: 1367869 - RNA, 19 nt, Homo sapiens
  misc_RNA (1)...(19): siRNA sense strand
ugugccaugugccuuuaua

SEQ ID NO: 1367870 - RNA, 19 nt, Homo sapiens
  misc_RNA (1)...(19): siRNA sense strand
uauuggcagucacauuuau

SEQ ID NO: 1367871 - RNA, 19 nt, Homo sapiens
  misc_RNA (1)...(19): siRNA sense strand
ccaagaccauuacguucag

SEQ ID NO: 1367872 - RNA, 19 nt, Homo sapiens
  misc_RNA (1)...(19): siRNA sense strand
gugccaagaccauuacguu

SEQ ID NO: 1367873 - RNA, 19 nt, Homo sapiens
  misc_RNA (1)...(19): siRNA sense strand
gagacucaagugaccauug

SEQ ID NO: 1367874 - RNA, 19 nt, Homo sapiens
  misc_RNA (1)...(19): siRNA sense strand
gaagucaaugaaacagaug

SEQ ID NO: 1367875 - RNA, 19 nt, Homo sapiens
  misc_RNA (1)...(19): siRNA sense strand
caucuugucagaagucaau

SEQ ID NO: 1367876 - RNA, 19 nt, Homo sapiens
  misc_RNA (1)...(19): siRNA sense strand
gagagaccauuauuuugga

SEQ ID NO: 1367877 - RNA, 19 nt, Homo sapiens
  misc_RNA (1)...(19): siRNA sense strand
gcaaggcuagucuccaaag

SEQ ID NO: 1367878 - RNA, 19 nt, Homo sapiens
  misc_RNA (1)...(19): siRNA sense strand
caagaucuccaggcccaaa

SEQ ID NO: 1367879 - RNA, 19 nt, Homo sapiens
  misc_RNA (1)...(19): siRNA sense strand
ggcagucacauuuauggaa

SEQ ID NO: 1367880 - RNA, 19 nt, Homo sapiens
  misc_RNA (1)...(19): siRNA sense strand
accauuacguucagcaaga

SEQ ID NO: 1367881 - RNA, 19 nt, Homo sapiens
  misc_RNA (1)...(19): siRNA sense strand
gaucaggguguugacagaa

SEQ ID NO: 1367882 - RNA, 19 nt, Homo sapiens
  misc_RNA (1)...(19): siRNA sense strand
caacuucaucuugucagaa

SEQ ID NO: 1367883 - RNA, 19 nt, Homo sapiens
  misc_RNA (1)...(19): siRNA sense strand
gaccagaucaauaucaacu

SEQ ID NO: 1367884 - RNA, 19 nt, Homo sapiens
  misc_RNA (1)...(19): siRNA sense strand
uggaccagaucaauaucaa

SEQ ID NO: 1367885 - RNA, 19 nt, Homo sapiens
  misc_RNA (1)...(19): siRNA sense strand
gaagcuuugccuccuaauc

SEQ ID NO: 1367886 - RNA, 19 nt, Homo sapiens
  misc_RNA (1)...(19): siRNA sense strand
gagaauauuaauggcuuga

SEQ ID NO: 1367887 - RNA, 19 nt, Homo sapiens
  misc_RNA (1)...(19): siRNA sense strand
agauggaaggugcaacaua

SEQ ID NO: 1367888 - RNA, 19 nt, Homo sapiens
  misc_RNA (1)...(19): siRNA sense strand
ggugcaacauagaauuugg

SEQ ID NO: 1367889 - RNA, 19 nt, Homo sapiens
  misc_RNA (1)...(19): siRNA sense strand
uggcuaaucucaggaagag

SEQ ID NO: 1367890 - RNA, 19 nt, Homo sapiens
  misc_RNA (1)...(19): siRNA sense strand
agaacgcagugaucagcaa

SEQ ID NO: 1367891 - RNA, 19 nt, Homo sapiens
  misc_RNA (1)...(19): siRNA sense strand
aaagauggaaggugcaaca

SEQ ID NO: 1367892 - RNA, 19 nt, Homo sapiens
  misc_RNA (1)...(19): siRNA sense strand
gggaaauaccgaguggauu

SEQ ID NO: 1367893 - RNA, 19 nt, Homo sapiens
  misc_RNA (1)...(19): siRNA sense strand
ggagagaccauuauuuugg

SEQ ID NO: 1367894 - RNA, 19 nt, Homo sapiens
  misc_RNA (1)...(19): siRNA sense strand
gugccuuuauaaugagaaa

SEQ ID NO: 1367895 - RNA, 19 nt, Homo sapiens
  misc_RNA (1)...(19): siRNA sense strand
guuagagccaggaugaaga

SEQ ID NO: 1367896 - RNA, 19 nt, Homo sapiens
  misc_RNA (1)...(19): siRNA sense strand
cagucuauacuuggaguua

SEQ ID NO: 1367897 - RNA, 19 nt, Homo sapiens
  misc_RNA (1)...(19): siRNA sense strand
ccauaacuuuagcaagaca

SEQ ID NO: 1367898 - RNA, 19 nt, Homo sapiens
  misc_RNA (1)...(19): siRNA sense strand
ggauuuccauaacuuuagc

SEQ ID NO: 1367899 - RNA, 19 nt, Homo sapiens
  misc_RNA (1)...(19): siRNA sense strand
gacaaaggaagggaaauac

SEQ ID NO: 1367900 - RNA, 19 nt, Homo sapiens
  misc_RNA (1)...(19): siRNA sense strand
cccauaguauccaagacaa

SEQ ID NO: 1367901 - RNA, 19 nt, Homo sapiens
  misc_RNA (1)...(19): siRNA sense strand
uuauuggcagucacauuua

SEQ ID NO: 1367902 - RNA, 19 nt, Homo sapiens
  misc_RNA (1)...(19): siRNA sense strand
gcaagaacgcagugaucag

SEQ ID NO: 1367903 - RNA, 19 nt, Homo sapiens
  misc_RNA (1)...(19): siRNA sense strand
cagcaagaacgcagugauc

SEQ ID NO: 1367904 - RNA, 19 nt, Homo sapiens
  misc_RNA (1)...(19): siRNA sense strand
caaagagcaaggcuagucu

SEQ ID NO: 1367905 - RNA, 19 nt, Homo sapiens
  misc_RNA (1)...(19): siRNA sense strand
aaggugcaacauagaauuu

SEQ ID NO: 1367906 - RNA, 19 nt, Homo sapiens
  misc_RNA (1)...(19): siRNA sense strand
aaggagagaccauuauuuu

SEQ ID NO: 1367907 - RNA, 19 nt, Homo sapiens
  misc_RNA (1)...(19): siRNA sense strand
gguguugacagaaaguaug

SEQ ID NO: 1367908 - RNA, 19 nt, Homo sapiens
  misc_RNA (1)...(19): siRNA sense strand
acagucaagguuuauauuc

SEQ ID NO: 1367909 - RNA, 19 nt, Homo sapiens
  misc_RNA (1)...(19): siRNA sense strand
cagaugacaccaaaaugua

SEQ ID NO: 1367910 - RNA, 19 nt, Homo sapiens
  misc_RNA (1)...(19): siRNA sense strand
ugaaacagaugacaccaaa

SEQ ID NO: 1367911 - RNA, 19 nt, Homo sapiens
  misc_RNA (1)...(19): siRNA sense strand
gagcaaggcuagucuccaa

SEQ ID NO: 1367912 - RNA, 19 nt, Homo sapiens
  misc_RNA (1)...(19): siRNA sense strand
gcagucacauuuauggaaa

SEQ ID NO: 1367913 - RNA, 19 nt, Homo sapiens
  misc_RNA (1)...(19): siRNA sense strand
gauggaaggugcaacauag

SEQ ID NO: 1367914 - RNA, 19 nt, Homo sapiens
  misc_RNA (1)...(19): siRNA sense strand
ccaugugccuuuauaauga

SEQ ID NO: 1367915 - RNA, 19 nt, Homo sapiens
  misc_RNA (1)...(19): siRNA sense strand
gaaggagagaccauuauuu

SEQ ID NO: 1367916 - RNA, 19 nt, Homo sapiens
  misc_RNA (1)...(19): siRNA sense strand
ccagaucaauaucaacuuu

SEQ ID NO: 1367917 - RNA, 19 nt, Homo sapiens
  misc_RNA (1)...(19): siRNA sense strand
guucaaacaucuucggaaa

SEQ ID NO: 1367918 - RNA, 19 nt, Homo sapiens
  misc_RNA (1)...(19): siRNA sense strand
ucaaacaucuucggaaaug

SEQ ID NO: 1367919 - RNA, 19 nt, Homo sapiens
  misc_RNA (1)...(19): siRNA sense strand
caacauagaauuuggcaau

SEQ ID NO: 1367920 - RNA, 19 nt, Homo sapiens
  misc_RNA (1)...(19): siRNA sense strand
gaagagaggcuaugacaac

SEQ ID NO: 1367921 - RNA, 19 nt, Homo sapiens
  misc_RNA (1)...(19): siRNA sense strand
uagcguacauucacaaaga

SEQ ID NO: 1367922 - RNA, 19 nt, Homo sapiens
  misc_RNA (1)...(19): siRNA sense strand
ccagcaggacuuugaauua

SEQ ID NO: 1367923 - RNA, 19 nt, Homo sapiens
  misc_RNA (1)...(19): siRNA sense strand
gaggcacagucaagguuua

SEQ ID NO: 1367924 - RNA, 19 nt, Homo sapiens
  misc_RNA (1)...(19): siRNA sense strand
gaccucagcuuuucuguuu

SEQ ID NO: 1367925 - RNA, 19 nt, Homo sapiens
  misc_RNA (1)...(19): siRNA sense strand
gcaggacuuugaauuagug

SEQ ID NO: 1367926 - RNA, 19 nt, Homo sapiens
  misc_RNA (1)...(19): siRNA sense strand
gggaagcuuugccuccuaa

SEQ ID NO: 1367927 - RNA, 19 nt, Homo sapiens
  misc_RNA (1)...(19): siRNA sense strand
gaaggugcaacauagaauu

SEQ ID NO: 1367928 - RNA, 19 nt, Homo sapiens
  misc_RNA (1)...(19): siRNA sense strand
gcacagucaagguuuauau

SEQ ID NO: 1367929 - RNA, 19 nt, Homo sapiens
  misc_RNA (1)...(19): siRNA sense strand
gauguuagagccaggauga

SEQ ID NO: 1367930 - RNA, 19 nt, Homo sapiens
  misc_RNA (1)...(19): siRNA sense strand
cugcuuaucuuucagucua

SEQ ID NO: 1367931 - RNA, 19 nt, Homo sapiens
  misc_RNA (1)...(19): siRNA sense strand
aaacgugccaagaccauua

SEQ ID NO: 1367932 - RNA, 19 nt, Homo sapiens
  misc_RNA (1)...(19): siRNA sense strand
cagcaggacuuugaauuag

SEQ ID NO: 1367933 - RNA, 19 nt, Homo sapiens
  misc_RNA (1)...(19): siRNA sense strand
uuccauaacuuuagcaaga

SEQ ID NO: 1367934 - RNA, 19 nt, Homo sapiens
  misc_RNA (1)...(19): siRNA sense strand
ucacauuuauggaaagcuu

SEQ ID NO: 1367935 - RNA, 19 nt, Homo sapiens
  misc_RNA (1)...(19): siRNA sense strand
agacaaaggaagggaaaua

SEQ ID NO: 1367936 - RNA, 19 nt, Homo sapiens
  misc_RNA (1)...(19): siRNA sense strand
gcaaagagcaaggcuaguc

SEQ ID NO: 1367937 - RNA, 19 nt, Homo sapiens
  misc_RNA (1)...(19): siRNA sense strand
cauagaauuuggcaaugug

SEQ ID NO: 1367938 - RNA, 19 nt, Homo sapiens
  misc_RNA (1)...(19): siRNA sense strand
gcaguagcguacauucaca

SEQ ID NO: 1367939 - RNA, 19 nt, Homo sapiens
  misc_RNA (1)...(19): siRNA sense strand
gaacgcagugaucagcaaa

SEQ ID NO: 1367940 - RNA, 19 nt, Homo sapiens
  misc_RNA (1)...(19): siRNA sense strand
gaccucaaguggagauaca

SEQ ID NO: 1367941 - RNA, 19 nt, Homo sapiens
  misc_RNA (1)...(19): siRNA sense strand
agaagucaaugaaacagau

SEQ ID NO: 1367942 - RNA, 19 nt, Homo sapiens
  misc_RNA (1)...(19): siRNA sense strand
ugaaggagagaccauuauu

SEQ ID NO: 1367943 - RNA, 19 nt, Homo sapiens
  misc_RNA (1)...(19): siRNA sense strand
caaggcuagucuccaaaga

SEQ ID NO: 1367944 - RNA, 19 nt, Homo sapiens
  misc_RNA (1)...(19): siRNA sense strand
gccaugugccuuuauaaug

SEQ ID NO: 1367945 - RNA, 19 nt, Homo sapiens
  misc_RNA (1)...(19): siRNA sense strand
caagacaaaggaagggaaa

SEQ ID NO: 1367946 - RNA, 19 nt, Homo sapiens
  misc_RNA (1)...(19): siRNA sense strand
ggaggcacagucaagguuu

SEQ ID NO: 1367947 - RNA, 19 nt, Homo sapiens
  misc_RNA (1)...(19): siRNA sense strand
ggaaggugcaacauagaau

SEQ ID NO: 1367948 - RNA, 19 nt, Homo sapiens
  misc_RNA (1)...(19): siRNA sense strand
ucaagugaccauuggauau

SEQ ID NO: 1367949 - RNA, 19 nt, Homo sapiens
  misc_RNA (1)...(19): siRNA sense strand
gcuuaucuuucagucuaua

SEQ ID NO: 1367950 - RNA, 19 nt, Homo sapiens
  misc_RNA (1)...(19): siRNA sense strand
gaucacaacagcccuuucu

SEQ ID NO: 1367951 - RNA, 19 nt, Homo sapiens
  misc_RNA (1)...(19): siRNA sense strand
gauauggauucaggugugu

SEQ ID NO: 1367952 - RNA, 19 nt, Homo sapiens
  misc_RNA (1)...(19): siRNA sense strand
ugucagaagucaaugaaac

SEQ ID NO: 1367953 - RNA, 19 nt, Homo sapiens
  misc_RNA (1)...(19): siRNA sense strand
ccaacuucaucuugucaga

SEQ ID NO: 1367954 - RNA, 19 nt, Homo sapiens
  misc_RNA (1)...(19): siRNA sense strand
ucacaacagcccuuucuuc

SEQ ID NO: 1367955 - RNA, 19 nt, Homo sapiens
  misc_RNA (1)...(19): siRNA sense strand
cuuauuggcagucacauuu

SEQ ID NO: 1367956 - RNA, 19 nt, Homo sapiens
  misc_RNA (1)...(19): siRNA sense strand
caagugaccauuggauaug

SEQ ID NO: 1367957 - RNA, 19 nt, Homo sapiens
  misc_RNA (1)...(19): siRNA sense strand
gccaagaccauuacguuca

SEQ ID NO: 1367958 - RNA, 19 nt, Homo sapiens
  misc_RNA (1)...(19): siRNA sense strand
aggcuagucuccaaagaug

SEQ ID NO: 1367959 - RNA, 19 nt, Homo sapiens
  misc_RNA (1)...(19): siRNA sense strand
ucuuuggucuccuguggua

SEQ ID NO: 1367960 - RNA, 19 nt, Homo sapiens
  misc_RNA (1)...(19): siRNA sense strand
ggaugaagagaggcuauga

SEQ ID NO: 1367961 - RNA, 19 nt, Homo sapiens
  misc_RNA (1)...(19): siRNA sense strand
ccauuacguucagcaagaa

SEQ ID NO: 1367962 - RNA, 19 nt, Homo sapiens
  misc_RNA (1)...(19): siRNA sense strand
ccugaaggagagaccauua

SEQ ID NO: 1367963 - RNA, 19 nt, Homo sapiens
  misc_RNA (1)...(19): siRNA sense strand
agacucaagugaccauugg

SEQ ID NO: 1367964 - RNA, 19 nt, Homo sapiens
  misc_RNA (1)...(19): siRNA sense strand
cagucaagguuuauauucu

SEQ ID NO: 1367965 - RNA, 19 nt, Homo sapiens
  misc_RNA (1)...(19): siRNA sense strand
ucaggugugugacagaaca

SEQ ID NO: 1367966 - RNA, 19 nt, Homo sapiens
  misc_RNA (1)...(19): siRNA sense strand
gguaugcaguagcguacau

SEQ ID NO: 1367967 - RNA, 19 nt, Homo sapiens
  misc_RNA (1)...(19): siRNA sense strand
ugugccaugugccuuuaua

SEQ ID NO: 1367968 - RNA, 19 nt, Homo sapiens
  misc_RNA (1)...(19): siRNA sense strand
uauuggcagucacauuuau

SEQ ID NO: 1367969 - RNA, 19 nt, Homo sapiens
  misc_RNA (1)...(19): siRNA sense strand
ccaagaccauuacguucag

SEQ ID NO: 1367970 - RNA, 19 nt, Homo sapiens
  misc_RNA (1)...(19): siRNA sense strand
gugccaagaccauuacguu

SEQ ID NO: 1367971 - RNA, 19 nt, Homo sapiens
  misc_RNA (1)...(19): siRNA sense strand
gcaaggcuagucuccaaag

SEQ ID NO: 1367972 - RNA, 19 nt, Homo sapiens
  misc_RNA (1)...(19): siRNA sense strand
gaagucaaugaaacagaug

SEQ ID NO: 1367973 - RNA, 19 nt, Homo sapiens
  misc_RNA (1)...(19): siRNA sense strand
caucuugucagaagucaau

SEQ ID NO: 1367974 - RNA, 19 nt, Homo sapiens
  misc_RNA (1)...(19): siRNA sense strand
gagagaccauuauuuugga

SEQ ID NO: 1367975 - RNA, 19 nt, Homo sapiens
  misc_RNA (1)...(19): siRNA sense strand
gagacucaagugaccauug

SEQ ID NO: 1367976 - RNA, 19 nt, Homo sapiens
  misc_RNA (1)...(19): siRNA sense strand
caagaucuccaggcccaaa

SEQ ID NO: 1367977 - RNA, 19 nt, Homo sapiens
  misc_RNA (1)...(19): siRNA sense strand
ggcagucacauuuauggaa

SEQ ID NO: 1367978 - RNA, 19 nt, Homo sapiens
  misc_RNA (1)...(19): siRNA sense strand
accauuacguucagcaaga

SEQ ID NO: 1367979 - RNA, 19 nt, Homo sapiens
  misc_RNA (1)...(19): siRNA sense strand
caacuucaucuugucagaa

SEQ ID NO: 1367980 - RNA, 19 nt, Homo sapiens
  misc_RNA (1)...(19): siRNA sense strand
gaccagaucaauaucaacu

SEQ ID NO: 1367981 - RNA, 19 nt, Homo sapiens
  misc_RNA (1)...(19): siRNA sense strand
uggaccagaucaauaucaa

SEQ ID NO: 1367982 - RNA, 19 nt, Homo sapiens
  misc_RNA (1)...(19): siRNA sense strand
gaagcuuugccuccuaauc

SEQ ID NO: 1367983 - RNA, 19 nt, Homo sapiens
  misc_RNA (1)...(19): siRNA sense strand
gagaauauuaauggcuuga

SEQ ID NO: 1367984 - RNA, 19 nt, Homo sapiens
  misc_RNA (1)...(19): siRNA sense strand
agauggaaggugcaacaua

SEQ ID NO: 1367985 - RNA, 19 nt, Homo sapiens
  misc_RNA (1)...(19): siRNA sense strand
ggugcaacauagaauuugg

SEQ ID NO: 1367986 - RNA, 19 nt, Homo sapiens
  misc_RNA (1)...(19): siRNA sense strand
uggcuaaucucaggaagag

SEQ ID NO: 1367987 - RNA, 19 nt, Homo sapiens
  misc_RNA (1)...(19): siRNA sense strand
aaagauggaaggugcaaca

SEQ ID NO: 1367988 - RNA, 19 nt, Homo sapiens
  misc_RNA (1)...(19): siRNA sense strand
gggaaauaccgaguggauu

SEQ ID NO: 1367989 - RNA, 19 nt, Homo sapiens
  misc_RNA (1)...(19): siRNA sense strand
ggagagaccauuauuuugg

SEQ ID NO: 1367990 - RNA, 19 nt, Homo sapiens
  misc_RNA (1)...(19): siRNA sense strand
agaacgcagugaucagcaa

SEQ ID NO: 1367991 - RNA, 19 nt, Homo sapiens
  misc_RNA (1)...(19): siRNA sense strand
gugccuuuauaaugagaaa

SEQ ID NO: 1367992 - RNA, 19 nt, Homo sapiens
  misc_RNA (1)...(19): siRNA sense strand
guuagagccaggaugaaga

SEQ ID NO: 1367993 - RNA, 19 nt, Homo sapiens
  misc_RNA (1)...(19): siRNA sense strand
cagucuauacuuggaguua

SEQ ID NO: 1367994 - RNA, 19 nt, Homo sapiens
  misc_RNA (1)...(19): siRNA sense strand
ccauaacuuuagcaagaca

SEQ ID NO: 1367995 - RNA, 19 nt, Homo sapiens
  misc_RNA (1)...(19): siRNA sense strand
ggauuuccauaacuuuagc

SEQ ID NO: 1367996 - RNA, 19 nt, Homo sapiens
  misc_RNA (1)...(19): siRNA sense strand
gacaaaggaagggaaauac

SEQ ID NO: 1367997 - RNA, 19 nt, Homo sapiens
  misc_RNA (1)...(19): siRNA sense strand
cccauaguauccaagacaa

SEQ ID NO: 1367998 - RNA, 19 nt, Homo sapiens
  misc_RNA (1)...(19): siRNA sense strand
uuauuggcagucacauuua

SEQ ID NO: 1367999 - RNA, 19 nt, Homo sapiens
  misc_RNA (1)...(19): siRNA sense strand
gcaagaacgcagugaucag

SEQ ID NO: 1368000 - RNA, 19 nt, Homo sapiens
  misc_RNA (1)...(19): siRNA sense strand
cagcaagaacgcagugauc

SEQ ID NO: 1368001 - RNA, 19 nt, Homo sapiens
  misc_RNA (1)...(19): siRNA sense strand
caaagagcaaggcuagucu

SEQ ID NO: 1368002 - RNA, 19 nt, Homo sapiens
  misc_RNA (1)...(19): siRNA sense strand
aaggagagaccauuauuuu

SEQ ID NO: 1368003 - RNA, 19 nt, Homo sapiens
  misc_RNA (1)...(19): siRNA sense strand
aaggugcaacauagaauuu

SEQ ID NO: 1368004 - RNA, 19 nt, Homo sapiens
  misc_RNA (1)...(19): siRNA sense strand
acagucaagguuuauauuc

SEQ ID NO: 1368005 - RNA, 19 nt, Homo sapiens
  misc_RNA (1)...(19): siRNA sense strand
cagaugacaccaaaaugua

SEQ ID NO: 1368006 - RNA, 19 nt, Homo sapiens
  misc_RNA (1)...(19): siRNA sense strand
cacagucaagguuuauauu

SEQ ID NO: 1368007 - RNA, 19 nt, Homo sapiens
  misc_RNA (1)...(19): siRNA sense strand
aaacagaugacaccaaaau

SEQ ID NO: 1368008 - RNA, 19 nt, Homo sapiens
  misc_RNA (1)...(19): siRNA sense strand
gccaaguccggacauccua

SEQ ID NO: 1368009 - RNA, 19 nt, Homo sapiens
  misc_RNA (1)...(19): siRNA sense strand
cagaagucaaugaaacaga

SEQ ID NO: 1368010 - RNA, 19 nt, Homo sapiens
  misc_RNA (1)...(19): siRNA sense strand
ugaaacagaugacaccaaa

SEQ ID NO: 1368011 - RNA, 19 nt, Homo sapiens
  misc_RNA (1)...(19): siRNA sense strand
gagcaaggcuagucuccaa

SEQ ID NO: 1368012 - RNA, 19 nt, Homo sapiens
  misc_RNA (1)...(19): siRNA sense strand
gcagucacauuuauggaaa

SEQ ID NO: 1368013 - RNA, 19 nt, Homo sapiens
  misc_RNA (1)...(19): siRNA sense strand
gauggaaggugcaacauag

SEQ ID NO: 1368014 - RNA, 19 nt, Homo sapiens
  misc_RNA (1)...(19): siRNA sense strand
ccaugugccuuuauaauga

SEQ ID NO: 1368015 - RNA, 19 nt, Homo sapiens
  misc_RNA (1)...(19): siRNA sense strand
gaaggagagaccauuauuu

SEQ ID NO: 1368016 - RNA, 19 nt, Homo sapiens
  misc_RNA (1)...(19): siRNA sense strand
ccagaucaauaucaacuuu

SEQ ID NO: 1368017 - RNA, 19 nt, Homo sapiens
  misc_RNA (1)...(19): siRNA sense strand
guucaaacaucuucggaaa

SEQ ID NO: 1368018 - RNA, 19 nt, Homo sapiens
  misc_RNA (1)...(19): siRNA sense strand
ucaaacaucuucggaaaug

SEQ ID NO: 1368019 - RNA, 19 nt, Homo sapiens
  misc_RNA (1)...(19): siRNA sense strand
caacauagaauuuggcaau

SEQ ID NO: 1368020 - RNA, 19 nt, Homo sapiens
  misc_RNA (1)...(19): siRNA sense strand
gaagagaggcuaugacaac

SEQ ID NO: 1368021 - RNA, 19 nt, Homo sapiens
  misc_RNA (1)...(19): siRNA sense strand
uagcguacauucacaaaga

SEQ ID NO: 1368022 - RNA, 19 nt, Homo sapiens
  misc_RNA (1)...(19): siRNA sense strand
ccagcaggacuuugaauua

SEQ ID NO: 1368023 - RNA, 19 nt, Homo sapiens
  misc_RNA (1)...(19): siRNA sense strand
gaggcacagucaagguuua

SEQ ID NO: 1368024 - RNA, 19 nt, Homo sapiens
  misc_RNA (1)...(19): siRNA sense strand
gaccucagcuuuucuguuu

SEQ ID NO: 1368025 - RNA, 19 nt, Homo sapiens
  misc_RNA (1)...(19): siRNA sense strand
gcaggacuuugaauuagug

SEQ ID NO: 1368026 - RNA, 19 nt, Homo sapiens
  misc_RNA (1)...(19): siRNA sense strand
gggaagcuuugccuccuaa

SEQ ID NO: 1368027 - RNA, 19 nt, Homo sapiens
  misc_RNA (1)...(19): siRNA sense strand
gaaggugcaacauagaauu

SEQ ID NO: 1368028 - RNA, 19 nt, Homo sapiens
  misc_RNA (1)...(19): siRNA sense strand
gcacagucaagguuuauau

SEQ ID NO: 1368029 - RNA, 19 nt, Homo sapiens
  misc_RNA (1)...(19): siRNA sense strand
gacagaaaguauguucaaa

SEQ ID NO: 1368030 - RNA, 19 nt, Homo sapiens
  misc_RNA (1)...(19): siRNA sense strand
gauguuagagccaggauga

SEQ ID NO: 1368031 - RNA, 19 nt, Homo sapiens
  misc_RNA (1)...(19): siRNA sense strand
cugcuuaucuuucagucua

SEQ ID NO: 1368032 - RNA, 19 nt, Homo sapiens
  misc_RNA (1)...(19): siRNA sense strand
aaacgugccaagaccauua

SEQ ID NO: 1368033 - RNA, 19 nt, Homo sapiens
  misc_RNA (1)...(19): siRNA sense strand
cagcaggacuuugaauuag

SEQ ID NO: 1368034 - RNA, 19 nt, Homo sapiens
  misc_RNA (1)...(19): siRNA sense strand
uuccauaacuuuagcaaga

SEQ ID NO: 1368035 - RNA, 19 nt, Homo sapiens
  misc_RNA (1)...(19): siRNA sense strand
gcaaagagcaaggcuaguc

SEQ ID NO: 1368036 - RNA, 19 nt, Homo sapiens
  misc_RNA (1)...(19): siRNA sense strand
agacaaaggaagggaaaua

SEQ ID NO: 1368037 - RNA, 19 nt, Homo sapiens
  misc_RNA (1)...(19): siRNA sense strand
ucacauuuauggaaagcuu

SEQ ID NO: 1368038 - RNA, 19 nt, Homo sapiens
  misc_RNA (1)...(19): siRNA sense strand
cauagaauuuggcaaugug

SEQ ID NO: 1368039 - RNA, 19 nt, Homo sapiens
  misc_RNA (1)...(19): siRNA sense strand
gcaguagcguacauucaca

SEQ ID NO: 1368040 - RNA, 19 nt, Homo sapiens
  misc_RNA (1)...(19): siRNA sense strand
gaacgcagugaucagcaaa

SEQ ID NO: 1368041 - RNA, 19 nt, Homo sapiens
  misc_RNA (1)...(19): siRNA sense strand
ugacagaaaguauguucaa

SEQ ID NO: 1368042 - RNA, 19 nt, Homo sapiens
  misc_RNA (1)...(19): siRNA sense strand
agaagucaaugaaacagau

SEQ ID NO: 1368043 - RNA, 19 nt, Homo sapiens
  misc_RNA (1)...(19): siRNA sense strand
ugaaggagagaccauuauu

SEQ ID NO: 1368044 - RNA, 19 nt, Homo sapiens
  misc_RNA (1)...(19): siRNA sense strand
gaccucaaguggagauaca

SEQ ID NO: 1368045 - RNA, 19 nt, Homo sapiens
  misc_RNA (1)...(19): siRNA sense strand
caagacaaaggaagggaaa

SEQ ID NO: 1368046 - RNA, 19 nt, Homo sapiens
  misc_RNA (1)...(19): siRNA sense strand
caaggcuagucuccaaaga

SEQ ID NO: 1368047 - RNA, 19 nt, Homo sapiens
  misc_RNA (1)...(19): siRNA sense strand
gccaugugccuuuauaaug

SEQ ID NO: 1368048 - RNA, 19 nt, Homo sapiens
  misc_RNA (1)...(19): siRNA sense strand
ggaaggugcaacauagaau

SEQ ID NO: 1368049 - RNA, 19 nt, Homo sapiens
  misc_RNA (1)...(19): siRNA sense strand
ucaagugaccauuggauau

SEQ ID NO: 1368050 - RNA, 19 nt, Homo sapiens
  misc_RNA (1)...(19): siRNA sense strand
ggaggcacagucaagguuu

SEQ ID NO: 1368051 - RNA, 19 nt, Homo sapiens
  misc_RNA (1)...(19): siRNA sense strand
gcuuaucuuucagucuaua

SEQ ID NO: 1368052 - RNA, 19 nt, Homo sapiens
  misc_RNA (1)...(19): siRNA sense strand
gaucacaacagcccuuucu

SEQ ID NO: 1368053 - RNA, 19 nt, Homo sapiens
  misc_RNA (1)...(19): siRNA sense strand
gauauggauucaggugugu

SEQ ID NO: 1368054 - RNA, 19 nt, Homo sapiens
  misc_RNA (1)...(19): siRNA sense strand
ugucagaagucaaugaaac

SEQ ID NO: 1368055 - RNA, 19 nt, Homo sapiens
  misc_RNA (1)...(19): siRNA sense strand
ccaacuucaucuugucaga

SEQ ID NO: 1368056 - RNA, 19 nt, Homo sapiens
  misc_RNA (1)...(19): siRNA sense strand
ucacaacagcccuuucuuc

SEQ ID NO: 1368057 - RNA, 19 nt, Homo sapiens
  misc_RNA (1)...(19): siRNA sense strand
cuuauuggcagucacauuu

SEQ ID NO: 1368058 - RNA, 19 nt, Homo sapiens
  misc_RNA (1)...(19): siRNA sense strand
caagugaccauuggauaug

SEQ ID NO: 1368059 - RNA, 19 nt, Homo sapiens
  misc_RNA (1)...(19): siRNA sense strand
aggcuagucuccaaagaug

SEQ ID NO: 1368060 - RNA, 19 nt, Homo sapiens
  misc_RNA (1)...(19): siRNA sense strand
gccaagaccauuacguuca

SEQ ID NO: 1368061 - RNA, 19 nt, Homo sapiens
  misc_RNA (1)...(19): siRNA sense strand
ucuuuggucuccuguggua

SEQ ID NO: 1368062 - RNA, 19 nt, Homo sapiens
  misc_RNA (1)...(19): siRNA sense strand
ggaugaagagaggcuauga

SEQ ID NO: 1368063 - RNA, 19 nt, Homo sapiens
  misc_RNA (1)...(19): siRNA sense strand
ccauuacguucagcaagaa

SEQ ID NO: 1368064 - RNA, 19 nt, Homo sapiens
  misc_RNA (1)...(19): siRNA sense strand
ccugaaggagagaccauua

SEQ ID NO: 1368065 - RNA, 19 nt, Homo sapiens
  misc_RNA (1)...(19): siRNA sense strand
cagucaagguuuauauucu

SEQ ID NO: 1368066 - RNA, 19 nt, Homo sapiens
  misc_RNA (1)...(19): siRNA sense strand
ucaggugugugacagaaca

SEQ ID NO: 1368067 - RNA, 19 nt, Homo sapiens
  misc_RNA (1)...(19): siRNA sense strand
agacucaagugaccauugg

SEQ ID NO: 1368068 - RNA, 19 nt, Homo sapiens
  misc_RNA (1)...(19): siRNA sense strand
gguaugcaguagcguacau

SEQ ID NO: 1368069 - RNA, 19 nt, Homo sapiens
  misc_RNA (1)...(19): siRNA sense strand
ugugccaugugccuuuaua

SEQ ID NO: 1368070 - RNA, 19 nt, Homo sapiens
  misc_RNA (1)...(19): siRNA sense strand
uauuggcagucacauuuau

SEQ ID NO: 1368071 - RNA, 19 nt, Homo sapiens
  misc_RNA (1)...(19): siRNA sense strand
ccaagaccauuacguucag

SEQ ID NO: 1368072 - RNA, 19 nt, Homo sapiens
  misc_RNA (1)...(19): siRNA sense strand
gugccaagaccauuacguu

SEQ ID NO: 1368073 - RNA, 19 nt, Homo sapiens
  misc_RNA (1)...(19): siRNA sense strand
gagacucaagugaccauug

SEQ ID NO: 1368074 - RNA, 19 nt, Homo sapiens
  misc_RNA (1)...(19): siRNA sense strand
gaagucaaugaaacagaug

SEQ ID NO: 1368075 - RNA, 19 nt, Homo sapiens
  misc_RNA (1)...(19): siRNA sense strand
caucuugucagaagucaau

SEQ ID NO: 1368076 - RNA, 19 nt, Homo sapiens
  misc_RNA (1)...(19): siRNA sense strand
gagagaccauuauuuugga

SEQ ID NO: 1368077 - RNA, 19 nt, Homo sapiens
  misc_RNA (1)...(19): siRNA sense strand
gcaaggcuagucuccaaag

SEQ ID NO: 1368078 - RNA, 19 nt, Homo sapiens
  misc_RNA (1)...(19): siRNA sense strand
caagaucuccaggcccaaa

SEQ ID NO: 1368079 - RNA, 19 nt, Homo sapiens
  misc_RNA (1)...(19): siRNA sense strand
ggcagucacauuuauggaa

SEQ ID NO: 1368080 - RNA, 19 nt, Homo sapiens
  misc_RNA (1)...(19): siRNA sense strand
accauuacguucagcaaga

SEQ ID NO: 1368081 - RNA, 19 nt, Homo sapiens
  misc_RNA (1)...(19): siRNA sense strand
gaucaggguguugacagaa

SEQ ID NO: 1368082 - RNA, 19 nt, Homo sapiens
  misc_RNA (1)...(19): siRNA sense strand
caacuucaucuugucagaa

SEQ ID NO: 1368083 - RNA, 19 nt, Homo sapiens
  misc_RNA (1)...(19): siRNA sense strand
gaccagaucaauaucaacu

SEQ ID NO: 1368084 - RNA, 19 nt, Homo sapiens
  misc_RNA (1)...(19): siRNA sense strand
uggaccagaucaauaucaa

SEQ ID NO: 1368085 - RNA, 19 nt, Homo sapiens
  misc_RNA (1)...(19): siRNA sense strand
gaagcuuugccuccuaauc

SEQ ID NO: 1368086 - RNA, 19 nt, Homo sapiens
  misc_RNA (1)...(19): siRNA sense strand
gagaauauuaauggcuuga

SEQ ID NO: 1368087 - RNA, 19 nt, Homo sapiens
  misc_RNA (1)...(19): siRNA sense strand
agauggaaggugcaacaua

SEQ ID NO: 1368088 - RNA, 19 nt, Homo sapiens
  misc_RNA (1)...(19): siRNA sense strand
ggugcaacauagaauuugg

SEQ ID NO: 1368089 - RNA, 19 nt, Homo sapiens
  misc_RNA (1)...(19): siRNA sense strand
uggcuaaucucaggaagag

SEQ ID NO: 1368090 - RNA, 19 nt, Homo sapiens
  misc_RNA (1)...(19): siRNA sense strand
agaacgcagugaucagcaa

SEQ ID NO: 1368091 - RNA, 19 nt, Homo sapiens
  misc_RNA (1)...(19): siRNA sense strand
aaagauggaaggugcaaca

SEQ ID NO: 1368092 - RNA, 19 nt, Homo sapiens
  misc_RNA (1)...(19): siRNA sense strand
gggaaauaccgaguggauu

SEQ ID NO: 1368093 - RNA, 19 nt, Homo sapiens
  misc_RNA (1)...(19): siRNA sense strand
ggagagaccauuauuuugg

SEQ ID NO: 1368094 - RNA, 19 nt, Homo sapiens
  misc_RNA (1)...(19): siRNA sense strand
gugccuuuauaaugagaaa

SEQ ID NO: 1368095 - RNA, 19 nt, Homo sapiens
  misc_RNA (1)...(19): siRNA sense strand
guuagagccaggaugaaga

SEQ ID NO: 1368096 - RNA, 19 nt, Homo sapiens
  misc_RNA (1)...(19): siRNA sense strand
cagucuauacuuggaguua

SEQ ID NO: 1368097 - RNA, 19 nt, Homo sapiens
  misc_RNA (1)...(19): siRNA sense strand
ccauaacuuuagcaagaca

SEQ ID NO: 1368098 - RNA, 19 nt, Homo sapiens
  misc_RNA (1)...(19): siRNA sense strand
ggauuuccauaacuuuagc

SEQ ID NO: 1368099 - RNA, 19 nt, Homo sapiens
  misc_RNA (1)...(19): siRNA sense strand
gacaaaggaagggaaauac

SEQ ID NO: 1368100 - RNA, 19 nt, Homo sapiens
  misc_RNA (1)...(19): siRNA sense strand
cccauaguauccaagacaa

SEQ ID NO: 1368101 - RNA, 19 nt, Homo sapiens
  misc_RNA (1)...(19): siRNA sense strand
uuauuggcagucacauuua

SEQ ID NO: 1368102 - RNA, 19 nt, Homo sapiens
  misc_RNA (1)...(19): siRNA sense strand
gcaagaacgcagugaucag

SEQ ID NO: 1368103 - RNA, 19 nt, Homo sapiens
  misc_RNA (1)...(19): siRNA sense strand
cagcaagaacgcagugauc

SEQ ID NO: 1368104 - RNA, 19 nt, Homo sapiens
  misc_RNA (1)...(19): siRNA sense strand
caaagagcaaggcuagucu

SEQ ID NO: 1368105 - RNA, 19 nt, Homo sapiens
  misc_RNA (1)...(19): siRNA sense strand
aaggugcaacauagaauuu

SEQ ID NO: 1368106 - RNA, 19 nt, Homo sapiens
  misc_RNA (1)...(19): siRNA sense strand
aaggagagaccauuauuuu

SEQ ID NO: 1368107 - RNA, 19 nt, Homo sapiens
  misc_RNA (1)...(19): siRNA sense strand
gguguugacagaaaguaug

SEQ ID NO: 1368108 - RNA, 19 nt, Homo sapiens
  misc_RNA (1)...(19): siRNA sense strand
acagucaagguuuauauuc

SEQ ID NO: 1368109 - RNA, 19 nt, Homo sapiens
  misc_RNA (1)...(19): siRNA sense strand
cagaugacaccaaaaugua

SEQ ID NO: 1368110 - RNA, 19 nt, Homo sapiens
  misc_RNA (1)...(19): siRNA sense strand
ugaaacagaugacaccaaa

SEQ ID NO: 1368111 - RNA, 19 nt, Homo sapiens
  misc_RNA (1)...(19): siRNA sense strand
gagcaaggcuagucuccaa

SEQ ID NO: 1368112 - RNA, 19 nt, Homo sapiens
  misc_RNA (1)...(19): siRNA sense strand
gcagucacauuuauggaaa

SEQ ID NO: 1368113 - RNA, 19 nt, Homo sapiens
  misc_RNA (1)...(19): siRNA sense strand
gauggaaggugcaacauag

SEQ ID NO: 1368114 - RNA, 19 nt, Homo sapiens
  misc_RNA (1)...(19): siRNA sense strand
ccaugugccuuuauaauga

SEQ ID NO: 1368115 - RNA, 19 nt, Homo sapiens
  misc_RNA (1)...(19): siRNA sense strand
gaaggagagaccauuauuu

SEQ ID NO: 1368116 - RNA, 19 nt, Homo sapiens
  misc_RNA (1)...(19): siRNA sense strand
ccagaucaauaucaacuuu

SEQ ID NO: 1368117 - RNA, 19 nt, Homo sapiens
  misc_RNA (1)...(19): siRNA sense strand
guucaaacaucuucggaaa

SEQ ID NO: 1368118 - RNA, 19 nt, Homo sapiens
  misc_RNA (1)...(19): siRNA sense strand
ucaaacaucuucggaaaug

SEQ ID NO: 1368119 - RNA, 19 nt, Homo sapiens
  misc_RNA (1)...(19): siRNA sense strand
caacauagaauuuggcaau

SEQ ID NO: 1368120 - RNA, 19 nt, Homo sapiens
  misc_RNA (1)...(19): siRNA sense strand
gaagagaggcuaugacaac

SEQ ID NO: 1368121 - RNA, 19 nt, Homo sapiens
  misc_RNA (1)...(19): siRNA sense strand
uagcguacauucacaaaga

SEQ ID NO: 1368122 - RNA, 19 nt, Homo sapiens
  misc_RNA (1)...(19): siRNA sense strand
ccagcaggacuuugaauua

SEQ ID NO: 1368123 - RNA, 19 nt, Homo sapiens
  misc_RNA (1)...(19): siRNA sense strand
gaggcacagucaagguuua

SEQ ID NO: 1368124 - RNA, 19 nt, Homo sapiens
  misc_RNA (1)...(19): siRNA sense strand
gaccucagcuuuucuguuu

SEQ ID NO: 1368125 - RNA, 19 nt, Homo sapiens
  misc_RNA (1)...(19): siRNA sense strand
gcaggacuuugaauuagug

SEQ ID NO: 1368126 - RNA, 19 nt, Homo sapiens
  misc_RNA (1)...(19): siRNA sense strand
gggaagcuuugccuccuaa

SEQ ID NO: 1368127 - RNA, 19 nt, Homo sapiens
  misc_RNA (1)...(19): siRNA sense strand
gaaggugcaacauagaauu

SEQ ID NO: 1368128 - RNA, 19 nt, Homo sapiens
  misc_RNA (1)...(19): siRNA sense strand
gcacagucaagguuuauau

SEQ ID NO: 1368129 - RNA, 19 nt, Homo sapiens
  misc_RNA (1)...(19): siRNA sense strand
gauguuagagccaggauga

SEQ ID NO: 1368130 - RNA, 19 nt, Homo sapiens
  misc_RNA (1)...(19): siRNA sense strand
cugcuuaucuuucagucua

SEQ ID NO: 1368131 - RNA, 19 nt, Homo sapiens
  misc_RNA (1)...(19): siRNA sense strand
aaacgugccaagaccauua

SEQ ID NO: 1368132 - RNA, 19 nt, Homo sapiens
  misc_RNA (1)...(19): siRNA sense strand
cagcaggacuuugaauuag

SEQ ID NO: 1368133 - RNA, 19 nt, Homo sapiens
  misc_RNA (1)...(19): siRNA sense strand
uuccauaacuuuagcaaga

SEQ ID NO: 1368134 - RNA, 19 nt, Homo sapiens
  misc_RNA (1)...(19): siRNA sense strand
ucacauuuauggaaagcuu

SEQ ID NO: 1368135 - RNA, 19 nt, Homo sapiens
  misc_RNA (1)...(19): siRNA sense strand
agacaaaggaagggaaaua

SEQ ID NO: 1368136 - RNA, 19 nt, Homo sapiens
  misc_RNA (1)...(19): siRNA sense strand
gcaaagagcaaggcuaguc

SEQ ID NO: 1368137 - RNA, 19 nt, Homo sapiens
  misc_RNA (1)...(19): siRNA sense strand
cauagaauuuggcaaugug

SEQ ID NO: 1368138 - RNA, 19 nt, Homo sapiens
  misc_RNA (1)...(19): siRNA sense strand
gcaguagcguacauucaca

SEQ ID NO: 1368139 - RNA, 19 nt, Homo sapiens
  misc_RNA (1)...(19): siRNA sense strand
gaacgcagugaucagcaaa

SEQ ID NO: 1368140 - RNA, 19 nt, Homo sapiens
  misc_RNA (1)...(19): siRNA sense strand
gaccucaaguggagauaca

SEQ ID NO: 1368141 - RNA, 19 nt, Homo sapiens
  misc_RNA (1)...(19): siRNA sense strand
agaagucaaugaaacagau

SEQ ID NO: 1368142 - RNA, 19 nt, Homo sapiens
  misc_RNA (1)...(19): siRNA sense strand
ugaaggagagaccauuauu

SEQ ID NO: 1368143 - RNA, 19 nt, Homo sapiens
  misc_RNA (1)...(19): siRNA sense strand
caaggcuagucuccaaaga

SEQ ID NO: 1368144 - RNA, 19 nt, Homo sapiens
  misc_RNA (1)...(19): siRNA sense strand
gccaugugccuuuauaaug

SEQ ID NO: 1368145 - RNA, 19 nt, Homo sapiens
  misc_RNA (1)...(19): siRNA sense strand
caagacaaaggaagggaaa

SEQ ID NO: 1368146 - RNA, 19 nt, Homo sapiens
  misc_RNA (1)...(19): siRNA sense strand
ggaggcacagucaagguuu

SEQ ID NO: 1368147 - RNA, 19 nt, Homo sapiens
  misc_RNA (1)...(19): siRNA sense strand
ggaaggugcaacauagaau

SEQ ID NO: 1368148 - RNA, 19 nt, Homo sapiens
  misc_RNA (1)...(19): siRNA sense strand
ucaagugaccauuggauau

SEQ ID NO: 1368149 - RNA, 19 nt, Homo sapiens
  misc_RNA (1)...(19): siRNA sense strand
gcuuaucuuucagucuaua

SEQ ID NO: 1368150 - RNA, 19 nt, Homo sapiens
  misc_RNA (1)...(19): siRNA sense strand
gaucacaacagcccuuucu

SEQ ID NO: 1368151 - RNA, 19 nt, Homo sapiens
  misc_RNA (1)...(19): siRNA sense strand
gauauggauucaggugugu

SEQ ID NO: 1368152 - RNA, 19 nt, Homo sapiens
  misc_RNA (1)...(19): siRNA sense strand
ugucagaagucaaugaaac

SEQ ID NO: 1368153 - RNA, 19 nt, Homo sapiens
  misc_RNA (1)...(19): siRNA sense strand
ccaacuucaucuugucaga

SEQ ID NO: 1368154 - RNA, 19 nt, Homo sapiens
  misc_RNA (1)...(19): siRNA sense strand
ucacaacagcccuuucuuc

SEQ ID NO: 1368155 - RNA, 19 nt, Homo sapiens
  misc_RNA (1)...(19): siRNA sense strand
cuuauuggcagucacauuu

SEQ ID NO: 1368156 - RNA, 19 nt, Homo sapiens
  misc_RNA (1)...(19): siRNA sense strand
caagugaccauuggauaug

SEQ ID NO: 1368157 - RNA, 19 nt, Homo sapiens
  misc_RNA (1)...(19): siRNA sense strand
gccaagaccauuacguuca

SEQ ID NO: 1368158 - RNA, 19 nt, Homo sapiens
  misc_RNA (1)...(19): siRNA sense strand
aggcuagucuccaaagaug

SEQ ID NO: 1368159 - RNA, 19 nt, Homo sapiens
  misc_RNA (1)...(19): siRNA sense strand
ucuuuggucuccuguggua

SEQ ID NO: 1368160 - RNA, 19 nt, Homo sapiens
  misc_RNA (1)...(19): siRNA sense strand
ggaugaagagaggcuauga
